United States Patent Application Publication US 2005/0228172 A9 - sequence listing, part 191

SEQ ID NO: 862958 - DNA, 631 bp, Homo sapiens
aatgatgtaactgtgggaaagcgagttgaattttctggatgaaaccaatttcttattttattttgtgtgacagacttcaacaaatatctcttgggcactgactaggttaaacatattatgcaaaggggctgcagcaattaaaagatgtttaaggaaacaatttcttctctaaacacctttgaatcttttagaagaattaagtaaacggatgaccatattacacaattggataagggaagaatgaaggtaagtaaaatatgatacgacatagtcaaaggaggaaaagatgatttggtgaataaatttgaaaaggcctttagagaaagtaaatctgcaagtgactttttgaaaagctaaaactttacatgaggaaagaagtcaaattaaggaaactcataataagagaaggcgaatgggagcagggaaacagaaaacaagtcctaaattcytcactgactcatctcataaaaaagggaatttacagatgaatgatttggataatgcttatacttaaaattattagctaaacaaacaaggaacaagagaagaagaaagtacaggaaagaggcaagggagcaagtaagagagggaaggagaaagaataacacaaaccccccagattagaaaacta

SEQ ID NO: 862959 - DNA, 630 bp, Homo sapiens
tctagcctttataactataaacatttttcagagacagcaatttatggatgctcttctaagaattagtcaatatattagctttctttaaaacatacagctgcagcagtaagccacatatattttatttggccttgcaaattttctgttgagttctaggagctgtggatttttgmgatatttggctcaaactcaaaatgaaaaaatcattttaaaaaatagaaatgcatttcattctttaaaaatgctaaaaatatatgatgcaaaatgtcatagtttggctgtaatagcaaaattcttagaatcaatcagtcaaaaataactgtgttatttaggcgcaatttgaaggcatacaaactaaaaacagtattttaaaaccagctataagagcttgatggcttctctacacactgatagctatttgccttataaaaataacaattgaacgagcacagggaacaggccgccacagaaaaggttgccttttatgtagcactaacatgcactcagtagcatttaccgacttagtctggggcaggggcaagaggatgcttcaaaaacaaaataggctaccctctttcgccactgttcttactatataacccccttgcagtaaagataagaaacaaacta

SEQ ID NO: 862960 - DNA, 630 bp, Homo sapiens
tctagcctttataactataaacatttttcagagacagcaatttatggatgctcttctaagaattagtcaatatattagctttctttaaaacatacagctgcagcagtaagccacatatattttatttggccttgcaaattttctgttgagttctaggagctgtggatttttgagatatttggctsaaactcaaaatgaaaaaatcattttaaaaaatagaaatgcatttcattctttaaaaatgctaaaaatatatgatgcaaaatgtcatagtttggctgtaatagcaaaattcttagaatcaatcagtcaaaaataactgtgttatttaggcgcaatttgaaggcatacaaactaaaaacagtattttaaaaccagctataagagcttgatggcttctctacacactgatagctatttgccttataaaaataacaattgaacgagcacagggaacaggccgccacagaaaaggttgccttttatgtagcactaacatgcactcagtagcatttaccgacttagtctggggcaggggcaagaggatgcttcaaaaacaaaataggctaccctctttcgccactgttcttactatataacccccttgcagtaaagataagaaacaaacta

SEQ ID NO: 862961 - DNA, 618 bp, Homo sapiens
tcttacgggattcacttttttatgtatgtctcatagacactaatgggtctatgagaaaatgttttcagtcatgtaggacatctgctttaagcaaaaaaagtagagtgaccatagatacagttaaggaggtgctaacagtatggcagataaagataactactgtgcaatgaatcttgaagtcattatgtgcatagcttcttcaaagatataaatctcaatagaaaaatggttggaaaataggtttttctgaactaaatcttcaattttttatagtttatgccacctataaagatttataaaatgcatttcttytttatcatatgagatttttcttcaaacctataattttacgtatatgtattgctaataatgatgcctggcatttgtgtagaatttttcaaaaagagtgttagtaccaagaatctatgaacaaacaccttgcctacctgactggggatgctaaaagattttacatgttttatattgtcttaaattgacacaccattaacttacctagttcttcaaataaatacactgtcatcttgcattgtttatgaaaaatagcatataaataacagttggttagcatgaagtgttcagtttttaatctcattttgc

SEQ ID NO: 862962 - DNA, 609 bp, Homo sapiens
agggcatttttagaacaatcctggatggttcaggtgtctcctctgtgactcagtcattccagagtcttgtttccttgcctggcactttcttaaagacatgtagtggggtgtggtagacagaaaataaatgcatgacactttttaaagaatttttctttatattattattgagatttaaaaatatctttaaataactattaaacaatagaaatattgaatggtattccctccttttctatcactatcaggatggctcctttaaaatgtaatgtaatcatgttgtgtttgtttttctctgcctattttgatatagtaaaatactgtctggattcaattgtaaaatgtatatttagcatactaacaacaacacaaaaggctttgattttaaaaggaaaaaaatttcacaatcttgcacatcagctgtttccacttagtgtttgcrtgttcatgctcatacaattcctgacaccatcatattcatgataaatagttttttgatttgatttcggaaatctacaaaaacacccaggaaatatgaaagagagggaaattaagagcacttacgggtggggtggggttgaggcacccagggcagaagaacccaaagag

SEQ ID NO: 862963 - DNA, 590 bp, Homo sapiens
tcatgttgatgagtagggtggatctaatccagaaaagcataaacaccagcctcagctaattcagaaagggcgtgcccagtgaggttgggagattggtggtctcctttgtcagcagatgagaatagctgaaatttacattctttccacaggctgccaaatacacagacacacgcattcacctattatgtgggtttatatgtgcaaataggcaggccaaaagtaggattagatgaacctgaatcaraggaatgatcaaaactggataagtgattcttttaaaacattaaagtgtgtgtgtgtgtgtgtgtgttttattttgccatgtatagtgaagtggagcagacactggatttttcatcttagaaaacctagattttaatcttaccttgaccatttctaggtgtgctttcagtggcacattatttaagcgctctcatttcatttctttttttgtaaattggctttagtattaatacccagttcacacacatctttttaaaaggattaaacatacctggtggaatgcctgcctcttaaagggcatgcagtcaagttcagctactgtgtttagtaatgtatctgatgatagg

SEQ ID NO: 862964 - DNA, 583 bp, Homo sapiens
acagaggcctcggaaataacaccacacatctacaaccctttgatcttcaacaaacctgacaaaaacaaggaatgaggaaaggattccctatttaataaatggtgctgggaaaactggctagccatatgcagaaaacagaaatgggaccccttccttacaccttatacaaaaattaactcaagatgcattaaagacttacacataaaatctaaaactataaaaaccctagaggaaaacctaagcaataccattcaggacataggcatgggcaaagacttcatgactaaaacaccaaaagcaatggcaacaaaagccaaaattgacaaatgggatttaattaaactaaagagcttccacacagcgaaagaaactatcgtcagagtgagcaagcaacctacagaatgggagaaacyttttgcaatctatccatctgacaaaggtctaacatccagaatctacaaggaacttaaacaaatttacaagagagaatcaaacaaccccatcaaaaagtaggcaaaagatatgaacacacacttctcaaaagacgacatttacgcagccaacaaacatattagaaaaagct

SEQ ID NO: 862965 - DNA, 598 bp, Homo sapiens
catgctgtgctccttcccactgtgaggccttagacacagctctccctgcctgcctgcttcctcatctgtaaaactaggacaataatagtggctgtgtttctgtgaattaacacacagaaccacaacaatgcccggacaccatgttccctacatgctagctgtttgtattgcatctgactttcactcacagtaagggagcgataactataacagaggtgagtgctacctttaaggagctcacagttgaaagtcacccccgcaaatgtcaagacccactttttgtctgttccatgcccctctatgtggaaggagggaaggagatgtcggttagagtggagcgtagctcccgggactgacccatcacacaggtcgcagcatcrtgtggaatcacttcagccagacgagccatcagaaggaagctagataacccatttaaaaacaaacatcttaaaagggcattgcagataaaacaatagaggaaaaaaactgaatttcctattaattatgatgtgttttttaaaaaatacaatccatgcggaaattcccaatcaggcattgtctggtgttgaatactctgcagtagagaaatgctgcttgt

SEQ ID NO: 862966 - DNA, 633 bp, Homo sapiens
gtaaggcaagaaattagatgggtagctgtatgttgcacttttctttgatcgtgagatctcaaggtaacaggcaatgggcatagcatagggcaacgaatcccacagagctgtcctaataatgtatatccttcatgtcttcaaagtgatgcaatgtcagcagtttccatttgaaggctaaccctttgtagtgcccttccctatgtaagtattcagtcttgacaaaagtgattaaaattttgttttccaatttgtaaaaaatattttaaatgtagactatagtatagtacctcttaattcagccttccctaaatacaacaaataaacttttttttcagtgttgcctaagttgtgttctcaaaatgatagttccttgagatgttaatagttgttctttgcaaaagaaaaagtgtgcttagtgttcaataaatcaaagaagtgctgggttaaacaaaggtaakctgacttcctactggtagacttctcagaacttttaatatggtagggttgctgtgactctccaagatttagaatctcctgggcagcatttcccaaatctacttgacccggaacccttcctttaagggaatatctgttaacatcctgtaggacactggtgttctcagtttgagaaac

SEQ ID NO: 862967 - DNA, 635 bp, Homo sapiens
catcccttttaagaaacatgtacgctctgaatttgataagactggtttattgctaacaattaagccctttacactgtgccagcctctgtcctgaaaagcatcagtactatttctctgtgaaaacattcagagttggcttcagtagcatttgatacatttcttcacagttggtatagaaaaggaagatgagatytgaactaagaaccttttcccctcattctaatgcagggttttaaactagatagcgaggacatttagaatcatttggttggtttataaatacaggttgaacattccaaatttgaacaccagaaatgctccaaaatccaaaacattttgagtgctgacataaggaaatgctcattggaacatttaggatttctggacttgggatgctcagccagtgagtataatgcaaatattctgaaatatgaaacacttctgatcccaagcattttagataagaatactcaacctataatgtgtaatgagttgcgtattttggagactgcatcacctgcacagaaacctcctctcactcacacttcaccacttttcctaacttgcctgatgtgaataatcacctagagtgtattttaaaaaacagattcctgggcctcaacccagacctactg

SEQ ID NO: 862968 - DNA, 608 bp, Homo sapiens
atctgcaaagtcttttttgccatacaaggtagcatattctcaggtttggagtattaggatgtgggcatctttgggagccattattctgcctaccacatcgtgtaacactcaccctcccgcagtggagaatgttcctctctgaaaattccttcgtgcttcttctcagttcttcacagccaactgccagaggcaacttctgttctgatttctatcatctttcattagtttggcctgttctagaacttcatacaaatgggacgtacagtatgttcccttttgtgcctggctgctatctcacagcacagtgtttttgaggtgcatctatactgttaygtgtattagttgcccattctttttattgttgaatagtattccattagtatgaatatgacaaactctgtttatacaatgtcttgttaatgaacgtttggattgtttccaatttggagctattacaaactttcttataaaagtcttttgtgaacatatttttatttctcttgggtcctgggaggattgctgagtcgtggcatagaaatacatttaactttatatgaaactgctaaataatttttgaaaagtggttttaccgattaaaattcctacac

SEQ ID NO: 862969 - DNA, 590 bp, Homo sapiens
tttttgctccaacaaaaaagagttatttcaaacaactatttaattgaggtctttgggtttaccaataactaattgttagtgatgttgttgaagctacccaaatagtcctcacctactgagggacattccaactgaagcacctttaatttaaactttgatgcctctggaattttccaacatacctgagactttactttctaattttctggatatataataatttaagtaatgtaagcagaacatttttaacaatattttggaatattttggaamtataagtctatctataaatctacttagacacactaattgcttcttattacaaataacctacacaatgatccatttaaatgcataaaaatattatggtatatttttttttttttaaacagggtctcactgttgcccaggctggagtcagtggcatgatagtggctcactgcagcctcaacctcccaagatcaagggatcctcctgcctcactctcctgagtagctgggacttcaggtgcacaccatcacacccagctaatatttttatttttatttttagtagagacaagtcctcactatgttgcccaagctggtctc

SEQ ID NO: 862970 - DNA, 664 bp, Homo sapiens
agcctcagattcccggatgtggtatctcccaagggtcaaatctggattttaaataaactccctaggtaacatgcacagtaaaaattgaggatcactgagggaattaggggaggggactagcgactcattccccagtctcctctttcaggtggacttcagattgtggagagccacttctagcctagaagtcagagaaggcctcgtggggctgtagcataggaagagaaacaagtaggagaaagcaagtccccatgactggcacacatgatcctggtagggggagcaatgtccacgaagccttctctgaaattctcagctggggtatttctccataatctgaagtccatatcatgttacatgcagctgtttcatgacccttagcccccaccaccacacattagccatttgtgtccatggctccttcccactayaatgagggcaggctccatgtttaagtgtttctgttttctttcattcagccattttattcacttgagaaggtctcttatgtgtaagaggtactggctttgggaacaagacagccaacgtctgctttcatttgcttctccaacatactcatttgtgcatatgcacacaggaaggctcagtaaaaaatctcagtaaagctaataaatgaaggaatgaactaacctaaaaacaagcc

SEQ ID NO: 862971 - DNA, 664 bp, Homo sapiens
agcctcagattcccggatgtggtatctcccaagggtcaaatctggattttaaataaactccctaggtaacatgcacagtaaaaattgaggatcactgagggaattaggggaggggactagcgactcattccccagtctcctctttcaggtggacttcagattgtggagagccacttctagcctagaagtcagagaaggcctcgtggggctgtagcataggaagagaaacaagtaggagaaagcaagtccccatgactggcacacatgatcctggtagggggagcaatgtccacgaagccttctctgaaattctcagctggggtatttctccataatctgaagtccatatcatgttacatgcagctgtttcatgacccttagcccccaccaccacacattagccatttgtgtccatggctccttcccactacaatgagggcaggctccatgtttaagtgtttctgttttctttcattcagccattttattcacttgagaaggtctcttatgtgtaagaggtactggstttgggaacaagacagccaacgtctgctttcatttgcttctccaacatactcatttgtgcatatgcacacaggaaggctcagtaaaaaatctcagtaaagctaataaatgaaggaatgaactaacctaaaaacaagcc

SEQ ID NO: 862972 - DNA, 588 bp, Homo sapiens
cttgaatgttcaaggtgtcctgtcattttccaggattcttccccacgcagcctcttcagcaggaaagctggattttaagagagcaaaagtggaagctgccaggcctgtgaagagctgggcccaaactggcacagtgtaacttctgcctcattctgttggccaaagtaaaccacaaaaccagcctgattttaaggagaggaaaggcagattctatgtcttgatggggaaggtaatataaatgtacaggaaggacttgctggaaggcatctttagagacaatatatcatgcayagtattttagacataatatttgatttaatgaataggtgaacaaaagtgcctgcctgccagctctggagagagcagcagatctcccagcacagaggactggtcaaagaactaccgaagaaaacattcctttggggccaccagtgaatgaaaatgtgagtctagctatctcaggtagcacagaacataaatatagaactatcagtgcactgtgaagaactgctcactcagctggcttgactggggcctagtggccactcgagcatagtctggtactcactgttcacaaacatttccatc

SEQ ID NO: 862973 - DNA, 588 bp, Homo sapiens
cttgaatgttcaaggtgtcctgtcattttccaggattcttccccacgcagcctcttcagcaggaaagctggattttaagagagcaaaagtggaagctgccaggcctgtgaagagctgggcccaaactggcacagtgtaacttctgcctcattctgttggccaaagtaaaccacaaaaccagcctgattttaaggagaggaaaggcagattctatgtcttgatggggaaggtaatataaatgtacaggaaggacttgctggaaggcatctttagagacaatatatcatgcacagtattttagacataatatttgatttmatgaataggtgaacaaaagtgcctgcctgccagctctggagagagcagcagatctcccagcacagaggactggtcaaagaactaccgaagaaaacattcctttggggccaccagtgaatgaaaatgtgagtctagctatctcaggtagcacagaacataaatatagaactatcagtgcactgtgaagaactgctcactcagctggcttgactggggcctagtggccactcgagcatagtctggtactcactgttcacaaacatttccatc

SEQ ID NO: 862974 - DNA, 604 bp, Homo sapiens
aagtgatcacactcagttttgtgctccacgcatgaagtagcatcccagaaaaaaactgctgtcctattccacactacaccttaaaccctagctggatgtgttgaacaagtatgtttttgactgcaagagactgaaaaacagagggaaggagggagggagggagaagacagaggaaactcagtaattatgttagtgtctctctctctctctctctctctctctctctctctctctccctctctctctctcatgagacggggtggagagtttgkggcaaatgatgttggtctgaaaactatggagaaagtttatctcaggcagaaatgggaagaagtttgaggcgtgatagaagagtctgctgggaaaaatgacttgaagtagccatgtgctagacacaaggatgcactgcccagctcccacatcagtgaagccccattgccccagctcctgagaatgtcatgggccaatagccttcaactgtcagcccctttagggaggtttttttataccccagtggaacatggaatgccagtgagacagaaccattcactcccctggaaagggggctgaagctagggagcccaatggtctagttcagcagatc

SEQ ID NO: 862975 - DNA, 598 bp, Homo sapiens
aaatcaatgaatccaggagctggtttttagaaaagattaataaaatagatagactgctagccagactaataaagaagaaaagagagaagaatcaaatagacacaataaaatatgataaaggggatatcaccaatgatcacacagaaatacaaactaccatcagagaatacyataaacacctctatgcaaataaactaaaaaatttagaagaaatggataaattcctggacacatacaccctcccaagactaaaccaggaagaagtcgaatccctgaagagaccagtatcaagttctgaaattgaggcagtaattaatagcctaccaaccaagaaaagccctgggccaggcagattcacagccaaattctactagaggtaccaagaggagctggtaccattacttctgaaactattccaaacaatagaaaaggagggaatcctccctaactcattttatgaggccagcatcgccctgataccaaaacctggcagagacacaacaaaaaaagaacatttcaggccaatatccttgatgaacatcgatgcgaatatcctcaataaaatactggcaaaccaaatccagcagcacatcaaaaa

SEQ ID NO: 862976 - DNA, 582 bp, Homo sapiens
cactccattccagtcaaagccttggtaaaataaccagtttctccagttgtgtcctgttacaaaagaaaacagattctggctaggcatggtggctcacgtctgtaatcctaccactttgggaggccaaggcaggtggatcacctgaggtcaggagttcgagaccagcctggctaacatggcaaaaccccgttcctactaaaaatacaaaaattagccaggtgtggtggcgtgcgcctgtaatctcagctacttgggaggctgaggcaggaaaatarcttgaatccaggaggcagacgttgcagtgagccaagatcacgccactgcactccagcctgggcaacagagtgatattccatctcaaaaaaaaaaaaagaaagaaaataaaacagtttcttattgcacttaagcaaataactatattgccataagttaagagtacttgggttggcacagtggctcatacttgtaatcccagcattttgggaggctgaggcgggtgatcacctgaggtcaggagtttgagaccagtctggccaatgtggtgaaatcctgtctctattaaaaatacaaaaattagctgag

SEQ ID NO: 862977 - DNA, 549 bp, Homo sapiens
cagccattactcttaagtaccatctactggatcgcagcttcttcttccagtatatattctctgtgaaacccagggcaagaatgtagtcactaataaagatcctgtacagaggcttggccctctgaaagtaatccagaaacaaagtgaactcaactatactcaacttacaccaaagttaattcctcaaggaaaataaagaatagaaaaacaaaaagctccatccaaacgacagcaaatccgaaaacacaaaagaacgcaagctttcttggatgagaaagaatcagttaagaactctggtaatttaaaaagtcagaatatccctttatatccaaatgttattagctcyccagcaatggttcttaaccagattgaaatgactgaaatgacagacatagttcagaatctggatggtaaggaaactcattgagattcaggagaaggttgaaacccattccaagaaacccggtaaaacattccaagagttcaaagacaaaatagccatttgaagtaaaaaccaaacaaatcttctgtaattaaagattgcactgc

SEQ ID NO: 862978 - DNA, 653 bp, Homo sapiens
tatcctaattaccttgatcattacccattgtatgcatgtatcaaaatatcacacatttctcaaaaatgtataattattatatatcaataaaaaattcatcataataaaccctttaaaatcaaggaaaaacgtattcagatctgtcatgactctatgccaaaaactcacattggactctactccaaaattttccatgtgtaccatattacaattttagggttttattaagccttttgggaacatcagagrcataaacaataggtgatttaaaatcaaaatgaaagtatataatgcattttaatgactttaagattaaaatattcatttctgttaccaactattacttttttagcatactctctattagaatctacaacttcaactcagatttttgctacattaaaccagtcttaagaaatatttttttacccaaatacaaaagtggtcaatcaaaccacccactcatttactacctcttgaggatacttttaaaaggctcagttagccaaaaagccacttttcttctagcaggatatatatagacattgaatctgaataaattactggactaaacctgcataggcaagtaacttagtgcttttatgtagcaaagtgtttgctatatattgtacaacgtatttgacaaaatcatt

SEQ ID NO: 862979 - DNA, 642 bp, Homo sapiens
aaaagtcttaattctttgtagtctgtgctacacatacaaagattacacagatttcttttctaaaacttttaaattattttctagtttcactagaaacaacaggtgtaagattctatttccaccacaaggtgtcagtccacggtaatttaagcttcaaagggctttaaactaatccaaggaaagtcagtgactacagaaaatacttatattaaaacatgctttgttaaacggatgcttgaaggcggcatgctagttaagagtcatcaccactccctaatytcaagtactcagggacacaaacactgcggaaggccgcagggtcctctgcctaggaaaaccagagaactttgttcacttgtttatctgctgaccttccctccactattgtcctatgaccctgccaaatccccctctgcgagaaacacccaagaatgatcaataaaaaaaaataataataattaaaaaaaaaaaagtaaaaaaaaaaaaaaaaaaaaaaaaaaaacatgaacagtcttcggtgccctagcagtgaataaaaaacaatcatggaaaatgtggttgcgcgtttattttcctttgtgttttctactcagcttagtcctgagaatgttgtataccaaatccccagaattttgcaattca

SEQ ID NO: 862980 - DNA, 569 bp, Homo sapiens
catcatcccaggtattttgttataatagtacaaaaaggactgagacatagatatctagcactccttaatgaactaggagaaaagctatctgaataatgtctaataatcactatcttccttctactagttcctcctttaccacccctatttcatttaataatattgctgcttgctcagttgcttcaccttaaactttactattatgttttattcttcagtactacattattcttctccccaattagttgcaacatcctgatgaatcaacctcgcctaaaaataagtcatcttccacctgagaaaagcatcctcttcacctcagagcttcaagaagaaagtacatgtggtgcagaaaaagataagatattcatctamccagccaaatcaggcataatcaactttggtagtgaaatagtgacagatggtgcaggctgttcaactgcatattcaattccattattccatctcttacatgcggcccctcttctcctttctgactgccactgtcctaactaaagtagcatcacttctcacctggacaaaagcaggtgcccaacttctggcatctg

SEQ ID NO: 862981 - DNA, 607 bp, Homo sapiens
aggtgagccaagaaagaccaaataaattccctatttctctttactgggctagaagaggtgtggtggctatgtgtagactacaaacacttatactttaacaaatattgtcacactgacacttttccttttggccgcactaaatagggatgctccctttaccaaggaaaatcaatctgtgccctcagctaggaaggtaagactggttgtctactasgtaaaatcaagaaagcctcaagaccttccttaggccatcttaaactgttctgccaggatcagcttaactatgcttaactgttccttaaccaattaaataattcttgcccttaatgtctcttgaccaatggagaaggttaactttggttcatatccacccagtgctacttctcttctttccttccccccaaaacccaaaactaatattagccatatgtttcagtaagctctccccaatccgagactctctgtggacctaccatagccagaaacagccagaactgtctctctgaattaaagcttgggatttatataaatggccctagatactgccctctggggaactttaagtggcaacctacatgctatctgaaacagaagcccaacatctacc

SEQ ID NO: 862982 - DNA, 607 bp, Homo sapiens
aggtgagccaagaaagaccaaataaattccctatttctctttactgggctagaagaggtgtggtggctatgtgtagactacaaacacttatactttaacaaatattgtcacactgacacttttccttttggccgcactaaatagggatgctccctttaccaaggaaaatcaatctgtgccctcagctaggaaggtaagactggttgtctactaggtaaaatcaagaaagcctcaagaccttccttaggccatcttaaactgttctgccaggatcagcttaactatgcttaactgttccttaaccaattaaataattcttgcccttaatgtctcttgaccaatggagaaggttaactttggttmatatccacccagtgctacttctcttctttccttccccccaaaacccaaaactaatattagccatatgtttcagtaagctctccccaatccgagactctctgtggacctaccatagccagaaacagccagaactgtctctctgaattaaagcttgggatttatataaatggccctagatactgccctctggggaactttaagtggcaacctacatgctatctgaaacagaagcccaacatctacc

SEQ ID NO: 862983 - DNA, 607 bp, Homo sapiens
gttatgaacttactagaaaaatacagtaacactgctgggctcatctgatttgtggtcatgaatttataatcaagtctgtccaatcgtgatttttttctattctaccggctcttctgatgtaggaagagaaaaggcaaagagatatttgaattcaaccaggaatgtaatttaggcaagtgagaacaataggcaacagagcaatgttgttcamagttttaccggagaatgattattatggtccagaaagtcagagtaaggatggacgtgaatacagaaagggtactgtttttcagattttgaaatatctgcagtacacttaacagctgagcatccccaattcaaaaatctgaagactgaaatgccctagtgagcatttcctttgcgtgtcatgtttgtgctcaaaaagtttcagattttggagcattttggattttcagatagtcaacttttacttataatttattaaagaaataaagctagtttaaattttttctgaggaacctgtaactttcagaaaattactacaatgtacactgttgaaacttaacatatcattactttattgtgactcaagattattttcatctgtattaaattaagtatttgc

SEQ ID NO: 862984 - DNA, 607 bp, Homo sapiens
gttatgaacttactagaaaaatacagtaacactgctgggctcatctgatttgtggtcatgaatttataatcaagtctgtccaatcgtgatttttttctattctaccggctcttctgatgtaggaagagaaaaggcaaagagatatttgaattcaaccaggaatgtaatttaggcaagtgagaacaataggcaacagagcaatgttgttcaaagttttaccggagaatgattattatggtccagaaagtcagagtaaggatggacgtgaatacagaaagggtactgtttttcagattttgaaatatctgcagtacacttaacagctgagcatccccaattcaaaaatctgaagactgaaatgccctagtgagcatttcctttgcgtgtcatgtttgtgctcaaaaagtttcagattttggagcattttggattttcagatagtcaamttttacttataatttattaaagaaataaagctagtttaaattttttctgaggaacctgtaactttcagaaaattactacaatgtacactgttgaaacttaacatatcattactttattgtgactcaagattattttcatctgtattaaattaagtatttgc

SEQ ID NO: 862985 - DNA, 606 bp, Homo sapiens
acatgaaagtaagatcatgtggtatttgtctttctgtgcctggcttatttcactaaacataatgtcctccaggttcatccatgttgtcgtgaatgacaggatcttattctttttatggctatatagtattctattgtatatatagactgcattttctttatccattcatccatagatraacacttcggttgatccatgtcttggctattgtgaatagtgctgctatgaacacaggagttcagatactgatttcattttttttggacatatgcccagttggattgttggatcatatggtagttctatttttaattttctgaggagccacaatactactttccataattgctgtactactttacattctcaccaacagtgaacaagtgttctcttttctccacatccttgccaatacttcctacctttcatctttttgataatagtcattctaacaggtgtgaggtgatatctcactgtggttttaatttacatttccctgatgattagtatgttgagcactttttcatatatctgttgcccatttgtatgtcttcttctgaaaaatgtctattcaggtgctttgcccatttttttatttgggctgtc

SEQ ID NO: 862986 - DNA, 666 bp, Homo sapiens
aaatgttgtccatagtaccataattccattttttaatttgggttacatttttttttcattaaatgaattaagccgaggacttaaggaactgatccaacagaaaaaaagttttctacattcatcaaccataccctttataatttgttacaccaattaatttacagtaatcacttcagacacaagaacacagcagtcaacttttccattagttgggttttactcctctgtcagctttcttagtaatgaatggaggctcacttacattcaaagatttcacacttccaaagacaatctaaaggtaactctactgattgctctgctagggagtggctccattttgagcttccctcaaacaaagtatgagcaaaaatgtttagtcacatgaagcctccattttgccagctgcacacttccaaaaatttattcacccaaaggtcagaagcggtgagttctggagttctttatggtgtcctsggaatgcctttcaagtctctggctgctcacaatatttttgtgtgtgctgaactgttatctaaaacgaagtatttcctaatttcagcctactctgagaaccttcagcttttaaagagcttgctgtataaaaaacacaacaggcctctgtaattctacttcaggtgcgatctggacaccatgaagcactgcaaa

SEQ ID NO: 862987 - DNA, 647 bp, Homo sapiens
tccatgattaattttaaccaagcattattgtacttaatgacatcaatgtctaagaaattttaagcaacttaataggaacaggtaatgaaaataggtaacataattccaattacattgcagtgtaggacagaagtctgaattacccctaaatagcaggaaacaactgtgcacacaaatcaaaaagaaaaaaaaggcacttgatcttattctactctgatgcttcatgggaatacaccgtgctctataatcacatcaacaacaggccgtggcggggaagaatctaatacagactgaaaagaacaaacaatgaagaactaagtatttgatcaaggttgacaatgtcagagaggaactcagcaatgcaattagtattttagaggtggctttgaaggcggtaagaaaatatggcatctggaataaaggggttgctgaacacaccattataagaaagaaaaagcataaggttaaagtggaacagaataaaacyttaattaaacagaagccaactaacaggtgtgcttgaatattatgtttattacatatctcacttttatgagagagggtaaaaccacaaaaggaatgcttcaaaaagcttcttttaaaccagaacttagggtcagtctgtagtaagaagagcagaaaccacg

SEQ ID NO: 862988 - DNA, 637 bp, Homo sapiens
aggttgttggccattgattgcattagtatttaaaaggccaagccttacattggaagatcaatacatctaaaataaaaacatgggtttggggataacttttgttgttaggaggtggaggaggtcaagctaacaaaagcttgtttttggcattccaagtcttagctaaagattatgtagaggtaaatatcagtagtagattcctgttgaaatgagttatctgttcttttaaagtctctaaacagccaccaaagaaaaggaaggttaaaccttaatctatttactargctattgttcataggtgtcaatgatgccaataaaaaatactgtcttgttatgtctaagtgcatttagcaatgggtgttcctgagccatactttgaaacataaaatactctaaatgttgattgatgttatatcactatttcactattagattaatattattattttgaatcaaattgaataaaaagttagtgtgtttggattcttacaagtttagcttctttatttctgtttgcaatctccccaccctaagtatagtcttggtatacatcttgaactgaaaaattttccattgaaatctatatatggtaattataatgcatagaagcaagtgaaaatacaaagtgctatgagca

SEQ ID NO: 862989 - DNA, 656 bp, Homo sapiens
ctttgaaaaataagtatgcttttaaacatatcaaaaatgtaaatatacaaaccattcttttatagtaacttgtatatttactattactgatactcttcattcctttgtgtatattcagatttccatctagtatcactttccttctgctcaaaggacttcctttaatatttcttgtagtgtaggtgtgctggtagttaattattttaacctttaatttctgaaaatgtctgaactttgccttcctttttattrggcatttttctgtaaatagcattctgatttgaggtgttttctttttctttcagtgctttgaaaatattgctccattatcttcttgtttgcattgtttctgatgagaagtttgtagctttcttgtctttttcctcatctatattgtgtcaatttctctggatgctttagtagttttctccttaacattggttttaagcagtttgattatgatatacctaggtgtaggatttcttatgtttcttatgcttagaatttattgagcttcttgaatctgtggattttaagttttcatcaaattggcaaatttttaaagcattatttcttcaatgatttggacttcctttggggacatatgtacatacggaatatagatataataaatgcttaatgtctctactaactct

SEQ ID NO: 862990 - DNA, 553 bp, Homo sapiens
actgccctagactcctgcagatgacaatcttggctagcttcttgttccagtagtgctcagtggccagtagtttccccagcacctgacaggttctgaagctcagcaccgtcctgtggaaggtctcccttgccacccttgagggcagatttccagcaagccccaccagcaaggyaccacagcaactgctctgccatccagtgaaccacagctgtgccctttccattgaggcctgcctctccgccttgctgggagagaagaaagggatcatcgatgggtgctgtatttcactccagcggtagtggggtgctacttttatctgctacttctgtattctttagaggtgtcttaactttcttttattattattattattattttattattatactttaagttctagggtacatgtgcacaacgtgcaggtttgttacatatgtatacatgtgccatgttggtgtgctgtacccattaactcgtcatttaccttaggtatatctcctaatgctatccctcccccctctccccaccccaccacagaccctggtgtgtgatg

SEQ ID NO: 862991 - DNA, 553 bp, Homo sapiens
actgccctagactcctgcagatgacaatcttggctagcttcttgttccagtagtgctcagtggccagtagtttccccagcacctgacaggttctgaagctcagcaccgtcctgtggaaggtctcccttgccacccttgagggcagatttccagcaagccccaccagcaaggtaccacagcaactgctctgccatccagtgaaccacagctgtgccctttccattgaggcctgcctctccgccttgctgggagagaagaaagggatcatcgatgggtgctgtatttcactccagsggtagtggggtgctacttttatctgctacttctgtattctttagaggtgtcttaactttcttttattattattattattattttattattatactttaagttctagggtacatgtgcacaacgtgcaggtttgttacatatgtatacatgtgccatgttggtgtgctgtacccattaactcgtcatttaccttaggtatatctcctaatgctatccctcccccctctccccaccccaccacagaccctggtgtgtgatg

SEQ ID NO: 862992 - DNA, 573 bp, Homo sapiens
gtgattgcctgccttaactaaccttggggtgggcgttttctagtaagtaataagtaaacctatgtttcctaatttcattgtcccattttttgcagttatgtatgtttagcacatctaaataaaacaaaaagaaaatacaaaacgtctctttttaaatgtgctcaaagcagaagtccaattttccagcattggaaagatgctgttggcagaaagctaccttgcaaatgagtattaggcaaaaaaaaaaaaaaaaaaaaaaaaaaaagccggacacaattgctttcagtagaggcagtcagtaaagccatagattcccacttaattatactttgyttgctttctctacagccagtgctcacttgaatctctggatgtacatgcttttagtgagcaaatgaaaaaggaaatacagaagtgaatatttatttagcatcccctctacaaaagtagttcgtttttgcaatttgacacaatataattttaaaaatataacccttccaaataaaggggccaacaagtatatctcaaataactccactctatattttaataaaaatacataaattttttata

SEQ ID NO: 862993 - DNA, 585 bp, Homo sapiens
tgaaaagcagtaactccaaattatcttgtaaagttgagaataatctgagaagagctattgtaagactgggaatcaagtaacaaaataaagatatgaaccgtccattggtctatttatttacttgttttaaaacagggaatacttttaaaatttagttatgaatatagtttatatttttaagggacacagatgatgtataaatgtgataattctgtacctcacagtcaaaacagatattttgtaaacaaggattctgggttaccagacctcctgaaaatgaatgacttttgttgttatatccacttttctatcatttctcyttttctggtaacacaaacctaaaattacctgttcattcttcattacccccaaaatacttttgatctactttcccatcatagttaacctggttatccaacatgtaatgaaattaacattttagacaaataataaacaaaaaaatgagaacagattaaagaaatataaaatgtaaagttacccagagacttacaggatgctaaacttttaaatagaatatgatgtggctaatttttcaaagagaagagactgacaagtttgtataga

SEQ ID NO: 862994 - DNA, 611 bp, Homo sapiens
ctgttttactattgtatgtatttattatcatacttcttcctcttgtttttaaagccttacactatctagtccttgaccacccttttaaatttatttcccataattctttccctgtagccacatagtccttctctgctcctttagtccactagtttgtttttaagagtggatgaattttatatggaatggtcttctacttggtggacaaatgccagcttccatcttatccttgaaatctctgcttaaatgccatctcttcagagagacytttctttacccaaactaatgtagtcagtcatattctaccaccacaccttactttcattctctgcttagctttttcactatacgatatttatcaaacttcatgagagtaaagaatatttctctcttgtccattgctatatacttagcatggagaatggtctctggtccatgggagttgttccacaagttgttgctcaataaataaatgggtagctaaaagcaatatgaattcattcaaaaatttataagggctatcaatataaaggcaggaaaatagaaatgtttgagtagaaaacccaaaattttacatacttcacagttttgcctaaacctaacactatgtt

SEQ ID NO: 862995 - DNA, 630 bp, Homo sapiens
ctacagacttaaacgtccctgtctgatagctctgaagagagcagtggttctcccagcatggtgtttgagctctgagaacggacagactgcttccttaagtgggtccctaacccctgtgtagcctaactgggagacacctcccagtaggggctgactgacagctcataaagccgggtgcccctctgagacaaagcttccagaggaaggatcaggcagcaatatttgctgtgctgttctgcagcctccgctggtaktacccaggcaaacagggtctggagtggacctccagcaaactccaacagacctgcagctgagggacctgactattagaagtaaaactaacaaacagaaaggaatagtatcaacatcaacagaaaggacatccacaccaaaactccaactgtaggtcaccatcatcaaacagtaaaggtagataaaaccacaaagatggggacaaaccagagcaaaaaagctgaaaattctaaaaagcagagtgcctcttctgctccagaggattgcagctcctcgccagcaaaggaacaaagctggatggagaatgactttgataagttgacagaagtaggcttcagaagatcagcaataacaaacttctctgagctaaaggaggat

SEQ ID NO: 862996 - DNA, 640 bp, Homo sapiens
gcaaactattccacagaattaggagaaacagaggattcttactctactctgcccaacatttatcattcagcagttacattgcatgtctctggtgggtacaatacataactagatgccaagtacataatagtgtaaaacaccgatagtgtcctgagctcttctagtgcgggatatgtatattaartaagttaatttagtaattgttcaatcaacattgtgagtaggtcttcaaggttaggtatagggtcctgatcctgtatggctgacattatcaggagcgtcaggaaaagtttcagtgaagtaacatttaaatttcaatcagaaggaagtttgctaactgagaaacaggagcagcaggagcgcattccaggcatttctttttttaaaaaaaagttccctaattaaacaaataattttcatctttattgagatataattgaccagaattgcatatatttgagatgcacaacttgatcttttgaataacatggtcacaataaaaggtcacatgattaaaccatgaaaataaatttaaattactccatctctcttttttgtcactgcatccaactctatgaagcaaatgatcttcttgataaaagcctcacacccagaatccttacctcccctacgctgcagt

SEQ ID NO: 862997 - DNA, 681 bp, Homo sapiens
tatgaaaaatggcataaaggttcctcaaaaaactaaaaatagaactatcatatgaccaagaataccacttctgggtatatatcgaaaggaactaaaatcagtatgtccaagggatatctgcactcccatgttcactgtagcactattcacacaatagccaagatatggaatcaacccaggtgtccatcagtggataaatggataaagaaaatgtgagcctgggggctgtggctcatgcctgtaatcccagtactttgggaggcctaggtgagcagatcgcttgaggccaggagttcgagaccagcctgaccaagatagcaaaaccttgtctctactaaaactataaaaatcagctgggcatggtggtacgtgcctgtgatcccagccactcatgaggctgaggcacaagaatcacttaattccaggaggtggaggttgtggtgaaccaagatggcaccactacactscagcctgagtgacagagctagcctctgtcccccaaaaaaagaaaatgtggtatatatatatatacacaattgaatactatttagccttaaaaacaaaggaaatcctgccatttgtgacagcttttggatgaatctggagaacattatgctaagtgaaataagccaggcatagaaagataaacattgcatgatctcacttacatgtgaaatctaa

SEQ ID NO: 862998 - DNA, 681 bp, Homo sapiens
tatgaaaaatggcataaaggttcctcaaaaaactaaaaatagaactatcatatgaccaagaataccacttctgggtatatatcgaaaggaactaaaatcagtatgtccaagggatatctgcactcccatgttcactgtagcactattcacacaatagccaagatatggaatcaacccaggtgtccatcagtggataaatggataaagaaaatgtgagcctgggggctgtggctcatgcctgtaatcccagtactttgggaggcctaggtgagcagatcgcttgaggccaggagttcgagaccagcctgaccaagatagcaaaaccttgtctctactaaaactataaaaatcagctgggcatggtggtacgtgcctgtgatcccagccactcatgaggctgaggcacaagaatcacttaattccaggaggtggaggttgtggtgaaccaagatggcaccactacactccagcctgagtgacagagctagcctctgtcccccaaaaaaagaaaatgyggtatatatatatatacacaattgaatactatttagccttaaaaacaaaggaaatcctgccatttgtgacagcttttggatgaatctggagaacattatgctaagtgaaataagccaggcatagaaagataaacattgcatgatctcacttacatgtgaaatctaa

SEQ ID NO: 862999 - DNA, 562 bp, Homo sapiens
accataaccctagcagagtagacatgaaagtgtctaaaaacacatcacgacttaagtgtacatggaacatccacagaaccactcctccccttccacaattaaatatgactcagaattttaaaaacctacaaatcactgcaagggagtgtcagcaaacagaacaagcagaagaatcagatccccaagaatttaaaacaatggaaatagatgaacaagatcasaagtgtgttaaaaattattgaaagaataaagagaattgaaaacaaaagggaaaatgcaacactatgaaattagaacaagttgatttcaaaaagtatagaaatgaaaaatataggctttaaatatttttaaaaaattaatgtcctacttaatgtattagagccaaaagtagattattaaactggaagttaaatctgagaagactatctgtaatcaacccaatgagataaaaagctgtaaaatgtaagaggttaaagcacacaatgacaggagaagctccaacaaatgtcaaatagaaattccagaaggaaagagaaaagggagaataaatcagtatatattg

SEQ ID NO: 863000 - DNA, 562 bp, Homo sapiens
accataaccctagcagagtagacatgaaagtgtctaaaaacacatcacgacttaagtgtacatggaacatccacagaaccactcctccccttccacaattaaatatgactcagaattttaaaaacctacaaatcactgcaagggagtgtcagcaaacagaacaagcagaagaatcagatccccaagaatttaaaacaatggaaatagatgaacaagatcagaagtgtgttaaaaattattgaaagaataaagagaattgaaaacaaaagggaaaatgcaacactatgaaattagaacaagttgatttcamaaagtatagaaatgaaaaatataggctttaaatatttttaaaaaattaatgtcctacttaatgtattagagccaaaagtagattattaaactggaagttaaatctgagaagactatctgtaatcaacccaatgagataaaaagctgtaaaatgtaagaggttaaagcacacaatgacaggagaagctccaacaaatgtcaaatagaaattccagaaggaaagagaaaagggagaataaatcagtatatattg

SEQ ID NO: 863001 - DNA, 578 bp, Homo sapiens
gtgggtggatcacttgagctcaggagtttgagaccagcctaggcaacatggtgataccccgtttctacaaaaaatacaaaaattaggtgagtgtggtggcatgcacctgtagtgttagctactcaagaggttgagacacaacaatctattgaacccaggaagtggaagttgcagtgaaccgagctcatgccactgcactccagcctgggtgacagagccagaccctgtctcaaaaaagttaatttttcatggtaagcattcgtgaataatgtctaaacttgrtaagtaaaaaaaaaaagccatataattttattacttagagcagtagttctcgattccaggaaagattgggaagtgtatcctgtggatggagaatgctactagcatttaatgtcaagaagagagatgctaaatgcacagaactatctcatacaaatcccacctgaaataccagtttctctttctgagaattgctgatttagagttaataataaactcaccagaagaattaatattaaaaatgattttaagaaaatggtggctggctacagtggctcacacctgtaatcccagcactt

SEQ ID NO: 863002 - DNA, 658 bp, Homo sapiens
gaatactttttaatataattatatcccatgcaatatttgagacatactaaaagattatttcttgattaatatgcaaatttaactgagccttctatattttctctggcaaccctacagatagtgcatatcttaatgstttagaaaatccatcttatgttttgagatctaaatttgtttgagatttgctcctaattgaaacccacaatgaaatggttgtgacagttaagactgcatttgcctgaagtatagtggatgttgcactgcccacctccgcacaactctcttttgttgtgagaatataagcatagaaacaagactttgcttgagaaacctaagctaaatagtactcttttgtaatttgtattaaatattttgcagacacacataagtaaagatagtgctataatgcattgcacagaatttatttacaccctatttagtttttttctttttgtttgggtgctgggtacatggatgggtgggtgagggtgtttgttttgccatctcctatgtcagtggttttgagcctttgctatacaatagaatcacctgagagcttcttaagctctcaatccctgtctgctttgcagaccaattaaatcagaatcactggaaatagactcgggcatcagtatttaaagctgcccaggtgactcca

SEQ ID NO: 863003 - DNA, 604 bp, Homo sapiens
atatctggattgctctaagacagtttccattaagtcaagaaagatgagcaagaaatatttggtgctggctacatgctcgtggaatttgttggaaacaaatacattagaaagctattaagtttctagagggctatattgacaaaggacttcaatcctggatgccaaaggatgagtgacctaagcaatgcctgtgccaccagaagtgcaacagcagacacatgactataaaagctgtttggccgccaagaagggaaaactctccattgttcacatcaaatgtggtcatcaaggataacgaacaggaaggaccttccaggggaaaatgcagggacctgtggacaatgtggaaggtaatcctccaagaaaacagaaccaggggtttggagatgaaacggacaaaaamtttactcagctgtcaaggcaggaacatatttgcaatttccagccagtgggatttgatcattataatgaaaacagaactgctatgtctgtcccattccttccttctctgaatgtaatcctttagaaaaattatcttgttctgactccacagttttatacaagttatttcatgtgtgtttgtgagtaggaggagatttgcata

SEQ ID NO: 863004 - DNA, 565 bp, Homo sapiens
ccatagagaagagaaaaatgaaaaagtggaatcccaccagaaatgttgagaacccttgcttatgacaaagaatccaattggagagacacttacaacgcacatgtctacaaccacagacattaatcaatgtatcatttccaggttgtgtttaatataagaagtaacttgcactctctttgacataatatgtttatttcaccaatgtcaagaaacattgagtttaaaatacactggttagcaaaaacttttatcacatgcgtcaaataattttgaaaacygtatgtaagattaaaggacacctttatttgaaaactttataatttaattattttcctattgttagtaagaaattaccttttaaaataataaaatagacctgaaacaatgaaaacctttaagaaaaataatgatcatgtgttattaaaagaatgggtggctttcaagaataaagtccaaaagattgtcagggaaacagagacttcttagaagattcaagcatctttcatcaccctgagtttgcttgcacaatgagccattaatcagtactgcagctaagaaagtccag

SEQ ID NO: 863005 - DNA, 603 bp, Homo sapiens
gggaatagcacctccatcttgattttttttaatgagccagagtctcatcttcttgcccaggctggagcacagtggtgcgatcatagctcactgcagcctcaacctcctgggctcaagtgatcctcctgcctcagcctccctagtagctggaactacaggtacgccaccacacctggctaattaaaaaattttgggggctgggtgaagtggcttacgcttgtaatctcagcactttggaaggccgagatgagtgggatcacgaggtcaggagttcaagaccagcctggccaacatggtgaaaccccgtctctactaaaaaaacacaaaaagtacctgagtgtggtggcacacacctgtacycccagctactcaggaggctgaggcaggagaatcgcttgaacccgggaggtggaggttgtagtgaactgagattgcgccactgcaccccagcctgggtgacagagtaagactctgtctcaaaaaaataataataaaaaaataaaaataaattttggccaggcacagtggctcacacctgtaatcccagaactttgggaggccaaggtgggtggatcacctgaggtcaggagtttgagatcagca

SEQ ID NO: 863006 - DNA, 593 bp, Homo sapiens
aaaatattatttcctaacatctcagaaaaaatccgttttctggtttccaaaacaaagtcatttaaggggctcagtcagcaggccaagaagcgctctgcagtcaggcctgatcctggtgcccacactgacttccctcccaggaggtgccataggggcctgctgtgcccatatttgttcttatgaggctgggaaaggaactggtttttttatttgcgaagtgacargagtgtgtaaaggcctttttgacttttaacctcattctctctagcaagcaagtagctactcttccaccagtgagcgcgggctggacctcttagattctacagagctggatattgaggtgagtgtccccagagcaggagttatgtatccttcggaaatgctggcaggcaacccgtgcactcatcaaattgacaggccatagcctgggggtggccctctgggctgtctctggggctttgagggtaacccaggggaggatggtctgcccattggcccgttgctgtgtcctgtgtattcctttcatctttctcattataggatttctgacaggactctgggcccctccccagctccactccctacctcaagaa

SEQ ID NO: 863007 - DNA, 593 bp, Homo sapiens
aaaatattatttcctaacatctcagaaaaaatccgttttctggtttccaaaacaaagtcatttaaggggctcagtcagcaggccaagaagcgctctgcagtcaggcctgatcctggtgcccacactgacttccctcccaggaggtgccataggggcctgctgtgcccatatttgttcttatgaggctgggaaaggaactggtttttttatttgcgaagtgacaggagtgtgtaaaggcctttttgacttttaacctcattctctctagcaagcaagtagctactcttccaccagtgagcgcgggctggacctcttagattctacagagctggatattgaggtgagtgtccccagagcaggagttatgtatccttsggaaatgctggcaggcaacccgtgcactcatcaaattgacaggccatagcctgggggtggccctctgggctgtctctggggctttgagggtaacccaggggaggatggtctgcccattggcccgttgctgtgtcctgtgtattcctttcatctttctcattataggatttctgacaggactctgggcccctccccagctccactccctacctcaagaa

SEQ ID NO: 863008 - DNA, 562 bp, Homo sapiens
accattctcacagggacactgaggtttatccacccatatgtcccttcagcaactcagaaaatatggtcactatacccatacatagcctatgagccaactataagaaaaaagtgactcaattcagtaagcaaaggatattaccaaagaccagcaaaaatcacatccagagaaaactcagtagaccatcagcttctgagagaccagacctcagtttaagttttttttaatacaatattttatttactactggcctctgctacatacaacttagcagaaagaaaaagagaaaaatgattttaattgcatgagagcttgaagcaccayttcctgttttgatatctagcatatccaggtttctaaacagtccctgccttctactgtgagctcagaatgtcccaagaatgtaggttactttttgataacgctaaattctcactttgcttaaaacttaatatacatgaaatcaagaacttggtaagtcattgtccctagggctaaaaaggctacaaaaatgaggaaactggcacctaccattaaagaagagcttattctatagttagga

SEQ ID NO: 863009 - DNA, 606 bp, Homo sapiens
caggcatgagtcactgctcccagcctttttaattcaatttaaattataaatgtgatcgctatagaaaatatgtgtattatttatctgctgctatgtaacaaattactccagacctagtggcttaaaataaatacttagggccaggcacagtggctcatgcctgtaatcccaatactttgggaggccgaggtgggcagatggcttgagtccagcagtttaagatcagcctgggcaacatagtaagactccatccctacagaaaatgcaaacattagccaggcgtggtggtgcacacctgtggtcccagctactcaggaggctgatgggggagaatcrcttgagcccgggaggaagaggttacagtgagccaagatcacaacaccgcactccagcctgggtgacagagtgagactctgtctcaaaaataaataaataaataaataaataaataaataaataaaatacttacttaggatctccatttctgtgggtcaggaattcaggagtggcatagctgggtcatttgggctcagggtgtctcatgacattgcactcaagctgtccactgagactgcagtcacctaaagcctgtttccaagatggctc

SEQ ID NO: 863010 - DNA, 714 bp, Homo sapiens
cagagtttatccacgtagcagcatattgtagtatttccttttttaaggctgaataatactccattatgtgtacataccacatttcgtttacccattcatctataaatgaacacttgggtttcttctaccttttggctattgtgaacaatgctgctgtaaacatgggtatacaaatayctcttcaagaccctgctttccattctttcgggtagaactcagaagaatttctagatcatatgttaattctaattttaattttttgagaaactgacacattgttttccacagctgctacccatttatattcccaccaacagtgtacaaggcttctaatctctctacacctgtgccggcacttgttattttccctttttctaacagtagccatgctaatgggcatgaggtgatacctcattttaatttgcatttccctgatgatcagtgatgttgaacatcttttcatgtgcttattggcagtttgtatgtcttctttggaaaaatgttcatgtaagttctttaagttctttgcccagtttttaatcggtgctttttaaaattgtgcctggatcttgttaaaatgttggtataaaattctaaatatctatatgctcacttgaaggtattagcagttacatttaaggctaactaattaggctaattaaaagttaattaacttagcactggaatgcctttgtcatttttacttggacatta

SEQ ID NO: 863011 - DNA, 672 bp, Homo sapiens
tttccattgttccgcggttcccactgtcgctaccacacagggacattctatcaggctactcttatgcaattggacttctgctgaaaaccatttctcttggacctgaaaaagttttgacagttgacattttataaatttcatcagagtgtaacataaccggctatttaataaactctattgtgaagccttgagaaaagtgaaaggagccgtttgtcagataatcatcttgccttaatgtctcctgatgctcaaaatgcaaggtgtagctgaaattgacctgtggtcatactccttctctgctggctgctaaatgtatttattccccatgcttcatccttagtgagaactttctgagggattatttttagtttaacatcatacatttttgccctgtagactactataggtgctactaagtcatgcttygttttactgataagtattattttactaatacattaaggatatttaatgtatcaaattgataacattttatgtttcagattacacacacacacacacacaccccagcacccaagcatgaaacgccatatcagagccacctattggaaactcgttagcagctatcagattggagttacattcagtccattgaaaaaggagacactttgaaatagcccctacggaattttcatctttttattcgtaact

SEQ ID NO: 863012 - DNA, 613 bp, Homo sapiens
tttacttagtgagggaagagagaatttactaatgtagttgatgttgggataaaatggaagttggcattttagggcactattgaaaccacagaggtggcttgtggatggagatagggcaatacaggttagtatactattgtacgctgttctaaatactcgatactgcttttttttttttttctaagataaaggctatgtaaagtaatgctgtctgcatattttgtcaggatcaagtctcagctagaaaaaaaaaccaaaacaaaatgttaacaaaaacagaattagttacagagataccttctaragtaatgcttgtttatatttatgatccacttattttgaagacattggatttctcaataaaaaaattactatgaagaactttcttatgttgggtgagctagatacttcaaatgtgtaacattattattattgtcactagaaaacaaattagcaagctttaaaaatttataaccctctacattctgtgaagtaggaataataatattagttaattttattgaacaatatgatgcagacactatgattagtgctttatgtttattttctcttcaaagtttaaaataaaatctgaataaggtactatttttat

SEQ ID NO: 863013 - DNA, 613 bp, Homo sapiens
tttacttagtgagggaagagagaatttactaatgtagttgatgttgggataaaatggaagttggcattttagggcactattgaaaccacagaggtggcttgtggatggagatagggcaatacaggttagtatactattgtacgctgttctaaatactcgatactgcttttttttttttttctaagataaaggctatgtaaagtaatgctgtctgcatattttgtcaggatcaagtctcagctagaaaaaaaaaccaaaacaaaatgttaacaaaaacagaattagttacagagataccttctagagtaatgcttgtttatatttatgatccacttattttgaaracattggatttctcaataaaaaaattactatgaagaactttcttatgttgggtgagctagatacttcaaatgtgtaacattattattattgtcactagaaaacaaattagcaagctttaaaaatttataaccctctacattctgtgaagtaggaataataatattagttaattttattgaacaatatgatgcagacactatgattagtgctttatgtttattttctcttcaaagtttaaaataaaatctgaataaggtactatttttat

SEQ ID NO: 863014 - DNA, 613 bp, Homo sapiens
tttacttagtgagggaagagagaatttactaatgtagttgatgttgggataaaatggaagttggcattttagggcactattgaaaccacagaggtggcttgtggatggagatagggcaatacaggttagtatactattgtacgctgttctaaatactcgatactgcttttttttttttttctaagataaaggctatgtaaagtaatgctgtctgcatattttgtcaggatcaagtctcagctagaaaaaaaaaccaaaacaaaatgttaacaaaaacagaattagttacagagataccttctagagtaatgcttgtttatatttatgatccacttattttgaagacattggatttctcaataaaaaaattactatgaaraactttcttatgttgggtgagctagatacttcaaatgtgtaacattattattattgtcactagaaaacaaattagcaagctttaaaaatttataaccctctacattctgtgaagtaggaataataatattagttaattttattgaacaatatgatgcagacactatgattagtgctttatgtttattttctcttcaaagtttaaaataaaatctgaataaggtactatttttat

SEQ ID NO: 863015 - DNA, 613 bp, Homo sapiens
tttacttagtgagggaagagagaatttactaatgtagttgatgttgggataaaatggaagttggcattttagggcactattgaaaccacagaggtggcttgtggatggagatagggcaatacaggttagtatactattgtacgctgttctaaatactcgatactgcttttttttttttttctaagataaaggctatgtaaagtaatgctgtctgcatattttgtcaggatcaagtctcagctagaaaaaaaaaccaaaacaaaatgttaacaaaaacagaattagttacagagataccttctagagtaatgcttgtttatatttatgatccacttattttgaagacattggatttctcaataaaaaaattactatgaagaactttcttatgttgggtgagctagatacttcaaatgtgtaacattattattattgtcactaraaaacaaattagcaagctttaaaaatttataaccctctacattctgtgaagtaggaataataatattagttaattttattgaacaatatgatgcagacactatgattagtgctttatgtttattttctcttcaaagtttaaaataaaatctgaataaggtactatttttat

SEQ ID NO: 863016 - DNA, 498 bp, Homo sapiens
tcatgaaggaattcttggacctacctggcctgaaagtaggtcttaagaccttcattccagaggggttctatcccagacttaggaggaaggagatgctatacagagaggtcaagaagaatctgaacaaacaggcctttctgttcaaacatatttgtataccactgtacattcttcatcaaaccctggcacaaaaaaatacatgtttttctgtgggtcttttggtcttcatttctgaaggctcctactaatttstcttttattataggagtgtcagccataatccttgtgatgggcaagtggaaggtattccttttttctcctccacatatgaataaatatatattgtgtgaaattacaaaaataaaggtactctgaatcttaagaaattctaagtaacctttcaaagataagaatctctcttcagcttgtatcctagtgtctctctaatctccttcttgtgtatctataaatggctctggcatcattacaaattgagca

SEQ ID NO: 863017 - DNA, 664 bp, Homo sapiens
ttatgagaggagcagatgcaatattatgaaattgattaggaggaagagaataactcagattaagacaaactgagaaggacatcttgaagagtgtttttcattgagctttggaaaaaatgaaatctctgaacatttcaagatgagcaaaaatggtttcagggaggagaaatgccatgcagaatgccctctgtagggtttggggaaattaagaaccatttgttttggaaataatataatgacataaaggaaagctaggttctagtagagagttgaggaacctgtgacaaaaagaaacagaacagctcagtttggattgtgggatgagtcaaggggaaacttcaaagggaatctgggtggattaggtgatctggcagcatgaagccagggatgcatcagggaggaaggggtggttagaacagtaggagagaaagtgcagaaaagggaaaggaaactttttctttgtcaccattctgccatctacttacwttagatgaatccttctattatgtttctgaacccagacccagccaggacttgtctctattcattttctgggctgtgtctaacaggagataataggctagagagagatgctgtatgaacaaatagagaaacacatttgttttaaacattctctgttgctgatgttggaaaaaaatgtgaa

SEQ ID NO: 863018 - DNA, 615 bp, Homo sapiens
gaggagcgggctgccatctttgctgtttgagcctctggagtttttaagcttggtggtctgagagaaggacagtagcactgaaggaaaggagagggaactggttcttgtggggaaatgcagctttgtatctcaggtgatttgaaattgagaggagaatggaccttcaagcagaaaagggaaactatgttgttaatcatgtgggattggaattctggagtgccatcagggagggccagataaatggaggagacaagtatgttcctcattaaaatgacacctagctccgcttttcctcctgccccactcaagtttccaggagaagagagctgaagagagattcttcaggtactcagggatgggaaggcagaggaagggcatgctgactctttcctcccaggttttgttttctcttggttactgtggccaccaccttgcycagagataagaggcttctttataggggccttccttggaataaacagaaacatcttcatctccagccagaacagacatcaggtttaatttccaggaatggtagaagagttttgtatgttttctatttccactgggaagacacctaatttagatatttccccaatacatgtaatatgtagt

SEQ ID NO: 863019 - DNA, 674 bp, Homo sapiens
tttcaaagaataccaccaagaaagggaaaagaatgagtgaaaatacttgtaaatgatatagctgataaggaacttgtatccagaatacatacatgtcagtagtagaaagattaccctacttaaaaaaaagcaatgaatcttaatagacatttctccaaagaagatatataaatgttcagtaggcacatcaaaggatgcccaatatcattagccatcaggaaaaaaagtaaccaaaatcacaatgatataccacttcacattgtctaggatgattacataggaagtaacaagtggtgctgaggatccagaaaatttggaaccctgattcactgctgttaggaatgattaagcatagaatcactgtatcattcagcagttctactcctaggtatatatccaagacattaaggaatatatccacacaagaagttgtatatgaatgttcatagcaacattattcataatagctaaygagtgggacaatctaaacatctgtaaactgatgaatagataaacataatgtagcattattttgttataaaaaaaagtactgagagatgctaccacatggataaatcttgaaatattaagataaaaaaagaagccagtcgccaaaaaaactccaccccacatattatattattccattgatacaaaatgtccagaaaagacaa

SEQ ID NO: 863020 - DNA, 656 bp, Homo sapiens
tttgttttgtcctgaaagcctcacataaacagttatataaatcaatgtgattctcacactttacttggtcctaatacccttgaaaggtacaatacactctcttcagtaagagaggctcgttatagcagtaattctcaagaaagaaaaagaaaaagattccatcttccctgtttctatggaggrtatatcagtttctctgcaggagctcaaggaaatatacgctgtagcttgcaaaagtccctgaggtgattttgataagtcctttaaaggtagatgcttcttctccattgagataaactgatataaacactaatcattagactggtgaatctttatttagggattctgaaaggtagcaatggaggtgcccaaggctactttcagtattttagaaacctaataaattttcattgaaatgtctaaaggcacttatagatgaaaaaactgacagataaccagaaagtaaattatttgcttttacctgaagttatagcaactgagtgtggtattactggctgcagaatgttaatcagtgacccagataagtgggtatatgtgtataatataactaagaagtcaaaaatagaaaatgagttaatttttatttaataagtatactttgatattgtttaatagacattaccttacaaacacat

SEQ ID NO: 863021 - DNA, 656 bp, Homo sapiens
tttgttttgtcctgaaagcctcacataaacagttatataaatcaatgtgattctcacactttacttggtcctaatacccttgaaaggtacaatacactctcttcagtaagagaggctcgttatagcagtaattctcaagaaagaaaaagaaaaagattccatcttccctgtttctatggagggtatatcagtttctctgcaggagctcaaggaaatatacgctgtagcttgcaaaagtccctgaggtgattttgataagtcctttaaaggtagatgcttcttctccattgagataaactgatataaacactaatyattagactggtgaatctttatttagggattctgaaaggtagcaatggaggtgcccaaggctactttcagtattttagaaacctaataaattttcattgaaatgtctaaaggcacttatagatgaaaaaactgacagataaccagaaagtaaattatttgcttttacctgaagttatagcaactgagtgtggtattactggctgcagaatgttaatcagtgacccagataagtgggtatatgtgtataatataactaagaagtcaaaaatagaaaatgagttaatttttatttaataagtatactttgatattgtttaatagacattaccttacaaacacat

SEQ ID NO: 863022 - DNA, 634 bp, Homo sapiens
cctctccagatgtcttttcagtttccaccatccaccttaaacttcaaccttattgaattggcttgctgttcattgagtatccctcacactttcttgtgccaagttccctctttcttggagcacccttgcactcttccctgtgtttcagktcttggcttgataacctcacttctttgactcttcatgactgggctagtggtccttcttatgtgttcctatagtcccctgcttttactctatagtagcacctcatcagttttctcatctgtctttcccaatatagtgtaagctccttgaggtcaaggatttgtccacttgcgaatcaccagcacagagaacaagactcaaatgtaattgtggagtcaatattgaataagtgagtgaatcaatgacaatcctttcaaagacccagtcttagaattaaatgtggagtctcagaagattggaataaaattgttttgccaatttgcaagggtctcaaaactcaggacctaagaaaacacaaatttattttagagattagttcccaggcaattaagctgtaagtgtactctgacattgttctgtagaatactgatctccaaaatgatttggaatattcagcataaagtttctgacatcagatcagaggagc

SEQ ID NO: 863023 - DNA, 634 bp, Homo sapiens
cctctccagatgtcttttcagtttccaccatccaccttaaacttcaaccttattgaattggcttgctgttcattgagtatccctcacactttcttgtgccaagttccctctttcttggagcacccttgcactcttccctgtgtttcaggtcttggcttgataacctcacttctttgactcttcatgactgggctagtggtccttcttatgtgttcctatagtcccctgcttttactctatagtagcacctcatcagttttctcatctgtctttcccaatatagtgtaagctccttgaggtcaaggatttgtccacttgygaatcaccagcacagagaacaagactcaaatgtaattgtggagtcaatattgaataagtgagtgaatcaatgacaatcctttcaaagacccagtcttagaattaaatgtggagtctcagaagattggaataaaattgttttgccaatttgcaagggtctcaaaactcaggacctaagaaaacacaaatttattttagagattagttcccaggcaattaagctgtaagtgtactctgacattgttctgtagaatactgatctccaaaatgatttggaatattcagcataaagtttctgacatcagatcagaggagc

SEQ ID NO: 863024 - DNA, 634 bp, Homo sapiens
cctctccagatgtcttttcagtttccaccatccaccttaaacttcaaccttattgaattggcttgctgttcattgagtatccctcacactttcttgtgccaagttccctctttcttggagcacccttgcactcttccctgtgtttcaggtcttggcttgataacctcacttctttgactcttcatgactgggctagtggtccttcttatgtgttcctatagtcccctgcttttactctatagtagcacctcatcagttttctcatctgtctttcccaatatagtgtaagctccttgaggtcaaggatttgtccacttgcgaatcaccagcacagagaacaagactcaaatgtaattgtggagtcaatattgaataagtgagtgaatcaatgacaatcctttcaaagacccagtcttagaattaaatgtggagtctcagaagattrgaataaaattgttttgccaatttgcaagggtctcaaaactcaggacctaagaaaacacaaatttattttagagattagttcccaggcaattaagctgtaagtgtactctgacattgttctgtagaatactgatctccaaaatgatttggaatattcagcataaagtttctgacatcagatcagaggagc

SEQ ID NO: 863025 - DNA, 456 bp, Homo sapiens
atgggaggtaaaatctgacagaactgcaaaaagagataggttaatctactattatagttgaaggtttcaacattctactagctgtacaggcatagctcagagatactgcaggttctgctcaagataaccacaataaagcaaatactgcaacaaagtaagtcacacaaatttttttgtttccctgtgtatataaaagttatgtttacatgacaaggtgatctattaagtgtgcaactgcaatatgtctaaaagacaatatacataycttaatttaaaaatactttaaaggttaaaatgctaaggatcagagccttcacagagtcaaaatctttttgcctgtgtaaggtcttgtcttgatgctgatggctgctgactgatcaaggcggtggttgctgaaggcttgggtggctgtggcaatttcttaaaataagacaataataaggtttgccacattga

SEQ ID NO: 863026 - DNA, 456 bp, Homo sapiens
atgggaggtaaaatctgacagaactgcaaaaagagataggttaatctactattatagttgaaggtttcaacattctactagctgtacaggcatagctcagagatactgcaggttctgctcaagataaccacaataaagcaaatactgcaacaaagtaagtcacacaaatttttttgtttccctgtgtatataaaagttatgtttacatgacaaggtgatctattaagtgtgcaactgcaatatgtctaaaagacaatatacataccttaatttaaaaatactttaaaggttaaaatgctaaggatcagagccttcmcagagtcaaaatctttttgcctgtgtaaggtcttgtcttgatgctgatggctgctgactgatcaaggcggtggttgctgaaggcttgggtggctgtggcaatttcttaaaataagacaataataaggtttgccacattga

SEQ ID NO: 863027 - DNA, 587 bp, Homo sapiens
tccatgtttctttggagcttcattcctatgaggtgaaaaggaggggacgctcagtcacgtccagtgtaaagtggtctcaggttaaatggactttgcttagaagagtacttagcctattcaaaggttcaacctcaggcaggtgtggtggctcacgcctgtaatcctagcactttgggaggccaaggtgggcagattgcttgagcctgggagttctagactagcctgggcaacgtggcgaaactctgtctctacaaaaaaaaaatacaaaaattagccgggtgtggtggtgcatgcctgtagtcccagctacttgggaggctgagctgggaggatcacttgagctcagtagttggagttgcagtgagctatattcacaccacttcactccagtctgggcgacatagcgagaycctgtctcaaaaaaaaaaaaaagatattgtgtaatattatatatgaaatatattgaataagatatttaagttataagtagaaaaaatgagcacctgtaagagctcatcacccagtgtcatgcaatcaggggttgatatggccaatcggaacaatgagccagatggaaaggaatgatc

SEQ ID NO: 863028 - DNA, 621 bp, Homo sapiens
attgtatgttctctcataagtgggagctaagctatgaagatgcaaaggcataagaatgacacaatggactttggagactcagggggaaatagtgggaagggggtgagagataaaggactacaaatagggtgcagtgtatactgttcaggtaataggtgcaccaaagtctcacaaatcaccactaaagatcttactcatgtaaccaaacaccacctgttcgccaataacctatggaaataaaaaattaaaaagcaaaacaaaaacaacagccatgggaacaacaacaacaaaaaaaatgttctcctctatagatctcatattcctgtgacaagtccacaagctttggggtcttactctttccaggaggtctgattaaatccctgcaaagacaggaagcagcgagcaygcttctttctctggggaactccatgtgacagttgtcatggttgcagccacgtgttgtccctgacagtctattgggccaatttggtgtagtccactttagagtcatgcaacagagcctgaaactcaagctctgctttaccccaggagtccacagctaggccacagccactgccaccgtcctgtcactcacaatctgcatgcagagggtgatgcaga

SEQ ID NO: 863029 - DNA, 644 bp, Homo sapiens
aagtcgcattaatgactataatttgctctattactactggctttgaagtttcattaagtggttttatatctattattttgttatgctttgttttgttttgtttcgttttgtttctaaagacctgtgggatacctcgagcaggaatcytgttttgttttctcccctacatttaacatgtcagaagctaaagcttaagagaggtgactttctttgcccaaggtcacatgacctgaactacaactcatgtttctatcttcaagcctgaatatccttgtgtaagatcatagtgccttgagcacatttccttaaaatagagtcatccaaaaacagtaaattgtactgttggtctccaggaaatcctgaccagtttccatagcttcccagtgaatatcttttttataagatcatagtgccttgagcacatttccttacaatagtgttgtccacagacagtaaattgtactgttggtccccagaaaatcctaaccaatttccacagcctcccagtgactgttagatgatccagtgcccatcttccttagccttctctaatgtcctgaccagatcattagagacaggttgtttaaaacttggcttgcttcctttcaccttgactttgacttctcttgctttcacctagtttt

SEQ ID NO: 863030 - DNA, 637 bp, Homo sapiens
cgctctttgcaataaatcttgttgctgcttattccttgggttcataccagttttaagagctgtaacacggtagaggtctgtagtttcactcctaaagtcagccagaccacgaagtgagaccacaaacccaccagcaggaagaaactccggacaggtccgaacgtcagaagggacaaactctggacacaccatttttaagaactgtgacacttaacacgagggtctgtggcttcattcttgaagtcagcragaccgagaacccaccacttctggccacaatatcacagcaacttctgagaaagacatttctggtaccagtcacatcttgtcacagagaagtcactactttggaggttctgttaaaaacttctgttgtagaaagtgcaaatggacacataggctctaattgagtttatctaagcatgtactatttgtattcagacaattttttttttaagtttataagctttggcaagacagacttacattcaaatctgggtgctgccaactattatctgtgtctgttagagcaagccgtttctcttcctgagctatggcatctctaactcagccacattgtctactaccctccctgggatttctctgagatttgcgggatatcaagggtgttttaaat

SEQ ID NO: 863031 - DNA, 628 bp, Homo sapiens
aaacagagatcatttgaattcctctctttctatttgaatacccttcatttctttctcttgcctgattgccctggccagaacttccaatactatgttgaataggagtggtgagagagggcatccttgtcttgtgttagttttcaaagggaatgcttccagctttttgcccattcagtatgatattggctgtgagtttgtcataaatagctcttatttttgagatatatttcattaatrtctagtttattaagaggttttagcatgaaggggtgttgaattttatcaaaggccttttctccatctattgagataatcatgtagtttttgtcattggttctgtttatgtgatgaattatgtttattgatttgcgtatgttgaaccagatttgcattccagggatgaagccgacttgatcgtggtagataagctttttaatgtgctgctgctggattcggtttgccagtattttattgaggatttttgcatcggtgttcatcaggggtattggcctgaaattatctttttttgttgtgtctctgccaggctttggtatcagaatgatgctggcctcataaaatgagttagggaggagtctctctttttgtgttgtttggaatagttttagaa

SEQ ID NO: 863032 - DNA, 628 bp, Homo sapiens
aaacagagatcatttgaattcctctctttctatttgaatacccttcatttctttctcttgcctgattgccctggccagaacttccaatactatgttgaataggagtggtgagagagggcatccttgtcttgtgttagttttcaaagggaatgcttccagctttttgcccattcagtatgatattggctgtgagtttgtcataaatagctcttatttttgagatatatttcattaatgtctagtttattaagaggttttagcatgaaggggtgttgaattttatcaaaggccttttctccatctattgagataatcatgtagtttttgtcattggttctgtttatgtgatgaattatgtttattgatttgcgtatgttgaaccagatttgcattccagggatgaagccgacttgatcgtggtrgataagctttttaatgtgctgctgctggattcggtttgccagtattttattgaggatttttgcatcggtgttcatcaggggtattggcctgaaattatctttttttgttgtgtctctgccaggctttggtatcagaatgatgctggcctcataaaatgagttagggaggagtctctctttttgtgttgtttggaatagttttagaa

SEQ ID NO: 863033 - DNA, 575 bp, Homo sapiens
tgcaacctccgtctcctgggttcaagcaattctccggcctcagcctcctgagtagctgggattgcaggtgcccaccaccacacctggctaatttttatatttttagtagagatggggtttcaccatgttggccaggttggtcttgaactcctgacctcaggtgagccgcccacctcggcctccaaagtgctaggattacaggcgttagccaccacgcccggactacctgcttaattttttgattttttttttgtaaagacagtgtcttactttgttgcccaggctcaagtaatgcccactccttggcctccagaagtgatgggattataggcgtgagccaccgtrcccggcctgggatgctactctaaatgcacattcattctagctcccaaactacttttttttcgctatttctaaatcaaaatgcttttcgacattgctatgtggaaactgtgggttttataaagttataaagaatagtttaataagaaattacacccaagaaaagtataaaacacattacaatataaatgtgacctggcacttagaataaacatttgctttgcaatactctc

SEQ ID NO: 863034 - DNA, 575 bp, Homo sapiens
tgcaacctccgtctcctgggttcaagcaattctccggcctcagcctcctgagtagctgggattgcaggtgcccaccaccacacctggctaatttttatatttttagtagagatggggtttcaccatgttggccaggttggtcttgaactcctgacctcaggtgagccgcccacctcggcctccaaagtgctaggattacaggcgttagccaccacgcccggactacctgcttaattttttgattttttttttgtaaagacagtgtcttactttgttgcccaggctcaagtaatgcccactccttggcctccagaagtgatgggattataggcgtgagccaccgtacccrgcctgggatgctactctaaatgcacattcattctagctcccaaactacttttttttcgctatttctaaatcaaaatgcttttcgacattgctatgtggaaactgtgggttttataaagttataaagaatagtttaataagaaattacacccaagaaaagtataaaacacattacaatataaatgtgacctggcacttagaataaacatttgctttgcaatactctc

SEQ ID NO: 863035 - DNA, 641 bp, Homo sapiens
ctggccggcgcgggctgcactcacccactcgaggaccttgatgaagccgagtggctccttgagcgggttgaggttgatctggaagccggacatcctctgaggaaaggagggagagagagtcaggacgacggggcggaggaggggaccgacgagaccagagcagcccggtggcgaggaagggcaggcggggctggcgcgctggccgggctcggaggcgggcccgggcggccgtggggcggggcggggcggagcggcggcrgttgagctgctggctgagactctggggcggaaacggagtggggcggctggggaggcgaggggcgggccggggcggagaccgggaggcttctcctcaggccgcacctggccgagtcgactgatccgctggcgaaccaagtagatgttgggcgccatactgcgtgcgccgcgcccccttccctgcggttcagcccctggcactcggtcttcccctgcgcacgcgtgtacgcgtgcgctcgttgggcccgcgccgcgcttccggacccgcgcgactgcgaagagccctgacccgggggcgcccacgcccgctcctgcgcagcttgggggcgctggcctcagagacaccctcacttgaccccgagctcaccacagctgagctcact

SEQ ID NO: 863036 - DNA, 575 bp, Homo sapiens
tgcaacctccgtctcctgggttcaagcaattctccggcctcagcctcctgagtagctgggattgcaggtgcccaccaccacacctggctaatttttatatttttagtagagatggggtttcaccatgttggccaggttggtcttgaactcctgacctcaggtgakccgcccacctcggcctccaaagtgctaggattacaggcgttagccaccacgcccggactacctgcttaattttttgattttttttttgtaaagacagtgtcttactttgttgcccaggctcaagtaatgcccactccttggcctccagaagtgatgggattataggcgtgagccaccgtacccggcctgggatgctactctaaatgcacattcattctagctcccaaactacttttttttcgctatttctaaatcaaaatgcttttcgacattgctatgtggaaactgtgggttttataaagttataaagaatagtttaataagaaattacacccaagaaaagtataaaacacattacaatataaatgtgacctggcacttagaataaacatttgctttgcaatactctc

SEQ ID NO: 863037 - DNA, 613 bp, Homo sapiens
ttttgtataatgagaagtctacattgaatttgtcatataaaaaggacaactactttggactatcattattagctccaatgaacagatgagggaagtgagacgtagagaggttaagatcatgtggtcagtaaatgggtactgccttctaggatgatggacaatgccagaagttagataaatgccaaatgcctaaaatcatttttcctcatcacaggacacagttcagcagtatctagttgctgcagggtatttgacttcaggctgagagggtcagtccaggtttaccagaccatgcgccctttgctttctctcttcagattctagaatttctagtgattcaggtgttgattttgcatattctccctggtctttgatattttcaaccttgtatttaacactactagtaatgtgattgttctctgctccctgtgtccatgacttttaarcatttcctactttattaatgtgctttgctaatttggattaaattttaaaaaatcatccatctctgtcttttccctttttttcagcggtgttctcacctctgccctcaggctcatagaaacaccaacatggcacatgtatacatatgtaacaaacctgtacattgtgc

SEQ ID NO: 863038 - DNA, 525 bp, Homo sapiens
aaagcagcagcagcaggtgtgtgttagtcagtttttttgcatgactataaaggaataactgagacttgataatttataaaaacagaggtttcagccaggcgtggtggctcacgcctgtaatcgcagcactttgggaggctgaggcaggtggatcacctgaggttgggagttcaagaccagcctgaccaacatggagaaaccccatctctactaaaaatacaaaattagccaggtgtggtggcacatgcctgtaatcccagctactcaggaggctgaggcaggagaatcgcttgaaccygggaggcagaggttgcattgaacagagatcacgccatcgcactccagcctgggcaacaagagcaaaactccgtctgaaaaaacaaacaacagcaacaaaaaaacagaggtttcattggcttacagttctgcaggctgtacaggaagcatggcaccaacacctgctcggcatctggtaaaagcctcaagaagattacaatcatggctgaagccaaagcaggaacaggc

SEQ ID NO: 863039 - DNA, 648 bp, Homo sapiens
aggggagctcttaggctgagacccagaaaacagaagggaaaggggaagctggcagaggagacaatttgtctgaagacaaggtatgggggcagttgagagtggtctgttcagtgggctctctgggacttagcctgtgaggggaagaggagaggtggctgcaggtaggtcagcagggaggccttggcccaccaggagccatgrggccagggaagaaatgcaggccccaggacttggcactcttggtttttcttctacctcctgggctgctccaactcagagtcctttgccagtttctgcttctcccagtctcagctttggagtgccccaggctcaatccttggccctcttcccttcccatgtatacttttattccttgctgccctcatccagccccatggctataaatgcattctatttgcagacatgtcccagactcctgtcagcagcctgggcttttctcctgaacttgggactcagacatcccaccacctgcttgacatctccagcatttaacatgtggaaaactgaattgttagcttaccccctgtaatagtttgctagggctgccgcaacaaagtaccacaaactagatggcttaaaataacagaaattcattctctctctgttctggagaccaaagtccaaagt

SEQ ID NO: 863040 - DNA, 626 bp, Homo sapiens
tctagtaaaagtttaaaaaaatctgtaaagcagggaataatatttactccacagctttgtcataaatattataatgggtagtattattgatatggtaaactttggactctgttacacttatctactataatttatgtgtgccaaaaatgtagyttatttttttctcttttattaaaaatatcttgctcatgagcccccattccttctgatgatggggaggagatagggatgaaatggacataatcatgccaatcaaaactgacttggtcccttctggtttagggccatcattttcaggtcagtcttcagccaatatgagtagaaattgcccttgctgctgctcttcttgctcaaggggcctctatcttacagccttgcacaggctacatgtgacactagggctcggatgtcaatgacagaaaagggtgaaggtttcttcaaaaatgagacatactcaaaattccaactaaaatttaattttagagggagtctatttggttgattgacaaaatgttccctaagagagtgggaaagcaaagaggtgggcctcataatttagttagtgtggctttcctttgacccaattctcttacatgttggataaatttctctggcaaattgaataa

SEQ ID NO: 863041 - DNA, 535 bp, Homo sapiens
aggtgtgagcgaccacacccggcccagggcctgatctttaaagaaatgtcttctctgacttgtattctctactccaacccttcaggctaaagccattttagttaacctccttttggacaaacttctcatcatttccgttggaactctggcctcttggccagcaactccttgcactttgtctttgaaaataccatttctctctctcaaccccttctcccacagtgttctgtgagcccctcgacttcttttcaactttttaytatttaatataaaatctaagacaagatacattaaatgcttattggcatatatttagtcttcacctagtacatagtatttgtccaattttaaactttcttccattttataggtttcaattaatcttttttaaaaaaatgttttaacatttattttaagttctggggtacatgtgcaggtttgttacacaggtaaacttgtgtcactggggtttgttgtacagattacttcatcacccaggtactaagcctagtacacattagttatttttcctgat

SEQ ID NO: 863042 - DNA, 626 bp, Homo sapiens
aaaaatgcagttcttcgatttgcctatttgctttaatcatccccagcttcacttcctaaaagtccaggaataaaaagcaatgaatgaataggctgtctgcttctcagaagctttgtgactaggaaagaagtgctattgactttaaagaagctctcatcaacttttgaatcatgccagcagccatgtgaccytgtagcctgtgatcaaaacatgatgatgatgggctgaagtaagatgaccacgtttctcagaatgctcctccctcattgctgtgaaaaccactgtccaccatgcagatgaataggaattacataagattccatgacaacagcagcaacaatagcaatctacagtctcacttgtatgtatgctgtgtctcaccttaaaagcgattttccttcttaaaacaccgtggtagagagtagttattgccagcctgaatcaagcacttatgtatgtggtaggagctatgttaagcatcttgcaatatattctcaatttttagaacaatttgatgaggtagatattcttttttctttctttttttgttttttgagacatcctgctctatcaaccagactaaagtgcagtggagggaccatggctcactgcagcctcaaacttgc

SEQ ID NO: 863043 - DNA, 649 bp, Homo sapiens
ttaaagtgtcagaaacatgagtatttatagaaagccagcatagatgaaagaatatgattatgtggtctatttaagatagcactgtattgaaacaggtggtagagtggaaagaggctagccagagtgggtctgaattctgtctcctctactttctgtgtggtccctctactttctttgagccttagtttctccktctataaaatgggattaaatagtaacatcctgcagtaacgttgtgagagtttgagagattgcatgcaaaatgccttgtgcacagattagatgcacaataaactgttattacataactatcctcttacacatattcacctgggaataaactctcttaggctttggtgcctgttgctaatgggtggatcacagtggattcctatgatgctacccgaatgtgtaattttattgtaggctgtcttttaagtacaaggaaactctgattcaataaaagatgattagtgaccagttgcctttgcacacatgcccaaaggtgaaaaactttgtaatggatagtccaagttcattcttcttttttctgtctaggaaaaatctttagacttggtatggcattgagctctgtagccacagacatgagtgaaattaaactgaggaagagaataaaattaggaaagtg

SEQ ID NO: 863044 - DNA, 674 bp, Homo sapiens
gactaaaatgaaatttcccattttattcttctgacttctcttgtgcctaccgtttttccatcatagttcctgtgttcctagggaaagggtgaccattgaattggaagacatgatacctgtgtacttaacattttctcaaatgtgataatttgtgattttcctgaagtatgccacaggagactatttcagcatgccgtctgtttttttccaaagattcaccaagattcataaaagattaggaacagaactcttctagtctgcattaatgcattttggtaacaaaatggacagccctttcatgtggagaaggggaaattaataccccagaagagcaaaaagggaagaaaaagagagttttagasgtagtgtattctcccagaagtcacagaacaggtacaaataatgagggttgtaaaaggaagacagacctggctaagtgttgtgtcagggaagtctgtgatctcaggctattaaatattatccggctctttctggtcatcataattcaaaaccacaggacagtgtggcagttgtgagccaagtggttatcatgcctttgcccaaaaggctaagaaaaagacaaaagctgggaaagatcagagaacatattgggttgcgataaggaggttatctcatttctctatggaagcatcacaaaatacctagcttgacct

SEQ ID NO: 863045 - DNA, 610 bp, Homo sapiens
tcactttcttggaatggaggattttcatcactgatctctgcacagttctgggcctggaaggtccaggaagtggccttggaaagttaatgaccaccatagagaatccatagagaatagattgtcttggcaatttttgtgttgcttctttttgttttgttttgttttttgttctttggtttgcgtgtgtgtgcrtgtgtgtgtgtgtgtgtgtgagagagagagggagtcgtttatgtatggctgtctgtgggaggagaggcatgggccaaggtaggggggtgtgtgtgtgagtccccagcttttccctattggaatttggttgaggtgagacatttaagagaactgtctttcccttatacttagagaggaaatatgtcttcctcttaaacttacaggaagagttaggaagttaagaatttacctgtgcaatttctcctgcatgtttctctgtggaaacaggtcatacattgggacaaaagtgaggcaacaggtctcccctgatatgtcctcaatcttctggtagtattgaaggtcccagagctcatcaccagtaaatcgcacccctgtattaaggataagttacaaagatgttcatgaatcaacctgcaga

SEQ ID NO: 863046 - DNA, 507 bp, Homo sapiens
tcttcctgtcaaagctgcagggctcacgaccccaaccagaggtccagaaagggtccctctgagagtctcccgctggaagcttcagccttgctggcatctggcactttcttcactcccaccttccttgtaagctctcctgagtgctctgagatgcttgtcctgctctccacgcaggaactcaaatccatgcagggaaggttaataaaaaccactggtcaggtgctattgactatgccctccctcagcaacccctgctaccctcagctgacatgagatgcctttgcactgaytcaagcctggcctcatggctacgggagtggaataatattttgtttttcccttcatgggatccaagctccctgtcttcctcagagattgcatgtttcaaaatagtctttggattacgaataattaataagaaatatgtctttttcagaaagacactgttcatcttcctaacatccaagaaaaacattcctattcttttaatagtaaattatttctagg

SEQ ID NO: 863047 - DNA, 627 bp, Homo sapiens
acccccaagcaaggagattagtttcaattcctaagccaggagctaacctcagatggccctgggcaggtggcatgatctctctctccaggctggggagcaggaaagggctcactccacccttgtatgccatttgaggagaacaactccagctggtcctctgggagcacatggagaacraccacattgtgtcccagggttgcttgcctggcctgcaggcaggacacatacctcctgggccagccggttgatctttagctgcttttccttctccagcatttcctctttctctttgtaaagcttttgctcaaactccagttctttcttattctttctcaagtcctgcaggctgccatacttggctttcttcttatcttttcctttctgagtagatgtggcattgtttatatgacaaaggttagaaatagtgtcgacagcacagcacacggggcatccagtcctcacataacacaaccatcccatggtgagcccctcccccagctctctcaccactctggacatcagacctcaggtttaggacaggaaggccactgctacctactgcagagtgggagacacattctctttaccagccagaaagactggcttattagttcactaactagctgt

SEQ ID NO: 863048 - DNA, 627 bp, Homo sapiens
acccccaagcaaggagattagtttcaattcctaagccaggagctaacctcagatggccctgggcaggtggcatgatctctctctccaggctggggagcaggaaagggctcactccacccttgtatgccatttgaggagaacaactccagctggtcctctgggagcacatggagaacgaccacattgtgtcccagggttgcttgcctggcctgcaggcaggacacatacctcctgggccagccggttgatctttagctgcttttccttctccagcatttcctctttctctttgtaaagcttttgctcaaactccagttctttcttattctttctcaagtcctgcaggctgccatacttggctttcttcttatcttttcctttctgagtagatgtggcattgtttatatgacaaagrttagaaatagtgtcgacagcacagcacacggggcatccagtcctcacataacacaaccatcccatggtgagcccctcccccagctctctcaccactctggacatcagacctcaggtttaggacaggaaggccactgctacctactgcagagtgggagacacattctctttaccagccagaaagactggcttattagttcactaactagctgt

SEQ ID NO: 863049 - DNA, 387 bp, Homo sapiens
tgggcatgccttgtgtgggctctgtacaccgacgtggcccagggcctgacacccagctctgcccattctcattcccaggtctgggctgagaagacagctggcaccttatcccatggcttggcaacagccggctgtgcccttcagcttatgcagagattagtggtcacccgggagtcgtggcccaggcgtgaaagcctaggraaatgacatgggggtcagggcttctagggtaggaaggggaggggacagtcagttggagctttactgcttctaagacactttcatgttattacctccttcagtctcagagcatccatggcagagaggaggggaggaccatgattcccattttgcaggtgaagaaactgaggccaggggaagggtgga

SEQ ID NO: 863050 - DNA, 650 bp, Homo sapiens
tggtgtgaaagtgatacacaaacacaagaatttttttttttttttagatagagtcttgctctgtcacccaggctggagcgcagtggtgtagtctcagcttactgcaatctccacctctcaggttcaagctattctcctgcctcaacctcctgagtagctgggattaaaggcactcactaccacgcctggctaatttttttatttttagtagagacagggtttcaccatgttggccaggctggttgcgaactcctgacctcaagatatctacccaccttggcctcccaaagtgctgggattacaagcatgagccaccatgtctggccaaacacaaggttttcaacttyaagcaccagtgattcattgagtaaagattctctcggctgcatttttgatttgcaagatgaaaagacaaaagttactaatctgaaaaatgagttaggagatatcactacaaaccctgcagacattataaacataatgagaggaaactatgaacaattgtatgcatttgatgacttagatgaaataggttaatgcctcaaaaaacacaaattacaataaacaccaactatgacaattcaccagtatgaaaaagataattctgatattttgctagctccataactcttaaagaaaatggatttatg

SEQ ID NO: 863051 - DNA, 629 bp, Homo sapiens
atcaccaggggtcaagagttcgagaccagcctagagcacatggtgaaaccctgtctctactaagaaatacaaaaattagctaggcttggtggtgtgctcctgtaatcccagctactctggaggctgaggcaggagaatcgcttgaacgcaggaggcggaggttgcagtgagctgatatcgcgccattgcactccagtctgggctacaagagcaagactctttctcaaaaaacgaaaacatgttgagaaagtaatgctgttatgcaaatcctatgtttcactttcttgagttatggatgattaaatttgtaawcttaaaattgcactgccatgtgagtctaaaatttaataaactggttccacaaacaaagggaaaaggatggtattccttttaaaacatgaatcaagcagaactgtcatcatgtagataaatatatttgaaaggatgaagcaagatgaatttatgtgtacaaattaatttttttcaaataaactatggaactcgtatgaaaataagcagtaaatatttacattgtctttaaatgttaaaatacttatggaatgggatatggggtagcagtgtgcagctatgctttttaaaattttatttcatgatctaattaaaaatat

SEQ ID NO: 863052 - DNA, 656 bp, Homo sapiens
gcaggctgcagactggctcttggccaataaaacctcaggattccagtcagctgtaacctggagtttaatgttgtctggggtgttcaaggtcatctctccccaaagtcctgtaggtcaagtcagtctttataaagcggccccatggagctactgctttctaatcaccactgttcaaaaatccttttagtcaatttgctttctccccaggaaaacaaaacaaaacaaagaaacaaacaaaaaaaccaccaaaaaaaaaatcyttttgggagttagccttaaaagtcttactcagaaagactttttttaaaaattgaacttgcttttttttactccctatttaaatggaatatacttgctattgacatggtggtaaacataaaatacaagaaatcacccttattccatttcccaaaagcaaccatctaaattcatgatgcatgtcacagtagttcttctttctatgtgtattttacatactgatcatcatactaaatatataattcataattaccttcttccaaaccttataccaaaattttttgtgttaatataaattttttaatcataatggtaatggcagaagaatatttcattgtggttgtaccttacattcaaccattctcacattattgaatgcttatggtgttttctttctc

SEQ ID NO: 863053 - DNA, 656 bp, Homo sapiens
gcaggctgcagactggctcttggccaataaaacctcaggattccagtcagctgtaacctggagtttaatgttgtctggggtgttcaaggtcatctctccccaaagtcctgtaggtcaagtcagtctttataaagcggccccatggagctactgctttctaatcaccactgttcaaaaatccttttagtcaatttgctttctccccaggaaaacaaaacaaaacaaagaaacaaacaaaaaaaccaccaaaaaaaaaatccttttgggagttagcyttaaaagtcttactcagaaagactttttttaaaaattgaacttgcttttttttactccctatttaaatggaatatacttgctattgacatggtggtaaacataaaatacaagaaatcacccttattccatttcccaaaagcaaccatctaaattcatgatgcatgtcacagtagttcttctttctatgtgtattttacatactgatcatcatactaaatatataattcataattaccttcttccaaaccttataccaaaattttttgtgttaatataaattttttaatcataatggtaatggcagaagaatatttcattgtggttgtaccttacattcaaccattctcacattattgaatgcttatggtgttttctttctc

SEQ ID NO: 863054 - DNA, 656 bp, Homo sapiens
gcaggctgcagactggctcttggccaataaaacctcaggattccagtcagctgtaacctggagtttaatgttgtctggggtgttcaaggtcatctctccccaaagtcctgtaggtcaagtcagtctttataaagcggccccatggagctactgctttctaatcaccactgttcaaaaatccttttagtcaatttgctttctccccaggaaaacaaaacaaaacaaagaaacaaacaaaaaaaccaccaaaaaaaaaatccttttgggagttagccttaaaagtcttactcagaaagactttttttaaaaattgaacttgcttttttttactccctatttaaatggaatatacttgctattgacatggtggtaaacataaaatacaagaaatcaccyttattccatttcccaaaagcaaccatctaaattcatgatgcatgtcacagtagttcttctttctatgtgtattttacatactgatcatcatactaaatatataattcataattaccttcttccaaaccttataccaaaattttttgtgttaatataaattttttaatcataatggtaatggcagaagaatatttcattgtggttgtaccttacattcaaccattctcacattattgaatgcttatggtgttttctttctc

SEQ ID NO: 863055 - DNA, 502 bp, Homo sapiens
aactaagaaaaaacacaggaagccaggtgaaatttactgatcaatgtcttcaaaagcagtgtacaagtttagacttgactcatgaattatcaatgtcaccaatttttaaactgttaaaaaactttgagtttctaagggcagggaattcaatagccgatgtattagtccattctcatgctgctaataaagacagggtaatttataaagaaggtttaatggactcaccgttccacatggctagggagatctcatgatcatggtggaaggtgaaggaagagaaaaggaacatcttacatggtggcaggcaagaragtgtgtgcaggggaagtgccctttataaaaccatcagatctcgtgagacttattcactatcatgagaatagcacaggaaaaaccagcccccatgattcaattacctcccactgagaccctcccatgacatgtaaggattatgggagttacaattcaagatgagatttgggtggggatgcagccaaaccat

SEQ ID NO: 863056 - DNA, 588 bp, Homo sapiens
gtaatattcaggtacaggaaattcaattaccctaagtgaaaccaccaagtgattctgatgcaacacatttagacacggcataagatacgttagaattggaatcaagaagatttggggttcaagtcctttgactttgagcaagatgtcaaagccttaactttttcaatgtcctcatttataaaatgaccacattacactataattgccacaagtttgtttcatattctattaatwtatagatcaagaaacctctcttctagagagtcttctacttggtcccagttccacagaaaatagagcctgaggcaaatattaagagcttaatgcttgtttgggaggtgtaatccaggatggtggagtgaaagcaacaagaagtgaagcaggaactgatgcgaatcaaactcaagatggtccattatcaagcgagccactgcttcataaagtgatagaggccagcactgggctttgcatgttatcttctggatgaaatctgtgcttcaaaacaattccttagacacaggagactgagatcatcaaaagtggcacatgagtgccactggtacaatgtaccactcagatccaaacatg

SEQ ID NO: 863057 - DNA, 588 bp, Homo sapiens
gtaatattcaggtacaggaaattcaattaccctaagtgaaaccaccaagtgattctgatgcaacacatttagacacggcataagatacgttagaattggaatcaagaagatttggggttcaagtcctttgactttgagcaagatgtcaaagccttaactttttcaatgtcctcatttataaaatgaccacattacactataattgccacaagtttgtttcatattctattaatttatagatcaagaaacctctcttctagagagtcttctacttggtcccagttccacagaaaatagagcctgaggcaaatattaagagcttaatgcttgtttgggaggtgtaatccaggatggtggagtgaaagcaacaagaagygaagcaggaactgatgcgaatcaaactcaagatggtccattatcaagcgagccactgcttcataaagtgatagaggccagcactgggctttgcatgttatcttctggatgaaatctgtgcttcaaaacaattccttagacacaggagactgagatcatcaaaagtggcacatgagtgccactggtacaatgtaccactcagatccaaacatg

SEQ ID NO: 863058 - DNA, 627 bp, Homo sapiens
caaagaatcttaactaatgtggtggcactataaatataaagccatgcataagtgtacggagaaattcaagggggatatcactgagatttgatctgacttttgaggctgagtgtgtggtagaagagtagcactaagaacagaaaatgaaatatcaagaaaataaatcactgtgatctgaagatagaaaggaaatactgagctcagttttagatgtttatcctagttaactgtgatgcctttcaggtggtgatgggtcatccaggtaaatatgtctatcagatatttgtatctgtggtacataaatttgggataagtgtcaggatttgagaatttgaggaagtaaaatttgaagatgtgaggccagaagatatttttctagtctygaatttaacaatatctatataataacacaattcaatattttttgttcatgtatctctggatccaaaggaataaaagagatttccacttctgagatggagtgaatgtactttttccttttccttctaagctcaatgaaaaatcctgcacattatgtataatgcaagcatgagaagactctgaaaggtagagagaaaaaggcagactggctatgaaacttaggacccaagaaaccagaaagaagtg

SEQ ID NO: 863059 - DNA, 583 bp, Homo sapiens
agaggaggaggtgcctggctcttttaaacaaccagttcttacaggaactaagagtgaaaactcactcattcccatgagactggcaccaagccattcacgagggatctgcttccatgacccatacacctcccaccaggaccccacctctgacactggggataacatttcaacatragacttggcagggtcaaacaaaacatatccaaaccacagcagatgctgacctgcaaggctggttccctgagcatataaactgtgcagttgttcacatgtccccatgctcagaaggttctcactcttggtttaacactctcttatcaccttcctgaaattgtaataatttttgaataggtgctgtaattttttatttgcactgggcgctataacttaggtaggcagccagtcttgctgaattatattagtgtgtgcagtaaagatttaactcagtgcaaagaaagatttgtccctttcctcctaactcttgggaggtcatctctaagcacttggaatgtcctccctgataagaatgcctttgtttacctgggggtgatagggacatgccagagtctttatggcaatagtg

SEQ ID NO: 863060 - DNA, 583 bp, Homo sapiens
agaggaggaggtgcctggctcttttaaacaaccagttcttacaggaactaagagtgaaaactcactcattcccatgagactggcaccaagccattcacgagggatctgcttccatgacccatacacctcccaccaggaccccacctctgacactggggataacatttcaacataagacttggcagggtcaaacaaaacatatccaaaccacagcagatgctgacctgcaaggctggttccctgagcatataaactgtgcagttgttcacatgtccccatgctcagaaggytctcactcttggtttaacactctcttatcaccttcctgaaattgtaataatttttgaataggtgctgtaattttttatttgcactgggcgctataacttaggtaggcagccagtcttgctgaattatattagtgtgtgcagtaaagatttaactcagtgcaaagaaagatttgtccctttcctcctaactcttgggaggtcatctctaagcacttggaatgtcctccctgataagaatgcctttgtttacctgggggtgatagggacatgccagagtctttatggcaatagtg

SEQ ID NO: 863061 - DNA, 567 bp, Homo sapiens
tcagataatagaatgctttcatatggatggggtatcaaagtttaaaactcagaaagtaaatatacatatgaaataccattgagagccgggtatggtggctcacacctgtaatcccggcattttgggaggccgaggcaggtggatcacctgaggtcaggggttcaagaccagcctggccaacatggtgaaaccacatctctatgaaaaatacccaaaaattagccaggcatggtggtgsgcacttgtaatcccagctactcaggaggctgaggcaggagaatcacttgaactcaggaggtggaggttgcagtgagcagagatcgcaccattgcaccccagcctgggcaataagagtgaaactctgtcttaaaacatactactgtggcagagggttgggagacaatgcaacattttggaagaccagtaagtagaaactggaagtctttatatctgagactgagtcttcatatcattgacttgttccatgacctaggtagggagaaggagaaatattggcctccatcattttatttgtaatgcatgaaatatcaaatctgtaagttaata

SEQ ID NO: 863062 - DNA, 647 bp, Homo sapiens
atcaaaaggtcatctgacctagacagatgagcgtctgcagctttgaaatgcctcagagactttacgaagacccctaaactaaatttgaattgctccgtacttctttagcacccccacccaccttggaaacatccaggagaggtgcttatgtggctgaatagcttggctgggcagtagggttccagctgtcagagcagagagtgcccccagcccactgcctctttgcaaaccattcccctttgcagcagctccaccaggcggctctcagcccggggaggaaggaggagcrgagtgctactgtccctttgctgttctcttgatgggaaagttaacgatttaattgtgtctatgtgggatacataatgaatgagtctgaataattcaagacaggatgttagtgaagaggacgcagccaacacctgggctgcacaaagatttctttggctgcctcagggggagggggtgtgcagtcttcattttaccagactgtattccccgctgcgaacagtctaaactacagggacattctctttctcttttgagaagataactgtggctgtttggatgtgtgtgtgtgagagagagagtgcgtgtgtgcataaatgcatgtgtatgtttgtgcatatatgtgtgtatgtgtgcatcat

SEQ ID NO: 863063 - DNA, 603 bp, Homo sapiens
ggttttataaagcgtggttcccctgcacacgctctcacatctgccaccatgtaagatgtgcctttgttcctccttcaccttccaccatgattgtgaggcctccccagccatgtggaactgagtccattaaaccttttttcctttataaattacccagtctcaggtatttcttcatagcagtatgaagatggaataatacaatagtacatgaggtgattgtgcactcatccaactgaagccttagaatttgggtcctgctgattacaaatgttgtgagctaaggcactttcctttatctctctctgcctgtgtttcaacatctgtaaaatggcgaaataatatttcccttctgcttctcttcttccccttctttgtcattattatgacaataatatattttgattgtcctcaagggcctaggtcttgttcatctttgtatcaygtgcactggaaataataaacatagtaggcacttaatacgtttttgatgaataagtgaataaatgaatgctgtcctcaatactctcataagaaatactgtaggtaaaaccttggtcacttttctcaaatgcttgacatgtgtacatatttaggagcagctgg

SEQ ID NO: 863064 - DNA, 637 bp, Homo sapiens
tcctgcagtatttggtttatggtgactcagatatttttaaccaaggaaattaaagaagcaaataaatctcctggggggatagcttagtggtctaagtctcaggttggaaatggggagactccctagaactgtaaagttcaaattacagccacgttgactcaccctttcgtcttttttgagataaattgagttgcacttagtttatggtgggagagttgtttggataagtaccctaaactcccaaggtttgtttgctctgattgggacattatagaactcctgaggcatttttttcttctattagaaaatggtttgctgcaattcatttggccgcaaattctgatactcagttgaaatgttggaaaaacagagaattggcttctcctatagtatattagacacttaataaaatacagrtgattaagagacctctttctgcttcccagatgagtgctagagactggtggggaatagaagtaaaggaatggggtgacaaattttaggatgattctttaaaagtaggatttagcagtatggctagaaaagtagctcttgggattttttaacctatgaacactgacactggaagccattagattatttccagtgaactttcagaaaaaaagcaatagtgcta

SEQ ID NO: 863065 - DNA, 598 bp, Homo sapiens
tagatagtatagctctcaagtcctatattattctacaactatcagctcattatccatattccttccctcgtgaaactccctctttataaacggaatataactttcctctttggatacaggatgcatccttgatcaaaacttttctttaaagtttcttttcttcccaacactgagttactgtcatgtctgtaggcaagcactcattgcccagtcctgaggccacattaggttaggttttagaagtaggagattttgagtaatcgaatcctccagaattcagttccmtattttagagcacacggttttgtctcatagagttagtgattcctctctgtttcgtctgatttccaagggctgcgttcagtttccagtccacctttcagaactaatttttccattcttaactattccctttctatcttaaatgaaaatggtcaatttgatggtggtagaaaaggctttctggagaataacagcaaggaggttcagcattgcctcactgagtgagaaaaatatgctggtgaaagattttctatttttcaaagagaataagaaatctccacataaatctctgcaaactcagtctggaccataaagt

SEQ ID NO: 863066 - DNA, 612 bp, Homo sapiens
tcttttagttattttaaaatgtacaattaaattattgactatagtcaccctattgtgctatcaaactctaggccttattcattcattctatttttttgtacccattaacaatccccaccttcccatcacacccccactacccttcccagcctctggtaactgtccttctaccctctatctccatgagttcaatggttttgattttcagatcccgcaaatatgtgagaacatgtgatgtttgtctttctgtgcctggcttatttcacttaacataatgacttccagttccatccatgttttctcaaatgactaaatctcattttcttttttttatggctgaatagtactccattgtgtagaagtaccacattttctttatccactcatctattcacaggcacttaggttgctcccaaatcttggctattgtgaacagagttataaaaaacgtgggaatgcagatatctctttaatrcactgattttctttcttttgagtatacacccagcagtgggattgctgtatcatatggtagctctatttttagttttctgaggaacctccaaactgttctccatagtggttttactaatttacattcttaccaacagt

SEQ ID NO: 863067 - DNA, 609 bp, Homo sapiens
cattgattgaagtaagtagatgaaatctggtaggaatttataaaaacttccttaataatgaaggctacagtttggaggtgagggtgaattctgggaacacttttcgctactgagtttaatagcaatgaaaatgtttggagtcaaatcttagaagtcaccagtgatggtaacatcagaaatggggctggcgcgaycaccgaagttattgggtgcaggtgtgggaatatttgctatagaaagcggctttcataacatcattacacagagagaagaatctatacaaggtcgacattcttcacaactctgatttttttccacttctttctggctgccaaatcattgaatggattatataaatatccatcatattcccttcttccaatgtacctgagctctaattgcatctagggcatttaagggcctctaggggccaaagaggtgatgcaggaagaatctttccaccaggccagggagagccaactggaattgcactgtgagtgattagtaaaagtcaaacactgagctaatggaaaggaattacctacaggagaacataagaacagatgaaatggaagagcataattttgaaagcattgattacaacaaaaa

SEQ ID NO: 863068 - DNA, 612 bp, Homo sapiens
acaacaaaaagttgaaaagtagagggagataaagtatagagttttattagttttcttcttgatcgtttgtttgttcatgcaaagtgttaagtttttatcagcttaaaataaaaagttataagatatttgcaagcccatgataatctcaattcaaaacacatacagcagataaacaaaaaaataaaaagcaagaaattaaatcataccacaagagaaaatcatcttcacttaaaggaagaygcaaaggaaggaaagaaggaagagaagacacacaacaaccagaaaacaaataacaaaacggcaggagtaagtcctcacttatcagtaataacattgaatgtaaatggaataaactctccaacccaaagacacagaatagttgaatggattaaaaaaacaaaactcaatgatctgttgcctataagaaacacacttcacctataaagacacaatagactgaaagtaaaggtttgggaaaagatactccatgccagtggaaacaaagaagagcagaagtagctatacttatatcagacaaaatatatttcaagacaaaaactgtaagaagagacaaaagaggtcaatatataatagtaaaggtgtcaattcagt

SEQ ID NO: 863069 - DNA, 608 bp, Homo sapiens
tgattgggttaaggtaaatttctaatatcacatagaaattaaataaataaataatcaagagttattcatgtttcctttccagcaaacatgaatatgtggactaggagttttaccagctacatatgctccatcactaaacagattagtttaatacaagaagactgcaaagttgcaaaataataataatcagcttcacgtacatctgtgtccttctaaagcagaaaacagggtcttcagattggcatcaaactaaggaaacttyaaggaataattctttagctacagttttgaaaggtaagaattttctagttatgtctgtgtattaatagtgcgtaagtatacataattaatttacagtctccatctgtaaaattatttcatagcatataatacagatacactttatctcttttgtttcccactcacagattcaaattttcacaaagcatgagaacttttgcagtagctagtgtggaaagagctttgcagttacaacaccaaataatggggttattacaaaagtttttagcagatatgattaactgaaagactgatttaagtaggccttcattccagtttggagtagggtttagtgtagccatattccg

SEQ ID NO: 863070 - DNA, 589 bp, Homo sapiens
caaaaatgtttaattacattagaaaatctgtataatatacttaaaattagaatcaaagtcatctatatattaagtacatactgcaaaaaatctaccatctattgtgaatagttatcactctaagtttatagtccatagcattatgactgggtaatttgattgtaggtactgttattttctaatttgtatatacttgaattttctaaaatgtctccagtgaaaatatattatttttatagtaaaataacaaataytattgtaatgctataaaaattacaagttggcaccaagagcctgaaactgagcatagcaaatagtagagctgagtaggtgtttgtagaatgaatgaaagaataaacggccatgataattttgcaaagggacacttgtgttatcgaatggtgaagttcacaccgccaataatataacattttaaaatcatagcaagttaccagttgaaacaaattcaaaaataatcagttaaatgaaataaaaagctcagcaacaaatccaagtacataaaacagtttagtacatgaaacatgtaacattttcggtgaaaattttcaggaaaggggccatcagttgt

SEQ ID NO: 863071 - DNA, 623 bp, Homo sapiens
tggatggaattttcttttttttaattatactttaagttctagggtacacgtgcacaccgcgcaggtttgttacatatgtatacatgtgccatgttagtgtgctgcacccattaacttgtcatttacattaggtatatctcctaatgctatccctcccccctcccctggagtcgccatgttagtgaagactaagaacccagatttcagagcagaagcagaactctggggccacctagaggtacttcttaaaaaatcacatggatttcagttgagtgttttgttcattgtacttcacagcttttggagcaatatgtaactagttggatgaagctacttaaatcaaaggttgcatagaaacccaggttctcctataggtaaaattttccttactattaaagtagtagagtttggagtgttkaaagggttttcacaaaatttttaaagaaaaggttggtggctacttgtggttttatggtcttagactagaccaactctgagagaccaaaagcttccaagtaagtaaaaatgggtttctatgatcttgaacaaaactgaaaaattcagaaatttctctgaaaatttctctggaaataacccttcctattttgtcaagaggtagaata

SEQ ID NO: 863072 - DNA, 570 bp, Homo sapiens
taaaattacttctaaacacctgttccatgatttcaaggtttttcatgatttggtttctttctagctaatatatttctatgcctagatttggtaaatattacacagcttgtagggaaagttcatttccagagtgtgagtgtcactatcagctgtgataatgaatacacactgagttcagaatctactmggagattaataacaaaaaacaaacaaacaaaagtcttttcccctggagtcactcatttagtacataccaagcatacctcagataaacattcaggaggtcatttttttctccattctctctttttctttctaaaagtggcacagattcatccaaggagctgtatcttccgattcttcagatatgaaacatttttctccacatgatgggcaactatcatagcttctttttaatttgttgttatgcaaagtctctctttattttctctaaccagtgaaagatgaaaaacatcttgccacatttatcttaaaataatgtttccaccttgttggtatggtcacttcactgatactctaagactccaagtgtactctgcattcgccaac

SEQ ID NO: 863073 - DNA, 655 bp, Homo sapiens
tggatgacactttgagcagataggcggtaaacttggagccttggggatcatttggtgcaattttctccattaagagttgaacaaacagatttatagggtttaaaagccaagtctctcaggggtggttaatccaggtcctacttaatatatcacattattttctcccaggcttctttgaaaattttagtagatacagttagttaaataaaagcatacctcattcagatgtaaggtttttagttcaaccataggatatatatatctcaataaaagtggcggttttcttacatccaaaatctccaaagaaagcagcaagcttcaaccatgttgctgtaaatgayaggatttccttcttttgatggctgaataatattccattttgtatatgtaccacattttctttatccattcatttttttgatggacacttttgttgattccctatcttgactcttgtgaataatgctgtcatgagcatgggagcccagatatttcttcaacacactaatttcatttcttttcaatatataccaagtagtaggattactggatcaaatagtggttctattttcactattttgaggaacctccatactattttccataatgatcgtattaatttacattctcttttgttaagggaaataagcccggc

SEQ ID NO: 863074 - DNA, 643 bp, Homo sapiens
tagttcattaaataactaattataatacagaatataaattctgtagtttttttatgtctgtcttaagctagtctgagttctttgaggacatggactgtagtttacatttctgcaaaatccttgggacccatatttaatccaggaagataacagttggccgggcatagtggctcatgcttgtaatcccagcactttgggaggatgagacaggcrgatcacctgaggtcaggagttcaaggccagcctggccaacttcgtgaaaccctgcctctactaaaaatacaaaaattagcctggtgtggtggtgcgcacctgtaatcctagctactcaggaggctgaggcaggagaatcacttgaacccaggaggcagaggttgcagtgagccaagatcgcaccactgcactgtggaggaggtgggagttttatctataagcccctgaatggggctgctgcctttcttttagagatgccctgccaagagaggaggaatctagagaggtggtctggctacagtggctttgccaagctgtggtgggcttctctcagtttgaacttcccagtggctttgtttccactgtgtggggtaaaaccgcctactcaagtctcagtagtggcggacgcccctcctcgcaccaagcttga

SEQ ID NO: 863075 - DNA, 643 bp, Homo sapiens
tagttcattaaataactaattataatacagaatataaattctgtagtttttttatgtctgtcttaagctagtctgagttctttgaggacatggactgtagtttacatttctgcaaaatccttgggacccatatttaatccaggaagataacagttggccgggcatagtggctcatgcttgtaatcccagcactttgggaggatgagacaggcggatcacctgaggtcaggagttcaagrccagcctggccaacttcgtgaaaccctgcctctactaaaaatacaaaaattagcctggtgtggtggtgcgcacctgtaatcctagctactcaggaggctgaggcaggagaatcacttgaacccaggaggcagaggttgcagtgagccaagatcgcaccactgcactgtggaggaggtgggagttttatctataagcccctgaatggggctgctgcctttcttttagagatgccctgccaagagaggaggaatctagagaggtggtctggctacagtggctttgccaagctgtggtgggcttctctcagtttgaacttcccagtggctttgtttccactgtgtggggtaaaaccgcctactcaagtctcagtagtggcggacgcccctcctcgcaccaagcttga

SEQ ID NO: 863076 - DNA, 633 bp, Homo sapiens
ttgaaggacgggaagaagacagtccttgaacaacttgaagcttacatcttatttccccaatacgaatttgcagttgctgtaaattaacattttaacaaatgccataattacaagtgactaccataattatgttacaatgcttttgcatgtgttgacagtatttatttagaaaatgtcaatattaatatatgccacagtttctgtcaacttgtgttgacattgctctttaaaagaaaaagaggaatttgctgggcttctcttgtctttagatggacccatatcttgtaaataaattgttgctggttttttaaaaaaaatccatgtgtataagtgataagagatgttcctgacacgggaagggttccacacagtggagggactgaatatgataatggccagtgtttgtttatccaaatacaatttttcttaatcaaacaaaaacacacaaacccaggaaaattagcactttcctygaacgccaaatgtcctcatcttttcttggagatgtgttttctatgctgaggcagccttgacctcaggtgaaagggaaaagcccccctccacctgattagagtaaatgatgggtaaggaagccatcacacctgcccatgcagctgagcggcagcacagggt

SEQ ID NO: 863077 - DNA, 599 bp, Homo sapiens
ttccaacacacttctctagggaaccaatttgagctgacctgtgagagatcaatctgccgcagtctttgcatcggggagctgtattatataagagcatggactttggagtggaggaacttggatttgggctgtggtcactacttaccattatcacatgacttggagaaaataattgatcatctccaagcctcagtttcctcttctgaaaaatgggagtaatagacctacctcattggattgttgtaagcattgaatggaatgatgctgagaagcactagggcagagggcctggttcaagtaaaaagcagctgttatgattacactttaagctccttgagatctgaagagtattactttttttcttcactattacccattggaataattaggacacytgtttgttccctctccagtaaaactgagttggtttggcagctgccattaatcatcaactaagtggcctcattaatccaaagtcacaagggacccggactctttctcttttgttgcttggccattcctgggatgttatccacttggtcccaggtggttcaacacatcccagtacaaccagcaggaaggagataaggggaaacaga

SEQ ID NO: 863078 - DNA, 542 bp, Homo sapiens
gaggttcagagcgtgaattcccttgtccaggattgcacagtgaagggcagagctgagattcaaattcagggattcctgtctctaagacatcctgagaaatgattttgcaacgattactggaccctttgcaacactgcctcccaaactgccttaaaaaaagcaaaagtaccctcaggatttgtaagaggtgagatgtcttccccctgtgcacagagcaatcctccctccagcctcgcccactgccccaggggttggcagagtggctccacctgcacctgcacaggtggccccgcgcctctcacacaggttcagctcccgcckgtccctgtgcagagcgccccctgccggtccctcttggaggctgggccagcgttgcgagtcttgccagggacgcgcgctctagcgccggaggctgggaacgcaccgcggtgccaccgcgtcctgcaggggcggggcgcgcacctggggatgcacctgtcctagaccccctgcgcctattcctcgcccgccccatccttccccttttcactttccctgttctg

SEQ ID NO: 863079 - DNA, 608 bp, Homo sapiens
atggttttaagtagctttgggggtcatgtgatttttttcatgtttaatgaaattatgctttttgctttgaaatagggaattatttgctagaaaagatttctcataaaatctaaatgttatagaaaacaataaaaaatcggaaaaattattgacccttgtctcacgttcataccgtagctaacacattcatgctttcatttatttgtgcagcaactaactgactgaagctgagttctcattgctccaaagccttctctaggttgctagaattcccatctagcctgcctcagccctttgtaacactccctggacaactgccatagtgaccatcctatttcctggcaaaacacccaccctgatagaattgagctcttcactcttgggcacccacatcctgctgctgacctggcaacgtccatccttgctgactgttctcactgacagccaggtgggttcttgtgcrgcctgacgatccactcacccgctttcctggtgactattccataccgatatggtttggctctgtgtccccacccaaatctcatctcgaattgtaatccccataattcccgcgtatcaagggagggacccagtgggaggtgattgga

SEQ ID NO: 863080 - DNA, 612 bp, Homo sapiens
tggaagttcctcctttgctcttctctctcctgtcgccttgtgaagaaagtgcctgccttgaagaaggtttcatgaagcctccccagccatgtggaactgtgagtcagttaaacctcttccctttacaaattgcccagtctggtgtatttccttatagcagtgttaaaatgactaacacgtgtactttggccttttatcctcacacctacaacactcttcctcccattctcatgatcagctgatgtccaagcttccaatttcacaaaggaaataaaagcaagcagaagaaaccttcaacaacctstcctcccaatgcagtctgggtctatggcattaaaatctgccctccttcctatgttacggacagaccacctaaggcagcccctcctggctgcactaagtcccatctgctcttgccttctggggacatagctccagccattctcccctctcccagctcatccttgactatgtcccacaagctccttgctcagggcctctccccagctgtcctcttttgcctgaacctgtttcctacaggaacctgcatgcatccttcctcacctccttcagctccttgctatgctgtccccttctcagtaaggtctcttg

SEQ ID NO: 863081 - DNA, 605 bp, Homo sapiens
ctggaattgggacggagggttgtgatatttcagcaggttctgaaaccacggagtcaaccaccatcctgcactcatgcattttcatcccatagacgctgttagatgcagtccatttagcatgacatcacaagctggaggaagaagagcccagagagctcattatcagaagctgtccaggaaggtgtgggaacaagttctgaattaattaaactttcatttgaataatgagtgcatgctatttactttattgttgagctgctccaagataagcaaggaggctccctcctgtggaatgcctggcattgrggggcctgccgttctttgcttgggggaagtgaaagagttctttttaactccctgttattggaagaaatgcacataactggaacgttgtgggagtgactatcaactgttcacctgagaaatggcctggggtcagccatccattattttctatccattttgacactgctcattgctgtatacaccttgggcatctacaattaaggtccatttaatctccctaaattgtattatctcagtctgtcatggaatcatggtttaatgcaatctctgcttttaccaggcagtaaaactgagatgga

SEQ ID NO: 863082 - DNA, 627 bp, Homo sapiens
gaaataagcttagatttcttaactatgaaataagctgacataagtctagatttctgttgattttgccttaaattaatgaggatgcaattttcagttttccctaatacataatgggttatcttgaaggaccttgagagatccctaaactttctctcccaggactctctacccagagtttcccaactttcaatctctctctcttttttttttttagacagagtcttgctctgtcgtccagcctggagtgcagtggtgcgatcttggcrcactgcaacctctgcctcctgggttcaggtgattctcgtgcctcagcctcctgagtagctgggattacaggtgtgtgccactatgcccagctaatgtttttgtatttttagtagagatggggtttcgccacattggccaggctggtctcaaactcctgacctcaagtgatccacctgcctcggcctcccaaagtgctgggattacaggggtgagccaccatgcccggcccaatttccagtctttgtgcaacactcttactgctttttaaataatatttttcatactatttgcattgttaatgacttcatatttttatttaaaaatatgttccttatatacaaatgtttaacatggaaacca

SEQ ID NO: 863083 - DNA, 646 bp, Homo sapiens
ttgtactaatgagagacatctgtttgttcctgttttgtaaatgtgcatttacccaatagacaggagtttttttttaaaaaaaagttggaaataaaagttaaaaaaagtaaaacaagctagagatggttgctggtcctctggggaaattgacagaatcaaggccacatttggaaaagttgtgtttagagaaaggctctgcagcatgatttcacagtttctgataaacatatttgaattttaatcttgcaaatgcttagtatcatatgcatccatactgttcctcatttgtctgtttggcaggtgttaactgagcatcttctacaagctggcacctgctagtgccgagaacacattggcaactaaatcaaatatggtcactgtccttagggagactgtgctagaggtgagacagrtgtgaatcaataacatttagtggttaatgctcacctatcttttgtgatgcaaccggcagtcttctaagggctgtgcaaatatattaggttttcaaattcttctgataattctaagacagagtaagtcttatttttgtgccgtccatttctgttgctttctgcagccggtgttgacgtggacttaggattgctatgagcgttttcattagtggctcattcttcctcatggctca

SEQ ID NO: 863084 - DNA, 625 bp, Homo sapiens
aaaacaaaaccatcacaagctgaatggctcaaatgacataagtatattgtctcatagttccagagctcagaagtctgaggtcaaggtgtgggcggggcaggcgctttctggaggctgtgagggagaatctgttccgtgtctctcttgctactggtggtttgctggcaatctttggcatttcttggctagtagaaggaactaatctcttcctttatcttcatgtgatgttctacctgtgtgtgtgtctaccttcaaatttcccctcttcatcagcacacctgtcctgttggattagaggcccacccttcyccagtatggcttcttcttaactaattccacctgcagtgaccctgtttccaaatacggttacgtctgttgtactgggggttatgactccagcatatgaatggggatgggtacaattgacaggaaggttaataggaggctttggcagtcttctgaggagttcatgttttatgctgcagaaaacatagtccctgaattttcaggtgtatcaaattacctaaaaccactctgtatttcctctaagaaaacaggcagtttgatgtccttactttgtcctgctcccacccccaacatctacaaaaccttaagactggtgtcc

SEQ ID NO: 863085 - DNA, 634 bp, Homo sapiens
ctgaatggcattttccagcatccatcagttgtattctggctcatggaatgggatgtgcacgtttgtagctctctccatgtagcctcctgctcagtccttcacacactcccttccctagtctcttggccagatgcagaggatctgagtaaaggtcctgaggccctacatccttgcctagctacaggatggcaaggcttgagcaggaggaagcctgagtccctgaatgactgcatgaaggctccctaggaagatgagcagggacatcgtccgcctgtgagcccagctgattcrttggctcaggctgccataacaaagtgccacagaccctggatcccagctttacaacctcatttaaccttaaccacttctttaaaggccctgtctccaaagtcagtcctgtttggggttaggacttcaacatttgaacttgaggagaaaacagttcaccataacaaccagtgcagtccagccttggataatgactcttctggatattaacagagaatagtcacacaggagagaaattgattatcaaatttactggaaatatattaggacttgtcaatttgtcattgtcttgtgttcactaaaactgctgaattctatgtatttgagcatttgagagagatataga

SEQ ID NO: 863086 - DNA, 688 bp, Homo sapiens
gatatctgagtttcaaagttgtaataatggttaaagatgttagtatgggaaaagtacttaacaaaacgaaagaagaataatatgttctcaacaaaaatagttttcttatttcatttttgtatctcttagtattttatttttcaaaatcatttagagcagtgtttcacagagttaaataagaaattattctttctttggaaagggggggctcaagaggcaaaaacttaaggagaaaatcttttccaatgaaaaatgtatttaaaatatctataagtacaaaaaagcatatctatataaatgatgttggagggataatgaagctttagaaagagatgtctgtgtagtcatttatagctctaaatatgcaaaacaagacatcagcaagacggctgactagaggtgccgaacattcacttcttccacaaagaaagagcaatataacaagaagatagtcacacgtcaaacagaacatttaggagagaacaatagaatttataaaggaagtgcaaagtccctctgagtcatgggaactcaggatgccatcayagacagaacagcaaaaccccagacagtatcagcttggagctaagagggcctccccattatggggaaaagatgagcaggaaatccccagaagttcacatttttcttgcagacacttgcaattttaatggcaggagagccccca

SEQ ID NO: 863087 - DNA, 548 bp, Homo sapiens
ccaaatatcatctttaattgtaatctccaagtgctgaggaagatatctagagagaagtgattgaataatgaaagcagtttccctcatgctgttctcatgatagtgaggaagttttcatgagatccaatggttatataaatagcagtttccactggacttttcactcattttctctcayctgctgccatgtaagatgtgcctgcttccccttctgccatgattgtaagtttctgaggcctcccaagccaggcaaatctgtgagtcaattaagcatcttttctttataaattacccactctcagatagtatctttatagcagtgtgaaaatgaactaatacaccatatcacaagggattaataaccagaatatataagaagctcaaaggaaactgtataggaaaaagtctaatttttaaatctgatcaaaaaatgggcaaaagagttgaatagacatttctcaaaagaagaaatacaaattgcaagtgggcatatgaaaaggtgctcaacaccattgatcatcagatgaatacaaatcatctcattacaa

SEQ ID NO: 863088 - DNA, 654 bp, Homo sapiens
cagtttcttgtcctgtgttttgttataaattaaatgtttttttcccaccaaattaagttatatttttgttacttttggctatcatatgttgtatacaaaataccgtaaaaaacagaaagattgcatacctatatatctattctatctatgtatctatctgtctgtctgtctatctacctatctatccatctatctcgagagagattggataagagatgggcatcaactgagtaagaataacctgaaggtgactcatcatactgacagtgaatttcaaratcctatgtcatcatttttcttctttttttagttcaagcatactgtgaaaatttttatgttaacctagatttatgcacacttgcaggtcctatgagttatcagaataaaataagaaggtactttacatgtaaaggcaaaattttatccaaaggaggagcaatacaaaatggttagtgctatgatctgaatgtttgtgtcccccagaaattcatatgttgaaatcctaacctgcaggtgatagtatgaggaagtggggccttttgggaggttattaggtcatgataattctgcctgcatgaatgggattagtgtaatgccttatagaatgaaggcattcattttataagaagtgagttcattcaccacttctgccat

SEQ ID NO: 863089 - DNA, 614 bp, Homo sapiens
gcagagcttccctttctggttgccaagaccctgaaggctcaactacatcctattgtctctcttccttagaatggttgagggagaggcttcatagaatcctctggctgggttgggacagcaagactcattcctgggcctttgtttcagcttgaaatacaccacaaattaattgggttgatgcaggtaattaagacagtcacttagattgtgtgcctttcctctgaaaaatttccttaagttgccagatctaagcttagtgtattgaaatgttaatgattcatggcttttaaaagaaaaatttttcctttgaatgggattcagggctaagaaaatgttcagactgattagcacctatgctgtagacttacatacttctccctataattgtacrtcatttgccataacatatgtctcaagaaattcaatgccaaactttctgtagattcctgctgttataatgacaagatttctggtctctattctcaaatggttttgtagcagagagagaaatattctgggatatgttctcgatctgcagtcagagaagactcaactttgaataccaacatagtttgagtaaacacgggcaactaacagtcagtcagttggaaaag

SEQ ID NO: 863090 - DNA, 614 bp, Homo sapiens
gcagagcttccctttctggttgccaagaccctgaaggctcaactacatcctattgtctctcttccttagaatggttgagggagaggcttcatagaatcctctggctgggttgggacagcaagactcattcctgggcctttgtttcagcttgaaatacaccacaaattaattgggttgatgcaggtaattaagacagtcacttagattgtgtgcctttcctctgaaaaatttccttaagttgccagatctaagcttagtgtattgaaatgttaatgattcatggcttttaaaagaaaaatttttcctttgaatgggattcagggctaagaaaatgttcagactgattagcacctatgctgtagacttacatacttctccctataattgtacatcatttgccataacatatgtctsaagaaattcaatgccaaactttctgtagattcctgctgttataatgacaagatttctggtctctattctcaaatggttttgtagcagagagagaaatattctgggatatgttctcgatctgcagtcagagaagactcaactttgaataccaacatagtttgagtaaacacgggcaactaacagtcagtcagttggaaaag

SEQ ID NO: 863091 - DNA, 614 bp, Homo sapiens
gcagagcttccctttctggttgccaagaccctgaaggctcaactacatcctattgtctctcttccttagaatggttgagggagaggcttcatagaatcctctggctgggttgggacagcaagactcattcctgggcctttgtttcagcttgaaatacaccacaaattaattgggttgatgcaggtaattaagacagtcacttagattgtgtgcctttcctctgaaaaatttccttaagttgccagatctaagcttagtgtattgaaatgttaatgattcatggcttttaaaagaaaaatttttcctttgaatgggattcagggctaagaaaatgttcagactgattagcacctatgctgtagacttacatacttctccctataattgtacatcatttgccataacatatgtctcaagraattcaatgccaaactttctgtagattcctgctgttataatgacaagatttctggtctctattctcaaatggttttgtagcagagagagaaatattctgggatatgttctcgatctgcagtcagagaagactcaactttgaataccaacatagtttgagtaaacacgggcaactaacagtcagtcagttggaaaag

SEQ ID NO: 863092 - DNA, 618 bp, Homo sapiens
ttcagaaaaatgctttcatacctgactagagatacaaaatagctgtgtggggcttcataattcactttctcccatcccattttaatgttaccacacctgctgctggatcccaagggggcatagatagtacctcctttcaagggtccttctggcccccacctagctgttgtgctgcacaagaccaatactcagtgccctgtggcccgtgtttaacctttgggattcatgtaatcagcacccacacaggtaggaatcactgagtcacaggctgagtcgctgcttgcatcttctgtgcctggaaatgagatctgtggggaagagtagctctgcctcctacacccctggcaggttcccatggctctgtgcagtcctgctgcagagtcgtatggggtatatctctgacatctcagaggagcacttmacaaatgtcaccatctgtagatcacagcatacagtagtgttagacctggaagtccatgaacatcttggcaggaatcttcatcgtgtttctggagaaggagttggggaatgtgttcattaacctgtccctctataattcattgatttatgggttcatttacgttttcaacttaccctccagttaagatgcagtttcag

SEQ ID NO: 863093 - DNA, 615 bp, Homo sapiens
tccgaaaagagaggagaagaagatattggtgaataatactgatgtttgctatctgccaacttcgaaaggacctggaagggcgaaggattaccattcctttgactttagagcaacaaagcgtccaaacaatcctacaaagtttagacggctaacacgtaagaaattgcaaaacctcccttagtaatcattacaacattttaaaatactgtaatttattgaggttaaattcatagaacataaacattttaaagtgaccattaagtagcatttattacattcacaattgttgtgcacttttttctagttctgtaatattttcatcaccccaaaggaaaacacgttaagcaattattctttattttgcactccttytatcccctgactatcatcaatctgtgttctatctctatacatttatctattctggatgttttatgtattaggtaggtgcaaaagaaaccacaattacttttgcaccaacatcatatatatatgcacaaaagttttgaatatatatatatatagcatagaatcatacactagatgatcttttgtgtctagcttctttcatttagtgtgttttagaggttcatccatgttgtagcatgtgtcagt

SEQ ID NO: 863094 - DNA, 623 bp, Homo sapiens
aattctaggagtctactgtatgacatggtgactatgttagaggcgttggaaccagagtgaacaggggttcctgtttgaggttccatcttgaacagggactgggtagaatgaggctgagacctgttgggctgcattcccagcggattaggcattcttagtcagaggatgaaataggaggtcaacacaagatccaggtcacaaaaaccctgctgataaaacaggatgcagtaaagaagccagccaaaacccaccaaatccaagatgtcaaggaaagcaacctctggttgtccttgttgctcattatacagtaattataatgcattagyttgctaacagacactcccactagtgccatgacagtttaccaatgccatggcaatatctggaagttaccctatatggtctaaaaaggccacaggtggtggtggggttcccctcagttctgagaattgcctgcttctttcccagaaaactcatgaataatccaccccttgtttagcgtataatcaagaaataactataaatatagccaaccagcagcccacagtgctgctctgcctatggcttagccattcttttattccttaactttcctaataaacttgcttttgctttactctgtg

SEQ ID NO: 863095 - DNA, 547 bp, Homo sapiens
ttgagctcttgacctcaggtgatctgcccacctcagcctcttaaagtgctgggattataagtgtgagccaccgcgcccggcccacactttgtattaaagcaacatggtcattgttgaacttccaccagcaagctgctgacgttttgttgacaatttaccytcttcctcacctactctctcccactcagcctccaaattctcagcgttacctgttcacacccactttccttctaatctgctctctggatgtctgggagtgtggcccaaggatagggagtgatatcagagggtgggaagaggttgcagactgaacagggagctgtttgtgggctaaaagatgttaatgtgtgctcaccagactccctaggctttctgaaagcatctgaatgtctgtccaactgcaagctacgtcatggaaacaggaccgccctgaggggctctccaatatgaatgccagggctgccagattccacagacaagaataaagggcatccagtgaattctgaatttcagagaagcagcatttttttcattaaaagtaagtccc

SEQ ID NO: 863096 - DNA, 660 bp, Homo sapiens
agtactttccacctctgtgacatcgggcaagctttctgccttccagaaatagctccacctcctgtcaaaggggcagagacatgtgcgtggagttaaggcttcctttgccttcctggcacagcagtcttcctgctttctcctcaaggcccctcggaggccaggtagggtagggtaggtcacccagaacaggatttcatccacatgcacaacctcatatcacgtcttcgggmccttttgcctgctttgataatttctcttaccctgtgaatgcctccacttggccctgtgattacaacctggcttctccaaaacatttaccacgagtatttaccagagttactaaaaactccattttacattacatcctaaaagagcttttgaactaaaaagtatgctagatcataattaagcactgggatgaaactggtcgcaagagctgctggcccagaagccctcagatgtctcggtttctgtgtgaaggtctcagggtaggtgtggatctcgggtactgtgggtcagtgtgtgcaccctggaggctgggccgtctgtccagggacatcttatgctgcagagggctcgaagaggacaaagagagtgccccatttgctatttttacaaggcgattactgctgagccttgagcaaagactcacagccagtc

SEQ ID NO: 863097 - DNA, 660 bp, Homo sapiens
agtactttccacctctgtgacatcgggcaagctttctgccttccagaaatagctccacctcctgtcaaaggggcagagacatgtgcgtggagttaaggcttcctttgccttcctggcacagcagtcttcctgctttctcctcaaggcccctcggaggccaggtagggtagggtaggtcacccagaacaggatttcatccacatgcacaacctcatatcacgtcttcgggaccttttgcctgctttgataatttctcttaccctgtgaatgcctccacttggccctgtgattacaacctggcttctccaaaacatttaccacgagtatttaccagagttactaaaaastccattttacattacatcctaaaagagcttttgaactaaaaagtatgctagatcataattaagcactgggatgaaactggtcgcaagagctgctggcccagaagccctcagatgtctcggtttctgtgtgaaggtctcagggtaggtgtggatctcgggtactgtgggtcagtgtgtgcaccctggaggctgggccgtctgtccagggacatcttatgctgcagagggctcgaagaggacaaagagagtgccccatttgctatttttacaaggcgattactgctgagccttgagcaaagactcacagccagtc

SEQ ID NO: 863098 - DNA, 581 bp, Homo sapiens
cctcttgtgttccttacaaacattctcatcagtagctctacgcgttgactgggtggtttgagatggctggtatacacagggctttcttggtgttctgtctctgggtcttagctttgtgtgtggttggagggccctggtgagattggaagtaccagagagtgctgtgtcaggggcagaggggcctgtcgctggagctggarggtgcctgcctttgtgtctgactcagtctcctgtctgccttgccccctcagggtctcgccagcccagcctctgtgggaatctaaaaggagtggatgtggacgtgtgaccaagcacatctcagcttttaatacccgggctatttatagacctttggggggatggctgtggaacaacaggggttggggagagagtttaaagaaaaatgcagcagggctgaaaaaaaaaatgagaaaaccattggcatggctgatttgaacaagaaaagtggcaaagagacttggagagagatgagacacacacttcaacataatttcactttcctagagaagatcatgtatcctcagtgcagataagctcattgagagactcagggaagaaga

SEQ ID NO: 863099 - DNA, 611 bp, Homo sapiens
tgggctgtgctgaggaatgatgggcagggagtggcccaagggctgcagctcgatgtgaggccgagacagtggggtgcacagcttccgtgcaccggctctgccatggcccctccactgccaactggcagcacaggtttctgccgaggagtcacactttagctgcaagggttaaggcaaggaagtaagattctcttttttgagttgtcttgatatttaaatattttttcttgaggagtagagtaatgccagcattagtttcagaaatttgaaaaayacaaatgtacttcaaggaatttttgccctttccatttcttgaaattatttttggaatattatcttgaaaagtagtgttcccatttaacttaggccattgtaatcatatgcagtttatagatagtgatgtgattgtttataatcatgcaaggtcatttgaaaatacatatctttaaatcatggagaaaattaaaactggagggaagatctttgaacagatgtgcagtcgatggccaactggaacactggtgcctggagcatttgtgccaggggcactcagctgcatccggaggctgcacagctctggatctctgagaaaggggtcacctgccacgttg

SEQ ID NO: 863100 - DNA, 669 bp, Homo sapiens
gactagagaaatcagtgcgattggttggtgtcttgagctggtcaccttgatctctcttttctttctttgggagaggcacttgtcctgtgagaggccaggatagggagggcacctcctagctcctggggcactcgctgtcatcctgagtcatgggtcagagctgcatcaactggggagaagacccagggccatttctgactctgataatgtagctgcttttttattccaaagtaagaaatttgaagactgtttttggggaatgcagcagaacaggcttttctcgtgactgggcttaccttttagtttcaggaattctttatctcacrctgtgcacttgtgccactgggctgggacgctggcatcgctctttgccatggagcatgctgtgagacatgaatcccttagtaaacatagttggtattccacactagtacccagcatttcaggaaacaaaatacaaccttttgaaggaggtgtttcttctgtgtgataggagaataaaaaggaccgccattttaaatacaggtgtatgtaattatactggtaggaatagttttaaaattgacatatctatatgacataccttccctcactttgaagctaaccttttacgtatttgttttttcccattttcttagaatttcttcccagaacagatggttacttggt

SEQ ID NO: 863101 - DNA, 669 bp, Homo sapiens
gactagagaaatcagtgcgattggttggtgtcttgagctggtcaccttgatctctcttttctttctttgggagaggcacttgtcctgtgagaggccaggatagggagggcacctcctagctcctggggcactcgctgtcatcctgagtcatgggtcagagctgcatcaactggggagaagacccagggccatttctgactctgataatgtagctgcttttttattccaaagtaagaaatttgaagactgtttttggggaatgcagcagaacaggcttttctcgtgactgggcttaccttttagtttcaggaattctttatctcacgctgtgcacttgtgccactgggctgggacgctggcatcgctstttgccatggagcatgctgtgagacatgaatcccttagtaaacatagttggtattccacactagtacccagcatttcaggaaacaaaatacaaccttttgaaggaggtgtttcttctgtgtgataggagaataaaaaggaccgccattttaaatacaggtgtatgtaattatactggtaggaatagttttaaaattgacatatctatatgacataccttccctcactttgaagctaaccttttacgtatttgttttttcccattttcttagaatttcttcccagaacagatggttacttggt

SEQ ID NO: 863102 - DNA, 626 bp, Homo sapiens
aacttgttaaaattcatttgttaaaaacctacarcattgcatcatacataatggaaaactgttagagtcatgttcatgaacatctagaattagacagcagtgcctgctgtcactggaggtcttagtgtaataaaagaagcaaatgaagaaactaaaatgtaaacattagaaaggaagactgaaatatgtgtctttttgcaaataattattcaaatagaaaatttacacagatatgttagcacttttaaaatgagcaagaattctctaagcagatataatgtgagatcaacatgtaaaatggaatagtactcctgtatgccaagaaaaaacaattgggaaatgtaatataaaaagaaatcccacttataatattaacaaaaattataagctatctaggagtatattcaggaagattaccaggcattataggatgtttcagagcatgaaaacaacctgagtaagtggagagctatattatgatcatggatcaggagacagaatatagtgcagatgtcacattttctcaagtttatctttaaatttaatacagttgcagccaaattcttaacagttttgtcacatgtgacttgaaaaatgtttcctaactttaataagaaagagtgaaa

SEQ ID NO: 863103 - DNA, 600 bp, Homo sapiens
ctgtctaacaaaagccttgcaaaggtcatacatttaaacccatcaattccaggaatttatttcaatgacgtgtgcatgtgtgtgcatgtatatccatttcaattcaatcaatagcatattcccctagaataaaggaaatagggaaagacaagactgatcagataaacattacatacactgatgatagactattattctgtcttaaaatatgttaaatatctagtaatttgagaagatgctcagatttactgagtgaaaaaaacagggaaacaggttacggtactgtatggtcccaattttgtagaaagagaaaataagagcacamtatatgttttatataatgatgtttaatttgggtggtgggattatgggtgatttttattcaccttgtaatattgtgcatttaaaaattttgaacaaatgtaacaatttttcataatgaaaataaaaatataattactattatttttcattttatttaaaaatacaatgacagaactttgaatgtttattatctaaacctatagcagacaggaaggaacaaaagaccctggaaattcctgtaagttcacctcagtaagagttggttttggcagcggt

SEQ ID NO: 863104 - DNA, 640 bp, Homo sapiens
tgcgtgctcattcctccctttctacagtgcgttttccgccgctctctctctcacttactctctgtgccattgtggcttctctctctgcatctgccccatgccttcctctgtgaagatgggcttccttctgcactctggccaatcgagaggatgggtgggcacccgaagccctcaggcatgtgttgtagtagcagccacacacaaacccctgccacagtgtcagcccctacttaacctttctgggctggaaccagtgtcagtgttgggtgctgctctgtttctgtctcttgtttcacttctggaatcccagggaagggagagtcctgatcctgggagacacctgtgattcagtcagctgagtccaggccagtggggtcgtgctatgcagctgtggctgtgtgcggcctaccggagggggtggggaggagagaagggggtgctgaagggagctgagcagatgctcygaatggcttctccctggagacaggtagaaatgcagcccagctctaatgattgaattgtctctggaatgtcagtcatgatgaatacatgtaatatgcatgcttccatacagtcatacttgtcttggtgtttcccctctaccccttccataatatttgaaaaataggattgaggtttg

SEQ ID NO: 863105 - DNA, 605 bp, Homo sapiens
tcctgttttgtgaaagtatcacaataaatctgatgggattgtgggtgggaacagttttttttgttgttgttgttatttttgtttgtttgtttgttttgagacagagtttcactcttgtcacccaggctggagtgcgatggcgygatcttggctcactgcaacctccgcctcataggttcaagtgattctcctgcctcagcctcctgagtagctgggattacaggcacctgccaccacacccggctaatttttgtatttttagtagagacggggtttcaccacgttggccaggctggtcttgaactcctgacctcaggtgatccacctgcctcgacctcccaaagtgctaggattacaggagtgagccaccgcacccggcctatattttgttttaaatttagtagaaggccatcaacttagggtattaccattaagcctagttagaaataaggaatataaagtgaaaaataatcagtccccacaaaaatagtacagagcaaaagtcaacaatactggctttcaagtggatttttaaaatcccagagccacaagaaataccatattgaagaaatgctcaatggttgccaaacgtttcatttcctttg

SEQ ID NO: 863106 - DNA, 659 bp, Homo sapiens
tagctatgagactttaggcagagtaacctctccaagcctctgtttcctcatctgtaaaatgaggagaatgatggtccctacttcatagggctaatgtacagattaaatgagagtctagcataatctctggtacatgagatgcatgtaatcaatactagagcttattatgataaccatgtagacctacagaagtgatacaattgctaacagtggttatttctggtggcaggatcagagacgatttttaatttcttctttgtttttccaaattctcttcagcacgcaygcattgcttttataatcatgaaaagacgcaattaaaatataatagattgctgatcccctgttcttgatgattcctctgaaacattcaaactttctctgtgactcaatgagctccccaaggctgggcctatatcttatctactttggagtctttgacatgaaacacataatttgacacacagtaggcaatcaatactcatttcctgaaaaaaatctcaaaggcaattacttcaggttttaatttctcagtgtaactaaacatctttttttcctccaagaattctcttttctcacttagattcaattgctaatccttttgccaaattaattaaatcctctccagattctccccagtcaaattccttagactattg

SEQ ID NO: 863107 - DNA, 618 bp, Homo sapiens
aggaaaaccaatgctaactaacacaaacctcgtgcaacttgttctgccatgagtagtgtagtcctttgtctctgatccagtctcatgtcatctgccagcatccatgaaaccataacaggcttactagcttgtaagatgggcaaaattcccgactttcacagattccaacacacatgacccaagtagggccaatcagggattcttcccaaagatacttcctcaagagcacttccccagagttctttcccactgatagatgggtgatgggaaaatgccatccattttatctctctctccttcttccctttatyagtttatatacaagttgttggaggttagctttacaatttggtcttttggtaacagaatatttagagggactgtgatcaaattcgagtaatgaatatagccagagatagataaaattgttgttggcacgagtatcttctcatttgggagaaagggtaggaatattttccctggtaagaaggatagctgtattttgttcgttgtcatatagaagttcaggtatgtgtaggagggtgcatatggaaactgagtagccaaaggggtgggctgtgacagttatcactttagagcctctgaattccaaatcca

SEQ ID NO: 863108 - DNA, 587 bp, Homo sapiens
acttcattgtccacatcattatcagcattttggtcaaaaccattcaactagtctctagaaagtttcaaactttcccacatattcctgtcttcttccaagtcctccaaactgttccaacctctgcctgttacccagttccaaagtcacttccatattttcaagtatctttatagcagtatcccactcctggtaccaaaatctgttttagtcagggttctctagagggccaaaactaatacaatatatgtatatatgaaagggagtttattaaggataattgactcacrtgatcacaaggtgaagtcccacaatagaccgtctgcaagttgaggggcaaggaagccggtagtggctcagtccaagatcgaaaacttcgaaagtagggaagtcaacagtgcagccttcattctgtggccaaggcttgagagcttgtggcaaaccattagtgtaagtccaagagtccaaagtcatctctctccaatgctggatgcctcctgtcctcagacataagactccgagttctgatgtttgaggggaggaagcatccatcatgggtggaagatgaagactggaagactcatcaagtc

SEQ ID NO: 863109 - DNA, 611 bp, Homo sapiens
ttctacacagacacagcaacaatctgatttctctttcctttccccacacttcccccacttccactcgacaaaactgccatcgtcatcatggcccgttctcaatgagctgctgggtacacctcccagacggggtggcggccgggcagaggcgcccccgacctcccggacggggcggctgccrggcgggggctgtcacccacctcctggagggggcggctgctgggcggagacgctcctcacttcccagacggggcagctgccgggtggaggggctcctcacttctcagacggggcggccaggcagagacgctcctcacctcccagacggggtggcggtcgggcagagacactcctgttcccagacggggtcgcggccgggcaggggcgctcctcacatcccagacggggcggcggggcagaggtgctccccacacctcagacgatgggcggccgggcagagaccctcctcacttcctagacgggttggcggctgggaagaggcgctcctcacttcccagactgggcggccgggcagaggggctcttcacatcccagatgatgggcggccaggcagagacgctcctcgcttaccagacggggtggcggccggg

SEQ ID NO: 863110 - DNA, 611 bp, Homo sapiens
ttctacacagacacagcaacaatctgatttctctttcctttccccacacttcccccacttccactcgacaaaactgccatcgtcatcatggcccgttctcaatgagctgctgggtacacctcccagacggggtggcggccgggcagaggcgcccccgacctcccggacggggcggctgccaggcgggggctgtcacccacctcctggagggggcggctgctgggcggagacgctcctcacttcccagacggggcagctgccgggtggaggggctcctcacttctcagacggggcggccaggcagagacgctcctcacctcccagacggggtggcggtcgggcagagacactcctgttcccagacggggtcgcggccgggcaggggcgctcctcacatcccagacggggcggcggggcagaggygctccccacacctcagacgatgggcggccgggcagagaccctcctcacttcctagacgggttggcggctgggaagaggcgctcctcacttcccagactgggcggccgggcagaggggctcttcacatcccagatgatgggcggccaggcagagacgctcctcgcttaccagacggggtggcggccggg

SEQ ID NO: 863111 - DNA, 552 bp, Homo sapiens
cagctgttgggaatgccagcccataaccacccagataggccctgggtccaggctgctaatatgtatccctaacccaggcgggggcagtcagagttgactcttgggagacagtttctctccatttaaagctgcaaattctaagggccagatcagcctggagctgccccaggtaatcaatgccaccacaggaaaaggaccctcctgaggaggggccaacatggggggacacagagctcaaggggaggacaaagacctgatgacatcgaccctggatccagctgtggctgacatatctgacccttggccatctgctatgtgagccaaaaaatatccacttttgcttcagctagtttgagttgagtttyggtcatttggaaaagaaaatttcacaggtaattggttctaaaagtctcttaaatttggagaataaacatatttttcagaaatgtcaacttgcagaagagaacactttttaagaatctctttcttcctctctgttatggactgaactgtgttctccccaggcccccaaatttatatgttgaaacctta

SEQ ID NO: 863112 - DNA, 675 bp, Homo sapiens
tatccaaggagtgggttcccaataaaaaggctgagtttgcaccccccatccccagttcacacacatgcaccttccattttctgcctactgccatgggatatccctcattagatgctggcaccatgcttttggacttcccagaccctaaaactgtgagaaatacatttctctcttctttgcccagtctgtggcattctgttacaacagcagaagacagactgagacacacatcttaagacaaaactggtggcctaaattaactcagaggtagattcagttagaacatcgtgagaaaaagtgaaaagaattaacttcagacaggcctttatacatatcctgtgaagaatctcagaagatcagagtcagaatggactacaaatatcatttaatccaaacctatcaattaacaggtgagaaaactgaggcccaaagaggttggtgactagctcaaggtcacacagtgaccaacccaggtcacataggctgtttggagcctagactccaaacygtattgccaagaaactgtaagaataatacttttaaatgtttaggtaaacataaagctattaaaaataaatttgtggataatgaaaagacagaaatgtattcataaaaaaatgtgttaagtaaaataaaaatgcatgtatataccttggatattttctgaaaattatt

SEQ ID NO: 863113 - DNA, 669 bp, Homo sapiens
acatctttttgtttggggaagggagagcaactgaaggggagaaaataatgtttagtattatcacgttttattttcctaaccaatagaaatatctttgaaacaccaggatggagtctctgagtgagttcttaatagaggctcacatcataaggctagaaattagtcttacagctcayttattctaacatactatgattgcaacttgatgataagtgattttcttgaagacacatgactaataacttgtttgatagaaatagataacttgttagaggcaaagttagagcacggcataacatcatcatcatcatcataaatagctaaaatatattaaaaatttattatgtgctaggtactattctaagtattatacacacattatcctgtttagtcctcataattacttgatgaaatagattctactattatctccattttttcacataaagaaacaaagatatagtgaggtgcatcaatcagggtagggtggattaagttatggcagcaaataaccccccaaatgtcagtggcttagcacaaaggttatttctctgtcatgctacatgtctagtgtaggtcaacaagggaaccctactcattggagttacatcaccttgcatgttgctggtcaatgtgccagggggacaagagagaattctggagagtttc

SEQ ID NO: 863114 - DNA, 611 bp, Homo sapiens
tgaaggattggttctgtgacttctttgtcctccactcagtttagttatttcaccacacgactgaatcttagaaggctcatttactaaagaggtcctttttccttatgtttgcccacaatttactaagaggtacatcactcatcaggggttacagctagatcaaaaaaacaatcccctcaactaacagaaagaagactacactccagcaacagtctgcaacatcacaggtgtggaagaaggaattattgccccccagttcctgactyccccatggtattaatatacacctgaatacttgccttggcctcatagtgagcagtgtctaccttttccctttcgggtttggccatatgatttgcctggctactggggtgttattgaatgtgatatgaacagggacttgctatgtacctgcatggctgtagttactcccttctcttgccctcttaccatgagaagaacacgcctcagaatagttgttatttcaaggaagatgagagacatctggagcaaatggtactgaacccattgctagatcagccaaacctaagctggcctatagactcatgagcaagcaataaaagtttatttattttttattttatatatat

SEQ ID NO: 863115 - DNA, 659 bp, Homo sapiens
ctcctcctgtgaataccacagaggttggggaatgcccttttcccaggggtactgtggttcccaagctcatgaccactgcttcttgtctttccttgaaatatcccaaactctccattatattcccaggtgggtggcccccattttctccatctcttttgtaacaaaatagaggaggttgtattcaccaaaattcctcataagaattccttatagtttttggaaaaaaataaattcacaagcttctaggtgtggggacaargtgactaggggtgaaacttaaaagacaagatcaactagtacaagatgctgtaaaccatcttctaaggaagatgggtcctgctaactggagggctctttgtttttctgcatactggaatctctcagaacacaaggtttggcaggacagatatgaattgctctgcctaagggaagagaagtcagtggggttgggcactgaatagaaggacagtgtaaataaaaatatccctacgggggcatgactagagaaggacaaaggacagacattctagtggggaatgtcggagctatttgctgtgatgtgtttgatgtcacatcctctcctttataggctgttttcggaaagatttggtaaaacctgcagtttatgtaagtggattgtttagggcaaaggtagcaaa

SEQ ID NO: 863116 - DNA, 614 bp, Homo sapiens
tgtgtatcagctgcccatcagacacttctgtttggatatctgcaagacatcttaaacatgacattggcgaaatgagctactctccacccacttcaggctgctacaccttttctagcccaggtgatggcaaggccatgctttcagttcttcaggctcccaacggtggaacattggaaccatattccccactccctcacctctcygtctctctctcactctctcacacatacacacacccatacccccttgccacacacacatcccaagtctagcttgctaggaaattctgtggacttttctcttcataaagcaccagaatctgccccctgctcactgccttcctaggagccaccatcagctctttcctggattgcaccaacagccctcagtttcctcaccaccatccttgctttactagagtctgttgtcaacacagtgagcctttacaaatataagttggattatgtcactctcctgcttaaaactcacccaagggtcccatttcccttggagtcaatgtccatacagtggccttgggcagcacactctgtccctcccgttacctgcccacccacgccttccctctgctccagctgtattagtctgttttcacg

SEQ ID NO: 863117 - DNA, 601 bp, Homo sapiens
cccagatagctaggattacaggtgtgtgccaccacgcctggctaatttttgtatttttagtcgagacagggttttgccatattggccaggctggtctcgaactcctgacctcaagtgatcagcccaccttggcctcccaaagtgctgggattacaggcatgagccactgtacccagcccctatttytccaaatgaagagactgagccccaaaagggtgaagtctgtttcctcagcttatacaactggaccgagggatggaaggcaagcatttcggggggactggcccagtgtactttattcatgctagcatcaatggtgaatcccaacacttaaaagcatttatcactttgttgatcacagacacacagacacaccaagtaccacataggtggtgtgtttttgatcagctagtctcagggtctctctgggaatttaatggactcaaacagttgcacaaggtgcgactgtaaggtaacagacggcatttacagaaatcaggcaggaaagacaatcccaccgcttcatagacatacttcatgtcagcatgggggcagaggttctactgagagctgacatctatagaacacttcccctgcgcat

SEQ ID NO: 863118 - DNA, 639 bp, Homo sapiens
tacttcttatatttcaattgattgtaattgaaatataagaagtaattgaaatataagaagtaataagaagtaattgacttctcacagataaccatcactgctaacattttggcatttgcttcctgttcttttctcttttctctttgcttctcttcttttttttgtgctttgtggrcattattaatcttctattgttgggcatttaggacttttacttgctctattataaatattgtttcagtgaacatccttttagggaagtctttgcatagaacctgaattacttctttgggtatgtacccagcaaggggaggattgggccaaccagtatatacatttaagacttgtcctccatatcatcaaattggtgtatgtatatgtgagtattcaacatgcaccaatgctatcctgctaataacagtgcatgctccttattaaacctttaccagcactttttcgtttgataccaagacaaaaaaatagcatcatgtttcaattttatttttttcataacacaatgaaatacaactatttttcattttcatattgcacatttaaatttcttcttcactgaattggctgttcatgcacagtttgaggcggcttttttgatacagagtaacattttgttatatattg

SEQ ID NO: 863119 - DNA, 633 bp, Homo sapiens
atgacatcaatttagtactttccccaataagtaaagatggaataccagttattttatgctatggagaatttttatttatttctcaagtgttgtgcctaaactgaattaacaacaagaagtaaggataatttgtataattacgtttttgtatctctgaatttccttttaggaaatagaaatatatacacccttgtatgcattttaatgcgtatgtattttggtgtgtactgtcaacaaaaatatagactttactaaatatgaaactgctctcatttgctagaaaaaccaccaagtttgtgaattagttttctatcattactctttggtcaagacactgcatgtcttttaaaggaaggtcttattgctgagattagcagattcaggatgtagaaatgttggttgagtgtaattctctctccrgaaatgtgaaaatagagttactaattactggtgaaaaaagtgttggcctggtctgtccaattgtcccatcaaagtggaagatgttaatttaagggatgagtaacacatacttcagacatacgcatttgaaataaatgtcgataatggacttgccaattgattttaccgatatgaatgctaatattttgttagcacttgtgataaccataagaa

SEQ ID NO: 863120 - DNA, 617 bp, Homo sapiens
gcttggaggaagtccaggccaacaggcagagtttaatagccaagagagatgcaagagaacaggccaatagtcaatttcagacggtctaacaagaagtgtcctcatggggtagaacaacagaagaaaaaaaacttaggaatggcagatacatggatgtccaagcaggcaagagccaccatcgatatcyttcagcaaggactgtggctatcatcatgggactcaagctcagatttttactctacagaaggaagattagcacttgccagccagggactgggataagaggcaaaaagtcgattggaagagacatggttcagcaaacgggcccaagccagaggtaattcatgattccagaatttctatataaagaatatttggagaaggcagtatgggtggcagggcaagaatgaaaccacgctgacacagaactttgcctatggttgacaagatagcagttttttttatgtaaaagaatgcagtagttatggaagaaaacggactaacacccttctcacatacacgcaaacacacacactcaggcaacctccacacaccactaatattggccccaaactagccatcagaattaaagtccaaaattagagcagacaagcagg

SEQ ID NO: 863121 - DNA, 623 bp, Homo sapiens
tttggggaatttcaatgttttggtgcttactcaagtgacattttaaagacctctttgcctgctatcattttatagcattgtttttaaagcatcctttctctagtgttttccttgtatgacctctgctgcctgttcacttattctgacctgtgctctccaagtgtctccttgtgaccacaarctaggataggcccatgagggaaagattgctgttcacaagccaaaaccctcatacactcaatggtgtttgaaaaattaaaaactaaaacccaaaaatgtgcagccctgccccttcattccaccgcaacagctctggcagttgctttctctttctgtctctgttagcttttcatcttcctgagagtccagaagcctccccgtcagaagtgtgttaacagcagttcagcccatttcagggtgaaggacagtttgtcatctaactggtgagtacaagacaacttctggttattttttaaagccaattgttagcataataaggggaaatcattgaacctctagttgtaatgaaaatgccaacaagtttctcccaaatatatttaacctttaaaagccatcagaaggtcacctcggtttctaatatttctggtcaccactttctagca

SEQ ID NO: 863122 - DNA, 623 bp, Homo sapiens
tttggggaatttcaatgttttggtgcttactcaagtgacattttaaagacctctttgcctgctatcattttatagcattgtttttaaagcatcctttctctagtgttttccttgtatgacctctgctgcctgttcacttattctgacctgtgctctccaagtgtctccttgtgaccacaaactaggataggcccatgagggaaagattgctgttcacaagccaaaaccctcatacactcaatggtgtttgaaaaatkaaaaactaaaacccaaaaatgtgcagccctgccccttcattccaccgcaacagctctggcagttgctttctctttctgtctctgttagcttttcatcttcctgagagtccagaagcctccccgtcagaagtgtgttaacagcagttcagcccatttcagggtgaaggacagtttgtcatctaactggtgagtacaagacaacttctggttattttttaaagccaattgttagcataataaggggaaatcattgaacctctagttgtaatgaaaatgccaacaagtttctcccaaatatatttaacctttaaaagccatcagaaggtcacctcggtttctaatatttctggtcaccactttctagca

SEQ ID NO: 863123 - DNA, 623 bp, Homo sapiens
tttggggaatttcaatgttttggtgcttactcaagtgacattttaaagacctctttgcctgctatcattttatagcattgtttttaaagcatcctttctctagtgttttccttgtatgacctctgctgcctgttcacttattctgacctgtgctctccaagtgtctccttgtgaccacaaactaggataggcccatgagggaaagattgctgttcacaagccaaaaccctcatacactcaatggtgtttgaaaaattaaaaactaaaacccaaaaatgtgcagccctgccccttcattccaycgcaacagctctggcagttgctttctctttctgtctctgttagcttttcatcttcctgagagtccagaagcctccccgtcagaagtgtgttaacagcagttcagcccatttcagggtgaaggacagtttgtcatctaactggtgagtacaagacaacttctggttattttttaaagccaattgttagcataataaggggaaatcattgaacctctagttgtaatgaaaatgccaacaagtttctcccaaatatatttaacctttaaaagccatcagaaggtcacctcggtttctaatatttctggtcaccactttctagca

SEQ ID NO: 863124 - DNA, 619 bp, Homo sapiens
cttgcttttgtatggaaaggagattaggcaaaaaaaaatggatattgcagagccaagagcaataagcaggataagagcttgaaaaaccctatgaggcaaagatagggtctgtggcaggcaaagtccatgctttccacctacatctacagactccaaaaaattcaccgttttcttagtcctaaatttgactggtgattttcaaaaatattttttactttcatgatctcaaaagattaaagattccagagaaggtggggagagaacttcaaaagtttgcctcacaactcttttggatcaaagggattttattttcctggcactgaagaactaaaagatacataaaamggcacaatattttatagggttccttatggatgggctattctttaaatgctgaggaaggaaacaaataatgcaccagactatttaattaaactgtgtctaaaatctgcgctccgctgtattagaggcacctcctcagacttgtaaaccagtgggccaaagtcaattaagaaggacatgtctacaaatgtttcaacgattaccagttacttgcctctgacgccctcccctaatctccaggacataaatggtgaacgaaaaatcagtcacttgattt

SEQ ID NO: 863125 - DNA, 616 bp, Homo sapiens
gaactcaaagacaggttatttgaaattattaagttagagggaaaaatgattaaaaagggtgaggaaagcttatgtgactaatgggaacattaagtgaaccaatatatacattatggatgtcctaaaagaaatagagaaactgaagggaaaagaaagcttatttaaagaaataatgacagaaaacttccaaaaccagagaatagaattgaacatccatagtcttagtgcccagaaaatccctaataggctaaacattaagagatctgcagatacaatgcaattcttwtgaaaattgcagtggcatttttcaaagaaatagaaacaacaatcgtaaatacatatgaaccagaaagaccccaagtagccaaagcaattttgagcaaaaataacaaaactagaggcatcacacttactgattttaaattatactataaagctacagtaatcaaaatggtacaatactggcataaaaccagacacatagatcaatagaatgaaattaacccagtcaactaattttcaacaagggtaaaagaatatgctctgaggaaacgatactctctttaataaatgtgctggtaaaactgtatatccacatgcagactaatgaaatttc

SEQ ID NO: 863126 - DNA, 616 bp, Homo sapiens
gaactcaaagacaggttatttgaaattattaagttagagggaaaaatgattaaaaagggtgaggaaagcttatgtgactaatgggaacattaagtgaaccaatatatacattatggatgtcctaaaagaaatagagaaactgaagggaaaagaaagcttatttaaagaaataatgacagaaaacttccaaaaccagagaatagaattgaacatccatagtcttagtgcccagaaaatccctaataggctaaacattaagagatctgcagatacaatgcaattcttttgaaaattgcagtggcatttttcaaagaaatagaaacaacaatcgtaaatacatatgaaccagaaakaccccaagtagccaaagcaattttgagcaaaaataacaaaactagaggcatcacacttactgattttaaattatactataaagctacagtaatcaaaatggtacaatactggcataaaaccagacacatagatcaatagaatgaaattaacccagtcaactaattttcaacaagggtaaaagaatatgctctgaggaaacgatactctctttaataaatgtgctggtaaaactgtatatccacatgcagactaatgaaatttc

SEQ ID NO: 863127 - DNA, 616 bp, Homo sapiens
ggaccagcatttactgtggaggactctagagcatgtggctaaatttattggactgagaattggaaaggcttttaattggcatttccattaacagagttagactatggggcaggtcacaaggttctagtctataagggatagaaaaacaccactgtgacctcaaaccagactgcaaacaaaaagaagyaaagaaagccttatttcatagagttctcatgaagtttctcatgaagagtttctcatgaagaaaactatatgtgattggaagaattttcatgggccacttaaagggtgtatggggctaaatctaccagaataaaaaaagaaggtggtccagggacaacagtttataaactgcctgctaaggaaggagagacagacaggtcaccttctttcctgggaggggcttgcacaggagaccctggatctttctcaggacttgtttgcagccactctcagcctcttccctaaatggatgtccaatatctctttttaagacaccatattaaggtacccccagattattagcctacctggaggttcacatatctctggctttgccttgacctagaagtagtggatgactttgctgacattttaattcagatagtcacag

SEQ ID NO: 863128 - DNA, 643 bp, Homo sapiens
gagacaggaacaggggcccttcactgcataaactgcagtggttaagagctcagactagagccctattggttaggtttggtttgactactgactaacacttattagttattttataaccttgaacaagttacttaacctctgttttgtttttgaggatctttgtctctaaaattgatataattatagtaggtatgttgtagggttgatataagaattacgtgaattaaaacacttagggctggacacggtggctcatgcctataatcccaacactttgggaggctgaggcgagtaaaccacctgaggtcaggagttcgagaccagcctggccaacatggtgaagtccatctctactaaaaatacacaaattagctttgcatggtggtgggcgcctgtaatcccagcttcttgggaggctgaggcaggagaattgtttgaacccaggaggcrgaggtttcactgagccaagatcatagcattgcactccaggctgggtaacaagagtgaaactccttctcaaataaataaataaataaaacaaaacaaaacacttagaacaatgcctggcacttagcgagtgtcatgtatagttattattaacaatatgatcatcaacaccgttattgataatctcactaggatc

SEQ ID NO: 863129 - DNA, 599 bp, Homo sapiens
aagtattaacgagaaggcgtgttgtctttttaaggattcctaataccacatcataaaggcagtcacttcacctagatataagggtagtattctacttatgcatttctaatctaggataagcaatcgtatcgcaaagattataaccaacatatagggtgaaatggaaatctgaaatggataaaaaattttcattctaagtgaaaaaatttggaattttttttttcagtgttggtaaagcctggtatcctactgctactttactttcaatkactttggcattccgtgttaaaatgggttcatctttctttcctgaatgacttctttggatgtaacactaagttcaaatgttaatgtgggagctgacaagcctgtcctttctcctgaagactacaaagcatgtgatgtttccatactgacaaataccaggaattagtgaatgttaactattgttgttgttgctattattttttattattattttatcatgtaaggctcactgacttatatgcaacctctggaagtttcatataaaaaataaaacacaaggctgggtgtggtggctcacgcctgtaatcccagcactttgggaggccgaggcg

SEQ ID NO: 863130 - DNA, 617 bp, Homo sapiens
ggcatatacatacgatgttgccattatgattctattttatatattatttattatgtattattgtatatcttctctataatataatattttctattttattattatttttagaaacaggatcttgctatgttgcctgggctgtagctattcacagatgtgatcatagcacactgaggccttgaactcctggcctcaagkgatcctcctgcttcagctacccaagtagctttgaccacaggagcaccctaccatgcctggattattttatttcatttttatatttgatgaaataggaaaacattctgaatatattaattgcaaatgaagggtataattccaatttaataaaagttgtgtgcgtatgcatgcataagtgtgcagatgtatttgcgcctgcatacaggtgcacgtgattatgtaagaatagaaagaagaatgaaaataaaagcttctcgatgttaataatatttatacctgggtgtagaattaagaatatgcttcattttctactttgcacttacccatattatcagtttcttaacaatgagaatgtaatttttctactgaagaaaataatcccagtcattgtaacacactgtgactgctgttctagaaga

SEQ ID NO: 863131 - DNA, 634 bp, Homo sapiens
agcgttagaagctttttatgtaatctcatctaccccttttacatagaaaccttacttattaattattttaatttaattttattttttagagacagagttttgctttgatgcccaggctggaatgcactggtatgatcatagctcactgcagccttgaactcttgggctccagtgatcctcccacctcagcctcctgtgtagctgggactacagacacgtgcaccagtgcctgcctggaaattayttatttgtctgaggtcaaactgcaagtaaatgaagaaccaagacacaaatttaggctcctgatttggaatccattttagtgtatttccacagcagcaggtatatcatttgggtttcctttagctgcaagtaactgaaaatccaactcaaattggtctgatcattaaggaatttactaaactggagaacaaggaagtccagatgtaaagtgtgattcagtgttagttgactgaccacctccacatcagcatcaactaatcaagtcctccataatttaaaggctcctcttgttctcaggagactctggtttggggccagtggaaaagagagatttttcttcctcacaccactactgaagagacttgagctttgcattgataagactgctctt

SEQ ID NO: 863132 - DNA, 604 bp, Homo sapiens
ttgaattgatacattctgttgagtcatccaggcagactaaaaattattcctgctaaaatatttgtatctcacaaggcatacttgtctctgaagacactgatttaatattccatatctgtaaggaatctgatgctaattgagcaggttttcttctagtattaattttaattatttagaacagcatgaagctcttcgtaatttcccacctgacaactgggacccaaaagaacagctgcctatggttttatgctcctatgagcatrctggatatcagagtcaataagtttaggcatgaattctctgtgtgttccattgaggttgtgaaaatcaagccttttggaggagttcagaggaaacctgcaactgagaatgatgtccatgccactgtgcaaagtgttatgacagtcatagatctcaaaggagctacaggaagcgaggctccctgctgtaatgaacgcagcccatagttaaataataaatcacagtcatgtatctagtctgcaacagccactacctatcagaaagtcaccatgaccacatagtgcaaatatttagttccacacagttataaatctggatgggatccaaataaagtagttatcta

SEQ ID NO: 863133 - DNA, 694 bp, Homo sapiens
gctcctttatcacaggtcttctcttgaatctaggaattcggttattcacacttgcaatttctatatggtgacatgactcatcatttatttttactataattaagttttctgctgcaacagaaatatgactttttgtactctgagatgagctattttattctggaaggaaaaataaatttcacaataaaaagcagattgactaatggttaatgataagtcatgtcattaagtatctcccaatgttaaaaatatgtcatgagtcatgaaatctagtaagctaaaataattacagaggaatccctgcaacaaaacagatgataaaccaaatttaaagcagttatatatctgaagcccaaccaygtagaagaaaatttaaaccaacagcctacaaagtaagtatcaatcttatcattctgaaactttgtaaaggaattacactaataaatttgagttaattttttaatttatatttttctagctacattttatgttgttaaaatgttttacttttacatgatatatccaatttataaacatctacatgacaaaaaaagaaagttaaatcagtccaagacatatcaactgcagaaaactaatacagggctcatagttataatttgtcaatattttacttgctaagttaaaaaggagaaagacaaaagacttgccatctaattattaattacacaaaaat

SEQ ID NO: 863134 - DNA, 569 bp, Homo sapiens
tggaaatttccccagtggtgtcagcactcagacacacacacacacgcacacaccacacacacacacacagtcaccttcaagttgtcttcttgctgactttacaatgtgatcatcaccaaaatggcatttaaaaccccccaaagcctctttctatttctgggtctacatttactgtgtattctgatcccctgtcttgttcattatggataagattttctgttaagattataaaagccttacggtttccacttcgtcatctttaaagccatgtaaacaccttccccagcaaagcctagtgattgcaagtagtgagcggtagaactgaaacccaatggagatggaagaggacaacccaattctgttcaaatggtggtttacagaagctgttcacttcagcaggctcatttaacttacscaacctaaaaaccactgagccttccttccatcccttgagtcacatgtgctttctatagatagctggtagaaatcacaatattgaaaagtcaattacttgcatatttggagctaaaagtggggatttgaagtatgaccatccccagtgtttctta

SEQ ID NO: 863135 - DNA, 542 bp, Homo sapiens
ttatgcagcaaaagattactagaacaacatgggaacatgtccataataaatcacataagcagttcctaaacaaaatgtataacttgattacatttgcatacacacacacacgcatatatctgagtacacacacacacacaaacacatttatacaggcatagaaataagacaaacacaaacatacacaaaygcacaaaaaatcatgatgttaggccaaaatggtttgttctggtgggacttgaaatttgtactttatacacatatgtattcattggtattgttctgtaaacaaagacatgtattagttttatcagaaaaaaaaaccttagcttttgtaaaataatgtgtatacaccttaatctctagattgtgtgttcatgagcttttattcttccatcaactttctatagagagtaggcactgagcgcgtatgtcgtgatgtgaagtaattaggatagcaattaggatagcagtggaaatggtttcagacagtacaggctggtttcctttgaacagaaatgtgatgccatttttctataatg

SEQ ID NO: 863136 - DNA, 639 bp, Homo sapiens
ccgcactgatgctgcaactatactgacagttcacaaattatagagtttaaatttatagctccctttacatctgtcatcaacagctcccaaatcacaaggcttgcaggtgaatccacctacattttttgtgttaaagccattttggaaaaaaggaaacctaagaaaactaaaacaaaggttaactaaatttccttcttttaaaaataaagtcagggcaatcctttcaattttgaaagcaaagtagtcacaattagatggatctagtcaaataataatggataaaaatgtatgtaatgaatccaactattcaaaaatactaatgtcattatttactgattaaaaaaattaaaaattcctcaaaggtatttgttttatctcaaagccaagaggtaaaagaatgactaccaccagcagtttgtgtgtgtgtgtgtgtgtgtgtgtgtgtgwgagagagagagagagagagagagagagagacagagacagagagacagagacagagagacagatctactgtaagacagagagaagaaaaataagctaaattaatttttgctaatttaatttccattagaaggagaaaatgaaacatttttccattaatataatgctttttggtgacgacaaactttttttttt

SEQ ID NO: 863137 - DNA, 622 bp, Homo sapiens
tctccttcttttggggatccaggttaaaagagcagcccccactgggacatgtttgttctcatgacacaaagaaaagagcaatggaaagtccacagtatgatttttcaacatttttgcttggtcatggcatactggcagacttacatggaaggtccctaacttayaaaggtttgactcaggatttttccactttctgatggtgagaaagcaatatgcattcagtagaaactgtactttgaattttcatctttcccccggctagcaatatgctatatcaatactctctcaagatggtggcactctctctcaatagtggcaatgagccataggtcccagacagccacatgatcatgaagttaaaacaaactggtactcaacagtatactgtgtggccagatgatttttgcccaactaatgtaaatgttctgaatacttaaatattaagtgctaagttcaatgtttggtaggttaggtattttgaatgtatttcaatgtacgatattttcagcttatgatggttttattgggatgtaactccatcacaagtcgaggagcatctgtactctactgaccaaagcaagtcacactgataagcccaatatcaatgggatgcagacatatt

SEQ ID NO: 863138 - DNA, 622 bp, Homo sapiens
tctccttcttttggggatccaggttaaaagagcagcccccactgggacatgtttgttctcatgacacaaagaaaagagcaatggaaagtccacagtatgatttttcaacatttttgcttggtcatggcatactggcagacttacatggaaggtccctaacttataawggtttgactcaggatttttccactttctgatggtgagaaagcaatatgcattcagtagaaactgtactttgaattttcatctttcccccggctagcaatatgctatatcaatactctctcaagatggtggcactctctctcaatagtggcaatgagccataggtcccagacagccacatgatcatgaagttaaaacaaactggtactcaacagtatactgtgtggccagatgatttttgcccaactaatgtaaatgttctgaatacttaaatattaagtgctaagttcaatgtttggtaggttaggtattttgaatgtatttcaatgtacgatattttcagcttatgatggttttattgggatgtaactccatcacaagtcgaggagcatctgtactctactgaccaaagcaagtcacactgataagcccaatatcaatgggatgcagacatatt

SEQ ID NO: 863139 - DNA, 579 bp, Homo sapiens
tttaaataataatgacaaagaaatttttaaaacatgcttttctatcagatggtttaccaaaatattcgcccttctatgtttccttcttttagcctctacattctgggaattgtctataccttttgaaacatgcgagaactttaccaaaaaagagtagaaaaggctggtgaaatgagtggggggttagttgacatggatgctaagtgtaacagaatggaactttgacactttgatggaatatttgcctataagcttaaggagtcatgaacaagactggattgccactcccaatgtcagggacaaaaatctaatcattaccaggcagcacaattctcatcaggtagccaagactgctgctcrtgcttaattttaaggtttgacccaccagagataagcatgaagttagttcagtattccagctggtgaatttctctgacagatgtggtgagttaatacgagggagcagaatctaacagacatcaaaccaattattggttcctaaggactcttatgagtcaatctacttcatatttttattactaccacctttgcctaatgcctaatcatctcccatttgaa

SEQ ID NO: 863140 - DNA, 663 bp, Homo sapiens
taagaaaagtaactcttatactatcaagggaacttctatggcttgaccataaacacaggaaaaagagaaactccggtaaaaagcattgttttgagaataaattaaaataaagcatttgatagggacacttacccagcaaaccaatcttctatataaagacaatgtatatatgcatttggtgtcattaatagcatcaaaaacaaacaaacagaaagtcttaaaagaaaaatagagagtgaactcatagaagcataaaaggtgaactcttaaatatattggattctccctgaaaggaggctttattatatgtctacacacattttacttttaagggaggttctaaccttttattagtagaatatttcaaaagaattcactaagccttttatatttaagcattactttttcataaaataaaatctatcmaatatactttatacacaaatattttggtcacagctcattattacttaattaaaataaattgccaacacacttataatttgatctaaattatgactcaaaagatctcacttttaaattagagtatcactcctataaatatgacattattctttgtttaggcattccttcaaggtagactaaaactgatttctcagaacttacctttttgaaagttatatcccaatgccctacaggtta

SEQ ID NO: 863141 - DNA, 504 bp, Homo sapiens
aacattttaaaatcacctatacaaaatgcagatcccttgctgcgtggtaaaacactcactatcacaaacatatgtgggccttgcttcttttgttacttgtttttttggcagccagaggagtaccatttcatctctaaatgtgttttgcattcacaagaagagtcagcgggttgagtgtgatatttgccaccagtttctgactggcggccaattccttttaccacctctgtgggacttgtcgccctgaagcagcaatctgkcctcccaagctggacgttttatgcaaagagccaagcaggacacatgtgggatgccaggcctgggagcatttcacaaggctggttcaggggatataaaataacaggtggtggaggcagccatcaaataatcttgaggagatcgtgtgtgtgcctggtgagatgtttatcacaaagtagtgtagcagatggggggaggtaacatgtccaccactccctggcagctcaacattcaaatatgccctta

SEQ ID NO: 863142 - DNA, 628 bp, Homo sapiens
gtgataatacatgtccaataaaaatagctctctccccttgccttcactatttatgacaaaatatgtttaactttcaaaactgaatatttacttactaaattcctgcattatttcttaaaagtaaaatgtatgttcttatgacaatttactacctacattttggtgttgagttcaaccaaaataataaaagttttaaaagttttttctaaaaggagggaatgagtaagagaaagacaaaaggaagaaaaagaaattcagtcagatagtctttccagctaaattgagggccaatatctctgtaagcaccttggcacastttgtcacaaagtagaacctcaatatactttttttttttttttttttttttgagacagagtctcactctgtcgctcaggctggagtgcagtggtgcgatcttagctcactgcaacctctgcctctagggctcaagcaattctcctgcctcagcctcccgaatagctgggattacaggcacacgccaccatacctggctaattctttgtatttttagtagagacgggtttcaccatctgggaaggctggtctcgaactcctgacctcatgatctgactgcctcggcctcccaaagtgctgggattacaggcat

SEQ ID NO: 863143 - DNA, 553 bp, Homo sapiens
tgaattcaagcttttctcgttactaatcatgtgactggggaaagcttcctaactctcccagccttggtttacttatctgtaaaatgggaatttgggtgaagattaaatgggttagggcaagttaggtgctccagaacattgtaatttattattgtttataaataatttgatataaaattaatactacaaacacatttgcagagaagaatggcattaaatagrggaataaactatttgataaaaattatactatattgactttttagcataacccataatcacatgccaaataaattgtgtaaatgatgcaattgtttttcccttaacaacttttttttacataagtatatacaatctttattttcaataaagaaataatatgaaaagaagaatcacaacacccaaaaatcccccccaaaatttagcttttctgtaagtgtgtggtagtgtttcatcatggttttgatttgccatttccctaataattgacgatcttaagcatcatttcaggtacttatatgctctcattgagttaaatacatattcaaataag

SEQ ID NO: 863144 - DNA, 618 bp, Homo sapiens
gtgtggtcctggtttgtttagaatggttaccaaatcccaacttcttcaaacattttttaaagtgatgattattttgcggcatgatagaaactgacacccacaaaatgtgttgactttaatgaagtagatgtgagaattaaaacatcttcctttccacacccagcttctgagcttgtgtgctgagctgcctgacagaaagttggcctctgcaggccccgcagctgccatagaaatggcagtgtgactggcagctctcagcagtgtgtccaggatgtactaatatttaccagaagaggcggcctctggtgtcactgagtccccactcacctcatgtgactgctgcttccmagcctgcttcacagagttggcccagaggagggtgtggtctgagtttgcatcagagatctggttttaccttaacccctcaaaaatcacaattatatttagcagatctcagcaggcatagtataaacaataaaaaccaacctttaaggatattgttcacaaaggatgtaaatgccaagtaagatgggtaatttaactttacatatatatggatggaaacatatatggcttttagattgtgcctgaattttctacatatacaaacacacatac

SEQ ID NO: 863145 - DNA, 611 bp, Homo sapiens
gtctgtaaaagatagttgtctccaaatagcaacttttactccaaagaaagagtaggtaggtatggttgtgtatgtgtcttgtgagtacctgcatataaagtcacaaagttctagatagaattatatatttcctcctaaaaagatattggaaggtatcttttgcctctcttaggaacatrgtaaatgtaacaggaatatagccacatcagttttgttaaaaagaaacagatcttctatgaaaatagagattttatatacaacttgacatttgaagacagatactttaccaatgagatggtaaaaaacagtcaggactgtttgattatggctgtaaaattcccaactaaaaacagttaaatcaaaataaagggggtgatcaggaaggtactgggtggttcatggagtcgaaggagagcttcagagctcagaggtgacactttctgttcatctcatcgctctgcgggctgttggtgccacgctgtctactgccaaagggctttctacacttcagggagcatggctggagacaactctgacttgcacaactcagactttccaatctgaatagaaagatatcctcaccaccagaaccacctcgaacacctgggaag

SEQ ID NO: 863146 - DNA, 705 bp, Homo sapiens
aatccccagcaatattccatgttctggtccatcccttccactaacaggcgtcacccacctggtgtttccctttccttaggagtcagttctctgctagatgatagttaattgtataatttttaaaatctcaaacatctcagtacacatcagtgtacattatttatcccaagttatagacttgcacttgaacagggactttctgggctaatactttaaaccaaatggacaaaaactctagtggyagaatttcaagcactctggcacctctgtgaatgtgagatttttgtacaggaaagtggtgttttaccaccagtcttaggctgtgggatcagctccttccttcgtgtttgtggccaacaaaagggtttacagaaaaagaaaataatttgcccttgcaaagactgtgaaaacagtcatatttataagcacaattacatacacttctgactctatctcagtggccagtatatggtagctgcctaacatatgaccaaagaaggaagaagaaaaaagaaagggaggaaagaagaaaggaaataaggttgtccataatcttttttaacatggcttccagcataaaacttggtaactaaaaacagatattttttcattcctaagggggcagggcaagggacatagatatccaatttattaccactaagatttttatcctaaaatttgaaatattttgagtgtacaaaaagc

SEQ ID NO: 863147 - DNA, 705 bp, Homo sapiens
aatccccagcaatattccatgttctggtccatcccttccactaacaggcgtcacccacctggtgtttccctttccttaggagtcagttctctgctagatgatagttaattgtataatttttaaaatctcaaacatctcagtacacatcagtgtacattatttatcccaagttatagacttgcacttgaacagggactttctgggctaatactttaaaccaaatggacaaaaactctagtggtagaatttcaagcactctggcacctctgtgaatgtgagatttttgtacaggaaagtggtgttttaccaccagtcttaggctgtgggatcagctccttccttcgtgtttgtkgccaacaaaagggtttacagaaaaagaaaataatttgcccttgcaaagactgtgaaaacagtcatatttataagcacaattacatacacttctgactctatctcagtggccagtatatggtagctgcctaacatatgaccaaagaaggaagaagaaaaaagaaagggaggaaagaagaaaggaaataaggttgtccataatcttttttaacatggcttccagcataaaacttggtaactaaaaacagatattttttcattcctaagggggcagggcaagggacatagatatccaatttattaccactaagatttttatcctaaaatttgaaatattttgagtgtacaaaaagc

SEQ ID NO: 863148 - DNA, 705 bp, Homo sapiens
aatccccagcaatattccatgttctggtccatcccttccactaacaggcgtcacccacctggtgtttccctttccttaggagtcagttctctgctagatgatagttaattgtataatttttaaaatctcaaacatctcagtacacatcagtgtacattatttatcccaagttatagacttgcacttgaacagggactttctgggctaatactttaaaccaaatggacaaaaactctagtggtagaatttcaagcactctggcacctctgtgaatgtgagatttttgtacaggaaagtggtgttttaccaccagtcttaggctgtgggatcagctccttccttcgtgtttgtggccaacaaaagggtttacagaaaaagaaaataatttgcccttgcaaagactgtgaaaacagtcatatttataagcacaattacatacacttctgactctatcycagtggccagtatatggtagctgcctaacatatgaccaaagaaggaagaagaaaaaagaaagggaggaaagaagaaaggaaataaggttgtccataatcttttttaacatggcttccagcataaaacttggtaactaaaaacagatattttttcattcctaagggggcagggcaagggacatagatatccaatttattaccactaagatttttatcctaaaatttgaaatattttgagtgtacaaaaagc

SEQ ID NO: 863149 - DNA, 655 bp, Homo sapiens
cggacacagtgaggcagccaagtctgatggttcatgtcaaggtggcaaccttcctacaccaggaagaagaggcctgaggaatttcaggctacaaaagcaacttgcagacgtcaagggtactgaaaactgaatcgacagtctttcatccctgaggatgacagctcccaaaatgtagaacatagtctgcctcaggctctcctgycccaccaagttcactcctgcccttcccagaaatgaggtatgcagggaccagtgaaatgccagcccttgcccttgtttctgctgctcttagaaatgacagcttgtcttgactacagacacctctccggatgcacccagagcctctgtctattatgcaaagggaatataactcttgataagaggaaataaatctgatcacccaaagcagaagccaaaaccagaagggtgatggtggttttccagcagtgaagaaatccacggcttgatttttttttttttttttgaatatacattccagatgtttaagagaaatctacaagccacatttctagattccaaactggcctctctgttcatctcctctctgccctaagcaactctcctctctgtagttgagttaatttcccccaaagcccactttgtttatttatttgctgaagaggttctccagtca

SEQ ID NO: 863150 - DNA, 655 bp, Homo sapiens
cggacacagtgaggcagccaagtctgatggttcatgtcaaggtggcaaccttcctacaccaggaagaagaggcctgaggaatttcaggctacaaaagcaacttgcagacgtcaagggtactgaaaactgaatcgacagtctttcatccctgaggatgacagctcccaaaatgtagaacatagtctgcctcaggctctcctgccccaccaagttcactcctgcccttcccagaaatgagktatgcagggaccagtgaaatgccagcccttgcccttgtttctgctgctcttagaaatgacagcttgtcttgactacagacacctctccggatgcacccagagcctctgtctattatgcaaagggaatataactcttgataagaggaaataaatctgatcacccaaagcagaagccaaaaccagaagggtgatggtggttttccagcagtgaagaaatccacggcttgatttttttttttttttttgaatatacattccagatgtttaagagaaatctacaagccacatttctagattccaaactggcctctctgttcatctcctctctgccctaagcaactctcctctctgtagttgagttaatttcccccaaagcccactttgtttatttatttgctgaagaggttctccagtca

SEQ ID NO: 863151 - DNA, 617 bp, Homo sapiens
tagcacaacttgattttaacactttgattcgtgctaagaagcagcagttttcctgccattgcttctgcaccattagcgcaaatgtcagcacagaaaggcaagtaacctcttagtgttaatatgaaaatactttgatgtcatgggttcccagaaaacagtccatgaaccacagttggagagcctctgatctagaaggttcttgactctggaaacaaatttcctaggactgtgtcctggctttttcattagccatatggtgttaggcaaattactaaactttagtgagcctcagtttyctcatccgttaatagagataataatagtacctaccccaaaagagtgctggaggaaaaaataagccaaactatataatgtgcttacctcagtgcctggctgattgtatgtaacaaatgttagctcccaatgccagctattgttattaatgttattaccttctgcttctttgcaaaatgctgtagatattaaatgtcctataaatgttgcttaaaaagcaatgatcttctcatttctcagatgatgtttttattttgccaaaacaagatctcatttgacaacaaatccctaaaaatcctgtcaataaattaaatattgacata

SEQ ID NO: 863152 - DNA, 727 bp, Homo sapiens
accataacaataaatagctaacaagctattgaagtagcctgctgttcaatgtccatctccctacttagtcaaaaatgcaaagattaggtctgtttgactagtgtaacctccccaaagcccagaatataactatatataggcgctcaaaaaacattccttcactatgcgagagagtttttaacaaggtgaaacccctcctgactaaacttcacattcagatgaaattcagtacagatcaaagagtatttcagaggggagaaatctttacagtctattggctgtaaggtacagaaactgaagaggccaaggggttttggttggttgcagacttaagagggccagggctccccaacatttgtgtgacccccacacaacagtgggggtcccaaaaccactggtctaaatatttataatcttcagatcgagctaacaaacagttagataaaatatgtcctctagtcttatcttgaaaatatgccttcaaatmaattagaggtccagataattaaacatagtgaaatatagagactttaatcaagttgggttttcagcacgaaaattatccacattttaaaattcttgagtaggggataatcattctcttcatcacatgcacacatacacacacacacacacagagagagagagtatgtagttatccattaagaaagaatggttgccactgttttgaaaaaaaaaacaaaactaagattcataggatgctcag

SEQ ID NO: 863153 - DNA, 727 bp, Homo sapiens
accataacaataaatagctaacaagctattgaagtagcctgctgttcaatgtccatctccctacttagtcaaaaatgcaaagattaggtctgtttgactagtgtaacctccccaaagcccagaatataactatatataggcgctcaaaaaacattccttcactatgcgagagagtttttaacaaggtgaaacccctcctgactaaacttcacattcagatgaaattcagtacagatcaaagagtatttcagaggggagaaatctttacagtctattggctgtaaggtacagaaactgaagaggccaaggggttttggttggttgcagacttaagagggccagggctccccaacatttgtgtgacccccacacaacagtgggggtcccaaaaccactggtctaaatatttataatcttcagatcgagctaacaaacagttagataaaatatgtcctctagtcttatcttgaaaatatgccttcaaatcaattagaggtccagataattaaacatagtgaaatatagagactttaatcaagttgggttttcagcacgaaaattatccacattttaaaaytcttgagtaggggataatcattctcttcatcacatgcacacatacacacacacacacacagagagagagagtatgtagttatccattaagaaagaatggttgccactgttttgaaaaaaaaaacaaaactaagattcataggatgctcag

SEQ ID NO: 863154 - DNA, 547 bp, Homo sapiens
taggctgctttttctcaattataacataagcatttccaatcataaatatttttgagagcatgattttttaaaaaaatatttcagtggatgaatatgtctgacttgtacccttctttggagttgtttgaattccaggaacagaaacagagtcaagctaggttagggaaagtaggatttatggtagtgatgcagagaaatctcacagagcatcattcaggatgctgaattatgaattattaatattatgtcattaactgtaccttttcttatgtttagyatccctagtttcacttctagctacaattcacttctcattaattttaaattaagttaaaaaatttactctgctatcacaagtacttcaaacaaacaagaacaaaacaaaacaaaaaaaattttgcaaatttctcaaagtccacctcagtaataagtatttgaagccttaagagcagatgcaggtaaaagggtaaaaagatataaggccagggagaaaagagaattgcggtaaagaaaataaaggcaaactgagaaagaagcatgataacat

SEQ ID NO: 863155 - DNA, 633 bp, Homo sapiens
aagaccaaagtgatttcttatagatctaaagtcacctgggagttctgacacagtatgaagaaaactctgaaagagagacatccaatgttgtgctataggtggtggaggcttgaaaaattaattggaaatagatgtgaacccatttgcatggacttcaataatgaaaatcacgagcatcagatggtagcttctgcctgatgcttcacagactctgtacaagctgcgtaatgggagataaaggtgaagttgtccagggagtaaatattagggtagactcaaacttgtaagttatctcargaagcgagcattctcagcatgtggaatagaaggcctggcacttactacagagtgctcccactaccacttaaagaaggtgaaaacagctccagacaacttctgtctgtacccacatgcatgggaaagaagccaaggaatgtgctttgtagcctgcaaatgcattccactgaaatgccttcctacactttacagccaaccaaccttttcctcatggaataaaacagacccagcatgaagattgcctttcccttttgtctaggacaacatatttgaacagctacccatccccacccaaggccccatgacaggcagctgtgcacatttcgggagcagcat

SEQ ID NO: 863156 - DNA, 581 bp, Homo sapiens
tccacattttcttaatccagtctatcattgatggacatttgggttggttccaagtctttgctattgtgaatagtgctgcaataaacatacatgtgcatgtgtctttatagtagcatgattaataatcctttccgtatatacccactaataggatcgctgcgtcaaatggtatttctagttctagatccttgaggaatcgccacactgtcttccacaatggttgaactagtttccactcccaccaacagtgtaaaagtgttcctatttctccacatcgtctccagcatctgttgtttcctgactttttaatgattgccattctaactggtgtgagatggtatctcattgtggttttgatttgcattcctctgatgaccagtgatgatgagcattttttcatgtgtctgttggctgcataaatgtcttttctgagaartgtctgttcatatccattgcccactttttgatggggttgtttgattttttcttgtaaatttgtttaagttatttgtagattctggatattagccctgtgtcacaagggtagattgcaaaaattttctcccattctgtaggttgcc

SEQ ID NO: 863157 - DNA, 592 bp, Homo sapiens
gtatctgggtatccagacagctggaatcttcagtcaatgtgactgcacagccataaaaatgttttaggaatgaatgcaaatttggacattctctctatgtaaatgcatctagcttattgtcactctattacattgcaattcattattcccatttctggtgtcaaaaaaattacagcccttgagatacttagcttagaggagaaaacgctgagaagctgagaagagatataatctgccaagtacaagtcttgttaaattcaccttaagtctttttggttaaggtcattaaactgatgtatgtgaggaacgctctacaacaaaggattttgtggagtctctcakgttattttcataaacaagaaggtaaaaggtgagtgaattgatgtatgattgaataaccatctctggaggatgcagccggggtctttggttatgaacgtcaacagattggtataaatacctggaatacattctgatcaaatccagatcatagagctaggaatgagagcaaacacatgggtggcagaatcatgtcccagaaatatcttattgagctgtaacaatgggctgaatttagcaagactgaatttaa

SEQ ID NO: 863158 - DNA, 640 bp, Homo sapiens
aatattcttaggacatctataaatcaccacaaacattctggaaagcagtcttggaacatctatcaaaggccttaaaaatttcttcttctgtgaatttatcctcacaaatgaccccaagtttagaccaaaataaaaaaatgcttaaaaggcttattaaagcatgatttaaaatagaaatgattgcstaaattcctgaaaacaggggaatgtctaaataaaatatggtatctaacatgatagaaaatgtttactaatgtttaatgataccaagaaagtatcacaataataacatcaagtggtaataacaggaaacagatctgtatacaatataaaaccaacagtattgtatatataaacaccatagaagatctgaaaaaaaattagatgacattatttgtgatatctattttatttattatatttttctgcatactactctacagtgagcctgtcctttataagaaaaaatgctaatgatttattgtgtatgaaaaaagtgtatctgatttgattatatatttttatttccacttatattttctaggattattttgctttagaattctatgtataatcctgtgaaaatttgtagtgttgtagggactggaaagatcagagattatgttatggccatgaatga

SEQ ID NO: 863159 - DNA, 619 bp, Homo sapiens
taatactgcctggagcatagcagggcaatttacataactaaaacttttcatttatttccatttcacaagcacctgcatagcatttactatctaaattccttacaacccatttaatccccagaataacccgatgaggtaggtactattattatcctcattttcctgttgggaaattgagacttggaggctacagaacttgctcagagtcacacggctggtaggagatgtgggccagggcgccaagcccaggccasaggcttcagaggatctgttggctctaaacagcctgctgcaaggtggcgatcattatcctctatccaggagaaaacactcagagaggttccatgactgagctcaagccccagaactcacggcaagtggagcagagattctgattccaaagtcaacccccaacccaggtgccgccatgagtgactttacgggcagcatgcacagatgcctcatccctccttcctctgactcttcactgcatgctcttggccctctgcattggtccctggtgatcacctccagcccactttccagtgaggagagacatgctgccccatggctgaggaagccttttacctcccacctcctgcaaactacgcaggctatt

SEQ ID NO: 863160 - DNA, 611 bp, Homo sapiens
ggaaacaaagacgataagagtcccttcccaaaataaatcccttctgcctggggaccagactgcctttgtagaactagcaaatcagctataagattagaaattaggggccaggccggtggctcacacctgtaatcggagcactttgggaggccgaggcaggcggatcacctgaggtcaggagttcaagaccagcctgaccaacatggagaaaccctgcctctactgaaaatacaaaaaaattagctgggcgtggtggcgcatgcctataatcccagctacccgggaggctgaggcaggagaatcgattgaacccgggaggcagaggttgcggtgagccgagaccgcaccgttgcactccagcctgggcaacaagagtgaaactccatctcaaaacaaaaaaaaaaaattagaaattagggctcaggagtcatgcagccagaggccatgagattcctaacctcagccgggcayggtggctcacgcctgtaatcccagaactttgggaggccgaggtgggtggatcacgaggtcaggagatcgagaccatcctgactaacaaggtgaaaccccgtctctactaaaaatacaaaaaattagccgggcgtggtggc

SEQ ID NO: 863161 - DNA, 550 bp, Homo sapiens
ctagagcagtgcttttcaaacttgaacatgcttctggatcatctggagggcctggtaaagcaaagactaccaagcctcatccccagtttccatttcagtagatctccaggggagcctgtcagtttgcatttctaggaagttcccaagtgatgatattgatggtggtctggggaccgcacctggagaaccaccgaagtggagaggcccactatcaatgaaatgtacatataggctcatactgtactttggckgtaacaattggtactcagtaaaataaatggtgccgtttgtcgtgagaatgacagataaaacatgttttacatagtttctaaatgatctagaaataatagtggcattcagttgtcagaaataaaaaattaatattgggcagggtgcagtggctcaagcctgtaatcccagcattttgggaggctgaggcagattgcttgagcccaggagttcaagaccagcctgggtaacatggtgaaactgtctcttcaaaaatatataaaatttagccgggcatgttggtgtgcacctgcagtcccag

SEQ ID NO: 863162 - DNA, 717 bp, Homo sapiens
caaaaacataaagtggggaaaggacagccttttcaacaaatggtgctgggataactggctagccacaggtggaagaatgaaactggatccttatctctcaccttatagaaaaatcaactcaaaatggattaaggacttaaacctaagacctgaaactatacaaattctggaagataacattggaaaaacccttctggaaattggcttagggaaggatttcatgaccaagaacccaaaagcaaatgcaaaaaaaaaaacaaagataaatcgctgggacctaattaaactaaaaagcttttgcacagcaaaaggaacagtcagcagagtaaagagaacccacagagtaggagaaaatcttccccactatacatctatacatccracaatctatacaatctatacatccgacaaaggactaatatccagaatctataatgaattcaaacaaatcggtaagaaaaaagccaacaatcccatcaaaacatgggctaaggacatgaatagacaattctcaaaagaagatatacaaatggccaacaaacatatgaaaaactgctcaacatcactaatgatcagagaaatctgaatcaaaaccacaatgcgatatcacctcattcctgcaagaatggccataatcaaaaaaaaaaaaaaatcaaaagactgtagatgttggggtggatgtggtgaactgagaatgcttctatactgctcgtggga

SEQ ID NO: 863163 - DNA, 622 bp, Homo sapiens
atgcttgtgtaagcaaagctacacattatattgcctgcttttaactaatgcgaccctcataaaatggacacatggcttaagattattcctccaaggaagccacagatagactatcttgcctagaatcctgcctttgccgcttatgagatgtacttgaatgcttaaacagtgcgcatctctgagtttctcctgtctgaaatcaaacattggcatatttctcaaggattgtggtggagattagatggtgatatgatttgtctgtgtccccayccaattctcatcttgaattataacaatccccatgtgtcaagggcagggccaggtggagataactgaatcataggggtggtttcccccatacttttattgtcttagtgaataagtttcatgagatctgatagttttataaatgggagttcccctgcacaagctctcttgcctgcagccgtgtaagacatgtcttgcttcccctttgctttccaccatgattgtgagggctccccaaccatgaggaactgtgagtccattaaatctttcctttataaattacccagtcctgggtatgtccatattagcagcatgagaacagattaatatagatggtctagcatatgttagcctc

SEQ ID NO: 863164 - DNA, 607 bp, Homo sapiens
ggagattttgaaagaaagctagacagacggtttctcataatgacactgcaaaaaacccccaaagccatctgcagctggctcacttaggaaccaagtttaaagaaaaaaaatctttttttagaaaggctcatttatcaatgccaacaaagttaagccgcttaataaatcctaagttcccattttgggtagatatatttttacattatcactatttccgagaactctgaagttattggctgttgtacataatgatagggtggatcaacctgttttaatcccaagtgcagtctgaaacgagagaaacaccagttcaaatgtaaaccagttgaccattccttacagaatttcattttctatttgttttcactattaaaaatatcatctcccttcaatccacatgaagttcaaaatggaacacattaggaatattgcagacaagcatctaagatawactacccttctgtgaccacaactccaccatcaatctgcttgtctccccaaataatcagattctgtgtattcattaaactggtgatcagtgtctcaaagatgcttcgattaaaatactggcttagagaaacaggaaaatgttcttcctaagtaatga

SEQ ID NO: 863165 - DNA, 715 bp, Homo sapiens
ttggctcaaagcttccctccagatgcctgacacaaaccaaaaaacaggagtctggagtccaagttctgagtgagcagtttaattttcaaagggcacatagctaagaggcgacttaaattttccaataagttcttcagcttctcttttcatcacattcacagattggggcattgaaattgaggccttccatggtggtaactttttgaaacaaaacttgcttattttccagacccaaggcattgagctaataggtctatcttcrtccccgcggaacctgccgcgagccagggagagcaaagaacagctaccaaatgtagatcaagagaagacctgcccttgcatgcacccacacaaaagagagaaacaacaccagcatgagaagattccaaccagtcatcaaggtcattctatggttggtttgttgaatgattttcccaggtgactcaattcatgttgattaatggtggtgccagaatctttgttacacatatttccaagatgttctagggtgttatctcaaagccctttctcaaacttgtgtgataaatgtttctacaacattgagaaagttaaatgaacttacgcagaaattttgaaatattaatagaaaaagagttggtttttttttttgcattaaactttgacgagagacatgagacaagaatagtatcataagaacctctccccataaaaaaatgattgtgaggtgtgtata

SEQ ID NO: 863166 - DNA, 716 bp, Homo sapiens
tccctaaagttttggactgtttaccttccactttctgattgtcatatttttaagccgtatttgtccatttgcattgctataaagaaataccagaggctgggtaatttataaagaaaacaggtttattcagcttagagttctgcaggctgtccatgaagcatggcatcagcatctgcttctcatgaggcctcaggaagcttccaatcataatggaaaatgaaggggagccagcatgtcacatgatgagcaagggaacaagagagagaggaaagaggtgctaggctcttcwaaacgactagatctcatgtgaactcatagaatgagaactcacccattaccacaaggacaataccaagccattcaggagggatccgcccccatgacccaaacacctcccactaatcccacctccaacattggaggtcacatttcaacatgagacttggaggggacaaaacatccaaaccatatcagcatctcaattttttggtgttacaagtcaaaccaacataatcaaaattaaatattcattggatagactcaatggcaaaattaaaaagacagagtgaagagtcagtgaactcaaagatacatcaatggagatcatccaatcagaactaaaatatggaaaaataactgaaaagcattaataaaatctcaagagtgttgagataatactaaaaagactcagatttcttcctaattggtacacacat

SEQ ID NO: 863167 - DNA, 375 bp, Homo sapiens
tttttccacaatttcagctctttctctacaggacatgagactcactcagggcaatcttagcagatttgaggttcagtatctgcttctgaagctaggagatagaatccccgagttcattattttctgtcatcactttgtccactgaasttaggagcaaccaactagcttcattatgttccttggctctccacatatggtcaaaggtattatgtacagagtcactaaactccttgactctcatgagcgatgaatcaggagtgtcaaatgtatttattttgcataactctctaaacagttcatgccaaggactatcagtgttctccatactattagaagtagagtccttagcatttttgggtctaatcatattaagca

SEQ ID NO: 863168 - DNA, 652 bp, Homo sapiens
aattgtcctgttccaaatgattattttgtttcatgcaagcacttgctgggaacgtttccatgctgaaacaagacaagtgcaggcagagctgtttttaatttttaaagataactaaaaacatacagaaaagccttccaagcttgacttgaaattgttgtatctaaagattctcaatgcatttattaggaagtgtccatccaacttaagagaattttaacaggcgtcctaaggtcagactgcaaatcaggccaggagtcaagagcttcagtaatcttttcccagcgtcatgcagtagatcctggttattttcaaccaaattagacatcattttggatgtttattctcccaattatctccttacccccccaatccttctaagtttctttatggttttatttaaaaattctcttagttttttattgcgagagtaacttaagtgtggtctatttgaaatcttcatcacatataaagggggaacacaaaatcatttaygtaataagactccagctaacaggcaccctccagcaatctgaatgcttatgaaatggcatgaaaataaatccagaaaattaaactaagagctagacaaaatataaactactttgagctgtgcttttacaagacagatatgtctaggtatatgagctcctag

SEQ ID NO: 863169 - DNA, 587 bp, Homo sapiens
agcaattccactactgggtatctagccagaggaaagtaagtcattatatgaaaaagacacttgcatacatatatttatagcagcacaattcacaattgcaaaaacctggaaccagcccaaattctcatcaatcaacaagtgaattttaaaaatgtgatatatacgtacacaccatggaatactactcagtcataaaaagaaactaaaaataggctggatgcaatggctcacacctgtaatcccagcactttgggaagctgaggcgggcggatcacttgaggtcaggagttcaacaccagcctgatcgmcatggtgaaaacccatctctacttaaaaatacaaaaattagccaggtgtggttgtgggcgcctgtaatcccagctacttgggaggctgaggcaagagaatcacttgaaaccgggaggcggaggttgcaatgagccaagatctgtctcaaagaaaaaaaaaatcccactcccccagacatcctccatttagtatgaggatggagattattccagtatcttgtgtatagaaagatgtagaggaatccagttctgccaggccatttccaatgaataacaggc

SEQ ID NO: 863170 - DNA, 587 bp, Homo sapiens
agcaattccactactgggtatctagccagaggaaagtaagtcattatatgaaaaagacacttgcatacatatatttatagcagcacaattcacaattgcaaaaacctggaaccagcccaaattctcatcaatcaacaagtgaattttaaaaatgtgatatatacgtacacaccatggaatactactcagtcataaaaagaaactaaaaataggctggatgcaatggctcacacctgtaatcccagcactttgggaagctgaggcgggcggatcacttgaggtcaggagttcaacaccagcctgatcgacatggtgaaaacccatctctacttaaaaatacaaaaattagccaggtgtggttgtgggcgcctgtaatcccagctacttgggaggctgaggcaagagaatcacttgaaaccgggaggcggaggttgcaatgarccaagatctgtctcaaagaaaaaaaaaatcccactcccccagacatcctccatttagtatgaggatggagattattccagtatcttgtgtatagaaagatgtagaggaatccagttctgccaggccatttccaatgaataacaggc

SEQ ID NO: 863171 - DNA, 543 bp, Homo sapiens
atttggatgtttctgatgttgactgataaaatgtaggcttaaaaaatctgtttacagttttatactgctgtattgtgtatagcccctctttcataatgacacttgggactgtgatggtatagagtgactcttaatagtctgctcccaggaataatatataatacctaataatacctaacagttgttcagtcattatctgttaaatgaatgaatgaatactgaaaggaggcagaaaagggagtgagttagtaaaaattagccaggagtggtggcgtacacctgtagtcccagctacttgggaggctgtgatgggaggatcacttgagtccaggaagtcgaggctacagtgagccgtgatcgtgccacygcattccagcctgggcgacagagtgagaccctgtcaccagaaaatcaaaacaaaacaaaaaaattagccaggcatgatggcatagtaaaatacacataacataaaatttaccatctaaattatctttaagtgcacagttaatgttactgagtacatttatattgttgtgtgaccct

SEQ ID NO: 863172 - DNA, 639 bp, Homo sapiens
gagaattcatggatacatgagaatccatggatgcatgagattttaatgcaccagatgcagctgcattggtgggtgtgaaaatggcgtctatggaacttctcttttgaatgctttacttttctcagtgcaacaggaatcagggtgaccagctgagagtaaggaccagacaaagggatggaggctggagtgactgacacatagacaattttcttttcttttcttttctttttttttttttttttgagacagggtcttgctctgtcgcccaggctggagtgcaatggcacgatctcggctcagtgcaacctccgccccccaggttcaagcgattctcctgcctcagcctcctgagtagctgggattacaggcacctgccaccacacctggctaatttttgtatttttagtagagacagggtttcaccatcttggccaggctggtcttgaactcctgacctcgtgatccacccgcctcagcctcccaaagtgttggrattacaggcgtgagccaccgcactcagccacatagacaattttcaaaaagtttttagtatgataaataataggcttttatttttaaaaatgattaacattggtattttacatttttgtaacacataaaagtgttacttgtatttct

SEQ ID NO: 863173 - DNA, 615 bp, Homo sapiens
taaaaattaataaaccgcacagaaaagtaaaaccaaaccatcattccagatttaccatgtagaaacagccatggtttactgtgcagaaacgtgttaacacagcaaggccaagactgctctcccaatgcctacttaaatggctggccaagaggccagcacctggaagctctgtgcacactagtttcaaataaatgcttaaagtttaatattacttgaaggcaagagaagacaaagasaccccaaaatattataaagaaaagattataaaagatattatgtggttggaattgttactctttcaattccatatttgttttattatttactgatgttctaatattaagttcaagataagtcacactcataggttttctccaccactcctcccacctaccagtttttctaacatattattatttgaaaattcttagttttatcacagcaaattctccctcctatcattcttattttatttaattttagtttcatacttaggtacatagaaaaatgattaattttactgattcttttttccactgtatgcttaattttgtaaatttaattcatatctttgtttttaaacaggggtctatggatggtgttttctttaagttt

SEQ ID NO: 863174 - DNA, 654 bp, Homo sapiens
gcaagtgttcccacttttaaaaatgtaatcataaatttggaggttatcatatttattcaaaataaattcaccacctttcatgttctcacctaccaggtatgtttcagtgaatgagtataaaatgttggggttaaggtagagagacttatgaaagtgttagggggtactgcttgtattaagtcagaaatggagaagttccaatggattacttggtattgctgtccagaaacctgactctcataccattttggggggaagrgaggtttgggacagcaattaatgaagcatatccatattatcaaaaggcatttttatttatgaaataggaatagaaataactgaaaatgtctctttgcagtgccttgtgtaaagtatagaataacataatttctgggcatcatctaagctcacagagccttagggttctgaagtcagctacctttcaacttttccatttaacttaccctggcctccatattttgaaagcaggttgtctatcaacatatggcgtttattaagtatgacctagtttttcctctttacattaatcaaagatagccataactctttcaagctttagattagcattaggttgcccccatgaccagagctgattgataaaatgaatagttatgacattttagttctctttgc

SEQ ID NO: 863175 - DNA, 601 bp, Homo sapiens
caggcagcagctctcattgcagagcaggtatctcagagattgaatgaagttaacccttttctgtcattacaccattctaaatatttattcgtcaagcttaattcctgtcttcaaaattgtacatctcagtgctcccagttttcgctcacatactcaccrtatgcttgtctgtaattattatggctcattgactattggtatttgctggatgctttcctcttattttgcttaattcctattttttaatctttagtgctttttgcctatctctgcttccatagtgtttattttgagctcatagcttattggtttctcttttcatatgtcattcaaatttttttctataggcctcacagagttcttacacaaagtttagtcatcgatatccttcagaaaatttgtcaatatttgattaaacatccaaaaacctagatcgattgtttgtttaagttaatgtccagaattgcattcaattcatatgaatagtcactacatatcagttttgggttaatgaaaacatttatacattaatggtcaatattccacatgatcacttaatgagcattagctgaagtgtgaccacgaaaactagccctagcaa

SEQ ID NO: 863176 - DNA, 597 bp, Homo sapiens
ttagaccctgaatctctatctgggaaaaattccccggtccaggtctactgattgaatttcccaatcacttttcttgcagaaacatacatccgtcatgctagtctctacaaaaaggaatgagaaattgcacatatttagagagcaattggagtgcataatttttttatatttttatgactttttccaactttcacagttctcttgttcacgtctaatttagcagcaatttatatttgtgcaactcaccttgggcatttaaaagtatttaattttaatgtaaagawcactttatattggtactcattttgtatgtgtaatatttacctaaagtataaaattacaataacaaaataggcttaaataaaattgttatttaacacagtagattcttggtaaacatataactcaaccagtctgagctaagaaaagtagggcattctagacaggcattgttcaatctatgctgggagacagttcaagtgtttaacagagagaacgcagggtttcatgtaatcaggagttgataagtagaccttagctaagagaatttctcctttactttatggccttggggattttgctaagcctacctgaagc

SEQ ID NO: 863177 - DNA, 597 bp, Homo sapiens
ttagaccctgaatctctatctgggaaaaattccccggtccaggtctactgattgaatttcccaatcacttttcttgcagaaacatacatccgtcatgctagtctctacaaaaaggaatgagaaattgcacatatttagagagcaattggagtgcataatttttttatatttttatgactttttccaactttcacagttctcttgttcacgtctaatttagcagcaatttatatttgtgcaactcaccttgggcatttaaaagtatttaattttaatgtaaagaacastttatattggtactcattttgtatgtgtaatatttacctaaagtataaaattacaataacaaaataggcttaaataaaattgttatttaacacagtagattcttggtaaacatataactcaaccagtctgagctaagaaaagtagggcattctagacaggcattgttcaatctatgctgggagacagttcaagtgtttaacagagagaacgcagggtttcatgtaatcaggagttgataagtagaccttagctaagagaatttctcctttactttatggccttggggattttgctaagcctacctgaagc

SEQ ID NO: 863178 - DNA, 597 bp, Homo sapiens
ttagaccctgaatctctatctgggaaaaattccccggtccaggtctactgattgaatttcccaatcacttttcttgcagaaacatacatccgtcatgctagtctctacaaaaaggaatgagaaattgcacatatttagagagcaattggagtgcataatttttttatatttttatgactttttccaactttcacagttctcttgttcacgtctaatttagcagcaatttatatttgtgcaactcaccttgggcatttaaaagtatttaattttaatgtaaagaacactttatattggtactcattttgtatgtgtaatatttacctaaagtataaaattrcaataacaaaataggcttaaataaaattgttatttaacacagtagattcttggtaaacatataactcaaccagtctgagctaagaaaagtagggcattctagacaggcattgttcaatctatgctgggagacagttcaagtgtttaacagagagaacgcagggtttcatgtaatcaggagttgataagtagaccttagctaagagaatttctcctttactttatggccttggggattttgctaagcctacctgaagc

SEQ ID NO: 863179 - DNA, 597 bp, Homo sapiens
ttagaccctgaatctctatctgggaaaaattccccggtccaggtctactgattgaatttcccaatcacttttcttgcagaaacatacatccgtcatgctagtctctacaaaaaggaatgagaaattgcacatatttagagagcaattggagtgcataatttttttatatttttatgactttttccaactttcacagttctcttgttcacgtctaatttagcagcaatttatatttgtgcaactcaccttgggcatttaaaagtatttaattttaatgtaaagaacactttatattggtactcattttgtatgtgtaatatttacctaaagtataaaattacaataacaaaataggcttaaataaaattgttatttaacacagtagattcttggtaaacatataactcaaccagtctragctaagaaaagtagggcattctagacaggcattgttcaatctatgctgggagacagttcaagtgtttaacagagagaacgcagggtttcatgtaatcaggagttgataagtagaccttagctaagagaatttctcctttactttatggccttggggattttgctaagcctacctgaagc

SEQ ID NO: 863180 - DNA, 595 bp, Homo sapiens
taataaacttctgaagtaatttttattaccagagtgggtagaacctgctgctttttaagaactcacaagtcctgttatctattgctgagagacagaaaagaatccaccacttctccagctccccaccgttttgtccaattccaattctcccatttcccaccccattccctccaacacacatacaagtagatattttccctccaccatttgtgtgactctttctggagcataatccgtactcccaacatgggaatggaccctgaatttaacaaagatctttgtattacactataaaacagaactcctttcatttcaatacctatttattaatttatattttaatcttttatgcattttgtcaatcatctgatattattctggattttggatactcagtggttcttatcattaaakaaacagtgtttttttactcctagtttggactacattttgtttttcagatagctaacatcaatcaggaacttaaagccagagaagccttagacttcagtaaacatttgatataatccacagtttaagcatccatctctgtagatcacaaaactagatttaggcctttagctttcagtcagaa

SEQ ID NO: 863181 - DNA, 582 bp, Homo sapiens
tttaaagcatgaaataaagatggtagctgctccacttctacctcccaaatctcacagaatatgtctcttgtgactcacattaacctggacctatgcagagaaggaagttctgggaaacatagttccaatttggctaaggtaacaaacacaaatccaccacagcctttawgagcactggtcccactgtcagttgtttaggtgccagcctttgccacaagaatatgtgctccttaagagtatggaccacatcttactcacaatgatatggacaggaggcagggaaatactgggtagaaaagggcagggtccctggcgagggttccaccctcaagcctggacctgtggtcctaaatgagaacttcacttccccattttcccacctgaatgttgccttttggcccaccatgctcccatcctgtgcccgtaaaaaccccaagctccactggcagagcagcagactggtgtggcgtagcaggacagcacatggaagagagaagcagttgaacattgagaggaaaagaagcagctggatagtggaaactacggtcagagaggagtttggatatgaactctggacagtac

SEQ ID NO: 863182 - DNA, 608 bp, Homo sapiens
cctggatgcaaatcctaagataaatcttcaggtgccactgatttccttcagaagtgctcccaggagaaactggacaagggaatggggacagcaggaaagagaaggccaaaggtgtgatttcaggtaaagacccactctgagcctgatcccatggagagctgtggagcacccattacacctcagagtttgtacattacacctacaaggtgaggaagctgagctttcatactgccccatctgtcagtcattggctacgggggtgaggtagggcatcaactcccaggcattccaattctctgcatgaaatgctttgaagaaggtcataggtgagagwcattaaagatgaagcacacagaagatgggccatggggacacacaagtaaaggaggggagggagaatctgggtgtagcaccaacagtgtctgacacatagtcctttcttaaggaacccttactattttaatgaccttatttccagctcccctacacagccctagtacttctggttcctggctcaatgccaagaggggttggccttggaagtcccttgctatagtaaatagcattcagacttagagaggtaatcagagtaccttctggtgtcagcc

SEQ ID NO: 863183 - DNA, 588 bp, Homo sapiens
aatgttcttggaaacagcaatggtcaaaaaaaatccccccacccctagagtttactgcaaagaatgacccttccccatatgacttagataaaatttacaaatgaccctctttttccccatgacaaggacagacatagatcctccaaattcctattcattgtctggcaaatgattagccaagtcctttgaccccaccaaccagtctggataaaacttcgactaatttgacttgatgaaactttagtcgggtttttctccttccccagggtcacaaattttggctcacctttaagcattagaactcagaacaaccccttctaataacccctcctgaaactcagctgacctcaggaaaaaagtaattcctaatcaatcatccaatcaatccactgactcatcccacytcatgacacctaattatttctagccttgtttactcctccctctaaaacaagggccaaccccttggccatccatggcctattaggaaccaggtctcaaagcaggaggtgactgtcaggtgagtgagggaagctgcatctgtatttatagcctctttccatcgctcacattgccacctgagctcca

SEQ ID NO: 863184 - DNA, 588 bp, Homo sapiens
aatgttcttggaaacagcaatggtcaaaaaaaatccccccacccctagagtttactgcaaagaatgacccttccccatatgacttagataaaatttacaaatgaccctctttttccccatgacaaggacagacatagatcctccaaattcctattcattgtctggcaaatgattagccaagtcctttgaccccaccaaccagtctggataaaacttcgactaatttgacttgatgaaactttagtcgggtttttctccttccccagggtcacaaattttggctcacctttaagcattagaactcagaacaaccccttctaataacccctcctgaaactcagctgacctcaggaaaaaagtaattcctaatcaatcatccaatcaatccactgactcatcccaccycatgacacctaattatttctagccttgtttactcctccctctaaaacaagggccaaccccttggccatccatggcctattaggaaccaggtctcaaagcaggaggtgactgtcaggtgagtgagggaagctgcatctgtatttatagcctctttccatcgctcacattgccacctgagctcca

SEQ ID NO: 863185 - DNA, 625 bp, Homo sapiens
tttttctagccttgttttctcctccctttaaaagaaaagtcccctttctgcctggcctttgagatttgcttgcaaatctcatatgggaagatcctccctattgcaatatgcatttctccctcatctggctggttcttgtttaaatcctcattttcagtaaactctctttctacctaagtttagatctgtttttatttgatattatctatctagaaaaaataatagttgatgaaactgggactggcctctattgcatatgctcgtttacagagaggcagcagtgtgccacctgaaagttgggcaaatttggtctggttgctcaccctctccatacttcatgtgtcatcacctgttcaatgcagatgacagtacctgcttcatgtaactgttgtgaagactaaaaggttaatattaaatgctaacaacactgcctgacacaccataaacaccatactagtctttccttttgctgttattattataaktttttcatttaatggtttattttgaataaattcttatgtttttaaaattacttttcaatatagttttaatgatgactaatattccattatgtgctaaggtcatagttcacttaactaatctcctattatattttattcta

SEQ ID NO: 863186 - DNA, 645 bp, Homo sapiens
tgatatctaattatcaaggtattagcattccaggtctctcttgtaactttaacaactacaaagtacagacacagacatggcccactattgtcatctgagagcaggtggtgcatgagtgtgaactggtaacttgggaagaggagccaagtagaaccgtacatgaaaaggtgtagcatctcctgtaaccatgcacaaggcagaatgtggcagcttcattctctaccaccattctttaccctatttcaacaatttctaaggctggtgtgcctgtgaggaaaatataagatctggacagatgggatgaggacatctgggaggagccccaactctctgagattacccctatacctcactccgtgcccccagccacatcagtgaggtgtttcttctcattttcaagcycatttaactaggacatagtttagatatcagggagagttttctaaaccagattaaagatcctctctgcctgttatttccaatctgtgctctgaggacccaggattaattggagagctgggcaggtggcagatctcagaattagtgacgtcacagcaaacccaagaattcacagagcaaagcccaaaataatttttttgcactgcttatcagtagattccaagtgaaatgaaattaacttagttg

SEQ ID NO: 863187 - DNA, 695 bp, Homo sapiens
agcaaaaatactatgattggctgaaggctcagatgagcattagcattcttttagcaataaagggatttttaaaattaaggtatagttattgttttttcgacataatgctattgcacacttcatagactagaatatagtgtgaagacaagttttaaatgcactgagaaaccaaatacatttgtgtaacttgctttattgcaatattcagttgattgtggtggtctggaaccaagcccacaatatctccaaggtatgcctgtgcaaggtctacaccaacaactcacacagcaaagtcatgaaatccactctgtaggccagattaaggtttccctgtcacatgattgtgcccaatgaaattaattctttcttcctttacaaaggctttacagcacattgtacatctaatatagcagattctctaaactgcctctctaacattccttgtctactttyttattggctttacagaacccatattttcttctgaacattttatgcctagcttaatttttttccatcaccacattctcccttgcacctggggtggccagttgatcccattctggcccatgagacactgtcataagtttatggaagggtggtagttctggaaatggttttgctgtcctaataaagggcaagacatgactgtcattactccttttacattcttcttattcttttttttggggggg

SEQ ID NO: 863188 - DNA, 452 bp, Homo sapiens
tcactatccgaggggtcctaggacagccagtcactagatacttctcccagccactaagttgtgagtggggagctttactcttttcacatgcttttctaattatgcctgaaagccccactcccttgttagggagacacattctagcaaaagcaggggccattatacamctgaacataggagaaggaacacctgtttgttgtcccctgcttgaggaaggaattaatcctgaagtctgggcaacagaaggacaatatggaccagcaaagaatgcccatcctgttcaagttaaactaaaggattccgccttctttccctaccgaaggcagtacccccttagaccggaggcccaacaaggactccaaaagattgttaaggacctaaaagcctaaggcctagtaaaaccatgcaatagcccctgcaatactccaattttaggagtacagaaacccaac

SEQ ID NO: 863189 - DNA, 452 bp, Homo sapiens
tcactatccgaggggtcctaggacagccagtcactagatacttctcccagccactaagttgtgagtggggagctttactcttttcacatgcttttctaattatgcctgaaagccccactcccttgttagggagacacattctagcaaaagcaggggccattatacaactgaayataggagaaggaacacctgtttgttgtcccctgcttgaggaaggaattaatcctgaagtctgggcaacagaaggacaatatggaccagcaaagaatgcccatcctgttcaagttaaactaaaggattccgccttctttccctaccgaaggcagtacccccttagaccggaggcccaacaaggactccaaaagattgttaaggacctaaaagcctaaggcctagtaaaaccatgcaatagcccctgcaatactccaattttaggagtacagaaacccaac

SEQ ID NO: 863190 - DNA, 566 bp, Homo sapiens
aattggaaggatgaaattaagaataggagtgaatcattccaatatattccttttcatataaatttgatttttgaaaatcattgttttcaaacgttgttcaactgtttcaaacaaaatcattgttttcatttgaaaatatattctagatggagaattcagagtcctgcaaaaagcattaaataaagacaggcaaaaagaatgatcagaaaatattaagagtcaaacaagaatgaatgaatgccttgcctattgaaaacaaaataaaattatattggataaacttagcttcatgaaaatatttgatgtttcatgaaaatattgaaaaagaatggtcyttccttttccatggtgcctcatgtttccaaaaacttctcatagattagtgttagcctccaattctctcacctcctcccctctttaattcagccttctctatcttttacttaagttgattctaatctcttcctattataaacaatgtcacaatgaataaaattgtgttcgtattatttcacaaaggcacattcaccatggtagaagagattttccaagagaacctgctgtaa

SEQ ID NO: 863191 - DNA, 468 bp, Homo sapiens
tacagttcccaataagttcctcatttctgagacatcagcctcaacttcattgtccatatcaccatcagcattttggttgaaaccattcgaaaagtctctaggaacttccaaatttgcccacatcttcctaccttctgaaccctccaaactcttccaacctctgtcccttacccagccaaagtcacttccacatttcaagtatctttatagaaatgccccactttcctgataccaattttctgtattagtccattctcacactgctataaagaactacatgagactgggtaatttatgaaraaaagaagtttaattgagtcacagttccacaggctgtacagaaagcatggctaggaggcctcaggaaacttacaatcatggtggaagatgaaggggaagccagcatatcttacatggctggagcaggagaaagagagagaagggggaagtacaagacacttttaaacc

SEQ ID NO: 863192 - DNA, 618 bp, Homo sapiens
aaatagagcccacggaggcatgtgctgccctgcatttccagcctctgagcagaagggagacaaatcccaaagcatgccccattatgtcccttctggccacccttctactgagaacactcagagctgatggttgaaagtttgtggagaaatcactttccttaaaaacaaagcacaggttaagtaactttctcccacacaattttctacaaacacacagccactggggacataaaattctacactgcttgcagccacggaaagtcaccagmcattaaacgcaggtgtttcctgcttaaacttcatgatccaatcagatcttggggttccagcagaatattgccaatacctgaaatgtgtcatttctaaacttcattcctctctatacactgacctttccaacctggcttgtattcacggaggcacagaatcatcccacatggaaattgaagagatgtgctgattctggtggagcaaggctgtcactcagtggaagtatttttttctccagattaaaaagtatttctaagtattggaaattgtctgtttccctgaatcattagaagcaacccataaggacccccatagtgaaactatcagtggtagttttcccctatagta

SEQ ID NO: 863193 - DNA, 595 bp, Homo sapiens
ctcataattcagtcttcagatttttcttctctttgtatccacatctggcatctctgtgttagttactaagctattgtctctcagcttcaaaccttctcttctagctctgtgatgctgggactaggattctgcaaacacttttctcctttaccatctgttttcctgtyaagttcttctggtagaagaaactagagggagacaagaaagcaggaggagggagaaggaattcacaattttctatttgctttctattattctctggtcaccacagaaatgcatcctcaccccagaagcacagctggttgcagaagcaaatgattccagattctagcttttttccacctattagaactagcctcataatgatacctatcacaagccaagagataacagcacaagccaagcagctctaacagtgcctctccttcaagcgcataagcttttgagaaccccagtcttttctcttggttctaccactactatggaatgcaagctgcttcctgcagttactctctgtgttatctgaattccctccaatacccttttaaccagttccaccccccagccttttttttctgagatggagtttcactct

SEQ ID NO: 863194 - DNA, 657 bp, Homo sapiens
gcccaatactttgtgaggatctctgctgcttcacagggtcacaaatgagggtcacaaatatggacacttaattggtaataaaaatcttgtactcctatccccatttgctaacttgctctgaatctagttcctttgaacacttagttttgartaagtggtatagaggaatttgtaagaacttgccctctcccatgatctgcctttggctccttctaagttgctgatatggtttagctgtgtccccacccaaatctcatcttgaattgtagctcccataattctcatgtactgtgggagggtcctggtagaagataattgaatcatgggggcagtttcccctacactgttcttgtggaaatatatgtctcatgagatctgatagtttttataagggaaaacccctttcacttgggtctcattctctcttgtctaccaccatgtaagacgtcctttgctcttctgccatgattgtgaggcatcaccagccatgtggaactgtgagtccattaaacctctttttctatataaattacccactctcgggtatgtctttatcagcagcatgaaaatggattaatacagttgcctatctgattttgtttccatcatttattcccttcccagatcttatacaatgttcagctttgggatgcacat

SEQ ID NO: 863195 - DNA, 657 bp, Homo sapiens
gcccaatactttgtgaggatctctgctgcttcacagggtcacaaatgagggtcacaaatatggacacttaattggtaataaaaatcttgtactcctatccccatttgctaacttgctctgaatctagttcctttgaacacttagttttgagtaagtggtatagaggaatttgtaagaacttgccctctcccatgatctgcctttggctccttctaagttgctgatatggtttagctgtgtccccacccaaatctcatcttgaattgtagctcccataattctcatgtactgtgggagggtcctggtagaagataattgaatcatgggggcagtttcccctacactgttcttgtggaaatatatgtctcatgagatctgatagtttttataagggaaaacccctttcacttggktctcattctctcttgtctaccaccatgtaagacgtcctttgctcttctgccatgattgtgaggcatcaccagccatgtggaactgtgagtccattaaacctctttttctatataaattacccactctcgggtatgtctttatcagcagcatgaaaatggattaatacagttgcctatctgattttgtttccatcatttattcccttcccagatcttatacaatgttcagctttgggatgcacat

SEQ ID NO: 863196 - DNA, 647 bp, Homo sapiens
tcccggaacgtaaagtaaaataaaaaaaaatagattttacgtgttaaaatatatataaataaaaatgcaagataagagaattagagtttatatggcccttgaatagttaaagaagttgtaatgttagatctggatgcatgttataatctctaggtgaataactaaaacatgaataaataatgaaaggtagcttaattgaaaaattgtacaaaataaaataggaaataacaaaaatacrtaacccaaaagaaatcaagaaaagagaaaaaagaaaaaatgtagaactgtcaggataaacagaaaatattaaaacacaaatgtaataggaattttcttaattacaaatggatttaaatattcaattaacagagaaagattgacatagtggattaggaaggaaaaaaatcaaactataccctatttacaaaagatccacataaaacataaagacatagacaggttgaaaaataaagtgatgggatatgatatcccatgaaaacactaaccaagacaagttaatataattatactaacatcaaagtagactttaaggcaaaaagtcttattggagataaagaagtgattttaatttaaatataattatagttcaatttactaagaatatgtgacagttttaaatctgacta

SEQ ID NO: 863197 - DNA, 598 bp, Homo sapiens
ggtaccacaatcagatttatctgagactcatattgagaaccacgacctcataatctttgttatggatcatacctcaaaatgttagtagtggaaggtatccgagtcacaaggcaccaaaatatgttaatagtggcaaataggtactggtctgcagcaacctcagttcttgcctcctcagaagaaagtatttgacttcggggcttaaggcagaaggagagactggggaaagttttagagcaggagagaacatttatttaaaaaccttagaacaggaatgaaaggaaggaaagtacacttggaagagagccaagtggccaacttgaaagacaagtgcacagtttgacctttttgacttggggtttcatatgttggcatacttccgggtcttgtgtcacttctctcaactcctcagatcttattgggaagctgcaaatcgccagtttcaggtattttctatctawtatgagactgtctttccctagtgccagctgggatcaattatttccttagagagacagttaacactgcctgaccatcactggatggtcacctgacactactggagtatgtgttgggtggtggggagctcttttatgcc

SEQ ID NO: 863198 - DNA, 633 bp, Homo sapiens
atagacataaataccattaatattttgatgcatacactttgagacaaataaaaatgtatctggtatgtacacaggaaaaatatgtagatacttttaaaataaaatgagatgatactgtacatactctcctgtaatctgcttttttgcacttaatacatcataggcatctctgtawgtcaaaaaatatttgataccattttttaatgtcaggacggctgaattccattgtataactgtggcataacttaacaaattcctttcttagacttttaagttatttcatttttttcataaaagaacataacagcccccatctcataaaattattggaaatattaaatgagatgaagtacttaaattacttgacacagatcctttcacgtaataaatatggagtggaaattagctattttataatttaatttttgttattataatacctcttatctgaaatgctttggaccagagaaatattagatttgatttttttggattttggaatatttgaagactatataccagctaaacattccttatctaaaaaatccaaaatctgaaataatccaatgagcatttcccatgagtatcatgtcggtactcaaaaagtttcaaattttggaacactttgaattt

SEQ ID NO: 863199 - DNA, 637 bp, Homo sapiens
gatggtgacagccagagaataaatgatatactctagtatctccaaccctcttcttttaacttacccttttctgaggggatggctcccagggggccatatctatataatctgattggaaggtggggaggggtaagagggaggtctaaagctacatttgtcaaaactaagaaaatgttccctgtgcacatccaaggatggagagaggcaagtggagactaaaggagcagctcagcctttcattttmtaccactggctgcttctgaaatcatatctccccaacccgcacagtgcagaacactctggtgtgcaatcgtcagagtatcacttcttggtcggacactggtcagacaccttaactggaatcaaattacctttcagtgaatgcagaatcgatttcattttctcaggcccactcctgaccttgtgatctgcttaccttggcctcccaaagtgctgggattacaggcgtgagctaccacgcctggccgagacagggtctcattcttttgcccaggctgcagtgtagtggtgtgatcacagctcactgaaatctcggagggtttccttgtacttccttttgctcatgtcctactttcaaaggcccagcttatgccccacctcttctaggaaaccttcc

SEQ ID NO: 863200 - DNA, 564 bp, Homo sapiens
ttacattaggactccaaggacactgacatatggatgtacttggtggtccctttaaatctaccaatggatacaacctaaaagctgacctaggccaagtccacttaacccccacaaaataaagttgattcattcagaagcaaaatcaatttcatttgattacactcycagagctgagtgtccagaaaaatgcttgtgcttgaaagaattgaccaaatgttggatttggcacagttggtggcaaatccagttttatctttctcctctatgcgtgaatagggggaaagaaagatttgtctgtccttttataaagagtttgaaagcaaaatgaggctggctatttatgcttggaatcttgcttggttcagagatttagaattagttttgtggtgtttgacagcttatacatctctgtctaagcttgtggtaactgaagttgcccagtgggaggaaggttaagttgtctttttgaacagcttccagtcatccttctttgcagacccagaggcagctctggtggttcaaaaagaacaaacaatttcttcccccaggaggaagcactgcttg

SEQ ID NO: 863201 - DNA, 597 bp, Homo sapiens
attcaggagacccatctcccatataaagacacacataggctcaaaataaagggatggaggaagatttacgaagcaaatggaaagcaaaacaaaacaaaaaaacaacaaaaaacaacaaaaaacaaaaacaacaaaaaaagcaggggttgcaatcctagtctctgacaaaatagattttaaatgaacaaagatcaaaaaagacaaagaagggcattacataatggtaaagggatcaatgcaacaagaagagctaactatcctaaatatatatgcacccaatacaggagcacccagttttataaagcaagttcttagagacctacaaaragacttagactcccacacaataatagtgggagactttaacactccactgtcaatattagacagatgaatgggacagaaaattaacaatgatattcaggactttaactcagttctggacaaaacagaactaatagacatgaacagaactctccaccccaaatcaacagaacatacatccttctcagcaccacattgcacttattctaaaatttaccacataattggaagttaaacactcctaagcaaatgtaaaggaatggatatcataac

SEQ ID NO: 863202 - DNA, 613 bp, Homo sapiens
ggttatgattggtgtaatttctattagggcagggatcttgcctgtttttattcactattacattcctagaacttaacataccatttcttgcatcaattcctagactttgcttttcttggaaacgccaatccttaggtaagtttttcagaaaagaagaagccccaaccgtctaaactgtcccgtttgggcactgggctgtgggtaggaggtgagataacatttggggtgtccattgctttgtgagaaaatggctgtgagatagaacttgggtttgtgttatttcagaatcctattgccgtcctttatccatcctttygagcttcaaaggattgatgacatgattctattctgctttacatcagtttcctgtaggcttatataacttccctccaaaccctacctcactactggacaagaagttctttctcaacagaaattaggtcttcccttatttttgctatggtaagccttgttcacagagaaatttaataacatatgaggttaaatcaaatctggaaacattgataggaaaatgggttcatgggagagcggagtttggcccattagtatcttccctaggattgccaggataacatagtgataatttaccctg

SEQ ID NO: 863203 - DNA, 566 bp, Homo sapiens
tgttagaagagctcagaggagaccagcaggggatagctcctctctgtagggaggtcatcccatggagtgtccagctctcagcagagagggtgccctggagagggtcactcctctctgcagctggtagtcccgacatatctgcaggtccctgaagctctcaacagagagagtagctcctctctgcagctgatygtcctgtcccatcaactctctctgtactccccaccctctgccctcctctggctgagcccagggcttttatggacctcagaggggaagacgtgcatgccaattggtccatgggtggccatgggtgccagaagaggcaccgagtccccactccactctgcaagactggcagcctagcccccaggcttcaggccctccctggcctgaaggaggggccttacagggacctgcccccttccacccaggaagctgtctgcctcctgctgccattcatggccctggggctcagccccaacccctctcctagatcagggcaggcccccggagaggagagaggccaggcagcagtggcagacacccccagcctccagggaagt

SEQ ID NO: 863204 - DNA, 549 bp, Homo sapiens
gatcaatatgctggttctgggcaattatcctgcaaattctgccaggtaatgaaagtgagtagggtgcccataaccctgaggtttctttgtttgggaaataaaaccaaggaacttcataaatccccaaatatcttggcaagtaaaattttagatgaaaattatctactataccacacttgtgggaactgctatactcactctactatttgcaayagggttatacagagtagcaccttctaactgaaatattggacagagaacttatgtcttgtattaatatttggaccctgtatactcaatactataacttgaattgtttcctctcacctagaagcaatcaaactccaaatagtgctgcaaactaaaccacacaggaacacacctttcttccaaggacccttagatcaaccccaggagaagccctagctgctgttccccattcgatgccccttctcagcaggaaatagccagaaagagtcatcacccaaaaccccttaagagcagttatggtgacatctccacatggggggatgttataggagtttatta

SEQ ID NO: 863205 - DNA, 549 bp, Homo sapiens
gatcaatatgctggttctgggcaattatcctgcaaattctgccaggtaatgaaagtgagtagggtgcccataaccctgaggtttctttgtttgggaaataaaaccaaggaacttcataaatccccaaatatcttggcaagtaaaattttagatgaaaattatctactataccacacttgtgggaactgctatactcactctactatttgcaatagggttatacagagtagcaccttctaactgaaatattggacagagaacttatgtcttgtattaatatttggaccctgtatactcaatactataacttgaattgtttcctctcacctagaagcaatcaaactccaaatagtgctgcaaactaaaccacacakgaacacacctttcttccaaggacccttagatcaaccccaggagaagccctagctgctgttccccattcgatgccccttctcagcaggaaatagccagaaagagtcatcacccaaaaccccttaagagcagttatggtgacatctccacatggggggatgttataggagtttatta

SEQ ID NO: 863206 - DNA, 549 bp, Homo sapiens
gatcaatatgctggttctgggcaattatcctgcaaattctgccaggtaatgaaagtgagtagggtgcccataaccctgaggtttctttgtttgggaaataaaaccaaggaacttcataaatccccaaatatcttggcaagtaaaattttagatgaaaattatctactataccacacttgtgggaactgctatactcactctactatttgcaatagggttatacagagtagcaccttctaactgaaatattggacagagaacttatgtcttgtattaatatttggaccctgtatactcaatactataacttgaattgtttcctctcacctagaagcaatcaaactccaaatagtgctgcaaactaaaccacacaggracacacctttcttccaaggacccttagatcaaccccaggagaagccctagctgctgttccccattcgatgccccttctcagcaggaaatagccagaaagagtcatcacccaaaaccccttaagagcagttatggtgacatctccacatggggggatgttataggagtttatta

SEQ ID NO: 863207 - DNA, 655 bp, Homo sapiens
tctccaatgaatgcaaatgaaaaggggaatatcccccagggtagcattacagtaaatgaatacattcacattaacaagacagtgttgggatacttttatttgaaaggatataactccttacttatcctttaagaaagcatgtgtccgacaaaaaatgctatagcagacyaagggaggtaattttaaaagagtactatctaccagataataaaagtgaagaaaggttttcaaatgactgttgccaaggagaaaactgaaaaagctgggaccaagagttccagtgcaggactgttcttgcaaattctgaccacattgtagctactttgcactattattccccaaatggaaaaggcacactataccaaataatcaaagagagaagtaatagaagggctaagcaaagccctacaaggactattcaccaatggaaagacaaacactcaccatattggactaaatatctatggactagatatagtccttaggcatcaaagcaggaagatgctacaaccccataatatgtggagctggctggacccttgttttcctgggtcacctgaacagattgtactgtaatggtacctcaggaactagataagatatattccagtgtttgctttgattctgtaattttatgtgcttaaggattgttaag

SEQ ID NO: 863208 - DNA, 655 bp, Homo sapiens
tctccaatgaatgcaaatgaaaaggggaatatcccccagggtagcattacagtaaatgaatacattcacattaacaagacagtgttgggatacttttatttgaaaggatataactccttacttatcctttaagaaagcatgtgtccgacaaaaaatgctatagcagactaagggaggtaattttaaaagagtactatctaccagataataaaagtgmagaaaggttttcaaatgactgttgccaaggagaaaactgaaaaagctgggaccaagagttccagtgcaggactgttcttgcaaattctgaccacattgtagctactttgcactattattccccaaatggaaaaggcacactataccaaataatcaaagagagaagtaatagaagggctaagcaaagccctacaaggactattcaccaatggaaagacaaacactcaccatattggactaaatatctatggactagatatagtccttaggcatcaaagcaggaagatgctacaaccccataatatgtggagctggctggacccttgttttcctgggtcacctgaacagattgtactgtaatggtacctcaggaactagataagatatattccagtgtttgctttgattctgtaattttatgtgcttaaggattgttaag

SEQ ID NO: 863209 - DNA, 654 bp, Homo sapiens
ccacactgaaagtgcttctcttctaatagaagaaatattatttatggctttgaggtacagagtccaaaatgactaggccaggtgggcagggagacaaagctttatgtgtatatttacaaacattaaagtagatgaaaagaatgtagcaatacataattgggattaaggtttctgactttcaagaatatttctgcttggcaacatgcagtgtggctcatgcctataatcagcactctggggaggctgaggcgggaggatggcatgagcccagtttgagaccagcctgggcaacatagcgagmccctgtctctaccagaaatttaaaaaatgagtgtggtggtgtgtgcttctactctttatctacttgggtgctgaggcaagagggtaacttgagcccaggaggtcaaagctgcagtgagccgtgattgtgccactccagcctgggtgacgagtgagaccttgtctcaaaagcaaaacaaaaaagaatattgctgcttgtttgcccatgaggtatatttctttcattttatgaaaagcattttgacaacacgttaacatttaataaactttagattaaaatatatagtgcaagcaacatgccatttcaaatccgtagacttgtttctttgatactcttgctgtaggtcgccgtga

SEQ ID NO: 863210 - DNA, 654 bp, Homo sapiens
ccacactgaaagtgcttctcttctaatagaagaaatattatttatggctttgaggtacagagtccaaaatgactaggccaggtgggcagggagacaaagctttatgtgtatatttacaaacattaaagtagatgaaaagaatgtagcaatacataattgggattaaggtttctgactttcaagaatatttctgcttggcaacatgcagtgtggctcatgcctataatcagcactctggggaggctgaggcgggaggatggcatgagcccagtttgagaccagcctgggcaacatagcgagaccctgtctctaccagaaatttaaaaaatgagtgtggtggtgtgtgcttctactctttatctacttgggtgctgaggcaagagggtaacttgagcccaggaggtcaaagctgcagtgagccgygattgtgccactccagcctgggtgacgagtgagaccttgtctcaaaagcaaaacaaaaaagaatattgctgcttgtttgcccatgaggtatatttctttcattttatgaaaagcattttgacaacacgttaacatttaataaactttagattaaaatatatagtgcaagcaacatgccatttcaaatccgtagacttgtttctttgatactcttgctgtaggtcgccgtga

SEQ ID NO: 863211 - DNA, 659 bp, Homo sapiens
aatcagcagccagcataatgaaatccaattcatatgttaggctgttgtggttctaaaaatatttcacatccccctgaggggctaaggaaattggaggaatcaaggtattaccgcaaacctgtcatttgcagaaaagttcttcaatcatttttggaggtggtagatttgttcttaagaaaacaaaaatagatcagctctccaaaatgaggctgcstgtgagatcgttccactgaacctttactcagatgccaggccctgcgtgcaagtctaatgatccctcacttcagatatatatgaattattaaggtcagttaattaacacatttttcttctgctgaagtaattagatgaatagagctcttgccctctttttggctttcctggcagttgctcagggctgaatagaggcagtaaacatattgccaaacagatgctaaccagagaagtaatttttcagtttccatttgatttctgaagtgttatcctgcaactgaaataagctcctacttggggatggtaggggagggcaatgcggaaaaagagagaatgaggtgaagaatgggcaacaagcccccacacaaatctgcctgagagcctctgctagatacccaatgttcatgtgtcattccacctaatttttttaatacttccttcacaac

SEQ ID NO: 863212 - DNA, 695 bp, Homo sapiens
tagtagctgtggaggaagatgcagaatcagaagatgaggtgggggacgtgaaactcttaggtatatctggaaagtgatctgctcctgcaggtggtagcagggttccatggaaaaaagtaaaacctgctgtgatgatgatgatgatgatgatgatgatgatgaagatgacgaggaaactgaagaaaaaytccggtgaaaaaatctatataagatataccagccaaaagtgcacaaaagtgaagccagaatggaaaagacttaaaaccactaacacccagatcaaaaggtcaagaatccttcaaaaaacaggaaaaaagtccgagtgcagtggatcacgcctgtaataccagcactttgggaggccgagttgggcagatcatgaggtcaggagattgagaccatcctggctaacacagcaaaaccctgtctctattaaaaaatacaaaaaagtagccaggtgtggtggtgggcacctgtagtctcagctacttgggaggctgaggcgggagaatggcgtgaacccgggaggcggagcttgcagtgagccgagatcgcatcactgcactccagtctgggtgacagagccagactccatctcaaaaacaaaacaaaacaaaacaaaacaaaacaaaacaaaaaaacaggaaaaaatctcctgaaacacaaaaaggatctagtcctgtagaaaacattaa

SEQ ID NO: 863213 - DNA, 695 bp, Homo sapiens
tagtagctgtggaggaagatgcagaatcagaagatgaggtgggggacgtgaaactcttaggtatatctggaaagtgatctgctcctgcaggtggtagcagggttccatggaaaaaagtaaaacctgctgtgatgatgatgatgatgatgatgatgatgatgaagatgacgaggaaactgaagaaaaactccrgtgaaaaaatctatataagatataccagccaaaagtgcacaaaagtgaagccagaatggaaaagacttaaaaccactaacacccagatcaaaaggtcaagaatccttcaaaaaacaggaaaaaagtccgagtgcagtggatcacgcctgtaataccagcactttgggaggccgagttgggcagatcatgaggtcaggagattgagaccatcctggctaacacagcaaaaccctgtctctattaaaaaatacaaaaaagtagccaggtgtggtggtgggcacctgtagtctcagctacttgggaggctgaggcgggagaatggcgtgaacccgggaggcggagcttgcagtgagccgagatcgcatcactgcactccagtctgggtgacagagccagactccatctcaaaaacaaaacaaaacaaaacaaaacaaaacaaaacaaaaaaacaggaaaaaatctcctgaaacacaaaaaggatctagtcctgtagaaaacattaa

SEQ ID NO: 863214 - DNA, 548 bp, Homo sapiens
tccctctgccattctctcctacatctccctgattccagaaggaggcaggtccaacttcatgcccaggctgctgtatccctctgctctgatgagctccacattccctggaagtgagaagggatgattaactccttcatattctgttacacaggccagaggagtattgtttttcatgctctgtacctgactgaaaatttagtgaaagaaatcttttatttttcatttcgtgtattccrggctcttttgctgtgactcaggcaaacaactgtccctaaatttccttttccttcctgtactgacctagcgctcttggaccaagtttgtataactttattctcctttcttttaggaagacttttaagaagtggcttcttattcctcatgcaaagagaactgggtaagttctgccccagtggccttccctgttttcttcctgtagtgtatccaacctcttgcttcttatgcatcctgcctcccacattggcatacacttttatgtttgtgtatgtacatgtgtgtgtttatatataagttatatgtctacttat

SEQ ID NO: 863215 - DNA, 612 bp, Homo sapiens
taaatcagccgtgagaaccatgttcagcacgtggaggagcggaacagagaagagggaatgagaggagatgggagatctggaaggcctttgcgctgaaatcattagtctaaggtgataggaggtctagagaggattttaactcttagtttgcaaaaggcatttcatatactctggaagtgttgttactcccatgttgaggaaccaagatatctagcaaagcaaagtcttggtcttatagttgctaagtcagaatgttttacatgctggttacccatggttattatctgtggctcaacaacaacccagactgagactgagcctatagccaggtaatttgtggggggaaaatgtcaggatttagactgtattaaaagaagataatatacaaaatccttgcattagtcagatagttgttaggttatattacatctattttcagtcaaagcacttgagaaaaatagggtagaargagaaaaaagtttggaaaagagactaaaaaggttaaaggatgtaacgtacagcaagtcctcattaactatagatccatgtccttatttctattccaaatataccaagtagagggatctcatagactttgtttctcttgagaca

SEQ ID NO: 863216 - DNA, 517 bp, Homo sapiens
tgttttcttagcctacaagatctccagtaccagctcttcccattgtagtgcataccttcccatctacaactctttataaggactgaaaatatggaaagcaagatgtattttaagtggaaaattcaaatgtgaactaagggctagaagaagacatgtattgggtaagggatgagggatcagatcagttacgggaggaactgagttgactggcatcattacagtgaaggatgataagaatatggcacaaagtagggaattttctatwtattaactatgaatgactattaattatactccaggagtgaatacttaatgtttaaatattatatccagagagtctatgaccatttgtgattctgaagacataaaaaactggttcaataatgcaatgttacttctgaggttcaacaagatagttaattttaaataggtcaaatatcagtgagaaaatacacaacatgtactgagtataaaagtgcttaataagtgagtcctggcacttaataatacaatttgt

SEQ ID NO: 863217 - DNA, 630 bp, Homo sapiens
ggcagagtagccaggaccagacatttgataaaccctggctactttaaaaattctaaattatctagatgtttacatataaaatactaacagaaattatctatttcccagtctatatacatttttatgtagtcctaaggctagtcttcagctaagattgtaccagcccttgacagaactattctaatatgtaacagaattgagaagtcagatatataaagtcattatgaaaatatctatttgtacaaaagagaagattatgtccattacagggaaaggggaaagaaatgtttcatatttctctgcaatttcttccctttatgttttactagtataaaggcaaaaattttgcaattaatatcaagatcctggatggccgagtatatgagtccttaagatattctgtaactctctagagcaacagcctttcaacactccyggtacaaaaactgtagctaatctttgggtgggagacgaaagtaaaatcatttaggtggtctctgggaggcagttatattgctgttccgagtgtccaataagctagaagtagtaaatggggtatcctgatcacttctcagagcttctaccatttgatcatcttctgtttcgtccaaatatgtttttcgtcattcc

SEQ ID NO: 863218 - DNA, 631 bp, Homo sapiens
atcatgagaaaaagcaaggctgcctcctgccaaatataacttatttattagatgtagaaaaagaaaagaaccttcaggagttcacagacaaacagagattgctgggtccctgagaaagatattctgtaatctatttcataggcaaaaccccaaatggatatgctggatccatgagcagttctttgcttcctaagtagatcccaaatagaaccaagagagaagacatgactttctgttggttccagacaggcctaaaatgttagattcacagtaatttcctcactccattgtgatgctgaagccaacttgttcctgtgataaggtagattctggcaatttgagttattctatcaggaatatatgaggtgatatattcacacacatgaaaaggaaaatgttactgagtgaaaaatacttctatttttaactaatttaaaacattttagtgttcattgtttgaataatgaaaggcctgtgtatatctacatttttaataaamttatctgaaccaagagattaattcagattatagaataaatcaaacttttttaaaaaaatgtattattctgctaatttgcaaatatcacaaattcatgaatggctgttagagacagaaaaagtaacaggtcag

SEQ ID NO: 863219 - DNA, 620 bp, Homo sapiens
tgtaccctaaaacttagagtataataaaaaaaaaaaaaaagatcaaggccccagaaccttgcttctgaaagggagactgctgtggtcaacccttaggaacttcccaaggccaattcttaaaagcagaaacagagaccaccaaatatcacacacttagtcctccacccacagacactgccctcactgtcccatgtgagggcagtagctgccaagtccccagtggaatcctggaagaagtgcaaggaaatagccaaaggaatgttaatatgttaattctcagaggttcagtggctgcctgatggtgaaagaagagaaattgttggsgaggagggggaataggggcagaactcatctctccccacagaaggtcaagaggccacccaccgcccagccccagaagaccacctcaaactctgctgccctccaggaggaggggatgcctcctctgatgtgacgttgtctgctttggccttccaaagctcaatgtcatcaaatgtcctttccctagattcaaaaatatgtccttggggataagagcacaatactgtggttaggaatacatgctagatagtcagaaagccagatgcaaaccctggctccaccacttactatatgggaga

SEQ ID NO: 863220 - DNA, 620 bp, Homo sapiens
tgtaccctaaaacttagagtataataaaaaaaaaaaaaaagatcaaggccccagaaccttgcttctgaaagggagactgctgtggtcaacccttaggaacttcccaaggccaattcttaaaagcagaaacagagaccaccaaatatcacacacttagtcctccacccacagacactgccctcactgtcccatgtgagggcagtagctgccaagtccccagtggaatcctggaagaagtgcaaggaaatagccaaaggaatgttaatatgttaattctcagaggttcagtggctgcctgatggtgaaagaagagaaattgttggggaggagggrgaataggggcagaactcatctctccccacagaaggtcaagaggccacccaccgcccagccccagaagaccacctcaaactctgctgccctccaggaggaggggatgcctcctctgatgtgacgttgtctgctttggccttccaaagctcaatgtcatcaaatgtcctttccctagattcaaaaatatgtccttggggataagagcacaatactgtggttaggaatacatgctagatagtcagaaagccagatgcaaaccctggctccaccacttactatatgggaga

SEQ ID NO: 863221 - DNA, 620 bp, Homo sapiens
tgtaccctaaaacttagagtataataaaaaaaaaaaaaaagatcaaggccccagaaccttgcttctgaaagggagactgctgtggtcaacccttaggaacttcccaaggccaattcttaaaagcagaaacagagaccaccaaatatcacacacttagtcctccacccacagacactgccctcactgtcccatgtgagggcagtagctgccaagtccccagtggaatcctggaagaagtgcaaggaaatagccaaaggaatgttaatatgttaattctcagaggttcagtggctgcctgatggtgaaagaagagaaattgttggggaggagggggaataggggcagaactcatctctccccacagaaggtcaagaggccacccacmgcccagccccagaagaccacctcaaactctgctgccctccaggaggaggggatgcctcctctgatgtgacgttgtctgctttggccttccaaagctcaatgtcatcaaatgtcctttccctagattcaaaaatatgtccttggggataagagcacaatactgtggttaggaatacatgctagatagtcagaaagccagatgcaaaccctggctccaccacttactatatgggaga

SEQ ID NO: 863222 - DNA, 646 bp, Homo sapiens
ggtgagagagtgtcagctggggagacaaagaggtacacaggaagaggtggtacctcttttccctcttgatactttcattaagtataagacacccctagacccacagccaccaacttgtgaccctgtaaatggctaagttggctcatggaggatggtggaacagggagagaaaaagaacctaggtccttaatgagctgcgcaaataacccattctaaagctgtcctacctcaggatttattttccttcctacttaaatcaattgagttgggtttttctgttactcaaagtwgaaaacacatcaaatgaaaaagaagtcgaaatgtaaataaaaacccgatgcattatttgaatggcttcaggcacacagcatgggaggcaaatgctattaatatgggcatcatccccactttccatgtcgagatgcgttttgtacattatttgccaagaaccccaagctggtcagcagttgaagtctcctgactccaacccagtgctgagacatatggtaattttcagttatggagaacatttaattaactaagaccctccatttcctaattgcagtaaataaaaacagtgggcatataacaactgacatgaacaggatgctttaaagctgacaaatgcatgcacatacatcagcat

SEQ ID NO: 863223 - DNA, 418 bp, Homo sapiens
agtaaagtggaatttgcttccatggacctttcacgtacgtattcctttcagatacaactttctgacctaaaatgcaacctatgcatttgacgaaggtctaatttccagaatcgataaggaacttaaacaaatttacaagcaagaaccaaacaactccattacaaagtgggcaaagaacatgaacagacacctttcaaaagaagacatacacatggtcaataagcatatgtaaaaatgctcaayatcactactcactagagaaatgcaagtcaaaaccaccatgagataccatctcacaccagtcagaatgactcttattaaaaaggcaaaaaataacagatgctggtgaagttgcagagaaaagggatcacatatactgctggtgggaatgtaaagtagttcaaccactgtagaaagc

SEQ ID NO: 863224 - DNA, 593 bp, Homo sapiens
caatcagagaatttgttggttccaaattagataagattgtagattttaatctatggaatcagtatctaaagattaaaaacatgacatcacaagatgcgagaatgttagaatgtattattgaaccaacaatgaacaccatttgtaggcttttggctgtagtatgtgagaaaaattatgcattctgtcttcctgacatgctctcttcaggcttcataatgttgttttggtagcagtgtaaagtattctttattattttgtaaatgtgtcctcaaaataacaggtattattttggtataattctagttaagtaaaactctggcagaactgttaagttatagagtaaaagacatttctacaggttggttaaacccytacttatagctcctatatattactcttgtgaatggctgctgataccaagcaaagattttaagggttattaatttaacttcttctgatgtactcaacaacactttctaaaaatcacatgcagtaatttcctcctacttacttcaagcattaagtgaacagatttgtataattttgtatgcataattttattttaatctataatgtaggtgccatcactaagt

SEQ ID NO: 863225 - DNA, 631 bp, Homo sapiens
ttgtagtattttatgatagaaacaactctgtcaaagattgtgttaatcttcttaagcaacaagaattcctattggtcttttccttacacattaaattgaaccaaataatttcaaaagtctcaaaagctgtgaaattattataataattkgaaatgtgtcaaagtgtggagtatttatatgacaatttcatttaagctttcagggcactattgaaacacatttcaaccttaaatggccatccaggcagaggctttagaagtaaattgtttacattgattcacaatcccataagcctttatagtaaactatcctctttgaatttactaccttggttaattcagcagaaaattgctttctatttctgagacccgcttagaaggcttgagcagatttttttttaaaaaaattgttctgcgatgatgatgaagggagacttgagaatccctttgaaaaatagaattgactacagaccgaacagcctgtgtttatggataactgagcttcacacctctcactgaaggtgagaaagtcctattgaagatgacaaagcccttatcacagtgcctggtacaaggtgggtacccaaatgtgtgtccctataagacagcagcaaagaaactgttactcctca

SEQ ID NO: 863226 - DNA, 624 bp, Homo sapiens
aatcccccaatgttcaagtggggccttgtggagggtgattggatcatgggggtggtttctaatggtttagcaccattcctctagtactgtctcatgatagagttctcatgagatccggttgtttaaaagtgtgttgcacttccccctttgtgctctctctcctgctgccatgcgatgacatgcttgcttccccttctgccatgattgtaagtttcctgagacatccccagccatgccttctatacagcctggggaactgagtcaattaaacytcttttctttataaattacccagtctctggtagttctttttacagtgtgagaacagactaacacagatgggtagtctgcaaatattttctcccattctgtgaatagtctcttcactctattgattgtttcctttggtgtgcagaagatttctagcttgatgtgatcccatttgtccatttttgctttgattatatatgcttttcaggttttactcaagaaatctttgtctagaccaatgtcctggagtatcttcccaatgttttcataaaactgacatgaacagcaactgaattgctggactggtttagtcaccagaagtggaagtcttcgtggtgtacctttgaagtattg

SEQ ID NO: 863227 - DNA, 624 bp, Homo sapiens
aatcccccaatgttcaagtggggccttgtggagggtgattggatcatgggggtggtttctaatggtttagcaccattcctctagtactgtctcatgatagagttctcatgagatccggttgtttaaaagtgtgttgcacttccccctttgtgctctctctcctgctgccatgcgatgacatgcttgcttccccttctgccatgattgtaagtttcctgagacatccccagccatgccttctatacagcctggggaactgagtcaattaaacttcttttctttataaattacccagtctctggtagttctttttacagtgtgagaacagactaacacagatgggtagtctgcaaatattttctcccattctgtgaatagtctcttcactctattgattgtttcctttggtgtgcagaagatttctagcttgatgtgatcccatttgtccatttttgctttgattatatatgmttttcaggttttactcaagaaatctttgtctagaccaatgtcctggagtatcttcccaatgttttcataaaactgacatgaacagcaactgaattgctggactggtttagtcaccagaagtggaagtcttcgtggtgtacctttgaagtattg

SEQ ID NO: 863228 - DNA, 616 bp, Homo sapiens
agtgacacagaaaagtctccaaagggattatgatggtgagagaaggcagtaggaagcaattatcataataaagcatttagcatgatgaagtatccatcagaaacacaaacacacacagcaacactgtacacttctctaaatagttgcttgtatgagtacatgtgtatttaacacattaaaaagcctaaaaatatacctgttaaatgataatctgggataaaaagaggtattacatgtagtmgtcaaaaagcatttaaccttaacctataatatttcattttttatcagtgacaatgcattctacattgcttgtgtaattctataaatattactatacaaaccagtgctaaaatgaattataatatgggaataagcatgcatatggggtctgtatatgcatgctaggaggccacttagtggaatgtagtgggtgcctcttatttttgtacacagcatccctttctccttttccagttaataggacaattaaattcctttttatagttttattttgcataaactaattcaaattgggtttgtgtcatttgtaactgaacaagtccttattttctaacacattttccgttttgttgtcattgtgttttaaaaatgtaaa

SEQ ID NO: 863229 - DNA, 569 bp, Homo sapiens
taatcccatcattcagatagagagcatagtaccaaacaggtagtttttcagcccacagtcccctccttctctctccactctggtagtccccagtgtcagttgtttctatctttacatctatttgtactaaatgcttagctcccacttagaagtgagagcacatggtatttgattttctgttcctgcattaatttgcttagcataatggtctccaactgcatccatgttgctgcaaaaaacatgatttctctttttttatggctgtataatagtccatggtgtatacataccacattttcttaatctaatccaccattcttgggtacctaggttgatttcatgtcttgttattgtaactagcactgcaatgaacataccaagtgcatgtatctctttkgtagaatgatttgttttcctttgggtagataccctgtaatgggatttctgggttgaatggtagttctgctttaagtactttgagaaatctccaaactgctacccacagtggtagtaccaatttacactgctaccaactgtgtataagtgttctcctttctttgtagccttcc

SEQ ID NO: 863230 - DNA, 600 bp, Homo sapiens
ctaaagccttgccttctgaaaggtctgtagggcttttcagtttttgatgaaagcccccaaagaataaatctactctgctaatgttgtccttgatgcccaagtcccctaaagctgtttcctctaaggtgctgtccgtggtactgggcactggtgcttctgggcctgtatttgcaagtgaggggccaataagacagaattaacataaattttttgttttgttttgtatttgataaatcacagctcaaaatatgtataatgaatggagcaggaattgaatttggatcttcagaccccawtttctgcagtgccctctctcacccctcctattcaacatagttttggaagtcctggccagagcaatcaggcaagagaaagaaagaaagggcatccaaacaggaagagaggtcaaaccatccttgtttgtagacatgatttcctatctagaaaacctcatagtctccacccaaatgatcctcaagctggtaaacaactttagcaaactttcaggatacaaaaccaatgtgcaaaaatcactagaactcctatatgccaacaacacgtaagtatatggccaaatcagaagttcaattccattcacaa

SEQ ID NO: 863231 - DNA, 598 bp, Homo sapiens
acctcccaacacatgttggcttagagcaatcttttcttctgatcttgctcagttaactggactcatgtgggtggtagatcatgtagtgaaagtgacgttttctgaaggatatttcaggctgtgattccagaggatgcttcactcatgtctgactcaacactagggctgggcgaacacctggggctggctggttatttcctttcctacctcacctccaaattcatgccttgaattccctcaaatcatgagagtctcctgtttcttggackgaatgatgataggcttccaccaaagcaagcctcccaaaaggctcaggaagaaggtgcaaggtatcataggacctagctttgaaaggcagacagtgtcacttctatgacattatattgatcaaagtgagccatacacacagcccaaatcaaaggaagggaacttcataagctgtggttattgtgacatgtggtcatgaaggagcatccttggcaattatttccactcggtcctcactggcttacaagcttctcatatatcaaggataccaatcctgtaaggaaccactgaaggcaacacgtttacaggaacaggctcagattgaagtcta

SEQ ID NO: 863232 - DNA, 613 bp, Homo sapiens
atgggaaaagtttcataacaaagatgccaaaagcaatcacaagaaaagcaaaaattgacaaatggatctatttaaactaaagagcttctgcacagcaacggaaactatcaacagagtcaacagacaacctacagaattggagaaaatatttgcaaattatgtatctgaaaaaggtcttatatctagcatctataaggaattgtaattactttacaagaaaagaacaaacaactgcataaaaaagtgggcaaaggggccgggcgtggtggctcacgcctgyaatcccagcgctttatgaggtggaggagagcggatgatcacgaggtcaggagattgagaccattccggctaacatggtgaaacccttctctactgaaaatacaaaaaattagccgggtgtggtggcacgcacctgtagtcccagctactcgacaggctgaggaaggagaatctcttgaacccgaaggcagttgttgcagtgatctgagatcgcgccactacactccagcctgggcgacagagcgagactcgatctcaaaataaaagtaggcaaagggctgaatgcggtggctcatgcttgtaatttcagcactttaagtggctgaggcaggtg

SEQ ID NO: 863233 - DNA, 572 bp, Homo sapiens
tcctagaagtggaatttctaggtcaaaagctataaatatttttaagccttttaattcttttgccacttgggcatgtaaattggtgtgtcatttctggaaagcagtttggcaatgcctaagtaatccctccctaagatctcacttgttctaagtacaatcatttgtaaaggaaaacaagtaaacaaaaatgctgcatgaattttayggttttttaaaaaaagatatctcaatgtattaggtttgcgtgcacatgacaggttacaaaaattcaacattttttacatttattttcctttcgtatttctattttaatatttttatttctatcttggcccatttgtctgttttttctctcatcattttatcttttcctctccaattttatttccaccgtacatattttagatggtaaaaatttaagagcacaatttctagaatcagacggtccaggttcacaccgtaattcttccactttctggctgtgtgacctttcgcaagttactaaaactccctgtgcctcaacttccacattgctaaaatggagtcactaagagtatctacatcacgttctt

SEQ ID NO: 863234 - DNA, 557 bp, Homo sapiens
tagctctccctctaccagctatttccagcactcattaacttactccttctaacttactccttacttctccacccctcccctctcacctactgtcttccaggcaaatatgtgccatatatgggccagatacacatttcagaaaaagtctacttcagttttagagagatgtcattagtatatgtaacttaccatgttacaatagacatcatcttagatacattrtttaatttgaaatgacatcaagttacataaataccttttggtcactttttgtgcaagccattagctccagaaagctaatttcttcatttaaaaaaatcctcattaaaattttgaatacattgtttttttgaaaatgctgaactgaattgctccttggagaaacaaatttgagttaattattttttctttatcttctgcaccttatatgcattttggagggcttggagtagatagtaaaatacagagtccttaaattaaacagaagacaaaaaggaaggaatgagagggagaaaaaaaaagggagggagagagaagggaaaggaatagagaaaggc

SEQ ID NO: 863235 - DNA, 615 bp, Homo sapiens
gcttgtgagtgtcctgcatacagtctgatttgggtggttgttttctttgtggaactacttagaggtcatatgacatttgcctgtggatagttcaaattggctctattttcttaggtccattttgcccttattcactgagaaatatgtggtctctcatataagattgtttccattgaaattctgccaataccttttattcawcttgtaagcatggaaaagtattatgaacttatttaatttttaatttatttaaaaatttttatagtaacattagcacctaccttctaaagttgtttgagaattaaaggataatttctgtaagacaattaccaaagttccaatatgtaatgcttattcaataaataataactatcattattattacatcataataggtgcctatatttctaaattaacaatcttttgtactattgatgtgacaatatgtacattaagtggggtgaagaattaagtcattctcttcataatcaggtgataacaaccttctcctttattgagaatcaagcatctcagagcgagcgtgaatggatattagagtttctgcctcagtgttctcaacagcttctactggtaaagcaagttacagctagtaac

SEQ ID NO: 863236 - DNA, 615 bp, Homo sapiens
gcttgtgagtgtcctgcatacagtctgatttgggtggttgttttctttgtggaactacttagaggtcatatgacatttgcctgtggatagttcaaattggctctattttcttaggtccattttgcccttattcactgagaaatatgtggtctctcatataagattgtttccattgaaattctgccaataccttttattcaacttgtaagcatggaaaagtattatgaacttatttaatttttaatttatttaaaaatttttatagtaacattagcacctaccttctaaagttgtttgagaattaaaggataatttctgtaagacaattaccaaagttccaatatgtaatgcttattcaataaataataactatcattattattacaycataataggtgcctatatttctaaattaacaatcttttgtactattgatgtgacaatatgtacattaagtggggtgaagaattaagtcattctcttcataatcaggtgataacaaccttctcctttattgagaatcaagcatctcagagcgagcgtgaatggatattagagtttctgcctcagtgttctcaacagcttctactggtaaagcaagttacagctagtaac

SEQ ID NO: 863237 - DNA, 633 bp, Homo sapiens
attatttaatttcatttgataattgtgtacctgacacacaaggagcacagagtaaatggagacaattattgttagctccattttagagaggagagaaactgatagagagagtgatagggggttaatagctaagctctcagtaatataccaagtggtgcaattccaaagatacatgttttgctctcaagttaagaaaacacaagccaattgcaattttgtgatgaggaagatgggatacagttgcaatatcaaagctgcctctgacaactaataccagccctgacctgcttctgccatggttttctgacctgcaatatttaatcttcagctttcagacatccacattccaccctggaccttgcctgtctggtaagcccaatctctgcaggtcagccatgcagctgaggtgagggaaggtatgttgggatgggctggcatgaggagtcatgggggtcgagaagaaagttatggcaagagacattcttttgtgygtgcatagtttaacagagacgaataatgttcattttgatctttattaagaggtggcctcttaataggccacccccttaataggcctcagaatatctgctttaaagtggctttttcctgatggtttcttctaccattgttaca

SEQ ID NO: 863238 - DNA, 630 bp, Homo sapiens
ctgtgtactttggatccacgcagtaggaagcttcatgcttgctgctttcctcaggatgccctgtgacatcacccacactggattgtttttccttttgtgttaaaacactttggcttcattccaaagggtgtctgaagacaacaagccttccctccagtctacccactggccacgtaatcccacaactggaaacattcttctgcatgaaaaggcatcactcaattagctctcactcagagcacccctcccaygtctcagcttcctttgacctctttccttgccgatgttttagattcttaatggtttggtctggtggaggtctgctacagtcacttgatacttgtacttgtgtcccccagtgtgtatatcaagggctgatattataaggagagtgagtagatgcatctcaggaaaaattaaaaatcacttcagatgctgaaatagttcactacaaccctggtgtctggagttgcagggaataggatataatctcctcaattctagaaaacatggttcaagctgtatacaaaagatatacacatctgagggtatgagtgtgacattaaccattatgcaccactcacaccagttacagagatctgggttgcaatgctagtttttttgcttagc

SEQ ID NO: 863239 - DNA, 657 bp, Homo sapiens
atattgggggagtcacatttctagtaattcaattatagccttaacaaatttaattaaacacttttacacaaacagacacttttcaaaagaagacatacaagcagtcaacaaacatgaaaaaatgctcactatcactaagcatcagagaaacgcaaatctaaaccacaatgagataccatctcacaccagtgagaatagccattattaataactttaaaaacaacagatgttagcgaggctgcggagaaaagggagtgcttatacagtgttggtgggaatgtaaattagttcagccaccgtggaaagcagtttggagatttctcaaagaacttaaaacagaactactattcaaaccaacaatcctgttactgggtatatattcaaaagaaaacaaatcattcaccaaaagyctcatgcactcacatgttgataaaggcaccattcacaatagcaaaggcatagaatcaacctaagtgcccatcaatggtggactggataaagaaaatgtggtcaatatacactatggaatactacacagccataaaaaagaacaaaataatgtcctttgcagcaacatttacgtagctgaaggccattatcctaagtgaattaacacaggagcagaaaaccaaatactgcatgttctcacttaaaagt

SEQ ID NO: 863240 - DNA, 646 bp, Homo sapiens
ttcacaaaccatacaattcacccatttaaagtgtgcaattcaaagcattttaggatattcataaggctatgtgaccatcaccatatgctaattttcaaaactcttgttttgaaaccctacatccactagccattactttccatggcatctcaccaccttcccaggcctagtcagccatcatttactttctgtctctaaatatttgcctattctcggcygggcgtggtggctcacgcctgtaatcccagcactttgggaggagaggcaggtggatcatgaggtcaggagatcgagaccatcctggctaacacggtgaaaccctgtctctactaaaaatacaaaaaattagctgggcatggtggcgggtgcctgtagtcccagctactggggaggctgaggcaggagaatggcatgaacccgggaggcggaggttgcagtgagccaagatcacaccactgcactccagcctgggtgacagagtgagactccatctcaaaaaaaaaaaaattgcctattctggacatttcatagaaatgaaatcatatacaatatgctttcttgtgatgagcttctttcatttggcataatattttcaaggttcaaacatgtagtagcatgtatcagaactacattctttcttatggat

SEQ ID NO: 863241 - DNA, 646 bp, Homo sapiens
ttcacaaaccatacaattcacccatttaaagtgtgcaattcaaagcattttaggatattcataaggctatgtgaccatcaccatatgctaattttcaaaactcttgttttgaaaccctacatccactagccattactttccatggcatctcaccaccttcccaggcctagtcagccatcatttactttctgtctctaaatatttgcctattctcggctgggcgtggtggctcaygcctgtaatcccagcactttgggaggagaggcaggtggatcatgaggtcaggagatcgagaccatcctggctaacacggtgaaaccctgtctctactaaaaatacaaaaaattagctgggcatggtggcgggtgcctgtagtcccagctactggggaggctgaggcaggagaatggcatgaacccgggaggcggaggttgcagtgagccaagatcacaccactgcactccagcctgggtgacagagtgagactccatctcaaaaaaaaaaaaattgcctattctggacatttcatagaaatgaaatcatatacaatatgctttcttgtgatgagcttctttcatttggcataatattttcaaggttcaaacatgtagtagcatgtatcagaactacattctttcttatggat

SEQ ID NO: 863242 - DNA, 647 bp, Homo sapiens
tattccacaagttttagataattcttttgacttctttctaggtaagctaaagcttccatttctcatcttgtgtcagctatgtctttgtttttgcatagtcaagaatgaatgcatattcattctactctgttactatcattaatttcatgcaygcctagtttatgggttaatttttaagttgaaagccaataaacagcacatatattctaatatatgtaaatatatcattcactgcaaaggcaagtaatgtctaggattacacttccttctttttgatcaaatgtcataatctttagggggtctctaaaagaagaatgttcttagcacagaggttcaaaacatgtcaaatttcagtttgctttataggtgatgataatttttgtagcttttagttttctttggagttgcaagttgccttttatttatctcaggagaagaagtaaatgcttcacttatcattgtcactacctttttattcgttctctatattggaaagactgcactttattcttcttgaagatactctccctggagctcactgacatcttcttctaatataaataaattgtatttcagccttctaggaagctatcatcctgggacctattttctttatattctaaattagttctactgtctttatatcc

SEQ ID NO: 863243 - DNA, 647 bp, Homo sapiens
tattccacaagttttagataattcttttgacttctttctaggtaagctaaagcttccatttctcatcttgtgtcagctatgtctttgtttttgcatagtcaagaatgaatgcatattcattctactctgttactatcattaatttcatgcatgcctagtttatgggttaatttttaagttgaaagccaataaacagcacatatattctaatatatgtaaatatatcattcactgcaaaggcaagtaatgtctaggattayacttccttctttttgatcaaatgtcataatctttagggggtctctaaaagaagaatgttcttagcacagaggttcaaaacatgtcaaatttcagtttgctttataggtgatgataatttttgtagcttttagttttctttggagttgcaagttgccttttatttatctcaggagaagaagtaaatgcttcacttatcattgtcactacctttttattcgttctctatattggaaagactgcactttattcttcttgaagatactctccctggagctcactgacatcttcttctaatataaataaattgtatttcagccttctaggaagctatcatcctgggacctattttctttatattctaaattagttctactgtctttatatcc

SEQ ID NO: 863244 - DNA, 647 bp, Homo sapiens
tattccacaagttttagataattcttttgacttctttctaggtaagctaaagcttccatttctcatcttgtgtcagctatgtctttgtttttgcatagtcaagaatgaatgcatattcattctactctgttactatcattaatttcatgcatgcctagtttatgggttaatttttaagttgaaagccaataaacagcacatatattctaatatatgtaaatatatcattcactgcaaaggcaagtaatgtctaggattacrcttccttctttttgatcaaatgtcataatctttagggggtctctaaaagaagaatgttcttagcacagaggttcaaaacatgtcaaatttcagtttgctttataggtgatgataatttttgtagcttttagttttctttggagttgcaagttgccttttatttatctcaggagaagaagtaaatgcttcacttatcattgtcactacctttttattcgttctctatattggaaagactgcactttattcttcttgaagatactctccctggagctcactgacatcttcttctaatataaataaattgtatttcagccttctaggaagctatcatcctgggacctattttctttatattctaaattagttctactgtctttatatcc

SEQ ID NO: 863245 - DNA, 647 bp, Homo sapiens
tattccacaagttttagataattcttttgacttctttctaggtaagctaaagcttccatttctcatcttgtgtcagctatgtctttgtttttgcatagtcaagaatgaatgcatattcattctactctgttactatcattaatttcatgcatgcctagtttatgggttaatttttaagttgaaagccaataaacagcacatatattctaatatatgtaaatatatcattcactgcaaaggcaagtaatgtctaggattacacttccttctttttgatcaaatgtcataatctttagggggtctctaaaagaagaatgttcttagcacagaggttcaaaacatgtcaaatttcagtttgctttataggtgatgataatttttgtagcttttagttttctttggagttgcaagttgccttttatttatctcrggagaagaagtaaatgcttcacttatcattgtcactacctttttattcgttctctatattggaaagactgcactttattcttcttgaagatactctccctggagctcactgacatcttcttctaatataaataaattgtatttcagccttctaggaagctatcatcctgggacctattttctttatattctaaattagttctactgtctttatatcc

SEQ ID NO: 863246 - DNA, 641 bp, Homo sapiens
agttaagagtgaggatggcatgagtaggtcaagcacagaaaaattttaggacactgaaacaataatgatgaatatgatactataatggtggatacttgtcatatactataatgatacaacatgatactgtatttgtacaatactgtaacggtggatacatacaattatactgcaatgacatatactaaaatggtggatacgtggcattaaactgtaatgatacaatatgatactgtaatggtagatacatgtcattataaatttgtccaaacacatagaatgtacaacgcaaagggcaaaccctacggtaaactayggactctgagtgataatgaggtgaatgcaggtgcatcacttgtaacaaaggtaccgctctggtggggaatgttgatagtggtggaggttgtgcatgtgtcgaggcagaagatataagggtaatctctgtacttgctgctcaatttgctgtgaaactaaaactgccctaaaaaaaaaaaaataaagtatattaagaaaaggcatagagaaaacttctcaacaaattttatgaaaacagaattaacgtgacaccaaatacgttatgagcaaatgacagatcagctttcctcataaacacaaatgcaaaattccttagcaaaatgtta

SEQ ID NO: 863247 - DNA, 675 bp, Homo sapiens
ttgtcaattttatgcattcatgaaatttatttttcttttaacacaggttgattcagatagagttagaaaatccttccccactcagagattatttcccccattttttctcttatttccctgcattttttatagttaaatcattgattcagttggcatttactttagtgtgctgtataagatcaagatctggccaggcgcagtggctcatgcctataatcccagcactttgggaggccgaggmgggtggatcacctgaggtcgggagttcgagaccaagcctgactaacatggtgaaattctatctctactaaaaatacaaaaaaaattagccgggcatggtggcgcatgcctgtaatcccagctactcaggaggctgaggcaggagaatcacttgaacctgcgaggtggaggttgcagtgagccaagatcacaccactgcactccagtctgggcaacaggagcaaaactctatctcaaaaaaaaaaaaaaaaaaaaatcaacatctaaccataattttttcagatcccagttttcctaatgcagtaccatatattgaagttaatcttttcccggttgatttaaggcgtcctgcttatcatgtactaaattccatgaagccattctgctttctcccctttttctctcataaacagtgatagcttgctctttttaaat

SEQ ID NO: 863248 - DNA, 689 bp, Homo sapiens
gtgtgagaaaaaacaatacatttattacatttagactcatgaaattgtaaatattaaaaatttcacttcattcactataacaatggtaacaatgtataacaccaaattagttaaggggaatgtatggaatgagaggaaaagaatagtccaaaggaatttgtgaaaataaaaaaataagataatagaaaatctttacttattttaataaatatgaacmtttattttttcttttaatatttaattcattaaataagatatctattacatgttaatatcagtaatactttataaaaataagtatatatttcaaaacaataaacaatgagaagaatagcaatgttctatacttgtgcaaatctcttttatgtccgacttaatagaagacagctggattgtcatatgtgtacattcaatctgctgcaatatgttgtgttggttgaagtatataaagagaattcaacttcacatagatgtgaggctgaagaaggaagaatcttttagactctctaaaagagtctttgcggcctccaggggtccttggatcacactttaacaattactacactaaaaagtttccagttacaagactgcaaactaaacatgtgtaccaatcttctacatcctacgccaaactgagacaagttacagaaaatacattaaaataaaaatgtatggctgtaccaaaaaaa

SEQ ID NO: 863249 - DNA, 607 bp, Homo sapiens
ggaaccctcggtaccacaatcagatttatctgagactcatattgagaaccacgacctcataatctttgttatggatcatacctcaaaatgttagtagtggaaggtatccgagtcacaaggcaccaaaatatgttaatagtggcaaataggtactggtctgcagcaacctcagttcttgcctcctcagaagaaagtatttgacttcggggcttaaggcagaaggagagactggggaaagttttagagcaggagagaacatttatttaaaaaccttagaacaggaatgaaaggaaggaaagtacacttggaagagagccaagtggccaacttgaaagacaagtgcacagtttgacctttttgacttggggtttcatatgttggcatacttccgggtcttgtgtcacttctctcaactcctcagatcttattgggaagctgcaaatcrccagtttcaggtattttctatctaatatgagactgtctttccctagtgccagctgggatcaattatttccttagagagacagttaacactgcctgaccatcactggatggtcacctgacactactggagtatgtgttgggtggtggggagctcttttatgcc

SEQ ID NO: 863250 - DNA, 609 bp, Homo sapiens
catggtctcatttaatctctgagaatatgatcatcttggtatagcctggtgagtagcatgttctagactagaccctagagtcacctgggtctgggttgaagtcttggttcaaaataggagaaatctgtccctcccatgccacacttttattctgggattgttccactaaataaaaggcaaatttgaaaatgtaagcacgctcacaaaatcagaaattaaattagggcatagaaagctacagtggaaggcaggaacctctgttttcaggaggctgatgtagatggtgttaccacccaggttacacaaagaggaagaattcttccatagaagaygcacactatcaagaaacacacctaccctgtaaggaaaaccaaaactaaaaactattataaataaagattacccacagtacaatgagaatcagtatcttcaaagtgccaaggggaaataattatgaacctacaatttaaaatttatcccagtgatcattcaagtgtgatgacagaggtactctggtactctgaaaccatctaagattcagtcagcttactaaccccagactcacttaaatatcactaaaggatttattctaccaaacaaatgatccca

SEQ ID NO: 863251 - DNA, 649 bp, Homo sapiens
tcccggaacgtaaagtaaaataaaaaaaaatagattttacgtgttaaaatatatataaataaaaatgcaagataagagaattagagtttatatggcccttgaatagttaaagaagttgtaatgttagatctggatgcatgttataatctctaggtgaataactaaaacatgaataaataatgaaaggtagcttaattgaaaaattgtacaaaataaaataggaaataacaaaaatacrtaacccaaaagaaatcaagaaaagagaaaaaagaaaaaatgtagaactgtcaggataaacagaaaatattaaaacacaaatgtaataggaattttcttaattacaaatggatttaaatattcaattaacagagaaagattgacatagtggattaggaaggaaaaaaatcaaactataccctatttacaaaagatccacataaaacataaagacatagacaggttgaaaaataaagtgatgggatatgatatcccatgaaaacactaaccaagacaagttaatataattatactaacatcaaagtagactttaaggcaaaaagtcttattggagataaagaagtgattttaatttaaatataattatagttcaatttactaagaatatgtgacagttttaaatctgactata

SEQ ID NO: 863252 - DNA, 656 bp, Homo sapiens
actctttcctttgttgcttgtgcttttgttgtcatatctaaaaaccagtgtctaattcaaattcataagtatttatcactgcatttttttctaagagcttacagtttttactctaatgtttagattttatgatccagctggagttaatttctatgtatgttgtgagatagggatccagatkcattcttctacctgtagatatgaagttgttccagcatcatttactgaaaaagactattttttcccattttgttatatttacactcatgttaaaaattaagtactttttatagcaacacatcaggaagcacataatgcctaactgcctccctttttgtattaaaattgattctattcaagtgtcagcctgctccatccattaaatgggtccccattagccttttaccgggtggtttgaacattatttcattaggggttgcaaaatgatggtgttccaaatctgtcactcctgaatttttttatgccacaattcttccataatattgagctatttgtaagacacagcactgtgagctttatctcactattgatctccacacctacacatcataatccctcagcatatattggggagtccaaagttcatattcttaacctctctctctgtctctctcatttgttcctgggcattcccc

SEQ ID NO: 863253 - DNA, 586 bp, Homo sapiens
acacaaatatattaaaggaatttaataagagagcatggaaatagactcacacatagataagcaactgatttttgaccaacatgtaaaggcaattcagtggagaaaggatagtcttttaaacaaaatgtgctggaacaactaggtatccatataaaaaaacaaaatwaaaaaacttgcactcataccttccatcatgtaaagaaattaactctaaatgcatcatatatctaaatgtaactcctaaaactctaaaacttcttttaaaaaatggagaaaactgtaacaccgagttatgcaaagaatttttttatataacactaaaaaagattcataaaacaatagcactgataatttggacttcagcaaaatttaaaacgtcccttcaaaagagactattaaaagacaagctataggctgggtgcagtggctcatgcctgtaatcccagcactttgggagaccgaggcaggcagatcacgaggtcaagagatagagaccatcctggccaacatggtgaaaccccatctctactaaaagtacaaaaattagctgggcgtggcaacatgcacctgtagtctcagctacctg

SEQ ID NO: 863254 - DNA, 605 bp, Homo sapiens
tattacagtcagaaaatctatctctctaccactgccccccaactacacacacacacacacacagacacacacacacatacatacacatattcaatgtttatcttcaaattaggtcatttatgaaaaaatggagaaaaatgcttctataagatattcacactgttaactgtaagcagttttcaaaagttaccatcaagcttactctccttttctttgaatacttttggaagagacacaattttccaaactgtgtttgccaaaacacagttcaggcaatagaatagatgaaatttttacaaacaggacagtgaaagcctggcacatagtagacactcaggaaatatgtattgaaatatctgttggcgaaataaaactataatgctcctttgygatatggttttctctcttaacaatatattttgggcctcattccctattagttactagaaatcggtagcatcattgttaatcgctgctttgtattaccttgtaggggtgcactgtaatttatttaacttcattgatgggcatttaggtgcatccaatttattttctgtcacgaccaaagccacaaagaacatcattttgtgttacttttgcacatg

SEQ ID NO: 863255 - DNA, 584 bp, Homo sapiens
tgagggtcttttaaaaacttcagcttccttccccgacccaccccagacagctgaatcagaatcaccgggtggtgcgcaggaacccgcgtttttaaagaacactagtgtgactatttcatatttcctctcctcaaaccttctcccaaactgattcatctgccttatatttcatgaaatgaatttacataaacctgaaaatctcctcaccttcccaccaccaaagccaatacttttaccacaatggttctaggctctctgcytgccttctcaccatttctagtggaggtgtccaggcaatcaccacaggagatgcctcctgcaactccagatcccagcccctaacccaagtttgttcaacctgtggcccacaggccatatgtggcccaggatagttttgaatgcagcccaccacagattcataagctttcttaaaacattatgagattttttttttgcgatttttgagctcatcgggtatcattagtgctagtgtattttatgtgtggcccaagataattctccttcttccaatgtggcccagggaagccaaaagattggacacccctggctaacctctcacacca

SEQ ID NO: 863256 - DNA, 584 bp, Homo sapiens
tgagggtcttttaaaaacttcagcttccttccccgacccaccccagacagctgaatcagaatcaccgggtggtgcgcaggaacccgcgtttttaaagaacactagtgtgactatttcatatttcctctcctcaaaccttctcccaaactgattcatctgccttatatttcatgaaatgaatttacataaacctgaaaatctcctcaccttcccaccaccaaagccaatacttttaccacaatggttctaggctctctgcctgccttctcaccatttctagtggaggtgtccaggcaatcaccacaggagatgcctcctgcaactccagatcccagcccctaacccaagtttgttcaacctgtggcccacaggccatatgtggcccaggatagttttgaatgcagcccamcacagattcataagctttcttaaaacattatgagattttttttttgcgatttttgagctcatcgggtatcattagtgctagtgtattttatgtgtggcccaagataattctccttcttccaatgtggcccagggaagccaaaagattggacacccctggctaacctctcacacca

SEQ ID NO: 863257 - DNA, 529 bp, Homo sapiens
gtgttggctcacgccttgtagtcccagctactagggagattgaggcaggaagatagcttgagtgcaggacattcaggcagcagtgcgccatgatggcaccattgcactccagcctgggtgacagagccagaccccatttctaaaacaaaaaaaaaatyaaataactaaagatacagaattttcagctttttctgcaagagtggtgcaccctgaagtatgttataccaaacactggtgggatacagaagggtattcagagagctatcggcaacattatgtattacttttttttcttttttttttttttgtggtggagtctcgctctgttgcccaggctggagtgcagtgatgcgatcttggctcactgcaacctctgcctcgtgggttcaagcaattcttctgcttcagcctcccgagtagctgggattacagacgcacgccaccacgcccggctaattttggtatttttagtagagacgaggtttcaccatgttggccaggctgatctcaaactcctgacttcaggtga

SEQ ID NO: 863258 - DNA, 648 bp, Homo sapiens
aaggcatgtcagaaagctgtcaaactcttctaaagcaaactcagttttggacccatgctatatgataaatatcttgcttcaatcacttaagcgaggaagtgtgatccagaatggtccagaacgatctctggagcaggactgcctgggttggtatattagctttggtacttcccagctgtgagatcttgggcaaattgcttaacctctctgtgcctgtgtttcctcacctgtaaaagtacctacttcacagaactgtaatgaggattaaatttgctaatcctgtaaaacttgaaacagtgcctggaacatagggaaaacattcggtaagtgttagctaccaccatttattatgccacatacacacacacacacgtacggtatactttgtttaatgtgggccacagcattaacgtgtcagcttattttgtataacgcagaatggaaagggggrccgaggtggtagagggagtttctgccgctgtacagtctaaggcatatttttgtataacaaacaataattacacaatatttggctaacttaattcccaaactgaggtcattacaatttaagaatatctaccaacacttaagtaaaatcacaaagagaaactttaaaagttacagatttaatttttggtcattcaaact

SEQ ID NO: 863259 - DNA, 650 bp, Homo sapiens
aacaaatccatcactgaggtgcacttatttaatagtgaaagtctactcgaagtcacccccaaccacattttctttggcaaaatgacccacccacccgggactggggcggataaacgcgtcttccaagaaacagcaaccgctagctgggggaagtgcgggtgagcggtgctgcgctttgctgaattcttgcccaggcgtttggagttcggaagctcgagatcaaattcttactggtygtgttcaggaagttttcgatgcctgcaacccagcctctgcggggccagagggcctccaactcctggctgcaagcggttccggggacagaacattccttccggctccgaccccagcgcgacccccggggctgagtgtcactcacgaagtgactcaccgggagccgccgcccgcactgtacttacttcactgtcggcgacggcgggcgcagcggaaccgacctgagccctggtccctcgaccactctgtccaggaccagccaccagcagccggcccctctcacttcctgagtaaatgttcccaagtgtccccgagtttacgcagccccaccctgggtccggtcccccctcgtcggaagcaaacgcagaaagccagattgacgttagcacccctggtttgaaaatgtgcctgagcag

SEQ ID NO: 863260 - DNA, 578 bp, Homo sapiens
gatacaaaattaacataaaaaatcaggtgcatttctatatactaacaacactaaagctgagaaccaagtgaagaactcaacctcatttacatggacatgaagatggaaataatgagcctgctttaatgtgatccaaatgttcatgggaaactctaaagcagttttgaagaatcttagtgattcaaagaacatggctcaaaaactactcttcttcaggacatattgttaacccagtaattgcctgagtgattaactatgagggatattaaatccctagaacaaatcaaaaacacagtggcyccttatcttggttttcacagcaacttctaacaccactggcaaaagtctcactgaagtagaaagcatcttcatgtaaaaacgttttaaaagcactcctcttgcaggtgtctacccatctcaatgacatgtttttggggtgcacatacatatttcagaggattactgcaggcctagccccaatctcaacatcactaagttgacagctgtctgtagttatttgttgaattcaaatgaaattatacaactgagtaaagcatagcatactactgtttactaag

SEQ ID NO: 863261 - DNA, 577 bp, Homo sapiens
gatgttcaagttcatcaaccttgttgctataaaagacgatattcttttaggccagtcaaaacttctcttgttttctgagactacattgaggcaataatttaaaaccttgagcctgttttatttttctttccttaagatttttagcacaattccatgtagccagtacagccacgtttcttaaaatactatacggaagcagccacttgagtttcccaaaatgctgccttcmgtaggcacttcactccaattaaccaaagccaatatttacggaaatgttttgctccacatgccttcaaactcaactatgttaaatagctaaccccaggttcccatttacttgacagtccattaggtacaaatatttccagcaccaattactactcttagttgcaaaatcataatctactttatccaggctaagtagaaaaggatcaataaaggatataagtagtttacagaatctctgagagggcctggaaaccaggcatggataatgtagatccaggaacaattcagatgggaaaaaaaaaattcatgtggaatgtttttcaatttgctgtcatctctgatttctttt

SEQ ID NO: 863262 - DNA, 607 bp, Homo sapiens
tattgggtggcaaaaacaagagatggaagaagtggaagatgctctgagaaacagagaagtaactgaatcagaaatggagtcattggagctgaaaccggaaggcagagtgagaataagcctgggtgaggtgagctgttgatgggagttgaagataaaggtgttggccaaagatgtgccagaggaaacatgaactggaaagtgaggggccttgcaatctatctaaggaaactagaaatttatcttgagggcaatgggcagccatggaaaattttattcaagacaatgacagagattaggcataaagggtggacaatctagatgtayggatgaacaagatgaaagcaagaagccaggtaacaggatattgcactaggaatttaccttgcccatttcaaatgcctagtttccagtaatctcatatacctaaaaaccataacattgaagtcattagaaatataactgaatatctactggcacataaatatgcagggaataatcacatttatcccatattgtgaaataaaagcagcagattacaaaatggtctaaatggaaaaattacattttttaaaaacaaacaatacatctatagaaaaaggtatggaag

SEQ ID NO: 863263 - DNA, 651 bp, Homo sapiens
atctagggaataaatgaggaattgaacttagttctctacaccttcaacaagtttcccacttggctaatagtcattagaaaatgtataaggccataaaattcttgtgttaaacaggatttattcatttttcttttcttttcaacttttattttaggttcaaggggttcatgtgcagatctgttacatgggtatattgtgtgaagctaaggtttgggggaatgaacaatcctattgcccaggtagtgagcatagtacccaatgggtagtttttcaacacttgctcccctttccatcctcccctctagtagtccctggtgtcgattgttcccatctttatgtccacatattttcaacatttagctctcactcataagaagatgtggcatytgttgttctgttcctgtgttaatttgcttaattcaaatctctggacaggcctgttgtggctcagaaaaatgatattccaaagtaaagtgctttggcatgctgaccacttttgaattgaaagaaattggaatacctcagaaagtgcctctgaaccaaggacttgctaactttctgttttccttgcttctaagtgcagggaggacctctctctggaatttccctatctgattaagaaaactttttctaaaagaattgtaatagtct

SEQ ID NO: 863264 - DNA, 574 bp, Homo sapiens
agagctgaaataataggaagggaatgcttcaacctttaacactcgaaaatcttttcccaatttaattcaccaaaactgccccttgaattattcagtctatcctaattaactccccagagagttatcttcaaggcacagttagttggttgttgcctaaggycaaactccaagctagctctggatgtgggaaggatacaaaagtttctttgcacttgacaatttctgttacctgaggtgagacagggagacaaaactatcccattaaggttactgttgaacccaaagggacatacagaatttcatatcataggctgtcattggcagcttatcagaaaatgtcccttacaaaataaaattccagataagggagcattgcaattttaaatatttgatttgagataataagattcttcctaagacaaggtgataattttccttaagtatcccaagtagactgggaaatcctaaaaagaagactccagcaggaaatcccagaggaacctccaagctaggcctgctgagataacgatgccaaaaatccacagtcgggcattaaaatagctttttagcaaga

SEQ ID NO: 863265 - DNA, 620 bp, Homo sapiens
agggaaacagaagagttgagctttccccaaggcagagcctagcaggcacaagaggggatcaaggcagtagctgcaaaaggagtcacaaggggaaacagtgtccaactctaagactattccaggaggctctcccatcaccctcctatccccccaacacacataccaatgcaacaaactttgtctcattcatccgtttatgtatacgtaagacatagcattagctttccagaaacctgctctaggggaaagtgggataaacatgtagggtaattttctaagcaaatgataggaaaacagtcctttgtaaaatttcatctattttgcttgagtctgcagaggaccagtgtcacagattaaagatggccacacattctttgtcatcaaccctgtgatagaacagcaaaatctattttgtctttgtccctagttccygaggcacagagcttcaaaaaccatttgaaattcctgagtgacaggaacatcttttgttgttcataatgaacccctttgagctgtatctttatgctatcaaggtgactcaaggtgtgcccttagatagtttccaggaaggtgccagccacatggatacataattagaggaactttcaaccttgtccctg

SEQ ID NO: 863266 - DNA, 651 bp, Homo sapiens
acatttttataactaatatcgaaagctcacacaaaataaacaacataataaagcaaaggagactgtatcagcaaacagattaaatggctgttattattattattaaacagtaagtgaaagaacagcattctgtgcctctgctgcaggacacaaagcatctgtcacctaccttccatttcagatcttaattagtgcttcagccagcagcttaaggggaaattctaagcgaatgttatagactgtgacttygaatactctgtcacttactgatattttaaggtcatttaggtcattactgaaagtcatcatgctctgaccagtttggggtgtactcagtccttcagcaaatgagggacagggaacagctgtgatacagtcaagtggagggcatttccatttacatatttttaacctgaagcttcagaatgtttttcaaagtttggagaaatacttatttattagtaaagatataccactcttgctttccataacgtgcttatataaggtcttgggcaggtcagacttcggaaaataattatcacctaaacttcgaaattcagtctgttattttaaggaactctcttattaatttttcagcattacacataattttcaataagaaaactaaggtgactcctaattgacctgatt

SEQ ID NO: 863267 - DNA, 645 bp, Homo sapiens
ataaactctcaccacctctcccattctcttagcgatgcttttcatatatataccaaagagcacagcacagtgtgtgatcactctgtgatccctaatggagttaaactgcacgtctgtgcagatgagcctccaggccatctaacaacaagtgtgtgtgggcagttggcattccttcagtgtagacaggcctacaatggaagccactggtgtcttctcccctgtctcattcccatggaactataaaatgtttaagctattcaagaccctcaaggctatggaatggagccatttatcagcaggttggcaatacaggtaaagcatggtacaagaaaagtgtagctgtgtttgccagttctggtttcactggaggaaagtttaaaagctgagtcaaagagcacagtgtcgtcaagttaatacttcacagccacggtggggtttgagcagggaagrggatgtccagggagggagaagccagccttgatgctgtgttggtgaagaggaggatgactctgagggagagagatgcggttaaaagagctggaccaggaatcctgtaaacctaagttctagctgctagtctttctcatgcctagctatgggaactgagcaaatctccctccaagaatcttcaaactcaacttttat

SEQ ID NO: 863268 - DNA, 634 bp, Homo sapiens
acaaattgactcttgatggataataaatttcataaatttatattgaaattaagcaagcatgcaaatacagtaagatccctatataaatacagcaagaccaagtaaaagcaaggtcatttgtctctgaaaagaaaagtgggggtcaccaaccacttatcaatgatatcttgtcctctctccaagagctatacctcatttacattcaaaatgattcagcatgcaaaacaagacatagaacaatatgaaaaccatttatttaaaaagccaaaatataaacatactaaatgtagctgggctgttccaggcactgcagctgggcacagcatctrcatgagagctactcctagtagctaaggcaaaaaagaaacactttgctttacattgcttccattgttcgataaagaaagcacataaattcagtaggagagtagcattttcctgtccagaaattctttaggtaatttatgatacaagaaacattaagaaacatcccttaataagccttatatttttttcatggcacacaatacattgttctttatttttatgatacagctgtatagtacatacatatctttaattacttctttaatgttcattttcccaattagattgtaaactcatgataaatgaa

SEQ ID NO: 863269 - DNA, 634 bp, Homo sapiens
acaaattgactcttgatggataataaatttcataaatttatattgaaattaagcaagcatgcaaatacagtaagatccctatataaatacagcaagaccaagtaaaagcaaggtcatttgtctctgaaaagaaaagtgggggtcaccaaccacttatcaatgatatcttgtcctctctccaagagctatacctcatttacattcaaaatgattcagcatgcaaaacaagacatagaacaatatgaaaaccatttatttaaaaagccaaaatataaacatactaaatgtagctgggctgttccaggcactgcagctgggcacagcatctacatgagagctactcctagtagctaaggcaaaaaagaaacactttgctttacattgcttccattgttcrataaagaaagcacataaattcagtaggagagtagcattttcctgtccagaaattctttaggtaatttatgatacaagaaacattaagaaacatcccttaataagccttatatttttttcatggcacacaatacattgttctttatttttatgatacagctgtatagtacatacatatctttaattacttctttaatgttcattttcccaattagattgtaaactcatgataaatgaa

SEQ ID NO: 863270 - DNA, 634 bp, Homo sapiens
aaaggaaactaggtaaaaactaggaaaaatgaaaaacgtatggacttcagttgacatactttatcaacattggtttgttcattgtaaccaatgtactattctattttaaggtgctaataataggggaaactggatgcagagaatacaggaactccttgaactatctttgcaactgctctgtaaatctaaaactgttataagataggaagtctatctttaaaaactaaagggagctgaggccaggcgcaatggttcacgcctgtaatcccagcaatttggggggctgaggcaggtggatcacctgaggtcaggagttcgagaccagcctggccaacctggtgaaaccccatttctactaaaaatacaaaaattagctgggcgtggtggcaggtgcctgtaattccagctacttgggaggctgaggcatgagcatcacttgaacccrggaggcggaggttgcagtgagctgagattgtgccattgcactccagcctggatgacagagcgagagaccagcctgggcaacatagcaagactttcccatcttaattaatcagtaagtaaataaatgacaaaacatccttcaagtggacttttcccatagccatccttcaaaaagacataagctcacttt

SEQ ID NO: 863271 - DNA, 657 bp, Homo sapiens
aagtatctcagcagcgagtatcatcatgggaaacgcattaacagagagatagatacactttgcatgtaggccagcagaaccagtggctctcctggagcaaatacactcagaaatacccagatgggaagagtaagagtgtaaccacagatcccatgacacccttcttgtagcagctacagatacaaactggaatacacccttgacatcataataggtagacataaatgtgcctacagaagcaaacattctttttttttttttttttttttttttttcagatagagtctcactctgtcactcaggctagagtgcaayggcacgatcttagctcactgaaacctctgcctcccaggttcaagcaattcacctccctcagcctcccaagaagctgggattacaggcacctgccaccacacccagctaatttttgtatttttagtagagatggggtttcaccatgttgcctaggctggtctcgaactcctgacctcaagtgatccgcctgcctcggccttccaaagtgcttggattacaagtcggagccactgctccaggccgcaaacattcttaagaggactgtctctacatacaaaaatatatcccacaaggccaacacatatgataccttagcatttattacaggtaacatgaaaagga

SEQ ID NO: 863272 - DNA, 609 bp, Homo sapiens
aatttaacaattcccagttttttgaaggttatactctttatatttctgtaaggacttaatataatgtaatctctgacacagtaggaatccttcagtatgatgggtgtatcagtcatcttcatgttggttggaaagggaaggattatttcacagtatcctcaacctaaaagataaatgatagaagttatggaaattgctattctcttctcacccctattcttgtgatgtgaaattaatctcaaccattcggtcttatctcaatttccaccttttaaaaccaagcgacaggcttagttcttttccactagaaacttttgaaaatatgttttgacttccaggaagcatttgaatacataagkgtaaggtcagcaattttgacaggtggcagccagatacaggacagatctgtttagcatttgactcagccagtctttttgagatcaatttcgtggagagattttgaagagaatatttctcctacacaacaaggctcttattaatttgaagacagtgttctagtttcaccaaaaataaattcttaaactcctactttgtatgacataaaatgaaaacagaaaaataggtttgcctacagaaacataatagccc

SEQ ID NO: 863273 - DNA, 494 bp, Homo sapiens
aaaataaattaatctctaaattcacctacagctaaattcaaattcaaggctaattttgaagaaaaggtttgaatttagtggaaaagctgattagaagcaggttacaaactattattttcttattttaagacaaaaagtrtacatgaatccagcttgcatagttcatattttccaattgatttgtaggcctgtttatactcttcttcttctttttattttttgagacagggtcttgctctattgcccaggccagtgttccaatagtgcagtcatagctcactgcaacctcccaggctcaagagattctccggcttcaacctcttgagtagctgggactacaggtgtgcaccaccatgaccagctaattttcaaaaaacatttttagtagagatgaggtctcactatattggtcaggctggtctcaaactcctggactcaagttatctttctgcctcagcctcccaaagcgctgggattacaggtgtgagccatca

SEQ ID NO: 863274 - DNA, 663 bp, Homo sapiens
tcctttcatagatgccaatgtgtgaatgttttatcatttattgacatgacatcattatttcacacagtgtaattacaattaacatggctgaattatttgattttagcttagattgtcacattctttttgcgttaatatttgagactctagaggtatactatgttaagtgaatccttcaacacttccctctttgcaagttagagtgacctgaaatttgtactttgaaagaaacattcccagcatagaaaaagcaggagaaacaaagaaatcgatggagacactttgaatgccaggtcacacagaatcactgcatccatttattaagaaaccctagagtgcagctctttcctccaattcattcatattgtagcaggggccttgggtcaaagcttgttaacctgttccccttattcaaaaccacctgatgttccatcttctctctyagtgtattccaagaatggaagaaaataaacctaattttgtaaatagattgactgctacttatcaatctttttttatatttaactttgtttaattaaagaaaaaaacgggaacagtaaatgtccattatttttccttggaaataaaatggaaagaaacacaagcatactaatctttgctggaatttatacaatgatcatattcaattgaagagctaaatgt

SEQ ID NO: 863275 - DNA, 584 bp, Homo sapiens
ttctgctgttttccaaataattccaaaggtattaatttacaacagtgttttctaaatgtttctatgaaaactaatttatcaaggtgttcataagttttaacatcaaataatattttgaccaagtgagtcaaggaactgctgggttaaataaagttcattggccgggtgtggtgsctcacgcctgtaatcccagcactttgggaggccaaggcgggtggatcacaaggtcaggagattgagaccatcctggctaacacggtgaaaccccgtctctactaaaaatacaaaaaattagccgggcgtggtggcaggcgcctgtggtcccagctactggggaggctgaggcaggaggatggcgtgaacccgataggcggaggttgcagtgagccgagatagaaccactgcactccagcctgggtgacagagcgagactctgtctcgaaaaaaaaaaaaaaaataaataaataaatgaagttcattacatttctatattgcaagacttcacagcaactttatattaatatgtatatgactctcttaaagataggtagtatgtgggcttttccaaatgtatttgattacag

SEQ ID NO: 863276 - DNA, 642 bp, Homo sapiens
aagtgatccatgggaaggggtatatcagtttttgttgttgttgttgttgttgttgttttaaacttaagctcgtactttataacaagaggattttctgtcagtttagttttgttttttaagacagggtcactctgtcacccgggagtgcagtggcgtgatcatggctcattgcagtgacctagaagcgatcctcccacctcagcctcctgagtagctgggrcagcaggcatgcaccaccacacctggctgatttttgtactttttgtagagatgggattttgccttgttgcctaggctgttctcaaactcctgagctcaagcgatcctcccacctaggcctcccaaagtgctgggattgcaggtgtgagccactgtgcctggccaagagtattttaaaaatcttaataatgataacaaaggaggtgatacatttccttgatagtaattcttttacggataaatgttaactgtagagttctttatggatcaatattgggatgactcagttatcaatttctttaacaacatatgcaatgggagcccattgtgggggcaagtgagagataagacaataaatcagatagcatgtgctgtgtgagtaggcacaaaagaagatgggatatgagcatttctaagttaaac

SEQ ID NO: 863277 - DNA, 589 bp, Homo sapiens
agacaagagaaagaaataaagggtattcaaattagaaaggaagaagtcaaattattcttgttcgcagatgataaaatcttatatttggaaaaaaaactaaagattccaccaaaaaaccattggaagtgataaacaaattcagtaaagttaaaggatacaaaatcaacataaaaaatcagtagcatttctatatactagcaatgaataatatgaaaaagaaatcaaagtaatctcatttawgatagatacaaataaaataaaatacttaggcattaactttaccaaagaagtcaaagagctctacaatgaaaactgtataacgttgatgaaagaaattgaagaggacacaaaaagaatggaaagctattctgtgttcatagattggaagaatcaacattgttaaaatgttcataccacccaaagcgacctgcagattcaatgtaatccctatccaaataccaatgtcattcttcacagaaatagaaaacaatcctaaaatttatatggaaccacaaaagacccagactaaccaaagctatcttgagcaaaaaaataaaactagaggaatcgcattacctgacctccaact

SEQ ID NO: 863278 - DNA, 589 bp, Homo sapiens
agacaagagaaagaaataaagggtattcaaattagaaaggaagaagtcaaattattcttgttcgcagatgataaaatcttatatttggaaaaaaaactaaagattccaccaaaaaaccattggaagtgataaacaaattcagtaaagttaaaggatacaaaatcaacataaaaaatcagtagcatttctatatactagcaatgaataatatgaaaaagaaatcaaagtaatctcatttatgatagatacaaataaaataaaatacttaggcattaactttaccaaagaagtcaaagagctctacaatgaaaactgtataacrttgatgaaagaaattgaagaggacacaaaaagaatggaaagctattctgtgttcatagattggaagaatcaacattgttaaaatgttcataccacccaaagcgacctgcagattcaatgtaatccctatccaaataccaatgtcattcttcacagaaatagaaaacaatcctaaaatttatatggaaccacaaaagacccagactaaccaaagctatcttgagcaaaaaaataaaactagaggaatcgcattacctgacctccaact

SEQ ID NO: 863279 - DNA, 604 bp, Homo sapiens
tctggagccgattcctaaggccttgcaggtggtaagggggtcgagaattggctgaggttcctcggaagtccgcgccgattcggagggccacctctgactttctgatctggggtgcaacccccagtccctgtcccggtcgacaaaggtgtggagtcaggttccaggcaagctgggggtgggggtgcgcacaagggaggggcaggggactgggaccccctcttcttcggggtgcttcgggccgtttctccagaggctggtggtgtccccgacccaagcasctcagccccgctcgcgaggtccgaagtggcgggaacgggtcctccgcggcggtcccaaggcgagggaggctgtaaaacctggcagagaatccggcgcgccgggtcggggatgtctcgggtgccgggggcaggggccgcaggctcgcaggtagaagcttccccacgcgagcgggggcctcggccgcggaaggggcgcccccggggccgccggcagcggcgagcgggcgggagggagctttccgggcccctcccgcgcctcgggctggcggggcgatggcgacgacggtttcccggctcccccgccccggacgccgatggcggtgcgt

SEQ ID NO: 863280 - DNA, 604 bp, Homo sapiens
tctggagccgattcctaaggccttgcaggtggtaagggggtcgagaattggctgaggttcctcggaagtccgcgccgattcggagggccacctctgactttctgatctggggtgcaacccccagtccctgtcccggtcgacaaaggtgtggagtcaggttccaggcaagctgggggtgggggtgcgcacaagggaggggcaggggactgggaccccctcttcttcggggtgcttcgggccgtttctccagaggctggtggtgtccccgacccaagcagctcagccccgctcgcgaggtccgaagtggcgggaacgggtcctccgcggcggtcccaaggcgagggaggctgtaaaacctggcagagaatccggcgcgccgggtcggggatgtctcgggtgccgggggcaggggccgcaggctcgcaggtagaagcttccccacgcgagcgggggcctcggccgcggmaggggcgcccccggggccgccggcagcggcgagcgggcgggagggagctttccgggcccctcccgcgcctcgggctggcggggcgatggcgacgacggtttcccggctcccccgccccggacgccgatggcggtgcgt

SEQ ID NO: 863281 - DNA, 572 bp, Homo sapiens
atatgtcaaggttattttcagctcgctaatgagggaacaaacagaatgacaaaatgattcaaaggcagatgcaagaaacgaatgtacatatttcccatcaaagagaaggctagaataaaattattaaatactaaaactcatcattgttctacagagcaataaactataatctttagggttttttctctaatgaacagaaataattggcattattattagacaaaaataatttttattgtaacaatttaytacatattaacatctaacttttgttgcaaaaatgcctgggccctattcattagccaataggaagttaaattgtattctccaagagagtcaggtgatccttacacaggcttgttaagtgaacccctagcctaacaataaaattcacaccaccatctttctcgctaccttctatgtgttggatcattttgtttagtaacctccaagaatgtttagcctctgaaatgtacctagtatgaagacatcccacaaggagagttgtgatcttcctcaatctccccaaacagactaaaggttataggaaaatagatttcttctatctgatt

SEQ ID NO: 863282 - DNA, 572 bp, Homo sapiens
atatgtcaaggttattttcagctcgctaatgagggaacaaacagaatgacaaaatgattcaaaggcagatgcaagaaacgaatgtacatatttcccatcaaagagaaggctagaataaaattattaaatactaaaactcatcattgttctacagagcaataaactataatctttagggttttttctctaatgaacagaaataattggcattattattagacaaaaataatttttattgtaacaatttactacatattaacatctaacttttgttgcaaaaatgcctgggccctattcattagccaataggaagttaaattgtattckccaagagagtcaggtgatccttacacaggcttgttaagtgaacccctagcctaacaataaaattcacaccaccatctttctcgctaccttctatgtgttggatcattttgtttagtaacctccaagaatgtttagcctctgaaatgtacctagtatgaagacatcccacaaggagagttgtgatcttcctcaatctccccaaacagactaaaggttataggaaaatagatttcttctatctgatt

SEQ ID NO: 863283 - DNA, 572 bp, Homo sapiens
atatgtcaaggttattttcagctcgctaatgagggaacaaacagaatgacaaaatgattcaaaggcagatgcaagaaacgaatgtacatatttcccatcaaagagaaggctagaataaaattattaaatactaaaactcatcattgttctacagagcaataaactataatctttagggttttttctctaatgaacagaaataattggcattattattagacaaaaataatttttattgtaacaatttactacatattaacatctaacttttgttgcaaaaatgcctgggccctattcattagccaataggaagttaaattgtattctccaagagagtcaggtgatccttacacaggcttgttaagtgaacccctagcctaacaataaaattcacaccaccatctttytcgctaccttctatgtgttggatcattttgtttagtaacctccaagaatgtttagcctctgaaatgtacctagtatgaagacatcccacaaggagagttgtgatcttcctcaatctccccaaacagactaaaggttataggaaaatagatttcttctatctgatt

SEQ ID NO: 863284 - DNA, 603 bp, Homo sapiens
ttttttttttttttttttttgagacagagtctcgctctgtcacccagactggagtgcagtggtgcgatctcagctcactacaacctccgcctcctcggttcaagcgattctcttgcctcagccccccatgtagctgggattacaggcacccaccactacacctagctaatttttgtatttttagtagaggcggggtttcaccacgttggccaggctgacctcaggttcctgatctcaggtgatccacccgcctcggcctcccaaagtgctgggattwcaggcgtgagccaccgcccccggcctactctcccacctttattccagatatattcaaatattctgactcttactgtctcaatagataataacagcctgtaatagtcttaaatcccttttatggattgttaaaggatggagtaaataaataaacaaatgaataaaaagaaacgttgataagtaaatctgtctagagtagtctggtttttagaaacaactctgtaataacccaggtcctgccatgactcatccgaggaccttggtaagacagtaacttctctgggtcccacctgatgtgctcaagccagcgcaagagagctgatggtt

SEQ ID NO: 863285 - DNA, 603 bp, Homo sapiens
ttttttttttttttttttttgagacagagtctcgctctgtcacccagactggagtgcagtggtgcgatctcagctcactacaacctccgcctcctcggttcaagcgattctcttgcctcagccccccatgtagctgggattacaggcacccaccactacacctagctaatttttgtatttttagtagaggcggggtttcaccacgttggccaggctgacctcaggttcctgatctcaggtgatccacccgcctcggcctcccaaagtgctgggattacaggygtgagccaccgcccccggcctactctcccacctttattccagatatattcaaatattctgactcttactgtctcaatagataataacagcctgtaatagtcttaaatcccttttatggattgttaaaggatggagtaaataaataaacaaatgaataaaaagaaacgttgataagtaaatctgtctagagtagtctggtttttagaaacaactctgtaataacccaggtcctgccatgactcatccgaggaccttggtaagacagtaacttctctgggtcccacctgatgtgctcaagccagcgcaagagagctgatggtt

SEQ ID NO: 863286 - DNA, 633 bp, Homo sapiens
gtcacatagccaccgtgcaccctgctcttcttactatccttttccatagctgccaaagtgatcttttcagtatgaatcagaacatgttatccccttcctaaaagcttctgtggcttcccattgtgtctagaaataaacagaaagtctccactatgacccmcgtggctgctaggatctgacatctactcagcctctgacctggtcttcctctgcgtgcggtttcattcctttgacgccagctccactggccgcctttcctgttcctctaacatgcccagctcgtgtctgactcagccctttaaatctgctgttccctcctccagacctgcaagatcaagtctctgctgaaatgtcacatcctccgagagacgttgcctgacatgctgttttatgttcatctgaacacatttttcagcatttgaagttatctttttaaaaaaagcagttcattgtctgtgcctcttaagggcagggactttgtttattgttatattctcagggtctatacctatgcctggatcatagtaggggctcagttattgtttgttgaatgactgtttggcattaattaattaatttcacaacttggagtggaattagccatctgcattcatatgaaaaatgacttaaatc

SEQ ID NO: 863287 - DNA, 641 bp, Homo sapiens
aatatggatgatttctttttttgttttacttatctcttttttgcctctaacatatctacagtaagcatggattactttataagcaaaacatcttaaataacataaatgctgtaaatgactttttcttacttaaattataactatwtctttcagtgctctgaaagatggaatattttttaaaaagacaatattccttttgcaaaatgagaactaacactcattaatcactctgctgtcttcctcttaatgaaaacctgcaaatgcatatgcaaatgaactgaacttctattataagatggtgacaggatgctctacagaagagaaggtaatgatagagtttgaaaaataggagcgcagaggaaggttagcagtggtggaatctttctattcaatgccttaaaagagttgtattaatctgatagtgttccacctaccaataatgaaataagatcataagcagcagtaaaaagcaaaagctcctcattgtgatatgacacatagagtgtagcagaatagggctatggggacccagatcaaaaagaaaacgtagaaagttgtaatattcttcagacattttcataagtcctgccagatcatcctatttaactacttgacaagtttagtctgtattacccacgtta

SEQ ID NO: 863288 - DNA, 538 bp, Homo sapiens
ttcagttccttggagctgtgggacagagggccccagcttcttgctgtcctttgcttggaagccaccctcagatctatacccacagtttcttgccatttgggatttcccaacatgtccactttctttaacaaaccagcaaggagagcttytagagcaagacactatttttttttttttttttttttttaagcagggtcttgttctgccacccaggccaggctggagtgcagtggcatgatcttgggatcactgtaacctccacctcctgggttcaagtaattctcctggctcagcctcctgagtaactgggactactggcacacaccaccatgcccagctgatttttttttttttttgtattttagtagacacagtgtttcaccatgttggccaggctggtctcgaactcctgacctcaagtgatccatctgccttggcctcccaaagtgctgggattacaggcgtgagccaccatgcccagccaagacaacattttctaaaaggaaatcataaaacccaccttaaggggaagtcaatt

SEQ ID NO: 863289 - DNA, 615 bp, Homo sapiens
accttgccagtaagtagaggtgctggtgtatgaatgcaagtctgctggctgcaaaggcagggccgataggctgaaaagaaagtctaataagtggaggttcttcagaaagttctgccttccacagaagtcaggggcaggcgagggagcagagtctgggcccatcctgccttccacaccaggtcaggctgtggcatctcagagccaacttccctgctgctggtgcttgtgcaagatttagtcagatttctagggacttgatgatatggaaggaacagcatagaatgtcctagactaaaatgttgtcttgttcctttcaaacccctcacwtggcttcttaaaccttcagcctaggaaagccaaaccgttctagccttaatcagttctgggaacgcagtcaccatagtaggaagaaaattttaacaacattcttctgtggtgttgctttctacccctccctggggccgaggaacattatttgatggtggaaaaaaaattaggggtggggaggggaagtgtcttttctccttttgctattggaaaggagattgatttttgtaatgaacaatgatgcacttcaaattaatgccatcaagattccacagcaccatagcctga

SEQ ID NO: 863290 - DNA, 469 bp, Homo sapiens
catcagcctcttcctgatgccagacacaagtcaggtgagtaacctgcttctccagttgggcaggactttgggattcccctggatgagactcctgggtaggatagatcccctgatattactgttggatcacaccgaatgagataaccaaattttccttctcatggtgccacttacaaagggcttctgaataattatctgtttgatccttacaccaaccctaggaggtgaagctactaatgttatccccaatttaaagatgtgaaaactgagactcacggaaactaggtgacttgtctagggtcacacagccaggaaaygtcaaggtgagaatttgaaccctggccttctgaacttgagatccagggcctggcacagagtgggcccagcagacatttcttcttcccatcacacctgccatgagctaaagaaaagtcatcacttctgtcttgtaggaccggctcttcaggga

SEQ ID NO: 863291 - DNA, 577 bp, Homo sapiens
agtgggcataccttctgagaaatgtgtcattaggcactgttatcattgtgtgaacatcatagtgtacttacacacacctagacggtatagcctacaacacacctaggctatatagtataacttgttgctggtagattacaaacctgtacaacctgttactgtactgaatactgtaggcaattgtaaaacaatggtaagtatttgtgtatctaaacatagctaaccatagaaaaggtacagtaaaaatactgtataagagataaaacatggtgtgcctgtataggttgcttaccataaataaagcttgcaggttggaagttactctgggtgagtcagtgagtaaatgatgagtgaatgtgaggcccttggacatcactgtaccctactgtagactttataaacactgtacacttaggttaccctaaatctattttaaaattrttttctttcttcaataataaattacccttagcttactgtaacatttttacttgacaaaccttttaatttttaaaattttctgactgttataataatacttagcctgaaatacaaatgaattgtctaagtgtacaaa

SEQ ID NO: 863292 - DNA, 574 bp, Homo sapiens
aatagaatattaaattaaaaagctatgaaacaggacaatatatactcaacccttgttttgtatatgtatacacaaacctatatatgtatacatatacaaacctatatatgtatatatattcacatatatatacacacttacatacatatatgtgaatacatgcctgtaaagagagatttgatttacacatatatatttatatatatacagacatcaaaatacagatatgaaggaaaactaccaaaatattatcagttgttaatttggggtagggaaattataagtactgtactttttatttcagtttgtataactttttgaatttaaaaatttttatacccaacatgaatttattttagagtcaggaaaaaaaaaaaaaagttgtattttccaraaagcccagattttgtttcaggattagtgtcagtttactcgaatttactaaatgtttagagtgccatttatattactacctgggaagaaaggcacaaagatgcaggagaaaaggataccaaaccaagggctcccacagtgaattaaactgattctcaagagatcttagaggaaatgaaga

SEQ ID NO: 863293 - DNA, 635 bp, Homo sapiens
agttagtttgccaaaggtgacacaacatagccatatcattctagacacaatagttgatgataattgctacatcctattacctcctatctcatcctctcatccaatcatagctcacagtagcctcaaactactagggtcaagcaatccttccacctcagtctctctagtagctgggattacaggtgcacaccgttatatccagctgatttttcamtggacaaacatatcttgaaaaatataagtctccaagatgcatgaattagaaatccttagtgagactcttccttccccatgtgccctccatcccaatagcccttccagtccttcttttaggaggagctgcagtggtccctcgtggtgcttctgattctcctcattctatatgtctccatatattgactggtatcctttgttttcatatattatctgcttgctcataacgatcctaaatgcttatcttttttcatcacctttctgattaaatgcctgctgctaattggctaatttagtattcctggttaaattcctggagggaaagaatctgtttggctcagttcatcttctcacagctagtaatggcatcagtttgtgcttattctttgcacccttgcatatgtgttccaaccctgtgttta

SEQ ID NO: 863294 - DNA, 644 bp, Homo sapiens
acattattaatctttcatgatcaaatgtacaccaaatatacatttcttacctgataagagaataagtagatccaatcatgcccattttggtaaatccagtcatgcccttatcataatatggccaaagcaacaaaggcagacagaagattcttaggcaaacactgtttccaagaatgccaatgtttattgccactgagcaggtcctatatagaatgggaacaaatataataaacttttgtgcacactgactactgagaatggatctgtaccacaaaaattattttttcactttgttctgcaaaagaaaaaaaaaagaactagcaaatgcctygaagactcattcccagaggtagagtactctccctctacctcaaatccacccctgtaatccactctgctctggtctttaacatattgaggcagttcagtatttctgtcaatgttcattacctccaagtacaattattatcatgctcagaaatataaaaatgaatctgatacaattctcctgtcctcaaagagtttacagcttgctgggggagaaagagagtagacaagtttaaagcaatgtgttgtataatgtaagggaattatgcagcagcatgtggtggtagcttcactcctttctccaaatatcctcttct

SEQ ID NO: 863295 - DNA, 644 bp, Homo sapiens
acattattaatctttcatgatcaaatgtacaccaaatatacatttcttacctgataagagaataagtagatccaatcatgcccattttggtaaatccagtcatgcccttatcataatatggccaaagcaacaaaggcagacagaagattcttaggcaaacactgtttccaagaatgccaatgtttattgccactgagcaggtcctatatagaatgggaacaaatataataaacttttgtgcacactgactactgagaatggatctgtaccacaaaaattattttttcactttgttctgcaaaagaaaaaaaaaagaactagcaaatgcctcgaagactcattcccagaggtagagtactctccctctacctcaaatccacccctgtaatccactctgctctggtctttaacatattgaggcagttcagtatttctgtcaatgttcattacctccaagtacaattattatcatgctcagaaatataaaaatgaatctgatacaattctcctgtcctcaaagagtttacagcttgctgggggagaaagagagtagacaagtttaaagcaatgtgttgtrtaatgtaagggaattatgcagcagcatgtggtggtagcttcactcctttctccaaatatcctcttct

SEQ ID NO: 863296 - DNA, 618 bp, Homo sapiens
cactgtttccaagaatgccaatgtttattgccactgagcaggtcctatatagaatgggaacaaatataataaacttttgtgcacactgactactgagaatggatctgtaccacaaaaattattttttcactttgttctgcaaaagaaaaaaaaaagaactagcaaatgcctcgaagactcattcccagaggtagagtactctccctctacctcaaatccacccctgtaatccactctgctctggtctttaacatattgaggcagttcagtatttctgtcaatgttcattacctccaagtacaattattatcatgctcagaaatataaaaatgaatctgatacaattctcctgtcctcaaagagtttacagcttgctgggggagaaagagagtagacaagtttaaagcaatgtgttgtataatgtaagggaattatgcagcagcatgtggtggtagcttcactcctttctccaaatatcctsttctgtatccactgattcacacggtagctgaggagcttcaaagtaggtaaagcaacttgtactgtctcttaattggtgtttagatttatctgcctgcctagggggaagtcaaaatccagagccaggattataatatc

SEQ ID NO: 863297 - DNA, 662 bp, Homo sapiens
ttacactgatgctaaaacaacagcatctgatacagcccttgtatttgtaattcaggtatagcaggagtaatccatctttggcattagaaaatatgctttatcagcaaatgaagaaggaaaaacgacaccaaatgatgataaaggaatgacccagagtagttccattgagcttttatcaccatactgtgtgaagaccatcactgtataaggaatggcttttcccacctaagccctctccctcgagtcaaacttgtgtttcccttttaatgagcagtaaccaccaggatgcctattacttagcttgccagaatgactacagatttataggaaagaggtaaaagtaaacacaaataatttaaaatgcattaagtaggaaatgccttcttcaactaaactatgttgtacattttatcaaaaatgtcagaaaatatttgtaaatcttatattttcctttctacaagaaaagtggcacccatgtcactcagttcagcagtgtgaacagytgaatgaaatggaaaactcttaaaagtagtgagtagcttttactaaactaagagttcttgaaagtcaaaaaaaaaggttgtatgaagtgcatctttttcttaaaattattttttcaagacttttgattacctgggccaccatcaatttactatatgcat

SEQ ID NO: 863298 - DNA, 640 bp, Homo sapiens
agcgagacctgtcaaaccaaataaaatataaaataaaatcactaagtttttaggagaaaagaggctatctgtaagactttggggtagggaaagttttcttaaacaaggcacaaaaaactctagctataaaataagattaataagtttaacrttaaaattgagaacacatcacacctgtaatcccagcactttgggaggccgaggcaagcagatcacgaggtcaagagatcaagaccatcctgaccaatgtggtgaaaccccatctctactaaaaaaaaaaaaattagctgagcatggtggcacacacctgtattcccagctactctggaggcagaggcaggagaatcgcttgaacctgggaggtggaggttgtaatgagccgagatgacaccactgccctccagcctggcgacacaacctggcaggtggaggttgcaatgagctgagatcacgccactgcactccagcctggcgacacagcgagactccgtcccccccaaaaaaaagaaaaaaaaaaatgagaacacagcttcacaaagaataccataaagaaaacgaaagaacaagccacaatttgggagaagatatttgccacatacataaccaacagaaaattaatatccagaatagctttaaaaga

SEQ ID NO: 863299 - DNA, 608 bp, Homo sapiens
caacattttaagcttccatatataagagatcatgaagtatctatctttctatgcctggcttattgcacttagcataatgtcctccaagtttacccatgtagttgcaaatgacaggatgtcctcctttttatggctgaatattccattgtgtatgtataccacatttatttatccattcatctgttgatgggcacatggggtgattccatatcttaattattatgaataatgctgctacgaatataggagtgcagatatctctttagcatatcgatttttattcctttgacttttttacccagaagtgggattgctgggccatatgatagttctatttttaggtttttcatgaatctccatatcatttgccctatgactgtacwaatttacttatgtataaatttaattaaggtggtaaaaaatctgtatgctgagaaaaataaaacagtaatgaaagataatgaagaaaacatacataaatgggaagttatcctatgttcttggattagaataattaatattctttaaatgtccttaacaacccaaagcaatatatagattcaatacaatccctatcaaaatttcaatgccgtttttcacacatatag

SEQ ID NO: 863300 - DNA, 625 bp, Homo sapiens
acatttttgaaccatcttctccatctattctttactctacaagtcattctgattatacagaaatgctttgtgcctagacacaaatgtcaattcacagacaattcttcaatttcccagaaaattgacctcacagatcttaaaggcattggctgaggcagactgtttccttctgaaccggaatctcaatggggtccatcatttgtatacgcatgcttcattttacaatgttgccaaacaaggttgattgaggggtaaggggataagcaattactttagcatctgacttctacagttaacattacaatgaaatataaaacttggggcttgttatggaaacactttgagycagccccttaccttgaatgacccttctattccatcagatacctaactcaacactcactttggaaagaatctaatgatatatccattctcataaatccatagacttaatctgtgttgtattcatttacatttttaaccaagcaaagctacaaagtaaataaatatataaaggatggatgataaaaccaagtaactttaagataagcaagttagacttttcctgggttcacgtgtaaactatggcagtgataattcgtaacgcatcctatgaatgtcattg

SEQ ID NO: 863301 - DNA, 620 bp, Homo sapiens
tttacataataaaaatcaccctattgaaaaaaatcagtaaactttagaaaaataaaaactatccaggcgaaagtacaaagagaaatatctatatttatatctatatctatacctggcaaaaacactgaaccgtggctcagtgrcccatatgacaatatcaaaataatcaatatcaaataacccaatgcacatataatcagagtaccagaaagagatatttagggctgaaaaggtacttgatgaaatagcaatgaaaatatttccaaatctgctaaaaatatataaactagcagattcaggaaagcaacagctttccccacatggaataaatggaaggaaaaccacagcaatgcccatcataaacaaatttgtaaaaaaaaaaaaaaaaaaaagaaggtactatggcagacaaatcttaaaggcattcagtaaggggaagaagacacattatatacaggacaacaatggtaggaaagactgctgatttctcaacagaaacaatgatagccaggagacaaagacctgtcatctttcaggtgttggaagagcaacaaaaagcaaagatagctatcaacatagaatcctatatctagtaaaatgaattcttcaaaaatgaagac

SEQ ID NO: 863302 - DNA, 582 bp, Homo sapiens
gcccacaaggaagcaggatctagtaacatcctttcagagagtacagtatgaaaatgctggaaatcaagtaatgctcagtggagaaagcaagaaacaccagttcagccaggtgatcaaggtcagtatcagcagtgatgtcatgttttatctgcaccattgatacaagatgataagagtggcactttacctctgagatcttctctcccaaaattcattacgcctgtctaatcagaaagacatcagacacatccaaattgagggacattgtacaaaagacttgaccagtactcctcaaaactgtcaaggaaggtcatgaaaaacaagtgtgaaaactgtcacagccaacaagagcytaagcagacatgacaggtaaatgtaacgtggtatcctgggtgggatgggatcctggaatagaaaaaggacattaagaaaaaaaactaagggactctgaataatgtatgaactttctttaataataatgtatcaatgttggtttcattaattatgacaaatataccatattcatgtaagatattgacaacaggggaactaggtgttggatatatgggaattctctgtacc

SEQ ID NO: 863303 - DNA, 629 bp, Homo sapiens
ggatgtggcaggaagcaggaggaacctggcacccaccgtgggggttgggctgggtgggaggcggggctccgtcatcttctctcagcccaggctcctcctcgtttgctcgtgctttttcccacctgcacatcacacatctgcagctgtttccttgggctccttgttgctggaattatgaaataaagttaaaaatggataaatagagaaggaaatgggagggaccagagactcactcaaggctcagatgggctctggttggaagaaacccacatgtgttagcttggttggrttgtggtcagggtggagtgaggggcagggagttgtgcaccacagggtggggctgggggacctgctgttactgtgaattgaatattcatgcaaagaagagggtatgggaggggtgcctggatgaggagagatcagaattctcagctggtgtttcttctccttctttttttccgtcctgaactccagcttttctaaaactctctccatctttctgcttttctgctggcgtagcccaaccacctctccctgaatctcagcaccataaaaagaagccaaatccctttccctgagttcagcgcatataataatatcagtgactataaagatgacatgtatttgtg

SEQ ID NO: 863304 - DNA, 606 bp, Homo sapiens
ttgactttgagatataggcaggttgctcagagctgcatggttcgagcaaggcagttattgaaatgctgtaaagaatgctcaatgaactgggatgcacatgctcagatagtcctcacaggaggcaagagaattccacacagtcagaaacccttttgctattaagagtgacatccggccgggcgcaatggcttatgcctggaatctcagcactttgggaggctgaggcgggcaaatcacgaggtcaagatatcgagaccatcctggccaacatggtgaaacccygtctctactaaaaatacaaaaattagctgggtgtggtggcacgcgcctgcagtcccagctacttgggaggctgaagcaggagaattgcttgaacccgggaagcggaggttgcaatgagatgagatcgtgccactgcactccagcctggtgacagagcgagactccatttcaaaaaaaaaaaaaagtgacagccctaggaaaacaatcagttaagggtgtagaaatattagagaatacatatttaaaatatatgtgatgtaaatcaatgtttacataaatatgtatgagatatatggaaaaaatactaaaaattcccttttaaca

SEQ ID NO: 863305 - DNA, 679 bp, Homo sapiens
aggatcctggatatttaagcatgtccatgcagccttttttacattattaactgaagaaaaacaggtgccttttaaagattttttttttaattgggaaacaaaaagaagtcagaaggagccaaatcaggactgtaaagtggatgcctaatgatttcccatcgaaatgcctgcaaaattgtccttgattgatgagacaagtgagcaggagcattgtcgtggtggagaaggattctcctggggaagcttacctgggtgtttctctgctaaagatctggctaactttctcaaaacactcttataataagcaagtgttatttttctttggctctctagaaatcagcaagcaaaatgccttgagcatcccacaaaayccttggccacgatccttgctcttgacccgtccgtccgcttctgctttgactggaccacttctacctcttggtagccactgctttgattgcttattgtattcaggatagtattaggaaggccatatttgatttcctgttacatgctttaaagaaatgcttcagcatcttgatcccactaatttggaatttctatataaagctctgctcttgtctacagttgacctaggcacaatggttttgatagctattgagtgaaaagtttggtaaactttttcagtcagaattatataagctgaaccaattgagat

SEQ ID NO: 863306 - DNA, 650 bp, Homo sapiens
ttaagagctgcaaagggagaagtcagggttctggttagacaataaccaggtcattaattttccatatttacatataatgttcctcataatacaaatctagcttccgaaagctctgaaaatcatcatgtatttaagtatcacattgtgtctcttcagtttatcctttgtgatcaaataaatccggaacaaaaaacgcatgctctaatcaytgaattaaatagcacacgtatgaagtgtgtggctgtattgtctaaataattaaccactacttagtgattatgctaaccagtgcatactggaatgcataagattaatgaagcctttggttacaatttaaaagcctccctatcaacggtttctttcaccgaactaaagaaaaaggattttgcaacttttacttactagtcttatattggaaacatctggatcatatccaatactcatgcttagaggccgcatcagagatcagtatctagtgagcaacatgtacggtgaaaatctgaaaggataaaaaatgaagtgcaccagggaggcagcatgctatggtagaaaagtgcgcctctagagacctagaaagctgattgtttatcccatctttgccacttgctggttgtgaaagttaggcaaagtctttaatctccatcaatctc

SEQ ID NO: 863307 - DNA, 650 bp, Homo sapiens
ttaagagctgcaaagggagaagtcagggttctggttagacaataaccaggtcattaattttccatatttacatataatgttcctcataatacaaatctagcttccgaaagctctgaaaatcatcatgtatttaagtatcacattgtgtctcttcagtttatcctttgtgatcaaataaatccggaacaaaaaacgcatgctctaatcattgaattaaatagcacaygtatgaagtgtgtggctgtattgtctaaataattaaccactacttagtgattatgctaaccagtgcatactggaatgcataagattaatgaagcctttggttacaatttaaaagcctccctatcaacggtttctttcaccgaactaaagaaaaaggattttgcaacttttacttactagtcttatattggaaacatctggatcatatccaatactcatgcttagaggccgcatcagagatcagtatctagtgagcaacatgtacggtgaaaatctgaaaggataaaaaatgaagtgcaccagggaggcagcatgctatggtagaaaagtgcgcctctagagacctagaaagctgattgtttatcccatctttgccacttgctggttgtgaaagttaggcaaagtctttaatctccatcaatctc

SEQ ID NO: 863308 - DNA, 650 bp, Homo sapiens
ttaagagctgcaaagggagaagtcagggttctggttagacaataaccaggtcattaattttccatatttacatataatgttcctcataatacaaatctagcttccgaaagctctgaaaatcatcatgtatttaagtatcacattgtgtctcttcagtttatcctttgtgatcaaataaatccggaacaaaaaacgcatgctctaatcattgaattaaatagcacacgtatgaagtgtgtggctgtattgtctaaataattaaccactactyagtgattatgctaaccagtgcatactggaatgcataagattaatgaagcctttggttacaatttaaaagcctccctatcaacggtttctttcaccgaactaaagaaaaaggattttgcaacttttacttactagtcttatattggaaacatctggatcatatccaatactcatgcttagaggccgcatcagagatcagtatctagtgagcaacatgtacggtgaaaatctgaaaggataaaaaatgaagtgcaccagggaggcagcatgctatggtagaaaagtgcgcctctagagacctagaaagctgattgtttatcccatctttgccacttgctggttgtgaaagttaggcaaagtctttaatctccatcaatctc

SEQ ID NO: 863309 - DNA, 650 bp, Homo sapiens
ttaagagctgcaaagggagaagtcagggttctggttagacaataaccaggtcattaattttccatatttacatataatgttcctcataatacaaatctagcttccgaaagctctgaaaatcatcatgtatttaagtatcacattgtgtctcttcagtttatcctttgtgatcaaataaatccggaacaaaaaacgcatgctctaatcattgaattaaatagcacacgtatgaagtgtgtggctgtattgtctaaataattaaccactacttagtgattatgctaaccagtgcatactggaatgsataagattaatgaagcctttggttacaatttaaaagcctccctatcaacggtttctttcaccgaactaaagaaaaaggattttgcaacttttacttactagtcttatattggaaacatctggatcatatccaatactcatgcttagaggccgcatcagagatcagtatctagtgagcaacatgtacggtgaaaatctgaaaggataaaaaatgaagtgcaccagggaggcagcatgctatggtagaaaagtgcgcctctagagacctagaaagctgattgtttatcccatctttgccacttgctggttgtgaaagttaggcaaagtctttaatctccatcaatctc

SEQ ID NO: 863310 - DNA, 572 bp, Homo sapiens
aagtaactagtacagtgtatatgcgctgcatatggtagaaatggcaaaagaaaaattttagtttgttttgtgactggctcttgattatgaatttcagtaggattttggataattttctttctttcttttttttttttttaaagaaatgacattagtgacctttattaagatacttgattgtccttacatctcatacctatttcagcaggggtctccaacccaccggtccatgtgcrcagtgggggagtgagcattaccgcctgcggtccacctcctgttagatcagccacagcattagattctcatacaagcatgaaccctactgtgatctgtgcatgcgaaggatctaggttgcactccttatgaggatctaatgcctgatgatctgaggtggaacaatttcatccccaaaccgagaccatcaccaccaccctcaccctggtggaaaaattgtcttccacaaaaccagtccctggtgccaaaaaggttggggaccactgtcttacagcagcttctggatttttttttttctgttatttgaatacttcctccaaaaatacgattcagtgtgg

SEQ ID NO: 863311 - DNA, 636 bp, Homo sapiens
aattatgtgctctaatcatactcatgcatcaggcaaatccctttgaggcaagaggaatatacttttgaccttccctcttctacccactggacactggacatgcatcttgatgaccaaaacatttggtatttcagttgccatccattaaaatgtgtacctggtactgggccaggtgtcgtttttgtggtgttgtgcgtgccccctcacctttaaaaaagattgactgtgtggtttcttacatttcctactcccattaaatgagtccctgacactctgyttctgtctttttgatattgaatagaaattgcagtgtttgcttgctaaggttcatggacatataccattggttccattgccaaaagtcagtccttgtatctattcagtataaaccttcagttatatcttctttcatgtctgttttatgtcgagtatatcctacatccatcctctttcaggtaatttatagtatcatccataaatttgtctaaatctttcttcagttcttttttcagtcctgactatatgacatctttgaaaattaagctctctatagctttgcacctttttttggcaagggaggaagatagtttggtgctatttttgtgtgtttgtttaccttactcaagaaggtgatag

SEQ ID NO: 863312 - DNA, 577 bp, Homo sapiens
ctcccaggactttgcaggagcttggttctatggctcattgttaggaattttctctttttcttcattaggtatttttttttagcaggttcagggtagttgttagggctactacaggagataccgttttcaaaagggtcctctctcgtaacctttaattatgtgattcttatctcagatgagctcttcccaaaagcsgagggattccctttacagataagtgtgattttcacagacaaaatggcaaaataaataaagagggagagagaggggaaataaatgagaattgttttggattttattatctttagtagtataacgtgtgagcagctagtttggcatgtcatagtagtgaaatgaaccaaaacattgaagattttacaaatcacccttgtgctgatactgacaaagcttatgagatttgtctcgtgaagttatatgttttttatattgaaatagaatataagaacacttgaggaaaatgttgctcagttaaacatagtaatagaaactgaccagagagttctattcttgatttgccaccttcagcagttactcctccagcccctactgtgggtat

SEQ ID NO: 863313 - DNA, 577 bp, Homo sapiens
ctcccaggactttgcaggagcttggttctatggctcattgttaggaattttctctttttcttcattaggtatttttttttagcaggttcagggtagttgttagggctactacaggagataccgttttcaaaagggtcctctctcgtaacctttaattatgtgattcttatctcagatgagctcttcccaaaagcggagggattccctttacagataagtgtgattttcacagacaaaatggcaaaataaataaagagggagagagaggggaaataaatgagaattgttttggattttattatctttagtagtataacgtgtgagcagctagtttggcatgtcatagtagtgaaatgaaccaaaacattgaagattttacaratcacccttgtgctgatactgacaaagcttatgagatttgtctcgtgaagttatatgttttttatattgaaatagaatataagaacacttgaggaaaatgttgctcagttaaacatagtaatagaaactgaccagagagttctattcttgatttgccaccttcagcagttactcctccagcccctactgtgggtat

SEQ ID NO: 863314 - DNA, 688 bp, Homo sapiens
tctggtgagggctgctctccttgcttccaagatggcgccttgttattgtaacttcacatggcagaagggatgaattatgtgtccctgtgtggcagaaggcagaagagcaaaaggactagctagtcacctcaagctatagctagttaccccaagctttcttataagggcaccaatctcacctatgagggctccaccttcataatttaatcactcactaaaggccctacttcttaataccatcaccttggaggttaggtttcaacacagtgaatttggggagaacacatacattcagaccatagcaaagccatgagacctagatggcttcaccagtgaattcctacaaaagttaaagaagaataataccactatactagagactagaaagacagtgaacacattccaatgttgggaaatagttctcattggctctagtactatttgttagctccaagcatttgagatctcatggaattctyatgctgagagtataaataaccatcactttggaggttaggtttcaacgtaatgaatttgggggaacacaaacattcaaactttctcatggtgagagcataattaatttgaaaccactttgtgaaatggtttgcctattaaatgtgaacatgcacataacctatgactcagcaattccattccaaggtatacacccttcatgaatatgtat

SEQ ID NO: 863315 - DNA, 602 bp, Homo sapiens
agggtgttttgtcaccaggaaaataagaaaaattgggctgattaaccttggtttttttttaaccatttttgcagcagctataaagtcatgctggattgaaggtcttttgactgctactatttccctcaatcaatctacccggccctccatattcatttggacaactgtgcctctcatggcctttgacatctccttaggacttcatctagtccaagaaaccacccttggtaaattcagtgtgattgaaatctcttagaatctctgctttgaattttactttttttttttttagcaaaagtcttttaagctacttctttctctgccccaaaggtgtgagaccatgaggcatcaatctgctttctgtactttcccccartagtaccttgcagtgtgttctaaacaggggcaatcatcacaatttcttcctaaaatttgaccatagtttccagaattaacctttttgtaacacattggaaatttgcagctggttaaatatatatgcagatgctaacgagtctctcccaaaggttttctacaaacaaagatatactggtgatttaatttgatcatttttaaggacttctagagataactggttaatg

SEQ ID NO: 863316 - DNA, 646 bp, Homo sapiens
acgtggatatccgggtttcccaataccatgtattaaagatactgtcctttccccattgtgtgtttttggcatctttgcctaaaatcaattgaccataaatatatgggtttatttctagtttttctatcccattccattggtctgtatgcctgtttttatgccagtgctatgctatttttgatagcaattgcttcataatattttttaactcagggcatgtgatgccccagttttgttctttttactcaagattgatgtggttattcagggtcttttgtgggtccatgagaatttaaagagtgttttttctgtttccaaaatggcattgggattttyataggaattgcactgaatctgtagacatttctgaaaagaagacatacaaatgaccaacaaattcacaaagaacattctcagcattacctatcattagggaaatgcaaattaagaccactgtgagatacctcatgtctgttaaaatggtgtttataaaaaagatgaaagataacaaaggttagtgtggatgtggagaaaacggaacccatgtatactgttggtgggaaatgaaaattagtgcagcctttatggaaaaatggtatagagattcctcaaaaaaataaaaatagaactactatatgatccagca

SEQ ID NO: 863317 - DNA, 587 bp, Homo sapiens
atctcattttcctctgagtatccaaactattttgtttctatatatcctgagaaaacttacagtattttgacttgcatttgtatcagtacccttgtatttggttttcctattcttcagaccacaggttctctctgttcaatgccctcagcatgtaagaatctgctaataagatttttttaaaggacccctgggctccacctagaaccaagcacaaggtggggtagggggacaggtatgagtagtttgtaaaggcctgctattgatgctgatgtgcagccagggttgacaaaaattgtataattgtggtggaggtctaaactttatttttgtactcaatatatacacctgaattgaatttaagctgatgcgtgctttgacctctgtaaaatactttctggtccacaggctacactacacataatccttrtagttactgaaatgatttacaagtactgaggcatgctggtggcttgtgctccagaactgtgcaaaaggagacatacaaagaattaatccaatagtctaaattgtctcttttacctttattttagcatttattctgtatggtaatctcaccaacaatataa

SEQ ID NO: 863318 - DNA, 609 bp, Homo sapiens
aaataccattcaacccaataatcccattactgggtatatacccaaaagaatataaattgttctattataaagacacatgcatgcatatgctcactgcagtagtattcacaacagcaaagacacaggatcaacctaaatgctcatcaacagtagactggataagaaaatgtggttcatatataccatggaatactatgcagtcataaaaaagaacaaggtcatgtcatttgcaggaacatagagctggaggccattatccttagcaaactaatgcaggaacagaaaaccaattattgtatgttctcacttgtaagtgggagctaaatgaggagaacacayggacagatagaggggaacaacacacactggggtggaggatggaagagggagacggtcacgaagaaatagctaatggggactaggcttaatacctgggtgatgaaataatgtgtacagcaaagtcccgtggtgcaagtctacctatgtaagattgtggtttgggagttaaatttacctaccataatataaacatgagcaaataacttaatttctcttttaataatcaacaaaaataaaaaaaaaagtatgtgatttcaggttcagattccc

SEQ ID NO: 863319 - DNA, 655 bp, Homo sapiens
cattaagcctgattcattcactattatttcaaaaatatatatcaggcctcctgagccaagaggtttgctgaatgttagggattcaatggtgaacaaacgagcacaaaactccctcttcttaagtacaggagggactttgtggagaattcrgggtggcagaataagctcctgagaatttaacttaatcttattcttctcaaatttagcttcaatgaagagaaatgaaagctattgtttctcattctcacatctcccaaaaagtaacattgaaggtaatctcagtgtccttgaagttagcctttttgagtgattaagttgaaaagaagttctatcttggtgggctcccccagaggctaaatgggcctttgcattgggaggtcaaagtccgggttcatgccattctcccgcctcagcctcctgagtagctgggactacagcccatgaggctactgagctagagtttttgtttgaagatggaggagaagaggaggtctcagtgttagaagtggctccatcccttggggtgtctaagagcttccagatacatagaaaagtcaggggttgcaattctacaggttggaagacatatgaacccatttgatagcatagcctctgatgtgacgataccacaaggggatgcctgctggcagcctgc

SEQ ID NO: 863320 - DNA, 579 bp, Homo sapiens
tgttaattaaagaacctacagtgtgtatctaatccccaaagaggctgggcacggtggctcatgactgtaatcccagcactttgggaggacgaggtgggcaacctgaggttgggaattcgagactggcctggccaataaaatacaaaaattagctgggcgtggtggtgcatgcctgtaatcccagctactcaggaggctgaggcaggagaatygcctgaacccaggaggtggaggctgcagtgaaccgagatcacaccactgtactccagcctgggtgacagagtgagactccatctcaaaaaaataaaataaaataataaaataatcccaaaataattcagaatacttctaaaacatatgtaattgattttcactttttattgcagctcttcatcatcatttattttttctaagaaatatagttaaacttctttcataatatcatataaatacatttttcctgtttttggacaacagcagtgggcattaaagtttagtccatgacatattttgtttacgttaatccagagctcctaaaggacagggaggctgttttattcatcgcagtgcccagtatgc

SEQ ID NO: 863321 - DNA, 616 bp, Homo sapiens
tcttgggttgcggtttaatcactgtatacccaggaaggtatcgacagttgtcccgtggaagctattaaagttgctgtccaaggttaaatgaaattgcagtttatcagagcagcattgagaaaataagagaatctgttcatggctcttgattaatgccaagcgtgatcaacacaagggggttcattaagctatacatcatgtgggtaatttaacatgtcattgtgcctgctgtctgctttgactgtgcacagcctagagtttcaaagttgtatttcttatgccactaagttctacacagaagcatycctcttactccttttgctatacattttccattatgtagacctactttgtttcagacacattaggcatttcatataaattatttaatgtttgggggcaaaaaatgtttcttgactttttagtgggttttccccacactatataaaataaaacttaccagaaaactcttcctcttttgaattattatttcccctaattttatatatatgtatgtcttaaaaatctgatgtgacatggaaaaaatatcaaaattcttaactaaatccatgttaatttgtaatactcttagttattaatactcttattaaactat

SEQ ID NO: 863322 - DNA, 623 bp, Homo sapiens
aggagaaagccaatgtcctgattgaaggtcaaaaggctggataattctgtcttactcagggaaatcagcctttttgttctattcaggccttcaatggattggataagcatagacaatctgctttacatagtttaccaatttaagagttaattttacytaaaaacactcacacagacacactcagaataatgtggatcaaataactgagcaccccatagactagtcaaggtgacacataaaatgaaccattactgtgtcctaatccctggaatcagtgaatgtgttactgtacatgacaaaaggtattttgcaaatcctgacattggctattatctggatatttcaggatttatttaaggagggttagcgtcaaagaaggaaatgtgatgatgaagcagaggtcatggaggagagaagttagctacacggctggctttgaagattgtgggaaaggccatgggacaagaaatttctgtgttttctggaagctagaaaagatatggaaacatatgatcatctagagcctgcaagaggaatgcagacctggagatcaaggttgataccttgattcaagacttcagacctctagaaccataagataataaatctgtgttgttttaagc

SEQ ID NO: 863323 - DNA, 623 bp, Homo sapiens
aggagaaagccaatgtcctgattgaaggtcaaaaggctggataattctgtcttactcagggaaatcagcctttttgttctattcaggccttcaatggattggataagcatagacaatctgctttacatagtttaccaatttaagagttaattttacctaaaaacactcacacagacacactcagaataatgtggatcaaataactgagcaccccatagactagtcaaggtgacacataaaatgaaccattactgtgtcytaatccctggaatcagtgaatgtgttactgtacatgacaaaaggtattttgcaaatcctgacattggctattatctggatatttcaggatttatttaaggagggttagcgtcaaagaaggaaatgtgatgatgaagcagaggtcatggaggagagaagttagctacacggctggctttgaagattgtgggaaaggccatgggacaagaaatttctgtgttttctggaagctagaaaagatatggaaacatatgatcatctagagcctgcaagaggaatgcagacctggagatcaaggttgataccttgattcaagacttcagacctctagaaccataagataataaatctgtgttgttttaagc

SEQ ID NO: 863324 - DNA, 683 bp, Homo sapiens
cctccaaaaatgtctgtcataacccacagaacatgtgaatatattaccttctatgaaaaaaggagatttgcagatgtgatgaagatccttgatatgggcacagtatcctgtattatccaggtgacccaatgtaatccctagtgtccttagaggaggaaggtaggagggtcaaatcagagaaggtgatgtgatgatagaaacataagagagagagrtgagggcaagaattagaagatgctatcctgctggctttgacaatggaggagggagccataaaccaagggatgcaggcagtctcttgtctctagaaactggaaaaggacagaaaacagatatttctttagagcctccagagggaatacaaccctcccagcaccttgcctttaggacttcttacctccagaaatttaataggaaatatttgcattgttttcagccactgctggtggtatttcttatagcagcaataggtcactaatacaacatcttacccctgcaaccaccaccacctggtctgaatccatcatctctcactcggattctgcggcagcctcataactgatctactttcttctacttttccccttttcagggacaacgcagcagccagaatgatgctttggaaatggaagtctgattatatcttgcctctcttctgctcaaacctaatggctccccatttt

SEQ ID NO: 863325 - DNA, 683 bp, Homo sapiens
cctccaaaaatgtctgtcataacccacagaacatgtgaatatattaccttctatgaaaaaaggagatttgcagatgtgatgaagatccttgatatgggcacagtatcctgtattatccaggtgacccaatgtaatccctagtgtccttagaggaggaaggtaggagggtcaaatcagagaaggtgatgtgatgatagaaacataagagagagaggtgagggcaagaattagaagatgctatcctgctggctttgacratggaggagggagccataaaccaagggatgcaggcagtctcttgtctctagaaactggaaaaggacagaaaacagatatttctttagagcctccagagggaatacaaccctcccagcaccttgcctttaggacttcttacctccagaaatttaataggaaatatttgcattgttttcagccactgctggtggtatttcttatagcagcaataggtcactaatacaacatcttacccctgcaaccaccaccacctggtctgaatccatcatctctcactcggattctgcggcagcctcataactgatctactttcttctacttttccccttttcagggacaacgcagcagccagaatgatgctttggaaatggaagtctgattatatcttgcctctcttctgctcaaacctaatggctccccatttt

SEQ ID NO: 863326 - DNA, 634 bp, Homo sapiens
atgggtttggcctgagtcatattcttgtcttcaaggatggttctacgaaggctaaatgcaattgggtgggagggaagcggaaggtggttcctccagagaaaattagaggatctagttctaaaggaagtagctaaagatatgggtggaaagaaaaaaaaattaaagcaattgatggcgtctattctaccttggagtataaaaaattgagatttaccttttcatacaaagcagaataaattaatctataaaaaaaattccctggaatattttttagaggaagaaagaaaaacmtggaattgtggttgaagagtctgggaattcactgagtatggccctgttgcaatcaacaattattactaatggattattagcagtggtgctaatattgaattactgcagtattttgttttcctcataagtttctttggggtttggttaaaaaaaaagatatgtgtcatttaatatttgtggtacggccaaataaataaataaacaataaaagaacctctcatttgtttaaacactagaaacaaagcctaaagatcacagaaaatctttgatctttgttattgggcagatttaagtttactgactcgttgcaacagcagagaacacacccgatgggggtccttcg

SEQ ID NO: 863327 - DNA, 642 bp, Homo sapiens
taatggctattaattcctaaaatacttactctctggttctctccataaatagttttccaacccttgctctaggtcatagaattatatatagttcattagagtttatcagaaaatacctcaagataatcaatgtaatcctctcattttacaaataagagaggggttatgattgacccaaggtcacatgggaagrttatgacctccaggccaggcatctactcatgacatcaggcatgcagaaggttcctgtatgcaacgcatgtagtttcccctattattattaccattattattattattattattattattattattattatttgagcagactctggctctgtcgcccaggctggagtgaagtggtgtgatcttggctcactgcagcctctgcctcctgggtttcagcgattctcctgcctcagcctctcgagtagctgggattacaggcctgcacccccacaccaggccgatttttgtatttttcgtagagatggggtttcgctgttttggccaggctggtctccaactcctgacctcaggtgatccacatccgcctcagcctcccaaagtgctgtgattacaaagtgtgagccaccacgcctggccggtttcccctattaatattgtatgtcagtatgg

SEQ ID NO: 863328 - DNA, 642 bp, Homo sapiens
taatggctattaattcctaaaatacttactctctggttctctccataaatagttttccaacccttgctctaggtcatagaattatatatagttcattagagtttatcagaaaatacctcaagataatcaatgtaatcctctcattttacaaataagagaggggttatgattgacccaaggtcacatgggaagattatgacctccaggccaggcatctactcatgacatcaggcatgcagaaggttcctgtatgcaacgcatgtagtttcccctattattattaccattattattattattattattattattattattattatttgagcagactctggctctgtcgcccaggctggagtgaagtggtgtgatcttggctcactgcagcctctgcctcctgggtttcagcgattctcctgcctcagcctctygagtagctgggattacaggcctgcacccccacaccaggccgatttttgtatttttcgtagagatggggtttcgctgttttggccaggctggtctccaactcctgacctcaggtgatccacatccgcctcagcctcccaaagtgctgtgattacaaagtgtgagccaccacgcctggccggtttcccctattaatattgtatgtcagtatgg

SEQ ID NO: 863329 - DNA, 635 bp, Homo sapiens
agattgcatagccatgtacagagaggttaagtaacttacccaaggttgcacagccattaaatggcagaaacacttggatcaggatcaagttagggcttttaatcatggcattaaattatttcttatgtgtggtggtgtacgtaagtaaagggacccacaaaacactcgtgcaacccagttttaggggtgggagggtagggacaggaactcttctaggaagtattgacaatgcagctgaaagaaataacgacccccaaattctaatacgtctgaagcaagctctcctgagaattctggtgggctagggtcaggaaccttctcttaaggtacagaagaagtgtaggamgcttgggttctttgactaaaatgtttaggactttctttcccactcatctgtcccaaatgacttccttttgaataagaattactgtctctttctgtgagtgagtgacaggctatctcctgggtccccttttctctctcttaataacagcatgtttggatactgatgctaagtgcagaagagctggtgctcctaggctggcagtaatgaaaatatttttaaaaggatgtctgctcctctatgtttccctcagtcttgactgccttcaaaggctgaggaaggtcacaagaag

SEQ ID NO: 863330 - DNA, 575 bp, Homo sapiens
gacccacctggcaactgacttctcctctgagtagagccctcaggtcccctgtctccatcaaggcctcaggggctgcagcacagggagaacttacaagctaacaacagctccatgcacgcggctgaaggaagccgtgggtaacartggggatggcgatgtgttggaagcagcacagctttcctgcgggaatgggtgtccagttgcaagaagggacattctcccgggacaactggtcttgcagctgttgtgtccacctctttctgtcgaacccttcttggaagatgcttcgtcctaaagcattgtccttgtcatggacagctgtgtgactatgctggcctcacttctttcccctacagctcacaaccactgtgccctgccgatctattgcagcagcagcacttgatgccaggccgaaatgctcatttcctgtcattagggtcactcagggacactgtcaggtagggacatgccagtcatggaaaagtcctctggttaaataagacctgcctctcccatttcttcttcagcctctacagtgttgatggcaatgttctgtccacatatttgacacccag

SEQ ID NO: 863331 - DNA, 575 bp, Homo sapiens
gacccacctggcaactgacttctcctctgagtagagccctcaggtcccctgtctccatcaaggcctcaggggctgcagcacagggagaacttacaagctaacaacagctccatgcacgcggctgaaggaagccgtgggtaacagtggggatggcgatgtgttggaagcagcacagctttcctgcgggaatgggtgtccagttgcaagaagggacattctcccgggacaactggtcttgcagctgttgtgtccacctctttctgtcgaacccttcttggaagatgcttcgtcctaaagcattgtccttgtcatggacagctgtgtgactatgctggcctcacttctttcccctacagctcacaaccactgtgccctgccgatctatygcagcagcagcacttgatgccaggccgaaatgctcatttcctgtcattagggtcactcagggacactgtcaggtagggacatgccagtcatggaaaagtcctctggttaaataagacctgcctctcccatttcttcttcagcctctacagtgttgatggcaatgttctgtccacatatttgacacccag

SEQ ID NO: 863332 - DNA, 618 bp, Homo sapiens
aacggactaatacaattcccaacatgtgaagcaatgacatgaggtcccatctactactggtagaaacataaattggtacaacttcttaagaaatcagcttggaattgccatgcatagttgaaaatgtgcatatatcatgactcagtattttcatttgtaggtatataacctagagtaatacttgcacatgtagaagaggaagcatgcatagggaagtttacagcagcctaatgctggaaagagtgttagtgactacggaggaagaataagtaagtgtaaataagagtcaatgaaagaatgaactaagaagtgtaaataagaattcagcagtaaataggaatgaactagagctacacttatcaacataggtaaagcaaaataaaacaagcagagcaggataactaatcaagaacaaaatggttcatttatatatcagacaaactaaatatacatgtatacacatatgcrtatgtatcccataggagataagtaataggaaataaaggaagttttaaaataatgaatgaaaatggttactgctgggagggagatgaagatgcagtctgtgacgaatacgtagcagtcatctacctagtcatgctctagttgtaacttgat

SEQ ID NO: 863333 - DNA, 630 bp, Homo sapiens
agtgtataagtggatattatgctcatgaaataagccagagagaggaataaaaaatgctacattatttcacttatatgtggaatctaaacaatgtcaaatactgaccaggtgtggtggtggttcatgcctgtaatcccagcattttgggaggtcaagatgggatcaccatttgaactcaggaatttgagaccatcctgggcaacagagcaagatgtcatctctactaaaaatatgaacaagtgagccaggcatggtgrtgtgagcctgtggttccagctactcaggaggctgaggcaagaggatggcttcagcctgggagatcgaggcttcagtgagctaccatcacaccactctacttcagtctgggtgacagattgagatcttgtgcttaaaatgtaaaatacatagaaatagagagtacaattctggttatggaggggtgagaatgggaggagtggggaatgggaaaatgtgggtcaaaacgtacagagttgtggttatgtaggatgaataagcctagacatctaatgtacactatgacgactatagttaaaaatattatactgtacactgtgaattttctaagagtagagtttaggtgctctttccaccaaaaaaggtaactatttg

SEQ ID NO: 863334 - DNA, 556 bp, Homo sapiens
tattatgctcatgaaataagccagagagaggaataaaaaatgctacattatttcacttatatgtggaatctaaacaatgtcaaatactgaccaggtgtggtggtggttcatgcctgtaatcccagcattttgggaggtcaagatgggatcaccatttgaactcaggaatttgagaccatcctgggcaacagagcaagatgtcatctctactaaaaatatgaacaagtgagccaggcatggtggtgtgagcctgtggttccagctactcargaggctgaggcaagaggatggcttcagcctgggagatcgaggcttcagtgagctaccatcacaccactctacttcagtctgggtgacagattgagatcttgtgcttaaaatgtaaaatacatagaaatagagagtacaattctggttatggaggggtgagaatgggaggagtggggaatgggaaaatgtgggtcaaaacgtacagagttgtggttatgtaggatgaataagcctagacatctaatgtacactatgacgactatagttaaaaatattatactgtaca

SEQ ID NO: 863335 - DNA, 556 bp, Homo sapiens
tattatgctcatgaaataagccagagagaggaataaaaaatgctacattatttcacttatatgtggaatctaaacaatgtcaaatactgaccaggtgtggtggtggttcatgcctgtaatcccagcattttgggaggtcaagatgggatcaccatttgaactcaggaatttgagaccatcctgggcaacagagcaagatgtcatctctactaaaaatatgaacaagtgagccaggcatggtggtgtgagcctgtggttccagctactcaggargctgaggcaagaggatggcttcagcctgggagatcgaggcttcagtgagctaccatcacaccactctacttcagtctgggtgacagattgagatcttgtgcttaaaatgtaaaatacatagaaatagagagtacaattctggttatggaggggtgagaatgggaggagtggggaatgggaaaatgtgggtcaaaacgtacagagttgtggttatgtaggatgaataagcctagacatctaatgtacactatgacgactatagttaaaaatattatactgtaca

SEQ ID NO: 863336 - DNA, 601 bp, Homo sapiens
ttagagtaagagtaaaggatcccagtcaggggacctccacccagcagcgcaactgtaaaatatatcaccatgtgattaagaaagctatcagaacaagcaagttggatgacctgattaagttcacagaaaaagtgggggatttctaaggctgtgcagaaggacagccgtactaccattaagatttgtagcaaggaatacagagcactcatggtccaggatgcyagaaccagcagtccacagaggtgagggttcataatgaccatgtagtgcagggggtgacagatggccacaaaccggtcataggccatcacggacaggaggaagttttcaaatccagcaaagagtatgaaaaaatacatctgcatgaggcaggctatgtaggtgatgactttgttctgtgtctggatgttcatcagcatttttggaatggtggtggaagtaacacaaatgtcagcaaaggacaggttggagaggaagaagtacatgggggtgtggaggtgggagtctgagattgtggccaggatgatgagcaggttcccgagcacagtgaccaggtacatggacaggaacagcccaaagaggaagggttgcagtccaggtt

SEQ ID NO: 863337 - DNA, 589 bp, Homo sapiens
aaatcatctggcaagagacttatatccagaacatacatagaacttttacaacttaacaataaaattcaaataacccaattaaaaatgggcaaataatttgaatagatatttccccaaagaagatatgcaaatggtcaatatacatttgtaaagagtcttatcataagtcattagggaatgcaaattaaaaccacaccgagttaccactccacatctgttggaatggctaaaataaaacaaaagacaagcaattaacaagttttgatgagaatatggggaaattggaacactcctacattgttggtggagatgaaaatggtgcagtcactaagaaaaatattttggcagttcctcaatatgttaaacatagcattaccatacaacccagtaattctactccraggcatatattcaagagaaatggaaacatatgtctacacaaaaatttgtacacaaggctgggcatggtggctcacgcctgtaatcccagcactttgggaggctgaggcgggcctaccacctgaggccaggagttcgagaccaacctggccaacatagtgaaacccgtcttactaaaaatacaaaaaaa

SEQ ID NO: 863338 - DNA, 647 bp, Homo sapiens
gtctacactgtgttggccagactgatcttgaactcctgatctcgtgatccacccacctcagcctccctaagtgctggcttcttttattttttagaaccccatcctctccaggataccccatccagtcactctgcttcctcctcctgtcctctcccaggaagtcctctcctcacctgtgagcaggagccccttccaggtgatgtgctgagtgcagggaggggctgagaggggycccatggtctctgctgtctgtgtgttctcccctgtggagatgagcctaggatccagagacttcctgagcagggctgtcaggtgtgctgtccttcctccttctgtgctgagcctcttcccagggcagaagcacttctcaggctcatgggcggggtcaggcccaggacacctctctgtcccctcctctctcagtcctgcctccttgtccctccttctgtttttccttttgtctgtgtttcaggtccctgggaattgtggaggcctctgcctttttcagcagtgattctttcaccaaacctcaacacacactttgtgcagacacacacacacacacacacacacacacacacagacccacacagtgacacacataccctgcaggttgggcgaggacagtcctgggcctcagcctcctg

SEQ ID NO: 863339 - DNA, 677 bp, Homo sapiens
cagaggatgtgtcatattccatcaattctgttgaggggtggctgtctcctaggacctctatgcagaggacattgcccctgaaatctaaaatctggtaggcatgtaagacctacaggggctaagcaggaaacagatacagaaacactacatacagaaacattggatagtagggagtagtggagactgggaaactagaagttatgtgtgtactctaaagggggatacacaaatttaatgtaactatgactctgcgatgagggtgtacaaaaattctcacgaccggctgagctccttttctcctatggctgaggccggtgtgagagcaaacaatctgaaagtttgtgaattcctgtacctccctgggctgttgayattttggtcatcactgaacaggcaggaaccccaggactgacaaaagagagcttggagtcgatcgtgcatcttttgtgacccagtcagcatgtgggaagtgatggccttcattgctttctagtttttgctgccactgaaggagggctgactcaagatatgggaagagggagagagttgaataaatacaggattgattgattcagatttttatgtggaaacttttttttcttaacacatcaatgatatataattggcatacaataaactagacatattgaaattgtataatttgataaatttcgaca

SEQ ID NO: 863340 - DNA, 634 bp, Homo sapiens
acctttctcctgaatggagactcagtatctcaaatatgttatttcttttctaaactaatgactaaatttaattgagtgtttataaaatacaatgcatttaaattgcttggcatattccctaggttatagttacattgtataaatatcagttattgacatactattaggagtaaagttctatggccaggtggcatattgattaaggacttggatttgagagccacagcagsaaagtctctccaagaagtgacatttgagctgagacccaaagagtgagttgattagaaggagcaagatagaggagcaagtagtattccaagtaggcaggctggcatgtgcaaaggccctgaggtggtgaagagcatgatcctgacaaagctgaaggaaggtctgattcccctttttcactgcactgtcattgaacccagtgccaagcacatagcaaaaatgagtgaacatttgcttagagatgactgatgaatcccaccctgtgtttttgtgggtcctactgcctgtgccattaacttctccatagagtacttatgtcttttacccccttatattttgaaaagttttgggctatatgtgcagatcagctcatacagtcttaaccctgaaggaaatatattatctc

SEQ ID NO: 863341 - DNA, 601 bp, Homo sapiens
caaacatcagtcacttatccagatgacccccctttgatacctcctctattcactcccaaaagccagtcaacacccttctatgagtctggccctctgcaagattctggacactatggtgtgcaagaaaggtggggccaggcagcaacttcaacctctcagatatgctgaaacttaagcctcaaggacaaacccagttacrgagcctagtacccgatggtggtgcagcagagtgcttcaggtgtctaccctgcagaggacaaaaggaggccaggtcagacagatacagtagaaatggaaagagggtgtcactatctagcccagtgcagcggcactggatgggacagccatccaacattaatgcagctcacttgggggttcaagctgaatgcaagtcaggggacctaggggcaccaacgtagcacctctgctctgtctgtccctcactcttctcatgaaatcctgtccaagactgccactgtcctctgcaaccacaggattcccccagcctcccccttggctccagtaatcaggattccttcaaaagcccactgaagacccagggaccggtagcttttccacctgtaaaccactcaccctgtca

SEQ ID NO: 863342 - DNA, 671 bp, Homo sapiens
acttaccatttgaccaagcaattccacttctaggtatttacccaagagaaatgaagacgtatgtccacatttaaaaatctacatgcaattatttgtaatcaccaaaactggaaacaactcaaacgtctatcaactggtgaatagattaacaaactgtatacattcatacaatagaattctacttaacagtaaaaaaattattgattattgatacatgtaacaacacagatggattgtgtgattttcaaaaaccgcagaaaaaaggcctttaggttgaaaggattcgtaaatattaagcagaaagacagaacaaaattgaaatgagagttacctcctctgcaaaagtcagagtgccaagaaaaagatagaaccctaaaaacttccagaaaaaaaatgttacctgcaaaagaaaaaggatcatrttgtcacctgacttttttgagcaaggatcatattggcacctgacttttttgaacatatcataacatttttgagatagaattatattaaatttacatttctgtaccaagccaaaacatcagtcaagctttagggtaaaacaaactaaaataataattcaagagtattaggagataataaaccatagtgcacaaagaaatcagtaaaatttatagttgggtctaattcattaattgactgaaagaaagtta

SEQ ID NO: 863343 - DNA, 649 bp, Homo sapiens
tattcatgcatacagctatgtacatatacacatatatatacatgcacaaatgtttctgtgtatgcacaggtgtgtgtatatcataatgcatgatttcagtaaatggtaactaaaagctggctgggttttctctgcattggagaaagcagttgcccttctttacttagaccarcattgactataatccaaagtaatagggagctgcaagcctcgatacatccatatcttctctgtttcctattattatagagggtaattatgcaccactgcttggaaatttattaaaattgtctttttgaagtttgggaagaaattaggtcaaaatcaatttatcatatagcataaaatacttgtctgtattgaaaagaggttattttttaagcaatgagaaaagaactccctattcaataaatgttgctgggacagctggtagctgtatgcagaagaataactggacccataccctttaccatatacaaaaattaactcaaaacgaacgaaagatttaaatgtaagatctcaaacgataagaatcttagaagaatacctaggaaaccccattctggatatctgtcttggaaaaaaatttatgactaagtccccaaaagcaatggcaacaaaaacaaaaattgacaagtgggacctaatg

SEQ ID NO: 863344 - DNA, 592 bp, Homo sapiens
cctaagtgaaaagtggtgactcctgataacatggcttaggaaattaaacctaatttatattattttctttttaagagacctgctaaaaagcagacacagagtagagatgcatattagtgtctattaactttggggatttgcagaggaatagtaaagtrttgctttgggtatcttttaaaactttaaaagagtttaatttttgtctgtattgccaaatcagattagaaagagctaagttccattagataattggcatgtgaggtatgaaaatgaattgtccctagaataaaaagatttttttttgagaatgggggtaggggtgagaaggtaagtaacaaatagtgcacatgaggtgaagcagaggagaaaacctagatggcggtggtgttttccatagaagaaatgcatcagcattgtaaggcaatcttatatatgttaaaaataaaaataaaaatagagaagtatacataaataataaaaaatttaaagttttattccaaatcagcttcagatttaaaatgcgtttgtgtgtgtacttatacaaaaataaaacatttgaaaaaagtaaaaaagggatgttaatagtattacc

SEQ ID NO: 863345 - DNA, 580 bp, Homo sapiens
ttaatttttgtctgtattgccaaatcagattagaaagagctaagttccattagataattggcatgtgaggtatgaaaatgaattgtccctagaataaaaagatttttttttgagaatgggggtaggggtgagaaggtaagtaacaaatagtgcacatgaggtgaagcagaggagaaaacctagatggcggtggtgttttccatagaagaaatgcatcagcattgtaaggcaatcttatatatgttaaaaataaaaataaaaatagagaagtatacataaataataaaaaatttaaagttttattccaaatcagcttcagatttaaaatgcgtttgtgtgtgtacttatacaaaaataaaacatttgaaaaaagtaaaaaarggatgttaatagtattaccccatagacttgttatgaaattaaatggaatactatacataatgtacttagcaaataaatgcatgctagcattacttcattatttacagtatttcaaaattaaagtaccctcctgtgccccatttctcgttccctctccagaagcaacagctgtggtgaatttgatgtacaaccttactgt

SEQ ID NO: 863346 - DNA, 654 bp, Homo sapiens
ttgtatattatggtttaactttgcttatgatatctgtggttatacaacttttttaactttgaaatagtcacgtttattattttcttattttatgccttaagctttattttatccttttgcttgcaattgtgttttggtatgtttttatgtacttcaatggttctcaatatttagcaygcattaacaataatacgaagagcttgttaaaattactgaacctctggccactttttcttgaagattcaggagttccaaggtgcgcaagagcatagaaagtcatacaaggtgatctgcaaacacactttgggaattactgcagtgcaccatattggaatcaccattggccagaagaccagaggactgcccttcattgaattattgtctttttaaaaaaaaatcattattttgggcttccttgtctgaacaagctacgaatatgggaaaatgcttagagacaaatgtacagattaactttgagggaatgttgtttatttttcagtccttccaagtgttcctgaaacaaggagatatttgaagtctctccagcctgatatccccagtggaaataagtcaatgttggaacaagaagtatgagcaaccagaatttaaaaaaatcttgctaaggtatattttcattattttattcatgtcttt

SEQ ID NO: 863347 - DNA, 599 bp, Homo sapiens
tcaaactcctgggctcaagtaatgctcccaccttggcctcccaaagtgctgacattacaggcatgagccactgtgccaccataaacacagttttattgcaacatagctatgcctatttgttaacatattatctgtggctgcttttgctagctgctttggccaagttcagtaactgtgacagagaccaaaacatttatcatcttgccgacttctgatttctaataactatgtctaacatgatggtaaacagaattccacaaaagtatttaaacaaatagtgatgtgacattctgtttgatattttcctggaataacaaaacttcccactgctttgagaaaaaaaaaaactcgccaatatttttatgatcaaataaaaaatacatgaacatarttacttatcatgggcttcctagaggaccaatgtgtaggatgatcatgtgatctatctccaatgtataaaccagacaggataacaataccatatctggactgtctgcaataaactgagatctacagtaaccctcttaatgttcaacaatccattcattattttctcattttaactaagtctccaaatgcattgtattctggcaactgat

SEQ ID NO: 863348 - DNA, 599 bp, Homo sapiens
tcaaactcctgggctcaagtaatgctcccaccttggcctcccaaagtgctgacattacaggcatgagccactgtgccaccataaacacagttttattgcaacatagctatgcctatttgttaacatattatctgtggctgcttttgctagctgctttggccaagttcagtaactgtgacagagaccaaaacatttatcatcttgccgacttctgatttctaataactatgtctaacatgatggtaaacagaattccacaaaagtatttaaacaaatagtgatgtgacattctgtttgatattttcctggaataacaaaacttcccactgctttgagaaaaaaaaaaactcgccaatatttttatgatcaaataaaaaatacatgaacataattacttatcrtgggcttcctagaggaccaatgtgtaggatgatcatgtgatctatctccaatgtataaaccagacaggataacaataccatatctggactgtctgcaataaactgagatctacagtaaccctcttaatgttcaacaatccattcattattttctcattttaactaagtctccaaatgcattgtattctggcaactgat

SEQ ID NO: 863349 - DNA, 476 bp, Homo sapiens
gcctcctcctcagcctaaaagaggagcaggccaacaaagaaatagggtttggaaaatacatgaggctggtgctcagctaggccccagctgtcctgcccaccctgctcaggccctgcagtcccacctgatcacccacattacttctccgccctgtacttacccttctgcttgtggccataggaggttgggtcctaaaacaattgccatattactgggagtcatcttgtttacatcttgatattctgacagcttggataaaaattttatcaagtatctaaaagaaaattagaagggccaggtttaaccaargctcaacaccagccatgtcccccggggactggacagaagcttctctcatgtcacatatctcactgactaggagactcgtgcacctgcaatgtaatgaacatgcgtcacgtgtcaggaaatggaaattctgcatcctctttccaaaaacaggcaggctcagatctcac

SEQ ID NO: 863350 - DNA, 618 bp, Homo sapiens
aaccagacaggaatagggggagctcttcagagctggaacgtggcttagagagcttgattttatcaccacccttcttcctctggcaacccatcctcagtgcaaaaggcaacaaagaaaggggtaactgtagcaagtggaaatggaaaacacatttagaaatacatttactgagtcaggtgtgatggctcatgcctgtaatcccagctactcaggagactgaggctggaggatcacttgagcccaggaattcaagaccagcttgggcaacatagcaagaccccatctcttaaaatagaaacaaatttgttgaaataaatatgaaaaataatttacttatgagatatgtacgacttaaatgtcattaacttgtatacatcttttgtttctgcaaagttagtytaacatataactgatcagaaaacttgtggcttgatctgcaatcttcttcaaataccctggaggtgggattgctttggtgaaaatgatgcagtccaaagaacaaattccttcaaagtattctattttgaccatcccattaattaaaagtggccaacatgttgataagagcagatgaaactcataaacactagttacttcatttgtttactgactcctcct

SEQ ID NO: 863351 - DNA, 549 bp, Homo sapiens
tgatgcaccaatacaggttcatcaattgtaacagactctaccactgtgtgtgtgatgttgacattgggggaggttgtatgtttgtgggggaatgacatatatgggaggcctctttgtattccacttaattttgctgcaaaattagaagtgctctaaaaaataaagtttactgatttaagaacgtttgtttaaaaaatcatttcaaaggtaaagaaaagtgcaaaatctctgtttttcagaatcacagatttgagattgagatctttgaygcaagtcaattttatttttctatgctcttctgatttgtttggcttatttttcaggatcccctattatctgtacattggttttccattatcttcaacatctgccatcttttctttcattctttttggctctcaccttaacattctagaagaaattctcaaatttttctctacatcattggctcacctttctgcagtgtcaattctgttgtttactaaaatcgattccatacctgcattattttcctacttaaaaaatatttcctaatctcattcagttccc

SEQ ID NO: 863352 - DNA, 737 bp, Homo sapiens
attcctgggtaattttttcttataaaggtttaccctatacaagtgatatatttgattaatactctcccagttgaatcatttcaaataaagtattaaagtgttgtggagttttggagaataaaatacgagatgccatggctgtaatttagatctcagacaataactacaacacaatggtagattatggaattaagttagaaccaccatctgactcatgctacctgaagaaaaaataactaaccaatatgaaagtgtttaaaatatatataaagtgactacaaacactaagtagatttttatggctttgtaactcaggattaaattttttaaaaaacagaatcatactaaatataggtatattaaaatgaagacattttcccaagttccttcttttctttttattctcatctattttttcctccagattttatcctgtagtcagtatcttgatgctttaaaaacatatacatttcccctttttataagaaattttatttacaatttacaatgttatatatataatatatatgtatgtataatatatatgcatatataatatatatacatatattatacatacatatatwttatatatattatatatgtatatatattatgtatatacatatatattatatatacatatatattatatatatacaatatatattatatataatacatatataatttttttttcatatcaagtctcgctctgtcacccaggctggagtgca

SEQ ID NO: 863353 - DNA, 737 bp, Homo sapiens
attcctgggtaattttttcttataaaggtttaccctatacaagtgatatatttgattaatactctcccagttgaatcatttcaaataaagtattaaagtgttgtggagttttggagaataaaatacgagatgccatggctgtaatttagatctcagacaataactacaacacaatggtagattatggaattaagttagaaccaccatctgactcatgctacctgaagaaaaaataactaaccaatatgaaagtgtttaaaatatatataaagtgactacaaacactaagtagatttttatggctttgtaactcaggattaaattttttaaaaaacagaatcatactaaatataggtatattaaaatgaagacattttcccaagttccttcttttctttttattctcatctattttttcctccagattttatcctgtagtcagtatcttgatgctttaaaaacatatacatttcccctttttataagaaattttatttacaatttacaatgttatatatataatatatatgtatgtataatatatatgcatatataatatatatacatatattatacatacatatatawtatatatattatatatgtatatatattatgtatatacatatatattatatatacatatatattatatatatacaatatatattatatataatacatatataatttttttttcatatcaagtctcgctctgtcacccaggctggagtgca

SEQ ID NO: 863354 - DNA, 606 bp, Homo sapiens
atagtctatgtagaaaatgccaaggaacctataaaaaaattcgtagaactaatggtttctgcaagattgcatatgagataaacatacaaaaataaattgtacatactaataatgaacacatgaatactgaaataaaaaataccactgacagtttcttaaaaaaacacttaggtgttaatccattaaaacatgtacagaatgtataggcagaaagctaaaaaatgcttatgaaataaataaaagcaaatctaaatagagagaaaaagcatgtctgtggtatttgtatctggcaaagrtatcacttctccccaaactgatcacagattaaatgcaatcccaatcaaaatcttaataagatttattatagttacagacaaattgattctaaaattgatacgaaagtacaaaggaaatagttaaaattttctagaaagaaaagcaggactcacatgatccaatgttaagatttagtataaaattaagtagtcaatcaagagagtacggtcttggcaaaaataaagaaacccagatcagtggaaaagaataaaagtacaaaaagtagacctagacaaatatgatcagtggtctctaaaaaaggcacaaagg

SEQ ID NO: 863355 - DNA, 615 bp, Homo sapiens
ggaagccttggaaattttgccacaatagatgtcattattcctctttcagttagagaagtaaggcagaaaaaaagtggacatagaggatttgaaaaggataagatagcaagatttattagattgatttatgcacacaataatttattttcaaagattaaccacttgtaagtctgtaaagcacatctcaacaaatatcaaaggtcagaagtcacaaagatgatgttctctgaccccagtgtaatttaaattcaaataaataacaagtttaacagcaaacaaatctgggatcttgtaaacacttctaaatcgataacaggtcaaaaagaattactgttaggaatttaaaatatttagagttgaaagacaatgaaaatactgtatatcaaatttgttcggtagcaaaatgatatttagaaaaaatacagaaactcaatttcttagaagagaagctgaaaatayttaagaagctgaaaatatttaagaaaatatttaagaagtaaacagaataaacttcaataaattagaagaaaaaacaataaaaaaagaaactaataatatagtaaaaatcatataggttaattctttgaaaaaaactaacaaaatggcaagcctcta

SEQ ID NO: 863356 - DNA, 524 bp, Homo sapiens
taccgtttgaaaatgttgatgtaaaatgtggcagacatttcctgaacacaccaaaaatttgacaaccagctcccgggagagtcatttcaaatcgctcaacgtatttgcccacaacagagtccagggccctgcattcatcccgcgtcccagtggttacaagtttctccttcatggacrtttgcctgggtcccgaagccacagaatgtggggcaatttgacgtctggcacctcctgcaaagcgaagatgcaggccaggaagagcagagcaggagaggagggggttggtttcagacccaccagtgaaggaatctgggctttggttgcataaattctgagcttcaagagggagccaagttagtacaactagaggggaggtcctgatgctggatcgagggagccgtaagtctcatgcccagagctgggactgcagaagccgagaaaggaggatgacaggagaggagcccggggataaatggaagcaataagcaatctgcatttcttccagcccaacagcccatttggca

SEQ ID NO: 863357 - DNA, 631 bp, Homo sapiens
ggtacccaaaatcttgattttaggatgtgtctatgtggaaaaagtaaagaaataaacaattgtctagataactagattaatataaattatagatctggataattcaaatctaaaaatctcaaatagtcatttttcattagcttatrgaattttgagaaggagttgaattatcaatgaaaaaacactttgtgattgccagtcacaaagaccacactctttatctactgaaagagatatttgtaattgtcaaaacctagtaattgcttcactctctcagggagagtctcttcgtgaatgccatagaatgaagcaagagtggcctcaacttatccaccaagatctttcttcaaactaagtgaaaaagaaaagccttctagaacaaaggactttatacaacaccaccagatctgaattcttggtgtccttcttggtcagttcatcccagaagtggaagccaccatggtggctggagaaatgagttttccaaactctcagctgaaagaaaatcaagaataataatccttgattcaccaggtggatcacactgtgatccccatgacttgtgtgtttaggggagatattcagtatctaaggcttttccctaatcaaaacccattcctgaaactgtaac

SEQ ID NO: 863358 - DNA, 610 bp, Homo sapiens
acttaccacatttcctgtatattactaaacatttcaaaccgagacagagagaaagcaggagaaagtgatttctattggcaaaaaggctcactttttttttctgtcttgtaaaacaaaagaggaaaaataatgttaaattactctgatgatgacttcttttcttgaactgcccccactcctttctcatcctattttaaataaaacctgatgatgcaaaatactgcttggcttgagactctgcagtccatcagcttgcaatggaaatgttttcttatttttatttttttttaatggctacatattaaaagtgaaccagtctttgccagctttggataaaaggctatttattttcmaccaatttgatagctgcagttttcagtaattgaattttctgtggtcagaaaagcagtaatcttagaaaccaaataaatattttttaataaaatggaacactgagaaaccatataataatgtcaaaaatgtagccacttatggatgaataaatattttaagaaatttacatttcacccaaagctttatgcttctagcttccctggagattttgaagagcataacattttgctttgggaatggaacaatgtgaggctga

SEQ ID NO: 863359 - DNA, 644 bp, Homo sapiens
aagttgtaaggatggcatgaggcaagtgatgtaatgggtttatttaatattgatactattgtagatatctaatagacatttgttccattttcccttccctctttaaaatacagtaatcatgtgatctctttccttagaaataggttctaaattttggtgggtcaaaaagtagtttttacaactaagatatggtcagaattccaagagttggccttccatttctccttcctactagggtgatgtgtgcacagttctaagggtgactttccagagatctgacaatgactcaaatgtcgggaggtagataggaccctgaagtcaccacccatgagcagaaatccctcacctgagttggctgtgctcacaataccatcakaagagtctcagagaaggcactttttaaaatcaaatgaataactaatataaatacaccaaagaaaaatggaaatagttgtttatataacagcgatagaagaaaagacctggaaaaaaatcttaaaaattgtcaatgaattgggaaaaagaagtagtgttaccatccttcccataggtaaccttccctaaaggaaagaagatctgaatatttggaagaagtgagtcctaaaggggattcatccctctacccctgcttgctctttcctata

SEQ ID NO: 863360 - DNA, 651 bp, Homo sapiens
gtcatgtttcctgtacagcctgtggaaccacgggtcaactagaactctttttttcatatgttagccagtttcagttatttctttatagaaatgcaagaattgactaatacaatgcaagagaaacaaatattcaaaactctgcattaaataagcagtataaatagaataatcatgaacaaatatcaccgaattytgctctcatatttgttacaaacttactttttatgagaaagttggttatatatttcacttaccatgcctcggttgtcctgtgtgtacctgagaactgcaatgctgcctctgttattgttttcttcctgtgtgctggtcttctctacgcagacaaattgtgtttgaaaagttggtaagttagttgcttagaactgaaaggcatactaaaatagaaattttacaataaatggtattcagattccctgaccagccactaaatgcctcaaagaaaaaaagaaaaagaaaaaaatagaaagaggaggaagagtaagcgtgtcataagttattggcattatttgttctagtaagcatgcatgtgtaaatgtgcaaatatacctatacagttacatatgtgtgtatatattacacacacatacacactgcatatgttcctattgagaccagatcctgtaatttaaa

SEQ ID NO: 863361 - DNA, 651 bp, Homo sapiens
gtcatgtttcctgtacagcctgtggaaccacgggtcaactagaactctttttttcatatgttagccagtttcagttatttctttatagaaatgcaagaattgactaatacaatgcaagagaaacaaatattcaaaactctgcattaaataagcagtataaatagaataatcatgaacaaatatcaccgaattctgctctcatatttgttacaaacttactttttatgagaaagttggttatatatttcacttaccatgcctcggttgtcctgtgtgtacctgagaactgcaatgctgcctctgttattgttttcttcctgtgtgctggtcttctctacgcagacaaattgtgtttgaaaagttggtaagttagttgcttagaactgaaaggcatactaaaatagaaattttacaataaatggtattcagattccctgaccagccactaaatgcctcaaagaaaaaaagaaaaagaaaaaaatagaaagagkaggaagagtaagcgtgtcataagttattggcattatttgttctagtaagcatgcatgtgtaaatgtgcaaatatacctatacagttacatatgtgtgtatatattacacacacatacacactgcatatgttcctattgagaccagatcctgtaatttaaa

SEQ ID NO: 863362 - DNA, 651 bp, Homo sapiens
gtcatgtttcctgtacagcctgtggaaccacgggtcaactagaactctttttttcatatgttagccagtttcagttatttctttatagaaatgcaagaattgactaatacaatgcaagagaaacaaatattcaaaactctgcattaaataagcagtataaatagaataatcatgaacaaatatcaccgaattctgctctcatatttgttacaaacttactttttatgagaaagttggttatatatttcacttaccatgcctcggttgtcctgtgtgtacctgagaactgcaatgctgcctctgttattgttttcttcctgtgtgctggtcttctctacgcagacaaattgtgtttgaaaagttggtaagttagttgcttagaactgaaaggcatactaaaatagaaattttacaataaatggtattcagattccctgaccagccactaaatgcctcaaagaaaaaaagaaaaagaaaaaaatagaaagaggaggaagagtaagcgtgtcmtaagttattggcattatttgttctagtaagcatgcatgtgtaaatgtgcaaatatacctatacagttacatatgtgtgtatatattacacacacatacacactgcatatgttcctattgagaccagatcctgtaatttaaa

SEQ ID NO: 863363 - DNA, 543 bp, Homo sapiens
aaacaacctctttaattactcaaagtgaccaaggctataatgttttactaagaaaaaaaagtgcctttctttggcattttgtagaaaatttaagaaacactttggggcatgcaatcatccctgtttatctgaaggcaatttccacatgatgaaaaagcagttcagttcatcgttcagatccatccacctactaaatgacygttcacgagatgtctgatctgagatagatgatgaatctctccttggattgcctagtactacacaaaattggtagtcaggtttgagtttttaaattttttttgtggtgttgatgatgactagaatttactgagagtctgttctgtgggcatatatcatgctaaagtttatgtgcatcatcttatttaattctcctaaaacctgttgagttaggtactattattttccccattttatagatgaggaaactgaggcttagaaagcctaaggaattgaatggttgcacagctaaaagtagtgggtcgtgaccgatgctttgggaatctacttatgaggcttgaaaca

SEQ ID NO: 863364 - DNA, 579 bp, Homo sapiens
gatggcaaaggctgccatacaaaacacttctcctaggccagagaaatgagtggagtgtttatagaagcactaccctcagaaatctacgttcacagaaaaccgttttctgagacaggttttgaaagaaggtgtggattctgcaagcctttggtctccatctgttttctcccctctgacccttggttgtttgactacatggtcatgaccctacgttgagtggggtagatggtctgtgaagatgttcatgcagcttcatcttcatgcctcccagcagtgcctaaagctctcctgctccttccttcctggaagaaatgccagaatytcacttcttaaaaaaaaaaaaaaaaaaaaaaaaaaacataaaagagaaacacaaacagagaatgagccagattgctgagggggatcaaggaatgaaatacagactcaaaagctgcatagactcagaaaccccaaaactttcccaaaacccaacctggaacatttatcttcctgactttctttagtctcaggccagtttttaaccattagacgacttacaattataatgttgacaatgcttaggttagaggtggctgc

SEQ ID NO: 863365 - DNA, 615 bp, Homo sapiens
ctcagaatccaaaagaggaaagagttaaaataaagagacatactttcatgtactggatatttacctaccggctaatacatagatgacaccaagaatggatttcaggaaagtacttaagcagagaagaatgtaggttatagaaaagttccaatgtgaaaaatccagagtaactataaggaacatgtaaaacacagattaagtctgaataccgtttgattatttgtagttcagattsacaagaatgaacaattagcacagtcatgagctaaaattctgtttgcagatttattacaaaaattaaggaatttctgacttgattgtgattactggtgtaggaacatcttcgctgtacctgattcttggatactgtttatgttgacagaaatgcatattgataggataccactgctttgctaaaacaaaatcattgtttatttttaaagtcttacaagtgtctcagcaaaagtataactcaatatcctttcttagttacatttcttaataaagcatgatttttatttgtttttaagatttcacatgcatatcaaattcactgttggagaaaaattgtaagtactacttcttaaatgattctgtgggagagtgagccattat

SEQ ID NO: 863366 - DNA, 633 bp, Homo sapiens
ctcctttagactctaggctgtatgcagggacttcttaatatgcaggaggggagctacagtctcaagcatgcttttctcagtattagaatttcagttcttgaatgtatcaactttgatgcattgtattcttttaaatttatcttctgttctggaaccagaagatttatctttctaacaatgatttaccattgttctgttttgttttattgctgtattttacaaggcttttatgcatgcttaatgtgtgtgtgtgtgtggagcgctttcttcatattctcttcttgttctcttgtcccttctgttgtgtgtgtgcttacaaatgaactctgggggtaaaaaaaaagccctgatttgtagcatttgctcattttcatagtgtaaatactcccactgtgatcaatttcaagctatggacatgacatcaacacactctcaaaattcctgaaaatgtaacagtcaactcttgcaagtgcaagtcrcgttgaactagcttcaccacaccacagttaaattactgtatatttaaagtttcggaaactctgatattgtaattcagtggaactctagtaacatttgggaatgtgcagttttatatgcattctcgtcattctaattcaggaggctgtgaaccac

SEQ ID NO: 863367 - DNA, 691 bp, Homo sapiens
cccaaagatctgggattacaggcgtgagccactgcacccggccagaagctttttcatttattcgtccagcagcatcttgtactagtcctgactggttagtatagaaacagcactcctcttctaaaaagatacacaggccgcctttctcggcagtgaggagatctaaacctcgatggttttgaagtgtcactgctgcttaaagagtcttttggaattggagagcaagtctatttgggattggagaccccttcgtggggttttgggagggcctggtcggcttgttggcagaggagatagctcatgagggagactgttgggaggtattctcctagctgagagttagaagggggcctgttttgtaagaggaaagggcgtccgtatattaactcaaatggactgaggaaggagggtgcttttggactggctctaatgctctccagtgctatgggcaaaagggaggtccatggtttttggacttcaagagtgagtttggttarctgagccttaaggatcccatttgccctttcgacttttccggatgtctggggccagcatgggatatggagacgccactggatgccaagggactgagaaacctgttgagtgatttgggagatgaagctaggggccattgtctgattgtatggagccagggagaccaaatgtagggatgatttctgttacaagaatt

SEQ ID NO: 863368 - DNA, 663 bp, Homo sapiens
gcagccattttcctcctaccaacatcatataccagggattatggagttaaaaaaaaagcatttgggcaatataaaaagaattgttttacaaataacgttttttcctgtattgttaaatacacttaatataccaggaaatttttgctattcttttttttttttttttttttccgtcgcccaggctggagtgcagcccgccaccacgcccagctaatttttttgtattttttgtggagatgggctttcaccgtgttagccaggatggtctcgatctcttgacctcatgatccacctgccttggcytcccaaagtgctaggattacaggcgtgagccaccgcacccggccaattttgctattctttcactgctgtatttaacttcaattataatcatgtttattatggtacacaagtatttcttaatcatagaatgtcttccttctctgaagttctttctctttaatttaccttgtattttaggtaaagatgctaatccccaagagaggaaggctgcaatgaagacagctgaagaatttctacagcaaatgaattattccaagaatacccaagtatgtgtgaaactgaactggctagaaaaaaatagaaaacattggagctcatgacatctccacgaaactcatgaaaaagtttgggtcaaagtaa

SEQ ID NO: 863369 - DNA, 597 bp, Homo sapiens
aacacattttcccataggtttatttcttgtgtaagaagtcagataaattatttccatttcaagtatttattattcagattatttaaagcaaagctttcacaaagccttttgtcagctttcctgtaatcctcaaataatttttcctggctggacgctttggcttactcctgtaatcctggcactttgggaggcagaagcaggaggatcacttgagcccaagagttctaggctgcagtgagctgtgatcacaccactgcagtccaacctgagtgacggatcaagttcttgtctcaaaaataaaagtaataacaataataataaattttcctctaaatacaatggtgaatgaggtagaaatgttgagttcataagagaactgttgaatagtgaaggaaactgacttaattttaatgacaggaagaatactgttacacactagcaaaaatraacttttatgctgatgtagcagtacagaatatgcttccaacccagggacgctggagccaggcttgctagctaagcgaccttggacaacttacttaaccattttattcctcagcacactcatctcaaataaggataataaaacctactata

SEQ ID NO: 863370 - DNA, 617 bp, Homo sapiens
cctcattttaactaattacttctgcaacagtcctatttctgaatgaagtcacattctgaggtactgggggttacaacttaaacaaatggataacatatgagttttctgaaaggacacaattcaagtcataacagtataagaacatgggaatatactatgatgttaggttcaaataacaggaaaaaagttgcacaatgaaaggaccctaaatatgagacacgaaatatatctgatgcatatattagtattagtatatattatgagatatttgtatataaataattagatattacataaaatatatattatrtaaaatatattatattgtataatttttaaataaggctactttttcaatgtcttactagttttttcacaatgaatatatgttattcttacagagaccaaagtgctgtttttaacaaattgttgcactctctctgtttctcttgctgtacccaccaggctgggtcacttgagaggctgccagctcttggaggtttgaattttgcctcttgtttttctcaggcagaattgtctcacacagacggtgcacgaatgaatgatgtaaaatgaatgacgtaaatgaagactcccctatcttaatggtctaggaa

SEQ ID NO: 863371 - DNA, 589 bp, Homo sapiens
cctaaacttcttagtaactttccaaacaaattatgggagagaatcagctgttaggttgggactgtattagaggctatttctgttgtcaattttgtggacaaacaatttgtcctgtatagagactaaattcttgatcagctatttcaacactgcttgcaaaaccctcatctaattcttcatctccttgaccattggctctgctgggctcttgctctgaataaattgcactgccayatttctccactccttgcctgcagggtctttctagaaagagctatgagtcaattcctgtaggtcacccacagattcatacaattggatctcaatggggctttcactgatacttttcaaggcttcccttcaccacctgatgaggggctcactctccacaccccccaagcccctgacttcattcccactctcacattctctgctgataacctcaactcttgctttatgaagaagtcattgcaagtagggcagaggggaaagaaggaagaacaccaaagggaaaaagtcaagaaagaacagagtgagaaaatgagacaggctgagagggggtgctttggtagcaggcaggcagaggaga

SEQ ID NO: 863372 - DNA, 589 bp, Homo sapiens
cctaaacttcttagtaactttccaaacaaattatgggagagaatcagctgttaggttgggactgtattagaggctatttctgttgtcaattttgtggacaaacaatttgtcctgtatagagactaaattcttgatcagctatttcaacactgcttgcaaaaccctcatctaattcttcatctccttgaccattggctctgctgggctcttgctctgaataaattgcactgccatatttctccactccttgsctgcagggtctttctagaaagagctatgagtcaattcctgtaggtcacccacagattcatacaattggatctcaatggggctttcactgatacttttcaaggcttcccttcaccacctgatgaggggctcactctccacaccccccaagcccctgacttcattcccactctcacattctctgctgataacctcaactcttgctttatgaagaagtcattgcaagtagggcagaggggaaagaaggaagaacaccaaagggaaaaagtcaagaaagaacagagtgagaaaatgagacaggctgagagggggtgctttggtagcaggcaggcagaggaga

SEQ ID NO: 863373 - DNA, 589 bp, Homo sapiens
cctaaacttcttagtaactttccaaacaaattatgggagagaatcagctgttaggttgggactgtattagaggctatttctgttgtcaattttgtggacaaacaatttgtcctgtatagagactaaattcttgatcagctatttcaacactgcttgcaaaaccctcatctaattcttcatctccttgaccattggctctgctgggctcttgctctgaataaattgcactgccatatttctccactccttgcctgyagggtctttctagaaagagctatgagtcaattcctgtaggtcacccacagattcatacaattggatctcaatggggctttcactgatacttttcaaggcttcccttcaccacctgatgaggggctcactctccacaccccccaagcccctgacttcattcccactctcacattctctgctgataacctcaactcttgctttatgaagaagtcattgcaagtagggcagaggggaaagaaggaagaacaccaaagggaaaaagtcaagaaagaacagagtgagaaaatgagacaggctgagagggggtgctttggtagcaggcaggcagaggaga

SEQ ID NO: 863374 - DNA, 612 bp, Homo sapiens
cttcaaattttaaaggttaagaaggaaggtggaaatcagcaaagaagatttagaagcagcagcctgtcatataggaggaaaatcagcagagtaatggctcctggaatccaagtgaggaaaacacttcaaggagggcatgataaatgrtgtcaacccttgtgcaccttacagcaaaactataaggcacaaaacatggtctttgttttgtagctagggaaattagtccttaaagaaatgaggtggtctgcctagagggatgcaaactgttggaaacagaaccaagcatacaactacataccagggtgccctttcccttaactcatgccacagatctccttttctgcattcccaagaggggagaggcctgagagggtcagcaacagtaccaatagggagcagagccagcgcaattctgctctttctggtggcttgactgaggaggaccttaacacccttcacagagacacaaagagttgggtgttggcttctattttcctgatgtgcatctttcagaaggtagaggatgatgcagccaagggctagaaggctttaccatgtaagcaagtatttgtacctttccagaaggtgaagtcctggccttgtaaaccatca

SEQ ID NO: 863375 - DNA, 619 bp, Homo sapiens
cttatccgttattgcatagcaaattaccccgaaatgtagtggcttaagacaacaaacattgattcctgtccagtatctgtagggtaggaattccagcaaagcatagataagtgaccctggctcacagtcccctctcacaaagctacactcagggtgttrgctggagctatgctctcatctgaagactctccttggggtagcaggagtacttgcttctaagctgtctcatgtgactggcagactggatcccttgctatgtaggcctgtttacttgattgccccataacatgatagctggcttctccagggtgaatgattgaggagagagcaaaagaggaggtgcccaagacagaagccatagtctttttataacccaatgtcttagaaacctgtcaataagtccaggccatgctcaataggctggtgtgaatatcaggaggtaatgctcactggaggtgatcttagaagctgtctaccacagaaactcattgagaagtaagattacaacccttgaaggtataccaagtccctcctaaatgacttctgctgtctatccttttttaaaaaaagtagatatggagtcttgctctgtcacccaggctggagtacggtggtgtga

SEQ ID NO: 863376 - DNA, 619 bp, Homo sapiens
cttatccgttattgcatagcaaattaccccgaaatgtagtggcttaagacaacaaacattgattcctgtccagtatctgtagggtaggaattccagcaaagcatagataagtgaccctggctcacagtcccctctcacaaagctacactcagggtgttagctggagctatgytctcatctgaagactctccttggggtagcaggagtacttgcttctaagctgtctcatgtgactggcagactggatcccttgctatgtaggcctgtttacttgattgccccataacatgatagctggcttctccagggtgaatgattgaggagagagcaaaagaggaggtgcccaagacagaagccatagtctttttataacccaatgtcttagaaacctgtcaataagtccaggccatgctcaataggctggtgtgaatatcaggaggtaatgctcactggaggtgatcttagaagctgtctaccacagaaactcattgagaagtaagattacaacccttgaaggtataccaagtccctcctaaatgacttctgctgtctatccttttttaaaaaaagtagatatggagtcttgctctgtcacccaggctggagtacggtggtgtga

SEQ ID NO: 863377 - DNA, 619 bp, Homo sapiens
cttatccgttattgcatagcaaattaccccgaaatgtagtggcttaagacaacaaacattgattcctgtccagtatctgtagggtaggaattccagcaaagcatagataagtgaccctggctcacagtcccctctcacaaagctacactcagggtgttagctggagctatgctctcatctgaagactctccttggggtagcaggagtacttgcttctaagctgtctcatgtgactggcagactggatcccttgctatgtaggcctgtttacttgattgccccataacatgatagctggcttctccagggtgaatgattgaggagagagcaaaagaggaggtgcccaagacagaagccatagtctttttataacccaatgtcttagaaacctgtcaataagtccaggccatgctcaataggctggtgtgaatatcaggaggtaatgctcaytggaggtgatcttagaagctgtctaccacagaaactcattgagaagtaagattacaacccttgaaggtataccaagtccctcctaaatgacttctgctgtctatccttttttaaaaaaagtagatatggagtcttgctctgtcacccaggctggagtacggtggtgtga

SEQ ID NO: 863378 - DNA, 654 bp, Homo sapiens
aaaggttattttattcttaggcagatgcatctgtaattttgcgtctctcagtacacatggcttccagcctcagagcagaaaccacttttggacatgacatggaactcatgtatgaaatgggctttggaatgctatatattttcatgcttagaaattttgtttgatttatttcaattcaacaaatatttattgagcacctactatgcatcaaaycctggacataaaataattcataacatgtggatgctgatcttcagaagcccttgatctagtagaaaagacagatcttgatacagtgtggcaagtgatactcatgataagcataaaacgctgtgcaagctgctaagttttggattttatttcatttttgagagtatcttagagcttatacatttttttttcttgaggtttttcttgaagtttttttcatggctgttggtccagatgaatgatggtatgacctgacttcatggctttccagtgctcttggggtatatttaaaatcttcagagttggctattggggcctgcgtgacctgaccctgcccacctcccctgcctgagctggagtcacactgctcccaggacaatgttttcctgcaacactagtggcctttcggttggtgaaggctttatattttgtcccttttcaaga

SEQ ID NO: 863379 - DNA, 614 bp, Homo sapiens
attatgataagtaaaataaacaagtctagagaggatagatattgcataattccatttatgtgaagtacctagagtggtcaaattcatagggaccgaaaatacaacagcagttgccaggggctggagagaaggagcatggggagttattgtttaatgtgtacagaattttagttggggaagatgaaaaagttctggagatggatgggtggtaatggctacacaacaacgtgaatgtacttaatgctgctgaagtgtatgcttaaaaatggttaaaacggtacatgttgggccrggcgcggtggctcacgcctgtaatcccagcactttgggaagccaagggggtcggatcacgaggtcaggagatccagaccatcctggctaacatagtgaaaccccgtctctactaaaaatacaaaaaaattagcctggcgtggtggtgggctcctgtagtcccagctacttgggaggctgaggcaggagaatggcatgaacccgggaggcagagcttgcagtgagccaagatcacaccactgcactccagcctgggcgacagagcaagactccatctcaaaaagaaaaaaaaaaaaaaaggtacatgttatattaccagtggt

SEQ ID NO: 863380 - DNA, 614 bp, Homo sapiens
attatgataagtaaaataaacaagtctagagaggatagatattgcataattccatttatgtgaagtacctagagtggtcaaattcatagggaccgaaaatacaacagcagttgccaggggctggagagaaggagcatggggagttattgtttaatgtgtacagaattttagttggggaagatgaaaaagttctggagatggatgggtggtaatggctacacaacaacgtgaatgtacttaatgctgctgaagtgtatgcttaaaaatggttaaaacggtacatgttgggccaggcgcggtggctcacgcctgtaatcccagcactttgggaagccaagggggtcggatcacgaggtcaggagatccagaccatcckggctaacatagtgaaaccccgtctctactaaaaatacaaaaaaattagcctggcgtggtggtgggctcctgtagtcccagctacttgggaggctgaggcaggagaatggcatgaacccgggaggcagagcttgcagtgagccaagatcacaccactgcactccagcctgggcgacagagcaagactccatctcaaaaagaaaaaaaaaaaaaaaggtacatgttatattaccagtggt

SEQ ID NO: 863381 - DNA, 614 bp, Homo sapiens
attatgataagtaaaataaacaagtctagagaggatagatattgcataattccatttatgtgaagtacctagagtggtcaaattcatagggaccgaaaatacaacagcagttgccaggggctggagagaaggagcatggggagttattgtttaatgtgtacagaattttagttggggaagatgaaaaagttctggagatggatgggtggtaatggctacacaacaacgtgaatgtacttaatgctgctgaagtgtatgcttaaaaatggttaaaacggtacatgttgggccaggcgcggtggctcacgcctgtaatcccagcactttgggaagccaagggggtcggatcacgaggtcaggagatccagaccatcctggctaacayagtgaaaccccgtctctactaaaaatacaaaaaaattagcctggcgtggtggtgggctcctgtagtcccagctacttgggaggctgaggcaggagaatggcatgaacccgggaggcagagcttgcagtgagccaagatcacaccactgcactccagcctgggcgacagagcaagactccatctcaaaaagaaaaaaaaaaaaaaaggtacatgttatattaccagtggt

SEQ ID NO: 863382 - DNA, 435 bp, Homo sapiens
tcaatttgagacacgaaggataaataggagtagccagaacaacaagggtggggatgacaattcaagcaaagggaatgggctgtgcaaaatccccgaagcaggtgcacacagcaggtttagaggctttccagtgctcatcgtgaccagagtgccgctggaaagcctcagagaggtgggtcaggaaagcaaggtcacagactgaaaagctttgttttccrtactagggagtttggatttattccatgaattgtttcagatattccaacagttttgggcccagtctgcatctctgagacaatttcacacatctagaagttgtacacatcttcccttttgaaatgcacggtcactatatctgcctgctcaggaatggttgtgctcttgatgcagaaacaagatatcctaggcacacactattcacgtttttgaaggcag

SEQ ID NO: 863383 - DNA, 617 bp, Homo sapiens
gcatgggatcagttcctctagcaagagatgaagtctgtggaaactctgggggacttgggagctcaccaaatacccaggtcaagaaatgtcttagggaaatgcaaaaggtgccctcggaaggagagagatgcacaggagagagggaacctaccgctgcttgaagtcagcatagaggatccggctggggaatcccttcctgcaaatccggatgccctcgaggacccygttacagcgcagctggtgcatgaccaagtagtggtccatcacacctggagagagaacgtcccgggggtgtgcctgtgaccccttcatttgttgttgatggtctgaggcaccatgagaccctccaacacatccacacttgagtgggagagtcagtgagtgggagagtcagtgccagctccaaggtagagggctgggggtggctagagcctgcctgcaggtcccgcagtgaaataatcccaccctcttggggagatgctagcaccccataaccgtggcagtaagagccaaagcattgtgctttctgtcctcagccctgactctgcagcaaggctgcaaaagctgcagagtgagtacagggtgcacttgggcttcccatgggataacccgagatg

SEQ ID NO: 863384 - DNA, 636 bp, Homo sapiens
tccggatgcaggtggggctgctcacctgcattttgcctggctgtgtctccttcttcttgtccccggtaactgcaattgttgcaaaatactggatgacacgcttggtgttcacagtcttcccagccccggattctccgctgccaatttaaaagtaaacgggataaaggagagtggaagggagggcactggtttccaagtcatgatggtacaaagaggtgttactcacgtgatgaggatagactggttgtctcgatctagaaatgcagagggaagcaaaacaaaacaaataaacaacaaacagaatgttaaaataaagtaacwttgggggtggttggagaacataggctctagttaatgtctttgccattaaccactggtatgatttgggcatgtctaatcttctttgggacaatttaggcagatttctcaaatgtgggatgtgcaacatgaccagcctgggaggtgaatgattctctactcactgtagtgaatcccacagtgtagaagttactcatgtttatagatctttaactccctgctagtcctttcccatcgcccttttccataaagaaagcaagtgtcaggttcagagcttgtggggccacagcttttcatcagcatttatagatgctggtt

SEQ ID NO: 863385 - DNA, 584 bp, Homo sapiens
agtattttttaatacactaaaaccttcctggtagttcatacagtgctataattgttcaaaatttacatttccatttacagaattacccattagtcttaaggtgaattttattttttggaacttttaccccaacttttattttgaaaactgttaaacttacygaatagctgtatgaataatacaataaattgccatataccatttacctaaatcctcgtatttttaacattttactgttttttctctctctaaacacacacatagacacatatataggcacatgtgcacgcacacacacacacacactctcctaaatcatttgaaagtaaatggcagatatcatattttagcatttctctcctaaggacatgaacattctcctatataactacaatactgttattacaaatgaaaatattaatcactgatacaataatattatctaatatacagtctatattcagatttccccagtgtaacaaaaatgttctttaagttttgtggtttcattgtttcatttttatacacaacatgggcaataggcctaaactgcaacataattttcagagagttgtaccattgac

SEQ ID NO: 863386 - DNA, 469 bp, Homo sapiens
gccaagctctttatagcatctctaaacaaaccagaatttcatgtaagtcctattatctgtcaatgtcattttgcctcccccacattcaaaaccaaattagatatgttggtgatacacatcaagaagtctttattcccatacatatatatatatatatatatttttttttttaactgggaggcagaggacaggacaggatgttgccccatctttcctgttgagggaactgaagggaatagaatgtaggccctggagtcaaacaaacctgagttggggtccctgacttgggttcagttaygtagcctctccgagcacctcagtttccttgtgtgtaataatactacttatctgatggggttgttaaagggttaaatgagctaatcatcgcagagggctttgtatggcaagtgttccgcttcgtagccaaccagtgagctgagcagctctgcggaccagacagaaagattta

SEQ ID NO: 863387 - DNA, 660 bp, Homo sapiens
caacctgaaatgtcctttatttgtttctctctcctgcttggatccaaccattttcataaagcttccctgactctccctgccagaactgctacctccctcttctgaaggcctgatattgacatgtcctttggcattcacmgtcttgcgtgagtagatctatttttaagtatttctgtgttataatctatgtgttttttaaagcttcttgaggacagggctacacttctttggagtctctacaaaattagcatggtttctcacactgtagatgtccactgatttttcctgtacttaacactcagcctaaaacataaaaaaactctttaattataagaaagtctcatgtagttgtctgctataaaaagaacagacaggagtaagtgaataaagtagaacagttcagagtatatatgttctaatcacatttttaattgaattattcattagtaaattagtgttggttttgggagagagcatggggggtaccaagtttattaaagcaagcaagaggattaatgggtgaagtcccaaaaaatttttgcataatttccccattttctctcctacctatattttgagtgaaaacatcaggataaatcatataagaggaattaatgcttattcttttgtatttacaaagatttattatctttatagtgc

SEQ ID NO: 863388 - DNA, 634 bp, Homo sapiens
cccatttacatttaaggttaatattgttatgtgtgaatttgatcctgtcatcatgatgctagctggttcttttgcacactagttgatgcagggtcttcatagtgtcattggtcttaaaattttggtgtgtttttgcagtggctggtactggctttttctttccatatttagtgcttccttcaggtrctctttcaaggcaggcctggtggtgacaaaatcccttagcattttcttgtctggaaaggattttatttctccttcacttatgaagcttagtttgactggatatgaaattctgggctgaaaatttttttctttaagaatgtgaaaattggccccactctcttctggtttgtagggtttctgctgagagatctgctgttagtctgatgggcttccctttgtagatgacctcacctttctctctggctgcccttaacattttttccttcatttcgaccttggagaatctgatgattatgtgccttggggttgatcttctcatggaatatcttagtggtgttctctgtatttcctgaatttgaatgttggctgtcttgctaggttggggaagtatttcttgaatttgaatgttggcctatcttgctaggttggggaagttctcctggataat

SEQ ID NO: 863389 - DNA, 634 bp, Homo sapiens
cccatttacatttaaggttaatattgttatgtgtgaatttgatcctgtcatcatgatgctagctggttcttttgcacactagttgatgcagggtcttcatagtgtcattggtcttaaaattttggtgtgtttttgcagtggctggtactggctttttctttccatatttagtgcttccttcaggtactctttcaaggcaggcctggtggtgacaaaatcccttagcattttcttgtctggaaaggattttatttctccttcacttatgaagcttagtttgactggatatgaaattctgggctgaaaatttttttctttaagaatgtgaaaattggccccactctcttctggtttgtagggtttctgctgagagatctgctgttagtctgatgggcttccctttgtagatgacctcacctttctctctggctgcccttaacattttttccttcatttcgaccttggagaatctgatgattatgtgycttggggttgatcttctcatggaatatcttagtggtgttctctgtatttcctgaatttgaatgttggctgtcttgctaggttggggaagtatttcttgaatttgaatgttggcctatcttgctaggttggggaagttctcctggataat

SEQ ID NO: 863390 - DNA, 608 bp, Homo sapiens
aaaacacactttacaaatgaggcatattgggttattcatattatttccattgtcctccttgaaagcagtgttttagcttctccctcccttcacccggccttcatggtctaatctagatccttgaagcctaagagcaatggtgaaggtgttagccttaattagaacacgtcaggctgggcatggtgtctcatgcctgtaatctcagcactttgggaggctgaggcaggaggatcacttgagcccaggagttcgagaccagcctgggcaacatagccagatcctgtcacatttaaaatcaaaaagaacacaacagtcttaccctgctttaatttgcaagctaattgtcaatgtcctttctgtcatacattaggtattgccatgaagaactctctaagaggctggatgcagtggctcacgcctgtaatcccagcactttgggaagccraggcgggtagatcacttgaggtcaggagttcaagaccagcctggccaacatggcaaaacccatctctattaaaaatataaaagttatctgagcatggtggtgcatgcctgtaatcccagctacttgggaggctgaggtacaggaattgcttgaactcaggagc

SEQ ID NO: 863391 - DNA, 527 bp, Homo sapiens
aagctttctcaggcaaaatcatgaagaggcaagcagggaaggaaatgagacaagcaactgccagatgaggggattgatcaggaggagcctgcagcaatggaatcacagaaatacagtcagggctcatgggacacaaagagaccaatggtgtcaggtaaataataagggaagtagcaggaaaatcgagtgggctcatttgatgccaaacgggagggaacagaatggtcaattccttggagataccaaagatgtgagaatgatgtaaccagcataaattcataagatgcctcagagaaagcagcttcaggagagcactgggagaagaaagtgactttaaaaggggggcaaatgaaatggcaagaattsttaaatagatacagcaaggcagagctctcaattggactgtttagcatgaagtggagtggcacaaaggttctgtcttgacgggagatttggggaagaattgttctccacaaaggacacctgagtatgtttgtatattagtccattctcacactgctaataaa

SEQ ID NO: 863392 - DNA, 655 bp, Homo sapiens
tgttcacatcatatctaggaatttccagatgtcttccccaatggcacagttgctctttatgaagatcacactcagaagatttatcaggagaccagtcttgggtaaccccctgccaccaaacaccctcccattgttgggaacttttagctttacaaggtcataacaaggtcatatgagtgatgggttgaattgacttccttcatattaacgtaaaggcaaccttaatgcactcagaagttcttctgaggatctcagcatactgatttcggtatttttagttgacaaccttcagcatatcttcctttgtaatgggctgtttcattttatacttgtagagcaggaactgctccaacaacccagctttcctggtttgagggtctctgcatgagttcttactggaaggtggggcctcagccgtgcttttctyttccttatcttggccattgggaaatttatcagatctagtgcaaaaaatgcctatttaagtagtggtggatgaggctttctgaggctccttcaaagtgctacatgacccagcagtaggtaggctctcagtaacacctccacaaagaagaggtgaggagggaggagactcttctgctgccactactattgcctgagtacccccattaccccgagtcttactttgagtctg

SEQ ID NO: 863393 - DNA, 663 bp, Homo sapiens
agaaaataagtaacacaaggtctgcctgaggctggaagaagtgggacagctgtggactctagataaattcagagccagggtctagtctaattctgtcacttgccagtcttgtgaacttgagaaaattgcaagtttttaacctgcaaagtcaatttgataaaccccatcttatcaaatatatatatatatattctatgtaaatcacctgacacagtgttaggtaaackttgggtctttaatgaatggtaattattactaaacttagtttgacccaagatgatgacaatcttcccttacagaattttatttgcagaatatgttagagaatactccaaataacatagaaatccacatctgctgaaatgctgcccagccagtaaaattgagtagtgtttcctcattaaagcatctgttatttggctgtggagttgtctcctttagctggaggcaactcaaagttcttgtttcgtgttagggaccgaaaacttccccggtcacttttccatccaaaccgcccctattttcattcacttcatcaccaccaaaaaccaaaccctcccttagagtttgacaaattatactcaaagtaacctaattcaaatgtctttttaatggagcagactctcgctctcccagcctatgataggggtgatggttcagtgg

SEQ ID NO: 863394 - DNA, 588 bp, Homo sapiens
tctataggcatatatttgaatcagagattgttaagttgtaatcattaggcatgtaagccataggatcaacttcttgtgtttaattactggtgcagtgtgaaacatttttctagttactacatctgtttgagttacaatgggttcatctggaaaatagagatcaaaagcattagttatataaaattattttgtgcgataaacaagaaaatatgtgtagcggtttccccctctcattgggggatatgttccaagaccctcagcagatgctgaaccccatattgtacagatacaccctgtacagcatggacccacaaaataaaggtacgatacacaccctgggtggaatggagtaggactgtaggagatttcattatgctactcagagtggtgtacaatttaaaacttataaattgtttatttctagaattttccatttartattttcagaccatggttgacctcaggtaacagaaactatggaaagcaaaatcataaataagtggggactgcttagctcagagcctgataaatagtgaacactaaaacattttagctattagttactgagtgctcttttcttttgaattg

SEQ ID NO: 863395 - DNA, 639 bp, Homo sapiens
acattcaaaacctagcataagacaagaaataactaagatcacagcagaactgaatgggagagaaacacgaaaaaaccttcaaaaaaatcaattaatctaggagtgggttttttgaaaagattaacaaaatagttagaacggtagctagaytaataaggaagaagagagagaaaaatcaaatagacacattaaaaaatgataaaggggatatcaccactgatgccacagaaatacaaactattatcagagaatactgtaaacacctctacacaaataaactagaaaatctagaagaaatagataaattcctggacacatacaccctcccaagactaaaccaggaagaagtcaaatccctgaatagaccaataacaagttctgaaattgagtcagtaattacagcctaccaaccaaaaaaagcccgggaccagacgtactcacagctgagttctgccagaggtacaaagaggagctggtaccattccttctaaaactattctgaacaatagaaaaagagggactaactcattttatgaggccagcatcattctgattccaaaacctggcagagacccaataaaaaaagaaaatttcaggccaatattgctgatgaacatcaatgcgaaaatcctgaataaa

SEQ ID NO: 863396 - DNA, 674 bp, Homo sapiens
ctactaccctgaatttatgtttaggattccctgcctttaaaaaaacattgttttattgcatatatatgattgccctaaatggcatattatttagttttttaagggtataatttatttacccattctcctattaatttacccattctcctatcaatgaacatctggcttgtttccatatatttgctattatgaatggcattacatgagcattttttttaatacttctgktacatatgggcaagagtttctccagggcctatagtagagaaattactttgccgtaacatatgagaatgctcaactttataagataatccaaattgttttctaaagtggttgttctcatttaaacactcacgtcctgtattagtttgagatgatcttgttgatccacagtctctccctatttggtgatatggtttggctgtgtccacacccaaatcccagcttgaattctatctcccagaatacccacatgttgtgggagggacccagggtgaggtaattgaatgatggaggccagtctttcctgtgctattctcgtgacagtgaataagtctcatgagatctgatgggtttatcaggggtttctgctttggcttcctcctcattttctcttgctgctgccatttaagaagtgcctttcacctcctgccatgactctgaggcctccc

SEQ ID NO: 863397 - DNA, 645 bp, Homo sapiens
tatcacagctcaattactacattaggaaatccaataagtatacaaatcaagtgtattcccttttttcgtgttttttgtttgtttgtttgtttgtttgtttgttttttctgacagagtcaccctctgtcatccaggctggattgcagtggtgtgagctcagctcactgcagcctctgccacctgggatcaaaaaattgtcctgcctcaaccacctgtgtagctaggattacaggtgtgcaccacatttcctggytgacttttgtatttctagtaaggatggcatttcaacatcttggccatgctggtctggtctcctgacttcagatgatccacctgccttggtttcccaaagtgcagggattacaggcgttagccaccatgcctggcccgcaaatgtattcttgcagttaataataacaataacttgtaatctgtggctgtgtgcaataaactattttaaactaatctcatttactaaacattttcatgagtcatgtgaacttgattgtctatttctaggatttttaggagtatgtaattcacaataatgctcatttatctcttagccaatttggatagcacccttttaagtgatattaaaaattaacttggtactaacatccagaggtagaaatatatcacaca

SEQ ID NO: 863398 - DNA, 601 bp, Homo sapiens
tcctgctattcagcagtcaacctggagaggtgatcatgggtctgcattagggcagcccagagggtggtccccataagtgaggttgaggtcattgcaggggcagggtgagaggtcaggcgtttcctgctgcacctggaggatataaatggggatattttagtctctagcacaggccactccttagcctgagagagcacaaatatttacagaaggaaaaataaataggagtgctgctgcattgccggacrgtgctgctgaacttaatgaagggtttctttccccctatggatttcagagcagcctgaactaagatatgcaaacagcatatctgagatttaatggaaaggaaaacatgcatgtagcataaaagccccactattattccttagcacttaattgtaggtgaaatgcatagcagtggctttctgatgtgccactctgtccccctgcctgtgaagcaggtcagctcttcaggtagtgacatggtcagatggcacctgtcaggagcattagcctcctgaggaccaggaagcagtgatgtgcagcaacattggatggatttatgatgaggtgacacccagcagcagtgccagggacaaac

SEQ ID NO: 863399 - DNA, 562 bp, Homo sapiens
tgccagaaacacaagtatttttaaccttaattaatataaaatctattcatgtattccaccaattaataggtttggaaaattggtcatctcaataagtaaagaaaaagaagccaataaaatttaccattcatttatcatttatgtaggagacctagcaaactgaagttatgagggaattttattttattttatttttgtgggtacatagtaggtgtatgtgtttactgagtaaatgtttttatacagacatgcaatgcataacagtcacatcatgtaaaatggggtattcatcccctcaagcatttatcctttgtgttacaagcaatctaattatacttgtttagttgtttttaaatgtacaattaaattacrttgattatagtcagcctgttgtgctaccaaatactaggtcttatttattctttctattttttgtacccattaaccatctccatctccccctccccctcccactacattctcagcctctggtaaccatccttctactctctatctccatgagttcaattgttttgagtttaaggtctcacatataagtgaa

SEQ ID NO: 863400 - DNA, 606 bp, Homo sapiens
cgtgtcctctaaaacacatctgtgagagtcaaccgtgcatatctagaagtcgagttgttcatctgaaacaggggtcaacaacacagataggaaatgtttcagtcttttgacaccaaatggtctttgtcacaacttctcagctctccactgtggcctgaaagcagctgtagacaatacaaaaatcagcgaatgctgctgtgccccagtaaaaccgccagctgccctcctggaacaygtgtctcttcagcgtcaccagatatggtcaaattcctccgagtggctgcacccacttagcctgcccccagttctgtttctcagttttctcccttcccattttcttgccttcatgactcttgtagcactgaaaatagacgttgcttcaagtcaacagatctgcatgttttcagaagcctgagctcattgaaaagatcgtgtttggagttcagagagaagagatgtatgtgtgtatgagcgagtgagaaagagagagagattttgaaggccaacagagaaggggagagatttttccccagactgtagcgactacaggttggtcacttgagcagtgaggactcatttagttctctgggatagaatgtggtcaga

SEQ ID NO: 863401 - DNA, 615 bp, Homo sapiens
ggcccactggaccggtcatcggggaccccctttaagccttcctgctagaagattcttttttctaaagtcgaaggctgcagagttgactaggagaggacagagcttttccttcaggtgaaagggaatgactgtcattcattctcaaagtggaaagccacgtactggcaggtgcactcccaggtcaacgcggaagtcatgagttttgcgggttttctgcttaggctggatggaagctactgtcttcctcgaaacgtgtgaaagcaatgagatcattcctcttctctgaggtgggggagatggggagaccggcctgagatacaaaaagaaaattmtgaggtagggactgggcggggggacccagagggaggactgagagcgagagccagggaggcaggcagacagtaggctgggcaaagccagaggagagaggctgcgggaggtgagagtctgagccgagagtgaccccaggttgaatcagggataaacgctggaatgggctgtaaccaggaatgagacgtctggcattttgtaatttctggagaattcctcttaaattccctttcccttcagtaaacatgatgaaaaaccactgcccgccatgtgtgtggtctccgt

SEQ ID NO: 863402 - DNA, 569 bp, Homo sapiens
aaaaatggctttgtcttcattcagctctcccgatttattctgtgttttacaaatagaagctcagagcttctgtcgcccagtccttgcatgactcatggcggtggccacacgggtttcagggataacgggatgtttagaaaatcgctgcatatcggagtttcctagcacgttccatttatactgaacgcaggcggccgctgaaaatccagcctcgactcttgctaatgactgggtaggaccctcggggtcctgcgacggtgctggagggtgttcccggctccgatgcggggaggcctgcgcggggactaggttctcgagaggcgagcgggcgcgccagagaacccgagactgctgcggggmcggatgcgggatccctgggctgcggttctgcgcagaaacgccaatggccatgcctccccagctcctcccagccccagtcactaggccggcgcctggcccggagatcctcccagagccctggcggtgccatcatgccggagaagacaagctcggccccgctggaattcgctccaaacacagatgctcatttttggaatattctagaaaaa

SEQ ID NO: 863403 - DNA, 543 bp, Homo sapiens
acccacttctgtctcttgaaatgtccttacactaccctgggcatggacaaacaaagcagagatgagaaacaggaagcccttggtacttaaaaaaaaaaggtcaaatatttctattctcaaaagtccagcattaattatgttatgatttaaatctatcattatagataattttaatataaatgccttgaagcatgtatcttaaggtgtaccagttacctatgtgtttggactaaatgrtttcacatacgtatatataatatacccattctacgtgtgcatatatatatatgtgtgtgtatacatggtctatataccaaatcatatgcttatattaacaatcagttatgttaaggatggaggcagggtggggtgctataaatcatcagtcccatttaaaataacaacattgcattgactgagactagtgtttcatggttcattgtgtgttgaggggagcattcctatgtgatcacaggctgaagaaatcccctaccttttctattatcatccaaatttttcactgtgtttgcccacttgacgcat

SEQ ID NO: 863404 - DNA, 546 bp, Homo sapiens
ataacccacttctgtctcttgaaatgtccttacactaccctgggcatggacaaacaaagcagagatgagaaacaggaagcccttggtacttaaaaaaaaaaggtcaaatatttctattctcaaaagtccagcattaattatgttatgatttaaatctatcattatagataattttaatataaatgccttgaagcatgtatcttaaggtgtaccagttacctatgtgtttggactaaatgrtttcacatacgtatatataatatacccattctacgtgtgcatatatatatatgtgtgtgtatacatggtctatataccaaatcatatgcttatattaacaatcagttatgttaaggatggaggcagggtggggtgctataaatcatcagtcccatttaaaataacaacattgcattgactgagactagtgtttcatggttcattgtgtgttgaggggagcattcctatgtgatcacaggctgaagaaatcccctaccttttctattatcatccaaatttttcactgtgtttgcccacttgacgcat

SEQ ID NO: 863405 - DNA, 573 bp, Homo sapiens
ctagactcttcctcttcctcctgggcacttctggcctgagctctcggacaaaccactatttttctcctgtaggttccctaatttggatgggtaaaatgaggacatttaaggcagccacagttggcaagcggtggtataaatactactctgcagtagactgagagaacaataatttatttatatattaactcatttagtcctcccaactaaaggagatggctcccttttataaaagaggaaactggtatgaagaggttaaktaacttgccttcagtctcacatcccgaagaaggtccagtaggctttatacttggcaggaagggttagactcactgtgctttactatactactgactttgtagctttgctcctaaggtagtggctaaatgcctcctctcccaagtcacatttcatgtggatttccttgctttccttatcacccagagacagaaaggagtcaggggttgggggacagtgaacagcttcctttggagtctttcattcaaattctggctctctcccttacgtaccatgtgacttgtgtcaaatctccatatcctcatctgtaaaatg

SEQ ID NO: 863406 - DNA, 690 bp, Homo sapiens
agtcttatgttctttgcccttaggccagagttcttcgggaaaccaagccaatccctaacctcatctttgccatagaacagtatgaaaaatttctcatccacctttctaagaagtccaaggtaaacattctcttattatgtgctaccattcccatttaccttcttgacagatctggcaaactgaagcagcacaactacaatggaggaaaagagactctgggccatttgtgtgtttgccatcccccctctcccccccccccytttttttttttgagactgtgtctcattctgtcacccaggctggagtgcacattcaagtgatcctctggcctcagcctccagagtagctgggactacagtcatatgccatcataccccactagttttttgggtttgtttttgtagagatggggtctcactatgctgcccaggctggtctcaaactcctggcctgaagtgatccttccaccttggcctcccaaagtgctgggattacaggcatgagccaccacactcagcctctttgctgttcttgatctgatgacctgaaccccagcatacagaaggaagtgggtgcgtgcttgctttaggtagaaatggaaaggtttctcagaggtgaactaaaaatggcttaagctgttctggcaggacctatgagtagggagatgtcccatgcttacaatcttgtcat

SEQ ID NO: 863407 - DNA, 632 bp, Homo sapiens
tattacaaggtggggggtcttcaggaggtgattaggtcacgagggtagaggactcatgaatgggattagtgtccttacagaagaggccccagagaactgccttgcccctcccaccacatgaagacacagctagagggtgccatctatgaaaaggaagcaggccttcatcagatgtcagatccatcagcagtttaatattggacttcccagcctccagagctgcgataaatgtgttgtttataagccatgcactttaaagtgttttgatatagcagccaaaatgggccaaggtagccccatgctgaatagacaggaatgggatgatttagggttaatgacagaagaagaaaagccagagaccggcacaagaccaaygaaaatgtctgtttgttggtgtccaagaggaaaaggtggaaatggatggatctctcctaaaggttctaggcaaatctgtatttatttattcagatttaatttattcatagctgtgagagaggctgggtaggagatgccagagtgatctgtgcaaggacttggatgggtttccttttccatccaatgagtcaatccaccaggatgggctgggtggtcccacacatggggagcaggctggggcagccctgcaacctctc

SEQ ID NO: 863408 - DNA, 412 bp, Homo sapiens
atctgtatttatttattcagatttaatttattcatagctgtgagagaggctgggtaggagatgccagagtgatctgtgcaaggacttggatgggtttccttttccatccaatgagtcaatccaccaggatgggctgggtggtcccacacatggggagcaggctggggcagccctgcaacctctccagcaggggatccaagggaaaatgctgcagttgtggtcagatggcaaggggtaggaagctcctttaytgggcttgtgtgacataagagcccagatttgtccaacgttgtgctaagggagatgggtgcataaggtcgtgaggctgttaaggagggatcttccactcagatgtccgagtgtggtaggaagaactgcagatgaggacttaggtagtttcacctttcccaga

SEQ ID NO: 863409 - DNA, 615 bp, Homo sapiens
ctgttgcagccagcaaagcaggcagacaggtaggtgatgccatctgccccacacactggagtgaaggaatcggtttggcattcacagttattattgcagggcgagtaggggtccagggctgagccaggtgctgtgctggaaaagaaaggaaacacggaagccattagaaacaggtcaattcggaatcagatgcccccagtgacagccttttgcctctgttgtgatgagtcgcgtggtaccctgcttatgggattgttacctggttctcccttcccttttcctttaccaacsttagcctatcctgtccagcaaggagcagcccagggccactgctgagagctacgtgggttgtgccctggccaatgatgccagcttgggtggtgggctgggtgggagctgagtccactccagcccctctcatgaagcgaggaggaagatgctttttatcactggtattgacgtgccctctgggctggtggcagttgggactgctcagggccaccccctccacgatgcctctcctgattgctaaggcctcagcttatccccctgtcctgaacactgctatgcctgcaccactgaggatttaacttcttccctctttgggctggttct

SEQ ID NO: 863410 - DNA, 615 bp, Homo sapiens
ctgttgcagccagcaaagcaggcagacaggtaggtgatgccatctgccccacacactggagtgaaggaatcggtttggcattcacagttattattgcagggcgagtaggggtccagggctgagccaggtgctgtgctggaaaagaaaggaaacacggaagccattagaaacaggtcaattcggaatcagatgcccccagtgacagccttttgcctctgttgtgatgagtcgcgtggtaccctgcttatgggattgttacctggttctcccttcccttttcctttaccaacgttagcctatcctgtccagcaaggagcagcccagggccactgctgagagctacgtgggttgtgccctggccaatgatgccagcttgggtggtgggctgggtgggagctgagtccactccagcccctctcatgaagcgaggaggaagatgctttttatcactggtattgaygtgccctctgggctggtggcagttgggactgctcagggccaccccctccacgatgcctctcctgattgctaaggcctcagcttatccccctgtcctgaacactgctatgcctgcaccactgaggatttaacttcttccctctttgggctggttct

SEQ ID NO: 863411 - DNA, 569 bp, Homo sapiens
tccccacgctctcccacctgctccaaaagcttgagaaaaaagttaatccagtccctgtgctgatgaatcaaatagagacacactcatatcctgcttcttcctttttatctttaacctaaaccaaagcatcctcatcccgtccayggcacctgcttaattaccaagcagagcgacacagccagagcacaccctggtaacagaaatgggcacaagatacatctctggaggcttcccatcaagccaatccctcacatgaaagccctgatgcaatgctctcatttggcactttaccctttctgcttccaaaaaggatgtggagtaacctactgctgcagatgtcacaggcttctactatgtatcttcccataaagggaaactgctgatagggtatggcagacacaccttactccttattcagtggaatgtttctaaaatgatgccagagccccagtccagaccaaataaatcagaatctctggcactaggtcccagacatattttttaaaagctccccaaggcattctaatgtgcagccaggggtggcactcactgggctaaggccttgcagt

SEQ ID NO: 863412 - DNA, 569 bp, Homo sapiens
tccccacgctctcccacctgctccaaaagcttgagaaaaaagttaatccagtccctgtgctgatgaatcaaatagagacacactcatatcctgcttcttcctttttatctttaacctaaaccaaagcatcctcatcccgtccacggcacctgcttaattaccaagcagagcgacacagccagagcacaccctggtaacagaaatgggcacaagatacatctytggaggcttcccatcaagccaatccctcacatgaaagccctgatgcaatgctctcatttggcactttaccctttctgcttccaaaaaggatgtggagtaacctactgctgcagatgtcacaggcttctactatgtatcttcccataaagggaaactgctgatagggtatggcagacacaccttactccttattcagtggaatgtttctaaaatgatgccagagccccagtccagaccaaataaatcagaatctctggcactaggtcccagacatattttttaaaagctccccaaggcattctaatgtgcagccaggggtggcactcactgggctaaggccttgcagt

SEQ ID NO: 863413 - DNA, 609 bp, Homo sapiens
ccatgccttccacctaagccccatctcccctgcaggtgggaaggggtggcacagggtcctgctcaccttctaggcctcatttagaagactctagatgctcagcagttgaaatgcatttataatgttggtttattgtccatgaaaccaggagttctcagattttaaagtgaacaacatggggagggagcggtgtgactgaaaattgtaaactctcagagattctggttcaataaatctgggtatggccctgaaatctgcatttgtaacaaarcactctattatacacacatgaatctgatgcagatggcctgtggatcacacttagagaacactgctaagcaattaacttataacaaatgccccaaaattgtttgctcattcattcattcattccaatgtctgtctgcccactatatgcctatcctaggtacttggaggaataaagaagagaatcaagaattggatcttaccctgagagtctatctagcacaggagttaagacatggatataaatcaccaatgtaaaccaaggcacgatacagaaagtaacaaatgctgtcagagcatggagatcatgagctacagaaattcagaggagggagagaaacc

SEQ ID NO: 863414 - DNA, 618 bp, Homo sapiens
aagataattttcacctatttcactgggaagaggatcggtggagctcctcatgctgtcatgctggaagtcaatcctccttatagcacgtgtgtgtatgtgtgtgtgtgtttctttgtatgtcatttttagtagtttgctttaggtattacattatgtgtgtctcatcactgtcttctgttgtcatgttatcagttcaagtgaaacatagaaattttacctccctggaagtccttttaccctcccagtttgtaattgtcttaaatatttcctctgtatacttttagaaccacaccagaaggtgatataatttttgtttcaatcatcagacataatttaggaaactcaagaacaaaaaaccttttatacctacttttatttttgcttatatatttttttcctctttgatgttctagggtttctttattcacttttttcctttctgcttagagactttcctttagccattcttttagsgtaggtctgctggtgacaattctcatagtcttgatctaagacttaggtttaagacttaaaatagtcttaatctaagaatgtcttgatctccctttcattcctggagcttattttttctggacataagattctgggttgactttt

SEQ ID NO: 863415 - DNA, 590 bp, Homo sapiens
ttttctctggctgcttctaagattttgctttacttttagtatttagaagttaatgatatgcctgggtgtcgatttctttgagtttatcttgtgtagataaactccttcttgaatctgtaggtttatgtttcctagcaaatttgtaagttttcagccattatttctttaagtacttttcagccccaccctcttcttcyagcactttaatgagtgttagatcatttgttttaaggttctgtctactatttttttcatctactgctttcagttgttcaggttggattatttcgattattcttattccaactcactgatttctctgtcctcttctttttcctgttgagcccacccactgagctttttaattcagttattgtatttttctgttctaaaatttccacttttttaaacgtcttctttttatttgctgaggctttctgtttttccatttgtttcaagcatgttcatagttgctctttgaagcacttttgttatgtctgttttaaaatctttgtcagataatttaacatctctatcatcttggttttggcttttttaactcatttatcttcttttcattcagtgtgaga

SEQ ID NO: 863416 - DNA, 596 bp, Homo sapiens
taatgctctggagtagaaggatcctgagatttctcctattcttaacacctgtttggttatttgaacacttatgaatggagtggaaagaagatttatgatatttccagtatcagtcacagaatttgcttctagtaaccatggtttttaagttctcagaacatagagaaaaaaagggattggccttattacagattcttttttttttttttttttttttttttttgagacgatgtcttactctgttgcccaggctggagtgcagtggcgcgatctcggctcacagcaagctccacctcccgggttcacgccattctcctgccttagcctccgggagtagctgggactacaggcgccygccaccacgcccggctaatttttttgtatttttagtagagacagggtttcaccgtgttcgccaggatggtctggatctcctgacctcgtgatccacccgcctcggcctccaaaagtgctgggattacaggcgtgagccaccacgcccggccaagatttttaggttttattagcgtcatgatgcttgacttaccaaaaacactagggtgtggtcatctttgcctagttctctgtgtgtacac

SEQ ID NO: 863417 - DNA, 697 bp, Homo sapiens
agtgattcatttctatgtatgacttggccagaattgcataactcattgacctatcattaagtgttattgacttggtccattagcatttttaaaacactgcacagttgacccttgaacaatgtaggggttgggataccaatccctcgtattgttgaacatccacgtgtagcttttgattcctcaagaacttaactagtaatagccttctgttaattgacataaacagtcactaaacacatattttgtatgtttacatatatatacatgtagacatatatatatgtatgtatgtatattttttgagacagggtctctgttgcccagactggggtacagtggcttgatcatggctcactgcaggcttgacctcccacactcaagcagtcctcctccctcagtctcctgagtagctgggaccacaggcgcatgccaccacatctggctaattaaaaaaaaaatttttaaacaattgtagagatggagccttgctgtgttgcccaggctggtctcaaactattggcctcaagtgattctyccatctcagcttcccaaagtgttggcataagcctctgcaccagtgagaacttttttaattatgggattgttttaatagcctttaatatgctaattcatttggcaagtatatactgagcatcttctctgagttagagaagaatcccatgcaaaatgtgaagct

SEQ ID NO: 863418 - DNA, 647 bp, Homo sapiens
cctttacaccactgctgtaggcaaaagtcatggggctaagtcagtcccaggagggacactgactcttctttcatggataatccttttcccctggcactcaggtgggatcaaaaccgagtcatccactattccgggggagatctgatagctgtgtcatctaatcgaaagatccatcttctggacatcatacaagtgaaagcgatacccgttgaattccgaggccatgctgggagtgtccgggccctcttcctgtgtgaggaggaaaactttctcctaagcgggagctatgacctaagtatcaggtgaggagtccaaagrcatcatgatccctgtcccacctagggcctagaggcagctcatggaagaagtgtgcatgcttcttctttttatagttaacagttttcctagaagatactgacttctagaataccttcagcttattttttttttggcaaggaaaaagtcaggaatgtatatattgcttaacatttgaatgagatggatttataacagttatcagatatattttctaattgatgactgcaaatcagaaaaattttctttattagcattcttagaggaagaaataatttacatttgttcttacagattctttcaggggaacgtggttttttatgggtttgaga

SEQ ID NO: 863419 - DNA, 647 bp, Homo sapiens
cctttacaccactgctgtaggcaaaagtcatggggctaagtcagtcccaggagggacactgactcttctttcatggataatccttttcccctggcactcaggtgggatcaaaaccgagtcatccactattccgggggagatctgatagctgtgtcatctaatcgaaagatccatcttctggacatcatacaagtgaaagcgatacccgttgaattccgaggccatgctgggagtgtccgggccctcttcctgtgtgaggaggaaaactttctcctaagcgggagctatgacctaagtatcaggtgaggagtccaaagacatcatgatccctgtcccacctagggcctagaggcagctcatggaagaagtgtgcatgcttcttctttttatakttaacagttttcctagaagatactgacttctagaataccttcagcttattttttttttggcaaggaaaaagtcaggaatgtatatattgcttaacatttgaatgagatggatttataacagttatcagatatattttctaattgatgactgcaaatcagaaaaattttctttattagcattcttagaggaagaaataatttacatttgttcttacagattctttcaggggaacgtggttttttatgggtttgaga

SEQ ID NO: 863420 - DNA, 647 bp, Homo sapiens
cctttacaccactgctgtaggcaaaagtcatggggctaagtcagtcccaggagggacactgactcttctttcatggataatccttttcccctggcactcaggtgggatcaaaaccgagtcatccactattccgggggagatctgatagctgtgtcatctaatcgaaagatccatcttctggacatcatacaagtgaaagcgatacccgttgaattccgaggccatgctgggagtgtccgggccctcttcctgtgtgaggaggaaaactttctcctaagcgggagctatgacctaagtatcaggtgaggagtccaaagacatcatgatccctgtcccacctagggcctagaggcagctcatggaagaagtgtgcatgcttcttctttttatagttaacagttttcctagaagatactgacttctagaataccttcagcttattttttttttggcaaggaaaaagtcaggaatgtatatattgcttaamatttgaatgagatggatttataacagttatcagatatattttctaattgatgactgcaaatcagaaaaattttctttattagcattcttagaggaagaaataatttacatttgttcttacagattctttcaggggaacgtggttttttatgggtttgaga

SEQ ID NO: 863421 - DNA, 613 bp, Homo sapiens
agacatttggaactcagtgaagaggtgaggtgtttctgcttcctccttaccacccagtcccatgtcaccatccgctccagttggcagattcttcttgctcccacgacagctcagaagcccttcaggttgtggacaacatggtttttgtgtgttttttcaagctctcctgacttgagtctgggttcaccctcctctgacgatttttctcttccacaaagacttgtttaactagttcttgtgaaggcagactctattcttttccacttcattcccaaaactcctttgtcgaagaaaataaggatctcaccaagggtttccacagaaagcttgggagatgaaaaataattgaaggcctctctagctcctgcctcctttcttaatgactttatcaccatagggtaagtttaggccattctgccattcctttgacactgacacctctgataccttagctaggrtccagccgttgccatctccaccaagaaagggctaaaattatttgctccttagcttccgggtagaatcagaggactgtgaagggtggtggggagaaccctcctggctgagctgacctagaccaccttgatgatggtgaagatgtgaacttagctcg

SEQ ID NO: 863422 - DNA, 666 bp, Homo sapiens
aaataaattacttgctatggaatatttgccgtaggatatgcttctgattacccaaattaagacaggattcaaaaagccattcataatataccaaagcacgtacaatgcctggccaaagctgtctaagtgyatcagctagggtcctagcaaaaatgatggcaaactcaaaggttttaactgaaaagcatttaaggaagaaactacttaccaaaatttgaatgatgttaaggaaaccaataggagatggagaagcactggagactagcagagccagaaagatatttcctaaagagaagaggagaaagaattgtgctagtggagtcatgtcagtgatggagccgtggaagagaggccaccaggcagaagctgcaacagtagagggatgtggtcatcgtaagaccatggcaaggcaggaaaggagtggggataagtgcctagacttttccctctttccatcttccaacctcctgccaattcttcctgttggcagaacccaataaaaagccagagggcacaggagtctgctgtggtaatgaaatcaatgtaagtcagcctccttggtcacagagcatgtcagaggagggtataaatggatctgggcatggtaagaagaaggaaaattatcagcaaactaagtgagtaatatctaaataaatggaatggaaa

SEQ ID NO: 863423 - DNA, 629 bp, Homo sapiens
tttattccagtaaaacttaatttatacagtcagagggccagatttggcccttggtctatagttggccaaccctgtttagagcagtcaaaatttattccctggggctgggccaactttttcttaaaaaaaaaaaaaaaaaagaaagcaacccactgtcagaataaaataaggtttctatttaaaaagaatargaggctgggtgtggtggctcatgcctataatcctagcactttggaagggtgaggcaggaggactgcttgaggccaggagtttgaaaccaacttgggcaatatagtgagaccctctctctgcaaagaataaaaaaattagccaggcatggtggcacatgtctgtagtcttagctacataggaggctgaagggtaagatcacttgagcccaggattttgaggttacagtgagctctgactgtaccatttgtactctagcctaggcaaagagggagaacccaaaaacaaacaaacaaacaaaaggttggttggggcgggttggagaagaaagtatttctgaatttctggataggttactggtagtgtcaggccaaacaagctctacagtcatattcattataaataaaggcaactagaagatctccatctagctattaaaa

SEQ ID NO: 863424 - DNA, 580 bp, Homo sapiens
agctgaccctggaataacactctgatggtctacaataatacaatttttttcatgccctcgggccaaatcttctctcgacaaattaaatcacagtgaaactcccaaggatagcggatttccaagcctttggcaagatacctacttatttatttgtttagaggcagggtctcactcccatcatgggagtgcagtagcgtsatctctgctcattgcagcctcgacctcccgggctcaagcgatcctcccacctcattttttaatttttttgtagagacacagcctcactatgttgcccgggttggtctcaaactcctgggctcaagtaatctgcctgcttcggcctccctaattgctgggattataggcatgagctaccgcacccggccaatactcatttatttaaggggacacttaaccacatgctactaggaaatcctccaaactgcccgtggattgtgtcattgtacttcctccagaagaacactagggtgaagggaagatggctgccgggaacccccattcagaattgtcgagttttgtaagttggaaaaggcttgagagactcccctgacaacccatg

SEQ ID NO: 863425 - DNA, 616 bp, Homo sapiens
tgcacttgtagtcccagctacttggcaggctaagatgggaggatcatctgagcccaggaggtcgaggctgcagtgggccgtgatcgtgccactgcagtccagcctgggcaatagagactctgtctcaaaaaataataatatgaattaactcatyagtgccacatgaaaaatactcatcgtttctaatgtgactcaaagatcttcaacatcaaataaaaacaaaactaatgtaagccctatcatttctgcaatttaactgcaggctgagaaactacagcttagccactgaagtttatggcctcaaagtcatgtcacattagggaagacatcagatgactaatcaaaagccagcctcacaatgacaggtttcttccattcacatcgtgttcctatatagagctttcatccttcctcttgaatgggtccgatgttccaccacgaggctttttgaattaaggaaaaagttgaacatctctgtctggatcatctttgtcatattttctaattatttagattttgccagtttaatgatagacgattgatgggaaaacttaagctaatgtctgttctgattgaacctataaattctggggttgaagaggctgactaaaattcc

SEQ ID NO: 863426 - DNA, 490 bp, Homo sapiens
gttttctttacaaagaaaaacacagtatgtgttcatataaataaaaatcacagtgtgaattcatataaatgtgggcattgggatagccattttctggaagaatacacagaaaactgttgaccatagtcactgctaaggtggagcttaataaggaagctcatttttatcataaaattttttggaccctttcttttaaccacatccataattttgcttgaaatctggattttatactccaggacatgggtccaggcaaagattttctgtgttaagacctcaaaagcacaggcaatagacaaatgagattacatcaaggtaaaaagcttytgcacagcaaaggaaacagtcaacaaagtgaagaatcaacttacagaatggcagaaaatattctcaaattactcatctgacaagcgattaataaccagaatatattatataaggagctcaaataactcaataggggaaaaagaactcaaatcatcttatttaa

SEQ ID NO: 863427 - DNA, 584 bp, Homo sapiens
tcttttagcttgcttatgtctaaacttaaattatcttcacttccttgtaaatgggattttactgattcccaattatgaacagactcattatattggaactgagttatacaaaaatcagaagtattcctatcacactaaatttgtaatctatgttctaaactcataattctatctcccatccatataacagaagcacatcaagcgctgtaggctcattctggcagccaatctggcattgtctttacacaatcctgcatkcaactttgtattgacaataatcaggagcatttcatcttttattctgtaacaatagtttcaggggttctccctacaggactacaggtgtgcaccaccatgcctggctaatttttgtatttttagtagagacagggtttcaccatattgaacgggctgatctcgaactcctgacctggtgatctgcctgccttggcctcccaaagtgctgggattacagatgtgagccactgcgcccagcccataaatcacacatttctttgagtttttgtaattccagcccaagagaaaccatttgatatttcaagaatggctgcacacaaatattt

SEQ ID NO: 863428 - DNA, 646 bp, Homo sapiens
tgtttttactcaattcctgtgcccccattttatctaggaagtaactaacttgcttttaattttaatgttatatcctcataggtggaagggaactgccttgtctcagatgagactttggacttttgagttaatgctgaaatgagttaagactttggggatctgtggtgaagacatgattggttttgaaatatgagaacatgagatgtgggagggtccaggggcagaatgatatggtttggctgtgtccacaccaaatctcactttgaattgtagctcccataattcttttgtgttgtgggagggactcagtgaaatataattgaatcatggggtcaatttcccccatactgttctcgtggtagtgaataaatctcatgagacctgaagacttgataaagggtttccgccttcccttgtctctcacttgctcttgtctgccgccakgtaagacatgccttttgcctttcattatgattgtgaagcctcccagccacatgtaactgtgaatccattaaacattttttccttaataaattacccagtctcaagtatgtctttattagagtatgtctttattagcagcttgagaacagagtaatattttagtgatgttcaacatttcttcatatgcttcttggccatgtat

SEQ ID NO: 863429 - DNA, 633 bp, Homo sapiens
gttttttgcttgttaatttccttaagttccatatagactccggatattaggcctttgtcagatgcatagtttgcaaatattttcctccagtctgtaggatgtctatttattctgttgatatttcttttgctgtgcagaagctcttcaatttaattaagtcccacttgtgaatttttgtttttgttgcaattgcatctggcatcttcctcataaaatatttgccaggacttatgttcaaaatgatatttccttgtttttattttctagagtttttttagttttaggttttacatttaaatatttaatccatcttgagttgattattgtatgtggtgtaatgaaggggaccaggttccatcttctgcatatgacyaaccagttatcccagcaccatttattgaatctggaatcctttctttagtgctggtttttgatgattttgtcaaagatctgatggttataagtgtgcaacttcatttctgggctctctaacctgttgcatttgcttgggttttggtttttggaccagtacaattcttcataggtttctaagaaattgctttgtaaatgtgggtgctccagtgtttggtgcacacatatgtaggatagtttaattatcttgttgaattaatc

SEQ ID NO: 863430 - DNA, 633 bp, Homo sapiens
cagggcagtctctctgatgggaagggccaatgccagactggctgtcaggccaagtgcaagaatacataggcacagtagactggttagctgtgtggtggatttttcagtaggtgggactgccactgtgttggttgtcatgcttgatgtttgtgcacatgggtgtggtggtttgtctgcgagttcagcagcttccccactgtccagttacaccgattttctgtggtgtttctctttggattttgatgcagtggtgtctcagttctttcatcagtcctaggttccatgtcatttgttgtaacataaatgaacttagaggatatcatattaagtaaaataaggcagayacataaagagaaataccacatgataacactcacaatttctaatctaaaaacaaaataggttgatattataagtagagtgtggaggatagagaaaggttggccaatgcggacaaagtacatcataatgggaggaataagttctggtgttctattgcacagtgggataaatatggttaagagtaagatattacatattacaaaatagtcaaaggagaggcgtttgaatattctcaccacaaaaaatttaaaagcatgaggagatggatatggtaattaccttcattttatc

SEQ ID NO: 863431 - DNA, 690 bp, Homo sapiens
agttacataagaaatgtatatattcacatgaaggttctctccgtgagtcccctggcagttatgatggagaagtagaaactgtgttaattggatggtcagggtgaagagaagggttgtttactcacactgtgtatctgcttatgtgtgtgtttcaaggaactatctggtgtcacaactcaasacacagaaaaatagaaatacgaaatccagagataccacaaggctcaagagtgaaattctgctttacttgagatttttcagagcctttctttagatggatagttttctttagagtttagatcccttcctttcagcctaagtggagtactgacagagaacaaaaaagtcattttggattaaaggtcacagtgacaagtttcatcactcaagtcacagtagacgtataaccctttatcatatattaacatgttagctctctaagcaatggtgcataataaatagatcaatttttcagtcggaatggcaaaggagacttagagacacaaagtaagattcagtgaccacattatgatttttaaattttggtggctcttctttctttctcattaaatgcaggcttaaaaggagtccttgaaagtttctaattcaaccaaccactcctctcacatacagtaaaagagcctcaagactgtataggttacctattctgactaaatatgaaatgtcaaa

SEQ ID NO: 863432 - DNA, 621 bp, Homo sapiens
caaattggaaaagaggaagtcaaactactcttctttgcagatggcataatcttatatctagaaaaacctaaagactccaccaaaaaactcttagatatgataaatacattcagtacagttacaggatataaaatcaatatacaaaaatcagtagtgtttctatataccaataatkaactagctgagaaagtaatcaagaaggcaatctcatttacagtaactaccaaaaaagtacctaggaataaatttaaccaagaaggtgaaggacctgcataaggaaagctacaaaactgatgaaaaaaattgaagaggatacaaatgaaaagattttatgtttatggactgggataattaatataattaaaatgaccatactgcccaaagcaatctacagatttaatgcaatgattatcaaaataccaatgccatttttcacaagagtagaaaaaaatcataaaattcatatggaatggaaaaaaaagtcagaatagctaaagcaatcctgagtaaaaacaaaaacataaacaaaaacaaaaaacaaagctggaggcatcacactgcctgacttcaaagtatgtttcaaggctatagtaacccaaacagcatgatattggtataaaa

SEQ ID NO: 863433 - DNA, 621 bp, Homo sapiens
caaattggaaaagaggaagtcaaactactcttctttgcagatggcataatcttatatctagaaaaacctaaagactccaccaaaaaactcttagatatgataaatacattcagtacagttacaggatataaaatcaatatacaaaaatcagtagtgtttctatataccaataatgaactagctgagaaagtaatcaagaaggcaatctcatttacagtaactaccaaaaaagtacctaggaataaatttaaccaagaaggtgaaggacctgcataaggaaagctacaaaactgatgaaaaaaattgaagaggatacaaatgaaaagattttatgtttatggactgggataattaatataattaaaatgaccatactgcccaaagcaatctacagatttaatgcaaygattatcaaaataccaatgccatttttcacaagagtagaaaaaaatcataaaattcatatggaatggaaaaaaaagtcagaatagctaaagcaatcctgagtaaaaacaaaaacataaacaaaaacaaaaaacaaagctggaggcatcacactgcctgacttcaaagtatgtttcaaggctatagtaacccaaacagcatgatattggtataaaa

SEQ ID NO: 863434 - DNA, 620 bp, Homo sapiens
agagcagtcaatggagacaaaagatgattcctgacaagactaacaaaataaagaaatctatagggaattggaaagaaaaaatgcataatactgtaaattaaaaggggacacaattacagatacagcagagatttaaaagatgataataagagaataatagattcatacaaataaatttgaaaagtcagataaaatggatggattctaaataaaagtacttcaaattctaagaaatagaaagccacattagcattacaagtgatcaataaatcaaagcagyaattttatcttcccataagaaaacatcaggcctatatgctttatagatgaaatctatcaagcatttgaggaaaagatcattctaatcttattcaaatacttccaaaaaccagaaaaagagggactacttccaaatatattctatgaagctagtataattttgaaaacctaacaaggatagtaaaggaatgaaaaattaagggaccatttcacttataaatatagaagcaaaaatcctaaacaaaatattaataaaccaaatctagtaatgcataaaaggataatttactataatcaagttaggtttctcataggaatgcaaggattggttaacattagaa

SEQ ID NO: 863435 - DNA, 628 bp, Homo sapiens
gatggacaaaaaagcttaaggcttatagaaaacaaatagcaaaatgatggaaataagtccctcaacagtaattactttaaatataaatggattaaactttcccatcaaaacacagagattggcagcatggataaaacataaaactagcaagcaaatctcaggagcatattaaaaggattacacaccataaccaaataggacttattcctggaatgcaaggatggttcaacatatgaaaattgatcaaggtaatatacacattaacataatgaagggaaaaaattccatggccatcccaatggatgcataaaaagcatttcacaaaattctacatcctttgatgacaaaaacattmaaaaaactagcaatagaatgaaactgatataaaaatcatatatggaaaatcacatcccaaatatcatactctatggtgaaagactagaagctttttctctataatcaaaaacaagaccaggatgtccacttttgccccttctactcaacataatattggaaattttagctagagcaattaggcataaaaaagaaataaatgacattcaaactggaaagaaagaagtaaaattatgtctgttcacagatgatctcatatgtagaatgccctaaa

SEQ ID NO: 863436 - DNA, 710 bp, Homo sapiens
cagatgtaatgctgagagactgtccagtgcgctgcgttctagaacatttttgctgatagggaggccgtaaagtgaggggctggttttggagccaggcagattgggttctaatcacagcgtgtcccagaatcagctgsggacctagagtgagttgtttaatctcttaaagtatagtttttatcattttcaaaatgagggttgttggaaatgtcaaatggttgttcagcaagtgtttgttgagtccctagtgtgtgtctggcacagagctgagtgcagagtatggggtgctgaatactgcagccacgcatcctgccctctggggacgggtgcagcttgggattgtgttatatttgtagcagttctgatgacaacaagaataaaataaaacacctggatttgtttcatgaacataaccctcaaatctgcactcccctattacgtgtttgggcaactgagttttggaacctacatatcagactcaaatgttttcttctggggggttacagtctggggaagacccctgtgtaaagcatgtagcatagtgcctgtggacaggagagcccagtccgtgacggcggtaacaatgatcattactacctctgttatttcctgtagccaactgacatctttgcacctctgtttcctcatccagaaaatgttcagctgaattgcagtcctttcacagaggcagttcctgagtctctagtctt

SEQ ID NO: 863437 - DNA, 624 bp, Homo sapiens
aacctgggataatttctctcctctattaatcaccagagggctgggtaactaagttaggatgcgtccatatgatggaacaccatgtagccattcaaatgataacctagaaggacagttaatggcacataaagatgttcaactgcactgctaaatgaacaaacatagaaagttatctacaatatgatcccaaattttataagatatataamctctatttacatctcatatgagtgtagacaggatatactataccctggaaggtataataggtatacattagagtgttaatgataagccaattcagggaacaaaattacaaattattttatttcattctctatttatgattcttctaaattttctaacataaacatttgaaataaaaacttaaaaaaagccctgttatttgaaaaaacttgtgatgtcttaccatgtccaagtataaactgaaaagtgaataaatcagtgggctggtggcccttcttaatacactgccatacataggacaaccatttgtattcagaaagtttgtgttgagtaagtcactggatttgagtcagaagacttggagttggagtcccagctcagccattcactggctttgtgatcttgaacacgacgctt

SEQ ID NO: 863438 - DNA, 624 bp, Homo sapiens
aacctgggataatttctctcctctattaatcaccagagggctgggtaactaagttaggatgcgtccatatgatggaacaccatgtagccattcaaatgataacctagaaggacagttaatggcacataaagatgttcaactgcactgctaaatgaacaaacatagaaagttatctacaatatgatcccaaattttataagatatataacctctatttacatctcatatgagtgtagacaggatatactataccctgkaaggtataataggtatacattagagtgttaatgataagccaattcagggaacaaaattacaaattattttatttcattctctatttatgattcttctaaattttctaacataaacatttgaaataaaaacttaaaaaaagccctgttatttgaaaaaacttgtgatgtcttaccatgtccaagtataaactgaaaagtgaataaatcagtgggctggtggcccttcttaatacactgccatacataggacaaccatttgtattcagaaagtttgtgttgagtaagtcactggatttgagtcagaagacttggagttggagtcccagctcagccattcactggctttgtgatcttgaacacgacgctt

SEQ ID NO: 863439 - DNA, 628 bp, Homo sapiens
acaatagcaaagacatggaatcaacgtaaatgccaatcaatgatagattggataaagaaaatgcggtgcatatatacaatgtaatactgtttagccattaaaaaagaacaagatcatgtcttttgtaggaacatggacggagctagtggtcattatccttagcaaagtaatgcaggaacagaaaaccaaatactgcatgctctcacttgtaagtgggagctaaatgatgagaactcatgaacrcaaagaaggtgacaacagataccggggtctacttgaggatggatggtaggaggagggagagaagcatgaagatttagtttttaatttaaaactttttctttaaatctagataaactgtgagtttcaattgattcaggaaagcacagtaagaagcagatgctagaagcttcctttgtgatacatatgtggatatggcattaaaaatggtaccagccggctgcggtggctcatgcctgtaatcccagcattttgggaggctgaggtgggcagattgcctaggctcaggagttcaagaccagcctgggcaacatggtgaaaccctgtctctacaaaaatacaaaaaaaaaaattagctgggcatgctagtatgtgcctgtagtcccag

SEQ ID NO: 863440 - DNA, 628 bp, Homo sapiens
acaatagcaaagacatggaatcaacgtaaatgccaatcaatgatagattggataaagaaaatgcggtgcatatatacaatgtaatactgtttagccattaaaaaagaacaagatcatgtcttttgtaggaacatggacggagctagtggtcattatccttagcaaagtaatgcaggaacagaaaaccaaatactgcatgctctcacttgtaagtgggagctaaatgatgagaactcatgaacgcaaagaaggtgacaacagatacyggggtctacttgaggatggatggtaggaggagggagagaagcatgaagatttagtttttaatttaaaactttttctttaaatctagataaactgtgagtttcaattgattcaggaaagcacagtaagaagcagatgctagaagcttcctttgtgatacatatgtggatatggcattaaaaatggtaccagccggctgcggtggctcatgcctgtaatcccagcattttgggaggctgaggtgggcagattgcctaggctcaggagttcaagaccagcctgggcaacatggtgaaaccctgtctctacaaaaatacaaaaaaaaaaattagctgggcatgctagtatgtgcctgtagtcccag

SEQ ID NO: 863441 - DNA, 598 bp, Homo sapiens
agcacataaaacccaccatttttctttaatgctctgatcattcattttattatacaaatagcacattcactgtagaactgttaagatacataggcaataaaaagaagaaagaaaaaataatatgttcacccatttaattctattattgcaaaatacgtacatgtatatatatgtatacccatatttttatataatttattattatactttacatactattatggtgagcatattkatcacttaatgatgtaacatttttcatttttacttttctaattttaatttaaaatttttatttgtataaatttatgtataaaattacaagtgtaattttgttaaattgatatattgcatagcagtgaagtcagggtttttagtgtattcatcaccagaataacatacattgtacctattaagtaatttctcgtgaaaataattaaatgctcttcaaacatgcagagttcaattggtgttcattgaacatctactatgttcaaaggtttataagaatagatccaccttctagaggctgtaggcattctttgcctcatggccccttcctccatattcaaggagcagtgtagcacctactaagtat

SEQ ID NO: 863442 - DNA, 632 bp, Homo sapiens
atataagtaatacattatgacatattatataaaccatacattacaaaatatatatacacccacatatcttatttaatggaaatgaattgttacctggcttttgtttttacaggtgaaggaaaggatcttggtactatgagagtcaaaggttgtggaattgaatgttgtgaactatctgctctggcttccctggggaaatgtgtaagtcattattagaagttgaatatgacttagctagacaaagggtaacttagaataacgtttcagaatgtgagagtccctgtgacaggaagcagcatgaagattttgaagaatggaaagaaagacaatgtggctggtgtatggcctatgagaagaccaggtgagtgtaggccatcaaagttttggtcttgttcctaaaatcastgagaatcactgaaggaattttagcagacagaggagaaaatcagatactctctgcactggaaaatagtaattggtcaagatttgtagtgaattcttagagaccatttataatctagctgattttttttcacctagatattttattcgtaagatatttatcatgttgatgtactgaacaggaaaacatactggtgattgctggtttgttatgtgccctgtactcaagg

SEQ ID NO: 863443 - DNA, 449 bp, Homo sapiens
tgctggtctgtagaaggctgaggtcaacatacttctcaccactactgcatgacttgcatttccactactgatgtctatttgaatagttttaacatgctagatgttcagtagtttaccactatatgccttggaatttaacatttcatttcatttttttctagagaagttgtttccttttggtacacatattaaaacatttactgaagatgtagtaccttttacatttaaataatttttakgtttaatttgtctctcatatttatcattcctacattccctgattattcttcaggttttatcttttccagttattttggtaataaccttcatatggtttggctgtgtcccctcccaaatctcatcttaaattgtagtttccataatcccaatgtgtcgtgggaggtaattgaatcatgggggtggtttttcacaagctattctcatgatag

SEQ ID NO: 863444 - DNA, 667 bp, Homo sapiens
tattttgcctgattgtcatccttataacaggattaataattgcaggaaaaatttagtcaaggttgttttgcttatagcaggagtaatagttacaaataagaagtaagcattgaagttttaccatcattaagtttaataggactttttactaaagattggtaatataatgcactctaagctatgaaaagaaagttataaagaaagacattttatatgagaaagaattttgtatggtaaatacttgccctaaaaggaaatgactggttgtttaaaggaagaatgtttaggacaagtaaaaaagtttaagtatgctctaagagagtctgtgaaagtcattaaaaaataataattaaagaaaaggaattgtcataattaacactgaagttattttagccacccaatgatgtatttctcccaatcataatccaagttataaaaatggcctaaagcctaaggttattctctaatggcaagacaagggggaaatgtatgcttttcttttcttttytttttttttttttccttttgagacggagtctcactttgtcacccaggctggagtgcagtggtgcaatctcggctcgctgcagcctccgcctcctgggttcaagtgattgtcctgcttcagcctcctgagtaactggaactacaggcgcaccaccacacc

SEQ ID NO: 863445 - DNA, 634 bp, Homo sapiens
ccttcccaataacacacaagacactcttggcttcttgatggaaatgaggaaatggtggaaatcttcatgatatatatcactctttttcccaaaggcaatatcaagtgcttgacagaaagatgaaaactaaccattacaatctccctcagaagaatatcaacttatccccaagaaataccctaatggcatagcaaagtatggactataagggccaaatttataacacatcagttcaatagaatgtagggtttaataatttaggttaactgttatgctctcwttcttttcttgtgctccagtctgcaatcaagaacataccatcaaagtcaacggaaggttagaacacacacacaagtagtgatgaatgcagcacgggaagtcagcaatgccatttgtgaaagggtcaaggaacagtaaatacacaaatattcaaaaccattccaagaaaatcaggtccctactgaatgctttgattatctcagaggacaagtgagtatttgccaaaaataattcctttattctttatacttcttcaaaggctttaatgcatgtaacttcaaaaatcaatgatccttgtagaaaaaggggagtctattatccatattagacagatggggaaactaaggaatagaaa

SEQ ID NO: 863446 - DNA, 634 bp, Homo sapiens
ccttcccaataacacacaagacactcttggcttcttgatggaaatgaggaaatggtggaaatcttcatgatatatatcactctttttcccaaaggcaatatcaagtgcttgacagaaagatgaaaactaaccattacaatctccctcagaagaatatcaacttatccccaagaaataccctaatggcatagcaaagtatggactataagggccaaatttataacacatcagttcaatagaatgtagggtttaataatttaggttaactgttatgctctcattcttttcttgtgctccagtctgcaatcaagaacataccatcaaagtcaacggaaggttagaacacacacacaagtagtgatgaatgcagcacgggaagtcagcaatgccatttgtgaaagggtcaaggaacagtaaatacacaaatattcaaaaccattccaagaaaatcaggtccctactgaatgctttgattatctcagasgacaagtgagtatttgccaaaaataattcctttattctttatacttcttcaaaggctttaatgcatgtaacttcaaaaatcaatgatccttgtagaaaaaggggagtctattatccatattagacagatggggaaactaaggaatagaaa

SEQ ID NO: 863447 - DNA, 593 bp, Homo sapiens
cctaaaagctgctctaattaaagtcccctgtcactcagctcagctcttagcaaacgagtgggatttggtacagctgtctaggatttcacggatgtgctgcacacttcagccctcatgttagttcagtcatcagcggcgaaagaagctttcctttctcttgccaaaggcagcatctgaagagttctaaaagatgcaaaatgtacacttttaaatatgtcatatttaaccaatttttaaaattaaaatgccaaaartgacattaaaaattcatacaacagaaaaagacactttataatctatttttacacaaaaaatgaaaatacggaggtgtaagaatgtttttaattttaaggaatgttagccaagactgagaaattagaagatccattcatttataatacaaatattctttatcaaaaaagaccacctttatttcaacccaaggaactgtacaattagactagtaagggtttacttttaaattaaacatctaaacaaaaaatcaaaaactaatccactgcagtgtttctgttcatttaaatacatggattagatcaccactgtaccatttacaaaagaaggcaatttagacc

SEQ ID NO: 863448 - DNA, 620 bp, Homo sapiens
gtcctccaggttgacattatcactagcccatattacagatgaagaaactgaggcttggtaaaactaagtatcttgaccaaagatgcagagccaatacatggagacttgctctagagcccataccatcaaactgccttaaacgtgtccctgagttaagtataatcctgctcaggtgactagaagaaaggaaaaatagaacaaagaataaaagaagaaaaatgattcagaggaaaattaaaasagccaagaacaaagacactaccaaaggaagcagcatgaaggcagtggggccatcctctagggggaaatgagcaagtggtgacaggattctcacccagaaaataaatgatcaacagcagcaacttcttccacagcagagaaccacacaaggctggaaacttctaacctgacaacaaggctggaaattccctaaaattcacccccatgttttggttacccggtgataatctttaagaatgggttcatctttgaccttcttaggacagtggacaaggcattctaccacttaatggtcagagtggaaaagaaaatggcagaaagtagaaaagcaagtatttatagatgatttgcggtcatctcagggaaagtaataaacttgt

SEQ ID NO: 863449 - DNA, 656 bp, Homo sapiens
ataaaaggacacagaggaatacgaatggctcctgacacaatgatgagggcacaaagtaagaaataaaacaagacccagaaccatttattaacacacaccatttatcaagaacacaggaagataaaagacacacattttagaaaaaagaactaaaagggaatggatgaataaataaaatgaaacgaaagaatgaatgaatcaagaaacctgtgctgataatgtgccatgaacaggggagtgtgawgaattcatctctctaaacctgagatccaaacagagcatagagaagaggagaagaaaaggctctgcaaagaaatgtacatatatttatcagctgccatcctctccctggcaactgggtcatttggaaaataccagcagctgacagacattacttatggccctgtcttatactccacaggcaccgtatgccctgagagaaacttcgagatgaaagcaaacgaattcagaaattcccttttgttaactgctccttcagaacattctggctctctgataaaatgtttgcattgaaattcccaccaaaacatttcctagaaaagaaaatgccggacatttggaatttggactctagacatttggaatctggttaagaagagcagtgtctcactcttaaattcatatcagattggctt

SEQ ID NO: 863450 - DNA, 576 bp, Homo sapiens
gttaagtggcttacttgggtatctcaggctgctaaaagctatgccagggatttcactagaaaataaaaacaaatttttgtaagtcactttgcttgtttgtgtgcacgtgcacatgtgtgtgcatgtgtgcatatattataaagccaaatacaagttctcttaccaaactttcccytcagtgagtaagagacacttatcaccagaacttatgttaaatcaacttaaagactgaaatatttggaatcttattttaaaaataatttaattttcattttattttcctaagaaattctggattacttcctttatactctttttgacagatggttaaggaaaactattaagacaaagcaagagaggagaaataatgccatgcaaagatagaagataccactcatttaaattaatcagttattaataaataaatgttaactatttttgataaatttcagacatattctgcattttatgagtaattttgcctacagaaatagttgatctctttagaattccataaggtcaaatagtgctgtacctattcttcattgtagtcatcagaatcgcaattttacatac

SEQ ID NO: 863451 - DNA, 576 bp, Homo sapiens
gttaagtggcttacttgggtatctcaggctgctaaaagctatgccagggatttcactagaaaataaaaacaaatttttgtaagtcactttgcttgtttgtgtgcacgtgcacatgtgtgtgcatgtgtgcatatattataaagccaaatacaagttctcttaccaaactttcccctcagtgagtaagagacacttatcaccagaacttatgttaaatcaacttaaagactraaatatttggaatcttattttaaaaataatttaattttcattttattttcctaagaaattctggattacttcctttatactctttttgacagatggttaaggaaaactattaagacaaagcaagagaggagaaataatgccatgcaaagatagaagataccactcatttaaattaatcagttattaataaataaatgttaactatttttgataaatttcagacatattctgcattttatgagtaattttgcctacagaaatagttgatctctttagaattccataaggtcaaatagtgctgtacctattcttcattgtagtcatcagaatcgcaattttacatac

SEQ ID NO: 863452 - DNA, 535 bp, Homo sapiens
tttctcagactatgaaaataagccaacttaagacactaaaaacttccagaagcattctatcacagtagtaagcaagaatgagtgccaaatataaccacttttgcaaaaattgtatcagtgagaaaagttataacagagagctgaactcacccatccctatcttgactttcccttaattattcctgacttttggggccaagctgactttaagagacatttaggctatagtttaaataatagtaagccttcctcccaaactcaacgactttttaaggctaatgggaggccagcaggctgggaggaggagaggagactgagtcctgctaaggagtagacataaaggattttcaaccrttatttcagagtttataagatatgttacctccccagttattcctgcagataaaaccactattatagatttgtcttttgagatatcttttcaggatttctgtatgtctgacactcatggctccacctggacccacccaccatgttcctatggccctacccagaagcaatttagcacacagca

SEQ ID NO: 863453 - DNA, 470 bp, Homo sapiens
ctaatcaaggcaaacccagatgtcaagaaatgtggaaaaacctggatgtgttttctctctgtgaaaacataagggaatctaactttactttgctatccatatgaagattcattattagcattctcagtaattatttgttatatttgcctgtacagcatccattttttttcccttttggtaatagagtttcctttgaggacccatccttccctactcacagcctcgtggtgtgggtaggcattatcttaacctgtaagtcaagagaggatatttgattctttaatactcacataaagaaagctggaaaagacagtcaggggkatgaacacaaagctgagagaagaagagaacaagagccagtcttgatgacattgtttgaatcctaagaagaagccatgcctgaagctgaaccacctctctgtcgttacctcagccaatatgtctctcaattgttaatccatgttaaattg

SEQ ID NO: 863454 - DNA, 674 bp, Homo sapiens
atcaaatttttcatatttgttcttatttttaaccaaccccaaatctgaactagcttcatttctttgattaatgtttattttacatattcacttattgattcattcatcaccctacatctaaatattaatcatgagcaagacatcatgctcacaggggttacaggaatgtattatacattctccttgtcccgaaggagtttgcaatctagttgatttcacccatctgatatcctacaaatgacattttttaaaatgtacgtgaatgcattgggctaacagttcaaaatgtacacaaggaaaatctaaactcattgcaagctcacaaaagactttaatattgaactgtaatyaacaagtgattatcttggcagaatgatgcttttcagagttttcactgttgttgtttttgtttgtttttgttttattttgatgagtaaggtagtttatgtttgtgtaactgagtctggggatttttcctaaaacttgtatgagtattttcactacatgtaataggcaccctaaatgtatcattgagcatgacaaaaggagaaggcatcctcttgttgaattccaagctcaaaaagaaatcaatgcatctgctttcaacaagccacagtacattccagctttttctttaaaaaaaggagaaaagcagggttatttttaagtctttc

SEQ ID NO: 863455 - DNA, 597 bp, Homo sapiens
agggaggagaagaaaaaggagaaaagcatggaaagcttatttaacaaaataagctaaaagctccccaactactgcgagagagagagagatatctggatccatgagtctcaaaggacccattatagattcaacccaaagaggttctctttaggcatattataataaaactgtcaaaagtgagagacaaagagaattctaaaagtagtaacagaaaaccatcaagtctcatgtaagggaatttccagcagacaattagcagatctctcagcagaaaccttgtaggctatgagagagtataatgtattcaaagaactgaaacaagaagaagaaaaaaactttcagccaagaataccatgscaaggaaagccatccttcagtaactaaggagaaattaagtctttcccaaacataagctgaggaaatttatcaccacaaaactgctcttacaagaaatgcctaagagagtatttcagtctgaagcaaaagaatagtaactactaacatgaaaacgtatgaaagcataatcctcactattagagataaactcataatcaaattcaacactaattaatgaaatggtggcaaatctttttagtc

SEQ ID NO: 863456 - DNA, 627 bp, Homo sapiens
ccagtgcttttcctgtaattatgtacacagtgtctatcttcccagctgccttaacactctataaaggaagaggctgcttttcttacacactgctatattgtagtaactacaatatagtattcatttgccaggagatgcttacataataagtaaataaatatgtgttgaatgagaaactaaataaatgaaaagaataaaatgaaattcattttttctatttgcaccaactctaacactgaaagttttcagctgtaaaccggacaagtttttggtgggggtgttgtcctttactagaagtattctcatagacactagaaaacctcttggtggaaacaawgcaatggcatataaaagaccaagtagtataactgcactataaactttagttgctcttccaagtctagtgattctatgatttgtaaattactttaaagctgtgtttggggggtggaggagacataatatgaataaaaagattagtaaggaggagattaaacttttagctaaagatgaatgatttgaatatctggttctccaatttgcatgagaaggtttgtacatgtatggatgttatgtccttgagcacggatgaaggtgatattcactcattcattcattcattcattg

SEQ ID NO: 863457 - DNA, 647 bp, Homo sapiens
caatcctttatttgaatcacatgtcattgtctcctgttattctcagaagaaagtccaaattcctcagcttaattgacaagtttctcctttctgtccgttgttgtctctttcaactcccccttgccttccttgcttcaaccatactgactttaaaaatcaaatttctcagtgcatcataatctttcttcattataggattttgcatagtctgttctcaattactctttaaaatggctccttctcctttggagtgagttgaataacgcctcccagaaattcatgtccatytggaacctcagaatatggacttatttggaaataaggtctctgcagaagtaattagagtagagatagagattatattggatgaagatgggcattaaatccaatgacactgtccttataggggacagaaagggacatagagagacacagaggaaaaggtcatatgaagatggagtcagagactagagtgatgtatctgcaagccaaacaaccccaagcaaagactgcccacaacccacagaagctgggaaaaaggcatggaacagcctttcctcagaggctccagaagaaacaatctgtgtacacattgattttggatttctggcatcttgaactctcagcatactgttgctttaagccac

SEQ ID NO: 863458 - DNA, 649 bp, Homo sapiens
attccatgggccaccaaaagaataagttgatttaattcagccctttaaagaaaaacaagcaaaaagcaaaccaaccaaccaaacagcaacaacaacaacaaagcaaagaaacaatcttgctgatagaaggtattgtattttttattacaaggtaaagcatatttctgtgcatgtgtgtgtgtgcgtgtttctctctgtgtaccaaaatgatagcaatgtttttttttaatcagattttatttggggatggtaccaaaaatgagattgcamaaacttctttatgtaccttcaaggtattatctttgaccaagagaacttttgatctccagagtcagtgtgataaatgcagttacttgttagtgtagtcattggaaatctatataattttggaaaactttaagagaaaagtatgagggtaagaagattactaaaatatttcacaaattttggctttcagttgtatctaaaatcataaattcaatttagaacatctaatgactgaggtacaatcactaaggcaaaaagttgttgacaaagataccctttgaggtggcttaaaatctatgctaagaggcagggatgagaaaagataactagtgcttcaataagcatgagtgtgtgtgggaaggggggttgaggagctgagaat

SEQ ID NO: 863459 - DNA, 664 bp, Homo sapiens
tcccttatagaacctttgtcaaactgaaggttttgtcaaactgaaatgacctgaattattttgttgaatataaattaacctgcttcttttagggcctggagtatctcatagttttctctttccaagtaaattttcaaaatatttcaaacatagaaaattaaggccaacaccaagaaaatttgtcactgtttaatgtacctgaagcaataaaaataaaaggtttcctgttggctttaggttaaaaaagaaaatccttccttagcaagcagtccacggmgagctgtgaaggaatgagaatgctatttggtggaaggctccagtgacgtggaaggatgtttaggtgactgtgttcaatagattttgcttgactccctctcccacatgggagagttgcctttaaagcacattattttgttatcaaagctagaagcagtgtgacggaagtgagactcagatttcaaacccctctactttgaacatgaagggtctctaggtgacctgacttctgactgaagctttagggaatcctaagccttcctttgagtccaggctgagacagacagggctgatttgcagagatcctcacctcatttcctgaagttttgattcaactcaatgtgggcttcaacaaacgtttcctttcccaccatcccctggctgtgag

SEQ ID NO: 863460 - DNA, 530 bp, Homo sapiens
tcaggtagtgtgatgcctacagctttgttctttttgcttaggattgccttggctatatgggctctttttttgttccatacaaaatttaaagtagttatttctaattctgtgaagaaagtcaatggtagcttgatggggatggcattgaatctataaattactttggacagtatggccattttcacgacattgcttcttcctatccatgrgcatggaatgtttttccatttgtttgtgtcctctcttatttctttgagcagtggtttgtagttctccttgaagaggtccttcacatcccttgtaagttgtattcgtaggtattttattatcttcataggaattgtgaacgggagttcactcatgatttggcactctgtttgttactggtgtataggaatgcttgcgatttttacactttaattatgtatcctgagactttgctgaagttgtttatcagcttaaggagattttgggctgagacaatggggttttctaaataaatcatgacatctgcaaacagagacaatttg

SEQ ID NO: 863461 - DNA, 530 bp, Homo sapiens
tcaggtagtgtgatgcctacagctttgttctttttgcttaggattgccttggctatatgggctctttttttgttccatacaaaatttaaagtagttatttctaattctgtgaagaaagtcaatggtagcttgatggggatggcattgaatctataaattactttggacagtatggccattttcacgacattgcttcttcctatccatgagcatggaatgtttttccatttgtttgtgtcctctcttatttctttgagcagtggtttgtagttctccttgaagaggtccttcacatcccttgtaagttgtattcgtaggtattttattatsttcataggaattgtgaacgggagttcactcatgatttggcactctgtttgttactggtgtataggaatgcttgcgatttttacactttaattatgtatcctgagactttgctgaagttgtttatcagcttaaggagattttgggctgagacaatggggttttctaaataaatcatgacatctgcaaacagagacaatttg

SEQ ID NO: 863462 - DNA, 595 bp, Homo sapiens
attcctggagacacacaaattcccaagattgaatcaggaagaaattaaaaaccttaacagatcaataacaagttccaaaatggaatcagtaataaaacacaaaccaaccaaaaaaagccccaaaccagacagactcacagccaaattctaccacacatacaaagaagagctgtaggccaagcatactggctcatgccaacccttttggaggttaaggctggaggattgcttgagcccagtacttcaagactagtcttggcaatacaytgaaaccgtgtctctataaaaaacaattaaaaatcagttgggcatggtggcacaagtacctgtagtctcagatacttaggaggttaaggcaggaagattgcttggatccaggaggtcaaggctacagtgagccctgattgtgccattgcactccaccctgtgtgacacagcaagagtctgtcttaaaaaaaaatcacagaagagctagtataaatcctactgacactattccaaaaaatagaggaggagagactccctcctaacattatgtgaaggcagcatcatcctgataacaaaagctggaagacacacaacataaaaaggaaac

SEQ ID NO: 863463 - DNA, 573 bp, Homo sapiens
tgtgtctttatagtaaaatgatttataatcctttttgtgtatagccagtaatggggttgctgggtcaaatggtatttctggttctagatccttgaggaatcaccacactgtcttccacaatggttaaactaatttacactcccaccaacagtgtaaaagggttcctgtttctccacattctctccagcwtctgttgtttcctgactttttaatgatcatcattctaactggcatgagatggtatttcattgtggttttgatttgcatttctgtaatgaccagtgatgatgagcttttattcatatgtttttggccacataaatgtcttcttttgagaagtgtctgttgtaatctatccatctaaaaaagggctaatatgcagaatctacaaggaccttaaacaaatttacaagaaaaaaacaaccccatcaaaaagtgggcaaagaatatgaacagtagcatatttatacatcaaaaatattgaagctgagtgccaagttaagaatgtaatctcatttacagtagacacacacacacacacacacacacacacccctaggaatacggctagct

SEQ ID NO: 863464 - DNA, 573 bp, Homo sapiens
tgtgtctttatagtaaaatgatttataatcctttttgtgtatagccagtaatggggttgctgggtcaaatggtatttctggttctagatccttgaggaatcaccacactgtcttccacaatggttaaactaatttacactcccaccaacagtgtaaaagggttcctgtttctccacattctctccagcatctgttgtttcctgactttttaatgatcatcattctaactggcatgagatggtatttcattgtggttttgatttgcatttctgtaatgaccagtgatgatgagcttttattcatatgtttttggccacataaatgtcttcttttgagaagkgtctgttgtaatctatccatctaaaaaagggctaatatgcagaatctacaaggaccttaaacaaatttacaagaaaaaaacaaccccatcaaaaagtgggcaaagaatatgaacagtagcatatttatacatcaaaaatattgaagctgagtgccaagttaagaatgtaatctcatttacagtagacacacacacacacacacacacacacacccctaggaatacggctagct

SEQ ID NO: 863465 - DNA, 601 bp, Homo sapiens
aagcctcccaacaaaggcaagatcacacacagcaggagttatttcagttattccgagcggatgtaaatcagagtagaaaaacagcaaaattgtcccctccaaagttacacatgcaaaggtatttgtgggtttttcattttaattgtagcaccgaataccccttaaaatgtaaaaattaattagttcttacacaataaaagtcatatatgacagacccacagctagtatcatactgaatgggaaaaaaactgaaagcctttcctctaagatytggaacatgacaaggatgaccactttcaccagtgccattcaacaagtactgcaagtctcaactagagcaatcagacaagagaaagaaataaaggacatccactgtacaggaagaagtcaaattattcttgtttgcagatgatataatcttatttttggaaaaacctaatgactccacaaaaaaactattacaactgataaaacaaatttggtaaagttgcaggatacaaaatcaacatacaaaaatcagtagcatttttatatgccaacaggaaaccgtctgaaaaagaaaccaagaaaataatgttctttacaacagcagcaagtaaaa

SEQ ID NO: 863466 - DNA, 648 bp, Homo sapiens
ctgacctcacattttccttctgcattgccctagcagaggttctccatgacagccctgccactgcagcaaaattctgcctggacatccaggtgtttccatacatcttctgaaatctaggcagaggttcccaaacctcaattcttgacttctgtgtacttgcaggctcaacaccaagtggaagctgccaaggcttgaggcttgcaccctttgaagtcatggcccaaactctatattggctcctttcagccacagctgtagcagctgagacacagggcaccaagtccctaggctgaacacagcacggggaccctgggcccggcccatgaaaccactttttcctcctaggcctccaggcctgtgatgggaggggctgccatgaagacctctgacatgccctggagwcatgttcccaccacccccctgtcgtcttggggattaacactcagcttattacttatgcaaatatctgcagcctgcagcgggcttcaatttctcctcagaaaatgggattttcttttctatcacattgtcagactgcaaattttcccaacttttatgcttagtttcccttataaaactgaatgcctttaacagcacccaagtcacctcttgaatgctttgctgcttagaaatttcttccaccagata

SEQ ID NO: 863467 - DNA, 610 bp, Homo sapiens
aagggaagattgaaaaaaattattgatatatgacttattggtgatggcagaaaacccaagtgtagaagtttaagaagcaatttaagatatgggagggcagataaggtcagactttggagatataaatatagattttgaatttattttcatagggagttaacagttggagctacaataatatgagctttacctaaaatatccatgccattagaactatttttgccaaattattttttccagtgaatatggtctacagtagtttttcatgtttgttatagccagagttcagttttagataagagtctggcctgtttaagctgaaagatatttggctattaagaggtttgtgaaakcattgtgacagagggagctgaagaaacagggtctaggttgagcttccaggaatgactctcaaaccttattagagaactgggcatccggatgagctgctgccacctcctccaccagggccaggaagaccctggatcaggaagcctgggtttctgtggctgaccatgagacaatgctgcctccagcacagacctttctaggaatatgtacgttgaactctacctttctcttcatgcaagtctttctgaattgaaaccta

SEQ ID NO: 863468 - DNA, 649 bp, Homo sapiens
aaatctcttctatctttccaagtatcagatttatgcagaaaagtctttagcttagtgtgtccatcttttaaaggatctgacatgcaagttaaattttaagaatgtggttggtataaagatctttatttaatcttaaaataaatcaaacaacaaaattagaataactaagttaattttccacactgtctattgactttctggtatagcaggtaaaagcacagctttctgggtataccatgayattatttttttcccattgctttgtccaattgtagcacatttttattaaatcagtaatatttacatgattctgcttatgccagtattatttactgctaagtcatacggtgtttcagctgtgcatcttcattacgtatccttcattcctttaaacagttctggcatctgagcacttcttcacttctcccagataatccttttcctggcctatgttagtttacccagccaaatgcagtaagtagccgttggctggtctctctgctttcacatcctgtaatttttagcatagaattaattgtctgactatattcatttgcctgtctctaacagttattcttaccccaagtgttgtaatatttgtcacatgcatatcaaaaatattcatcagctcaaatacatctgttttata

SEQ ID NO: 863469 - DNA, 630 bp, Homo sapiens
cccctcctattttccagtttgtcttttcattctacttcttggatatttttttactttatagtttaatatttctcatgtttctcttgttgagggcatttttttaaagttttgctccaaaatttttactggtcccatgaattattttttcctgttgttttgatctctcttgaatggtggtccttggctttcaytggaagcaggacttctgttcacgaaggagactcactgtgaggttttggaaatgaagccagcatttcatttgggggacttcagtgtattatctggggatctttactctgggaccattccattccttccgagaaggctctcccaattttctgcctgggatgtaaaagcatggctacttgctttccagaagcagaggtggagttgtgtttcttgctgtacagtttttttccatctctcaggttttagctatggtatctctgaacccagaaatttcaggttttatatatccagagaacacacatttaaattccttgtaagatggaaggacaggtagacttggggatctaaccacagattttcaactgacctcgctcgcttttattttatgtctcaccctactttcagagatgccatttccctttaagttgaagtctgccttgg

SEQ ID NO: 863470 - DNA, 630 bp, Homo sapiens
cccctcctattttccagtttgtcttttcattctacttcttggatatttttttactttatagtttaatatttctcatgtttctcttgttgagggcatttttttaaagttttgctccaaaatttttactggtcccatgaattattttttcctgttgttttgatctctcttgaatggtggtccttggctttcattggaagcaggacttctgttcackaaggagactcactgtgaggttttggaaatgaagccagcatttcatttgggggacttcagtgtattatctggggatctttactctgggaccattccattccttccgagaaggctctcccaattttctgcctgggatgtaaaagcatggctacttgctttccagaagcagaggtggagttgtgtttcttgctgtacagtttttttccatctctcaggttttagctatggtatctctgaacccagaaatttcaggttttatatatccagagaacacacatttaaattccttgtaagatggaaggacaggtagacttggggatctaaccacagattttcaactgacctcgctcgcttttattttatgtctcaccctactttcagagatgccatttccctttaagttgaagtctgccttgg

SEQ ID NO: 863471 - DNA, 630 bp, Homo sapiens
cccctcctattttccagtttgtcttttcattctacttcttggatatttttttactttatagtttaatatttctcatgtttctcttgttgagggcatttttttaaagttttgctccaaaatttttactggtcccatgaattattttttcctgttgttttgatctctcttgaatggtggtccttggctttcattggaagcaggacttctgttcacgaaggagactcactgtgaggttttggaaatgaagccagcatttcatttgggggacttcagtgtattatctggggatctttactctgggaccattccattccttcygagaaggctctcccaattttctgcctgggatgtaaaagcatggctacttgctttccagaagcagaggtggagttgtgtttcttgctgtacagtttttttccatctctcaggttttagctatggtatctctgaacccagaaatttcaggttttatatatccagagaacacacatttaaattccttgtaagatggaaggacaggtagacttggggatctaaccacagattttcaactgacctcgctcgcttttattttatgtctcaccctactttcagagatgccatttccctttaagttgaagtctgccttgg

SEQ ID NO: 863472 - DNA, 632 bp, Homo sapiens
gtaaattgttactgtatttgatataattaaatatagtaagatttatcttccaaattggaactgatttaattaatttgtcaagcacttgttgaacttttaaacttgtccaaaattctgtgctcagcatctccaggtagagaagaaaggactctcccttccttggaaagacctactttcttatgaggggaatactctgtaagaattggtatcatgtgacaagttgtgaattagactgactagtttacaaaaatggaaatattytgtggtgtggttgctggcaaaggaatcacagagggtaaatggggtcaagtttgctgggacaaagaaaaagaatcctaggcagagagcagcaggaaactgtgtggcaggaaaatgcctatgcgcaggtcaaatgacttgtagaataaaatgaatcaactttggaaatgaatggaaagtactctccgagagtctcatttgagtgatgtcctggcagtcttattgaaacatgaagtgaaagttaaattcgtagagttgtctttgttatctgttttcaggatgtgagagaatattaaagtgatagtctttttatcttctatgtaagaaaacaggactagagaatgctatggctttctctgttgttggttatggag

SEQ ID NO: 863473 - DNA, 632 bp, Homo sapiens
gtaaattgttactgtatttgatataattaaatatagtaagatttatcttccaaattggaactgatttaattaatttgtcaagcacttgttgaacttttaaacttgtccaaaattctgtgctcagcatctccaggtagagaagaaaggactctcccttccttggaaagacctactttcttatgaggggaatactctgtaagaattggtatcatgtgacaagttgtgaattagactgactagtttacaaaaatggaaatattctgtggtgtggttgctggcaaaggaatcmcagagggtaaatggggtcaagtttgctgggacaaagaaaaagaatcctaggcagagagcagcaggaaactgtgtggcaggaaaatgcctatgcgcaggtcaaatgacttgtagaataaaatgaatcaactttggaaatgaatggaaagtactctccgagagtctcatttgagtgatgtcctggcagtcttattgaaacatgaagtgaaagttaaattcgtagagttgtctttgttatctgttttcaggatgtgagagaatattaaagtgatagtctttttatcttctatgtaagaaaacaggactagagaatgctatggctttctctgttgttggttatggag

SEQ ID NO: 863474 - DNA, 621 bp, Homo sapiens
acaaaaatattttctgaaaactatatcgttaacataaatagcattttttaaagaaaaataacttctctacaataaaaagttgagtaaaaagtgtgtcatgcattgatattattgcaaacctctaaagtttggcataatagaagacagatggattcccttcacaatatttttagagaagcaataagatgatcaagctttttgcaaatatatagttactaaaaggtgtatctttaatgyttttagataattgtgagtgttctttaatactacctcaaaactcccctgtaactagtttcttagttacaggggaattttgcatatcaatacatttattccatcaatactcactgatttttcttgtgcagtaaatgggtctttcccccatgcttgcttgtataagagtatgcattggttatttgggaaataatggtttatgttttgttgtgtcaaaaactcacttttgttagtatcaccatgtcttattaagagctctttaagtattgagaagctgtcgagtttacggtaggagtgtgttttccaaagttctgggttttagcctgaaagcttgactattatcattgagaacagttattctctttttttgtttaacttttatattaa

SEQ ID NO: 863475 - DNA, 646 bp, Homo sapiens
gaaaaagattttttaatactccataagcacaggcagccaaaacaaaaatgggcaaatgaagtcacatcaagttaaaaagcttatgcacagcaaaggaaacaacaaagtgaagagacaacccacagactgggaaaagatatttgcaaactatctggattaattaccagaatatatgagaagtgcaaacaactctgtaggaaaaaaactaataatctgatttaaaaatgggcaaaagatctgaataaacatttctcaaaagaagacacattagctgctgatggaaaatgcttctggttcctgctacaagggaggcctggatgggaaaattacctgygctcaggaggtcaaggctgtggtgagctgtgattgtgccactctccaacctgggtaatagggtgaggatctgtttcaaaactttaaaatatacatacaaatggcaaacagatatacgaaaagatactcaacattattaatcatcagaaattcaaaccaacactacagtgagacatccatctcacctcacttagaattacttttatccaaaagacacgcaataacaaacactggataggatatggggaaaagggaacagtcgtacactgttagtgggaatgtaaattagtacaacccctatggagaacagttt

SEQ ID NO: 863476 - DNA, 550 bp, Homo sapiens
cccttccacctgcagggccagggaggctcgttgagatttttttttttttttttttttttttgagacagagtctcgctctgttgcccaggctggagtgcagtggcgcaatctcagctcgctgtaagctccgcctcccaggttcaygccattctcctgcctcagcctcccgagtggctgggactacaggcgcccgccaccacacccggctaattttttgtgtttttagtagagacagggtttcaccgtgttagccagaatggtctcaatctcctgacctcgtgatccacccgcctcggcctcccacagtgctgggattacaggtgggagcccccatgcccggccgacccaccctgagagcatgacctctcagttgtgctggggatgccacaggggcctcagggctgtgtaccctgcggtgtgaggcgtttgcttctcttgagaggtgtcctccttcccccaggatcctccttcccctggggtccacttgttcgtagcttttggtggcttccagaatggtttctaatcatttgtctgatgaggcttatgcaca

SEQ ID NO: 863477 - DNA, 548 bp, Homo sapiens
ccccttccacctgcagggccagggaggctcgttgagatttttttttttttttttttttttttgagacagagtctcgctctgttgcccaggctggagtgcagtggcgcaatctcagctcgctgtaagctccgcctcccaggttcatgccattctcctgcctcagcctcccgagtggctgggactacaggcgcccgccaccacacccggctaattttttgtgtttttagtagagacagggtttcaccgtgttagccagaatggtctcaatctcctgacctcgtgatccacccgcctcggcctcccacagtgctgggattacaggkgggagcccccatgcccggccgacccaccctgagagcatgacctctcagttgtgctggggatgccacaggggcctcagggctgtgtaccctgcggtgtgaggcgtttgcttctcttgagaggtgtcctccttcccccaggatcctccttcccctggggtccacttgttcgtagcttttggtggcttccagaatggtttctaatcatttgtctgatgaggcttatgc

SEQ ID NO: 863478 - DNA, 550 bp, Homo sapiens
cccttccacctgcagggccagggaggctcgttgagatttttttttttttttttttttttttgagacagagtctcgctctgttgcccaggctggagtgcagtggcgcaatctcagctcgctgtaagctccgcctcccaggttcatgccattctcctgcctcagcctcccgagtggctgggactacaggcgcccgccaccacacccggctaattttttgtgtttttagtagagacagggtttcaccgtgttagccagaatggtctcaatctcctgacctcgtgatccacccgcctcggcctcccacagtgctgggattacaggtgggagcccccatgcccggccracccaccctgagagcatgacctctcagttgtgctggggatgccacaggggcctcagggctgtgtaccctgcggtgtgaggcgtttgcttctcttgagaggtgtcctccttcccccaggatcctccttcccctggggtccacttgttcgtagcttttggtggcttccagaatggtttctaatcatttgtctgatgaggcttatgcaca

SEQ ID NO: 863479 - DNA, 550 bp, Homo sapiens
gctttatacactgtcacgtggcttcatcagctgtgtgcatttcaggatggtttttaaagaaacctcagaaagctatttccttaaccacagattcttgtctttttttttttttgagatggagtttcgctctgttacccaggctgcagtgcggtggcgtgatctcagctcactgcaacctgcgcctcccaggctcaagcgattcttgtgcctcagcctgccaagtagctgggattacaggcgccccccaccacgcccagctgatttttgtatttttagtasagacagggtttacaccatattggccaggctggtcttgaattcctgaccttgtgatctgcctgcctcggtctcccaaagtgctgggattacatgtgtgagccaccgtgcctggcctacaaattcttaaaggaagccgtatcactaaggttgtatagaatactgattgtcacagctatggctgttctctagaattcatctccatatgagaggggtccatacccagggtctgggggtatgcattgctgtactggctctggaaatctttctcaca

SEQ ID NO: 863480 - DNA, 517 bp, Homo sapiens
aaactgtgggatgggaggggacatggcgctgggcccatgaccatagccctactcaccttttcaccaggagaagacctacagacacccgcagccctgtgatttcatggtcgtagtcttcagtggtgctgaaatacttgcctcctccagggccatacatctctgaagaaaagagagacccaaagggaagaaaatccccatgcggtgatatgggggtgacctctgccagaacaggggaccccrcccctccaggcagacaggatggttctgtgaccagagttagtctgggacaagggccgggtgagtccctggctctcctggagggaggcaggggagattgagggcagaccccactgacttactccctgcccaggtggggccccccaggagggcaagcgtgagcagcagcagcatggcctctggccggtgcatcccagggctctgtgggaagaagagaggcctcctgactccaaagcaagggccagtgtgaccttgccgggccccacccatggagccaagc

SEQ ID NO: 863481 - DNA, 635 bp, Homo sapiens
taaatgctattacatttatattacatcatatccatttaacctcagaattctttttcaagatgattccttcccctccgtgccccttgcctctactagagtacccttatctgtcatgtgtgtagatggtagtgagttacttaaaatactaactgtgaagcagcttttttctgcctaagcaaatgaaaccatttacctatttcttctgcttctattttatccacagttttgggttgttttcaccactaatcccatctacccaactttattctttctgtaactttcagaaacctgatagaatgaataaaacccactagaaattgaagaacaagtcatcaagaccttgttattgtctccaaatgtttttagagaggaaaaatggaatcctttggcttttgaacttgaaaacaggtgttttatcagctttaaaagagtctcttacatcctccagactaarcatcctccgggtcaaaaaataaatatatatgtaatatatctgaaaaaatgcctgaaacaactttacaattcttctaaagggacaaaatctgtgaaataaatctgagaagcgcagggtaacttttttcagcagtcatttctgagctgtagcagtttataaaaatagacagctttttatctga

SEQ ID NO: 863482 - DNA, 566 bp, Homo sapiens
tgtgtataggactggaaaaaataatgtacatgagagaacagaggaaacaaaaatcttagggaatcagtgaaagcttgatgtacatctcaaagtttctggtggttttcctagctgaaaaaacaattaaagggatttctttcaagtttytggggcacacaggagaaaccatgagggtgatgtcccacaacacaagcccttcttttgcaggatggtcccaccctctgcaaagctcctctccacactgcagacgggccttttacttgcccccaaaccatactcctgtattactcagtagcgttttgctgaatcttttattcccttaatacaaaagtactccaaacactctaggagcgtttgactgagtgttaaactgttctgctcagaagacatatagcattaagttgtccaaaatcagttgcaaatcactcagcatcactgtatgtattctctatttttttttttttttttttttttttgagatggagtctcgctctgtagcccaggctggaatgcagtggtgcaatcttggctcactgcaacctccgcctcccaggtcccagttcaag

SEQ ID NO: 863483 - DNA, 616 bp, Homo sapiens
tacaaaagtactccaaacactctaggagcgtttgactgagtgttaaactgttctgctcagaagacatatagcattaagttgtccaaaatcagttgcaaatcactcagcatcactgtatgtattctctatttttttttttttttttttttttttgagatggagtctcgctctgtagcccaggctggaatgcagtggtgcaatcttggctcactgcaacctccgcctcccaggtcccagttcaagcaatactcctgcctcagcctcccgagtagatgggattacaggatcgcaccaccatgctcaggtaatttttttatttttagtagagactgggtttcaccatgttagccaggctggtctggaactcctgaccttgtgatctgcccacctcagcctcccaaagtgctgggattagaggtgtgagccaccaggcctggtcatctctytctattttttaaagtacctttcatttactggttcaggtagttttgatccataaagacaaaaatccacattactaacagaatttagagatctttagttgacaaaataaaataactttttcgtcacctaactacagcatgatgttgatgcctctcagatccttcaaattaat

SEQ ID NO: 863484 - DNA, 646 bp, Homo sapiens
acaaggaattcaattagttattttatttcaggctgattatatgagatcctatgatgagaaaaaaaaagaaaaccaaaaaagaaaaaaaagaaaaccaaaaaggaaaaaaaaaaagaaaaccaaaagagattctgtactgcaagatataagaggaggcacctttaggggtgccaaggatgttgtaacttcaaatgctgtcaaatgtggaaaccccggcagagcacatgtggacatttcagcccctcagcatatagaatccccatgtggcctttaccactgacatgatcagtctcagctctgatgtggccatctccctgtaagccttttgcagcctgccatccccmccgcctgtgctcccaggccactatctgcacaccttagcacaggtctcatgagatcctcgtgctgttctctgtgtgcatgcctctgagtgcctcaagaagtgcctgttttctcttcccagtgtccagagcatctaacacagtgtgtgacacaatgcaggtgaccatggaaacaaaataattctgtcttgcaaactttcactcagatgctcttaagcactcctagtctgacctcaggctcagattccatatcccagtggaggaacagctaccgagtagcacaggggaaaacattctatgctttt

SEQ ID NO: 863485 - DNA, 580 bp, Homo sapiens
tgagaatatgtggtgtttggttttctgttcttgtgttagtttgctgaaaatgatggtttccagcttcatccatgtccctgcacaggatatgaactcatccttttttcatggctgcatagtattccatggtgtatatgtgccacattttctttatccagtctatcgttgatggacatttggttggttccaagtctttgctattatgaacagtgctgcaataaacatacattaattggggcattgagcctgtttacrtttaaagttaatattgttatgtgtgaatttgatcctgtcattgtgattttagcttgctattttgctcattagttaatgcagtttcttcgtagtgtcaacggtctttacattttggtttgtttttgcagtggctggtactggtttttcctttccatatttagtacttccttcaggagctcttgtaaggcaggcctggtggtgacaaaatccttcagcatttgcttgtctgcaaaggactttatttttccttcacttataaagtttagtttggctggtatgaaattctgggttgaaaattcttttatttaagaatattgaatattgg

SEQ ID NO: 863486 - DNA, 593 bp, Homo sapiens
aggtggttctaccattctggggtctggaggatggtggccctattctcacagctccactaggtggtgccccactgggactctgtgtgggggttccaaacccacatttcccttctgtactgccctagcagaggttctccaggaggtccctgcccctgcagtgaacttttgcctgggcatccatgcatttccatacatcttctgaaatctaggaggaggttcccaaccctcaattcttgactgctgtgtacccacaggctcaataccacatggaagctgccaaagcttagggtttccaccctctgaagccacagcccaagctctacattggcccctttcagccacggctggagtggctggaacacagggcacaaagtccctaggctgcacacagcatgaagacmctgggcccagcccagaaaaccactttttcctcctgggcctccaggcctgtgatggtagggggtgccatgaagtcctctgacattgcctggagacattttccccatggtcttgaggattaacattagtctccttgctacttatgcaaattttggcagcctgcttgaatttctccccataaaatgggtttttct

SEQ ID NO: 863487 - DNA, 642 bp, Homo sapiens
ttctaataaattattcatgcaagcttaaagtatgctaggaaagatttatatgagtatactcaataggcatgcacagcaaaatatattttgctgtttgcctaatcttctggttttatgttaaaacctttaatttaattttcccattaacatctaaagcttgactgtgcacaagatgatacaatattaagggtggctttgtggcatttaaattccatttccccttttattttacccattcatagtatgggaaatttttgaaattaagtatacatttaggtataaatgggacaggaggccaaaatcaaagtaatgtcacctgcaaagactctcatagtctgttagcaaactacaatttctcttcactgcttttgcgttgggagaattaaaacttgyaaaggaaattgtcagcatatttgctaaagagtgcttccaatttattaaatttatgccaggctccccttttatactaagtcttaaatctcattctcagaactcaaaaatcttttttcagtgtgaaggtcattaattttaattaaatggaaatcttttttttttacactaacaagaaaatgaggattagtctcaataactttcattaaataaatagagcaaattaaaaattataatacatctttagataga

SEQ ID NO: 863488 - DNA, 580 bp, Homo sapiens
cgatgcattaaataacctgttagtgagagtcagctaaggagtggtcagaccatgattcaaatattggctatctggctccagagactggatattttaaatatcatggtcaaggaagtccataatgagaagctgacatttgaacaaagacttaaactacttgaaaagtgaggcatgtaggtatctgaggatactgcattccaggcagctgaatagcaagtacaagtaccctgaggcaggagcatccctacgtgagagaaaatggagtaaggaacgagtcccaggatttttctgactacctggaagagtatagttgctattattgaaaatggggaagatttgggtgctacaggtctgwtgggacagccagaagttcatttttaaagaggttaagtttgagaaatctattagatattcaagaaatgtcaagtaggcagtccaatacagtctgggtttagaggacagaaagaatatgggcttggcattaaataaagtaaatgaggatggacaagcagtccaggaactgactgctcaacatttatagccagaagataaggagttagtagcatagaaactgagatgg

SEQ ID NO: 863489 - DNA, 784 bp, Homo sapiens
aaagttgtaaaaagcaaaaaatgaaataaaataaaattgtgtattatcttacccctactcgctctcattcccctactcgctctcattcctgcttttccatgtgacatgcaaactcccactttgcctactgccagattgtaagctccctgaggcctcatcagaagctgagcagatgccgagcaccatgcttcctctataccctacagaatcaggagccagttaaatttattttctttgtaaattacccagtcgtaggtatttctttatagcaatgtaagaatggcctaatacacatatgctgttaaaatgcttgatgttatagaagttggagacctctttgactggaagttcataaaaggaacgtcattttctgataatkttaagccaggcatttaatctttctatgactcaatttctaattttttacaaaaggaaacaaatgcattaattaacataaagcaaccatgcaaattagcagtggtattgtctacctggaataaataaagctcagttgatacaatcacaactcacgtatgctttaaagagtttggctcacaattctacatctgtatccatgaagaatgatatcatggctggcagtctccacatctagatcatagtccaagatctgatatggaacgatgctatttatacaaatgctttaaccttttaacttctttggatctcagatatatcatgtggaaacaaggcaagcagtactgccatgagataaaaacatatgaaggcctggcacagtggctcatgcctgtaatcccaacatttt

SEQ ID NO: 863490 - DNA, 575 bp, Homo sapiens
agagtgctaactcactaaccgaagggatggtgctaagccattcacggaatctgcctccatggtccaatcccctcccaccaggccctacctccaacattgagaatcacatttcaacatgagatatggaggagacaaacatccaaagcaaaacattaatgctgagaatttaatggaaatgcagcagtgttattctgagcatcaagaaaaatgatctggaagcatcaatatttaacagatttatgatgtgtttgataccagataagtagctggacatctgtagttttgaagaaacttttggtggtgaaattttagaaaatttagaaattttagaaaaattaacatctttacaaacttttgtagtcacactgaaaatatgaaggaaaaataaaaaaaawttgtttattatgctctaagcttgtttatgaacaaaaaaaccagggaaacaaaaacagccacccagaaagtagacatggtgtaactattgacagaatgtctctaatgaagctgcaaagagctcagagagaaagccattgactgggaatcagaagactggtttttattttcagctctgccac

SEQ ID NO: 863491 - DNA, 575 bp, Homo sapiens
agagtgctaactcactaaccgaagggatggtgctaagccattcacggaatctgcctccatggtccaatcccctcccaccaggccctacctccaacattgagaatcacatttcaacatgagatatggaggagacaaacatccaaagcaaaacattaatgctgagaatttaatggaaatgcagcagtgttattctgagcatcaagaaaaatgatctggaagcatcaatatttaacagatttatgatgtgtttgataccagataagtagctggacatctgtagttttgaagaaacttttggtggtgaaattttagaaaatttagaaattttagaaaaattaacatctttacaaacttttgtagtcacactgaaaatatgaaggaaaaataaaaaaaatttgtttattatgctctaagcttgtttatgaacaaaaaaaccagggaaacaaaaacagcyacccagaaagtagacatggtgtaactattgacagaatgtctctaatgaagctgcaaagagctcagagagaaagccattgactgggaatcagaagactggtttttattttcagctctgccac

SEQ ID NO: 863492 - DNA, 622 bp, Homo sapiens
tagacagtgtagtggttctccacatgtgcttagcagaccaccagcagaagcagcagaaacttgaaacttagaaatgcaaattctcgggccagactccaggtttactgactatgaaactgtggaaatccggtctgagaatttgcatttctaacaagttcccagctgagaacttgttaaaacccactagaaaccaaagttcatttctgaagtcactacaaaaataactttctagagcatttattttagacaaattccgggaaaatattcagaagtagcaaggtgtgctattgatatccatgatctatgatatccatatctttatcatgagaacaacaagttgtttgatatctccaattatagtacttacaaacctttttctctggtaagtttgaagtgatgattttccaaaaacacagatgcagctgacttgggaamcacagtctgagaatcaacggactggaacatagattctgaagtgaggctcagccccttatcaactgtataactttaagaaaactgtttaatccaattcttttctgtaaatggggatgagttagtgtattcctcataaacatgatacgagggttaaatgagtcaaccacttaaaaccctgcctgaattc

SEQ ID NO: 863493 - DNA, 647 bp, Homo sapiens; identical to SEQ ID NO: 861093

SEQ ID NO: 863494 - DNA, 647 bp, Homo sapiens; identical to SEQ ID NO: 861094

SEQ ID NO: 863495 - DNA, 633 bp, Homo sapiens; identical to SEQ ID NO: 861095

SEQ ID NO: 863496 - DNA, 516 bp, Homo sapiens; identical to SEQ ID NO: 861100

SEQ ID NO: 863497 - DNA, 515 bp, Homo sapiens
tgaattcatacaaccaagagaagccctgaccagaacctgggttctagggtgtaagagacagcatctggccagttttttctttatagtttcacgaatgttatgattgctaatattatggtatttctattattatatttgtgaaagcatggttttctgagttacaagtatgtgaaagacacatgtatacwtgtaatgaaatgtatagttttccttttatttctgtaaagcaagttagcttgtattgatacatgatgagtttttttcagaggtttcagaaacaggttagaaaatgcttccatagtatttcatagattctttataatttgagcagtttttcagggttttcagtccatttaaaccatttatctaatgaacagtaaatagaaactctgagctctacattctcttgtaagctttctttttctgttatagttgagcaaatttgttgacattcttatatttttgcattttgattttttgcaaaatgtttggttaaaatactttgggggaaaaat

SEQ ID NO: 863498 - DNA, 618 bp, Homo sapiens; identical to SEQ ID NO: 861101

SEQ ID NO: 863499 - DNA, 555 bp, Homo sapiens
gaagggcctaaaaagggtgccaggtgatttgtaagttataattccttagttatcgtgggttttggcctatgctgaccagtttcacctggcactaccagctaaaattaaacggcgtcttcaccagtcctttcaaatggagcagatggaatgatctcccaatgcaatggcttgtcatttgtttctyacacagacccatgagccaccctttgtcaaatgaatgccatcagccagatgagaatgatgagaatgaggaagaggaactggagaatctaactgaggaactaggggagtgtgggatttgagatgtactaatcaggaaggaggtgaggccaggcgtagtggctgatgcctataattccagcactttgggaggccaagatgagcagattgcttgagcccaggagttcaagaccagcctgagcaacatggtaaaactcatctctacaaaaagtacaaaaaattaccccactgtggtggcacatgcctgtagtcctagctacttggggggctgaggtggaaggataacctgagcctgggaattcaaggctacagtga

SEQ ID NO: 863500 - DNA, 555 bp, Homo sapiens
gaagggcctaaaaagggtgccaggtgatttgtaagttataattccttagttatcgtgggttttggcctatgctgaccagtttcacctggcactaccagctaaaattaaacggcgtcttcaccagtcctttcaaatggagcagatggaatgatctcccaatgcaatggcttgtcatttgtttcttacacagacccatgagccaccctttgtcaaatgaatgccatcagccagatgagaatgatgagaatgaggaagaggaactggagaatctaactgaggaamtaggggagtgtgggatttgagatgtactaatcaggaaggaggtgaggccaggcgtagtggctgatgcctataattccagcactttgggaggccaagatgagcagattgcttgagcccaggagttcaagaccagcctgagcaacatggtaaaactcatctctacaaaaagtacaaaaaattaccccactgtggtggcacatgcctgtagtcctagctacttggggggctgaggtggaaggataacctgagcctgggaattcaaggctacagtga

SEQ ID NO: 863501 - DNA, 620 bp, Homo sapiens
aataggcaaatctagaattcaaattgaaaggccatcctcttaactaataatttacattacattgattctttgtaataaatatttatattagaatataggctaagaagggcctaaaaagggtgccaggtgatttgtaagttataattccttagttatcgtgggttttggcctatgctgaccagtttcacctggcactaccagctaaaattaaacggcgtcttcaccagtcctttcaaatggagcagatggaatgatctcccaatgcaatggcttgtcatttgtttcttacacagacccatgagccaccctttgtcaaatgaatgccatcagccagatgagaatgatgagaatgaggaagaggaactggagaatctaactgaggaactaggggagygtgggatttgagatgtactaatcaggaaggaggtgaggccaggcgtagtggctgatgcctataattccagcactttgggaggccaagatgagcagattgcttgagcccaggagttcaagaccagcctgagcaacatggtaaaactcatctctacaaaaagtacaaaaaattaccccactgtggtggcacatgcctgtagtcctagctacttggggggctgaggtgg

SEQ ID NO: 863502 - DNA, 620 bp, Homo sapiens
aataggcaaatctagaattcaaattgaaaggccatcctcttaactaataatttacattacattgattctttgtaataaatatttatattagaatataggctaagaagggcctaaaaagggtgccaggtgatttgtaagttataattccttagttatcgtgggttttggcctatgctgaccagtttcacctggcactaccagctaaaattaaacggcgtcttcaccagtcctttcaaatggagcagatggaatgatctcccaatgcaatggcttgtcatttgtttcttacacagacccatgagccaccctttgtcaaatgaatgccatcagccagatgagaatgatgagaatgaggaagaggaactggagaatctaactgaggaactaggggagtgtgggatttgagatgtactaatcaggaaggaggtgaggccaggcgtagtggctgatgcctataatyccagcactttgggaggccaagatgagcagattgcttgagcccaggagttcaagaccagcctgagcaacatggtaaaactcatctctacaaaaagtacaaaaaattaccccactgtggtggcacatgcctgtagtcctagctacttggggggctgaggtgg

SEQ ID NO: 863503 - DNA, 654 bp, Homo sapiens
gaaatgactgtgacggatgtcttcagcactcagagtccttgcaacttaggaatggcacaggacagtggctgactatttaccctgcacccttctctactgaaaaaatatgaaaatgctaaatgagagccagacttagagaggccttttagctgggacaaggatgaaacaacaagtcagatggtcaaataactgaagaaatcatgggaataattctcatatgtaatagctcatgggaataagaattgataccagcactgactgacacaacctaggaacagatattttacctccaatatgcacacacactcacacacactcacaaatgtgcacacacaccttcttgggcacctggcaaaaaacttaggcaccatgctgtaagaattaggagaagcctaagatccacacattcaacaacttgcttattaagttctattcattattgcttctggctyctgggggacactgcagtgtacaagaaatttagtttctaccactcgggggcataggattttcatagagaaaataagattagctgtagaaaataaagtcacatttcttgctaaggtgagtttgtggcctgggattagaattcattcatttgggatctagaggtgtggaaggagtcaagagaagcaacgagaaagacattcacat

SEQ ID NO: 863504 - DNA, 646 bp, Homo sapiens
gctcgctctgtgttaactaaactctttctcaactgcagcactgtggtctcagtgaattggttttgtcagtgcagcaggctggaagaacccatgggcaactacatatggacactgacaagagtagcagcacagcaagagacttggggtggggatatctaagttctgagcttttctctcccaaggtgcatcaggttttagccacaaatagcatagtgaaaggaagagtgggcctatagcaggaagcatcagctctggaataggatgagatagtggtgtaccaacagggatatgagaaaaagcgaagaatagcaacaaacacttcaggggtgtgtgtgtgtgtrtgagtgtgtctgtgtgtatttgctgttttcctgtgaacagttctagctggggcagaatgaggaatggttgtagcctgagcaggctggagaagagaaaagaaaggaggaaagaaaataaagtggagttgagtaagcaagggagatgtgtggtgagtgtgagaagaaagaagtcttatgcaacaaggtcttccaggcaagagtcacatggagattagatctgataaaagcagaccaggaaaaaacaatatgatggcaatttttcttaggaactggtaagtcaaaacaaaaagtcatattcctatagt

SEQ ID NO: 863505 - DNA, 604 bp, Homo sapiens
tgatgtcctacacatgcagggatatgtgggggcagccatgttgctaggcacatgtggggacaagaagaggactttgggaatcgccatgtttgggtggacccagttctaatggctagcatttgcatattgaagtttgccagcctggctcttagagccagggcttttctgctagacaagaaatgtttctggagctgctttaaaaaaagaaaaaaccttcccaaggaccccttttcctctctatctgctaaaataatttcttaataactcctataacatatgcaccacattttctttatccagtatatcattgatgggcaggtaggttgattccatgtctttgctattgtaagtagtgctgcaatgaacatacatgtgcatacatctttataatggaataatttatatttctttgggtatatgcccrgcaatgagattgctgggtgaaatgatatttcttcctctaggtccttgaggaattgacacactgtcttccactatggttgaactaatttatactcccaccaacagcataaaagtgttccttttttcttcacaacctcatcaacatctgctgctttttgactttttaagaatagccattcta

SEQ ID NO: 863506 - DNA, 632 bp, Homo sapiens
ctcccataattttgtttaaaaattccccctttgtggtcaggttctcacttaagagagaatgtgaccaaaatttagggccttagtgccactctcagttaccatcattttgggtttcctgtcttagcatgtgattcatatgttacagtgtcctcatggtcacacatttttttcagctcatgccatttcagttgaagtgagaccatttgacattctagagatggctgcatgcaagcatttaaaacttttgagggaatacrgcacaccagggagactgctattatgactattaggaggataataccaagcatttggagtatgctccttagccagcatccccataaaccagaccacctaaaattaaatagatcaaagaatgagctagataaagagtctactcgcttaactaagcagtctttcattaatcccctacaactgaatttctataatctatatttgatttatttctccatagtccacaaaggccagcaattgcacagatacttttctgtttagccaattctattatttagcataactttcacaagagaattgaaagtctgttatgtaacaatagcctttacagtagaatctgctacagagcttatcatgaggaatacatttctagtcattgc

SEQ ID NO: 863507 - DNA, 589 bp, Homo sapiens
ggtgtatcttccaagctcccaagaacccaaagcttccaagaacacaaagcaggggctgtgctggagcagggttctagcattaggaggtcctaggtctcagctagatgctactaggacctcaacatatctgggcttctgaaaatggatgtgtttgcagggaccgtttctgttctgcaaggtggtttgatggggtgagatggaatatggctgcactgcgttggcaggggaaagcaaagggaagcctggctttcctcctcctgacccagagcaaaggctaggggctgggccacctcaaacactgtgtgcayagcagcctccctggatctcagctaggggtattctgcaccccccaggggactctggcaatgtgcacagatcgttctaattgttacaaccgggagaatgctactgcatctagtggataggggccagggacactgcttaacatcctctagtacacagcatggttcctcacaacaaagaattgttcagttcaaaatgccagtagtgctgaggtggaaatgtgccctgaataaccttcaatttccccttttggaaaatgtgatacatgtatgcgacagaatactag

SEQ ID NO: 863508 - DNA, 566 bp, Homo sapiens
cttccaaaactatttctatgcacttttaaacaaaaaggggattatactggtaataacatgtttacattatagttttattaagagaattaaacaagtgagtaaagatataaacatgctattatctgctccacactgtcctaagtgacataaatataaacatacatatttataagtataaatgtataacagtaattggctttgtaaatttttttcgcttaaaacattgcaaacaacttttaatgttagtaaatattcatctaaaacatcatttttaagcgaataaactttatttttcagaggagtttcaggtttataggaaaatcaagaggaaaatacagtcttcatataccccctgtctccacacacacaacytcctcactatcaaaattccccaccataggggtgcatctgtgttaattgatggacctacactgacacatcattatcacctaaagtccatgtttacattagggtttctcttggtggtgtacattctgtgggttttgacaaaagtatgatgacatgtatccaccactgtagtatcacacagaatagttacactgccc

SEQ ID NO: 863509 - DNA, 566 bp, Homo sapiens
cttccaaaactatttctatgcacttttaaacaaaaaggggattatactggtaataacatgtttacattatagttttattaagagaattaaacaagtgagtaaagatataaacatgctattatctgctccacactgtcctaagtgacataaatataaacatacatatttataagtataaatgtataacagtaattggctttgtaaatttttttcgcttaaaacattgcaaacaacttttaatgttagtaaatattcatctaaaacatcatttttaagcgaataaactttatttttcagaggagtttcaggtttataggaaaatcaagaggaaaatacagtcttcatataccccctgtctccacacacacaacctcytcactatcaaaattccccaccataggggtgcatctgtgttaattgatggacctacactgacacatcattatcacctaaagtccatgtttacattagggtttctcttggtggtgtacattctgtgggttttgacaaaagtatgatgacatgtatccaccactgtagtatcacacagaatagttacactgccc

SEQ ID NO: 863510 - DNA, 630 bp, Homo sapiens
atgcacagtctcttagttgggtcagtgtcccgggatggaatttcctgaccttgtcaccggttcttggatccacaccttagagcaattcattactgttggaactgcctgcatctggttctggcctctcctctcaattaagggagaaacaagacaggagggagggctgcaggaagytgctgtgctgtgagaagcaggtgcccttggatggcttctgcaaactccccaggtcccagttttctcattggtgaagaaaccagaatgggcagaccaatagccttacaggcttgctcagtggctatcctgacaaaacaaaagaccaaaacacaggttaggaggtgttacctaaaatgtacaggaggccattgatttgggcggagttcctggctgtgcatctggcctgcggtcacccagtactccgggctctgacacacaggcggcagctcctccctatgaaagtgccacccaggttggacatgtttttaaaagctgatcgttaatgagctggaaaggaaaggaatagaagccattatgatcactctaagaaagcatctctgattcatggatcatttactattgattattgaaaccaatgccatcgtgcacgccctgtggctggttttaaaacctcta

SEQ ID NO: 863511 - DNA, 675 bp, Homo sapiens
gcctgcggtcacccagtactccgggctctgacacacaggcggcagctcctccctatgaaagtgccacccaggttggacatgtttttaaaagctgatcgttaatgagctggaaaggaaaggaatagaagccattatgatcactctaagaaagcatctctgattcatggatcatttactattgattattgaaaccaatgccatcgtgcaygccctgtggctggttttaaaacctctatatcgtggagtttgggatttatttggaagcactataataagcagcacatgacaattacttccctcagtattccctgtaatcaagataaattatcctgctattgatgtaaatgggatatgaaaatctatagagtcctcctgaggagaataaaccctacattatgctcacctcatttaacagcaaaaccattttggggtcaatcaaaaatacattcccccaaacttttattgccatccatccttagtcacctccagaaacaattagcaaacaataccagtgaggaagcactcagcctaggggcgcctgtactgctgttattatattcgccttatagagcctccatgtccacagacctagggcatcctttgacactcacaggtgtcttatcataaatgtatttacataggacacatatgtatttaaaatttgttttccccatt

SEQ ID NO: 863512 - DNA, 675 bp, Homo sapiens
gcctgcggtcacccagtactccgggctctgacacacaggcggcagctcctccctatgaaagtgccacccaggttggacatgtttttaaaagctgatcgttaatgagctggaaaggaaaggaatagaagccattatgatcactctaagaaagcatctctgattcatggatcatttactattgattattgaaaccaatgccatcgtgcacgccctgtggctggttttaaaacctctatatcgtggagtttgggatttatttggaagcactataataagcagcacatgacaattacttccctcagtattccctgtaatcaagataaattatcctgctattgatgtaaatgggatatgaaaatctatagagtcctcctgaggagaataaaccctacattatgctcacctcatttaacagcaaaaccattttggggtcaatcaaaaatacattcycccaaacttttattgccatccatccttagtcacctccagaaacaattagcaaacaataccagtgaggaagcactcagcctaggggcgcctgtactgctgttattatattcgccttatagagcctccatgtccacagacctagggcatcctttgacactcacaggtgtcttatcataaatgtatttacataggacacatatgtatttaaaatttgttttccccatt

SEQ ID NO: 863513 - DNA, 675 bp, Homo sapiens
gcctgcggtcacccagtactccgggctctgacacacaggcggcagctcctccctatgaaagtgccacccaggttggacatgtttttaaaagctgatcgttaatgagctggaaaggaaaggaatagaagccattatgatcactctaagaaagcatctctgattcatggatcatttactattgattattgaaaccaatgccatcgtgcacgccctgtggctggttttaaaacctctatatcgtggagtttgggatttatttggaagcactataataagcagcacatgacaattacttccctcagtattccctgtaatcaagataaattatcctgctattgatgtaaatgggatatgaaaatctatagagtcctcctgaggagaataaaccctacattatgctcacctcatttaacagcaaaaccattttggggtcaatcaaaaatacattcccccaaacttttattgccayccatccttagtcacctccagaaacaattagcaaacaataccagtgaggaagcactcagcctaggggcgcctgtactgctgttattatattcgccttatagagcctccatgtccacagacctagggcatcctttgacactcacaggtgtcttatcataaatgtatttacataggacacatatgtatttaaaatttgttttccccatt

SEQ ID NO: 863514 - DNA, 588 bp, Homo sapiens
cattgcactccagtgtgggtgacagagcaagaccctgtctcaacatcaacaacaacagaaaagaaaatggtatgtcagtttctttaaaaaaaattaaagcattaccacttgaaccagcaattctacttccggacatacagccaaaagtattgaaaaatatttgaacagatattcgtacactgatgttcacarcagcatcactcacaatagccaatgggtggaaacaaccgaaaagtctattgaaagataagtgggtgaacaaaaaggtatatccatgctttggaatgttcttcaatcttagcaagggataaaattctgacacatggtgcaaaatggatgaaccgtgaagacattatgcaaagtgaaataagccagacacaaaagcataattattatatacttccatttatgtaagatagttagaatagtcaattacatagagacagaaattagaatggtgattaccaggggttaaggggagaaggaatgagagttatcatttatcgggttcagaggtttagtatagtaggataaaaaaagcactggaaatagatagtgttgatagtaacacaacagtaaattgcacac

SEQ ID NO: 863515 - DNA, 601 bp, Homo sapiens
aatggacaatagaggctctttttaaacttctctttgctagaagtttttaataagaatctcagattaaacttccaaaaacctcttgaaactaggaagccaaaccaaggcccacttcagactttgcctgcattccctatgggtttattctatatatattctcaaatataacatcscagtcaaagccttggtaatataaccaatgttttcaaatgtgtcctgttataaagagagcagatccttactgaacttgtgcagataactttattaccataaacatatgaatactcatgaatagtttcccaattctggggcactcagatagagagcaaaagcaaatgtttcaatttttgtttacaaaagtatactttaccaattgctcaagaaaaaaagttcataaatctggagaataaaacattcaaagaatcagcacattttcaaatagaaaattatgaaaacattatgcttttgattatttagtccaataacatggagtttttttcttctttgtctagaatttcatgaaggtatcagcctgttcattaaaattttgaaagttcttagtccagtggtatgatcttgaagttatcaggaacttgtattc

SEQ ID NO: 863516 - DNA, 601 bp, Homo sapiens
aatggacaatagaggctctttttaaacttctctttgctagaagtttttaataagaatctcagattaaacttccaaaaacctcttgaaactaggaagccaaaccaaggcccacttcagactttgcctgcattccctatgggtttattctatatatattctcaaatataacatcgcagtcaaagccttggtaatataaccaatgttttcaaatgtgtcctgttataaagagagcagatccttactgaacttgwgcagataactttattaccataaacatatgaatactcatgaatagtttcccaattctggggcactcagatagagagcaaaagcaaatgtttcaatttttgtttacaaaagtatactttaccaattgctcaagaaaaaaagttcataaatctggagaataaaacattcaaagaatcagcacattttcaaatagaaaattatgaaaacattatgcttttgattatttagtccaataacatggagtttttttcttctttgtctagaatttcatgaaggtatcagcctgttcattaaaattttgaaagttcttagtccagtggtatgatcttgaagttatcaggaacttgtattc

SEQ ID NO: 863517 - DNA, 664 bp, Homo sapiens
ggagagaccagagtcaagcctggaggtcagttcagtcatcagccagtggaggcagaaagtggggcagtgttttgcaggtgtttcatgatgacttacttgaaccagtgacctctaaagatagagcagagtgcaaggaatgatctagaaggagtcaaggggacaggcaagagctggtggctttggagcagaaccatgttccctgtcctgggttctttaagtttcctctccttctgcagagggcaggtgaggaccatgtggatctttccagaaatacatgtggatgtttgcaaatgcagaactgattggtagaaagggtgggaatgaactgctggaaatctggtcctcatggaccatgtgtgtttgatggatatgagacaaatttgaagagaagttttgggwatattttctttcactggacattctactctctgattccatggattcgactactctagggacctcatgtaagtggattccagagtgaatatgagaagagactgctgtttgccaggagctgggagtggggagaatcagaagttgttcatgggtgtgcagtttcagttatgcaaggtggggaggttatagagattggctgtcgagcttgatacctatagttcacacagattgagtatttcttatgcataagacttaggacaaaaagtgt

SEQ ID NO: 863518 - DNA, 647 bp, Homo sapiens
gtgaaacagttgaaatgagtccatgggcattggggactgcaggcctgtccagcctctgacaccctggtgagtcagtccatacattacaacagtgacagcaaagtagcatgtctgactccatctggcatctagtctctggctggctatcctcactcattcctgggcataggccaggctaaccttgggaggaatttaatttatggtttgactttgaagcaagaatcacaaaacttcctccatgaaactaacamccttactttgcccagggatggcctttgtcaaactagtgaaagaccatgagattaagattataggagggaactgaattctgctaaaatgttggcacagtttctataattcctgactgctgcaatgttgtttggccagagtttacaaaatttgtaactaattgctcctatagataacatcactattgtagaacatgagattggtcttttgagatgtttctcattcttttgcattctggcaaccggctgacctcattcatacctatgactaatggctcagccagtcatgtggtccctacctggaggcagattcgagcacaaacagatcatttccctctgcccacatgattccatcaccaaataatcagcagtactcattttttagtcctgtgcccctga

SEQ ID NO: 863519 - DNA, 647 bp, Homo sapiens
gtgaaacagttgaaatgagtccatgggcattggggactgcaggcctgtccagcctctgacaccctggtgagtcagtccatacattacaacagtgacagcaaagtagcatgtctgactccatctggcatctagtctctggctggctatcctcactcattcctgggcataggccaggctaaccttgggaggaatttaatttatggtttgactttgaagcaagaatcacaaaacttcctccatgaaactaacaaccttactttgcccagggwtggcctttgtcaaactagtgaaagaccatgagattaagattataggagggaactgaattctgctaaaatgttggcacagtttctataattcctgactgctgcaatgttgtttggccagagtttacaaaatttgtaactaattgctcctatagataacatcactattgtagaacatgagattggtcttttgagatgtttctcattcttttgcattctggcaaccggctgacctcattcatacctatgactaatggctcagccagtcatgtggtccctacctggaggcagattcgagcacaaacagatcatttccctctgcccacatgattccatcaccaaataatcagcagtactcattttttagtcctgtgcccctga

SEQ ID NO: 863520 - DNA, 608 bp, Homo sapiens
taagtctatttgctctagggcatagtttaaatccattgtttcttccttgactttctgtcttgatgacctgtctagtgctgtcagtggagtactgaagtccctcacaattattgtgttactgtctatctcatttcttaggtctagtagtaatagctatataaatttgggagctccagtgttaggtgcayatatatttaggattgtgatattttcctgttggacaagtccttttattattatataatgtccctctttgtcttttttaagtgctgttgctttaaagttagtttttttgatataagaatagttactcctgctcacttttgtggccatttgcatggggtgtctttttctacccttttaccttaagttcatgtgacactttatggttaggggagtctcttgagggcagcagatacttgcttggtgaattattatcaattctgcaattctgtatcttttaagtggagcatttaggccacttacattcaatgttagtattgagatgtgaggtactgtcccattcatcctgctatttgttgcctgaataccttggttttattcatttatttattgtatttttgttttataggtcctgtgagattcat

SEQ ID NO: 863521 - DNA, 608 bp, Homo sapiens
taagtctatttgctctagggcatagtttaaatccattgtttcttccttgactttctgtcttgatgacctgtctagtgctgtcagtggagtactgaagtccctcacaattattgtgttactgtctatctcatttcttaggtctagtagtaatagctatataaatttgggagctccagtgttaggtgcacatatatttaggattgtgatattttcctgttggacaagtccttttattattatataatgtccctctttgtcttttttaastgctgttgctttaaagttagtttttttgatataagaatagttactcctgctcacttttgtggccatttgcatggggtgtctttttctacccttttaccttaagttcatgtgacactttatggttaggggagtctcttgagggcagcagatacttgcttggtgaattattatcaattctgcaattctgtatcttttaagtggagcatttaggccacttacattcaatgttagtattgagatgtgaggtactgtcccattcatcctgctatttgttgcctgaataccttggttttattcatttatttattgtatttttgttttataggtcctgtgagattcat

SEQ ID NO: 863522 - DNA, 653 bp, Homo sapiens
ccacaacaagatctggatagtgggctgggtcagataaagtcagaatccatggggaagggtatgtgtcctggcagtgccgaggttcgtgcctccaggttagctctcagtttctgcaaatacatttatgttgtgcatgtgctgtttcctggactgtttcatgtccttaaatccttgaacctgtctgcagataatgtcatgagaggtctgcatggaagtatataagggctatctgattagggtgggtgtgttttacatagtgggttttttttttcaccaaacacttttcaaaaaattgtggttgagtgtatatatagaaacacatacatacttatattcrttagatgtgagcatatattcatataaatttaatatgtagatacatatgtctataaatatacacatatatgtgtgtatgtatatgtgtatatatatgtatatgtgtatatgtgtgtgtgtgtgtatgtgtatatatatatatatatgtatatatatatatagtgccattttaaccacttaaggggagagagagagagaagagagtttctgctaataccaaatctgggttaaataagggtggtcctatttcctggggttgggcttttgctacatgtgtcaattcctgttggaagtgagctagagaggttacatgctta

SEQ ID NO: 863523 - DNA, 657 bp, Homo sapiens
tagagattttctatatgaaaatcatctgtgagcacattgataagttctatcctttcctaggtgaaaagcttggtgtaggattttaaggacttcccattggctgaaggctggcaaatggagtttgccatcctctgactacagccattctgaggactggaaagaataccctgagaagtggcctattttatttctgcaggaaggtactgaggtttaatttatcttatggagtcttcctagattagaaggctttgaggtgtgttgatgccttgccagtgacttagctgcctgatcagcgaacctatttcctttggctacttcatctgttccctttttgatgttccctataatgtatcactgctayttcacgtggaagaaaactgaggataataacctgttaattttttggtgatatttcataggaaatccattggtggtaagaaaatgccttttattttaaatggcagcatgagcatgaagaactcaaaaagcatacttggaatcagtgtaaatgttagctacctttcccttgcttaatttaagtgttattttaataactatttgtttagctgatggagcatctgcacctgaagagagatgttatttagagtgactactgcttatcctaccttatgtatttcttgctttaccagctgattg

SEQ ID NO: 863524 - DNA, 657 bp, Homo sapiens
tagagattttctatatgaaaatcatctgtgagcacattgataagttctatcctttcctaggtgaaaagcttggtgtaggattttaaggacttcccattggctgaaggctggcaaatggagtttgccatcctctgactacagccattctgaggactggaaagaataccctgagaagtggcctattttatttctgcaggaaggtactgaggtttaatttatcttatggagtcttcctagattagaaggctttgaggtgtgttgatgccttgccagtgacttagctgcctgatcagcgaacctatttcctttggctacttcatctgttccctttttgatgttccctataatgtatcactgctacttcacgtggaagaaaactgaggataataacctgttaattttttggtgatatttcataggaaatccattggtggtaagaaartgccttttattttaaatggcagcatgagcatgaagaactcaaaaagcatacttggaatcagtgtaaatgttagctacctttcccttgcttaatttaagtgttattttaataactatttgtttagctgatggagcatctgcacctgaagagagatgttatttagagtgactactgcttatcctaccttatgtatttcttgctttaccagctgattg

SEQ ID NO: 863525 - DNA, 621 bp, Homo sapiens
tactctgtggaagtgttgcaaagtatggtccccattgcattttcctcttcttggggacctgggattcagtgaaatccttgatttttaatgtctaaatgttgtcccttccaactggttctcttttttacatatttaaatgattagaatctaaaaattgaaaagactttgttggccctcttccttaatgggctctatcttgagcacagtgattcagttgaagaacagagaccaaattaaaagctacgtctctaaataaaaaacaggtgctgcagaggatgtggagaaataggaacacttttacagtgttggtgrgactgtaaactattccaacccttgtggaagtcagtgtggtgattgctcagggatctagaagtagaaataccatttgacccagccatcccattactgggtatatacccaaaggattataaattatgctgctataaagacacatgcacagatatgtttattgtggcactactcacaatagcaaagacttggagccaacccaaatgtccaacaatgatagactggattaagaaaatgtggatcatgcacaccatggaacactatgcagtcataaaaaatgttgagttcatgtcctttgcagggacatggatg

SEQ ID NO: 863526 - DNA, 599 bp, Homo sapiens
atgctgctataaacattgaggtaccaaaacctgtttgggtctctgctctcaattattttgggtttatacccaggagtggaatggccaggtcatacagtacctctagttttagttttctgaggaaccgccataatgtttttcacagtggttgcaccattttaattcttatgaatagtgcacaggggttccaattgttccacagtctcattaacacttattattttctggggtttttgctttgtgtttgrgagtagccatttaaattggcataaggtataatttcattgtggtttgcattttcatttccttaatgattagtgatattgatcaatattttatatgcttgctggccatttgtacatcttctttggagaaatgggagggacagatccctcccattgaatagattaatgtcctctcctgatggtgaatgaattcttcctctattagttcctgcaagacctggttgttaaaagagcaggccaccgccccggtttctctcttgctcccttgctcatgtaatctctgcacatgttggcttcccctcctcttctgcgatgagtgggagcaggctgtggccatcaccagatgaagatgcc

SEQ ID NO: 863527 - DNA, 649 bp, Homo sapiens
actccatctcaaaaaaaaaaaaaaaaaaaagactgcaaactttggcatcaggctggctggattcaaagcctgattttgccacttgttagcccatgaatagtaacaagatgcttaaattctctgtgcttgaaagttttcatctgtaaactagagataatattaggacttgcatcacagggtttctgtgaagatcaaaagaaatatgtgaaaatcaccttagcgttagaactgtgccttgcacaaagtaaacactcagtaaatattaactcttattatagaagagtgtgtgttatctcctcaactagataaaataatcatagaatgatggtttcagagttgtgaggccrtttaatgcaattagattttataaatctaatctgtacaagtagacttgtgaaataaatctggaatgcctgctaaattttattgaaagcaatcgcgtgtttaatggtgcataatatatcaaagtacatgcatatttaatgctcaaaagacattatctgcttctagagtggattaacatttcaggcagtgagaatgggggtttattactttaatctaaatagggattaagttgattagattcagagtttggttgatttaagtactgattggtacacctgttcgtgtagggcacagtcctttcatc

SEQ ID NO: 863528 - DNA, 706 bp, Homo sapiens
gatctgcgatgacatagtcaggcaagttggtaccattgcataggcagagatggaaagaagcttgtgggatgctggaaatattctgtttctggatctgggtgctggctacatgggggcttaaaatcgctggtgttacactaatcactcrtgaacttttctgcatgtatgtgcaacttagaataagaaaatggaattacggttcacatgctaggcatgcctggatcaggctagtggacagcatcctgtaccaccgtgtcccatcctaagtgctgtagaaacatgttcctaatacttcagtgcatgccaaaataggcaaatattttatttacatttgaaatctcacagtagcaaggtcaactacagccactttcccccagggagagtccaatattttattcatgtctcctaaactcttataatgagcaactaccatgggccaggtcctgtgcagggctctgaggatcacagggaaagacccacaacctccctcatggagaccaacattcccagaaaacccacgcaaataaacatagcgaggtatggtgaagctccgggagtgctgccgcaccacacagaagttctgacctggcctggggcgtatgagagaagcctttgatgagaaagtagggaatgaggcctctgaaagtaaggggagggtgtgctccaaacaaatgcaacaaaaagagaaactgtaactgcacacggt

SEQ ID NO: 863529 - DNA, 608 bp, Homo sapiens
aggtaacaaacattgccttttttcttgtttgttttttgcagcttatagcatcatagcataatttttgacccaggagtatttgttgaagaatgaatacatgtaaattaataaatgtaataaaccaacaaggtatttcttttagccaggtgtggtgacatgcacctgtagtcccagctactcaggaggctgaggaggaaggattgcttgagcctgtgagttcaagaccagcctgagcagcatagcgggatctgatctcagaaaaaacaaaaagatatttctcttcagtatgctttcatagtttagatttttattttaagtattctatattctaytgggaatcagtaatacatcttcctttcacctctagccaatagcaacccagatcaccttcctgaagcaaacacgccagcaatgttattttaacaaaatccatccatataaaaccaatgtttgtcttcctcggatctttacatttggatattactaatttaatacaccttttaatttctaaagagactagaggaaatcatatgagttccttgattaagttaaatttgaaactttcaaaatatattacaagctcagagaattttaaagtacactagaaa

SEQ ID NO: 863530 - DNA, 604 bp, Homo sapiens
acagcagctaacaatataggggacaagatcacttggcttacaatgattttcacacagaaaaccagaaagtagtttgaatcttaaggaagagagctgcattttaaagtttaacagcaagttgggggtcaggagacctgattttttccccagtttgtgtgctgccactttaccagtagcgagtccttggggatgctactaaaactttttttttttaattatactttaagttctaggatacatgtgcacaacgtgcaggtttgttacatatgtatacatgtgacatgttggtttgatgcacccattaactcgtcatttacattacctatttctcctaatgctaaccctccccccaaccccccaccccacaacaggccctggtgtgtgatgttccccgccctgtgtccaagtgttctcattgttcaattcccacctatgagtgagaacatgcggtgtgtggttttctgtycttgtgacagtttgctgagaatgatggtttccagctttatccatgtccctacaaaggatattaactcatctttttttacggctgcatagtattccgtggtgtatatgtgccacattttcttaatccagtctatcattg

SEQ ID NO: 863531 - DNA, 596 bp, Homo sapiens
tttataaaagtaatttcttgttttgcttacttcttttttcatgaaattctgcttttgttttatggatgtaatactttctcaaatatgaataccaatactaataaaatagaattttttgaagatttcttctgtttcctaacttacctctatttcctctcgggtcaatatgtatctttatacatttcatatatgtttatatttatatgtatataacatatatttgcttgtcttgggttttttttttttttccttctttgctaactttgataccattttattttcttactactgctttttctttagtgtttggtatcttgaatatccattcatatttaaraatgaaagtctaggtatgttattctagatatcttgtaggagtttcctctatactagcttcagataggccccttccctgagtgggatgaatgaccgtaaattacgtggtcatcagcaagagtatgggctgggaggattttaaatgttgagtgggcattcagactgccaggatgagaacagtagttcactagaaacctcagttttctccaggttttcttcagagcaccgcttgctaacctctttcgtaccattaaatatat

SEQ ID NO: 863532 - DNA, 632 bp, Homo sapiens
taccggtagagcggggcactgctcaaaacattcccaaaaatgtggaagcaattttggaaccgggtagcaggtagcagttaaaacaatttggagggttcagcagaagacagaaaaatgtgggaaagtttggaactccctagagacttgttgaatggctttgatcaaaatgctgataatgatatgggcaatgaaatccaggctgaggtggtctcagatagagatgaggaaattgttaggaactggagcaaaggtgactcttgttatgttttagsaaagagactggtggcattttgcccctgccctagagatctgtggaagtttgaacttgagagagatgatttagggtatctggcagaagaaatttctaagcatcaaagcattcaagagttacttgaaggcattcagttttataagggaagtagagcataaaagctcggaaaatttgcagcctgacaatgcaatagaaaagaaaatctcattttctgagtataaattcaagccagctacagaaatttgcataagtaacaagaagccaaatgttaatccccaagaaaatggagaaaacatctccaagtcatgtcagaggtcttcatgtcagcctctcttatcacatgcctggaggcctacgagga

SEQ ID NO: 863533 - DNA, 632 bp, Homo sapiens
taccggtagagcggggcactgctcaaaacattcccaaaaatgtggaagcaattttggaaccgggtagcaggtagcagttaaaacaatttggagggttcagcagaagacagaaaaatgtgggaaagtttggaactccctagagacttgttgaatggctttgatcaaaatgctgataatgatatgggcaatgaaatccaggctgaggtggtctcagatagagatgaggaaattgttaggaactggagcaaaggtgactcttgttatgttttagcaaagagactggtggcattttgcccctgccctagagatctgtggaagtttgaacttgagagagatgatttagggtatctggcagaagaaatttytaagcatcaaagcattcaagagttacttgaaggcattcagttttataagggaagtagagcataaaagctcggaaaatttgcagcctgacaatgcaatagaaaagaaaatctcattttctgagtataaattcaagccagctacagaaatttgcataagtaacaagaagccaaatgttaatccccaagaaaatggagaaaacatctccaagtcatgtcagaggtcttcatgtcagcctctcttatcacatgcctggaggcctacgagga

SEQ ID NO: 863534 - DNA, 627 bp, Homo sapiens
tgacctgatacttttctctttcctgtgatatgaatacgtgaaagtatatttattttcaaagaaaaccaatatcctttcttgaaaaccttctgatatcagagaaggagctggcagccaaagaaccagctcaatactaaacccaagcctgggaaagtaagcggtcctcgtgcatctctagagcctgtaattaatggctctccttggattcccactttccgcttctttttaccctgctttagaaatgccttttgttttcctattcaccctggataagatccacttcccctcgctggctcccgcttccagtcaccacttccagtcacagtggcttgctatgaactcctctcctatgccattttggtttataaaaatactatattcttaataaaatcaaatagatgtttctcaataggaaaakatagatataaataatggaattcatgagctacgaagttttattccttacaggcaacttggagtcctcctcttcaacccataagacgtgtttatctcattcccactgcactccaggccatcttactaatattgttaaatgttgattttataacacctaaccaaaacattaaagaaatattcttaagcctctaggatcaagagcatctagcc

SEQ ID NO: 863535 - DNA, 667 bp, Homo sapiens
gtcgctaaggtaaaaaaccatccaaaaccatctttcaaatttcttacaaatggtttttagtttgatatttcagtcctttatgtatacatagaaggaccctaatcatatctttattgatagaagcatagagactatcagttctcaatactgtattatggtatctttaagaatatttttgtgtaaacagggctatatatgtctctatgaaccttaacctgaactcccaaagggcaatcagcatttaaaatgycctaacctagaattatcccaaagaaggctgctgtaagcagctttaaagattgctttccaaatctgcaccagaacattgcttagcataaaggatgttaaataaattttcatgggtaaaataagaagtgctccaggtatgtggtcagatgaaaaattgtatgcaggcacctcaacctttgcacgaacacagtataaaaatctccgccactttcagcttcagtgtgagaccctaggtctcatctagccttccaccacttcgtgatggactttgttacctgttcaaactcgaagctttttcctcccattccaagaatattgttctgtttgccttgaaatgaactttcatgcagggtactagtccaagtgcctaaaaggacaaagacttcatcaagtttactggagcagactgcatgattgc

SEQ ID NO: 863536 - DNA, 633 bp, Homo sapiens
caaataatactacaataaagataacaatttaaaacaataaaaacctaaggactccattgcatagatcatatttgatctgtcacctgcgattccacacactctgacctgattttagttaccctaagtctctgggagagaagttatgaatgagccaccrttaaaggagtgttaaagtagaaagtgggaatcttgtcaattgtttatgcatctctctattagagatgctctgtgggtctctaatcttggattttatcattgtaagtgctatattgctatagattataagagaagaagtcaacagagtgaagttaaggaagttttcatcaactggaattttgtggatgtaaaaagacttagaaaagaagggataaaatggctacataaatcgaaggaagcaagattgcaacatgagcagcaataagaataaacaccaagcttgccgaaacctggtggaggcaagtcagcaaagctgacctgaccagctgtagtagagcagttgtcaatggggctgggaggtaaggtgaagccacgttagaaaatagaagcagacaagtatggcaaaaatttagttcaagaaagggttaatataaatatataataacaccaagacctctattaataaatagacaaaat

SEQ ID NO: 863537 - DNA, 638 bp, Homo sapiens
gtacattatggttggcttacaaatcgtagcctcatagagaactttttcttcttttagctactgtcttcctaaaataaaagtctctgtgcaaagcaatggaagaaacctcatattgttttttggggttgtcattttatgtaacttacaataatgactacggctcgtcttatacaagatgtaaaggatttgggagagggaatccagtgtgcatttaggggaagatggtgatgtagatagcatatttcaggaggctgggaagtgtcgagtgcttaaatatatgcttctcaaatttaatgggcatasaaattacctggtggtattattaaaatgtaacctctaattcagtagttttgggatgggtccatggacagcactttggttagttccccttgggactcccctttcccctcagagaagtgtagagggttggggtattgggcttaagaggagttccagactgtaaccatagctctaggtaactcccttctggaagtgatgtgttagcgactggaggagaaagggatccctgggatccttttcagctttactattctgatttggggttctgagattccaacaaagtggacttttgggagtcacagacctccatgggaatgatgaaagctgcgtaccttctt

SEQ ID NO: 863538 - DNA, 539 bp, Homo sapiens
tcattccccttaggggctacccaaaagagcaaaagggaaaggcagaagggatctctgggacctcacatccttatttaagcagagaaactccccttttatcagtgttcattttcacttcagtgtaaaatttcatttgaactaggagttctaaggtcatcaaatatttgaaaactactgcttaagggaacacatgtggatttgtaaatcctgctaaatctatttatgtattgtgatataattctccctactgatgctgtaaaaaattgttttaaactgaaagctatgatataaactattccaactgaccccacatatccccaraggcctcctttaaagttctactctgtggtttgaatgagtttttgaatggatgccaaagatttcctatctcctctgctaaagaggctaagactacaaaagaagccaagccagggggaaagaaaaattccagccataaagtttcaaagaattctcagatattaattctgacccaagtgccagagtgattcactggcgggtgatgctgagtaatcttactt

SEQ ID NO: 863539 - DNA, 640 bp, Homo sapiens
taaccttcatctgtgaaatttaaactgcatttgtctgtgggagaatgctttaaggactaaattagattacatacataaagtgctcagcattctattacatgttttccccctgaccaaaccatgttaaccacatccttctttcaactccctcatggatgcatttgaatttccaccaccctctgccatgyaccattactgtgcacatgctggcttcctcacttctctctagtttgcctttgtgtgtttctaacacagcctctgtatggcaatgaactctgagatgaactgagccttcccataatatctggttattatgatgaccaaaatcaatttaacctcagagactgggatctgggaaaggcaggtctataaacacttaagatgttcacgaaattctctgatcacaaagtctaggcagacgggggtgaggggagcggagtttgggctcaagactctgtttctgagtgaacactcttcccacctccatgcttcgtcctgctgttactcaccccacatctgtgagggctctggatggaggctgctgtcctacgtgtagaatgggatcagtgttgggcttcaccagacctctgatttttgtgtgtgtatgtctgctgttcttcaggcagcagaggaaggaatc

SEQ ID NO: 863540 - DNA, 608 bp, Homo sapiens
ggtccaaataatggccaaagttgcctgcatctcttctgcatggtcttgctgcatctcttggcatgctcttgctctgaaatgtgattttgctagtctttatgaaagttcctaagttcaatgttcttcggtcaaatacgttatgtgccatttgataatcagttgggaacctggagcctcctatgtaaccctctgaaaaagttggtttagaacttgtggtcagactcaatgcctaaaagaaacctctaagccttttaagttttatatttacagatattgacattctaagatcctctggcagtccaggtgatacagaaattcatagcaaagacaagtgaaatgaagcatgcatgtgaataagaggaaaagttgagcaaaatggtgagctkggaatagatctttcaggatacacaaaacctcctaaggaaaacctgtacattataaggaatatttaacactctggaacctagcttccagtgaacatagcccaataaatgacccacaatttgaccatttaggttcatacttccttttcttgaggaggatgaacataacagtttccatattatccagtgacccagaatgcctaggaagtgatagatggtgaggtt

SEQ ID NO: 863541 - DNA, 472 bp, Homo sapiens
aaaaagacaaattagccgggcgtggtggcaggcacctgtagtcccagctacttgggaggctgaggcaggagaatggcgtgaaccccaggggcggagcctgcagtgagccgagatcgtaccactgcactccagcctgggtgacagtgagactccatctcaaaaaaaaaaaaaagacaatgatagtcactatataataacaaawgaattaatttaacaagatattataattctcaatttatatgcaccaaacactggagctcccagattcataaaacaattactactagacctgagaaacaaaatagacagcaaaacaatattagtgaaagacttcagtataccactggcagcactagacaggtcttcaagacagaaagtcaacagagaaacaatagacttaagtgacacacaagaacaaatggacttaacagatatttacagaatattctactcaagatctgaagaacatgca

SEQ ID NO: 863542 - DNA, 580 bp, Homo sapiens
aaaaaaattccactttattggaaaaaaatcccagctccattgctacaaatacggggcgattttgagccagtcacttcatttcttggggactcagttaatacatttgtaaaatgaaagtgttaaactaaaataactgagacttcccagctgtagcattcattgcttctatgttgtcagtatttgttgatgttttaaataatattacttcattcccagaggcttcttgatctgccatacctctctctccagattcctccacagataaatagttccaggtgggattcgtttagatttattattattattttaatagctaccatatatccagtgcttactatrtgcagaatatatgttatctgacataatccatatgtaatgcaagtattagactagtcttgcctttccccatattttgggaaaggggagtttgtgttaaaactgtttcttgctcctccttgcagctgctgctttgggttgcatgtttctctctgttgctcttggctccctcttgaaccatactggctgtgctgcccaccattgcctaaaactctggaactctgacttccccctccaggtgatg

SEQ ID NO: 863543 - DNA, 654 bp, Homo sapiens
gaaagaaattaggatgaatttagtatttttaagaaaactagccagaaatatcaatttgggtactttcgtttgtctcaattccatagatcccgaagcaatcacaggcattagagtcttgttatgaaaccataacctgcaagttttcttccccttgactaggtaggtagaagaatgtgrtaggatgaatgcatgatgtggacagtccaaatcctgcttgctctacttagtagtagctgagataactcaagtctttgtttctataaatggcgttaatgtctaacttacagtgttactgagaaaattaaagcagatacatatttaagatgcttggaacaagtactcaaaaacggaaaagattgccattaaacacactccttgaagataggataccttttattgtactttgcctccttcagggcatttgaacagagcagactctcaacacatacagtcagttcttgttattctaagtaattatgttctataaagttgctgcagtccaggtgtggtggcttacaccagtaatcccagcactttgggaggtggagggaggtggattgcttgagcccaggagtttgagaccagcctgggtaacatggtgaaacttcatctctacaaaatccaaaaaaaaaaaaaaaaaaaaaaaaaaaaaag

SEQ ID NO: 863544 - DNA, 649 bp, Homo sapiens
tttttatgttatgctttattattgacaaacggaaaccatttgcttctctgaacttattttaatcacattccaggatgtcattcgcatggcagtcattgcagatttgtaatttataatgctaatgttttgtcagatggcaataaaatgtttttgaagaagcagtacttgatctaatttgcacrgtggtgtcaaggggactcacacaggttctagcactctcctgacaaaatttgccccagacatgtgcgagtcccggggaagagtgctttctgctatgtgtgttgagaggcagatgagagttggggagcgatggaagtgaatagctctaatttttctctccccctcttctaataacagcacccagattttcctcagggcagatactcttccctggactcatatcacaaaatcctaataaagccagcctcaccctctggctttagttgtctaagcagcccagcttcctgtccagagggtttggtttaaaagatgcaagtaaatcgagtcaggctcagaggttcaactctaggactttgctgcaactactgaaaaagaagtgctcttctccctgggctgctggactggcagggtgtaaacctgagctgctggttatcatgttttcctctctgattgaatcaacacaggaatg

SEQ ID NO: 863545 - DNA, 649 bp, Homo sapiens
tttttatgttatgctttattattgacaaacggaaaccatttgcttctctgaacttattttaatcacattccaggatgtcattcgcatggcagtcattgcagatttgtaatttataatgctaatgttttgtcagatggcaataaaatgtttttgaagaagcagtacttgatctaatttgcacagtggtgtcaaggggactcacacaggttctagcrctctcctgacaaaatttgccccagacatgtgcgagtcccggggaagagtgctttctgctatgtgtgttgagaggcagatgagagttggggagcgatggaagtgaatagctctaatttttctctccccctcttctaataacagcacccagattttcctcagggcagatactcttccctggactcatatcacaaaatcctaataaagccagcctcaccctctggctttagttgtctaagcagcccagcttcctgtccagagggtttggtttaaaagatgcaagtaaatcgagtcaggctcagaggttcaactctaggactttgctgcaactactgaaaaagaagtgctcttctccctgggctgctggactggcagggtgtaaacctgagctgctggttatcatgttttcctctctgattgaatcaacacaggaatg

SEQ ID NO: 863546 - DNA, 511 bp, Homo sapiens
tgtctgtgtgcctgtgtcccttctattaaggatacaggtgattggatttagggcccgccctaatccagtatgacctcatcttaatttaaatcttaatttgcaaagattctttccaaataaagtcacattcgtaggtactgagggctgggacttaaaggtatcttttgggaggaccgaattcaagccacagcacacrtgactatgcaattaataataatagctaattaataatgcaataggctgggcacggtggctcacacctgtaatcccagcactttgggaggccgaggcaggcagatcacctgaggtcgggagttcgagaccagcctgaccaacatggagaaaccctgtctctactaaaagtacaaaattagccatgtgtggtggcatatgcctgtaatcccagctactcgggaaggctgaggcagggagaatcgcttgaacccgggaggtggaggttgtgttgagtcgagattgcgccatttcactccagcttgggcaacaagagtga

SEQ ID NO: 863547 - DNA, 600 bp, Homo sapiens
tgctgtttccaccaaagtggctgcacctcattatggccatggtggatacgtcttctaatatcatggcaaaatgtctgccccgcattgagcctcaacaaaggcgatttaaaatgttaccaggagaaaacaggatgctgtggtggaaagtgcattgaactgaatgagggtggtgaggtttgagggctgtctcttgctgtctgagacaacaggtgggtatgttacctcacttctcttgacctcagttagtgctccccaacagaaggagggcagagagccaaaggggaggttgagaccaccctggctccgggatgcttcccacccacatccagtcgccattaaccagagcaattccttgtgcagttgggtcctcattccttctcctttgcaaggtgaatcctgattctrttcacccccatctgaatggctgtgtgctttggcggaagaacccacccagaagggacctttatcagtcccttatagcctgttgacctcgtttccctttccaagggactgctttgcatgggagagaaaggcacttctggctgaaaagatgtaagggaaacttgcaagaggctctctgggaagggattccttgctttt

SEQ ID NO: 863548 - DNA, 541 bp, Homo sapiens
tccaattcatcaaaagagagtgaaaggcaaaccactagagccgggaaaagatattttaaatacatatgacaggcaaaagtatttgtattaaaaatttgtttttaaaagaagatttctacaactcaatgagaaaaagattaaaaatctartttaaaataggcaataagcttgaataggcactgcaaaagacaaataaaagtggcaaaaaaaaattaaaaaggcacatcatcatcagtcaccagaaaaatgcaaattgaagccataataagacatcactacgcacccaccagaatggctaaaattcaaacatttaacaatctcaagtcttaccaatgatataaagaaactgaaacactcatgaactgatgataggaatataaattggtgcagccacttaagaaaactctttgtaaggatcgaataaagctgaacatatgcacaccccatggcccagcaatccagtcttaggtgtgtatatcaaacagaaacacattcatatgtgtgtcacaaaacacatacaaaaatattcatagcagcacta

SEQ ID NO: 863549 - DNA, 699 bp, Homo sapiens
tcaccaaaggggacgtagggtcggcaaataagcacatgaaaagatgttcagcatcattggccatttgaaaaatgtagattaaaatcatgataaaataccctatacacatattagaatggctgaaatttgaaaatactctggcaaacagtgtggcagtttctcataaagttacaggcacatctaccggttgactcagcaaccttacttctaggaattacctaagcattacaatatgaaaacatatctgtaccccaaaacctgtataagaatgattatagaagcttaattcttaawtatcaaaaactggaaacagccaaatgctctacaatgggtgaaaaacaaaacaaaacaaaacaaaacaaaacgggttatgttcacacagtggaattctgctcagccataataataataataataataataataatatgtttacatgcaacaacttggatgagtcttcgaggcattatgcagagtgaaagacgccagtctcaaaagattatatacggtaggatttcatttatgtgaccttgtggaaaagacaaaactttggtgatgggtaacagggtagtgcttgctaaaggttagtgttacgggtgggactagggatattgactacaaaaggatgacatgagggagttctctggggtgacggaactgttttgtattctcattatggcagtggttacataaatgtat

SEQ ID NO: 863550 - DNA, 699 bp, Homo sapiens
tcaccaaaggggacgtagggtcggcaaataagcacatgaaaagatgttcagcatcattggccatttgaaaaatgtagattaaaatcatgataaaataccctatacacatattagaatggctgaaatttgaaaatactctggcaaacagtgtggcagtttctcataaagttacaggcacatctaccggttgactcagcaaccttacttctaggaattacctaagcattacaatatgaaaacatatctgtaccccaaaacctgtataagaatgattatagaagcttaattcttaattatcaaaaactggaaacagccaaatgctctacaatgggtgaaaaacaaaacaaaacaaaacaaaacaaaacgggttatgttcacacagtggaattctgytcagccataataataataataataataataataatatgtttacatgcaacaacttggatgagtcttcgaggcattatgcagagtgaaagacgccagtctcaaaagattatatacggtaggatttcatttatgtgaccttgtggaaaagacaaaactttggtgatgggtaacagggtagtgcttgctaaaggttagtgttacgggtgggactagggatattgactacaaaaggatgacatgagggagttctctggggtgacggaactgttttgtattctcattatggcagtggttacataaatgtat

SEQ ID NO: 863551 - DNA, 580 bp, Homo sapiens
actgggcttgctcctccacttccttggagaagtgctcttctcaaatacccccttatcagacagactttccttgaccagttcatcatgcatagtcactctctactcggactccatttctccttcagagcacatgtcaccacctgctgaagtctatgtttgtttactgatgtgttctaccacctggctggatctcaataaaacataggttccaagagggatggtctttstgtggtttatttcacatcttttgtaccaaaagcagtgcctggcacacagtagatgcttaataaacattagttattgttattaaagtgctttaaaaagtgcctggcacacaaaacatattcagtaagtattcgtgcttattggtgaagatctcagaaaacttgcaaaaagataaagaccttggagaatagtcacacttagtcatcaggaagaagaagaattcacagagcagttacagagacaagaaaacagtggcctcctttcgggcagagaagagagacaaggtgtgcccaccatgaaggtcacacctcagaccatgcagccacaggcttttccaagtactaatgcaggaaac

SEQ ID NO: 863552 - DNA, 600 bp, Homo sapiens
gtacaaatttaggcttcctatatggtccggaaatgcccaatctgagaaattcacataaaaattggtcctggactaatgaatgggcagggaaaatgccagagcaaaattcccacaatccatgctgcagacaattcctacagaaaaaatgagacccactgagatcacaagttataaaagcacatcaaaggggmggattctagccccaaggactagaaataatagaaaaattcaaaagaatataattgcgtatgtttaaaatgagagaaaaaataatcagatgccaaaactacatttgataaaattcaacattcaatcatgattttttttaataacaaaacaaacaagaaaagacttcctacaaatctaagaaagacattttcttgtgtggtacatatacaccatggaatactatgcagccataaaaaggaatgagatcatgtcctttgcagggacatggatggagctggaagccgtcatcctcagcagactaacacaagaaaagaaaaccaaacactgtattttctcacttataagtgggagctgaacaatgagaatacatggacacatgggaggaagcaacacatactggggcctgtgagg

SEQ ID NO: 863553 - DNA, 600 bp, Homo sapiens
gtacaaatttaggcttcctatatggtccggaaatgcccaatctgagaaattcacataaaaattggtcctggactaatgaatgggcagggaaaatgccagagcaaaattcccacaatccatgctgcagacaattcctacagaaaaaatgagacccactgagatcacaagttataaaagcacatcaaaggggcggattctagccccaaggactagaaataatagaaaaattcaaaagaatataattgcgtatgtttaaaatgagagaaaaaataatcagatgccaaaactacatttgataaaattcaacattcaatcatgattttttttaataacaaaacaaacaagaaaagacttcctacaaatctaagaaagacattttcttgtgtggtayatatacaccatggaatactatgcagccataaaaaggaatgagatcatgtcctttgcagggacatggatggagctggaagccgtcatcctcagcagactaacacaagaaaagaaaaccaaacactgtattttctcacttataagtgggagctgaacaatgagaatacatggacacatgggaggaagcaacacatactggggcctgtgagg

SEQ ID NO: 863554 - DNA, 600 bp, Homo sapiens
gtacaaatttaggcttcctatatggtccggaaatgcccaatctgagaaattcacataaaaattggtcctggactaatgaatgggcagggaaaatgccagagcaaaattcccacaatccatgctgcagacaattcctacagaaaaaatgagacccactgagatcacaagttataaaagcacatcaaaggggcggattctagccccaaggactagaaataatagaaaaattcaaaagaatataattgcgtatgtttaaaatgagagaaaaaataatcagatgccaaaactacatttgataaaattcaacattcaatcatgattttttttaataacaaaacaaacaagaaaagacttcctacaaatctaagaaagacattttcttgtgtggtacatatacaccatggaatactatgcagccataaaaaggaatgagatcatgtccttygcagggacatggatggagctggaagccgtcatcctcagcagactaacacaagaaaagaaaaccaaacactgtattttctcacttataagtgggagctgaacaatgagaatacatggacacatgggaggaagcaacacatactggggcctgtgagg

SEQ ID NO: 863555 - DNA, 635 bp, Homo sapiens
ccactaccttcaccattactgagcaatagcaattatttttcatctttgctaatataataagcaaaatatagttttaactttcattctttcagttgctattaagactatattttcaaatgttaaaaagcatttgaatttcttctttrtgaattatgcattcttgtgttctatcaaattctggaggtgttcactgtttttgttttaatttgtaagtgccctctcagccacccaggtgcaccatccattcatattttttaaagcctagtagcaaaatcttaacagaacataaataagaactacaacgtcagtaaatggttgagccaagttcaactttttttcaatccaaagtccaggcatttcccatgatgatgtatactatgctgactccccttcaagactgaaagcagccattcccaatctgtgttgcccattcaaacctcctggggagctttggaagcattccacttgtctcttaccccataccaattaaatcaggcgtagtatttttgaggatgcaaaggtgattccagtggagagcaaagtttggcaaagtatggactgagcatttcacccctcagctgctggctcttagctctcagctgtcaaccttctctgacccttggctggagagaatt

SEQ ID NO: 863556 - DNA, 624 bp, Homo sapiens
accattctaaccaatggcttttaaaattaaatgaacaacacacagttttatttttaaacaactacttagttgcctactcctttgccttaatacagaatacaacagagcatgaaaacaaaaattgagttcatttatatatactcatgtatccatgtaatagagacgttttaagtttctgtcgctttattttaaaatgaacactttaatgagcacattctcttctatctagaaaactgtattataatagcaaggttrgaaatgacctagaaacaaacgtgtcaggcctccctctgcccggcctccctctgcccagccaccccctcccaccaacagaagcatttgtgtgtgttaaaacaggctgatgttccagagtctagactggaaactactaagtgaatgcagatagtctctgtgtgaagaattttagtaagcctcgtattcagtagaaatgtttctatttttggttcctctattaactcgttttgaaactcagacaagctatttagctttcctgtgtctagaaagaatcatttctaaaataataatatactttctagtccataggtcaacagatgttatagagaactggatgtgaaacctacataggtaaagattttctaatta

SEQ ID NO: 863557 - DNA, 608 bp, Homo sapiens
agactgaagagcacaggtaacttgcccaaagtaacacagtttgtcagccaagcaactaaaattcaaacccaggactgattccaatgcccacagtttttccaacatgtccatcttgtgaaatcacctacataaagtagatgtttggcacaaagcctggaacatagtaggtcctcarctaatctgtgtttccttcattctacttgctagttttcagtgaagttgacttctccattccaatcctaccttaagacttacaaataaatacaacgttctctacactatcacagctgcctgacaggctaaactaattaaattatcaaagctgcatatatatatatatatgcatgcatgaggattgcttaaacctgggagttcaagaccagcctgggcaacatagcaagacccaatctctacaaaaaaatacaaaaattagccaggcatggtggtgcgttgcctgtagtctcagctactcgggaggctgatgtgggaggatcacttgagcccaggagttggaggctacactgagctatgatcacaccactgcactccagccagggcgacagggtgaggactgatctctgaagtaaaaataaaaataaaaattttgc

SEQ ID NO: 863558 - DNA, 608 bp, Homo sapiens
agactgaagagcacaggtaacttgcccaaagtaacacagtttgtcagccaagcaactaaaattcaaacccaggactgattccaatgcccacagtttttccaacatgtccatcttgtgaaatcacctacataaagtagatgtttggcacaaagcctggaacatagtaggtcctcaactaatctgtgtttccttcattctacttgctagttttcagtgaagttgacttctccattccaatcctaccttaagacttacaaataaatacaaygttctctacactatcacagctgcctgacaggctaaactaattaaattatcaaagctgcatatatatatatatatgcatgcatgaggattgcttaaacctgggagttcaagaccagcctgggcaacatagcaagacccaatctctacaaaaaaatacaaaaattagccaggcatggtggtgcgttgcctgtagtctcagctactcgggaggctgatgtgggaggatcacttgagcccaggagttggaggctacactgagctatgatcacaccactgcactccagccagggcgacagggtgaggactgatctctgaagtaaaaataaaaataaaaattttgc

SEQ ID NO: 863559 - DNA, 603 bp, Homo sapiens
cttctttacctcaacctgggcaggagctgtgtctggttatgtgagcagggaaacatctcattactcaccagccctctgcccaacacagctggcccccttaactcaaagccccctccaggccccctacaggctccaaatccactcttttcacactcccacagcctgcaggtagaggggtgatgagcagccttctccagctgcaccatctcccaggggcgggatgtggaggattccacactccaagaagccaattaaggatcctcatcctggcagagctgctggacctggtrctacttgaacactccctgcctccctcgcccctgctcccaggagtctacctgggatgcctcagagctccccagccaggggccaggccgagtaggatggggagctgccctctccctttccaccagccagctccggcccctgcccaggctctgcccagactcccaacttccttccatgattaagcatcaattaaatactgactgagcatctggtaagcataaaacagtctactatgttctccacagcagaaagcatctcttttctgcagaagtgaggccagtggggatggcctctatgctggtccttgtgcacacc

SEQ ID NO: 863560 - DNA, 576 bp, Homo sapiens
ccactgctctgctgaccctagggctttgattattcccaaaaccagtgaagaccccacttctatggatctgttcagccctcatgctgatgttcacaggttagggtgagggccagggggagctgaaagatgaggcccagggttggggaggtcaggccctccactgggagtcctggggcttataccctgggggattctgctggctgtcagaacctggatgttgcctccagggctttatggaagatggggtcacccatcacccacccacctatctgattttctcctcctttctctgggatacttctrtctctctgctgctccctggtgtgtgccaactgatgttcacaagcatcacacttgcatggcaaggaagtgagaggtgttggggaggagaaacacctagatctgttcctactcctgcccagagctctccactctccaggcaatggtggggccattggaagaaaagagggaggagaggtaggatgagccggcttgagctgctcacttagaaatgtgcaatcggcatgaaagctgcttcctttcgtgtctgggcctaactgaactctgaatcaagtg

SEQ ID NO: 863561 - DNA, 508 bp, Homo sapiens
ggggattgcagagatacaggaagaacaagtgaccccctccactgatgtgctggtgaccctgagcaccccaggtagctgcagccagacctttggggctccctgcaccctgccctgtgagctgtgtctgtccagagccaactccagggcaggggcatgwatggaatgccccctcacctttccaactaggtaaagtccccagcaggctcccagctgggctgtgcacccctggcctcatcttacaaagaacacagggtccctcttgtgaaaacaagagccctgcctggagcactgcccaagcccagaagggggaagagaagggacaccatgggagaaggaagccaggggtcttccaggagaatctgggggtccctctcaaggaaggggagcatggggagtgagggccactgggatcctggctcttccaggccactcccctgagtcagcagagtgcctggcagcgagcagctgcctgcccacggggagggctgattttcgggaaggaacatgg

SEQ ID NO: 863562 - DNA, 614 bp, Homo sapiens
aaggcactgcaacttttgttacataaatagcatatgtagaaaagaaaagaaaatgaagataagcagaatggcaacgaataaccccagggcccacagcaaactgtaaggcaaccttttcccccagtgctgagtaccttcatttcagctttggacatcctcaacagaatacaatttactgctttaaagtgaaaaaatgcagagatgaggctcacatcttacagataaggaaaccaaggcctagagaaggtaagcaattggtccacagcccccagcagccagtggcagcaccaaagcctgagcctggcctctgaaatgccctgtgggttttctcctggcccgtcactgcagccttctcgctgatcttcttaccatcgcytcccctttccagttgctttttcactgaacgaccaggttggcgtttctggtgcaaaatataacctatttaaaaaaattaccaagggtgcctagactagcattgtcctttttctgaatttccttttactaatctgatactttctatcccataagactgcttctcagcctttgccccgtccccaccgccatccttctctacattttgtgctgatttttctgtaatgaaccgacccagactt

SEQ ID NO: 863563 - DNA, 521 bp, Homo sapiens
ctccaaaggctctaggagagaatcctttcttgtctctctcagattctggttgctccaggtgttccttgacttgtggccacatcactccaatccctgcctctgcagtaacatggcctcctgttatgtgtctctctcaaaactgattccctttgcctctttcctttaatcttttttttttgtggttacattgtaggtgtctatatttatagggtacatgagatattttacaatgtgaagtaatcacrtcagtgtaaatgcatgcaatgtcaaataatcacatcagagtaagtaaggtatgcatcgcttcaagcatttatcctttgtattacaaacaatccaatcatacccttttagttattccaaaatgtacaattaaattactgttgactgtagtcactctgttgtgttatcacaaactagatctcatttattctatctagctatattgttgtacccattaaccatccccacacccttcctaactccataactacccttctcagtctcaggtaaccatcatt

SEQ ID NO: 863564 - DNA, 561 bp, Homo sapiens
tgactaatacaaattcaatgatcaaataactgtatacttattcagactctctgcgcccatcaattctaaattattacaacatgaattttttcccaatgccagtaagattgccacattgaaaggcccacctgaagtctcttaagcccagacccctgagtcttataaatatctgcttctgacttttgtggtgcttctgagagtctctgctaagacgatgctctctctgactgcaacagatcaataaacctagttttgcttcatcaacaggtaattctggtggtcttttaaggaggktctgcagtcaggagtgtggttgctggaagccagagtgctgcgtgtctatcattatcttcctgttttctattgatcagttggtacctttggatttgcagacaactgttaactgggacccaggagatgtcgcatttgctcaccctcctgccccgccagttactttgaaccatctttggtgactcacattttcattccccgacaatatgtttggttgagttttagccctcacttttctaatcatctggttcacagaggctgcagagtaag

SEQ ID NO: 863565 - DNA, 605 bp, Homo sapiens
tgggtgtattgggtaactggaaacagagtctgagaattgggtaagggagcatgggataaggaggtaaagaacaggcaagattggagcacccctagggctttttgaaccttaatgaagataatttgaataggaagtagagtgagcctgctgtaactacctgttgctctccaaactcagaacaaatgacccaaatttttgaaattgaattgatatagcactggggtgtgatttttctcaccagggccttagggtcagaccattgtctagtggatgggagttgaatttcctttgaagggagcaraggatcgaaccttcaatcatactgggaagagatcagctctatggcaagaagggaggaatcagaaagcagaccccggatttgagggagagtgtctgccttgctctagggatagaaatgagcctgaggactgtgtacagtggctcatgcctgtaatcctagcactttgggaggtcaaggtgggcagatcaattgaggccaggagtttgagacaagcctggctgacctggtgaaaccccacctctattaaaaaaaaaaattagccaggcatggctaattttagcatgcacctgtaatcccagttact

SEQ ID NO: 863566 - DNA, 605 bp, Homo sapiens
tgggtgtattgggtaactggaaacagagtctgagaattgggtaagggagcatgggataaggaggtaaagaacaggcaagattggagcacccctagggctttttgaaccttaatgaagataatttgaataggaagtagagtgagcctgctgtaactacctgttgctctccaaactcagaacaaatgacccaaatttttgaaattgaattgatatagcactggggtgtgatttttctcaccagggccttagggtcagaccattgtctagtggatgggagttgaatttcctttgaagggagcaaaggatcgaaccttcaatcatactgggaagagatcagctctatggcaagaagggaggaatcagaaagcagacccyggatttgagggagagtgtctgccttgctctagggatagaaatgagcctgaggactgtgtacagtggctcatgcctgtaatcctagcactttgggaggtcaaggtgggcagatcaattgaggccaggagtttgagacaagcctggctgacctggtgaaaccccacctctattaaaaaaaaaaattagccaggcatggctaattttagcatgcacctgtaatcccagttact

SEQ ID NO: 863567 - DNA, 549 bp, Homo sapiens
aatatgttttccaagcttttagaattgtcttcctcaggaacaccaattattcttaggtttggtcttttaacataatcccaaacttcttggaagcttggttcctgttttcttgttcttttttctttgtctttgttggattgggttaatttgaagaccttatcttcgagctctgaatttcttctacttgttcaattctattgctgagactttccagggcatttcacattgctaaaagtgtgtccagagttgcctgaatttttgattgttttttctttaagctatctatttccttgactatttcacccttcacttctgtaccattttttggatttccttgcattgagctttgcctttctctggtccctctctgattagcttaataactaacctcctgaattcttcttcaggtaaaytgaggatttattctcagtttggatccatagctggtgaactagtgtgatttttggggggtgttgacgagccttgttttgtcttgtgttctcactgatatatgggagctaagatctgaggacgcaaaggcataaggat

SEQ ID NO: 863568 - DNA, 613 bp, Homo sapiens
ctgctcgggaggctgaggcaggagaattgcttgaaaccaaaaggcagaggtcgcagcgagccaagatcgcaccactacactccagcctgggtgaaagaacaaaactccgtctcaaaaaaaaaaaaaaaatttaagtgacttcagtgaaatcagaggttgaaaaggcctgagatggttcagttacatgaagtatgacttaggaggtgaaatggagagtgtaggcttgagaagtagattaacttgggctcttgggcctggcctgccaccccgtaaccttatgactttggacaagataacacaatctgtcygaaactcagctcaactctcaaatgggcctaaggatccctgcttcttaagaatcctgtggagacaactgaggcagtaggatttgtttaaggctaggagtttgagaccatcctgagcaacatagcaagactccatatctaaaaagataaattaacccagcatggtagtgcatgcctgtagtcccaactacctgggaggctgaggtgggagggtcccttaagaccaggagttggaggctgcaatgaattatgatcattccactgcactctagcctgggtgacaaagtgagaccctgtcttacaaaaaa

SEQ ID NO: 863569 - DNA, 575 bp, Homo sapiens
tgcatcagatgccagtttgactctcttgaattctcaaccacagaagctcagggactctttgcgtgtgcaagtgtgtgtgggcatctgtgggagttcacagagtaagggcatgacacagttcagtattttcatctcctgagcagattttctggggagtgatgggtaaaagggcacagtggcttatgcctgtaatcccagcactttgggaggccgaggcgggtgaatcaygaggtcaggagttcgagaccagcctggccatcatggtgaaaccctgtctctactaaaaatacaaaaaattaggtgggtatagtggcgggcgcctgtaatcccagctactcgggaggctgaggcaggagaatcacttgaatttgggaggtggaggttgcggtgagccaagatcatgccactgtactccagcccgggctacagagtgagactctgtcttaaaacaaaacaaaacaaaacaaaacaaaacaaacaaacaaacaaaaaaacccaccatgtccacctttctacgcagtgctgaaaatctgttttggaccttccaatcaggatatcagaagaaaatgtccctt

SEQ ID NO: 863570 - DNA, 565 bp, Homo sapiens
ctcatggccacatggtgtcgctgttggcactctgtcctgcctcatcttgccggcctggcagatccagctccctgcagaggcccccgggaatagccatggatgagccacgcccccaatctcgagcttggcgaaggcgctctaggcttgaatcctccgaggtcgtcgttctcagggctcagccctttcagttcacatcccgagcctcctctgatggaccagctcaccctggaaatcgactggctgggcactggtgtgctgcctctcccagcccttgaaccctccrtcttccccgcttgaattgcacatcttcaagacgctacagacaccctagctcctctgtcctgctcccaggggagactgtagggatgcagccctctaagagacactccttcaggaattccaaggtgtccacacttgcttctctgggagggaggagcaagctcagtatgactttctgtgccctctctcattagacatgagctcaaaaatttgagcacttcatttattcactttctacaaaaaatatttatcaagtgtcggctttggactgggctctctgttctag

SEQ ID NO: 863571 - DNA, 637 bp, Homo sapiens
ggcttgatggttaagacaggcttattttagagaaaacaatcctgagaggggcatctggccatgttagttcagaggcacactctcttacagactaagagtttttaaggatttagggtggaaaagtttatcagaggcttagactgcttctgtgtctctttgttgtgcttatatgggagggagagttgtgtgcctgttcccatacatctttctgcagcttcaggcatatcactccagtctgctttttgcttttctatcttagtggacttgaagggaaaggaatgcgcttattaaggcccactgttttactggggcccattgtatgagggtgaagtttggtagttacccaagagactttccccccacctccctctgtgcccgagctgtctkatctgtgttttactgtctgctctttctggttgcttatagttagaaaagaagtgatttccttgaaatgcatgaggctagaaagggagctggaacttaaagtggcagtgtttgtccgagatgacagtcctcctgctctatcaaacaccaggagtttcttctctcatggttctggaggttagaagtctgatatcaaggtgtcagcaggactgcactcctccaaaggctctaggagagaatcctttcttgtctc

SEQ ID NO: 863572 - DNA, 619 bp, Homo sapiens
ggtccaattctcctagctcactctctctctttctctcaaaattcatctgagaagaaatctctgcaggtggttttgatatgtggccaatctgggaatcatgactgctctgaagcaccctcagaggccaccagagggggcgctagagcaattcgtactctgaagcccccacccttgtttatgaaaccctttgccccttcccctccgtgccacctgcaaaccttttcataacatggcatttttggctctagagagaacatgatacatttataagaattactttttccatcttcttattaaatttagaagtcatccaaacttcttagcttttgtggcatcaagccaagtgaaatcaggtggcagtttggaaaaatgttggaggtggcatggtgatgggcttggggtaaaaggcccaataatttatcctccaagccagaacagtcytgagaatgaaatgttagggattacctggatggtagacttgcacagagactaccccggttaaaaggaggtgggaggatcccttggggtcagaccggggctcaaactccagctccacctcttacaaactgtgggacttttgatgagttaccagcttcctctgaaccctagtttcctcgct

SEQ ID NO: 863573 - DNA, 647 bp, Homo sapiens
aatgcaagccaaaggtgtgtggtaggaatggagattgttttttaactactttctctctctcttcctttccatactgcatgggaaatacattcatgcttcaagatttcatttagattgttgaagtccaaccagtttagttgttttggtaagtgtttgactggagttaagaacaaaaaaccaattgtttgcaattgcctttacatccatcatcaatatcattaatggtatcattttcacttgctacttcagatctccacccagttgcttagatgtcttagtgtcaaatttctaactgtttttttttttttttaaaaattcaaaagcagtacatgcttctccattttgcagggtcaaaagcctgagtctgaattttttgcctgctgattaaagagacagaacccctaaactggarggatgatagcaggtgactgaaccaaacagtgtggtgattagacatcagcacctgaggacaggacagcacctaaggactgagggaatgaaatcatcttttaagatcttgttatgagaaaggtagagttggtgggagaaagtgtcttagcactgagcacgcaaaatttgttctcacatgcccatgtagcactgaacaatttctgcagaaggaagctggttagtttgacctaagaatg

SEQ ID NO: 863574 - DNA, 549 bp, Homo sapiens
tcccatgtactcaactccaagtacatgctctcattaattcttctttgtgttttgctatagactcctaaatggtttgctcacagtagatggtttacttcagttcaacctctgtagtgctatcagagttattttcttgaaaaaaaaaaaaaagctaagctttaaaaataccttttacacgtttaacaggtcctgttccccatgccacccaactgagtgagtccctccaacaggggttgtcagacaccctatataggagtgatcctactggcatcaggttggtgccccttgaggtcagaggtcccagaagaaggaggaggcacccatttttkctgttctccagacttcttgaatgacatatccaggcacgggagtgaatcggatgagtagggcctgaagtgaacctcccagcaaactgcagcagccctacagaagagggacttgaccattgaaaggaaaacaagcagaaagcaacaacaacaacatcatcatcatcaacaacaacaacaagccctcacaaaaaccctccaacgatcagcagcctcaaagact

SEQ ID NO: 863575 - DNA, 549 bp, Homo sapiens
tcccatgtactcaactccaagtacatgctctcattaattcttctttgtgttttgctatagactcctaaatggtttgctcacagtagatggtttacttcagttcaacctctgtagtgctatcagagttattttcttgaaaaaaaaaaaaaagctaagctttaaaaataccttttacacgtttaacaggtcctgttccccatgccacccaactgagtgagtccctccaacaggggttgtcagacaccctatataggagtgatcctactggcatcaggttggtgccccttgaggtcagaggtcccagaagaaggaggaggcacccattttttctgttctccagacttcttgaatgacatatccaggcacgggagtgaatcggatgagtagggcctraagtgaacctcccagcaaactgcagcagccctacagaagagggacttgaccattgaaaggaaaacaagcagaaagcaacaacaacaacatcatcatcatcaacaacaacaacaagccctcacaaaaaccctccaacgatcagcagcctcaaagact

SEQ ID NO: 863576 - DNA, 622 bp, Homo sapiens
tctcttaaggcaccagcagcccaccagtggagaagaaaacctaggctccctgtaggcaggacagtcaagatggcagcaatttacataaaactgaaacccacactgttgacaagagttcaataggctcttttctcctcctggaaactgctgcaactgtcaatgactttaggtgatctcctaaagtttctccttttgaagaccaattacatgctcagatgtgtttgctgctggacagccgagttaacccttcrttgaaatatgaccttattctgtggattgaaatgtctactcatttttattccaattagaattctacagatatggaaattaaaatatatccatagatgggaactttttgggaagatgatgttgctgcaccattgttgatggcactgtcaggcagttttctagatcttgagagtccgagaaatatctgtctattctgaatttcattttaaagccactctgtaggaaggaaaatgaccaaaatgcctacgtaagtcaggtaacaatccggactgagttattttatggggtgtaggtgggaagtcgatctactgggacttctggtctctaaggacataaattgaagccactgatttcccactggagagtagacatg

SEQ ID NO: 863577 - DNA, 652 bp, Homo sapiens
tgtcaggcagttttctagatcttgagagtccgagaaatatctgtctattctgaatttcattttaaagccactctgtaggaaggaaaatgaccaaaatgcctacgtaagtcaggtaacaatccggactgagttattttatggggtgtaggtgggaagtcgatctactgggacttctggtctctaaggrcataaattgaagccactgatttcccactggagagtagacatggcaggcacatggtggaaaatgacctcaactttgcatagcacaattctcctcctcagtggccgcaccacagtcataacctctgcacatctttagtccatcacaaggatcctatgcatttcttacttgtaaacaatggcacagctccatcacgctcccaaaaacttcccatctgtggatatattttaattttcctatctgtagaattctaatttgaataaaagtgagtggacatttccacccacagttatttataacaagggcacatgagatatcgcataaaaatgaattccttcaagccactgtggccttggtttccatttctagcatcttacttattcttttttcctcacttatttatttatttgaatattacttattcagtgggaggaaatgaaaatatttgtaaatatgatctaatgcttc

SEQ ID NO: 863578 - DNA, 550 bp, Homo sapiens
atgggtcagactggaggcagatgagaacaggaggtagctgggagcaatagggcaatcagagggagggagtgcagctgggggtaactgcacacagaagcacggtatggttcaccactcattcattcatcaaacacagcatcgactgtgtgtcaggtatggtggtgtggtctctccctgcaagcttctagagtatcggagagacagataagtagacagacaagagmcaatgggtacaagccagtgtaggggtatgctaagtgagccgtggacatactggggaactggttagctcagtgggggaaagaggaggggtgtcatggatgcttcacaaaagaactgatagcagctcaatcctggataaatcacagaccaattgagcagatgggaaagacacacagttggaatagaaaaaagaataattatgggattgtgggatgtcagaaagctggctatgctctgaatgtccacagcacacctaagacaggagatggagctcaggaaccttctgaaatgggctttgaaggcagagaaagaaggtgggagaaggaaa

SEQ ID NO: 863579 - DNA, 550 bp, Homo sapiens
atgggtcagactggaggcagatgagaacaggaggtagctgggagcaatagggcaatcagagggagggagtgcagctgggggtaactgcacacagaagcacggtatggttcaccactcattcattcatcaaacacagcatcgactgtgtgtcaggtatggtggtgtggtctctccctgcaagcttctagagtatcggagagacagataagtagacagacaagagccaatgggtacaagccagtgtaggggtatgctaagtgagccgtggacatactggggaactggttagctcagtgggggaaagaggaggggtgtcatggatgcttcacaaaagaactgatagcagctcaatcctggataaatcacagaccaaytgagcagatgggaaagacacacagttggaatagaaaaaagaataattatgggattgtgggatgtcagaaagctggctatgctctgaatgtccacagcacacctaagacaggagatggagctcaggaaccttctgaaatgggctttgaaggcagagaaagaaggtgggagaaggaaa

SEQ ID NO: 863580 - DNA, 679 bp, Homo sapiens
gatgcagtgaaccatgatgatgccaatgtactccagcctgggtgacagagccagaccctgtctcaaaaacaaagaatcaaacaaaaaggtaagaaatcttcctacggttagttagtatacatgttgagaaccaaagtcaagtgcaggctgggcacggtggctcatgcctataatcccagcactttggaaggttgaggtgggtggataacttgaggtcaggagttcgagatcagcccggccaacatggcgaaaccctgtctctactaaaaatacaacaattagccrggtgtggtggtgggtgcctgtaatcccagctactcaggaggctgagacatgagaatcgcctgaactcgggaggcagaggttgcagtgagccaagctcatgccgctgcactccagcctggatagcctggatgacagaacaagactccatctcaaaaaataaatcaataaataagtaagttcaaagcccaggatctttccaccacacaatgctgccacagaaagagtagaggaaaaaggggtgggagtatacaaagagaaagaaacagggagggacagtagaccagaaaatttgaagcaagtaagccagaacagaagggggaagacaagaaagtaagaagaaaagagaccagcaaagaggtaagagaggtaatcagagtcagaaagtaggcagcag

SEQ ID NO: 863581 - DNA, 626 bp, Homo sapiens
tgcattttaggccgcctgaaattgtgccacagcttgcagatgctctgttcatttttttttttttttagccttttctctgttttttcagatagtttctattgccttatgtaacatttaactaatcttctcttctatagtgtctattctgcagttcatcccacctaatgtacttttcatcttggatgttgtacttttcatctcttacattctaatgtgggtcttttgaatgtctcccatgtctttatctgacatgttcagttgttcctctgccttcttcagcagatggattacagtcactgttttamtgtccttgtctactaattctatcttctgtgtcacttctggatctgttgctactgactgatttttttgcttgttataggttacatttgcttgtttctttgcatgcctgctaatttttcagtggatgctggatatttttgaattgctaaattattgagttttgttagggatgcacttatttgaaaacggtaagttaagggtactgttcaggagtagcttttaagctttgttaagtgaaaccaaattatgccctagtgctgaggcaacacccttctgaagactctatttgacgccctgtgactaccaaatcctccactctggct

SEQ ID NO: 863582 - DNA, 609 bp, Homo sapiens
ggtggcactgacacaccagcttcctgctgcctcagtcctcactggactttgggtgccaataagcatgggagggaggctgaggtggggctgaaggtggctcagcatgggcctgcaggtgctcctcagcatggacagccatggtgctgtggccagcatgttgatgatggcaagaggcagacaggttcctggcaggaaggggccagtctccagtgaaacctctccttcaagccaggaacagtgtgaagcctgggggctggactgccagttccaggtgtagtctgcctcctgaagtgagaacttatggtgctttttccagaccccctccatggctaaccatggactaakcagcacacgcttcctcccttttgagcccacaaaaatcccagattcagccagacttacacagatgtggggactaccacttgcaggaaggagctacctactttgggtctccttaacttgtagggactacctgcctgtggaaaggagctacccactttgggttccctgagagctgttctgttgctcaatgaaggtcctctctgccttggtcaccctccagttgtctgcatacctcattcttcctggacatgggacaagaactccaga

SEQ ID NO: 863583 - DNA, 651 bp, Homo sapiens
tggaaaacattcttcaggatatgatccaggagaacttccccaacctactaagacaggccaatattcaaattcaggaagtacatggaacaccacaaagatactcctcgagaagagcaaccccaaaacacataatcatcagattcaccaagtttgaaatgaaggaaaaaatattaacrgcagctagagagaaaggtcgggttacccacaaaagggagcctatcagactaacagtggatctctctgcagaaaccctacaagccagaagagagtaggggccaatattcaacattcttaaagaaaataattttcaacccagaatttcatatccagtcatactaagcttcataagcaaaggagaaacaaaatcctttacagacaagcaaatgctgagagattttgtcaccaccagacctgacttaaaagagctcctgaaggaagcactaaatatgaaaaggaaaaacccatactagccactgcaaaaacataccaaattgtaaagaccatcaacactatgaagaaactgcatcaactaatgagcaaaataaccagctagcatcacaatgacaggatcaaattcacactaacaatattaacctcaaatgtaaacaaactaaatgccccaattaaaagacacagactggcaaattggat

SEQ ID NO: 863584 - DNA, 681 bp, Homo sapiens
tgctatccccatcaagctaccattaactttcttcacagaattagaaaaaaactactttaaatttgatacggaaccaaaaatgaggctgtatagccaagaaaatcctaagcaaaaataacaaagctggaggcatcacactacctgacttcaaactatactacaaacagcatggtactggtaccaagacagatatatagaccaatggaacagaacagaggcctcagaaataatgacatatatctacaatcatctgatctttgacaaacctgacaaaacaagcaatgaggaaaggattccctgtttaataaatggtgctgggyaaactggctagccatatgcaaaaaacacagaaactggaccccttccttacaccttatacaaaaattaagccaagatggattaaagacttaagtgtaagacctaaagccataaaaaccctagaagaaaacctgggcaataccattcaggacataggcatgggcaaagacttcatgactaaaacaccaaaagcaaaggcaacaaaagccaaaattgacaaatgggatctaattaaactaaagagcttctgcacagcaaaataaactatcatcagagtaaacaggcaacctacagaatgggaaaaaaattttgcaaactattcatctgaaaaagggctaatatccagaatctacaaagaactta

SEQ ID NO: 863585 - DNA, 629 bp, Homo sapiens
gtaggcagcagatagttgggtcttgttttttattcaatcagccactttatgtcttttgattgaagaatgtatttcatttatattcaagttaattattgatagatgagggcttactgctgccattttgatacctgttttctagttgttttgtggaccctttcttctcttacaatcttcctttgtgtgtaaatgattttctctagtagtgttttgatttcttgctttgtatttttaatatatctattataggtttttgctttgtggttaccrtaaggctgacaaaaaaacatctaacaagttattttaaaataacttaactttgatagcaaaggaaaaataaaaaaactgtacacttaattccattctcctcccacattttgaatttttgatgtcacaatttttaaattttacattttatattgcctatctcttagcaaataatttattatttttaatagttttgacttttattcttcatactaacgatataagtggtttatgctccacaattacagtattagaataacaatcatgttagcattcttctctttagattagaactcccttcagcatttcttataggacaggtctgatagtaatgaattcccctcagcttttgtgtgtctagt

SEQ ID NO: 863586 - DNA, 627 bp, Homo sapiens
agcatatggtaaattttccagaagtatttcgtccatgtgtgttttatttggtgccccaatgacacttgttcctgtgaattacaaggtaaaaatagacatagaaaattgtaagagttttgccacaacataatgtgatattcaactgtttccccatataatttcattagacttaaattaaaatcattttccatttaaatcaattttaacccaaatgcaaggggggaaatttaatggtttagattctacagtcagaagacatgcataagaattacatgttttattttcataatgacaagtatcagggcaagttttaggtacataaagaaaaaattgtgccaaattaagtatgcataagagaatgagagtacaaaaacagaaktaattgttgtagttactatacagtcagggattccttatttcagatttactgaagcaaagacaatttatatgacctttgccttctgcagaaaacaagattttttaaaagtgactctattttcaatagccaggaatttcacttgtcaggaatggaggattaaagagtaaatagccaaattgcacccaatttgcccatgaatgaaatatgcattttgcttattttggttacatcataatgatctcatttag

SEQ ID NO: 863587 - DNA, 673 bp, Homo sapiens
tagtaaagcttctaagcaatactcagtatgcctttctcattttacatatattcctgacactgataaatatcaacatattttatttttgttttgcaatttctttttataaagacaatttttaacgagcagtttcaggttcatagcaacattgagtggaaggtacggagatagcccatatgctcacttcctcaacacatacgcagctcctccagtaasgacataccccatcagagtggtacattctatacaattgatggacttaacattgatacgtcattgtcacccagagtccataatttacattaaggttgcctcttggtattgtatattctgtgggtttggacaaataaataatggcatcaaccaatcattgtacaaagtagtttctttttcttttacataatttgtaatatttattaataaataaggagttatatataatcaattcaccgatggcacttttatcacagactaaattcttattaagttgttctgcctcgggcctttctgttttgttgcattaatgggtctaacgatccataaaacagtaccacactttgaattcttaaaatttaaaatatatctttaaatctgcccaagaaaatgcttcttcctttctgtgctccacacctgctctactgctggagtcattgctgccaccgttacctgattc

SEQ ID NO: 863588 - DNA, 681 bp, Homo sapiens
tagcccatatgctcacttcctcaacacatacgcagctcctccagtaaggacataccccatcagagtggtacattctatacaattgatggacttaacattgatacgtcattgtcacccagagtccataatttacattaaggttgcctcttggtattgtatattctgtgggtttggacaaataaataatggcatcaaccaatcattgtacaaagtagtttctttttcttttacataatttgtaatatttattaataaataaggagttatatataatcaattcaccgatggcacttttatcacagactaaattcttattaagttgttctgcctygggcctttctgttttgttgcattaatgggtctaacgatccataaaacagtaccacactttgaattcttaaaatttaaaatatatctttaaatctgcccaagaaaatgcttcttcctttctgtgctccacacctgctctactgctggagtcattgctgccaccgttacctgattctcctctctttgagaaagaagtaagattcacaaccaaatccctttggttggggagtgccatatgacttgttctggccatacctcatgaactcagtgacgtgctatttccaggccacagtacttaatgatcagtttgagaccctctaaagatctcttttatctgctgcagtacctgcc

SEQ ID NO: 863589 - DNA, 601 bp, Homo sapiens
cattgataatttcagtatgctcccaaggagaacagtgtcacctctggctttgctttggttagtggttaacattctcttgctctgatattttgacaccaatgatgtcctgaggcatgaaggtcccctctgagccttgccactggcttctgctaggaattgccatccctcactatgttctccaacgaatgcagaaggacagggaatgctgttttctggggtccatagggcaccaaagctccctgtaaaattctcccttcttttgttccttwtgtacctcactctttcttatgaacaacaaaaaaatgctgcctgtgtttccatatcttactgttattggccaaaaattctttagatttttgctcagacacatcgtccttgttggttcccagatagcagccaggatcaggatacaaatctgagtgcaaagcactgcctggaactcagattcctctctcccttccactgcacatgggcttggcactgggccaagtttttctccatggcactttatggctatcaacttctggtggccagtcctactggtaatgcagacatgtaaattctggcaatagacacagctgagactcaagctggcggaccc

SEQ ID NO: 863590 - DNA, 713 bp, Homo sapiens
tcgacatcatactaaagattctaaccagtgcaacgagacaagtacaagaaattcaaggcatccagttcagagaggaagacataaaactgcctttattttcagatgacacaattgtcaaagtagataatttgatggaattgaaaaaaaaaaaactactagaactaataagagaatttagcaagactacaaaatacaagaccaatgtaaaaaaaaattgtatttctatataacagcaacaaacaatcagaaaccgaaattataaccaaaagtataatttatagtagcatcaaaactatgaaatacttagagattagtccaacaaagatgtgaaagactagtggcaactagaaaacttttctaagaaaatagagaacctaaatgaatgagagatgtacakgttcattaattggttgaggaatcaatattgttaagacgcaagttctgcctgtaaattatctatagatccaaagaaacctgaataaaaaattccaaaaagtgtttttgcagaaattgataaactaattctaaaattcatatggaaattcaaaagacctgaaataggcaaaataattttgcagaagaagaacaaactcgaagactaacgctacctgattttaggaattcttataaaactacagtaatcaagacagtgtggtacaggtgtaaagataaacaataaggccaaaaacaaatagagaaacctgaaataaacc

SEQ ID NO: 863591 - DNA, 580 bp, Homo sapiens
cacaacagtcaggaagtctgaacgttaaccagatatttgatgctattaaggaattgcaagatggagatgattatcttttaagtgcttattctttagtgatacataatgaagtgtttataaatgaaatagtatgatgtctgggatttgcttcaaaaaaatccagtacagggttgggtgaaacaagagggtgggttataggaaaagcaagacctgccatgcgttttggtaactgttacagccaaggattcactgtctaactcttccttcactacacactttggtatctatttgtaatgttccataacaaagtcttttttgttgttgttgcaaagatggagtcttgctttgttgtccagctgggctcgactcctggactccagcaatcctcttggccccgcaaagagctgrgattacaggtgtgacccactgcatccagccaaaaaagtcttttttaagtgaaaaacaattttaaatgtacttcatcgggtagaatctgcaggtagaaataaaaagaactagaaggaaagaaaaagagaatcctatgaaatgtatacggcctaagtagggaaagaaatcatgt

SEQ ID NO: 863592 - DNA, 580 bp, Homo sapiens
cacaacagtcaggaagtctgaacgttaaccagatatttgatgctattaaggaattgcaagatggagatgattatcttttaagtgcttattctttagtgatacataatgaagtgtttataaatgaaatagtatgatgtctgggatttgcttcaaaaaaatccagtacagggttgggtgaaacaagagggtgggttataggaaaagcaagacctgccatgcgttttggtaactgttacagccaaggattcactgtctaactcttccttcactacacactttggtatctatttgtaatgttccataacaaagtcttttttgttgttgttgcaaagatggagtcttgctttgttgtccagctgggctcgactcctggactccagcaatcctcttggccccgcaaagagctgggattacaggtgtgacccactgcatccagycaaaaaagtcttttttaagtgaaaaacaattttaaatgtacttcatcgggtagaatctgcaggtagaaataaaaagaactagaaggaaagaaaaagagaatcctatgaaatgtatacggcctaagtagggaaagaaatcatgt

SEQ ID NO: 863593 - DNA, 636 bp, Homo sapiens
attctgaacgacatctttctgtaaaagttcaggaaaactactttttcacaaaacaaatgagcaacaaaaatgagcaacttaaagtcgaatttatacaaagttattataagaacaaagaaaataaggtacatgcaatacaaatgtgaaaaataatctaattttcaaaatgagctaaaagacattaaaaagatacaaatatgaaagcaatataactcaaaattagaaaacaaaagtaaagtaacataaattcaaagaattacaaataaagaaaaaaatacagaaattaagaagaaattacaargaatgtaagagcaaatgagcccaacagatcactccagagaaataaaactgtgaaaagcaacaaaatcttaaaaattataatgaaataaaaatattaaaatgattcaagaaaaagcaacatgtattgaaggtagacttaaaaaaagacttaacctatggataatacgagtaccagaagaaatatcaaaacaagagagaagaaaatactaaaaattataattcaagaaaactttcatgaaatttaaaaaaagattaagagaagatttcaaaatacatattctgtacataccagacaatgttggcccagatacataatctagtaaaatgactagattt

SEQ ID NO: 863594 - DNA, 633 bp, Homo sapiens
ttgcagtatgagacaatggccctttttttcttaatggccttgttttcttcctatcccttttattgtattaacacagaattttccagtaatgaaatggtcggctgggaccaaaagtcacaaggccagttgatcaaagagaagaggaagctaaggtgtatgtgaaaggcagggggaaaatgataaaacagcctatcattttcctagccctcaagcagagtacactgtgattaaaagtcagatatgagagtttaggtttatttatcacacacactgggctttggcttaaacacggggatgtaacaattaaataactgagggaaaaggaagacccttgattctactctccatgtagaacctggagatgatgccatctccctcaacctagcaccagaggtttaggtgtaggtttaagatacaataaattatatctccctyttcttcatccttctctagctaagcctcaggtcagggaaagaccctgcagctaataatactcttatctaacagcttgaggcaagtatttttaagatctctgagcatcagtttctagactggccaaataaagagattgtgcaatatcctttttaatatgtcctgcaactttaaaatctgatgatgagtttaattctgtag

SEQ ID NO: 863595 - DNA, 610 bp, Homo sapiens
atttcctaagcagattatttcatttgcagaatgtgtgcttttttgtgataaaagtacattagaatgaaaaagctaataagtagtgtttagtattcgcaacctaagaaatgacatctccagctaatcaggatgcccaatcctgagaggttttggagaagtaatacaattggagaaaaaagtgggcttcgggatgctggggaatctgggctctggctaagtttgcctccgtgagagatgcagctgyagacgttgtagggaggtaagacctcttaagaatcaggaaaagatttagcagtgtcctctgtcaaaacacggccccactccaaataaagcatcttctcttttagagcagaaactttgcaaattgaggaaaggaaactgcagcagcactgtgtgtgggcaagacctccagtcacacttgtgcatgtgtgcagagggatacgccctaagtcgagaccggaagtactgtgaaggtaatgactggaagtactgtgaaggtaatggaagagtcgctgcttgaggggaggaatgctcaactgagccagcggcttgtcttcagtgggccagccagagactcagtggaaaaccaacttcaagtccattctccccg

SEQ ID NO: 863596 - DNA, 619 bp, Homo sapiens
gaatggtttatgccctagatcatgaccctgtggaaaataaggtatggttttgttacttgaacagatgtggacatgctttaaggacagagtagaggattttatcctaacaaatgacctggcctacttgaaaatcctctgctaagttctgaatgattaggcacagaacaagttaaatatagatattggagtaacacttgagaaattttaaggactttyttgccatcataatgctaccctagtccttgctacgattagccgttttattggaaatgatcacacagtttagttttagattttcagtttagtttcctctttggagatgaggatgggagactagcacagtgtcatgcatatagaaggagcttcataaccaggttttttattacttgctggtagtgagaggagtgggaggttgagtttggggcataggaagtatggattagtaatttgtgttttacatatgtcttttgagggaggagattcaatgacctcttaaccatgaaaatcagggaacgtaagttttatagctcatgtgagaatggcaatctaactaataacattatttacataaacattttatataagttttgtgtgtaacttagaatttctgtatcagctg

SEQ ID NO: 863597 - DNA, 636 bp, Homo sapiens
ctgcaataaacatacatgtgcatgtgtctttatactagaatgatttataatcctttgggtatatacccagtaatgagattgctgggtcaaatggtatttctggttctaggtccttgaggaattgccacactgtcttccacaatgattgaactaatttatactcccaccaacagtgtaaaaacgttcctatttctccacatcctctccagcgtctgttgtttcctgactttttaatgatcgccattctaactggcatgagattacatctcattgtggttttgatttgcatttctctaataaccagtgatgatgagcttttttttcatatgtttgttggttgcataaatgtcttcttttgagaagtgtctgttcrtatcctctgcccactttttgatggagttgtttgtttttcttttttcttgtaaatttgtttaagttccttgtagattctggatattatccctttgtcaggtggatagattgcaaacattttctcccattctgtaggttgtctgttcatcactttgatgatagtttcttttgctgtgcagaagttctttagtttaattagatcccatttgtcaattttggcttttgttgccattgctttttggtgttttagtcatgaagtcttta

SEQ ID NO: 863598 - DNA, 456 bp, Homo sapiens
ctccatccctttattttgagcctatgtgagtctttgcacatgagatgggcctcctgaaaccagcacactgatggtcttgactctttatccaatttgccagtctgtgtcttttaattggggcatttagcccatttacrtttaaggttaatattgttatatgtgaatttgatcctgtcattatggtgctagctggtttcttcatagcgtccatggtctttaccatttgacatgtttttgcagtggctggtaccggttcttcctttccatatttagtgcttctttcgggagctcttgtaaggcaggcctggtggtgacaaaatctctcagcatttgcttgtctttaaaggattttatttctccttcacttatgaagcttagtttgtctggatatgaaattttgggttgaaaattcttttctttaagaatgttgaatattggcccccactctcttctggc

SEQ ID NO: 863599 - DNA, 655 bp, Homo sapiens
accaggtccttcctgatacctctgtgcaatataccttcttcaatttgaatactctgttactcatgctttacaatttagcaaaccctctcgtacacacagtcttccttgttacagtagacactgctattaactagacagagtgaatggtatttccttttacacaaaaggaaactgaggttcatgaaattcagtgatttgcctgaggtaacagagctagcaaacagaactacgccccaaatttatctctttctgtaatgctaagctgcaaagtagtaattattgaggttgcctgttcttcctaatatttgattatgaaaacttcctaaaatttatttaaaattaacatgttccttrtcatagaaataatacatgtttacggtagaaaatctaaaaggtataataaggcaaaataaaaggcgcatctgatctcactacccgaagatatcatcattgttaaaattttgtgtaaattcttccagtcttttatccatgcctatatatgctaaaataacagagcaaagacaaaatgcggtcatgatgtatatgctcttttaaggtcattttctctccttagcattatacggcaaacacttttccgtgtacttcaatattcttttatgacatattcaaggagggcatcatattctattgcatt

SEQ ID NO: 863600 - DNA, 616 bp, Homo sapiens
accatatcacaatgtcaccatcatagcactgtcaataattgtgaactgctcatgtaccacgcgtgacaagaagcccttggagttcctgcttttaaataaatggaaaattacagcaccatgtctctgccacccactacacattcccaatctgtctctaattacactagccattgggtctgctacctgctaccataataaaatcttcattatctcaaaagtctaatgttgatgattgtcttaaagtatggttttggaatgctgagaaaatggtggtactgtgatttttggatcttcctgaattccccacaaaaaaaaaccagaaggtgaattttatggtatatgaattacttctcaataaagctgttggaaaaaatacatatatatatatatatatttacatggytgggcacagtggctcacacctttgatctcagtgctgggaggaagaacagcctgggcaacatagcaataccttgtctctacaaaaaaatttttttaaagtagctaagcatagtggctcacatttgtagtctcagctagctgagaggctgagactggaggattgcttgagcccaggaatttgagtctactgcagcctgggcaaaagagtgagatc

SEQ ID NO: 863601 - DNA, 518 bp, Homo sapiens
actccgtcgcaaaagaaaaaaaaaaaaagaatacaccttttgaactttatctgtgcaagaacgaaatttttattgttttgagcccttatgcatgttgggattctttgttacagctgcaagcatatctaatacacttaataggaacttataaacagtaactaatacacttgggcaggtaaattgtcagyttcatgagaccatggatttgcctctttggttcactgatggatctctggtgtctagaacagggctgagcaggtggaagggttcaataagtgtttgttgaatgagctatcagcttccaatttttctttgcagctgactggaaagcagagaagtatagtagatgcaagctctggctcccaggtgggaaagggttgggtttatatcctgcctgattatttactaattgtctacattgggcaattgccaagcctcagtttcctcatagggaggttggagaattatataaaagctctttctttttgtggacagagtgaggattcaacgtgatcatt

SEQ ID NO: 863602 - DNA, 601 bp, Homo sapiens
ctttttaatactcactataaaaggcctagaggaaaccagggccaaacctctcagttactctaagctgtctataatgaaccaaaagccagataataattctgtagcctttatggaaaggccaagagaggcactaatagagtacatctccttatcccctaattcaatggaggaacagctcattttgaaggagaagtttattacaaaagcagctcctgatattaaaactaaaaaagcaagcttaggacaaaataccaccttagagaacctcctgcaagtggcgactttggtcttttataatagggacaaggaggagtcccaacaaaagsgggggaatctcaagagaaggacagaggctccagcagcagctttgcaagcttgtaaagtccagaatccccaaggtacatccactagttgctattggcatggcagcccagagcatttttaaaaggaatgcccaggcagcaagatgaagcaaactcaaccctatccaggctgtggcaaaaaccactggaaacagaactacccccagaggcagaggtcactgggttcaaaatcagcctcacagatggtccagcaggaatgatgggtccaagggctccaa

SEQ ID NO: 863603 - DNA, 643 bp, Homo sapiens
tttgctagagaaggatattagaggccatggtttcagagactgaatcacgtaaaatatccactgtaagctatgtctcaactgagtctaaacttgttcctccacccatgaaggaacaagtctagtctcagttcagacagagcttacagtggatattaatcaacaaagcasctgggttcactggctcacggctataatcccaccaatctgagagacaaagatgagaggataacttgaggccagaagtttgaggccagtctgggtatcatagtgagaccctttctttaaaaaactttaaatatcagactgccagagtggcaggcaccttttgccccagctacacaagagggggcagatgtgtgaggatcactgcagcccaggagttcaacgtttcaatgagctatgatcgcaccactgcatgtcagcctgggcaacagagcaagaccctatctcaaaaatacagaaaaatcatcaaccacttgtagtcattgtagaaatcaatcattccctccagttatgtccctgacccacaggcttcacttgtgcaagtactggggctgtgctgtcagtaatgtgtgccacttcttggaaggacgtccattgcccttgatgattgtgagagttgaaaataaggcagatcagtgtt

SEQ ID NO: 863604 - DNA, 643 bp, Homo sapiens
tttgctagagaaggatattagaggccatggtttcagagactgaatcacgtaaaatatccactgtaagctatgtctcaactgagtctaaacttgttcctccacccatgaaggaacaagtctagtctcagttcagacagagcttacagtggatattaatcaacaaagcagckgggttcactggctcacggctataatcccaccaatctgagagacaaagatgagaggataacttgaggccagaagtttgaggccagtctgggtatcatagtgagaccctttctttaaaaaactttaaatatcagactgccagagtggcaggcaccttttgccccagctacacaagagggggcagatgtgtgaggatcactgcagcccaggagttcaacgtttcaatgagctatgatcgcaccactgcatgtcagcctgggcaacagagcaagaccctatctcaaaaatacagaaaaatcatcaaccacttgtagtcattgtagaaatcaatcattccctccagttatgtccctgacccacaggcttcacttgtgcaagtactggggctgtgctgtcagtaatgtgtgccacttcttggaaggacgtccattgcccttgatgattgtgagagttgaaaataaggcagatcagtgtt

SEQ ID NO: 863605 - DNA, 632 bp, Homo sapiens
gcaggggaactgccctttataaaaccatcagatcttgtaagacttattcactatcataagaacagcacgggaaaaacccacccccatgattcagttacctcccaccaggtccctcccacaacacgtggggattatgggagctacgattcaagwtgagatttgggtggggacatagccaaatcatatcataggggaacaagagtggaagcagggagaccagtagcaggtgttcagtagttcagttagtagatgttgatgtcttagaggaggctggtggtgtagagaagttaaatcatgctgggtttggggaggataatgggctggagatattgaatgaagaagaaagagatgttagatgtttgaactgggcaattcgatgaatgatgatgcctctttctgagatggaagagaccagagaggaacattttatggagtaaggtcaagagtttgtttgaaccatgaaaagtttgagaggttattagatatacaaataaagatgtagtatattggcagttggatatatgtatttggactttgggaaagaagtcagtctagttagatgtggcaaattgatgagatgtagagccacaaaactgattgccatcactttggggatgtgtggaaataaaaaa

SEQ ID NO: 863606 - DNA, 585 bp, Homo sapiens
ggagctaattgctttatacatattatcttacaatgcacgctattatctaatacaacatgtgtgaagctagtatcatcacaattattaaaatatcgttatttttaaaagggggaaacttgtgctctaaagaattatgggcatgatcataattcctcaatgtgagtggcagatccatgtttttcactcagttttgcctaactccaaagtctatttttcacatcttgtaatacattcacctgaatccctctaaaatacatgcccaaacgctaacccctgtgtgatggttaattttatgtgtcaacttgatkgtgctaaaggatgcctagatagctagtaaaacatcatttctgggtgtgtctgtgaagtgtttctagaagagattggcatttgaatcagtacagtgagtaaagaagaccacctcaccaatgtgcgaatcatccaatccatggagggattgaatttaaaacaaggtggagaaagaataaatttcttctttctgagtacctgccctcagatatcagcactcatgattttcaggcctttagagttgaaccaggatcgacactagtggtctcccataagggt

SEQ ID NO: 863607 - DNA, 590 bp, Homo sapiens
gatgataatccgtgtctggaaaaccactccaactgctgatccagggtcatgggaaacagctcagaaaatcacacccttgcttctccatcaacttttcactctatgaagggatttaaatattctggctctgaaaatgaatgctttttccttctttagccagaaagtgtgaagaacggcataatcagagtccrcaggagtaatttaaaaattgtcatgtctaaatgagtaaacttttcaacaaagcaatagctttatgaatttgtttcattaggaagaaataaaaaagcagattccactctagagcacagaaagttttgacagtggttttgcaatgcttgataataatattctgaattctaaggtaagatgtgctctgcaagtgccctgggaaaagcaagctgttgccaagtaaagcaggtttaggttgagaaaaggctatggggtcttctgcactagttctccttccatcaaataaagatgtgcacaggaacaagtgcatttcaccatcaccactgctttcactactaaagaggcagcatgccctctttatggtagccaagagcacagacattacagtcacacagactggg

SEQ ID NO: 863608 - DNA, 603 bp, Homo sapiens
acaggaatagcactgaatctgtaaattgctttcagcagtatggccatttttacaatattgaatctttctatccaaaagcatggaatgttttctatttgtttgtgtcacctgtgattcgtttgagcagtgtctggtaattcttactgtggagatctttcacctccctggttagctatactcctgggtatttgattctttttgtggctattgwcaatacaattgcattcttcatttggctatcagtttggacattgttggtgaatataaatgctactaatttttgtacattgattttgtattctaaaacttttctaaagttgtttatcagaacagagagcttttgagcagaggctatgggattttctatatataaatcatataatctgcaaacagagatattttgacttcatctcttcctatttggatgccttttattttttctcttgtctgattgttctggctaggatttccagtaatatattgaataggaatggagaaaataggtattcttgtctaattccaattttcaaggggaatactttcagcttttgcccattcaatatgatgttagctgtggctttgtcatacatggttcttattatt

SEQ ID NO: 863609 - DNA, 603 bp, Homo sapiens
acaggaatagcactgaatctgtaaattgctttcagcagtatggccatttttacaatattgaatctttctatccaaaagcatggaatgttttctatttgtttgtgtcacctgtgattcgtttgagcagtgtctggtaattcttactgtggagatctttcacctccctggttagctatactcctgggtatttgattctttttgtggctattgacaatacaattgcattcttcatttggctatcagtttggacattgttggtgaatataaatgctactaatttttgtacattgattttgtattctaaaacttttctaaagttgtttatcagaacagagagcttttgagcagagrctatgggattttctatatataaatcatataatctgcaaacagagatattttgacttcatctcttcctatttggatgccttttattttttctcttgtctgattgttctggctaggatttccagtaatatattgaataggaatggagaaaataggtattcttgtctaattccaattttcaaggggaatactttcagcttttgcccattcaatatgatgttagctgtggctttgtcatacatggttcttattatt

SEQ ID NO: 863610 - DNA, 602 bp, Homo sapiens
gccttttaattggggcatttagcctattatttatataatcctgtccccgcgttgctaactggttattgtgcaaacttgattttgtagttgatttatagtgtcgatggcatagtacttaagtgtgtttttgtgatggctagtaatggccttacctatccatatttaggactccttttagaacctcttttagggcaggtctggtggaaacaartttccttagcatttgcttctctgaaaaggattctatttctccttcatttaggaagcttagtttggctggatatgaaattcttggttggaattccttttttttttttttttaagaatgctgaatacagcccccaatatctttgagcttctatggtttcaactaaaagctctatttttagcctgattgcatccctttttaaatgacctgacctttatcttcagctgcctttaatattttttctctcattttgacctaggagaatctgataactatgtgtcatgggaatggccatcttgaatggtatcttgcaggggttctgtgcatgttctgaattagaatgttggcctctctagcaaggttggggttatgatcacggatgatatcctcaaat

SEQ ID NO: 863611 - DNA, 602 bp, Homo sapiens
gccttttaattggggcatttagcctattatttatataatcctgtccccgcgttgctaactggttattgtgcaaacttgattttgtagttgatttatagtgtcgatggcatagtacttaagtgtgtttttgtgatggctagtaatggccttacctatccatatttaggactccttttagaacctcttttagggcaggtctggtggaaacaaatttccttagcatttgcttctctgaaaaggattctatttctccttcatttaggaagcttagtttggctggatatgaaattcttggttggaattccttttttttttttttttaagaatgctgaatacagcccccaatatctttgagcttctatggtttcaactaaaagctctatttttagcctgattgcrtccctttttaaatgacctgacctttatcttcagctgcctttaatattttttctctcattttgacctaggagaatctgataactatgtgtcatgggaatggccatcttgaatggtatcttgcaggggttctgtgcatgttctgaattagaatgttggcctctctagcaaggttggggttatgatcacggatgatatcctcaaat

SEQ ID NO: 863612 - DNA, 602 bp, Homo sapiens
gccttttaattggggcatttagcctattatttatataatcctgtccccgcgttgctaactggttattgtgcaaacttgattttgtagttgatttatagtgtcgatggcatagtacttaagtgtgtttttgtgatggctagtaatggccttacctatccatatttaggactccttttagaacctcttttagggcaggtctggtggaaacaaatttccttagcatttgcttctctgaaaaggattctatttctccttcatttaggaagcttagtttggctggatatgaaattcttggttggaattccttttttttttttttttaagaatgctgaatacagcccccaatatctttgagcttctatggtttcaactaaaagctctatttttagcctgattgcatccctttttaaatgacctgrcctttatcttcagctgcctttaatattttttctctcattttgacctaggagaatctgataactatgtgtcatgggaatggccatcttgaatggtatcttgcaggggttctgtgcatgttctgaattagaatgttggcctctctagcaaggttggggttatgatcacggatgatatcctcaaat

SEQ ID NO: 863613 - DNA, 599 bp, Homo sapiens
caaatttccttagcatttgcttctctgaaaaggattctatttctccttcatttaggaagcttagtttggctggatatgaaattcttggttggaattccttttttttttttttttaagaatgctgaatacagcccccaatatctttgagcttctatggtttcaactaaaagctctatttttagcctgattgcatccctttttaaatgacctgacctttatcttcagctgcctttaatattttttctctcattttgacctaggagaatctgataactatgtgtcatgggaatggccatcttgaatggtatcttgcaggggttctgtgcatgttctgaattaraatgttggcctctctagcaaggttggggttatgatcacggatgatatcctcaaatacattttccaggttgcttgcttttcctccctctcttttaggaacaccaattagtcataaatttggttcctacgtaatcccgtattttatggaggttttgttcattctttttttaattctcttttttatttttgtctgactgagttaattcagagagccctggagattagagtcttagagctctgagattctttcctcggcttat

SEQ ID NO: 863614 - DNA, 661 bp, Homo sapiens
ttattgactaactgaaattaatccctttccactgatgcactgcatgagcctaagatattttatctaagctttagtcaaacctggaatacccttatggcaaatgttatctttgagagaatatattaagatcaactaaatgctgtagcaaacaaaaccaaaacctagtggtataaaaccacagagatttgtttctcatccatataatagtctcatgcaggtgtttgacaggcagccttcgtagtggcaatgcaggaacttgtactcctttcattttgtcacctacttgtcacctagggtcctaaggtcctctgctcaaggtctgcatccagtaggcmgacaggggagagagattgtgtgagcatatttttggaccagagcacttcttcctgcattgaattggccgaacctaatcatgtgacactatctactcagttcatttagttataatgaactcttttatatgtaatatttcagtacacaggtagagtaggagacaggttttggtaattcattgctgtccctgtagcacacagtgagcaccatgggtcagaactgtgagatgcttcctgtgttgctggcagccacagggattcagagaggccacaagaagcttaccttttgaacatcagagctacagacattaatatttaaagtttgaggg

SEQ ID NO: 863615 - DNA, 635 bp, Homo sapiens
tgtgaaatacgagagtataaaatttgactccaagcttttttggctttatcaactggaaggatggagtggccattaattgagactgggaaaactatagaggggcaagttcagacattaaaggttgagtttcccattagaagcccrgagagatttagatgaggcaatagattatataagtctggcatttaagggagagtttcagacatgattaatacatttgggcatcactggtatatagaaagggtttaaataaatgaactagatgaactcataaaagcaaaaggtatagagagaagagaagaggttcaagggctgagtctgggtcattccactctttagtggtcagagaaaggaggagaagctagcaaaagaaactaggtattagtaaaactcctataagctaaaagacaagtttcttagggcctaaagcaagcttgtccaacccacagcctgtgggccgcatgcagcgcaggacggctttgaatgcagcactagacaaatttgtaaactttcttaaaacatcatgggaatttctgtgattgttttttagctcatcagctattgttagtgtattttacctatggcccaagataattattcttcttccagtgaggcccagggaagcaaaaagattg

SEQ ID NO: 863616 - DNA, 661 bp, Homo sapiens
ttattgactaactgaaattaatccctttccactgatgcactgcatgagcctaagatattttatctaagctttagtcaaacctggaatacccttatggcaaatgttatctttgagagaatatattaagatcaactaaatgctgtagcaaacaaaaccaaaacctagtggtataaaaccacagagatttgtttctcatccatataatagtctcatgcaggtgtttgacaggcagccttcgtagtggcaatgcaggaacttgtactcctttcattttgtcacctacttgtcacctagggtcctaaggtcctctgctcaaggtctgcatccagtaggccgacaggggagagagattgtgtgagcatatttttggaccagagcacttcttcctgcattgaattggccgaacctaatcatgtgacactatctactcagttcatttagttataatgaactcttttatatgtaatatttcagtacacaggtagartaggagacaggttttggtaattcattgctgtccctgtagcacacagtgagcaccatgggtcagaactgtgagatgcttcctgtgttgctggcagccacagggattcagagaggccacaagaagcttaccttttgaacatcagagctacagacattaatatttaaagtttgaggg

SEQ ID NO: 863617 - DNA, 636 bp, Homo sapiens
agatacctcctcccaagttaagaaaatactccagagtatactaacctaatgagattttttttaagtgtgaaaagagtccttaacccagaaaatgccaagtgctattcaaagggagcccatcacatggatgtaggagtagtcaacttctaaaacttgtagctgaatgacattttgggttttgacaaataccgtaactctacttcaagagcaaagtaaaggaaaaaggaactttgatatccttgtggtcatttttacatagaatttctcatcagaatagttggtggaagctttttaaggaaacaaattcctatgactcaacaaaaccactgaacatgattttgaaatgcagaaccaggtttacgcttggacccagtaggtgattctaataccttctcccggttaagamcctctgaatagtaattatagtgtgcttctaacaaatgtttcatctagtttaatatggtgaggatctgttcatattagagcccatgtcagcacaacattattatttgagctgatggtaacctcattgcataagaaaatctattttaatagctacctccctgccagataatggcaaaacattattttagtaccatattgatatataatattttatttgattgtatttataaa

SEQ ID NO: 863618 - DNA, 663 bp, Homo sapiens
aaaggttggcatggtcaatctccttaattttggctaatatttgcatagtagtatcttactggggttcacatttgcatttccttaaatatttcacgtttttaagattttgtattttcgtaggttataagcaacttgattctgatgtgtcttggtgtagttttcttcatgtgttttatgcttggtgttttttgaggttttgggaactcttaagtttttagttttgatcacatttggaaaatattttagtgattgttttatcaaaaaaattgttttctcttgcattccctccatcttttctacttcagaaagttcatttacatagacatttggtcacttgaagttgtcccacagctctgtgatggtctattcactcactgttttcttyttcatggttgagaaagcatttcattgacacaaggccatccacactacatgatagagagttataactcaaatcagtctccgcagtggctcagaggttagggtttttcaaggatagtttgttggtcagcgtactaggaaatgagtgctgctgattggttggggatagcatcacaggagtgtggaaaatggtcttcctatactgagttcacctctgggtggggggaccacaaaaccagttgagttttgtgtcactagtccaggtggagttagccagtcttt

SEQ ID NO: 863619 - DNA, 631 bp, Homo sapiens
tcattttaatgtgggtgtcaattccatttccatttcaagtgattaatttttctccttattatggatgatgttttcttgcctctttgtatgtatggtaattttaaattatacatcaggaattatggatttgattttgttgggtgcaggatatttgagtatctttacacatatttttgagccttgtttgggttgtggttaaattcattttgttcttgcttttagcatttgttgagcttgcttagagcagagttcagtctatggctgattattcaccagtattaaagaagacccttctgattactstaccccaggctccatgaattatgagttttttcagtctgcctggtggaaatacacactattcccagccccatgtgagctctaactactgttctcactcaccttttcaagtagctctttcctttgcctctggtagtttcttcagaagcatgtgctgatcagtactcagctgaatattcacagcagagggtactctacgtatctctagagttctttctctgtgctgtctacttcctggtactatcttgtgtatgctagccactgtggtctccccagactcacagctttgtctccttaacacaaggattctgctgagctgcacttaggttct

SEQ ID NO: 863620 - DNA, 631 bp, Homo sapiens
tcattttaatgtgggtgtcaattccatttccatttcaagtgattaatttttctccttattatggatgatgttttcttgcctctttgtatgtatggtaattttaaattatacatcaggaattatggatttgattttgttgggtgcaggatatttgagtatctttacacatatttttgagccttgtttgggttgtggttaaattcattttgttcttgcttttagcatttgttgagcttgcttagagcagagttcagtctatggctgattattcaccagtattaaagaagacccttctgattactctaccccaggctycatgaattatgagttttttcagtctgcctggtggaaatacacactattcccagccccatgtgagctctaactactgttctcactcaccttttcaagtagctctttcctttgcctctggtagtttcttcagaagcatgtgctgatcagtactcagctgaatattcacagcagagggtactctacgtatctctagagttctttctctgtgctgtctacttcctggtactatcttgtgtatgctagccactgtggtctccccagactcacagctttgtctccttaacacaaggattctgctgagctgcacttaggttct

SEQ ID NO: 863621 - DNA, 631 bp, Homo sapiens
tcattttaatgtgggtgtcaattccatttccatttcaagtgattaatttttctccttattatggatgatgttttcttgcctctttgtatgtatggtaattttaaattatacatcaggaattatggatttgattttgttgggtgcaggatatttgagtatctttacacatatttttgagccttgtttgggttgtggttaaattcattttgttcttgcttttagcatttgttgagcttgcttagagcagagttcagtctatggctgattattcaccagtattaaagaagacccttctgattactctaccccaggctccatgaattatgagttttttcagtctgcctggtggaaatacacactattcccagccccatgtgagctctaactactgttctcaytcaccttttcaagtagctctttcctttgcctctggtagtttcttcagaagcatgtgctgatcagtactcagctgaatattcacagcagagggtactctacgtatctctagagttctttctctgtgctgtctacttcctggtactatcttgtgtatgctagccactgtggtctccccagactcacagctttgtctccttaacacaaggattctgctgagctgcacttaggttct

SEQ ID NO: 863622 - DNA, 664 bp, Homo sapiens
atgacttgtccttttatcccgaggggtaatccaatactgcttttctccttttgttccatggcaactgtgcaagagactttagtagatgtccctcagttggggtttataagatgttgattagcctgagttatgagtttttgggaggaagagcacagaggtaaactgccattttcagcatatcatatcaggagcacaaactatcgacgtgatttatcactgttgatgttaaccctgaacacttgcctaagatagtgtttgtcaagtttcttcactgtaaagttactctttcttcctttctccatacagtcctctttggtaagaactttctgtrtacaacccacacttaaaaattagagagatgtgcttcacctccttgaggatgaattgtctacatagaatagttgaaattcttctgcatgggagattggtttttatttattcattcattctttcaattattcattcatttatggcaatatggactcatgaatatttattttatattttgagttataaaccagtattactttattttgttgcccaaatttttccagctttggttattgaggacactttcagttggttggccatgaccttgcaaaaagtcaaattcctcaaaaacaaaaaaggtctaagaaactgttacaatcaactaaatgtgatg

SEQ ID NO: 863623 - DNA, 664 bp, Homo sapiens
atgacttgtccttttatcccgaggggtaatccaatactgcttttctccttttgttccatggcaactgtgcaagagactttagtagatgtccctcagttggggtttataagatgttgattagcctgagttatgagtttttgggaggaagagcacagaggtaaactgccattttcagcatatcatatcaggagcacaaactatcgacgtgatttatcactgttgatgttaaccctgaacacttgcctaagatagtgtttgtcaagtttcttcactgtaaagttactctttcttcctttctccatacagtcctctttggtaagaactttctgtgtacaacccacacttaaaaattagagagatgtgcttcacctccttgaggatgaattgtctacatagaatagttgaaattcttctgcatgggagattggtttttatttattcattcattctttcaattattcattcatttatggcaatatggactcatgaatatttattttatattttgagttataaaccartattactttattttgttgcccaaatttttccagctttggttattgaggacactttcagttggttggccatgaccttgcaaaaagtcaaattcctcaaaaacaaaaaaggtctaagaaactgttacaatcaactaaatgtgatg

SEQ ID NO: 863624 - DNA, 703 bp, Homo sapiens
gatttcataaaagtcttgatcaatgcagccggaataagcaagaaattagaaatggatgtaaactttgaagggaatgttttgcatttctcttaaaaggtgctgctacacaaacaggatacaaatgctctgaagaagcagaaaaagacctcagatctttttctagagagatcaccaggaaggatagcccccraaggttaattcatgcagaagggttggaaaacataatattttgtaatgtcagttttgattatatcataaactgagcaatgtcaaaatatagcataatcaaataaaaactcgaagcttgaaattatttaactacttcctcaactctaaatcattctaaaatgtctcactaattatgttactctcatgggttttctatccttttttttttgaaaagtgccaaaatctattcatttcaaagcattctataagaaagtacaaaatgatcctttgaacccatttaacatatggagagtccgaatccctagaaaagctaaatgattttatccaaccccaacaaaaggtgaaaagataaagccaagacaatattaggatttcacttccttctatcatattaaaaagttaatgtagtaataagagcaaaaaatttccacaagtacactgggaagacacatcctgaaatattttagcttaaggatgccccattgcagtcataatcttattctctacccccaaa

SEQ ID NO: 863625 - DNA, 630 bp, Homo sapiens
ctggacagtgtaactgggtgctcagaagcaagccctgggctccctctgctggggtcagatgggaacaggggcaatttcatccagagcacccctgggggtgtccaacaacactctcaggcacagcagccaaagctgctatggcctgaaggggatgtggactctaagggcagtctaaaacccaagagacaccagcatcatggagaactggcaggggtggaaagagccctgctctamcaggcaccagagctgtacctccctaagcctcagtggtctttctgcagctgacagtgggactaggtcagggcagtgctcttgtgaatggaagctatttcaccctcagccccgcatgacccttcttcccgcccatgtttgcagaagaagaatgccatgattgggccaggtatggtgactcatgcctggaattccagcactgtgagaggcagagacgggaggagtgcttgaggccaggagttcaagaccaccctgggcaacacagcaagaccccgtttctataaaataaaaatagaaagtcagccaggcatggtggcatgcacctgtagtcctagttactcaggaggctgaggtaggaggatcactacagcccagaagtttgaggccacagtgagctat

SEQ ID NO: 863626 - DNA, 596 bp, Homo sapiens
acatatacatacatacacatatataacagccctaattggaatcttggaaggagagaagaaacagaagagtacagcagaaaaaaatgtttaaagagataaaagtggagaatttttcaaaattgatgaaagacataaactcacaaaatcaagaatttaactccacacagcatacagctagactctatttctcagccttccatgaccaccctggccaataaatgtaggcagaagttttgtgtgycacctccagatctggcccttgtctaatacaggttaagatatgccatagcaacaaactcaaaatctcagagcccttatttctcacttaaacagtccaagccagccaggaacggtggctcacgcctataatcccagcactctgagaggccaaggtgggcgtatcacttgaggccaagagttcaagaccagcctgaccaacatggtgacaccccatctctactaaaaatacaaaaattagccgggcgtggtggcagctgccagtaatcccacctactcaggaagaagctgaggcaagagaatcacttgaaccgggaggcagaggttgcagtgagctgagctcgcgcaactgcactcca

SEQ ID NO: 863627 - DNA, 589 bp, Homo sapiens
taatttttttacagtatattattctcagtcagaggtggaatattttgttgctttaaagtaaataatacatatattgcagtaaaacttatgaaagccaattcaaactaaatagctttgatgggaaaacaattttaaacttttggaaaaataaccccaaactacccataaaagacaacatttatctcacaacttttatattggttaaaaataatcagatgaaacaactttgaacatggcaatttattttatgcattatttaaatccgctgtttaaaaatgttcaaaaggcacttcaagaaacatttaaaaatacatttttctgacttaatggtgatcacttaaaaataagcaagtcaccagacatttttaaaccattcgtaacaccattaccttaaataatttttaaattcmaaaacacgaacattcactatgtagtacaacacactgcttagcagtaagattagtttccctctaataatatacttcatgtagattattaatttgcagggccccgcaaagttattaaaacttaatataaactgaaaactagagaggtaagggagttgaaatagagcaaaattcaactctaa

SEQ ID NO: 863628 - DNA, 632 bp, Homo sapiens
agtcattcatgtgaaaggtttctataaggaatgttcacttagaattcctcactgggattccagtgttctatgtcagaaatgcagaagtcctttttcagtgcagtgctagacatattacctttgttcattcatgattttctttcaaggatttcctaacttcacttttgtatcttcatttttgtttgcttgactaatttcctttagtatacgttcaggtaaggtaggttgatatctgtataaataaccatatggacgaagatgataaacgaggtattctaactcatacatggttgtagaatcaacatagtgaaaagaaactgcaagatcagagcagcaaccaggaccctaaaaaagtagtggaaacaggtattgttaataaacagcacattgctagctacaatatttacatacttataaaggaccagctaattttaaaagaatacaaacattaaagatggcaaggtaaagcagaggaacctaatrtactagacctgtggaagaaatcaatagtttacttagacatcctaatgatttaaaaccaattgaaattggtgaaaccaagtgaaactgtggaaagtatttttaaatgaaacaatattctctcacactctttagcggataaaattactgag

SEQ ID NO: 863629 - DNA, 630 bp, Homo sapiens
aatgtgtgtaaattaccctttgcttaaaataaatgcccaataaatgttagctattattgactgaaaaatcatatcargtggccctaaggtaggtcagatttaaacctttgtccagttatgtaattctcataaattcctaatagggttggtatgagaacaaagtttaaaataaaacaacaacaatacaacgaacaagaaagcaagaaaattaagaagacagaaaaagagatgaattaagcagtcaacctagagtcagaattggtatctggagaatgttggtgtcatccaggtgactccaacaaaacttcaggctccatctgacatctttgtaaagaatgagggagatagtctggcaagttccaagagaagattcatattgactgaatatttaataaatctaataatttatgtttggaagtatgtagcttacagtgtgtaaaaattatcaaactgtccactgcgttttctctgctgttatctctaaactttcctttgaaacacacactggatatgtagattcttagacaacctactcttgcacctttaggaaatatcagaataaaagcaaataggaaaaataaccagataagtcaacttgtgattatctaaactagctctgtccaacagata

SEQ ID NO: 863630 - DNA, 577 bp, Homo sapiens
gtcggaagggaaatttattgtattagaagagggaaatctattttgttaagttacataaataaagtcagaggctttgtaaaggaaacagtaaaattagatgggcatacatattttgaatgttgtattttattgatgggaaaaggaagtattgaatcatcagaatgagacatacacgtattggggctataagaggcactcctagtcagcggggtgctyggagatgctggtatattaaagacaaagaggatgaacaatttggccttcagattctatgagaaggggagagactggggttttatatttgtttctaagggctgctggaacagattatctcatatttagcagctgaaaacaatacaaatgtattgtcttataattctaagagtcagaagtctgaaatgggtctcactgagctaaaatcaaggtgtcagcagggcgatgttccttctggaggctctagggaagaattcatttgcttgcctttttccagcttctagaggctccctgcattccttggctcgtggcccccttccatctgcaaagccagctatggttttctcatgctgcatcactctga

SEQ ID NO: 863631 - DNA, 567 bp, Homo sapiens
attttgtcttgttaagctgtttaaattttgaggattatttgttacaggtgccaatattttcctacctaaaagaggattccttattaaaggctgtggcaccaccatccctcaatccctgaaccagaaaacgaaggcaacaactttaatatttctttatcctcatttccagaccaattccaargcctgattttttttttaaacttttaactttgagatgatttagacttaaagagttgcaaaatactgcagttaccaatatacccttccctcaacttcctccagtattaatatcttatataaccatcatatagtaatcaaaactaagaaattaatatcgataaatactattaattaaatgacagagtttgttggatttcacttgttgagggacctggtaagacatagtaggaataaaatgtgagactcttgtgtactttggcttacagaagcaaaatatggtttttacacagttggaagacaaccagctgcctgtagtgttatcaccaaagaaagactactaggtggctcagaaccacaagtgtattgatgtgaaactggaagtaacta

SEQ ID NO: 863632 - DNA, 680 bp, Homo sapiens
ctacaggtaaagtcttagaattcataggtaaagttttcaaggttgcaggatacaaggttaataactgcctttctatacatggtcattaaacaaggaaaactggaaataaaattttgcaggatacaaggttaataataactgcctttctatatatggtcattaaacaactggaaataaaattttgcaggatacaaggttaataataactgcctttctatatatggtcattaaacaactggaaataaaattttaataaatgcatcacagataggaaatttccatgcataactgtagtgaaaaatgaggcgatctctgtgctgaaaattagaaaacatgatagaaataaaggaaagaagagcttcatctatggacagacttgctgtgcccatgaacgaggtgtcatgttattgtaaaaatgtcattatttccaagaacatctgtagattcaatgcaattccaaccaaaatctcagcaatattttttggaaattgatacactcatgataaaatctatatgaaaatamaaagggccaagaatagcaaaggcaattttgaagaagaaaaatagttcaaagatgacccatcttgtaaatacccaaagttatcatagattaaaatggcccaagtatttatgaaggccatgtgttataaaacatgtcatctaatctcattattttcctt

SEQ ID NO: 863633 - DNA, 547 bp, Homo sapiens
agctgccctgcatctcttcctacgtccaagaacctcttgggcccttcctttagcccccagacaccttgaacaaccagatacaaaactgtggtgggagtttttgttgcagaacttttatatccagaacttttgctgcaagtgcgtgatttccagagagcaattatatcacctcagcctaaagccaagcaccggaaacagccgcggacatccctgaccttgagaaggcttccctttgcccaccacccacggcttcccattggctggacaaaaccctgcaccacagggcaggtgctggtttggaggggcctgaagttaacagtctgagaggcctctttaagataaagaacacaaaagcacaacaaacattgtaagtcaggcagtgagcttggcccracatgggaggccctgactctctagcctcagcaaaaacacagaccacttttccagctgactacccaccccctcctgcactcttcctgggccgagagggcccccaccattcacacagtccaccttctactccccgccaaggcagaacacttcagct

SEQ ID NO: 863634 - DNA, 602 bp, Homo sapiens
aaatcgcattttctcatgtttccagaatctctaggattttacggcatcccacacttgctcccaggatgctctaccctggagccccatctggttttcttttctaaccatgttcccctgagatcttctttaatttgaattgtattaaattcatcaaactctttaatgagccttgggcattgttcgacttgtgtggtggcctctcctggatagtagcagaggggaatcttaactgccttcagtgtatatrcttctgggcgttcccatcaggtctaagcactgtttcacattatgtgaatgtcataaataacttggttgaaagggtcaatgttttcttatcttgaagagagtcaaagggcagtttgcatttatctaggaaatgcacctcacagatgctagtcttaaaagctcctcaggggatgggtggggaagtactattatccttacataattctaaaaatctggggggtagtaaaccaactgcataaatccttccctttccttttaatcaaggctatagcaaaaaaaagaataagaaaaaaaatactgctcctaatcacaagtaattttatttttcttacaatatactgtttttctcagtagta

SEQ ID NO: 863635 - DNA, 589 bp, Homo sapiens
tctgaatggcagagctgatatatatgtccttgctctatgatagtcaaagtatactggaggctttgggcaaaagtcatagcctcattctttaaaagacctccagaacttctgcctgtagaactgtatgaagggtaaagggactccaagacattccacagaagaataacaagggaatatacaaagactgcataagagaaaactgcaattggaagagttttctccaactatcttaagggcagccctgaaatagtctttagtgaggcatcattttgattaactaaaagggaaagccagactttctaaatggtaattcttaggaataacatattagctcaacataaagaaagataagtgtaagtattagaagtatcccccccccgccaaaaaaaaaaagaatggrtatctcagcagagagctagtttctcatctcttggaaggcttcaggcaggagagcaaaagtaacagagtctgactatatagctacatcacaactgacaaagtttatttaactattttaaaagtcaatttagatttattattggatttactttttaactgtccataaatctgttaaggtaggcgtaatgga

SEQ ID NO: 863636 - DNA, 635 bp, Homo sapiens
tcccccccccgccaaaaaaaaaaagaatgggtatctcagcagagagctagtttctcatctcttggaaggcttcaggcaggagagcaaaagtaacagagtctgactatatagctacatcacaactgacaaagtttatttaactattttaaaagtcaatttagatttattattggatttactttttaactgtccataaatctgttaaggtaggcgtaatggaactagtgcaagtcaaaaaagtggacaaaaaacagtcaatatcaaaaaaggaaggcatgcaaatgaattcctctctcgacagatagacatatctatatatatgwatatctatacatatgatgtcaaaattaccaatgatttgaagataaataaacaggcttcttgtaaagaattaatgttgccagggatcccatttgtctccaaagctgtggtggtggatgccatgttgagatgttaacttattttctcctctccccttcaaggaggtatttagctctatattcaatcatttcaagaaagacatggcaggacaaaaaagcggaactggccacaagtcttttaagatcttaggaaaagctggaagattttatgatgaagccaagattctttggtttcttgggcataagcttctgaat

SEQ ID NO: 863637 - DNA, 622 bp, Homo sapiens
ttatattcaagagccatcttaagtgagtgccattgtgtttacctggttatggtcacactggggtcaagaacaaccttcagttttatcgcaatatagaaacatactttaaaatcaggtgaggtggaatcctggctggcttgttgtattaactctataaatttgtatagattatttaccctgagtctcaatgtactcactgaggcaaaaygaatgttaaaatatctagcccatgctcaatgcaaaatgaataatagtttcttttcttcccctttaaaatatgacaattaatttgagagccttagaagaatcccgagcatgggaaataaatattatattttcccctgtgtcactttacaaaaaagaccaaattaattctacatttttctggcaataatggtttgcttttgaatgcatagctccttgatatttctttttaaaaaaagagagaggagatgaaaagaaaaccttacatctagtatacagttgataagagcaattgaaagaattttagatactgagcttactagatccttcagtactccatttgcccttccactaataaattaaaattatgtcctttaaaaaattatctaatgcataggaatcatcagacggttcacac

SEQ ID NO: 863638 - DNA, 622 bp, Homo sapiens
ttatattcaagagccatcttaagtgagtgccattgtgtttacctggttatggtcacactggggtcaagaacaaccttcagttttatcgcaatatagaaacatactttaaaatcaggtgaggtggaatcctggctggcttgttgtattaactctataaatttgtatagattatttaccctgagtctcaatgtactcactgaggcaaaatgaatgttaaaatatctagcccatgctcaatgcaaaatgaataatagtttcttttcttcccctttaaaatatgacaattaatttgagagccttagaagaatcccgagcatgggaaataaatattatwttttcccctgtgtcactttacaaaaaagaccaaattaattctacatttttctggcaataatggtttgcttttgaatgcatagctccttgatatttctttttaaaaaaagagagaggagatgaaaagaaaaccttacatctagtatacagttgataagagcaattgaaagaattttagatactgagcttactagatccttcagtactccatttgcccttccactaataaattaaaattatgtcctttaaaaaattatctaatgcataggaatcatcagacggttcacac

SEQ ID NO: 863639 - DNA, 557 bp, Homo sapiens
atggctaacgtgtagaaatatattagtgaaacagtcaaaacctaaataacaagaggaaaagaacacatactcccacaagcaggcacacacacacacccctaccaaaattatatacagttgaattagaaatgcttcagaaaacatttattcataatggttaaatttataaaacactatatccagtagtcactgctctaagggctctacatgagttatttaatgcttacatgtcattttcttttcttttttttttctttttttgagacagagtcttgctctgttacccaggctggagtacagtggcgctatctcggctcactgtaacctccacctcccaggttcaagtgattctcgtgtctcagcctcccaagtagctgggattrcaggcatgcaccaccacacctggctagcttttttttttttttttttttttttttttgtatttttagtagagatggggtttcaccatactggccaggctggtctcgaactcctgacctcaggtgatccacccgccttggcctcccaaagtgctgtaatcctccaaagggattaca

SEQ ID NO: 863640 - DNA, 636 bp, Homo sapiens
ctcaatgcaatttgaaggacatgatccccagaccagtggttctcaaacttcagtgagcatgagcatcacttggagggtgcagaagcatagagcgttgcgccctgccatcagagattctgattcagtaggtctgagatggagtctgaaaatggcatttctaataagctctcctcggatgatgtacatgctgctgatacagagaccatactctgagaacaatagacagagagtctatattcatcgaaagagcatcaggcatagaagtagcaaatgacttcaagctatagtcctggtgggaagagagcttctaatatcgtttctccttggttgggttaacatttgttgaaagctttattcarttatgatttaaggcaatacttactttaatactgagtgctaattttcattttcttacatttaactttttattcattcaacatgccttttagtgaatgataagattagagataggagtatgctgtttagtaaaagaaaatagcatgggaaaggcagaatatgggaaacaatgaggggttttcaggatgcgtaagttcccaatttgttgaataatacacaccacacacacacacacgttcacatacacatcctgctggttctatttctctggggaacact

SEQ ID NO: 863641 - DNA, 599 bp, Homo sapiens
aaaaaattcctctttgaaagagtgaagctcctattcaattttggctgagtgttctattgggtcaaagcacatgttgttcagagcttctgattttaaaaagaagctgcatatatggatctttttataaaacctctcaatttcaaaattatatcagccacttaaaatattgtgttaaaatatactgcaaaggtcatgcaaagtatatctaaaagactggtgtgactgacagaccatatatttataatttctggtctagcttccaattctaattatctgagtaaataygtgagcctcctgtccgctcagtggcggcattagattctcataggagcacaagcaattgtgaactgcacatgtgagggatctaggttgcgtgctccttaagagaatctgactaatgcctgatgatctgagtctgaggtggaactgtttcatgctgaaaacattgatccccgtcaccatctgtgaacaaaatgtcttcctcgaaattagtccttggtgccaaaaaggctggggactgctgttctaagccatcttaactttatttgtgacatttatacaattattaacaaaatcaactgcttttcaaactagatttc

SEQ ID NO: 863642 - DNA, 599 bp, Homo sapiens
aaaaaattcctctttgaaagagtgaagctcctattcaattttggctgagtgttctattgggtcaaagcacatgttgttcagagcttctgattttaaaaagaagctgcatatatggatctttttataaaacctctcaatttcaaaattatatcagccacttaaaatattgtgttaaaatatactgcaaaggtcatgcaaagtatatctaaaagactggtgtgactgacagaccatatatttataatttctggtctagcttccaattctaattatctgagtaaatacgtgagcctcctgtccgctcagtggcggcattagattctcataggagcamaagcaattgtgaactgcacatgtgagggatctaggttgcgtgctccttaagagaatctgactaatgcctgatgatctgagtctgaggtggaactgtttcatgctgaaaacattgatccccgtcaccatctgtgaacaaaatgtcttcctcgaaattagtccttggtgccaaaaaggctggggactgctgttctaagccatcttaactttatttgtgacatttatacaattattaacaaaatcaactgcttttcaaactagatttc

SEQ ID NO: 863643 - DNA, 604 bp, Homo sapiens
tggctccctcagtgtctgtgtctaacaggacacagttttagttgcaacaaggggccctggtgggtagaggggctctcaaagggctgttaacatatccaagtacatgatgatctgaagaacccaaaggttatttctgatgtaagtgtccagggatggagattgtgtgttgagarctagggccaggacgacggtgaggtgagtaggcacctggcttgggtgcaaaatttgtaaataatattttaatgcaatatttttaaaaaactcaaataaaaaaattcatgttggacaaaatataaaaattctaaataaagagaggatcagtaatggtgctgtgttgagccatatttgagcttgtagtaaaaggaaaaatcagtaacctatccagttttcatttaaaatttttatatttgattcatcatgaattttttgcattcatttgattttccagatcagattaaaatattatttttcttgaaaataaaaaaataaaattaaaattaaaaaaccaaaaaaaagcaaataaaaaaaggaaaatatataataataatattaaattattagttctgaccctgctgagagccattggatttaaaaagcattcctt

SEQ ID NO: 863644 - DNA, 584 bp, Homo sapiens
tttgaaaatctgaaatttcattggaataaatacaggtgtgtcttctcattttctaaggtaaaaagacaaaacaaaacacaacctaatacactgagagcatcttcaacctgaagtgtcaagcatttctgtgatttatttaattttgtgtttgttcctccacttgctctttttcttcactcttaatcttcatcttccatgacctcaaccttactcttcatgggtattctagtttccatcaaaatctctttttccagcacattggagaagataaaaaggctgggaaggaagtgaggagaattgtgcgtgccattagctgccttgcaaattatctcttccctggggctggtgtggcttcttggcccygcagggtgctaagatggtgctcagtggctccagtggaatctgtcttcatcactggcacacgtgggccgcctgcagactccccagacagatttctctgtggcacctgagctcctctctcatggataagatctcctttgtgactgagattaagctgctgaaatttgcctgctggaaacagtcctctcatcacagccaagcctttttctttctgcagcccatga

SEQ ID NO: 863645 - DNA, 569 bp, Homo sapiens
ggagagtggagttcttaaggttcagacagaagcttcattttccgcctcactcctggcctaagtgctaccctgtcctcatgccactttgtcctctactctccaggggactgctatcaccacagaatatctatatttcctgacttggccttgtgagaatcaaatgatttactaaatactgtctatactcctgcaatttgccacacaaatgcagggtgaaaatctgaggatagcaaaatgagtccttaaacygtgtgctaaaagaggtctaagttcaggtggggaaacagaaatgtacatagataaactggaacgcagcactgacaatgtcagatgaaaacggggaagctctgcagagaagagggaccttgggcaaagaaatggaggccaaagtggggtctgccaggttcaggaggtagaaagcactccaggaagtagcgaagtggagtagcaaggcacagagacatatatgagagtggcatgttcaggggatgacaagctattctggatgccttgtgtgtagggtgcacatggggaaggaccaggtgaatgagcctagaaaagtaggcctc

SEQ ID NO: 863646 - DNA, 606 bp, Homo sapiens
aaataatttatattcaaaatagagggaaaacgtcattaagtagttttaagttttgatggcacaaggaattatgaataacggtaaagaaaaaaagaagtccttttgaggataaaaacttactgactgcgtcctgtggtttcttcagctcatctgtgtgttacaggaaagaggatgaggaatcacttgctgattgatttcatcagctctggtactgacggcactgatggcaaggtcttatatgtttaattttattctccccatcttttccccccttaacctagatctctgaattttaacaatgtgtagggctgagatttatgtttctcmaactgctctgacttgaacccccaaagcaaaagcaaaagcagggaacatccatgcacgttaaatggatgtcaatttcaggacaaaatgattgaattacaatccctggccatggatgtgaattttgatcttttttttttctttcacacacatgatatttccctgacatctgtgcaatacaaatatatctagaaagtgtgaaatggaaaatctgcttcactaaatatataaaagggaccccgaatgaagtctccatgatggcatttgtcatcatgggcacag

SEQ ID NO: 863647 - DNA, 608 bp, Homo sapiens
atcttttgcccatttttaaatcagattattagattttttcctatggagttgtttgagctccttatatattctgttcattaatcccttgtcagatgaatagtttgcaaatattttcttccattctgtgggttgtctcttcactttgctcattgtttactttgctgtgcagaaggtgtttaatttgatgtaatcctatttatccatttttcctttggtttcccgtgcttatggggtattattcaagaaatctttgccctatccaatgtcctggagagtttccctgatgttttcatagtttgaatttagtagtttcatagtttgtagtcctagatttaagtctttaatccattttgatttgatctttgtatatggtgagagacagacgtctagtttcattctcttgcctgtggatgtctaattttcccagcaccatttattgaagaaagagtcctttccctattgtatgcycttggcgcctttgttgaaaatgaattcactgtagatgtatggatttattttggtgttctcttttctgttctgttggtctatgtgtctgtttttatgccagtaccaggctgttttgcttatgatagctctgtagtataatt

SEQ ID NO: 863648 - DNA, 671 bp, Homo sapiens
catctgcaagccaaggagagaggacttggaagaaaccaatcctgctgacacctggatctcagacttccagcctctaggactgtgagataataaatatctccagtctggggtactttgttatggcggccccggcaaactaataaagtctgattctggtttggggctgctattaacatcctcatatgttgatacccatgttagtatccgtgttcaaacacttttctctggtacatcagaatctctggggtatatacttcttaaataggagtaagtggttggctaaaagtttgtggctgagccactttattagatattgctcaagtgtttccaaagtaattgaactaatttacattatcttcagcagggtattcaaattccaattgtcccatgtccttgtcaatacttggtgttattaccagacgttcaaatttttgccaaccyaagggcacataattgttttatgtatatttccctgcctattaatgatgtagaacattttgtcacatgtttcttgttcacttagagttccgctgttgagaagggtgtgttcaaataattgccccatttttcttttgtgttatctgtcatattcttatcgattgattcatattggtctggaagttgcaaacgtctttcctgactctctctgtttgttgttgttgttgttgttt

SEQ ID NO: 863649 - DNA, 762 bp, Homo sapiens
cattgttctgtccccctcaataagcaggaagaaggaatgatcatccattcaggcttccctataatcataaactctgagtgccattcaaagatgcagccacacaacaatggtgttctcaactttctcatccacatttcccaatataatggaattgtagataagattaatgtgggtaaatagtggtgagggttgttgcaggtggtcaagccaagtcactggctcccctctgaacctgcaacaggtctaatttcttgcattaatgatgaaatgaggtaatccgttacctgctcttcccagcaataggatatataagcccaactttcaggatgttagtttcacatcaagtgaccctccctgtgactctgatagacatgctcccttccctaagacttgtattcaattaaagaacaagtacaccttgaaatgaatgtataacccctgacataaawgggacttagagctgaacttcaactcttcaacagataagctgccttagggaattcaacccaagaaaacagagtggtatagaaggttccttgccataatcctcaaacttatcagaaaggttagtaaaagcctcacagtacggtaaagaggaaagccacaaccctaaaggcaatattccaagttcagggccatttcaaagaagtgtgatattattagacccttctgaggcagaatggcccattaggctccatccacaacatgttaggtatgctgtgaaagccaagagacaactaagcaggcacctggaaaatgcaa

SEQ ID NO: 863650 - DNA, 630 bp, Homo sapiens
gattcaaggatggagatgggggaattggtacaggcttgcccccagggtcagctcctcgcctaggtcaaacggtttccagttcactcccacaagagactgacactgtcttccctggccactaccccagggaaggattaccctcacccctctagagaaagaagcctaaggagacactggcagagcatacctagctgrttgcctataaagttatattttcagtgatgttcttaaggatatgacaaacacaacattcaaaaaaatgatcttatatctagaagtaaaaagcatacaaaaagttggacatgccaaatttgttgtctctgaggccaccagtggttctgaattttggggacacctgttttctcatgggctcttttgctcctctttttttttctgtgtagatgcaaatgtctacacccacacacacacacaaaataagtgatgtccttctcttagttccttttcattcatcagttacttaattctcaatatgttaataaaagtttaaggttaaagaaagggcgagttgataggaaatcagtctgtctgcccgttttactcacagtcagcacatttgagaaagaatgagagatgagaagactggatatttaggagggggatgtgcgtgtc

SEQ ID NO: 863651 - DNA, 648 bp, Homo sapiens
agggcatttagcaaatgtcctttgaatgaatgaacaaatgagcaaataaatacattgattggtcttcttttaaatggtttgtatcctcaatgatttttgtaaagtagatatgttttccttccagaatacaagcttaagtatacatagctgttcatggccagagaaaggctgtgttttcaagatcttctttactgttcaccttatttaacatatggcaaaatgtaggattcattctaaaagcactctgtggcaggaggtcacattttcatttacaagatggtaatagtgatatgcatttctatgacttttctaaaaacacaataggagcagaaatgagttgctttatgggcaaattttatgaccagtccagaagcagatggattcccagccaaactgtggccaagtttctgctgcctgaaagcaaytggcttcaactggagttgctctgctgatagtgatcttcttgaagtgctggaagcccagggtaactaccaaagccactcaacaaggaaattctataatgaggaacaaatgcttctcagcagcaatcctcatgagcagcttgctctcctgggggttggggatgctgctggagatacatggaggcaggtccctgctagagatggtgcattgacgtggactgcagtg

SEQ ID NO: 863652 - DNA, 552 bp, Homo sapiens
actttatttttacttaatataagttggatctctcatttatatttccaaaaaaccctgtaagtagattaaggctgccttgcagagattcttcagctgggcagtgatcagcccatgcgtgtgagaaaactaccaaaagcaggaaaaagagccactcagaaggagcaggtagagcaatctccagagcttacagagatccagaggcaggagaatcacttgaacccaggagaatcacttgaacccaggagacagaggttgcagtgagccgagatcgcgccattgcactctagcytgggggacaagaccaagactctgtctcaaaaaaaaaaaaatttgaaaggcacaaaatgaagagaaaaacatattatcttttctaccattcttacattaatacttattttgaaaagttttaataacttttgacatttctccctctctctctccttccctccttccctttttatcctaatccctctagtgcaatctccatctcttttgatgtttttagtgtacttctcttattctctctcacactcactgattctttttgggtaa

SEQ ID NO: 863653 - DNA, 593 bp, Homo sapiens
atgctgaattttattttagggagaacaagctgcaatcataataaagaactgtatttacagctaacagcaatacccacgtttctctataggtcttacactacaatctgaaattgcatttcatgatttacaaggtctgagacrtaaacagtaaaaggtatgtttctgggaattttctcattaacagccacaaaacaagcaattttatgtggaattgctttgttcaccttttctgaaatatgtgcaagatctctctttgatgttgaatccattctgatttgaacatctcaatatttttgatgttccatgaactcctccacaccccacctatctccgggaagctcagacctccctacctacttggtgaaaagaaggaaatttagaacatttgagctcgcaggctgcctacttaagactacccgaagaatgagctctgcttacccctgttccttcgtaggtacatgaatgagtcgtcaaaaattcactaatagttgattaatgcagttgtgacagtatgaaaaacaacaaaaggagtgcagtgctgaagaaattctagatcttgcagatttaatgcatccacttatatccataactca

SEQ ID NO: 863654 - DNA, 650 bp, Homo sapiens
cttcttcttcttctattatcactatattcactcttactgggcattctaataaacttactaggcttccattactatctacatactaatcactcaaatctatactatactcacagttcatattgctcactttagtttcawatctagatatcgcactctttattgatcatctctagtctccatttgaatatccaacaagtatcacaaattcaaaaggtctaaaactgagcttgttgcattttctcccaaagctcctatttcaatgttatctgtttctatgaatagcaccatatcccttcagttacatgatgcagaaagctaaacatttttcctcttctattttcttcaaccctacattcagtcaccatagctagttaatattatatctttaacatttttcaaatttgtcgtcagcctctgttctctaacacttcagtattgaactccagtttagactactatcatcttttatctgtttactccagcatcttgtatcagtcttcttacctccacactggcctcctctttaatccatttttcatgctgtcagagtgaagtttttaatggtaaaatcggattacattgtgctcaattcagcaacacatataccaaaattagaacaattcagagaagactagtatggcccttgtgca

SEQ ID NO: 863655 - DNA, 587 bp, Homo sapiens
gggcggttcacaagttcaggagatcaagaccatcctggtcaacatggtgaaactctgtctctactaaaaatacaaaaattagttgggtgtggcagcgcgtgcctgtaatcccagctactcgggaggctgagaaaggagaatctcttgaacccaggaggcggargttgcagtgagctgagatcatgccactgcactccagcctggtgacagagctagactccatctcaaaaaaaaaaacaaagaaaagggtttaatggacttacagttccacatggctagggaggccttgcaatcatagtggagggcaaggaggagcaagtcatgtcttacatggatggcagcaggcaaaaagagagaagttgtgtacagaaactcccccttataaaaccatcggatctcatgagacttattcactatcatgagaacagcatgggaaataactgccccatgattcaattacctcccatggggtccctctcacaacacatgggaattcaaggtaagatttgggtggcagcacagccaaaccatatcattccaccccagcccctcccaaatctcatgtcctcacatttcaaaaccaatca

SEQ ID NO: 863656 - DNA, 640 bp, Homo sapiens
ggatacaaaattaatgtatgaaaatcagtagctttgctatacaccaacagcaaccaagctgagaatgaaattgaaaactcaatccctgttacaatagttgcaataaaataaaatataatgtaatacttaggaatatacataaccaagaaggtgaaagacctctacaaggaaaactgcaaaacactgctgaaaaaaatcatagacaaaacaaacaaatggaaacatatcccatgctcatgaatgggtagaatcaataatgtaaaaataaccaactgccaaaagcaatcttcaaactcattgcaattcccatcaaaataccaccatcattyttcacagaactagaaaaaaattctaaaattcatatgtaacaaaaaaagagtctgcatagccaaagcaagactaagcaaaaagaacaaatctggaggcatcacattacccaacttcaaactatattataaggccatagtcaccaaaacagcatggtactagtataaaaataggcatacagaccaatggaatagaatagagaacccagaaataaacccaaatacttacaccaaactgatcttcaacaaagcaaacaaaaacataaagtggggaaagtatatcctattcaaaaaattgtgcagggataattggc

SEQ ID NO: 863657 - DNA, 640 bp, Homo sapiens
ggatacaaaattaatgtatgaaaatcagtagctttgctatacaccaacagcaaccaagctgagaatgaaattgaaaactcaatccctgttacaatagttgcaataaaataaaatataatgtaatacttaggaatatacataaccaagaaggtgaaagacctctacaaggaaaactgcaaaacactgctgaaaaaaatcatagacaaaacaaacaaatggaaacatatcccatgctcatgaatgggtagaatcaataatgtaaaaataaccaactgccaaaagcaatcttcaaactcattgcaattcccatcaaaataccaccatcattcttcacagaactagaaaaaaattctaaaattcatatgtaacaaaaaaagagtctgcatagccaaagcaagactaagcaaaaagaacaaatctggaggcatcacattacccaacttcaaactatattataaggccatagtcaccaaaacagcatggtaytagtataaaaataggcatacagaccaatggaatagaatagagaacccagaaataaacccaaatacttacaccaaactgatcttcaacaaagcaaacaaaaacataaagtggggaaagtatatcctattcaaaaaattgtgcagggataattggc

SEQ ID NO: 863658 - DNA, 707 bp, Homo sapiens
ttttaatatatttaaattctttggaaaatcattctattctataatggcaacatcttattaactataatatctgagtagttataaaaataaaattctgcatgagaaagaatggactgattccctggttccctatataaggaaaagagatgaaacttacagaactccctaagcttatttctggtagtagaaaaactcmatcacaattacataagtggagaggtttgtaggaattacataagtgaagaggtttataagaattacataagtggagaggtttaaagggaagcaacgtgttgtcaagacagaacattttcaatatcttgacaaggcatttttcccagttctcctttggtcataacgttaaccataggcaaactagtgaagaattgactattaatttatctacctttagatgcttccttggaagttcttttgtgtgtagctccgtctccctatttcctaacccaaaattcaaatctcaatccatacaacctggcacagaaaaacaacttggggcaagcagattctctggctgggggagtccttgaaataataaataatgagcaagccagatgcttaagagtaaaaagtgaagttgtaggttatgatttaaagagcaattgagaagttggctgggatgtcatgatggatcatattcaagtgagggggagtggaaactatgagcaaacatacactctggcgatgag

SEQ ID NO: 863659 - DNA, 651 bp, Homo sapiens
ccatgatcaagtgggcttcatccctgggatgcaagcctggttcaacatatgcaaatcaataaatgtaatccatcacataaacagaacctatgacaacacccacatgattgtctcaacagatgcagaaaaggccttcgacaaaattcaacagccattcatgctaaaaactcccaataaactaggtattgaaggaatgtatctcgaaataataagagctatttatgataaactcacagctaatatcatactgaatggggcaaaaactgcaagcattccctttgaaaaccagcacaagacagggatgccctctctcaccactcctattcaacatagtgttggaagttctggccagggcaatcaggcaagagaargaaataaagggtattcaaataggaaaacaggaagtcaagttgtccctgtttgcagatgacatgattgtatatttagaaaaccccattgtctcagctcaaaatctccttaagctgataagcaacttcagcaaagtctcaggatacaaaatcaatgtgcaaaaatcacaggcattcctatacaccaagaacagaaacagagagccaaatcatgagtgaactcccattcacaattgctataaagagaataaaataccgaggaataccacttacaagggatgtg

SEQ ID NO: 863660 - DNA, 632 bp, Homo sapiens
taattggataggcagtcacatgcccaaaatcgggtcaatcacggtggccaggcagattgcagtgatttgtcatatgctctatctctaggactaagatggaatcagctttcctggaggaacatgcatccctaaccacgattgggagctctcaggaagagagaactgtctgagaaatgggaggatggacaagaaagctaccaaaaayattgactacagttgaggaaggtgaactggagaaaaatctgaattatagaagactttcaacctacacttcttttaaaatatcctatactgcagattcttttttcacatacttgcagtaattcaaattaggccaatgaagtgctgacaggtgctcccttgaatgaaaagatttgattgattggcaattagcctctcaattatatgtacacacactgatctttttttttaagtaggtactttaaaagagtttgctctttgaaggcaagtatatcgtaaagcacattttgtaaagtgcagttcatgtttatgtgtttgaaatcttgaaatcactggggtagaaatggggaatgaatggcaatgaaagccctgaattgagcaggaaatggggcaggaaagagatgcactgctacagcccttccttcttcttg

SEQ ID NO: 863661 - DNA, 632 bp, Homo sapiens
taattggataggcagtcacatgcccaaaatcgggtcaatcacggtggccaggcagattgcagtgatttgtcatatgctctatctctaggactaagatggaatcagctttcctggaggaacatgcatccctaaccacgattgggagctctcaggaagagagaactgtctgagaaatgggaggatggacaagaaagctaccaaaaacattgactacagttgaggaaggtgaactggagaaaaatctgaattatagaagactttcaacctacacttcttttaaaatatcctatactgcagattcttttttcacatacttgcagtaattcaaattaggccaatgaagtgctgacaggtgctcccttgaatgaaaagatttgattgattggcaattagcctctcaattatatgtacacacactgatctttttttttaagtaggtactttaaaagagttygctctttgaaggcaagtatatcgtaaagcacattttgtaaagtgcagttcatgtttatgtgtttgaaatcttgaaatcactggggtagaaatggggaatgaatggcaatgaaagccctgaattgagcaggaaatggggcaggaaagagatgcactgctacagcccttccttcttcttg

SEQ ID NO: 863662 - DNA, 610 bp, Homo sapiens
gtgatgagggtgaagtgcaataaaaactatagtttcattatgtttatgactttcagactgtatgtcaattattttgttaccatggccaccagcggtaacagcctccatacgattgtttccccacagaggctgaacaggaggaaagggatatgaaacaggaatgaatttcccattttatgcccttttcctgtgttggaggttttggaaaggagtaaatcaagttkcaagagtcatgtagagtcctctttgaaaaagagccagagagtgggaaaaaaaaggagagaggctgtctgtcttctggttttcacttctttcaagacaactgttagagacccttaccttccaggggcagccaggaatattactacatgttaagcagttgagctacagatgtgaacgaaaagagccttctgttgcccaatcctctctccatggtttgccaacatgatgatcagccaaaactttactctctgctcttctcaagaactgccatggaaagctaaatttgtggaagagggttgatggcagctgcttaaatggtgtattatatagctgccacgtcttctgcacactccatgagccacgagggcatagcaatcaccaaagtacg

SEQ ID NO: 863663 - DNA, 616 bp, Homo sapiens
cgatctctctccttctaaagatgtatttcatctcctcttcctattcaggcaaaagattggataatagtttggtgctcccctcccctcaacaggaggacctgaattataaaatacaaactcttcacatttgcagaaagattgggggcttgcctgtaaaactttcatactgggcataaaatcctgtgtcattttctccctctctgatgctgctctttatgctgctcaaggccagcattgggcaacatcgggagaacttaacactctccctcgggaatattcatttaagtgcctttctgcatgaggtaatgattttcatgggacattagcatgtgacatactcttcacttgcccaatactcctaaactgtctaaaatacaggaatagcccttctaacacagtgttctatttaggaatttaataggtctctggttcaagatggcagcctgagcrcagaatttgacttccattttctcccaagtttatattaaaattacacacacacaaacacacaccctgtaacagagcaaagggaaaaaaatagatactattactaactattgaatttggaggactgcatgaaggacacagtgtagactttatttgattgccagagaaa

SEQ ID NO: 863664 - DNA, 567 bp, Homo sapiens
ttatgaattcactgtaactcctttcccaaagtcagactttctcaggctatacttgtgctatccgtaatcactaggtatgctttaaaaatgcctccagttggccgggtgcggtggctcatgcctgtaatcccagcactttgggaggccgaggcgggcggatcacaaggacaggagatcgagaccatcctggctaacacgatgaaactccgtctctggtaaaaatacaaaaaattagctgggcgtggtggcrggtgcctgtagtcccagccactcgggaggctgaggcaggagaatggcatgaacccgggaggcggagcttgcggtgagccgagatcacgccactgcactccagcctgggcgacagagcaagactctgtctcaaaaaaaaaaaaaaaaaaaaaaaaaattcctccagttggcatttttaagagatagccatcccgcctctccccttagcttttgggtaacactggtttttcttgctcattgttctctgatccgtattcaccctcttcctttcagataatgtcaagacaccacaaactgatatgatcttatcattacagt

SEQ ID NO: 863665 - DNA, 605 bp, Homo sapiens
agtcctgaatatccttgttaattttctgtctcattgatctatctaacattgacagtagggtgttaaagtctcccactatcattgtgtgggagtctaagtctctttgtaggtctctaagaacttgttttatgaatctaggtgctcctgtattgggtgcayatatatttaggatagttagctcttcttggtgcattgatccctttaccattatgtagtgctcttctttttattttttgatccttgttggtttaaagtctgttttatcagagactaggattgcagcccttgctttttttgctttccatttgcttggtaaatattccccatccctttattttgagcctatgtgtgtctttgcacgtgagatgggtctcctgaaaacagcacaccaatgggtcttgactctttatccaatttgccagtctgtgtcttttaattggggcatttagcccatttacatttaaggttaatattatcatgtgtgaatatgatcctgtcatcatgatgctaggtacttattttacacattagttgatgcagtttcttcatagtgtcattggtctttatattttggtgtgtttttgcagtggctggtactggtttta

SEQ ID NO: 863666 - DNA, 584 bp, Homo sapiens
tgaagctggaaaccatcattctgagcaaactatcacaaggacagaaaaccaaacacttcatattctcactcataggtgggaactgtacaatgaaaacacttggacacaggatggggaacatcacacaccagggcctatcgtggggtgaggggtgggggagggatagcattaggagataaacctaatgtaaatgaagagttaacgggtgcagcacaccaacatggcacaggtatacatacgtaacaaacctgcacattgtgcacatgtaccctagaacttaaagtataataaaaaaaataataaaaataaaaaataaaaagaaaaaatcaattatggttttatacattggaaatttagtgaagttaagtaaacaattccatttataatagtaccaaaaagaataaagtacttaggartaaatttaataaaagtaatgcaaaacctgtacactgaaaactacaaaacatcaatgaaataagttaaaaaggacttaagcatacaaaaaaaaacatgttcatggaatagaaaacaatattgttaagatggcagtactccttatgatggttagttttaggagtcaactt

SEQ ID NO: 863667 - DNA, 614 bp, Homo sapiens
cttgctaagaattctttgtttcccctaaggaatgcttttagctaatctataacctatacaaacaatgtgtatcactggcttactgtcaataaatatgtagatcaaactctgttcgtggctctcagctctgaagactgttagccccctgatcccactttgcactctatttctgtgtctttatcttcaattcctctagcaccgctgggttggggcctccatgactgaactggtcttggtagaaggtctcacttttttccccaggctggaatgcagtggcatgttcacagcacactgcagcctcaatctcctggctcaagcaatcctcccacctcagcttcctgagtagctgggaatacaggtgtgtgtcaccatrcctggctactttttgtgttttttatagagagagggctgtgccatgttgcccaggctggtctcaaactcctgggctcaagtaatccacccgccttgggctcctaaaatggtggattacaggtgtgagccactatgccggaccaactgcctaattttataaacaaaatgttctcttgaaaatctcagagctatacaatagagtagacctgttccccaaactggtgtcctgggaagagcccaga

SEQ ID NO: 863668 - DNA, 614 bp, Homo sapiens
cttgctaagaattctttgtttcccctaaggaatgcttttagctaatctataacctatacaaacaatgtgtatcactggcttactgtcaataaatatgtagatcaaactctgttcgtggctctcagctctgaagactgttagccccctgatcccactttgcactctatttctgtgtctttatcttcaattcctctagcaccgctgggttggggcctccatgactgaactggtcttggtagaaggtctcacttttttccccaggctggaatgcagtggcatgttcacagcacactgcagcctcaatctcctggctcaagcaatcctcccacctcagcttcctgagtagctgggaatacaggtgtgtgtcaccatacctggctactttttgtgttttttatakagagagggctgtgccatgttgcccaggctggtctcaaactcctgggctcaagtaatccacccgccttgggctcctaaaatggtggattacaggtgtgagccactatgccggaccaactgcctaattttataaacaaaatgttctcttgaaaatctcagagctatacaatagagtagacctgttccccaaactggtgtcctgggaagagcccaga

SEQ ID NO: 863669 - DNA, 634 bp, Homo sapiens
tcccttttttatatattgatgtctcttttgttcctcacttttttaattactactttactttatgaaccataaatattttctactgtaccattgtatttcccatttttattatatatgtttgagttattttcttaatggctaccctggggattatcattaacatcataatttrtaacaacctatttcagattaatattttaatttcaatagtgtataaaacttgatcctatgtagctccatgccactcctcatcttaacattgttatcataacaaattacacctttatacattgtgtccccctgaacagagatttatagttagtgctttatgcatgtgccttttaaatcagatacaagaaacaaataattttaaacaaataaacaaaagtatttatactgtcttttatatttacttatgtagttacttttaccaatgctctttatttatttgaattatcatttagtgatcttttgcttcagcctgaagaactctctttagtattttttggaaggctggaatgtcttcatttcttattcacttttgaaaagggtagctttgccttatctagaattgttgattgatttttttctttcagtatttttaatatggcatgccactacattcccatgtttg

SEQ ID NO: 863670 - DNA, 608 bp, Homo sapiens
cttatttcctaatactggcagtgtctgtattactccaggttggggtattaattggagaggtacagattggggggtgggtagcccagttagggggcagttgcaatatgttaagggaagaattgcatgcaggggtcagggtctgtgagaaaaggaatgggggttgggctcttgctaaatgggtgaccagggtcattggactctgggctgcttatgttgaagackggaagggtggtgctttaatgcctaactggcctgccataaagattcttctacggagactcagaggagaccacccagtggagaagaccggggccaatccactttcccattccttcaaaatgtaagccccaccctctgaaatcatgttcctttgtcaccaccaagctcatactctcagctttgtaatttccttcaagaaaacactggaagtcaggttttgtacaaaaatatatttatttggtgtaatagttacaaaatattcatttccacaataatattttagcaatgcattggaatgttaaaaaaaattctttgtattaatgattcttgcaaagaccctcaaaacatcccaggggtagaactgtggttcaagaggaaaagcaatttcc

SEQ ID NO: 863671 - DNA, 618 bp, Homo sapiens
catagacagcatgtagtgctgcagaagaaatgccagtgtcatactcacagagtgcttactctgccaggaatattctcagacctttacaaatattaactctgtaaattccccaactttatctagtagggattgctaattttcatgttatagatcaggcaactgaggcacagaagggttaaatagcctgctcaaggtcccctcgagcacagaacccaggcagccctgtccccagtgggctgccacctctctgacatactgctggaaggaaacgtgtacaagtcctccaactagttgcctgcttgggtcctctctctgtcctcagcatcttccaaatgggcagacagmtaaaggagaatctagaaacattcctcatggctaagtcattatgagttaggaggctgttgctagcatagcaggcagcagtggacaagaagttcatccctggttatggcagctattctcctggcttccttcttaatttccaagggacatgagtaagcagtggaggagtatttcgggaattggaaagcctgacttcattcctcagttgtgccttagatttcctcagaaactacagaagcacactgataaaaacccaaagaccttagaattcatttc

SEQ ID NO: 863672 - DNA, 744 bp, Homo sapiens
tgtgtccatatgtacgccatgtttagcttctacttgtaagtgagaatgtgcagtatctggttttctgtccctgcgttagtttgccaaggataatggccaacaatgttgctgcaaagggcatgatctcattctttttatggccgcatagtcttccatggtatayatgtaccacatttgtaccacaatggtactacatgtgccacaatagtagaccacagtctaccattgatgggcatttaggttgattctatgtctttgctattgtgaatagtgctgtgatgaacatacacatgcatgtgtctttatggtagaaggatttatcttcctttgggcatatactcaatgatgggattgctgtgtcaaatggtaattctgttttaaattctttgagaaattgccaaactgatttccacaattgctgaagtaatttacattcccaccagcagtgcataagcattcccttttctccacaacctcgccagaatctgttattttttttttgactttttgataatattcattctgactgatgtgagatagtatctcattgtggttttgatttatatttctctcgtgatcagtgatgttgggcatttttttcatatgctcattggctacatgaatgtcttcttttgaaaagttcctgttcatgtccttgcctgctttgtaatggggttgtttattctttgcttgtttaagtttcttgtagtttctggatattagacatttgtcagatgcagtttg

SEQ ID NO: 863673 - DNA, 625 bp, Homo sapiens
tgaagctatacttgagaaaaattcagattataaaacagttttgtttcttcaattgaatccttcatattttatctttctccttcaacaaagggtaggatattcgctgtacagttcacaaccattcattaagaattatcaagcaagtattatgcgttaagtacttgcacttgggatatgacagtaataaaacagaccataactttttccctcrttgagcttgcatcctcacagagagagggtaacaagaacatacaaatagatatagatatcaagttaagtcatatagagattctacacaaaaatataaatagggaaggggtgtgagcagcaaaacaggaaaggcattgtgattttagggtggtcaaggaaatgtcaaagagaaggtgggacactctgggaagggtcatcccactgagtgaggcaatctctgcagtggttgacaactgaacatggctcaccaagagcactcccagccacactggcaatgtctttcgttaaagagaaatccaagtccaccatgtgctccaatattctcaaacaatgaaatgaccagaatgagttatttacctgtgatttagttattaatctccacgtataggtggttacaccccatgatagcaaaccc

SEQ ID NO: 863674 - DNA, 612 bp, Homo sapiens
ccagtgatcaaacattgctaaatctcaattttcagtgagcaagtcccatgtcagtctctctctaaacagccttattgacaagtcagttgcttaagtcagaattaggaacccacaattgccaagcccctccttccttctccttttcccccatgcaatcaatcatcaagtgaagtattcccaattatacttatttaatgttcattaactccataatcctctccaccaccagtcagtaccttatttgggggcctcactcatcttgtttaaattatagaggggtcccatgatcctgtagttccctagagcattcctccatcttcagagccagggtggagaattgatttggatcttagctctgtcagtttctaattctgtggatatattcatttgttaactcaagagaatattacaataaacaatttcgacaatgctgtgaacatacttaccatsatgactggcataagctccacaaatgtttaacaaatttaagttacatctagacctcactgtggaatgcagattcgtgtggttgttgagcacttgaaatgtggcttttccaaattgagattcattttaagattaaaatgtataccagatctcaaagacttcttg

SEQ ID NO: 863675 - DNA, 597 bp, Homo sapiens
ggcacctacaaagaaacaaatggatcttgagacacaacctaaaaaccaagcactaatttctccaatatatgtaatacagccggtgaaatggcccctcaaatgccatacctgtgttttcttggtctattaattcatttgataggtacattcttggggtaaatatttgagcaacttttttttcttttttttyggagacaagatcttcctctgtcaggggtgaagtggtgcaatcatagctcactgcagcgtcaaactcctgagctcaagtgatcctcctgcctcagcctccctggtagctgggcctacaggtgtgtatcaccacattcagctaattttttaaaatgttttatagagatgggtcttaccatgttgctcaggttggtctcaaactcctggcctcaagccatcctctcaccttggcctcccaaagtgctggggttacaggtgtaggccaccacaccttattttccttaatttttgtcttcagctatttagttattaattccttccagttttctaagttttgtttaatatataaatatagatttcctacaactataaatgtagaaatacttctaatgcagaaaatttaatcta

SEQ ID NO: 863676 - DNA, 610 bp, Homo sapiens
cttcacccttttccctcctaaacatctacccggccaaagacgtggcctctcctggatttggccagggaaagaagaattcctatggggaactggaacatctggcccctgacttctgatttctcccaaatctttcttagggaggcagtgggagcttaggcagtgctgggrctgagcaggagggaaaggggagaagcccagcctctggggcaggtcagggatcatgtccacagtggtggcgctctgtggtggctctctttcagatgccatcaactgatggggctctggaaatctggcaggcggcagctttgcttctctgcctggagtatcagtgccagctccatgagtggggaagccttctgcctcaggggtgcaaaagttgaaaagtggctgacccagttccccctacccattcttctttctctgccctggactgactcaggagctcatgggaaggtagcctggtggagtgggtctcctgggtccggattcactcttctagcagttgacatcttacaagttgcctcattctaagcctcaatctccccgtctgtaaaatggggatcctgacaccttcacagcagtgagggagaaatgtgatacaatgggtgac

SEQ ID NO: 863677 - DNA, 590 bp, Homo sapiens
gtgagtctcatcttggatatttttgcctccctgacaatgtttggagaagcaggtggagaggagaaagatggaaagggtctgtgaatgagtacaagagggagaatcatgcatgaaaagtgcctactctgttctaggcactgtgcacagtgctttaaatgccctgacccatttcatcctttaacgacgcatagatactatcattaacacttttacaggcaggaacattgaggttaggtaatttacctaaggccacatagctagcaagctgacacttaagtcagctgtgtctgaggtttaattctgtcttctgcaggtaattgtgtgggctgctgacagggccctggagagtgtcagaaagctcacagcytctgcaggagagaggagcttcccctctctgggcctccatctcctccagtgcagtgaatcaaatgagcaccagcaacatctccggagatggggtttggagggctccctagagaacagaaatagtgcaggggttttgagggactgttgtgccagccagggccaagtcaaagctgtcactcacactgactcattagccctaagttcgtctttggggcatgaggtac

SEQ ID NO: 863678 - DNA, 666 bp, Homo sapiens
tattgaaaatcaaatgaacatataaatgtgggtttatttctgggctccctattatctcccatgaaattatatctccctttatactaccaacctgtcttggtgacagtatactagctttacaacaagacttgaagtcttgttaagtcctccaactttgtttttctttgtcaagtttgccttgaatatcctaggttctttgcattttcatttccattttagaatgggcctatgaatttctacaaataaagcctgatggaaattgggattgagattatcttgaatccatagaattaacaggggagttattgattggggagaattaacatcttaacaacattgagttttctagtacagaagcattcatttaagtcttccttaattaatctcggtaattcttttagttttcagtatgtaagtattgccaatcttttgctaaatttattcctaagtattttttttttgyctgattgtgcagagaatttttgaaaatttcattttcaagtagtttgctgctggtatatggaaacataattgatttatgtgtaatgcccatttatcctgggactttgctaaattcacttattagttctaattgctcttttgtatatcacttaggattttctacataaacaatcagtcatctgtgcatgtgccttttgttccttt

SEQ ID NO: 863679 - DNA, 541 bp, Homo sapiens
tctattttaaacacttcagatgtgttacggaattcaatcctcacaataatgaggtaagcacaattattagccttattttgcagatgaggaaaccaaggcacagagagattaacacatttaccaaggtcacacagtaaatggcagagtacaagccaggcatcttgactgagtccaatccaaattctgctgtgggtttactattgcagaataattataactaccacttacttggcatttaatacataaaagtttctgtgctaagcactttaaatacattatcccatttagatcctttcaaatttttttttataaagccagtattgatttacacttcacagatgagggaactgaggctcagagaaagttaaccttctcaaggtcwcacagcaagtaagatgcgcagctggggccggagccccggctgcctgcatccgaaacacatattcaaacccattgcattccaccgcctctaccattgcaagatctcagacttggaagagccaccttaggaagtcaacaagctcaatctcctatttgtagg

SEQ ID NO: 863680 - DNA, 599 bp, Homo sapiens
ggacttcttcagaacagagggtggactttgggagaggaccatgcacaggtcctcagtatcctggactcgagactcggggtttagagggatagatgaccatggactgggctcagcagggaagacctggtcaaggggagagagagaaggggaggcacagtgggaggaagtctcaggtctgtgaccttggcaatggacaatgtttcccctgctaaggccagggcagctagtggtggggtgttggggtggagagttttygccagagtaccatgaagctacgcccctgacccacagtcccttggccattgcagggcactctgccctaatcctgccccctccatgcctgcctttggctcacaataagcatgcacatacccccacaagtacaaaggttcggcctcttggctcaagctgcagtggatctttgattttgatcccggccttactgaggtctggaagatgaggggctgtccagggaaaaggtctgggttggaaagagaagccagctaggaagggagggagaagaaacaagggcaaatcctgtgttcctgagaaagtcactctccaatctaggacttaatgcctcattcatagaaatcaaa

SEQ ID NO: 863681 - DNA, 646 bp, Homo sapiens
gtgggaggaagtctcaggtctgtgaccttggcaatggacaatgtttcccctgctaaggccagggcagctagtggtggggtgttggggtggagagtttttgccagagtaccatgaagctacgcccctgacccacagtcccttggccattgcagggcactctgccctaatcctgccccctccaygcctgcctttggctcacaataagcatgcacatacccccacaagtacaaaggttcggcctcttggctcaagctgcagtggatctttgattttgatcccggccttactgaggtctggaagatgaggggctgtccagggaaaaggtctgggttggaaagagaagccagctaggaagggagggagaagaaacaagggcaaatcctgtgttcctgagaaagtcactctccaatctaggacttaatgcctcattcatagaaatcaaaccttccctgtttgcccctcaggggttacaaggatcaaagtagagactggacgtaaaagcactgggtagcaggcaagaggcaaaatcttatattgagtgcccaggaagggctcaggtcttggaggcgggcagacagtcagacagacttcagctccaagtctgccctgttcagactcgctgggggttcttgagcactttgcctaa

SEQ ID NO: 863682 - DNA, 646 bp, Homo sapiens
gtgggaggaagtctcaggtctgtgaccttggcaatggacaatgtttcccctgctaaggccagggcagctagtggtggggtgttggggtggagagtttttgccagagtaccatgaagctacgcccctgacccacagtcccttggccattgcagggcactctgccctaatcctgccccctccatgcctgcctttggctcacaataagcatgcacatacccccacaagtacaaaggttcggcctcttggctcaagctgcagtggatctttgattttgatcccggccttactgaggtctggaagatgaggggctgtccagggaaaaggtctgggttggaaagagaagccagctaggaagggagggagaagaaacaagggcaaatcctgtgttcctgagaaagtcactctccaatctaggacttaatgcctcattcatagaaatcaaaccttccctstttgcccctcaggggttacaaggatcaaagtagagactggacgtaaaagcactgggtagcaggcaagaggcaaaatcttatattgagtgcccaggaagggctcaggtcttggaggcgggcagacagtcagacagacttcagctccaagtctgccctgttcagactcgctgggggttcttgagcactttgcctaa

SEQ ID NO: 863683 - DNA, 611 bp, Homo sapiens
cccagtatgagacatgggaaggactttgacaaaatggagtgtgtcaaggggatggccaggaggggccctgaaaccatcatatttggaagaagggcctggggccagcactgaacattggggtttagagtcaaggatttggaactccttatctgggaggctgcccagtttattttaattgcttattttttaaatttttgagacagggtctcgatctgtctcccaggctagagtgcagcgacacaatcaaggctcactgcagcctccacctcctgggctcaagtgatcctcccacctcagcctcctgagtagstgggacttcaggcacaggcacacaccaccacgcccggctatttttttttttttttttttgagatggagtctagctctgttgcccaagctggagtgcaatggcacgatcttggctcactgcaacctccgtctcctgggttcaagcaattctcctgtctcagcctcccaagtagctgggattacaggcatgtgtcaccattcctggctaatttttgtatttttagtagagacagggtttcaccatgttggacatgctggtattgaactcctgacctcaggcaatccgcctgcctcagcctccc

SEQ ID NO: 863684 - DNA, 627 bp, Homo sapiens
ttctctgagatcaggtccaccaaggccctctcaaaacaggcccccacccaccagcaagcccaccaagtgtccccgggccctccagtctctgatgcaggccttccaggggaggaattccctacctgtgaagtgctgagtccgtttttagacagctgtgcttgaggaggcatcttctctacactgcgcagacacccagctagagactgcagaaattctggaaatagagtcccttattctggggtgcctggcctgatgtggaagatgtagcctccatgtgtgtgggtggaaggagtgcttggtgtcctggagtgcggagacagacagactgcgctccagtccagatgcaggtggccctggttactaaccrtgtgccctgggctactcacttcaccccttggcctcttcctctggaaaatgggactggtgatcatgcaccttcatttcagggttgatggcaatgtgatatggtgatcatgaacccaaacttggggtgaaggaggctaaagaactcccgtgttctaattcacactgccctactttctagctgtgtagccttatgcaagttacttaacccctctcagccactgtttctttgtctataaaatggtgatagagatagtcccttac

SEQ ID NO: 863685 - DNA, 624 bp, Homo sapiens
gaggacactaaagtttaactccatgtgtttctcattggggtgggaattcatggagggcagagtgaaatctggctcccatgggcagcccccacagcccgcgtgcctcatagggatgggactgtgctgtctgcatggaacagatcattctccccactccccgtgttgccttatcttgaagtggctcccctcctgccaccgaagcttgagccccgggatcgccttacagtgtgattctcagaatctcccagccaggaatagcctttcctggatttctctctctccactgtccagatggctgcagcactgggagcaggaagccaggtggcccaaacacatgtgtgtgtgtgtgtgtgtgtatgtgcrtgtgcacgtgtgtgtgtgtgtatttcagtgttggcttaattctttctttgccacagcctgattcctttattggcatgtctctctgtgcccccagcccaggctggatctctgtgtgttggagatgggagctgaggggaggaagtaggctccgtgttcgcatccttggcaggcttaggacattgggttcgggaatcacctccacatttctcagagctcagagtttattcaaactaagcggtgtcttgccaggatgtacacaaa

SEQ ID NO: 863686 - DNA, 632 bp, Homo sapiens
cttcccaacggattgcttttttttttttttttttttttttttttttttttcttaatttccagttccgccttgggacgagtccctggctgggggaaccgcatcaggcctgacacccatcccattcccccctaaacccagaacgagatccaacctcactccccagccccttcccgacctcgccgctcaggctgtgatgggaaggtccctgggagtggggaggagggcaaatttaaacccggaggggatcctgtagcccagttctcctcggttccctaaacctccaggaaagcggagaaagtcacattgtggtggcagcagcggkttttttttttaatctgttaataaaacgcaagtgaatcaaatccgccctaagggaatttggggggcgcggcgaggcagaggccatggtgtttgcagaagttggaaatttaataagaaggaaaaataaaaatagccactgtgctggagagagagagagagagaaggttgggagaagcaggcaagtgtgggactcctagctgggtggaaacgtgcagagggggctggggaaggcgagggcaccactagtccggaggagcaagggagacactgctggggataccaggaggggagtctttggggtgtcaccagaa

SEQ ID NO: 863687 - DNA, 543 bp, Homo sapiens
ccccttccacctgcagggccagggaggctcgttgagatttttttttttttttttttttttttgagacagagtctcgctctgttgcccaggctggagtgcagtggcgcaatctcagctcgctgtaagctccgcctcccaggttcatgccattctcctgcctcagcctcccgagtggctgggactacaggcgcccgccaccacacccggctaattttttgtgtttttagtagagacagggtttcaccgtgttagccagaatggtctcaatctcctgacctcgtgatccacccgcctcggcctcccacagtgctgggattacaggkgggagcccccatgcccggccgacccaccctgagagcatgacctctcagttgtgctggggatgccacaggggcctcagggctgtgtaccctgcggtgtgaggcgtttgcttctcttgagaggtgtcctccttcccccaggatcctccttcccctggggtccacttgttcgtagcttttggtggcttccagaatggtttctaatcatttgtctgatgaggct

SEQ ID NO: 863688 - DNA, 646 bp, Homo sapiens
atacatttcataatagtctttttcctggaagtaatacacattgcttccgcttgagttttatcgtccaaagcacatcccaagactctctcctcaactttaacctcaccaagtgcctggaaggagaaccaggatattaacaaacagctctgctgactaaaagccattgctagttgtacgaccttagtgtaaaaagtaaagtagaggttcctcttcaaaggctttcctccccatctaattaggaataaatagtaacttctcttagaagcaaaatttattcaaagacctgtgstaacattcttaaatatctgctagccataataaagaaatcaatgtactttacgttcttagcccccacaatttagcctaaatatttgccctggcatgcttatactggtccaagcaagcattaggtcatagcctgttcctcttccttatttgaacatgtttttacctttctcagcattccacaagttacttcctccttcctttgttttcctctgcctttgcctcttttaaaatgttctaagttgctagccaatcaggacaaatatagaatgtgaggtcccattccagccaatggaaaccggacacagcagtagagtggatgcatcaggttataaatgaccctgtctcctttgttcggtgt

SEQ ID NO: 863689 - DNA, 636 bp, Homo sapiens
tttttcacactttaatatctctgggtttaccagctcatgaattgggatgacttgcatttgatagtgtgtgactctttattggaagtactgttgctttcttcacagtgctttaagtaaccctaaaaattgatggcctctcaaacttgatgaaatatggttctttatttacccactctctatgtttagggggttataaccccttttaaaagtcttactgccattttggcaaggaagcaggggttaacacaagggttcagtgcatcttctttatttggcagtcagatcatcttttaaaataacttggcaagctcagggcaaagaaggacaggtcagagcaggagtgaatctaaaacgccccaggtctttgtgacatctgctgaacccctgagctgkaatattctagtggcataggttggtccctctgctctccttctaagcataaccatatcctacaccaagatgctgatcatgttcctgtttagaaagatttaaagaatgtctgaagtcccatacttcaggtttcggtcaactttcctgctgtgtcctctatttctgaaatttgggttcatacctagttctattttgagcaaatccctgggtcaataatacagagagaagtccttctctaggcctggg

SEQ ID NO: 863690 - DNA, 670 bp, Homo sapiens
agggccagggcagcacctcagggttacgtctgattctacagacacagcctcacaattaactgaaagtctccctttttaattctttttcatctccacctctgtttttacggtttccaatttttggaagaagtactccacgataatgtgggtgcagttaatcccccacctcggcaagtaaatttaattacatttaacatttcaacactgaatatagtatctcttgaagagattccattaatgctgatgaaaattaccagaaattggttcagaagagcatgggggcttgaaatgaactgacgcagataaaattcatgaagaaggaacgtgtgactaatgcgaaagctatgcaataaayaaccatcttcagagttgctctccttgtaggaacacgtatgcaaatgttactctatacatgcaaaacagtagtggaggcggaaaggatgcagaaaggctctaataatcgttttgccttgtactaaaacaattagacagttgaccaacacttaaaattagtttttgttctatatatacatatatatatatttttttggggggggggaggaggaagctagtactgtttaaagtcaccgactaactcaatattttttattcctagaggaagaaacgcccataatgttgaaaaatatttacacactggagaagatcacaa

SEQ ID NO: 863691 - DNA, 627 bp, Homo sapiens
ataattttaatgtcacagttgcagtggctctcaattttcaactttgctgcccattgctggtgtcaccgtcaggacctcacgtgctgcaccaggactctcaaaacatcttgcctgtctgtaagtatccaagattaccctgccacattcctgctttgacagtgaaatagactagaggcctcaaaggaattcagagtaaatggctaattatagagtttgctacattcagccttattatcatattattttaatgtaaaatgcaaaactcaggatgattattttccctaaaaataaaaggcaaggctatatgacagagcttgagatwatgataataaacagttcagagaagtctattatacagtccaacaaattactagaagaatctcatttttattatcattctacaaatagttattaaatacctattttgttccaggaactcttctgaagggcaacgacagatgtggtcccaccctcacacagcttaccatccagttttattttggaaacactccatatttgatatctgcttctctttcttccaaaagctcaattttatctcttttaaacaaatcagcatatttattcctagagttacttgcatatagcaaacatttaatcattgcctta

SEQ ID NO: 863692 - DNA, 601 bp, Homo sapiens
ctgtaactaaagaatatgtacacaaaacttcctaaaatttgttcagaaattatttgtaagctcttactatacactttctttaaatgtatagcgtatcaacagttagctgttacattctatatcaacaacattttttgcagaaacattaactttcattttccatttgaattcacaattttcgggctgaatkactctcctctcccaatttctcccctggcttatttggtattctccatatcatgtaatggcatcattcacccagtcaccagggctagcacctgagtgctatacacaatattttattttccctccagtctcttgacttcctcaaaaccactgatagtgaataggcagactattcatcttgcttggaactacttcagttaaagactgtcacaatagctttgagtctctaaaggaaagggcatgggctttgtgatagtctgtttgtgctgctccgacaatgcaccagaggctgggtagtctataaagaatggaaatttatttctagatttgtttccacagttctggaagctaggaagttcaagatcaaggtgtcagtaggttcagtgtctggagaaggcctgttcctcagagacgg

SEQ ID NO: 863693 - DNA, 585 bp, Homo sapiens
agcaggtagaaacgtggttaccaaggctgggagaagggagaaggaaggggaaaggggagatgtcgatcaaaggggaaaggggagatgtcgatcaaagggtacaaagtttcagttacactgcaggcataagtgtttgtcatctactgcactgcacaatgaccacagttaagactaatgtatatatacagatatatattttttgagacagggtctcactttgtcacccaggctggagtgcagtggcataaacatggctcactgtagcctcaacctcccaggctcaagtgatccttccacttgagccctcacaagtagytggggctacaggcacatgctctaccaacttaatttttttattttttgtacagagtgggtttcaccatgttgcccatgctggtcttgaactcctgagctcaaaggatctgcctgcctcgtcctcccaagttgctgggattacaagcgtgagccactgtgcctggccaatcatgtatattttaaaatcgcaaaaagaatagatttgtgacattctctctacaggaaatatgataagttgttgaggtgatggatatgttgattagcttgttt

SEQ ID NO: 863694 - DNA, 609 bp, Homo sapiens
tctgtgctcatcaatagtctttttccaggatctgtccagcttttgcaggagccaaattgatgagttaaatggagacataacagggatcacccttgctgtattcttatgttggatctttaatggtggcacaagtcttttctgtctctcccaggatacaatattgttttttayttactattttggcagaggggtgagagggaatttcagaggtttccacttggcctttctccatgatgacagtttttttctcacattgcagaaacccaataagggggttactacaattactaaggacgtcagttccaattatgtacttggagattgtagaaatgacctttgagtagattcatggacctagcagaccactgaaaggtggactttagccacaatttctaatttggcctaactctcatagccctctgtgctccaaagctgggctatgatggatctttggatttttattcgggtcaatcaatgtcaattcgggccctttattaagtagtctttgaaatggcttgttattcttttttcctcagtataaagaagcctaagtaaatggctacaggtccctttgaggaagattgagggcgttttcacagcatatgccat

SEQ ID NO: 863695 - DNA, 604 bp, Homo sapiens
tcctgagaagtaaatgtgcaacctgataagaaggtaatcgtagctaaaataatagcaaggaagtcagaccacacgaaacgtgtggttgcctaaagaaactaaaggtaacatcttagcatatgtccttgagttgtttttcagaaacccagacccccaccaaatggacttgctggcacgcacacctcggataagagggaactgagaactcaactctgctcatctttccccattgcaccccgacacgccccatcctctcgtggctcttgaactcaccgtgtcctcgcaccctgtgaccaaccttggaaggcccttgctcagttctccccttcccagmccagattagggatcgctttgaccaggaagcctttttggacacaccaggcacagccaggaatcccttctctgtttaacctgtgcacctaggaccatctacatggaatcatcattgtcatcaatttgttagtctgcacaagactacatgcatcttaacacagggtccttctctctcccctgcacccagtacaggctccacacacagtaatccattaataaaaactgtcataagggaacacttaaataaaagaaatttcagtacaaaacagat

SEQ ID NO: 863696 - DNA, 613 bp, Homo sapiens
aacagttaatttagtcttcgtaggagagtcaaaaaggccccaaaatagaaaacacattggaattgggtcttgaaggatgtgtattagcgtgtgaagcatcaaaatgaaggaagagcattccaagaataaacaacataaatgaaggtatggaaatgagaaatgtcatgttacattcaagaaactgctacagtcttatactgctaaaatgtagagtatttgtggggtgggaaggtggtgtctgaaggtgattcttaggcttctagatggttccacatgggtggatgatagtaccagtaaccaagacatgaaacacagagaaacaagaacatttggaggagcaaataatgtgttggcttcttgacaggtttacttcctgagcatcgggtctytgtgggcttcatctagaaacgtttgttaggaagttccaaaataaaaacccagctcacgtaaggggctgggaccgactgtacggcatgatggtgggtggttgtgacaccaaggagtagacaacataaatcacacagtgaccatatgatcttagattgttaaccagaaacgtcaatattgaaagttcaggcagaggaagagaagcacaaaagacgagaacttgaaa

SEQ ID NO: 863697 - DNA, 607 bp, Homo sapiens
atttttgccaccaaatgcctctcattagaaaatctctgcactcatctcagcaggtgaagtgatgtatcccctcaacggcgtgctctgccaagcaggtaaagattattactacaagcagggggtgtgggaaggtgcatactgagcagactgtgttccaagcgcttgccaagcagttcttgagggtttttttaatgtctgtgttcgcaggtgctgagctgaggccctgaaggaacagaaggcctctctctacacaccccaggaaacaggccagatgttcagggagaaatagcaatgggctttcagggaytggagccaagagagctgattttgttgtagtgtctgttcctgctgtcctccagccccagccatggggcaatgataaagagggctgtaccaaggatgcaaccccgcctccgatgattctagagtttcacaaaataaatcaggctgcagactcaacaggaatcagtgtacccagtatatgcaaaaccctcagctcttggctcgacctgcaagtgtagctggggctagggtgaggtctcctcctcctccctggctcacccacctagttagtctacattcccagcctgccttgcagctgggcatg

SEQ ID NO: 863698 - DNA, 668 bp, Homo sapiens
cctcatcagaacctcagggaccctccacgatgcgggatgatctcccttcatcagaactgcagggaccctcaaccatgcaggatgatctctcttcatcagaacctcggggaccctccaccatgcgggatgatctcccttcatcagaaccttggggaccttccaccatgcagatagtctcccttcatcagaatcttggggacmttctactatgcggatggtctcccttcatcagaacctcagacttgactcagaaggtcctggaccagccttcttagggaatcagagtatactctgagcttgtggttaatgggctccttctctcctcaccctcagccctgctccacagcttccatcatccacactttgggtcgatcagcaggcttctgacctggccctggaagacccacagccctgaagtacaatgtcaacaaccagaccaagtgtagctaggtaggtgacactgacaccaatgtcctcgagtccagatctttcttgactgctgcgcaacaagcttacagaaaccatgcctccaaacactggcagtcaggactctgacttctccatggacccctgctaccccctgaaccaacggagcacttgggctgctgctctaagccatgtagcctggcttgtgggcacacacaacgtcctgcaacacctgggactca

SEQ ID NO: 863699 - DNA, 540 bp, Homo sapiens
tccgtagctgagggtgttggctcaatgcgattctgctctctggaacatattcttagtaagctatctatagaatctagaaagcctttgccaaagcccaaataagtccatcctaagtgggaagagaagctcaccaagcccccactgactctgtagggagtaagcacatgattcttccaagtgcaaaattatcaaaacctggcaactcaacctgtgttgggagtcgcatgattcaaagcaaaggaactgagatgggcaatgcactgagtggcttcagaatttccaccactgcccaaggaggtcaggcccacagccagcatcactcacaaagcatccatagggctcatattccctggctggggcccactgcataatccartcacaaaagaaagagttgggggtgtagaggatcagtcttctcccaaacagggttttaaaaactgaagtgagaaagaattagaggctgtcaccttctttggcccacttaatcctaacagcagcccccaaagcccattattttactgtttgcatgtgaaaaatgag

SEQ ID NO: 863700 - DNA, 655 bp, Homo sapiens
gttaaattttctttagaaatttgctagaatatttgagtcacaccatgtggactcaagagattgcggggggaggacagctttttattacatactacactttcttagtatagagttataaggctattcaaattatctacttcacattggatgagttttggtagtttatgtggtttttttttttggttttgttttgttktttttttttttttgagacggagtctcactctgtcgcccaggctggagtgcagtggcacaatctccgctcactccaagctccacctcccaggttcacgccatactcctgcctcagcctcctgagtagctgggactacaggcgcccgccaccacacccggtaatttttttgtatttttagtagagacagggtttcaccatgttcgccaggatggtctcaatctcctgacctcgtgatctgcccgcctcggcctcccaaagtgctgggattatgggcgtgagccaggccagtagtttatgctttttaagaaaatagcccatttcatctaagtcatcaaatatatctgtgtagcacggttcacagtattcccttattatccttttgatatctgcatggtctgtggtgatatcccctgttttattcctgatattcataatttgtgtcttgtgttcaatctattg

SEQ ID NO: 863701 - DNA, 580 bp, Homo sapiens
acatcatattggaagtcctagccagtgcaataaggcaagaaaagagggagaaagtgggggatgaaggaaagaagagagagatagagagaggtcaagcatattagaaagaaaaattaaaactggtcttattcataagttacatgattgtctatgtagaaaatccaaggaatctacaaaaaaaaaactcctagaactaatgagcaagtttagtaaggtcagaggatctaagattaacacacacamaaaaataatttttctatatactaacagtggacaattggaaactaaaatttcaaaaacaataccatttacaatacactccctccccatgaaatacataaacatctagtgaaacatatacaggatttgagtgctgagaactataaaatactgttgaagaaaccaaagaagacataaataaaaggagagacatattgtggtccagggctggaagactcaatatggtaaagacatcaattatccagaaactgacctactgatataacacaattctgatcaacttctaacataaatcttggtaaatatatgcaagctgattttgaaatgtatgtggaatggc

SEQ ID NO: 863702 - DNA, 606 bp, Homo sapiens
tacttatcaaacatgaagatttttttagttcatgaattgggtaattatctgtacagtgcctattatgtgtcttgaactatgttagttgttctttcctgagccttatccatcattgttatttctcactgaaaacacggaaggtgatacagatcattctgagaaaccattaacatcctatgctcctacatggaatagaaaaagaggagccaagtttcaaaagctatgcatgtagaattagggattcaccaccaccaccaagcagtgaaaaacattctgagtttgatgacaggagggaaagagggaagaagggaaggagggaaggaaggaaagagggagggagggagggagggaaggagggagggagagaagtatgctaaattacgcggcaagagccaagccaaaaacattcccaatasagcaacatgccaataactggccaccatcagaaaccaaaagcaccacagccaattgaagaaatattttctgaacattggtaaagttttctgagtttttaaaaacctctgaatagattttactttaaagaaatctgctaactgaccaacttttaaatatgtcttctgacagcaaagtatatggtcatataat

SEQ ID NO: 863703 - DNA, 629 bp, Homo sapiens
cctcaagtgatctgcctgccttggcctcccaaagtgctgagattacaggcatgagccactgtgaccggccaaaattttttatttttttattattgcattcaaataagtatagcattaaaaatataacaaatttctgaggttaaacctaagagaagcctgtagcaactcaacccccgctttttcattttgtttgcagttgcgggtggggagaaggtagygattttgcacagaatgggaactggcatccaaggtttttgctttttctgcgtcatttatattctgatgctttcatatatgggtgattacactttaaagagaaaagacctcacactcttctgatgatcaaaaatttcacactaccaaagggatacatcagggagcagggatggttaccatctttcccttacagaaaaagaatgcagcagcgggtcctgagatgaactaggactgtggtcctggcgcaacagcatgggcgtcaccagggagcttgttagaaatgcaaatcccgggcctcaccccagacccatctaatcggaaacgctgtgggttaggcccagcagtccatgttttaacaagtcctctaggtgactctgatgcgtactgaggtgtaagagccactgcttcagggg

SEQ ID NO: 863704 - DNA, 601 bp, Homo sapiens
gccccttcagtaccatgtagatgaagtagtagtagtaccactgacagtaagggccatctcacaccaattttttaaaaaagtacatctaaaaccacaacacagtgtcttctcacccccaccagactggctaaaatggaaaaaaaataaacaccaagtgttggcaaggatgcggagtgaccagaagtctcataccttgggagactgtctgttttgacaatcactgtggaaatttytgttggtagcaactactaatgctgagcacatgcgtaacctatgactcagccatccactccttaaacatacctaagagaaatgtgcacacagattcgccaagaggcatgtacaagaatgtagcagcgttactcttattaatcccaaactggaaagtacccaaatgcctattaagagtagataaagaaacaaattatgatatattcacacaacaaaacactgggtagcaataagaatgagaaaattatagcacacaacaggaatgaatcttgcaaacacaatgttgatctgaaaaagccaaatacaaaaaagttaatgaagtgtggttccatttatatatattaagtacatgtcattggagaccatagag

SEQ ID NO: 863705 - DNA, 643 bp, Homo sapiens
tggaaatattatctgtttcttgccagagcactctataccaaagcgtcaagatacttcaacgcacagggaatggattgttggtaagggtttactttgttttctgtcatggggttttgttataaaataccacacaaagaatgctagaaatgtggatttttgtaggtactttaagttraaaaaaaaagcctcagttatctacctattttaaatagcaaattgggctttcctactatttcctttctacaagtacttctctaagtgcagacctcatcttagcaggctattagatacataggtgaaatctatgttttgatgtgtaggatgcaagcttggaaggtacattggtccctttcacagagataatgctgcctaacacacaatcccaaacctcagtgccttctaagtataaatgttcattttccctgctggtttgacagcaggcttctctacacatcttcccattgagagacccggcctgaaggagcagctcctgtctggggcacctcatgtcctcatagtggaggacaggagttcaggggatgagtggaggcacaggttgtcctttaagctcagaatgggcaccctgccccttcaccagcgttccattggccaaagcaagtcacatggtcacacacatcgtcgt

SEQ ID NO: 863706 - DNA, 579 bp, Homo sapiens
attaccattcaggacataggcgtgggcaaggacttcatgtccaaaacaccaaaagcaatggcaaccaaagccaaaattgacaaatgggatctaattaaactaaagagcttctgcacagcaaaagaaactaccatcagagtgaacaggcaacctacaacatgggagaaaattttcgcaacctrctactcatctgacaaagggctaatatccagaatctacaatgaactcaaacaaatttacaagaaaaaaacaaacaatcccagagtcatcttttaagaatgtaattctgggccgggtgtggtggctcatgcctgtaatcccagcacttcgggaggccgaggcgggtcggatcacctgaggtcaggagtttgagaccagcctggcttacatggtgaaaccccgtctctactaaaaatacaaaaattatccgggcatggtggcgtgctcctgtaatcccagctactagggaggctgaggcaggagaatcgcttgagcctgggaagcggaggttgcaatgagccgagatcatgccattgcactccagcctgggcaacagagcaagactccatctcaaaaaaa

SEQ ID NO: 863707 - DNA, 622 bp, Homo sapiens
gataatcaaaagaagactgatactggaatgtacaacttccaagaaaaagaaagaaaggaaaataaaggagagatgaatccagtatacagcaggacaaaaaaaaagtcaatacaaagtaggacaaataggaggcacaayataatataaaaacagaccccaaaatatcagtaatcaagataaatatcaaaggtgcaaacttaccttttaaaatcagttacagattgatttaaaaattccagttatgtactgattgcacttctaacatataatgacagagagagtaaaaggatggagacctgtataccaggaagatcctaaccaagcgaaagcaaacagagctgtactaatacacaataaaattgacttgagacttatttaaatggccataattaactttcaacgtcgattgaagaagtaggaacatactcaagaagggaaaataaccattttcggtatttcctatcacttagatggtgttgcatacataataatgttcagtgattatgaatttttcatgatattgtggcaactgatttattcttttttaaccttcagtgccttgcttggatattttaaaagtcctccttgaaaaagagcatttggaaacagctatgcatttgta

SEQ ID NO: 863708 - DNA, 622 bp, Homo sapiens
gataatcaaaagaagactgatactggaatgtacaacttccaagaaaaagaaagaaaggaaaataaaggagagatgaatccagtatacagcaggacaaaaaaaaagtcaatacaaagtaggacaaataggaggcacaacataatataaaaacagaccccaaaatatcagtaatcaagataaatatcaaaggtgcaaacttaccttttaaaatcagttacagattgatttaaaaattccagttatgtactgattgcacttctaacatataatgacagagagagtaaaaggatggagacctgtataccaggmagatcctaaccaagcgaaagcaaacagagctgtactaatacacaataaaattgacttgagacttatttaaatggccataattaactttcaacgtcgattgaagaagtaggaacatactcaagaagggaaaataaccattttcggtatttcctatcacttagatggtgttgcatacataataatgttcagtgattatgaatttttcatgatattgtggcaactgatttattcttttttaaccttcagtgccttgcttggatattttaaaagtcctccttgaaaaagagcatttggaaacagctatgcatttgta

SEQ ID NO: 863709 - DNA, 634 bp, Homo sapiens
aagtattaaatgaatatgtgggacacttaagttactctgggttgtcagaagaaggctccttggaaaagcaatgtttgattatctctaaaaatgggcgtggtgtaataaatgctattttatatggctgttggggaatcagtgagaaaatgtctatcttttgttataggagacttaaacctccactgaacaccggctgggtggcttcacactgagcatcctttgctttcctcatttgtgagacaaggaggttggactaaatcagtgatttttaaccatgtgctgaagagcttcctgcactgtcccctggaagtcccgtggtgcctgggcgcagggggactggttactggttcaccaccccatgtcattaagggcttaatttcagcccgctctccactgcaccgcctgtttagattccccytggtgaaaggtccaactggcacaatacaacacaacacaatgcaacacagcacaaactggtctgtataattttaatggctcttctatgtctaaaacaattacttcaaagaataagaataaaattaccattcttcctttctgttttcatttttgaaaaacacttttgaaataggtaggattcacttctttatatgaattccaaacactgattgcacac

SEQ ID NO: 863710 - DNA, 590 bp, Homo sapiens
ctatggggagctgcaaattaaaactccaatgagatatcactatacacttaatagaatggttaaaataataccaatactaaaggcgggagagaatgcagagctagtggcaacctcagacaaggctggtgggaatgcgaaatggtacagcccttaggaaatcacgttagcaatgtcttataattctctatctatatctgtagtatcgtccagcaatctacttctaagaattatactagataaataaaaagttgagtgcaaacagaaacctatacaccaatttacgtagtagctctgttcataacagcccatgtttttcaaaccaaaatgttttcaactggtagacgtatacaaaatggaatatgaatcagcaataaaaatgaaccagttattgatacacccmgtaagttgtctgaatctcaaagttatgatactgagtgaaggaattcagtcttgaaatgattctcccgtttgccagaggctcactgttaggaaagtatacggttgggggattatataactatgaagatgttttctaggatgataaaaccatcctgttttttaatttgtgatagttacacaaatctgtacag

SEQ ID NO: 863711 - DNA, 593 bp, Homo sapiens
cactggctgttcattttgatccatgaagcctgatgtgcatcacctcagtttcttggaatttggtctccactctgagaaaaagactgtgctggcctactgagaagagatcatgtggagcaaaaattaagttttccaagctatagccattctaaccagtccaacccttgctgacccagcagctcacaagacaatgagaaaaaccagctgaaagagccayggctggcccagatttacagaaccctagacccgtggtgatggttttaagcccctatgtttttggtttcttatgcagcagagggcaacatacaactcacatacttgttacaatctattttgttattcatgaaaaatagttggaacttttattgagaaacatcaatcatctatgtaccaggcactagagtagggatttcatacggtttatcatattctcacaagaagaatttagagaatctaagtaaattgtcttacattactttcctataagtggctacatgtgaaactcaaactcaagactctagtgtccattatttttctgctgcacccttctgccccctccttgtgtgaaaataatttagagtccaggataaatt

SEQ ID NO: 863712 - DNA, 660 bp, Homo sapiens
caaaacatcctctgtcaagctatagactgcttctgacctcaggtttgccattctgagcacataacaaaaataaaacaagaaaaagcataaggtatgaaatgttattcaaaaaaagaatgatgaaacaatgaactaaagcctgggcagtaaataattctgtcttcaagatcccacatggaaaattttttagaaagacttcctacctttcctactgtttgtaatgtgcatctggaatactagagaaagggtccctaaggtttgctggaaaaataccttagcttctgagtcttagctttattactaataaacactggatttctggtagtagagaaggaaatttagtatttcatgatggtgaaagatgaaaagagaggctttatggctgtatgatttgggtagagcttttcagttaattaacgargaaatatctgaattgagtcaatgaggtacagagtttatttcatacagatacttttaaacttcataatgccatgacatacctgatttgttactaatgtccacaacttatccacgtgtttatggcaaaaaaaaagtgcacgaagaagaaaattatagtttcaaaaatttctagaatttggtttctggaagaaaatacaagtgtctgtgtgtttgtgtacatatattctagatagatgagcc

SEQ ID NO: 863713 - DNA, 641 bp, Homo sapiens
tccaatccaataaatggtttgttggaaggggggaatactgtgggcatgcatgcgcatgtgtgtgtgtgttcagttaaagatgaggtcagagagctaaaatgaggaggcataaaaaaatcggtgtagtgaaaaaggtcctgaaaactttgattaatttgcacttgtaatttaataattcagttccctttcgcaccacattagtgtctccaatggcagaaacaaaatgttctggtgcataggaaataattgacttatgaatctratgtcttcagggatttcataaggagaaaaattcagttatttttattgttttctaagacttgctggacaagttgggagtaaaattgttttaaatactgaggtattgagttttgtccatagccctgaatttagattgtgattttgcagttcattttggatagtgattggtcttacttgacgtattccttgataaacaagattcttatcttccataagaaacagtaaaattatgtgtcagaataactttctatattacttttaatactcaatataaaactagattataaaaatacacagcatgatttcaattcactgttgtttagacgtgtgctttttcaaatgctgtctacctatttctctccagaaatgttgttttccct

SEQ ID NO: 863714 - DNA, 641 bp, Homo sapiens
tccaatccaataaatggtttgttggaaggggggaatactgtgggcatgcatgcgcatgtgtgtgtgtgttcagttaaagatgaggtcagagagctaaaatgaggaggcataaaaaaatcggtgtagtgaaaaaggtcctgaaaactttgattaatttgcacttgtaatttaataattcagttccctttcgcaccacattagtgtctccaatggcagaaacaaaatgttctggtgcataggaaataattgacttatgaatctaatgtcttcagggatttcataaggagaaaaattcagttatttttattgttttctaagacttgctggacaagttgggagtaaaattgttttaaatactgaggtattgagttttgtccatagccctgaatttagattgtgattttgcagttcattttggatagtgattggtcttacttgacgtattccttgataaacaagattcttatcttccataagaaacartaaaattatgtgtcagaataactttctatattacttttaatactcaatataaaactagattataaaaatacacagcatgatttcaattcactgttgtttagacgtgtgctttttcaaatgctgtctacctatttctctccagaaatgttgttttccct

SEQ ID NO: 863715 - DNA, 499 bp, Homo sapiens
tcttatgaaagagtcttataatactcatgatccatgaaagaaaatcagaccaatatttgacattctgtattctttattacagaaagatgtagaggttagaggcattgaccaccccctccagccatgcagttgaaaatttgcatataaattttgagtgaccaaaaacataactactaatagcctactgttggccaaaagctttaatgaaattgatcaacacttattttgtatgctatctctattatatagtgtattcctataatacagtaagcyagatttttcaaatgttaagaaaatcagaagagaaaatatatttactattcatcaagtggaggtgatccattataaaggtcttcaccctcatcatcttcacactgagtaggctgagaaggtggaagaaaaggagagtttgtcttgctgtctcaggggtggcagaggcagaaaaaaacctgcatgtaaatggacacacaacctcagcttcctcatctatacaggggac

SEQ ID NO: 863716 - DNA, 663 bp, Homo sapiens
agtggtatttgtccttctgtgcttggtttatttcacttaacataatgtcctctaggttcattcaggtcacataaataacaggattttattcttttttatggctgaattgtattacattgtgtatacacaccacatttctttttatctattcatccactgatgaatacttaaactgattttacaccttgactattgtgaatagagctgcaataacgtgggagtggagatatttctttgacatgccratttcatttctttggatatatatgcagtagtggggattttttaatcctgtggtaattttatttttatttcttgtaggaaacctcatactattgttcataatgcagggagattttatattgttcatagtgcagagagattttaaaaaccacatagtcaattatacaaagcagcaaaatttagagcaaataatattttaaatgaaaatattaatttcacttctattaaagtcacagaagtatatagatagtgtctgttttaaaacttatatttagattaagagatattggtgtgaactaacattaattttgaaatggatagatgaggtggatagatagatatacatatatgcatacagataaatatagaaatcaacatagatatgctgcatatagatattagtatatatacatgtatttt

SEQ ID NO: 863717 - DNA, 529 bp, Homo sapiens
tgcaaatactctttttccaaataaggtcacactcacagattctggggacttagacttggacagatttttggggggccaccatctcacccactacactttccttatctcctctcccatccctcctttatcttaaagaatgttcccttcccttctctgtcctctcttcctgtcttccactgataagttggagactcaggaccttcctccttggtggttttaaccagaaatattaagtggctggtcccctgtctgtgctgcagggcagggtggctgctggctcagcagctgttggggctacttggtgtgggatggggtggaaacgggwatgctgccggttctgggttgaattgttaccccctcaccaaaattcttatgttgatatcctaacccccagtccctcagaatgcggccttatgtagcaacagggtcattgctgatgtaattagttaagaggtcatactggagtggggtgggctcctaatccaatatgacagagatccttacagaaaggggaaatttggatccagag

SEQ ID NO: 863718 - DNA, 531 bp, Homo sapiens
ctagactcgtggatggaaattcagacttctgatcagtctcaactgattggccttttcctcatgtcccatattttttcctggggtggataaacagccaagatgcctcaacagtagtggcatgaataaatctgtttaagttttgttcttaaacaagtaagaggaacttaaaatggcttcacgtgatgacctacagtcaacctaaaataatctgaacrtgtgtggtcttataattttcagtatcatccacacaaggaaacattacctcttgtcttctttattccaaagtaaaaatgaagacaattatgtaagaaacctgtcttgggttaatgagccaagaaatgcttatctacctgtggatgggcattttattttaagatgagacttcctgtagatgtttctgtacttagagattaacataattggaccatgactttaactatctttttttttctttttcacactgatgacacacagattaatatctcagtcctgagctctaaatgaatattgtcggctttctacgtggcatgt

SEQ ID NO: 863719 - DNA, 600 bp, Homo sapiens
ctggtatcagtatgtcacagaaccatttataactctcatgttcattccagcattattcacaatagttaatgtatagaagcaatctaagtgtccatcaatggataaatgaataaataaaatacggtatatatacacaaaggaatactactcagccacagaaaggaagggaatcctgtcctttacaacaacatggatgaacctggaggacattatgctaagtgaaatgagccacttacatatgtacacataccacatgatctcacttaaatgtagaatctaaaacaaatgaatttatagaagcataggctgggtgccgatggctcatgcctgtaattccagcactttgggaggccgaggtgggtggattacctgaggtcaggagttcgagaccatcctggccaacatggtgaggccccacctcyactaaaaaatacacaaattagttgggcatggtggcacgtgtctgtagtcccagctactcgagaggctgaggcaggagaactgtttgaacttgggaggtggaggttgcagtaagtcaagattatgccactgcactccagcctgagcaacacatgagaccctgtcacacacacacacaca

SEQ ID NO: 863720 - DNA, 633 bp, Homo sapiens
caaatctttggttcaatgacaaaatctatacatataaagaaaaataaactagaaaaaatattataaggatagtctagacataagagtttctatcaatataagaaaaagacatatctcaatagaaaaacaagtacacaaacaagcaatttgtaaaagaagaaatataacaccatcagtaattaaaatgcatattaaagcaataataagatacccaggatggctggattgtggtaaataagcaataacaaatcatgacacatttttggagggaaatttgtatatatttcaaaagtcaaattgtacataacttttgacccagaaactctatttctagaaattcatcaccagggaaatagagacagggaaaaatgtgtgggcagcagcgggtggtataagagtccgcacaggaaaccagataagcctgggtctgaatctcagcccagtgactttctaagccttggccttctcataagtataacaaaataattaatcacrcctcttagagttgttgtgggaattaaatgaagcaatgtgctttgagtgcttaacaaaacacctgacatattataagtactctaaattttcactactatcattgtcattactattaaggtctatctatagataggcaca

SEQ ID NO: 863721 - DNA, 654 bp, Homo sapiens
actttgctttcactcacttccttatctttcattcactgaccagaaaggttaatggtggctgttcctcttttgaaaagcggattgggaacaccagcatagctattttgacactgggatttctgttagaaaagtagatgtgacttattccctttgggtggaactccttttctagaaagggaggcaacacacatgttgggtaaatctcagtttctagagtcaggctgccataarttaaatctcagttccgcccccgagacatgtagctatggggattttacatgaactcccgagtctcagttttctcaccatcaaccattcatcagaatagtgcctacctcaccaatgcacaccttaagcacctggcgcctctgttagctaccatttaagttgagaatttccctgtgaggttttttcagaggaggttccttctacaataaaccaccaagtacttggtccccttttgcagaaatccatccacaccatgtgtaaacacaggggctgggaacttgcatggtaaaccaggtcagccaaacacggattaacaatgccaggcccatttcacctgcaaagtatcagcgactcttcaatcggcaggtccccagctgccttgcagcacagccagggcctagcatagcgctgcctccttccctttca

SEQ ID NO: 863722 - DNA, 614 bp, Homo sapiens
tgcctaccagacaccctgactgggtgacttacggctttatatttttaaattggcctctctagcaccgtctgataaatcaacacacaagtcattaaatggttcattatcccagtaatatgattcattctttgtgccaagaaatgcaggagatgtcaggaaacttaaaaatatctcatttgaagccatgagtgcccatctacataacagattaactggatgagagagagtggttggacatggaggtcaaagagaagactcagcaggtggtggtcttmcctgcagcagtcctttacctcctgctgaaaaatgtaagtcacactctcactaggcaggctctgtgctggccacactttctccctcataggctcagaaggcggtcatgctggctgcaggcacctgctagagaattcacagccgagggcactcagctagggtcattcctataggaagaacaccaagtccagaagatgacggggccatgtgctatggaagaaagagcactcggtcccagttctgccaccaggtctgaaactctgggtacattgcttgaaatgaaatcacaatactttgttgtcatcatctgtcaaacaagaaagtcattctccacatttttt

SEQ ID NO: 863723 - DNA, 639 bp, Homo sapiens
cttcatattgtgctggaacaactggataaccacatgcgagatagtgtagttagacccctacctcacagcccatacaaaagttaactcaaaatgtttcaaaaacctaaatggaatagcaaaacttatcaaaccattagaagaacatataggagtaaaacttaatgatcttggattgggcaatggtttcttcaatatgacatcaagagcataagtaacaaaattaaaaatagataagtgaacttcatcaaagttaaaaatgtttgtgcttcaaagaacaccatgaagaaagtgagaagacacagaatatgagaaaaattttgcaaatcatgtaccccataagggacttgtatctaaaatatataaagaactattacaactgaataataaaaagataacccattttttttaaacagcaaatgatttgaataaatagttctctaaaaaatattaaaattgtcagyaaatacatgaaaaaatgctcaacttcatcagccaccagggaaatgaaaatcaaaactgcaatgagctatcacttcacacctactagaatggctataagttttaaaaaatattaaatagtaagtgtttacaagaatgtagagaaaatggaaccctcgtatattgctgatgggaatataa

SEQ ID NO: 863724 - DNA, 647 bp, Homo sapiens
ggggtaaggaagaggatttggtcaacgggaactatgtgtaggtgaacaggaattagggaggggtctggcatctcattgtccagatgcagtgatctaataagtttcagttctttgatactatctgggaggcctgatggtgggtttcctaagaaaggaactcagataagacaaatgtaagtttctcaagttttaagaccagaggggtctatttctatgtttattttttttttaacycataaacttcagttctatggggatattgggctggtttcataatcaattcagatgatttggggcagttaaattgaaagtatgcatatgttttaaaacttcaggtttttgcatttccctgggaatgtcacaatgattccttgggacttaaaagaaaatctgcctcagatattcagaaaattttagcaatgtaagcacctcctgattttcattccgatcacgaacagcagtggaagagtagcctggtctgggctaaaggctttgtaaaatagtttctgagcaaattatttcacttctgctaagccttgggttatttatctattaaaaaaattttcaatggcagtatttgattcaagagttagaaggtatatgaagttgagcatataacatgctaaacactagtcattattattaat

SEQ ID NO: 863725 - DNA, 647 bp, Homo sapiens
ggggtaaggaagaggatttggtcaacgggaactatgtgtaggtgaacaggaattagggaggggtctggcatctcattgtccagatgcagtgatctaataagtttcagttctttgatactatctgggaggcctgatggtgggtttcctaagaaaggaactcagataagacaaatgtaagtttctcaagttttaagaccagaggggtctatttctatgtttattttttttttaactcataaacttcagttctatggggatattgggctggtttcataatcaattcagatgatttggggcagttaaattgaaagtatgcatatgttttaaaacttcaggtttttgcatttccctgggaatgtcacaaygattccttgggacttaaaagaaaatctgcctcagatattcagaaaattttagcaatgtaagcacctcctgattttcattccgatcacgaacagcagtggaagagtagcctggtctgggctaaaggctttgtaaaatagtttctgagcaaattatttcacttctgctaagccttgggttatttatctattaaaaaaattttcaatggcagtatttgattcaagagttagaaggtatatgaagttgagcatataacatgctaaacactagtcattattattaat

SEQ ID NO: 863726 - DNA, 647 bp, Homo sapiens
ggggtaaggaagaggatttggtcaacgggaactatgtgtaggtgaacaggaattagggaggggtctggcatctcattgtccagatgcagtgatctaataagtttcagttctttgatactatctgggaggcctgatggtgggtttcctaagaaaggaactcagataagacaaatgtaagtttctcaagttttaagaccagaggggtctatttctatgtttattttttttttaactcataaacttcagttctatggggatattgggctggtttcataatcaattcagatgatttggggcagttaaattgaaagtatgcatatgttttaaaacttcaggtttttgcatttccctgggaatgtcacaatgattccttgggacttaaaagaaaatctgcctcagatattcagaaaattttagcaatgtaagcacctcctgattttcattccgatcacgaacagcagtggaagagtagcctggtctgggctaaargctttgtaaaatagtttctgagcaaattatttcacttctgctaagccttgggttatttatctattaaaaaaattttcaatggcagtatttgattcaagagttagaaggtatatgaagttgagcatataacatgctaaacactagtcattattattaat

SEQ ID NO: 863727 - DNA, 638 bp, Homo sapiens
ggaggttttgcacatgattctaggcagaaccctcctagttaatgcctacttgtcctttagaactcagctcaaatatttcctctggggagcattctctggcctccacttgcccagcatgagccagaccctctaacaatgagctctcatttaataccttgtttttctatcatagcactttctacagtcatcttatataatcatgtgtaaatcaaacttatgactatttaaataagacctatctcscacactaggaggtaggtaggctccatgaagatagagactttagcagtttcacctaccattgaatacccagtatttagtccagtgcctagcacattaataatcacatgggacctattttttttagatgaataagttatatacagaggttctggtaatagccattggttctagtatgaaaatgtaacaaactgcctcctcttcttctatcatatagtttgactttttcacatctttcctcaattggtagaattaataaggtgctattttagataacccatgtcaccaaaaagaagctgcagactggacaatcagcctctaagtaatcaagggcccccttttactgtgcatgatttaaatgaaaaatacaatctatctggaatgtaactgagaaccat

SEQ ID NO: 863728 - DNA, 600 bp, Homo sapiens
atgttatttcttaatggctctaaaacgtcctttgatggctgggcacggtggctcacgcctgtaatcccagcactttgggaggctgaggcaggtggatcatgaagttgggagatcaagaccatcttggccaacatggtgaaaccccatctctactaaaaatacaaaaattagctgggcatggcggtgtgcacctgtaatcccagctacatgggaggctgaggcaggagaattgcttgaacctgggggacagaggctgcagtgagccgagatcatgccactgcactccaacytgggcaacagagtgagactccatctcaaaaaaaaaaaaaaaaggctgggtgcggtggctcacgcctgtaatcccagcacttttggagaccaaggtgggtggatcacctcaggttgggagtcaaaattagccgggcgtggtggcacatgcctgtaatcccagctactctggaggctgaggcaggagaattgcgtgaacctgggaggtggaggtttcggtgagccgagatcttgccattgcactccagcctgagcaacaagagcaaaactccatctcaaaaaaaaaaaaagtcatttgacatgaagagtcat

SEQ ID NO: 863729 - DNA, 600 bp, Homo sapiens
atgttatttcttaatggctctaaaacgtcctttgatggctgggcacggtggctcacgcctgtaatcccagcactttgggaggctgaggcaggtggatcatgaagttgggagatcaagaccatcttggccaacatggtgaaaccccatctctactaaaaatacaaaaattagctgggcatggcggtgtgcacctgtaatcccagctacatgggaggctgaggcaggagaattgcttgaacctgggggacagaggctgcagtgagccgagatcatgccactgcactccaacctgggcracagagtgagactccatctcaaaaaaaaaaaaaaaaggctgggtgcggtggctcacgcctgtaatcccagcacttttggagaccaaggtgggtggatcacctcaggttgggagtcaaaattagccgggcgtggtggcacatgcctgtaatcccagctactctggaggctgaggcaggagaattgcgtgaacctgggaggtggaggtttcggtgagccgagatcttgccattgcactccagcctgagcaacaagagcaaaactccatctcaaaaaaaaaaaaagtcatttgacatgaagagtcat

SEQ ID NO: 863730 - DNA, 586 bp, Homo sapiens
ttagtacatctaaaactggggaaaccagaataatattgataaattagatcaatgtcaatatccagtctttgatattgtaccataattttacaaattgttattataggagaaaaatgagtcttaaaaagtcttaaacggtcttaagatcgcttaaaaagtcttaaaaagatcttacatgagatctctccatattatttcttaaaactgcatgtgattctacaattacctgaataaaaatttcaattaaaaaaattaaacatagggtcagacatggtggcttatgcctgtaatcycaacactttgagagtccaaggcgggtggataatctgagtgaggtcaggatttcgagaccagcctggccaacacagtgaaaccctgtctctaccaaaaatacaaaaattagctgggcgtggtggcacatacctgtagttccagctactcgggaggctgaggtgggagaattgcttgaacctgggaggcagaggttgtagtgaaccgagatcatgccactgcgctccagcctgggtgacaagagcaaaagtccgtctcaaaaaaaaaagagaacttatcaaactgtgctctttaa

SEQ ID NO: 863731 - DNA, 586 bp, Homo sapiens
ttagtacatctaaaactggggaaaccagaataatattgataaattagatcaatgtcaatatccagtctttgatattgtaccataattttacaaattgttattataggagaaaaatgagtcttaaaaagtcttaaacggtcttaagatcgcttaaaaagtcttaaaaagatcttacatgagatctctccatattatttcttaaaactgcatgtgattctacaattacctgaataaaaatttcaattaaaaaaattaaacatagggtcagacatggtggcttatgcctgtaatcccaacactttgagagtccaaggcgggtggataatctgagtgaggtcaggatttcgagaccagcctggccaacacagtgaaaccctgtctctaccaaaaatacaaaaattagctgggygtggtggcacatacctgtagttccagctactcgggaggctgaggtgggagaattgcttgaacctgggaggcagaggttgtagtgaaccgagatcatgccactgcgctccagcctgggtgacaagagcaaaagtccgtctcaaaaaaaaaagagaacttatcaaactgtgctctttaa

SEQ ID NO: 863732 - DNA, 576 bp, Homo sapiens
ttgagccttttaattcaataactatattttttatatagatgctatttttttcagatttacttgtccatcccaatagtttattgatacatgtttatttttgtaatgttatcctttgtttctttaaacatttcatacgtaactgtttcagtggtggccataggcaagagaaggagagcagtattttaacactatttagaattgctggctcatgataatcataaaaagtatatcaactttttgtagatttttactattgtttttaagttctctacaagtgatcactcccttgttgtcagcacataaagccaactattttcagtatgcccctgagcaactggtatactatagaattgacctgtgttcttatattagtcagtgcagcctgccataacaaaatataggctgggtggcttaaacaacrtaaatttattttcttttatttacttttagtagagacaaggtcttgctatgttgcgcaggctgatctcaaactcctgagctcaagtgatcctcccacctaagcctcccaaagtgctgggattacaggcatgagccgctgtgcccagcaaaaaacag

SEQ ID NO: 863733 - DNA, 590 bp, Homo sapiens
ccccactgtcctgtagagaactggtaagcagtagtgggggggtctcgggcaggtgagcagctggtcttgtggcccccaggtctggtgtgccttgtcaactgtgccattggcatggtgttcacgatggaggctgggaactactggtttgacatattcaacgactacgcggccacactgtccctgctgctcatcgtgctggtggagacgattgccgtgtgctacgtgtacgggctgaggaggtgaggaggcccargaccctcatttgcatagggaaaacacagccacagaggccacgcccctcaaggaaaacagctgtttcttgatgcacatcttcacctcttctttaagcttcgcatcatgactcaacgtttgttctttgcccgcagatctcagcttatgctctgcctctattccatgctcagtttgcttcagtgaatatctttttctctattccctgtacttttgctttgtatcataggctgttttagggttgaccctgctggacccccacagcttactggggcagggaattgtgcctccaggcactggatgctctgatcatcggccaacatcagtattttccaagaacc

SEQ ID NO: 863734 - DNA, 592 bp, Homo sapiens
ccagatgagtctggcacccacactttgagaaccactggcctagagagctttgctacctcaagtgtggtccctagagcgggagcagcagcaacaaggcgctcgttgggactgcagaagctcgggcccaccccatcctgctgaatcagatcctgtatcttcacactatgtccagggggcctgargcacatcacagtttgggcagcgctgctctagtgggtgcggtttgggcgaggaggctgtgccacgttgttttctgccctcttccccagtctttttgatcctctgtgctggttcagggtggggagggagacattgacaacactctgggaggcaggcatccctgaagcagcaatccctgctgtgtccccggaaaggccagggtcccgtgccatgctgagggatctcccatgatccatcaggacataagttaaacaaagccaaattgatgtctttcccgtaggacttctcagaatcttaaagacagttgtggatcccaaagagagggttagaattgcagcatttccagacttacttggtcaaggaatgccttttcaccctcctctcacccgactcccacccttagctactaaca

SEQ ID NO: 863735 - DNA, 631 bp, Homo sapiens
atgatgacatcatctttcatcttgggtgtcatcttggatgtcccagatttgggggtgacctcttctgtctggaccagacatacctgaatttctttttatttcaataagatggggattttatggctcaaaaaagacacagacgaatcattccctaccaaggccatgcccagccatctccaggcattacccacactgcttccaggcaccttccacaaaggaggggtacatcaatgacacaagggggtgtaggctcagagttggctgcrttgtcttaaaagttagagatggaccagaggaagtatgctccttcttatagctgtgtcccatcccaggctagggagggcagaacttgggggcccagggtaatatccaaccactacttcattgaaacgttaaccgtgttttctaaatgaaatatagaagagcaagcaagcatggctttaagcaagcatgactggaaggcatggcgtcttctttttcctgcttctaggaaagtcttcatgaaatgaaaaataaaaattgattacattctgcctagtctagcatcccaagggtttcccataacaaacatacagcatcagtagacttggttgcccatgcactccttgcacagcaggactgaccttgccaa

SEQ ID NO: 863736 - DNA, 631 bp, Homo sapiens
atgatgacatcatctttcatcttgggtgtcatcttggatgtcccagatttgggggtgacctcttctgtctggaccagacatacctgaatttctttttatttcaataagatggggattttatggctcaaaaaagacacagacgaatcattccctaccaaggccatgcccagccatctccaggcattacccacactgcttccaggcaccttccacaaaggaggggtacatcaatgacacaagggggtgtaggctcagagttggctgcgttgtcttaaaagttagagatggaccagaggaagtatgctccttcttatagctgtgtcccatcccaggctagggagggcagaacttgggggcccagggtaatatccaaccactacttcattgaaacgttraccgtgttttctaaatgaaatatagaagagcaagcaagcatggctttaagcaagcatgactggaaggcatggcgtcttctttttcctgcttctaggaaagtcttcatgaaatgaaaaataaaaattgattacattctgcctagtctagcatcccaagggtttcccataacaaacatacagcatcagtagacttggttgcccatgcactccttgcacagcaggactgaccttgccaa

SEQ ID NO: 863737 - DNA, 631 bp, Homo sapiens
atgatgacatcatctttcatcttgggtgtcatcttggatgtcccagatttgggggtgacctcttctgtctggaccagacatacctgaatttctttttatttcaataagatggggattttatggctcaaaaaagacacagacgaatcattccctaccaaggccatgcccagccatctccaggcattacccacactgcttccaggcaccttccacaaaggaggggtacatcaatgacacaagggggtgtaggctcagagttggctgcgttgtcttaaaagttagagatggaccagaggaagtatgctccttcttatagctgtgtcccatcccaggctagggagggcagaacttgggggcccagggtaatatccaaccactacttcattgaaacgttaaccgtgttttctaaatgaaatatagaagagcaagcaagcatggctttaagcaagcatgactggaaggcatggcgtyttctttttcctgcttctaggaaagtcttcatgaaatgaaaaataaaaattgattacattctgcctagtctagcatcccaagggtttcccataacaaacatacagcatcagtagacttggttgcccatgcactccttgcacagcaggactgaccttgccaa

SEQ ID NO: 863738 - DNA, 640 bp, Homo sapiens
ttttattccatccctttcctagttcgtcatacatatttatcattaaaagtttggtgtgtgttcatcttttctttgcaagagtctgtgcatgtgtgtgcatgtgcacgtgtttgcatgtggaagcatgtagtgcgtgtaagtgagattttgtgagctctgttgctctaactctggtttcactcactgaacaatgaagcttggaggtcgttcctcatcagtgcatgtaaacctcaatcttttgaattgttgctgagtatcctacttcaataagcagagggaagaggtgttttaaaatgtggttagaattctgtttacccttcctctgaaagaggcaggtctcttcaacattttctactcatgtgacaattagagaagctccttcttctcctcaggaaaggctgcctgtggggaaggattgcatttctttcggtggatctgggtcttctgggagcagcacaggcatgatcacccttctggagagtgatagaacrgtcagtggaaatgtaatcgatggccacaaggtgtgacagctctgccatcacattcggtttatgcttgtttcacgttcctcagagcagaattgcctttccaggcccaccatttgttctggtacttggtggtgaggaagctcactttaagt

SEQ ID NO: 863739 - DNA, 647 bp, Homo sapiens
atcctttgttatctgctgcagataccctccagtctgtgccattcatttgtttattttgtggctttggtgtacagaagttttttgttttcatgttgtcagatgtatccatctttttctttgtggtttgtgggttttgtgggrgtgggtagtttttggattttgtcttatttaagaaatcttctgtaacccgaggtcatttatgcacacctgtattttcttcagaaagtttgaaagctgctctgctttttccatttgggttttaagtgagcttgagtttatttttatgtgttacctgaggtggcctttttctgtacgggtaacaaaccggagctgttggcatttattgtagtcccttctttcaaaagctcccaaataacgtggggctgtgtctaggctgtttctttcctcttgggccagctgtagggtttgcctttccttgtctgtctgcacctgcactgccgccatattgtttccattgttactgctttgtaagtcataatggcaggtgggacaagtcattcctccccctccttcttcagagtggtcttggctattctttacctcccccctttttattatgtcactgttcgtgttgatcatattaccaactttcagatttttctgttaaatcagcattgaaaatttac

SEQ ID NO: 863740 - DNA, 604 bp, Homo sapiens
aaacccttagatgattccctaatgctcttcgaataaaacacacacctcctgcgatggcctaccagttttccctcctgcctacctttttctctcatatccacaccaaattcagccactattccctgtcctaggtctctttactggtcttcagaagcrccaaggcctttgcattttacatttgttccccctctgcccagattccctttcctcagctcttcttgcggtgggttctttctcattctgtagatcttacctcttcaaagggatctttcacagaaacattattaatgggaccttcctccattattctatgtgttttgaatttgctaatttactctatagcacttatcatactgtctatcttgatagttacacttttgttatacttggtatattatcacttccctcccagaatgtcataggagcccttgaattcttgaatttgatttatcacaggcacgttagcacagtggtacctggtacatggacaccacttaaataaatgtctgtgtgtgtgtgtgtgtgtgtgtgtgtgtgtgtgtgtgtgaatatatgaatataatgaatatacttagaaggtgagttagaggaagacgcccagtgg

SEQ ID NO: 863741 - DNA, 691 bp, Homo sapiens
tcatcttaatagcaagggaaggcagatttgccccatcaattttcagaaagcaaataaatattgtgttaataataataatgataataatagcttaatatatcctagacactttacatgaattatgtaatgctttctaacaactccttgaggtggacactattaattgtctttttcattgaggtatttgaaacttaaagaaggtaagtaatttgtccaaggtttgcaaggctcacacatttccagaattcaaacactgagtgctttgcacacgttatgagtaaacaattgtttttcttatgtctatagtatttggggtatgtgcttatttggtcttttcaatcatattaaaagcttcttgaggacaagattcatgttcttttggtcaggtgcartggctcatgcctgtaatcccagaactttgggaagccacagcaggtggatcacttgagatcaggaatttgagaccagcctggccaacatagtgaactccatctctactaaaaatacaaaaaaattaactgggcgtggtgttatttgcctgtagtcccagatacttgggaggctgaggcagaagaatagcttgaacccgggaggcggaggttgcagtgagctgagatcacgtcactccagcctgggcgacagaacaagactgtctccaaaaaaaaaaaaaaaaaagattcatgatcttttt

SEQ ID NO: 863742 - DNA, 619 bp, Homo sapiens
agagggctacagagagggagagttctgaagatctgcagaggttctttggcaattagaaagacttttagttgagttctatgtcccttgacataccctcatcatcgtgttgtttctgagcactttcatactttctggcactacaagattctccaggctcatcttgtatatttcctacccagtcctacaattcaccacttctccaaggagccctggttccttttattggaaaacagttttagaaaccaagatctgggcaatagatgtccttattggtaatgggatattgttgcctttaggccctctcagctgacagaccaacaaaatacatgcatgtgtgtttcatgtgtacatacataatatgtatacatattatatacacrcaaatatctataaatatatatccatttgtatctatattaagctaaatttgagttcatactgatatctccaattttaatccattaccacctgtatcattctagccttcttcccttgcttgtctataaaatttccctcccaaagtgagaagcctggctctcaccatctagcattcatttatttagttgttcaattccagtacccatgtagaggggtttcagaatttttaatccatactccc

SEQ ID NO: 863743 - DNA, 601 bp, Homo sapiens
cctctagagttcaagggtgggcccataagccaatgactgactcacatgggctacaagaggctatgtctcatccttcaagatgggactgattatagtgtgattttttctgaagctaagctccagcagaaattgcattttaattctctcttttcctggccttatcctgcttcacagattcccttcttctgagaccattctttcaataagctatatgtgcctcaattcttgtctcagattctgtttayggagaacagaagccaagtcaagaggtgttcataagaccacagaagcaatatttgatgtgctctgggatagactgtgtcctacttctcatattttgagaattcacctcccagaattaacacgggtactctccaaggctaagagccacctgtgtccacacagtccacagaaaatatattacatccacagactaactgccacaggggagaccacagtggtttattacctcctgctatgggctgctttgcaaatctgggaataggttgattagagagggtctgagtcctggttttctaggaccttagaaccttcccgtcctgcctgagaactctctccaaaagttttgtgatcagtggag

SEQ ID NO: 863744 - DNA, 672 bp, Homo sapiens
caattcttggattgggattatttctcaaatatccaataatagcccctatccacaacaacagtgcagtaaattattaccacattatcaagagttaagttcatctcaaggcttgtaatggaagagttagcaaatagcagagaaagagccatgtttctcaatcattagcctgcaacagaaacacctggaagatttgttaaacacaggcagctgggatgggaattaggccctgagtttctaactcaaaagttctgggacagggcctacaaatttgcatttccagcaagttcccaggtgatgctaatgctactggtttgaggacagctggtctagtccctagagcagcattatttaaattatggcccataaaacagtgccagtttgtgaactrcgagtatgagataattacataaatttagcataagcactttaaaatgtttacaacaatttgatagaattatttcatgtctgctatatctaacaatatacaatttaaggacataatttgaatgtcttcttgttttagtttttcttttctagaaattaaattttgttgtatttcatacaagtattgttcgatgctgtgtcagaggcaaaagccaacatgttcttctccacagatcgtctgaggtgtactggtatagagcacagggccctttgagaaatggtaaaata

SEQ ID NO: 863745 - DNA, 656 bp, Homo sapiens
tgcaatttaaaattggtaggtaatacattgtaatcgaaaactaccctgtgagataggtgtcatcctgactttgaaaatcaggaaattaagctaaatataatttacagaaggtaatgacaacctcacagctaataagggacagacccaattctcattctaaatctctttccatcaaacrtaataaatccacagcttacactgaattgagtaagtgtagggtgcttctttttgctctcccaaaaatgttatatgaaatcattttgtcagtttcattacttcccagttacttttgccagtagcaaatactagttttcatgaatgaacctgtaatcttgttcagcaacaatcaattacaatggtaaacttaggaagtaacaaactgcttatgcaatttagtgcattttccatgagtaatcagcatatagaaagtctgctaacacttcccaataaaccatggcatggtcttaaacaattttgcattttttaatatcatgactatttaaaattccatcatttatctccttctctagatgcccttgcctttctaaaagatagttttttgctttaaaaaattatccatgagcaagaataaatgacttggaatacattaatatctaatgtatgccatttatacatataaatgcaatctttttatc

SEQ ID NO: 863746 - DNA, 605 bp, Homo sapiens
tcactgatcaattaacccgcagttaggtttttactgtctctcaatgccaggatagaccttccttactggtctggtcatacgctggggaaatagccagaaattatgagtcagtgtcaagaaactttgagcaagaaggtttgcaagtagtggctcttgttaaatttgcctggggttcattgttaaattcaattttgtcagtttcatagttgttggttcctatttcaacatgttgggctagcattattctgctaggtgttgtatttctgcagaaatttgacatgcgaaaggtacaaaatttaaagaaaataatacaaagcaaaaccgaaaggaatataacaaattcacaatgattctgagtcaagagcccaaacaaccaacaaattaaaagaccaytggggactgagtgagacctatcatagtcaccaagactgttttcttattttatgcagtgggtctcaatttcctcagaggaatttatctagctacagcatatggtattagcggtggtacagatacatctttgttcagctagtaggtagcaattatattagttagtaccctgtaactaaattaaattaaagcagatattgctaactctgtgaaaa

SEQ ID NO: 863747 - DNA, 624 bp, Homo sapiens
taataatggtttggctttacttaaataagaaaaaatatataataataaaggacagggcagttgtgggcagcctggtttcatttgctagtttttatgttctagatattaagaaaaccatttcctttgtatatgcaattgataaattgaaagagaaatattgagagtttataaatatatattagaatttttttcaatgacagaatttttctaacgcaatgcagaacacttccaaactcattactgaataaaatagataatgaattctcattgagataatctagtgtcaaatccacttaaaatcacaaatgttcatagttaccaaagatttcatayggagattcaagtaggaatgaattttgattaatttagatccagatgggccatctctgttgatagtatgtgatctaatatcttctagaatggtcaactttgtagaccctagtagagtttttatgactgtcactaatagtgactaaaagtttttacttactgacagttttaaaatatggtaaccaccatgctagacacttcacttgtaaactttttctatgactgaggatagtggaagtccagagaggtttagcaacttgcccagagtgacacagctagtaactggtagagcca

SEQ ID NO: 863748 - DNA, 618 bp, Homo sapiens
gcccagttaagataagatagctaggaaaaaccatcttaaacaaggtaaggcttactatgtccattttaaaccaatgcctttttcatcttaagagtttctagtgacttagtctttcctcttttactggtgtagagaggtagatacccttgtaaatgaagactttctttaaagatgtaattttttttcactaagattctcaaaataaccagccaaatgtcagaaatgtgtatttggagacagattttttttttttttttcggtaagtggtcttttcaacttagcttgtttcttaattagatatctgagttaagggtgggatcctttaatgaaaagggcaaaaaataaccagtagaagcttcctggaacatccctccaagcccccaacaatgctggtggttaacatagagattaccatcaaaaggtgggccgcctrctttttaatgtcctgtttgtttgcacaaatgacaacggttttctggaaactgctatttttggggttgcttatgaaagtaggaccctggggaaggcccaacagtcattctaggttgttggttggcaggagctgctataatcacaaggccatttatttgaagctttccccgcaacccctcagctgga

SEQ ID NO: 863749 - DNA, 589 bp, Homo sapiens
cattaattagcaatgtaatttgcttttgcaaagagagggagggacaagtttttacataaattaacagacttcaaagtattttcctcacactacttcatgaagatacatctgtctgcccctcactattacccccataaagaactctaaaaatggagaggggaagggcacacatagaaaatagaaataaaataaaaatctgtaatgctcttttcttcattagcataaatttgatttattgtaggatactgagacacattcataattcgatttttatgtgagctccattttctatcatataygtgtttcattaagacaaaaagcctgagttttgctggagaacttacttatcttatatcccaacacaagatcaaggagcaaataaatgttgaatcaggtttatcaatattattcaattcaggtatttatctgagtctctactgatatttattttctggtgtatatgtatgggaaggggtacacttgctgataatagtaagtatgaagaacagacagtgcctaatttagagtgtcagaattctttaatgaataaatttagaagcttgaatgttttgtgtttggctgggtgccg

SEQ ID NO: 863750 - DNA, 622 bp, Homo sapiens
aacaaattcattcatcaatctctatctttctctctttctctgaatctccccctccttccacttgtctctacttccaatgttttccctttatatccttgacaggttttctataggtttactccagtgacttaaagctctattcaagaaagggatatgccctcacttggtgctgcttgtgtcacctgtccacctctggattagtagctgtgcctgggacagagaggagatggatgcctctaattgtctaggcaatgttagattaactgggggtcttttgtttgacaactccaccagatttacccagataagtaaaagggtgttcttaaaaagaaggaatgtttcctacaaaagcaggtggtgatgccagtgcctaaagacaaagtgaagagcaaagatkgaatttacccttttgttcagagagcagcattaaccagactggttatcctgggactttgccaagactccctgatgggtagcatcaaattggcatactgtaccctgctataaaaatgtacaactttgatgtgctttgacactcaattgaattagtgtacttagactttcatttattttgctacttcttatatattcttatatattcaattctaataacattctaggg

SEQ ID NO: 863751 - DNA, 604 bp, Homo sapiens
caaatgaacactctaacagacattatagttgattgcatacaactgagtgctgaagacagcactttatgtctgtgttcataataactttcaaatgaattggcagcttatctcaaatggataaaagaaatgataaatcaaaaactgcagtacaggggagaaactctacaccattctaccacttatgcaatggaagagcctagaaaaaaagagagaggaaaagtacaaaataatttagcatcttataaggttgatgaacctaaatccaatgattcatcattctgccacaatcttgacccagtaaatgtgttatgtgttttgtgggacatacatatacacatttttttccaaattcaaattcaaaaagagaagataactgaaacaatatacacaaagaaaaatattacataattttgcaagtgttgtatctatatacagatataagaaaaagcaatatgtsgataaatataacaagaaaaataattttcatcctcactaaatttagatttctcttttggtcttgtaaacttgcctatgaaaactatcaaaagaaaaattatttgagatctcccctgaagaaagagatggaaaatggaggcttgtgata

SEQ ID NO: 863752 - DNA, 586 bp, Homo sapiens
cagtaagatgtcgcatgccaacttgcagttaatccttgttcccattcccagtctcagacaatcactattgtccattgtctttagaagtttgcattttctgaacattttaaggaaatggaatcatgcaatatgtgggtttttgtgtgtgatggcttctttagttcagcataatgtttttgacggtcctccacattttggcatgtgttagtgcttttcaaaaaattgccgacgaatagtattccatttacttgtatagatatgccatttagttgtgtggctatgccacattttgtttatccattcatctgttgatggacatttttttkggggggcaattatgatcaatgcttctctgaacattactgtacaagtctacgtgtggacatgtgttttcatttttcttgggcatatacctaggggtggaattgcttgctaggtcatatggtaaactttcatttaacattttaagaaatcaccaaactgttatattcctaccagcaatgtatgaggggcctatttactctagatgtttcctataagaggaatatgagagaatttgagatcaaacatgggctgtgggaagaaa

SEQ ID NO: 863753 - DNA, 663 bp, Homo sapiens
ttatgtcttcaaatccaagaaatagttttcagtcctcattttgcttgatttttcagtataatgtgacattatcaaccattctctggtcttgaaatggtctctttcactggcttccaggacaacacattctctttatttcttcctgacttcgggctcctgtttactggtctcctttagaggtctgtctttctcttcctgtctattatatttggaagtttctgagtaagttgtagtcctcagccttcttgcctayactctttccctaggcaatctcatccatgcctcattgtttaaattgctacttgtcatctcagaagtttctttggagctgtaagctcaaatatccaattcctattagttatttccacttgaatgtctcaggttttcatactcctcatttattattctgaaattataatatgcccccaaatctagttcttttccgaagaatgccttcctgaccaccttgaccaggctgggctctgccatcatttgctctcatggaatgctgtgccttccctttatagctcttacctcagtttggaattacacattcacttaggtgagtatttgacaatgtctgtctgctcacaccagcctccagcctacataagaacaggaactacatctggttttgctcatcgtgtatcttcccaaattagc

SEQ ID NO: 863754 - DNA, 663 bp, Homo sapiens
ccagctaactttgtactgaaggcctggcccattagattcgaaaccattcaagggctacaaggaaagccaaataaccagagcttataacacaaatcaactgcacaatcttttacaggaacagcaaattcaattcccagacctacagaaagtgatcattgaaatactaaaacacaagctattaaccattttctccagggaccttctatcaattgtgcatttgcaatgagattcaaagcttgtttgggatcaacatttcaaaggttgtaaactactatcttgatgcaataaatatcacataaacctttcaaactctggctctaccgtcaaggatggtgattctttagacatttcggtcacatagaatcctttwtatattcctgtttgtgcaatagtacatcattgtccattttatttgcagatggaaacttagactgttttcctctttattaaaaaaaggctagcctgtcattctgttgtttctacatgtttgtataaatataagtatgtacatatatgtatacatgtctaagtatgcatgtatggctctaaaataggttttgaattatgagtaaatatatgttaattttccaaatccagaaaacacagataagctttccccactaaagaagttgactgctgggaatggcttggtgcatgtcttcc

SEQ ID NO: 863755 - DNA, 630 bp, Homo sapiens
aagagaaggccacagagttcttccagggtcattgacaagcaacagggcaatatttaggcaccacaattttaggtcagctgtaggtgaaccacacaaatgatttcgaccagaatacagcattccttctaatagagagtgaggcctatagccactttgctaaaactaacacatatctactctgtactactatgtcaaattgagggtctcatctggaaaatgccatgacctttcttccattcttaatgaaatctgcagcatgcttgggctcttttaaatgctctacctgtttttgtttttccttcccctttcactggctttaggtaaaatcaaaagaaaaactccctatccaaataaaaacgagtgtcttaaaakactgacaaggatttgagcagtctttggtgattaaagaggtcatatttctgcttatttgtagaaaggtaatgaaaacatctgttgagacttcgctgttcaaggtataaaacaatggatgctgtccaggcctgagggttttttcccatcctgaattacacaagagaccagcacgcaaagatagacaaacattctcagggtcctatttcaatcacctgataccttcttgggtgcatatattttacagtagggagaaaatgc

SEQ ID NO: 863756 - DNA, 630 bp, Homo sapiens
tcaagagattgtggttatttaggagaaaaaaagttaacgatcaagaggaaatagcaaaagctagtaaaaaatatagaaacactccagcttgttcaaacctgttccttttaggagcctcttcttgacataaataaatcaacaaatacataaacactacggggctaataaccaaatgtgaaaatatttaattttctgctgtggatattcttgaagctgaagtataaataaattgtgtaaattcctcttgaagacaatgttttcagctaaatctctcaagtattaaaacgttaggaacaggcttgatccttactgaagtggaatagaactggctgggtaacacagtatgtgaggatttagtcccgggcatgcccagcaatttggaacttctgtgagattggagatgaattcctttctgtgaaygatacactttaggctttgagcttatattgctttagaagtacactaagagggatttaggtctctgtctcagcacgatgatcaaaatcaaaactaaataacagcaccttttctcttaaactgctcctgcaacttgaagcatttaagaagactttatgttctttctaagcaccatttctttttccttggtgaaaggaaaaggatgtgcatcta

SEQ ID NO: 863757 - DNA, 575 bp, Homo sapiens
gctctttccccacgctctcccacctgctccaaaagcttgagaaaaaagttaatccagtccctgtgctgatgaatcaaatagagacacactcatatcctgcttcttcctttttatctttaacctaaaccaaagcatcctcatcccgtccayggcacctgcttaattaccaagcagagcgacacagccagagcacaccctggtaacagaaatgggcacaagatacatctttggaggcttcccatcaagccaatccctcacatgaaagccctgatgcaatgctctcatttggcactttaccctttctgcttccaaaaaggatgtggagtaacctactgctgcagatgtcacaggcttctactatgtatcttcccataaagggaaactgctgatagggtatggcagacacaccttactccttattcagtggaatgtttctaaaatgatgccagagccccagtccagatcaaataaatcagaatctctggcactaggtcccagacatattttttaaaagctccccaaggcattctaatgtgcagccaggggtggcactcactgggctaaggccttgcagt

SEQ ID NO: 863758 - DNA, 564 bp, Homo sapiens
ctcagcttcctcagtcagcaactgttgggcagtgaactggctgcatcagtcttggccgtagaagtgtcacattgaagttcattaccactattatggaaaaccagcttttgacttgagatcttttagggtgggcactctttttcaagcggaaaccatgcccagcattactggagggtggtaatgcacctgtcatgctgtggtcagtctgatcatacttgaagggctgggctcagctctatgcaccagtcagaaaaggaactgcagtgggtagatgagaggggctaaatgctggtgtgtgtggcctgggaaacagctttggagacggcatgtattctgtgtggtccaaggaacagatatgtgacctgtgatccggatagcttagggacacagagtcrtcactggcatttttcggtaaacagggtaaaaatgtttctaattggagtgaactaccttggaaggtagaaatctcactctcattcaatgtctgagcagagaccgggtgggaatagtaagagagaggattcttaagccagataactgaactaaggtcttagggatgatcca

SEQ ID NO: 863759 - DNA, 602 bp, Homo sapiens
tggtatttctggttctagatccatgaggaattgccacactatcttccacaatggttgaactaatttacactcccaccaacagtgtaaaagctttcctatttctccacatcctctccagcatctgttgtttcctgactttttaatgattgccattctaactggtgtgagatggtatctcattgtggtttttatttgcatttctctgatgaccagtgatgacgaacattttttcataygtctgttggctgcataaatgtcatcttttgagaagtgtctgttcatatcctttgcccactctttgtagattctggatattagccctttgtcagatgggtagattgcaaaaattttctcccattctgtatgttgcctgttcactctgatgatattttcttttgctgtgcaattctttagtttaattagatcccatttgtctattttggcttttgttgccgttgcttttggtgttttagtcataaagtctttagccatgcctatgtcctgaagggtattgcctaggttttcttctagggcaaaactaactgaaagttaactttccatcatactaccagagtatctccatggataattgccagatttgt

SEQ ID NO: 863760 - DNA, 640 bp, Homo sapiens
ctcagagataacacaaccaagtggaaaagcatcccatgctcttggagaggaagaatcaatatcattaaaatgttcatactgcccaaagcaatttacagattcaatgctattcctatcaaactactaatgacacccttcatagaactagaaaaacctattttaagattcatatgaaamcaaaaaagagcctgaatacccaaggtaattctaagcaaaaagaacaaagaaagagtcatcccactacccaacttcaaactatattacaaggctacagtaatcaaaacagaatggcagtggtataacaacaaacacatagaccaacagaacagagtagagagctcagaaataaggctgtacatatacaaccatctgatctttggcaaagctgacaaaaacaagcaatggggaaaggactccctattcaataaatcgggttaggataactggctagccatatgcagaaaattaaaactgaaccccttccttacaccatatataaaaatcaactcaagagaactgacacgaaaaaccaaaagcaataaaaaccctagaagacagcctatgcaataccattatggacataggaactggcaaagctttcatgacaaagattccaagcaatcacacaaaagcaaaaatt

SEQ ID NO: 863761 - DNA, 712 bp, Homo sapiens
gtcagcatggttagaaaagaaagcaaactagtccgatgctcttgaaggctattttcatctagtagagatgttgggatgctgcaaacttttttttttccactttgggatttttctgtttagatcattggaatcattttacttcatttgcaaacaactgagtgaaggtattgtgatctgtgaccattaggataacaattttagaatcagagatgcagagattgactttagactgtagattgtagggaggaaagatttctttcctcacccctctgtaggttcatggctgaggcacctgtaacaaaagacagattaacaagagaaaaacatataaatttatttcacaatgcaaacaaatagttttcctttgctactctgaatctggaaagaaaaggacaagaagcttttaccttcctttccccactggaaactacagacagtggggagtgtctgtagtatccaggagtttttaacgttcctcaccccactgggaactacagacagtagggagtgtctgtagtatccaggagtgctgaccttgggaagaattcttmcctttttttttggcattttgttcattgtcccgggatctcatctgcaggattaaaagtgaccagaaaagtctcagctgttctacctggggtgtgaggaacaaactcgggggaggcagaagaaatatctttctttactatcacagggttcatggctggggtcc

SEQ ID NO: 863762 - DNA, 563 bp, Homo sapiens
ctcaaagatttgtcagctacagtgctttgcatccatacggtgggtttccttccactagctcccagtggaggcatggtggctggagaactcagcccatgcacaaagagatgagctgctagatccttctgtacagcctctacagtggagaaaatcagagcagaaaatcaggtgcatttcacatttttcttcacactttgaagtattgcatgagttttyttcatgaatgtgtatcatgctcatcaacataaaaatgaaatcaaaattaaaaattactggtgggactatatccacagaactcatttatagggcaatttggcaatatgtaacaaaaggtttacaaagtacatgccccttgccttaaaatggttttacttttagagttttgatgtggacacatatggatatacaaagagatataaggatatttatcaaggattgctgtattagagaaaaattggaaataatgcaaatatcaacagcaggggacattgagatcagttaaggtccattcccagaaggaaatcctccgtggctctcagaaatgatgtgtagaaaactatgaa

SEQ ID NO: 863763 - DNA, 600 bp, Homo sapiens
gagaactgagatttcaacttgattcccataatttagacttcagcttttggaacaacttctgtcttcaccagtgtgtcctgctttgatttccaagcacgtaagattctagagacacattttttggtctatttcaattgcacattcataggacttgtaaatataaaagaggcccataaactgagaggtgctggktaatggcctttaaaacagtaggttttatatcagaatctgaacagtggtccctaaatcgggcatctgggtttgtgccctccaagtcttcaaacccaaggtgagattctgcgtgtgcttcaagatgtgtctggaggatcataatgcaggaaatacagagcccagttttatgttcatctttatctttatattttgaaccctggcccttctacttcctgactgtgtgaccttacacacactccatcacttcactgaggctcaactttctcatttgtaaaatgaggctaataattacccactggcattatagggctgggggacagatatctgagataatttttgtaaaatggctgccattccatacaccccaagatgttgcttcttgccccctcctcatatcacagaaaagaa

SEQ ID NO: 863764 - DNA, 600 bp, Homo sapiens
gagaactgagatttcaacttgattcccataatttagacttcagcttttggaacaacttctgtcttcaccagtgtgtcctgctttgatttccaagcacgtaagattctagagacacattttttggtctatttcaattgcacattcataggacttgtaaatataaaagaggcccataaactgagaggtgctgggtaatggcctttaaaacagtaggttttatatcagaatctgaacagtggtccctaaatcgggcatctgggtttgtgccctccaagtcttcaaacccaaggtgagattctgcgtgtgcttcaagatgtgtctggaggatcataatgcaggaaatacagagcccagttttatgttcatctttatctttatattttgaaccctggcccttctacttcctgactgtgtgaccttacacacacyccatcacttcactgaggctcaactttctcatttgtaaaatgaggctaataattacccactggcattatagggctgggggacagatatctgagataatttttgtaaaatggctgccattccatacaccccaagatgttgcttcttgccccctcctcatatcacagaaaagaa

SEQ ID NO: 863765 - DNA, 658 bp, Homo sapiens
cttgaaaaccttattctaagtgaaagaagccagtcacaaaaaagatcacatattatatggtaccctttacaggaaagtccagagaaggcaaatctatagagacaggaagtagattagtagttgacaggggctgggattagggaggggatggggaagctgggaattgatggctaaagggaggtgagactttttagggggataatgaaaatatttaaaatcattggtggtgaagaatgcacaactctgtgaatgtgtcaaaagccactgatccatacatattaagtgggtgaattgtgtcgtttgtggattatatatcaataaggctgctaaaattgaaagtttyttagagaagtgagagatggcagctctttttcaaaagtcttgaataatgatttgacctttaaactataagcatgtataacacagaagaaaacaaaaattaaattagaaatcacacactaattctggaaaaaaaaaaaaaaaaaaaaggaggaatagtcctgtaatgtattactgtttctgttttacagagaagaagccaagattcagagagggctaaatgattcactcaaggtcaggttgctaataaacagaggagccagaattggaacttaggtcagtttgagtcctaatgtttaaccatttctaggcataagaa

SEQ ID NO: 863766 - DNA, 658 bp, Homo sapiens
cttgaaaaccttattctaagtgaaagaagccagtcacaaaaaagatcacatattatatggtaccctttacaggaaagtccagagaaggcaaatctatagagacaggaagtagattagtagttgacaggggctgggattagggaggggatggggaagctgggaattgatggctaaagggaggtgagactttttagggggataatgaaaatatttaaaatcattggtggtgaagaatgcacaactctgtgaatgtgtcaaaagccactgatccatacatattaagtgggtgaattgtgtcgtttgtggattatatatcaataaggctgctaaaattgaaagtttcttagagaagtgagagatggcagctctttttcaaaagtcttgaataatgatttgacctttaaactataagcatgtataacacagaagaaaacaaaaattaaattagaaatcacacactaattytggaaaaaaaaaaaaaaaaaaaaggaggaatagtcctgtaatgtattactgtttctgttttacagagaagaagccaagattcagagagggctaaatgattcactcaaggtcaggttgctaataaacagaggagccagaattggaacttaggtcagtttgagtcctaatgtttaaccatttctaggcataagaa

SEQ ID NO: 863767 - DNA, 615 bp, Homo sapiens
gctgccatcatgaagaaagatatgcatgtaaaacatagagacattctacttagagatggcggaagtgaggctcagagaggcagactgactggcctaaggtctctcagtgctctggtggcaaagcaggcctgagctgaggcctcctgactccttgtacagtgctcttcccaccccatgcactttttgcagcagccagcttatttgctgcatttcagctgggaaagggtgggaatgggtccagtggtcaaggctgaggagtgggaggaaagtttcacttgggacagacccaggctcgtgtttttgccctcacagcttccctccgtcttcctactcataaatctgctccctgccctaatccccacatagttgaggaacatactctctagagtgcaccccagtggaacctttggctgctgctaaattaatttcaagctragagtgcacaggtttggaggctgcaggtgggagctcatgcaatgattctggggaagctcaattcaactcctgctgctctgaacaatgccctgggattgatgaacgcagagacggtacgatgctcagagtaaagaagtgataacccactctgtgggacactggtatccagtcctaggcacc

SEQ ID NO: 863768 - DNA, 643 bp, Homo sapiens
gaatggctattaactcacgtaataatctcaataggtatgattatttttccagttttacagaggaagaaacccaggaaaaactacaacttaccttaaccagcaatttgctcaagattacatagaaagaaaatgagaagatgggattggcagaccaaactggaaaatgggtaccaatacygagaatctatgtgccacactacctctttcctttccttttctctgctgttgtgttttataggggattccttcctcagcaggatccacatgcactggaattctgtcctgactccatgtttgcctctttgctctagaatttaggctggacaaagcagaaggaaatccaaggtccccttgacctccatgatgaacagccagctccatgcatgccacttccttactgctcagagcctgctcaggctattccagcagaaggattctccatctctgcagactcacctgctccacagactaaatgggagatgaaagaagatgaaggagagaggaggcatcctcaataacttctctgttccttctgaaaaatttcctgtctacatcccagagacttgaaatgcacagaaatctagggaagaggggtctaaagcagaacagttgactagggccatttgatgcagccattttaacg

SEQ ID NO: 863769 - DNA, 602 bp, Homo sapiens
taataaataaataagctccctccagaggagattttgagccctgctgtatatcaggcaccctgctaggcattctatataatctatattctataatatatattctatattgtcatacatataacatatatatgttatttcagctagtctgagctttttgtcagagcagggcctgagcaacactgaatgtccccggggtaagcccccactacctgcagaggcatgagtccctatcatttttccagttctcctgggaacccttgtggagtccattctccacccccatcttcagcttcccctcactgcaaacttccacttttgtgtgaggctgtgaggtgtttctcttgccgccacatccattccctgaggagacaaagcggccagcagcaggtgcaggcagataactcttgtcatcttcctccatttcctgcaccaggggcttcagagacttggcagtatggtgggaccayggactccggtacatggacctgagcttaagtcccagctggctgccatcctgcgggattgctgtgtaatcttaggcaagccatggcaccctctggaacttggtttttttattctgaaaattgatggggattggaaag

SEQ ID NO: 863770 - DNA, 498 bp, Homo sapiens
tgaggaagagtcagggccttaagaggtcatggccagcacaagctaagaggaggcataagccaagaggaagcagaagctacgaggtaaaaggaaatgacctcccatttttggcaggttttgttgaacgtggacttggctaagggagtccccagtgatcctagagatcccttactccttgatgagacacacacacttgtcctgtcaatgcgcccccattagtagagggaatctattctcaggacatagtgaagtgacaccgaaatacttgtcccctgcttgcttttgcacttaattacccctactcactcctttcctccaattctgcacctgatgctttagccacagatggytgtgctctccgaatgtgctgtgatgttgagagactctgcacttgctattccctttgcctggaatgccacctcccacctgttcccaggatgctcacctttcaagttgccttccctgggaggtttttctaaccacttccagcctcaactg

SEQ ID NO: 863771 - DNA, 653 bp, Homo sapiens
gtcaggcatggaagaaagacgactatctgactatccttacatctgggaaggaattagcagcgaacagggcaaatgctagagggtctaatcaggattataaaatgtcatttagaaagatatttacattgttaattaggcaatgaagctgataactgctactctgtacatcgtgctaattaccctggtgccttggaagactttctaatcagccagatcaatagactcctggtttatgctaatcacacagagtcaccctccttctgaagtgctttgcttatagcagcctgaacccagttcagctcctgcccactgtcctgtgctagaggcagccagcattcatctgtctgcccacatcacagcagtaaggctgatgcctgctcacccccaaggcccacagcaagggaactagaatcctaccatgcagcacgccgtcatcaattgttcaggaaggaggcctgagcctttgtgctccatgagattttcatgtagccacagctctgttytcttccgacaatgagaaagatcatatagtcccgagggataagggctatgaggaagatctagatttaagtctcctctgccatcgactttgacggtaacgaccttggagcaggacaccaattgttttgatgggaatgtgtgcaggaccaggt

SEQ ID NO: 863772 - DNA, 620 bp, Homo sapiens
gaggtatccatccacgcccaaatgctctgactcacaggtctatattgacatgtgtccacctcagagctgaacactgtcctaccgtcattttgattaggccattttgataaaaggaatgatttagtatgatatttatttatttayttatttatatttatttatttatttttctgagacagaatcttgctctgttacccgggctggagggcaatggcaggatctcggctcactgcaacctctgcctccgtggttcaagcgattctcctgcctcagcctcccaagtagctgggactataccaagatgcctggctaatttttttttttttttttttgtatttttagtggagatggggtttcaccatgctggccaggctggtttcgaactcctgatctcatgatctgcccgccttggcctcccaaagtccaaagtgctgggaaaacaggcgtgagccaccatgcctggcctggtatgatatttataatgttgccctaaacctcactccactcctagctacacgtacatggggaataaaagatgagggaagtgaggagagctgctagtgaagggttggggatcgaagatgggctggggatgcaatggttaccatgtgtctgttggg

SEQ ID NO: 863773 - DNA, 647 bp, Homo sapiens
gttcagcccagctcttactatcctgcagaaaatggtgcatccatccaccaatgggaggtgatgggctcctggccttgagggttactgaaataactgcaatcgtggaaagtggaattagctttgtccccatatgtttcataacattttgtatctcttcttgcctcatccatatctgtattgcaatcatttgatttcaaagcatcctggggcaatgcaaaagctaggtttcaggacagacatgctgtgttaacaggttgcagttgactgtgagctgtagggtttgggcacatccataagcttgctgagtctgttttttactttgtaacgtaatactaactacacatactccacaggatgttcaagagtcttaggtgatctcatgcatgtagttaccttagggtaatgttggcccaacatattacggttactccaagatgagtaatatgagctttcagcctaaaacgttaccaagaraactaatgaaatgccaggcaacattaacagaaatgtggtgaccaggaaaaagacaacgagagttaacagttaaagtaagctggtaagatcaaacctgaatcctggggtctcttccaagaattacacatcaaaagtgattttggcaagcagacacacagtcagaggacaatggt

SEQ ID NO: 863774 - DNA, 647 bp, Homo sapiens
gttcagcccagctcttactatcctgcagaaaatggtgcatccatccaccaatgggaggtgatgggctcctggccttgagggttactgaaataactgcaatcgtggaaagtggaattagctttgtccccatatgtttcataacattttgtatctcttcttgcctcatccatatctgtattgcaatcatttgatttcaaagcatcctggggcaatgcaaaagctaggtttcaggacagacatgctgtgttaacaggttgcagttgactgtgagctgtagggtttgggcacatccataagcttgctgagtctgttttttactttgtaacgtaatactaactacacatactccacaggatgttcaagagtcttaggtgatctcatgcatgtagttaccttagggtaatgttggcccaacatattacggttactccaagatgagtaatatgagctttcagcctaaaacgttaccaagagaaytaatgaaatgccaggcaacattaacagaaatgtggtgaccaggaaaaagacaacgagagttaacagttaaagtaagctggtaagatcaaacctgaatcctggggtctcttccaagaattacacatcaaaagtgattttggcaagcagacacacagtcagaggacaatggt

SEQ ID NO: 863775 - DNA, 612 bp, Homo sapiens
tataaaaaaattaagaggttactagtagcttttgagaaaagtatagtctgttatacaaggatatttatgtgatatataaggttgcattgctttcacaaaattgatttttaaatctaactggtaaaataaataaattaggagaaatagtaggcagaataatgctttcccacaatccacaaaagatgttcattccctaatgcttgggacctgtgtatatgtttgttgtttgttcatacagaaacagggtgatatggtttggctctgtccccaccaaaatcccatcttgaattttagcttccataattcccacgtgtgatgggagagacccrgtgggatgtaattgaaccactgaggcaggtctttcccatactgttatcatgatagtcaataagtctcacgagatatgatggttttataaagggcagttcccctgcacacgctttcttgcctgccatcatgtaagacatgcctttgctcctcctttgccttctgccatgattgtgaggcctccccagccacgtggaactgtgagtccattaaacctctttcctttataaattacccagtcttgggtatgtccttatagcagcgtgataacagactgatacacag

SEQ ID NO: 863776 - DNA, 634 bp, Homo sapiens
aacaccttggtttcagaactccagcctccagaactgggagacacacatttccaaattcttgtttgtttgtttgtttgtttgttgtttttgcatgtgtgttaagctacccagtttgtggtacttcgttgtagcagatttaagaaacaaataaaggaatatttcttcttttcctaaagtaggagaacagaaatagcagctatgttgtaaccatgagaagagcaaacctgaggatgaagcagacgcaagaacaagatggctgagagttatgatggagtcttgaccttccgaggatgaaatctcaacctttaggttttttccataaaatgatatccttttttactgaacaagccagtctgagtgacatttttctgatactttcataagtatgggaaacacacacacacyctctcgtgtgtgtgtgtgtgtatatatatatatatacatatatatatacgtgtgtatatatatatgtatatatatatacacacacatacacagacatatggtgtagtatgtatgtttacatatatatacatatatatttcatatatctgttacagagacataagtgtgctggcacttcatttaatcaccatttatgattgtacattcactatctgtgctgttctctgtt

SEQ ID NO: 863777 - DNA, 634 bp, Homo sapiens
aacaccttggtttcagaactccagcctccagaactgggagacacacatttccaaattcttgtttgtttgtttgtttgtttgttgtttttgcatgtgtgttaagctacccagtttgtggtacttcgttgtagcagatttaagaaacaaataaaggaatatttcttcttttcctaaagtaggagaacagaaatagcagctatgttgtaaccatgagaagagcaaacctgaggatgaagcagacgcaagaacaagatggctgagagttatgatggagtcttgaccttccgaggatgaaatctcaacctttaggttttttccataaaatgatatccttttttactgaacaagccagtctgagtgacatttttctgatactttcataagtatgggaaacacacacacactctctcgtgtgtgtgtgtgtrtatatatatatatatacatatatatatacgtgtgtatatatatatgtatatatatatacacacacatacacagacatatggtgtagtatgtatgtttacatatatatacatatatatttcatatatctgttacagagacataagtgtgctggcacttcatttaatcaccatttatgattgtacattcactatctgtgctgttctctgtt

SEQ ID NO: 863778 - DNA, 496 bp, Homo sapiens
tatttgttcttatcctgaatggttctgtattactagggtttttggttatctctgttgctaagagtttttattttctgtcttttccatcattatcaggcacttgtatactcttaacctattgccatggtgtttgactccttactctaatacacaygcacatacacacacacacacaaacttacactctgtagaaaatgctactacatgtgttaaaatgtacataaaaatgatgtattttgggcatgagagactgaaatattctcccataaataaaaaatgctttatcaacttccttttgcctcagctaacctcagcatagcggtagttagaagatacatgaagttgtttccagtaaagaattacagtgcttctttattcaattgtttacttattttgatgtgtcatatttaaatatactaagacagttttctgaaatcccatagaaactatcaatgcttttttagaaaatgccatttgactataaataagtttaatt

SEQ ID NO: 863779 - DNA, 706 bp, Homo sapiens
tgagttctcatgagatctgatggttataaaagggactcttctcccttcactcctcattcttccccttcctgccactttgtgaagacaaccttgcttcctcttcaccttctgccatgattgtaagtttcctgaggcctccccagccatgccgactgtgagccaattaaacctctttcctttataaattacccagtctcaagcagtttttacagcagagtgagaatggactaatacactcacctactcaaaactctaataaaaagagtagaatgcattataatatggtctgggtctgtgtccctgcccaaatctcatgttgaaatgtaatccccaatgtcggagtggggacatggtgggaggtgactggataatcggggcagatttcccctttggtgctgttctcatgagagtgagtgtgttctcactagatctggctgtttaaaagtgttctgcacctcctccctctctcttcctcctgctcaggccatataagatatacytgcttccctttcaccttctgccatgatcgtgagtttcctgaggcctccccagctatgcttcctgtacagcctgtggaactgtgagccaattaaaccccttttctttataaattgcccagtgttaggtatgtctttatagtggtttgagaacaaactaatatatattataaacaaaatttaaactctattgctatggacagagtcct

SEQ ID NO: 863780 - DNA, 663 bp, Homo sapiens
agttagattcttgcttagtcaattatgcataatggctgtcagtcaagttctcctgtttgtgtccttgcaaaacctggggaggggaggaaccaaggctgtgatgtgtttaagggtagcactcttactttagtggaagcagctgcagcccaagactcgcaagctgagtcttctctctgtaaacagaaaattctgttcattgtcatatacagaaccaagtccttagggagactacaataagatcttcgggatgctcatttgtctctcagcctgaatttcctgcaaattttctacatgcgttgggtgcttcaacaatggagggtgactgttaaaggttgaattgtgtcccccgaaattcatatgttgaagtcttaccaccaaataccgcagaataggaccatatttggaaatagtgtcattacagatatatttagttatgatggggttgtackggagtagagcaggcctctaatccaagactacagtgtctttataaggaggggaaatttagacacagagacacccacacgaagagaatactatgtgaaaatgaagggggcaaggattgcggtgatgctcctaacaagttaagaaatacagaagattgccagaaaaccatcagaagccagggaagaggcacataactgattttccctcaaaatcttc

SEQ ID NO: 863781 - DNA, 448 bp, Homo sapiens
cacccatgtattcattcatccaataactttctgtgggccacattacactctgtttactattctagacgctgggggatatatgtgtgaaaaagatagtagaagttcttcttccaaagcaccatatactgctccacactataaacctctttaaatgcttttgtcctaccattgcttcaataagcaattcagatttccttctcytatttactgacacaaacattcctttaaaccacctgccatccctatggacttcttaaccactggtatcttaattcagtttcctcctttgattcgagaacatctgaaacattgttttctatcctcagcatcatgaaaccctaaacatacaggtttctgtcttgctgctggggtgggaaatttggatcagtatgtgacatattgtacaaatgcaactaatgtatttacctttggcttttctgctggtttt

SEQ ID NO: 863782 - DNA, 570 bp, Homo sapiens
tttccataaaacggccttttaaaattagaaaatgtataattcatttggggtggttattaccacttttgggagggatttagacttgtatttaaatgcaaataggtgtattttttgttcttccatttacacataggaagccacaaaatttargaactctatgatgcaaccttattcttaactatgacttctggattacaatatcaataacaaaagagatttgcttggtccattaaagtttgcagctgtcttaaatttggtcttcctcacttccataagagagaatacccattgtgcacatgaggaaaatgaggcccagataagttaggtgatgtctccgaattgcacactgaggatgtggcagagctgtaacttctattctgatgagagagcaaatggacaaacataaacagctagagagggtcaagaatgggaacaaggtagccagaaaatggatgaaaaggggagagaacagagaagcaagaaaaattttagaaggcagaaaatatctagacaaggagggccaagaaaactattgaacaagagtgcagcactttgcctcccacctctgac

SEQ ID NO: 863783 - DNA, 659 bp, Homo sapiens
tactgaagaactgtcctattgaaatagtcggaattgtcaccattgaggtcacctttgcattgtttcaaggatgcctataggatattccaactttagcattttgtaaaaggctaattgaaataataggtgctcaatacatttgtgtttagaagagttttcagttttgcaatgctgtgacttttataatattgcataactctaattatccttgaaattctgttcttgacctatattaaaaagaccaacatttttcttcttttaagcacttggtttccagaaaatgctatgcacactcatttcctataacctttccttcatgaacctacattatagcctcagcacttctcaaagttccagctatcagaattgggggaaatgcagcagctagggacccatttgtgaattttagtccatcattaagctgtttacatcttcaattctaggaagaaaaactgaagatggaccacctcgggctctggcattgctaattctcctatttataaaatkatcttttaaaaacatatatattttccaagttccttctttgtgtcaaacactgatgtagaagccttgcaaacattattattaagacaacacttcacttgcagattatttccccattttcaaaatgaggaaagtatgttctagtgagatttgta

SEQ ID NO: 863784 - DNA, 576 bp, Homo sapiens
ttagtctttattgcccttgttcttccttctcaaggggactgttgctttcctgttttccaagattatttactgctcagtcaatactacttcatacaatcgggttcctgcatattttcctccatccttttaacctccttttttcttctcactgttttctaattcatatccaccaatccagaaatatttcttttcctctccttctttccaattcatcagtaggtcaataaacgaccctgaccatgcctaataagaataatgcacatagtrtatctatttaggataaaaaaaaagatgctctgaaattcagctagaaatgagaaaatcagtcaccagcttagaagatcctgccaaattttctgaccaagtctctacctaactcttctaatcaaattttcttccatcattgacactgagtttcatatttaaagaatttctctttttatggtagtgtttatctggcactattgtaatggtatcttttttaaaaaaaattcattgccggcatatactctactgcaaataactttttgaagctcacctggggaagtgaatcttataactattaattcatatgaa

SEQ ID NO: 863785 - DNA, 660 bp, Homo sapiens
tgtaagaggacatactgatgtgaacccaggaaaggaaaaatgattattgaatcttggggaaagtgtgcatctcccagtctatcaaaaaactctcttgacccaatgacacagagctgtctaccccactgatgatgtgaaatacctatagggaagaataggctcaatggtggcttaacccaggaaagctctagctttagtctctgtaagacatcttcaccccagacttccagcatgtgccttcttgcctacctgctcttccagaactccaactccaccttaggggtgggattctccccttgtaagagtggctgggaagactctctcttgagtaccacctggacttggtagctccatttgatcactgcagactcaatggcatagatgactgacttatctatagaatccaagctgtgaaagacaaaacaacaacaatgataacaacaaaaacaaaaaccctgargcgtgaaaataaccctgggtgtaccccaagacagaatcccaaatttaaaaaaataggtgagaaatttcatctagcccatgcattcttaacttttttggataacagtctctgttgactagtcaacgaaaattatagatcctctctccagaaaaaaaaaatgcttatgtgtgtgtatgtacatttttcatacagattcaggg

SEQ ID NO: 863786 - DNA, 572 bp, Homo sapiens
tttaaagaaagtaacttagctatatttggaagcagttaaaatttttttaatacattttggtcattattttcacagtcttaactgaaaatgataggtgcaaagaatcaaggacacaacgacaaagaaagaggacatacaattcacatttttatgtcagaaacccacttccacttcattaaattaaatttatatttgctgagaaatgatacggcacaagtgattgtggaagrtattaaaggaagaagacacccattcccccaaaatgatccagtcttttgggaaattatcaaacttgaacaaacagagataaattcagcaatgattagaaacacacactgaatgttacaaagttaaaatataaagggactagaaaaggggtagtttgaatttatttattttgaagattggatatctttattaaaccgcaataagttttccaattaactgggaaattacttcaaattgtatatgtaggaaattacttctgatagaaaaaactcattataaagtacattgttgtattttataatgcattgcacgcatataatctgttgcatgcgttacttattctt

SEQ ID NO: 863787 - DNA, 599 bp, Homo sapiens
ctggagacaacagggaagggcatgccagtgaggaaggagggaggtgccttgccagcctgtggggatttggctgattattattggtttggttgggattatggagaattatttcctttatatggtttggctgtgtccccacccaaatctcatcttgaattgtagctcccataattcccatgtgttgtgggagggacccagtgggagacaattgaatcatgggagtggtttcccccatacagttctcatggttgtgagtgagtctcacaagatmtgatttttttttttttttttttgacagagtctcgctctgtcacccaggctggagtgcagtggcacaatcttggctcactgcaagctctgcctccagggttcatgccattctcctgccccagcctcccaagtagttgaaactacaggtgcctgccaccatgtccagctaattttttgtattttttgtagagacggggtttcgctgtgttagccagggatggtcttgatctcctgacctcgtgatccgcccacctcagcttcccaaagtgctcacaggcttgaaccaccacgccaggtcgatctgatggttttataaggggaaatccctt

SEQ ID NO: 863788 - DNA, 624 bp, Homo sapiens
atgaaaaaaactcaacatcactgattattagagaaatgcaaatcaaaaccacaatgagattccatctcacaccagtcagaattgctattattaaaatgtcaataaaagaacagaggctggtgaggttgtggagaaaagggaacacatttatacactgttggtgggagtgtaaattagtttatccattgtggaaagcggtatgstgcctccacaaaagctaaaaacagaaatactgtttgacccaggaatttcattactggacatatatccagaggaatataaatcattctactataaagacatatgaacgcaaatgtttattgccacactcttcacaatggcaaagacatggaaccaacctaaatgcccatcaatgacagactggataaagaaaatgtggtacatacacaccatggaatactatgcagccataaaaataatgagatcatgttttgttttttttttttgggaacatgaatggagctggaggccattaccttagcaaactaatgtaggaacagaagaccaaatgctacatgttctcatttgtaagtgggagctaaatgatgagaactcgtgaacacaaagaagggaacaacagacaggacactggagcccccttga

SEQ ID NO: 863789 - DNA, 624 bp, Homo sapiens
atgaaaaaaactcaacatcactgattattagagaaatgcaaatcaaaaccacaatgagattccatctcacaccagtcagaattgctattattaaaatgtcaataaaagaacagaggctggtgaggttgtggagaaaagggaacacatttatacactgttggtgggagtgtaaattagtttatccattgtggaaagcggtatggtgcctccacaaaagctaaaaacagaaatactgtttgacccaggwatttcattactggacatatatccagaggaatataaatcattctactataaagacatatgaacgcaaatgtttattgccacactcttcacaatggcaaagacatggaaccaacctaaatgcccatcaatgacagactggataaagaaaatgtggtacatacacaccatggaatactatgcagccataaaaataatgagatcatgttttgttttttttttttgggaacatgaatggagctggaggccattaccttagcaaactaatgtaggaacagaagaccaaatgctacatgttctcatttgtaagtgggagctaaatgatgagaactcgtgaacacaaagaagggaacaacagacaggacactggagcccccttga

SEQ ID NO: 863790 - DNA, 606 bp, Homo sapiens
gacctgaaaggattacagaaacctgtagggaccaaagagtctctcatagctacatttttcctttttctgtactgtgcgcatactgctttggaaataaaagcaaacacaagcaaaattaaaccatttttgattatatggtgtgcggcacacactaggagtaccaggcacataattgtcccaagcacctcgccacagctttgatcatcacatggtgcccttgtgattgctttgctctgttaagggcaggatgggggttctgaaaccagccgcccctagcaggagaaggggggtgctcascctgcagggaggcatgtggaatagaagctggcaaacgatgtgctttatcttggagatggggttcctggggggaatggagcctgtgcagctgcagtaagaatccttgggagagactcttgacttgccctcagccaccagttttcctactgctcagcccctccttcatattgctggcaaatagaggggcaatctccctcccagatgtctctgggggttctctgatgcctgctgaggaaggcatttccgcctgctactattgggttcgaacttgtctctctggccttattttctcctctggcattttaccca

SEQ ID NO: 863791 - DNA, 621 bp, Homo sapiens
caccaaactaagaaagaaaacaaaacacataagttgacatccactaagattcgctttagtgataaatctacaattccattttagctctgatgtttttcttgacaagaagagaaatacaccaaaattgcagaaatgtttggtttcccagcagttcttttcaaagcatcctcttccagggattcatctgcatgtcaaattagcagatgtgaatttggaacacccagctaagagtagcagtatcctcacagccagcagatacaagtgcaaagaaagaaaaacgaacacaactatcaaataaaaataaaatgaaaaaacaaacaggagttgatcaatacacaaaatatacccatgaaggaggaataycgaatttcgaacagacacaaaagcacaccaatgttgtttccctttcaagcagtcttagaagtctctttgggaggatattttccccaacatctttgaatttttttcttttttgaaattatcttaagagactgttgggccgggcgtggtggttcatgcctgtaatcccagcactttgggaggccaaggtgggaggatcacgaggtcaggagttcgggaccagtctgaccaacatggtgaaaccctgcctctactaaaaat

SEQ ID NO: 863792 - DNA, 333 bp, Homo sapiens
gacacacaagcaaaaccctctgcccaagaggggtcatcccagggcaatggctggggctcaggcccagcctcatgggcagactgggccaggacccgacttgagagggctcagggaagcctcaagccctgggcaagcccctctctccaggagccacatccccactcaaatgagtgccycccatgaggagcttcaagaccttgtctgacccagcgtcctggagggctcaggcgaccctcatggggaaggaaggtcactgactcaggagactgaagccccagtgtgcgcagctcgagccaccagccccagcctggaaggaccaggttctttcacacc

SEQ ID NO: 863793 - DNA, 647 bp, Homo sapiens
aggagctgaatgatttttactcttttttttttttttcctattcctggctaaacagaatttgcttttctttcacttcctgccgacttcatggtatgtctatttcctctgctcctttactgacttttgaacaaaacctacttttgtttctgtcaagttttcttgttaaaatatccttgccaaaaatctttaggattattattgggggaggggattactttcctttttaaatggatggttctgaaagcagcccttyggcggtctagatttagaaaaaataaagatcataaactaaggggagtggggactgagaaaaattgctgttttcatttcaagacttacttttatttaaaaatgttctaaacgagttatttcaaaagtgattctaaacattcttggcatttttggtggcaggccagacagaccaggctctgctctacttaaataatctttatgtatatatatatgcacacacacacacacacacacacacacacacacacacacatatatataaataaactgtggtagctttatttgtatttgaatgcaagacattttgtggttctgtaattccaaaaaaaagaagaaagaaagagaaagagtgacttcagcagaacagctctctgcaatcagccaagaacaaggaa

SEQ ID NO: 863794 - DNA, 576 bp, Homo sapiens
acgtggtgaaaccccatctctactaaaaatacaaaaaaaaaaaaaaaaattagccaggcgtggtggcgcatgcttgtagtcccagctactcgggaggctgaggcaggagaatggcgtgaacctgggagacagagcttgcagtgagctgagatcgcaccactgcactccaggctgggagacagarcgagactcagtctcaaaaaaaaaaaaagattcatactcatgccctttgttcggcttcacagacacacatatgcaacaaagtggcaaaaaaatgtcagtgtctgagatgtaaacaaagtctttgctttcctgttttggctctcaatactgtaaatgagtgtcctttgtgaagtattttaggtattttagtacaatattttaactttttttgtgcttatcgttggtgatttattgtttttaatggcctccaagcgtagtgctgaaatgccgtctagtgttcctaagtgcaagaagggtgcgatgtgccttatggagaaaatgcttgtgttagataagctttgtctgggcatgagtgatagtgcagttagacatgaagtcagtgttaatgaatcc

SEQ ID NO: 863795 - DNA, 516 bp, Homo sapiens
cacttgtcaagtcccacatcaccaacagatcaagcctcttaccaattttgttatttgtaggtaagaactcattattcaccgtctggaccaggcctggtggtttattgcatattcccaaattatactgctttggatttcttctctcttttaaaaatacttactcaagcataccccacatgcttccatgtctaagttaaagctttgtgatttgctctttttttggtacaactgtgtaatgtgccaacattcagtatgtttcccttactcttttctattagctgtgtcttygaaataattatgcacatctccaaatgacagcagcctgagatacacaagcaacgacaggtgttgacttgcctataagagaaatcagtcttaaggggctaagtacaggaatgaattccataggcgatttgtagaaaatgactgtaattagaagtgggaagagaagccaggctaaatggcagaagaggggcaagctgacagtgctcaagcggaaaacaggcaggcatcacg

SEQ ID NO: 863796 - DNA, 589 bp, Homo sapiens
tgcttataccaatggacataccataacagtttctgagagttcccattgatactcatgcttgctagcatttggttttgccagacattttaatattctcttattgaggatatcatggtcttactgtggtcttaatttgcatttccctacagtaagtttggacacttttcatgtatttattagctatttgaatctcctcttttagatgtgtccattcaagtgtttcatctatgtgtgtgttgtggggagcatttttcacctttttcatttttatttgtaagagttctttatatatttgtgatactagccttttgtcaattttaagtgctgaaaacaaacagatgccaaaaagtaaaaacaacagcaataacaacaaatcatcagtggcttttctttttcaycttacggtatcctttgatgaagaaaattcttaattttaatgtcacatttagccattttcttctttaaaaatagtgtttcttttctcttttaatatgctttccctatccaataatcatgaatgtatttttctatgttaccttcttaaagttcccttcttctaatctctgaaagggtttgtataggtttgaat

SEQ ID NO: 863797 - DNA, 665 bp, Homo sapiens
tgttatacacataaatacaatgaagtcttagttatttgatggcttatgtccttttatttgtataattgtccctagtgtttgtcctgttgctcaatgtctcactacttggttagttttaggtattgtaataggagtgaagaatgaaagagaaacatagggtgactttaaaaatttttttttttttttttttggkgagatggagattcactcttgttgtccaggctagagtgcaatggcgcgatctcaactcactgcattctccacctcccgggttcaagcgattctcctgcctcagcctcctgagtaactgagattacaggcgtgcaccaccactcctggctaatttttgtatttttagtagagacggggtttcaccatgttacccaggctggtcttgaactcctgacctcaggtgatccgcctgccttggcctcccaaagtgctgagattacaggcatgagccactgcacccagccaactttttaaattttatttatgtaatctttatcactttcctggagagtgcttacttatgtccaaggaagctgttatgtgctgacaagatcatgagagaaaaaagtgaggaaaaaatatccaaaagcttgcaatatagtaacattaacacaaagcagctaagagtaacgtagatagtcacagtcatttct

SEQ ID NO: 863798 - DNA, 504 bp, Homo sapiens
tttatttgtataattgtccctagtgtttgtcctgttgctcaatgtctcactacttggttagttttaggtattgtaataggagtgaagaatgaaagagaaacatagggtgactttaaaaatttttttttttttttttttggtgagatggmgattcactcttgttgtccaggctagagtgcaatggcgcgatctcaactcactgcattctccacctcccgggttcaagcgattctcctgcctcagcctcctgagtaactgagattacaggcgtgcaccaccactcctggctaatttttgtatttttagtagagacggggtttcaccatgttacccaggctggtcttgaactcctgacctcaggtgatccgcctgccttggcctcccaaagtgctgagattacaggcatgagccactgcacccagccaactttttaaattttatttatgtaatctttatcactttcctggagagtgcttacttatgtccaaggaagctgttatgtgc

SEQ ID NO: 863799 - DNA, 628 bp, Homo sapiens
aggagagaagagctgccaactcaacccagggtaagcttctcagttaatttccctggtcctcttttagaggagagaaactgatgtcatcggtttaattccagggcactttattagcccatgttcacaaggatcagtggcttaccttgagtgctttcaggaagcagagcctgaaacaaaggcttgtgtagggtagtttatttgggggtgtgatmccagtgagtggagaactgagaaagtgtaccaggaaggagaggaagacagtccaaaggctattgagctggttacaaccatggaacacgggatctcaatcctgctgggaacatgtgaaggtaccctgacgttgtctgcctgggatgctgaactggggggcgttgatcccctgagtcccctaccctttggatgggaggtggttaaatccatcactccagattagcctatgtgatggaatggcggagcaggctccacagcagagcaaaaagctgcagggcagaaagcaccaggtgcagctgagaggtgagttgctctccagatacacctatatggagtcatccagctgctatagtcatgtccaaagcaaaaatgaaggacaagaggatgtgagatggagcataaaaagtgatcagtacac

SEQ ID NO: 863800 - DNA, 615 bp, Homo sapiens
ggactcacatgcaagattaacaataaaatagaaggtcatcaaactcagaaggaagcaatattctagttcatggggctcttgtccagtgttgtctgtattagaaaaagacagtgtcgggccaggagtggtggctcacgcctgtaatcccaggctgaggcgggcggatcacgaagtcaggagttcsagaccagcctggccaatatggtgaaatcctgtctctactaaaaatacaaaaattagccaggagtggtggcgcttgcctgtagtcccagctactcaggaggctgagacaggaaaattgcttgaaccagggagatggaggttgcagtgagccgagatcgtgccatcgcactccagcctcggggacagagcaagactccatctcaaaaaaaaaaaaaaaaaaaggaaaagaaaatgacagtgtcatgtctgttggagaaagttaggagttcttgggatatcatctcaaccacatacaggtaatatcacaaaggatcagtgttccagggcaagaacttacctggaatagtgccaccaccaaaatttacctggtgagaccattggtatgacctaacatgttgcttctgatacatgcatctttggtcattttccatt

SEQ ID NO: 863801 - DNA, 615 bp, Homo sapiens
ggactcacatgcaagattaacaataaaatagaaggtcatcaaactcagaaggaagcaatattctagttcatggggctcttgtccagtgttgtctgtattagaaaaagacagtgtcgggccaggagtggtggctcacgcctgtaatcccaggctgaggcgggcggatcacgaagtcaggagttccagaccagcctggccaatatggtgaaatcctgtctctactaaaaatacaaaaattagccaggagtggtggcgcttgcctgtagtcccagctactcaggaggctgagacaggaaaattgcttgaaccagggagatggaggttgcagtgagccgagatcgtgccatcgcactccagcctsggggacagagcaagactccatctcaaaaaaaaaaaaaaaaaaaggaaaagaaaatgacagtgtcatgtctgttggagaaagttaggagttcttgggatatcatctcaaccacatacaggtaatatcacaaaggatcagtgttccagggcaagaacttacctggaatagtgccaccaccaaaatttacctggtgagaccattggtatgacctaacatgttgcttctgatacatgcatctttggtcattttccatt

SEQ ID NO: 863802 - DNA, 577 bp, Homo sapiens
tatgtgtgtgtgatttcagggttatcttctgggttggccccctgcatagaatatagctctgcaagccacggaagctcattcatagacgccagttttgccctttctcagctctgggcccagatactgcaggctaatcaagctggaaatctgggcttaatcattaygtgaaaataacctctgtggcatgcagtttgggggttttccctgtaatgtgcttgatacttcctttgaaagaacctggttgtacataccttaatgtgtcacccttccaagcagtcaccttgggaggccgcatgctgatttttctgcagaaaatgtttccacggtccctctcttgaaagtacattgagagcccatggcatgtcattttgactttatataagggtaacatattttaattttcctagggttgatttgattcttgtaagcaatggtaagtcatggggctgagtctgatgaatgagataggtgatcagaaatcaagagtgcctccagtaatgagacttgctctcctaggagccgtgtcagctgtctctgaaggcaggagcccagaagaggcatttcagaaaggagtgaa

SEQ ID NO: 863803 - DNA, 629 bp, Homo sapiens
atgcaccccagaagtaagtcttcctggatgaggctctgcagttagggtgtctgcttattccagtttgatctgaggaacttcaaatgagttgttagaagtctgagttgggattaggtttgcacatcccatttggtgtgtcagacagacagggatggattcctcattctgagacttggaggtgttgcatgatttttgcaggagttgctgccgtttgctttcttcccttcagcttgttgcaaatgatacatctgggggacatatcccaccacccctcaatccttgagaggagcaaatcttgccttgcagttgggaaaagttttgtcttaaaaaggggagaaggggtgtcattttattgtttgaaataatgattttgacaccttttaaaaamtgaatcctactgacagtttggaggcctttgtggaattaatcaagtttgatccaatatgcatttaatgagagcttactttgagcgagggactgatgggacaggaatcaatttccctttttgcccctgggcttgtacagactatgcgcccatgctgcagaggtctgtgtttactatgaaaacctgtggtcaagacacagattagcgtagctgggaaagggctcttgtgcactttgtagaagct

SEQ ID NO: 863804 - DNA, 700 bp, Homo sapiens
gtagaacacgatggaagaggaaatggtgggtagtggtatgatggttgtgctattttcatcagtgattcttaagtagaaatctacagaagtgagagaaataactctacatacatttggggataagatctccagacagagagcacagcaaataccaaggccttgaggaacacaaggacaccagcatagctgaggggagggagtatgcggagagtggcaggagatgagcttagaaggacagcaggcgagcaggtcatgccaggycatggcccaagttcatacttgaggttcatggtaaagacacactgtgaagtggcaatagaggtaacttcttagaggtactcccttcacttagctgctcatttatagaggagtgaactgaaccccatggaagttataggattagttcaaaattgcatagctaggtagaagccctagagaaattcagaaccgagacagacaatgcatgatgtatttattaggatgccattggctacatgaaagagaaactttggattcagacaggcttcaataaaaggaaacttaattatctcacgttactggaagaccagagatgggaaggccctgagcatacctctttgagtggcccaatgatgttctgtccatcttttcagctggcaccctcagtgtatcagtcagggtgggctaggatacgctgcaataataggcctcaattccagtg

SEQ ID NO: 863805 - DNA, 700 bp, Homo sapiens
gtagaacacgatggaagaggaaatggtgggtagtggtatgatggttgtgctattttcatcagtgattcttaagtagaaatctacagaagtgagagaaataactctacatacatttggggataagatctccagacagagagcacagcaaataccaaggccttgaggaacacaaggacaccagcatagctgaggggagggagtatgcggagagtggcaggagatgagcttagaaggacagcaggcgagcaggtcatgccaggccatggcccaagttcatacttgaggttcatggtaaagacacactgtgaagtggcaatagaggtaacttcttagaggtactcccttcacttagctgctcatttatagaggagtgaactgaaccccatggaagttataggattagtwcaaaattgcatagctaggtagaagccctagagaaattcagaaccgagacagacaatgcatgatgtatttattaggatgccattggctacatgaaagagaaactttggattcagacaggcttcaataaaaggaaacttaattatctcacgttactggaagaccagagatgggaaggccctgagcatacctctttgagtggcccaatgatgttctgtccatcttttcagctggcaccctcagtgtatcagtcagggtgggctaggatacgctgcaataataggcctcaattccagtg

SEQ ID NO: 863806 - DNA, 644 bp, Homo sapiens
taggcccagaaagtctgtcctggtgtctagcctcaactccagctgctgcagtattgggaaaggacttttgtctggagttttggtcccacacactccagcaccctcatttcaggtcctcagatggagctgagctgggctctggcctggaggagctgcagctagatgcttagacaggctggggccagagaaagctctgtccctctgaatactggaggtcagaagcagttcactgtatgctgctgagctgtgcccagggctgggctgctttgggccagaaaacagccctggctggggatggaaatccctggggcccatgtctgctatgcttcagtctggggaaagaccctagggacgctaggaagaaggaagagcatgtgcccacccttgggagccccaatgtgatggaggagggggacccctycctgaaccctgcatctggattggccatcttctgtctgcttccgctcatgcaggctggacttgcttttccaaagtgagttcccaagatttgagcctgctgctttccaagtctcactccactggtgtgcaagacactgaagaacatccacagaggaacagggcccaagcaaagctgccatgaggccctgaggcccagggaccacatgtcaaagaaggggtgggga

SEQ ID NO: 863807 - DNA, 590 bp, Homo sapiens
acagacagaagaacatatactgcttggtatgaccagaaagaaaagtatgaggagtgtggagaataagagacacagcacaaagatagctagggaacagttacagaaggccaacgctaaaaagctaggaatctgagctatgtctgggagaatccacaagggtttatgacaggagagtgacagaagatgcccttgccaaaggaccgtggcaaagagggagcctggtcagaaaccacagatggtcctttaaatccagaatggccagctagacagagcaaagctgaacagagaggtcaaaactgcttcaagggaacagacgtcagctgacaaggtaactactgctggctgttcccaagtgcattactctaataaccctctggccatatcctatcctgctacctggcttcacaaagaccaaacagatctgcctaacacatttaraaaaaaaaaaatcccacagtgtgaaaaagctgccatcactgctttggcaaccactattgcctcatattctcctaccacattccctgtaagtaaccctctgctgccactgctggccactggccagctaccccaagcacacagctatcatgaac

SEQ ID NO: 863808 - DNA, 608 bp, Homo sapiens
gtcttacatggtggcaggcaagagagagaagtgaagggggaggagccctgtataaaaccattacatcttgtgagagctcactctctatcatgagagcagcataggcgaaaactgcccccatgatccaatcaccttccaccaggtcccttcttcaacacctcaacacctggggattaccatttgagatgatatttgagtggggacacgaagccaaaccatataatgctaaatcctttattagcaatacctcatttagttttcacaaccaccttctaggagattagaaatattatatttattatgtagacaagtgctctaaggcttagggaatktcagcagctggttggcattacaggctggcacctgccaggaccagttattgggctcagatctgattccaaaggtttggctttcacgcatgctgatgaattcttatctcaagagcagagggaagagtatgtgaggcctctcagagaatgactgttagcggctggtgttctaggggcttttcatcatctatgagctcacttaattcccataacaggtaggtgacttatgtgttatttgtcctcatgtgtagtttaggaaatggaagtccagagaagttg

SEQ ID NO: 863809 - DNA, 673 bp, Homo sapiens
atcttgtagctttgtgtggatagcaagttatggctgatgccaaatgtcaacagagtaaactgtgagtgcgattaaatgtctttctaatgatgccatccaggccccaagcacccatcgtagggcaaacaaatgcaccagagcagcagtaagcaatcaagagaaaagaaaaaaagtgatgctgtaaaaagaagaagctattttactcttcattttccacttagaacatattgagagtacagggctggataagcaacctgaattcaactcacagaatgtaaattcaaagcagaagtgattctagaataccttccctctatccctactcctccatcttctaaggatgtaccagtatgatgttcaatatttaacaacatttagggctcaggtgctagtcgctcagaatggatacagcagctaacaagagcagacccagctataaacccacacagctctgccgtggtcaaccaggactgccastggtataaatcctttgtgtcttcaggacattggctaccagtttgtaggggaccctgtggtcctcatggacccaaagccactgcccaaagagggcttcatggaccatttaactactggataactcagtagcaaaggaagaatggagtctaatgtcagaataatacctgagaagctgctttagcttaggaccaatgcc

SEQ ID NO: 863810 - DNA, 636 bp, Homo sapiens
accatttaactactggataactcagtagcaaaggaagaatggagtctaatgtcagaataatacctgagaagctgctttagcttaggaccaatgccttctggtttccacaagagatcttgtccgtggtgcctgcttggggtcttggtatgataatagttgctctgagccttggctttttatgtgcttacctcccttcctttcagcttaaggttgtgtttctccaactcttgtatttcagccgaaggacctgacgtcagtggtgagtgctttctgttcagttggaagcaacagagccaratggctaagagggtaggtttggagtccattagcactggagtgaaattctggccttgaagcccactttatgtcttcttgagtaggaaagtacccatcttagggtgttgtagggaggagtcagttagctgatgttgatcaagtgctcatctcacaggagagctccgtgcctggtgactgctgttatttggttggggataggatctctctatgtcctgggaggtgctctttgcaggagatcaatgcagatacatatcaggattctctgtttctttccacctatctttatccacttctcaaaagtcatttgaggctcagaggcacagaggtatggtgccttct

SEQ ID NO: 863811 - DNA, 636 bp, Homo sapiens
accatttaactactggataactcagtagcaaaggaagaatggagtctaatgtcagaataatacctgagaagctgctttagcttaggaccaatgccttctggtttccacaagagatcttgtccgtggtgcctgcttggggtcttggtatgataatagttgctctgagccttggctttttatgtgcttacctcccttcctttcagcttaaggttgtgtttctccaactcttgtatttcagccgaaggacctgacgtcagtggtgagtgctttctgttcagttggaagcaacagagccaaatggctaagagggtaggtttggagtccattagcactggagtgaaattctggccttgaagcccactttatgtcttcttgagtaggaaagtacccatcttagggtgttgtagrgaggagtcagttagctgatgttgatcaagtgctcatctcacaggagagctccgtgcctggtgactgctgttatttggttggggataggatctctctatgtcctgggaggtgctctttgcaggagatcaatgcagatacatatcaggattctctgtttctttccacctatctttatccacttctcaaaagtcatttgaggctcagaggcacagaggtatggtgccttct

SEQ ID NO: 863812 - DNA, 636 bp, Homo sapiens
accatttaactactggataactcagtagcaaaggaagaatggagtctaatgtcagaataatacctgagaagctgctttagcttaggaccaatgccttctggtttccacaagagatcttgtccgtggtgcctgcttggggtcttggtatgataatagttgctctgagccttggctttttatgtgcttacctcccttcctttcagcttaaggttgtgtttctccaactcttgtatttcagccgaaggacctgacgtcagtggtgagtgctttctgttcagttggaagcaacagagccaaatggctaagagggtaggtttggagtccattagcactggagtgaaattctggccttgaagcccactttatgtcttcttgagtaggaaagtacccatcttagggtgttgtaggraggagtcagttagctgatgttgatcaagtgctcatctcacaggagagctccgtgcctggtgactgctgttatttggttggggataggatctctctatgtcctgggaggtgctctttgcaggagatcaatgcagatacatatcaggattctctgtttctttccacctatctttatccacttctcaaaagtcatttgaggctcagaggcacagaggtatggtgccttct

SEQ ID NO: 863813 - DNA, 624 bp, Homo sapiens
agcgtgcgctgctaatccatatgcatttgttcttcttgtgggagttcgggcccctcaggcttcaaggggtgaagctctgctcactaatcataatgcaatatcagtgttttctgcaaatccccttattatctctgcatcattagcagtttctgagcttgtctacaactaatttcacagtgaatcttatttctacctgatattttaaataagctgtcacgcagggcagcagctgacatgccgctgagaaagaagcaamtcagcctaaagtaggctttcaagcagcctccaacaattaggctttgggccatcgtacaaggtgggaaaatggggcaagtgtctagagcaaaccctgccccctaccccagtttaaataagtcatgtcttagtagataggtaagtggtctccagagctaggtttccagggggctcatttctgctcagctccttcccacaggtgacccatagcgagtgaattgatgtctctgaacttcagacagtaaaggaataaaacctcctcatagggttgttgtgggcttagcaagctaatgtctataatgtgcttagtgtgatgcacctagactattgaacacctagtgtatcctcaataaatctagttttaattgc

SEQ ID NO: 863814 - DNA, 642 bp, Homo sapiens
acacaggaagattggcaccttgtaggctgttttgtttttgtttttgtttttgttttttgagatggagtttcattctgtcactcagcctgaagtgcagtggcatgatctcagctcactgcaacatccacctcctgggttcaagatattctcctgcctcagcctcctgagtagcttggagtataggcrtgcagcactgtccctgattaatttttgtatttttggtagagacagggtttcactgtattggccaggctgttctcaaactccttacttcaagtgatcagcctgcctctacctcccagagtgctgggatcacaggcatgagccactgcacctggccaccttgtaggcttttgatgaataacactaaccacgacaatacatacgatatgcaggaggagaattcagggaaaacctgctgtgtcagaggttctcaagttctcggagcctcagttttcacatctgggcaatgggtgtcacaacctcactttcttaggtagtgcaactaaaaaaccagagtaagagaatgcatgcgagtgtgatcagaaggtgctgaaggactgcgcaggtgtggtgcactctgccagaagaggggacactgggctgacataggtttcatctagaccagggcttttcaaccaa

SEQ ID NO: 863815 - DNA, 556 bp, Homo sapiens
ggcacagagctcctcctgctggatgtggtttggggtaatgagctctcatttgggggaacataattttctgggttatgaagactcaatgggctaagtcttttgtctataattaggttattagagggatcatttaaaaaargaaggcatcgcatgttctcagtcataagtggaagttgaataatgagaacacatggacatggtgatcgggagggaacgtcgcacaccagggcctgctggggcattgaggggcagggggagggagagcattaggacaaatacctaattcaagcagggcttaaaacctagatgatgggttgataggtgtagcaaaccaccatggcacatgtatacctatgcgacaaacctgcacgttctggtattccagaacttaaagtgaaataaaaaaaaaaaataaaggaaaacatcacacctttttacccacccatttgtgtatccattcatctatacttgcatctatcacttattaaggtaacttttatgaaacatttattgtgtagctgcccatatatgtgtgtgtgtgatattacatatcatt

SEQ ID NO: 863816 - DNA, 556 bp, Homo sapiens
ggcacagagctcctcctgctggatgtggtttggggtaatgagctctcatttgggggaacataattttctgggttatgaagactcaatgggctaagtcttttgtctataattaggttattagagggatcatttaaaaaaagaaggcatcgcatgttctcagtcataagtggaagttgaataatgagaacacatggacatggtgatcgggagggaacgtcrcacaccagggcctgctggggcattgaggggcagggggagggagagcattaggacaaatacctaattcaagcagggcttaaaacctagatgatgggttgataggtgtagcaaaccaccatggcacatgtatacctatgcgacaaacctgcacgttctggtattccagaacttaaagtgaaataaaaaaaaaaaataaaggaaaacatcacacctttttacccacccatttgtgtatccattcatctatacttgcatctatcacttattaaggtaacttttatgaaacatttattgtgtagctgcccatatatgtgtgtgtgtgatattacatatcatt

SEQ ID NO: 863817 - DNA, 601 bp, Homo sapiens
acattttctatgtttagatatgcaaatatttaccactgtgttacaattgcctacagtgttcagtacagtaacatgtaaatgtacaggtttgtccctagtgctgtaggatatattacgtagcctaggtgtgcagtaggctgtaccatctaggtttgtgtaagaacactccgatgttcacacaataaggaagtggcctaaggatgcatttctcagaacttatcccagtgatgcaagactgaccttgctgatggaagttctgcttctcccaaaagcagccggagaaagccaagttgtgctggggacttgaaggctgttagaatgattccatccctctatctcygtacactgctgtatacactgctgaaaaagtaagaactttggttttcttttgtagacatcctctgtggtatgaaaaataatgctcgacttgcttgcttttcccatatgttttgagcttatgctctctccaaaaagttcttgcttttagcttttcctggactaaagcattggcccagagtcagcagatagctgtccttgtggaggtcccagacaattagagtaaggtttggcttctacagcagaaaggcacaaagatacagtg

SEQ ID NO: 863818 - DNA, 673 bp, Homo sapiens
tgataaagggttcaatgcaacaagacctaacttcctaaatatatacacatttaacacaggaataccctgattcatgaagcaagttcttagagacctatgaagaagagacttagattcccaaacaataataaagggagactttaacaccccactggcagtatcagaccattgatgcagcaaattaacatagatctttaggacctgaactcaaccmtgaaccaactggacctaatagacatctacaaaattctccacccaaatagaacagaatacacagtcttctcatcaccacgtgacacatactctaaaatcaaacacacaaccaggcataaaacaatcctcagcaaatttttttaaaaagatgaaatcataccaaccatactcttaaaccacagtgcaagaaacatagaaatcaatactaagaaagtcactcaaaaccatacaataacatggaaattaaacaacctgcctctgaattactattgggtagataataaattaaggcagaaatcaaaaagttttttgaaactaatgagaacaaagatacaacataccagcatctctgggatacagctaaggcagtgttgagagagaaatttatagcactaaatactcacatcaaaaagagagaaaaatttcaagttaacatcacaactagaggaaccatggaaac

SEQ ID NO: 863819 - DNA, 592 bp, Homo sapiens
gagagcacaaagagggaagtgctacacacttttgaacaaacagatcacgtcaaaattgactcactgtcatgagaacagcaaggaggaaatccgggcccatgagccaataacctcccaccaggtccctcccccaacacttgggattacaattcaacatgagatttgggtgaggacacagagccaaaccacctgaagtgtcaagcccagaattgtgtgaaaacagtttaagtaagattcttacacttctaaccagaatcacaaatgtgatgtgcccacttgkgctgtgagttattgtctgttattaaaggatacctcagatggaggacattacttgggagcagaaagcagcaggtgttttgatgacaaataaaactggaccacttcctgactttgtcacctataacctacagcaaatcttcttaattgtgcagaccattagtttactcaattttaaatatgctaatgattagactatctgtcttaagtgattatgactacagaagattgaaaagtgctttgcccactgcttgacacacaataggtgcccaaacacataaatctttcctcctccattgaaatcagtaccactcct

SEQ ID NO: 863820 - DNA, 571 bp, Homo sapiens
gtctatgttgttccccatgatgtgtccgtgtgttctcatcattcagctcccacttatacgtgagaacatgtggtgtttggttttctgttcctgtgttagtttgctgaagataatggcttccagctccatccatgtccctgcaaaggacatgatctcatttctttttatagctgcattgtattccatagtgtatrtgtgccacattttcttgatccagtctatcatcgatgggcatttgggttgattccatgtctttgctattgtgactagtgctgcaacgaacatatgtgtggatgtgtctttatgatagaatgatttatattcctttgggtatatatccagtaatgggattgctgggtcaaatggtatttctggttctaggtctgtgaggaatcactgcactgtcttccacaatggttgaactaatttacattcccaacaacagttttaaaacgttcctatttctccacagcctggctagcctcttttgtttcttgacattctaataatcatcattctgactggtgtgagatagtatctagcttgtctctttgtttaatgtaccagaatc

SEQ ID NO: 863821 - DNA, 667 bp, Homo sapiens
aatggtatttctagttctagatccctgaggaattgccacactgtctcgcacaatggttaaactaatttacactcccatcaacagtgtaaaagcatccctatttgtccacatcctctccagcatctgttgtttcctgactttctaatgatcaccattctaactggcgtgagatggtatctcattgtggttttgatttgcatttctctaatgaccaatgatgatgagctttttttcacatgtttgttsgtgcataaatgtcttcttttgaaaaatgtctgttcacgttctttacccactttttgatggcattgtttttttcctgtaaatttgtttaagttccttgtagatttctggatattagctctttgtcagatgaatagattgcaaaacttttatcccattctgtaggttgcctgtacactctgatgatagtttgttttgctgtgcagaagtgctttggtttaattagattccatttgtcaattttggctttcgttacaattgcttttggtattttggacatgaagtatttgcccatgcctttgtcctgaatggtattacctaggttttcttctagggtttttatggttttaggtcttacatttaaatctttaatccatcttgagttaatttttgtaaggtgtaaggaaagggtccagtttcagtt

SEQ ID NO: 863822 - DNA, 593 bp, Homo sapiens
ccaacaccatttattaaatagggaattctttccccattgcttgtttttctcaggtttgtcaaagatcagttgcttgtagatgtgtggtgttatttctgaggcctctgttctgttccattggtctatatatctgttttagtaccagtaccatgctgttttggttatkgtagccttgtagtgtagtttgaagttgggtagcatgatgcctccagctttgttctatttgcttaggattggcttggctataggggctcttttttggtttcacatgaaatttaaagtagttttttctaattctgtgaagaaagtcaatggtagcttggtggggatggcattgaatctataaatcactttggccagtatggccattttcatgatattgattcttcctatccatgagcaagaacgtttttccatttgtttgtgtcctctcttatttccttgagcagtggtttgtagttttccttgaagaggtccttcacatctcttgtaaattttattcataggtattttattctctttgtagcaattgtgaatgggagttcactcatgttttggctctctgtttgtctgttattggtgtctaggaatgc

SEQ ID NO: 863823 - DNA, 611 bp, Homo sapiens
ttatagaacccctggcagatttaacccaaagaagactattttaagacattgaatattaaaaaccccaaaggtgaaggatagacaaaggatcttaaaagcagcaagagaaaataagcaaataacacaatggagctccaatacayctggcagcagacttttcaatggaaaccttacaggtcaggagagagtggcataatatatttaaagtgctaaaagaaaaaaaatttaccatagaatagtgtcttcagcaaaaatatcctttcagaaaagcatgaaggagtaaaaagacttttctagacaaacaaaagctgaggaattttatcaacactaaacctgtcctatgagaaatgctaaaaggagttcttcaatatgaaagaaaaggtcataaatgagtaatagaccaattatctggaggtacaaaattcactggtaattgcacacagaaatacacagaatattataacatggtaattgtgctgtgtaaatactgttattgtaagtagaaagactaaacagtgatctaatcaaaagtaagtacagtaacttttctatatatatagtataataagacatacagagaaacaaaaaaattaaaaagcagggggacaaaa

SEQ ID NO: 863824 - DNA, 695 bp, Homo sapiens
acatggaatcaacttagatgcttatcaatgggtgaactggataaagaaaatgtggtacagatataccatggagtactatgtattcataaagaaaaatgagatcatgacttttgcagcaacatgagtggagctggaagacgttatcctaagcgaattaatgcaggaacagaaaaccaaacacccaaatgccacatgttctcacttataaatttgagctaactattgagtacacatggtcacaaagaagggaacaatagacacttgggtctacttgargatggagggtgggaggaggctgaggattgaaaaactgtctctcagatattatgatgactacctgggtgacaacattatttgtacaccaaaaccccatgacacacaatttatccatgcaacccacctacacatgtatcccttgaatgcaaaatacaagttggaaagaaaaaaaatgttttaagaactcttttttaaaaacattatgcacctgcatttaaacctgtatttcccagctttctttagaaatagtagtagccaatgagataaaagcagatagttaattgtaagcaggtatttagagaaatgttctttagagttggctcactatatttgaaatgtgtccctttacgtttacccttccttcttcatgcctcaaagaagaaaacctctgtcatcatggttccttgaggctattttgg

SEQ ID NO: 863825 - DNA, 618 bp, Homo sapiens
gaaaatccacccacaaagccacttcttgaggaataaacccatcaacatgacttcccaagagaaaagagaagacacaaataaactatattatgataaaaagagagaattaaatgcagataaatcgagattaaaaagataaaagaataccctcagtatctatatgccaatagctttgataagtttgaggacataaaattcttaaaagatggtaacttaccagaactcactgaataatgaataaaaagcttaaatagtcctatgctgttaaataaattgatgcattaaaaagtcttcccacagaaacaaaaatgaaacaatagacccaaatgctattaaaattgagaaaaagggggaatgttctttaacctattctatgaggtcaacataaccgtgatactaaaaccagacgaggacactacaagaaaataaaatgaacagttagtctgctgaygaataatattttttaaaaccccaaataaaatattagaaaagcaaacccaccagtgtacaaaacatatgatacactacaaccaagttgggtttatggtagttgagtaaagatggtttaataagggatttataaatttaagttattaaattaacagattaaataaagcg

SEQ ID NO: 863826 - DNA, 673 bp, Homo sapiens
atgaagtcagaataaaagggaaaaactacatgacacagcagataaagcaaagtatttgataaaattcaacaccaaagtaatacaacaattttagaagactagaagtaagtcaattatttaatatgtaaaagaatatttactggaaagaaacaacaaaaagcatcatacttatcaaaaacttttctcttgagatctagaaggagaaaagaatgcctattattaccatttgcgatcagtattttacttgactttttaaccagaaaaaagggcaataaagaaactgaatgtagaattggaaagcaataaataaaactgtcatttcttgaagatgaaatgattatatacttaatccaaaagaaaatacaaatacactattagaattaacaggtgaatttggcagggttttggaaatgagtcaatatgcaaaratcaactatatttctttgggatggtcccaatatctggaaacatatattcttttctcctgtattgtaatataatatcaataaatcatttaccaagtatttgtctatcttttcgtacttggtggtctcatgtatatatcacacaaattagaaaataaaatttaaaaataacacttaaaataacatttgcaagagcatcccaaaactcaggtaaacatggagctctctacataggaaaggacaaaaca

SEQ ID NO: 863827 - DNA, 686 bp, Homo sapiens
gtctcttttccatcttgacaattttgaggtgtttgcaaatcacgtagagagttatctaattcccttatacgtatcctcacatgagctaacgttcttttttccctgtcactaaacccaaggctgaaaaaagtattactccttgacgggcatggrggtagggaactaacccttgtttcagtcaagaatcacggactcctgaaagaaagaggattccatgctgaagacactcagaggaggggacagataggtcctcaaagcctctgctgggggaggccacatggctggagagaggagacacatataatattctcccaacctacttatactttggtacataaactttgtaagtataatgttggcagattccagtgcataaaaaagtagctgaaaaaactcaaaccataaataatgccaagtaataaagaaggtgaatgtttctgttatgagattctttcattgtataaatctgtttaataagctggctaggaatcactgatagaaaacagacttagtatggtgttacagaccaatccgttctaaaaggccagtatgggaactcatgccaagttatatttttctgttcttaaccaatgcaacttaatatgtaattgttgtctccctcctgccttcccttaactacccccacccccctgcctctgcagactcatcgtttcaaggcactttac

SEQ ID NO: 863828 - DNA, 628 bp, Homo sapiens
gtggcctgagacactcatctagaacaaacaccctcagcttgcagatgaagcaacagatccaggaaagcatcatgatgagccccagggccagccccagccttcttgtccatgctgcttctgctcgcctttcaaagcctccaacgcccaatacatagccaaggaccgtgtgacactgaagcctgggtcccagaagggagcagatctgctggctgagatgcaagcttcaggttgcagcagacgtgagcagcarttgagcacccatccgtcccttcccctcccatccctggattctttctgcactaccaaaaacccaccacgcgccaaaaggcgagtgtgagccctaagaacagcttgtgggcacagctggcatttggaggaggagcctggggaactgaaggaagcagcaagctggaagtggtcgtgcaaacaagttgaagaccctgggccaagaacttccagggcgaaaggctcagtgtaaaaataaagaagcagagtagtacgcccatgcaatgaaatacttcccggcaaggagaaggaacaaaccacacgcacacatcatgaatgactcaaaagcattaagctgagggaaagatgccagactcaaaaggcgacatcagtgtgactccat

SEQ ID NO: 863829 - DNA, 599 bp, Homo sapiens
cccggcccaaggctgggcgctgtggctcacgcctgtaatcccagcactttgggaggccgaggtgggtggatcacgaggtcaagagatcgagacaatcctggccaacatggtgaaaccccgtctctactaaaaatataaaaattagctgggcatggtggcacacacctgtagtcccagctactcaggaggctgaggcargagaatcgcttgaacccgggaggcggaggttgcagtgagctgagatcgcagcactgcactccagcctgggcaacagaatgaaactccatctcaaaaaaaaagaaagaaagaaagacccagccttgggttcatgctctgactgttacttaccacttgtgaggcttgggacaagtcacattgcctctccaagcctcaatttcatttatctgtcaaaaggacgttagaaagaaagcatctaccttatgggcctgttgtcagcataaatccaaaaagcctttgaaaactctaaggtgatatacaaaagcacgtaggattgttatcggtaatactggtagtcctagacctaatttcaggggtggtctgaagtgtggcacttttgagcctgaggcagcagcttgaca

SEQ ID NO: 863830 - DNA, 638 bp, Homo sapiens
cttctcctggggtaaatctttgctctgaaaagcctgggcttgccccactctgttatcccctcctttgagctccatttctgccagaggttggcaagatgcagcctatccctgtttggtcttgtgcctcctataagccaagaaatagctttttattttcgaatggtagaattcatcaaaagaataataatacttaaggacattttgaaattttccatgtccagaagaaaacttttgtggaggtgcagtcatgcctgttcttttacagggtgtctgcagaaggctgctgtcctgctacagtggcagagttgagtctttgggacagacaccagtgggaaaacctgaaaatactgacccaaggccctttagggactgtttttagttcttgatttgagagttacatagtgggactggaggctttgcaccaaawcttttatcactcccactgctgtagtctctgctggtgtgtctgtaaagttagggtaccatggcacctcccttgagagtattgagctccagtgtgctagttttgggggtgcctgcttcatggttgcttatcccacctacagaggtcctgggcctaaaccaggccagcaggatgagttggtcattggaggctggagcctgcaggtggcagaggc

SEQ ID NO: 863831 - DNA, 653 bp, Homo sapiens
ttactagtattgttttttcttgtggatgcttttaacctgaacaacttcccgccttaggacttgttgtaaggtaggcctgttagcagcaaattctctctgcttttgtttatctgggaatacatttatgtcacctttagttttggaagatagctttgctggatacagaattcttggttgacaggtttctttttttttttcttcatgcagttttagcactgtgttctggccttttttgtttctgttaaaaagtcagctcttaaacttactggggtttccttgtaagtgatgagtcatttttctcttggtgctttcaatatttcctccttctctttcacttttagcagtttttttttacgtgatgtgtctggatttctttgtgttaattccacctacttggagttcattaaattttctagatgggtagattaattttcaatgaatttgggacatcttcarccattatttccttgaatattgttttctgcttctttgtctctcctctatgtccagtactccaattacatgtatgttggtgtgcataatggtctctcaccaacttctcagaagctctgttcatctttaaaattcttttttctctatgttcttcagattgtataatctccattgatctgtcttcaagttcgttaattatt

SEQ ID NO: 863832 - DNA, 625 bp, Homo sapiens
tttccacaatgtttgaactagcttatgcttccaccaacagtgtgtaagggttcccttttctccacaacctggctggcatctgttattttttgaccttttaatagtagccattttgactggtgtaagatggtatctcattgtggttttgttttatatttctctaatgatcagtgatagtgtcctttttttccctatgcttgttggccacatgtgtgtcttcttttgagaagtgtctgttcatgtcctttgcccactttttaatggggttggttttcttttgtaaatttgtttaagtttgckatagatgctggatattagatctttttcagatgtatggtttgcaaatcttttctccctttgtccctttactctgttggcagcttcttttgctgtacagaagctcttaagtttaagtatatctcatttatcaatttttgcttttgttacaattgcttttggtgtcttcatcatgaaatcttcatcagttgctatgtccagaatgatactgcctaggctttcttctaggattgtcatagtttcaggttttacgtttaagtctttaatccatctcgagttcatttttgtgcaggtgtaaggaagggatccagtttcattcttttgcata

SEQ ID NO: 863833 - DNA, 624 bp, Homo sapiens
caaattgggaaatgattaatttattgaaagctctgatttccaactctgaaaaattagtaaactttaaatacctcaggctattggaaatctctctggtgtctaaaccaattaaaaaaatcaagggtggacataaggtaactaacactgagcttgrttttacacaaatagccaaatcacgtaaggtgggagcagaaaataatccatgatgtagatttagataaaccctagtaagaaaggcaaaaatctcctccagaacacaaccatgataaagtgtagtccaaattattttatttttaaaactagaagcccagagatgcttcaaaagatgcacactcacaagaaacactaattttaattcactccccatcaaaggaacatactacctggaaactatgatgctttatataaatgttaatgtcatttttaattttttaaaaaactttttaaacaatgttgacttttttattcaatcagaggaattctgaaatttttaatgtattaaggatgtagtcaaattctttatgaataaaaagtgtttcattgtagaaaaccgtatttgagtaatatgcaagtcctaaaatgtggaatggatttaaaggaagaactagcagatttcttaagaac

SEQ ID NO: 863834 - DNA, 593 bp, Homo sapiens
gatcagtgatactgagcttttcttcatatgcttggtgactgcatgtatgtctttttttgaaaaagtctgttttttaataactagtgagatttctcacttcatcacaatattttttaatttagattttctcatttaaatttcttaccactttttagacatagatgcattctttatatttcatctgttttcagatgaatattaattgacaatttgrtactagatcctcctttaattttttgttcatgacttgtctgtccacagtaaaaaaaaaaagtataaatagtagcaaaatatagaaaccaatggttttcaggcattggataacaggaaattcaagtctacaattttttttttttttttgagacagagtcttgctctgtcgctcaggctggagttcagtggcgcaaccttggctcacttcatctctgcctcctgggttcaagcaattctcctgcctcagcctcccaagtagcttggattacaagtgtatgccaccatgcccggctaatttttgtatttttagtagagatggggtttcgccatgttggccaggctggtctcgatgtcctgacctcaggtgatctgcccacctc

SEQ ID NO: 863835 - DNA, 621 bp, Homo sapiens
aatcattgcaaactcagacattgcatactcagccagcaactcagatggcaatgatttattttactattgtttgagacatcccaggatacaaaccctgtgcatagttagattgcatgcataaggcataataatagactctggtcactcgtgcagaccaagaagttctcagactataaaacagtgggattggtgccaagatccaggytgacgtaggatgctgaggaagcacagtgtgcccctcatctgggctaactggtgacatctattttaggtttacagttaaaaataataacgagtcacctaggaaatcaaggaggaaaggacattctagaccaaggacaggacctatgggaggatgaagaggaaaaagcttagtacatcttcggatgatcagctcagtaggtctggagaaaagggtgtatgagaaagatgagacagaaagagaggaaggtaggcataagggctgagcctaatgccaaaaggccttgtaagtcaagctaaggagtgtagatctcatcataggatctctaaagaacttaaagcatttgacagggccagacttgtcctttgggtccatcacccgccagcagtttggagaatgtgttgggatgatgtgacatt

SEQ ID NO: 863836 - DNA, 621 bp, Homo sapiens
aatcattgcaaactcagacattgcatactcagccagcaactcagatggcaatgatttattttactattgtttgagacatcccaggatacaaaccctgtgcatagttagattgcatgcataaggcataataatagactctggtcactcgtgcagaccaagaagttctcagactataaaacagtgggattggtgccaagatccaggctgacgtaggatgctgaggaagcacagtgtgcccctcatctgggctaactggtgacatctattttaggtttacagttaaaaataataacgagtcacctaggaaatcaaggaggaaaggacattctagaccaaggacaggacctatgggaggatgaagaggaaaaagcttagtacatcttcggatgatcagctcagtaggtctggagaaaagggtgtatgagaaagatgagacagaaagagaggaaggtaggcataagggctgagcctaatgccaaaaggccttgtaagtcaagctaaggagtgtagatctcatcayaggatctctaaagaacttaaagcatttgacagggccagacttgtcctttgggtccatcacccgccagcagtttggagaatgtgttgggatgatgtgacatt

SEQ ID NO: 863837 - DNA, 621 bp, Homo sapiens
aatcattgcaaactcagacattgcatactcagccagcaactcagatggcaatgatttattttactattgtttgagacatcccaggatacaaaccctgtgcatagttagattgcatgcataaggcataataatagactctggtcactcgtgcagaccaagaagttctcagactataaaacagtgggattggtgccaagatccaggctgacgtaggatgctgaggaagcacagtgtgcccctcatctgggctaactggtgacatctattttaggtttacagttaaaaataataacgagtcacctaggaaatcaaggaggaaaggacattctagaccaaggacaggacctatgggaggatgaagaggaaaaagcttagtacatcttcggatgatcagctcagtaggtctggagaaaagggtgtatgagaaagatgagacagaaagagaggaaggtaggcataagggctgagcctaatgccaaaaggccttgtaagtcaagctaaggagtgtagatctcatcataggatctctaaagaacttaaagcatttgacagggccagacttgycctttgggtccatcacccgccagcagtttggagaatgtgttgggatgatgtgacatt

SEQ ID NO: 863838 - DNA, 622 bp, Homo sapiens
tctgctttactctcaaggcagaagagtgaagggccttataatacatggtatttttaagccgggtgcagtggcttatgcctgtaatcccagcactttgggaggccaagacgggcagatcacgagatcaggagatcgagactcctggctaacacggtgaaaccccatctctattaaaaatacaaaaaattagccgggcttggtggcgggtgcctgtagtctcaactacttgggaggctgaggcaggagaatggcgtgaacccaggaggcggagcttgcagtgagctgagatcacgccactgcactccagcctgggcgactgagtgagactccatctcaaagaaataaaaaaagaaaatactactactactactactactactactamtaataataataatacatggtattttaagcctgcattaaaactgtggggattagaaatcaagaaatgtcagagtaataaaattgatattgtctatgcattaagaaatcagcaggcaactttagattttaaaaggctattaaatacagtgtatgtcaaaatataagatatggtcaaggcagcagtaaccacaggaagatgcatagttttaaatgaatgaattatatatatatatatata

SEQ ID NO: 863839 - DNA, 600 bp, Homo sapiens
caaagctaacaaaaacataaagtgggaaaggacaccttttcaacaaatggtgctggaataattggctagccatatgtaggagaatgaaactgtatcctcatctctcaccttatgcaaaaatcagctcaagatggattaaggacttaaacctaagacctgaaactataaaaattctggaagataacattggaaaaacccttctagacattggcttaggcraggatttcacgaccaaaaacccaaaaaggaatcccataaaaacacagataaatagctgggacctaattaaactacatttttgcatggcaaaaggaacagtcagcagagtaaacagacaacccacagattgggagaaaaatcttcacaatctatacagctgacaaaggactaatatgcagaatctacgaggaactcaaatcagtaagaaaaaaaacaatcccatcagaaagtgggctaaggacatgaatagacaattctcaaaaaaaagatataaaaaatggccaacaaacatatgaaaaaatgctcaacatcactaatgatcagggaaatgcaaatcaaaaccacaatgtgataccacctcactcctgcaagaatggctac

SEQ ID NO: 863840 - DNA, 600 bp, Homo sapiens
caaagctaacaaaaacataaagtgggaaaggacaccttttcaacaaatggtgctggaataattggctagccatatgtaggagaatgaaactgtatcctcatctctcaccttatgcaaaaatcagctcaagatggattaaggacttaaacctaagacctgaaactataaaaattctggaagataacattggaaaaacccttctagacattggcttaggcaaggatttcacgaccaaaaacccaaaaaggaatcccataaaaacacagataaatagctgggacctaattaaactacatttttgcatggcaaaaggaacagtcagcagagtaaacagacaacccacagattgggagaaaaatcttcacaatctatacagctgacaaaggactaatatgcagaatctacgaggaactcaaatcagtaagaaaaaaaacaatcccatcagaaagtgggctaaggacatgratagacaattctcaaaaaaaagatataaaaaatggccaacaaacatatgaaaaaatgctcaacatcactaatgatcagggaaatgcaaatcaaaaccacaatgtgataccacctcactcctgcaagaatggctac

SEQ ID NO: 863841 - DNA, 635 bp, Homo sapiens
cacaattcacaatcacaaaatcgtgcaaccaacccacatgcccatcaatcaacgagtggataaactgtggtatatatataaatatacatactatataatatatattatatatataatgtgtatatacatactatactatatatatacaatatacagtatatataatatatatatatagtatatatatacacaatggaatactactgagccataaaaaggaatgatttaacagcgtttgcaatgacctgggtgagattagagactatgattctaagtgaagtractcaggaatgagaaaccaaactttgtatgttctcactgataggtgagagctaagctatgaggacgcaaaggcataagaatgatacaatggacttcggggacttggggggaaagagggagggggcgagggataaaagacaacatatatggtgcagtgtatactgctcgggtgatgggtgcaccaggatctcacaaattactactaaagaactcacccatgtaaccaaataccacctgtaccccaataacttacagaaaaatataataataatttaaaaagtgtactttgcttcctttcattcctgctttaaaactttttagtaaactttcattcctgctctaaaatgtgcctt

SEQ ID NO: 863842 - DNA, 575 bp, Homo sapiens
atgggtgcaccaggatctcacaaattactactaaagaactcacccatgtaaccaaataccacctgtaccccaataacttacagaaaaatataataataatttaaaaagtgtactttgcttcctttcattcctgctttaaaactttttagtaaactttcattcctgctctaaartgtgccttggtctcttcctctgccttaaacctacttctgccccttagctgaatttttcctctgaggaggcaagacccttaaggattcacaggtggcaataaatctaaacaggccctgctaagtccctctactctactaccattagctcacaccccctttgtccagtcatacttcctgcatgactgtccactctttatcaaacctaagcacaaaaatacacaggtttcctgattcttgaaatcttcatttctgaagactcccatgtcacatgaaatttacgttaaataaatatgtatgctcttctcttgttaatctgtcttttgttattaagcacctcatccatgaacctaagatggaaaagaaagaattttctttcccctgcacaggcagacaggcatctgg

SEQ ID NO: 863843 - DNA, 575 bp, Homo sapiens
atgggtgcaccaggatctcacaaattactactaaagaactcacccatgtaaccaaataccacctgtaccccaataacttacagaaaaatataataataatttaaaaagtgtactttgcttcctttcattcctgctttaaaactttttagtaaactttcattcctgctctaaaatgtgccttggtctcttcctctgccttaaacctacttctgccccttagctgaatttttcctctgaggaggcaagacccttaaggattcacagrtggcaataaatctaaacaggccctgctaagtccctctactctactaccattagctcacaccccctttgtccagtcatacttcctgcatgactgtccactctttatcaaacctaagcacaaaaatacacaggtttcctgattcttgaaatcttcatttctgaagactcccatgtcacatgaaatttacgttaaataaatatgtatgctcttctcttgttaatctgtcttttgttattaagcacctcatccatgaacctaagatggaaaagaaagaattttctttcccctgcacaggcagacaggcatctgg

SEQ ID NO: 863844 - DNA, 641 bp, Homo sapiens
gacaccatactcccggtgcatgtaatcatctttaccaaatattcctcatgtatattccgcagctctattgattttgttagactcccattcccttcgagagatgacgattggagtgtagaggtagatgaggtacccatttggttattaattggtagaatcctgaacastgaattacattagtgaacaattgacccaattagatggcaagatgatgagtataccaaatggctaatgactagtttattacaactgtcttaattgattagagtaagtcagctgatcaacaatttgctctgttgccttcatatttaaccatattctcacttaacgcaaaacacaaaagcacatcacctggatggttacttcattctcctcattgtatatgcacaacctacttttattttatcttgatggtacacccatgatgacagatgcagtgcagtacttggtgctttgcatattttgaaatgatcagagtatcatccttgaaaataattccaccttcagtttgtgcctccagggacacaatagtttattcacataagaaacaaaaatgtcatccatctctgttggcttcactctctgacaaattgcctcactgtttgagactttcccctttctgcctgcccctatataagatt

SEQ ID NO: 863845 - DNA, 624 bp, Homo sapiens
ttgcaattgtctcgcattgtgtaaatgaaaatgcctgcctgcggggtggtggggatttggggggctgtgtaagagaggaaaacacagctttcccttcacatagaaaattggaataaattatagacaagatgttattaattctggcactgtgtttacctggttcatccatcgcaatttggcgactggcatgcggctttctcagctatttataaggtcttgtatatgattatgccaaatgtgtttttttaactcatccctatgaacttatgccagatgtcaatgaattatacaacctcagactgttagcagagacaacggtgatcattagtaaacactggtcagtatacagatgagtagactgatgccagaggatgcaaaggtcttcgccaggaatccccagttagttaaagaagaacagtgggtacyaaaacccactgctgaccacgcacccaaaaccacttatttaatcctttggatgggaaacgcatttaacacttctgagtaggaaatcccctgtaaccagtacctgcgggaacccaggtcataatgtcagagccactggagcaatgagattaatttatgaagatttttcagagggtttaactcaaatgcatacacgtggat

SEQ ID NO: 863846 - DNA, 608 bp, Homo sapiens
taacttgtgtttatttctaaagaagaaaaagataatttcatggcttcttgcctcttaaagcatattccaacagtccaaattaactatttcacattcatctctttatctcatgattggaattttctggaatatctaaggatttaagatgaatgccttattattgaagtagttaagaaaacagcacagtagcaaccataactgcataaatgcctttacttgttaaattaatttcaactaacagcaaaattgcagttcatgaattcatgaattacactgaagctacgatggctccttttaatactttcagactagagaactgtgagtatatatgagtgtgtgtgcgtgtgtgtaaactagtgttaatatacatatcaaaatgctatcatttcatacaratctagcactggcaaggaaggtctctgtagaatccttgtgcggactaggatgcagttttttgacataagagtcattcatggtcaagattaatcttccatgtgagtggtcacagtttgaaataaaattctccaattctagggcagacactgagatggctgaacacttgaagagactgagggacgtaccctataaaggcttgtgtatactttttc

SEQ ID NO: 863847 - DNA, 713 bp, Homo sapiens
gacttacttttgctatcttatgtctttcatgtgaaaagcaaacattcttttagtcaggaaaaataacaaaggggcatagtgaagtcgtcttaaataaatgcaacttaggtgtgtctgataccttcatttgctatccccagcagatgcacctgcaagcttggcagcattgcactcgctttacaattggattggaccatgggggcggtttcccttgtgctgttctcgtgatagtgaactcttccaagatctggctgtttaaaagcgtgtggcaggtttgccccatagccaccatagtaagacgtgcctgcttctcctttgccatggttgtgagtatcctgagctctctcggtcgtgcttcctgctagccctgcagaactgtgagtcaattcaatctcttttcttgataaattaggtagtctcaggtagttcttttatagcagtgtgagaacgaactaaatatgctttacatgtcaggcctacactaggctttgggaaacatactgggactatattgtgatcaaaacaagtatastgccctcaaacttttaagaagtaaataattacaaacgtggtggcaagactgcagtaagtgttgctttgcaggcgcgaaggaacagactagaagcttttccaaagacactgaaatgactaacaggtatatgaaaagctgctcagcatcactcctcaccagagaaatggaaatcaaaaccaca

SEQ ID NO: 863848 - DNA, 663 bp, Homo sapiens
cctgcttgcatatgccaggaataccacaaattcagcccatcccaaaccaaaacttttactttcacctctctaaaatgtatacagacaaccaaaagccatccatatcatctaaactgttctaatattttaccatcctcactgcaagggacttaactgttactttaagggagaggggyttgaatccccaaacacttgtgtgagaacttgacattgttcctcctctccacgcagtttaaatgactcgttatccctgtgaatttcctccttgcctacaggctctaaatcagttgcagatttatttaccctgtagtggacaaacattagacaccttgacatctttgagaataaaatgatgagtgacacatcgtagaaatttctggaggtgcatttcttaatgccagacaatttgatgtcagtgatttgggtcatctttgagaccctgagtcaaaatgtgctcctttgtgacatcactaatctgttctataaagtcctgacttttctagggtacgtgggaatccaccaaagatacgtacataactacctcaattgtcttttcatgttaggaatagaggcataggtctatagagctaataagcagtagagatggaattcaaatacacattgatctgaatcccaaattttagtcactatactacaaccaca

SEQ ID NO: 863849 - DNA, 663 bp, Homo sapiens
cctgcttgcatatgccaggaataccacaaattcagcccatcccaaaccaaaacttttactttcacctctctaaaatgtatacagacaaccaaaagccatccatatcatctaaactgttctaatattttaccatcctcactgcaagggacttaactgttactttaagggagaggggcttgaatccccaaacacttgtgtgagaacttgacattgttcctcctctccacgcagtttaaatgactcgttatccctgtgaatttcctccttgcctacaggctctaaatcagttgcagatttatttaccctgtagtggacaaacattagacaccttgacatctttgagaataaaatgatgagtgacacatcgtagaaatttctggaggtgcatttcttaatgccagacaatttgatgtcagtgatttgggtcatctttgagaccmtgagtcaaaatgtgctcctttgtgacatcactaatctgttctataaagtcctgacttttctagggtacgtgggaatccaccaaagatacgtacataactacctcaattgtcttttcatgttaggaatagaggcataggtctatagagctaataagcagtagagatggaattcaaatacacattgatctgaatcccaaattttagtcactatactacaaccaca

SEQ ID NO: 863850 - DNA, 679 bp, Homo sapiens
tcaatggctgcctaccactgaaaggataaattccaaaattcagatttcattatgtaaaattttaaggtcttatgcaacctttctctagaaggtactctctaatctcaacagatcaatataccttagcctttggaaaaaacgtcaacttggctcagaaattcccatcagtaggtatcaggtgaagatcaagcatgtgtattttttttttaagttttctcaatgrattctaaagataaaggttgagaaacagcttgggaccctaccaaccacctccatattccctcctgcaatgatctttacccactttcttaccaggtgaactcttaccctttaagactcaatttacaccacccccttgactcctcatgcagagagccttgttattcttttggctctagcaggtatcactgtgtactatacccgcattgacagtttgttttgcatccttctactaccctgttgacttctagagggaaagcctgggtctgttttggtacctcggcacctagcacagtgtctagcgcccgatactataattctgcaataaaaggtgaattcatggaaacaaggattaagtgttaatacacggtctgtctctttggcccttccctgatgaacatcaaacaactgagtgccatccagctaaggtcatgggttcatgtagtatataaccgctaaa

SEQ ID NO: 863851 - DNA, 679 bp, Homo sapiens
tcaatggctgcctaccactgaaaggataaattccaaaattcagatttcattatgtaaaattttaaggtcttatgcaacctttctctagaaggtactctctaatctcaacagatcaatataccttagcctttggaaaaaacgtcaacttggctcagaaattcccatcagtaggtatcaggtgaagatcaagcatgtgtattttttttttaagttttctcaatggattctaaagataaaggttgagaaacagcttgggaccctaccaaccacctccatattccctcctgcaatgatctttacccactttcttaccaggtgaactcttaccctttaagactcaatttacaccacccccttgactcctcatgcagagagccttgttattcttttggctctagcaggtatcactgtgtactatacmcgcattgacagtttgttttgcatccttctactaccctgttgacttctagagggaaagcctgggtctgttttggtacctcggcacctagcacagtgtctagcgcccgatactataattctgcaataaaaggtgaattcatggaaacaaggattaagtgttaatacacggtctgtctctttggcccttccctgatgaacatcaaacaactgagtgccatccagctaaggtcatgggttcatgtagtatataaccgctaaa

SEQ ID NO: 863852 - DNA, 679 bp, Homo sapiens
tcaatggctgcctaccactgaaaggataaattccaaaattcagatttcattatgtaaaattttaaggtcttatgcaacctttctctagaaggtactctctaatctcaacagatcaatataccttagcctttggaaaaaacgtcaacttggctcagaaattcccatcagtaggtatcaggtgaagatcaagcatgtgtattttttttttaagttttctcaatggattctaaagataaaggttgagaaacagcttgggaccctaccaaccacctccatattccctcctgcaatgatctttacccactttcttaccaggtgaactcttaccctttaagactcaatttacaccacccccttgactcctcatgcagagagccttgttattcttttggctctagcaggtatcactgtgtactatacccgcattgayagtttgttttgcatccttctactaccctgttgacttctagagggaaagcctgggtctgttttggtacctcggcacctagcacagtgtctagcgcccgatactataattctgcaataaaaggtgaattcatggaaacaaggattaagtgttaatacacggtctgtctctttggcccttccctgatgaacatcaaacaactgagtgccatccagctaaggtcatgggttcatgtagtatataaccgctaaa

SEQ ID NO: 863853 - DNA, 669 bp, Homo sapiens
gttgctgaaaatacttgcatattgaaataacattttccagtaagagcagtctaatatggtaaacatattgagactttctcgagaaactcccttagggtcatcacaacagcatcagagctcaaatagcattaatgtagattccattaggactttgacagggacagaargtcaactggaaaacttagaaaaagattcattaaggatactgagacggaatagctacaggtaaagatctgggcctgggaatcaactggacccaggggttctttctcttttatttctgcttgccattctctaaattgtgttctacttgtttacaaatgtaataggttgtctcaccaactaggtttgtgattctaaggcaggggatttgtatcagttttccattgctgctctaacacaaactaagagacttgacgcaacacatttcttacagtttgggagatcaaaagctgaaacaagctttacagagcaaaaggtgttggcagggctaagtttattctggaagctctaacggataatctgttttctgatttttggcttctagaggctgtctacattctttggcttttgtaactccttaaccatcttcaaagccttctgagtagcatcctcaaatcttagccttctctcttacaaagactcctgtaatacattgggtttatttgt

SEQ ID NO: 863854 - DNA, 612 bp, Homo sapiens
gaaatattgtgtgtggatcacttgcttataaggcagggtttaagtcacggggcaaaatcaatatctttttcatgtttgatctaagatgtccaaatataacctaacatactggaacatgcacaggggttaacagaaggcagaagctctagtgcactgaggcatctatacatgaggcctatgaacattttaaattaacattattccccacccctacctcccattccaagcggtctccccttttgtttcatgctccattccactaaggctctgaaaatgttaaacaacttttgtattgcaggaacattccctgccactcccagcaattcaattaaccattgcacctagcactgggcattagtaaagtgttaaggatgtcgccacctctcacaatgagaagcagagatacgagtctaggggttaagagggaaaytgcaggaccatcagcaaagaggttttatagaaagagtataccattgttttaaaatgtcagcatgcatcatgcatacctcttgaactcaccaggtaagactttaacccgttatgaaggttgaggctgaccatataaataaaactgaccctgccttttagaacagagatagttgggtgcatgtt

SEQ ID NO: 863855 - DNA, 608 bp, Homo sapiens
gagagagtagtttagaattggctgaagcatttgccctctctctatggggacttgagttcacgttcaccatgggacctaacttttggggtgctacctcccccagcagtcatgcagtttcaccaagaccatacaagaatctcctctcccatcaactaagttaatttacaagtagttgtcaagcacaagaaggatgacccttacctgtcactgtaggcagcggcagtggcaggggtaggctgggcgtagcggtatgcagcataaccaccctaaaacacaaggagaaatgtgactcaggaatgtagcggagcccaatgcagggatgcccagtggcaagaccacaccagagcagcygttacccaaatctactgagctaaagttgaggttaatgaaagcttagtatcaaagcgaaaatacaaaaacaccctggagaaacaaggggtggaataccaaccccagctggatgttaaaggttagcggtcataagcacatcccaaaagaagagcctagaggcccttggaagaaaatgtacctaaatgttaatggcgattgtcttggggtggagaggattatggggaattatttaaatactctttatactttgctgaact

SEQ ID NO: 863856 - DNA, 684 bp, Homo sapiens
gagcgttgatgatcaaactgtgaatataacagagcttcttgctcagtggaccacaatgatacatcaaccagtgtacaatgaactcagcacagttaaacaggatccagtgtccgctgataacacaggaccattcaggttctaattagaacacacagtcccataatcctctgaggtaagtgtcctcaccatcaccataaaggggcaactcaggacaaagtagtgtstgagaaggtatacaacagcagaatcatgagagggaaaggtaggttcatggcatttggcttcatgaaactaaatacgataagacatagatgaagcagggaagctacaaaaagcctctttcaagatgtaggtacacgggtctcaatttctttctgcctctttcctgcacagttaactttcagagtaaatatgctatcatttgcacagcaattcaaagaaacgagtttatcttttaaagtttattctttggatcagtcctggagaagacacatccaaaacatcctgccacataatcaccaataatttagaaccagttttttttttttttgtttcccttaaagaggtaatggaagttaaccacaacaaaaagaggtcttagccagatgccacctggtgttccaaatactatgttctccaattaggaatggggaactcattaaatgtgctgaggagttataaaac

SEQ ID NO: 863857 - DNA, 615 bp, Homo sapiens
ataaaaagaatgaaaccatgccctttgcagcaacatggatgaagctggaggccattatcctaagcaaactaacacagggaaagaaaaccaaatgccacttgttctcacttataagtgggagctaaacattgtgtacccatggrcataaagatgaaaatagtaaacactagggactccaaaaggcgggaggaagggagggagttgagggttgaaagattatctattggatacaaagctcaatatttgggtgatggatacaatagaagcccaatccccaccaatatgcaatatgcccatgtaacaaacatgcacaggcacatgtacctcctgaatctaaaattaaacataaaatgcattcttacagttcaacaacaaagaaggtgcccttttctgccttctcaccatgtctcatagttccagctgtgtggctgcatctgtggagggaaggtccctgaggcttcctgaagacccttgagccctggctataacagagactgtggctgaaatgttaacagtgctacctgtcaggctccaatgccaggctgctgggggtggcaattggcctcttcaaagctcaggactcaaaaagaaaggtagaaggatgctctcacctgc

SEQ ID NO: 863858 - DNA, 654 bp, Homo sapiens
tcatgccagaattaaaaatttccctagatattatctgtcactaaaaggtatttgtgggaagatggtggacaggaagcaggactacattgcaactccagctcagagggacagagtagtgtgtagaatcacattgtgaactcttgctccagaactattgcaggaatataccaggaaagctgagagaatccacagatcctctgaaagaagcagattgctcctgcaggacccaggagacagcccaaatactgtgctggtatccatggatgagagatctgaagatgatttacatcataggtctctgtgcagacactcccagtaccagcctggagcctggtagccttgctaggtggctagatcctgaagagaaataacaatcactaaaattcagctcycaggaagccatatccctcagaaaagggggagagtactacatcaagggaacaccctgtggggctaaagaatctgaacagcagccttgagtcccagatctttcctctgacatagcctacccaaatgaaaaaaaaacaaaaaaacaaaaaaagaaaaacagaaaaacaactctggtaacatggcaaaacaaggttctttaacacccccctccaaaaaaaaaaaaaatcacactagctcaccaaaaatggatccataccaagaaga

SEQ ID NO: 863859 - DNA, 624 bp, Homo sapiens
caacattcttaaagaaaagaattttcaacccagaatttcatatctgaccaaactaagcttcataagtgaaggagaaataaaatcctctacagagaagcaaatgctgagggattttgtcaccaccaggactgccttacaggagctcctgaaggaaacactaaatatggaaaggaaaaaccagtactacccacggcaaaaacaaaccaaaatgtaaataccattgacacaatgaagawattgcctcaactaatgggcaaaataaccagctaacatcatatgacatgctcaaattcacacataacaatattaaccttaaatgtaaatggggtgaatgccccaattaaaagacatagattgcaaattggataaaaagtcaagaaccattggtgtgctgtattcaggaggcccatctcacgtgcaaagacacacataggctcaaaataaagggatggagaaagatttaccaagcaaatggaaagcaaagaaaagcaggggttgcaatcctagtctctgataaaacagactttaagccagcaaggatcaaaaaaggcaaaaaaaggcattacataatggtaaagggatcaattcaacaggaagagctaactatcccaaatatatatgcac

SEQ ID NO: 863860 - DNA, 681 bp, Homo sapiens
atgttgcagaatgttctgatgggcttggttcctcaggactacttggatggctaatgagagagacgggaagacagagagcttgagattgtgaataaatactgctgttgttctcatgtcaatgccaatattacagatccaccttcctgaagagttttgcaaaacatggattttgcagaccaacaatgcatacagtgtgaccgaggttgtgttatttattgctatggtgagagaaaacatccatcacagctgctacagtggggtcacacctgatgacgtttgcattacyttcctgccatctgccatcatccttctggattttgaagataccagactggtgaattccatgaaacagatgactggacccacagcactggtccttgagtttttgatggtggtgctcatctctgccatctatatacaggaaataatttgccttgagatttgatattggtttttattgattatgttgtcttggatgagcattgatagacttaggctttccatttgcaattgtttttttcctaaaattataagtcatagctcacaggccacaaaaacactgtaagtatttttcctgtttctaagtctatgactcctgattatacatgagagcctaggaacataaccacagaggagagaggttcacaaacagagttcactcacttagaggcagaagttggc

SEQ ID NO: 863861 - DNA, 632 bp, Homo sapiens
gcagctgagaggaaagtcagaggccaccaagcatgaaaagagagagatgaggctgtcattgctcaaagtcacccactctgggtgtgttttatgactgtttctggattttggaatattctcccctttgtgatcattccagggactcaccctcctcctatttccttctcattgcactttctgtccccagtgcaccctttttatggccagagactggctgtatgactagatgacaattcagtgaaagttacttgttgtgaggactgagagccaggcccaccctgctttttcccagaagagactggaggttcataaaagccagctttaatgcagggctgtgcaggtgtgagtgtggtgttagggaacaggtgcaaaagtgaagagtgagacagaaaaaaaagatgctggctgttcatcaaatcctgaaagtagagggagcaaaaattattctggaaggtggatgtcattcaggagaccttggaagacytagagtgtcctctgcacaaatgaagtggaggatggggttaaattacggagttggatgacactcattacctgacttcacttctctgcctcagttttttaaatctgtaaaaatggggatgctgacactcaggattttttatgaggactgt

SEQ ID NO: 863862 - DNA, 636 bp, Homo sapiens
ctcatgaatcagataagtcacctcttcttctctgggcagagtcattgaggaaggcagggagagtcctgcagtctagctctaactgacgtccttcccatggcttgcaggcagatgaagtttcctccacaaaataaggaattgtattagggacaagggcacaggatatataaagataaagaacatggccaggcacggtggctcatgtctgtaatcctagcactttgggaggctgagacaggaggatcacctgaggtcaggagtttgagaccagcctggctagcatggtgaaatcccgtctctactaaaaatatgaaaattagccaggcatggtggtgggcgcctgtaatcccagctacttgggaggctgaggcagaagaattgcttgaacccaggaggcagaggttgcagtgagtgagatgacatcactgcactytagcctgggccacaaaatgagattctgtcaaaaaaagaaaaaaaaaaaaaaaaaaagaacatgcccatgcctgaagagccaaggaacttataagctagcatgaaagagaggaaatggcatgaatagcaatacagacatacaaacattagggcaggtggtagtcagtgaagggtgagggaaattgaagaaactgaagttgtaag

SEQ ID NO: 863863 - DNA, 597 bp, Homo sapiens
tagagcagtgtttctcaaccgttttttctgttattatcctccccccagaaaaaattaaattgaaattattaaattaaagtaaaatgacaagctaatttaattgtaaattaagttaattaaattacattaaatttctccctgatacgagaaattaaatactaaagaataagattttgttgagtagggttgtaatattgccccctttgagaatgcatgattcggataaacacaagttgaaaactttttgtttggcgagtctatggaatagacacatccctcygttgtaagggttgtaagatccaactcttgaaacctgtgcagcctctagtaattgtagcttgtctggagcccttcaaaaatatttactaaatggaactgaatgttgataacacaacgtcttagaacattatcatacccgccataaagcagagcagatagactgggttaatttattctccttccttttacattaattaacattgtcaagaatcactagaatgtcacttgataattcacagagaaaaaacatggagaagaaataattgggccggaggctgtcactcgtgagagcttgcttaggcattccttttgcagaag

SEQ ID NO: 863864 - DNA, 610 bp, Homo sapiens
tcatggcacgcgtttatctatgtaacaaacctgcacatcctgcacatgtaccccagaacttaaagtaaaagttgaaggaaaagaaaaatatttgctacaatgatttttgtctctttagagtttaaaaaaaggtgagcatattttcatgtttgctcatggtttgtttctttttgggtaatttgttttctttacctcattttgttttctgttgagatgtttgcccatttcttgttgattggcaataactctatagtctagatattatttctttatctatcatatttgctgcaaatatttctcccagcctattattggttygttttaactttgtggtatcttttgtagtgcagattttttttatttttgtgtagccaaatctgtcaaatcttctcatttttaccttctcagttttatgtcttgcccagaaaggcttagctttagaattataaaaacattttctaatgcttttatagtcttgtgctttatctttaggtatttaatacatctagaattcatttttgtaagtggtatgaaggaggaatctaacctctttttttaaatggaaagccccaacacagtttagtaaatactgattctttttgtcctcccc

SEQ ID NO: 863865 - DNA, 629 bp, Homo sapiens
gctgcttttgttttcacagttgcaaaatgattgctgtacccaaaattgcattcctatttaaggcaggaagaaggggggagggcaaaaggataaaaactcaagccagttgggtccattcttaacaagagctcttccggaagcctgtctagcaacttccatttgcatctccactgttgagtccagcagcacggatagctagggataatgactattgcagtagggaatattctatcttgaatattgaatatgaagatggggatgcggtgggtaggtaaaaaggggagaatgaataccgatagttaagtagcagtgtctgccttggtttaccccaagtatttctcaaacctatccaattttctycttccctaccgccaacatcccagtgaaaccacaatccactctcagctggacattcttctagctggtcttcctgcacagcaaaaggatgtttatcttttaaaacttacatctattatgctgctctgctggttaaaacttataatgtcttcctatattagttagaataaaatctgcacatgtttttatgacttaaaatgcccacatgacttgatatctcccacttatttttttcccttctttcctcctggtttgtgacagtccaggcacgt

SEQ ID NO: 863866 - DNA, 636 bp, Homo sapiens
ctcatgaatcagataagtcacctcttcttctctgggcagagtcattgaggaaggcagggagagtcctgcagtctagctctaactgacgtccttcccatggcttgcaggcagatgaagtttcctccacaaaataaggaattgtattagggacaagggcacaggatatataaagataaagaacatggccaggcacggtggctcatgtctgtaatcctagcactttgggaggctgagacaggaggatcacctgaggtcaggagtttgagaccagcctggcyagcatggtgaaatcccgtctctactaaaaatatgaaaattagccaggcatggtggtgggcgcctgtaatcccagctacttgggaggctgaggcagaagaattgcttgaacccaggaggcagaggttgcagtgagtgagatgacatcactgcactctagcctgggccacaaaatgagattctgtcaaaaaaagaaaaaaaaaaaaaaaaaaagaacatgcccatgcctgaagagccaaggaacttataagctagcatgaaagagaggaaatggcatgaatagcaatacagacatacaaacattagggcaggtggtagtcagtgaagggtgagggaaattgaagaaactgaagttgtaag

SEQ ID NO: 863867 - DNA, 574 bp, Homo sapiens
atgatagggggaaatatgtttctaaaaattgtggaattattctgatctataaatgtccatatctgatagttcaggatttcttgctttttaaggtttcactaaagctttaggttagtaaggataagaattctagttaacacagccgggcacggtggctcacacctgtaatcscagcactttgggaggccaaggtggatggatcacctgaggtcaggagtttgagaccagcctggccaacatggcaaaaccccatctctactaaaaatacaaaatttggccaggtgtggtggcaggcacttgtaatcccagctactcaggaggctgaggctagagaattgcttgaaactaggaggcagaggttgcagtgagctgagattgcaccactgcactccagcctgggtgacaagaggaaaactgtctcaaaaagaaaaggaaagaaaaaaaaaattctagttaacacataattctgtatacaaaatgtgccaacaagcattatgttattagtgagaaaaataataattttgtctaactcagaagttatctaaatattagttcaaattacagattttaaaat

SEQ ID NO: 863868 - DNA, 594 bp, Homo sapiens
aaaattcaaacaatacaggcaattaaaatttcaaaggagatgcttgcaactgagaaagatctgactaaacaagagaattaaaatgtatcacaagccatgtcctgggggctgctttgggtgaaatatctcaggtgcctgtcatcctcttggttatcccagtgggggaggtggtgcagggactggcccaggccacagtgctggaattcagacccggtggactccacccaagtacctgctgctttctctacatcgtgctgccctccatggatggatattcacagataagggcatgggcgaaatgttttcagcttgcagataagcaagggacttgtcagtgcccctcagcattgatcttctgccttcagctggtccctgcattttgggaaaggagattggaggaaatggcaataggacatttaggttttacacctgttttctggctcagatggcytagtgggtatcatccctgttaagatgttttctgttactgttcatagaaaaagacagaagtaaagtctcctagtgaggttggggtgctcacactacttgataagtgatctcatcattaaagtacaagaccttctaatagggaac

SEQ ID NO: 863869 - DNA, 641 bp, Homo sapiens
aaggggtggctgtgggcacagcttcagcagacttaaatgttcctgcctgccagctctgaagagagcagtggacctcccagcacagcactcaagctctgctaagggacagactgcctcctcaagtaggtccctgacccccgtgtctcctgatggggagacacctcccagcaggggttgacagacacctcatagaggagagctccagctggcatctggcagttgcccctttgggatgaagcttccagaggaagaagcaggcaacaatctttgctgttctgcagcctcygctggtgataggcaaacagggtctggagtggaactccagcaaatgccagcagacctgcagcaggggaacctgacagttagaaggaaaactaacaaacaggaagcagtagcatcaacatcaacaaaaaggatgaccactcaaaaaccccatccaaaagtcaccaacatcaaagaccaaaggtagacaaatccatgaagatgaggaaaaaccagtgcaaaaatgctgagacttccaaaaaccagaaagcctcttctcctccataggatcacaactcctcgccagcaagggaacaaaactggatggagaatgagtttgatgaattgacagaagtaggcttcagaaggtgggtaataac

SEQ ID NO: 863870 - DNA, 641 bp, Homo sapiens
aaggggtggctgtgggcacagcttcagcagacttaaatgttcctgcctgccagctctgaagagagcagtggacctcccagcacagcactcaagctctgctaagggacagactgcctcctcaagtaggtccctgacccccgtgtctcctgatggggagacacctcccagcaggggttgacagacacctcatagaggagagctccagctggcatctggcagttgcccctttgggatgaagcttccagaggaagaagcaggcaacaatctttgctgttctgcagcctccgctggtgataggcaaacagggtctggagtggaactccagcaaatgccagcagacctgcagcaggggaacctgacagttagaaggaaaactaacaaacaggaagcagtagcatcawcatcaacaaaaaggatgaccactcaaaaaccccatccaaaagtcaccaacatcaaagaccaaaggtagacaaatccatgaagatgaggaaaaaccagtgcaaaaatgctgagacttccaaaaaccagaaagcctcttctcctccataggatcacaactcctcgccagcaagggaacaaaactggatggagaatgagtttgatgaattgacagaagtaggcttcagaaggtgggtaataac

SEQ ID NO: 863871 - DNA, 635 bp, Homo sapiens
catcatattgttggaagagatcttggattagatctgatccaaccttcttattttgctgaggaggaaatggaagctccacaggcagatatgattagcttatgatctgtccaatctgtttaattcagaggattcaagtgactctgagacacgatatgtcaggagggtctactccaggacaactattgagaagaaagaaagaagaatcataaaaatattaacatcagttgttcatgtattttaggggagtagtataattttccttaagggaaaaatattgttttatttaagaaagcctgataatggatgtttgcttatgaaaagagagactcaaggctaattctggatttgagaagttgagacaatggacttgaatttgctgtagataacaaatcagcaggacttttcagctagcccttgtggatttggggcctggaactcaaagaagtgagagaataggaaaacagagcatasgaatatgatggcagatcaagccttaaggacagagtccataaagacagactatctgataaactttatcaacactaatatctaatattcagttttgagctgtataccgttctgcatgataattttccttggtaatgcctaaaccttccataaagttgtactggtgg

SEQ ID NO: 863872 - DNA, 609 bp, Homo sapiens
ggtcaagatcacagtccattgttttctttagatccacagagtaagccactgcattattccaactttcttataagatagaacaattatttaatgaactccaaatgtatgaaacttccattgttgagattatgtaaataattgggctgtaatgcagctggattcctagaattaataatttccatgttcatactctgtgcttaccactctagtgcccctaatgycatttcagcccctgtgtttctgggcagtctcaatcagaaggatagcatgcttcagaaagcttgcaatcactctgcagaggtagactcagagtcctgggtttcactgctagcaatgcttctaactctcggagctttatcttctttgcgtgtaaaatgtgaggattgcccagctgcactctgagtctctctgatgtctttctgatgtgaaatcaaggtggagatcaggagttgccttccttaaacaagggcaggcatgttttgggtagacagaaaagtggaaacataaccagtcagtcattcatctgctgcatctggggatggacctaagctgagcaggagcctcccctatcagtcctcttctcctttctccatgctacggccactactg

SEQ ID NO: 863873 - DNA, 564 bp, Homo sapiens
ctactgctcattttttgttttgggagatttttttcaaggagcatttctacattcctggcattgtgtttggtgctcaaaatgttttctcaattcatgcaataactgtatgcaaattttaaatcaagcatcaggatgtagttatttgcccaagttttaacagctaataaattctatctgtccaatactgcatttaaaatacaaagtatttackgtggttgatgagaatatattcttgaatggctaggcaaactcaaaataaagcaccttattttaaaatatgactgttttaatgttttttggaacaataagtgaagtggagctattgtttttctttttggtcagtttgttttttctggagtttccaattgccttttgcatcacttggtgtcctggtgggatacaaaatgctcttacccatggtctagcccatgaaagtacaaatctggtcatttttatcatttaaaaaattaatctttttataagaatgttcattgtgctattatttatatcgttaaaaaatagaagtggcctcagtatcaaacactaagttatgaaacattcata

SEQ ID NO: 863874 - DNA, 572 bp, Homo sapiens
cctctgagtctcagatcccttttttgttcccctcacaaatctattcccacggctttaccattcagcttattatctctgtccagataaacattagcatagcacattatcatatctaaaacccaaccatacttcaacctctctaatttcaggttagggtgacttaatccttttggagaacgaaaatttcacaacatttctgtcctttggtaataggagtaggattgtgattttgccaggcctataggaagaataagggggctatgtgaaggattctgctttgccaaacctgtacacactagcccttgggagggttcaaaggatcctaaggatcagcagacagataagaagcattgtaatggtaagagcctggtratgcaaaacaagccttctgcaaaaacagggctgaaccatgaggctgagcactagggcccagtgaagtctcctcatgtctaaaatctttgtcctcacgtctaaaatctaaacacttctacctgaaaacatggatgatcttgtctcaatggcatgtgtgcagagacagaaagagatggaatgccccatgaaaaggacaaact

SEQ ID NO: 863875 - DNA, 572 bp, Homo sapiens
cctctgagtctcagatcccttttttgttcccctcacaaatctattcccacggctttaccattcagcttattatctctgtccagataaacattagcatagcacattatcatatctaaaacccaaccatacttcaacctctctaatttcaggttagggtgacttaatccttttggagaacgaaaatttcacaacatttctgtcctttggtaataggagtaggattgtgattttgccaggcctataggaagaataagggggctatgtgaaggattctgctttgccaaacctgtacacactagcccttgggagggttcaaaggatcctaaggatcagcagacagataagaagcattgtaatggtaagagcctggtamtgcaaaacaagccttctgcaaaaacagggctgaaccatgaggctgagcactagggcccagtgaagtctcctcatgtctaaaatctttgtcctcacgtctaaaatctaaacacttctacctgaaaacatggatgatcttgtctcaatggcatgtgtgcagagacagaaagagatggaatgccccatgaaaaggacaaact

SEQ ID NO: 863876 - DNA, 599 bp, Homo sapiens
ttccaaaccagaggcttagaatcagcctgaaaactcatcctgtgatttaaacgtgttcaccactcaaagccagccctttagcttttcttaactcttgagtagaaaaggtggaattctttcccttctcaccagaataaagagctgatctggatgagaggaagggatggttaaaagagcagaggacacaggatgcaaaatgaaggaagcactactgtagactgagaaaaagtatcagaatggccacaggcagagctgcataacaatataaaatattaacagcacagagaaaaaatattgtttcaatggaatcatcccaacttttgccttacgtttgaagacagaaaaaaatacatatccaacttgtctgacttcaggrtctgaagtacctggctcacgggtttgtttcctctgaaaactgttcaaagaaataacctgatttcctgattttgttaacggttgtcaaccagataattccgtttaagccccctgaatatctagaaatacttgataatccagacaatacaaagaagagatagggcagagaaagccaggaagaggacgggacaaaatccgcttttcgtaaaataatataggcgaca

SEQ ID NO: 863877 - DNA, 613 bp, Homo sapiens
cccagcacaatccaccccttttcccgtttaaacccacaaaatccttgcaacacatatttagcttctaaccaacaccagcaacaaattaatgagtctgcctaatatgatgtgtctgctcttatataaatgtagatgcactcacccactcttggaaaggtggagactcaaagtttcccttcagaactgtagccatctctggatagtgttaattctccttctagtttagtcacagtccttctttgataatcagtaaactaaaaattaaattacaaattaatcacaactaacaaacttctgtatggaaaagagaagataagaagatgtacgtacatatgcaagaaacaatacatagttaacatggtcctcatttttgcaagcagttacaargccatacttaggctttaaacttctttcttctacaacccactctgtttcctttacaatcaatcagtcagcatctaagccagtcatagctttttatctgttggaataactcaaatctctactcctgaaggtgcctgtagtgggttgctgtatgcttccactaacttcctgcataaggaatgcataccaataaatcccctaggctcccaacacaaattccctaggctcc

SEQ ID NO: 863878 - DNA, 613 bp, Homo sapiens
cccagcacaatccaccccttttcccgtttaaacccacaaaatccttgcaacacatatttagcttctaaccaacaccagcaacaaattaatgagtctgcctaatatgatgtgtctgctcttatataaatgtagatgcactcacccactcttggaaaggtggagactcaaagtttcccttcagaactgtagccatctctggatagtgttaattctccttctagtttagtcacagtccttctttgataatcagtaaactaaaaattaaattacaaattaatcacaactaacaaacttctgtatggaaaagagaagataagaagatgtacgtacatatgcaagaaacaatacatagttaacatggtcctcatttttgcaagcagttacaaggccatacttargctttaaacttctttcttctacaacccactctgtttcctttacaatcaatcagtcagcatctaagccagtcatagctttttatctgttggaataactcaaatctctactcctgaaggtgcctgtagtgggttgctgtatgcttccactaacttcctgcataaggaatgcataccaataaatcccctaggctcccaacacaaattccctaggctcc

SEQ ID NO: 863879 - DNA, 626 bp, Homo sapiens
cccatttaaaaatatatcttaagtctcaatgttaggagaagttgtgtcccttctatgcaactaatttgttttactttttggatactaatacttgatcatgtttccctgtttggccacttcgaagttcagaatacatttgtgaacctcatagtttatcacaagagttaggggaaactgaaggtctttctgtctctttctctctctccatcwttttaggaaattaccaagctgctgcctttccataggatttttttggatcgactagaagagaatgaagccatagaccaggacctgcaggcttacatcctgcaccggatacacagcagctcagagatccagaataacatttcacttaatggcaaaatggacaatactacatttggcaaactcagttctcatctcaagaccctcagtcaagggtcctatctatatctgaaacttacatttgacctcatagagaaaggctatctagtgttaaagagctctagctacaaagtagttcctgtttcgctctcagaggtttatttactccagtgcaatatgaagttcccaacccagtcttcctttgaccgggtgatgcctctcctgaatgtggcagtggcctctctccacccactgactgatga

SEQ ID NO: 863880 - DNA, 679 bp, Homo sapiens
ttaaagcatggcatgctctgaagtcatattagaaaagtcctttgctttcatgcaaaactagtctccgtggcttttcattgtgtagatcgggttaaaagcagaatataagaagcaagtttttggatgagatgatagaacttaagtagtacttgtctgtcaatcctaaaagaattatttctggccaaatcctctcctctaaccaccaaataaggagcttgacttcattctcactgttaagaatcagaaacccagtttagaatatccaactcctggtgaacttttaaaaattaatatatatcttgatactttataatctattgtgtggcatccaacgaatgtgaggtaatctggggagttagaaatgccttgcatttcgtgtggaaaaggtgtagtcgtaagtttggcctgggaaggttaatactgtctttgcacatagaaagctaagggcagtgtcatcatcattygtttgtgaggaggggactgaaaaagcaaaatcatcactactagcctattctaaaggatcttaatcccattacatttttcagattttttttttattatgtagtatcccctggatataatctttttggtgaagggggatgtctctaatttccacgtggtaccccctgtcatatacaggttatgtatctggcagtctacagctgcaattcatggctgt

SEQ ID NO: 863881 - DNA, 701 bp, Homo sapiens
aacagaatctaaaaacccaaaataagaaactgtttcaaggagagaatggttaactttaccaaatgctgaaagtgaagtaggaagaggacagaggaccacagaagctggaggatgtggctgtaggtggcataaataagagcaattttattggattagtgggactgaaagccagactggagcaaacaagagaggctgtgaggcaaggaagtagatgaggagtatasacaatccttctgaaaaaggagaaatggaactagagaaaacaaggacaggaataggtttgtttgtttgttttaaatatgagttaacatttatgtgctgatggaaatgacatgatttccatggtagaggtagaaaattactgattcaggaaagggaatgaatagttgagagaggataagattgaatgcaaagtgaaggaactggccacagattggaacagaaggagctcacccactgtaacaagagaaaaggcaaagaattatcacatatcaactattagagtttatggtgggaaaatgactgttctcatctgattcctttgatttctctgtaaagctgagaatgagacaaaagcacatgttagaggttttaggaaactcgctatgttaagtaatgattatggagacaaggaaaccaaatttcctagaaaaatgtagcactgaaaatctacttgagatttgtattcatgaatttaaaat

SEQ ID NO: 863882 - DNA, 563 bp, Homo sapiens
attcattggctgtgaagcacgggtgattttttggtcttcttctgcaggtgtggcagtgtggagggaaggtcgagattttgccctgttcccggattgcccacctagagagacaccacaagccctacgccttggatctcaccgctgccttgaagcgcaatgctctgcgagtggccgaaatctggatggatgagcacaaacacatggtctacttggcctggaacatacctctccaggtgagtcatggaattgaacagcagcacggaagaatgaaagaggaggaggtggcrgttatgtaatggggagggataaagcaaaagtgccatcgcagccctaaagaattagggtaaggtcctgatggtgtgataataatggctcttaacatttatgtaacagtacagtactgcattccggacccttctatatattaacttattagccgtcacaacatatgtaggggataggttttatttttattattctaaattttacagatgaggaagctgaggcacagagagttggaagaaacttgtttaaggtaatgcagggagtaagattcaaaccaa

SEQ ID NO: 863883 - DNA, 526 bp, Homo sapiens
aggaaaacgtcacatttggaagtcaggtattaaaaccacagccaggcagctcctggccctagagctgaagcccaaacgcctccagggttttccattcatattccgttaccacctgttcaccgatcttgtctccacagtgagaggtgacagcgtgctggcagccctcacttgctctcagtgcctccttggcctcagtgcccactctggccacacttgagaagcccttcagcccgccactgcactgtgggagcccctctctgggctggccgaggcggagccggctccctctgcttgcrgggaggtgtggagggagaggcacgggcaggaaccagggccgcgcatggccctcgtgggccagcgggagtgctggatgggcgccggctcagcaggccccacactcagagcggctggccggcgctggccccagggagtgagcatcttagcacccaggccagcaggggaggaggcagcaccaggtcccccagcactgccggcctgcccgcaccacgcttgaattcttgccagg

SEQ ID NO: 863884 - DNA, 558 bp, Homo sapiens
gcaacttcagtgaaatagagatggaagttggcttatattaggttgagggatgaggccagaaggaaaatgggaaatagcttcaaagttgataaagccaaggagaggagtttcgatagttttaggctggggaagacttaaccatattcacagactgaaagggaaaggccagaggaaggaactgaagatggaagagtgagaggtgtttctaagtaagatgctgggggaatgagcgctggtactgacgggtgcagtaaaagcagatgagttggtataataactctaaaggggcaagtaccctgttttcacagagsaaataaagttaaaccctccactgaaagtgagatagggtatagatgtgatggggagcttgaggagaaagtgaatgttggaaagattggagggagctgacaagagacaagtgatagactcattaggagtagctcttgatggacgatttattgagttgaactgcctgccagggagaaaatgcctagaatcgcagcaagtcatagtctgcttcatctgcccttctaacttcctaagtaggtaagggcacag

SEQ ID NO: 863885 - DNA, 659 bp, Homo sapiens
ggatgccccttcttggccctggggattcttcctgctgggctctgctatcccaagggcctctagactggggtgggctcttgtggggctggggaaggagcaggtttgctgtccaatctcccggctgaaacaaggcccgggagcaggggtgtctccctgggtgcccactgtgggcagtaagggaagagccagattggcactctcagctaagagaaagcctgcccgggaaaggttgctcargaaaccaccagattcttcccctggacactgggactctgcatgtgtgggccacttcctcttgttcttggtggtcctggaatcacactggatagcaatccatacttttcactgtttctctggaaatgaccctggcaggtggacagtgcaaatattactgccattttataaatgaggcaaccagggcacaggaagtggagggatggtgcagcactccagaacttccagggctaggatagactcctctgatcagaggactgatcccactctgacccccaccaaccgtgtcatggcagagcgaggattagttctctgcctcatgcctttcccatcagaacaaaaagtggttctcgctttttggtcttgaatgcctttacactcttaaaaattattgaggacctcaagatcttgtaggaggattatat

SEQ ID NO: 863886 - DNA, 659 bp, Homo sapiens
ggatgccccttcttggccctggggattcttcctgctgggctctgctatcccaagggcctctagactggggtgggctcttgtggggctggggaaggagcaggtttgctgtccaatctcccggctgaaacaaggcccgggagcaggggtgtctccctgggtgcccactgtgggcagtaagggaagagccagattggcactctcagctaagagaaagcctgcccgggaaaggttgctcaggaaaccaccagattcttcccctggacactgggactctgcatgtgtgggccacttcctcttgttcttggtggtcctggaatcacactggatagcaatccatacttttcactgtttctctggaaatgaccctggcaggtggacagtgcaaatattactgccattttataaatgaggcaaccagggcacaggaagtggagggatggtgcmgcactccagaacttccagggctaggatagactcctctgatcagaggactgatcccactctgacccccaccaaccgtgtcatggcagagcgaggattagttctctgcctcatgcctttcccatcagaacaaaaagtggttctcgctttttggtcttgaatgcctttacactcttaaaaattattgaggacctcaagatcttgtaggaggattatat

SEQ ID NO: 863887 - DNA, 619 bp, Homo sapiens
actgcaatcaggacctgggtaaataatttcaatgtttgacattatactgaattgatcatttctaaaatgaggaaaaaaagttatccaagtagtattttcaaacattttaatttttaattaataaacaaacaacacaataaaaataagaaagtaagcattattttaacactgcaaatattcatgtaaaaacagctgtaccttaattatttatccagtcctgtgcaggctttcctgacttgtttggaatggcagacccgtgtaacagctttgatttatatgaaactttagagatctagacattgatttaaagaccagtgggagtgaacgagacaagccaatcaacaccaccacctcaccccaacacctccttctgtccaacttgcgtcagctcttgaaaaaaaaaaaaagagaagctaagtcagtttactgttgtacatttggattaaacatcagttacaccratttctatttgcttttagaattttggctttcatacaataaaataatcactgaaagttttagcttggttggtgtcattctctattaagattttactaggttggttgactgatgaatccagaaatattccgttttcaaaagacttatgaattgaagtcaa

SEQ ID NO: 863888 - DNA, 594 bp, Homo sapiens
cattacacacgtctattcaaaaaatttatcaaaaatggactttaacaacaagctatgtaaaacatgttcatgacaaaaaaattcagatgacactgccaaagttgggaggtagtatacagtacttaatttctctaaatcataccttcttctgaaaaaaatggaaattgtaacagtgcttttacctcataatattttgtgaatacaggtgataatgcacgtgaaatgcttagcatagtgtattcagtaaccaaatgttacctaaaaccactgatagttcattatatatmatttaatatgcatacaggagagaaactctatgagctgcatataattcaagatttaaaaacagatgttaagaatcctatttaacttttaattccataatttttcaagaataaacctctccaaataggtttctttcatgaaaacagatgcatacaattcaaaattatatcagcttacgttaattttcatgatcacaacctcaaaataattttgtctcagctaaggacatctactaatttgcatatagctatttttgtgaatgttaatagtattgcattcaggaggttccttagtaattccttattttta

SEQ ID NO: 863889 - DNA, 680 bp, Homo sapiens
tataacaaggcttgaatgttgtggaggaagtaggcaaaaactaaagaaccaagaaagatcaaaaagcaagagacctataacccgtaaggttaagaggttatgaccctagggccctgcagtaaggtggatgtctagaaagacattttcaggtagttttaagcaaactaactttaccgggcttttggaaaagggatagagataggatctattgctgaggacaacattcctggcatgaatacgcttacaaagatcatagggatcctatcaaaattaagctgtcactgctgtttgagaagggaactatggtattagtaattcattaccctttgtgttcactgttcaaagttaacattgtccaccttgcaagtatttcttgaataacttgttcatcayagttattatcccagttctaacctttcacaaggtgcagtcagggcacaaattagaagggaaaaaaatatgtgattagataataaaaatgaatcacatacacctaaacaatggtgtcacattctaaatttggttgtgatagctactatttgcctttaaactaggggaggtaatttgtagtcagtatgatgtcgagttgtctttactgtaacaccatgcactaggtgcccacctgtgtttttctaatgtttgacagggaagcagttgtagctgtggcagtgtagagagga

SEQ ID NO: 863890 - DNA, 629 bp, Homo sapiens
tcttcatgttacaatcaattctcccaaagccataaataactgttttctggaaaatggcactctgtggtacagtaccatgctgtttgataattttgttaagggcctggctttaaccaaacagtacatttttttgccaacagtaccaccttcatgagtttagggaaccagatgaggaagcgcaataacaacatagtttttggagggagacagacctgcagtagatttctacttttgctctgtattagctgtgttgagagtgcgcaaatacaaataattatacctatcttgtagggatgttatgaggataaaatggagtggaacatacaatgcaaaagtcacaaactgtttcagttagcctgtagtgtttaaaaaatcaggaaatatccataaaaatgtgaatttcctgtctcttttgactaaatggaaagtctgggaacacggagcccacayttctgcagttggcaacatggaatgaaacggcagcagcaaccttaaatgtaggtaatttgctgtataacccccaccacttaaatccagccagtgtagcctctgagtttttgaatgttccatgaagtggtttaacacagtgtttggaacagtgtctggcacataatggttggtacatagta

SEQ ID NO: 863891 - DNA, 601 bp, Homo sapiens
ccttgcctttgtatttggggaagagtctgatcttcaagatggacccaacctcaatagaaacaaagtatgtgtgaaagttcttacccaacccttttcttagtgtgttctatttcatctttaatgcagatctttaatctcagacgttcatcagaaaggggtaacatcaaatactccaaatctgagcaacattcaactcatttgttgttgttctggggttttgttttggttttggttgagacagaggtaaaaagcccagaaaagccatagagagaattttaaatgctgctctcccactaatggttataccttttttatcagcttcttcatctgattggattaratttaaaattttcctttagccttggatatctgacaagattctttcagtacagtgagactttctccaagaaaaggaatccacttgattggatcagaaaccacaacctgcctctggaagttaaacctttcagtaggtcaggtcatgaatcaggggtggtggcattttatgaaccttgcttggattctttgatcttgccccgtgacccacacagacctggtaaggagcttcttctcattgacggggataggggagtggactcta

SEQ ID NO: 863892 - DNA, 601 bp, Homo sapiens
ccttgcctttgtatttggggaagagtctgatcttcaagatggacccaacctcaatagaaacaaagtatgtgtgaaagttcttacccaacccttttcttagtgtgttctatttcatctttaatgcagatctttaatctcagacgttcatcagaaaggggtaacatcaaatactccaaatctgagcaacattcaactcatttgttgttgttctggggttttgttttggttttggttgagacagaggtaaaaagcccagaaaagccatagagagaattttaaatgctgctctcccactaatggttataccttttttatcagcttcttcatctgattggattagatttaaaattttcctttagccttggatatctgacaagattctttcagtacagtgagactttctccaagaaaargaatccacttgattggatcagaaaccacaacctgcctctggaagttaaacctttcagtaggtcaggtcatgaatcaggggtggtggcattttatgaaccttgcttggattctttgatcttgccccgtgacccacacagacctggtaaggagcttcttctcattgacggggataggggagtggactcta

SEQ ID NO: 863893 - DNA, 576 bp, Homo sapiens
acattaacccctaacacacatagcactttttataccctttgaatcaaaaaacgtattcctgagcctacatcattactccacccgaagaatcaattatcaaagatgaatgtactctacaaaccaaggggaaggggagtgaaaagtctccctctctctgtagaaaaattgcttagtgattagattctgtttcacccaaagaataacagcttcttgaaagatacatgtcaatacagaacaattttactttctgtgcctggttatattgattcaaaagcggtggtggtggcagtggcagtgggggtgggcaggtggaaggtgaggaagactatyttcttgccttgggcaaaacccagaagtaggcaaaggagagagatttggagtcatttagccatgacagagtgagaccaaatagactataaatatcaccttaaagcaaaaccaccctggggcaagaaaggctcctgcctgggactccacgctttagagggctctgctctagctcctcctcctcacagggcaaggggtccaaggtagcaggagatgtgtcctagcagagccgtacttctcccttctaga

SEQ ID NO: 863894 - DNA, 570 bp, Homo sapiens
agagctgaaataataggaagggaatgcttcaacctttaacactcgaaaatcttttcccaatttaattcaccaaaactgccccttgaattattcagtctatcctaattaactccccagagagttatcttcaaggcacagttagttggttgttgcctaaggycaaactccaagctagctctggatgtgggaaggatacaaaagtttctttgcacttgacaatttctgttacctgaggtgagacagggagacaaaactatcccattaaggttactgttgaacccaaagggacatacagaatttcatatcataggctgtcattggcagcttatcagaaaatgtcccttacaaaataaaattccagataagggagcattgcaattttaaatatttgatttgagataataagattcttcctaagacaaggtgataattttccttaagtatcccaagtagactgggaaatcctaaaaagaagactccagcaggaaatcccagaggaacctccaagctaggcctgctgagataacgatgccaaaaatccacagtcgggcattaaaatagctttttagc

SEQ ID NO: 863895 - DNA, 600 bp, Homo sapiens
ctttccccaaggcagagcctagcaggcacaagaggggatcaaggcagtagctgcaaaaggagtcacaaggggaaacagtgtccaactctaagactattccaggaggctctcccatcaccctcctatccccccaacacacataccaatgcaacaaactttgtctcattcatccgtttatgtatacgtaagacatagcattagctttccagaaacctgctctaggggaaagtgggataaacatgtagggtaattttctaagcaaatgataggaaaacagtcctttgtaaaatttcatctattttgcttgagtctgcagaggaccagtgtcacagattaaagatggccacacattctttgtcatcaaccctgtgatagaacagcaaaatctattttgtctttgtccctagttccygaggcacagagcttcaaaaaccatttgaaattcctgagtgacaggaacatcttttgttgttcataatgaacccctttgagctgtatctttatgctatcaaggtgactcaaggtgtgcccttagatagtttccaggaaggtgccagccacatggatacataattagaggaactttcaaccttgtccctg

SEQ ID NO: 863896 - DNA, 659 bp, Homo sapiens
acatttttataactaatatcgaaagctcacacaaaataaacaacataataaagcaaaggagactgtatcagcaaacagattaaatggctgttattattattattaaacagtaagtgaaagaacagcattctgtgcctctgctgcaggacacaaagcatctgtcacctaccttccatttcagatcttaattagtgcttcagccagcagcttaaggggaaattctaagcgaatgttatagactgtgacttygaatactctgtcacttactgatattttaaggtcatttaggtcattactgaaagtcatcatgctctgaccagtttggggtgtactcagtccttcagcaaatgagggacagggaacagctgtgatacagtcaagtggagggcatttccatttacatatttttaacctgaagcttcagaatgtttttcaaagtttggagaaatacttatttattagtaaagatataccactcttgctttccataacgtgcttatataaggtcttgggcaggtcagacttcggaaaataattatcacctaaacttcgaaattcagtctgttattttaaggaactctcttattaatttttcagcattacacataattttcaataagaaaactaaggtgactcctaattgacctgattctaagtgt

SEQ ID NO: 863897 - DNA, 626 bp, Homo sapiens
actcttgatggataataaatttcataaatttatattgaaattaagcaagcatgcaaatacagtaagatccctatataaatacagcaagaccaagtaaaagcaaggtcatttgtctctgaaaagaaaagtgggggtcaccaaccacttatcaatgatatcttgtcctctctccaagagctatacctcatttacattcaaaatgattcagcatgcaaaacaagacatagaacaatatgaaaaccatttatttaaaaagccaaaatataaacatactaaatgtagctgggctgttccaggcactgcagctgggcacagcatctrcatgagagctactcctagtagctaaggcaaaaaagaaacactttgctttacattgcttccattgttcgataaagaaagcacataaattcagtaggagagtagcattttcctgtccagaaattctttaggtaatttatgatacaagaaacattaagaaacatcccttaataagccttatatttttttcatggcacacaatacattgttctttatttttatgatacagctgtatagtacatacatatctttaattacttctttaatgttcattttcccaattagattgtaaactcatgataaatgaa

SEQ ID NO: 863898 - DNA, 626 bp, Homo sapiens
actcttgatggataataaatttcataaatttatattgaaattaagcaagcatgcaaatacagtaagatccctatataaatacagcaagaccaagtaaaagcaaggtcatttgtctctgaaaagaaaagtgggggtcaccaaccacttatcaatgatatcttgtcctctctccaagagctatacctcatttacattcaaaatgattcagcatgcaaaacaagacatagaacaatatgaaaaccatttatttaaaaagccaaaatataaacatactaaatgtagctgggctgttccaggcactgcagctgggcacagcatctacatgagagctactcctagtagctaaggcaaaaaagaaacactttgctttacattgcttccattgttcrataaagaaagcacataaattcagtaggagagtagcattttcctgtccagaaattctttaggtaatttatgatacaagaaacattaagaaacatcccttaataagccttatatttttttcatggcacacaatacattgttctttatttttatgatacagctgtatagtacatacatatctttaattacttctttaatgttcattttcccaattagattgtaaactcatgataaatgaa

SEQ ID NO: 863899 - DNA, 614 bp, Homo sapiens
taggaaaaatgaaaaacgtatggacttcagttgacatactttatcaacattggtttgttcattgtaaccaatgtactattctattttaaggtgctaataataggggaaactggatgcagagaatacaggaactccttgaactatctttgcaactgctctgtaaatctaaaactgttataagataggaagtctatctttaaaaactaaagggagctgaggccaggcgcaatggttcacgcctgtaatcccagcaatttggggggctgaggcaggtggatcacctgaggtcaggagttcgagaccagcctggccaacctggtgaaaccccatttctactaaaaatacaaaaattagctgggcgtggtggcaggtgcctgtaattccagctacttgggaggctgaggcatgagcatcacttgaacccrggaggcggaggttgcagtgagctgagattgtgccattgcactccagcctggatgacagagcgagagaccagcctgggcaacatagcaagactttcccatcttaattaatcagtaagtaaataaatgacaaaacatccttcaagtggacttttcccatagccatccttcaaaaagacataagctcacttt

SEQ ID NO: 863900 - DNA, 621 bp, Homo sapiens
tgctaactagctttccactatgcctgacctaatttacattcccaccagcagcctagaaatgttcccttttctctacaaccaccccagcatctgttattttctgactctttaataattgccattctgactgatgtgagatggtacctcattttggttttgatttgtatttctctaatgattagtgatgttgakaattatttcatatgcttgttggctacatgtgtgtcttcttttaaaaagtgtctgttagtgtcctttgcccactttttattggggttgtttatgcttacaagtttgtttaagttttttacagattctggatattagacctttgttggatggatagcttgcaaatattttctctgattctgtaggttgtctgtttactctgttgatagtttcttttgctgtgcagaagctctttatgttaattaggccccgttgtcaatttttatctttgttgcaattgttttggcatcttgttcatgaaatctttgccaggttctatgttcagaatggtatttcctaggttgtcttgcaggtttttgatagtttttggtgttagatttgagtctttaataaatcttgagttgatttttgtatatggtgtaaggaagaggc

SEQ ID NO: 863901 - DNA, 619 bp, Homo sapiens
aactcctacctttttatgttttgtgattacttggtagattattctccatctctttactttgggcctatgggtgtcattgcatgtgaagtgagtctcttgaagacagcataccattgggttttacttctttatccaaattgccactctgtgccttttaattggggcatttagcctgtttatattcaaagttagtattggtatgtgcagatttgatcttgtcatcatgttttaagctggttattatgtagacttgtttgtgtggctgctttatagtgtcactggtctatgtacttcagtatactttgtaggtaatgyatgttgtacctatgtactttgttgataatggtctttcctttccacatttagtgctcccttcaggaccccttgtaaggcaggtctggaggtaatgaattccctcagcatttgcttgtctgaaaaggatcttatttcttcttcacttatgaagcttagtttggctgcatatgaaattattggttgaaaattcttttctttaagaatgctgaatataggcccccaatctcttctagcttttagggtttctgctgacaggtctgctattagtctgataggcttccctttgtgacttgccctttctttg

SEQ ID NO: 863902 - DNA, 619 bp, Homo sapiens
aactcctacctttttatgttttgtgattacttggtagattattctccatctctttactttgggcctatgggtgtcattgcatgtgaagtgagtctcttgaagacagcataccattgggttttacttctttatccaaattgccactctgtgccttttaattggggcatttagcctgtttatattcaaagttagtattggtatgtgcagatttgatcttgtcatcatgttttaagctggttattatgtagacttgtttgtgtggctgctttatagtgtcactggtctatgtacttcagtatactttgtaggtaatgtatgttgtacctrtgtactttgttgataatggtctttcctttccacatttagtgctcccttcaggaccccttgtaaggcaggtctggaggtaatgaattccctcagcatttgcttgtctgaaaaggatcttatttcttcttcacttatgaagcttagtttggctgcatatgaaattattggttgaaaattcttttctttaagaatgctgaatataggcccccaatctcttctagcttttagggtttctgctgacaggtctgctattagtctgataggcttccctttgtgacttgccctttctttg

SEQ ID NO: 863903 - DNA, 619 bp, Homo sapiens
aactcctacctttttatgttttgtgattacttggtagattattctccatctctttactttgggcctatgggtgtcattgcatgtgaagtgagtctcttgaagacagcataccattgggttttacttctttatccaaattgccactctgtgccttttaattggggcatttagcctgtttatattcaaagttagtattggtatgtgcagatttgatcttgtcatcatgttttaagctggttattatgtagacttgtttgtgtggctgctttatagtgtcactggtctatgtacttcagtatactttgtaggtaatgtatgttgtacctatgtactttgttgataatggtctttcctttccacatttagtgctcccttcaggaccccttgtaaggcaggtctggaggtaatgaattccctyagcatttgcttgtctgaaaaggatcttatttcttcttcacttatgaagcttagtttggctgcatatgaaattattggttgaaaattcttttctttaagaatgctgaatataggcccccaatctcttctagcttttagggtttctgctgacaggtctgctattagtctgataggcttccctttgtgacttgccctttctttg

SEQ ID NO: 863904 - DNA, 656 bp, Homo sapiens
aacataaagtaaaaagatccatgagtccctactgatataaataaatgacggaacagataaatgggaagaacagataaatctcctttaagcaagaattacaaaaaatttatgtagccactctctctcctttctctgggaggtggagtttaattctcaccatccctcccccggatgagagttggatttartgatttgctttcaaaaaatagagctggaaaagtgtaaaaagaataatgttagaatgaagaaatacggtgaacactaccctgagcaggtgatcaagattaacatcaacaatgacaagtcatattgacaatatgtggccttcataggatgtggtgagaatggcactttatgtctgtggtcttcttccaaaaacacataacctcagtctaatcatgagaaaaaaaatcagacaaacccaaactgagaatattcgataaaatattagtaatactggccaatcctcctcaaacctctcttaaggtaatggccaaaaaaacaagtctgagaagcagccatgagtgggcatagatgaaggagtcatgatgattaaattcaatgtgatatttgggtttggatcctgaaatgagatcggcagtaaaaaagctggtgaaatacatacaaaaattagctgggtgtggtggcacgcacca

SEQ ID NO: 863905 - DNA, 662 bp, Homo sapiens
taggccaagacaaaatctctctaaataaggaggtgagaagaatttgcatacaaaataaaggtggcacggcttacaaatactaaggaaaatggtttccttctgactctgtcattccagcttacaaatgggcacctttactaccttttcaatctatttatcattatccccatcactaccaccatcaccagtgtcatcactgctatgttttattaggcacttgatatttgccaggcataatgctggacataagatatgttgtatctcatttaattcttcaataagcctagaaagtagaccctttgacacttagagaagaaaacagcaaactgtggtcccaaaagtagtcagaggtggagttaggacctgaacccagctctgctacttctaatctctatatctgtaatcatcacattatctggacattatcttatayaaaatctgcaaagtttaaattttaagcacctagaagacaggctgagaatttcatgtattctttcaacatccttgttcttttcttatttatttatttatttatttatttatttatttatttatttacttacttacttattggtggtgcgtgttatgggactgcattgtgttggtctccacagtaccagttctcatcagatgctagtcatcttccatttttgctctctcca

SEQ ID NO: 863906 - DNA, 649 bp, Homo sapiens
tagattcttccaaatggccttcttcccctaagagatgatagattgcttttcgctccacagtgcaaatcagaaattgaaataaatgaagcacgtcttgagcagtgtcatggcaaaggagtctggcttgtagaatgtctgtctctggaaatttggagagctgggagcaggagatgtgatcgtggttcacaactgcaggtgaggctggggcagctctcccaggcctgaagcatatgcagggttttctctcctaatagcagcatcctgacttccctatatgctttttgaattggttttgcacattcttcccccaaattcacattttgactggtcaggkataaacaagtcaattcacagattcagggaagttttagagaatggaagggaaggacacattttcactggaaattatcaagccattatatttcccagatgtttactgaaaacaatggcataattatagatgcaagatcagttttcgttggatgtactgtgtgtccaaaagagaccataaattcaacagtagtggaagggaacatcccaggacacagtacagccaaatcaactgcacagtcattttctctacgatcaatgtgactaggttgcaatcccagaaatgttttcaactcctgcaatatttatggggatatgg

SEQ ID NO: 863907 - DNA, 632 bp, Homo sapiens
ctcacacctggatcccaaacctgccaagggcaagccaggcagagagcagcaaggggttgtgagcgagtgagcacagggtccagccattgcgcacagccaggtactctggctgctgcagcagggttggcagctccaggccatggcataggtgctggctccatgcaaggctgcagctggaccaaatttatcacacatggcttctgctgcaggcacctgcatctggacttggggaatgtggtggtgcctgggagcttggagacgccgggaaccacagagcccccaaaarggtgtcacagccctgtcttggggagcccctagatctgggctccccaaaagtccatagctcttctgtccttctcatcacccacaatgtggtgagcaagggttgtgttacagctatttcagtcccatcatttggcgggtcccaagttcttgtcctgtgtctaggaagaatgaggtatgtggacaactggagggtaagaaaggcagagaggtgcttcattgagtgacagaacagctttcaggagacccgcagtgggtagctcctttcctcaagcaggtcatcccaacaagttgaagagacctaaagtgggtagctccttcctacagctggtagtcttgatgtctgtttg

SEQ ID NO: 863908 - DNA, 638 bp, Homo sapiens
ggtgtgcaggcacatgtacacatagtaagtacgtgtctggttgaattatatggtcagttaagttaaataacaaggcatttcaaacaataagttgactgattttgtattttgactagttaaaattcttaaatgtgttattttgtgaaaacttagacatattcatgccgcatygttagaagttatagtggttccatagttggtgatttttttctcccaatgttttctttcaagttcaatgaagttttctttctttgattccccctttttgcagctgattcttaaaaagaacattatttcttcttctgaacaagaactatccattacatttaaagcttattatttaaggcatttacccatggagccccaagggactatttctaagtagagacaactgctccaaatgtccctagatttgtttttgtcattatgcaaaggaaaacataaaagagaagaatgagtcctcagcgctttgggacatttattgatcttgctggaggatgagcttcaaacaacaagtcttcctctgaagacacaactttgttatgaccagatgcttttgaacatgtgaattaatcctgcatcactgcatggatgattgatgtttttactctgaaagctctggggcccctgtgaaattt

SEQ ID NO: 863909 - DNA, 638 bp, Homo sapiens
ggtgtgcaggcacatgtacacatagtaagtacgtgtctggttgaattatatggtcagttaagttaaataacaaggcatttcaaacaataagttgactgattttgtattttgactagttaaaattcttaaatgtgttattttgtgaaaacttagacatattcatgccgcattgttagaagttatagtggttccatagttggtgatttttttctcccaatgttttctttcaagttcaatgaagttttctttctttgattccccctttttgcagctgattcttaaaaagaacattatttcttcttctgaacaagaactatccattayatttaaagcttattatttaaggcatttacccatggagccccaagggactatttctaagtagagacaactgctccaaatgtccctagatttgtttttgtcattatgcaaaggaaaacataaaagagaagaatgagtcctcagcgctttgggacatttattgatcttgctggaggatgagcttcaaacaacaagtcttcctctgaagacacaactttgttatgaccagatgcttttgaacatgtgaattaatcctgcatcactgcatggatgattgatgtttttactctgaaagctctggggcccctgtgaaattt

SEQ ID NO: 863910 - DNA, 665 bp, Homo sapiens
caactgagcaagcaaaacccaaataatctcagacgaaaaataaagaaaacagccaggtgcggtggctcatgcctgtaatcccagcactttgggaggccaaggcaggcggatcacctgaggtcaggagttcaaggccagcctggccaacatggtgaaaccctgtttctactaaaaatgcaaaaattagctgggcgtggtgatgggtgcctgtaatcccagctatttgggaggctgaggcaggaggatcgcttgaacccrggaggcagacgttgaaataagctgagatcacgccactgcactccagcctgggtgacaagagtgaaactctatctcaaaaaaaataaaaataaaaataaaaaaatgaagaaaacaacaaaggcaaaagttgatttattacaaatattggtaaaataaaaatctttagcaataatattcaacaaaaaatgttggagtaatagaaatacagaaaattggaactagaatccagaaacagattttcacttatagaataacttgacacgtttcaatgtaatttgttttcatctttgacatgacaaaaatccgtattttataatttgttaacagctttattgaaatataattcacataccataaaatccacccacttaaagtatacaattcaacgattgtgctatatcgcatta

SEQ ID NO: 863911 - DNA, 633 bp, Homo sapiens
tttcagatgtcacgttcctagagaacaagcaaagctctgttccactctgcttgccagtccccacgacaatcctgcacaggtgggagctggctccctgatgataaagtagtaatgagcacctaattatggataattgcataatgaagggctctctcgcttctgccagttcacatttgcagctggtacctgaacgatttctgcttgtggcaacaggttactttcttctggaatcatgcgasggaaaaaaggcagcatgccagcacaccagcatggattaaattatccccaacaagtctgtacctgattcctatttctcaagggcaggatggggaacttgactagtcattctcattatccagggagattagtttgcactcccaggctatggactaataataatgtcttccatttggagaaggctttaaatattcaggctatgcaaccacacccttctgaatttctgtaacaagctgcccatgtgccagtctgtaactgcagcagtgtgcagtaagctgtagcagtgttcttcaaatttgtctgcttataagactcaccttgtacatgtattaaaaacatgcatttcccaatgctcatccggacgtactgaataaaaatctgccagggtagttaaat

SEQ ID NO: 863912 - DNA, 633 bp, Homo sapiens
tttcagatgtcacgttcctagagaacaagcaaagctctgttccactctgcttgccagtccccacgacaatcctgcacaggtgggagctggctccctgatgataaagtagtaatgagcacctaattatggataattgcataatgaagggctctctcgcttctgccagttcacatttgcagctggtacctgaacgatttctgcttgtggcaacaggttactttcttctggaatcatgcgacggaaaaaaggcagcatgccagcacaccagcatggattaaattatccccaacaagtctgtacctgattcctatttctcaagggcaggatggggaacttgactagtcattctcattatccagggagattagtttgcactcccaggctatggactaataataatgtcttccatttggagaaggctttaaatattcaggctatgcaaccacacccttctgaatttctgtaacaagctgcccakgtgccagtctgtaactgcagcagtgtgcagtaagctgtagcagtgttcttcaaatttgtctgcttataagactcaccttgtacatgtattaaaaacatgcatttcccaatgctcatccggacgtactgaataaaaatctgccagggtagttaaat

SEQ ID NO: 863913 - DNA, 651 bp, Homo sapiens
actctttaaacaaccagctctcaggtgaactaaaagagtgaaaactcattcattaccatgaggaggacaccaaggaattcatgaaggatctggcccatgccccaaacccctcccaccaggctccacctccaacattggggattacatttcaacaggtaatttggaggggacaagtatccaaacyatattataggcctccttgaatcctctctgctactgtgaagcagaacagtctcttcataacaatagaaagcttccccatagctattaagtttgatcaattaaagaaaagtaaaggacaagtcttctgagacatagagcttcatggaaagccagggagagagcctacaaacatgaagcatgcatctccttggaacaaaatgaaatctgcattagttatttgttgctgcataattaattatccatgaatttagcagattaagacaataaacacttactatgtcacatcatttctgagggtcaggaatctaaaacagctttgctggaggggtttggatcatgatctgtcgtaaagtgcagtcaaacctttgacaggacctcctgtaggcagtaggccttagttctttgcttgtggttggcacaggcctcaattccttgcaatgtggtcctctccatttagctgcttggttt

SEQ ID NO: 863914 - DNA, 769 bp, Homo sapiens
cttaatgcccactgctgcttacaggctggggcaattataggcctggatgagagggctctcagagaggaaggggcatggtctgctgcctggaaaaatgttgataacaaattcccatgatgaggcggtttggcccctgttctgacggaatgtgatgttccttgcacttcttcccccagaaggtgataaagtcaggcagttgggcaggctgtcattgcccgagcccctgtggaatgtctcactttgrccaaggtctgtgaaatggtgtgggggcggagggtgcttagaaaatggtgcagcttagactagaggtgtttccctattggtttcggagcaacgcgttgacatccccactaaaatttcttgagtattttgaattgttaaaatctaagaaggtagaaaaaagcaaaaccaatatgtttttttcttctcatcataggggctttcatttatgcatggacacattcattattgaaccccacttctgtgccatgcactttaccaggtgctcagtaaacacattaataaagcaggcatggtttatcccgagacgacatgcactgagaggacgtttctgttttccaacaggagcacagttcagcacagcactggttcagcatgggccaattccttgccctgacattgtaggacattgtgaagcctccacctgggtcacaatgaccctcggtacctgttaatgtatgcaccttcatcatgaacccggagtattaaacaacaaatgaggcttcctgcagtcactaaggatcacgat

SEQ ID NO: 863915 - DNA, 594 bp, Homo sapiens
tttcagtgtttctcagtgttgacatttgttcaccctaaatacatgtaatatgtaggcaatttagctcattttcatcactgtctcatgatttaaaatgtcttccttgactgaccaagcttaaaagggagaggcgtagcaatgctgtttgtgtttggtttgtttttaaatcttagaagtagaacccttagaaagttaatgggtgctaaacagactggctcagtcctccaccttcatatgtccatattgtttctgtaaactaaaagtaaatcctaagcccccaaactaaccaagaggtcttggccaagaggaccccagagaaatctgaaaaacatagtcctgtatcatgatgtgatggaaggtyggacacacttctctatatcccgttttggagtttaggcaaaactgactagtgttaatgttaaattagagattatatgaccgaaaaaacagactgtttgtggcaataagataccaaattataaacaagacataaggccattcaaagtaagagttaatttgtgcctgcagaccatcagccttgctatacatcatttttatcttagaacatttccactttgggaggccacggcagtg

SEQ ID NO: 863916 - DNA, 693 bp, Homo sapiens
aggctgaaatgtgtggttgctttgtatttacaattgtgatgtggtctgtatcaagaaaactactgatcaacgtaagttaaaattacaataaaccatcaaatgaaagctataaacagagtctttgagtggtaaaaggaatgcctcatacagatgctaaaaagaaaagtgatacttccagttttgtaaaagcactttactgaaatatggaggctccaagtccaagaaatgagaggctttgtacaaaggtctccgagtctcatcaactacttccatttagaaaaagcagaatctagaattcagatgccaaaagctgtgactcaaagatgacccctctgaggacgaacaagttaataggaaaggagacacttgcaggaactctagagaactgcagaagtgaatccaagatctgtttgttaactcaatggaaattgcaggaagaaaacaaattccttctaagtcccatgacacagtgarctctatatttttgaacctaaaatggaaaactaatttgcaaaattaagaaatggcaaaggctcaagaataggtgtactgatttataaaaccatatttcctgatgtatacaattaaaatgagcaaaaaccaattaaaatgataatactaccatcacttttggttttgcattggtgtagcaatgtagcaactgagcttatcaacattgagcctagtattgtt

SEQ ID NO: 863917 - DNA, 647 bp, Homo sapiens
agtgagtccattacataggtacatttaatacataaggaaataagaaatagaaaggttttagaaaactccccccaaatcatatagctagtaagtgtgtcaattgggatctaagacccaggcagtctgactcttaaccattaaacattttataccattcttaacacattctacttcctatctttacatgaaagtattaaatatattcgaattcttttctatgaccttcctgtctaagactgacaaagctgtattctgtgcactgayatgaaagaatttaccaaataattaagctatgatgagtatgtgctaataattcaaaataataaattatttaggaggttttatgtaaaatatatattttgtcattatgtagctccttaaatacctaaactattcaaaaacagaacttttgtctctttaggaccaaataaaatgcaacaaaaactttataaggtgcttttggtataccttaaatatatttatatttcaaaataaatcatgtcctcaaatgctatgcatgatatgtaggtaacttctaatgccataatactcaaagctttaaacttgggtgttagccttgtcttgtaatatttacgagcattatgagagaattcttctatttaaaaaaaattcatctgtggtttttt

SEQ ID NO: 863918 - DNA, 605 bp, Homo sapiens
tgcagccccaggcaagactggagatgactgcagcttttgtgaacatcttcactgcaatatcattacataccccgagcctgagccagacagttgagcctttcccagattcctgaccctcagaaactcttattttaataaattcttatttttctacattgctaagttgtagggtgatttgtataaagcagtaggtaattggcacaattagacactcagtaggcatttggtcacataaagtatgcctcagatagtttgcaaatgcctctggaggtttgccatkgttcctccaacatggtaggttttctatcaggatttgctgattgattgtgttcttcctaaaaaaaaatctagggaattttcatgggaaactgaatggatagctgtcattcttttcctatccattttctcagtttttcccgaggacggagtagttcaagttgaactctcagctccacatatggatatgcggcacaggtctggccagtggacatatttcatgttatgtccacagttttaccaattcagaaatgggcactacacccaagtctgtttagtcaggtaattcttgatgcattgacagggaacaaagcttctagtcaccagac

SEQ ID NO: 863919 - DNA, 615 bp, Homo sapiens
tccatatgacagctcatccatcacatgtcgccttaagcactcataagccaggtccacaaagtgctttcccggggcatggaagacttaagcatattaatgtttttattaggcctttagcatttcattattgcctagtccagctgaagccagaggcctgggcatttaattatcacatacataagttggtgggcacgctctctgtgccattatagatccatttatgtgtctttttcaagaatgaaaggaattcagtacttgctaatgatgcataacaggcttctgcggtcctgaaagccataatttattgacaaacaatataattaccgacccataaatgcataagcccatcatttatcagaaaaagagacatgaaaagatgaccactcttgaaatccttgcttttayccttcctgtgatgaccttcaaagaaacttgacaatgagaagaaaacgtgcctttcagatgatgtggctgaaaacaatagagtgttataaatatcagaaaagctcactatcaaccaactgacacctccagtggggaagcaataggaatgccattttgttactgttcatgagacgttcctcccaccacgttggacacaaactcaaaggaaga

SEQ ID NO: 863920 - DNA, 638 bp, Homo sapiens
ctatttgaaattgcctgtttttttatatcttatatgcagcatataatttaagttttaaattctatgtccaatatcaaatataatcaaacaaacaaacaaaattatatgccaacatggctttcagtcaagttgctagttgtattttgacctcttttctagaaaataggtattatttgttgctgttaaatatcacattagtactttgggaagcctcatttaacaactcacatatatggagtctaatattgataaaactatccaaggcctttcttcatagacattgcttttatgctatatttcccaagtcatacacttgtaaaggtgatttttcttgtttgtttgcttatttatttatagggatgtatgctatttttgaaaatgcatttagatataaatacagaactttacatttatttcttctaatcttgtyacattaggcccaaagttccagcctatcaaaatcttttttcctccctccagattctgtgtcctaactacttccccatttcatccctcaaaagtgtaggcaacttggggacataaagaagctagcagattttgtgtttggattgccataacttaaattttcctccaggttacactttctcttttgggtaagtcagggtctcaacacagag

SEQ ID NO: 863921 - DNA, 636 bp, Homo sapiens
attcaccactagccctacagaatgaagaataggtgcatctttaacctctctattggcaaggtggaaactggtaaattaacattaaggatgaatgtttttcctgcagagaatgagaactgaatcaaagaaaaacagcagggttgtaagctccacaagggaagggaatgcatttctttgagccagtttctagcacagtgccaggtgcctgrcatagcattcaaataatgtttgttgagtgagtgcaaagccattaatcaatgctgccataagcacctgttgggaattttcctgttcttaacccccactgtcgcagaaacatcaaagggttgcctggtaaccattatgtctatataaccctgcccacctagctgctgtggattggtccaaagatgacacacattgggccaatgagccattcccttggggaattggaagaaataatggattccagccttggtctacctctcatttgaaagaaggagacgttaactcaggaaagattggtagctactttctgccacatgacctgggaagtggagaaggcagggaagcatgaagcagaggtgccgacagaagcagagatggaaggtggaagaaacttcctataagcctggagctttgggtccagctcattcc

SEQ ID NO: 863922 - DNA, 624 bp, Homo sapiens
gtgccgatgggaggctgaggggaggtctggaggcaaaggagacgtcaaccagcaggaggggagagagagaggacctgtgggacttcacctttattaaggttcgtgaacattctcctttaggctttcccatgggggttatgggttggatatctaaagaaaacatgctggaagtagggaacttatttacatcactctggtgttgacaagtaaattttatcatggtcagcagctgtggcatttgtggatttggggtcagtragatgaggacaagctggctgtatcgcaaattgcacacggggagggggaggtttaatgaggccaaagatgacaagttatgactgggttttaaacaactgatgacagacctgtaggtgaatgcctaggcagcaactctgttaaacaaatttatggcagtctgaaaactgcagtttggacacacctgggcctcagacctcacctactttaaccccctcctattgcagctgtgagcaacataactagagatgtcaatggggtcttgccagatcacaatcttggctgaactaggtctttaactcctgcctcccttctgagctcttccccgtgcattgtgatgctggcagcatcctcagatcatatggacag

SEQ ID NO: 863923 - DNA, 624 bp, Homo sapiens
gtgccgatgggaggctgaggggaggtctggaggcaaaggagacgtcaaccagcaggaggggagagagagaggacctgtgggacttcacctttattaaggttcgtgaacattctcctttaggctttcccatgggggttatgggttggatatctaaagaaaacatgctggaagtagggaacttatttacatcactctggtgttgacaagtaaattttatcatggtcagcagctgtggcatttgtggatttggggtcagtgagatgaggacaagctggctgtatcgcaaattgcacacggggagggggaggtttaatgaggccaaagatgrcaagttatgactgggttttaaacaactgatgacagacctgtaggtgaatgcctaggcagcaactctgttaaacaaatttatggcagtctgaaaactgcagtttggacacacctgggcctcagacctcacctactttaaccccctcctattgcagctgtgagcaacataactagagatgtcaatggggtcttgccagatcacaatcttggctgaactaggtctttaactcctgcctcccttctgagctcttccccgtgcattgtgatgctggcagcatcctcagatcatatggacag

SEQ ID NO: 863924 - DNA, 646 bp, Homo sapiens
atcatttgtgcaacttaatttttttcaaatattacaaaattcaagattgcaagaggacaaactaaagcctcttgcagcatatgtaaatatgacttagattttggctgtttttcctacgaccccagccaaggtgggcaccgtgaaggaagttctcagaataattactactggagtaagtctagtcatgccaatgccgtcttcatttactaaacggatgagcccaaacgggagaatgtgcagggctaggacaccagagaaggaaaatcaatgccttttatgcctataccatatataggtttccagacccaacggaragctatactcttgaaaatatccacaactctcaaagtccagaaactctattcttctgagttatgctgctcaaactctacattactgctgcagcaggaggatcacttgaacccaggagttccaggctccagtgagctacgatcacaccaccgcactctagcctgggcaacaaagtgaaactctgtttctaaaacgtctttttacacgtggattatctgctgctgagggtgaggagagttggggattcactgaattccagagtttgcaagacagaaagtactggaatgtagaaaatgtgttcaaagacacaatgacccagggtccaatccagaag

SEQ ID NO: 863925 - DNA, 556 bp, Homo sapiens
aggctcacagaaattaattaaattaaccaggatttaacaggtgttaaggttccatgaatgtcaattaggcctaggtgatttataatgttttataggttttatatatcctagttaattttcagcccactcattccataaattactgacaaaggagtactgatgtcttcaagtgtagttgtggacttgtatatttcctctttcaattctattcatttttcttcatgtattttgtagctctgctaatagatgcacacatttatttctgttatatctccttggtgaaatgaccattttatcctaaygtactgaccttctataatcctgataattttccttgttctaaagtctactctttctgatattaatttaactcatctttcctttgctctgtacttgcaaggtatattttctgctagccttttacttttagcctatctatgtcattattataaatgggtttcttatagatcatgtataattggttctttcatgaattcatcttatgatctctatcttttggttggtgagttaagatcatttagattttatgtaagtg

SEQ ID NO: 863926 - DNA, 611 bp, Homo sapiens
ttcattatgcattgctctttccatcattgtgttctccataagactgcaaatttctcaatggcatcttcatctttatattcctcccatgatacttggtgtaatgcctgttaattggcaggtggtggtggtttgtggagtgaagagattaacgaatctgtcataactcctttcctcaccacattcttaaactgtgcagtagcccccagagtagggaaagacactaaagagagtgcatgaattaaatacttggcacttcagaataattttcatcaagttagcttgagagctatgaacttcatcgttagaccgtctttgttcttaaaactccccttgcctccgtacccccttctcactaaaagagccaatatctgctttaaaatcagcttcaaaatggaatgcctggatttacattacaagctcctggagaactaraactgtctcatttatttttttcgcccgatgcacttggcttcatcccaggcaattgtaggtcttctgtaaatatctgatgaatttctgaaaaagtaaaggaaggtcagaattcatttaaatgcatattttactccatatgacgccaaagcattaatgacaaaagtttttactttttgaaa

SEQ ID NO: 863927 - DNA, 586 bp, Homo sapiens
caccaggataacctcttcatgtggaagatagaaaaacaataaaacataaaaatcttctatctcaagaaacctgaatctcagtattatctttgactacaaaattttgttttgaatatcataaatagaatattaattattttcattcttggtaaaaatgcttaggtcccaatgccactcccctagcaagtaataaatgtctttgaagaaattgcaaagaagaaaagaacagggatatatttagcaaacatgatcttccttgtcctttgataggaaagcagtacaaacagagtcatggaattggcactcctcgaattttcacagatccaatgtgatctggcccaagaaatagaaaatgctctccatgacttcacagccacttcccatcaatccatcctgagcactgcatcggtgcttttcaaagtttgkttttacctttcattatccaactctgctctataaagcttccctggccccgtggagtgggggtagaacacaaagctttcatagctcccagggccctcggtaagtcatttcaaaatttttcccacctgacgttggaatgacctctgtatccattgaacgtttt

SEQ ID NO: 863928 - DNA, 636 bp, Homo sapiens
cagaaacaaaacattagtatcaagaataaataactggctgggtgtggtggctcacacttgtaatcccagcactttgggaggcctatgtgggaggattgtttgagcctaggagtttgagaccagcgtgggcaacatagcaagaccctgtcacyatttttaaaaagaataaatgactaatcaaataagtaataagagagtaaaatagaaagatggacaaaagtcataagtagaaattttacacataaccaataaatatgttgaagatatttgacatcattagtgatcagggaaatgctagtcaagagtatagtaggttatcaccttatactcattagattggcaaaaatttataagactaatagttccaatttataagactaatagtatcaagtgctggaaaaaaatatagatccttgagttctatgaggtacaattattttgagacattagttcccaaagttaaaaatattatgtaccaaataactcaccagttccgctcttaggagtacacgtaagagaattaagcatgcagcagaaataaacaagttcttaagttcttagtggcactgtttaccatagcaaaacaacaacaaggaaataatgcaaacatccattaagagaaagtagatgaatgaa

SEQ ID NO: 863929 - DNA, 636 bp, Homo sapiens
cagaaacaaaacattagtatcaagaataaataactggctgggtgtggtggctcacacttgtaatcccagcactttgggaggcctatgtgggaggattgtttgagcctaggagtttgagaccagcgtgggcaacatagcaagaccctgtcaccatttttaaaaagaataaatgactaatcaaataagtaataagagagtaaaatagaaagatggacaaaagtcataagtagaaattttacacataaccaataaatatgttgaagatatttgacatcattagtgatcagggaaatgctagtcaagagtatagtaggttatcaccttatactcattagattggcaaaaatttataagactaatagttccaatttataagactaatagtaycaagtgctggaaaaaaatatagatccttgagttctatgaggtacaattattttgagacattagttcccaaagttaaaaatattatgtaccaaataactcaccagttccgctcttaggagtacacgtaagagaattaagcatgcagcagaaataaacaagttcttaagttcttagtggcactgtttaccatagcaaaacaacaacaaggaaataatgcaaacatccattaagagaaagtagatgaatgaa

SEQ ID NO: 863930 - DNA, 583 bp, Homo sapiens
gccagggagccaagtggtcttgttcagtaggtcccactcccagagcccagcaagctaagaaccagtggcttgaaattcttgcctgccagcacagcagtctgaagttgacctgggatgatcaagcttggtgaggggaggtgcatctgccattaccgaggcttgagtaggtggttttcccctcacagtattaaagaagctgccagaaagttcagactgggcggaacttaccacagcatggcaaagcagctgtggccagactgcctctctagattcttcctcactgggcagggcatctctgaaagaaaggcagcagccccagtcagaggcttatagataaaacccctatctccctgggacagagcacctgggggaaggggtggctgtgggagcagcttcaacagacttaaacattcctgcctgycagctctgaagggagcagtggatctcccagcacagcacttgagctctgctaagggacagactgcctcctccctcaccccatgcctcctgactgggagacaacttccagcaggggttgacagacacctcatacaggagagctccagctggcatcaggtgggtg

SEQ ID NO: 863931 - DNA, 649 bp, Homo sapiens
aactcctttttgtcgcctgcttcttgctcatgtctccagcttactgccagtccctcttgcacactgactctggcagtactgagtggctttctgttccctgagtgcccgggtctcccacttctgctaatgtggtttcccctgagtagaayggctgttagcctggcttcctcccacttctctttggggactcagccaaaatgtcacttcccccttctccaggcccagtttggttggccagaccccctgctgcatcatagaacctatcacattgggttatacctcaattgtccacgttgcctgctagtctacaagctctgtgagggcatggatcacgtcttttcgggaggttaagtactgcatagtacttaacttgtaataggtgtgtagtaggtactcaaatacttgaataaataaaaggattaatgaataataaacagatcatccattacaaaggtcaaatatttaggaattaccctgtattctttcttccccacctcctcccattactatctaacctatcagaaatgctagtcagctctccttccaaaatgcaccccaaatcaactcacatctccccacccctacaatttccaccctggtccaagtaccatatccctttcttgggtcactggggtgttctcctagctgg

SEQ ID NO: 863932 - DNA, 607 bp, Homo sapiens
gtgtgaacaggcacacattcatatagggatttagtgttcagaaataaggcacctcaaccaggggaggaaaggggacaactcaattagtgatgctgggacaactggatagctctgtagaaaaaaaaaaaaaattggattcacacctcaaatcaatgccaggataaatttcaaaaggatcaatggtttaaatgtaaaaataaatccataaaatactaaaagaaaagtcccttataagtaaggaggggggttagggctttcaataactcaaaatccaaaatctataaggaaaagactggtcaattcaatcaaaagcatcrgtgtgggaatatcactacaggcaaaaccaaatgacaaatgataacctggacatgtgtaactcatcacagataagagctacatcctcctaatttataagagttcctagaaattgatatcaaaaacctacaagaaaaatgagcaaaggatgagaacagcagttcgcaggagaggaaatttattaaaagaagatgcttaaccttactcataataaaggaaatgcaaattaaagctaacactgatatccacatttcacctgtcaaactgacaaaaatccacaagtttgctctcc

SEQ ID NO: 863933 - DNA, 600 bp, Homo sapiens
cttccagaggcctgctagtcaaaatgcagtccatggatcagcagtatcaaggtcacctataaatgtatcagaaatgcaatttcctaatcccatccccagacctactgaattagaacatctggagactgggcccaggaatttgtttctacaagttctctgggtgattttgatgcctgtcaaagttttagaacattgccctacagggctgattcttttactgggtgccatggtgcataaggaattctggggcggggagaaaaattctcttagataagagyttgggatctggactggggtagacctagccagagttccagcaatatgccttactcatgtgacactcagcatctctacgactcagtttctctatctgtaaattagacactactagtacccacctcttgcagttgctctaagtattaaagctctggtggaatatatgtactcaattattatacttggtattgttaatgctagttagtctgtgaaatttaacagctgacaagtacatgcatagtccccaaattatctgtattaattgtctacagtgaccactggggtaattagtggcctctatttttgttcacccaatgatgtggc

SEQ ID NO: 863934 - DNA, 620 bp, Homo sapiens
aggttccccctggccgccacatgaaagatgagtgtgaaccttgccctggggacagacccgtgcatggacaggacagcacagccccaggaacacgcatcagaaatgcataatccagagaagactcacttagaacagaccagatagagaaatagtgtgagaatcctggttttaggcccatgaaaaatatttttgacatgacagctgaaaaaaattcctgaagactttgctcattgatgggtccggcctcagtgcccatttgggccactttcagcaatccagtggcacacatgcctccgctgaataagaccatacaaggtaaggctaatatgaagtgtctggatctgatggatttgaggtgcagacacgagccccatctccrgagtcaggactctgtatttctgaagaagggtagaaagtaatctttgaagaaattccagagaatttcctttacggttaagaggagagtgtggggaaaacgttgctgccttttcttttctttcttttctttcaaggcaagttcttcctttgtcatccagactggagtgcagtagcacaatcagggctcactgcagcctcagcctccttgactcaagaaatcctcctgcctcagcctcctgagt

SEQ ID NO: 863935 - DNA, 648 bp, Homo sapiens
tgcaagtcaaatagcagaaaacatttcaaactgtaaagcattatttggaaattagttgttattagggagtagtcactataataagtgcaattaagttacaaatagaaagtttagggaataagagtagagctacacataaatctctaatgttattttgttgataccagagtcctcatcgaccctttccgggtggaaagaagctgtyttagggcatgaatcaactaccaagttgttgaaggatgattttaaaaataggatgtagtcatgactctcatacaaatatgaaattaaatatctccaaagatttttatttaactcaattaatgagaaaagcagtaagatgtcacaactgatcaaagaagaattcaaggaacatgtttatagaggtaaagggaggctgaaatgagtttacaaatagatgcaaaaagtcgtttaaccacagggcaacaatgctttgtactccaccagataaaacagacttgtaatatggcaagaatcatttgtattactacaagttttatacaacataaagagctgttaaaaaagaaaagaagacagaattgttaggtaaccccaaaagaatgagtgaaagagccaatcaggacacacacaaatctatcagtcaatcaaccaatctattgattcact

SEQ ID NO: 863936 - DNA, 661 bp, Homo sapiens
cccagcacagtgtctgggatgcagtaagctcagccagcatgagctcgtatctattttcccttctgcgtgtcctggctgtcttctcacagtgcccaggccagttcccaatggtgccagtcttacctattgtttgataccaatggacatgcagcatcacctcaggaaagaaagggctgggccagctccagctcaaatrgaagtccccctcttccatgtttcagccagtcttcaatctagtccagaataaagtcccgcctcctacctcagtggtattccatgaagctttctttataaattcaaaacttcttaagaattttccctacctatccaaccagggagctaccaggattctcctctccttcagagcccaacaaatgcacttactctctgcttccacatttctcagtcttagctattctgagcccatcaattcctcaggctaacctgactcctctcccaaacatatctccctgaatgagtatcaccaaacgtaacatcctctgtaagccttctacgggaatgagtatagctcccatagggacagcaaaaagacaagtcttgcaagagtagaggatagatgctggataacagagcaagtaaggtcctgtaggtagggagaggccagattctgaggcactaggaaagcccggtcagttcagat

SEQ ID NO: 863937 - DNA, 632 bp, Homo sapiens
acccctcatactgtcttatgccaaatttctgcctccaaagaaagaagtaaaaactaaaaggcagaaatggaatccacaggcagatagcccagcactgcgccctgggcctgggagttaaaaatcaacccctgacctaactgcttgtgttatctatagatttcagacattgtatggaaaagctttgtgaaaatccctcttctgttctgttctgttctgttccgtcctgattactggtgcatgcagcccccagtcatatatctccacttgctcaatcaatcacraccctttcacgcggacccccttagagttgtaagcccttaaaagggacaggaattgctcactcggggagctcggtttttggatatgtgagtctgccaacactcccagctgaataaagccctttccttctacaacttggtgtctgaagggttcttgtctgcagcttgtgctgctacagctgaggctacacaaattaaatttgaggcaaagccaaaatttaagcacagatccctgcctgattccaaaacccatgcttgtcctcctacatgataccaaagttctgtccaggtaaccacgaaggttggcaggtggagctgacacctcagaggctggtgggaaataacaagcaccaa

SEQ ID NO: 863938 - DNA, 607 bp, Homo sapiens
agttattgtgtttttttaccatctattacttgggatgacccacttacaaacagccttattccattatgtagtggagttttttaaggtttggtttaactttagtttgatattttatgatatttaaacagttacagtttgatgcctttttattctcctctcctttttataagaaactggctggagttaggttaggcacctttccagggtgcactgggaaacgtggggaggcaagggactgaacagctgggctcccagggtgcctttggctgggtcctgctaggtctggctttgggccaagagccgctggtttgaagagctgtcagcctgtggctccttccctgatgggcactctcatgagcaaaggcatccctggcttcactctcctttccttttctttgctttgaaggcacygttggttttcccgacaggccgagagatgcactgtttgtattttacatcgccccttctggtgacccagcaactgcaaagggtctccggtttgtccccactctgggaggggactcagtggcttttcctcctcctcagctgcaaggatcctcccctggcccagcctggctctgggaaactttcatacaacccacctcaa

SEQ ID NO: 863939 - DNA, 612 bp, Homo sapiens
aacgtgtcacctcagccaggtggtgctacatttcccaacttctctttctgttatgtttccagttagggtgagtcacagaggagattcaggtgagatacagaaggtgaaaaggaggcaagaaccattctgaagcccagccatcacttcctgtgctgccccagggctgatatctttgatcttattagaagttgaataaggtgggggtttggttggattcagttcaattctggctttaaatactttgaaggtgagctgaagcctttcgctttaggagatctcggaccaaagacaacaagacagatggtatatctagaaccaggcatggggcatggcgcatagcaggtgctcagtaagccggaaaaccatacagcacagtggttaartacacagactctagagcattcaaatcccaaattcccgcattcagatcatacctccactgtttgtgagctctctgacccagaccagctttcagctgtctgtgcctcagttccctcatctggaaactggtaataacatcacctacttcctagggtttgttatgatgattacacaaatgtagtaagtttcacgaaaatgctagttctggctcttagtgataactacaaccct

SEQ ID NO: 863940 - DNA, 661 bp, Homo sapiens
cctgccagtaagttatgccgtggactataggcatcagagaaagcatgaagctataagaaagcggtggggggaggaagcactgaactaaagtcaggagaatcaaattctagtcccagctctgccacaagttactggagacctcagggaaggtgggtgtcaagaaaaagacccctgagaaatgggggtggggagtggttaaggtatgcttctgcccttaaagtccctcgtattcctggttttcatttcttcctctrtaatgtgagaagtttggacaagttgaatttgtcactttcaactcttccattctaagattgtgaaccctgtgactggcattcagagtacagatactgtccccagttcttggaacaagcaagggggaagaaggaagaagtactgggaaagcctgtgctctggggctcaggcacttgggcctcaagaataaccaaccctacctaccttccaggttgtttttctttaaaaaaacattttttaagctttaatttaaataccgccttttccccatgaagagctcaaatgctcatggtctttgggcagaaatcatctgttttaaaatatggcattcaagccagacttgcagagaaggtctttctaaatagaaattttaaagaaatatgcccatcagggtttgtccattatccat

SEQ ID NO: 863941 - DNA, 614 bp, Homo sapiens
gttttcctaatttattttttgaatagtttattgttagtgtatagaaacataacttactatctttcattgttgattttgtatgctgcaactttactgaatttattagctctaacaatttttgtgtgtgtgaagttattaaggttttttatataaaagattatatcacccataaccagagataattttacttcctcctttctaatttggatgcttttcatttctttctcttttttaatttctaaattgatgcatttatttatttatttagacagcctgccagcttgttagttactgttctygtcactgaaaacttttccatgattatgtccagtcattctggacataagtatagagttacatgaactctatacttcaaaaagtcattttcttttgatgagttagaatgtaaaatgaaggaaaaaattagagtgagatttggagggatatgctgatttaataagtgttttctttcttatttgcctattaggtgtttatatatgagagggaatttaatagacttagaagctataagaagaactgattcatagatgctggtaaaccatgagaataaataacctatgttctagaggataacaccttttcatatgcactga

SEQ ID NO: 863942 - DNA, 372 bp, Homo sapiens
ttatcaaaaagaaaacaaaaatgtagtgaaaagcttgagtccataatggtactggatatgggttatactaaaagtatatgtgagctcctgaaaatgtcaactggtttttggttgtttttgttttgccaaagccaattgttctgaagtgtccacttttaaaacactgtgcataccatagccaagttttgattyataattaagctatgaatttcttgtactttttttttttcttttgagacagagtctggctctgtcgcccaagttggagtgcagtggcgcgatctcggctcactgcaagctccgcctcccaggttcacgccattctcctgcctcagcctcccgagtagctgggactacaggcgcccgccacca

SEQ ID NO: 863943 - DNA, 605 bp, Homo sapiens
acccgcaccgcctcccgggaggggctgggtcccctctcggctgtgacaccgccgggcagtgggagctgagcggggccagcgcctctcccccgagggaaacccgaggcccagaggggccgagggagcccgtcacgaaaactccagaagttcctragcagggacctgaaccaaaggtctctgcccacggcgcgggatgtagtgccgccgctccacttgagaaaggggtccccacacgggagtagggcgagggggtcgcctcccgccgccgaaaccagtccctccctgagtcgccaagtcccgagtcccgccctctccccgcagggctcccggagaggacctccgccttctcgcttcgcccctccgcctcgctcaggaggagacctgccacggccctgtctgacctgtcgccgctgggactgagccggcagcgcgaagcctccatgcccgccaccgaggaagcccccaccacgtacacactcttccccgccgtcgctagagtggctaggctggcacgccgccgcgtcccgcctcctggcaaccgcgttccacactgtcgccgccgccgattggtccgtgttctcgtggctcctgtctcattggctatt

SEQ ID NO: 863944 - DNA, 574 bp, Homo sapiens
caaaggcctgatgtccaaaagcatctgtcaccagctcataatgagtcaagggcagcggctgcatatattgttgctggtaacgacgtttggtgtctgcaaagtctagtctaaggtggtgatctgggccaccaagtgggaagtcctgcatatgggtccaggcagcgtgcactgcatccaggctttcatactggatatacacccaactrtcacctttctgtagtctgtggggtgtatggtgccaagttggtcaaactctcatgtcagggcagcaagaggcatccaaggtttcaggccacccacccagaggtgggtggtgtgtgtagctttaccataaccaattttgataggattccaaattataattttgctgaacattgctaatttggccctgtgggacatatctaggttctcaaatttgagaaggctgtaattactgctctggccaagaaaagggctcttgatatctacttctgtgatgactccaaagcaatcaaacgcccttcttatgtcactctctgttacagttgtgtctaggttgcccaagaaaagcatctggttagttctatgatgatcc

SEQ ID NO: 863945 - DNA, 547 bp, Homo sapiens
ctgagcattattgattcgttacccaccatgacccctcctcccacctcatgcagaaggagaggtgatggtgtggacggcagccatacctgaatctggcgcgtggactggagaaccagagggattacaaactgtgagagatgctgggctcatgctttggataggctgtgcacactgttaattaggatcatagatttgaacaatgtctaaaataattagccagggcrggtatgtgcctgtgcaggggtggcttacagatttttctgttgcttagagaaattttctatagtaacaaaggaataaaatgtaaattaattcacaactgcaggacttacacttagtaggcatttcaaagctgacttccaagtaaaccacataccaaaacctagacatgtcagtagcttataaatactgatatgtatgtcactcttagcctcatttctttgtactgctcatcagcttttagaggcagtgtcacttggtggagacaatagacctgaattcaaatcccaccttcatcatttactcacatttacacaccacagatctt

SEQ ID NO: 863946 - DNA, 671 bp, Homo sapiens
gaaaaattatgccaagaaataaaaaaaatatatattccacagaatgggtaaaaagttttgtaaaacaggtatctgatagagggcttatacctagaaactacaaggaactcaataataacaaaaaaaaactttttaaatgggcaaaagctctgaatagacatttctacaaaaaacatgtacaaatggccaataagcacatgagaagatgttcaacatcatcagccatcagggaaatacaagtcaaaattacaatggtgtacaattaatcaccatttaacattcccaatagtagcctacaagcttccatttccactgtggaaaacagtttggccgttcctcaaggtagtcaagttacttaactgctctgtaaaatgaagttaatcacattcactttggaygaatgagttcatatatattagctataattattatagcaattattattgtgcatattattactgattgggtcagattattagccctgtatccctaattcatttacttttgctactttggatgaatatttaaagtagtcttgaactgagatatgtatgtaaaggtcctatcacattggcatataccatgtgctcaataaacaaaagctataattattcatttctaaacaatttaaagattaaacttgcctcaaaacaaaacaaaacaaaaaacca

SEQ ID NO: 863947 - DNA, 623 bp, Homo sapiens
atattctgttgacacttatgactgaggagagttgtcttaccttatccattttggtaattaggagcacacccctaattggtgttatgttttgtgggagtttggaaagacattaacttatttcctgaccctgcaaaatctgaagcaaacctggtaggaactattttttctgtcttaatttattgtggtttagctcagatgaaagtcatcagtaaggtatttagtcggtgggaattcacatatatttactgaaaactctacctattatggaaatataaaaaattgacaaataaggccaggcacagtggcttacgcctgtaatcctagcactttgggaggctgaggcaggtggatcacttgaggtcaggcatttgagaccagcctcaccaacatggtgaaacccyatctctactaaaaatacaaaaattagccaggcatcatggcgaggtgcctgtaatcccagctactcgggaggctgaggcaagagaatcaattgaacctgggaggcagaggttacagtgagctaagattgtgtcactgcactccagccagagtgacagaatgagactctgcctcaaaaaaaaaaaatgagaaataaaaattgtatatatttatggtgcacgaca

SEQ ID NO: 863948 - DNA, 598 bp, Homo sapiens
tagcaggaccaagagaaaatggggttgtagccaagcttgcaaggatatggggcagtttctaggtctggggatgggaccatgatcagtaagtgccaactgggtgtgggtctgtcctgtaaaaatgaaactcctaggtcttgggctctaccagagctttataaactcctacctgaatyccaaggctcctacaaaggcacttttgcctgttgatgactattatgaaattattgttcctttgggggatatgagtgggggatctcctattccaccatcttgctaatgtcttttctgtttcatgaatcttttaaatatgtagatccatggatcatttagaagtatgtcatttaatttccaagtgttgagagatttttcttttgactttgtattattaatttctggtttgattccattatgatcagagaacatattcagtataatttcaattcttataaattttacaaggtttattatatgacctaagatatggtctatgttccactggtgcatgagaagaatgtgttttctgctcttattgagtgcagtgttctataaatgtcaattaaattctgtggtttgatggtgttcagttcttctattc

SEQ ID NO: 863949 - DNA, 506 bp, Homo sapiens
taagaatacttattaccttatcttttatgtttaagatctacttgtatgtattttggtttgttacttggtaaaactcactgaaaaaaaaaatagaattcctaatgtatgctcattcttatgcagttaaacagagtttcgacctggaggagtacagcctctcacagtctaccctggagcaggtgggtcatttttagtgattctatawcatccatggaatatacatgtataatgcattcgcctggagctgcaggaggcagtatggcattgttctcctctctttatttctttccttccttttaggttttcctggagctctccaaggagcaggagctgggtgatcttgaagaggactttgatccctcggtgaagtggaaactcctcctgcaggaagagccttaaagctccaaataccctatatctttctttaatcctgtgactcttttaaagataatattttatagccttaatatgccttatatcagaggtggtacaaaatgcatttgaaa

SEQ ID NO: 863950 - DNA, 639 bp, Homo sapiens
aacatgtatatatatgttatacacaagtttgaaacatatttctgtttttatatgttttcttatgatgcaagggcatactcttatgcaaataattaaaacttcataggtcttaatttcccatatctctatatattattatgacctatccaactggtaaccctatgaacaccttaaaataaacttgtatactcttatttaggtgagtttttcttgttaatactattattattgctatctaattgaatacttgaaggaagttgtgtgaaagaccttggctttgattttagttcttatattcttctagtttttgaaaataaaacacttccatcaacccgtaagaatattcgtmtgagaccttgggccaagggccccagacttcttattttttttaaaaaagagacattaatactgatcctactgagtcacttgacttttataagtcacaaatgagttgatacaagtcaacccattgaaaactatagttcactttacgtacatcagtaatagagtaagtgtttcttgcagtgagccaaatttccaaagactgtgccattatcattgtatataaggcctatgccttaaataagacttgattttataagactgggttcatccgcactaatgacacactcagactca

SEQ ID NO: 863951 - DNA, 604 bp, Homo sapiens
aaccatctgatctttgacaaacctgacaaaaacaaacaatgtggaaaggattccctgttaaataaatggtgctgggaaagctggttagtcatatgcagaaaactgaaactggaccccttccttacaccttatacaaaaattaactcaaaatgttttaaagacttaaatgtaaaacccaaaaccataaaaaccctagaaaaaaacctaggcagtaccattcaggacataggcatgggcaaagacttcatgactaaaataccaaaagcaattgcaacaaaagccaaaattgacaaatgggatctcattaaactaaagagcgtctgcacagcaaaataaactatcatcagcrtgaacaggcaacctacagaatgggagaaaatttttgcaatctacccatctgacaaagggctaatgtctagaatctacaaggaaattaaacaaatttacaagaaaaaaacaatcccatcaaaaagtggacacaaaatatgaacagacacttctcaaaagaagacatttatgtggccaacaaacaaataaaaaaaactcatcaccactgatcactagagaaatgcaaatcaaaaccacaatgagatatcatttcatg

SEQ ID NO: 863952 - DNA, 613 bp, Homo sapiens
atgaagaatgtacctagaagctttcctcctcaaaacactattcagtacaattgcacagcaagaactccaaaatgcagctccagggcaaaatatgtcctatttatacatgcatttgatcaacactcactgtggagttgtgtctgcaatcttccatgagagtacatctgtcctagattctgagccaccaggggcttggcagtcaggctcacttgccagagccaggggcagaaaggggcttagctacacagtcagaaactagttcccatctagtcccattataggaccaagaactgtcacgtcctttaatatatgtcatctcacttaatcctcatgacaagtctgtgggattgagaaaattatccyttaactgaggcccaaaggtattagataatttgctcaaggttacccagttaggacatggcaaagccaagatttaaacccagggctggcagtgtgcaaagcatttaacctgggcccccctgcctctcactgtcctcatttggtattttgcctccttcccccaggaggtcaaatagtggaaatcacaccagattggctggaggcagacagcaaccagagacggtttccagggcacagagcttcaaacagctgt

SEQ ID NO: 863953 - DNA, 643 bp, Homo sapiens
atacttccaccatggccaatgatggcatccattctgcaaatttactgaaactttcacagtcagctctcaggatcctgtaaggtgctgactccagagtgccacagttatacaaacagcaactatgcgatccccacaatggccctggaatgtatgaccactaattcctgtctcatagatgaggaaactaaggcacataaactaagtcatccaagagcacagcctaattctggcagagctgggtgtgagccagaaagtctgattccagagcccatgcttgcagtatatcatgtgggacttcaacaaggacgtttacaaggccccacygccatggcatcctaagggagaagatgacaaagtactgtgtggattcatgacttggctgcatgaccctattccaaggagctggttaagagcctaatgtagagcagcctgtaggagcttccaccctcaccgtaggacacccatcacaaaccgggagcagtgaccccaggagagtgatcatctgcagggcgtcttagtcatttgtgatagaagaccaactctaacaacttggtgttgaatatgaataaaaacatgtgactcttggtttggattgattcaaaacatccaccaaccagatataggttaggaggtatcgcttggc

SEQ ID NO: 863954 - DNA, 616 bp, Homo sapiens
attaatcaccaaataactgatggatttaatttaattttgtaagtaatgtcaatgtgaaattacttatagtcattcttctgctaatttttcctgtgtgaaacaaacaaaacaaattaaaacacacacatacacacaagcagaagcaaaagtccaatttaagcagcatgatgtggtagaaggcacatgtgcttgggagtaggtcaactgggttcaaatcctaattgtcacttattagctatgagctctttgggcaggttagttaacctaattgagcccatttataagtgataataatatctgcctcaaagggccactgtaggaattaaatgagaatctatatgtgaaagttcatgaaaagaggaaaatttcccttcctctgccagagcatctggtacaatgctctacacccagatggtgataaataaacatgagctgagtcataaaataaatgccaacatatgattaattgtttgattakaattaatttggcatcaataacatagtgtattatttaaaaaatcaaactcggatttaggatatctggattctggccccaacgttctttgaccttaaatgagttacttaaactctttggtattgaattccttcccctggc

SEQ ID NO: 863955 - DNA, 546 bp, Homo sapiens
catccaccccatacctccaaccttcctagtgtccattgtccatcattccactctctatgagaatgtcaccttatttagaaataggattgttaagatgaggtcatattggagtagagtgagcccttattccaatatgtttggtgttcttataagaagacaaccatatgaagacacagagatacacaggtagaatgtcatgtatgcagcctgcaaaacaaataacaccaaaaattgccaacaaaccaccagaagctgggaagargcaagaagcattgccctataagtttcagagggaacaaggcccctgccaaaactttaatttccaacttcaaaacctcaaaactgtgaggcaataaatttctgttgctttaagccaccaagattgtggtgcttttttacagaagccctaggaaattagcacatatgccttggtgtagattttttgtatttatcatgcttagtgttctctgagcttcctggatctgtggtttgctgtttgtcattgatttttgaaaattttcagccgttattacttcaaatatttct

SEQ ID NO: 863956 - DNA, 546 bp, Homo sapiens
catccaccccatacctccaaccttcctagtgtccattgtccatcattccactctctatgagaatgtcaccttatttagaaataggattgttaagatgaggtcatattggagtagagtgagcccttattccaatatgtttggtgttcttataagaagacaaccatatgaagacacagagatacacaggtagaatgtcatgtatgcagcctgcaaaacaaataacaccaaaaattgccaacaaaccaccagaagctgggaagaagcaagaagcattgccctataagtttcagagggaacaaggcccctgccaaaactttaatttccaacttcaaaacctcaaaactgtgagrcaataaatttctgttgctttaagccaccaagattgtggtgcttttttacagaagccctaggaaattagcacatatgccttggtgtagattttttgtatttatcatgcttagtgttctctgagcttcctggatctgtggtttgctgtttgtcattgatttttgaaaattttcagccgttattacttcaaatatttct

SEQ ID NO: 863957 - DNA, 546 bp, Homo sapiens
catccaccccatacctccaaccttcctagtgtccattgtccatcattccactctctatgagaatgtcaccttatttagaaataggattgttaagatgaggtcatattggagtagagtgagcccttattccaatatgtttggtgttcttataagaagacaaccatatgaagacacagagatacacaggtagaatgtcatgtatgcagcctgcaaaacaaataacaccaaaaattgccaacaaaccaccagaagctgggaagaagcaagaagcattgccctataagtttcagagggaacaaggcccctgccaaaactttaatttccaacttcaaaacctcaaaactgtgaggcaataaatttctgttgctttaagccaccaagattgtggtrcttttttacagaagccctaggaaattagcacatatgccttggtgtagattttttgtatttatcatgcttagtgttctctgagcttcctggatctgtggtttgctgtttgtcattgatttttgaaaattttcagccgttattacttcaaatatttct

SEQ ID NO: 863958 - DNA, 546 bp, Homo sapiens
catccaccccatacctccaaccttcctagtgtccattgtccatcattccactctctatgagaatgtcaccttatttagaaataggattgttaagatgaggtcatattggagtagagtgagcccttattccaatatgtttggtgttcttataagaagacaaccatatgaagacacagagatacacaggtagaatgtcatgtatgcagcctgcaaaacaaataacaccaaaaattgccaacaaaccaccagaagctgggaagaagcaagaagcattgccctataagtttcagagggaacaaggcccctgccaaaactttaatttccaacttcaaaacctcaaaactgtgaggcaataaatttctgttgctttaagccaccaagattgtggtgcttttttacagawgccctaggaaattagcacatatgccttggtgtagattttttgtatttatcatgcttagtgttctctgagcttcctggatctgtggtttgctgtttgtcattgatttttgaaaattttcagccgttattacttcaaatatttct

SEQ ID NO: 863959 - DNA, 663 bp, Homo sapiens
ctcactatgttacccaggatggtttcaaactcctggcctcaagtgattcttccacctcagcctcccaaagtgctagggttacaggcatgagccaggaatgtttctagaggtaaggcttgtcttcctccaccctacctctcctcctctttgcccagatgtacccttcctctatggaagaaaccaaattttagccagcactcaaatcctggttctcactattcaaatttctctgtctctggcacccatctgctggatgtaaaatcatgtattcacctaattttggtggtgggatatctgcattttgtctgtttctttcttttatacaagatgttgtaacaacacrtctgtagtaaattgctgcggtcatttattattacgtccttgggataaattcctagaagaatctacccaggtcaaaagaaagtgtattttgccctcctagaaactgtttctggttaatcccatcagtgcccagtggctggttcctggcttttaccaggtaccatcaaatttacctgcttaagaccttcagccagagatgggtcaaatttacaaacaaacatcagccaatttggtgggttaaaataaggtcaccttggggcaggcacagtggctcacggctgtaatcccaacaccttgggaggccaaggtgggaggatcgct

SEQ ID NO: 863960 - DNA, 610 bp, Homo sapiens
agttttgtccaaaaaatgtttgtggttattattttaccttatctctgcaagaattttaaaattgttgggatgctgtcatccagagcctggacttatagtgatacttgggttgctctgctacagtgggagtggacatgttgcaggttgtgtggataagccagtagagaattaggtaggcctagagtactgactttgaggcagactcagttttccttctcacatattgctctgtatatgctaaaccctgcatggaacactttaggccccacttgtamtacagaaatcaaaattcccatatgcctttgcctcaatgcctacctcactcttgtatgagttttttagtccacatttagaaataaactctataatcacattttattcttcttgatcttaccatagattccatccacagtgatgaaattagaaggatttttcagaatgtgaatatatacaaacatttatttctaaaaaaaaattttttttttttaattgagacgaagtctcactcttgtcccccaggctggagtgcaatggcacaatctcggctcactgcaacctctgcctccccggttcaagcgattctcctgcctcagcctcccaagtagctggg

SEQ ID NO: 863961 - DNA, 637 bp, Homo sapiens
actgtgatcagaaatgatgaaatgaaggatattacaacaataaatcagacactctgtgattccccagataatggtgctggcttaggaattacacgcaccaaaggctaatctacccttagaatatgactcaatcttagtgactgttaggtcttctcaagggataacagcacattttasttgctgacaggtcagatgatttgtgtggctatgaaaacatcagccttgatgaaaagaaaaccatgattttgggcccatgcattgcctccatccctattgctccgctcttgagtgactagtgcaagtattggggtagtcaaggtcagaggtttggtgccctccctttatgaatcactgtaactcctggttgcagtgaactctttgtggcttaatgctcaaagattcacacactctgtccaatctgacaggtctagccacatgcctttatataggcatttttgtagctaatcatccaacactgtgccttccaggtgcctgctcaaccagctaagccattcatcagtgcccagaagaccatttatgtccttacctaagtctgcttctttctccataccaaattcatgaccaggtgtgcatctcaaagatatgtttctttatggaacttcactttaccactgtc

SEQ ID NO: 863962 - DNA, 681 bp, Homo sapiens; identical to SEQ ID NO: 863860

SEQ ID NO: 863963 - DNA, 586 bp, Homo sapiens
attgtgcacaaagggtgcataagactatgcttagtcacagtagagtgacgctgtcacctctttacctgggtagtcggcatctccagggtaaggcacatgtctgtttaagctctatgtctgcaggagccagcaagggagcacctcttcagaggcctcatgcaatacccaccaccctttattatactgataagtaaattccattttaatcaggtggcaggtagcaatgtgccactgtcctaggaaagcaatcatgattggcctaagccaatatgagcaacttgtcttttttttttttttttttttttttgaggtaaggtattgctcrttgcccaggctcgagggcagtggcatcatcatggctcactgcagcctcaacttccctgacaaagcagtcctcccacttcacctcctgagtagctggaactacaggtccacaccaccacacccagctaatatttttttggttttagagatggggtctcactatgttgcccaggctggtcttgaactcctgagctcaagcaatcttcctgtcttggcctccccaaattctggcattacaggcgtgagccactgtccctgacct

SEQ ID NO: 863964 - DNA, 680 bp, Homo sapiens
tgcccctatgccagagaaggtccctgagaacaaccaggaagacacagtttgtatgccccttatttattttatttcattcaagcaaacagttggcaagagcagacatttcctattgcctgggcactgtttaatcactgtttaaatatttgccatcctgtctttgttttggttagaattgctgagttaatgtaatacagatttgtaccctctgctgagtgaaatatagatttcgtcttctgaactagggctatgttcactggaaatagttttctcactccccacccccactgcttgtctttcattttatgcattatattaatccttttcatagcttctcaaatgcctacaggttaccgacaaattgcccccaggcagtttcaacactttcggtttcagcaaacctggccttatgtgtgactcaytgtgaaattttaaggactcttaagtcaatctctgagtaccaacttagaaaaatatccgtcctaggcaagaacctcatcatctgatggacattctgaggttaaggtaaaatgagtttctggcctcaggccagtttctgaccggcagcgggtttgtaccaaggaccccttctgttaacgaaactctgcaaggtggagctggatccgggttaacttggcttctgtgtaacctgatttcccccaggcctcacagcctgggta

SEQ ID NO: 863965 - DNA, 678 bp, Homo sapiens
ggaatagtatctggccttaagaaggaagggagttctgattcatgctgcaacatagaggaatcttaaggacattaagctaagtgaaataatacagtcacaaaaagacaaatagcatgtgattccacttataagaggtacttagagcagtcaaattcatagagacagaaagtcgaatggccattgctaggggtttgggggagggaggaggggagttagtgtttcatgggtacagagtttctgtttgggaagatgagttctggagactgatggttgtacaacactgtgaatatacttaatgccactgaactgtacacttaaaaagggttaagattgtaaatcttatgtgtattttaccacaataaaattttttttacaatactaagttaaaaaaaaaaaaaraagaagacctctcggccaggcttctatgccttatgtgtgaataatgccttcgaggagaggctattggccaaacaccaatcacccactgccaaaacttgattcaccagagaattgattttaaattgttttttcacatgtgctgatggttgtcagcatccagggtaataaaccaagccaggagaggcacccctgtgttttcacaagtcatttgttcctagcaattcattcattaagcacaccaacattaagcatctttctgtgttccaggcattggacaag

SEQ ID NO: 863966 - DNA, 399 bp, Homo sapiens
tataaaatatagaggatttgaaagaaaaacaacttttcttctgccttcattcctctcttcccatctcccccagggaggccttcactatcttcagagcttcagctcttgcctctaagctggtggttcccacattgtgttctcaattccaatttccccgagastgctagtattatatctatgactgtctagctgacattttcacctagatggcccaaactcacccctcaatattctaggctcaccataaccttctagtaacattttgagggttcctatgtgtcccggaccatctcattaaatttagttatctgttcacttccaagtataagactttttattctgaatgtcgttccctttggcctttttacaatagaaaccttattgggtgagtgtttttcc

SEQ ID NO: 863967 - DNA, 581 bp, Homo sapiens
accaatgtgacaccaatccaagaaagccaatataacacaaaacaaattaatactaattttgtatcattgaacaccctttaaatattcaaaatttccaggtaatcttgaaaatgcctttgtactatttgtttcaatcaggatctaaacaatactcattatctgatttggttatatgtctcttaaacctaaaagcagaatattcaaaatgacacaaatgcccaataataggaaaatacttaaagaaattatgtcatcaccatggaaagaagaaatacacaattggtagaaaaaaataataattgttttaaaaactatttactagtatggggaaatrctcctgagatgaaattaaataataaaaacgtcgtgctgttatttccatgggataagtttctagatatgaaatttctgtgtcaaaatttatatatgcaattccagcaaaagtgtatgaaagttctcacttctcctcattctcaccagcacaggatattgcaggttttaaagcaatttgataagggaaaaagtatacctggatactttaatttgggttgtgatacagtttgggtatttgtcccctccaa

SEQ ID NO: 863968 - DNA, 668 bp, Homo sapiens
aaaagttctcaaactccactttctaacccagagacttctgtcacctaatacagagcttagcacatagtaattgtaaatattaactgtggtgagcaaacgagtaagtgattaagtgaataatttaatgaattaacatgagactaacccaaaagttttataaatccagtgagtttgctatttggatcatttggaaatcagtaatgttagttttcttttattctctcattcttttctagtcttttgactctgtcccacatcagtctaactgaagagctgttgtctggtaggcgaaagactgtagatttagttcttgattgaacgttaactctgggttcttgagcaactcagcagatcccaaggctgcccctctgtcctctgaatcatagcctttatttgttactcmcgtaggacttaatcacacaatagctgtaccagcttattgtcttgcattagtgttatctttcagattatcacataagtcttcatctggggaggacttttctcccctaattcattgtgaacaacagcagtgtatggctcacgtgtattttctttgttacttctcattgtctaacaaagtcacctttgctaaacagaaaggagtaattcgataaataaccccgagatttgctgagaaattgttctacattcagcagacactttggctc

SEQ ID NO: 863969 - DNA, 668 bp, Homo sapiens
aaaagttctcaaactccactttctaacccagagacttctgtcacctaatacagagcttagcacatagtaattgtaaatattaactgtggtgagcaaacgagtaagtgattaagtgaataatttaatgaattaacatgagactaacccaaaagttttataaatccagtgagtttgctatttggatcatttggaaatcagtaatgttagttttcttttattctctcattcttttctagtcttttgactctgtcccacatcagtctaactgaagagctgttgtctggtaggcgaaagactgtagatttagttcttgattgaacgttaactctgggttcttgagcaactcagcagatcccaaggctgcccctctgtcctctgaatcatagcctttatttgttactcccgtaggacttamtcacacaatagctgtaccagcttattgtcttgcattagtgttatctttcagattatcacataagtcttcatctggggaggacttttctcccctaattcattgtgaacaacagcagtgtatggctcacgtgtattttctttgttacttctcattgtctaacaaagtcacctttgctaaacagaaaggagtaattcgataaataaccccgagatttgctgagaaattgttctacattcagcagacactttggctc

SEQ ID NO: 863970 - DNA, 530 bp, Homo sapiens
tggtgtgtttgacataagtcagtatttcacacctgaaatttcatggagattatgattcaataggtttgccaatacctaagaatctgtatgcctttacaaagctcaaatgattctcacaagtagtcaaatttaagagagctccaattacagaaattgtagttaagttggagtatgagacaatttacgtatagaataatcagtacagaattaggaaagtcatgtccgttgatctgtttttgaggatcacataagatttctatagctggagaaatgaaggcatggagaacatttcaggttaagggaaaaactggggcaaagcacaaaggcaggaagttaccaagtctatcaggggagasagggaaatcaatcaagaaaggaatgttgagccagaaaacagggtattgatgaataagctaataaatgagtttagactttaatcatctgggcctagcaaaataactgataaattttcaacagaagaatagtataatcaaactattactttatgaagaattatttagcaaacaaga

SEQ ID NO: 863971 - DNA, 609 bp, Homo sapiens
gatttctaggaggacactaaggttaaagattagtacctagccctggtttacagtaatttttggcctcaggtcagactttttctggtattggagtaggcttgaatctacaaaaggtaattaagtattaaataagtaaagaggagagggatacagaagatggttaaaatggacaagttattacgcttgctccattaacatggaatacattgattagytgggaattgtgagtatcctgataatcaattttccccttaattttgtgagcacatatgtgtccttttcatgaacagcttcacttctcatactatccatcccaagaaacaaacttagatgccatatgaacttgttttgtcagaaaatgcccagagcctaatagctatatggactttaaaactttaattaatgtaatcacttacttcaacatttggtcttctttcccatgttatcttatttcattttcacaagaacgcattaaagtaggtattttattcccatttttacagatgaggaaagttaaatttgaagtgtgtgcacagaacggcagaacttggatccgaacccaaatctcttggatgccaaaacctacttttcggttgctcctctaaaatt

SEQ ID NO: 863972 - DNA, 609 bp, Homo sapiens
gatttctaggaggacactaaggttaaagattagtacctagccctggtttacagtaatttttggcctcaggtcagactttttctggtattggagtaggcttgaatctacaaaaggtaattaagtattaaataagtaaagaggagagggatacagaagatggttaaaatggacaagttattacgcttgctccattaacatggaatacattgattagttgggaattgtgagtatcctgataatcaattttccccttaattttgtgagcacatatgtgtccttttcatgaacagcttcacttctcatactatccatcccaagaaacaaacttagatgccatatgaacttgttttgtcagaaaatgcccagagcctaatagctatatggactttaaaactttaattaatgtaatmacttacttcaacatttggtcttctttcccatgttatcttatttcattttcacaagaacgcattaaagtaggtattttattcccatttttacagatgaggaaagttaaatttgaagtgtgtgcacagaacggcagaacttggatccgaacccaaatctcttggatgccaaaacctacttttcggttgctcctctaaaatt

SEQ ID NO: 863973 - DNA, 633 bp, Homo sapiens
gttcaaatgcctctgacaaagatactaaaaatttgaacaacataaataacataattgagtacttgacgtacatacatcagtacctattaattaaggaatacacattgctatggactgaatgtttctgtcctcctacaaatttatgtgttgaagccctaatcccctgtaaaagaaaaataaatctcaggaccccaaagtcactaagccaagggaaaagtcaagctaagaactacatcaggcaaatctgcctcccattttactcctaaataatataggtacaaatatagaaaagatacatacctccctcacaattttcccatgaggaaattccttgtggacaaagggcagacagaactcaaagtcatccctctgaggctcatgtgagaygaatgcatatctggtggcttcctctttcctattgtttcactaagccagaccaaggcataagtgactatttcttctacccttctctcacacataaattgtgtattcagtgaaaggctaatcaaagactcaaagaatgcaatcatctgtctctcatctacctataacctggaagcccccttccccgccttgagttgtcctgactttctggactgaaccaatgtacatcttacacatattgattgatgt

SEQ ID NO: 863974 - DNA, 616 bp, Homo sapiens
ttctaggaaattccccaaattcgctaactataagtaatgtttatcctttagctctttggattatttcccccaagcacacatactccaatgtaataagcacagaaaaattgtgttataaacacacacaacacacacacacaacatacagcacaataatctgatgaaactgggatttctctgaattgtggaagcagaggtaggtccaygttagcacacatgttcgcatagaaggatcaacataagcattacactttattttgcaatgtttcatctttttctcctttaagagagagtccttcttcggtgtctcctagacactggtaaccctggagaagtgtgacaactctcaatattcactccataaaattgtgacttgcttttcccagaagaagtggctataagagcccaaaaatcttggcaaattagaaaatgaccctgagaatagacgcatcttaaagtcttatccgcatattgcaggaaatagaaggtgagcattaagataggttgatactttcctttttaaaaagaagggaaaataacattgaagaacttatcatgtgcaaagcactgcattagggcactttatattcaatacctcatttattctccattacaa

SEQ ID NO: 863975 - DNA, 616 bp, Homo sapiens
ttctaggaaattccccaaattcgctaactataagtaatgtttatcctttagctctttggattatttcccccaagcacacatactccaatgtaataagcacagaaaaattgtgttataaacacacacaacacacacacacaacatacagcacaataatctgatgaaactgggatttctctgaattgtggaagcagaggtaggtccacgttagcacacatgttcgcatagaaggatcaacataagcattacactttattttgcaatgtttcatctttttctcctttaagagagagtccttcttcggtgtctcctagacactggtaaccctggagaagtgtgacaactctcaatattcactccataaaattgtgamttgcttttcccagaagaagtggctataagagcccaaaaatcttggcaaattagaaaatgaccctgagaatagacgcatcttaaagtcttatccgcatattgcaggaaatagaaggtgagcattaagataggttgatactttcctttttaaaaagaagggaaaataacattgaagaacttatcatgtgcaaagcactgcattagggcactttatattcaatacctcatttattctccattacaa

SEQ ID NO: 863976 - DNA, 549 bp, Homo sapiens
ccacagcatgatggaagaaggaaaagaagtccttcttcctgatctggccttgaagaattactccagcaccctttattattaaagattaacattgtgccagctgggaagaagaaatgttcatagggtccagttctagtatcacaaagcacagtgaagaagggtaaatttcaggctaaaaggcaaaaattaatagtagtataactaatttaaagatgtggtccattagtgcacactgttattcaaaaacaaaatagactataagaaaattattcctgtgcaataagaatagagcctaaggcttttaagtctgaatgagggactataaatttttcaaaatgagaatttgtttctaaaattttccatttaaaatatcyattccttgccaaagtttacttaaagcgttctttaaactcattatttaaaattatttaattacaaataataaatatcttgtggcaaaatatactacatatgatatcaaaagaaaatacaaactatttgcaatatgtatgaatgacaaagataattatcattaatttataaagagtt

SEQ ID NO: 863977 - DNA, 559 bp, Homo sapiens
attgtgtatatgtaccatattttttaatccattcttctgtcgatggacacttaggttgcatccaaatcttggctattgtgaatagtgctgcaataaacataggagtgcagatatctcttggatattctagtttcattttttttaaatatatacctagcagtgggattgctgggttgtatgataactctatttttcatctttgaggaacctccaaactgctctctgcagtggttatactaaccagcagtgtatgaggatttccttttctccacatcctcaccagcattcattaatatctgtcttttagataaaagacattttaactagggtgaggygatatctcattgtggttttgatttgtatttctctgatgatcagtgatgttgagcaccttttcatatacctgttttctattcgtatatctacttttgagaaatgtctattcaaatcttttgcctacttttaatcagattattagatttttttcttatagaattgtttgagcaccttatatattctggttctaatcccttgtcagatgggtagtttggaaatagtt

SEQ ID NO: 863978 - DNA, 559 bp, Homo sapiens
attgtgtatatgtaccatattttttaatccattcttctgtcgatggacacttaggttgcatccaaatcttggctattgtgaatagtgctgcaataaacataggagtgcagatatctcttggatattctagtttcattttttttaaatatatacctagcagtgggattgctgggttgtatgataactctatttttcatctttgaggaacctccaaactgctctctgcagtggttatactaaccagcagtgtatgaggatttccttttctccacatcctcaccagcattcattaatatctgtcttttagataaaagacattttaactagggtgaggcgatatctcattgtggttttgatttgtatttctctgatgatcagtgatgttgagcaccttttcatatacctgttttctattygtatatctacttttgagaaatgtctattcaaatcttttgcctacttttaatcagattattagatttttttcttatagaattgtttgagcaccttatatattctggttctaatcccttgtcagatgggtagtttggaaatagtt

SEQ ID NO: 863979 - DNA, 631 bp, Homo sapiens
agtaaaaatttctgaaatgtggaattaatctaggtaaagtaggagcagtggttccccatgatcttaaactgtgaatgatttggtttggctgtgtcccaacccatatctcataattgtaactccgacagttcccatgtgtcatgggagaaacctagtgggaggtaattgaatcatggkggggagcctttcccatgctcttctcatgatagtgaatgagtctcacgggatctgatggttttaaaaatgggagtttccctgcgctagctttcttctcttatcttccgccatgtgagacatacttttcaccttccaccatgattgtgaggcctacccagccacatagaactgtaagcccattaaacctctttcatttgtaaattgcccagtctcaggtatgtcttcatcagcagcatgaaaatgaactaatgcagtaaggtatatcaactgatgccacagtagttatttaaaggattcttcaatcccatagtccctgtggcttgggtggcatgtgatccaggttggccaactgaatcatcaaatcttcaagactcactagaagtgattaattcagtatacactcatgacccaacttaattcactaagattcaagtctagagctttcatttgaatt

SEQ ID NO: 863980 - DNA, 613 bp, Homo sapiens
ccttttcactttaatttccacatctgtaaagtggggcaggtggattcagtcaccctagagacagcagcacacctgatcttctcagcatccaccatctagcaaatatcaggcacacattaggcactcaaagcctcactgaatgtatgtgtgaataaatgactataatagagccatgtggatcgtggacactatcaacacatatctttgaatgtctatgaagtacacttgagaatggggaaagcaaataattgaggcaggacagtgttttcttcttccttccccttacctccttcctgaagagagcctttgtacctcggagagactctgttgccaggtttctctactgtaagttactatttgtcccattataatcaataagtakctcctgaagtgatactttgggaatatggaagtagcctgtttcttctcaacgtacttttttttcccccttggtactcactagttgtagcatcatcatacttttacccattcatatttaaagtccattgataattcttgcctacaaacaattgactgtgctgttagccaaatagtgattttctatttgatcattccttctacattcattaattggaattctgctgtaagaaaa

SEQ ID NO: 863981 - DNA, 613 bp, Homo sapiens
ccttttcactttaatttccacatctgtaaagtggggcaggtggattcagtcaccctagagacagcagcacacctgatcttctcagcatccaccatctagcaaatatcaggcacacattaggcactcaaagcctcactgaatgtatgtgtgaataaatgactataatagagccatgtggatcgtggacactatcaacacatatctttgaatgtctatgaagtacacttgagaatggggaaagcaaataattgaggcaggacagtgttttcttcttccttccccttacctccttcctgaagagagcctttgtacctcggagagactctgttgccaggtttctctactgtaagttactatttgtcccattataatcaataagtagctcctgaagtgatactttgggaatatggaagtagcctgtttcttctcaacrtacttttttttcccccttggtactcactagttgtagcatcatcatacttttacccattcatatttaaagtccattgataattcttgcctacaaacaattgactgtgctgttagccaaatagtgattttctatttgatcattccttctacattcattaattggaattctgctgtaagaaaa

SEQ ID NO: 863982 - DNA, 659 bp, Homo sapiens
gccttcagccacagactgaaagctgcactggtggcttccctacttttgaggttttgggactcagactggcttacttgctccttagcttgcagatggcctgttgtgggacttcaccttgtgatcatgtgagtcaatactccttaataaactccccttcatatatacatctatcctattagtcctgtccctctagagaaccctgactgatacacagagtgaagcagttcctgtatcttgtttctctaagaggggctggtgaccctttagaattcagctcatttggctgccttgtgacctcatctctctaataggtttataaaatgtttatgttgtgtagattaccctgygtttacttattcttctgttaggagctgtgcatgttccttgtgactttcttcctccgaagcagaaggagaattctttttttgagtttgattctgtcaccaaacatggtggcagggctatggatggcacacttagtgcctttatgggaattagaaaaaggcacccctttcaccaggctgatttaacccaacacctggacacagcgtggagagcatagtgtaggctggctttcagcccccacacctgctctcagtcaagttcgttggggtggggcttaatttgcagaaacaatatgttcaaaccagcacagaaaa

SEQ ID NO: 863983 - DNA, 599 bp, Homo sapiens
tgtaaaccctgtgttagtccttcaggtcaaacttctctgatcttccaggtctggagtgtacccaccaacccaacaagctttgaggaattgggtagcatccgggaggaacattggggaggctctgggctccatctcttctgaaayaattccatgccccatcttaaattcaagtccatgaggtctgatttcattcagaaccatcaccactgcccagatagacacaaagaaaagtaaggccggctcttgcccagagcccagcatgggtggcagacccaggagagtctgctctggggactataggcaatatcaagtggcacattcatggctggctaacgtactctccagggacagtgagaaggggcgagaagagcctctccttttcccatgacacctaccagaagatgacaccataggagggggagtggagagagagagcagccctcccatagcacgaagagccccagctagtggaattcctgcccttgacattgggcactgactgcagccatctccagggctgccgaggggttgggactgccaagatcaccacccgcatgctcaccaccactgtcagagagacactgaggaagctgtggctg

SEQ ID NO: 863984 - DNA, 599 bp, Homo sapiens
tgtaaaccctgtgttagtccttcaggtcaaacttctctgatcttccaggtctggagtgtacccaccaacccaacaagctttgaggaattgggtagcatccgggaggaacattggggaggctctgggctccatctcttctgaaataattccatgmcccatcttaaattcaagtccatgaggtctgatttcattcagaaccatcaccactgcccagatagacacaaagaaaagtaaggccggctcttgcccagagcccagcatgggtggcagacccaggagagtctgctctggggactataggcaatatcaagtggcacattcatggctggctaacgtactctccagggacagtgagaaggggcgagaagagcctctccttttcccatgacacctaccagaagatgacaccataggagggggagtggagagagagagcagccctcccatagcacgaagagccccagctagtggaattcctgcccttgacattgggcactgactgcagccatctccagggctgccgaggggttgggactgccaagatcaccacccgcatgctcaccaccactgtcagagagacactgaggaagctgtggctg

SEQ ID NO: 863985 - DNA, 745 bp, Homo sapiens
gatcgagattgtttcaaaagcctcattcattcctaaccttttgagactctatgaaacaaaatgttaaggacactcagactgacggggtgagcagcatgagcctgggtgagtcaaggagggcttcctggaggaagggagttttaagcaaggttttgaggaggtggaagatgacggagaggagtgagtctgctattgagggggccccatgtcactgtctcctcttccatctcagatcccacccaatgacccccgcatcaagaaccagcgtgactgcatccctttcttccgctcggcaccmtcatgcccccaaaacaagaacagagtccgcaaccagatcaacgcgctcacctcctttgtggacgccagcatggtgtatggcagtgaggtctccctctcgctgcggctccgcaaccggaccaactacctggggctgctggccatcaaccagcgctttcaagacaacggccgggccctgctgcccttcgacaacctgcacgatgacccctgtctcctcaccaaccgctcggcgcgcatcccctgcttcctggcaggtcagacagggaggaaggtggtgtcttcccaggaaacagccatccctggggtcccaactgggaagcaatggtgggatgtggtgaaggtacatggtttgggacctcagtattaggcacaccataagcatggatctgtgcacagccatcatagaatcagaacgttgagtccctttgcaagctccctgtgtgtggcc

SEQ ID NO: 863986 - DNA, 594 bp, Homo sapiens
acccagatgatctaggataacctcctttacttaaagtcaactgattatagacatcaattttatctacaaaataccttcacagcaacacctagattagagtttgattgaataactggaaactatagcctagtcaagttgacacataacacagaccatcacaaagggagaatgattaattatcaatgatgctgggcttcctgcatgagaatttacatgatatttcctctacacgtgtcctgtatccgtttagtggcttgacattataatagtagctaagtctgacaaacatttattttcttagaaatgtgatacatatagaaataattttctcagctcaattttccatgactgagtctttagcataattactccatccaggccattcatacactggcaaccattatactgrctagtggttgcagtaaagatgagctttgatggacattttacgacctacctgtacttttgacaggggaaatatataaactggaacctaccaggtctctattactgaaagctaaatcggaatcataaagaattaatccaggtaattcaaaatcacccatctgagagtcaataacattaacaaggcct

SEQ ID NO: 863987 - DNA, 642 bp, Homo sapiens
ctcaagttcagagaggctgtcatctcctccatcccacccttgtttgtagtcaaatgaaaccatactaaaaaaaggttgatgccttttcactatcacaggcgcacaggcaagcctgtaagaatcaaattacttacataaggcagagaaagtgactcaaagtcagaattcagggatgaatgctgccattctgtcctgtggttgtcagatcagggatgagaaagaaaaaaggaaaaatgaaggaagctgaaaatccagccctctggaggcaggaagggctaytcccaactctggttacttgatcatggagagcaagttctctcaaagtgtttaactcagatgctgagcctgtatttgcatgtgctcacagactccttagctaggttgctgaaacaaaacctacccacgaggctaagggaagttgaggctgcagtaagacaatcatcctgccactgtactctggcctgggcgacagtgtgaccctgtctcaaaaataataaattaaaagaataaagtttttagaactacacttcctggctttggtgtgaccaggtaactttgagacagtcatttcacctctctgtactcagttttcttatctgtccaatgagtatagtgaaagcactcacctcacagggttgttgt

SEQ ID NO: 863988 - DNA, 717 bp, Homo sapiens
ttggatcctagtactttcagatatttggggttatatacttaggagtggaattgctggatcatatggtaattctatgcctatgaacttttgaggaactgccagactgttttcctcagcagttgtaccattttacattgccactagcaatgtgtgacagttacagtttctgcgtgtccttgcaacacttacttatttggacagcagttatactaagtgaagtgggacttcattgtggttttgacttgcagtttcctaatgactaaggatgttgagcatcttttcatgtcctttgggccttttttttttttttaatcattcaagaaatgtctattaaagtcctttgcctatatttgaatmtgtttggttttttcgttgttgagttgtagttctttatatcttctggatattaatcttttatcagccatatgctttgcattctgtgtactatcattttaactttcttgacagtatccaaaaaagttttataattttttatgaaatccgagtttatctgtatttttctttagttacttatgcttttgatgccacagccaacaaatcattgccaaatccaaggtcataaagccttctatttttttcttttagagttttatattttttagctcttacagtaatgtctttgaccaatgttgagttaatttttattatgtaggcaaggtgttacttcattctttttacatgtggtgatccagtttt

SEQ ID NO: 863989 - DNA, 622 bp, Homo sapiens
tgttaaatctattttgccaaatgttttacaagaaaattcttttatcttatagatggatttaaatctgaaagaacaggttgtcattttagatgaagctcataacatcgaggactgtgctcgggaatcagcaagttacagtgtaacagaagttcagcttcggtttgctcgggatgaactagatagtatggtcaacaataatataaggaagaaagatcatgaacccctacgagctgtgtgctgtagcctcattaagtaagaagatttgtctattagtgtatttgtgctgcctttatatgaaaaatatgtttgattatgccagagtatttaaagttagtaaactttggttaactaggcttcttgrgaaatgaattgttccttgccagttaagctttaaaaacaaggctagtccaaccttttgtcttgttcacaagaatataatgaacataagtgatttttaaaaatgaataattgtgaatcttattcctaatttggcaggataacataatagccccgaaggatgtgtctaggatattgaaccagaaactaaacgtgcttttaattaatatattttaaaattctggatcatggctttaatttattgctttattctccaatttaaata

SEQ ID NO: 863990 - DNA, 692 bp, Homo sapiens
ttaaactcctggcttcaagcaatcctttggcctcaagcaatccttctgcctcagcctcctaaagtgctggaattacaggcatgagtgaccacgcccacccagcattgtgaattattttctagttgttgtgtaggtactttgtttctttatttctcttgctgtcttcctttgtgatttgatggtttcctgtagtggtatgccttgaggcctttctatgtttgttatgcactgcactgtaatttaaatatttttcttttggatcttattcactagattgtgaagcgatgctttctccaaaamatttctttcaagttttagagcaacaaatttacagcagattcagatggcaatacttgaaagtagtaacttttaggtaacattatagtggttgcttcttattcatctgcttccctcagcctgaattctaatagtgcaagagcactgacttcattatagtttaattattagcccatttacagaagtatagaaaacgagttgcctttttcgcctacagttaatctattcaggaaaagaatgaaacatatagttgaatttgtgtgaataagtttatacattcagattttagccaacattattaactcagtcaacagttcttcatttttaaaaagcaaaacaagtcagattatatacattttaactaaatgattactttagacattgatgaattaact

SEQ ID NO: 863991 - DNA, 757 bp, Homo sapiens
ctgaatactgtgtctcgtacatttctagatagcctgagtgacctactttggattattttccttcttcccaacactctttgagcccatatttcttcagtagcgagatgatgtagtccaagcatagactttggagttagacctgggtttaaagccagcctacggctcacctgtgctttcctgtaggctactccacatctctaaccctgagtttctccatccacaaagtggggctgatcccacctactcacagggttatcgtgaggtcctgatgaaaccctgtacctgaaggattttgcacagtgcctgggagctaamcctactcagtcaataatatgatttatttataaataaataggattacataatagaagcatagatataattttgtaatgaataagattgctattttccaccccaggtagcattccataaatgtattacatactctggaaatagatgaaactttttggttttcctaggtatattccaggctttaggatctgctattgtagagtttggcaggcaaggtcactttcagcctcttttatttctcgcttttgtagattaagatccaatctcctctccactttcatctttccaaatctccaaacatgaatctttttcatctccctgccaagcttaacattaagattggctgctcagcttcgaccaggcaacagcagtcgtgcttcagaagctctgatccattctctctgcaagactcaggggcttagtccactgttgcttaataacaata

SEQ ID NO: 863992 - DNA, 645 bp, Homo sapiens
aaataagcaagtttattaatgtgtgtaatgcacagcaatgccagagaaacttcaatgaaaggtgactcaaagcagtgacttagaacactggcttatgtagtaccttaaacaaaaaacaataaatctgtagagaaatgacaggacaaagagaagcagtcttaggctttcaaaggtaggaaactatgggaaggtaaacagatgaaaattaactaacagagcaaggctcgtttgtagatttctttcctggagctgtctccagtaaaggagaatttatattctgtctttgggaagcaaaggggaagcacagagagagctcttctctgcttgctgtttttttgttttgttttgttttgttttgtttttgtttttgttttaagacagagtctcrctctgttgcctaggctggagtgcagcggcacaatcttggctcactgcaaactctgcctcctgggttcaagcaattgtcctgcctcagcctcccaagtagctgggattccaggcgcgtgccaccacacctggctaattatttttgtattttagtagagatagtgtttcatcatgttgcccaggctggtctcaaactcctgagctcaggcaatctgcccacctcggcctcccaaagtgggagcattacaggcatgagcc

SEQ ID NO: 863993 - DNA, 502 bp, Homo sapiens
tcacccagtctgccccgttcccctgacctaaagtagatcagaccagtcctttggtttggggtaaggtggatctggagccaggaggtgaacagagcccccaactgtgcagacagcaccctgcccaccttttctagagggacagcattcagcagctggtgctttggaaatccagcccagcctgtgttgagagagttattattggcacattcctgaattttatcgggtgttttaaaacagcaattactgcgaggatacgcagagatctataaacactgggaaatgtatttatctccttgctctgtgacagctgggccagcttccacatgccaaatgttttgsggcagggtcagatcgagacttcagatggttgccagcagggagctactattttgggggcacaggtcatgggaaagtcttatagctcaaagttggcttctgtgcctatcccataacttttccttcggcctcgtgtatcacaattatcaacaagcctgtcaaattt

SEQ ID NO: 863994 - DNA, 621 bp, Homo sapiens
gaacacagaaagtaacatctaactctccctgactttcagaaagggagatccttagagagaagttgatgtcaagcgttaaagaaatgctccagttcaaaaatagtgaagatgatggaagaacattccaggcataaagaagcatatgcaaaaacccagacttgtaaaggacatgcttagaggaacttccaacagtttgggctagccagatggtagtgtgcattggtgaatggaaagaatttggactaagtctcagagaggctggtatgtcatactgaaaggtctaaatacgactcttgaacttcttttacagggagggaatacataagctcgtgacactctttggggatgtaaaaaaatcaaatgtcatttatatgtggtacatgataaagaaagagttttgcattaaaaatatttttaggttagtattatttcagattataatacatttcactttttaatgccatctttartaattattttaaaatataaatattttgttccacttaataagcaacacatgctccttaatttaacttaattatgtaaggaaaggcatgatttctgaccaatccatttaacattaacatcttgttttgtgggtgtgttttgagattggacaca

SEQ ID NO: 863995 - DNA, 618 bp, Homo sapiens
aaatttgggaaaaagttatgtggatggacctttctgagtggtcaaaaactgtgaagctatctgtatcccatgtaagtgctcaccaacgggtgacctcagcagaggaggagtttaataatcaggtgaataggatgacctgttctgtggacaccactcagcctctttccccagccacccgtcaccacccaatgggcycatgaacaaagtggccatggtggcagggatggaggttatgcatgggctcagcaacacggacttccactcaccaaggctgacctggctatgatcactgctgagtgcccaaattgccagcagcagagaccaacactgacccctccatatggcactatccctcagggtgatcagccagctacctggtggcaggttgattatactggacttcttccatcatggaaagggcagaggtttgtcctcactggaatagacatttactccggatatgggtttgcctatcctgcacacaatgcttctgccaagactaccatctgtggactcacggaatgccttatccaccatcgtggtattccatgcagcattgtctctgaccaaggcactcactttatggccaaagaagtgtggcagtgggttcatgctcat

SEQ ID NO: 863996 - DNA, 587 bp, Homo sapiens
ttgtaatccatttggctttcttgcaaagaaaccttcttctgtccaaagctccttctccgtgactgggagaaaggcatttcaaattggtgaggactggaaagaacgactacagctcattttctgagaaagcttctagtggaagtgcccagcctggagaatattccgtcagaacaatgattccaaaacaaaagaacccagagaaggcagcaaatgagcttaaaaatatcacaaatgttaaacagcaaacttagrgggagtcaggaattgctttgggaaagtcagggcaaggccctgagagtcaggtgagcaactggttgggttacctgtgaaaatgaatggttaggacaagagcagatggtaggctgtacaaagtctgtcttcccagtccactgggcctcacagcactgcctctcacctgcactggggcagcaggtggtacagagacagaaagaccccatgcagacagcaggccactgtgccctctctccacaccagggactggtcaacaacagcaaatgcagccaccccatcctcgaatcccttcactccagcctcaaaagagttgtttaactcaagatttatgacaa

SEQ ID NO: 863997 - DNA, 669 bp, Homo sapiens
ggagctagagagatctcgatgggtgtgcttcttgacgtctttcttaggtttttttcttccacctgtttcaaatactgttttttccctcatagctgtcttgcagacactatctctcctcaatttgatgctcccactagctgatctaatttctcccatggcttcatctagctaaaattcatataatacatcctaaataaatataaccactccagacttgtmtcctgagtttccagcctggaaatgcaatagctgggtgccaatgtcacttggggtacgtacaccacagcctctgcagtctcattgtgttcccttacaaggcctgatcttccctcttggggtctacctcagtgaattgcacccattttccaaaggtgggaacctggacatcagtgcttccctcctcttctctgtcttccacatcacgtaaattaccaaagtcttgttaattacacctctatgtatctcttgaagctctttccttctttggtctgtttaatctttcctggtttgatctttcaacaattctcccctggttactcccacagcaccctttgagctcttctgctcttttggaactctccaaattaccagaatgtcgcatttactaatttgcacatctgctcacactcctgtttaaaatcctcctctgaaactccagagccttcagaa

SEQ ID NO: 863998 - DNA, 635 bp, Homo sapiens
accaggaactctgtttccaacaaaaccattaattaaaaacaaagaagaaattaagatattcccagattaaaaaaaaaaaaactaacagaatttgttgctaacagatctgcctcacaagaaatactcaagggagtcctttaggcagaaatgaaaggaggttcgcatgaagaggaaatccacaggaagaaataaagagcatygataaaagaaaatataaaagactgtataaatttaattctatttacataatagctcttttcatctcctatcttatagataagaaaactacataaagcaataattattaagcagcattgataggttataataaataaagatatgaattgtgtgatgatactagcctaaagaaagggagaataaataccattggggcaaaatggtattaaacttactgaaattaagttatattattctaatctagatgttttaagttaagatgttaattgtaatccccagagcaacaatcattaataaaataactaaatccacattatatatatatacatatatatacatacatatatatatataaagaaacaacaagcaaattaaatggtagactagaaaaatctatttaacacaaaaggaggcagtaatgaaggaatagagaaaca

SEQ ID NO: 863999 - DNA, 708 bp, Homo sapiens
tgatcttttttcaactaaatctaaatccagtgtgtactttatgcttacagcaaatctcaattcagactggccacatttcaagtgctcaggacccatctgcggctggtggctaccatattgggcaggcagtcctaggagacacagttgccaggggtgggaaggagccaccacgggtaagggtgagcacgacraggatcccactccccaagagctgcacccttgttgggtagcaagatgtagcaagaacacagcagaacggttaagaacagcagcttctgcatcagaaaaacctggatttgatagattagctacgcaaccttgtaccagttgtttaacatcactaagcctcatgtgatcacacacattgaagaagatcagtaatagtatcttctcttgaaattgtttaaggattgaataagttgacactttcatgtgctcagccttccgggggtacctattcttaaattggaagttgtcttcacttctgcaccaatctctggcatctgaggatcctaccttcctttccttgtctttctaagagacttgggtatgtcctggagaggagagctggccctagctcctaatagtgggaaaatattgaacaggaagcggcaccaagcctcatggagaccctcagaggacatgggcagtcctcacctctactttcccccagttcctagaaatgctcatttctatgagcatatttat

SEQ ID NO: 864000 - DNA, 588 bp, Homo sapiens
aaaatttgatgggtgcacagcccggcatacataaatgatgttagaacaatgctttcctttcacactcccaccacaccggcagcaatgtctctcgcttcacctgtagcttctcactcccaaatccacctgcagagactgcattgaagtaggtgacttggtgattcccaacacaaaggaagaggggggaagaaatgctcctgcagatggtgcccagcaaagaggtggtcctacctaaaaggctgycaaccatgcagaggagaatccaagacaatcccacacctcctcactgggattcccttgtggtgacactctatctctcttgatcccagaacacacttgccctgtgacatcccattatctccaggatattggcttcttcacagaactcttcctaaagcatgcttatttgttgtccttttccccaggggacttcaaagctcttgaagcactcacaccatggagccctcctaacatggccataaaactttaccaaagaaagcatctagaaattcaggcaaaagcagatggaaagacggatgtggaaatgttgacccaatttcctttaccatgaaatgttttaattgtatt

SEQ ID NO: 864001 - DNA, 643 bp, Homo sapiens
gtctggcttggtttttaacaaggttatgctggcagctgtgttttggatcaactataggggccaaagatgataggagagagtccagtatttcaggcaggagatgacagtggtttggagaagagggatggcagagcaggtaatgaatggttgttagcctctggatgtattttcatagaggggctgattagattgactgatggatcgcttgcctggtagaagtgacaaaatagagtcaattactccaaggttcttggcatgagcaaatggagtttcttttttttaattattattatactttaagttctagggtacatgtgcacaaygtgcaggtttgttacatacgtatacatgtgccatgttggtgtgctgcacccattaactaagggagggctgtgagaggaccagtttagggaaaatggtctgaagttcagttgtgaacatttggaaatgcctattactcgtccaagtggagattcgagttggctattgggtagagaattctaatatgaatttgaaatgttatcaatatcaatagtgcatgtagatgatatttaaagccaggaggctacacgagatcactgaagaagtaaatataatcaagaagagaaggaatccaaagaccgagccctaggctgctccaggc

SEQ ID NO: 864002 - DNA, 570 bp, Homo sapiens
gaaaggatccaggaattcattccaaaatccaagtgggagacattctgcccatgtacgctttggggtctcgacaacttggttaatgtgaatactatgccacttaaaccatcttctatgcccctaaacatatgatggagtagggcatgtgaatggaggtggaggtgaaacctactagaagatgaagaacactgcaatactgcagttgcaatactctatggatatataagatctaacatctacataagagacacatggggaggctgaggaagaactgggacctggctcagcctggtgcwgagcagcctagggaggagacagtggtacaacttcatgtggcaggaattaattctcaaggtctgaagagaggactctcacaggacatagtctaagagacataaaagaatgggattggattgtttcttttggtgtttcaagttcactgcagagtgttacgagatgatttctgaaaaaaccccacagatgttgtagtggcagctggagagcctgcaatcgtggagtgccagcctccccagggacacccagaacccaccatctactggaaaaaagaca

SEQ ID NO: 864003 - DNA, 621 bp, Homo sapiens
acagcctaacacaggtggctaattacacgtcactgtttttctggaaaatctttggtaatgcaaacgggaagacagcaaaatattttaaccaagaagcaatgtaatcagtttcacattttgaagagtaatgctggtgatggtgagtggaatttcattattttattaactaaaaacaaagtgtgtgtgtgtgtgtgcatgtgtgtgcacatttagtatctataatactaygggtcaggcactgggatgcattacagttacaaacataaaaaaaaaatgcgaaccttaaccccatggagacagttaaagtagttacaatgtacattaattggaagggaaattaggtaaaagattactggaaaaccccaccaagaaatattggaagcagaaatgacagactagctatgagatagattacagagatattggcaagacctaatatattataacaattgaatgtgtgatggggtagcttaagagtgaaaaagaaatctaggatgatgctaaagtttctatcttggaaacagcagaaaaatagcattaggcgtggaagaaggaagaacaatttgggagaaatggcatggatttcagtcctgggcaagcaggggttgaggtgtttgtgag

SEQ ID NO: 864004 - DNA, 625 bp, Homo sapiens
taattcttctggaaagctgataacttttgaatgcaggcagcagggaatctggcacaggctgctttttctttgggtttcatgcaaagatactgccaggttgactagagctacccagggcaggaaagtagggcagtagtctctaataagaggctaaaattaacaggaaaaaaaaaaagccttctttgcaaatttcacttaaaaatagtttaaatatttaataattatcaacaaacttatctacagattttttgaaaaggactgaattatctatcagtaatatgtacatgacattgctcatgttaccaactgctattatttgtcataagaaaataagcatttcaaatgtaaagcctctctttttctttgaaataatttargttaagcgtcctttcttcttcactttgaaaactcttgtgctcccaaattttaataatacaataattaaaggtaaaacatattgcttttatttccaaagcatctctagctgagaagtctgcaatgttataataagaaaccccagaggtcaatggtcagtagtggaaagatggcatgcacttgagcaagcaaacaaagcaggccagctttgccagctatatacctgacatccaaagcatacagatctcct

SEQ ID NO: 864005 - DNA, 636 bp, Homo sapiens
gaaaagaaaggcaggaaacatgtctatataaatattcttgtccttccaataaactgttaacgttttcacctcatagtaagctcaacagatcaacaatatgtgtgattacaaaacaaagctatctagttttagatttcacaaaaaaaaaatactgtatcaggaaagatcagagtaaatctgacatgaggtatgaggagcacatttcaaaagtattgtgtacacattagaatatgtttcaaaaatgaaagtaagagttggaaaggaaaataaaataatattccttgaattaggattaaagattaatgaagttaaacattgagaataatatgaaaattagtggttttagctatttaaagtcttgtactgagaagaaataagaygtattaccttttgcttcaagggtcagtggatggaaactttagggagagaaacaaattcagttgaaaaaaataaatgtcccaatgtattaccccaaaatagaatttttacactggaagttggtgaggtaagctttccaatgaatactgaagaacaaactggataaccatttgaaaggggtattacatacttcacctttattgggactcttacaactctaaactgtacttttctaataatctagatttaaatttgtga

SEQ ID NO: 864006 - DNA, 621 bp, Homo sapiens
cagtgagccgagattgcaccactgcactccagcctgggcaatggagtgagatctgtctcaaaaaaaaaaaaaaaaaaaagattctgttcttgtcatcagagattctaacccagcaggtctgaagtggggtctgagaatctgcctttcagcaaactcacagggtggacatggtgctgaatgactgcaaaataaacgttacgtttactacatagattactgtctgctctgcaaggtataaaggttacatttcccattagcaaaacttgagtttgatattactgtgccaaatcagaagccagttccaaagtatactttattgaaaatgtattttttactagctcaacaaattatgtaataacaggcccagagtaaaaacctaagctgtgtacccactgcaaatgtgagtatacttgggcaggcacaatggcaacagagcaatgtggaactgccaggagctcccagktatctcacagatgagttcagctgccaactaggaccccactaaggaccacaaaggctgtgattatgtctgtcttattcactactctatccccagcacccaacattgagtctgacatgtagtaggtacaatatttaatgaaatatctgtggagttacacg

SEQ ID NO: 864007 - DNA, 626 bp, Homo sapiens
agaataaaaggtcataatagcaatgacaatttttattatgtgtcattacgaggcatagtgctaaatatttccatgcagtatttcctttagctctcaaacaacagtatagtataaggtagatgttaatttcattttttagcagctttggtgagataattcatrtactgtacaattcactcaaagtttacaattcagtgacttttagtatattcaatgtatgtgcaatcatcaccgcagtcaattttaaaacattttcatcacctcaaaaggaaaccctgtatcatttaacaattatacccatcctctcttctcccttccccactaatctacttttagtccctatagatttccctgttgtaggctttcatgtgaatggaatcatatagaacatggtcttttgtgactggtttctttcacttggcataatgtttccaaggttcatccatattgtggcgtatacaggcacttcattcctttttatggacaaataatatttaattgtatgaaaatagcatattttgtgtatgcatttgtccactgatggatatttgagtggtttccaccttttggctattatgaagaatgctgctataaacattcacacacaagtttctgtgtgcctatgt

SEQ ID NO: 864008 - DNA, 626 bp, Homo sapiens
agaataaaaggtcataatagcaatgacaatttttattatgtgtcattacgaggcatagtgctaaatatttccatgcagtatttcctttagctctcaaacaacagtatagtataaggtagatgttaatttcattttttagcagctttggtgagataattcatatactgtacaattcactcaaagtttacaattcagtgacttttagtatattcaatgtatgtgcaatcatcaycgcagtcaattttaaaacattttcatcacctcaaaaggaaaccctgtatcatttaacaattatacccatcctctcttctcccttccccactaatctacttttagtccctatagatttccctgttgtaggctttcatgtgaatggaatcatatagaacatggtcttttgtgactggtttctttcacttggcataatgtttccaaggttcatccatattgtggcgtatacaggcacttcattcctttttatggacaaataatatttaattgtatgaaaatagcatattttgtgtatgcatttgtccactgatggatatttgagtggtttccaccttttggctattatgaagaatgctgctataaacattcacacacaagtttctgtgtgcctatgt

SEQ ID NO: 864009 - DNA, 653 bp, Homo sapiens
tcctgtggttcctgcagacccatggaggtaccgccttagtagtcttggacaagaattttctggattacaactacaacttctgtagagactcttgttctcttctcttactttctcccaaacaaatggagtctcactctctctgtgctgagccacctgagctaggggtagggtgccatgagcactcctgtggccaccaccactgggactgtgctgttttagacctgaggccagcacagcactggttctcacccagggcccactgtaaccactayttgactactgtctacgttcactcaaggctctagggctctacaatcagaaagaggtaaagccagacagacttgtgtccttcatgtcagggtattgtgttcctccagaccccacatgggtccagaatgctgtctgggagccagggactggaggcaaaaaccttggaaatctatctgatgttgtattctactgctaagctggcactcaaaccacaagacaaagtccttcccactcttccctcccctttccacaggcagagaagcatctcccaccacagactcacagcaggtactgccaggctactgctgatgttcacttaaggctaaagggctctttagtcaacttgtggtgatgcttgccaggcttggaactcagccttcaga

SEQ ID NO: 864010 - DNA, 653 bp, Homo sapiens
tcctgtggttcctgcagacccatggaggtaccgccttagtagtcttggacaagaattttctggattacaactacaacttctgtagagactcttgttctcttctcttactttctcccaaacaaatggagtctcactctctctgtgctgagccacctgagctaggggtagggtgccatgagcactcctgtggccaccaccactgggactgtgctgttttagacctgaggccagcacagcactggttctcacccagggcccactgtaaccactatttgactactgtctacgttcactcaaggctctagggctctacaatcagaaagaggtaaagccagacagacttgtgtccttcatgtcagggtattgtgttcctccagacmccacatgggtccagaatgctgtctgggagccagggactggaggcaaaaaccttggaaatctatctgatgttgtattctactgctaagctggcactcaaaccacaagacaaagtccttcccactcttccctcccctttccacaggcagagaagcatctcccaccacagactcacagcaggtactgccaggctactgctgatgttcacttaaggctaaagggctctttagtcaacttgtggtgatgcttgccaggcttggaactcagccttcaga

SEQ ID NO: 864011 - DNA, 606 bp, Homo sapiens
ctttttatttttgtttgttaagtgtggaccctgctgaaacccctctgagggtctgccctagttgtcaaggacaaggtctgggtaggcagttgtagcccacaggcagctggccagaagcagagctgcagtgcccactgaagccagaaagagtgccatgatctgaatrtttctgttcctcaccccaaacccaaccatatatgtattaaagcctaaattccccaatgtgatggtatttggaagttcaattaggtcatgagggtagagccctcaggaatgagataagtgcccttagaaggggataaagagaccagagagctatttctctttgctctatgccatctgaggaggcagccatttgcaaacaaggaaatgagccttcgagaccagcacctagatcttggactccccagcttccagaactgtgagaaataaatgtttgttgtttaaggtactcagtctttggtattctgttatagtggcctgaactgactaagacagagggcttgctggtggccacaaaaagtgtccttccagctagtcctgtggcagctatgcagtgctgtaacggtgttgtctgaattatggacacaaggctcaagtctgttt

SEQ ID NO: 864012 - DNA, 337 bp, Homo sapiens
atcccagctacttgggaggctgacgaaggaggattgcttgaacccagctggtggaggatgtagtgagctgagattgcaccactacactgcagcctgggcaacagagcaagactgtctcaaaaaaaaaaaaaagaaagaaagaaagaaagtttaaaattatgtttaaaaaacagagaaattaagctaaagtacatgayaggaaaaacaatgtggtaaggaattaaaagaaagctaaaggtaagtaaataaaagctaagggaacaggctataagttcaacaaaccaaaattaagtagtgaagaggtcatctacacaagaatgaagacgggacacttggc

SEQ ID NO: 864013 - DNA, 646 bp, Homo sapiens
actgaattccccctattaaattccaatcctttgttaccttcatctttacctgcatctttgttacctgcatcttgcaaataagcaagagttaactgtttaaagcaagcaagcaagcttgtttacagatcattgaaaacaattatcaacttgatgagcttcaaagagctgtgggataatttagtactaatctaaagagatagacaacatttctaaaatgttgcttattttagcagaaaacagtttaaggcagattccttcccacatggttcagctgacagccagctrcccacataaattcacgtgagtacattctctccaactgtctctgaacatagaataggctatattactaaaagcctttttctgttggaaatgtattctattaaacactttttctcctaagcctcagctgcactttcatgagcagtatattgaacccaaatcaaaatctctactttgtgttgagatctctgattctcaatggaatctgataaatatcaatttgatttaacaaaccattttggagcagtgataatttgtcaggagctgtactaatgaaaatatgctttagagaccaattcttatcatcaaggattgaaggatggggtgagcaaggacaaaggaatcagaaaaaaatttcatggaa

SEQ ID NO: 864014 - DNA, 643 bp, Homo sapiens
taccatttgacccagccatcccattactaggcatatacccaaaagattgtaaatcattctactagaaagacacaggcacacatatgtttattgcggcactgttgacaatagcaaagacttggaaccaacccaaatgcccatcaatgatagactggataaagaaaatgtggcacatatacaccatgaaatactatgcagccataaaaaaggatgagttcgtgtcctttgcarggacatggatgacactggaaaccatcattctcagcaaactaacacaacaacagaaaaccaaacaccacatgttctcactcataagtgggagctgatcaatgagaacacatggacacaggaaggggaacatcacacatgggggcttgtcagggggttggggggctagggaagggacagcattaggataaatacctaatgtagatgatgggttgatgtgtgcaacaaaccaccatggtatgtgtacacctaggtaacaaacctgcacattctgcatatgtaccccagaacttaaagtataattaaaaaaaaaaaaagcctggaaagacaagttggtggcaaattctgaatgatcttgaatgctatggtaagatttagtgcttaatttgtaaggtaatcgttatcatgatgaact

SEQ ID NO: 864015 - DNA, 628 bp, Homo sapiens
gtgttgttcctctctatgtgtccatatgttctcatcattcagttctcacttataagtgagaacatgtggtatttggctttctgttcctgcattagtttgctgaggacaatagcctccagctccatccatgtgcccgcaaaggacaggatctcattcctttttatggctgcgtagtattccatggtgtatatgtaccacattttctttacccagtctatcattgatgggcatttaggttgatttcatgtctttgctattgtgaatagtgctgcaatgaacatatgtatgcatgtatctttataatagaataaattatattcctttgggtttatatccagtaatgggattgctgggtcaaatggtatttctgcctctaggtctttgaggaatcttcacgctgtcttccacaatgattgaactaatttcccctcccaccaacagcataaaagctttcctttttctctgcarcatcaccagcatctgttgttttttgactttttaataatagtcattttgactggtgtgagatggtatctcattgcagttttgatttgcatttctctaatgatcagtgatgtagagattttttttcatgtttgttggccacatgtatatcttcttttgagaa

SEQ ID NO: 864016 - DNA, 539 bp, Homo sapiens
aggtaggtcaggggaaatctagaagggagatgtgacaagaaagcatgccaggaagacagaaatgggcaccagggatgagcactgctaagagatcatgcaagatgaggactaaaatattgtccaggaaattagtaaaattgaagttgttggtgaccatagcatgagttgtttatggaagkgacggaaatttaaacctgggtgatgtgaatggagtatggggatgaagggtggggttaggagattgagtcagaaaatgcagtgtggcatttccaaatgaaacacagcatcagataataggataaagatgaggcatttcatttgttcgctcttttaaacagcctgcttttggaatcaagatggtgaattcaattaacctattattatttcttggtatatgacagttcactagctattgcactccgtagaatttatttcattctattcaccctggctgaagaaccataggtaagatccaacattttcagtggcagcccctcaaaaccaacgtgtttccctgataatcattctgcttcccttct

SEQ ID NO: 864017 - DNA, 645 bp, Homo sapiens
gacagttcactagctattgcactccgtagaatttatttcattctattcaccctggctgaagaaccataggtaagatccaacattttcagtggcagcccctcaaaaccaacgtgtttccctgataatcattctgcttcccttcttttgttgtttctggagatctccatctgctcttccatttatcatctgcttgatattcttggatggtgtgcttggttggcctatgctatgggttcagataggcaagtaactatattccccttccccattacagatgatgtgcctcatttagctatgataaatatttgctcatttcctcacatctgcatatggcactgctaccaatccatcttttcytccccatcctcatctctgctaagttcttttcctgccaccatttctatggttgaccagttagcatttaagaaaatatgctgacagtagccgcatcatggattagcatttcttcatgttcataatgcaaaagccccattagatgtaaaaaacttgctttcttatctttcctttgttacacttatatggaaccttttagaagttctatttataagtagaatgatatgaataaatagaaatgtgccagtgaaatagaataggccaaaatatacatcatattaaaaatgaaaa

SEQ ID NO: 864018 - DNA, 579 bp, Homo sapiens
gcccatagacctaactccagttcagacccacttcctatggagtaggagaagaagaaaattttatatatatatataaaattttatattttatatgtaatataatacataatattatattatattatatataatgctgtctttattctccattaaatgaatgaagtgtaatactagagaccaggagaaaacattcagcaaggccatccatggtgaaggtgtggagttatcaaaaaggacgtacattacagaaattcttatagcaataggacttgcagtatggatgcactcagagtccatgagctccaggcccatcacacgtgcttcctccyggggtaaaggcctgctttccgagtcccaccagggccttgctgaatctctctcagaggaggagtctggcctttccttcaaacacctgggagagctctcatgcagacattcatttgttcacaaatgtttacaaagttcctactacgtgctaggcactcttctagacaatggggatatatcaaaaatcttacttttaaagtttaaattctagtaggtaggcagacataaataaatataagacatttcagatgg

SEQ ID NO: 864019 - DNA, 591 bp, Homo sapiens
ttggcttttgttttgaacattttcattagcttaaaggctgctgctttgcaggaatttgaaatatcctcttgggtggtgcgaccatccttactgtaggccaagttcttcttctgccagacaacttttaatggaaagtgcttaagtaagtccagggtcaccaacctcattttctgtcaaggctgccacttcacaacttgtaagagtttcaatatggcatacagaagcaattggctttttcaccctgcaagcattgggaactcgcagtcaatctagattgcttgctgaaagtggagtgtatctcagtaatgctgtattactttctgtgtctgcaagcagactggctcactctagtctgaatttatccttttttggttgttgaacttggttgaaaattacaataattaaccatcatattcccacattctgaaaggtctcaasaatttaaaaactacatcctatattgaactcccagtctgtgatctggaatggtcaagccacactttgatcaagtgttctgctgccacatagcaaaggcttccatattgcagcatggaatgtctgagtctccaacagttggttgtagcttctcct

SEQ ID NO: 864020 - DNA, 669 bp, Homo sapiens
tcaggtatattatttgcaagaattttcactcattctgtggattatcttttcagtttttgattggtcctgtaaaggatgatttctatctaagagcatattttgggtaatatctgtacctgaacttccccaaaagcaaagctggagacaaggtttatacacaaggggttttcttgaagtgattttagagagctagaktgaggtacagggggattgaaccagggaagacgggaaagacaaaaggataatgtgtaactgaggtggccactggcatgggtgactggcatgtgattattgttgggactttctgagtagttttataaaacctgtttcagaactgtccatccgcagcacaaaggtggggggaatatttaaccatcaatcctcattcactaacttgtcaaggatggttccaagggcattaaacttctgggatgtgcatgatgagtgccaaactggtttctgatggcgtcttatgtgcatgtcagaggatccctgggacagggagcaagaggtgtgttctgtagacccccaggcaaagtctgtccagtggcacctacattatgcaggttaaacctccattgagcttgtcattcagtggtggctggagtaacaggtgggaccaagagaatttgaggtgtaatacaagagatgtccattctaataggcaac

SEQ ID NO: 864021 - DNA, 650 bp, Homo sapiens
catacgtttcttctaagttaaacaagtcatgcttgcagctatagactaagaaggcatttcaccttgaacttgcgctgaggaagaattctttagtgtgtaaactataagacattgagatgcaatctatcttctgagtcacatcagctggttaattccatcacaagtgaaatgaccgaaactaatctcacaccaacattccaatggcaatacaactttaatyaggtcaattcttccattccctattacttagcccaaacacgcaagttagtgactcatgtcaccctgtcagcatctccacaaacagttgcagctgcattcatttgaactggatactcaaaaagcctactgtgtccttatccattgtaattttttccgtttttatgcctctgctaatttgaaatagcctccagttacattcaggtaaaacacaccttaaaggcattgattgtcttttctgcaaaatctgctcttattttaattgatacccaggttatagaactgacaccttatacaaagcagcctgagcctgacagtcagtactggagaggctcccagggacctccttacacctgctctgttcaccttcctatgctttggctgctcaaagttccagactgacttagctttacagctactccgtccttgatccg

SEQ ID NO: 864022 - DNA, 600 bp, Homo sapiens
tggatacaaggttttctctgggggtgatgaaaatattttgacatctgataaaggtggtggtagtacagcactgtgaatgtaccaattgccactgaattgtgcattttaaagtgattgattttatgtggaacaaatttcactttaattataaaaagtgaataaacttttagaagctaaccttggaagaaggtagagactggaagggatcacaagaaaggcttctgggatgttggtaagtactctgtttctaaaattggttactggtttttagaaaaatcaatttgtaaaattcttcaagttstatgctaatgatatgtgcacttttctatgtaagtgtttacctaaataaaataaaatgctcacttttacaaaaagaaaatattctgaagtatgtacagccattttcatttaagcagcattgtacagtatactacaatcagtaactgtggcacatatgctgttgagccctgaaattgttacggcaaatcctaaactcttcccatcgcattatgccctagagctcacaacagatccctgagactactttatcatccacaaattttatactgagcatttttctcagcctgacactaaaaacca

SEQ ID NO: 864023 - DNA, 584 bp, Homo sapiens
aatgataatttgaagacgtttttatcattaaatgcttcctcacagtaaatgagagaagaaactactttacaatatctggccctaccaagttcattactaaggtttctttggctgtaaacttttaaatattaaatgctttacatattatcttatctgcaccaatcttgccagtccctagacagtggtaaataaacttgcttctgtctctttcctactttgagcttgggcactctgaaaaatacagttttataatgataccgattggctccaatcactccaatatatttttatgcaaatcacctttggctctaacttttctctgggctctcagtgaatgtgtttgtgtgcccctcaatgttattgacgtcttgttaattttgcwttgttgtcactggatgtaagctttgtttcttctcttcctaatggcgtcactcactcatacctattttttaagaaaattcgagtgtattcaaaaagacttccttcaactgctcttcattcctcagcaacaggtatttgtatctctgttcttctaaggaaaatacttgttttttttttttttttttttttttttagttctttag

SEQ ID NO: 864024 - DNA, 588 bp, Homo sapiens
ctcacttcacagaatcaacccaggaaagacaagcctactcttcagatgttaggtgccatgcagataacacaaggtattctcccccttttaaaatcagttatgacatatttaggcacagtttacatctaagccttaatatttttaaatgggagaatgctcatttgtataggctaaaatacaaaatatgtgaagtgcactgcattrtattttaagccataaacctgaagtttagatatgaatggaagaattataaacattctcaggtattctaattttttcacaaacaaaataaatatgttcattaaaactatattgaaacatatcttcttgtgcataaatcttgaggcaacacaaagtgattgtgaatctgaaatttctttgtaatactgttataattttactttaatataacaaaactaagtccagtctcaagttgttagggatagtctttaccaatttaataaggctgccttctattcttagattctaatactaaaatgttttgaaagcattcatggcaattgactttgtcatgcccttcccctaccctcaaatcctcatttgcagtataagcagaaatcttcactg

SEQ ID NO: 864025 - DNA, 600 bp, Homo sapiens
gagtcagcctcatttttcatttctatattagctattattaggcttttagaaattggcaaatgtcagttttgactaactctgttttgttattgctgtgataatataactgtacctcatttctaaaccatgaaaatggagttttctaaaataactgatatgagttattaatcaaaatgaataatataagaaatacttcctactaattttaaagatatgggaactcaagctgataatatggtactttggactgagtactgttaatgacagttattagaattctggttgctaagaagtaaaggctggccttagtctcagggaccaacccatctgtatatattctttgatatgcttattaaaaaatccatttcattcttttatgatcatgctctatacttattgccctgagaaagaatcaacctcaggggtccaagctttgtgggaagaagtgatttcaaaagtggaacttaccaaagggtcagggaataacagaagcatttgcatttgtgtcttggctcttgagtgcctaagtccacaaatttraggccctttcaaaatctggcttatgtgaatctttttagaacatatgcccacttgagttca

SEQ ID NO: 864026 - DNA, 502 bp, Homo sapiens
ttgagacggagtctcgctctgtcgcccagctggagtgcagtggcgcgatctcggctcactgcaagctctgcctcctgggttcacggaattctcctgcctcagcctcccgagtagctgggattacaggcgcccgccaccacatccggctaattttttgtatttttagtagagacggggtttcaccctgttagtcaggatcgtctccatctcctgacctcgygatccgcccgccttggcttcccaaagtgctgggattacaggcgtgagccacggcacctggccctatgagattctattgtagccttttaaccacaccctatttttcacttgggctaatttgagttaatttctggggtttttttttgtactaaaaaatcttatctaagaaaataatagaggtatatattatttcccatgtagatgaaaaataaatgaattcccatttgaattaaaaataatataaagcataatctaccaaattctgattgtctatatcttgagc

SEQ ID NO: 864027 - DNA, 570 bp, Homo sapiens
agctatatctaatcgagaatttttctgcagagagcatgcgcactttgattttactgggcctcagactgactctgctcattgtaacagtaaaaacacacccaagtggagatttaagaagctaaggagacatacaatgtatgaacaagcatgtasaactactacacatgtgcacccagaacatgcttaccagtaacacctcttcccacccccttagaaataatcatgtaagactcccataaagggagtttccctggtaaacagtcaacactgtctcacccttatgagcagccagctctgaatcgtcttgaagagtttactgtctattctacaccttgctttcagagtcttctttctcctttgcaataaagttctctatgctgcacctcctctgctgtatgtcttttgtttaaatattttaaactaagaagacaagcagcaaggtttcacaatagctgtcaacaaaaacactgaacattcctaaatattaacatccttcagggttctgcgctgggttgcgtgtccttctcctccttctgggaaatgcccatggggcccagcacctcagtgact

SEQ ID NO: 864028 - DNA, 603 bp, Homo sapiens
tctttttagaagtggttttatgctgcgacattaactctggaatttgcctcctactgacaatgaacattagagaattgctttttacatcttgatagcagtcatactttattcaggcttgcatttacagtgcttttgcacaatgactggtgtatattaggtgcacagtatgtctttttgactgaaggactaaataaataaatacgaataatatgtgcatcagactcagatatctgttctctaacacttcactaagcagtttctttacaaaytgtccagtctctactagtatttctcctgtgaaatctcctagtttccatattcttatagtttgttaggctaagtcagagaatagggaatagtgtgactattatagtatctttgagaatttgagcattacagagagtagtgatgtagcactaattgactcagtttgcaattatttttcttttataatagagctgtgatcaagggaacaataaaaaatattaactctgtaatgcaccaaataacagcataaagtgtgaaagagcagttatacaagcaaagaaatgaagagtgaaagaaatgcactcaggttcacttattaagcattattgtcactat

SEQ ID NO: 864029 - DNA, 589 bp, Homo sapiens
tgatttcctctcttttcagtatatacccagcagtgggattgctggatcatatggtagctcaatttttactttttgaagaacctacaaactgttctccatagtggttgtactaatttacactcctaccaacagtgtatgaggaagggttcccttttctccacatcctcgctagcacttgttattgcctgtcttttgaataaaagctattttaaatggggtgagataatatctcattgtaattwtgatttacatttctgcaatgatgagtgatgttgagcatcttttcatatacctgtttgccatttgtatgtgttcttttgagaaatgtttatccaaatcttttgcccatcttttgattggatttttaaattttttcctacagagttgtttgagtgtcatagctggaggtcttagatttaagtctttaatccattttgacttgattcttgtaaatggtgagagataggggtctagtttcatttttctgcatatggatatacagttttcccagcaccatttactgaagagactgtgttttctccattatatgttcttggcacctttgtcaaaaatgagttcactgtaggtg

SEQ ID NO: 864030 - DNA, 589 bp, Homo sapiens
tgatttcctctcttttcagtatatacccagcagtgggattgctggatcatatggtagctcaatttttactttttgaagaacctacaaactgttctccatagtggttgtactaatttacactcctaccaacagtgtatgaggaagggttcccttttctccacatcctcgctagcacttgttattgcctgtcttttgaataaaagctattttaaatggggtgagataatatctcattgtaattatgatttacatttctscaatgatgagtgatgttgagcatcttttcatatacctgtttgccatttgtatgtgttcttttgagaaatgtttatccaaatcttttgcccatcttttgattggatttttaaattttttcctacagagttgtttgagtgtcatagctggaggtcttagatttaagtctttaatccattttgacttgattcttgtaaatggtgagagataggggtctagtttcatttttctgcatatggatatacagttttcccagcaccatttactgaagagactgtgttttctccattatatgttcttggcacctttgtcaaaaatgagttcactgtaggtg

SEQ ID NO: 864031 - DNA, 634 bp, Homo sapiens
gatttttgcattaacattcatcagaggttttggctgcagttttctttttttgatgtttctttgtctggttttggtatcagggtaatactgacctcttagaatgagtttggaagtatttcctcctcctatattttttagaatactttgagtagaattagtattagttgtttaaatattcggtagaatagrgctttgatcttgttacttgatattggtctgttcagattttgaatttttcatggttcaatcttggtaagttatatgtatttaagaatttgtccatttattttggattttccaatttattgacatatagttgctcataatggccactaataatcctctgaatttctgcagtatcagttgtaatgtcttctatttcatttttgattttatttatttggatcttctctttttctaagtgtgactaaagatttgtcaattttgtttaacttttcataaagacaactttttgtttcatgtatttttaaattttatttatttctgctctgatttttattatttcttttcttctactaattttgggtttagtttgctcttgcttttccagttctttaagatgcattgttagactgcttatttgaagttttttctcttttttaatatagacact

SEQ ID NO: 864032 - DNA, 634 bp, Homo sapiens
gatttttgcattaacattcatcagaggttttggctgcagttttctttttttgatgtttctttgtctggttttggtatcagggtaatactgacctcttagaatgagtttggaagtatttcctcctcctatattttttagaatactttgagtagaattagtattagttgtttaaatattcggtagaatagagctttgatcttgttacttgatattggtctgttcagattttgartttttcatggttcaatcttggtaagttatatgtatttaagaatttgtccatttattttggattttccaatttattgacatatagttgctcataatggccactaataatcctctgaatttctgcagtatcagttgtaatgtcttctatttcatttttgattttatttatttggatcttctctttttctaagtgtgactaaagatttgtcaattttgtttaacttttcataaagacaactttttgtttcatgtatttttaaattttatttatttctgctctgatttttattatttcttttcttctactaattttgggtttagtttgctcttgcttttccagttctttaagatgcattgttagactgcttatttgaagttttttctcttttttaatatagacact

SEQ ID NO: 864033 - DNA, 634 bp, Homo sapiens
gatttttgcattaacattcatcagaggttttggctgcagttttctttttttgatgtttctttgtctggttttggtatcagggtaatactgacctcttagaatgagtttggaagtatttcctcctcctatattttttagaatactttgagtagaattagtattagttgtttaaatattcggtagaatagagctttgatcttgttacttgatattggtctgttcagattttgaatttttcatggttcartcttggtaagttatatgtatttaagaatttgtccatttattttggattttccaatttattgacatatagttgctcataatggccactaataatcctctgaatttctgcagtatcagttgtaatgtcttctatttcatttttgattttatttatttggatcttctctttttctaagtgtgactaaagatttgtcaattttgtttaacttttcataaagacaactttttgtttcatgtatttttaaattttatttatttctgctctgatttttattatttcttttcttctactaattttgggtttagtttgctcttgcttttccagttctttaagatgcattgttagactgcttatttgaagttttttctcttttttaatatagacact

SEQ ID NO: 864034 - DNA, 634 bp, Homo sapiens
gatttttgcattaacattcatcagaggttttggctgcagttttctttttttgatgtttctttgtctggttttggtatcagggtaatactgacctcttagaatgagtttggaagtatttcctcctcctatattttttagaatactttgagtagaattagtattagttgtttaaatattcggtagaatagagctttgatcttgttacttgatattggtctgttcagattttgaatttttcatggttcaatcttggtaagttatatgtrtttaagaatttgtccatttattttggattttccaatttattgacatatagttgctcataatggccactaataatcctctgaatttctgcagtatcagttgtaatgtcttctatttcatttttgattttatttatttggatcttctctttttctaagtgtgactaaagatttgtcaattttgtttaacttttcataaagacaactttttgtttcatgtatttttaaattttatttatttctgctctgatttttattatttcttttcttctactaattttgggtttagtttgctcttgcttttccagttctttaagatgcattgttagactgcttatttgaagttttttctcttttttaatatagacact

SEQ ID NO: 864035 - DNA, 604 bp, Homo sapiens
ctatgtgtgtctttataggtgaagtgcgtttcttgtaggcaacagatcaagggttctcatttttttcacccattcagccagtctatgtcttttgattggggagtttagtccatttacattcaatgttataattcatgggtaagaatttgctcctgyattttattatttgttttctggttgttttataatcttttcttccttcttcctttctttcatctcttcctctagtgaaggtgatttttttctggtgatttaatttagtttctttttttaaaaaaattttttgtgtattcagtgtattttttttgttttgaagttaccatgaggcttgcaaatactatcttacagcccatcattttaatctgataacaacactgttttcataaacaaacaataaaaaaataacaaaaactcaccctaacttcctccttctgcttttaaattttttgttttctatttatatcttattgtactatgtcttgaaaaactatagttattatttttaattggttcatcatgtagtctttctccttaggataagagtagtttacacaccacagttgcagtattataatattccatgtttttctgtgtacttactgtt

SEQ ID NO: 864036 - DNA, 604 bp, Homo sapiens
ctatgtgtgtctttataggtgaagtgcgtttcttgtaggcaacagatcaagggttctcatttttttcacccattcagccagtctatgtcttttgattggggagtttagtccatttacattcaatgttataattcatgggtaagaatttgctcctgtattttattatttgttttctggttgttttataatcttttcttccttcttcctttctttcatctcttcctctagtgaaggtgatttttttctggtgatttaatttagtttctttttttaaaaaaattttttgtgtattcagtgtattttttttgttttgaagttaccatgaggcttgcaaatactatcttacagcccatcattttaayctgataacaacactgttttcataaacaaacaataaaaaaataacaaaaactcaccctaacttcctccttctgcttttaaattttttgttttctatttatatcttattgtactatgtcttgaaaaactatagttattatttttaattggttcatcatgtagtctttctccttaggataagagtagtttacacaccacagttgcagtattataatattccatgtttttctgtgtacttactgtt

SEQ ID NO: 864037 - DNA, 604 bp, Homo sapiens
ccaggccccaggtggtccagaagtgctgtctgggagtcagggactagaatcaaaaatcttagaagtctacctgatgttctattgtattgcaactgagctagcactcaaaccacaaggcgcagtccttctcttcccttttccaaaggcagaggagcctcaccctgtagccaccatcacccctggccatgaggagtactgccagactaccatcaatgtttccttaaggcccagggtctcttaagtcagcttgtggtgaatgctgcctggtttgggactcacccttcagggcagygggctcctctgtggcccagaaaaggtccagaaatgctgttcaagtatcaggtactggaatcagggactccaagagcctgcttgatgctctatctgcctgtggtggcattggtacctaagatgcaaggcaaagtcctttttacttttccctctgcttttctcaggcagaagttttgccctgtagccaccatagctggtaatgtgctgaatctcacctgaagccagcaagtctcagtgatttaccaaggcccttgatatagcacctggctgtcgctgctggttattcagggcccaagggctttttagttagcag

SEQ ID NO: 864038 - DNA, 604 bp, Homo sapiens
ccaggccccaggtggtccagaagtgctgtctgggagtcagggactagaatcaaaaatcttagaagtctacctgatgttctattgtattgcaactgagctagcactcaaaccacaaggcgcagtccttctcttcccttttccaaaggcagaggagcctcaccctgtagccaccatcacccctggccatgaggagtactgccagactaccatcaatgtttccttaaggcccagggtctcttaagtcagcttgtggtgaatgctgcctggtttgggactcacccttcagggcagcgggctcctctgtggcccagaaaaggtccagaaatgctgttcaagtatcaggtactggaatcagggactccaagagcctgcttgrtgctctatctgcctgtggtggcattggtacctaagatgcaaggcaaagtcctttttacttttccctctgcttttctcaggcagaagttttgccctgtagccaccatagctggtaatgtgctgaatctcacctgaagccagcaagtctcagtgatttaccaaggcccttgatatagcacctggctgtcgctgctggttattcagggcccaagggctttttagttagcag

SEQ ID NO: 864039 - DNA, 618 bp, Homo sapiens
agtagcagaaaaaaataatcagagcaaagaaagaaatggtattaactgtacattttgaacttggtctgcttttaaaattacaagttttttaggcacaaaataaattaaaatgagcacattttctcgcaaaagccaaataaatagatatatatcacaagcccagtcaaatacctatttgttaaaaataaaaccatcaaaaagaactgcataagtgagatayacacacacacacacacacacacacacacacacacacacacacacacacacacatatatatatatatatatatacacacacacatatatccctacttgtcctccaaaaatgttcgtgggaatccagtggcccctcttgattgctgagctcaggataaccatgcagaaagcagaaccacttgtaaccagctcttacaagtactttccaaaacaaccacagacagcaatgatgaaccaaattccaagcagcatgttctaataggaacatgctgccatttcaactcctattttaaaacaagagagagagacagaaagaggtcacactgtatggtaaccaccacccaccttggcaaacttaaagccacagttggaattattctaataagtggtgaacctcaac

SEQ ID NO: 864040 - DNA, 523 bp, Homo sapiens
tttactttgatttaaggggaataagagatttttgacatttctgtatttctcacattcaaatttgacaatgggaggatcatgccctgccccccaccctcattctccatctctctgaagcccaggcttttaaccattggccagagggctgaatataaaggtcacatgattttggccaggcayggtggctcatgcctgtaatcccagcactttgggaggccaaggcgggcggatcacctgaggtcaggagtccaaaaccagcctggccaacatggtgaaacccagttactactaaaaatataaaaattagccaggagtggtggtgggtgcctgtaatcccagctactagggaggctgaggcaggagaattgcttgagcccaggagatggaggttgcagtgagccaacacggtgccactgcactccagcctgggtgacagagtgagactcctctcaaaaaaaaaaaaaaagatggcacaatttcagggacagcccaggttctgcagttcttgtggccattgctaata

SEQ ID NO: 864041 - DNA, 523 bp, Homo sapiens
tttactttgatttaaggggaataagagatttttgacatttctgtatttctcacattcaaatttgacaatgggaggatcatgccctgccccccaccctcattctccatctctctgaagcccaggcttttaaccattggccagagggctgaatataaaggtcacatgattttggccaggcatggtggctcatgcctgtaatcccagcactttgggaggccaaggcgggcggatcacctgaggtcaggagtccaaaaccagcctggccaacatggtgaaacccmgttactactaaaaatataaaaattagccaggagtggtggtgggtgcctgtaatcccagctactagggaggctgaggcaggagaattgcttgagcccaggagatggaggttgcagtgagccaacacggtgccactgcactccagcctgggtgacagagtgagactcctctcaaaaaaaaaaaaaaagatggcacaatttcagggacagcccaggttctgcagttcttgtggccattgctaata

SEQ ID NO: 864042 - DNA, 588 bp, Homo sapiens
agaactgctgaactctaccaaatttttaaagaagaaccaataacaattctactcaaactcttcaaaaaatatttaagaggatgaaatacttccaaactcattttatgaggccagaattatgctgataccaaatccatgcaaggacaacacaaaaaaggaaagtgcaggtcaatattcataatgaataaaatgcaaaattctcaacaaaatactagcaaacataattcaataacatattaaaaagatcattcatcatgatcaaatgagattcatcccagtgatgcaaagatggttcaacatatttaaatctgtaaatgtgatacatcatattaacagaatttttaaaaaaatgtttatttccatagatgctaaaaaagtatttgatataatacaycctttcaggataaaagctctcaacaatcttggtatagaaggaacatacttcaaaacaataaagccttacgtgacaaacccatagctattgtcatactaaatggagaaaaattgaaaccctttcctttgagatctggaacaacaaggttaaccgctttcactacttttattcaacatactactaggtaagtacta

SEQ ID NO: 864043 - DNA, 645 bp, Homo sapiens
aacactgaagcattgcatattattgcaatataacaaaataaaataaagtatcttaggagatggctgattctgacctttctatcacctgttggagaaaggcatttcttgcatataataacctgtaggaaaatgctaaatctttctggaaacatacattttagtcacttaggcaatggaggccttataactcaagaataatttaccattctgaagatgagtctagatttccaccaattcttgggtccgtatgttttgtggcattgattaaacacagaaggtgtgtttgtcaatcagcctttccttgaaaggtttaaagttgcttaagacccagaattttagccttcatcatgattcagtcatattgttctgaattatgtaatatttgacaagtggttctatcagctgaattaatttttcaattgtctctaattgccttttatttcttggggtgatttttcacacaaatttgaggtgagagtgtcgyttggccaaatgtatctaaacatcccatttattcagcatttattaactacccactgctattttccaggcacagactgacctaggtaatggggataaagctttgatgaaaacgtacaaaatatccagcttaccttgagcttacattttaataatatttatcac

SEQ ID NO: 864044 - DNA, 642 bp, Homo sapiens
cttgaccccttttcctgctttatactgaaaatcattcctgagtacctgccaagataaattctagatttctgggtgcttagaaaaaaaatggtttgattatagtataactgctagttactgcttgaaccttaaaacttggtctcagcatagaactttcaagatccacagttcatttgcttctaaggtcttcaagaaataggaaatagtgagaatttctgaattgcactgcaggtgtctagtatttcatggaaatgccaacggaggctgctttagctttttctgtcctggattttgtggtatttttcaagaatatcaggaagtaaattcaatgtatatttctggaatgccttcaatgaaggaaggagggaagatcagggtttactcaccaccagctctagtgaggttacccgacaatgtcgggtgctgataacagcttgtaacacaagcaaggaggatgtagaaaagcaggaggcagagagggggaaaaaargagctagaaagaacaaagaggaggaaaatagagaaagagaagtgtcacacaggcaagggtggggtacaagacccttcctctgatgaattgtaacagtcttccctttgttacatgaaggttaacatttcaaatataaaaatgaaacttaaaag

SEQ ID NO: 864045 - DNA, 587 bp, Homo sapiens
ggattcaaaaggagtgatctccttctcactgaaggtattcaaactggaccttcttaaccataggttagagatgctgttgaagggattcttgtatcagctgtgatactgcactagctttttaaaggcattttacaacgttaagattcgttgaaatattttttaaaacatttcaccagcttgtataactgtattttggagaaatcaaagggattttaattctgtgaccttaaaagcatgtatcaagtccagtgtttccatatcaatatgtcagaatatgctccattcatagttgcacagataagccaaactttctgtatagtttctgccacaatctggtttcatttctgctcatgtgggccttctgtaggatagtttctgtggccctcatgtctctcattcctcatcagtctrccatactctccattttccaggatattaacctagttaggagggtccctttgacacttgtttctgtatccactcacctttctcttattcgacctgctctctcttgaagatatttctgtgttctctcaatatatcttctctcaggtgtgattatcaaaggcttatactaccacagtaga

SEQ ID NO: 864046 - DNA, 600 bp, Homo sapiens
tgaataatgaatccataggtcactatagtcattagtgctgtcatatatatgaactgttatctgttctcaattatagtagctgctttttagttttcattagatttatgttaaaagaaaatatcaggaatccatctatctgtcttaccaggtagtgacattgatacgttcttgctagactatgctattatagaaggatatatataatgagatgctaaacctaaaattattgactaaagcttagcaartttctcttcagtgcactaattagttttatttaattatcaagagtgtgttctcccactaattaggataaaacaatatgaatatgacatccaacattatcaagtaacataattagtgaagtaaataagatcaaacaagattaggggaaaattctggcctatttttaaaactgtatctataaaatcatatgtaatctgtcttatccaataattgaatatatccctttatcaaatgcatgcagactagctctgaaacttaagattttatggtgtatttctagaatgcagaacaatttacaggatgtgttctttaaaatactatagataaggcaaatattagtatccacaatttataaat

SEQ ID NO: 864047 - DNA, 619 bp, Homo sapiens
gttcattagctggtcttactctaccagttttctgacattgtattgtgttacctaagtcattaactttgtttcagcatgtaattttaacttttgtggaaaatagaaataccttcattttgaaagaagtttttatgagaataacaccttaccaaacattgttcaaatggtttttatccaaggaattgcaaaaataaatataaatattgccattaatttgtgtttgcttgtggagcattgtgctgaagcgtgtgtggcagaaaattgtggatgtgggtccccctatgatgatggcacacacacacamaaaaaacagctagtaggatgggacaggatttagagtggtgggtcccaaactgtgcattgaggtgcacagggaagtacaaaactttccatttgtgaggaaaacacagcaacatgtgcagacactgcacaaacttttactattaaattatttgaactttactacttaatgaacagaacaattatgtatttcttttggcttggggagtgctatgatctgaatgtttatgtctcccgacaatttatcccctcaccctcaaggtgataatattaggaagtaggacctttgggaggtgattagttcataagggcagagctc

SEQ ID NO: 864048 - DNA, 631 bp, Homo sapiens
agttcataagtctatcatgaaatccttacaaagaagatggagaaatgtcagctgaatggcaatgattcatttagtgagaatggcaggtggctaagcaacctgacccaaaaattactgggtaatcattgtcatttgatattcattcrtagttgtatttctagtggtatataatgtagttcaacaataagttctttcttgtttattattttattaataatttgaatgacaacagaaacatatttgtctgttttgcagagaatatacatttctttctgctctgacaatgctcaggctcattattcactgctgttgcaagcttctctaggtccaactctttcacacatacacacaaacacaaatacaaatctcccaagtagagagaatcactgttatatttgaataaatatatcatatatattcaaataatcacagtaagcttgatcactaaactaataaggaaatatacaatcattttttcagggcctactatgtgcccagtgccttgtactgggcattatctttaatccatgaaacaactcatttttcagaggtgaaaactgaggctgagtcacccaaaggcaaatctgaacccagttctatttgactgcaatgtctgtgttccttcaactac

SEQ ID NO: 864049 - DNA, 575 bp, Homo sapiens
aactttaagtagtaaaatcaattaaggaaacaagggccttagctaaagacctttctaaagtaactattctcttgagtagatttgctacattactttttggcaccttccccctaataagaatccctggagaaaactacctcttactttcatcaattgtttattcacaactctcttaatttgtaaccacgaattcacttccctgaacattatactaaacaaaagagagtccaaatcctcaactaaaacccaaactgaaagcaccacagaaaggctagtgtgctcattttcctttgagaaaataaccgaggcatgatcatgtatcaaaagctagagaaaaacaagaagctacctgaaggacaatccttttggatttttgcttgcttacccatacgtctacacaggctattagaaagccaaaatgacsctatactactgttaagtgggaaacagtcacagtggtttcagccagccacttagtttggatttcctacattttcaaacattatcaaaatttatatagtgtacaaacctaatattaagaactcccattgaagcattaaaaaatactcatgaat

SEQ ID NO: 864050 - DNA, 682 bp, Homo sapiens
gaagatgacgaaatcttatatatagaaaaccctaaagactccatcaaaacactgttggaactgataaatttagtaaaattgcagaatgcaaaatcaacatacaaaaattagtagcatttctatatgccaactgtgaacaatctgaaaaaaaatcccatttccaatagccacagcaaaaataagatgcrtaagaataaatttaaccaaggaaatgaaagatctctatactaaaaactgtaaaacattgatgaaagacattgaagaaaacaaaaacaaatgtaaagatattcccatgttcatggaatggaagaatttatattgttaaaatgcccatactacccaaagcaatctaccaattcagggcaatccttaccaaaaaaaaaaaaaaaatgataatcttcacagaaatagaaaagacaatcctaaaactagtatgaaatcacaaaagaccccaaatcgtcacacaatatttagcaaaaagaacgaagctggaggcatcacactacctgacttcaaaatatactacaaagctatagtaaccaaaacagcatggtactggcataacagcagacacataaaccaatggaacagaaaagcaagcccagaaagaaatccatgcatctatatccaccagttttggagaaaagtgtcaagaacaaacattaagggaagaagagtctct

SEQ ID NO: 864051 - DNA, 625 bp, Homo sapiens
aatgggtctcttgaggacagctgaacaatgagtcttggttttttatttgccttccactatttgcctttaagtggtgcatttagaccattcatactcaaggttaatattgatatgtgaagcttctaacctgtcataaagttgttagctggttgcttttaggtttctattgtgcagttgatttatagggtttgtgggctccgttcttaagtgagttattgtgttagcagatattgtcatttcacttctgtgtttagaactcccttcaggatctctttaaggctgttctggtggctaaacattttcttagagattgyttgactggaaaaaatgttattttgtcttcacttatgaagcttagtttggcaggatatgaaattctcggttggaatttcttttctttaagaatgctgaaaataggctgccaatctctactggattgttaggtttgtgctaagaagcccactgttagcctgatgggattccatttttatgtgatctggtcagtttttctagttgcctttaagaatttctctttagcaatgacttggacagtccaatgactatattcttggtgatgttcattttgcatagtatctcacaggtgttccctgggtttcttgtatct

SEQ ID NO: 864052 - DNA, 608 bp, Homo sapiens
tggtgctcttcttgtttgaaatttagccaaccatgatttgctattgactaataaggttctaggagcatttttctatgcaaattattcagtagacttttttttttttttttttttttgagatggagttttgctctcgttgcccaggctggagtgcaatggtgtgatctcgacttactgcaacctctgcctcctgggttcaagtgattcttctgcctcagcctcccgagtagctgggattacaggcatgcaccaccacacctggttaattttgtatttttagtaaagacggggtttctccatgttggtcaggctggtctcaaactcccaacctcaggtgatccacccgcctcagcttcccaaaatgctgggattacaggcatgagccactgcacccagccgcttcagtagacttcrtagatatcaggacagtgactttcgactgagattatggcagatggaggatggaaggggtccacacaacagtgacttttctatgtacaatccaagctgaatcatgggcttagtggtacttctcacagtcttgaattcaacagacttattggcacctcttgaatgccagacattatgcttggcaccagaaattcaag

SEQ ID NO: 864053 - DNA, 623 bp, Homo sapiens
ccagtttcttatatgtgcttctctgcaagaactaatatgtatatagagaactctctctctatatatatatttttactttgtgttcctcatggtgtttggccagaaggccccatagtttctaaatcataaggctattgtaaaaattaaataagcttatgtacctggcacaaagtgattttttataatatgagctattgctactgggtggttatcaatttattatctctgaaatccaaatctaccctcattgccttgatttgtgattctggagctggagccagtatcatttctctttgatagctagcagaatggcatgtctgagagacagccacccagcagtgttccccttctgcacaccctcagccattctagcaagaggcttccagtgtctcagacccatgctttcctcacccccaacagaagattttgtgctcaccagtccatgctcrtggtttcctaaactgcagcctcactgcagagcctatggaccatgcctaggctaaggcaatccagccagttgcaccatcctgttgtctgaaactcagcatcagagaggagattccctcccaagtcagccccttcctttgcactgtctctcagtcctaagaattctcatgtattcc

SEQ ID NO: 864054 - DNA, 647 bp, Homo sapiens
gtgaccagaggagagaacatatagttaaaaatgacatttatgtaaagtctaacacaaagtagaaaatgctagatctcaaagaagtgggatactttgggagtttaaagagggaagaaaatgtctcccttttaagagaaccaggtgctaacatgtggtagaggctccactccacyttccttcatgaaatttcaaatgtctgcagtccccttaggtgtggaaaagaactgagactacagagtctctgtcttggatccaaaatatgctaagtcttccattcaaattatttgttctttctcaatactgatgggaggaagaaaaaaagacaaggaagaaaattaatcatctttatgtgaagtaggagatagttgggctccctcaggctttgcataggagataatcccagaaaatgaacggtcaagactcttactgtttctattttaacaaggatctggccaattattgttgacaagctcatgaatatgataatcagcttggtctcctgtttctctttataccaagctttgcagtaatagtctgcaaagtacatatatctctgcgccttcctctcccagggccctagccttgtttctgacacataagttaaattcctgaggtatcgatactaaacccctgctgctcataattcc

SEQ ID NO: 864055 - DNA, 584 bp, Homo sapiens
taagaaaatgcaggaattcaagcaagatatttgtcataaaataaaatgattaaggtggggatttcatgtggttcttttatttgctcctcttgcgtcagaacaattcaggaggtttgtgcttatgagccgtttatgacacttaattcgtctttaaattaaggcatattttcactccaggattgtttttcccctccatataaaaataaaagacaagctttgtaaggcctatgaacagtttaactaagttgcttgcccttcatgccagtgacaagtaatgagtaagaactagtaggtgtcattgagaaaacagacattgtcactccagtgtcaatcaaaattatctggtagtgaaaactggactttaaattttaaaaataaygtgagagctgctagaaaaattatgaagaattgagtagggtcacagcactcgacaaatcttccaatttctctgccactggcttagtgtcacctgtacattttctagtctaaaagaatgtaatagcccaacagggtcagcagcgatatgcacctctcccaaatacatttctgtttacattcctgaggtccaattatgataacaatga

SEQ ID NO: 864056 - DNA, 625 bp, Homo sapiens
gtcattgagaaaacagacattgtcactccagtgtcaatcaaaattatctggtagtgaaaactggactttaaattttaaaaataatgtgagagctgctagaaaaattatgaagaattgagtagggtcacagcactcgacaaatcttccaatttctctgccactggcttagtgtcacctgtacattttctagtctaaaagaatgtaatagcccaacagggtcagcagcratatgcacctctcccaaatacatttctgtttacattcctgaggtccaattatgataacaatgacataatatgaattctaaacacatttgtattgttgatatagtaagaaatttttcaactaattagaaaattctaccttttaaaactgcacagttaataaatataacacatacgcatgtgctgctgtttctgcttttgttttttgttttagctaagagctaagcctatgactactacttcaggaatgtttgtcaatttaatatgagctgaggaccatcgcacttctagccttcaagcttgtattctatcaggaagaagggatagagaagaattggtagaaaacattgtatatctttgccaggcacatgtttgtagtcccagccatctgagagactgag

SEQ ID NO: 864057 - DNA, 625 bp, Homo sapiens
gtcattgagaaaacagacattgtcactccagtgtcaatcaaaattatctggtagtgaaaactggactttaaattttaaaaataatgtgagagctgctagaaaaattatgaagaattgagtagggtcacagcactcgacaaatcttccaatttctctgccactggcttagtgtcacctgtacattttctagtctaaaagaatgtaatagcccaacagggtcagcagcgatatgcacctctcccaaatacatttctgtttacattcctgaggtccaattatgataacaatgacataatatgaattctaaacacatttgtattgttgatatagtaagaaatttttcaactaattagaaaaytctaccttttaaaactgcacagttaataaatataacacatacgcatgtgctgctgtttctgcttttgttttttgttttagctaagagctaagcctatgactactacttcaggaatgtttgtcaatttaatatgagctgaggaccatcgcacttctagccttcaagcttgtattctatcaggaagaagggatagagaagaattggtagaaaacattgtatatctttgccaggcacatgtttgtagtcccagccatctgagagactgag

SEQ ID NO: 864058 - DNA, 655 bp, Homo sapiens
tttttagctgtctgactttcaatgagataaagatacaaactgtttctgtcactcagaaagtctttccatccttttccccagtcaatcttcacagcagaagtattcattatgctgacttctgtcataccatgctctacatgttcttgaatttcataaattgactcctacaccatgtacttttcaactccacagaatgtttttgaactttactcatgtggttttatggcccgttgttcattccttgtcattgctgtgtaatattccatcgtgtgatttatgacgatgggtttatcgagatgaagcagctgtcctyttcaggagggttgatcagactgtactgtgcaatcactaagaatgtgggagttcttgcagaatcatcccactcctttgaagattcctgacttccaaccacagagttgatcatcatgtgacctggttcacagaaagaaaaaaattaaagggatttgggggtgggggtgggaaggagagacagcagcactgtccatttgttttctctgaggagcttaaatacccttcccatcatcccctagttttaaggaacaataaagaataactttctgggtcccttgggtgttttcattaagtagccacagaaagtgctagctagaaaagtctatagcgacttatatacaga

SEQ ID NO: 864059 - DNA, 655 bp, Homo sapiens
tttttagctgtctgactttcaatgagataaagatacaaactgtttctgtcactcagaaagtctttccatccttttccccagtcaatcttcacagcagaagtattcattatgctgacttctgtcataccatgctctacatgttcttgaatttcataaattgactcctacaccatgtacttttcaactccacagaatgtttttgaactttactcatgtggttttatggcccgttgttcattccttgtcattgctgtgtaatattccatcgtgtgatttatgacgatgggtttatcgagatgaagcagctgtcctcttcaggagggttgaycagactgtactgtgcaatcactaagaatgtgggagttcttgcagaatcatcccactcctttgaagattcctgacttccaaccacagagttgatcatcatgtgacctggttcacagaaagaaaaaaattaaagggatttgggggtgggggtgggaaggagagacagcagcactgtccatttgttttctctgaggagcttaaatacccttcccatcatcccctagttttaaggaacaataaagaataactttctgggtcccttgggtgttttcattaagtagccacagaaagtgctagctagaaaagtctatagcgacttatatacaga

SEQ ID NO: 864060 - DNA, 655 bp, Homo sapiens
tttttagctgtctgactttcaatgagataaagatacaaactgtttctgtcactcagaaagtctttccatccttttccccagtcaatcttcacagcagaagtattcattatgctgacttctgtcataccatgctctacatgttcttgaatttcataaattgactcctacaccatgtacttttcaactccacagaatgtttttgaactttactcatgtggttttatggcccgttgttcattccttgtcattgctgtgtaatattccatcgtgtgatttatgacgatgggtttatcgagatgaagcagctgtcctcttcaggagggttgatcagactgtactgtgcaatcactaagaatgtgggagttcttgcagaatcatcccactcctttgaagattcctgacttccaaccrcagagttgatcatcatgtgacctggttcacagaaagaaaaaaattaaagggatttgggggtgggggtgggaaggagagacagcagcactgtccatttgttttctctgaggagcttaaatacccttcccatcatcccctagttttaaggaacaataaagaataactttctgggtcccttgggtgttttcattaagtagccacagaaagtgctagctagaaaagtctatagcgacttatatacaga

SEQ ID NO: 864061 - DNA, 620 bp, Homo sapiens
tttttttgagatggagtttcactcttatcacccaggctggagtgcaatggcgccatctcagctcactggaacctctgcctcctgggttcaagcaattctcctgcctcagccaccccagtagcgggaattacaggcatgagccaccacacctggctaatttttgtatttttagtggagatggtgtttcaccatgttggccaggctggtcatgtactcctgacctcaggtgacccacctgccttggcctcccaaagtgctgggattacagrcatgagccaccgtgccctgccccaacacacatttctaaccctctccttgacaattgccatcatagagcctggaaaactaagtactggattggctttcccagttttctctataccaaggtgtggccatgtgagacataaatgaaaatttttttgcagaggcctctaggaaaactctttgataaaagaaacaaatgatgttggtggccctcctttttcctttcttgaatttgggtatgatttctggagttgtaacagctcttgcaaccatgaggaaaatgctctaaaccaatgtgagcaactacctacccccactcttctttaaagcaataaaaaataaaatttatgtttaat

SEQ ID NO: 864062 - DNA, 620 bp, Homo sapiens
tttttttgagatggagtttcactcttatcacccaggctggagtgcaatggcgccatctcagctcactggaacctctgcctcctgggttcaagcaattctcctgcctcagccaccccagtagcgggaattacaggcatgagccaccacacctggctaatttttgtatttttagtggagatggtgtttcaccatgttggccaggctggtcatgtactcctgacctcaggtgacccacctgccttggcctcccaaagtgctgggattacagacatgagccaccgtgccctgccccaacacacatttctaaccctctccttgacaattgccatcatagagcctggaaaastaagtactggattggctttcccagttttctctataccaaggtgtggccatgtgagacataaatgaaaatttttttgcagaggcctctaggaaaactctttgataaaagaaacaaatgatgttggtggccctcctttttcctttcttgaatttgggtatgatttctggagttgtaacagctcttgcaaccatgaggaaaatgctctaaaccaatgtgagcaactacctacccccactcttctttaaagcaataaaaaataaaatttatgtttaat

SEQ ID NO: 864063 - DNA, 624 bp, Homo sapiens
aatagtgggggctttatgttttcccataatattttgggttcttacttctgaaattaacccatgataaacttgattacctaacacacagatgtggttggagcttgtgctgagccaagtgtgtatttaggttccgcattagtttaaacccctggccagggtttggagacaggtatggaaattagtcatgttggcttctgctttgatgttttttgtactcttttgggatacattttcaaaggaggtaaatgttagaattttgagcagttaaggctctacctttaatgagaggaatgaacatctttgcttcaatatcaaaggaaaagctgagaygaatatgtggtaatcctctgttgataaacctggatcagtaaagttgcattatgaattcattgtctttcctatttataaccctcttatataggaagtggaggggagaaaagatttcttttctcacccatcactaggttcatggctgagacacctatgtttctggatcaaaccgatagttgggctgcctattctcgtggcccagtaatgtgattcagatgaactgggaaagaagggagattatttctgtaactggttatagggagaaggcctggaagatatcgccagaccaattca

SEQ ID NO: 864064 - DNA, 625 bp, Homo sapiens
gtaaatttcttaatcatctgtgaggcttgccttttaactcttttaatggtgtaatttgataaaaccaagtcttaatgtttttttttgtttttgttttgttttgttttgttttgttttgttttgagacagaatctcgctcagtcaccaggttggagtgcaatggcgcgatctcakctcactgcaacctctgcctcccgggttcaagcaattctcctgccttagcctcctgagtagctgggattacaggcatgcaccaccttgcccagctaatttttgtatttttgtagagatggggtttcaccatgttggccagctggtcttgaactcctgacctcaggtgatccgcctgcctcagcctccctaaatgctgggattacaggcgtgagccattgagcctggctgtcttaatgttaatgtggtcaaatttacctattttcctattataggtagtgctttttggattcgtttaaaaagtctgtccccttacccttgagatcaatatactgttttattatctttaaaaacaataaaagcattatttcttttttttccttctcactttaaagtctgcagatagatagcttcattcttctgcctttaaaatttatgtttcagctgggcatca

SEQ ID NO: 864065 - DNA, 633 bp, Homo sapiens
atgtatctgtttcttctagatttctactttatttgcatagaggtgtttatagtattttctgatggtagtttgtatttctgtgggatcagtggtgatactccctttatcattttttattgtgtctatttgattcttctctcttttcttctttattastctggctagcagtctattttgctaaccttttcaaagaaccagctcttggattcattgtgtttttgaaaggtttttcatgtctctatttccttcagttctgttctggtcttaattatttcttgtcttcttctagcttttgaatttgtttgttcttgtttctctagttcttttaattgtgatgttagggtgtcggttttagatccttactgtttctgatgtgggcatttagtgctataaatttccctctaaacactgctttcactgtgtcccagagatctggtacattgtgtctttgttctcattggtttcaaagaacttatttatttctgccttcatttcattatttacccagaattcattcaggaggaggttgttcagttcccacgtagttgtgtggttttgaatgagtttcttaatcctgagttctaatttgattggactgtggtctgagagactgtttcttatgatttatgttct

SEQ ID NO: 864066 - DNA, 613 bp, Homo sapiens
gattttaaaatgttgaaacaggcttgcattcctgggataaaccccagttgatcatgatatatgatccctttttaaatattgcttaattccaattgttgataatctgttaagggtttttgtgcctataaaatattggtctaagaggatagatctcctcttccagctctaacagctgaaggacttttctgatgctgatttcccagatttccaagtaattccaattcctccacgccctgactctaaacactgtcatttcatgttgagctcccttatagtgaccactgttaagatcatcatctcccccaatgcaaagatctgccttctgaaccagaacttttccacagtgcctgaagctgcacatgccaccagttcctgttcattcccagtggtgaactgattttcagttatttcccagatggtcatagtgttctgtatcctaatgtagttagcactctctcaacrtggaattcagtaattctttgatagcctaggaattcttcaagtggcaataaaggtaactcaagcacccattaggtctggcatctctgtactcactgagcgaagcactttgctcttcctaaggccttctgctttgctgcgctctacatttcct

SEQ ID NO: 864067 - DNA, 618 bp, Homo sapiens
tggagctcttggccaggtggtggctcatgcctgtaatcccagcaccctgggaggccaaggcaggtggatcacttgaggtcagcagtctgaaaccagcctggctgacgtggcaaaaccctgtctctactaataagcaaaaattagctgggcgcagtggtgggtgcctgtaatcccagttactcaggggactgagacaggagaatcgcttgaatcctggaggccaaggctgcagtgagccaaggttgcactacagcctgggcaacaaagcgagactacatctcaaaaacaaaaacagaaacmaaaaaaaaagaaagaaaaaaaagatttgggctccttttaacagttcttgtagttctgccttggtagtggtgaattctctcagcatttgtttgtctgaaaaagactatctttccttcatttgtgaagattagttttgctggatacaaaactcttgacttaaaattgttttgtttaagagggctgaagataggaccccaatcccttataacttgtaaggtttctgctgggaaatctgctgttaatctgtaggttttcctttacaggttacctgatgcttttgtctcacagctcttaagattctttcctgcatcaaaaagg

SEQ ID NO: 864068 - DNA, 647 bp, Homo sapiens
ccaaagtactgggattacagtcttgagccaccgtgcgactctacttataatagaattacagatactgtgaatttctaacaagaacaacctgtagttgttttgttcacagaccgaagtctctttacctaagtactaagcatgggcctaatgttcataataggcccaaatgcatgaatcctgtgctctgtcttatcatgaatatgtgaaaaatctaaatctcattcttcgaggagcaatatttctttgatacactatattgggtggttgaagaactggctacaatcctaggctggagttcctcctgcctttgtcaagagaattccagaaygaccttattgcatccttagtctaacccaaaatctatgattggaacatttccaaatttccttattgtattaggaaattctctcaagattacatctggaaatcaaaatctattgtgaaacattttgaagttataaggtttgtgtaattagactgcatgcaattagcagtcttggacaaataaacttatttttaaagaattaaaaaatatttgtatgaaaaagtatttcttcacatttatggttaatgtatgttgctatgaattaatgtaggaacgcaacttactttactaagatccaagtgcaacacagttctcacaccat

SEQ ID NO: 864069 - DNA, 681 bp, Homo sapiens
tctacatatagcctctctctccacctccccagtccttcacacattccttttctctctctctttttctcccctcaaaccccccttcttctctccccacacctcccctggtgcttaactggaaacaaaagtgagtttgttgtgtgaagaagaggacctgtggaagtagcagccagggaggcagcagcggaagcaggctggggccagaggcagcatcgacagccagggaccccagcgctcagctgttccagggagcaggtaatgccccaggcagaactggtttgcatcctgctctctgcctgtctcctctctccaggacctgtccatttatttgccttcttgtctggccttgaaggggaaaggggattccagacttakggaatggcaggcacaggggcccaaggagtagcatgccctcctcttcagggatgtggtctgctgtggctggggtcggggtggctgggtgagggacatgctagaacctagaaaggcaggttagggctatattatgaggggtggtttgagccatgtcactgacccctaggctttaggcaatagagagacattgaaagtttttcaactggtgaataacataatcaaatctacattttattttattttatattttattttctttttcatgccatcctccaaggtacatcaaatctacattttaaaagagta

SEQ ID NO: 864070 - DNA, 640 bp, Homo sapiens
atcaactaataactttactccactagttgtagaaactatgcttttctccctttaattggccaatgtctacaaagaaattagctgattttattatacattttttttcacttgaggtaattttgtaacaacccttaatttaatcctatctatgtatgctatataagtgtgtgtatcatggttacacaacaggctgcaaaagaactgcttcagaaacatattgaacaaactaagcaatgaaaacttgctaatgcactgtgagtcacatactgtgcaagagcagtaaattgcttccttggtggttttgacaacattgcctcygtacataattgaatgtcattcatttatatgtttgcaaataaggtcccagtgacattacacctggaagtgtgcacacttggtcatctgtttatgacagaggagccagacatatggcctgtggactcggtttggcccagagctgttgcaaagtcctcctaccagttttcagccagtcagccccgtcactgtgaatcagctctgtcaaaggcagtgcttcccatcaattaaggaggggaaatgcagcttacccaactgccagtttgccagggcctcagtcctgagatggcaaaaatacttgaaactgcaagagaatgtcacatgc

SEQ ID NO: 864071 - DNA, 640 bp, Homo sapiens
atcaactaataactttactccactagttgtagaaactatgcttttctccctttaattggccaatgtctacaaagaaattagctgattttattatacattttttttcacttgaggtaattttgtaacaacccttaatttaatcctatctatgtatgctatataagtgtgtgtatcatggttacacaacaggctgcaaaagaactgcttcagaaacatattgaacaaactaagcaatgaaaacttgctaatgcactgtgagtcacatactgtgcaagagcagtaaattgcttccttggtggttttgacaacattgcctctgtacataattgaatgtcattcatttatatgtttgcaaataaggtcccagtgacattacacctggragtgtgcacacttggtcatctgtttatgacagaggagccagacatatggcctgtggactcggtttggcccagagctgttgcaaagtcctcctaccagttttcagccagtcagccccgtcactgtgaatcagctctgtcaaaggcagtgcttcccatcaattaaggaggggaaatgcagcttacccaactgccagtttgccagggcctcagtcctgagatggcaaaaatacttgaaactgcaagagaatgtcacatgc

SEQ ID NO: 864072 - DNA, 640 bp, Homo sapiens
atcaactaataactttactccactagttgtagaaactatgcttttctccctttaattggccaatgtctacaaagaaattagctgattttattatacattttttttcacttgaggtaattttgtaacaacccttaatttaatcctatctatgtatgctatataagtgtgtgtatcatggttacacaacaggctgcaaaagaactgcttcagaaacatattgaacaaactaagcaatgaaaacttgctaatgcactgtgagtcacatactgtgcaagagcagtaaattgcttccttggtggttttgacaacattgcctctgtacataattgaatgtcattcatttatatgtttgcaaataaggtcccagtgacattacacctggaagtgtgcacacttggtcatctgtttatgacrgaggagccagacatatggcctgtggactcggtttggcccagagctgttgcaaagtcctcctaccagttttcagccagtcagccccgtcactgtgaatcagctctgtcaaaggcagtgcttcccatcaattaaggaggggaaatgcagcttacccaactgccagtttgccagggcctcagtcctgagatggcaaaaatacttgaaactgcaagagaatgtcacatgc

SEQ ID NO: 864073 - DNA, 611 bp, Homo sapiens
gattgtgccattgcacgccagcctgggcaacaagagtgaaaccccatctcaaaaaaaaaaaaaaaaatcatcagaccctataggtgtaagtttgtgaatagttaaaagaacagccttagttcctgtttcatttttttatttggaattcttgccactctgtcactgaacatcttgagtttgttttgcatatcatcaactgtatgagatgaagkttttttttatcctttattaactatgcaatcaaagtatcaggccctgcatgattccccaaaatttgtggttttcagatcagcagtgccctagttcaagaagaaaattgctttcagccagtattattcaaagagtcttgtttccattttatcttttatttaacactgctgtgtcatctaggggcccgttcacaaggactccaattatttgataggcagcagccagtgacatttttctctcgttttctcatctgataggcataagttaaaatttatttttattaaaaaattaggcacctacttagaggttggggaagtttacatgagggccacaaagatttcactgtgaagcaaatttttaaaaaaagaaaagatctctctgaaatgaagactgctgcacaa

SEQ ID NO: 864074 - DNA, 645 bp, Homo sapiens
atgtgtgctcgattttaagctctgtctttataacttaaggtaacaccaggaatatttttctgctctgtggttactttcttatcacgttctgacacttagcaagattccctggttcactaccacactaaccatcagatcacataggggtctgcagattttatttattttacatggccagtcccacgaattaaaggaacagaaaaacaagaaattatgatttaattgatctgttaggttttgaacttctatgagkttcctgttgctcatttagtatctaattaatgaaagtaatttaattatctgccttccttttcttaacatcatctcctcactctcctactagtcttcctgtgtctcccaaacaaactagctgtcctcaaagcctgaggctcacttcctgggggaactcaaactaagaccggttggctgtgtccctttcaatacagataccctcccggttgttataacagttccatgtccctccagacttaagagtagcaaggacttttgtgttgcaatagcccatttgtgtagttacaacagagactatgttgtccaccaacgtagaatatatttactattgggtcctttgcaaaaatagtttgccaactcctgttttagagcaattaaggtttaaaggactat

SEQ ID NO: 864075 - DNA, 648 bp, Homo sapiens
cgtcatgatcaggcatgcttcctgcttaaagcattaacccaagatggcttcccagaaagatccagaagtgccgcagagaaggcaaggctgagggtgggagcccagctaggagtccatagagtttgctcccatgggaaggatgtggttgggcagagacccaacagaggttgttgtgtgggacagtgtggcactgatgctgtgggtcctaagcagtgcagtagtaaatggcctcatcttcctttcctatgaagtttatggtaaagactgaagtagacatttgaaaatttgttcttgcctcaagtttcttgtttttctcacctaagcaaactcgaactggggcttgttattgaagtgatakttgtcagatggctcataatttagattcagtttctgctggtaccagtgtataactatatttacaaagtcttcagtggacaccacacaagatacctagacacttttatctgttgctctgttgacaaaaatgtagttgacattttttattgctttaaatttaacttaccaagttcaactgcaaacaaaaaagagaaatccccatgaacctgggacatagaaagaggaaatgataatgaaacactttcatctggccaggtgtggtggctcatgactgtaatcacagtactttgg

SEQ ID NO: 864076 - DNA, 558 bp, Homo sapiens
aaagcagctgctttgaggggctgggggagataagagtgaggcggatttggtgggctgcgaaggagcctgtgagcagctttctagaacacctttctgtgtcaggctcaggacagcccctcgatctcttgccactagtgcagcagtttttaaaagtcagtttgaataagaatcagctctggaggttattttaaaatgcacattttcacccttcattccaagattctgtcttattgtgttggatgcttcccagaacctgtacttttttttttttttttaattaaaagcctcacgtgcttcttatccaggtggtccgtggagtacactttgagaaacactcttctaggagccaggactataaggctgattcaaggtttagggttctggaagaaagaggatccaatagayaagagaccagataaacatgaacccagcactgctcccctgcagtattctggactctggatttcttgtagactcaagcttctctatcattattcagaaacctcttcctcatgaccacatttgtttaatctcattcctgcataccggggcctttga

SEQ ID NO: 864077 - DNA, 609 bp, Homo sapiens
caaagaataagagtgtaaggatagccagagttatcttacttgcatgaatttatcagtcacattttattaatgccaagtgtcttaacattttttatacaggtatacatttataaggttttgaaaatacctcagatttctaaatttctaaagaatagagatgaatttatrttaatttacttagccagaatgtctacatgccagtcacatgtcattgttttaatgacaggtactaatctatgttaagaggacagcagtcctgtgagatgcaggtgctgttatcacctccattttacatttgaagcagcagagacatagaatgggtcacttatccaaggttgcacagctagacgaggcagcgctggggctcaggcccacactttctggtaccaggtccactgcagcccctcactgggacatttctcaaggattttggagcctctgagatgaaagctgctgtacatccaaagcagtcatgcttaatgggctccaaagtggaacacattgttaaatccctttaagtcatcaaagaaaatcattttaacctcataaatagaaggcaattgaagtaaattgtagtagcagcaaatctgcctgacagtttaaccacag

SEQ ID NO: 864078 - DNA, 632 bp, Homo sapiens
ccaggtgagaagtggccaatgcctcagttctcatgcttagctactcattaaaataaactaagaagcttttaaaaaatactagcatccagtatctctaaaatcagaatctccagagttgggggttgagcagtgatatttgaaaaaaaaaaaaaaccaaacaaaaaaacaaacaaacaaaaaaaacaagcaaactaacaaaaaaaacccttgccaacttattctaatttgtagccatggttgaacaccacacgcttacttgttttagtccatttagtctgctataacaaaaatccttagcctggatactttataaacaacrggaatttatttcccatagttctgaagcctgaaaaatgcaagatgaacatgtcagctgattcaaagtctgatgacagcctgcttctcagagatggtgccctttcactctgtccttgcatgatggaaggggaaaaaaagtttccttcaagcctcttttaaaagagcactaatcccattcgtgggaggcctcataacctaatctcatcctaaaggccccacctcttaatatcatcacattgtggattagatttcaacatatgaattctggagggacacaaacatctaggctgtagcagtagtgtaggttgaaaatc

SEQ ID NO: 864079 - DNA, 643 bp, Homo sapiens
tgaactaatggcatttgccttaggttttgaacttacataggactggttactcctttcttcttttctattatccgctttcagagtggtgatgtccatcgtatgcctgtaacattattgtattttggaaacatataacatgtttgtttcacaggttcccagctagagaacaatttgcctcaggagaccttgactacagtgatgaagacaggatctaaacaaatgagtcttagatacataatgaagaaagcatatatagaattctctcgttgaaagagaatagaaaggattaagaatgactcaggactttgtaaagggaaaatagtactcaaaaaagtaaaattagagaagtatatgttttaatgaggtwagaaagaggtagaaagtggaaaaagagattgagtaaatgatttcttcatatgaaactaaagtctatagtaggttttataataccattgactcttgaaccacataagcttgaactgcatgggtttacttacatgcaaatttttaaaaaggaaatttactgaaaatttttttggagatttgcaacaacttgtaaaaattggcaaacattgtagcctagaaataccaaaaaaataaaaagttaggtatgtcatgaatgcacaaaatatatgtagatgct

SEQ ID NO: 864080 - DNA, 586 bp, Homo sapiens
tgtcctgttggttttgttctttcagaaaccatctgtatccacttcctttcaattttattttattcaatatgtataaattcccacacacaaatgttaacatgattataaaaatagtgtatttttataatggaaaattcctacagtgtcaaaatgaaaaaaagctgaaaaatcaccctttgtcctactacccagagaaaaccacatctagtatttggacatatatcttctatagagtttttctatatgtatttgaaaaaattgaatcatatcttgtatattcttttggaaccagctatttccactaaacaatttgtaattaacacctttcaatgaaaaataaattcagaaacctatcattcttaatgactgggaagtgtttcattrtatggatgagacattatttacttaaccagccccatattgatagcttgttttcagtttttcattataataaaatgctgccagaaactttcattgcacaatcatcctgttagttaagaataattattagaataagaagtccttatttcaataaaatttaatttttatagatgtagactatttgttcatatccatcccttcattt

SEQ ID NO: 864081 - DNA, 608 bp, Homo sapiens
ttccaagccattaatatgtaattgaaaatgttattttaattatactataatatcttacaaatgtgcccaaatagagaaactccaacatttctgtattactagataatttgcttgcagtttttatgctacggtaatcattgcatatttttaccacatttaattattcattcattcagcaagattattaggcactttatgtgacagtcactgtgactatggtggtaaaccaacaaacatagcccctacttgcttcgagaatatggtcagctgagctacatttgaatagcttccaggaaaccaggtcagaaagatgttgcaaaacgattgttacacatcttggatataaatgatgagaaaaagagtcaaagataacttaaaagyttcaaatttggggaattaagtgatcaacgatgtcattgaaaataatgggaacattgaaaaggagtaccactggagggagaggaagaagagaactcaaggtactggactttatgtgatagcggcggtgacctcagatggacatgtccagtatataactcatacacaacaaaatcagggagatgcatgggaatcaaggagccattcacccaaaagagacaatcttggtt

SEQ ID NO: 864082 - DNA, 586 bp, Homo sapiens
gatgctctgttcaacagtaaaattagtttataagaaaacagtgtacagaccattatattaatagcttgttttttaggacattttggtagtgttttttttttcttaattagattgttaccaaagttcatttgaccagtctttaaatctcaagagtaaacatatataagtggaaatatgcatraatgaaggagtattcttgtaattgtcagtaaaaaaaaatgcatagattgccaaaatgtatgatttgaaataatggtagattgtggattccttagcagattgataaatcaagtgctttgtcacatgtatccttcattacagtaaaaatatcagttccctacattttgtcagccttggctatagatagcaaagggagtcacttcttaaattttgaaagatgcctgtgtatttgaccttctatgtgaatgacatgtctgtggtctgccttggatatgggtgatatgggcatctgtactgtgcagtgttatagcacaggctaagcttttttttttttttttttttttttggtcaagctcaaggtgtagacttcagtgtctgagggcattcttatttttgaacactgaat

SEQ ID NO: 864083 - DNA, 625 bp, Homo sapiens
tattcttatttagcctgcaggctgtgctaggcagacttgtttccatccagcacatgctctcactccagttgcagtctccaagctccaaccttcatcatgtgcccctggaaaggcggtcagtgcccaggaggccttggggcgtgagagcagtggcacaagagggtttcagcatgtgtttctctggcctcctatcagctggaacctgctgccrgtcaggcgggacttaggccaggaccagtccctgcccagatatgcccctgggactatggcagagccctgagccaggtgccagcaatgtacagtttgccatgtacagggccagttggcagatcaaaggaggccagcctgagtgaataagtcctggtcccatttaccagtcctctgggatagaaggagagtgatagccaaggctcacagcaacaactggggatgaaaatctaggaacctgtgtcttttctggaagtccttcccttgagcagagatggcagcaaaaaggcaggctccttttgcagtgaactttagttttaaaagcatggtatcaaggaattggaagtccagtatttcttctaactttgtcaccagttagtttttttattttggacaagtcacttaaatggacagttgt

SEQ ID NO: 864084 - DNA, 442 bp, Homo sapiens
aggatacaatcaacaggatatgaaaagaaaagtaagagggtgccaaaaatgactccaagatttctgcctggtggaaacattaaagagtggcagggcatggtggctcacgcctgtaatcccaggagttcaaaaccagcctggccaacatggcgaaaccctgaatctaccaaaaatacaaaagttagcttggccgcagtggtgcacacctgtaatctcagctactttggaggctaaggcaagagaatcgcttgagcctgggaggaggaggttgcagtgagcctagatcgcaccactgcmttctggtctgggtgacagagtgagaccctatctcaaaaaaaaaaaattaaaaaattaaaaaccattaaagagtgtatatcaagatgtcagttggataagcagagaggggctcagataggaaacctgggctggaattataaatcta

SEQ ID NO: 864085 - DNA, 542 bp, Homo sapiens
ctaaaaaataaataaaaataaataaataaataaataaataatatattatatattatattatatataatgaataaataaataattatattatatataatatataatatattatcattaaataatataatatataatatattatcattaaataatataatatataatatattatcattaaataatataatatataatataaaaagtaaataaataataaggcaacaagaaataaaaactaaaacaactttytgagacataaacagtataacaagatataaatagaaacaacaaaaggttaaaaagcagggagatgaagttaaggtgtagaatttccattaattttgttttttcttagtttgtttatttgattatgcaatcaatgttaagtcattatcagcttaagataatgggttataggatagtatttgcaagcctcatggtatcctcaagtcaaaaaccatacaatggatacacaaaatgtaaaaagcaagaaatgaaataccaccagagaaaatcaccttcactaaaaaaaagacaggaag

SEQ ID NO: 864086 - DNA, 668 bp, Homo sapiens
atttaatttcccctgttactagacttcatagaaattgaataatgtggtatatattctttgtgtctgacttcttttacttatcattatacctaactcttctaagatattaaatggaagctactttggactttgtcctctgcttttctatgtgggtagatcttaacagttctcccctttcttgttgactctttcattaytgaaggccttgtggacccccttccttcattaaggatatattgaatatagtaccaggtgtctttggcttcatgtgggaagtctccatttcttaaaatgtcagactaggaaattttcatttcactgaagcatcctgtgagaataaacacctttaatcacttcctcacaaccttttaatgtggatgtttcacaataaaacatcttgcttccagtaggagtgtttgttttgaaggtaaatggaaatgataaataatagtaacttgttttaggttgtgtaggtggtaaatggagaaaccagtctgtcttcattccaaactcatattctttgttattaagtacagttcaggttggccacttttgctacttaacacttgtaactggggtaaaaatgaaaagtagaaataatggtggcagtacagctagacagttaagtctggagttctgttttctttaatactgtggataattgagag

SEQ ID NO: 864087 - DNA, 613 bp, Homo sapiens
tgtatggtgatcaagcaagcttttttgagacagaaaacgtcccaagaattaagcacaagaagaagggcacaatgtccatggtgaataatgacagtgatcaacatggatctcagtttcttatcactacaggagaaaatctagattaccttgatggtaccatacagtatttggtgaggtgacagaaggcattgacataattaagaaaataaatgagacctttgttgacaaggactttgtaccatatcaggatatcaggataaattatatagtgattttagatggtccattttgatgacattcctgatttattaatccctgatcaatcaccagaacctacaagggaacaattaaagagtggtagagttgacacaaatgaagaaattgatcatttcaaacgaaggtcagcygaagaagtagaagaaataaaggcagaaaaagaagctaaaactcaggctttacttttagagatggtgggagacctacctgatgcagatattaaacctccggaaaaatctgtgtatgcaaattgaatccagtgaccacagatgaggatctggatataatactctctagatttgggccaataagaagttgtgaagttatctgggactgg

SEQ ID NO: 864088 - DNA, 611 bp, Homo sapiens
ttggattctatcacagaatgcacattagtagtaaattatttaggatagatatatggagaatcctctatagttatctgtgtagatttggtgttcagtgtgattaatttttaacagagattcttgtgatacccctatgggaaggagaagtatcatagtttgttatggcagattgattgaackgtgtataatgtctgtagattttgggttctttttacctctgtcccttgtttgcatctcttgttcagtattcctctaggactcaaattcttcgtctgtgaatgaggaagttgaattaaaatataaagttatttatacatgttatttttgtatagctctgaataaattcattaagtgagtattgaatgttggttcctatttagtctgtagggtttaaacttatgttgtgatgggagagagaaacaggcttagggtgccatgaaagcagagacaggcaagtatatcttagaaggaaggcgagaggaaagggcattagggaaactttcacagaggcagtgtgacatctgaactggtcttgaagataaatgagtttgtcaagtaaacaagaaagagagttctagctcaggaagtagaatgtacagaggcagaaagaa

SEQ ID NO: 864089 - DNA, 703 bp, Homo sapiens
cccaagagaaagttcaaaaacaatacaaagaaatcagaaaaacaatttaagatataaatgaacagtttattaggagatacttttttaaatccaccagaacttttagaaatgaaaaattcattgaatgaattacaaaatagagttgaaagttttaacaagtagactaaaccaatgagaagaaagaatgtcagagcatgaagacaggtcctgcaagttaatccagctagaaaaagaaaacagaattttgaaaaataaagcctttgagaagtatgagattatgtaaaacctccaaaccttgtcatagggagaaggtttcttcctgagggagaagaaaaagaaaaaagtttggaaaacctatgtgaggagataattgaggaataattctctcatcttactagagatttagatgttgaaatagaagaggctcaaggaaatccaaaagatatattgcaagatgactygaccaaaatagtcttcagacaaagtcagtgtgaaggaaaggaatcctaaaatcagcaagagaaaagcatctaatctcctgtaaaggaaaccccaacagacttacagcagaatgctcagcagaaactctataagccagaagaggttgggtgcctaatttcagacttcttaaaagaaaaagaaaactgtcagccacgaattttgtatgctggtaaactcagctcggtaagtgaaggggaaatag

SEQ ID NO: 864090 - DNA, 703 bp, Homo sapiens
cccaagagaaagttcaaaaacaatacaaagaaatcagaaaaacaatttaagatataaatgaacagtttattaggagatacttttttaaatccaccagaacttttagaaatgaaaaattcattgaatgaattacaaaatagagttgaaagttttaacaagtagactaaaccaatgagaagaaagaatgtcagagcatgaagacaggtcctgcaagttaatccagctagaaaaagaaaacagaattttgaaaaataaagcctttgagaagtatgagattatgtaaaacctccaaaccttgtcatagggagaaggtttcttcctgagggagaagaaaaagaaaaaagtttggaaaacctatgtgaggagataattgaggaataattctctcatcttactagagatttagatgttgaaatagaagaggctcaaggaaatccaaaagatatattgcaagatgactcgaccaaaayagtcttcagacaaagtcagtgtgaaggaaaggaatcctaaaatcagcaagagaaaagcatctaatctcctgtaaaggaaaccccaacagacttacagcagaatgctcagcagaaactctataagccagaagaggttgggtgcctaatttcagacttcttaaaagaaaaagaaaactgtcagccacgaattttgtatgctggtaaactcagctcggtaagtgaaggggaaatag

SEQ ID NO: 864091 - DNA, 559 bp, Homo sapiens
aaatgtaagacctgaacctataaacattttggaggaaacctaggacaaacctagaaaacctaggacaaacttgaacattggcctaagcaaaaaatttatgagtaagatctcaaaagcaaatgcaacaaaaataggcacatgggagttaattaaactaaaaagcctctatgtagcaaartaaataacagagaaaatagactacctacagaatgcaagaaaatatttgcaaactatatatctgacaaaggactaatgcacagaatctacaaggaagtcaaacaatgcaacaagaaaaaaaatacgtaaccctgttaaaaagtggataaaggacatgaacaaacatttttcaaaagaaaacatgcatatagccaacaaggagatgaaaaatgctcagtatcactaattatcagagaaatgcaaaataaaatcaaaatgagatagcaccttataccagtcagaatgactattaaaaagtcaaaaaaaaatagttgttggtgaggaaaagggaatgcttatacaccattagtgagaatgtaaattactacaacctctatgcaaa

SEQ ID NO: 864092 - DNA, 682 bp, Homo sapiens
ccaattatactattaagagtatttaagatgcaccgaagccagttgtttagaaggacatagtattcctaagtcttattgacattcctttccaaattttgaataaagagatttctgtgacgtagtatacagcatcctaaatgataattttacaataatgaatttcacaggctatactaactttattaaaatgtgttttaatgattaattttcatgctgatttccttccctagattgtgtacttctatatacaggatacatgtgttatttatctttctgtattgagcatctaatacagtgaatggaaaatagcttttcttgttaaatgactaaatgatgagtgtgtgttttaaaacatttattttcaaacatatgtcaataactttaagaaaccaagaaacagctttgaaatgtactaggatatcaacttttcttgtttcctatctgttctatatccgttttgctaggtcattgttcgtcatatgcataactttatccttagaaaatacattacraaaactttctgggatgcagttatgcatacaacccagttcctccaactttccacctgcatgtaattattttcttagaaaagttaatgtgcagccacctgctttatggtcactatgttgaaaatattccatttaccatcaaaatgagtttctagagttcacagagaatgaga

SEQ ID NO: 864093 - DNA, 660 bp, Homo sapiens
cttctataaacgtccattcattatttcctactgtacctggggaaatgtcagtttgctttgtgaatgtgaatgggaagattgagtcattcacacgttaatttctcctgctcttcctggacatgagggtgtctatgttggggatatagtatccagctgggaggtggaatcatggccaactgagaagaatatccacatattggcactgaaactcttacagctgagtctgtcctctactccacactaggttgagcttctcaaaatgcaaattttcayataaatgagatctcttccctccctcggtcgtaatgctagttatttagttaagacattaacctgtaatgtgtattttatatataaaggaagattcatcactaagccattactcttcactaattccatggaaaacttcgaactaactcctagcagacatggccgtgtgcaccatcaatcatgtcatgaagcacccaggacctacaaggtacatagattcaacttcaaaaaattcagagccactaggcatgcattaaaaaatgttgttttctatcgatcccttttcactcccataaagtatctctctaaaatgttattgctgagtgcaggaggagatcattgttatcaaaggtatttctaaccttttgcttctagattgagtgaaagtag

SEQ ID NO: 864094 - DNA, 670 bp, Homo sapiens
aattgggctaagttctttctgctgctacatagagtgagaacttggtctgtttacacagacagcagataaaatttaaaaagatgttgagtagggcccattgttttctaaaatagctgtgtgttgcctctactaatccaaatgagggccaacatttctatgttaaggtccaaacaataaggattccctttctttcacatcttgctctcggtggccatgttgtccagggctactccaaagtggtgggtaatggagctggtggctcagaatgcctgggtcagcagcctgtctcatgaggctctgcatgcagcatgacctcacattgttgggcattctgctgtagaacggtaygacagggaggccagggaggagatgttcttgaggaatccctcattcttctccagggatgggtcccaaagccttgttcagaccattatgggttataaatgcgaaatttatagcaggcattttgggtaagagtttggagtctgggctctgcagtcaaactgcctgggtccaaatttcagcccctcatctcaataatgtgtggttctggataagttacttaacttctttagccagggtttcctcatctgtaaacttaagacaatttagctcattatcactatagagagaattataaatgtgatagaaactgttaagcactgagccc

SEQ ID NO: 864095 - DNA, 667 bp, Homo sapiens
cattcaatgtgaatgtgtgttaccgcacaatatcattttcaaggtggcaacagtagtcggcagcacagctagaagctgtgtaattcatcatttttctatttttgaatatttgggactttctagtttttacctgtcatgtgtcatctgtattggacctactaaaatgtaaatcttttatcatwtttctataatatagtatggaaaaattcctagatgtgaaattttggatcaaagggcatgcatccttttattgtttttgacatatattaccagatttctaccttcccaactcataaaaaagtactaatttataatctcactgagagtgtatgagtgattttgtttctctgtaccatcaaattaaatacagatccacaattcctcatccaaaacttttaggaacatatatgttttagaatttagaatttttgcaattttagaaagttaacacagtgcaagtgctttctctttcataacactctaagtagagttggggaaagcagtttataattgaacatatgagtatttctgcagccaaagatatgattcatactaagaaggataatttaaacttacaacaccaaattttagagtaccttaagaaatctttctttcagaaggataataagagtaaacctttactgagtattgtttgtggtttgagtac

SEQ ID NO: 864096 - DNA, 689 bp, Homo sapiens
gttggctttgttgaatatcagctagctgtaaatatgtggctttatttctggattctccattctgttatattggtctatgtatccatttttataccaataccatgttgttttggttaccatacccttgtaatatattttgaagtcaggtaaagtgatgaccccagctttgttatttttgctcagaattgctttggctatttgtgctctttttttttggttccatatgaaatttaggattttttctaattctatgaagaatgacattagtattttgatagggattgccctgaatctgtagattggtttggacaatgtagtcattttaccaatggcattacctaacatagctttcataatgtaacatattttgtgagactttttcaagaaatatttattgataacctactatgagctaagcactgtgctgggcccgaggttagagtgacaagtcacaagatccatggatcagatagtttcaggcagagccagccaataaacaaataatctcactaattattaattcattacaatttataatatmtgctactaggagaagtacatgtatattttactctacctaaaccctcaggtaatttataaacagcttggaatcataggctattacatgtcataggcataattcatcacaattgatttaaataatcctaatgcaataaatcagcaacaca

SEQ ID NO: 864097 - DNA, 706 bp, Homo sapiens
cagaccctgataactctataaaatggatataaaatggtagaaagggatggaaatggttattttgatagctggcaacagagttttcatgagaatgtttatattcaggaaactaccttaataatgctctttggtggtaaaaagtaaggccttagaagccttactttttaaaaagaaaccagaaagaaaagaggaatggtaaactgctctgcatgagaaatgaagataaatttggggataggaaaaagaagaagcagagaaggattgagtctataaaaatacactggcgtcaaggtggccagrccaaagtagttgtgaaagtaaaaatgtataatatcacatttgaaattcctacacacacacacacacacacacacacacacaccccttgtcttacattgcccaaaccatcaataagttcctttgatgtattgcttgtaatgcctcatgtgacaggtttctaggcaaatcaaggaagcagggttgagttgcatatctgggttggcctggagaagaaaacagccatgaaaattgaagtataagtgagatcaagagtttggcaggcaggaacttagagctaaggtatgactttgtgaatgtaatcctccaggaactcacagaaacctgagttagggctcagaaactcgaagtctaacattttatgaacatttacagacttctaagattgagatataaaaatcaagaagat

SEQ ID NO: 864098 - DNA, 610 bp, Homo sapiens
tttttgttaccagacagacccctcctcggaaccttgtactttgttgcaggaaataagccaagaagcatattatttattgaagcaggggaacctgacatagaagggatagtctaacttttctgccttaaaatgcagaccattccagatatttccaggtaatttgcaactccctcccttctatgcttatcatccaatttcatacacattttccctgtcttctatttcttctgtaagaatattatatttattaaaaatataaaaacagtatatatttatcatgtacaaattgacactctgaactactgtgccattgtggagtggctaaatcgaggtggaatggctaaatcaggctaattaacatatgyatatacttctcattttttacggtaagaacaaagatctgtcagcaatttttaagaataaaacacatttatactttatctgtttccaagcaattataatatgttgtaagctatctactcattggtttctctccttcactgtatagtgaattggggatgggagtgaggggcaaggtccacagcctgcagtttatctttgatacccagtacctgagaaaaggagggatggagaaaggatgaaaatggtg

SEQ ID NO: 864099 - DNA, 609 bp, Homo sapiens
agacagggtttaaaggaaaagtcactgttatctgaagtcaggtgccaggtagctgtgtgactttgacaaaaccagttttcttctttgggtcttagttccctcacccgtaaaatgagaaaagttgtattagatagtcttttaaggttcttctctttctaggttttgcacttagacattttaggactctgatctgtgtaaagaccaatttatatgtccaaacaaatgacactggcyttatatgtaattcgggtcagctgaatttgacaaaagattcaatccattagtggaagaaaatggtgtctgaaattatccatattcatttatatttcacaagtatacagatttgcatttagaacatgatgagaaatggcaattaaattatcacaacattagaggaacattagaggtttgggtgaagtagaatggaagaacaggagagtaagttcagctctgcatatattaacattaagatcccattagtggaaatgcctaataaacagttggaagtgtgattctgaagctcaaaaatattttactctggaaacaaatttgggagtcattctacaaggggttactgaggcaatgggagtgaatgaggagatcttgggg

SEQ ID NO: 864100 - DNA, 602 bp, Homo sapiens
aagtgagcatggatttcggctgcctgaggcatgaactggccaatgtgtggtgacagcgaaggtctgaagcaacaacatcaagggagttgctgacaaggtataacatggtctgaaatgaagtgaatatgttggaacaatgaagattagctagtggaattccaaaggagggatgcaaatgattcctacagacaatggtatgatgagakgcaggtgccataggataggtgagttaggcagtgatatggcaagctagggctgagataaaaaatgcagaaggtatttatgatgaaagaggaaattggtttaggtttacatactaaataggtacaatttatgttacatacatgattggaaaataaatattgaaacttaatttaataaaatgtgttagcactatataaattattcatatgaaatgattgtattccagggcctattacagtcaagtaaaatgttttattctctgtaggtttcttaagttatagtaattatagttcatgatgttaagttctaaaacacttttttgcctcctaaataattttaaacttgtaagaatcaaatgaagtatagttgtaaaccattgaatgtctgtgtccctccaa

SEQ ID NO: 864101 - DNA, 617 bp, Homo sapiens
tgtttcagttctgatgatcactatgccaaaattttacctagcagtactgcccatatcctggccatatcatttaattaacaaaactgaaatacttagcttggccatgtaatttgagtaaccaaaatgagaaatgattgtaaacmgtattgagcaaagttcttgaaatgaattatttttgcatgatgactttgaggaataaaaaggattagaaaagagaaagaaaggaataaagttcgagttgcacaggtcagaggtaacggatcaaaaggtaaggagtacataaagtgttccaagttgacaaattggacataaataaatcactaggaccagatggcattcatccaagagttttgaacggactcaaggatgaaattgtggagctgttggccaaatgtggaaactgttgttgcaaacaatcaccttgtcagagtactgggagattgctgatgggattcccatctgtaagaaggactctagagaaaaccctaggaacaagatatagatcagcaagactggctttcctggcataaaaagatgaaaagaataaaaaaacagggtcagtgccactgaacacctttatgtaactcacttactggggtaaaagctgcatagtttgg

SEQ ID NO: 864102 - DNA, 642 bp, Homo sapiens
ttttgacctccccttctccatgtagactccgagctctcctgcagtttcttccttgctccttccctgtaacgcctacggaatgaagaggaacacctggctctaggatgtccctcacctggcagccatctgctttaccagtctcatttcctgctcatccctcagatgaatctccaattctattcccctaaaccacctcctgtgttcctgcttcctctcctttgctgaaacaaatgaagtatctcaccagtaagtcctagggcagaccccatctcctacacaggctttccttgatgatctgtggcagaagtgatccttattttttgaaactcctatatcactttgcttttttgttaaaacactgaaaacctcctgtcttgtgttaccattatctgtgtaggtcatatcttctcyagtaaacttaaagctatttgaggactgtgtagtacctactaccctgtgtttaagagagactatctggaggaaagtacagactcctttctttatcatgtgtgacctcgggcacttgctctctttaccctagtttcttcctctgtaaaatagggagaagaaaaacaacatagagttgttggacagaataaataccatgaatcctgtgcagtgtttaatccaatgtccatcacg

SEQ ID NO: 864103 - DNA, 608 bp, Homo sapiens
atagcagaaacttccaactctattttattcacctttttagctttcataacatctgataataacagtacctagctgatataatttggctgtgtccccacccaaatctcatcttgaattgtagttcccataatccccacatgtcacggagggaaccggtgggaggtaatttaatcatgggtgcrgttgtcctcatgttgttctcatgatagtgagttctcatgaaatctcatgatggttttataaggtgcatttccccctttttttttggcacctctccttgctgccgccatgtgaagaaggacatgtttgcttcaccttccaccatgattgtaagtttcctgagacctctctggtcttgctgaactgtgagtcaattaaacttctttcctttataaattacccaatcttggctatgtctttattagcagcctgagaacggactaatacactagcccactgtcacttttctataaatgcttattaaaataaatttctaaaaactgcttttctgtctataaaacaatgtttggggatttcctttatttatgatcaaagggaaatatctaaacatatatctatgtaaagctatggtctactatatcacataa

SEQ ID NO: 864104 - DNA, 608 bp, Homo sapiens
atagcagaaacttccaactctattttattcacctttttagctttcataacatctgataataacagtacctagctgatataatttggctgtgtccccacccaaatctcatcttgaattgtagttcccataatccccacatgtcacggagggaaccggtgggaggtaatttaatcatgggtgcagttgtcctcatgttgttctcatgatagtgagttctcatgaaatctcatgatggttttataaggtgcatttccccctttttktttggcacctctccttgctgccgccatgtgaagaaggacatgtttgcttcaccttccaccatgattgtaagtttcctgagacctctctggtcttgctgaactgtgagtcaattaaacttctttcctttataaattacccaatcttggctatgtctttattagcagcctgagaacggactaatacactagcccactgtcacttttctataaatgcttattaaaataaatttctaaaaactgcttttctgtctataaaacaatgtttggggatttcctttatttatgatcaaagggaaatatctaaacatatatctatgtaaagctatggtctactatatcacataa

SEQ ID NO: 864105 - DNA, 587 bp, Homo sapiens
aattttcatggagatcatcgtatcacttttttacttcatggattgttcctttggtgtcatatctaaatattcatcaccaaatccaagggcatctagattttctcctgtgttatcttctttcagttttatagttttgcattgtacatttaggtctataatcaattttgaggtagtttttgatctagattagttttttgcatgtgatgtccaacttttctagcatcacttgttaaagagatgatcttttctccattgtattgcctttgcttctttgtcaaagaccagctgactatttttatgtctatttctgggctctctattgtgttctattgttctattttattttcagcacartgttgaaaaggaatggtaagagggagcattcctcccttgttctttatcttagtgggacagcttcaagttttcaccattaagtatgatgttggctactgattttttgtagatattttttatcaagttgaagattcctagttgaccagttatttttaaagataatagaaaaggtacatggaaggcaggtgtgatagagcccagctacaattttccttaaaagaaataaccatcac

SEQ ID NO: 864106 - DNA, 620 bp, Homo sapiens
atggaccactatatatataacacaacacattaattttcatgaagaaaatttcttttttaaaaaaatcccatgatgcacacatcattattctgaattaactatgcctctgaaaaggaaattgatttccccaaggtaatgtgagtaggaactgtgttttgatagggtcctattctcctaatttctaatgcaaacttcagtgctctgagtgctgcactctcccacaaaaataagttatatgaatacatgtataactaatggataatcaaagtatgggtaattgaggttgtttatgtgtgtatgtggatgaaattctatgcccagytttattttaaagatcaagtctattaaaatcttctagaatgaagctattaaaataaggtcatcattttgcaagtacagttctggccatggcatttcggttaaagtatgctttgtcattagcctttttacaaagccaccacatcctggtggatgctgagacaaagttgtggtcttctcagggctgagtaggcagtacatgccacagaggaaaaggaggctgttttgtcatgtcagccttgacacactcctgggctcctgagaggcagaatttcagccactggtgatgaaggcagggagaa

SEQ ID NO: 864107 - DNA, 499 bp, Homo sapiens
ttaaaagactggtgcctttttaacacagggtgcctttggcaatccagggactctagtgcaatttgtccctggaatgaatgcaaatttggtttctaacctggcagagaactccttgcaaataaccatcactggctggctgccttaggtaaatgtgattcaataaggagaggctttgtggtgatttatatccaacaagagaaagacaaaagtctcttatgctttctcaccctttgtattcacaccagktaatttaaaaattattctaacatctctcgttcttcagtggtttatttttcttctctctcacattttctttctttttttttaagttacagtcttttgacaagtttacacttcattctcaggaaaggctgatcatggaaaacaggagattttgccttcaggaaaaaaaatgaatatgcttatggaaggaaacatgtgactaaatatgtgggaaatagtgactgagtggcggctgagtaaacagggtagcatcctt

SEQ ID NO: 864108 - DNA, 602 bp, Homo sapiens
ccctccaggccttctgactcttatgcatcagccctttgggaccacaacacagtcctctggagttcaattcttttgatgtggtgcaatactaactttttttttatgtcagtaaagtgtctatattcatagctttaaaaagatacataaagttggtcaaagggtataaacttgcagttataagatgactaggttctagagaccttargtacagcatggtgactatattagtaataatgtagtttgtacttaaaattgtctgaaagagtagatcttgagtatattctcacctcagaaagaggtatttttcaccctcaataagagatagagatgatttgaattcaagtctgtctgatttcaaagttcctgctcttttaaccagaaactagcataccgccaatgacagcacactggtgtaaatcaattgtcattaagtttatctctaacttttctttacttctgtgagccaattttgggtggcagaaaagaatgctctctaaatttaaggttttaatgccactaaaatatagaggcacatagagtagattttaattcaaagcaaaattactacttagaaacagttctaatagtaagaaagaagtata

SEQ ID NO: 864109 - DNA, 630 bp, Homo sapiens
taattaatcagtgaattcactaaatataaagactgaacgtgatgtactggagccatgtaggaatggagaaagctgactcagggatagagttgccagataaaatttaggatgcccagtgacatttgagttttagatcaatagcgtatctggggggtataagtatatcccaaataacggggcacagttataaataaataggtcacagttatgcccataaatgtattttttgatctgaaattcacatgtaaytgccttttatttctatttgctaagacaattcaattcaaagatgaaaattgaagattatgagaaaaatcatccatttctcactgtaaactttcactgtaattttccattgaaaacttgcctaattatcattgtcttattatacagtattgggaagtgacttaatacttgggttcaaaccttaaaaaaaggaagcaatagtccaaataattataacaagtccagagttcattgtttgtttcataatgttaacacatgagttaatcagtttcccaactaggtattgaaactgatcatgattacgataatatataggatctatatcttctggttcagacaccagagtactgcctgattagccttgctcagaacttctctacaagt

SEQ ID NO: 864110 - DNA, 630 bp, Homo sapiens
taattaatcagtgaattcactaaatataaagactgaacgtgatgtactggagccatgtaggaatggagaaagctgactcagggatagagttgccagataaaatttaggatgcccagtgacatttgagttttagatcaatagcgtatctggggggtataagtatatcccaaataacggggcacagttataaataaataggtcacagttatgcccataaatgtattttttgatctgaaattcacatgtaattgccttttatttctatttgctaagacaattcaattcaaagatgaaaattgaagattatgagaaaaatcatccatttctcactgtaaactttcactgtaattttccattgaaaacttgcctaattatcattgtcttattrtacagtattgggaagtgacttaatacttgggttcaaaccttaaaaaaaggaagcaatagtccaaataattataacaagtccagagttcattgtttgtttcataatgttaacacatgagttaatcagtttcccaactaggtattgaaactgatcatgattacgataatatataggatctatatcttctggttcagacaccagagtactgcctgattagccttgctcagaacttctctacaagt

SEQ ID NO: 864111 - DNA, 630 bp, Homo sapiens
taattaatcagtgaattcactaaatataaagactgaacgtgatgtactggagccatgtaggaatggagaaagctgactcagggatagagttgccagataaaatttaggatgcccagtgacatttgagttttagatcaatagcgtatctggggggtataagtatatcccaaataacggggcacagttataaataaataggtcacagttatgcccataaatgtattttttgatctgaaattcacatgtaattgccttttatttctatttgctaagacaattcaattcaaagatgaaaattgaagattatgagaaaaatcatccatttctcactgtaaactttcactgtaattttccattgaaaacttgcctaattatcattgtcttattatacagtattgggaartgacttaatacttgggttcaaaccttaaaaaaaggaagcaatagtccaaataattataacaagtccagagttcattgtttgtttcataatgttaacacatgagttaatcagtttcccaactaggtattgaaactgatcatgattacgataatatataggatctatatcttctggttcagacaccagagtactgcctgattagccttgctcagaacttctctacaagt

SEQ ID NO: 864112 - DNA, 630 bp, Homo sapiens
taattaatcagtgaattcactaaatataaagactgaacgtgatgtactggagccatgtaggaatggagaaagctgactcagggatagagttgccagataaaatttaggatgcccagtgacatttgagttttagatcaatagcgtatctggggggtataagtatatcccaaataacggggcacagttataaataaataggtcacagttatgcccataaatgtattttttgatctgaaattcacatgtaattgccttttatttctatttgctaagacaattcaattcaaagatgaaaattgaagattatgagaaaaatcatccatttctcactgtaaactttcactgtaattttccattgaaaacttgcctaattatcattgtcttattatacagtattgggaagtgacttaatacttgggttcaaaccttaaaaaaaggaagcaatagtccaaataattataayaagtccagagttcattgtttgtttcataatgttaacacatgagttaatcagtttcccaactaggtattgaaactgatcatgattacgataatatataggatctatatcttctggttcagacaccagagtactgcctgattagccttgctcagaacttctctacaagt

SEQ ID NO: 864113 - DNA, 619 bp, Homo sapiens
agtgttggtgaggctatggaaaatggcaatctctgactctgttggttggattataaattggtacaaccattgtgcaaagcagtctggcaaaatctaggaaagtttaagatgcatagatcccttaacccagccattcagcttttagtatatatcctaaagaaatcttcacatatatgcagaagaatgaaagtataagaatcattttgaaacactgaaatagtgaaaaacttttgtcaacaacataagggcaatcaaatcaataagaaaatggttaaacattatgtatcgtactcataaatagaataatatacagcaatgctagtaaagaagttagtctatccacatagataaatattacaaatataagttgggggtaaattaatcgtagttgggtacatacratatataaagtatatattaaccttagcaacatctgctgtatattaataatgtgcaaagtaaaagcacaaaaatatgaaagggaatatataaccaccataatcaggatcctggttaactctggacatgaatgaaaggaggaaagaataaactcaggacttctactgtatctatgtttccccttttaaaaaatctgaagtaattatggcaaaatgttaag

SEQ ID NO: 864114 - DNA, 619 bp, Homo sapiens
tccctttaattactgcccaagtgctagtataaaacaattcaaggtgaatattgcatcaagaaacctaggccattcactaaggagtttgtgttgtgctaaaattctcaggtagtatgaaattaaagatcaatggtttgggagcaagcaatggaaacatcatagcttcgctcctccttttcagggacatgttggaaggaagatcctagttcttgtctcctgtagcaaacatcatcccttatgataagcrtgagactttagaaaaggttgagcaaatgaggcataccagtaaaaaggaaactggtgatagaagaggctttgggtattagggttctttctctcataactgatcttattctggccgttcttgctttggaaaaaagagttggcattttccccttctactcttcctgggaaagttgaagccagaggtgaggctgattcttctccctgggaagagaggttggaaagtggctcagtgccagagcagctgagattttgattggtttcttctgctgccaactctagccggcttctggtgcccatacagacctcaatgatgatatctgacatggtctatttcctttagcatgtgcaatttgcccacctgcatggcagtctc

SEQ ID NO: 864115 - DNA, 657 bp, Homo sapiens
attgtacctttgtagtaagttttaaataaggaaatacatctttcacctttgttcttctttttcatgattattttgactactttatgtcctttgcatttccataagaattttagggtcagcttgtcaatttccatataaaaaggtagctgagattttgatagaaattktattctatcttcaaatcaacttggagactattgccatcttaacaacattaagtcttctgattcacaacatgggatatctttccatttatttggtcttctttaatttctttcagcagcattttgtagttttacatgtataagtcttgtagttctttggttcagtttattctaaatattttattctttttaatgttattgtgaatgaaattgttcttgtaaatttaattttgggctgcttattgctagtatgtagaaataaaattattttttgtatattgatcttatatcctgtgactttgctgaattcatttattagttctaataattctatagcggatttttatatacaagaccatattatctgcaagtagagatagttttacttcttcctttgattctgaattttttttcttttttctttttgccttattatcctggaaatagaagaggagagagtggacatccttattttcttcttaattttatgggg

SEQ ID NO: 864116 - DNA, 500 bp, Homo sapiens
tgaaaacctgacaaaaacaagcaatggggaaaggatcccctatgtaataaatggtgttggggaaactggctagccatatgtagaaaacttaaactggacccctcccttacaccttatataaaaattaactcaagatgaattaaagacttagacctaagacctaaaaccgtaaaaaccctagaagaaaacctaggcaataccattcaggacataggcatgggcaaagacttcatgastaaaacaccaaaagaaggtttgtttaaagtgggtgtgagttggctgaggggccttgagttgagagatattaatgcctggcgcaggactgagatatccatttaggggttaattggttattttgcaacttaaatacaagttctttgaggagcccattaggcctcacagttaaaccagttttcttggacatatttgggatatgaaagttatattgaatgccttctttgagagcctggtgtgattctgagaaatgaaatgtgtgcttt

SEQ ID NO: 864117 - DNA, 551 bp, Homo sapiens
tttttttttttcaatgtacactcattcccttgatgatctcagctaataaaatctgtctttaaaaagccatccattcactgataactctgaaatttatctctactgtggtactctccaattaagtccaagttcatatattcaattatctattttacatttgtaattctaaataatgtcagtctacattagtcatactaaccatatctaaaaccaaactccagcccccacccacctcactttcacattttgcactcttgcttatacaaataagtcgaaatgctattcttccaatttcyactagctggaagatagggaatagtcatcactgactcttttctcatacatttttctcatacccacaaccacccatcagcaaattctgccgactcatgttcaaaatatacctactatgtttctaagtatcccacctcttttttgtccaagtcaccaatatattttacttggattattaaaatatcctcctaactggcttccctgctttcactcatccctctgaagaatatactccacagataagccataataatgat

SEQ ID NO: 864118 - DNA, 551 bp, Homo sapiens
tttttttttttcaatgtacactcattcccttgatgatctcagctaataaaatctgtctttaaaaagccatccattcactgataactctgaaatttatctctactgtggtactctccaattaagtccaagttcatatattcaattatctattttacatttgtaattctaaataatgtcagtctacattagtcatactaaccatatctaaaaccaaactccagcccccacccacctcactttcacattttgcactcttgcttatacaaataagtcgaaatgctattcttccaatttccactagctggaagatagggaatagtcatcactgactcttttctcatacatttttctcatacccacaaccacccatcagcaaattctgcygactcatgttcaaaatatacctactatgtttctaagtatcccacctcttttttgtccaagtcaccaatatattttacttggattattaaaatatcctcctaactggcttccctgctttcactcatccctctgaagaatatactccacagataagccataataatgat

SEQ ID NO: 864119 - DNA, 662 bp, Homo sapiens
ccctcttacttactctgcttctgtctcattggcctttctgaacttccttgaatgcactccagtgtaattctttttcctcaaaatgtcctcaattaagtcacctgctcaggtctttgctcggatgttaccatatcagagatcttccctgagtgtcctgtataaaataaacccagtgttttctagctttcttgttctgctttattttcttttccagttttcatcaccaaatatatattaatttgtttacttcaaggctttctccagaatatcagtttcatgaaggcagagctcttgtctatttttttcctgtatgtatccacaatccttataaaatgcttctcaaatgataggaagcttaataactacttgctgaatgagtaagtgatcagagaagtaataaaaataccaattattcatgaacctagcattgtcaamtaagacagtaaggatgtgaacctgaaaatagacatttttgctctcttgttatgcagcaacaactaaaatttagtatataatcaatagagaaacctgttactaaacttttaaatataattgcaaaataataattggttacgtggataaatacataatccatcttcactaatggcgaggaatataaaaatgaaattaatgtggaatgcaattccacaaaaatggaatgc

SEQ ID NO: 864120 - DNA, 645 bp, Homo sapiens
ctgaatttcttataaagaagcactgtaactgtcctagaaaacgtcccacatatacttatactttcctttttcatgggggcatgttgaagatgacagagattcagtcagcttgggtctttgaatgactctatggagtagagacaacctccttctcatccttgtgcacacacatttttctggattgattgctctgtgaacttcaaactttgacttacatcagaatcacccaggaaggtttgtttaaacacagattgttggccttcagtatcagtttctgactcaacagatagagggtggagctgaagaatttttatttctaacagctcccaggttatggctacagggatcctactttggggagcactgccttagactatggcatagaatgaaacaaatgtctatttttctgagccattacattttgagtctattgttaaagagctttagtcttccctatytcattcggaaatgattatggaaacttgatgagaattattttatttttatgctgtcatgcgcacttaatttggcataaaatagagcaaacccttataaggtaacattgagtgactggaaaatgggtcaaactactgtatccatgttctccggtttgtcatcttcctactttttgtgctgttctcttaa

SEQ ID NO: 864121 - DNA, 555 bp, Homo sapiens
agaattgagttattcaaattgacagtctcttgattggttgatattcaagacaccttgaattattcaagaaaccacttagacaaaataatgttccccagttttttgttttcttgtttatttttgttttatcttcttcattcttttcattttaatcataaatcctaaaggttacactgaaattgtccccaggttaataaaggtaacctaatcttttttttcctggaaacaaatcttttaattccttataattttatctctctccttcttggctaccatataaaaaatgggcaaatttccraggaagaacaaagtgtggtaagttaggcaaacctgaaaatgaaaggataagttagtaagaaaaagagaaacatcctactgaggaagtgtaaagttcatatggtttctttaaggcaggaagagaagtgatggatgactactaaaatcagtacattgtacaatgtattagaaagccacattcactggaagtaaaatccataagagattatattttaatattaagatgatttctaggaggagtagaaaccaattatggtg

SEQ ID NO: 864122 - DNA, 555 bp, Homo sapiens
agaattgagttattcaaattgacagtctcttgattggttgatattcaagacaccttgaattattcaagaaaccacttagacaaaataatgttccccagttttttgttttcttgtttatttttgttttatcttcttcattcttttcattttaatcataaatcctaaaggttacactgaaattgtccccaggttaataaaggtaacctaatcttttttttcctggaaacaaatcttttaattccttataattttatctctctccttcttggctaccatataaaaaatgggcaaatttccgaggaagaacaaagtgtggtaagttaggcaaacctgaaaatgaaaggataarttagtaagaaaaagagaaacatcctactgaggaagtgtaaagttcatatggtttctttaaggcaggaagagaagtgatggatgactactaaaatcagtacattgtacaatgtattagaaagccacattcactggaagtaaaatccataagagattatattttaatattaagatgatttctaggaggagtagaaaccaattatggtg

SEQ ID NO: 864123 - DNA, 631 bp, Homo sapiens
taggcttccctctttcttagggtacattcaaaaagacttaagctgggctatgttattctgcctctattggcccatgcacctttgccagctccaatggtggaagtgcaagtccctttattcttttccctacacgttcctgtgcagtagtgggctgctcaagccacattctcacccayagaagattccatgcagtaaagaggtctaagctttcatatgcataaatgcatccaccctttagaggactcggttaagcactgtctagtgttctcctctaagaaatgccccaagatgagactgagaatctgtggctcataaacattcaaccatggtgtgagaaacagtctacatcttttaaaaccactgccagtctctctgcatgcttttctaaggttacattgccttgggagagaaaaagcttccattccccattactctcctctggtctgacaagccaacaatccaaatgaattctctctatacgtaaacccctctagacctggccttacttagtctggatgggttgtgggtatgagtgtcaaaagacttaccctgcaatctttgattaaatactataagggttacttgtaactacttgacactctaaaatataggggcaatttctgccgagtat

SEQ ID NO: 864124 - DNA, 617 bp, Homo sapiens
catcataagtcatctctagggtttaataagaacctgtcatatattaatctgttcatatttctcattgcgtaaatatgcaacttataaatgacaccaatttctccaatgaaatgttatttctaaataagagcggcagaacaggaataacaaacatacgctatacctgctaccactagcaacaatcacaaataaatgattaaaacattttgctgatgattccagaggcagcagactcaggatctccgcagagcacactataggcaaatactaccggttgactgatgttggcatatgtgatgaaaactatttgtcaacacctgctctagaattgcagaatttacagaaagtaacttcacagctaagtttctgccttatgttatatgcactctctrtgcttaacgtaggtcctatttaaggtagatactggataaattttggttaaacgaataatgtagtattttggtgaatgtttataaagcacagtgacaccattatactcactgtttaaagaaactaagttgttgcaaaaattctgaaatcaaagcttgtttcacagacattagatactgtgcggcctcaaggtttctttactcaaggacactcttgtagcttcactc

SEQ ID NO: 864125 - DNA, 628 bp, Homo sapiens
tttccagcctctcagcttcctttaactttgggacctgcttaccacagaacaaatagaaaatgcaaataattaagagagtacaaatcagggtgtagctgcattaaggatctcatccccacaatatttcataaataaaccatgcctttggtataagtattttaacttctggttggatctttttaaatagtgtcaatactctasggaaggcacaatatttcataaataaaccatgcctttggtataagtatttttactcctggttggatctttttaactagtgccaatactctagagaaggcattatgaaactaaagtattatctgaatgagtttatcaggtctttccttcctcatcaaaaagaagacagtatctaaaatcagggtggtggtgggtgtgggtgaaatgaggtcctaaagggaagtgggcacatgggaagagagatgcctattactagatcatttttcacatgtggaaactgaggctcagattgcagcctaccaagcctaaggggtcaagcctggatgtgagctcacttctagctgactccaaaatccataagattattcaggacaccaaagtcacattgacatgagggtttattatgtttaatgttatcaagctgcctacc

SEQ ID NO: 864126 - DNA, 654 bp, Homo sapiens
atgggtatctgtacctatgtcagttttcgagagcaaattacactttttctcattgagcatgtactaaattgcagagttcatctgattccaaaactgccttggaaaactggtttacctgttatttgagattcaaatactagcggggcaggcaaaggcagtccccagctagacccatcccctgaggatagtcaaatgcccagtcatcagtgacagctgctaatattttgtatagtggtgacttgtgtgatactgtcattactgaataataatagtaactatttcacagctttcctccagtttcacaccatttcccccaacaagctgagtgacatcagcattaaagcctggcataacccatactattcatcaatgaacttgtgcttctttctagacaggaaaggcaccaagaaagaatcatgcagaaatatacatatatattcattaaatataaaaactttataattcctccatgaaaactttatacctactagctgaactttcctaaaatatatttcaagragagacagctattacaatcatcagaaaactgtttatatttttgttttaaaggcatttttgtatgactgaaaacagtaggtattattcctttacggcaccaaaaggaaactccacatctgcttagcatgagatact

SEQ ID NO: 864127 - DNA, 622 bp, Homo sapiens
actgaatatatattctatgctaaggctaaccataaaccaaaggagtaatcctcagtcaaataactggcatcaattatttttctcatatttttagatataatgattatgagatctaccttgtcatgggtttgctttgctgtgaaatcaagatcatagcaaaggtaaagcaactgggttctaccttaaggtatcacttggcaaccagtctcctacccagctggtaaacatttctgattaccaatkcaataccagtaggccttaactttggctggaaattagagtcatttaaggatcatgtaagaccagttaaatcaaacatctagcggtggggtctgagcttcagtaaaatgaaaaagcttcccagctgagtcagggccagacctgcggaagccattctcattccattatggaagggccaggtgttgccaaggccacacactttgacattctagtcccctggattcaatatataaaacttagtgatatgtccctcagctgctatagtgaatggtatgtagctgtgcaaggattataaacctgaaacaaaataatgatgcaagacaatccttttgagcttgtgaaacccaactctagctttcagctggctgaatgtgtttcaagc

SEQ ID NO: 864128 - DNA, 622 bp, Homo sapiens
actgaatatatattctatgctaaggctaaccataaaccaaaggagtaatcctcagtcaaataactggcatcaattatttttctcatatttttagatataatgattatgagatctaccttgtcatgggtttgctttgctgtgaaatcaagatcatagcaaaggtaaagcaactgggttctaccttaaggtatcacttggcaaccagtctcctacccagctggtaaacatttctgattaccaatgcaataccagtaggccttaactttggctggaaattagagtcatttaaggatcatktaagaccagttaaatcaaacatctagcggtggggtctgagcttcagtaaaatgaaaaagcttcccagctgagtcagggccagacctgcggaagccattctcattccattatggaagggccaggtgttgccaaggccacacactttgacattctagtcccctggattcaatatataaaacttagtgatatgtccctcagctgctatagtgaatggtatgtagctgtgcaaggattataaacctgaaacaaaataatgatgcaagacaatccttttgagcttgtgaaacccaactctagctttcagctggctgaatgtgtttcaagc

SEQ ID NO: 864129 - DNA, 644 bp, Homo sapiens
tatttcctctttggaggaattttccaggtgttgagggctttcatgggtgagatcgtaattttcagtataatggaaaagttaatacaatcaattcttaccttatgagtgagtacagaaaaaggtttagctcttatgaaagctgaaacaactggcttaaaattttctaattctcttgtggttataaaatgcttccgaattctagcatgtgatatamtttcaagtattccactataacaactttactaatacaaaaaaaaaagtttacattagtcacattgtaaatggtttcttagacttctttaagcttgtcatttttctaaatatttaaagaagactgaaccacctttcaaagtgaagtactctcaaataagtaaatgagagtaaaaaaaattagtggagggggctaaaatttgagtgtggttgagaatcgtcacagtgattgtttcttgttgttcagcatgattctcccctgtgcaccttctgacaaaaagccctgaccctgggtacagtagtgatcacagaatccagggatagccaacaataatgcccaagcctgtgacccagcagggtcaatcaatgcccttccctggaatttgcctctgggggtcggggaaggaaagaggagtatatttctgttctagatg

SEQ ID NO: 864130 - DNA, 644 bp, Homo sapiens
tatttcctctttggaggaattttccaggtgttgagggctttcatgggtgagatcgtaattttcagtataatggaaaagttaatacaatcaattcttaccttatgagtgagtacagaaaaaggtttagctcttatgaaagctgaaacaactggcttaaaattttctaattctcttgtggttataaaatgcttccgaattctagcatgtgatatactttcaagtattccactatawcaactttactaatacaaaaaaaaaagtttacattagtcacattgtaaatggtttcttagacttctttaagcttgtcatttttctaaatatttaaagaagactgaaccacctttcaaagtgaagtactctcaaataagtaaatgagagtaaaaaaaattagtggagggggctaaaatttgagtgtggttgagaatcgtcacagtgattgtttcttgttgttcagcatgattctcccctgtgcaccttctgacaaaaagccctgaccctgggtacagtagtgatcacagaatccagggatagccaacaataatgcccaagcctgtgacccagcagggtcaatcaatgcccttccctggaatttgcctctgggggtcggggaaggaaagaggagtatatttctgttctagatg

SEQ ID NO: 864131 - DNA, 666 bp, Homo sapiens
gaaaactgagcttgtgataaatgcttgaggaatgtttatttaccaagttgacttcaaattttaaccttttaccaagaaataaataattcttcacaatgctaagttccacaaacaataattccttgaagcttttgaaaatatactgacttgctattaggaaaaatcgtatatagaaaaattaaatcaaactcccagctttgagggagtgattatcatgttataaattttttatatctttagtgccaatttttatgtatttgttcaaataaagaatctctatttgtgacaataattcttatagaaggacaaatatagacacttttaattcatcgawcttatggtgactttaggattgccccaaaacagaaaaaaaaaaaagccaacagcattttatcagtgaaatatgtacataaacaaatagagcctgtccacaaaaattatctgtgtattacccttgcacatataaatctataaaccaagttggcaagaaaatattcatggcaataataattcacaagttaacaatagtttttacatccaccttttgattttatctgcattcacaaatggaaatgtagagtaaaatttttactgacggctttatctttctcttttgcaattgttctaatgtctctgcatcatagctttaaaagactgtcagcagcc

SEQ ID NO: 864132 - DNA, 626 bp, Homo sapiens
tctagttttaaaaaattatatataatttctagttcatcatgcccagcatactcaaaatcttcctattacttagcatttctcagcctcacaagatgacaatttggtttctatttaaaaaactgtgtccctaagaatcctyatgagaattcataactgggggaaataatttcagttgaaggatcaaagtggtaatttcaggaaagtgacatttaaagggaagtagcagaatatggaaaaagtggatccagccagaggtagtgagtcaggaaagggcaggttctaaggtaagaaagagttgcattctttcaaaataaaataaaagttcatcagtattttgggaggccaaggcaggcggatcacaagccaggagttcaggaccagcctggacaacatggtgaaaccctgtctctactaaaaatacaaaaattagccaggtatggtggcatacacctgtagtcccagctactcgggaggctgaggtagaagaattgcttgaacctgggaggcgtaggttgctctgagccaagaccgtgccattgcactccagccttggcaacagagtgagactccatctcaaataaataaataaataaagcaaataaaagttgcatattgtttctagatga

SEQ ID NO: 864133 - DNA, 652 bp, Homo sapiens
gttcttaatcactgtgctaaacaattgtagcaagctaaatctacagaattttttttctttttgcttgaatgccaggccaaggtgaatctacggctaatttagaaaaaaataaaggaaggatctactgaattattttgagcaagaacatgggaaaatcaaaaccctatacaagaaaattgatagtgaggaggatggaatacaagtattaagcaagaatggattraaaatgaaaagaccatatagcaagttaagaatacagttgagtgaaatgtaagagtttgtaattgtctagtacgggcagaaattgaaagaaaaggacaaatgtgagaggcaacagagacagaaaagattaaaagatagaatttcaattagccaatatggaagctgggaggttactagaaagagggaccatttcaagctgacggagatctgaacatgggaagaagtgtttggaaggatgcagataagctcagttttgatactattcttgaggtgacagcaagatacatacacagaaaaatctagtaggagatgaggacggctcaaaagtccttcatattcaacatgtttaaactgaattcatgagacacaaaaataacagcaaaccaaagactcctgctcgaactctctctctcaaatggtacaaggcact

SEQ ID NO: 864134 - DNA, 597 bp, Homo sapiens
aagacagtttggcagtttcttacaaagttaaacatagtcttatcatatgatccagcaatcacactcctaagtatatacccaactgagttgaaaacttatgtccacacaaaacccttcacaggaatgtttatagcagctttatacataattgcaaaaaactgaaagcaaccaagatgtttttcaacagaggaaaagataagtaaactagggtacgtctctaaaatgaaatattatttggtgataaagggaaatgagctatgaagccaaggaaagacataaataaacttacatgtatttttctgagtaagcctgaaaagactcccatactaaattacattttctttttaaattaattttttttcattcccactttaaattttccattcccactytaggttcagggacacatgtgcagatttgttacataggtaaattgtgtgttgtgaagagttggtgtacagattattttgtcacctgggtaatgagcatagtacccaataagtagtttttcaatcctcacctcctcccatctgacatttcgaaaaggcaaaactagagagatagtaaaataatcagtggtttccagaggttttggag

SEQ ID NO: 864135 - DNA, 559 bp, Homo sapiens
caaatcttccctttgcttttctgttgaactcccatgtttgctctttgataatgtattgaaagtgtgattgaccacacactgttttggttcttttaagtagatgaagcatgatggaaatgcttccactcagccattttggaaaaaataaagactgtttatctttacctaaactactaatagttcttcgtaatgaacatcattagtcagattattgtayattctgttaatactgcaaaccataaaattatacttttaaaagtacattactttatgccacccctatgggcaaaatatctcaatgctttccatatcaggtaaggcacattcaaaacatagacatcatgctaggaatttcaaacataagtcacttaatgtaaataattggttcctcaggtattaataacgcaaaacaatataggatctaaaagaagcagctatagcacctaaggcttgagaaccaaagtatcataagggtcaccagaaactaggagtttatcaaagctaatctgttgaccaccaaagggcttccaggcaactggtgttggtacctagtgggagg

SEQ ID NO: 864136 - DNA, 606 bp, Homo sapiens
aattctgtgagtgctggagtacttgacatactataatctcattgaattaaaaattggttttcatttatttatttttaatcattttagggttaagctattactttctgaatgtacaaagtagacttcaaactagagaagagacaagcaayaagaaatcatcagatactaatttcaacaagtaaaagtgatctttatacatacattctaccaatctttgtttggtttataaactctaaaataatattctacctgacacaataaaatttatcatgtaaaattaaaatgcaaagaagggtatatttaagaattaatactgaagcaggtgagaaacaaagtcaaatgcttacaataaagaatgtctatttcaatcaatcccctaacttgatttaaaactccatgtggttattgatctgtcctttgacatctgtccaagtttttaaatttaatgcatttttatcagtgactgaaactaatgaaagtaaacccacataactgaatttctttgcagccataattctacctacagcctaatgttacatttagaggctcctggttctgaaagcacattatgtactaacattgagagaagccttagagctaatttga

SEQ ID NO: 864137 - DNA, 632 bp, Homo sapiens
tctgaagggtacagtaggaggaactcatatagcggcagacaaatacctctaaagtactctttctatttctttaccaatccttaaatgtctcaaatgccttgctttgatttgtctataatgatttttcatgtcttcaaaaagaagcaggaaaggaaggaaaaagacttaggaatggaggtggtcatagctcaggattgcagggaaacacagggcaggcctgtttgcgggctcggcatcctccacccccgccttcttttggcagcagacttagactttcctttggtaaatgattactctcccattcccatgtcatcctgctgmgttgtttctcaggcttccaagtttccaggccaataaaacttgcctttctaggaatgtgaaccttgagcagtgttacaaaagggcagagaatacttaaatcattgcagtggtgacacttggaggggactaggctttcatttatatcagggtggtccctgccccgtctttgtttctcccatggtgtaaatgattaaatatctccttgtaatgactttctgcttcagggttataaaaccagctattgatgtgattatgtccattcactacacacacacacacacacacacacacacacacacacacacacacac

SEQ ID NO: 864138 - DNA, 632 bp, Homo sapiens
tctgaagggtacagtaggaggaactcatatagcggcagacaaatacctctaaagtactctttctatttctttaccaatccttaaatgtctcaaatgccttgctttgatttgtctataatgatttttcatgtcttcaaaaagaagcaggaaaggaaggaaaaagacttaggaatggaggtggtcatagctcaggattgcagggaaacacagggcaggcctgtttgcgggctcggcatcctccacccccgccttcttttggcagcagacttagactttcctttggtaaatgattactctcccattcccatgtcatcctgctgcgttgtttctcaggcttccaagtttccaggccaataaaacttgcctttctaggaatgtgaaccttgagcagtgttacaaaagggcagagaatacttaaatcattgcagtggtgacacttggaggggactaggctttmatttatatcagggtggtccctgccccgtctttgtttctcccatggtgtaaatgattaaatatctccttgtaatgactttctgcttcagggttataaaaccagctattgatgtgattatgtccattcactacacacacacacacacacacacacacacacacacacacacacacac

SEQ ID NO: 864139 - DNA, 620 bp, Homo sapiens
aataatccatcttgaaacagacaacatgatacattttcctcttttcccttataggttctttggtggttaactacccttttgatgatgatgaacaaggacttgccacatatagtaaatcaccagatgatgctgtgttccaacaaatagcactttcttattccaaggtaggcttgtctttgaatataaaatgttacaaaattaattcttttatttaaaaatatgctttaaagtcctgcaagactcaggtcaagtgcttccatagttaataaagcatgactttttcagctgtttccgaaaaayagctttttctcctgtttcccacctcacttttgaatacactacatgtctttctccattggccttttatctatggttttagcacagtacctggaacatatacatgtcaatttatttcatttgacaaataagttataagcccagtaaagtaggccaagataagggcttaatgaattatagctctggagccaaatcttgcccaccacctgtttttgtaaataaaattgtattgacacacagccacagctatatttttatatattgtgtgtggctgctttctccttcaacatttcaaagtaagtcagtataatttactatattaa

SEQ ID NO: 864140 - DNA, 641 bp, Homo sapiens
tatatgtatctctccatataatattggttatgttttctggacaatattaatataattataacattactaaactcatagaattattattaaaattaagataatacatgtaaatatttcagaatagtacttagtatattgtgaatactcaaagtatgatatattattgaggtgtcttttgagcattcatttctcaatatccaacatgtatttgcacacactggcatgtatttggagtttatgggtattatgtaggatggagataaaggtttggtattattagcacatagatgataaatgatgccattagagtagattggattaaccagmgagaaaagatgctatgtgagaaaagcttagagcaaaacttcaaaaaacctaatatttaacatatggacaaaaaagcttttcaaggagaaaccagaaaagaaaaaaaacaggagggcattttgctaaagcactgcaaaatatactatttgcaagatgaaagttagcatatgacattgactataattagagtgagcatatgaccaagtgtacattaacctgttctggtttacatttgttatccaagcatagttattaatttaattttataggaatctaagattcagtaaaagaagtcagcatgttattcaacaaaa

SEQ ID NO: 864141 - DNA, 683 bp, Homo sapiens
atcccagagaaaaatacattcaagaaggaagcaattaatggaagaaaattatgagtgattaatgggagataattatgagactactcagaattattgaatattgactagagtaagaagaaaagtcaatgatattcttaataagacgatgaaagtccaattgkgagaggtgaggagagaatgagaggtgaccatgcacagtgagcaaagagagacaactcttaaggggtgaattcaaaggcaaccagaggagatctgtagacaaagataattttgttattatagtcacaatctttttattttggaataattttacatttatagaaaaactaaagagattgttcttggagattgtgttttaagacaggtaatttttaaagaagagggataaattgatgagcaaaagagataaatccagcagataataaattcttcgatgaagtgatccacaggggagacattcctgatacaaatagagaggtttttcactgactagaaatagacaaagaatggaaggcagaatacatgcagatgatggggagctggtagacttgataatagaaggatgagtagttccctattaattataaggaatagtcaacagctaagggtgaaaagtgagaggatttggggttttgagaatataaaaaatcatttctgtaagtgaaagtgatctttctagataa

SEQ ID NO: 864142 - DNA, 683 bp, Homo sapiens
atcccagagaaaaatacattcaagaaggaagcaattaatggaagaaaattatgagtgattaatgggagataattatgagactactcagaattattgaatattgactagagtaagaagaaaagtcaatgatattcttaataagacgatgaaagtccaattgggagaggtgaggagagaatgagaggtgaccatgcacagtgagcaaagagagacaactcttaaggggtgaattcaaaggcaaccagaggagatctgtagacaaagataattttgttattatagtcacaatctttttattttggaataattttacatttatagaaaaactaaagagattgttcttggagattgtgttttaagacaggtaatttttaaagaagagggataaattgatgagcaaaagagataaatccagcagataataaattcttcratgaagtgatccacaggggagacattcctgatacaaatagagaggtttttcactgactagaaatagacaaagaatggaaggcagaatacatgcagatgatggggagctggtagacttgataatagaaggatgagtagttccctattaattataaggaatagtcaacagctaagggtgaaaagtgagaggatttggggttttgagaatataaaaaatcatttctgtaagtgaaagtgatctttctagataa

SEQ ID NO: 864143 - DNA, 626 bp, Homo sapiens
tctctgcacataactgttgcctcagtctgaaacacattttcccctttctcagccaagtacttcaagatcaaagccagttttacttgccttggtttcctaagaaatattaggcattttcttttctgggattatatttttaaatagctcttactcattacattgtaacataattattgtattatcttggtctttatttatcattcctttgctctcatttacttgtgctttccacatttagagtaagattcaagatgttttttaaaggtctacaagacsctgatcttgcctttggctactttcctgacctcatttccttccaccttctccccagcggactccgctctagccacatggtcctccttcctgtttccacactcattctcatataaggtactttgtgtttgctgttccttatgcctcttgtcctcttccctaggtatttccatgtctggtgccctcctttcatacaggtttctgctcaagcattgcttccctctaaaggctgtttttcctgagtgtgtagtttgggatgacccgtgcttcatatttcccaggcatcttgaattacattcttcagaataatacattcccagcctgccatctgaattacaactctttgacttgtt

SEQ ID NO: 864144 - DNA, 602 bp, Homo sapiens
caaacctgaacctcctccccatgtctgccagctctgctgtccatttcccactctctccaaacactgcctataaccattctgtgctttctgttaagacattttcttcagtctggaaagcccctgtattcatttcactgattagtcgcattctacccgttattcaatgcccaattaaaattccacctttttcatgaagttgattctggcccttggagcctacatgttaatctcccatttctgaagtccgatagcactcgtcgcaagaaaggcataatacagcaatgtgatagtaatcttctattttctgtttcttctatcttcacttggtttgccccagacaataatggatattcttagggtaaagaaaatgtgttgtttatttttcttatatgtttcgactcyacctagcttattcctggatacctactaacgtttcaatttgcattaggttaacggataaagagttgcatcagtctttaaaataagcatttgttatccagtaaaagttcgctcatgggaatccagccaagcattgtgtcctcagttgatgttgcttaggtgggccagtgtatggtaaataaaaaaaattactataatgaata

SEQ ID NO: 864145 - DNA, 583 bp, Homo sapiens
gatcttttcctcccgaattagctatattcctaggtattttataatttttatggcaattgtgaatgagatggcctttctgattttgctcttagtctgactgttgtggtgtatagcaatgctagtgatttttgtacattgattttgtatcctgaaactttgctgaagttgtttatcagctgaagaagctgtggggctgagactatggggttttccagatatagaataatgtgatctacaaacagaaaatgctttacttcctggcttcctatttgagygccctttatttctttctcttgcctgatttctgtggctaagacttccaatgctatgttgaatagaagtggtgagagagggcatccttgtcttgtgcctgttttcaatggaaatgcttccagcttttgcccatttagtataatgttgcctgtgagtttttcatagatggcgcttattttgaagaatgttccttcaatgtctagtttattcagagcttttaacatgaagaaatattgaattttatcaaaagccttttctgcatctattaagattatcatgtggtttttgtctttagttctgtttttgtgat

SEQ ID NO: 864146 - DNA, 641 bp, Homo sapiens
tatatgtatctctccatataatattggttatgttttctggacaatattaatataattataacattactaaactcatagaattattattaaaattaagataatacatgtaaatatttcagaatagtacttagtatattgtgaatactcaaagtatgakatattattgaggtgtcttttgagcattcatttctcaatatccaacatgtatttgcacacactggcatgtatttggagtttatgggtattatgtaggatggagataaaggtttggtattattagcacatagatgataaatgatgccattagagtagattggattaaccagcgagaaaagatgctatgtgagaaaagcttagagcaaaacttcaaaaaacctaatatttaacatatggacaaaaaagcttttcaaggagaaaccagaaaagaaaaaaaacaggagggcattttgctaaagcactgcaaaatatactatttgcaagatgaaagttagcatatgacattgactataattagagtgagcatatgaccaagtgtacattaacctgttctggtttacatttgttatccaagcatagttattaatttaattttataggaatctaagattcagtaaaagaagtcagcatgttattcaacaaaa

SEQ ID NO: 864147 - DNA, 601 bp, Homo sapiens
acctcggtacatacgttgtttcttgtttgtggagggggatcttctggttaaaataccagaagtgagattgctgtgtcaaaagataaaaatactgcaaaatctctctccaaaggagtcgctataatttcacactcccactagcaatgtttgagtgactattttcatagagtattgcccacagaatgagttgccaagcttgtcaaaactcctccattctcactctcagctaatgactttgattcctacttaactgagaaaactgaagcaataagaaacttcagactcctattgccaccgcctttgtgcctatgctctctgccatcttgcttatcaccatatgtgargctctacttgctcctatctaatgtcacctatgtatttgatccttcctctctcacctattgaagtacatgactccaacatttttacactctttctcctatatcactaatgttttactctctactggatcatttccaccaacatataaatatgctgttatttctgagttggggagtgcgggggcgggggggattttccttaggatggagacatctgaacaataggtggttgggcaaggacaggaaaaaaaaaacatacc

SEQ ID NO: 864148 - DNA, 601 bp, Homo sapiens
atagtagagattgaattttcactctctcactattggcccacctatattcatctctttgttttgtagtgctcgtacagacctccccatttgcctttagtggcaacagccctatggttacaccctggccttcaattagtaattgtgtttattctatgggattgaagcccattccatcaaaaatagctcatgataataaggcagtttacctcatctaagttaagagagtgtaaggagtctgcctgacttcagggataaaaatataaatatcagcaacaactacttcatgaagtcttctagattgacatgaaagtcaaaggaagttaatatggagaaaggttttaaataaaggccattcatttaggggcccagacacagccttcctcttcctcaataaaagacagttytaaattttaaatcagtaaaaaaaaaaaaaaaaaaaaaaaaagatatatttagaaagatctggctgttactcaaatggatatttttccagataggtgacattaaattacattatttagctttaaaatgttctgccagcataaaatgaaataggcgtttccttttggagagtaagaggatgatcctctggggtcaaagt

SEQ ID NO: 864149 - DNA, 676 bp, Homo sapiens
ggagttttactccaaatctacctgcatgttcattacagcactagtcacaatagccaggatataatcaaactaagtgtccatcaacagatgaagggataaagaaggtttagtgtgtatatatatatatatatatatatatatatatacacacacacacacatacacacacaatggaatactattcagccttaaagaagcaaattccatcatttgtgacatgtatgaacttggaggacattaacttaagtgaaataatacaggcasagaaaaataaaaaccacatagtctcacttatatgtggaatctagaaagtttggattcatagaagcagagagtaaaatagtggttgacagggactgggagcaggggtgaagaatagggagatgttgattaaagggtatcaaatttcagttacacaggataaataagttctggatatctattgtacagtatgatgactatagctaataataatgcatggcatacttgaaaactgctaagacagtagatcataaatattctcaccacacacaaaaacgataactatgtgaggtgatagatatgttaatcagcttgattgtgaaaattatttcacaacgtgtacatatatcaaaacatcacactgtacactataaatatatacaaatttttgtcaattataccttaataaaggtgg

SEQ ID NO: 864150 - DNA, 718 bp, Homo sapiens
ttagtttgtctgttaaaatataaatactcccaacatgagtgagatgttatacaggtctcttaaagtgaataagtcataccttgaccaaggcagacactaaggacctgaaaacagaagaggcaccaccaaaggtggataaaagaaggatacagaatgggaatgtagaggcatgaaagtcaaacagcacttcctccactatttggccctcagccagcactaatagtatatggtacttcatctttgccctgtacaatattgcatacttccaatgtggaatatgggaggaaatttagagtaagaaaattacacccactagggtgactacaagaaaaatgagaaataataattgttgatgaggatgtggagaaattggaacatacctacactgctggtggaaatgtaaaatggtgcagccactgtggaaaacactagggtagttcccccrtaagccaaacatctaattatcatgtgatcctgtatattagtaagggagctatctgggcatccctttgcctagtcaagttgacacataaaattaaccatcacacccagcaactccactccttatgtatattactcaaaagaatataaaatgggtgttcaaactaaaacttatacacaaatgctcatagcagcacttttcacaatagccaaaaggtggaaacaacccgagtgtccatcaagtgataaatggataaacaaaatgtcatctattttt

SEQ ID NO: 864151 - DNA, 664 bp, Homo sapiens
cagttagaatggcgatcattaaaaagtcaggaaacagatgctggacaggatttggagaaataggaatgcttttacactgctggtgggtgtgtaaattagttcaatgattgtggaagacagtgtggcaattcctcgaggatctagaaccagaaataccatttgatccagcaatcccattactgggtatatgctcaaaggattataaatcattctactataaagacacaygcacacatatgtttactgcagcactattcacaatagcaaagacttggaaccaacccaaatgccatcagtgatagactggataaagaaaatatggcacatatacaccatggaatactatgcagccataaaaaggatgagttcatgtcctttgcagggacatgggtgaagctggaagccatcattctcagcaaactaacacagggacagaaaaccaaacaccacatgttctcactcataagtgggagttgaacaacgagaacacatggacacagggaggggaacatcacacactggggcctgtcgggggttgaggggctaggggagggatagcattaggagaaatacctaatgtagatgacgggttgatgggtgtagcaaaacaccatggcacatgtatacctatgtaacaaacctgcacgttctgcacatgtatccc

SEQ ID NO: 864152 - DNA, 576 bp, Homo sapiens
gaaatgggcacgtggccaaatttaggccccagagattgaaggcaaaatttgtcagcagctttttgggaagttttctttactctgccagaagagcttccagaatcagttctgtctgtcttctcttgaacatgagctgtaagatgcaatgactttggcactctgggccgcacatctgcttggacagaagacgatgccaatacctggaagagagtaaagcaaaaagaactgtcgaggggggaggcagagctcagatayagactaggttagccctgactcttactcaatccctgggttacagctgagtggttcagaaatgatttaagctggctcatgttacattttctcacttgcagggaaggcactctgcctgatagaaaccctttgagagctgtggggattcaagtgttgaaggaatctgtgcctcacctccaagagaaggttggaaggcagcaaacttctcagagaacaacctccctcccacccctgtaccccttcccccacacacatacatgctggcctggctcagggtgcatctatgcagtgaggactcacagcctagagttccctgcatcccct

SEQ ID NO: 864153 - DNA, 616 bp, Homo sapiens
tatatcatgcttcagtataatttgtctattcttttataggggagaaatgttgaaaatagaacattcagtctttctggcagttaatcaacagtgacacaaccttacatttcctaacaactacaaattccctaattaaccattttaaaaatgcaataacaaaaccattaaaccactatttgctctagttcactgtttttatttacatagctacctttctcctagacaagcaacgttagcgaaagatgccttcttgatgacaatcctattcaatttttatttatttttttggtgaagggttttctcagcagccagttaccacatggagcatttcacagtttcaaagaagttttcctcattttaaaactgcaagaaaatgctacacttgatggtagttcctaaaaaaatagttsaatcaaccttctagaatttttgtaatataacttcaagtatgtaatgatttaattaacacaatactcttaataaacaacagcaacaacaaacccaagtgctagctcatttctggtgccatgagacataatagcaccacttgtttttctattttagtggttaaaatgtatgcaattttagcacccatctacaaaagttagatgttaat

SEQ ID NO: 864154 - DNA, 583 bp, Homo sapiens
ctcaagggatctgtccgccttggcctcctgaagtgttgggattgtaggtgtgagccactatgcctggcctgctctagcttttaacagctctacttccctaaatacctcgaactctctttctttccctccctccctcctttccttccttccttccttcttcttcctttcttcctttctcttttcctctttctttcctttctttcctctccctctgtcacccaggctggagtgcagtggcatgatctcagttcactgcaatctccacctcttgccaaccctctttcttaataaacttttaattttggaataatttcagtttaaaaaaagttgcaaagatagtgcagcttccttytaatgttaacgtcttatataatcgtggtatatttgtcaaaactgagaaatcaacattggtacaatactgttaactagactgcagactttatttagatttcatcagtttttccactgatgtcctttttctgttccagaatccaatccaagtttccacattgcattttgtattttgcattttttttttttttggacatagagtctcgctgtcgcccaggctggagtgcacagt

SEQ ID NO: 864155 - DNA, 640 bp, Homo sapiens
ctgtctttgcctgtttcttcttgtacatcacctagaggaatacccattaatgtttagaggcagagaacaatagaaaatagcactgttcaaggaccaaaaatttaaaaagactgctgacatacagcatagaatgtgaaagtccctgataatcttatccctagggataaccacttgccatttttttacaatttcaattttttrtgattataaaagtcatacacatttaaaaatacttcaaaataaatacaaaataaaaataaatgcttcattgcttaggttaccttggtacatgcaaggtctgagaccacatccatcaatgcagtttgctgcgtggattaccagatctctccaacattgacctcaattttttactctgagagcaaacagaatgggcaagggctgacctgaaatccttttgaaacacaagctggatcctagggctttgacctccactgctcactgccacatgggatccgtctctgtgccccactctgccccagccccactggccttcctgctgctgctcacacaggcctactcttaaggcctttgcatactctgttccctgcagaggcctctgcctctgaacaaatgtgggacccatctctgccaaggctgggaagcaaacagcccccacttt

SEQ ID NO: 864156 - DNA, 600 bp, Homo sapiens
tcaagtcccaggaatcaaactctaaggtctccagaaaagctctgtgggaggaatcctctgtctcatggatgtcccctgtctgcccacatttgtgtgttctgggtctgggaacctacaacactctgtctgttgtaggttcaagcttttatgataatatctctattttctttactcwtgaaataaaattggtgcatgctgagtccttggtcccaacgctttcctcccagacactgcagaactgcagatgttactctactgctttctggaatgcagtgctctaaagaggaggttggaactttttgtctcttataatttacttttttttttttcagacagggtcttgctatgttgctcaggctggtcttgcctcaagcaatcctcccacctcggcctcccaaagtgctgggattgcaggtttgagccaccacacctagctattatttgctcttgttgtttgaagatttagtcttatgaataaagtacctattcatttatcaaccatatatcagaacttacccctcaaaagtggcccccatttattttgcgacagggggcagtgttcaaagttttgtcttgtattgttcacaaactgccatgtgg

SEQ ID NO: 864157 - DNA, 593 bp, Homo sapiens
tgggtgaacactttcagctgcctcaagatggtcttatcaatgagtctggtgacagcagaagtgttcattctgcctaattctccatcaccacccatcagcgtccaggtttatggcgagaccaccctgcatcctgctctgcagtcctcagaccaacacygactggggggacagttgtcatttttggctgcctattccccatggccctcactacagcactgagtttttctatcacaaaatgatttctccgtgtagggagaaagaagccttcttagagtctctgtctcttggtgatctgaaatatccatctccatgcgatcaaaaggcatccaagtctgggcacagagagaagaagcattcctaattccagaagttcctgagagaacagggccagctttctggcagaacagagatgtgaactcaatgtcctttgggaaattagctttagttctgtaccaagagcctataattatactgaccaggctagggtacttgaaatgatgattaaggcatgaatgaaaaataaaagatccctttgtttttatgctcattatgcctctttttgatgactatgcaaaaaaaaaaaatgcctttca

SEQ ID NO: 864158 - DNA, 623 bp, Homo sapiens
gggtgccagccacatttgtagcagatcagctttctctctattgggatgacctagggcaacatgggactgtgttgagagaatttcttactctttccaaaacacaagggttactatttcacacacacacccttacccagctcttagtacaagctgtttagctttagccatagcatgggcgtgggggagggtgtgcatgtgtgtgtgcaggtccttgggggagaaccttaagaacgaccacttttctcattgccggcaatgactacagattgggctaagctgaatagcacactaagacatgcacaatcaggaagggatgaagaatggaattaagaagccctgtgcatcagaaagyggctgaattctgtgtgaatcctcccaaagcacaccttcccttaaaggtcagtagatagaagctttttgagatgccttaagctgttaaagtccagtgtcagaaattcccactgggtttgaatttcaatggattacttgagttccctgaatgctttgcagacagaaataaaaatacatgtatatatttgctaatatgtatatatatatgggttaggctttgtgacttctaaatgtaaggataatgaaatgaaaaagtaagaccaaagtgcctc

SEQ ID NO: 864159 - DNA, 603 bp, Homo sapiens
ccaccacacttccatgggggaagtgtgcttccttgctccaccaatgtggggctgggccctgggtcttattttggccccatggttgatgtctacccctgctgcctaccaactttgtatttggccatgttattggctttggccaatggaatgttagccgctgtggcataaaatatagttgtgtggttgggtttgccttcctatgcttctgccttgagaagtgcttctgagggtagctcagtggtcccagaaaagtgaaaaactcaatgttgcagacctgaacccaatactggctagtgccaagtcctagtgagcccaaattagatcaggtcacctgcagacatgggagagaaagataaatgcctrctatggtaggctactgaggtctagagtggtttgttacatagcattgttgtgataaaagctaattgatgcagtgactgatgttggacctttcctgttctttaaactattccttgacccccttcatttcataaatgcctataccaagacctgcatgaaattttgaatttttttcagattttagtatttcaatctatatcaattcatcgaaagaaagtcatcccctgccccccaggaatgaac

SEQ ID NO: 864160 - DNA, 596 bp, Homo sapiens
ggaaactaagcaaacaagcaaaaacaatgcttcgctaaagaagaaaaacactgttcaggaaaaagaagttatagtagagcactctgtggctcagctgtgaagagcattttcacagtcacagtgaaagccaaacattgatggaacccaagttaaaggtgcattatactggaaggatggggtgtgtgtgtgtgtgtgatgagggtaaggagcaaaagacagctggatctccatcttcctggtgtaaggcaaaccctgatttcacacaaaccaagaagtaggaaaagagcawattctttagagaattggaggtaaatacccaaagcatcagctgaaagagttgaatatgtttttttctttcctaaggagtggaacaagagagaaaaatgaaggagtgttgatcttcacgacaaaatctattttgctttttctattatgagcttatataacttgatggaaattaataatttaaagaaacaaactacattaacttaaatgtttttcctgtgataattactttaaaaaaataacctaattaaatctgccctctctcaggatttgtaaagtcttttgcctcttttcaaaaaaaaaaaataaat

SEQ ID NO: 864161 - DNA, 668 bp, Homo sapiens
tttaccatgttggctaggctggtcttgaactcctgacctcaagtgatctgcccgcctcagcctcccagagtgctgggattacaggcttgagccaccacgccccccccccccccccgcctccctcttttaaggacccttgtggttactttgggcccaaatggatatccrgaattatcttctcacctcaagatctttaacttagtcacatcttcaaagcccccctttttttccataaaaggtcacatatttccaggtttgggggactaggacatgtatatctttgcagagccgattattctgcctatcacaaggatgaagttggttttcagaagtaacaaaaagttagatgatttcactattctctcccttttaaaaatgtttcttaaaaatttgaaccacaaaatttgttaattttaagaagttactgttaattttttggatctgataatggttggctcagatttttttggtttcttatttctcagagacatgtattaaaatattcacagataaaatgctatgatgtcttggatttgcttcaaaataatcttatattgaaggaatgagtaggaatagaagtaaccaagttggccacaagttgacaatagaagaagctgattgataagtatgtgggggttcactgtgctttgtctttatatgtttaaaat

SEQ ID NO: 864162 - DNA, 610 bp, Homo sapiens
acagtaagaagaatttggaaaagcaaaatctaagaatggaaacaaaatagaattaagagggcatttagaaagtaaggcaaagaaagactaagataagggtggggagagaaggagagaccgtgaaaccaaagacataagtactgaagactacagttcttttgcatcatgactaagggccagaggtctgatttagrtgccacagcaaattttgaaatgggaacactgtagagtaaatgttactgagtaaattttacatatattctatgtatgaaattgaagtagttgggagaactagaactgataaggaacaatgtggagtccagggctccctgtgttttgtgaaatttaaattcaaatccaagccctatgtcatttgccaatcttctttaaaggagtctctccctctctctctctctctctcttttttttttttttactttgtattttgagaaaattgtagattcacatgcaattgtaggaaataatagagattatgaactatcctgaacccttcatttagtttcccacaatggcgacatctttcaaaactacagtatagtatcacaaccaggaaattgacattgatacaaaccatatcctttattcagat

SEQ ID NO: 864163 - DNA, 610 bp, Homo sapiens
acagtaagaagaatttggaaaagcaaaatctaagaatggaaacaaaatagaattaagagggcatttagaaagtaaggcaaagaaagactaagataagggtggggagagaaggagagaccgtgaaaccaaagacataagtactgaagactacagttcttttgcatcatgactaagggccagaggtctgatttaggtgccacagcaaattttgaaatgggaacactgtagagtaaatgttactgagtaaattttacatatattctatgtatgaaattgaagtagttgggagaactagaactgataaggaacaatgtggagtccagggctccctgtgttttgtgaaatttaaattcaaatccaagccctatgtcatttgccaatcttctttaaaggagtctctccctctctctctctctctctctyttttttttttttactttgtattttgagaaaattgtagattcacatgcaattgtaggaaataatagagattatgaactatcctgaacccttcatttagtttcccacaatggcgacatctttcaaaactacagtatagtatcacaaccaggaaattgacattgatacaaaccatatcctttattcagat

SEQ ID NO: 864164 - DNA, 611 bp, Homo sapiens
attttacacacaaattatttgcaatctgtttacacaaatgagtcattgtgttttaagtagataaacatctaagggacacacaatgacttaaataaattagttttaaggaggtatggcagatttttgcacatttccctagggctgagtgcaatgtactttgtgctgattttaactttaacattctaggaatgatcgactcaatatgcatgtgatgccatcttcaatttctgtcagtgaattgttttcataaagtggccgagcacataacaagtctgtttagaaaaatccatcttgtccaaggaaacaaaatgtttgagtacgtaaaaatctatagatttgaaaaatcatttcactgagagaaatcctggtgcacatttatagtctagacgtggatttgagaaaagaaaaagaasagtgaaatcctttattggctagaaaactaaagattgcccaaagtaggaagaataatcgagtttcagattaaggtaatacttaaagattgagttttgcacaattgactctgattattagcatgattctgaccctgggtcagaggctttcaaaactggctgcctattagaactcccaggggagcttttaagaagtccagt

SEQ ID NO: 864165 - DNA, 611 bp, Homo sapiens
attttacacacaaattatttgcaatctgtttacacaaatgagtcattgtgttttaagtagataaacatctaagggacacacaatgacttaaataaattagttttaaggaggtatggcagatttttgcacatttccctagggctgagtgcaatgtactttgtgctgattttaactttaacattctaggaatgatcgactcaatatgcatgtgatgccatcttcaatttctgtcagtgaattgttttcataaagtggccgagcacataacaagtctgtttagaaaaatccatcttgtccaaggaaacaaaatgtttgagtacgtaaaaatctatagatttgaaaaatcatttcactgagagaaatcctggtgcacatttatagtctagacgtggatttgagaaaagaaaaagaagagtgaaatcctttattggctagaaaactaaagattgcccaaagtaggaagaataatcgagtttcagattaaggtaatacttaaagattgagttttgcacaattgactctgattattagcatgaytctgaccctgggtcagaggctttcaaaactggctgcctattagaactcccaggggagcttttaagaagtccagt

SEQ ID NO: 864166 - DNA, 645 bp, Homo sapiens
atgaacataaatcattttttagcaaaattaactgccaacctctgacctctgaagaaagcagggatatatgtggagaatgcaccaatccagtcttaagcagaatgaagaagaaatatattctctggaaacgttcaggctacaggttttgagagtgaattcaattaataatgaactatttttattaaaacaacaaactctgtcaaagtgacccaaaataaagattcctccccaaaggaaaggacaccaagaacaacsgtttttgttgaaaatcccgattactatgttttctgaattggggaactgaactcaatataataaaagttcaatgtcagcccagccagagaagttgggaattgctgtaacaggccgagaagttcagaattttcattcacagagtaattgtataatttatgtgaatggtaaagattttgcctaatatattcatcaggtataaagaaaatgcagttaaatgaaaaacaatcatccctactctatagccattataagactctgctttttaacaatcatctttaatcatttgccacttaggtcagtacgtagctttgggactcatgacatgttgccctttagtatcaaacactagaattttaaggcttcccaagatcacagcttaaagtcatctaa

SEQ ID NO: 864167 - DNA, 645 bp, Homo sapiens
atgaacataaatcattttttagcaaaattaactgccaacctctgacctctgaagaaagcagggatatatgtggagaatgcaccaatccagtcttaagcagaatgaagaagaaatatattctctggaaacgttcaggctacaggttttgagagtgaattcaattaataatgaactatttttattaaaacaacaaactctgtcaaagtgacccaaaataaagattcctccccaaaggaaaggacaccaagaacaaccgtttttgttgaaaatcccgattactatgttttctgaattggggaactgaactcaatataataaaagttsaatgtcagcccagccagagaagttgggaattgctgtaacaggccgagaagttcagaattttcattcacagagtaattgtataatttatgtgaatggtaaagattttgcctaatatattcatcaggtataaagaaaatgcagttaaatgaaaaacaatcatccctactctatagccattataagactctgctttttaacaatcatctttaatcatttgccacttaggtcagtacgtagctttgggactcatgacatgttgccctttagtatcaaacactagaattttaaggcttcccaagatcacagcttaaagtcatctaa

SEQ ID NO: 864168 - DNA, 302 bp, Homo sapiens
ggaatgcaaaaaaaaaaaagtgtcatcactatagagataattaaagcatttggggtttccaaacactcttaattcattatactgaggaataaacatttttaacaaaagttgaatttggccttgggcccaaaaacgtaattattctaaacttagtccctactyattgatcatcctctgatttcaattctgaaacaaataaatttcaactggaattagtttatctggaaacattcctacagtgcatttaatgctcaacacttgaaatattgagaatatgttagcacacatggacaaactgcata

SEQ ID NO: 864169 - DNA, 633 bp, Homo sapiens
acagtattcagtacagttgcatgctgtgcaagtccatagcctaggagcaatgggctgtactatatagcctaggtgtgcagtaggctgtagaagctaggtttatgtaactacactctatgatgtttgtacaatgatgaaattacccaatgatgcatttctcagaacatatttccatctcatgaatatatttaactgttaccttccttctaaggtgattcttctaagtggatcaccttccaatccactcaaactccatgtcagatggaagcccagaagtctttcctccccttgtcatcccttttattctgtgttcactcctctgccttgctctcagggtctccactccatcatgcccttcttcaacrgcagattggagaaacctttttgtccctcatatctgagctggagagacctgtgcttatgcttatcctagcagggcagtggtgcctcagaaaggatcacagaaagaaaagctactttccttcttgctaatgttgatcacctctcacagtgataatcaaactgtgctattttggcagtgagaattctaccacagaaccactcatgcacccaaaatgtgttattttggaaaagatcccctctccaccagaggtgagagtgggaggaatgaag

SEQ ID NO: 864170 - DNA, 633 bp, Homo sapiens
acagtattcagtacagttgcatgctgtgcaagtccatagcctaggagcaatgggctgtactatatagcctaggtgtgcagtaggctgtagaagctaggtttatgtaactacactctatgatgtttgtacaatgatgaaattacccaatgatgcatttctcagaacatatttccatctcatgaatatatttaactgttaccttccttctaaggtgattcttctaagtggatcaccttccaatccactcaaactccatgtcagatggaagcccagaagtctttcctccccttgtcatcccttttattctgtgttcactcctctgccttgctctcagggtctccactccatcatgcccttcttcaacggcagattggagaaacctttttgtccctcatatctgagctggagagacctgtgcttatgcttatcctagcagggcagtggtgcctcagaaaggatcacagaaagaaaagctactttccttcttgytaatgttgatcacctctcacagtgataatcaaactgtgctattttggcagtgagaattctaccacagaaccactcatgcacccaaaatgtgttattttggaaaagatcccctctccaccagaggtgagagtgggaggaatgaag

SEQ ID NO: 864171 - DNA, 449 bp, Homo sapiens
atgtgtcagggtgacttatttccatcatcgtccttaggggaacttgggtaggggcaaggcgtgtagctgggacctaggtccagacccctggctctgccactgaacggctcagttgctttgggcagttactcccgggcctcactttgcacgtgtgcttacctagtggagacaaaagtacatacctcggtagagcgcgcacgcctgtaaccccagcactttgggaggccaaggtgggtgtatcacytgaggtcaggagtttgagaccagcctggccaacatggtgaaactccgtctctactaaaattacaaaaatcagccaggcttcatggcacatgcctatagtcccagctacaggcatgctgaagcaggagaatcgcttgcaccccggaggcagaggctgcagtgagctgagaccacaccactgcactccagcctaggcaacagagtat

SEQ ID NO: 864172 - DNA, 588 bp, Homo sapiens
agaaagtcacttgtttgctttctttcaggctcaagtcactttggaggattggcatcctgaggcagccacattctaacagtgaaataatctagtcacaatgacagacaaatcttcagaaacctaaaatcagcatgcactaagatttggttctgaatagcaattgatgaacaaggtaaagctctttgagtgactgctctggccaaagggagcagccttggtgctgataagggagtaatkgcaagtcaatgagggtggtaattaagtggtctttcagaaagtttacatattcactgaatatataaatttttaatattatttgaattttgaatatttgagtttaaaaggagataaataacctagagtgaaaaaatacatacattgactttaagacttcttttaatgtcaaccatttataaacacaaggctaaaataagccatgcaaccctttattttcaggcactattataaaaatggggctgagcttgacaaaagcttgaagggtactattgtgaggttttaaaaaatgtgtttgtatgtgagttgttggatttttaagtatgcaaatctgtgctccataaggatggatgg

SEQ ID NO: 864173 - DNA, 558 bp, Homo sapiens
tttggtgccaagtctctgaccatctgctgctgcaggattccagctttcagagtgtccctcctctggggctccagccctggcatctgatgaccctgatctttcctttcgctcttcagacctagaggccataacagcatcctcctgtccccaacctctggaaggttttccgcttccggtgtcttcccttacccctgctcacatctgtgtaaatagtcctttcatggaagtacccctggttggaccatctgggtagatgctgtttcctactggccaccgagataggtctggctgctgaccaccaggtggtcaccaggcagcaaagaatctggggaaycagccaaggcatctcttcttcagcttagcttggtgcagagacctccagggggcagttaagaggctgggtgggggttggggggatggctggactagtgcagcccctccttttctggattatgcagccattctgtggggtgccagggatgttttgcgggcctcctgctccccccaagattaacacaaagtcagtatcgaagtgcaaattgttaaaacttttagatt

SEQ ID NO: 864174 - DNA, 667 bp, Homo sapiens
tataacacaagacagcatttatgacacttaacgagttgcttcagttttctaatttttaaaatagggataaagtatctttcaggactattttcagtatttatttaattagataattcatgtgaatagtttgtcacaaattaaacactccatatatttaaatcattatcatattggcttattctcattattctcatagtyagggaaagtaggatatcagcaacccctcagctactgctgtgtagactggaagcccctaaaaacacttttaaaagcacattattttaaataattttttgaaatgaagtaatcagccgtagagttttactttggggacatctataatatttttagacctctaaactgtgtgcttatagcagcatatttatagaaagactgtattttttcaattgtaccatgttatcgtagtaatctttttgaaaagttaagcaatagatgaagcctcctttatatttgaaggcctattgggtggataaacaggactgggagatactgagagttggagccctttcatatgcctgcaaccaatgcccattcatggctgaagaatgcaggaaagacagtataaacatgcttaagcctttccactgtgtgtttctgcctctccaagcttctcctatgtatgtgtttgtgtgcacgtgtatgtata

SEQ ID NO: 864175 - DNA, 651 bp, Homo sapiens
ttttttcctctgcatagattgccttctcaatctgttgattgttccttttgctgtattgaagcattttagtttgatgcaatcctacctgtctgttttacttttgtctattttacttttgtctattttactttttcagtctgtgctttttacttttgcagtctgtgctgtttttctttttgctttttttctttttactttttctgtttactttttcagtctgtgctgttttactttttctgtgctgttttactttttttacttttttactttttttacttttttacttttttattttttacttttttacttttttaatttttttacttttttactttttttactttttttacttttttacttttttacttttctgtgctgttttactttttttacagtctatgctgttttactttttcagtctgtgctgtttttctttttactttttttccttttactttttctgtttaccttttcagtctgtgctgttttactttttcagtctgtgcytttggtgtgacatccaaaacatctttactgagaccaaaatcaacaagactttcctctccgttttcttatagttattttctttcagtcttacatgtaatatttaatccactttgaatttatttttgaacaggatgtttaataatg

SEQ ID NO: 864176 - DNA, 635 bp, Homo sapiens
gaacatttgaaggaaagggcttgttatcaatattgatagcagaaagtagtctgtctcacacgagtgcatccacagatgctctggtccatctcctccggactccctaaaacctgttctgttcatattgctactttctctccagtttctcctttcctaatggctctttctcattaagattttaataaactgaaagccagttccacatgaaggagaatcaaactctctggctctctattagccatcccctctccctcttccccttctcagcctaactttttagaccgctttttcccagatcatccgaartgcactcctcaatccactgcagtctcttttggttccaatcaccccactgaaactgttctttaagattagtaaaattgggccaggtacagtggctcacacctgaaatcccagcactttgggaggccaaggcaggtgtttcacatgaggtcaggagttcgagaccagcctggccaacatggtgaaaccccatctctactaaaaatacacaaattagctgggcatagtggtgtgtgcctgtagtcccagctactagggagactgaggcaggaggatcacttaaacccaggagatggaggatgcagtgagctgagatcataccactgcacgcc

SEQ ID NO: 864177 - DNA, 582 bp, Homo sapiens
acacatagagatttcatatctttcttaaagcatttgctaggcatttataaaaaaagatctctaatctaacatgtctaggttattgcaaatgaaagtatttattggtcattttactcttattgtttcctttttcttttctgtttttattttttctttttttgagacagggtctttcttgctctgttgtgcaggctggagtgcggtggcacaatcatggctcactgtaaccgtgaactcgcaagctaaaacgattctcccgtctcaacctccatagtagctgggactataggcatgctccaccacacccagctaattttttattttttgcagagactgggaatcttgctatgttgtccaggctggtctcaaacttctgacctcaagttatcctcccacttcagccttacaaagcacaggtgggagtcactcmgccagaccttttgtgttctttatacttttgtgtctttacctgtttattccagcttcctggaaccttcatgtatttgagattgttactctcccaccatgacttaatggcctcttttcactcccttttccttcatagttaaagagtttttggtg

SEQ ID NO: 864178 - DNA, 636 bp, Homo sapiens
tcgcataggatttcaaagggagatggagtattcagggaagtcatctcctaagaagtagcatacaatgtaaaccctgtgatttaaaaagtcagtcatgtgaagatccagggcagaggtgagcaaactcatctgtaaagagctaggcagtgcaaatgcttggctttgccaggcacacagtctttggcataatgactttgcagtgcaaaaactgtcatagacaatacttagtgattgagtgttgatttattccaataaagctttatttacaaaaacagccagttgggcatatacggttcatgggccaaagtttgccaacccttgacttaggggaagagtcatccagataaagaaatcaaaaggtgaaaatccctgaggcagaaaaaaatttgtaagtttaagtgaaagaaagaaagaaagatttcattctttatcaagaataaaatcagaggagattaggayatgagagaccgtgctcatctgtcccttagatttggcaactaaatgggagagaagttatactgaaatcagttctaatgtacacacaattctatatgttttctaacttacttgtcctagcaccaacactcattgatatccatggaattaattattaatacattcaaagctgttttatta

SEQ ID NO: 864179 - DNA, 641 bp, Homo sapiens
ataaaatatgatgtctgggtacatcagagccagagaacagtgcaggctcagaacaccagccagcgcaccaagcaggggttcacttgggagcccaagttgttttcattctgcttgaatcacctggaaattagggccagggcaggagtaggaactggcttggaacatagcagcatcataagaacaycacaatttgatttattagacttataagcacctgagagaagaaagggaatctccctcattcatccaatcccctccatctggttcttggatctccctcagaaacaccagcttacactgaaactcctcccctgattatctgcagaggctgcccagttcataaaacatttctatcatggtaagtcagacatttttccacccccttccctgggttccttgactcctcaggggtggggaaatacatatatatttattaactgatgagttaatgaattgacaacatagcacatttttgaaacaatagtcagccatccctacatgaaaaaatataggctgatatcctttgttcttgatacctgttttctgctttctttctctctttattgatttattttttgaaaacaaagatgtaaagtgtgaaattggatcaacaacttctataaggaagcagcagagtatag

SEQ ID NO: 864180 - DNA, 641 bp, Homo sapiens
ataaaatatgatgtctgggtacatcagagccagagaacagtgcaggctcagaacaccagccagcgcaccaagcaggggttcacttgggagcccaagttgttttcattctgcttgaatcacctggaaattagggccagggcaggagtaggaactggcttggaacatagcagcatcataagaacaccacaatttgatttattagacttataagcacctgagagaagaaagggaatctccctcattcatccaatcccctccatctggttcttggatctccctcagaaacaccagcttacactgaaactcctcccctgattatctgcagaggctgcccagttcataaaacatttctatcatggtaagtcagacatttttccacccccttccctgggttccttgactcctcaggggtggggaaatacatatatatttattaactgatgagttaatgaattgacaacatagcacatttttgwaacaatagtcagccatccctacatgaaaaaatataggctgatatcctttgttcttgatacctgttttctgctttctttctctctttattgatttattttttgaaaacaaagatgtaaagtgtgaaattggatcaacaacttctataaggaagcagcagagtatag

SEQ ID NO: 864181 - DNA, 538 bp, Homo sapiens
ccttaaaacagctctgtatttctcatcagaaggtctagaaaatgggtcacaattcagagtgcggaagataaaaaagcgataggtcctacggtgttctcgttctcacaccagtggtcatctgtttcacactgaaatctgtttcacactgaaaccttcacaggccatctgacccataatgaaggagccatcagactgaaatgcagctttatcctcctgagtcaccagaaagagtcawgggcctgtaagaatagtaatcacccaagagtagtcatgatgtgttaagcaaatgagactgaagcacatagtatgtgcttacaggcagatgtcacatggctgctctaggaggaagctatagtaagagagacacaggaggtggttcaggaagagctgagctaaggagtcctaacacattagggaaaggagacagtgtttccatctatgtggataagttaaccagaacaacaaacttgcctaatttgataattgcctacatatcaggacaaataataacaaggaaagagtgttgcatctgatgaca

SEQ ID NO: 864182 - DNA, 538 bp, Homo sapiens
ccttaaaacagctctgtatttctcatcagaaggtctagaaaatgggtcacaattcagagtgcggaagataaaaaagcgataggtcctacggtgttctcgttctcacaccagtggtcatctgtttcacactgaaatctgtttcacactgaaaccttcacaggccatctgacccataatgaaggagccatcagactgaaatgcagctttatcctcctgagtcaccagaaagagtcaagggcctgtaagaatagtaatcacccaagagtagtcatgatgtgttaagcaaatgagactgaagcacatagtatgtgcttacaggcagatgtcacatggctgctctaggaggaagctayagtaagagagacacaggaggtggttcaggaagagctgagctaaggagtcctaacacattagggaaaggagacagtgtttccatctatgtggataagttaaccagaacaacaaacttgcctaatttgataattgcctacatatcaggacaaataataacaaggaaagagtgttgcatctgatgaca

SEQ ID NO: 864183 - DNA, 635 bp, Homo sapiens
ctctcataggatggtaccttacgagggactcagggccactctcttgctggcaggtcggatgttcagcagtggtgtcctggtatgctgtagacaggatgcttaaaaatattaccagtgtggcagcctctggaatccttttctcttctcttctagagcacatggatccttagcaaggtctccacagtattcacattttgtgttcatcaaatcygattcacatgacattatcaatattgtggatcagcatgctgtattgtaggatgctcacaatgcctagatcttttgcgactatactgtgacaaagatcaggagaattaccatatccctagttcagcacagagtgttaacaccactgtctgttccaggtgaaatggattcacttctgatgctgcttcctggtggttattgaaaaggacacatttgccagtttggttgccatacaccccatattggagactgtgttcatttgtcccagaaatgattctacatgcatcaatcacattggctataattagatttttatttgacagagtttgtgttcatccactgtcatctgccatgatctatgtggtttttgttgggtctgaactagtgaatcatatgaaggtggtattcacctctcctgcatttgtaag

SEQ ID NO: 864184 - DNA, 635 bp, Homo sapiens
ctctcataggatggtaccttacgagggactcagggccactctcttgctggcaggtcggatgttcagcagtggtgtcctggtatgctgtagacaggatgcttaaaaatattaccagtgtggcagcctctggaatccttttctcttctcttctagagcacatggatccttagcaaggtctccacagtattcacattttgtgttcatcaaatctgattcacatgacattatcaatattgtggatcagcatgctgtattgtaggatgctcacaatgcctagatcttttgcgactatactgtgacaaagatcaggagaattaccatatccctagttcagcacagagtgttaacaccactgtctgttccaggtgaaatggattcacttctgatgctgcttcctggtggttattgaaaaggayacatttgccagtttggttgccatacaccccatattggagactgtgttcatttgtcccagaaatgattctacatgcatcaatcacattggctataattagatttttatttgacagagtttgtgttcatccactgtcatctgccatgatctatgtggtttttgttgggtctgaactagtgaatcatatgaaggtggtattcacctctcctgcatttgtaag

SEQ ID NO: 864185 - DNA, 599 bp, Homo sapiens
ttctattgtccataactacagatccctgtaagtcacagatcactctgcctagtttgccattccttgcttgctgcatatcatataatgatacctacactaattcttaaagttaaatgctacctcctggctttgctattctgggatmttatcattcccattactcctgggaagcttagttctataacaaaactttttatcacaaatgctgactttatggaataggcactactaaatttctcattgatgttggtggctctcttacctgctcattccttactgcttttgtaaacagaatgtctccaagactcaccccagaaatatagtcaggtgcttggccttaagaccagagctattttaatatttccacttctctgtacttttttttttttttgagatggagtcttgctctgtctcccaggctggggcgcagtggcgagatctcagctcactgcaacctctgcctcccaggttcaagcaattctcctgcctcagcctccagagtagctgggactacaggcacgtgccaccacgcccggctaactttttgtatttttagtagagttggggtttcactatgttagccaggatggtctcaatct

SEQ ID NO: 864186 - DNA, 599 bp, Homo sapiens
ttctattgtccataactacagatccctgtaagtcacagatcactctgcctagtttgccattccttgcttgctgcatatcatataatgatacctacactaattcttaaagttaaatgctacctcctggctttgctattctgggatcttatcattmccattactcctgggaagcttagttctataacaaaactttttatcacaaatgctgactttatggaataggcactactaaatttctcattgatgttggtggctctcttacctgctcattccttactgcttttgtaaacagaatgtctccaagactcaccccagaaatatagtcaggtgcttggccttaagaccagagctattttaatatttccacttctctgtacttttttttttttttgagatggagtcttgctctgtctcccaggctggggcgcagtggcgagatctcagctcactgcaacctctgcctcccaggttcaagcaattctcctgcctcagcctccagagtagctgggactacaggcacgtgccaccacgcccggctaactttttgtatttttagtagagttggggtttcactatgttagccaggatggtctcaatct

SEQ ID NO: 864187 - DNA, 599 bp, Homo sapiens
ttctattgtccataactacagatccctgtaagtcacagatcactctgcctagtttgccattccttgcttgctgcatatcatataatgatacctacactaattcttaaagttaaatgctacctcctggctttgctattctgggatcttatcattcccattactcctgggaagcttagttctataacaaaacttttwatcacaaatgctgactttatggaataggcactactaaatttctcattgatgttggtggctctcttacctgctcattccttactgcttttgtaaacagaatgtctccaagactcaccccagaaatatagtcaggtgcttggccttaagaccagagctattttaatatttccacttctctgtacttttttttttttttgagatggagtcttgctctgtctcccaggctggggcgcagtggcgagatctcagctcactgcaacctctgcctcccaggttcaagcaattctcctgcctcagcctccagagtagctgggactacaggcacgtgccaccacgcccggctaactttttgtatttttagtagagttggggtttcactatgttagccaggatggtctcaatct

SEQ ID NO: 864188 - DNA, 599 bp, Homo sapiens
ttctattgtccataactacagatccctgtaagtcacagatcactctgcctagtttgccattccttgcttgctgcatatcatataatgatacctacactaattcttaaagttaaatgctacctcctggctttgctattctgggatcttatcattcccattactcctgggaagcttagttctataacaaaactttttatcacaaatgctgactttatggaataggcactactaaatttctcattgatgttggtggctctcttacctgctcattccttactgcttttgtaaacagaatgtctccaagactcaccccagaaatatagtcagstgcttggccttaagaccagagctattttaatatttccacttctctgtacttttttttttttttgagatggagtcttgctctgtctcccaggctggggcgcagtggcgagatctcagctcactgcaacctctgcctcccaggttcaagcaattctcctgcctcagcctccagagtagctgggactacaggcacgtgccaccacgcccggctaactttttgtatttttagtagagttggggtttcactatgttagccaggatggtctcaatct

SEQ ID NO: 864189 - DNA, 621 bp, Homo sapiens
ctcccttctctttttcttttttgtttcttttctctttcctcctctcatcttctgttccttctcttcctctcctctgcttcttccttcttttagagcttgtggctctccatcacatttaaacagcaaagatttgacttgagtggagctaattgtagrtctcagacaagttttcgtaagtgcgcccatatatcttgcatgttagtgtgcttggattaatttccatctgtcagagtccgcatctctgtggccaagggctcttgtattgcagctgtagaaagtcatgccacctgtgaatgcaacacagagaaaaacactcaaccaatgattctggagagctgatttataaagactctagcttcctcattcctgaagtaggataattctagctgtgtgtttttcatcatttctgatagttttccctttagtttaagctttagttggtgactgtgatactgactttatagtgtacccttttctgtatcacttccccaattcctaccggtgtgatctgcacttcccagtaaactagtttcactggaatcttttcttcaaagtcttttcgggagaaactaatctatgacattatgttaactccctcagcctcaattttcttatctctac

SEQ ID NO: 864190 - DNA, 621 bp, Homo sapiens
ctcccttctctttttcttttttgtttcttttctctttcctcctctcatcttctgttccttctcttcctctcctctgcttcttccttcttttagagcttgtggctctccatcacatttaaacagcaaagatttgacttgagtggagctaattgtagatctcagacaagttttcgtaagtgcgcccatatatcttgcawgttagtgtgcttggattaatttccatctgtcagagtccgcatctctgtggccaagggctcttgtattgcagctgtagaaagtcatgccacctgtgaatgcaacacagagaaaaacactcaaccaatgattctggagagctgatttataaagactctagcttcctcattcctgaagtaggataattctagctgtgtgtttttcatcatttctgatagttttccctttagtttaagctttagttggtgactgtgatactgactttatagtgtacccttttctgtatcacttccccaattcctaccggtgtgatctgcacttcccagtaaactagtttcactggaatcttttcttcaaagtcttttcgggagaaactaatctatgacattatgttaactccctcagcctcaattttcttatctctac

SEQ ID NO: 864191 - DNA, 663 bp, Homo sapiens
tgatcagttgcagaaacctaaattccttagaagcagagaatgaagctcttgacttttgagtcaaagctgagaccatgactcaaaattgagaacacacgaagctggcacatgatccacaaagtgtaaggaaaaagagaatcaggatgaagtattctgccctccctcaagtagattcccaagattttaaacaggtagagaattcataaaaatttgggtgagagcatggtggctgtcagcagcaaattaaattagtcccccaaaagataagtcagttgagcagaaagttgttgtgtgaggatggtggttctcttgggacttgatcagcagcaaaaaggctgacagcagctgkacacacaggtgggctggaagcaagtggtctcacagcaggctgggcggcagcagggctggcagcagttggagccacagctctggtttaggcaaccaggcaggcagacagttgtggggtagtagcaggttcttctgcagtacacaggtgcacaggagctgctctggtcacagctggacccacagcaggtgggctggcagcagggtgtgctgcagcaggaaggctggcagcagctggtcacacaggtgggctggcagcaggtgttttgacagcaagttgggcggcagcaaggctggcagcagctggaaacacagcag

SEQ ID NO: 864192 - DNA, 581 bp, Homo sapiens
ttaaatagttaataataatgtacacaaagcatttatccagtacccatcatagagcaggcaacacagaattagtgttttttgttcagaaaattcccaagttttatgttgaagataagaatatttttgtaataattaaatagatcaactaaatacgtttttttctagctgtattgaggtatwattgacaaacaaaaattgtgtacatttcaggtatagaaggtgatgctctgatatatatattgattgtgaataacatatttattaggtcacttagttaccatttcctttttatttttctggtgtgaacatttaagatctaccttctcagtaaatttcaggtatatgataaagtgtttttaactatagtcatattactgtacattagacctactgaacttattcatctttcataactgatgctagtcaaagagaatgtcctagttttcatctcctttacttcatccctgaacgatgatgacagtaagtggctgttgtctcttagccaagtcttcagagcattctagattcacagtctcagaagtggcatctgtcatggaaatctacattgttagctcatcaga

SEQ ID NO: 864193 - DNA, 646 bp, Homo sapiens
atttggtcttttcagatagtcccatatttcttggaggctttgttcctttctttttactcttttttctctaaacttctcttctctcttcatttcattcctgtgatcttcaatcactgataccctttcttccagttgattgaatttgctactgaagcttgtgcattcgtcacgtagttctcatgccatggttttcagctccatcaggtcatttaaggacttctctacactggttattttagttagccatttgtctaatcttttttcaaggtttttagcttctttgcaatgggttcgaacttcctcttttagcttggagaagtttgwtcatctgaagccttcttctctcaactcatcaaagtcattctccatccagctttgttccgttgctggcaaggagctgtgctcctctggaaggtgagaggcacctgatttttagaattttcagcttttctgctctgtttctccccatctttgtgattttatctacctttggtctttgatgatggtgacatacagatggggttttggtgtggatgtcctttctgtttgttagttttccttctaacagtcaggaccctcagctgcaggtctgttggagtttgctgaaggtccactccagaccctgtttgcctgggtatcggcagcg

SEQ ID NO: 864194 - DNA, 646 bp, Homo sapiens
atttggtcttttcagatagtcccatatttcttggaggctttgttcctttctttttactcttttttctctaaacttctcttctctcttcatttcattcctgtgatcttcaatcactgataccctttcttccagttgattgaatttgctactgaagcttgtgcattcgtcacgtagttctcatgccatggttttcagctccatcaggtcatttaaggacttctctacactggttattttagttagccatttgtctaatcttttttcaaggtttttagcttctttgcaatgggttcgaacttcctcttttagcttggagaagtttgttcatctgaagccttcttctctcaactcatcaaagtcattctccrtccagctttgttccgttgctggcaaggagctgtgctcctctggaaggtgagaggcacctgatttttagaattttcagcttttctgctctgtttctccccatctttgtgattttatctacctttggtctttgatgatggtgacatacagatggggttttggtgtggatgtcctttctgtttgttagttttccttctaacagtcaggaccctcagctgcaggtctgttggagtttgctgaaggtccactccagaccctgtttgcctgggtatcggcagcg

SEQ ID NO: 864195 - DNA, 578 bp, Homo sapiens
agcttggggtgcagaaaacaacttggcttgtttccatcctgggggtccttctgatgacagaaactcaatcctgtccagattttctcagccacatcctggtttctccctccctcctcctgcccagggagagccccgggcctgggggctgacttggtgcaggggtgtgggtcgggttgctgagagcagtgttcayggaccccgagggagctgtggaggggccctgaggccttctgtccacaaagaggggagcagggcctggtggggtaccactgggggacattccctcctgcctcttacaccagccagggaatctttgttgagtctagggcagggcagggctgggcagtctccgtcagctcctaaccaagcatccgcaagagtaacatgctctgaatccttcaggagacggactgttgcgaaaccttttagactgataattgccatcagttttaaaggtcagtttaggaactccatgctccaaattgccacatttgttctctgctgttatcatcactcaccccgaggtgggcagctgcttcagccacataatttatttaaagaaaaaaaaataattgcag

SEQ ID NO: 864196 - DNA, 578 bp, Homo sapiens
agcttggggtgcagaaaacaacttggcttgtttccatcctgggggtccttctgatgacagaaactcaatcctgtccagattttctcagccacatcctggtttctccctccctcctcctgcccagggagagccccgggcctgggggctgacttggtgcaggggtgtgggtcgggttgctgagagcagtgttcacggaccccgagggagctgtggaggggccctgaggccttctgtccacaaagaggggagcagggcctggtggggtaccactgggggacattccctcctgcctcttacaccagccagggaatctttgttgagtctagggcagggcagggctgggcagtctccgtcagctcctaaccaagcatccgcargagtaacatgctctgaatccttcaggagacggactgttgcgaaaccttttagactgataattgccatcagttttaaaggtcagtttaggaactccatgctccaaattgccacatttgttctctgctgttatcatcactcaccccgaggtgggcagctgcttcagccacataatttatttaaagaaaaaaaaataattgcag

SEQ ID NO: 864197 - DNA, 669 bp, Homo sapiens
tcttcagatcctccatctggaatacgtgaagatttaatgagatgatatctatataacacgctttgaaaaatgcctgacacgtaaagatcacttaataaatgttggttattcttactgtattaaacatcccaattattagatggtataacttgcccaggttcacacaactcagaagatacaagaggaaaacttgagttggttttgtcagctcttytgcagacgtagggggctaaatgagtaacattctgaaatgaagtcttcggcatctccaagggataaggatgcctggaaatttcacctttggggcacattctataaactgtacaaaattaaatccctcacttcatttccccagaaagacccctctgaagcattgctctgtatccttgcaaatctgtaccacgagacaaggggatgtcagtaggatttggtctccccacaaaatccctgcaaagatgtatgaggctgcatataaattgcattgaatgggctaacattgcttttatgctgaatatcggcaaaaagtatgaaatggagattacattttcaattctggctttttcccccaaagctttaccaagctgccctcatcctcacccctccatcatagtgcaattgcattggtgtggagtcctagctctcctttccttgctgggaagtgtacctaac

SEQ ID NO: 864198 - DNA, 669 bp, Homo sapiens
tcttcagatcctccatctggaatacgtgaagatttaatgagatgatatctatataacacgctttgaaaaatgcctgacacgtaaagatcacttaataaatgttggttattcttactgtattaaacatcccaattattagatggtataacttgcccaggttcacacaactcagaagatacaagaggaaaacttgagttggttttgtcagctcttctgcagacgtagggggctaaatgagtaacattctgaaatgaagtcttcggcatctccaagggataaggatgcctggaaatttcacctttggggcacattctataaactgtacaaaattaaatccctcacttcatttccccagaaagacccctctgaagcattgctctgtatccttgcaaatctgtaccacgagacaaggggatgtcagtagsatttggtctccccacaaaatccctgcaaagatgtatgaggctgcatataaattgcattgaatgggctaacattgcttttatgctgaatatcggcaaaaagtatgaaatggagattacattttcaattctggctttttcccccaaagctttaccaagctgccctcatcctcacccctccatcatagtgcaattgcattggtgtggagtcctagctctcctttccttgctgggaagtgtacctaac

SEQ ID NO: 864199 - DNA, 691 bp, Homo sapiens
ggaatttctctagtgtgatagtggcatcagctccacattctccccagcatgtcgaatttgtaacaaagctagatgtgaagagtcttccccagaacatccctcaataatttgttttaataatagacattttcagcttaaatgtgagtttttatcggagatttcccccttcccaatttgtgtcagcaaccgttattaaattcctaggaaaakgcaaatgttggggcttggtcagaagtgaggccgacgtataggtgccagttccagcctgatgttccccaccgatgtccatgtgctgactcagtaaacaactgcctttcttctgaatggtctatgtgagctgttgattatcatgttcttaaagaaggctgaatatcttgtgcctttcttgttaagcctgtgtgtcttgggacagctacacacactctctaagttacagttttctgagctttgggtgaggggatgttcgtctttttctgcctgcagcactgggcctcgggaagcaacttagggttttggctagagcaaggacagatctgacatctagtccttcttctgtgttttctgtcaatcccagtttccctctctttcaacctgagctggtagcactatccttttactgtttagagggttaagagagataacacctagtatatagtagctgctcagaaaatttctcgtttccacaaatgag

SEQ ID NO: 864200 - DNA, 691 bp, Homo sapiens
ggaatttctctagtgtgatagtggcatcagctccacattctccccagcatgtcgaatttgtaacaaagctagatgtgaagagtcttccccagaacatccctcaataatttgttttaataatagacattttcagcttaaatgtgagtttttatcggagatttcccccttcccaatttgtgtcagcaaccgttattaaattcctaggaaaagkcaaatgttggggcttggtcagaagtgaggccgacgtataggtgccagttccagcctgatgttccccaccgatgtccatgtgctgactcagtaaacaactgcctttcttctgaatggtctatgtgagctgttgattatcatgttcttaaagaaggctgaatatcttgtgcctttcttgttaagcctgtgtgtcttgggacagctacacacactctctaagttacagttttctgagctttgggtgaggggatgttcgtctttttctgcctgcagcactgggcctcgggaagcaacttagggttttggctagagcaaggacagatctgacatctagtccttcttctgtgttttctgtcaatcccagtttccctctctttcaacctgagctggtagcactatccttttactgtttagagggttaagagagataacacctagtatatagtagctgctcagaaaatttctcgtttccacaaatgag

SEQ ID NO: 864201 - DNA, 691 bp, Homo sapiens
ggaatttctctagtgtgatagtggcatcagctccacattctccccagcatgtcgaatttgtaacaaagctagatgtgaagagtcttccccagaacatccctcaataatttgttttaataatagacattttcagcttaaatgtgagtttttatcggagatttcccccttcccaatttgtgtcagcaaccgttattaaattcctaggaaaaggcaaatgttggggcttggtcagaagtgaggccgacgtataggtgccagttccagcctgatgttycccaccgatgtccatgtgctgactcagtaaacaactgcctttcttctgaatggtctatgtgagctgttgattatcatgttcttaaagaaggctgaatatcttgtgcctttcttgttaagcctgtgtgtcttgggacagctacacacactctctaagttacagttttctgagctttgggtgaggggatgttcgtctttttctgcctgcagcactgggcctcgggaagcaacttagggttttggctagagcaaggacagatctgacatctagtccttcttctgtgttttctgtcaatcccagtttccctctctttcaacctgagctggtagcactatccttttactgtttagagggttaagagagataacacctagtatatagtagctgctcagaaaatttctcgtttccacaaatgag

SEQ ID NO: 864202 - DNA, 691 bp, Homo sapiens
ggaatttctctagtgtgatagtggcatcagctccacattctccccagcatgtcgaatttgtaacaaagctagatgtgaagagtcttccccagaacatccctcaataatttgttttaataatagacattttcagcttaaatgtgagtttttatcggagatttcccccttcccaatttgtgtcagcaaccgttattaaattcctaggaaaaggcaaatgttggggcttggtcagaagtgaggccgacgtataggtgccagttccagcctgatgttccccaccgatgtccatgtgctgactcagtaaacaactgcctttcttctgaatggtctatgtgagctgttgattatcatgttcttaaagaaggctgaatatcttgtgcctttcttgttaagcctgtgtgtcttgggacagctacacacactctctaagttacagttttctgagctttgggtgaggggatgttcgtcttkttctgcctgcagcactgggcctcgggaagcaacttagggttttggctagagcaaggacagatctgacatctagtccttcttctgtgttttctgtcaatcccagtttccctctctttcaacctgagctggtagcactatccttttactgtttagagggttaagagagataacacctagtatatagtagctgctcagaaaatttctcgtttccacaaatgag

SEQ ID NO: 864203 - DNA, 645 bp, Homo sapiens
aggacctatgcagacagatttaagtaaggagaattatttcttttgaattggagagattattctatagtatccagatgagtccagtgtaatcacaacagtacttacaagggggaacacagaggtgtagagtcagagtcagagaggaagaaaatgtaataacagaatcagaaactggagtaatgcattttgaagttggagaaagagaccacaaggtaaggaattaaggtggtcattagaagctcaaaaatggcaaagaaaccgatgatcctctcagagcctccagagccctggtgacaccttgactttacgtcagttgagaaatcagaactaaaagagaakatgtttgcattgtgtgaagccacaatgtttctggtaatttgttataacaacaatagaacgctgataaaatcatcattatcattgtcatcatcattatcgtcatctcagtaggtgcttggttttagtttgggttcttataattttgcattctcaaatagaaagtcaaaacaatttcttagttatttgaagaaccacactgataagcaatggcaccttttattttttgagattttcttattggcttgtgaatgatttcttctccgagagtggttatggaggcttaaacagtatgtcatgagttagcaa

SEQ ID NO: 864204 - DNA, 645 bp, Homo sapiens
aggacctatgcagacagatttaagtaaggagaattatttcttttgaattggagagattattctatagtatccagatgagtccagtgtaatcacaacagtacttacaagggggaacacagaggtgtagagtcagagtcagagaggaagaaaatgtaataacagaatcagaaactggagtaatgcattttgaagttggagaaagagaccacaaggtaaggaattaaggtggtcattagaagctcaaaaatggcaaagaaaccgatgatcctctcagagcctccagagccctggtgacaccttgactttacgtcagttgagaaatcagaactaaaagagaatatgtttgcattgtgtgaagccacaatgtttctggtaatttgttataacaacaayagaacgctgataaaatcatcattatcattgtcatcatcattatcgtcatctcagtaggtgcttggttttagtttgggttcttataattttgcattctcaaatagaaagtcaaaacaatttcttagttatttgaagaaccacactgataagcaatggcaccttttattttttgagattttcttattggcttgtgaatgatttcttctccgagagtggttatggaggcttaaacagtatgtcatgagttagcaa

SEQ ID NO: 864205 - DNA, 645 bp, Homo sapiens
aggacctatgcagacagatttaagtaaggagaattatttcttttgaattggagagattattctatagtatccagatgagtccagtgtaatcacaacagtacttacaagggggaacacagaggtgtagagtcagagtcagagaggaagaaaatgtaataacagaatcagaaactggagtaatgcattttgaagttggagaaagagaccacaaggtaaggaattaaggtggtcattagaagctcaaaaatggcaaagaaaccgatgatcctctcagagcctccagagccctggtgacaccttgactttacgtcagttgagaaatcagaactaaaagagaatatgtttgcattgtgtgaagccacaatgtttctggtaatttgttataacaacaatagaacgctgataaaatcatcattatcattgtcatcatcattatcgtcatcycagtaggtgcttggttttagtttgggttcttataattttgcattctcaaatagaaagtcaaaacaatttcttagttatttgaagaaccacactgataagcaatggcaccttttattttttgagattttcttattggcttgtgaatgatttcttctccgagagtggttatggaggcttaaacagtatgtcatgagttagcaa

SEQ ID NO: 864206 - DNA, 560 bp, Homo sapiens
aaaaaaaaaaatccagcctcacctttctttctgggtggaggaaaaggcatccattcactttaagaagaaaacaaatcatttgtattcttcttgtctggacacaatttttaacccagaattatccacctagttcctcccatctccaggccttgtaagtcgataggagatttgcaaatatctcccttaaagaaaggcaacgaggagagcatttaatccatgctttaaatgcaaaatgtcttgagtcccaacgctgctcagtttttcctgaagataaattttagctggattaaataactgttttaaaggcactattcatgcaagtgctgtctcatttgtgactgtatctgcattgctaatgsatgtgtcttttcctcatgcatattctttcctgagcatctaccgccaaatttacagattgcttgcttgtcaaattgggatggggtttgaggaagaggtgacaatgatctaggtggaaaagagaagtgccagtgtgttcaaagctaatagaaaattgttgctttgtattagcagtcaaggctccaggtttcctgaaccacaaa

SEQ ID NO: 864207 - DNA, 637 bp, Homo sapiens
ggcctaatatgccaacttctgatatagtacagctcaattagcctggcatggttgtgcacaaatgtagtcctagctgctttggaggcagaggtgagaggatcagttaagcccgcccagagtttgacgttgcgctgagctaggatcatgccactgtgcttcagcatgggtgacagaggacccatttcttaaaaaccaaagaaaaaaaaaagacagctgttattttcctaagatatcctctttaaagagaaatggaacaagtgacctgccttcctctatatgaggtggggctcacaccagggttctcctgctcaccattggcccaggaaactcaggaaattaatgctgcatgcgcatgacttggcgattcgacctctgaaagytctgcaaggctaggaatttatgctttaagaacaatcagcatcaaaggccttggcagtggtggagctgttagcatattagttccatttgagatggtgaaatgccttggaaactaaaaaccctacctaataaagtttattttcaaaggattagaggtagagttttgctctgagagatgatgttgcctaagcctcccattacagaagagcagagatgggactctagggattcatggatgtgccagcgtcactgggtagtg

SEQ ID NO: 864208 - DNA, 604 bp, Homo sapiens
atcaaggttgcagtaagctcagatcgtgccactgcacttcagtctgggaaacagagtgagaccctgtctcaaaaaaaaaaaaaaaaaaaaagtgcatgaagccacacaaataagttcctggtgcttgtgaaggagatgagggtgggaggcagcttccaaatagttaggtgtggtycaagaagcaggggtagagagatccactataaagctgcgtgttaaccctttagttagttgctggatcctaggaagccctagatgattccagggagaggcattgaagggcagctcttgaccaaccagtatggaaaccgtcctatattttaactaccagtgtggtcttcctggtcacagctcttgatgttggctatatttgctatatttgagtatattcacaggtttccaaccctagaattcttgggtcaaatggtataaactcttttagtcttaatgagtctgttatcaaactttctcttggagtcttttttttcataaaaataaaacagtaatagtaatagatggcatttatgagagcaaagcaacatactaaaggctttttatacttgatgtcctgcaattttcccaagagggctatgccacaggcact

SEQ ID NO: 864209 - DNA, 653 bp, Homo sapiens
taaaatgtcaacaaacatggtgcagcaaggttattacacacatcagaggaggaaggtttttgtaagtcaagttcccaaatgagcttcttctttgtctagttttagtcattctgcagggaagtgggtggcatacaagtcttgagtataaaccagatcccaaattcagaggtccattgtaagattgcaatatgccatcaggagcatgtataaatcattgttttttgagggtttgccatctacaagtgttttgagtgttgatgcagactagaaaactttctgaacacaacctccartccttggtgtgtgatcctgtctgagtgagccatcctaggaaataaaagacaacgactcacttagttgcttctcaaaacttattcccctggtgggagctatttattatctatcaacccttagtcaggtatccttaacactgcagttatccccgcaggccaagacagtttgtctcaagtaatcacacactatggtgttcatattttaaaagaagaattaaaaatggatttctagagtagaagaaccaaagtaataaggaggttgagaagtcatcttttcccaggaatatttcgaggtctggcatgtttaattcaaaaagagagattaaagaaggaagatgatagttgtttaaaaacacacga

SEQ ID NO: 864210 - DNA, 591 bp, Homo sapiens
ttttaagtcaaaaacttgaacatggcttggaggagagagtttaagctccataatccccggtcctgagcaaagcagtaacatgcctgcaatttcctttttggaagagagaagtcaaggaaacagccattgggcagagcatcctggcgccctccgtgagcctggtgggagcagacgtttcacaggctcctggggccactgctaggcagctgggcctgttttctctcaatgcccacacagttatgtgctgggtttcaatcgttgagaaaagaaagaaagaaagaaaaccacggggcagcttttctgtccctataccccaatcttttccactttccgtgcctgggttgagccagccctttgaggtagccaccataccagctaccrctggtctttgctgaacctgctgtcctggaatctatgcgttctgcctacagcctcttctgtccttgtccaccagtcatcacagcatcactgagtcatcatcaccaggagagtgaagtggacttcagatcaaatccctcaagctccccaggtttagattttctcatcccagacatgagaaaattgaaccagataacactctaaggtatcagc

SEQ ID NO: 864211 - DNA, 658 bp, Homo sapiens
agaaagttacagcagaggtaggaaaaatagcaagagaattagaagcggagcctggagatgtgactgaattgctgcaatctcatgataaaacttcttttccttttagttgatatggaataattgtacatatttatgggatacagagtgatattttgatacatgtatacaayatgtaaaaataaaatcagggtaattagtatatccatcacctcaaacatttatcattttttgtattgtgaacatttaaaaatctctcttctgagccgggtgcagtggctcacggctgtaatcccagcaccctgggaaactgagtcaggtggattacctgaggtcgggagttcaagaccagcctggccaacatggcaaaaccccgtctctactaaaaatacaaaaattagcctggtatggtggtgggtgcctgtggtcccagctactcaggaggcagaggcacaagaattactttaacctgggaggcggagcttgcagtgagccaatatcgcaaccactgcactctagcctgggcgacagagcaaggctttgtctcaaaaaaaataaaaaaataaaaaaataaaaaaattctatcattttgaaaatatacaataaatgattgttaaccatgtataccctatagtgctatacaacaggggtccccaacctc

SEQ ID NO: 864212 - DNA, 622 bp, Homo sapiens
aatacaaaaattagcctggtatggtggtgggtgcctgtggtcccagctactcaggaggcagaggcacaagaattactttaacctgggaggcggagcttgcagtgagccaatatcgcaaccactgcactctagcctgggcgacagagcaaggctttgtctcaaaaaaaataaaaaaataaaaaaataaaaaaattctatcattttgaaaatatacaataaatgattgttaaccatgtataccctatagtgctatacaacaggggtccccaacctctgggcagtggattgatagcrgtccagcctgttaggaacagggccacacagcaggaggtgagcagcaggccagcaagcattaccgtctgagctctacctcctttcagatcagtgatagcattagactcttatagaagcatgaaccctattgtgaactgcacatttgagggatctagggtgtacactgcttaagagaatctaactgatgcctgatgatctgaaatggaacagtttcatcctgaaaccatcccaccccaaatctggtcagtgggaaaattgtcttctgtaaaactggtccctggtgccataaaggttggtgactgctgtgttagaagactagaacttattc

SEQ ID NO: 864213 - DNA, 627 bp, Homo sapiens
agtccatttacatgatattcaagaatatgcaaaataaatgtatgatgataaagtcagaatagtggttagctcttgggtgggtgtgcagtggagattacataggactacctatgtgtccagactcagtgactgtaagcttaagatttatgtacttatgttagacctcaatgtttatgaatgctcttacagagattccctgtattactagagatttttctaaaacatgctgtccagtgactacaaaatgtcccatttttcataaaatggccaatgatggctgatcacttatcacatgccagggactgttctaaggactgctggtactaagtgaattaatcctcaccaaaccttatgaggttagttaccaacattatccccaatttgcagatgaggaaaaccaaacrcaaaaagctaacttccttaggttaacatcatgaggggtcaccagcaatctgattaagaggtcacatgctcaaccactctgccacactgtccttctggtcaggcatcatgacacctgcccctccctctccccatgcaaacaaattgcaattgattggctattaggttggtgcaaaagtaattgcggtttttgccattactttcagtggcaaaacctgcaattac

SEQ ID NO: 864214 - DNA, 606 bp, Homo sapiens
caattttcccaaggttcattcacataggactagatggattttttgcttcaagttcactgcatttttagaagggaataattaaaaaaaaatctaagtgccacttaaaccaaatgggtaaagcacctagatagaaaatgataaaatcaggacactgccatttctattcatgaatgccttttctgtcttcatttaacttaagatatttttgattgtagagaagtaaaacatgcataaaataccagccttttcagcaagtgayaggcaactttgttgatacaaatggatttgatgattacttttcaagctgtagataaagacagaattgatggtgacagggaagagatggaacccatatgggaaaggctgaggaaataaacttgtccaggatgtatttctatgcttttttatgtacaaagaaatatacaaacatagaaatatatatatacacatagtatatatgtataatgtgtatattacatataaatatatatatctgtgtgtacacatacatgtacacacagaaggaaaatatcttttaaattgagagaagaataacagttttcccctaatctggctgaggttaagattctagcaaatatgggctcc

SEQ ID NO: 864215 - DNA, 581 bp, Homo sapiens
ggctccctgtgatcatctctgctacccatatatcatttgggtagaaaataaatgggttttaaattacctttagttccagatagacctagaaattaaatctctacacatttgaaaaaagctaataccaccttaagctgcattaatagaaatcaatttctttgtcatgggaagtaattgactcattcaycctatatttaagttagaatattcatttcttttaatcatatgctaagtgtaaaagtaacacattagagtttgtccaaagaataatgggtagtacattaagagggtctgaaagtcatgttctctataagacaacagaggattgtaattcagataaaagacgatttaagagagacctcataatggtcgtcaattattaatatataatacagtacattctatgttattcaggaggacatagcagataaacaggaggaagagatatttgattaaatggtacagagaagattccaaaggatcaagcaatcctgagttagaacaggtcttctcagaaggtgacactgactagacacacaatgtgtgaaggagtgggcaaatggctatcagttggagatgat

SEQ ID NO: 864216 - DNA, 628 bp, Homo sapiens
ttgaactgaataaaaattaaatcacacatactaagatttgtgggatgttgctaatgtagtacctacagggaaatttccagcactaaattcttatattaaaaaataatgcatgcaaggtttttagctttcagcttaaaaaactagaaagagcagagaaaactgaacctaaaataaagaaaaagacataataaagaaatcaattaaatggaaaacaaagaaaaaagaaaatccatgacaccaaccaagaactgttcttttgagaaattgacaaaattggtaagcttctagtaaaaaaaaaaagaatttaataggaaaataatatataaaaggtataaattatcaacagtacaaagggaaggaaggaatttatcactaagattctacagacaccgaaagtatactaaaaggatataatgagtaatgttatgctaataaattttacaacttatatgaaaaygacaaattccttgaaaatactttctaccaaagcttactgtagaagaaataatctggatagtcatataacaattcaagatattgaagtagttataaatctttataaaaattgtgtaggcctagatggtttcattgatgcctttctaccaaacatttaatcttctagaaaata

SEQ ID NO: 864217 - DNA, 651 bp, Homo sapiens
agagtttttcttctatagttatgagagaatataaaaaatttaataatactgtatatgtgattcaatatcttgcttttatcactaaaactacaaaattaaaacctaatatatggaatttatttccctgattagaaaactcagaatatctagttcataagtattgcaaaataactctttccaacttaaaaaattccagttagaaaatatgttttatggtgaaacaatattatattagtaaaataaaagcctgaaaaagtttcatttggtcttatttagatgaaaacaaatgaattttcaagacttgcttctcatctatacaccaatggctccatccaatctcccacacccacaaaaawtaaaaaaaaaaaaaacatttgtttttggttttattttgctgaagcatctgaaaggcagtttgctgagagccaaactgggggaaaaaatgtcttgtttagagttcaccctatctgcaaaagtcttaactttggagtcagtcacttaacattcttggttttagtatatatttcaggaaaagatgtaataaatcactccaagatacaaatgcatctgggaagcagaatcattccactggaaagcaagacaaagggggcagtgctctgcaggtactaatcagatagaaagaagcagctg

SEQ ID NO: 864218 - DNA, 651 bp, Homo sapiens
agagtttttcttctatagttatgagagaatataaaaaatttaataatactgtatatgtgattcaatatcttgcttttatcactaaaactacaaaattaaaacctaatatatggaatttatttccctgattagaaaactcagaatatctagttcataagtattgcaaaataactctttccaacttaaaaaattccagttagaaaatatgttttatggtgaaacaatattatattagtaaaataaaagcctgaaaaagtttcatttggtcttatttagatgaaaacaaatgaattttcaagacttgcttctcatctatacaccaatggctccatccaatctcccacacccacaaaaattaaaaaaaaaaaaaacatttgtttttggttttattttgctgaagcatctgaaaggcagtttgctgagagccaaactgggggaaaaaatgtctygtttagagttcaccctatctgcaaaagtcttaactttggagtcagtcacttaacattcttggttttagtatatatttcaggaaaagatgtaataaatcactccaagatacaaatgcatctgggaagcagaatcattccactggaaagcaagacaaagggggcagtgctctgcaggtactaatcagatagaaagaagcagctg

SEQ ID NO: 864219 - DNA, 601 bp, Homo sapiens
aaaccagtttggtatgaaaagaggactcacttagttttggcttattatcattcagggcacacatatttactgtctcctccatgcatgcttcccacatgttattacagaaaagatattagaaaagaaatgaatacawaacaacttcaataaatatgaacaagtggtacttgtaagaccaggaattttgaggagttttcagaagatatcaagtgaataggatcagatttaataaaataataaataaataactaggactgagaataagctccttgtagtataatagcttttcttcctaaattctcactggctccttagataaaggttaaacctgctgacaaaagtactcggagcagaagcagcttacatagggcaataactagagtacaacctatgaaagccttggctgcttttccttctcctcctttgcatattaatgctaagtttggatatggcatttgctcccatattgaaaccgtgtaaagggccttccagtaaagcaatacagtgtgtatgagtatgtgtgtgtgtgagagagagagtgtgtgtgagtgtgagtgatgtgtgtgtgtgtggtggcttcctactatgtgcctggggccag

SEQ ID NO: 864220 - DNA, 539 bp, Homo sapiens
gttaatcaaatttatacatatttgtagtggaaagagcattggattagaaatgtgcttatttataaacctgcttctacgttgacctgcattggaaatttagatagtaactttatctaatttgctttgttttctcatctggaaaaaggggagtatgagtgcaaattttgtaagggatgaatgaagtaacatgagtaaaccagtactgacaactayaaaatcatatgttcatgtgatgggttaattgtgcttccattagctttggagataatgtaagtatgaaaaaaagaataatggtcttcccaaaatgtccatattctaatccaccaaacctgtgaatgtgttaccttatatggcaaaatatattttgcagatatgattatgtcaaggatcttacgatggggagatcatcctagattatccagatgggccaaatgcaatcacaaacattctgaaaagtgggaggcagaagggtcagagttagagaaagatatgtgataacagaagcacaggctggagccatgcaaggaagggaccctgca

SEQ ID NO: 864221 - DNA, 539 bp, Homo sapiens
gttaatcaaatttatacatatttgtagtggaaagagcattggattagaaatgtgcttatttataaacctgcttctacgttgacctgcattggaaatttagatagtaactttatctaatttgctttgttttctcatctggaaaaaggggagtatgagtgcaaattttgtaagggatgaatgaagtaacatgagtaaaccagtactgacaactataaaatcatatgttcatgtgatgggttaattgtgcttccattagctttggagataatgtaagtatgaaaaaaagaataatggtcttcccaaaatgtccatattctaatccaccaaacctgtgaatgtgttaccttatatggcaaaatatattttgcagatatgattatgtsaaggatcttacgatggggagatcatcctagattatccagatgggccaaatgcaatcacaaacattctgaaaagtgggaggcagaagggtcagagttagagaaagatatgtgataacagaagcacaggctggagccatgcaaggaagggaccctgca

SEQ ID NO: 864222 - DNA, 583 bp, Homo sapiens
gagaatgtttacctaatgcctatacaaacattgcatattataagtagatgaattgcttttgatttcacaggctcataggtggaaggaacttgccttgagtctcagatgagattttggatttgggacttttgagtagatgctagaacaagttaagactttcgggaccattgggatagaatgattgtattttgcaatgtgagaaggatgtgaggcatggagagtcaagcgtggaatgctacagtttgaatatctgacccttcaaacctcatgttgaaatttgattcgcaatgttgcaggtggggtctaatgagaggtgtttgggtcatagaggcagatcccttatgaatggcttggtaccaccttyatagtaatgagcaagttattgctctattggttcctgtaagagcttgttaaaaagaacctggcaatttctctgtatctcttgcttcctctctcaccatgtgatctttgtacatgctgcctccccttccacttgcactatgagtagaaacagcctgaggccctcaccagatgcagatgctggtgccatgcttcttgtacaccagcctgtagaatcatgagc

SEQ ID NO: 864223 - DNA, 583 bp, Homo sapiens
gagaatgtttacctaatgcctatacaaacattgcatattataagtagatgaattgcttttgatttcacaggctcataggtggaaggaacttgccttgagtctcagatgagattttggatttgggacttttgagtagatgctagaacaagttaagactttcgggaccattgggatagaatgattgtattttgcaatgtgagaaggatgtgaggcatggagagtcaagcgtggaatgctacagtttgaatatctgacccttcaaacctcatgttgaaatttgattcgcaatgttgcaggtggggtctaatgagaggtgtttgggtcatagaggcagatcccttatgaatggcttggtaccacctttatagtaatgagcaagttattgctctattggttcctgtaagagcttgttaaaaagaacctggcaatttctctgtatctcttgcttcctctctcaccatgtgatctttgtacatgctgcctccccttccacttgcactatgagtagaaacagcctgaggccctcaccagatgcagatgctggtrccatgcttcttgtacaccagcctgtagaatcatgagc

SEQ ID NO: 864224 - DNA, 563 bp, Homo sapiens
cttagcttctcctagattacacaaggaggctctccttgatctccagactatttctactaggctttttaaaaccttgagtactttccatttatagcatgtactacagattgtactgatgtgtttgttactattattattttataactcaatttaagggttgaggaacagcctttcactctgtctcccgagtcaagcctttgtctttttctttaaggaatattgctgtctattctgacccaagtttgtttggcaaacattgagcccctggtgcatggaaggcctgaggtatatcctsgaggaataggtggtgggaagagataaggtccctaactctagaagctgaaccatccctaggcccctcactgctcctatcttagctcatatggccctcttctctgactttgaattctgtaagagtttcaatctctcctttgattctttagggtaaaatccaaacttctagttcctttcaggtaaaatccaaactcccagttggtatggccctccataatcaggcccctgctgctctccaaggccttaattcccagagctcttcttgcact

SEQ ID NO: 864225 - DNA, 563 bp, Homo sapiens
cttagcttctcctagattacacaaggaggctctccttgatctccagactatttctactaggctttttaaaaccttgagtactttccatttatagcatgtactacagattgtactgatgtgtttgttactattattattttataactcaatttaagggttgaggaacagcctttcactctgtctcccgagtcaagcctttgtctttttctttaaggaatattgctgtctattctgacccaagtttgtttggcaaacattgagcccctggtgcatggaaggcctgaggtatatcctcgaggaataggtggtgggaagagataaggtccctaactctagaagctgaaccatccctaggcccctcactgctcctatcttagctcatatggccctcttctctgactttgaattctgtaagagtttcaayctctcctttgattctttagggtaaaatccaaacttctagttcctttcaggtaaaatccaaactcccagttggtatggccctccataatcaggcccctgctgctctccaaggccttaattcccagagctcttcttgcact

SEQ ID NO: 864226 - DNA, 642 bp, Homo sapiens
tcttcctttagccttgtagtgagatgcctggccctggaagactgctttaggctgcaagtgacagaaagtctgactcaaagtggctcaagcagtaagaagtttgttacgtcacttaacacaataagtggtgaggcagttccatggtgaattcaacccttaagtgagccatagaagataygggtttttctcaactctccattttgccatcttagtgtgtcttttgtacccaagtttattcagaaggcttctccttacatggcatgaatagaactgtttatcacatatgcatgactatattaatgtattactctgggttctcctgagaaagagaatcaacagaatggggtgacagtgagagatttatttaagaaattggctcacatgatggctggcaaggatgatgtctacagcgtaagccgataggcaggaggcctagggaaatgttgatattgctgctcctggcctaaggcttctggaggcagaactccctttttctttggggacattggtctttttctcttaaggccttcaactcattggataaggcccacacatattatacagataatctgctttactcaaagtttactgatgcaaatgttaatctggtcttaaaaagtacctgcccaacaacatccaggc

SEQ ID NO: 864227 - DNA, 642 bp, Homo sapiens
tcttcctttagccttgtagtgagatgcctggccctggaagactgctttaggctgcaagtgacagaaagtctgactcaaagtggctcaagcagtaagaagtttgttacgtcacttaacacaataagtggtgaggcagttccatggtgaattcaacccttaagtgagccatagaagatatgggtttttctcaactctccattttgccatcttagtgtgtcttttgtacccaagtttattcagaaggcttctccttacatggcatgaatagaactgtttatcacatatgcatgactatattaatgtattactctgggttctcctgagaaagagaatcaacagaatggggtgacagtgagagatttatttaagaaattggctcacatgatggctggcaaggatgatgtctacagcgtaagccgataggcaggaggcctagggaaatgttgatattgctgctcctggcctaaggcttctggaggcagaactccctttttctttggggacmttggtctttttctcttaaggccttcaactcattggataaggcccacacatattatacagataatctgctttactcaaagtttactgatgcaaatgttaatctggtcttaaaaagtacctgcccaacaacatccaggc

SEQ ID NO: 864228 - DNA, 657 bp, Homo sapiens
ctggtctcaaagccttctactctaagctctggttcttttgattagacctaaagacaaagccatttgtaaaccaataacagatctgataactttttggttctcacttataagtgggagttgaacaatgagaacacatggacagagggaggggaacctcacacaccggggcctatcagggggtagggggaaaggggagggagagcattaggacaaatacctaatgcatgcggggcttaaaacctagatgacggattgacggatgcagcaaaccaccatggcacrtgtatacctatgtaacaaacctgcacattctgcacatgtgtcccagaacttaaaataacaaaaaatctggactaattttagatttccaaaaatgttgcagagatagtatagacagttccccacctaataatttttagaagaaatattttatagaaaagcataaagaatgatattaaaaacacatgtatactcattttccatctttatcaaatctcaacattctgccatttgattcagatttttttttaaagatataaaacaatacttggttctccatgtaagtctccttgattctaaggagacttgattctaattcttcctactcagaattaagcactctcctgatttggcatttatggttaattggcctgcttt

SEQ ID NO: 864229 - DNA, 703 bp, Homo sapiens
ttacatagaacaactttgtgggtttattcaaatggtcaggcttacaaggagtagatcgaccaatttcagagccttcttggagagaatgtacaactgataccagctttttaagatcagcatcaaaagcttatcttgggtgtgtgtgactgtttctgccgctgtccaggagatctaccagtcttacctttttaactaatgtaaaaccatttgtctcaggctgcttgacaggtggagctagtctgtaaaacttagctcatgtttttttcttttctctcccatgtttagatggatggtaagagagctgagctgcaagcagtattatgtgaataacacattttgttgcctatgtttaagaggctggttgttttgtaaaatgcctgttagttgttctctttgtttgattgttygtttgtttttgagatggagtctcactttgtcgcccaggttggagtgcagtggcacgatctctgctcactgcaacctccacctccctggttcaagcaattctcctgcctcagcctcccgagtagctgggactacaggtgcgcaccaccacacctggctaatttttgtaattttttagtagagacggggtttcaccatattggccaggctggtcttgaactcctgaccccatgatctgcctgccttggcctgctaaagtgctgggattacaggcgtgagccactgctcctggccaaat

SEQ ID NO: 864230 - DNA, 703 bp, Homo sapiens
ttacatagaacaactttgtgggtttattcaaatggtcaggcttacaaggagtagatcgaccaatttcagagccttcttggagagaatgtacaactgataccagctttttaagatcagcatcaaaagcttatcttgggtgtgtgtgactgtttctgccgctgtccaggagatctaccagtcttacctttttaactaatgtaaaaccatttgtctcaggctgcttgacaggtggagctagtctgtaaaacttagctcatgtttttttcttttctctcccatgtttagatggatggtaagagagctgagctgcaagcagtattatgtgaataacacattttgttgcctatgtttaagaggctggttgttttgtaaaatgcctgttagttgttctctttgtttgattgttcgtttgtttttgagatggagtctcactttgtcgcccaggytggagtgcagtggcacgatctctgctcactgcaacctccacctccctggttcaagcaattctcctgcctcagcctcccgagtagctgggactacaggtgcgcaccaccacacctggctaatttttgtaattttttagtagagacggggtttcaccatattggccaggctggtcttgaactcctgaccccatgatctgcctgccttggcctgctaaagtgctgggattacaggcgtgagccactgctcctggccaaat

SEQ ID NO: 864231 - DNA, 581 bp, Homo sapiens
taaaactcatcacgatgaaaaggtaaaacaagaatcagcagtatcagaagcaaaagaagggacctttctacagacattataaagatgataaagaaatattatataattttatgctaattagttttacaatatagattaaaygggcagattccatgaaacaaaacttagcaaaactaatagaacaggaaatggaaagtgtgaccaaccctgtatacattttagaaacttaattttaattaaataattcttaggcacaaatggcttcactggtgaatactatcaaatatttaagagctgtacaatatccatttagcatattctttttcagagaatagagatggaaatcttcgcattttattttatgaaaatagcatatctttgataccaaatccagacaaaggggaaaaaaacccctcaaaatcctgaccaatacctctcatgaacccagacacaaaaattcttaacaaaatattagtaaacaaaacccaataacacatttttttaaaaaaaggttctatataatgactaaatgaatttagtacaggaattcaagcttggctaaatatacaaaattaaattaa

SEQ ID NO: 864232 - DNA, 581 bp, Homo sapiens
taaaactcatcacgatgaaaaggtaaaacaagaatcagcagtatcagaagcaaaagaagggacctttctacagacattataaagatgataaagaaatattatataattttatgctaattagttttacaatatagattaaacgggcagattccatgaaacaaaacttagcaaaactaatagaacaggaaatggaaagtgtgaccaaccctgtatacattttagaaacttaattttaattaaatawttcttaggcacaaatggcttcactggtgaatactatcaaatatttaagagctgtacaatatccatttagcatattctttttcagagaatagagatggaaatcttcgcattttattttatgaaaatagcatatctttgataccaaatccagacaaaggggaaaaaaacccctcaaaatcctgaccaatacctctcatgaacccagacacaaaaattcttaacaaaatattagtaaacaaaacccaataacacatttttttaaaaaaaggttctatataatgactaaatgaatttagtacaggaattcaagcttggctaaatatacaaaattaaattaa

SEQ ID NO: 864233 - DNA, 576 bp, Homo sapiens
agtaactcagttacattcaaattacccataagaaggcttcctgcatgccacagctacttcacccatgaccctcagtaaagccacttgcctagaggtccttattctgtttcctccctgcctgccacaaacgtttggcttttgggtgactttgcatggccctctgagcatgtggtgtctccttctctaggacctatgagtataataaatcctttaatttcttatgcctctccagatataatttccgtgaccatactggagtgaaccttaaagaccccacaaggggtatttcctcccccacttatgacacagccttaatgagaaataagcctgtaacagatagaaaaaagtatttgcaaaacatatatctgacaaagaacttgtacycagaacaaatatcttagtaatacaaaataaacatcttaatattttttaaacttttattttatatttaggggtacatgtgaatatttattatataggtaaatttgtgtcattggggtttgttgtacagattatttcatcacccaggtattaaacctagtacccaatagctatcttttctgctcctctcccttc

SEQ ID NO: 864234 - DNA, 631 bp, Homo sapiens
acacacagtttgcaaatattttcctccattctgtaggttgtctatttactgagagtttcttttgctgtgcagaagctcttaagtttaattagatcccatttgtcaattttgcttttgttgcaattgattttggtgtctttgtcacaaaatctctgcctgttcctatgtctaggatggtattgcctaggttgtcttccagggtttttatagttttagattttcarttgaagtctttaatctatcttgagttggtttttgtatatggtataaggaaggggtccagcttcaatcttctgcacatggctagccagttttcccagtgccatttattgaatagggagtcctttccccattgcttgtttttgtcagctttgttgaagatcagatagttgtaggtgtgcagcatcatttctcgactttctcttccgttccattgaccagttacttcacaaacagttatttacaactagacaacatgcacgtgaaaaactattcagcatcattagccatcagggaaaatgcacattaaaaacacaattgattatcactacacacccaatggaatagataaaattgaaaacactggtgacaccaaatgctggtgaggtgaaacaactccaatacccataca

SEQ ID NO: 864235 - DNA, 680 bp, Homo sapiens
taatgtaataaaagtcatccatgacaaacccacagctaacataatacagaatggcaaaacgttgaaaggatttcctctgagaactggaacaagacaaggatgcccactctcaccactcctcttcaacatagcactgggagtcctagccagagcaatcagacaagagaaaaaataaagggcatccaaactggtaaagaggaagtcaaactgtcactgtttgctgatgatatgattatatacctagaaaaccctaaagactcctccaaaaagctcttagaactgacaaattcagcaaatttccagatacaaaattaatatacacaaatcagtagctgtcctatacaccaataacaaccaagctgagaatcaaatcaagaactcaaccccttttacaatagctataaaaaaacaaaaatacttaggaatatacctaacaaaggaggtgaaagacctctacaaggaaaactacaaaacactgctgaaagaaatcacagatgacctaaacaaatgaaaacatatcccatrctcacgggtgggtagaatattgtgaaaatgaccatactgccaaaagcaatccacaaattcaatgcaattaccatcaaagtaccaccatcattctttacagaactagaaaaaacaattcccaaattcatagggaagcaaagaagagcccacatagc

SEQ ID NO: 864236 - DNA, 603 bp, Homo sapiens
acactgaatgttatacggacctcttctgaagcatacactttgattctttcccatctgttcaactgatgcagcatctcagttgccactggaaccaactatccttcagctctgacatgaggtcactttggagaactgatatagttatttattagcatccgtgtaaccatgaacagaaatcctccycagtgcctcaggtgttctaagggcattattatttaaattcacggtggaatgtgaagaaaaattctaattatttatcattgtattctgcttaaggtgataggaagagaaaataactcaaggtcttccaaatcagccttaaaaataagtattattttgagctgcatatgtgattttgcctaaatttatacacctcctcttctcatgtaatctggagttgaggaaacagaagtctctcccagtggaagatgcactcaagtttctttttctctctcttctacctccctccttcctttgttcttttattgataaattacttttattgataaattactctcttcttttattgataaattactaagtgccagatgctgtgatgggtgctggcatgcagagataaggaaccagtagttactcttttag

SEQ ID NO: 864237 - DNA, 550 bp, Homo sapiens
ttgctttacaccttgctggaggttagagactagttggagattcagaccatacaccctggtctaacatttggtccagacccagctgcagcctcataatgccgatttcccggcacctcctcagtcccggagtggggcccaggcggctccactgaggttcccaggtaattcggaggcacactgaagattcactgccacactctaataactgtacaaaaatagcgactccagctcgtggcacgtgctgcagagaagcacaggagccaggagagtgaccttcagtggggccgggacagagctgggtggaagaggatgtgtcaggaaacgcttccaggtggaaagtggcaagttcccagcttaagcaattgagaagggaatggaaagagggtggrcagatttgggtggaagagcagggtcctgtcacccagaccactccagcagccctgacaggccccctgcttccgctcttgccagcctcccatcctccacagcagccggatcatactccgtctctcagatcctccagtggtccccctaccaacacacatgcaca

SEQ ID NO: 864238 - DNA, 639 bp, Homo sapiens
agcatggtagatctagcgacagcctggactgtgcacctggaaaagctgcagacactcaatgccagcccatgaaagcaggtggaaaggtggctgtgccccacaaaggcataggggcagagctgcccaaggccatgggggcccacttcttgcatcaccatgaccaggaagtgagacatggagtcaaaggagctcatttgggaactttaatgtttaaagactgccctaatggattttggactcacatgggacctgtagtccctttgttttggcaaatttccctcatttggaatgagtgtatttatccgatgcctgtaccccattgtatctagtaggtacctaacttgcttttgattttacaggctcataggcagaacagasttactttgtctcagatgagacttttgacttggacttttgggttaatggtggaagaagttaagactttgggggactgttgaaaaggaataattgtgtttttaaatgtgaggacatgagatttggaaaggaccaggagcagaatgatatgctttggctataccgaaatctcgagttgtagttcccataatccgcatatgttatgggagaaacccggtgggaagtaattgaaccatgggggcggtgaccctgatgctgttctca

SEQ ID NO: 864239 - DNA, 639 bp, Homo sapiens
agcatggtagatctagcgacagcctggactgtgcacctggaaaagctgcagacactcaatgccagcccatgaaagcaggtggaaaggtggctgtgccccacaaaggcataggggcagagctgcccaaggccatgggggcccacttcttgcatcaccatgaccaggaagtgagacatggagtcaaaggagctcatttgggaactttaatgtttaaagactgccctaatggattttggactcacatgggacctgtagtccctttgttttggcaaatttccctcatttggaatgagtgtatttatccgatgcctgtaccccattgtatctagtaggtacctaacttgcttttgattttacaggctcataggcagaacagagttactttgtctcagatgagactttkgacttggacttttgggttaatggtggaagaagttaagactttgggggactgttgaaaaggaataattgtgtttttaaatgtgaggacatgagatttggaaaggaccaggagcagaatgatatgctttggctataccgaaatctcgagttgtagttcccataatccgcatatgttatgggagaaacccggtgggaagtaattgaaccatgggggcggtgaccctgatgctgttctca

SEQ ID NO: 864240 - DNA, 560 bp, Homo sapiens
gagtggcattgccatttctataaaacagaggagtagagactttcaagactgtgtaaatgtcaactataataaaaacctgaggtgtaagctgtaaatccatctatcacttggacatttttttttccaaatatagtgtggacaatctgtttcagaatgttaaaatcatctcaataaatttgataagaaacttttggtccctgcagtgcaagtataatagtattaaatatatrgccaataacagtccaagtttttcttgcgagaattttggcacctcatgatctttcatggacaggtctccaggcaggtccacattggaaaaaaaaaaatctataaagaaatattacacaatgatgtataagaaattcatttcctgcttcttcctattttcattacaaggtacaggctgaaatctatattttttttaattgaaaacaagaacagatgcatactggaaatagttcataaagccatggaaatgaacgaaattgaatgctgctcagagttaataattcacataatcacaaccagcatattgaaaataagcaaaattgttcctcacg

SEQ ID NO: 864241 - DNA, 560 bp, Homo sapiens
gagtggcattgccatttctataaaacagaggagtagagactttcaagactgtgtaaatgtcaactataataaaaacctgaggtgtaagctgtaaatccatctatcacttggacatttttttttccaaatatagtgtggacaatctgtttcagaatgttaaaatcatctcaataaatttgataagaaacttttggtccctgcagtgcaagtataatagtattaaatatatagccaataacagtccaagtttttcttgcgagaattttggcacctcatgatctttcatggacaggtctccaggcaggtccacattggaaaaaaaaaaatctataaagaaatattacacaatgatgtataagaaattcrtttcctgcttcttcctattttcattacaaggtacaggctgaaatctatattttttttaattgaaaacaagaacagatgcatactggaaatagttcataaagccatggaaatgaacgaaattgaatgctgctcagagttaataattcacataatcacaaccagcatattgaaaataagcaaaattgttcctcacg

SEQ ID NO: 864242 - DNA, 672 bp, Homo sapiens
agagaaaacagagacaataagtagtgcttgctgcttgacagcacgtgtctttgtagcctatatatctgcctctactgggctgcttgtaagaatgtggcatccaggtgtacaattgagagacttacttccacatcaatcatttccscccattaatttatttccactcctttgccattttggctctcccagcccacaacatatattcgtattctcgttctttcacctgcaaatatctgaggtttgttctggtttgggttatcctggaacaactttggcttttcaggttgatggcggtgattcaaattactcaccccatattcgctgctaagaagccatccctgttgggacggcacaatacagaaagacttggcatcagcatgtcgactttaaatgcaccattaaaggagaccattgaacctcatagggccctccttctttggtgttttgggggaaatgagagaaaaggggaatcaacatgccacatggtgggtggatttcttcagaaatgcattaattcataacatggataaatataaagcatttatagactccctccatggaaataaactgtcgagtaatataaagtgctctgaactcttgggttccaaaaaatgggtcagattgaaaaatgctttcctcaatgccattttgagttcctttagaataagggtt

SEQ ID NO: 864243 - DNA, 672 bp, Homo sapiens
agagaaaacagagacaataagtagtgcttgctgcttgacagcacgtgtctttgtagcctatatatctgcctctactgggctgcttgtaagaatgtggcatccaggtgtacaattgagagacttacttccacatcaatcatttccccccattaatttatttccactcctttgccattttggctctcccagcccacaacatatattcgtattctcgttctttcacctgcaaatatytgaggtttgttctggtttgggttatcctggaacaactttggcttttcaggttgatggcggtgattcaaattactcaccccatattcgctgctaagaagccatccctgttgggacggcacaatacagaaagacttggcatcagcatgtcgactttaaatgcaccattaaaggagaccattgaacctcatagggccctccttctttggtgttttgggggaaatgagagaaaaggggaatcaacatgccacatggtgggtggatttcttcagaaatgcattaattcataacatggataaatataaagcatttatagactccctccatggaaataaactgtcgagtaatataaagtgctctgaactcttgggttccaaaaaatgggtcagattgaaaaatgctttcctcaatgccattttgagttcctttagaataagggtt

SEQ ID NO: 864244 - DNA, 672 bp, Homo sapiens
agagaaaacagagacaataagtagtgcttgctgcttgacagcacgtgtctttgtagcctatatatctgcctctactgggctgcttgtaagaatgtggcatccaggtgtacaattgagagacttacttccacatcaatcatttccccccattaatttatttccactcctttgccattttggctctcccagcccacaacatatattcgtattctcgttctttcacctgcaaatatctgaggtttgttctggtttgggttatcctggaacaactttggcttttcaggttgatggcggtgattcaaattactcaccccakattcgctgctaagaagccatccctgttgggacggcacaatacagaaagacttggcatcagcatgtcgactttaaatgcaccattaaaggagaccattgaacctcatagggccctccttctttggtgttttgggggaaatgagagaaaaggggaatcaacatgccacatggtgggtggatttcttcagaaatgcattaattcataacatggataaatataaagcatttatagactccctccatggaaataaactgtcgagtaatataaagtgctctgaactcttgggttccaaaaaatgggtcagattgaaaaatgctttcctcaatgccattttgagttcctttagaataagggtt

SEQ ID NO: 864245 - DNA, 672 bp, Homo sapiens
agagaaaacagagacaataagtagtgcttgctgcttgacagcacgtgtctttgtagcctatatatctgcctctactgggctgcttgtaagaatgtggcatccaggtgtacaattgagagacttacttccacatcaatcatttccccccattaatttatttccactcctttgccattttggctctcccagcccacaacatatattcgtattctcgttctttcacctgcaaatatctgaggtttgttctggtttgggttatcctggaacaactttggcttttcaggttgatggcggtgattcaaattactcaccccatattcgctgctaagaagccatccctgttgggacggcacaatacagaaagacttggcatcagcatgtcgactttaaatgcaccattaaaggagaccattgaacctcatagggccctccttctttggtgttytgggggaaatgagagaaaaggggaatcaacatgccacatggtgggtggatttcttcagaaatgcattaattcataacatggataaatataaagcatttatagactccctccatggaaataaactgtcgagtaatataaagtgctctgaactcttgggttccaaaaaatgggtcagattgaaaaatgctttcctcaatgccattttgagttcctttagaataagggtt

SEQ ID NO: 864246 - DNA, 675 bp, Homo sapiens
acaaaaaaaattgcatgatttctgcaggacttaggacatactggtggcactctctgatgcaccagagaattgagcaaatggttgagatttatgcaacactgaatagaaaacagaagatagattaacagatagattatatatatatatatacacatatatatacacacacatatatatatacacacacacatattatatacatatatatatakagagagagagagagagaaacagaaaatggaggatccttccatttatatccattcccacaactcacccctattctaagccaatgtcatccttccctcccagactttttttcttcattctgtcacccaggatgaagtgcagtggtgcgaacttggctcactgcaacctccacctcccgggctcaaatgattctcctgcctcagcctccccagtagctgggactacaggcatgcaccagcatgcctagctaattttttgtacttttattagagataggatttcaccatgttgatcaggctggtctcaaactcctgaccacgtccacctgccttggcctcccgaagtgctgggattacacgtgtgaaccactgggcccggccccagactatttcaataacccacttaactgttctttttgcctcctcttcaagccttcttcaacacagtagccagatcaatactttc

SEQ ID NO: 864247 - DNA, 614 bp, Homo sapiens
aatattcttttgacagaactccaatggttcaggttgtaatgcagcatcatatactctctgtctgaagttcttgttgcttgtgtactaagaaaagaccttcccaggggtcaaagaaaaaaatgccttgaccacttccaatgcctggggcttctggttcctaagaaaaggtagggaaacaacacacaatgggccctatctgagggtggagggtggaaggagggagaggatgaagaaaaataactagtgggtaggtactaggcttaatacctgggtgatgaaataatctgtacaatgaacccccatgacacaagtttacctatgttasaaacctgcatatgtaccactgaacttaaaataaaagactaaaaaataataaaataaaattagaaataaaaaaggcagaaagaagtagaaaagaggactgagcaagagaagcaaaaatcacgacacatttaaaaatctaggctcaacatttcaatgttctaactcacacacaaataaaatggttttatttgtttttgcaaaggcaaaaaaaaaaagtcatttaagggctacttaacagatgagaatttttgtggcagaataatttccctttagaattttgaataaaacag

SEQ ID NO: 864248 - DNA, 670 bp, Homo sapiens
tggttctacggctatcttcattaatagatggagaaatgaagccttagaggcattaagtgtcttttccaaggtgaaaccaatagtaaatagtacagccagactgagaacacaggtagtcccacagatccttaaccagcaggcatgctccctctgtggtcctgagtgatgccagcaaggtaaaaaacttcatgctgcagacgaacttccagagctcaggataacacagagttctgctatacagggaggggccgtgtttgsacacagttactgctggaaatccaattgcaaaattttctgttcccttcttcaaacttccccagccctggatgccatcagcttcaatatcttcatttaaaaacatgctacaaagaaattacatcaaagagattcttttttttttcagttttgagaacacaaacctatgtatgtgtgtgcacacgcatctgtttgcacatgtacgtgaccaccatgtcacccctgaaagggcacactgggcttcttctcactttgccccagaactatctgtaaactgaattgcaggggagaaactaatagccactttttattccaaggcgctgaatttacaactccatttgtaacacctagctgcacacaacaacggactaattactctctggtcattaaagcagatcaaacgatgaaggacagc

SEQ ID NO: 864249 - DNA, 670 bp, Homo sapiens
tggttctacggctatcttcattaatagatggagaaatgaagccttagaggcattaagtgtcttttccaaggtgaaaccaatagtaaatagtacagccagactgagaacacaggtagtcccacagatccttaaccagcaggcatgctccctctgtggtcctgagtgatgccagcaaggtaaaaaacttcatgctgcagacgaacttccagagctcaggataacacagagttctgctatacagggaggggccgtgtttgcacacagttactgctggaaatccaattgcaaaattttctgttcccttcttcaaacttccccagccctggatgccatcagcttcaatatcttcatttaaaaacatgctacaaagaaattacatcaaagagattcttttttttttcagttttgagaasacaaacctatgtatgtgtgtgcacacgcatctgtttgcacatgtacgtgaccaccatgtcacccctgaaagggcacactgggcttcttctcactttgccccagaactatctgtaaactgaattgcaggggagaaactaatagccactttttattccaaggcgctgaatttacaactccatttgtaacacctagctgcacacaacaacggactaattactctctggtcattaaagcagatcaaacgatgaaggacagc

SEQ ID NO: 864250 - DNA, 670 bp, Homo sapiens
tggttctacggctatcttcattaatagatggagaaatgaagccttagaggcattaagtgtcttttccaaggtgaaaccaatagtaaatagtacagccagactgagaacacaggtagtcccacagatccttaaccagcaggcatgctccctctgtggtcctgagtgatgccagcaaggtaaaaaacttcatgctgcagacgaacttccagagctcaggataacacagagttctgctatacagggaggggccgtgtttgcacacagttactgctggaaatccaattgcaaaattttctgttcccttcttcaaacttccccagccctggatgccatcagcttcaatatcttcatttaaaaacatgctacaaagaaattacatcaaagagattcttttttttttcagttttgagaacacaaaccyatgtatgtgtgtgcacacgcatctgtttgcacatgtacgtgaccaccatgtcacccctgaaagggcacactgggcttcttctcactttgccccagaactatctgtaaactgaattgcaggggagaaactaatagccactttttattccaaggcgctgaatttacaactccatttgtaacacctagctgcacacaacaacggactaattactctctggtcattaaagcagatcaaacgatgaaggacagc

SEQ ID NO: 864251 - DNA, 636 bp, Homo sapiens
agcaacacagttcatgccttgaggtgttgattctctgtaaggtggacatgcgccatttgcaaagcacagtggacatgtgttgagcctcctccatctttattttccctatttctgttcttcccatcagcccgttttccacttggggatctctttcagcctgacgccccctcaggtgacagtattggattatgcgtcctagtccaaaccaatgagaacactccaccctctcgcttgaactgattggctctgcagtggccacagaaacaagacaatgatgtcatggtttccagactttgtttttttttgtttgtttgtttgtttttgagacgaagtctcactcttgtcccccaggctggagtgcaatggtgcgatttcggctcactacaacctccrcctcccaagttcaagtgattcttctgcctcggcctcccgaatagctgtcattacaggcgtgtgccaccctgcccagctaatttttgtatttttagtagagacaggttttcaccatgttggctaggctggtctcgaactcctgacctcaggtgatccgcctgcctcggcctcccaaagtgatgagattacagacgtgagccaccgcgcccggcctcatggtctccaaacttttacacagagtca

SEQ ID NO: 864252 - DNA, 603 bp, Homo sapiens
tttctcccaggctggagtgcagtggtgtgatctcagctcactgcaacctccgcttcccaggctcaagcgattctcctgcctcagcctcctgagtagctgggattacaggcgcgtgccaccatgcccagctaatttttgtattttcagtagagacaggattttcaccatgttggtctggatggtctcaatctcttgacctcgtgatccacccaccttggcctcccaaagtgctgggattacaggtgtgagccaccgtgcacggccaacagtgtttatttctaaccagaaagacaaacattcgagtggatgtgtccccctttaagcaccaaagtcccacccaggaatttttctgagaagctaccactaagtcaagctctgtcccctgctattctcactggctgctgaagggctggacgtcaatgaccctttctatcacccgrcagcctgtgagggaaggttgttagatactgagagttaagggcttggaagaattaaaagcttggaaacaaagcctatgaattcctcagagcaatctttagaaagtgactctcacaggcatgtggaattgtcattccataatatcttgctaggaattcatcctaa

SEQ ID NO: 864253 - DNA, 593 bp, Homo sapiens
ctgcacgaggtggctcacacctgtaatccgagcactttgagaggccaaagtgggtggatcacctgaggtgaggagttcaagatcagcctagatgacatggcgaaaccccgtctgtactaaaattacaaaagattagctgggcacggtggcacacgcctgtaatcccaactacttgggaggctgaggcaggagaattgcttgaatcctggaggcagaggttgcagtgggccgagattgccccactgcactccagcctgggcaacaagagcaaaactccgtctcaaaaaaaagaaaaaacaaaacaaaacaaaacaaaaaaacaagaaaataaaacgaagctgacaagcagtcagagagaaagaatctagcagaggactttaggggaagctatgtacacaggagagagctcgttcccttakgatgtctgggtcctatttgttccccagagatacttacaactctctcttcacctgcctcccttagaaccctggctcacttgagatcagcggcattagacattattagccccatccctcatacagctgccatccactcaccaccccccagggcatgttccctcatcctcctcaatg

SEQ ID NO: 864254 - DNA, 570 bp, Homo sapiens
tgtgaaactctgagtcaattaaacctcttttctttataaattacacagtctcaggtagttcttcatagcagtgtagcaatggactaatacacacaccatctattagaaatgactggaatgaggctgcagggaaatgatgactcctggagaacctaatgaagyagtgtcagtgggttgtgaaatacatttaattgtcaaattaggtgctgaagacactgaccaagcaaagcttagaaccaagggaaaagaaaataaaagatccaaattggttttcaagctgcaaacaaaaggagttaaacagaaatatgctctctgtgcttagttctgcacagacacattttaaaaataaaattcatttagcttaaattaatggaattaaataaagtaaatgcaggtcagtagggaattactggagtatgtgagcaacgatgctgtggacgctcattcctgattgaacagtaaaaacagccccttcgttcactgacatgctgtgggtgatagatcttcttctcctaaaatagtgtctgtgcaaaagatgggaggaaacgatcgcctattaatttggttttt

SEQ ID NO: 864255 - DNA, 611 bp, Homo sapiens
gctaccactctggaaaaaagtatcaactcttgtggcaagaagcatctccctgcttgtccccaccctgtacaatgtatctttacccaaagccagaggcatttcttaaaaacacaaattttatcatttactccctcatttgaaatctttcaaagatttcttattacccttgaagtccaaatatattaatgtggactctaacatccagcttaaaaaggagcaagatgacaaaatgctccaatgactggactgggagtgactgagagaagcagctgcttaccgagggagagcagcttcctgtagttttccatgttgtcctggattgtgttgtgaggtttcctgtcctcagygaggtccaccacattttggtatgattcagcatcctaaaacagcaaacacagacctctcaatggagtctgtccccaccgatgttcaaagacagaataatgttggcaacatgggagttacatatatgaagttatataggaagtgctcacggtattggggttctgagtgatccaagtcaagtgttactagggacctacgtcgtacctaccttggtgctacactctgaggcagatcccaaagacgcatgacacatattccttgccctc

SEQ ID NO: 864256 - DNA, 558 bp, Homo sapiens
ttctgtaatctcataagaaagttttagcagatgagttgaggagttgcttttttttttttttgagagacagagtctcgctctcactctgtcgcccaggctggagtgcagtggcacaatcttgcctcactgcaacctccacctcctgggttcaagcgattctcctgcctcagccttccgagtagctgggactacaggcacgtgtcactatgcctggctatttttttttttttttgkatttttagtagaaacagggtttcactgtgttagccaggatggtctgaatctcctgaccttgtgatccacccgcctcagcctcccaaagtgctgggattacaggaattgcttcttttgaacaagcaaagtaagtggtttcttgagatggaacctactccttgagaagatgctgtgaacattgtagaaatgacaacaaataatttagaatttagattatattctccagttcacaatatccccaccttaatgtaaaatatattattgctaaaaaattataagaatcacctgacccttcaatgagtcataaccatttttctggtggag

SEQ ID NO: 864257 - DNA, 558 bp, Homo sapiens
ttctgtaatctcataagaaagttttagcagatgagttgaggagttgcttttttttttttttgagagacagagtctcgctctcactctgtcgcccaggctggagtgcagtggcacaatcttgcctcactgcaacctccacctcctgggttcaagcgattctcctgcctcagccttccgagtagctgggactacaggcacgtgtcactatgcctggctatttttttttttttttgtatttttagtaraaacagggtttcactgtgttagccaggatggtctgaatctcctgaccttgtgatccacccgcctcagcctcccaaagtgctgggattacaggaattgcttcttttgaacaagcaaagtaagtggtttcttgagatggaacctactccttgagaagatgctgtgaacattgtagaaatgacaacaaataatttagaatttagattatattctccagttcacaatatccccaccttaatgtaaaatatattattgctaaaaaattataagaatcacctgacccttcaatgagtcataaccatttttctggtggag

SEQ ID NO: 864258 - DNA, 768 bp, Homo sapiens
aaggactggttatatatttattttatcactcaatcatctcttagcatatgacacatgttagggacaatgctggtaacagagaaaacagaactagtgcatatgtggtcatagcgttccacattcctcacagtctgtgggttttctgaaggygcaaagctgacaattgctgtttatattttgtttccccaatggtttagagcagtgcctgaacataaaatgtattgattgctaaataaatgggatttctggagatcctggcaaaatcagagcatattgaaggatgaatcagaaaaaaaaagaagtaaggggaaaatatgggagaaaggcagaaaagattggaagaaggagggggagaacatcaaagagaggcagagtccattcacacagaaggagattctaggagagaaacagagaaaggcagacagtctggctccagccaccttggcgtttcaccttccctgtattgaataaagttcaggacctttgcaggtgcagctccctccacaccctgagtcttcatgtggctccatcttgtctccaaccagtgctctgaacagagttcaccacccaagggagccctctctgactgctgtcccccgagcacctgctttgttcccttcttgaggttggtgctttctttattcactttctgtttactgctttctctccattggaatataaattccttagagtatgataaaaaagatggacctaaagttgtgagtttttattggtcctaggtttcttactggaggttagataagtcca

SEQ ID NO: 864259 - DNA, 768 bp, Homo sapiens
aaggactggttatatatttattttatcactcaatcatctcttagcatatgacacatgttagggacaatgctggtaacagagaaaacagaactagtgcatatgtggtcatagcgttccacattcctcacagtctgtgggttttctgaaggtgcaaagctgacaattgctgtttatattttgtttccccaatggtttagagcagtgcctgaacataaaatgtattgattgctaaataaatgggatttctggagatcctggcaaaatcagagcatattgaaggatgaatcagaaaaaaaaagaagyaaggggaaaatatgggagaaaggcagaaaagattggaagaaggagggggagaacatcaaagagaggcagagtccattcacacagaaggagattctaggagagaaacagagaaaggcagacagtctggctccagccaccttggcgtttcaccttccctgtattgaataaagttcaggacctttgcaggtgcagctccctccacaccctgagtcttcatgtggctccatcttgtctccaaccagtgctctgaacagagttcaccacccaagggagccctctctgactgctgtcccccgagcacctgctttgttcccttcttgaggttggtgctttctttattcactttctgtttactgctttctctccattggaatataaattccttagagtatgataaaaaagatggacctaaagttgtgagtttttattggtcctaggtttcttactggaggttagataagtcca

SEQ ID NO: 864260 - DNA, 637 bp, Homo sapiens
tcattgcaataataatcagaaggttggtttttgattactaaagataaattttaatctggaataacggaaacttatatataacttcacataaatttatgcatacatgtacatatactttttaaaggcacaatgatggaaaacattaaatatagccataaaaattaagaagaatatagatctaggataaaacagggcaacaagccaataaaagcaagtagatggtccaaatatagaacctacattataaaatataacaatttataatttactaataatgttggggcaattaacaatgaggaagaataaatttaattctcttttcatacaayatgcccaagtaaattcaataatcactaaagcatatttttaaaactccagaataaaacactaatgtttacagagggttagattttgtagggttggaagaaaatagaaggattgaaatatataaaaattgaaacattttcaaaaaataaagaaaataccaaagagggaaaatcatttgcagccaagatgacaacaaagaattaatatctttattatgcaaagagatggttcaaactgataggaagctattaaagtcacatagacaaatgattaaaagacagacaatgtgaagagaggaaacaatggctta

SEQ ID NO: 864261 - DNA, 637 bp, Homo sapiens
tcattgcaataataatcagaaggttggtttttgattactaaagataaattttaatctggaataacggaaacttatatataacttcacataaatttatgcatacatgtacatatactttttaaaggcacaatgatggaaaacattaaatatagccataaaaattaagaagaatatagatctaggataaaacagggcaacaagccaataaaagcaagtagatggtccaaatatagaacctacattataaaatataacaatttataatttactaataatgttggggcaattaacaatgaggaagaataaatttaattctcttttcatacaatatgcccaagtaaattcaataatcactaaagcatatttttaaaactccagaataaaacactaatgtttacagagggttagattttgtagggttggaagaaaatagaaggattraaatatataaaaattgaaacattttcaaaaaataaagaaaataccaaagagggaaaatcatttgcagccaagatgacaacaaagaattaatatctttattatgcaaagagatggttcaaactgataggaagctattaaagtcacatagacaaatgattaaaagacagacaatgtgaagagaggaaacaatggctta

SEQ ID NO: 864262 - DNA, 617 bp, Homo sapiens
aaggtttctactgttacacaccattatgagtgacaactttatctacctaaagactcacttttctttattctcacccacaagtttgtcagctgaaagtggcaccctgttttgccgagaagttccttatatttgataattctagatctgagaaacagactcaaattcttttttctgtgaccttaaatcaggctcagagccctataatggacttcacaattctattttgttgtatgtgaccaataaattatctttaaaactatgctggaagtaaaatatcggtaattttttttttttttgacacagagtcttgctctgttgcccagactggagtgcagtggtgcaatctctgctcggtgcaacccccacctcctgggttcaagcrattctcctgcctcagcctctccagtagctgagattacaggtgcgcaccaccacgcccagctaattttgtattttttagtagagacagggtttcaccgtggtctcaaactcttgacctcgtgatccgcctgtctcagcctcccaaagtgctggggttacaggtgtaagccactgcgcccagccagtaattcttatcaaatgaaaaatgatcttcattcacaatgactgaccaaact

SEQ ID NO: 864263 - DNA, 633 bp, Homo sapiens
atggattggtgtaatgccattccggcagtggtggtcattgcagtgactgtaattaggcccatgataacagtgatcaaagtgaaaacaaatctcttggacctttttagaattcgctgtcgcacttcattaattaaatgtattgagggggaggattcccaaggtctaggtaaagttactggaatccagattccttcttaagatcgaaccaatattatgcttctcttggagtcaaaatgggagttaatacaarggtatagatgacaattaatgcattggacagtttgattattcgtccaaattttgatatttcctactaacagcatgtaagggggcttaacacaactctgtatgggaatagtcaggttggaggtaagtaaagcagaatgtctcgttctacgttgataaggagagagtgggacagtagtgggaaaaacagtcagaagagttttcctttcccatacttgcagtccagacatggcaatagccaatttccaaagttctgggtgttcaggctcagaatggggagtatcatacgaggcctgggtgggggataatgcctttatcttcccattttaagggaaagcataagctgatcctcctatgcaaagtagaatgatgattcttgttctccca

SEQ ID NO: 864264 - DNA, 524 bp, Homo sapiens
gacttttaagtctgatatgaaacatttacaatctagtctcactgaagcctgttactgctacttggaggcttcatctgcaggataaaactttggtctccacaaccctttatcttttttttctttttgagacgtaatcttgctctgtcacccaggctggagtgtagtggcgcaatctcggcttactgcaacctccgcctcctgggttcaagcgattctgctgcctcagcctctgaagtagctgggattacaggcgcccatcaccatgcctggctaatttttgtatcttttagtagagacagggttttgccatgttggccatgttggtcttgaactcctgatctcaggtgatccacctgcctcrgcctcccaaggtgttgggattacaggcacgagccatcatgcccggcttcacaatcccttatcttaatcacagtataattaaatctacctatgacctggaagcaccccctaatctgccactgcttcaacttgtcccacccttccagatcaaaccaatgttaatc

SEQ ID NO: 864265 - DNA, 607 bp, Homo sapiens
cccatgctggaatgcagtgctgcaatctcggctcactgcaagccctgcctcccgagttcatgtcattctcccgcctcagcctcccaagtagctgggactacaggcgcctgccaccacacccggctaattttttgtatttttagtagagacggggtttcaccgtgttagccaggatggtcttgatctcctgacctcatgatccacccgccctgccctcccaaagtgatgggattacaggtgtgagccactgcacccrccctttttttttttttttttttttgagacagagtctcactctcattgcccagcctggggtgcagtggtgtgatcacagctcactgcagccttgacctccccagggctcaagtgatcttcccacctcaatctcccaggtagctgggactataggcttagaccaccacacctggctagtttttttgtttgtttgtttttggtttttttttggtaggtccggggtcttgtcatgttgctcaggctggtctcaaactcctgtgttccagtgatcacctgcctctgggcctcccaaagtgttgggattacaggtgtgagccaccacgcccaaccagatctgtaattttttttttct

SEQ ID NO: 864266 - DNA, 600 bp, Homo sapiens
tttttttttttttttactctgtcgcccatgctggaatgcagtgctgcaatctcggctcactgcaagccctgcctcccgagttcatgtcattctcccgcctcagcctcccaagtagctgggactacaggcgcctgccaccacacccggctaattttttgtatttttagtagagacggggtttcaccgtgttagccaggatggtcttgatctcctgacctcatgatccacccgccctgccctcccaaagtgatgggattacaggtgtgagccactgcacccgccctttttttttttttttttttttgagacagagtctcactctcattgcccagcctggggtgcagtggtgtgatcacagctcactgcagccttgacctccccagggctcaagtgatcttcccacctcaatctcccaggtagctgggactataggcttaraccaccacacctggctagtttttttgtttgtttgtttttggtttttttttggtaggtccggggtcttgtcatgttgctcaggctggtctcaaactcctgtgttccagtgatcacctgcctctgggcctcccaaagtgttgggattacaggtgtgagccacca

SEQ ID NO: 864267 - DNA, 618 bp, Homo sapiens
ttgtcattactaatttcccaatacttatactggaagataattagaaaaaaatgaaaaaaacagctcaaaaatgtgtaaattttaaatttgaaaaattaacactaagaaggtgactttctctatagcctcgacataaggaatatatccatagtttccattctttttggctttctctaatgagtaggccaaaagattcacatcttattcagattcaagtgagggatcttttcctaggcttaaaagttgttgaagataatatcctatgttttacaagacctgtcctcctttaactctctaagaaccctgggtttcattctttgccactaacacctcagatgtaggctactccaaagaggaactgtgccatcagtagtgaaaggcagtcacagttcatggaactgaaaagtatgcattcaatgaacatggcctygcactaaccctctggcaggtcctgtgcgagatgcagggtctcaagttcctgagacaccgtccctggtgatggggatcttccaggttggaagggaggccgagtaaacggactgtgtgacacggtgtataacttcactaggggaatgagagaaaacattagaaataaaatgagcatctgtctcaaatagg

SEQ ID NO: 864268 - DNA, 587 bp, Homo sapiens
tgaagctttcaaagaggttacacaactcacctaagatcgcagttcagagaggtagcttgctgactttgtccagagctcacttctactagactaaattctaaattatcagtgctaaagtgagaactcgaagggacctcagaaatctcctaatggagtgtttccctaaccaacctgataaactttctggggtatacattaaaaacacattcccaggacccactgcagacctactaaataagttataggagagaagtttagtattttaacaagagcctccaagaagtgattmtaatgattagttatgcttagaaaacagtgttctatgtgtgtatgtccagtatgccagacatttggctacttaaatttacattgcctaaaacagcaaaattaaaaattgagttcttcaatttttagttccactagttacatttcaagtgctcaacaaccacatgtggctagtggctaccgtaactggacagcaaagatataggaaatttccatcattgcagaaacttctattggattatgctgatactagactaacccttcaactgccatgagaaaatggaggcacaggatcttgtcca

SEQ ID NO: 864269 - DNA, 505 bp, Homo sapiens
tttgattttaactatggatgttaagctttgtgtcatctttttcttctcctttaaaattttttttttttttttcctgttttgcttttgccagttgcagctttaaaaaaagcaattgaggtagggaggctggaaagggagttgatgttgaaaatatattcatagaagtttggggtaggtaaaaggggcagctcattgattctaaagatcagccttctgggtttgtttgacttagatgaaagtgaagaggatgaagatgatttgttgcaaaggactgggaatttcatatccacatcaacttctcttccaagaggmatcttgaaggtgagagtcagtgaagttgggggatcctatctaactacttacctctgcagtttaatttgcttcccagtagcagatgtatggattcctattatctgtggggttaaatatgtttgctgtcattttgccctggtaaatacttatgttattgttttttttttttccttttgcaaaaaatgttctagag

SEQ ID NO: 864270 - DNA, 645 bp, Homo sapiens
ttagactcacttgtagatatataaactaaggtctaatctaatgttagacagcaaattagtaacaaaaccaggtctgaaagtcaggagtttctttcttactagctcagaaatctgtcctctatatcagcagttggcaaactttggctatagaaagccaggtgaaaaatattttaggctttgtgggccaaaccgtctctgtctaggactgacagatttagcaaagacaaatgcaacacacctagttacatttgaacttcaaataagcaacaaattttttttagtgtaygtcccatgcaatatttttgtttatctgaaattcaaatttaactagatttcttgtattctatccggcaaccctatctctgtcacaatcactcaactctgccattgtgcacaaaagcagccacagacaatacataaatgagcaagtttgactgtatgcaaataaaatgttgacaaaaacagacagcagggcttatttggctggtggggggtcatggtttgctaacatctactccatgtcattggctttgtctttactaagagttgacctgcataaaggaataaaacatcaaacttatgttatcattgtatttgatttatagatcatttaacaagtataaactttcaatgccatatctttca

SEQ ID NO: 864271 - DNA, 634 bp, Homo sapiens
tttccctctaggggagtgccataccatctgtttttctttttccttttgctttttttccccccagaaaatctgtatgaatatattgttggtcagttgtcacatcagacttcaatgatctggctcctgcccttctttctaaacttgagagagttctgtgacagacataaatcctcattgcatctattcggcaggtttatatctggaccattcatttgtggtgatgttgtctgaggaaacctacctttgtgtaagggtctgttatacaagtttccaccttttgtggatccagtattggctttctatgacccttgtagccttttataactcaagctctaggttataaaagtctggctgatagcccaggggaaatgccagttttaggttttgccaactatctctgttcgagttcattcatttcttacagtctcaactatatatattttgaacttttttttttgtagttttaaatgttctatacygaaagaatttctcagtacatctatagccatttggacaggggaaaggcatatctaaatacttccctttttattctttttaatgtgttttcactttaaagtatttcaaacatagaaaaatatatatggaaaatataacagatctgtgtgcccaatgt

SEQ ID NO: 864272 - DNA, 676 bp, Homo sapiens
ggaagaactgaggcagagtgtggaagagagctccttttttcagaaagaagaggaaataaagtatctgattatttaggcaaaaacaacaaagggacgataagtagaagactaatgtgattggttacctagagaaggcggatgaggctaggtgggaagcatgaaaggaatgacagaaggtggtcagtgaccctcctctgtgtatactttttgtacaggtctgacttttgggaccatggcaatgttttacatactcaaaaaaaggaaaaagaaagaaaaaacacacaaaaaaaatcggaaaggatagggaaataactctaaaattgagtcaaaacaaaaacaaatatarcaaaccatatttcaaaagaataacctacctacactgaataaattggagagagaattaacccaggtaactttttcctacaggatttaaatgatatacacttaggctaaaaacaaatataattctaaacaaatattgagttcttattcgtgggcttcttttacatagacatggatgagcaacctgaaaccattttctttgtattctatgattagcaaataaggcattatgtcatgaataatggtagccaggtttctcgccactggaaaagggaattacaagtatgagaaggcatgaaaaaataaacaaacatgagaaggcagaaagctagaa

SEQ ID NO: 864273 - DNA, 676 bp, Homo sapiens
ggaagaactgaggcagagtgtggaagagagctccttttttcagaaagaagaggaaataaagtatctgattatttaggcaaaaacaacaaagggacgataagtagaagactaatgtgattggttacctagagaaggcggatgaggctaggtgggaagcatgaaaggaatgacagaaggtggtcagtgaccctcctctgtgtatactttttgtacaggtctgacttttgggaccatggcaatgttttacatactcaaaaaaaggaaaaagaaagaaaaaacacacaaaaaaaatcggaaaggatagggaaataactctaaaattgagtcaaaacaaaaacaaatatagcaaaccatatttcaaaagaataacctacctacactgaataaattggagagagaattaacccaggtaactttttcctacaggatttaaatgatatacacttaggctaaaaacaaawataattctaaacaaatattgagttcttattcgtgggcttcttttacatagacatggatgagcaacctgaaaccattttctttgtattctatgattagcaaataaggcattatgtcatgaataatggtagccaggtttctcgccactggaaaagggaattacaagtatgagaaggcatgaaaaaataaacaaacatgagaaggcagaaagctagaa

SEQ ID NO: 864274 - DNA, 676 bp, Homo sapiens
ggaagaactgaggcagagtgtggaagagagctccttttttcagaaagaagaggaaataaagtatctgattatttaggcaaaaacaacaaagggacgataagtagaagactaatgtgattggttacctagagaaggcggatgaggctaggtgggaagcatgaaaggaatgacagaaggtggtcagtgaccctcctctgtgtatactttttgtacaggtctgacttttgggaccatggcaatgttttacatactcaaaaaaaggaaaaagaaagaaaaaacacacaaaaaaaatcggaaaggatagggaaataactctaaaattgagtcaaaacaaaaacaaatatagcaaaccatatttcaaaagaataacctacctacactgaataaattggagagagaattaacccaggtaactttttcctacaggatttaaatgatatacacttaggctaaaaacaaatataattctaaacaaatattgagttcttattcgtgggcttcttttacatagacatggatgagcaayctgaaaccattttctttgtattctatgattagcaaataaggcattatgtcatgaataatggtagccaggtttctcgccactggaaaagggaattacaagtatgagaaggcatgaaaaaataaacaaacatgagaaggcagaaagctagaa

SEQ ID NO: 864275 - DNA, 658 bp, Homo sapiens
ccaaggctccatctacttacatcatcacctcggtgaatagcattcaacatatgaatttggaggaggtggggaacagaaacattcagactatagcagatagatagatagataaatagatgatagatagatagatagtagatagacataaaaaataaatgtttaaataaaaaataaatgttaacacttagagaatctgggtaaagagtatatgatcattctttgtatcatactgacaaatttttgtaaatctgaaaatatgccaaaatatttatttttaaatttgggttggctggaaggcaagaacatatatgcagaatactacatgtgctacctctcctacccagaggaacatttttcacagccccataggtgcctgctctggcaccatgattgaaatagtgtaggcataggactagctgtcaggaaatttagtatcaatttggmtcctaaccatgttccatggaaaagctgtgtatcatctctgagcttcagtgttctgatgtgaaaggaggcttaagcaagatgatctctccaaacattaaatagcttttgaaaatctgctatatgctataactgagatagttctgcaagcaaagcatctgctctcatggagataatagtctaatgcagatggcagatttaaaacaaattgttatag

SEQ ID NO: 864276 - DNA, 590 bp, Homo sapiens
gcccactaaaaaggatcaatgatccttggaaaaatgctgcttgaaggtctggagcagaatatatacaagatgaacttggccaccttgttgatgttgggtgctatgtttggagacaacagtaaaaaaggtagtaaagactaatgagttttaataaaaagacttagtagccaaattggagaggctgcttcaccagcaatgtgataattttgagcaccaaatataataacaactaaagtttattaaaacataaaatatataaaaatccatgaatttatacttcatcatgatattaaataatttttttaaaaacctcaattttctgaaaaaatgacaaagggaaattatcaaacaatgttctatctttcttatatgaaccrtattttgggatgaccagtagttgacaaatgattctttttatagaagatttctagtttgtaaattcagaaggaggaatagaatttttttaagttacaatttacaatccccccacccccaaaataatgtatctaagcaatggacatcaatggatactaaaatcattaggtaaaatagttctttataacagatgaatagaataaggtttcaaatac

SEQ ID NO: 864277 - DNA, 621 bp, Homo sapiens
gtgccaagatatctgtctgctgaagctgatgttattctttaaataattttagggttcaagtatcaaacttttacatcaaagcacacaaactttattctcatcacaaatagaagattggcaattaatgtgtaatgaatctgagaattttaaaagaaggtgtggtgtaagaagaaggggaatacacatatgcacacacacgttgtatgtcgttaagccagttccattccttttcttattatcaagtacatttctgcttatttccaagaatgccttctgaagccttttcttcagagactttctgatgtgattgagttttgttctaggagctgccagaaaacaacttgttatttttggagagttatagttgttgtgctgggtcaagaagaacacgtattccaattctaagcaagacctaagcgcagttttaaatcycaccttgagaaagaaaatgattctcttatttcctgctttaaaagatgttgggggtaaaacatgaaaaagatgctggaagcccttgaaatacctgggacttgacacatccaaggttgtaaacatcttgaagtatttacattcgtatttcaagggattaattaggctgctatttatgtaaacatcactttt

SEQ ID NO: 864278 - DNA, 564 bp, Homo sapiens
aggaagtttatcaaggctagcatggagtctcccttgagccaaagtcacctgtcagaggagttctctgtctcccaaaatgggcctgcttttgtatccctggaactttcagtcattggctaaaacagcctttggaaagtaggcataaatgtagtgataaattttaaagcagagccaatggggtactttttcatgtacataaaaactgcagtgggaaacccaaggggcacattttatggccactatactcctcctgatttcactgaagggaagtgatcttcttttcatccataggtgaagagaagcgaagtaggattaatrtttctggtcctccatcttttcctcactcctctgggattgcctaactggtgagaccaaagaaagtctaacatagtctgagccatagtcttggctagtcatagccaaattaacctacacacaggatcacagcacatttttaaaaaggtgggttgcttctggttctaaaaataattagatttttttaaacaggcctcacttgtcctctcagctatcaagataactgttgggtatgaaaactgaactctg

SEQ ID NO: 864279 - DNA, 612 bp, Homo sapiens
ctgacttgattttctatccagaccactaaaattttccccatatcaacaataaagctgttttgctttctttctttttgtgtgcactggagtagcacttttaatttccttcaataaatttttctttgcattcacagcttggctgtttggtacaagaagcctagctttctgtccatttcagcttttaaaatgccttccttactacacttcatcatttctagcttttgctttaaaatgagagcactgccactcttcttttcacttggacactgagcggccattgtagggtcattaattggtctatttcaatattgtcrtgacttgggaaatagggatgtccaaggagaagaagagaaatatgggaatgactggtcagtggacaagtcacaacatgcatatttatcaattaagttcaccaacttacatgggtgcagttcgtggcatcccaaaataattatgttattaacatcaaagatcactgatcacaatcaccataatatatataataatgaaaaagtataaaatattgtaagaattaccaaaacgtgacacagagacatgaagtgagcacgtgctgttggaaatatggtgccgatagacttgcttgacgcaggg

SEQ ID NO: 864280 - DNA, 615 bp, Homo sapiens
agaagcttcactctccaggtccatgggcctgaatgtccttttctttctgctcccaacttctcttgttttggtcaactttagtggagccaggaccatcttcatatggcgtctcaacttgttggttctttgaagcatgaatttgaatttggtgggaagcagtgatgagcatctccaatatgtctcrcactctgagacccgggtctcagatgagtcattctagaaaattatttttcatagcgctgagattttatataaagcctaaattatgtactgttgacatcatattattgaaaatcttttaaacatgtattttaagcttgcctccctttctaatcagtgtgctatagacaactaaacctttctcttatgactcatgcatccttataaccaccacatattgtataatacattctacaacacagagacagcctccaatccctttgaggcctttggggctattttcacccacaaaataatggcacagattgttacattttggggttgtctgttgtcaacagcttccagtgcgtatttctaaaagcccctcttctcatgtttaatttactgctgttacaatccttgtggctctgcaaattaaatcactcagtctatttg

SEQ ID NO: 864281 - DNA, 706 bp, Homo sapiens
tactcctgagcttaggtattggcattaaatagaaatagcaagtgtattaagtaatgctatggtcaacatcagattaggtgggcaaaaaggaatgaagcaatgaaatattttcagctataatactgacaagggcttgaagtcaatstcttcatattagttagatactgttttcttgtttaatttttgccccttgagcaattactgtatattccacaggagataaatatcatacactgagctatgtgatgtgtagctatggtgatgtggcatttgagatataaattaaaggtggaattaatcacttgaatcaagattgtgtgcttcttccacattcttcctggtcttcttccctaatccacatttgttcactgttaacaagatattctttttatgtctatgaaaaagcagtatggcctgatagatactgtttttcagaagtttcagaatggaaatgacaaatttggcaaaggaaaagatccagaattaactgacaacatagaaaaagaactgcatgttttattctctaacttcaaataagctatcacagaagtggtcatttcaattgctagttgtgtagagcaaagtttctcaacttcattatgcaaatgaatcactgaagtatctgtttaaatgcagatttctattcagtagatcagaaatagggcccgagattctgcattttttattatactctaagttctagggt

SEQ ID NO: 864282 - DNA, 706 bp, Homo sapiens
tactcctgagcttaggtattggcattaaatagaaatagcaagtgtattaagtaatgctatggtcaacatcagattaggtgggcaaaaaggaatgaagcaatgaaatattttcagctataatactgacaagggcttgaagtcaatctcttcatattagttagatactgttttcttgtttaatttttgccccttgagcaattactgtatattccacaggagataaatatcatacactgagctatgtgatgtgtagctatggtgatgtggcatttgagatataaattaaaggtggaattaatcacttgaatcaagattgygtgcttcttccacattcttcctggtcttcttccctaatccacatttgttcactgttaacaagatattctttttatgtctatgaaaaagcagtatggcctgatagatactgtttttcagaagtttcagaatggaaatgacaaatttggcaaaggaaaagatccagaattaactgacaacatagaaaaagaactgcatgttttattctctaacttcaaataagctatcacagaagtggtcatttcaattgctagttgtgtagagcaaagtttctcaacttcattatgcaaatgaatcactgaagtatctgtttaaatgcagatttctattcagtagatcagaaatagggcccgagattctgcattttttattatactctaagttctagggt

SEQ ID NO: 864283 - DNA, 706 bp, Homo sapiens
tactcctgagcttaggtattggcattaaatagaaatagcaagtgtattaagtaatgctatggtcaacatcagattaggtgggcaaaaaggaatgaagcaatgaaatattttcagctataatactgacaagggcttgaagtcaatctcttcatattagttagatactgttttcttgtttaatttttgccccttgagcaattactgtatattccacaggagataaatatcatacactgagctatgtgatgtgtagctatggtgatgtggcatttgagatataaattaaaggtggaattaatcacttgaatcaagattgtgtgcttcttccacattcttcctggtctycttccctaatccacatttgttcactgttaacaagatattctttttatgtctatgaaaaagcagtatggcctgatagatactgtttttcagaagtttcagaatggaaatgacaaatttggcaaaggaaaagatccagaattaactgacaacatagaaaaagaactgcatgttttattctctaacttcaaataagctatcacagaagtggtcatttcaattgctagttgtgtagagcaaagtttctcaacttcattatgcaaatgaatcactgaagtatctgtttaaatgcagatttctattcagtagatcagaaatagggcccgagattctgcattttttattatactctaagttctagggt

SEQ ID NO: 864284 - DNA, 615 bp, Homo sapiens
cttttcagtgaatcctgaaaagcccctaccaagtactttcaggtgaattggtaaagaaaaagaaaatggttgaaaataggatgtgtgcagtggctcacacctgttatcccagaattttgggaggctgatgtgggaagattgcttgagtccggggcttcatgaccagcctgtgcaacatgctgagacctcatctctacaaaagaccaccaccaccaacaaaaatattagccgggcatggtggctcatgcctatagtcctgctactcaggagcytgaggtgggaggatcacctgggcctgggaaggtcaaggctgcagtgactcatgatgacaccactgcactccagcctgggcagcagagtgtgatactgcatcaaaaaaaaagaaatgagtggaaacgacaaattggtccaaaggatatactacttgaaaatgaatatttctatttattcacaattttttcacctattggtcacattaacattcatgtaccatgaagaatgagactttctgaaagtactgaaaaagcaatgacctaaaattagaaaaatttctttaatatatattaggaccactcctaaactgcaaaaagtgccttgttgtgtgtacaagtataa

SEQ ID NO: 864285 - DNA, 583 bp, Homo sapiens
catttcataatactaaaaataattgcctgaaagtggataatttctaaagataaaaggtttaatggactcacagttcagggatggggaggcctcaggaaacttataatcatggcagaaggagaaggggaagcaaggtactctcttctcaaggcagcaagaaagagaagtgccaagtgaagggggaagagccccttagaaaaccatcaaattttgtgagaactcactatcataagaacagcatgggagaaactgcctccatgattcagtgacctccacctggtctctcccttgacatgtgggaattatgagaattacaattcaagatgagatttgcatggggacacaaagcctaaccatatcattctgcccctgacccctccaaaatctcatgtctttttcacatttaaaaagcagtcatgccttcccaacagtcccccaaartcttaattcatttcagcgtccaagtccaaagtgtcatctgagagaagccaactcccttctgcatacaagcctgtaaaatcaaaagcaagttagttacttcctggatacaatgggggtacaggcattggataaatacagccat

SEQ ID NO: 864286 - DNA, 615 bp, Homo sapiens
aaatggtcctcgtgcactgagtcagccactcggcaggggccacaggactggttgggtcataggtctgagtgaagtcagctggttgtcagaaatgcaaaaatctgaaaaaaaaaaactcaaaagaccaatcttaggttctacratagtgatgtgatgtataggagcaattagggaagtcacaaatcctgtgatctctggccatttgactcctcagcagtaagggattacagaaactatgcctacatcttagcagacttcaggttcctcataaccctaaccttatagctttcaccagttttataaaggcagtttagtttagggaagggctattaccatcttgctttaaggttaaactataaactaaatttctcccaaaggtagcttggcctatgcccaggaatgaccaaagacagcttggtggttagaggcaagatggagtcaaatttctcttaactgtcatgattttgcaaacacagtttcaattgtatcctggactacatggaactttgtcatgttgagggtaccattcaaatctgacagttattaatataaatattttggaacagcgtgtctaaaactttagtctccagtatcaaaagaggctattcaagcatt

SEQ ID NO: 864287 - DNA, 631 bp, Homo sapiens
ttaaagaagtctgttctgccatataattgcatatttttttaaaagtccattctgccaacctctgccttttagatatttaatccattcacatttaaagtaattatggataaggtaggatttatgctgccattttgtgatttgatttctgtatgtcttatgtcttttttattcttttgttsttctattactgtcttcctttatgttaaatagatatttttgagtataccattcctggtctgtaaataacgagacacagaacagtaagggttaaacaaaatgctgcctgcaatggacttagcacagtgcctggcaaatagtaagtgctcagtaaacatgggcactcaattgggtcccaggcgtggtaagagccacagttaaccctaggactggctgagagcagagtcccctcagggctctgtgcgacccctcatgtctcctgggcaggccatagcactctgacaggtagtgcctttggggaatggggagtggtgggtcctgggaaacttcactatgccaggctgtggccctttagcccttcccctgctccagtgcatgggcaccacctggctgcttgtgaagcatcctagattccccatcgtgctcttcccacccccgacccccaccccaccag

SEQ ID NO: 864288 - DNA, 645 bp, Homo sapiens
gattaataggacctggcctgatgaaaagagtgagaaggtgtcctaggaaggggtacagcctggccaaagacctggaagcaaagcgagaagaacacgttggaggccctggctcaagcacagactgtcgagagaggtggcaggagccaaggtctgcagggacttgtggacagggcagggagtttagactttgtcctaagacagctcagagaactgactcgcctggagactcagtttgggcctgtcttgcccttgggtgacagacccatgatctttgactcccctcttcctagtgctgagcttgtggggcctgcccaggctataagagtgggagcttggagcattagcctccaagggcagggggccctcgggtcagctgttatccccaggtcagagctgagccccygcagctgctgagatcaacttggcatctcctccctggtctgtgtggccttgactcacaatagtcttttttctcaaatggacacactgattgccccaagcagactggtgagtggccctggtcccacagtggccacagtctggccccttgccctgtggtgatggctctctggcttctcctggggtcagccagccagtgttgggtgtgcagctgggctgccgatggcatttggggagcagtgtgtg

SEQ ID NO: 864289 - DNA, 629 bp, Homo sapiens
aaagatgcaagtagaaaaagtaatagtaaacagaataaagggagataggcaagagagaagggggtgggtaaagaagaggaagaatgtgtctatgattggatccaaaagtaaggatttttaaagttaagtcccactggaaaaatgcagaagagatatttttaccataatgtgagttgacatgggagggcagcaggtgaaaagaagggcacagcctttattgcaggaatattctatctcatgtatgtgtataaataagagtctagctttttcacataagcacattgtgaaatatgtcagtagaattcagtaatgcgtattttaaaacaaagagttggagccagaaaatatttacctatctaccttgatttgyttgaaaatttaataacacaaaatctctctaaagacactatggcttaccactacccacattatattctttttgtcatcatacacaaaggaaggtaatttcaaaatcctgaaaataaactaaaacagaatggagaatcattatcattgaactttgacacagcagtctgattttgcaaagtgaaatttttaggcccatgacatttttgttttcaggtactttatcattattgcttttagaattctcttttagataccaaatt

SEQ ID NO: 864290 - DNA, 613 bp, Homo sapiens
cagtcaattaataccacagtctctattttctgacctccatttggccacatggccccttatgtgggtggcattggagtgaccacaggcatttttgacatgacactctaaggaaaagttaagttgataaatttaagtttscgtttaatggaattgtatttatttggtttgtagtcacattgtgaacagggtgttttctatctatccaagtgaaggaatggtttccaaaaattcttctacacccctttgaaaaaacagactcaatgacattaacaacaacgtgattatgagcactgtcaattcaaagagtattacagagtagttacaacacaacagaacttgaaatgccctaacatattacagatcatacaaatttttaaatcttattgctcatctacaaaagaaacttgatagataattccccaaatttaacaacaatttaaagaatttacatgacaatgatttgggaagctaaattgtcaataacagataacaaataacttgtcatcaaccatgctagagaaaatactaaattcctttcctactatctttatagaaaatattaatgtatatgaagaggtaatcagaatgtattccaaaatatagccaataagta

SEQ ID NO: 864291 - DNA, 613 bp, Homo sapiens
cagtcaattaataccacagtctctattttctgacctccatttggccacatggccccttatgtgggtggcattggagtgaccacaggcatttttgacatgacactctaaggaaaagttaagttgataaatttaagtttgcgtttaatggaattgtatttatttggtttgtagtcacattgtgaacagggtgttttctatctatccaagtgaaggaatggtttccaaaaattcttctacacccctttgaaaaaacagactcaatgacattaacaacaacgtgattatgagcactgtcaattcaaagagtattacagagtagttacaacacaacagaacttgaaatgccctaacatattacagatcatacaaatttttaaatcttattgctcatctacaaaagaaacttgatagataattccccaaatttaacaacaatttaaagaatttacrtgacaatgatttgggaagctaaattgtcaataacagataacaaataacttgtcatcaaccatgctagagaaaatactaaattcctttcctactatctttatagaaaatattaatgtatatgaagaggtaatcagaatgtattccaaaatatagccaataagta

SEQ ID NO: 864292 - DNA, 664 bp, Homo sapiens
catggaatcaatctaagtgaccgacaacagtggattagatttaaaaaatgtggcacatatacaccgtagaatactacacagccatataaagaatgaaattttgcagcagcgtggacatagttggaggccactgtgctaagtgaattaacatttaaacagaaaatcaaatactacaccatctcacctataagagagagccaagcaataagtacacagggttatacatatgaaaatgatagatacagggaactccaaaattggggagagaagcctgggggaaagggctgaaaaactacctattgggtacaatgttaaatatttgggtgataggttcactagaagccaaaaacgcagcattatacagtacacccatgccacaaacctgcacagctatcccctgaatgtaaaaacaaagagaaaactaagtargcaaagcataaaaatgggaccaataatatcttctttttattagttttgattgttctaaaggtaagaagggatggcacataaagtgcctatcaaatattgctcggttcatgataagaatagtaataatggtagtcacaaaaagagtcataacttcaacaacaatgatgatgatgacaactagaacaattaagatatttattatagctttgagaagattttagaattttatgaagtc

SEQ ID NO: 864293 - DNA, 662 bp, Homo sapiens
tattttgctggagatgataatcttcttatttttaatgcttctttaattatctttaaatagttaaattttatgcagcctccaggaaatctgaaattgttttctatgcagtctaacctcgagatcttttatcagttgcatttttgttctgtagaaccagctcctggaacactttgccctctgctacatcagagggctttgcttgccaagcttggtgaagcagtggtatgactttgctgctattcagagacttctatttgactcttctctgtgttgcattcctggtttcttgattctcatgtcttcctctttactggtttattcctgcattttgttgaagtacatgttctaatagcttcctgagaaatcgtgcatgggaggtaatttttttgaaattgtacacattttaaaatagctttattctaccctcatrtttgatcaattgtcctatggctctataattctttcacagcactttaaagggaaagtttgtttaattgtcttctagcactgccaatgtttgcgatgagaaatcaagtgctatttttacttctaatctttattagttgctttgttttttcttttctggaaacttactatcttctctttattttggggaagtaatatgtcagtatcttctgttctatgcaacttaaaagaattga

SEQ ID NO: 864294 - DNA, 596 bp, Homo sapiens
agcatatgatctcactcatatgtagaatctaaaaaagttgatctcgtagaaagagaaaggaaaatggtggttaccagaggctggggtagttgggggaagatgttggtcaaataatataaaattacagttatatagtagaaataagttcaagagatctattgtacagtatggtgaataagttratgataatatgttgtattgttgaaaaatgctgagagtgaatgtgtattcttaccagaaaaatgataaatatgttacctaatgtttatgttaattagctagatttaactgtttcataatgtatatgtacttcaaaacatcctgttgtacataatgaatattgtacatagaattttatttatcagtaaaaaagttatattcacctgaatccctgttatgagctctgggccaatgaaattggacctaaaacaatgtggaatcaggttatcattcatgagccccacgcacagtccatggaactgggtaagggacaggcatcgtgttattaatattttgaccattaatctgatttctcttctccactttacagacccctgttcatgaacatacatgcacatgcacatgtgtgcacacac

SEQ ID NO: 864295 - DNA, 586 bp, Homo sapiens
ggcagtgtccccacccaaatctcatcttgaattatgattcccataatccccatgtgtcatgagagggacccagtggaaggtaactgaatcatgggagcagtttccctcatgttgttatcatgatagtgagtgaactctcatgagatctgatagttttataagcatctggcatttcctctgctggcactcattctctcccctgccaacctgtgaagaggtgccttccaccatgattgtaagtttcctgaggcctccccagtcatgtggaactatgagtcaattaaacctcttttctttayaaattgcccagttttgggtatttcttcatagcagtgtgagacggactcaaacagtaaattggtaccacagagagtgcggtactgctataaagatacttgaaaatgtgggagtgacttcagaactgggtaataggcagagactggaacagtttggagggctcagaagaagacaggaaaaatgttggaaagtttggaacttcctggagacttattgaatggctttgaccaaaatgctgataatgatatggacaatgaagtccagacagaggtggtctcagatgaaaatg

SEQ ID NO: 864296 - DNA, 665 bp, Homo sapiens
agtaaatgagtctcacgagatctgatggttttaaaaaaacaggagttctttgcttgctgccatccacgtaagatgtgacttgctcctctttgccttccaccatgattgtgaggcctccccagccacgtggaactgtgagtccaattaaaccactttcttttgtaaattgcccaatctcaggtatgtctttatcagcagtgtgaaaacagactaatacaaataccaactcatctaaagaagctgtggaaatatttcarttgtgtatatttgcatgtgtgtgtgtctgtatagtcagtatctaatgaaatgaaaaacacctgaaaataataaaaatgaatagaaaatttactgactattaaactgtgacaaagcagaagaaggttcttatccacacaccttaaatatcaagaggtggtaaaagggatagagtctgaggattcagaagaatctcttagcccctcttttaccaccaccttctagaagcagtaccggtgagttgacaacatcctgtaaatccttatgaatagctgacattttcaaaaaaattgtctgaggatattttctgtttccccgtttcagatgagggagagcataaacagttggtggggaggtgtagatgaagcattcagggctgaagaaccgaggcttaagactatataaagaat

SEQ ID NO: 864297 - DNA, 614 bp, Homo sapiens
tgagtccaattaaaccactttcttttgtaaattgcccaatctcaggtatgtctttatcagcagtgtgaaaacagactaatacaaataccaactcatctaaagaagctgtggaaatatttcaattgtgtatatttgcatgtgtgtgtgtctgtatagtcagtatctaatgaaaygaaaaacacctgaaaataataaaaatgaatagaaaatttactgactattaaactgtgacaaagcagaagaaggttcttatccacacaccttaaatatcaagaggtggtaaaagggatagagtctgaggattcagaagaatctcttagcccctcttttaccaccaccttctagaagcagtaccggtgagttgacaacatcctgtaaatccttatgaatagctgacattttcaaaaaaattgtctgaggatattttctgtttccccgtttcagatgagggagagcataaacagttggtggggaggtgtagatgaagcattcagggctgaagaaccgaggcttaagactatataaagaattagaaagatttgaactccaagggtaacttagacatttcagctatctcagagaggacagggccaagctccatcagcaaaaggtgc

SEQ ID NO: 864298 - DNA, 665 bp, Homo sapiens
agtaaatgagtctcacgagatctgatggttttaaaaaaacaggagttctttgcttgctgccatccacgtaagatgtgacttgctcctctttgccttccaccatgattgtgaggcctccccagccacgtggaactgtgagtccaattaaaccactttcttttgtaaattgcccaatctcaggtatgtctttatcagcagtgtgaaaacagactaatacaaataccaactcatctaaagaagctgtggaaatatttcaattgtgtatatttgcatgtgtgtgtgtctgtatagtcagtatctaatgaaatgaaaaacacctgaaaataataaaaatgaatagaaaatttackgactattaaactgtgacaaagcagaagaaggttcttatccacacaccttaaatatcaagaggtggtaaaagggatagagtctgaggattcagaagaatctcttagcccctcttttaccaccaccttctagaagcagtaccggtgagttgacaacatcctgtaaatccttatgaatagctgacattttcaaaaaaattgtctgaggatattttctgtttccccgtttcagatgagggagagcataaacagttggtggggaggtgtagatgaagcattcagggctgaagaaccgaggcttaagactatataaagaat

SEQ ID NO: 864299 - DNA, 639 bp, Homo sapiens
gcttgggcataaactgagagttttttttccacagcactacagtattcctcaagagaacattgtggatgttttctaataagacatttttaaaggtgtggtcagagtctcgagtttttactggcagagaatggccatattttattatatatgtaattcgatggacatctaaattatgactttctgttttggtaaaacattcatagcatatctagtgctgaaccatgtaatttaccctctagtccccaagataatcaggtcataatgtatagattttagcttcagttactaaatgtgatttattttaatacttggtagtcatagagcaaatagttaaagataaaaatctctacagtgcctgaaaaaaattttctgaaaatgtatctgtaactcttttaatatttttttgttattttattacagaaatcatgtatgtttctggtagatagagagtatgagtaaaatttaaagacacatattcttatcarccagagaaaaccaagtaatatttctctctgttttttctaggcattttataaatacatacaatttatacttcacagcccatttttgttcacagagtcaaaagttgatgaaaacagaacaaaacgtgccaactagcttttttttgtttgatacaga

SEQ ID NO: 864300 - DNA, 639 bp, Homo sapiens
gattcaggtccacttgtggctgacttcaaatcccatcacactctgccttctgacatagctctgaaggagtttctaattctttctgaaaaataaaggcttcttggggaaggaagcccttggcatgtgtttagaagggtgagttgtatgttggcagatggaggcaggaagagaggaagtgctgagcagttctaggctggggcatcaacttgggggataaagcatgaaagtagaaattattaatagagtatatcagtgtaacaactgtaaatcrctcagtattgttcaggttagggggtagatgacagaagaaacaaaacttaagttggcagaagccatgccacaaaacaacactgttcagagtttatactttatcctatagagaatggtgacccactgagggtgctaagcaggaaaacataatcagatggccatgttaggaaggccgttgcatttgcagtatggaagatggttaggaggagaccaatgataaggatatggaaataattagaatgacagatggtgggatcctgtacgaaagttgtacaagggcatatgaagaggagtcaacagacctgagaagtatttttggaggtgaattaatagggcttagtaatcaatttgctatggtgagagatagaa

SEQ ID NO: 864301 - DNA, 631 bp, Homo sapiens
gatccttaatgtgtgcaaatgaaaagtcacgtaggaggcttagagatcacaggatggaatgccaactgtgacaaaataacctaactgcattacaaatatataaaattgtcactaaagagaataggggaaaagagcctcacctaagtaactttgtaaatgaatagcatctgaaagactaatggcaaaaagaaatgtggataagaactttactatagttgataaatttgctttccttgcggggggcgggatatgagttaacaagtatgaaaccactgtatgtgtatgtatattggaactgagcagttaggcaaatggatgtcaaatgatggaaactaagttttttactgttggaatgggaagttataggtaagcaaaagtagaaagctagaatgatctatagagttggagacttcattatgagctcrtgtttgttttaatatagattcagatggttacatacagaaatatttatagagatgagtatatacatggttagtatatacacgtattttcttgctctctcagctgagaggaactagaagcactgccgtaccaataacagtaaacacaccttgtatccagacattggtttctaatgcagttctccaataaaaggaaccaagactccttt

SEQ ID NO: 864302 - DNA, 604 bp, Homo sapiens
agttagtccactcagagccatgtggcttcagtgctttgcttgtatgtggggaccccataggtgatgtgagagaagacacatagatgctaagtaggcatagaccctggatttcatatgcaaaataaaccccagaaatgctttactaatatttgatttattagtatgtcaatgagtacttattggttataattattattaaattggactttattttaaaaatttaggggagagatgtagggtttgaattcagtgtaacatattgtgagattaggtcctgttgtacttttgaatcacctggagagctttgaaaaatcctaaatccagacctcaacctggatcagattataacttctaggatttctggtttagcaagtctggtctagcaaggctgggtctcrctcataattttttgtttaaaattatatatgtcttaaagaaaagttgtaagaacttaagtataactgctacctactttcatccatttttaaggttttgtcacatttgctttatcattttctctttttatgtatcttgattttttttttctgaaatgtatgaaagtagactgcatacaatatgcctctttacctaatgattattcagt

SEQ ID NO: 864303 - DNA, 604 bp, Homo sapiens
agttagtccactcagagccatgtggcttcagtgctttgcttgtatgtggggaccccataggtgatgtgagagaagacacatagatgctaagtaggcatagaccctggatttcatatgcaaaataaaccccagaaatgctttactaatatttgatttattagtatgtcaatgagtacttattggttataattattattaaattggactttattttaaaaatttaggggagagatgtagggtttgaattcagtgtaacatattgtgagattaggtcctgttgtacttttgaatcacctggagagctttgaaaaatcctaaatccagacctcaacctggatcagattataacttctaggatttctggtttagcaagtctggtctagcaaggctgggtctcactcataattttttgtttaaaattatatatgtcttaaagaaaagttgtaagaacttaagtatamctgctacctactttcatccatttttaaggttttgtcacatttgctttatcattttctctttttatgtatcttgattttttttttctgaaatgtatgaaagtagactgcatacaatatgcctctttacctaatgattattcagt

SEQ ID NO: 864304 - DNA, 615 bp, Homo sapiens
aaggctgggtctcactcataattttttgtttaaaattatatatgtcttaaagaaaagttgtaagaacttaagtataactgctacctactttcatccatttttaaggttttgtcacatttgctttatcattttctctttttatgtatcttgattttttttttctgaaatgtatgaaagtagactgcatacaatatgcctctttacctaatgattattcagtgtatatttcctaagaattagaatgttcttttacatagccaaattacaatgatcaaattcaggaaaattaatgaacatagtttttaaattagtagactttattctttcttattatggcaaaaagtattgtatcaatatacaataccttaatctgcaaaccaaattytaattttgtcaactgacccaataagtgtctgtgatgtttaatttatgtgtcagcttgactgggccagggggtgcccagatacttgttcagacattctgagtatttctattagagtgttttgggatgagattaacatttaaatcaggagacctagtacagcagattgccttccataatgtgggtgacaccatccagtcagttgaaggcctgaatagatcaaaaaggctgtt

SEQ ID NO: 864305 - DNA, 694 bp, Homo sapiens
ctagattcttcacatacacagttcacagtagggtttgtgctcctatgagaatctaatgcggctgctgatctaacaggaggcggagctcaggtggtaacacttcctggcccactgctcacctcctgctgtgcagcccrgttcctaacatgccacagacaagtactggtatgaggcctgtgggctggggacccctgtagtagatgactgaactgaaagaggggttgttagtacgagctatgattttctttttaatctatagaagtttatccacagaattacaaaataactgattgattaataaaattggtctactctgtgttacgtggcctatatgaagggaaatagacacgtaatagctcttaaaaccaaagaatgatttaaaaaaatgaacaaattctgaactggaataattgcatgatgagatgtaatgcattcaagagaacccaagagacacccttcaaatgaacagaaactctaaaaaaactgaaccatattataaaggctctaatgtaggtttctaaaaaaagctactagaaataaattactcctttttaagacaaattcaaggtgtgaaatgaggttgtaatattttaaattaggtctatctcaaaaaaagattggtgaacagcagcagctgtttggagatcagcagagaaatagcatgcctcagcctctcctggttagaatgaactaa

SEQ ID NO: 864306 - DNA, 694 bp, Homo sapiens
ctagattcttcacatacacagttcacagtagggtttgtgctcctatgagaatctaatgcggctgctgatctaacaggaggcggagctcaggtggtaacacttcctggcccactgctcacctcctgctgtgcagcccggttcctaacatgccacagacmagtactggtatgaggcctgtgggctggggacccctgtagtagatgactgaactgaaagaggggttgttagtacgagctatgattttctttttaatctatagaagtttatccacagaattacaaaataactgattgattaataaaattggtctactctgtgttacgtggcctatatgaagggaaatagacacgtaatagctcttaaaaccaaagaatgatttaaaaaaatgaacaaattctgaactggaataattgcatgatgagatgtaatgcattcaagagaacccaagagacacccttcaaatgaacagaaactctaaaaaaactgaaccatattataaaggctctaatgtaggtttctaaaaaaagctactagaaataaattactcctttttaagacaaattcaaggtgtgaaatgaggttgtaatattttaaattaggtctatctcaaaaaaagattggtgaacagcagcagctgtttggagatcagcagagaaatagcatgcctcagcctctcctggttagaatgaactaa

SEQ ID NO: 864307 - DNA, 597 bp, Homo sapiens
tttaagtttagccagaaggaaatcatttgtgtccctttcaagggctgtttcaattcagtagctgggaaaaaaaaaataaacccagagtgagtttaagagaaaatatgatgagaggaatgggaggcagcaaatataggcaactcattcaaaaacawttttttgccatagaaggaaagaatttgggcagtagctggactgcaagaagtgaaggcaagataaatttttttaaaaaaagagaaaaaaaacagcattctaatagaaattattcagtcgagagagaaaaaaataaaaaattaaaaaaaaaatttttaaacacccactagaatgttgtcctttagtgggtaagagagaatgcaatcttcttcatagcagaaggtctggcttagagtggaggcatggacagtttacctaagtaggaaggcagattgacaagtgctgcttaattaccattcactatttgtcatgacatcattactattggtaagtggatataataataatgttttctttgtccttaggctgggattagtagctggtgcatagtatatattcattgacagtgagcccttatcatcatcatctgtgccatcaggctta

SEQ ID NO: 864308 - DNA, 650 bp, Homo sapiens
cggtaacagaaataaactctcttctttcccagtttgtctgcatctcgttattgggcggcaagaataagcagcctgaccctcactttagtctgggaacaatattacccaatgctggtgatgtagtatctaaagggggtgcttatatagatgactttgctttgatgaargattaattaaatggtcttgatagcaatgaggacaaagctctgattttttttcttgcccaaattcttttctatggggtctagggaattgggccttacaaatcataaattctcatcatcagatgggttttatttaaccctgtatattgtgacttactttccagtctgattctggcataactagggaaaaaatcaaaatatattttccccaaaatatatttccctgccataccttgaaaatgccctgcaaagtctcttttgggaaaaatccacattcaatagagaatccccttccccctttgttttccttcctttctttccagatccaggagataatcaactaagcgccaggcacccttttaggtctgataagaaacattttacaacctgctgtctccctgaagtctgatatctgagagatttctctgcacagtaatacttgatctccacaattctttatcttaacctgaacactcctttccattg

SEQ ID NO: 864309 - DNA, 560 bp, Homo sapiens
ggtctcactatgttgcccaagctggtcttgaactcctatgctaaagcgatcctcctacctctgccgccttaaatgttgggattacaggcgtgagtcactgtgcctggcagaattttttagttttcaccacacaagtcttgtacatattttgttagacttacatctaagtattttggggagttgtaaatgatattgtattttgaatttcattgtcaatatatagaaatacaattggctttgggatgtttatcttctatcctgcaaactttctaaactcagtaattctaagaagctgtttttggagattgctggagrttttcaaaataatcatgtcatctgtaaacagtggtagttttatttctttatttctgatataatttttttattttctttacttgtcttattgcactggctagaaattcaagcactatgttgaattgaaaaagggataatggacatctttctcttcttcccaatgtttgcagaaaagccttcttttaccattatgtagatgttaagctgtgggtattgtatagatgctctttgtcaagttgaggaaa

SEQ ID NO: 864310 - DNA, 571 bp, Homo sapiens
ccatgtatgccctgaagtatagccttatctcctagagctgcaggactgaaattgtcaaaaatccaaagcagagcattatcttgcaactggctgaattacaaagcaagttgagctttcggtctggcaggaggtctacagttaaaatgaaggcatttaattgaaaaagaatgggatcctctaagttggaaagggaacacgtgggatagatcctgatgaagctgtggacattgagcctctaagttctgatgagtcttcattaccagtaaaagagatctccccaacctccagcagaattggcctcctctacccacagtgacagcagtattcccacccatagtggtactggcatctctgccwctatagttataaaagattggccttacattgcctaaggaaactgtaatgacctcccccaaggcagatgccatacaagacaatgctgattctctgcagaaccgactctttgcttctagacctataattagactcaagtctcatcagtctcctaaaggtgaggtacaatgtgtgacccatgaggaggtatgttaaactcaaacaaactacttgagtt

SEQ ID NO: 864311 - DNA, 654 bp, Homo sapiens
tggtggctcacgactgtaatcccagcactttgggaggcagaggcgggtgaacgcttgagcccagaagttcaagaccagcctgggcaacaaagggaaaccccgtctttacaaaaaatacaaaaaaacattggccagtcatggtggcctatgcctgtggtcccagctattcgggaggctgaggtggaaggattacttgagcctgggaggcggaggttgcagtgagctgagatcacaccactgcactccagcatgggttacagagtgagacacagtctaaaaaatgtaaaaataaaataataataataattgctartactacatccctatgacacacatatggtactataattacccacattttacgaatgaaaaatctgagacacagagatgaagaaacttgaacaaagttgtatggtttgtagagttaaaatttaaatctaggcagttaaattccaagcccatgttcttaatatctataccatatatctttaagagtcaaaaaaaagtatatgaagtaaacacactaggtaaaatattaaaactaatagaagggtcaaataaatggcatagccaagaaatgcaatgaattccagagaccaagattggaataggtataaatattcagagaggttttttaacagccaccctccgccc

SEQ ID NO: 864312 - DNA, 651 bp, Homo sapiens
aaagagtctcagatatctttgtatgttaaaagaaaattaagttaaaaaaactattcaaaatttgtaaagaaacagtgagatttctatataaaataaattaggtagggtatacaattaggcaaattaatggatacagtattgaaatatgtagataagctacaatatataattattaattgatttttaagacctatttctgcttaattactactttttatttctaaaaccagcagattaaaaatattttctcaatttaaaaatttgatctctgtggtaaaactaaacatagaatgtttttgctctgttagaarttagcctttggagagaaaacacagttattgtaacatattattcaaggtaaaaatcactaagacatagagaatttcagattttttttgctaatttctactgagagaactgtttgggaaaactgagagaactaattgaaagagttgactatccatgctttaaaatgtcagattttaaaatctatctctgcactaaagacatcattatttttgacactgggaaaaagaaaaaaacaatgtttagaatttgttaccccaaacaaaataacagcaattaaaaaacacagcaatgaaactgtgattgaaaacatcttagaagaaagtgaggctaaaggtattacat

SEQ ID NO: 864313 - DNA, 557 bp, Homo sapiens
ggccagtgcacatttggaattaaaagcacatcagctaaaataaagggaattgtgtaagtgtgacataagtcatattgttcattcatattttcaagagctcggcatttaattgttgttgactgaggtgccacaacttcatgagatatcaagggctcattayttgttgctctatgataaatgcaaatattatctctggcaatattaaatgttttataatttgcattctgttgaagagctaaccctcattagaaataaatatataactaaaataaaacatgaatatatgtatgtatgacatctctaaaaggtaaataagctgttttatagtacctaaatgtataagtgaatcatttgcaaaatgtctttaattaacaccacctattgggcctgttccctgatttgtctactatttaagatttgtgtacttttgcatgttacacccctgttggaaatacattaagtttcagtatgactaaatgttataaggggtttaatatgtacctgtggaaaacaaaataactaatgaacccatcagggagattaaaactaagatgata

SEQ ID NO: 864314 - DNA, 624 bp, Homo sapiens
taaaaaaatttaactaagttaaaagcttaacctgtttaaaagcttaaaatcacctgaaagtttctcaaatactaagcaatataaatgtttatatagcactgttacccacaacaaaaaaaatctacacacacacacatacatgcacacacacatgtacacaccgcacatatataattagagacattatctgatgttacygcgactgatttaactaatttttttcaaagtttctaactatattcagaagagctacttgttttaacagttcctgtgagatgtattgtactgagaagataactatatcttctcatgagtctaccctaactgcaaagaaacctgggggtgctccaaggaaggaggtttgaactaatttttcgttttatctcatttttgtgtttcagtaacccagttaactatataaacattgtttccttttaaaaacaagtatcttatagaaatgtgtatttactctcagctaaggacgttagtagaaatcttatctggattattagaagaactcaaatatgagagtccttgaactagatgatgttaaccatttcctgcttagtaaactgtgagtgccatcagtgtccacactgaaagctcaaaacagaacactaaaac

SEQ ID NO: 864315 - DNA, 649 bp, Homo sapiens
aatataaagtcgattggataagaaagattgaattatctatttataccaattggtttttctttgtatgtacaattagccctctgtatccgtgagctccacacctgtggactcaaccaactatagatcaaaaatatctgggaaaaaaaatatctgaagtttcacaaagcaaaacttaaatttgctgcccactaatttgtatgctgaatccaagggaatgaaattatgtgtaggcattgtgttaggttttataagtaatctggatatgatttaaagtttatagaagaaaaaaatgtataggggaagaggtgagtaggttatatgcaaatacaacatcacattatataggagacttgagyatcagcagattttggtatccaagaaggatcttggaatcaatatcccacgaatcttgagggatgacagtgtgtttttaatctcaaacttttgtatttgagaataagaaatcacttctctttgcaaatgccttataatttctctgcaataaagatccttctttccaccagatttttttttggctttttgtattattaaacatactctatcatcttgcttggtgacaagatgtgattcctgataatttcctgttcctttaatgggagttcttatctatgagttgtagatttagtct

SEQ ID NO: 864316 - DNA, 612 bp, Homo sapiens
ggctctgctgatcactttatcttcctctgatttctgattcctgtgaagatttcacaggaatccagagtcttacatatttctcattgtccttctccacaagtagattttaccagtctcagttgctggttcagcctcatctctctgacctttgaataatggagtgtgccagggatcagtccttgcacctattttttcctctatctgaatttcttcccttggcaatctcacctctcataaatgccacccttatacttatgactgccaaaattatacatttatctttgactactgccttcaccttttgactttaattcagctgccttctcaatgttgccaggtgaacgtccaatagaaagccagagcatatccaaaaccaaatcttgatcttccagcaacctccaaaatgggagttgaacaatgagaacatatggacaggggggaayatcacacatcggggcctgtcagcaggtagggggcaggggagggatagcattaggagaaatacctaatgtagatgacgggttgatggtacagcaaaccaccatggcacgtgtatacctatgtaacccacctgcacattctgcacaagtatcctagaacttaaattatata

SEQ ID NO: 864317 - DNA, 571 bp, Homo sapiens
ttgttcttctacagcacttaaagttttgctcttcacatgtaagtttgaattaccctgaaatttattttttatataatgagacagcaatctattttttccacttttcttaattttcaaatgtttctgtgtgtggatttacttctggggaaaagcttaggtgaatgtgagactyaccttgtgtgcatctcttctgtcagtgattattctctgtgttatttcttgccatttaaagattaatcaatataggcaggatgtaacttaagaaacagaaaatttttagtaagtttgaatttctctatgagctccttcctggtctcatgctccttacatttattcccagaggccaccactgtattgatatatatttgacttttaagtaaatgaaattattttaccaaatttttcagcgacttacgtatactttcagcattattttttttttagctttttatattttgttgcaggtagttgtagtttttttcactgttatattgtatcaaattttatttatacattttgtgtggcaagaaaattaagatgctactatacggaggctcatctcaacaagctt

SEQ ID NO: 864318 - DNA, 638 bp, Homo sapiens
atttcaggaaaattaatgattaatttgtcattgtggatgttgatttgtcaataatcataatatatcaagatggatacgtacgataaagtagacgctacagcatagtaaaagggttggatagaaaggaagagaaagccaaagatagaatcctggcactgtctacwtttaagacagagaaaggaagagacctgagaagacacaaatgaaaaataaaaacaaaaaacagtcacactgagagaactagaaaagaacgttttaagaaaacaacatctacataccaagaaaacacattcctcaaagacaagaaagtgtaaactattacagaaactgagccccaagtgttcaagaactgggagtaaagcccactattagagggaagttggtgttcttgttgagtttgttggtttggcaactgagtatgaaaggcaagccaaatgggactataaaatgcaataagcaggtagaaattactccattatgttcttcgacatggagaggaagcagactagtttaacggttgcatgaggaagtagaaggtttgagaaagtagacgacattttaatgcatggatgaactaagcatacattcaggaaatgagcaaacagccaagtaagagaggagatctaaagaccatggaa

SEQ ID NO: 864319 - DNA, 543 bp, Homo sapiens
ttttgttaaacttgtgcccctgaactgtgaacttcatcattgcttctcagttttgttttgttttgtttccccctccattatgtgggataggatgaccagaaagggctggagttgaatattttctacttgcaaagtggtaggctaaagcaggctggctttgagtatatcccttctcccatgttacttaggctctgataaaatcccagcaggttagacgctggtcatatagtttctgctgaaggtagcwttgccaacgagaacagaatattccacagtatttttaaatgattattttctttctctctccctgctaaaggcagaggggacatttttttcttgatacttcttgtgaggaccagttacagctccaggatgtaaagctcacaaaaatgtagggatcatcctttgtttgggtctccctggagtgttttaatctcagacttgtccactccaagcctccattaacttgtgaatttccatgcaggttttcccacctgaagaaagttcctgtgatttttgtcctggtaaattgtgattctgtgt

SEQ ID NO: 864320 - DNA, 659 bp, Homo sapiens
gtattatttttctcttgttgacttcaataatttctctttgtctttgaatatttttataatgagttttctgagtgtggatgttctcgtatttatcctacctggaatttgttgagatttgtaaatgtctaaattaatatttttcatgcaattttgaaatgtttcagtcattattttctcaaacatttttctgtctcttgttccctcttctcttcttctagtacattcattatgtatatattagtatgcttaatgccccaccatatttctctgacactgccatttttcatcatttttcctctctgtttttcagaatactgatctctaacaatctatcttcaagttcactgattgattctcatgacagckcaaatctattaaactttctagttctttttttttcattttggttgttatatttttcacctttaatatttcaactaaatcctttttaattatttccatttttgatatattctatctggtgaaatactatcaacatacattccttcaaaattttaacttttttttttctttagctttgtgggcatagttataatagcttctttgaaaatattttctgataagttgccacgtttctatccctcaaagtctatttcttttgcatggctttttgcctatgtatcagtctcattttcctg

SEQ ID NO: 864321 - DNA, 586 bp, Homo sapiens
actagggatgctgaggcaggagaatcgcttgaacctgggaggaagaggtagcactgagctgagatcgcgtcattgcactccagcctggatgacagggcgagactctgtctcaaaaaaacaaaaaagaaagaaagaagaggcttgccactgcaaactctgtaagataactgaacaaatggtgaattcccaaaatgtgagaggggaaaactctgcctctgaatatayatccctactggggaacctgaatatccagatcatgggtgaaggatttaaccttacctagagctgaaacagctttagggagctgagtgaaatataaaagtagaagaagcaacgagaagagccctgtaggtactcctggtccccagctttatctcacaggggtccttggggaaggcagctagcagaattgggaaggggtcacagggtgaaggaagcttctagctgaactttgtaataatttcgaatgagcacaaattttcctgagcagaatccaggggtatgaacaggaagtgcagatacaagcacaggaggcacaaccaaaggaataggcaggcagggagggcaaggcctaagagccctactt

SEQ ID NO: 864322 - DNA, 614 bp, Homo sapiens
attaagctgtttatttgagatctttttttgatgtaggcatttattactacagactttcctcttagaactgtttttgcttcatgacgtaagttttggtatgttgtgtgtcctttttcatttgtctcaagtatattttggtttcccttttaatttcatctttaacccattagttgttcaggagcatgttgtttaatctctgtttttgtgaaagtttcaaattcctcctgcaattcatttctagtttcatactatttgggttggaaaagatacttgatatgrtttcagtcttcttacatttgttaagtcttgttttgtgacctaacatatgatctatcctggattatgttccatgtgcacgtgagaagaatgtgtattttgctgctgtttgaatggaatgttctgtttatgtctattaggtccatttggtctaaagtgttgtttaagtcatgtttccatatttttttccatctggatgatctgcccattgtcaaaagtgggttattgaagtccactactattattgtattattgcctatgtctccctttacaactatcaatatttgctttctatatttaggtgcttgtatgtctcttgctgtcttactttgtgatta

SEQ ID NO: 864323 - DNA, 599 bp, Homo sapiens
gttgaattccatcatgatgggccaattgccacacttcttttctgtaaattgagttatatgatcagaagcaatgttgggatatcatgatggtgaataagacattctttaagtctttggatggtagatttagaagaagcattatgtgccagaaaggcaaattcatgtccagagtaagcrtctattacagtaagaacaaaatgtttccccatccatgatggatggaagtggttcaatgtaatcaacctgccatcaggtagctgatcaacctggggaatggtatcaaactgggtactcaatgttgggctctgctgctggcagattgggcactctgtggcagtcatagctcaagtggctttggtgaatggcatccatgttgctgagcccaggcatgatctccatccatgctaccatggccactttgttcatgaaccaacgaggtgataacaggctatctggagaaagaggctggctggtttcccgagaactggtcaacctatgcagttaattattaaagtgcttctctgctgaggataccatttggtaagcattcacatgggatacaaataatttcacatttttgcccattcacagagttctgt

SEQ ID NO: 864324 - DNA, 609 bp, Homo sapiens
atgtttctcaaagcttaagatggtctccaccagcagttcagcaactagcagcacaaagtatgagcaaacactcaaacacaagcatgagctaaagtaaaacttagggtcaaatgtacctctcaaagtatatgattggagctaacttttttattttaagttacagraaaaaaaacaggagaactgaagagaaatcttcatctaatatgttgtttaaaatctggaaacatattttctgtactcttgcatcattttttttttctaccaagtaacaaatggatgtgtcttcttgcaggaccaaaaacaaaaagaaaagtaaaacacagagttctcaaaagcaccataatccctttaaatttgtgtttgagatgtcattagttaacgtactgttcaatgtactaataaaccacataggcctgaaagaatccatacaacttgaaatttgtggagatatttaagaaaaagacttgacttatcgaaagcattataaagcattctcattcacagaaaggcttatattaggattgattctcagatctcaaatttatcggaccacctatcactaaataaatacctttatcaataaattatactgcaaagcctttgctgaaa

SEQ ID NO: 864325 - DNA, 476 bp, Homo sapiens
gtggtaatgcagcagcattcaagtgcacacttgcactgacctgataggtttatcttttggtcttcctctactcgagatataagtagtttacacacaacaattagagtgttgtagtattctgtatttgtctgtgtacttatattaccagtgagttctgtaccttcagatgatttcttgtttctcattaatgtccttttcttacagattraataactctctttagcatttcttataagacaggtctggtgttgacaaatcccttagcttttgtttgtctgggaaagtctttattttttccttcatgtctgaagaatattttcactgtatatactattctagggtaacagtttttttcttccagcactttatatatgtcatgctactgtctcctggcctgtacggttttgactgagaagtttgctgccggacatattagagctcctttatgtttcattttttttctcttaatgctttta

SEQ ID NO: 864326 - DNA, 573 bp, Homo sapiens
ctttctttatcctggacctttgggatttgattgttaaatgtcttgaggtaatcttctttatgttaaatctgattggtgttctataaccttcctgtacttgaatattgattcctcaccctaggtttggaaagttctctgttatctctttgaatctctttctaacccaacttctctctctctctatcttctatttaaggccaatgcctcttatatttgcccttttgagactattttctagatcttttaggcatgttttattcctttttattcttttttatcttctctatktattttcaaatgtgtgtgttaaagctctttcttcattcttttttctgcttgtttcattctgcttttgagagactcggatgcattcttcagtttgtcaattgaatttttcaactccaaaatttatgcttagatttttaaaaattatttcaatctctttgatatatttatctgatagaaattctgaattccctctctgtgttatcttgaattttatttagattccttaaaacagctattttgaattctctgtaagaaatgccatatatctcagtcactccaagattg

SEQ ID NO: 864327 - DNA, 625 bp, Homo sapiens
aacacttctatagcaatgaggtagggttttcaataagattattaatattgtgactcagggacattactaaaaaattaaaaataagattatgaataaaataagcatactagaatacaatctaaaataatctttaaatgtcatgattcatgttatacaaagccctgcagtccaggatagttaaatcttttgctcttgtctgtgaacattacttatcaccggatttggaacaacaggttttgtttttggttttatgctttgttttccacttctaccatggaaaatgtttaattctttagatgctttctcacatttttctaatactaaatttttagaaaatagtgaattatgacttttactccaaagtgtagaaggaatacttgccttaggaaaaaacagttttgctttatcaggaatgccttctgaggagttttacatgtcccttaataaattgcacctatatcccactgcctaatttctgaacaaaytgaaaaataaagacattgctattcaagaaccaagatatcaccttatagatgataaaaatcaaaagtgatgggtgcagcttagcgtaaaatccacaagtgctacctactgaatgccagaagtagaaggtcttggccagtag

SEQ ID NO: 864328 - DNA, 667 bp, Homo sapiens
actttgagctctgagcaacctgcacctcaagcctagttctcattgttttgcttttggcaaattttcactaagtgcccttcctccccaaacacacgtatatgtctaccagaccctaaagccctttatgaacatgcaaactcctcccttctgaaaacctttgcgtgagtggtcagcaggctaattcatccattgcaatgtggytttgtgttagggttctgtttccgtgctgcctgcaagataatcacagatgtgactgcatcttagaagttcctgaatctttcaagacagtctggttcacaagaaaattaaaaggtggaggtcgggcgcggtggctcacgcctgcaatcccagcactttgggaggccgaggcgggcggatcacctgaggttgggagttcgaaaccagcctgaccaacatggggaaaccccgtctctgctaaaaatacaaaattagccaggcgtggtggtgcatgcctgtaatcccagctactcgggaggctgaggcaggagaatcgcttgaacccgggaggcagaggttgcgatgagccgagatcgtgccattgcactccagcctgggcaacaagagcgaaactctgccacacacacacaaacacacacacacacacacacacggtgtagtttaggaagtaaaaaaaaaaaaaaaaaaa

SEQ ID NO: 864329 - DNA, 667 bp, Homo sapiens
actttgagctctgagcaacctgcacctcaagcctagttctcattgttttgcttttggcaaattttcactaagtgcccttcctccccaaacacacgtatatgtctaccagaccctaaagccctttatgaacatgcaaactcctcccttctgaaaacctttgcgtgagtggtcagcaggctaattcatccattgcaatgtggctttgtgttagggttctgtttccgtgctgcytgcaagataatcacagatgtgactgcatcttagaagttcctgaatctttcaagacagtctggttcacaagaaaattaaaaggtggaggtcgggcgcggtggctcacgcctgcaatcccagcactttgggaggccgaggcgggcggatcacctgaggttgggagttcgaaaccagcctgaccaacatggggaaaccccgtctctgctaaaaatacaaaattagccaggcgtggtggtgcatgcctgtaatcccagctactcgggaggctgaggcaggagaatcgcttgaacccgggaggcagaggttgcgatgagccgagatcgtgccattgcactccagcctgggcaacaagagcgaaactctgccacacacacacaaacacacacacacacacacacacggtgtagtttaggaagtaaaaaaaaaaaaaaaaaaa

SEQ ID NO: 864330 - DNA, 667 bp, Homo sapiens
actttgagctctgagcaacctgcacctcaagcctagttctcattgttttgcttttggcaaattttcactaagtgcccttcctccccaaacacacgtatatgtctaccagaccctaaagccctttatgaacatgcaaactcctcccttctgaaaacctttgcgtgagtggtcagcaggctaattcatccattgcaatgtggctttgtgttagggttctgtttccgtgctgcctgcaagataatcacagatgtgactgcatcttagaagttcctgaatctttcaagacagtctggttcamaagaaaattaaaaggtggaggtcgggcgcggtggctcacgcctgcaatcccagcactttgggaggccgaggcgggcggatcacctgaggttgggagttcgaaaccagcctgaccaacatggggaaaccccgtctctgctaaaaatacaaaattagccaggcgtggtggtgcatgcctgtaatcccagctactcgggaggctgaggcaggagaatcgcttgaacccgggaggcagaggttgcgatgagccgagatcgtgccattgcactccagcctgggcaacaagagcgaaactctgccacacacacacaaacacacacacacacacacacacggtgtagtttaggaagtaaaaaaaaaaaaaaaaaaa

SEQ ID NO: 864331 - DNA, 667 bp, Homo sapiens
actttgagctctgagcaacctgcacctcaagcctagttctcattgttttgcttttggcaaattttcactaagtgcccttcctccccaaacacacgtatatgtctaccagaccctaaagccctttatgaacatgcaaactcctcccttctgaaaacctttgcgtgagtggtcagcaggctaattcatccattgcaatgtggctttgtgttagggttctgtttccgtgctgcctgcaagataatcacagatgtgactgcatcttagaagttcctgaatctttcaagacagtctggttcacaagaaaattaaaaggtggaggtcgggcgcggtggctcacgcctgcaatcccagcactttgggaggccgaggcgggcggatcacctgaggttgggagttcgaaaccagcctgaccaacatggggaaaccccgtctctgctaaaaatacaaaattagccaggcgtgktggtgcatgcctgtaatcccagctactcgggaggctgaggcaggagaatcgcttgaacccgggaggcagaggttgcgatgagccgagatcgtgccattgcactccagcctgggcaacaagagcgaaactctgccacacacacacaaacacacacacacacacacacacggtgtagtttaggaagtaaaaaaaaaaaaaaaaaaa

SEQ ID NO: 864332 - DNA, 590 bp, Homo sapiens
caacagcatgcgcgaaacggccactcaaagcagatgtatcagtattctggtgaaagtttcagctaaacttctgatcagaagttgagccacaggattctctgttgagctattgaatgaagccctggtccgagaagagccctatgaagagggtaggctgtggagctctctccagattcttactccctgttgtttacagaaggaaggaattgcttacataatatttccagcatattcacatatcttaatcaccactcgtttcatccatggaaacttattttagcatcccctatgctaactaacaggcttttttgtgttcattggagataaagctataataggacagctgattagggtcgttcaaatgctggctgaggatccctaagtatgaattccctagccgactatttcacaagttaactatccaccgctaagacgtcctcyaaaacacaaacacacatttctttattagtgttagaggatatgaaataatttacttgaaaatacaataatactgttttctcttcagaagagttctcccccagatggccaagaggtttgaactcttgccttttgtcagatatagggctgaa

SEQ ID NO: 864333 - DNA, 580 bp, Homo sapiens
gaatctgagcagaaattgtgtgctccatttctggacctggatgataaaaatctcatgtgtgattctacactcttcctctatatgtcagctggatatctagaccaagggcatccatgaaaaccccatgttgaaaggacacaacatctctcagcttgggtcctcaaaaggctacacagaggccgagcatggtggctcatgcctataatcccagctactcggtaggctgaggaatgaggatcacttaaacccgggaagcataggytgttgtgagccaagatcgtgccactgtactccagcctgggggacagagcaagaccctgtctgaaaaaaaaaaaaaaaagactacacataggaaagtaccatcccccacagcccacagcctaccccaccctccagcactaatggacttttccatgcgtaagaaatttccattgtgtgagccactaatatttgaaggtttatctgttatagcagctggacttacattatccaacacagtcacccacgaccaaagctaggctcccagccaagtaagtgaccccagctgtctgtagcttgctcccctctcacagttgtggag

SEQ ID NO: 864334 - DNA, 560 bp, Homo sapiens
aaacaaaaaaagttgtgtgtctttgctttatcacaatatttgctttattgtggtagtctggaactgaacctacaatatctctgaggtatgcttgtaattattaatacttttgtcttttaacttttatgctagaattaaaagtgatttgcacactactattacagtaatttagttctatatttgcctatatatttaccttttctaatgagtttcatacttttaggctaccctgttgctgtttagcatcctttcatttcaacttgaagaaattcctttagcatttcttgtaaggcaggtctagtgatgaagaactccctccacttttgtttgtctsggaaaatctttcatttatttttgtttgttgttgttgttttaaatttttttttatttccataggttattggtgaacaggtggtgtttggttacatgagtaagttctttagcagtgatttatgagatttggtacaccgatcacctgagcaatatacactgcactcagtttgtagtcttttatcccttacccccttcccaacctttcctcctgaatctccaaagtccat

SEQ ID NO: 864335 - DNA, 653 bp, Homo sapiens
tatttgtggcctttatatctctgagtttactgactttagtgtttttctatactagagacttggaagtcctatatttcttttcttttcttttcttttctcttttcttttctttttttttcctttcctttctctttctttctttttcttttttttttttcgatggagtttcactcttgttgcccaggcttgagtgcaatggctcgatcctggctcaccgctacctccacctcccgggttcaagcaattctcctgcctcagcctctcgagtagctgggattacaggcatgtgccaccaagctcagctaattttgtatwttaggttaagatggggtttctccatgttggtcaggctggtcttgaactcccaacctcaggtgatctgcctccctcggcctcccaaagtgcttagattataggcgtgagccaccgtgcccagctgacaccctgtatttctatcagcttgtctatcacctatctaacatccatcatatctgtccatctatctatgcgtccacctacctatctgtcatctgtcttgcttttcatccttctactgaatatgaatgatgctaattattcatttgaaagactacttggtctggcaactatggcttcagattctgactccaatgctgactcactgaaatttgaca

SEQ ID NO: 864336 - DNA, 677 bp, Homo sapiens
atggtaaacatttctacaacattaatcactttcaatattctgcagaaacttaatttgcaaagagcatataccccaaaatttgtgtacaaggttagaaatattactctttgaatctgaatgggaattaatctaaatctaaatctaatctaaatgggtgaaattagcatctgtagatacaagatactctaaaatataattagtaagtataggtctaaaagagctgagattttcaattgattgtaacatgactgaggtaaggttgtctttctagaggaaaatcattttaaatgcactagaaaaaaatactrtcttgccaaagtttttgtagtggtattctacatttgctattatttatgaagacttacataaaaatttacaaaactttttttatatgttaccttatcttattctcacaatgatatgaaagacaggatgtatgatacaatattgtagatgagaccttacctatgtattggccttacacttagctagtaaaagtcccagtagaccatgatgcctaagcatgctgtgatacttaatttaatatatcagcaccttgacaatgactagaatagtgtgctaagtagagaagaattcaggtcattggaaaattactgctctcattgttaaaatgtgaaaatacttagactccctatttataaattaacacatccagg

SEQ ID NO: 864337 - DNA, 677 bp, Homo sapiens
atggtaaacatttctacaacattaatcactttcaatattctgcagaaacttaatttgcaaagagcatataccccaaaatttgtgtacaaggttagaaatattactctttgaatctgaatgggaattaatctaaatctaaatctaatctaaatgggtgaaattagcatctgtagatacaagatactctaaaatataattagtaagtataggtctaaaagagctgagattttcaattgattgtaacatgactgaggtaaggttgtctttctagaggaaaatcattttaaatgcactagaaaaaaatactatcttgccaaagtttttgtagtggtattctacrtttgctattatttatgaagacttacataaaaatttacaaaactttttttatatgttaccttatcttattctcacaatgatatgaaagacaggatgtatgatacaatattgtagatgagaccttacctatgtattggccttacacttagctagtaaaagtcccagtagaccatgatgcctaagcatgctgtgatacttaatttaatatatcagcaccttgacaatgactagaatagtgtgctaagtagagaagaattcaggtcattggaaaattactgctctcattgttaaaatgtgaaaatacttagactccctatttataaattaacacatccagg

SEQ ID NO: 864338 - DNA, 677 bp, Homo sapiens
atggtaaacatttctacaacattaatcactttcaatattctgcagaaacttaatttgcaaagagcatataccccaaaatttgtgtacaaggttagaaatattactctttgaatctgaatgggaattaatctaaatctaaatctaatctaaatgggtgaaattagcatctgtagatacaagatactctaaaatataattagtaagtataggtctaaaagagctgagattttcaattgattgtaacatgactgaggtaaggttgtctttctagaggaaaatcattttaaatgcactagaaaaaaatactatcttgccaaagtttttgtagtggtattctacatttgcyattatttatgaagacttacataaaaatttacaaaactttttttatatgttaccttatcttattctcacaatgatatgaaagacaggatgtatgatacaatattgtagatgagaccttacctatgtattggccttacacttagctagtaaaagtcccagtagaccatgatgcctaagcatgctgtgatacttaatttaatatatcagcaccttgacaatgactagaatagtgtgctaagtagagaagaattcaggtcattggaaaattactgctctcattgttaaaatgtgaaaatacttagactccctatttataaattaacacatccagg

SEQ ID NO: 864339 - DNA, 621 bp, Homo sapiens
aaaatgtgaaaatacttagactccctatttataaattaacacatccaggctatgggccaggattaagtctctatcatgatcctacatggtaaataagtaatgaacatcatttggtggtgaatcaagaacagagtgaattatcactttctgaagaagtaaaaacacttcacagagtggtttgtattttggactggatgactttaaaaaattagagctgattgtgttttattatctgtggttcattttgttttgtagcttaattatttttctatgtaaattgacaaatttctgtatatttatggtatacaatattattcccccacacacattgtggaatggcaaatccaaactaattaacatctgcattacctcatccacttatcttttttttttttattttttttcgacggagtctcactctgtcacccaggctggagtgcagtggtgcgatcttggctcactgcaacctcygcctcccacgttcaagtgatttgattatcctacttcagcctctgaagtagctgggactacagcatgtgccaccatgcctggctagttttttttttttttttttttttttgtatttttagtagagacttttgacaacagctagtctaacaa

SEQ ID NO: 864340 - DNA, 633 bp, Homo sapiens
ttccattaagtagaggacacttggagccaattttaatgaaagaactgaatgtcaacacatgctcatcataatcttcttatgggaagttttatagaatgaataagtaggatcttagaactcaaagtgacctgagctcatctactctagtttttactcaatgcagagatttcctctttaatatttgatagatgatttgagccttcgcctagcccatttaatattttgtggcacaatttcctccatttaaatcagctttagttgtagaaaagccccatcttatgttcagctagaatctgctttcctgaactaaccaactatgtgtcctgtggcactgcacagaacaactccagtaatcgttctgcatgatgacctttcaaatatttgaaaacagctatcaaatccccattargcttcttttcaacctcctgaaactttctaatctttcattgtttgccaacctttcttcttctttctcactctcttctgcatgggcttcagtttgcccaaatgaaatgcccagaactgaactcagtactccagctagagtcagatcaatgcaaaactgacttgacaaaaatctcacttccttcttagacctgggcagactgctcagcaaaggagactaacaaaaca

SEQ ID NO: 864341 - DNA, 614 bp, Homo sapiens
caaatatccattttggaaaagagagacaatgccatttttttaatgttgctttatagctcctcacttgattcttaccttttctctgcacctatgctatgtgatataaagatttgctctaaaatgtagattgcttatcaataaatgttaaaggaagagcagagcctttaatcatgaagaattcagggttggggcaaaagtagagctagagagatggaaatttgtgcctggttaactggtaccaagtaacatattaattttgcaaaacccatcagatgtcaaaagatatgattgagtgayctctaatttctctatgccttgtgtttaattttcttaatgttcttaatctcatgtttaagtctaagttatatttatgcactctaatatccagaattttatctttctttttcctccaaaattactccaaggtaatttttagcatcttacattgagagagtcttacttgtctagtgttaaaggaaaacatttacttgtattcaaattattttttggatgtatgtaactcaaacaaagcttgtactaacaaggtaaaaatatctttaggtttcaccagtcttattcttgaaattcttatgagcgtatatgtatatttcttg

SEQ ID NO: 864342 - DNA, 614 bp, Homo sapiens
caaatatccattttggaaaagagagacaatgccatttttttaatgttgctttatagctcctcacttgattcttaccttttctctgcacctatgctatgtgatataaagatttgctctaaaatgtagattgcttatcaataaatgttaaaggaagagcagagcctttaatcatgaagaattcagggttggggcaaaagtagagctagagagatggaaatttgtgcctggttaactggtaccaagtaacatattaattttgcaaaacccatcagatgtcaaaagatatgattgagtgacctctaatttctctatgccttgtgtttaattttcttaatgttcttaatctcatgtttaagtctaagttatatttatgcrctctaatatccagaattttatctttctttttcctccaaaattactccaaggtaatttttagcatcttacattgagagagtcttacttgtctagtgttaaaggaaaacatttacttgtattcaaattattttttggatgtatgtaactcaaacaaagcttgtactaacaaggtaaaaatatctttaggtttcaccagtcttattcttgaaattcttatgagcgtatatgtatatttcttg

SEQ ID NO: 864343 - DNA, 488 bp, Homo sapiens
attcattccaactcatttacagttggcaaaacttaaggtctagccaatgttagctgacaaaaagccacatacaggaagtaatattcaggtaaccccctcacccaaaacctctcaactacatggaaactgaacaactgaaggagatagagacacaaaaaacccttcaaaaaaatcartgaatccaggagttggttttttgaaaagatcaacaaaattgatagacttctagcaaggctaataataaagaagaaaagagagaagaatcaaatagacgcaataaaaaatgacaaaggggatatcaccaccgatcccacagaaatacaaactaccatcagggaatactacaaacacctctatgcaaataaactagaaaatctagaagaaatggataaattcctgtacacatacaccctcccaagactaaagcaggaagaagttgtatccctgaatagatcaataacaggctctgaaattgaggcaataatgaa

SEQ ID NO: 864344 - DNA, 617 bp, Homo sapiens
gtactgaataactactttaggccggccattgtaagaagtgacttatatttattattactactcataataaaacctggaaaatagatatccttattcctattattatttatagaggaagaaacagagattcagagaagttcaattgcttaatgagttacttaaagtctcaaagctcttggatgaggacacggaattttaaactatgcctgtatgcttctgaggcttatgcagatcatgatgtgacacccagcgtgaggcagtgtgttgtggggggaaataagtttataggcatgaagttctgtgttcacatccagagtttgcctattcctaactaaatgactgactgaattattctgtyttactctcctaatctgttaaatggggatagatggaagaagaaaattgatttatgttcttggaatccaacaaaagcaaagatttgcaagagaactgacagtgtctaggaaattttaaattgccttgcatgaatagaggataatacgtatgacaaatattccttccactaagtacaactaaaatccctggacattatgtataaaacagacctaagaaaacgtaattaaggcaaactggctgggaacgtcaggacccaagaa

SEQ ID NO: 864345 - DNA, 606 bp, Homo sapiens
aacattaacaagaacagataaaaagaacccaacataaccctgttttctgagaaatgaagcctgtccaaaagatcagttaggttgattctttctcaggaaaggcttagcctaacaagataaatcttttagacaataactgctggactccaactgaacactccatgagaacatgtggccacacctccatccatattggcaaagacaaactggagaatctagatttttaccctctaattgttgtaataaggttctccaacatcccctctgggtgaccartgagagaacacgaaccaataaggccaatgggggacactaaagcttttgctcagaagccattgatgagtctctgtcccttctgtatcctgtcagcagaggctatatgaagaacctgaaactgcaccccatcctcttccctccacattaagctggtatctgaggtggcctagtgaagagtggggactttcatcatcaccagtgataatgagatgactccatagaatggtgagtggagaccccatagggagtctggcagtaatgaggatctccactcccaaagtgtcaaagactgtgtgaagaacctgaatttctacttcatgtggctgtaag

SEQ ID NO: 864346 - DNA, 621 bp, Homo sapiens
tacatccgtgccatgtattactactcagcaataatggaacaatttatacatgctgcagcatatatgaatttcacaggaatcctgccaaatgttaaaagcaaatcccaaaaggttacatactgtatgattatataacattcttgaaatgacaaaattatagaaatgaagaaaggaatagtagttgccatggttaagaaagtagtgaggatggaaggggttgtgtgaaaaggcaagatgagtgatcctgtatggaacatttttttcttgattgtatcaatatgaatatcctggctgtgatatttgtactgtagttttgcaagttgctaccattgtgaaaaaacggacaaaaggtacaaaggatctctgtgtacttttttttataactacatgtgaatmtaaaattaggtaaaatagtaagtttgattaaaaaatgtatgggagagaattatggtgggtaaaactggaaatgcacctggagccagactgtaaaccattttgcatcccatgcccgaagaattctagactttggcttttcttctaggtcaggaggactcatctaaagattttaaatatagagcatttataatttgaaaatataatacttttctctgtagtaatgta

SEQ ID NO: 864347 - DNA, 604 bp, Homo sapiens
aaatatttttatttgttggtataacgttttactaattccaaatagattcttagcattttctttttaatgtctatgtaaactttatcattttaatgtatatattaggatccaaacttttactggattttcataggccattataccacttaaaaattktttttggcttgttttattaagaaataaatactaaagacatgaagagttggaaaaggaaaaagtaattgcagtttgtgcctttactactattaatatggtgacattcattaatatacagcatgcaaaattattttcttgattgccttctctttaggacatcatgcatgaaatctcctaatcatgttaaaaacctaggccaggcactcgtaatgtgattgcaattgctttttctttttccttttgagaataaaggttaaacagttgggagatcttctacttgtatgctagcctagtttatgcggtttcacattttcatcattttattgttactgttcctatcatcctttttcatcatttctctgaaaatattatttagaataatacaaatgctaacattttcattatttctagaaaaagttcttcactataaaaaaggcattggaagcta

SEQ ID NO: 864348 - DNA, 573 bp, Homo sapiens
tttcttaatttcttaaaatgtatagctaaaccatgagatataactgaagataattcacatgtataatgcatgggaataaccaacaagaaggagaatctgattctggatataggagtatatatgtacgggtacaatacatatttccctatgaaatatgtgtatcacctgaaagtaagacaagttgggagatttctcccattaaaggagaaattattctgttcttaggatttctcagaaagaattcacattcacaattgtacaaaggtggaagcatattctgaaaaaaacacatattatagaatgcacttacatttgcaaaacggaggkcaatcatttcatcattttgggtatagtcagcaggtacagaaatagttaacaaagagataaattctgtgaatagagctaaggtcaaatacacattctgtgcacaaatattctctatagagctcttgtcattcatgaatgagtaaacattaagacaaatagatctttcaaacaatactgaagaacaagaaaaataaacagtgagaaaggaacaccaacctaattaatattcacaaaaacaaaaaaaac

SEQ ID NO: 864349 - DNA, 610 bp, Homo sapiens
tggatatatacccaaagtaatataaatcattctactataaagacacatgcacatgtatgtttactgcagcactattcacaatagtaaagatttggaaccaacccaaatgcccatcaataatagactggataaagaaaatgtggcacatatacaccatagaatactatgcagccataaaaaagaatgagttcatgtcctttgcagggacayatatgaagctggaaaccatcattctcagcaaactaacacaggtacagaaaaccaagcactgcatgttctcactcataagtgggagttgaacaatgagaacatatgggcacaaggaggggaacatcacacactggggcctgttggggggtgggaggaaaggggaaggaaagcattaggagaaatgcctaatgtaaatgacaggttgatgggtgcagcaaaccaccatagcacatatatacctatgtaacaaacctgcgcattctgcacatgtatcccagaacataaagtataataataatttaaaaatgggcaaaggaagaccacccacaggagaacctccctggattccacttctgcaaagcaagtggatggagcgggacatgcagagcatccagcacac

SEQ ID NO: 864350 - DNA, 599 bp, Homo sapiens
agagtttagtaaaaccaagtgtagattattccaaacagacacaattctggaacacagctttgttccttttgtctcctcttcctagaatgtcctgccctttttctttatctaagtgactttcctcatcctttaaaactcagctcagtcaaaattacttgctggaaaccttttctgaacccccaggtaggcttctctgccctgcgctccaattatgccatctacttctaccagacagagatgacctcttcatacatgtgtctctcctgccacctttcctgtgacagagacaatgttctgttcttctttatacttccagcacctactacagtcccttgcatacaggaaatgcttgaaatatatttgttaaatcgaactgkattcttctcttcatttttttaccagttatattctataaagatgcatcatcaattgcatagatcattctcctttccgattcatctctagcagataataatttcggaacaagtgtcaaggttcctgtccatccctctcccatcccccatcccaaaaagaggaagctcttttatgatcggttaagttctttgacactgatttgttgagtgaccttgaacaagtca

SEQ ID NO: 864351 - DNA, 655 bp, Homo sapiens
gatctgaatagacatttctcaaaggaagacatacaaatgtctagcagatatatttaagaaagctcaacaccactaatcatctgaaaaatgcaaatcaaaaccacaatgcgatatcccctcacaactatcagaatggctactataaagaaaaaaagacaaaaggtaacaagttggtgaggatgtggaaaaaagggaacccctgtacactgtcggyaggagtgtaaattagtataaccattatggaaaacaggatggaggttcctcaaaaaactaaaaacagagctatcatatgatccagcaaccctacctctgggtatttacccaaaagaaaggaaatcagcttgtcaaagagatatgcactcccatgttcattgcagcaatatgcacaatagtcaagctatggaatcagcctaagtgtccatcaacagatgaagtgataaggaaaaatgtgatatagatacacaatggaacattattcagactttaaaaagaaggaaattttgaacctggcatggtggcttgtgcctataatcccagcgactagggaggctaaagctggaggattacttgaggccaggagttacactagcctggatgacagagcaaacactggtctcttaataataaaaaaggaggaggaggaggaagcaattct

SEQ ID NO: 864352 - DNA, 655 bp, Homo sapiens
gatctgaatagacatttctcaaaggaagacatacaaatgtctagcagatatatttaagaaagctcaacaccactaatcatctgaaaaatgcaaatcaaaaccacaatgcgatatcccctcacaactatcagaatggctactataaagaaaaaaagacaaaaggtaacaagttggtgaggatgtggaaaaaagggaacccctgtacactgtcggtaggagtgtaaattagtataaccattatggaaaacaggatggaggttcctcaaaaaactaaaaacagagctatcatatgatccagcaaccctacctctgggtatttacccaaaagaaaggaaatcagcttgtcaaagagatatgcactcccatgttcattrcagcaatatgcacaatagtcaagctatggaatcagcctaagtgtccatcaacagatgaagtgataaggaaaaatgtgatatagatacacaatggaacattattcagactttaaaaagaaggaaattttgaacctggcatggtggcttgtgcctataatcccagcgactagggaggctaaagctggaggattacttgaggccaggagttacactagcctggatgacagagcaaacactggtctcttaataataaaaaaggaggaggaggaggaagcaattct

SEQ ID NO: 864353 - DNA, 680 bp, Homo sapiens
ttcagtctgccattggttgaatctagcagcatggaacccacagatacaaagggtggactgcaatacatgtgagaaaccgaaagaagatggttatgtgaaatgaaaagtgcagtgcaagatgtggctggaaatctccctaggaaccagactgtctagagccttctaagtcattttgagaatttggatgtttatcctaagagcaatgcactaacattgaagagtttaaagcagaagggacataagagggtttgctgttttgaccaaagctagactggagtgggttgagaagtaagtgggaagtgagaaaatggagatagcaaggattgttatcattcacaagaagtttggttttgaaagaaggaaagctttaagacagaaattggataaggaatatatgaccaattgagagttttattaaaagrtaaaggagaatgagaatgggaatgtaggaaggaatgtaaactccaggtagcagaatgcagtacgatgtgcatgaaataaataaagagagggttagagttagaaggcaggaaaaggcacagacgatggcactggccataaatagacagagaagcccctgttccggtgtaacaaaagagaagaggatggatgcaaatagaagccttcgcatttgcataattgttgggcagcaggaaattgatggtggggctttccatcag

SEQ ID NO: 864354 - DNA, 624 bp, Homo sapiens
aggcctttgggggcggtataataataagggtcagattacatgtgtgatcaattttggccttttgcatgtcaattaacgtattgcacttggatgttttattgatggcaaatcctatagagagatgttattatgctcatattttaatgtcttaggggtcagcatctcacacacagatatccactggcatacattcaaatgcagaattgctagctttatcattttaaatgatttaagccaatgaaaggacactccatttgtttgctcaatagtcaattgaaatggaaacggtttgctgagtgcatctcccttgaaagtctcttcccctctagtgccaattacagaatatgaaaggcatactccgcacagcttgctcaggataataaatcactaaattggaagcttcgcttcccttgctgattttgataagaaaattaatagaattagcagcttatctgctcraccaggagattcacattatgaaaaagaagagaagggggaaaaaaaaagaaaagaaaaaagaatgaaaaagaaaagaaacggaatctgtttctatggccaggactgcctgtatctcttcttcctggtgacagggagacagttcagatagtttcttttggcgcccat

SEQ ID NO: 864355 - DNA, 658 bp, Homo sapiens
aatttaaaacaaattatttgtgatgttcaaatagcaatgcaaccaacatgatgctttttgtggtttctgatattcccattaatgtgataagcaagggaactggagaagaagcaaattaacattagccaatttctttggtgtcttacagaggcaaaaaaaaaaaaaagatgaaaaaaaggatgaaaggtctcgggatttttggctcattggttctgggtcctgactgcaaatacatcatagagccactaagracctctgttttctcatctttgaaataaatgggcgtaatatgaagtttctgtggcctattattctcacattctggatgctgtccctttcccaacagctccatcagtgtatatcctagggaccccaaagacgtggcatgcacctgtaggtccagctccaccggcattgggaagtcacaaagcctaccctgacagtaggtggtccttaatactaagaaatagggtcaagaaagagttaaatgttgccttgtgtcactctcttgctggattgtgctgctatggccccaggaatagagtcttgcatcagactcctcacctcatggactcttctcttgggaccatagtgtctagtgtcttttcaacctcctcttccaaccaagcccaacacacctacccaattcctgttcatc

SEQ ID NO: 864356 - DNA, 658 bp, Homo sapiens
aatttaaaacaaattatttgtgatgttcaaatagcaatgcaaccaacatgatgctttttgtggtttctgatattcccattaatgtgataagcaagggaactggagaagaagcaaattaacattagccaatttctttggtgtcttacagaggcaaaaaaaaaaaaaagatgaaaaaaaggatgaaaggtctcgggatttttggctcattggttctgggtcctgactgcaaatacatcatagagccactaagaacctctgttttctcatctttgaaataaatgggygtaatatgaagtttctgtggcctattattctcacattctggatgctgtccctttcccaacagctccatcagtgtatatcctagggaccccaaagacgtggcatgcacctgtaggtccagctccaccggcattgggaagtcacaaagcctaccctgacagtaggtggtccttaatactaagaaatagggtcaagaaagagttaaatgttgccttgtgtcactctcttgctggattgtgctgctatggccccaggaatagagtcttgcatcagactcctcacctcatggactcttctcttgggaccatagtgtctagtgtcttttcaacctcctcttccaaccaagcccaacacacctacccaattcctgttcatc

SEQ ID NO: 864357 - DNA, 607 bp, Homo sapiens
ggaccaacaaccacaggataagcatcagcttctttcgtacatcatcagagatagaccacagcttttgtaaccaagaggaacctaaggtgtctgtggtcagaagcagctcagaggccaatatatatgttaataaaattgttttgttaataatatggggcaaatcaagtttccagaaactcttgagtttctgraggtagaaatgaaaggctgcactttggtgacctgaggaggaaaatgtgtagaatgcggcaagttggaaaaaaacagattgatggggctagtgatcaaaaaaacagacaagcacctgaacatgatacagtgtctgctactgaggacacagtagagccctcgaggggttcttgtgaggacaagagaggctcatgttggaggtagatacgagtctgtagtgttgcagacagttagctaaggagaaagttgagagaccagttcattcccacacggagaaaaggggtcccattcaataagattttctgtgtctcactccacagaatttctctctcttttaaaagatccgattacccaagcaagttccacagagcaaatcttagtgcatattatacttttgaaaaggcatttatggttaaac

SEQ ID NO: 864358 - DNA, 542 bp, Homo sapiens
gtttctataggaatttggaaatggcttggctaacaggttttagtcaaatattgaggctacagctatctgtaggactgacaaagattgaaaggtttgtttacaaagtggtattcacatggctgagaatttgatgctggctmttggcaggaggccctggatcctctccaattgagattgtctgcagggttgcttgagtatcctaatggcatgaaggttggcttcctccagagggagaggtacacaagaccagccagaagctgcaaaagccttttataacttagcctcaaaaaggaaacatcatcgcttctaccatattctcttggcctcatcgttagccatgattgaaatgggaggggagtgcgatattcatgagccatgaatgtcagtgggggagagtcatggggccatggttaaggctggctaccacaaaatgtttaactaacaaaaataaacattttttacaaaacaaaacaaaatgttttactacaaaatgtttaagcaaaaaaatctatgaaactgtttaaatcatcagagtgtctaat

SEQ ID NO: 864359 - DNA, 542 bp, Homo sapiens
gtttctataggaatttggaaatggcttggctaacaggttttagtcaaatattgaggctacagctatctgtaggactgacaaagattgaaaggtttgtttacaaagtggtattcacatggctgagaatttgatgctggctattggcaggaggccctggatcctctccaattgagattgtctgcagggttgcttgagtatcctaatggcatgaaggttggcttcctccagagggagaggtacacaagaccagccagaagctgcaaaagccttttataacttagcctcaaaaaggaaacatcatcgcttctaccatattctmttggcctcatcgttagccatgattgaaatgggaggggagtgcgatattcatgagccatgaatgtcagtgggggagagtcatggggccatggttaaggctggctaccacaaaatgtttaactaacaaaaataaacattttttacaaaacaaaacaaaatgttttactacaaaatgtttaagcaaaaaaatctatgaaactgtttaaatcatcagagtgtctaat

SEQ ID NO: 864360 - DNA, 542 bp, Homo sapiens
gtttctataggaatttggaaatggcttggctaacaggttttagtcaaatattgaggctacagctatctgtaggactgacaaagattgaaaggtttgtttacaaagtggtattcacatggctgagaatttgatgctggctattggcaggaggccctggatcctctccaattgagattgtctgcagggttgcttgagtatcctaatggcatgaaggttggcttcctccagagggagaggtacacaagaccagccagaagctgcaaaagccttttataacttagcctcaaaaaggaaacatcatcgcttctaccatattctcttggcctcatcgttagccatgattgaaatgggaggggagtrcgatattcatgagccatgaatgtcagtgggggagagtcatggggccatggttaaggctggctaccacaaaatgtttaactaacaaaaataaacattttttacaaaacaaaacaaaatgttttactacaaaatgtttaagcaaaaaaatctatgaaactgtttaaatcatcagagtgtctaat

SEQ ID NO: 864361 - DNA, 760 bp, Homo sapiens
ttataaacgggaatatgtatgggtgttttttcctctctctttctgtttcaggggcacctgtggcaatggctgtactttttctgaagttccagtctacatgggacagttcatcccttcatggtctcagctcctgtctaatgaccttggcttctgggcaggtgacagcaccaccccctgtattttttccattccagggctggtaatggtttcctgccattgagaacatttaggttgcctcactgtctcccacttggctgtcttctttagcactgatgggaggatctgggcagcatatcacagtatccccaaagaggatcagaccctggaatgtggccaccccacaggttgtctccctctcttatttctaactttgtgttccttcacatgccacacacgcagagagacacataaaaattcactgaggactgcaaaaaaaattaaaatgcaacatattatttggccactgacatccatattctcagtattggaacttttttccattttgaaccattttttccatttggataaaatcaaatcatgcaggtccgacaaagaacatacgtaggtaaaactaatctggattctcagytctagtctcagtgtaaggcttagatattaagtccaacaaacccttgagatagcggtgtgacatttagataacattttctgtgagagtttgctaaacaacacaaacatatcagcacatgaaatcaggagttgggaataggtcacctgaagatggattttatttttctttaac

SEQ ID NO: 864362 - DNA, 565 bp, Homo sapiens
aacaccaacaatgaattagctaaaaagaaatcaagaaagcaattcaatttataatagccaataaaataaaaggaaatatgtaggaataaatttaaccaagaatgttaaagacttctgcaataaaaactagaaaacactaatgaaagaaaatgaaaggggcacaatcaaagggaaagacatcccctgttcatgaatcagaagaactgatataataaaaatgtccacactacacaaagctrtctagagattcaatgcaatgcttatcaaaatgccaatgatatttttcacagaaatagaccaaaagccttaaatttatataggaccacaaaagaccctgaatagccagagcaattctgagcaaaaagaacaaagctggaggcatcatacaatctcacttcaaaatatactacaaacctatagtaacccaaacaccatggtactggtataaaaacagatgcgtagattaatggaagataatagagactccagaagtaagtccatgtatttcagccaactgattttcttttttttttttcatgtttgatattaatttattaaagcattc

SEQ ID NO: 864363 - DNA, 629 bp, Homo sapiens
tcacattatttgttagcatagcttgatatgtgattttaatactgccctttagttttaaactayactatttcaaaaaagtgttttaatcttcaaaagaatatctccatttgagtggagaaaaaagggaaacctagtttaaaaaaatcagtgtgataaccatgtccctaaagccttcttctctcagtgaggatgattttacacattttaatgacctgcttaaaaaatctgaatttaaatctttttttccaagcaggaattacatacgttttaatgatctaccataactcttaaaaaaagttcttatcttgttaattttgctcccgtggaaacaaaggctatgtgcaatgtgtgtgtgtctataaagtcattgaacactgattgttcattttttctttaaaagcaggcagacatcatcctacggcaaggtcatcttactgtttgcaatgatacatggttctgtacactaggcttgcttttgcacctcctatgaccattattgatagagaaaataaaaaaataaagaagtcagtttgtaccaagtgaaggcttaagaaaaaaagatgtcaagaagaaaactcaaaactctgtccttaaagaaggtgaaagattttaatggtcccgttgattta

SEQ ID NO: 864364 - DNA, 642 bp, Homo sapiens
ggtggcttagacagggtgatggcagtgttggtgaacggatgaaaagatggatttgagatatattttggtgtcataaatcgtgtaatttgctggtgaattagatatgggaattgagagaaaaatagaatacaaggttgttttctgcatttttggattaagcaactgayggatgctggcaccatttaaagagatattaaagactcaggaaaataataggtttgggcggaaaacaagaacactattataaatttgaaatgcatatagatattcatgtggaaatctgactgcttatttcaaataagcagttagaaggcactcgggggaagttgcttctgtagctataaacatgggaagtcagcagcttcacaagtagatgtaaactgtggatttagaagcgttttagacaacagtgaggaagagagagtgagcagaaaacaaaagatgacccagcacaaagctcagttactccaacacttagagttgaagacagcaaaggaggctgaaaaagagcagacaaggacaatagaagagagaggagtgttacagaagctatagtacctatgtgtgttttctttttgtgtaagatgagtgtattttcttaaatcttaatccatacagtttaagtggagctgattctctccc

SEQ ID NO: 864365 - DNA, 623 bp, Homo sapiens
tcaaaatcctcgtgtgttgaaattttacatacgttttttactggttcttatctgaaggactcaattcattttgcaatcctctaaagacttatttgtggtaatgggtgagtctgattggcaggtgcaatactgtaaagtggaaactgggacacagatacttttctcaattttactttggtgaagagattctagcagcatgagaatgacagatatttggatctttagggaataatggaaaaactgaargatattattatcacagaatggattttgtgtcatttttggttctcactacaaaggaagatgtgaaaatgtggtttgctaactttagtacttcatagcctaagacagtctatgctttaaaccccagagagtttttttagtacttatttcccacactctgaagcctaagtgatcattagatgaaaactgaatttttatttttttatcctattataccagattctcaggaaaaaagctactgacatatactgtgacaagtcactgcatccaaaatgctatttaaattgttgctgagtgggttaatttttataaaatcaatttcatgttgtggctggtgataaaccttggcaatctttgattgatatgtcttttttttaacc

SEQ ID NO: 864366 - DNA, 607 bp, Homo sapiens
gttaatatttttagctgtaaaccttctagatatgttttatgcatgcttggtagaaaatcaattactattagagttatcaccagggaagggcagcaagggcaccaaataaggtagtttagaccatcagaccaccccaacaacaaatgacaaggtcttggaaatgtggggaggtggaagtatatgcctaatttgggtgggaatgtaggtaaattgataagcttgccaaggggatgagactgggtaggaatttgtgaggatacaaaacaagaaatacasactagaatgttcttgggttttatacaaatatataataaaaccagcactgaaaacataatgtcaagcactcttctgaatgtactctatgtattacccaattctcacagcagttctgtaagtgacaaagtatatacattttacaaaggagatattgagacacagagtaagtagcagagctgggtctttgaactagatctcataatcttaattgttacactatgatccctgtaaatcaaagagtgagagttggataacttctggggttctttcatcgttaataaatgatgtgactgtcttagcttgggctgctataacaaaataccctagactg

SEQ ID NO: 864367 - DNA, 607 bp, Homo sapiens
gttaatatttttagctgtaaaccttctagatatgttttatgcatgcttggtagaaaatcaattactattagagttatcaccagggaagggcagcaagggcaccaaataaggtagtttagaccatcagaccaccccaacaacaaatgacaaggtcttggaaatgtggggaggtggaagtatatgcctaatttgggtgggaatgtaggtaaattgataagcttgccaaggggatgagactgggtaggaatttgtgaggatacaaaacaagaaatacagactagaatgttcttgggttttatacaaatatataataaaaccagcactgaaaacataatgtcaagcactcttctgaatgtactctatgtattacccaattctcacagcagttctgtaagtgacaaagtwtatacattttacaaaggagatattgagacacagagtaagtagcagagctgggtctttgaactagatctcataatcttaattgttacactatgatccctgtaaatcaaagagtgagagttggataacttctggggttctttcatcgttaataaatgatgtgactgtcttagcttgggctgctataacaaaataccctagactg

SEQ ID NO: 864368 - DNA, 607 bp, Homo sapiens
gttaatatttttagctgtaaaccttctagatatgttttatgcatgcttggtagaaaatcaattactattagagttatcaccagggaagggcagcaagggcaccaaataaggtagtttagaccatcagaccaccccaacaacaaatgacaaggtcttggaaatgtggggaggtggaagtatatgcctaatttgggtgggaatgtaggtaaattgataagcttgccaaggggatgagactgggtaggaatttgtgaggatacaaaacaagaaatacagactagaatgttcttgggttttatacaaatatataataaaaccagcactgaaaacataatgtcaagcactcttctgaatgtactctatgtattacccaattctcacagcagttctgtaagtgacaaagtatatayattttacaaaggagatattgagacacagagtaagtagcagagctgggtctttgaactagatctcataatcttaattgttacactatgatccctgtaaatcaaagagtgagagttggataacttctggggttctttcatcgttaataaatgatgtgactgtcttagcttgggctgctataacaaaataccctagactg

SEQ ID NO: 864369 - DNA, 640 bp, Homo sapiens
accagaaaatgtgaaatttggaacatctttgagtaggaggtcagaaataccagaattacttcattcctgcacattgcttggctacaaattcagctcagtcagttcactttcaagagaatatttcttagttctccttcctttaatgtcctggtgttgttgttayactagccatgtttaggaagagttttttttccctcttgtgtaggagtcttctgcccacaagcccattttgtgttaaaattaagaaacactgatggagtgatgaaaagcaaatgcttagatgattctcagaaatctttgcttaagcgctgaatttaaaacaatcacttccagacacactcattatctactagctatttcaagtttctaaagcacaattaaatttagttaaaattatgcacttgttggtgcatatttatttctagacacatataatcaggcaagagtgttaacatttagtcatgggctaaggaatgcagggctttggcaactgggtttttgagatgtttaggtatgtggatagaaggatggtgagcttactcttggtacagcattccaagtttccatctacttgctcagcaataactcagtaggagaagtttcaatgcacacttatcaaccaaaataaatttgtaacacc

SEQ ID NO: 864370 - DNA, 611 bp, Homo sapiens
gggttttatgtggattacgaataaagtgctaagtccaggcagagcatagcagtttctcttccaaaaaaagtttttatataaataaagaattggatacaagacttgagactctctttggcatgaggaaagcagcagggatagggcagtagtttgcagtggtgccggtggtggcagtgccaggctttaggaaagctgttttcagaagcaggaggatacaagatgtttataggctgagaaaggatcaagagaagcagaaattgataacacaaaagaaaacagagatgtttatgtagtaaagtctcaggggaggtgggagggaatgagattaagagctttgatgaaggttttagccttggataagagaaacaccttttcttttaagatagaagggaagaaaggaaggctgggacaaagaaatataattgcttctgttgggattcttaatatgataccccaaagtarggtatcttggcatgctgagtactttgaactgaagattggaagggcctcagaagcgagttctctctgaccttcttctgcgcttctgtctcacaaccctttttcttccccaaagggattcatagaaattagaattcctgtttcccaaggag

SEQ ID NO: 864371 - DNA, 660 bp, Homo sapiens
agatgatgccttcacacaaactgagatgaatgaagcctccacagaaggatgagatttcaacagggggctaaagaatataacaggtttacataggcagaaaagaaaacattccagaaggggaagtcattcatttacttattcattcaaaaaatatttattccaggcactattctatgaatggaacacaaagctgtatacagacaaaacaacrtctctaccatcctggagctcatttgagtaaaaacctgaatggaagaaaaaaaaaactgctgcctggaaataagttttcactgtcactttacgttcaaagactcctaaaattaaaacctgctctttcaaatgtgctgtatctccagtggaagccatagaaacgtttttgagcaagagggagacataaagaaaggctaatttggtagccatgtagaggaggggttggcaagggcagagactaggagcaggggagtcggttaggaggcatttagagtggtccagacttgaactgctaaggacttaaggaaatagcaggatgagtggaatgggacaaatgaggaaacatggacttctgcctcttgatttcctggctaagggaaccatggcagagggtggagtcaaagatgacaatgacgttttcactctggatgacagggagaaggattgtac

SEQ ID NO: 864372 - DNA, 619 bp, Homo sapiens
tggagtgcccatgtagcaatgcatgtcaggctgttgcctgccctataatctgtccatctcctccattctgctcctgcttttgtaagatgctttcctcccctgtgtatgacccagcaaccctacagatcccctaatagtcctcatctactgcccttccccaccccagtatatcctgtggtcctgtggatgctggtgctggatcaatgggctggaatggttttaacatgaaagctggggaagcgcatattgataaggcagggactcatgcattggtaattctggcccctgactgtaatctaactttgccttcatgtattagtccattttcatgctgctgataaagacatacccaagactgagtaatttataaagaaaaagaaggttaatggactcacagttccacgtggctggggaggcctcacaatcacggtggaaggcgaaaggcacrtcttacatggcagcaggcaagacagactaagagccaagtgaaaagggaaaccccttataaaactatcagatcttgtgagacttattcactaccatgaaaacagtatgggggaaactgcccccgcaattcaattatctcccattaggtccctcccacaacatgtgggaatta

SEQ ID NO: 864373 - DNA, 730 bp, Homo sapiens
tttcactttaaaggagggaaactgtgaagccagagtccatgactattgcatgtattagtgtgcccagaaattagtccagtatataaaaatacatattaaattaatgaataaaactaagtagaaaaggattacttatatggttgatttatgatgctatacaaaaatgtcaatttaatgatctgagaggatcactgacaaacagttgttttcctttctttgggtttttgtgtattgttattgttgttgttgttatttgttttgacacggagtcttactctgtygcccaggctcaaggccagtgaggcaatcttggctcactgcaacctccgcctcccatgttcaagtgattctcctgcctcagcctcccaagtagctgggactacaggcacccgccaccacactgagctagttttttatttttagtggagacgtggtttcaccatgttggccaggctggtctcgaactcctgaccgcaggtgatccatctgcctcggcctcccaaagtgctgagattacaggcatgagccaccactcccctcgaacaaccagctgttttgtgtagagactcaacatttgggagaaagaaatattacatacaattttttacagtctagggatcttccccattgctgaggtgagcagtctatctggaagattccggataataattatttctgtagtaaactctaaggattaagcaaatgaattaattatggtataggcaatctg

SEQ ID NO: 864374 - DNA, 588 bp, Homo sapiens
ttttcaacatattaaaagaacatattaaaaacaatttgtttccatacgtgctatatgtatgtttttccccatgtttcccctaataattatgtttctgcttctttcttaaacttcagaattccatgatttatcaaagtttactgctttgatctcattaattgttttatgtttataatgctctttttacaaataaagcatactgcaatttctatgaatttcttatggatgagatagatgaaaatctcattataaaatagattggaaatagaagcattcttctctatgcagatatgaaatttattatccagtcatgtgagtcactttcacaatccagttattatcgggaaaaatgacttaagatcaattaatgaagactcaaattttcatmtttggcagatactctccaacatgcaatataattatataatcataaacatctatatatgaatgaacatctaaacatcatgaacatctaaacatgattatataatcatgaaaagctatcgacagcaggccaacttatttagtctagcagaaatacagattgtaacaaatttatggtattataaatttgttcatggataaaga

SEQ ID NO: 864375 - DNA, 602 bp, Homo sapiens
ccatggtgtatatgtaccacattttctttatccagtctatcgttgatgggcatttgggttgattccatgtctttgctattgtgaatattgctgcaatgaacatatgtgtgcatgtatctttataatagaaggatttatattcctttgggtatatatccagtaatggaattgctgggycaaatggtatttctggttctaaatctttgaggaagtgccacactgtgttccacaatgaataaactaatttacatttccactaacagtgtataagcatttgtttttctccacaacctcaccagcatctgttgtttcttgactttttaataatcaccattctgacgggcaggagatggtatctcattatggtttttatttgcatttctctaatgatcagtgatgttgagcttctcatatgtttattggctgcatgtatgtcttcttttgagaagtgtctattcatgtcctttgcccacttttaagtgttttttttttcttgtaaatttgtttaagttcctcgtcgactggatattagacccttgtcagatggctagattgtaaaaattttctcccattctgtatgttgtctgttcactctgatgata

SEQ ID NO: 864376 - DNA, 635 bp, Homo sapiens
taatacatatactctctttgccaaaaggttaagagaatagactcacacataattatcaggagctatttacccccaactgaacataattattgaaatcacaggagcacagatttgaaagggaccccaacgggttatctagctcatggtctaatctcttcaagggcatacatttaacccaccacaatttaccaatgttttttttttttccttttcttaatcaagttagtccatttttcttactttaagcaggattgtttaaaacctctcctgatgaaaaaattctgtgtagtaaataaacccctctggagagagagagagagattccacaacagcccttggtatttygctttggcttgtgtttaacaatgcttgctgaaaacatttcttcaggatatctaaggtaactcccccacgcttcttccactgaagacaatgctctctagtcttgtgtgtttcacttacagcaatagaagtattactttatcgttgctataatctgcatttaggtgggaaagtatgggtgataggtgcaaatcccttccaactgtagtaaaaaatgatggggcgtgtataaagagtgacattattaatgttattctttttgacccccaaaagtttcatgtattttttaacct

SEQ ID NO: 864377 - DNA, 661 bp, Homo sapiens
cttattcaccattgatggagtatcagataattgtgcttcaaactcaggatatactgataaaacaaaacaagaaaatgctggcccttcttcatggaacgtacatactggtgggagagacaggcaacaaagaaacaagaaggcaaatatataaaatgattgctaattttagtgagtgttatgaaaacaatgggaggctctggtagagaaaagtgaaggaatctttgtttaggtgggatggtgagagtggtcagggaaggcttctctgtaaatgggatactgttgcagaggtagaagcacagacaaggacttagtcctgagaagagcaaagaaacagctgtgcagatggagggaacagcacatgcaaataacctaaggccagagaatgcttagtgtcttcaaagaactgataggaattagtattaggaatgtcacctactatgacctaggcaggggccagaggatgtcgactcttgytcacggtaaggagtgagaatttttcccagtagtaaggggaaaacgctgcaagatgtaaacagggaaacaatataactgagttttttgggggaagattgtgtttgctgttctaggaagaatagattggaggtgacaagagtggaggagaagggaccagtgaaagggctttgagaacatcaaattatct

SEQ ID NO: 864378 - DNA, 632 bp, Homo sapiens
tttttttttttttgagatggagttccacctttgttgcccaggctggagtgcaatggtgtgctctcggctcactgcaacctctgcctcccaggttcaagcgattctcctgcctcaacctcctgactagccaggattacaggcacgtaccaccatgcccggctaattttgtatttttagtagagatggggtttctccatgttgttcaggctggtctcgaactcctgacctcaggtgatctgcctgcctcggcctcccaaagtactgggattacaggcataagccactgtgcccggccaaccagtgacttttatttattaaagccacccgagttgacagcagcttatgggcaaatatgccattttatttgattgctgtcagcccttctaaggattttctcatrgactctgttgaaccaactttttcctttatttcatgcacgtggtttgtttgctgaagttaaggaaaaccctcttctctctccagtctagaatgtagatcatatgtgtagtaacagtgtgtggtgccctgaaaaagacatgcactttggagtgagacattcctatattcaaagactatatggttctgctattgtgtctttgcttaatttgcttagcatcattttccacatttaa

SEQ ID NO: 864379 - DNA, 481 bp, Homo sapiens
ttggtgccagttcctgtaaattcaaacaatatgaaaaatgtgcattttgaaaaatcaaggctggtatgtttttcacatacataattatttgaatcattgctcacagcaatgtggcagaacatggcatctttggtgatttcttccaatctttgtctttaaaaaatatatatacatctctagttatctcaaggctttgccccaccatttactgaaattgtttactacattgtatctcctctcccagattgttaaattacaaatattatgaaagctattattaggaatayatgttacacaacaaatcaatggataacttaattggaaaaggtcctcaaatgtttcctataacctgggtacacagaaggaacatttatccttctggatcatgttcaaatagaaaagccattgtactgggttttacagcctttcttgggcatatgtgcaaatgagaagctaaatattttggaagcctattgtgtac

SEQ ID NO: 864380 - DNA, 532 bp, Homo sapiens
ttataggctctctgcaagaagaaaaatatggctctttttgcccaaccccgcggttagtcagaccttgtggttatcttctcttgttccctaaaaattgctgttattctgttctttttcaaggtgcactgatttcataytgttcaaacacacatgctttacaatcaatttgtacagttaacacaattatcacagtggtcttgaggtgatgtacatcctcagcatatcaagataacaggattaagagataaaagtaaagacaggcataagaaattataaaagtattatttgggaactgataaatgtccatgaaatcttcacaatttatgttcctctgccgtggctccagccggtccctctgttcagggtccctgacttcctgcaacaatgtaggacggcagtaacctaagcagagacagaagctattcctgataaaataatctgtgcaagtttatgaaagagtgagggagtatatatgtttttcagggtcagaactatggtagggcattaaaagtgcatggtatttgcagacttt

SEQ ID NO: 864381 - DNA, 631 bp, Homo sapiens
ttcaaagacattgatacctgagaaaattgtgtcagagttctgaggccaggagccttgagaccctgtgaagaagtttgtgactattaggcaaagcccaggggttaggcatttgtgttcaagctcacattagaaagtacctggccttttgacagtatggaaaggttgcagacatagacatacaagacctgcattgaagtcccaattctgctaattcatagctgtgtaaccttggtctagtaaactcctcgagtgtctgtttttcattggtgatgttctacctaactttcagggttatggtaccaagcaaagaaaaaagatttatgcaaaatcctattgtaatgtgtaaaaggcaatataaaatttacagaccgggcgtggcggctcatgcctgtaatcccagcattttgggaggccaagataggtggatcacttgaggctaggagttcgagaccagcctgaccaacatgctggaacccwgtctttactaaaaacacacacaaaaattaggcaggcatggtggtgcgtgcctgtaattcccgctacttgggaggctgaggcacaagaatccctcaaacctgggaggtggaggttgcagtgagccaagatagcaccactgcactccagcctgggt

SEQ ID NO: 864382 - DNA, 575 bp, Homo sapiens
tccattttctgcagcgccttaactttttggttcaacatgaccctcacgaccctctttcatctcctctggacaacctcaacctagaagaaaacagtttacatggacagcctgctcatccccagaacgaggtgccagtcatcactcgctatgtttgctgtagtatttctctggaggaggaatagtgccagaagtgctccatgaagggtagggtgtgggttgaggaagctggcaactcccggatatcaatgtatgaatgctaaacatggcctggaagtaaaatcagatgaagaaaatcatatgtataaagtactttacactgcaaggaataattttctgagctctgggggtaagggttagaaccccagggaaacgtgctccagcaayaatcgcttcctagggagggtttatccagttcccaatgtttgtttactttgttctttctcagccttcttgctcatcctccctaaaactttcaacaagaagccaaggaacataaccaaaatctcagggcaaactgcacctttgctcatcaagtgtctcttgccagacaccagcctcattaatgattctggggc

SEQ ID NO: 864383 - DNA, 642 bp, Homo sapiens
catcacagcccctacatgaactatgtcatccatgacgtgaattttgtaccacggtctctttcaggttctgaggacactgtggtgagtgagagagaagttgctagagtcatggggcttatactgtagtaggagagccagaaaataaaacaactaagatgattataaattgtcatgttttctaggaagaaaataagcagagtgatgtgagaaagagtaactgagcacggagggcccacagagacaggctggctctagaggagggagctgaggtctgaaggaggagaagcaagcatccagccttgcccagagcatgccaggaagagggaaggattagtgcacagtgatggagggactgaaagaacaatgaggctggagtgtaatragcaagagagagcgatctaggtgaggatgggtagaccaaataatggagaagcctttggttctcagattggagttgggaactttttaaagtgcaatgggtactaactgataggctgtaagcatgggagtgatataatccaagttatgtttaagaaatcactctggttggtgtatggtcaaaaggaaagtagggatcacagttagaaagctactccaatagtgcaaatgaaagatcatgttggcttgggtgaaggtaatagt

SEQ ID NO: 864384 - DNA, 549 bp, Homo sapiens
taccatctgggcattgctcattcggttttggttggcttttcctggtggataactgtataaggagagggtgagtctctgagggtggtcccatcttcttccactctatagctctctggcaccttctacagggttccgaataccatctccatcctaatgggacatagtccacatcatacatgcccaaatctgtggtgattctagagaccttccagagcacatgcagaggcggggccagctgtgctaggttctatttgacaacatccccgtctagacgaaggaggaaggatcaaaaagtccagaattgaatcctggctccctgcygggagaaatctcacttccttctagattatgaactagtcagtgaaggccagcaggaggagagtgtgacccttacaaatattggtaggcacattctacagcctggccagaacgtcactggtttaatttccataagaatgaccctcagacactgtctataagatggacagaaggacactcatggaacagtcctcccaggacctcctgtcaccacttacctgctgaattcta

SEQ ID NO: 864385 - DNA, 590 bp, Homo sapiens
gtataccagtgaggagcttacaattttaatacaaatcagaatcccacagtttggctcaataaaaaggcagttaaacatttggcactttaagatattctgagggaaaatgaaatttcaaaagtatttctcgatgattgagactatcgttatgaattataaaacatatagcttacacactccgttgtgtttgaacaaccagtcatcagaggtgtagtagtgaggtagtattgtcatcccctcctcargactgacgtttttatatgctgcccttccagaaaggtccaggttttaaaaaataattaaaatcagttaccaacaaatgtatactttgttttattaataatctgtttttctaaatcagtctataaaagaacaagacttttaaaatcatgcagagactgtttcatcaacaaactctcctagggaactactactgctgtccaaacctctgtgaaatggtaggcaaaaaaagccatcaaaggattacaggagataatacaccaatcaatgtagctgttaaagatgactgtgattagataaccaaatgtcaaatatccaattaggtaattaaatttggattaaaaaaacta

SEQ ID NO: 864386 - DNA, 644 bp, Homo sapiens
ggcatcatggcaatgaagcagtaaagacacgagtaattagacatattcgatttaattactcagttccttccactaagccaacatttcttgaatgtcctatgccttaacagcattatattaggtctagagtttaaaaattttagcagtttaaaatctctgtctcagcacaatatgaatgaaagggagagatggragtgggatagctgggatgaagaagctggaaaaaacatggcttcaggatacatttagcttcggcttgattccatgagtagctaaggtgcatgaactaaaacacagaggttttccagtgtacagactgggggtgaggatggttctagtcatcatatccctgcatcaacaagtcattggctagagctgctggaagagggaatataacctagtgtcttcaggtgtgatggcttcagttaaccaaaaccattcttccagtgaataataatggaagccaattggctgtgcgcacttatcattaaaggcaatctcgacaacaaaagaatatgctataccctgtgttcagagactagaaattagtagaagagacagccaagtttacaaaaagtcatgaggaatgctatgacagaaatgttttttagatgctgatatggtattgctttgtgtccccaccc

SEQ ID NO: 864387 - DNA, 644 bp, Homo sapiens
ggcatcatggcaatgaagcagtaaagacacgagtaattagacatattcgatttaattactcagttccttccactaagccaacatttcttgaatgtcctatgccttaacagcattatattaggtctagagtttaaaaattttagcagtttaaaatctctgtctcagcacaatatgaatgaaagggagagatgggagtgggatagctgggatgaagaagctggaaaaaacatggcttcaggatacatttagcttcggcttgattccatgagtagctaaggtgcatgaactaaaacacagaggttttccagtgtacagactgggggtgaggatggttctagtcatcatatccctgcatcaacaagtcattggctagagctgctggaagagggaatataacctagtgtcttcaggtgtgatggcttcagttarccaaaaccattcttccagtgaataataatggaagccaattggctgtgcgcacttatcattaaaggcaatctcgacaacaaaagaatatgctataccctgtgttcagagactagaaattagtagaagagacagccaagtttacaaaaagtcatgaggaatgctatgacagaaatgttttttagatgctgatatggtattgctttgtgtccccaccc

SEQ ID NO: 864388 - DNA, 565 bp, Homo sapiens
ttttatgccaatatcatgctgatttggttattatggctttgtattatattttgtagtcaggtagcatgatgcttccagctttgttctctttgctcaagattgctttggctattcaaggccatataaattttaattctatttctgtgacaatgtcattggtattttgattgaaaatgcatttagtccgtggattgctttgggtagtatagatgttttaataatattaattcttccaatctatgcacataaatatatttccatccatttgtgtctttcatcagtattttatggttttccttttaraaatctttcaattctttggttatacttattcctgggtattttattttattttacttttgtagttattgtaaatgggattgatttattgatttcttttttagttcaccattggtgtataaaaatgctacagatttttgtatgttgattttatgtcctgcaactttactgaattcatttgttagttctaacagttttctggtagagtctttagaattttctatatatatgaccatgtgctattgagatgaatgtgtattctatg

SEQ ID NO: 864389 - DNA, 614 bp, Homo sapiens
tcctccaaaaagatgcattgaagtcctcagccccatacctcagaatgtgaccttatttgtaatagggttgctgcagatttatatgggttggatttgagtccccatcaaatcttatgctgaattgtaattcccagtgtgggaggtggggcctggtgggaggtgattcaatcatggggtcgtagctctcatgaatggtttagcaccatccccycatggttactgtatagtcagtgagttctcatgaaatttgattgtttaaaagtgtaccacatctccctcttctctcttgctccttctccagccatgtgaagtgctgctacccctttgccttcttccatgattgtaagttttcctgaggcctccccagaagctgaacagatgccagcatcatgcttcctgtacagccgatggaactgtgagccaattaaacctcttttctttataaatgtcccagtctcggacatttctttatagcaatacaagaacaaactaatacacagatgtaattatttaagatgaggtcatactggagggggcttgaaccttaatacacgatgactagagtccttataagaaaaggaaaagagacacaaagacacacaggagagaaagat

SEQ ID NO: 864390 - DNA, 614 bp, Homo sapiens
tcctccaaaaagatgcattgaagtcctcagccccatacctcagaatgtgaccttatttgtaatagggttgctgcagatttatatgggttggatttgagtccccatcaaatcttatgctgaattgtaattcccagtgtgggaggtggggcctggtgggaggtgattcaatcatggggtcgtagctctcatgaatggtttagcaccatccccccatggttactgtatagtcagtgagttctcatgaaatttgattgtttaaaagtgtaccacatctccctcttctctcttgctccttctccagccatgtgaagtgctgctacccctttgccttcttccatgattgtaagttttcctgaggcctccccagaagctgaacagatgccagcatcaygcttcctgtacagccgatggaactgtgagccaattaaacctcttttctttataaatgtcccagtctcggacatttctttatagcaatacaagaacaaactaatacacagatgtaattatttaagatgaggtcatactggagggggcttgaaccttaatacacgatgactagagtccttataagaaaaggaaaagagacacaaagacacacaggagagaaagat

SEQ ID NO: 864391 - DNA, 557 bp, Homo sapiens
aaaaataattcttaaagaaacttagacccccccccccacaagagagggcagagcaagatggcagaatagaaaggtccattgttcatccctccctgcaaggacaccaatttaacaattatctatataaaaaaagtaacttcatgagaaccaaaaatcaggtgagcactcacagtatttggttttaacttcatatcactgaaagaggcactgaagaggtargaaaaaaagtctggaatcaccaacaccacccctctcccattccccagtagcagcaatgtggcatggagagtgtttctgtgcactggagagagggacagcacggcagttgtgaggcattgaactcagtgctgttttgttatagcagaaagcaaaaccagaccaaactcagctgttgctcacccagggagggagcatttaaaccagccctaaccagaggggaattgccagtcccagcagtcagaacatgagctcctgtaagcatcccaccacaggttaagtgctctgtgactctaaataaacttgaaaggcaggctaggcacaaggactgcaactcccag

SEQ ID NO: 864392 - DNA, 611 bp, Homo sapiens
gcatggctctggaggctctctggaatggagatgacaatctataaagaccaacacggttattgttcttcaaaaaacatatcggagacaagagagctgcacagagaaagaaccttggagatcagcagagggtctccctcaagtattctgctaattactggtcagcagattcatgtaagaacacactacccaaggcttggaaagaatcactgaataagattagagggaatggtgcctagtattcaatctatggagggcttgatcaaattttatttttattggtacttaaagcagaagcagtaaaccctgtgttgtgtaaacacagtgcaagctccaactttgtaggagccaagggtagaaaagtttccccctttttatctttttctttgtcattatcctccctgcaatcctctctatcttcttttaragaaaaaatatgactttctataaaaatacatatatgggatattactattcacattcttctgcatctattttatatttttgttacttaaaaatatatctttgagatattttcctgggtgtacatgtttatatcaactttattctgtaatttgtttaacagtcttgctgaataggctcagggtacaagt

SEQ ID NO: 864393 - DNA, 612 bp, Homo sapiens
tcactgaataagattagagggaatggtgcctagtattcaatctatggagggcttgatcaaattttatttttattggtacttaaagcagaagcagtaaaccctgtgttgtgtaaacacagtgcaagctccaactttgtaggagccaagggtagaaaagtttccccctttttatctttttctttgtcattatcctccctgcaatcctctctatcttcttttagagaaaaaatatgactttctataaaaatacatatatgggatattactattcacattcttctgcatctattttatatttttgttacttaaaaatatatctttgagatattttcctgggtgtacatgtttatatcaactttattctgtaatttgtttaacagtcttgctgaataggctcagggtacaagttaatatggtacaagcattaccaagttgccttcatacctactttatgaattctcttctctgtsttgtgtaaccaagacaaacaggggtttgcttgcctggggcagcaaggccaaacatctacactgaagttttcagcgggagaaaggagggcatttatttacaaggcaacaagcaaggagaatagggcagcccacaattaaaatc

SEQ ID NO: 864394 - DNA, 628 bp, Homo sapiens
caaactgctttgctaagaattgggaactgaatttcctattagaaatttagaatacttctcaaggaagatgagggagaatggatgagacaaaaagtaaatatctactaatatggctatattatgaatttgctatgggtacatttatataaatccatggaacaccaaagtcatgtacatcaaactgataaggatggatgctgagcaaaatgtagggatgatagttcttagatttcagaaatgctaaatggaaactttaatcttattaataggtattttatttttcatttattgtttatttatttatttttgagatggagtttcactcttgtcgcccaggctggactgcaatggcrcaatctccactcactgcaacctccgcctcccgggttcaagcgattctcctgcctcagcctccctagcagctgggattataggtgcctgccaccatgcccagctagtttttttgtatttttagtagagaaggggtttcactacgttggccaggctggtctcgaacccctgacctcaggcgatccacccacctcggcctcccaaactgctgggattacaggcgtgagccaccacgcccgaccagtaggtattttataagaaggttatatttatatct

SEQ ID NO: 864395 - DNA, 657 bp, Homo sapiens
gaaaaaaagcaaagaaaaatgtgccaattcttttacatctgagttgaatactttgcactaataaaaatagaagttactataaatctttgtttacaatctaatttcagggtaccaatatggggttatatctccgtatagcctaatataatattttatgtgagaaataaaaatgaaactgcactagtcgttaagtatagaaaagaaactgttacaatgtcagattaactaagtagataatattaatcaacctcccagtgttattttaacattctgtaattttatctacattcttatttgtagcattagcattgccttatagataagtacactgagactcaaacaggttatatgaatgatctaaaagcctaataggtagaaaatmcttcaataatgacacaaagccattccaaatccatgtctcatacacttttcccaatgtataaaatattagtgaagatatataaaaccaattaaaaatgtatttatcaaaaggaagctgatgtattttcaaaactctatcatagtgtgatttctcgcataatatgtaatctattatacatttaaacatcataatgtttagtatcaatagaaattatacaaaatttaattacttttaaggagtaatcctcaaaactgagaaagaaatatgaatagctt

SEQ ID NO: 864396 - DNA, 608 bp, Homo sapiens
atgagataccattttgccccaattaaaatagcttatcaccaaaagacaagcaataacaaatgctggtgaggatgtggagaaaagggaaccatggtacattgttggagggaatgtaaattaatacaatcactatggagracagattggaggttcctcaaaaaactaaaaatagagctaccataagatccagcaatcctactgctgggtatatactcaaagaaagggcatcagtgaattgaagagatatctgcacgcccatgtttgttgcagcactattcgcaataaccaagttttggaggtaacatttaactttgataaaatgttcatcaacaaatgaatggataaagaaaatgtgtatatatatacacaatgaagtattattcagctataaaaaagaatgagatcctgtcatttgcaacaacatggatggaactggcagtcattatattaagtgaaataagccagccatagaaagacaaactttacgtgttctcacttatttgtgggatctgaaactcaaatcaattgaactcagggatgtagagagtagaaggatggttattagaggctgggaagggtattgaagggggttgaggggagatggggat

SEQ ID NO: 864397 - DNA, 579 bp, Homo sapiens
atatcaggataaaataactgctaatgactcaatcagaagggtttacaaattttcaaaaacaactttgaagaaattaaacttaagtttaattcaacgcaattattgttctaaaagaataaaatatcagaaaaagaatatataactccagaattcctcactactcctcttctcctccttctccttctctattgttacatcattgtagcttataaaataaactctgaatggagcaaatttactgcaattttgatagatcaatgtagttgaaattactgtttttaacctcctatgtaacacaagctccagctcaaactcacaaatacacacaaacataaacaccaagccaaatatattaaaaatgtatgttttcttagatacttcyatatatatttctggatgatgtaatataccaatgattttggtttacttgtatacctttttattaaattcagaaagagttcttacctgcccttgaaatttgattttcaacataaactttcaattaaacattttggaagaatagcacagttgatacaagttgatatttaattctggaaacttgaatatttgtattcagaa

SEQ ID NO: 864398 - DNA, 711 bp, Homo sapiens
tattctagttatctttagcttatctatttagctccagtaactatgtgcttgtgggttatctaccttgccattttataagattaaatacaagtatagactcctcattcgtggttttactaaaagaacacactagacatataaaaaagagaaaatgtaatttattttctttagagttttaacatattcagaaattaaaaagaatatgatgacattctcttctttattgtattgtacataaggaaacatcarcctggtgattgatggtgcttataaatttgaattttctggctttgccatgcaagttgcaaaaattagtgtgtgatattaattacattgtgttgggtggaaaaaattgcaacgtggaaacacatataaatcaaatgcaaattaacgctaagtgaataaaattgttttaacctaaacgatttggttatctctttaatcagtcaaatctgaccctaattctagcattttataagtacaaggattgtagtggaaactcacattccttgcagcaagaaaaattatttttaatcccaatatttgttaatgacaaattctgtgattttaggcatatctcctaactcctctcatattcagatttcgcttttatacaaatgatatactcactgactcataaagtcataagtaatatggtacacatgttattcatgaatatgcctgacaaatagtaggacatgtgtacttatt

SEQ ID NO: 864399 - DNA, 711 bp, Homo sapiens
tattctagttatctttagcttatctatttagctccagtaactatgtgcttgtgggttatctaccttgccattttataagattaaatacaagtatagactcctcattcgtggttttactaaaagaacacactagacatataaaaaagagaaaatgtaatttattttctttagagttttaacatattcagaaattaaaaagaatatgatgacattctcttctttattgtattgtacataaggaaacatcaacctggtgattgatggtgcttataaatttgaattttctggctttgccatgcaagttgcaaaaattagtgtgtgatattaattacattgtgttgggtggaaaaaattgcaacrtggaaacacatataaatcaaatgcaaattaacgctaagtgaataaaattgttttaacctaaacgatttggttatctctttaatcagtcaaatctgaccctaattctagcattttataagtacaaggattgtagtggaaactcacattccttgcagcaagaaaaattatttttaatcccaatatttgttaatgacaaattctgtgattttaggcatatctcctaactcctctcatattcagatttcgcttttatacaaatgatatactcactgactcataaagtcataagtaatatggtacacatgttattcatgaatatgcctgacaaatagtaggacatgtgtacttatt

SEQ ID NO: 864400 - DNA, 575 bp, Homo sapiens
cctttattacttattaaaaagtattctataagaaaagtatacctacttactgatttcagtttatgaaaagctatttcttattatttatcttttatttcaatacatagatatatcatcatttaatcatattaggcatatttatcatttgatcacacaatagtatggtaggtttggctcccagtgatccttgtttcctggtactcatatccctgtgcaatctcttttccttgaatatggattgaacctggtgactttcttctaatgaacagaatatgacaaaagtgaagggttgtcactagtcgattaggttacaaaagactgttccttccatcttgctggaactgtrtattttgctgttattctctcttgcccttttgatgataaagcaaatggccatgttgtgagatgctctaaagacaggtcctcatgtcagggaaacaataattgtgagacaatacatgttgttggtttaagccagtaaagtttggggtaatttgtcacacagcaataagtaacttacacaaagaagttattcatgctatttaaaccactgtgctctggtcatatgctctggt

SEQ ID NO: 864401 - DNA, 635 bp, Homo sapiens
ggttttttgaaaagataaacaacattgacaaacctttagccagactaatgaggaaaaagagaagacccaaacaaataaaatcagagatgaaaggacaacatcacaactgatactgcagaaatccaaaggatcatttgtggctactatgagctactacatgccattaaattggaaaatctagaggaaaaggatacaytcctagacacatacaacctatcaatattgagccataaagaaattcaaaacttgaacagactaatatcaaataacgagattgaagccataataaaaagtctcccagtaaagaaaagcctgagattggatagcttcactgctgaattctataaaacatttaaagaagaactaatatcaatcctactcaaacaattctaaagaatagagaagaagacttccaaaatcattccacaaggccggtgttaccctgataccaaaaccagatgaaaatacaccaaaaaagaaaactatattccaatgttcttgatgaatgttgatacaaaaatcccctcaaaatactagcaaatttaattcaacaatacattaacaaggttattcattgtgaccaagtggaatttatctcaggcatgcaaaaatagttcaatatatgcaaatcaatc

SEQ ID NO: 864402 - DNA, 696 bp, Homo sapiens
ttctgagttatggcaaatatgccaaggataatgaatcaaaacatggcagtctttcccctgtccttttttcacttaaccattttcattacaaacaatgttatgtgaaaatctgtaccaagggtagagcaataaggaagtcccttaatagtactgcttgcagatgcttgatggccaaggacaacaaatccaaattcacgttaagtatmtattccagtgtggaaatatttgcaacctctatctcagacggatttcagagttattatcctgctaccagacacctgactggtcatctcaggtgtaatatatatgtggatttttgtatcactcactggatggcaaattggacacccattagtagaagtggcctgaatagtcttggtgaaggggaagtccatgtttataagcccatcttgaacatctcaccttgtttcatgactcttgaagcatttatgtaactaacataagggagagacacttccagaaaaccaccactgattactaagagcctcctctgctgtgggtatgatcttaggtaaacattccaaaataatctcaaactgcaatttttctgaaaagtatatacctcatccctaaaccctcttgttataatttttcaaacttgtaccttcaaccccctggtcacatggacaagccattggccattcctcatggactgctatacatacaatacatcct

SEQ ID NO: 864403 - DNA, 696 bp, Homo sapiens
ttctgagttatggcaaatatgccaaggataatgaatcaaaacatggcagtctttcccctgtccttttttcacttaaccattttcattacaaacaatgttatgtgaaaatctgtaccaagggtagagcaataaggaagtcccttaatagtactgcttgcagatgcttgatggccaaggacaacaaatccaaattcacgttaagtatctattccagtgtggaaatatttgcaacctctatctyagacggatttcagagttattatcctgctaccagacacctgactggtcatctcaggtgtaatatatatgtggatttttgtatcactcactggatggcaaattggacacccattagtagaagtggcctgaatagtcttggtgaaggggaagtccatgtttataagcccatcttgaacatctcaccttgtttcatgactcttgaagcatttatgtaactaacataagggagagacacttccagaaaaccaccactgattactaagagcctcctctgctgtgggtatgatcttaggtaaacattccaaaataatctcaaactgcaatttttctgaaaagtatatacctcatccctaaaccctcttgttataatttttcaaacttgtaccttcaaccccctggtcacatggacaagccattggccattcctcatggactgctatacatacaatacatcct

SEQ ID NO: 864404 - DNA, 696 bp, Homo sapiens
ttctgagttatggcaaatatgccaaggataatgaatcaaaacatggcagtctttcccctgtccttttttcacttaaccattttcattacaaacaatgttatgtgaaaatctgtaccaagggtagagcaataaggaagtcccttaatagtactgcttgcagatgcttgatggccaaggacaacaaatccaaattcacgttaagtatctattccagtgtggaaatatttgcaacctctatctcagacggatttcagagttattatcctgctaccagacacctgactggtcatctcaggtgtaatatatatgtggatttttgtatcactcactggatggcaaattggacacccattagtagaagtggcctgaatagtcttggtgaaggggaagtccatgtttataagcccatcttgaacatctcaccttgtttcatgactcttgaagcatttatgtaactaacataagggagagacacttccagaaaaccaccactgattamtaagagcctcctctgctgtgggtatgatcttaggtaaacattccaaaataatctcaaactgcaatttttctgaaaagtatatacctcatccctaaaccctcttgttataatttttcaaacttgtaccttcaaccccctggtcacatggacaagccattggccattcctcatggactgctatacatacaatacatcct

SEQ ID NO: 864405 - DNA, 612 bp, Homo sapiens
taatctagagatcctttcaagtatatcgcaggatgtgcatatgttagacacaaatactatactattttatgtcaggaacttcagcaaccccagattttgagatctgcagggagccttggtcccagtcctctgtagatacygagggtcaactgttactttgcttctgctcctctgcaatcctcctactcactgaaaccaggaacctacttcaagtgcaatctctcataagcatcttgaaccctaagcaaattatcactaagcatctgctctcattacacaatgtttttctcaaagtcttggtaaagagtgtcttctggtgtttctcaggggataaagttaggaaattatctgaagtaacacacggtgaatggactcccaccttctaacctctaagtctttgcagtgttctctctgtactagaccaagagttttctgtcatttcaactttttcctttcttttaactgtaggccacccttagttccaggttgcagatttaggcatccatccaaacaaacaattaaactcactcccagggaatccagcaagcatactgaaaccatatcaattaaattggccaaatcaaaaatgatgactgttcctcattttacaaa

SEQ ID NO: 864406 - DNA, 612 bp, Homo sapiens
taatctagagatcctttcaagtatatcgcaggatgtgcatatgttagacacaaatactatactattttatgtcaggaacttcagcaaccccagattttgagatctgcagggagccttggtcccagtcctctgtagatactgagggtcaactgttactttgcttctgctcctctgcaatcctcctactcactgaaaccaggaacctacttcaagtgcaatctctcataagcatcttgaaccctaagcaaattatcactaagcatctgctctcattacacaatgtttttctcaaagtcttggtaaagagtgtcttctggtgtttctcaggggataaagttaggaaattatctgaagtaacacayggtgaatggactcccaccttctaacctctaagtctttgcagtgttctctctgtactagaccaagagttttctgtcatttcaactttttcctttcttttaactgtaggccacccttagttccaggttgcagatttaggcatccatccaaacaaacaattaaactcactcccagggaatccagcaagcatactgaaaccatatcaattaaattggccaaatcaaaaatgatgactgttcctcattttacaaa

SEQ ID NO: 864407 - DNA, 668 bp, Homo sapiens
gatcgaataaccgaaagatggaaatcttggagtgcacctttagaattctgcttatcacacttccacatgataaaaaccctaattagagcatacaactgagcaacacaaaacatcacatgccataaccttcactagctaatagtgagcagatagaggatctagaagtttggacctctatagtctgaagcgaggcttttttttttttttttttttttggtcggagttttgctcttgttgctacagctggagtgcaatggtgcgatcttggctcaccacaacctccacttcccaggttcaagcaattttcctgcctcagcctcccaagtagctggaattacaagcatgcaccacsatgcccagctaattttttgtatttttagtagagacggggtttcaccatgttggccaggctggtctcaaactcctgacctcaggtgatccacccacttcggcctcccaaagttctgggattacaggcatgagccaccacacctagccgaggctttatcttgtacctattcaaacacaatgggtttatcaatcaaagaaacatgtaggataagatactgagtgatcctccacaaatgaaacaatgtccactattggaagcaaaatttcttttgttctttgacttggtacatttattatttttaccatcttagtaaaat

SEQ ID NO: 864408 - DNA, 618 bp, Homo sapiens
ttctttcaggttcttatcctttcttcctgtgaatttgacttattatctgatgtccttgtgtttctccaatacaggtttattcccactcaacttctttgtgccattattgtaaaatatatttctgtatgttataagatcaaaaatactatatatatatatagtatatatattggtcagagttctctagagagacagaactagtaggatatatgtatatgtgaagggagtttattaaggagaattgactcacacaatcacaaggtaaaatcctatggtaggttgtctgcaagttgaggagcaaagaagccagtgttggctcagtctgmgtcccaaaacctcaaaaatgtggaagctgatggtgcagtctgtggccagaggcctgagagcacatggtaaaccactggtataagtccaagagttcaaaagctgaagaacttggaggctgatgttcgagggcaggaagcatccagcacaggagaaagataaaggccagaagactcagaaatctgctctttccaagttttctgcttgctttattccagccccactggcagctgattagatggtgctcacccagattgagggtgggtcggcttctcccagcccactgactcaaat

SEQ ID NO: 864409 - DNA, 625 bp, Homo sapiens
atagtctgtccaatataataatagcaaaaatctattttattatatatgtttatgtgtgtgtgtgtgcgtgtgtgtgtgtatacttaggtatgcttatatgtaattgaaatgaatgacaacaatgatacaagggacaggagggagaaattagaattattttattataaagtactcactatgcaagagtggtatagtgttatttgaaaggtgacttggattcattataaatgcatattgcaaactctagggcaaccaataaagaaagttataaaaaagtataactgatatgttaacaatagaatcatagaaaatgttcaatttaaaccacaaaaggaagaaaaagaagacaaaaatagaaaaaaaagaatgaaggtaagaaatagaaaacagtaacaaatatggtagacattgatccaactatatcaataatcactgtgaaaataaatggcytgaatgcaccaattaaaagataaaggttgtcagagtggaaaaaaaaataagattcaactatatgttgttttaaaaacccactttacatgtaaagacacctatagattaaaagtaaataaagaaagaaaatatatcatgctaatactaaccaaaagaaaacatggtagctatatta

SEQ ID NO: 864410 - DNA, 673 bp, Homo sapiens
tgactattaatatggtggtcaaaattctcgatatatggtcaacattcttaagctacaaatataccctttcaggtttagttatttattttaattgagaaaattttgcttagctgagcagtactatgaaattgattaataaattaccatcaactatcattgttctaaaattccctactagtaatatttgacacagagttgacggtaattaaataacaatttcaccactaatagcaattgaatatatccaactgactggatcactatgtgacacattaaaaatcctattcttatagtattacattgattgatgggtagatgaaaaagacaattttctttyaaagaatctgtagattaagagggtctttcctattgtaaaaaatattaaaacataacctttattttacgaatggaaaactgctgtcaattgactcaaatttgactcatttgaaactaatagtaacaatcactcccaaccctaaatggtattcatttggaaaactggcaatatttggaagagatgcagcaaaataaatagaaacttcatcaaaaggtagacttgcattttttcacatttgaatgcatcctacaactgagggcatgtcttaacttaattgagagcattgttcttttttaatttgtatggaaagtagctatacgtcttacaactataaat

SEQ ID NO: 864411 - DNA, 627 bp, Homo sapiens
ttatctcattaagggcttctaaatcttgggctgtttggtacatatggtctgccaggaattgtgacgttgtttggctggcagctctaagaatgaagtctgctacagaactgaaaagatctagacttatgcctgttataccaaagattgtgatgaggcccaatttataatatacaaaaaggtggcctggtatccccttttatgggaagggcattcaccagtgcatacgtgtgaggcccttgtactttcaatggctttatataatatcaatcgttgacagagggcaggaaaggtgggactgtgaaggaaaaattcagaggaagaacctgatgaggttgagggtgcctggggaagtaaaggagctggagggtgaccagagaggatggcgactggttagtagtatggatatcacatacctccaagagtgtggaaatcagttgtacgagtggttacccaggttgggaygcctgctggcaggcccagcattgttggagttttatctcttggatgacatgttctgttactgtttcacatgtattatctggcaagttgaagaaagtaggatgtggtgtcatgatgaaggaatagtgcagagtgaagcatggattgttggacaatgggactggcgct

SEQ ID NO: 864412 - DNA, 644 bp, Homo sapiens
ctcatttaaccttaattacctctttaaagaccttatctccaaatacagtccacatgttgaggtactgagagttaggacttcaacatatgaactcagggagtggagtacacaattcagtttatatcacctgttctcctctgacatcactgtggtaggggaagtggatcctgcctcattattattaggtggtgacagaaatccagatttcccactcagcctccattgatacccacargggggctcctcattactagtggcaggggtgggagttccggtttcccactagacctccactgatacctttctaatttggagggaaaggagtgccttattactgcactccatgtggcttctactgttagcactgggttgaggggtggggaggaaagtcctaactctccaggcaagagtggaagcatgggtctttgctggcatgctggggatagtgctgaaggtttttcctgtggtgttttgactagagcatggcagtaattgtctaaaagttttccttcttgctaggctgccctcttccttgtcttttggctaaagacagcaggcttttgctgggacttttttgtctgtgcccattggtgtattgggactgctagcttctttggctttaagtctggcacaaaggaggcaca

SEQ ID NO: 864413 - DNA, 691 bp, Homo sapiens
gagaggtaacttttgactccaccaattagtaacttctactaataacctactattgagcattaccaataacataaacagtcaattaacacaattttgtatgctatatgtattacacactgtattcgtaaaatgaagctagagaaagaaaaaaaaattttttttgagaaagagtctcgctctgtcacccaggctggagtgcaatggcgtgatctcagctcactgaaacctctgcctctggagtttaagcgatttttgtgcctcagcctccctagtagctgggactacaggcagacaccaccacgcccagctaattttttgtatttttagtagagacggggttttgccatgttagccaggctggtcttgaactcctgacctcaggtgatctgcctgcctcggcctcccaaagtgctggccgagaaagaaaaatattttaaagaaaatcataaagagaaaatacatttacagtaccatactgtatttatcaataacatatttacrtaatctgtttataagatgaatcatctgtctgaaatggcaggcaactgcagccacagacctcagtctatggtacgtgacaagcaattcaactttttcttgtaatgtaataacttttcacggcttcctgggagcacttcgaatatcacaagcagtgctttgtatgggcaccatgctgttattcatcgtttac

SEQ ID NO: 864414 - DNA, 647 bp, Homo sapiens
atgtgttattacaacatttttaaagttttgccaatcaaatggtaagaagtgtatttaaatttagttttaatttatatttcttgttttttaaataacatagaacatttttgcatatttcctgtgtcaatattatttttctttttgtaaattgttcaaatctattacccatttttatgttgagtttttggtctgttcgcctcaatttttttttttagaacaaggtcttgctatgttgccaaggcttgtcttgaagtcctgggctcaagcgattctcccacctcagccttgtaaagtgctgatttactaactagggccagccaaaggctcaaccatcactatctttcattaacattttaatcacttttggcttttctgggtcatagggtcctgatggcagagaaacttacatagcagctgggacacattgcacagacttatcttggatgagycaaaatgttttcaggtcacacaaaataggcaaagtagcacgcctcaatgaggaataagtagcatacaatagccccagtggtccactaggcgttgtgacgctattttttgatcgtaggaagggctatattctacttgccctacacccagaagggatagctcaataggcctacatcagtgaacttgtggaaatttcacca

SEQ ID NO: 864415 - DNA, 679 bp, Homo sapiens
atacggaaacacaggagcttggtgtgtgatccgctgattgcgacaccttaaataatagctcattcctggggccagaggactcaggaggtgggtgaagtgggtcagagggtccctggagcatctaagagaaatggagccaacatgcgcaatgtgggcctccacagaaagggggactaactatctgatggacaagtatgaagaaaaccagaaggacatgttatcttggtgtatagagcactcttgacataaggaactccatcatcaatacaaatacagttatgaatgtacaaggaacagcacaagaagaaaaatcaggctaatttgagagcaaggaggtgaagaagtgggagcactgttcattcctactaatttttctactccataatgtaacagtaaaaaacaaaacaaaacccaaaccaaaaaccaaatgcaaagtcaacamaaaagagacaaaggaagcaactggcacacaacaggtcccaaatgcccatttcctccttgagtcttcccaagacagagaaaaatatatgacaatatgagcaataagatggaattttaatagcaagagaggtgagctctactcaccttgaatgtggtcatttttcctactactttttggagtcttcagtgtcttgagtaatggagcacaaaggaaggtggaattgtgcctggaaaatgc

SEQ ID NO: 864416 - DNA, 642 bp, Homo sapiens
ctgtgttctcacaattaccctaactcgataccaaaagtgttcacaggacacctttggggtaggaggaaaatgtctgctcctctccacacaaccttataaagacagaaaagaggaacacctttacatatccaaaatagaagataatattcaaataatacattcagggctttgtgttccaatgacacaaaatattctgctgctcatagtgtttctccttgaggaactctttctagccctgtggtcaggtctccccttcaaatcatcttgaagatcactctaaaatgtctgttctagcgatgtgagtcggtctgactgctgcaatggaggaagcggcaacacagaagctaggcagcctgggcttgcatcttagcccatcacttctctgctctgcccttcggcaagttactcaacctctccgaatccacagtcaccttgtctgcaartcagagataccaacgttaccttctagttcaggctgtgtgggggttaagcagagtaatgcatgcaaagagctcaggacactgcctgtctccggcatggaaaccatacttattcattagcgcttggtggtgaggtgcagaggcagaagtgggaggaggtagcaattaggaagcaagaccaagcatgacgtcctgacagtgc

SEQ ID NO: 864417 - DNA, 549 bp, Homo sapiens
acagtcaaccctgtttcaagcctctgaattttgaggtggttttttatgtaacattattgtggcaataactgattaacacaccaaccatttcctgaaggcctccccttgattttcagagcacctagtatccaccaataaattgttattgtgtgwttaaatgaactagaatcagcatctattatttacaacccaaacaacctacctacacatttgagaaactctgacagtagaatatcaaatgataatgctgagaacaaaaaactcaaactggatgtttttcttggtacttgtaccataatgatctgtttggagaaaattaacaaaatagagaagtcagtagaggcaggaaatttagatgactttaagtactttaagtggatgtcacttattttctaaccaaaggaaactaaatcaaaactgtaaccttcaggtagaggagatgagtaattaagatatgtgttttaacacagaaagcagttgttaaaatgactgcagtagtgtatgctgtcccagagaggtagtgacaagaactctgacaagactattgaa

SEQ ID NO: 864418 - DNA, 595 bp, Homo sapiens
acaatcaaagtgccatactccattagtgacagaactctgttaaggttgtgcaagtgcctcaaattggtattcagcttaatcactgataccgtattactaattatagcatgacaccatacaaaagtggtactttttaaaaggctggcaaatggcattattttaataagtcattaggaaattgctttttgaggatgcaatgaaagtacaagtttctcaattaggggaattatgtggagttgatgagatatttgagcacgcatgatctgcagctagcggtccatttgaagcaggccaagccattgagagggctggctaatgagatccaagatgatctgattaattgtaggagaaaaatgataatagaggctataaatggagggtgttacaagactacttgtctcccaggctacaaccacggaacrctcccaactttcaccgtcaagatgggcacggtagctcatgcctgtaatcctagcactttgggagggtgaggtgggcagatcacaaggtcaggagatagagaccatcctagctaatgcagtgaaacactgtctctactaacaatacaaaaaaatgaaccaggcgtggtggcatg

SEQ ID NO: 864419 - DNA, 600 bp, Homo sapiens
ctattcaataaattgagccgggataattggctagccatacgcacaagattaaaactggttccattccttacaccatagacaaaaataaactcaagatagattaaagacttaaatgtaaagcccaaaactacaaaaaccctggaagaaaacccagaaaataccattctagacgtaggccctggcaaaaaaattatgacaaagatgccaaaagcatttgcaaccaaaacaaaaattgacaaatgggacctaattaaacaaaagagcttctgcacaacaaaagaaaccatcagcagagtaarcagaacccacagaatggaagagaatatttgcaaaccatgcatcagacaaaggtctaatatgcagaatctacaaagaacttaaacaaattaacaagcaaaaaacaacttcattaaaaagtcagcaaaggacatgaacagacacttttcaaaagatgacatatacgtggccaacaagcatatgaaaaaatgttcaacatcactaatcattagagaaatgcatatcaaaaccacaatgagatatcatctcacgacagtcaaaatggctattattaaaaagtcaaaaaagtaacagatgctggtg

SEQ ID NO: 864420 - DNA, 600 bp, Homo sapiens
ctattcaataaattgagccgggataattggctagccatacgcacaagattaaaactggttccattccttacaccatagacaaaaataaactcaagatagattaaagacttaaatgtaaagcccaaaactacaaaaaccctggaagaaaacccagaaaataccattctagacgtaggccctggcaaaaaaattatgacaaagatgccaaaagcatttgcaaccaaaacaaaaattgacaaatgggacctaattaaacaaaagagcttctgcacaacaaaagaaaccatcagcagagtaagcagaacmcacagaatggaagagaatatttgcaaaccatgcatcagacaaaggtctaatatgcagaatctacaaagaacttaaacaaattaacaagcaaaaaacaacttcattaaaaagtcagcaaaggacatgaacagacacttttcaaaagatgacatatacgtggccaacaagcatatgaaaaaatgttcaacatcactaatcattagagaaatgcatatcaaaaccacaatgagatatcatctcacgacagtcaaaatggctattattaaaaagtcaaaaaagtaacagatgctggtg

SEQ ID NO: 864421 - DNA, 600 bp, Homo sapiens
ctattcaataaattgagccgggataattggctagccatacgcacaagattaaaactggttccattccttacaccatagacaaaaataaactcaagatagattaaagacttaaatgtaaagcccaaaactacaaaaaccctggaagaaaacccagaaaataccattctagacgtaggccctggcaaaaaaattatgacaaagatgccaaaagcatttgcaaccaaaacaaaaattgacaaatgggacctaattaaacaaaagagcttctgcacaacaaaagaaaccatcagcagagtaagcagaacccacagaatggragagaatatttgcaaaccatgcatcagacaaaggtctaatatgcagaatctacaaagaacttaaacaaattaacaagcaaaaaacaacttcattaaaaagtcagcaaaggacatgaacagacacttttcaaaagatgacatatacgtggccaacaagcatatgaaaaaatgttcaacatcactaatcattagagaaatgcatatcaaaaccacaatgagatatcatctcacgacagtcaaaatggctattattaaaaagtcaaaaaagtaacagatgctggtg

SEQ ID NO: 864422 - DNA, 599 bp, Homo sapiens
agcaaagacatgaaatcaacctaaatgcctgtcaatagtcgactgaataaagaaaatgtggttcatatacaccacggaatactacacatccattaaaaagaacaagataatgtcctttgcagcaacgtgaatggagctggatggwggccattatcctaagtgaactaacacaggtagaggaaaccaaacactgcacgttctcacttaaaagtgagtgctaaacactgagtacacatggacacaaagaacggagcaatagacactgggactgcttgagggtagaagttgggagaaggataggaatcgaaaactacctgttagatactacgtttattacctgggtgatgaaataatatgtacactaaacccccacaacatgcagtttttcgatataactaacctgcacatgtacccctgaaactaaaagttaaaaaaaaaaaaaaaaactaactttctgagagaagtgctaaatatggatggctattgagctgtcatttaaatatagttcttggctgaatttatatgccttggattgtgttcttgcctctgctacatggtaactctgaaagttccctgaatttttctagtgtcagcacctc

SEQ ID NO: 864423 - DNA, 628 bp, Homo sapiens
agaaagggtagtgaacaacaatcaggtatagcaaactcaagtgcctggtagaatcaggaaggtaacaaatatgtgtaaagcaggccaaatacaagaccataagcaggggtgagcagctggagagttcaggtcccttttaaaggctttcaaattcaaatttaaaatttaaaatggtgtggaccccagaagacagttctgtgagtcaaatgtagcccacagtcagatagtataatacrtctgaactagatgcttaggcccctttcttctacaatttcttgaatatgaaaacaaaatatgtggttaccagaagtcagtgttttcactagagtctaatatattatgattgctttcaagtaactcatttgttttaacatttctttgatctagaaatacctaatcattttcctctgtcttgctgtgcagctttcaatagtttgcctggtttctctgtgccgcagtttgtcattagctaaatgaaaaataaaatcgctgaccattctcatacggtatggtatgaattaattaatgttttggcataaatgtcaaggatgttcgttaataaaatatatcttgtgggcatatatccttcatgatcgtttgcctcaatagtttttttgttggcatcaac

SEQ ID NO: 864424 - DNA, 628 bp, Homo sapiens
agaaagggtagtgaacaacaatcaggtatagcaaactcaagtgcctggtagaatcaggaaggtaacaaatatgtgtaaagcaggccaaatacaagaccataagcaggggtgagcagctggagagttcaggtcccttttaaaggctttcaaattcaaatttaaaatttaaaatggtgtggaccccagaagacagttctgtgagtcaaatgtagcccacagtcagatagtataatacgtctgaactagatgcttaggcccctttcttctacaatttcttgaatatgaaaacaaaatatgtrgttaccagaagtcagtgttttcactagagtctaatatattatgattgctttcaagtaactcatttgttttaacatttctttgatctagaaatacctaatcattttcctctgtcttgctgtgcagctttcaatagtttgcctggtttctctgtgccgcagtttgtcattagctaaatgaaaaataaaatcgctgaccattctcatacggtatggtatgaattaattaatgttttggcataaatgtcaaggatgttcgttaataaaatatatcttgtgggcatatatccttcatgatcgtttgcctcaatagtttttttgttggcatcaac

SEQ ID NO: 864425 - DNA, 612 bp, Homo sapiens
ttcagctcgggatggatacctattccagtataatactgaaatatctcacttggggaaaattaaagatgcaacaacaataagccagcaaaggtctacatcctttcgtcttcttttttccacctcacccaggcaaatgcctgaggctaaaatagtactttccaaagcgcctgaacagggataggcatcagagtaaacaatactgggtaaaatcatctgtgacgcattttctgccattttcttggtatctagtttcccctaacccctctcttctcactccagtgccccagtagctcttggcagaggcttaaatgggtcacctggggcagccctggcttgagctctgcttgctgcctctggccttatctgcaatgaagcagccgctgcttggtgtacagcaattctcaaaggtcatcrgaggcagctgcaagcttggctggagttaacacaattcgttaagcaggcgatgagtcctccagagctgagtgaacgcctacatagctaacatattgacgctattccaagtggcttccttctgtcctcgcctctattgcccatgctggatatactagtagttcatgctcttgacttgaacctctgctactgtagtgctgt

SEQ ID NO: 864426 - DNA, 647 bp, Homo sapiens
tctttacctacttatctgttgatggatacttacgctcaatctgtatcttggctatggtgctacagtccacatgcataatccacatgctacaatgcacatgtacaaactttgcatagtttgcaaatatcttctcccatactgcagrttatttattcactctgttgattgtatcttttgccatgcagaacgtgtttgtttgatataatataatttgtctatgttttgcttttgttatctgtactttcgaggtcttatttataaaaatttttgcccataccaatgtcctgaagtatttctcctgtgttttcttcatagtgctacaagagtgctacaataaatatgggattgcagatattttgttgccacactgatttccttttctttagacatataccccctaatgacattgctggatcatatggtaatgtatttgtaggtttttgaggaatctccatactgtttttcatagtggctgtatgaaattccattcccaccaacaatgtatttgagtttcctttttgccacatctttgtcagcatttgatattttttgtctttttaataatagctattctaactggggtaagatgatatctcattgtggttttgattaacattttcttgataattagtgatgtagaccatttt

SEQ ID NO: 864427 - DNA, 647 bp, Homo sapiens
tctttacctacttatctgttgatggatacttacgctcaatctgtatcttggctatggtgctacagtccacatgcataatccacatgctacaatgcacatgtacaaactttgcatagtttgcaaatatcttctcccatactgcaggttatttattcactctgttgattgtatcttttgccatgcagaacgtgtttgtttgatataatataatttgtctatgttttgcttttgttatctrtactttcgaggtcttatttataaaaatttttgcccataccaatgtcctgaagtatttctcctgtgttttcttcatagtgctacaagagtgctacaataaatatgggattgcagatattttgttgccacactgatttccttttctttagacatataccccctaatgacattgctggatcatatggtaatgtatttgtaggtttttgaggaatctccatactgtttttcatagtggctgtatgaaattccattcccaccaacaatgtatttgagtttcctttttgccacatctttgtcagcatttgatattttttgtctttttaataatagctattctaactggggtaagatgatatctcattgtggttttgattaacattttcttgataattagtgatgtagaccatttt

SEQ ID NO: 864428 - DNA, 647 bp, Homo sapiens
tctttacctacttatctgttgatggatacttacgctcaatctgtatcttggctatggtgctacagtccacatgcataatccacatgctacaatgcacatgtacaaactttgcatagtttgcaaatatcttctcccatactgcaggttatttattcactctgttgattgtatcttttgccatgcagaacgtgtttgtttgatataatataatttgtctatgttttgcttttgttatctgtactttcraggtcttatttataaaaatttttgcccataccaatgtcctgaagtatttctcctgtgttttcttcatagtgctacaagagtgctacaataaatatgggattgcagatattttgttgccacactgatttccttttctttagacatataccccctaatgacattgctggatcatatggtaatgtatttgtaggtttttgaggaatctccatactgtttttcatagtggctgtatgaaattccattcccaccaacaatgtatttgagtttcctttttgccacatctttgtcagcatttgatattttttgtctttttaataatagctattctaactggggtaagatgatatctcattgtggttttgattaacattttcttgataattagtgatgtagaccatttt

SEQ ID NO: 864429 - DNA, 534 bp, Homo sapiens
tacattttaaacctttgcagcaggtattaggatttcgatttagcactgtgattatgaaaataaaaagtgtttcttttcttgtttcagattttggagaccagataaagatggtagttttggatcaagatgttctaacaatatcgtgatgggcgtcaacacctggattaatgatcacaagggaaagattcccctgtggctacacggattcaaattgtgatgttttgtgagtggattgcgtgaaattatgtgaagtgagtttttacccacccttaatctgccaacattaggaccagactagaggttcaggactagacatgaggaaatacagtgaatgatccagaatgtgggaattttgaacattgtgggtataygttgaactgtctttccaccacctaaaggattcaggtaagaggaacactaatttcaatgctgtatgcctgtaagtgcttccaaacttttatgaacctcaatgttttttttgtctaatatcaaaagttcacagggtttcaaaatctgggctggactttttttact

SEQ ID NO: 864430 - DNA, 627 bp, Homo sapiens
tttatggaaggaacaagagcagaaaaaattgagtaatttgccagctagataagaagcagaactgagattggaagccagatcttcttggcaccaaaacctgggctctttaacgtacatagcctgtcatctactcaaaggtctacttataccttcagatatgattatcacctcttcttcctctgccaagtaacttccttgatcttaagttggtcatagaaaaacatctcccttattttaacagctttgatttaaaaaaatactttaggtatttgaaatcttttagtttaatatactttatagaatctcttcatttccggaattcttttataacaaatacaatgcgttcataatctttggttcagctaacattrataaattattgtcactacaaaataaaaatgactctctttggaatttaactattatgagggtcacggtcctaaaatatatatgctacacaaactacagattatccaacttttgtgtccttcagttcacactcgagaataaagttgaacactctttaaaggatcacatcctaactctccaaccatgaaaattgctcttcagtttagtcccatgagacactgggaaatgttatgcaaattaaatacacctcattgagtt

SEQ ID NO: 864431 - DNA, 666 bp, Homo sapiens
attgctgtcttttgtttgtctgtgtcctgcccccagaggtggagcctacagaggcaggcaggcctccttgacttgtggtgggctccacccagttcaaacttcctggccactttgtttacctactcaaggctgagcaatggtgggctcccctcccctatcctagcttccaccttgcagtttgatctcagactgctgtgctagcaatgagcgaggctccatgggcgtaggaccctccgagccatgtgtgggatataatctcctggtgtgccgtttgataagcctgttggaaaagcacagtattagggtgggagtgacctgattttccaggtgccatctgtcaccactttctttgactaggaaaaggaattccctgactccttgtgcttcccaggtgaggtgatgcctcgccctgcttcggctcacacacggtgcrctgcacccattgtcctgtacccactgtccggcactctgcagtgagatgaacccggtacctcagttggaaatgcagaaatcacctgtcttctgtgtcgctcacactgggagctgtagactggagctgttcctattcagccatcttggctccacaccctctataataggttttaaatatccaacttatgactctaacgttgggtctatcaacaataaatggattttaccttatat

SEQ ID NO: 864432 - DNA, 666 bp, Homo sapiens
attgctgtcttttgtttgtctgtgtcctgcccccagaggtggagcctacagaggcaggcaggcctccttgacttgtggtgggctccacccagttcaaacttcctggccactttgtttacctactcaaggctgagcaatggtgggctcccctcccctatcctagcttccaccttgcagtttgatctcagactgctgtgctagcaatgagcgaggctccatgggcgtaggaccctccgagccatgtgtgggatataatctcctggtgtgccgtttgataagcctgttggaaaagcacagtattagggtgggagtgacctgattttccaggtgccatctgtcaccactttctttgactaggaaaaggaattccctgactccttgtgcttcccaggtgaggtgatgcctcgccctgcttcggctcacacacggtgcactgcacccattgtcctgtacccactgtccrgcactctgcagtgagatgaacccggtacctcagttggaaatgcagaaatcacctgtcttctgtgtcgctcacactgggagctgtagactggagctgttcctattcagccatcttggctccacaccctctataataggttttaaatatccaacttatgactctaacgttgggtctatcaacaataaatggattttaccttatat

SEQ ID NO: 864433 - DNA, 661 bp, Homo sapiens
cagagttggtgtattttggcaaagctccagattcgttgataacgggtgtcaccttggtacttcatccccagtgttcgtctcaaaatatgtttcctcctgaatttaaatagctcatatatgcaaggtggctatatttatgctatttttaagaatagcataatatttaaaggcataaaactaaacaatttggagttarcctgattaatatgaaaaagaaggtcaaatgaaaactggcatcaaattgcaatataaggtaatgtattcacattcctaacatataaagaacattttttaaatgatgtacaaaataattagaagttaggagagatcatgaacaagttgtttataaaataaattcggataggcaataaaaatacaagaagtgttagccttgttagtaaccaggaaaaggctgattaaacaatgaaaatcaattgtttccttaagagagcccaaagatgaaaacaaaagaggagcccagcatcagaagcgttggggagcacatgttcacttcagcactgctggtctcgttgaccagggagcacccccagagagtgagttgtcagcacttatttcaagctctaaattaatgagtattctcctgatccgccaaccaaacaagattacaaagtgtatataaagcatttttatgtcacagtgt

SEQ ID NO: 864434 - DNA, 661 bp, Homo sapiens
cagagttggtgtattttggcaaagctccagattcgttgataacgggtgtcaccttggtacttcatccccagtgttcgtctcaaaatatgtttcctcctgaatttaaatagctcatatatgcaaggtggctatatttatgctatttttaagaatagcataatatttaaaggcataaaactaaacaatttggagttaacctgattaatatgaaaawgaaggtcaaatgaaaactggcatcaaattgcaatataaggtaatgtattcacattcctaacatataaagaacattttttaaatgatgtacaaaataattagaagttaggagagatcatgaacaagttgtttataaaataaattcggataggcaataaaaatacaagaagtgttagccttgttagtaaccaggaaaaggctgattaaacaatgaaaatcaattgtttccttaagagagcccaaagatgaaaacaaaagaggagcccagcatcagaagcgttggggagcacatgttcacttcagcactgctggtctcgttgaccagggagcacccccagagagtgagttgtcagcacttatttcaagctctaaattaatgagtattctcctgatccgccaaccaaacaagattacaaagtgtatataaagcatttttatgtcacagtgt

SEQ ID NO: 864435 - DNA, 614 bp, Homo sapiens
agtatatagaagaacataaccagacgataaagccaaaaaacaacagtacgagaatgtcgtaatgcaatcacaagtattaacagcagaatagacctagaagaggaaagaatctcagagcttgaagactgactttctgaaataagatagttagacaacaatacagaagaaaggatgaaaaggaatgaacaaaacctccaagaaatatgggataatgtaaagagattgaaaactgtaattcatttgtgcccctgaaagagactgtgcccctgaaagagagttcaggccctgaataactttttaattttctcccttgatgatctgtctaatattgtcagtgggtgttaaagtctcccactgttattgttgggagtctaagtcttwttgaaagtctcaaaacagagatatagatcaatggaacagaacagagccctcagaaataatgccgcatatctacaactatctgatctttgacaaacctgacaaaaacaagaaatggggaaaggattccctatttaataaatggtgctgggaaaactggctagccatatgtagaaagctgaaactggatcccttccttaaaccttacacaaaaattaattcaacatggattaaag

SEQ ID NO: 864436 - DNA, 603 bp, Homo sapiens
caacacacgttcaaagataaaatccttaaaaatttcaagatggccactacagaacactaaaggtcaatcatttggctcttctgagcatggggcctaagggaactgcagaggttactggtccaccaagccagcctagacccaaggggcggtttacagaaagggtgtcccctacaatgattctgaaatctatgtgaaggtattttgggttgttacaataatttaagagtgctgttggcatttagaaggctagggatattatgcatcctggaaagtgcagaagaaaatctcctacaatgaaaacttacagtattcccccaaagactttcaaatattcccagtcatatagatgaaaaccagctcataagtgtctgagtctagaacataactgtttaacatatgaattctaagtctttttgcagttttaatatattctgagttttcaaggaaagcaaytgctaagtaaattgagaagaggttatactttgtgtcgttcagaatttcattaagagttgtttagcatttgaggaaattctctctccagtgacagagattctcctgttgtttgagtcaccagatttcttggcagtcacaattacattgatc

SEQ ID NO: 864437 - DNA, 744 bp, Homo sapiens
tcattctttcttactctgtgtatatatacgtgtgtgtgtgtgtatgtacatacacccatataaatacacatacaaacagtagttttgaaccatttgagtataagttataccatggcttgtcccctaaacatttcaatgtgcattttctaaaaatagggatagtctcttatataaccacactagggttaacaacctcagtaaattcaccactgtcacactgacacagtaatttctctggttgattgtacatatcccagttttgcaattcacccaatagtgatccttagaggytttccccctcctttccttttgctttcatgtctctttagcctttttttatctggacaatttccacctcctttctttttttctttacccaactgatgtttttgaaggtatctcatttctttttatttaaattaaaaggttatttcctcctggtctgagataggttgtgcattctaggccaaaacattgtctaccttagagagacaattgatcctgttacagctacattttaacataagatagtgtttcagaggaaggtggggaggtaaaaggccctcttttactgtaccaagccacactgcaggggcttcttcagaaatcttcttcaagttcctatgcatcaagttctactcggccccacctcacccacttcatcccccccagtcccccacctcagcctcatctctcactggggctctttgttccctgagctccttgccttaaccacgactagag

SEQ ID NO: 864438 - DNA, 628 bp, Homo sapiens
actggggctctttgttccctgagctccttgccttaaccacgactagagagtgtgcttcacaccctgggggcttccacacctttgcccccattgcttcctgtgctggagggacttccctcctgggatccactgccctattcccaaggagaggctgcttcttattccaagtcgtcctgcatggccacccctccacagaacctctcctctttgcctcagtccagggtaaccaccatgctttctgtccattttattacctttctcaattcctgtgtttatcttcccctactagaccatacgttttctagggataaggaacatgtgcaatttatctgtaattaattcatctgtaattaatttatttgtaattttggcacatagaataaatattcaacaaatgaatgtattaattaataaataaattagtagttatgtgtcggtgacaaacktcatcatttggctcagggcaggtttccattatttaatgacaggagagggtgattggatcaattgcccttgattgatcattatggccttagagaaggaatcaccaataaatagtcaattcagccatatacctaaagttggttagggttataattactgctcccaagtaatttcacggtttcag

SEQ ID NO: 864439 - DNA, 559 bp, Homo sapiens
gtgaaaatgatttgttgtatgagattcttaaaagttaatttctttattgagaagcttctagaaagaggaagtaaagattcctagatgtttgctggtaaagaagcataagtgaacagcagacacaactttttttctacctttatccagggaaattatacaagtggctytcttgatggaaagaagagaaccagactaaaaagggctatgcttttggtgatgaagatgataatttttcatgctatgtttttactggtaaataattcacataccaaaatattcagttatctttcactcctatcctttctttcaaagccattagcaattctgttggtaccaccataaaaaaatttattagactgctttatctcctgaaagtcccatccatcaacatttccatttgacttaatgaccggaagattggaaaatgctgctctagtctgagtagtttatagaacttcctctttttaaactttatcacatggcctgttgtcatgtttttattatgtccctaattaccattaggtcttctggtcatttctcatcttcaaatgtctgccat

SEQ ID NO: 864440 - DNA, 606 bp, Homo sapiens
gtgttttccccaaatgcacagcaacaaaaggctgagtgattttgaaactcagccccctcagtttgtgagagcatcatttggtacattctttcagaactaattctagttctttctctcattagacaagctttgtttgaaaaaaatattattttctatattaaaattacttgattattgtttcagtagaacaaaatatttgtttcactgcttgctggtgtgagactgtacttyggactcaggggagattttgtttctagactgctttttttcctgcttcctatttagccatatgcctagcttttgtgaaaaatgcatcactcagcctagattatttattgctctaccaccagtgttgactccatcagataacctggtcttcttggtcaattcctatgtcctggttcatgtttaatctgtatccacaggacattgggaagctagtgaaagtccgagtctgttggtacagtttatctggggactagaaagcaagagctgtcagggttgatgggtgagagagcactttctcggtatttctatcctttccagagaaaaaggataggtcactaggatcatgcttacaaatcaccaacaatgcatgacttcctc

SEQ ID NO: 864441 - DNA, 606 bp, Homo sapiens
gtgttttccccaaatgcacagcaacaaaaggctgagtgattttgaaactcagccccctcagtttgtgagagcatcatttggtacattctttcagaactaattctagttctttctctcattagacaagctttgtttgaaaaaaatattattttctatattaaaattacttgattattgtttcagtagaacaaaatatttgtttcactgcttgctggtgtgagactgtacttcggactcaggggagattttgtttctagactgctttttttcctgcttcctatttagccatatgcctagcttttgtgaaaaatgcatcactcagcctagattatttattgctctaccaccagtgttgwctccatcagataacctggtcttcttggtcaattcctatgtcctggttcatgtttaatctgtatccacaggacattgggaagctagtgaaagtccgagtctgttggtacagtttatctggggactagaaagcaagagctgtcagggttgatgggtgagagagcactttctcggtatttctatcctttccagagaaaaaggataggtcactaggatcatgcttacaaatcaccaacaatgcatgacttcctc

SEQ ID NO: 864442 - DNA, 616 bp, Homo sapiens
agtacatctcagattttgatgaattgtgttactttaagaatttgtctattttatgtaaaattttaccaaatcaggagcatgaagttctttataatatcattttattatattttaaggtctgtagggcctgataatcaatatcaggagtaaaaagtaagatactctgtagaagttatttctattatttgtaattttgcattctctcattgagtcataatcagcttaaccagtggtttatatcaatttattggactctacaaataattgattttgctcttcataattataygttttttcttctttcttcagttgcattttgaactatctttgccatttcctttcttctactatctttgacttttatgcacagtgttcttctattttgtttttctttgttttggtagctttctgagctataaattagatcactggtggcctttcctcttcccaatttttgcatgtaaaatcaaacatttatctacatccaccaagttttgatactcctattttcattataatttgcttcaaaacattttctaatttctgatgtaatgttgttttacctgtgaattatttaaaccttctgtgatttatttttcaaaacatgggaattttc

SEQ ID NO: 864443 - DNA, 616 bp, Homo sapiens
agtacatctcagattttgatgaattgtgttactttaagaatttgtctattttatgtaaaattttaccaaatcaggagcatgaagttctttataatatcattttattatattttaaggtctgtagggcctgataatcaatatcaggagtaaaaagtaagatactctgtagaagttatttctattatttgtaattttgcattctctcattgagtcataatcagcttaaccagtggtttatatcaatttattggactctacaaataattgattttgctcttcataattatacgttttttcttctttcttcagttgcattttgaactatctttgycatttcctttcttctactatctttgacttttatgcacagtgttcttctattttgtttttctttgttttggtagctttctgagctataaattagatcactggtggcctttcctcttcccaatttttgcatgtaaaatcaaacatttatctacatccaccaagttttgatactcctattttcattataatttgcttcaaaacattttctaatttctgatgtaatgttgttttacctgtgaattatttaaaccttctgtgatttatttttcaaaacatgggaattttc

SEQ ID NO: 864444 - DNA, 603 bp, Homo sapiens
ccaaagtagcttatagattcaatgctattcccatcaaactaccattgactttcttcacagaattagaaaacactactttaaatttcatatggaaccaaaaaagatctcatatagccaagacaaacctaagcaaaaagagcaaaactggaggcatcacactacctaaattcaaactatactacaaggctacagtagccaaaacagcatagtactggtaccaaaacagatgtatagaccaatggaacagaacagagacctagaaataasaccacacgtctacaaccatctgatctttgaccaacctgaaaaatacaagcaatgaggagaggattccctatttaataaatggtgctggggaaactggctagccatatgcacaaaactgaaactgtaccccttccttacaacttatacaaaaattaactcaagatggattaaagacttacatgtaaaacccaaaaccataaaaaccctcaaagaaaacttaggcaataggaacataggtacgggcaaagacttcattacaaaaacaccaaaaacaattgcagcaaaagccaaaattgacaaatgagatctaattaaactaaagaacttcttcacagc

SEQ ID NO: 864445 - DNA, 572 bp, Homo sapiens
ccatttccatcacctttctcaaatttaaaatcattatgggcactgttttagtcatttctgccattcttttccccaatattttgtccttctaaaatattctatgctttatccccactacccgtgttcttccttcagcaggcttttccctcttacccacaccttgttcttcctcagggccatttccactctgcctaccacagtgttgctgggtttgctcctctccactaaggtgcatgctgtcttgcacactgcatggccctttctcaccacrcagtgagttaaacaaatgtgcaaagcacccagtacttgcaggcctttctcaggattttcctgagttcattctttctacatactaactctctttataagaacttgtgattgtcacaacctgtttggcagctacttcatggggtaaactaaatggcagttatacatttcttctgtaatctgccattttgtacgcatgcttttgggaagggttgtattttttaaaacactcccgctggcaggaaactgataaccaacagtttctacacattactaccacaattgtacttcccaatattttgagt

SEQ ID NO: 864446 - DNA, 606 bp, Homo sapiens
gaaaaccctatgcttttagcagtggcttctggagaagatatttctggaggggaagacaagacctgattactggcctaagtaacatgcagtgttgttggaaaaatcaccaaagcttgagtaattcaagaacaatacaaggcagtatgaccagtgtcactattcatcttatgctaagctaaaggtgacttcaaagaaggaatgtcatgtcaatgtagactcaatgtctagaaaagtcttcatgaaataacacatatttaacctagctttggtratgggtagggctgggagagacataggaaattattatttcttgagtgcaaactgtgctggtcactgaagttactcacttaattcttgcaaaaaatcagtattaccatatccactttgaatttgaagaaaacaaggcaaccaagggagacaggatcaaatttactgagattggctctaggcactgccattctattaaccatgtgactatatgcaagaccctgaagctttctttgccttggtttccctctttataaagtagagatcataacagtgcctaccttgtggctttgttaaaactttcattgagttaatgcacataacgtggcacatattaaa

SEQ ID NO: 864447 - DNA, 588 bp, Homo sapiens
ctggagtgttggacttcagcttgcttgctttctttcatctatagaaagatgctcattctggactacagagaaggcatttaggcagagaggatgactatttgaagtggaatttgtgttgcatcacaatccatgcctgttttctattggggtgacttggtgtatacattttttaatattatgaarccaccagtgttaataaaaaacagctgaatacatattggcatccttggagatcaggcatgggaatgctgagcggggctggtagacagtagaactttaagaaatctctttcagagatttttgaagacatttacttatcagttgtccagatggcacttgaaatgattaataataaactttacaaggaggtaaaaccatgactggtggaaaacacattctgagtgtatatgtgataaatacataatatgagaaatacggaaagaagtaaaattaaagattccatatacagtcatatttttaggttgattattcagagatttctttcttttctttctttttttttttggtgggatgccttctgataacctcatatctcacaatctgacacctgaaagtaggactctttaa

SEQ ID NO: 864448 - DNA, 627 bp, Homo sapiens
ccaagctcttggagctctggataacagataatctctaccaggagttccatgtacttctgaatctttactgtgaattttgtgtatgcaaacatttctctggagagagggtctatggcaggaatcagaaatgcatgggcccacagatcatgcaaatgaatgacatagtcaggtggagggcaactgggactggtgggaagtggggccaactggacaccatatattccactgtaaggaaaagttggttttcagcatcaactaattgttaccagaagtagtgccgatccaggactgtcagatctttgaaattttctaaagaagccagttttcttcattttaggtaaaatattttaattttaaatgttggcaactctttcaaaggttttaaagatgtagggcagacaaagcacagcattactttggattgagtgcaaatcatggaccacacatttacaaacacagatttataactcataagattctcaraaagaatctttggaaaacagggaaatagcaacttagggaatgacagttacagctccaggacacatttttttttcctcctcctcctttccccattgaattagatgatgatttttatacatcacctacacctggagttatatttag

SEQ ID NO: 864449 - DNA, 620 bp, Homo sapiens
ttgtttccttctgtgctagagaaggagctgggaatgtcaagtgagaattgcaacattgctctcgacagaatatcacgatggcccctgagattcccacctgtctagtcccctcctcttcagtgtggtcaaaatatgtcaatatgatgggatgtcacttttgtgattaggttacatgataaagcaaaagtgaatggattttrcagctgaaattaaggtcctaatcagttgattttgagttaatcaaaagagaggtaatcctgggtgggtctgagttaatcaggtgaaagcttttaaaaagagggggtgggtctttcctgaggtgacagatactctcctcatggccatgacaaagcaagcagctatattgtgagctgcctatgaagaaggatgaccctctggagctgagggcctcagttttacaactgcaaggaactgaatattgctaacactttgattgagtttggaagaggaccctgagctccagatgagaacacaggctggctgacatcttgattgtagacttgcaaggccgtgagaagaggattcagctatgatatgctcatctgatccgcagaaaccatgagataataaaagtgcattgttttaaatcacttaagttt

SEQ ID NO: 864450 - DNA, 620 bp, Homo sapiens
ttgtttccttctgtgctagagaaggagctgggaatgtcaagtgagaattgcaacattgctctcgacagaatatcacgatggcccctgagattcccacctgtctagtcccctcctcttcagtgtggtcaaaatatgtcaatatgatgggatgtcacttttgtgattaggttacatgataaagcaaaagtgaatggattttgcagctgaaattaaggtcctaatcagttgattttgagttaatcaaaagagaggtaatcctgggtgggtctgagttaatcaggtgaaakcttttaaaaagagggggtgggtctttcctgaggtgacagatactctcctcatggccatgacaaagcaagcagctatattgtgagctgcctatgaagaaggatgaccctctggagctgagggcctcagttttacaactgcaaggaactgaatattgctaacactttgattgagtttggaagaggaccctgagctccagatgagaacacaggctggctgacatcttgattgtagacttgcaaggccgtgagaagaggattcagctatgatatgctcatctgatccgcagaaaccatgagataataaaagtgcattgttttaaatcacttaagttt

SEQ ID NO: 864451 - DNA, 620 bp, Homo sapiens
ttgtttccttctgtgctagagaaggagctgggaatgtcaagtgagaattgcaacattgctctcgacagaatatcacgatggcccctgagattcccacctgtctagtcccctcctcttcagtgtggtcaaaatatgtcaatatgatgggatgtcacttttgtgattaggttacatgataaagcaaaagtgaatggattttgcagctgaaattaaggtcctaatcagttgattttgagttaatcaaaagagaggtaatcctgggtgggtctgagttaatcaggtgaaagcttttaaaaagagggggtgggtctttcctgaggtgacagatactctcctcatrgccatgacaaagcaagcagctatattgtgagctgcctatgaagaaggatgaccctctggagctgagggcctcagttttacaactgcaaggaactgaatattgctaacactttgattgagtttggaagaggaccctgagctccagatgagaacacaggctggctgacatcttgattgtagacttgcaaggccgtgagaagaggattcagctatgatatgctcatctgatccgcagaaaccatgagataataaaagtgcattgttttaaatcacttaagttt

SEQ ID NO: 864452 - DNA, 620 bp, Homo sapiens
ttgtttccttctgtgctagagaaggagctgggaatgtcaagtgagaattgcaacattgctctcgacagaatatcacgatggcccctgagattcccacctgtctagtcccctcctcttcagtgtggtcaaaatatgtcaatatgatgggatgtcacttttgtgattaggttacatgataaagcaaaagtgaatggattttgcagctgaaattaaggtcctaatcagttgattttgagttaatcaaaagagaggtaatcctgggtgggtctgagttaatcaggtgaaagcttttaaaaagagggggtgggtctttcctgaggtgacagatactctcctcatggccatgacaaagcaagcagctataytgtgagctgcctatgaagaaggatgaccctctggagctgagggcctcagttttacaactgcaaggaactgaatattgctaacactttgattgagtttggaagaggaccctgagctccagatgagaacacaggctggctgacatcttgattgtagacttgcaaggccgtgagaagaggattcagctatgatatgctcatctgatccgcagaaaccatgagataataaaagtgcattgttttaaatcacttaagttt

SEQ ID NO: 864453 - DNA, 599 bp, Homo sapiens
tttccctgaatttctgtatgatgccaagtgaaaattatcactcacggggactctctgccattctaaaaccaagatctcagttttggtttttggagacccttccccaacctggagtgtgtcagtaatcacaatttacagcatttctgttcctcttaagcaaatattacaggaatgtagtctgctcagaggaggctgtgtaaacggtttcaagttcttattgttctccatgatttatagtttaggtacatatttatcaaaactactgccctgtgatcagaaaatgtgttaatgtatatttttatagaaagcagtcaaaagtaaatatacrttaaatgaatgaattaatgtttgatgtgcatgactactttctgacatgtcacacattcttgattttttttttggtctgtccttcccactagaacataagttctatgagggcaaaaatttatttttattcagtgctttttctcagaagaggaatatggtcggcatttaataaatatttgttaaatgaatggatgactccggggagcgagtgagggaacaaatggtggcagcaatgggaaacactttctgtgtatttctgggtatttctgaat

SEQ ID NO: 864454 - DNA, 637 bp, Homo sapiens
gtgtggtggcgcatgcttgtcatcccagctactctggaggctgaggcaggagaatggcttgaaccccaggaggcagaaattgcagtgagctgagatcgtgccactgcactccagcctggtttccaggcacttccacttccagaaatgtttgtcttcaagttctctctctctctctctctctctctctctstgtgtgtgtgtgtgtgtgtgtgtgtgtgaatttatcatccaatttgtgtgaaacagaattacaagccacattcaatgacttcctgacggccaggatgtttggctgattctctgtgcccttcccccatttcttggtatgtttttgatagatgtatgatttggccgattatatctcttacttcttggactaatagactcattatatctctctgggtacttgaagaacgtctgtttcggtgccacagtctaattaaaggctggtacccagctgcaggagtttacagttctttaacagctttccttgtgttgtcacatggagttagctctctctgaagacaggatgagtttgtagcagttaaagctcctgaaggagattaccgtaattaccagtgatcaatgtttaatacctctctttccaaccccaccttcgccccttcacaagacaaga

SEQ ID NO: 864455 - DNA, 693 bp, Homo sapiens
tagtcactgtcatttctgataggactttggggtccttcctgcaaagcctgaccaatttcctcccttgccctacagccttctttctttcttatgatgttttatgcatttgttttccctgcatgctcttgcctcttgtatccttccttctggtctgttgctgcatccctgctcttgaggcartggggcatattgcaaggaatgtgggctttgaaatctgacagactctagatggaaacctgaaagtgtcacgtattatctatgtgacctttattagtgctatattagttgtgtgctcttctcaccgcccccccttctctgcccaatatgcagaaatgtttatttccaccaggagagcctattttattagtgggaagattgacttccccacagaccacttttctcctcaaacccctcgaaggctttcaccccaggaaacaaaacagcccctttctgtagttccttcttactgatacactttaaagtctctctgctgaatcttccaggagggatcaaaagaactctgggctcctagagcttcagaacatttcaagtctgctcaggagcctttaacgggttacttcctacaacacaggaattacatagacagggcaggatgggcttgttaagcaggacagagggaaatgtccagaatattagtacaaagagcctttgcttggacatgaggtgaccggg

SEQ ID NO: 864456 - DNA, 622 bp, Homo sapiens
ttctgcttttgtttcctccctacttctctccctaactcacagctctagggatcctgactcagcatcttccagtgcacttatggctgttcgaagcctgtgtttggtgattagcactccctagagtttcctaacttctgttagtccctttgttatctggagaaytatttgagacggtttagagaatggaaaacagatatgtctgcattgccaagagcactcttggcatcctcatttttggatgggactgtctccatctttgttctcttttggggaggagctgattgggatgggggaaatgtctccttctagtctgaaagggcaagtgtctctcgattgtttctgaggataagcacattcatcaggagctgggggtttgaatgaatcttctgaggataagcatgttcatgaggaactaggggtttgaacaaatcctcctgagtcatgtttctctcagttatgtgagcacaaagaaagagattcacctttctttgtctcccttttgtcagcagaattctatttttaggccactgtcatataattcagctttccttgcacacaagtcctggcattccttttaggaatttctagagccaagaatggtgtctaagttgagggcagagtg

SEQ ID NO: 864457 - DNA, 570 bp, Homo sapiens
gtttttagttgaactgagtctgtaggctacagggagagctgaccattttaatcaccaaaggcctttgccattgtgagaagagaaggagagacagacagttctcctctcttgcttaacaagaacaagcagggactaaatcctgttaggcttgctaagacttcagtgatttgcaaaagaaagtgcatttcatgtgatcaggctggttgctcccaggcacttaattctggggtttcaccaggaacagccagaggccccaaaacaaacagccctcaaggatttgtgaacaggaagcataccttcccttgttgmccttaacttatatgttgagtaaacaagtgcttgttctgtataccctggtgtatctaaggcagcttctaatttcactgcaattggactgtgtccaattgtccctttggttctggctcttaaaactgccaagaattggaggttgagagagacctgacttaactagagaaactgacttggaacaggctgtgggtggatatgctctcaggttgtgggtgagttctctgaccttcagggggaattaaaaggggggatgcatgacca

SEQ ID NO: 864458 - DNA, 594 bp, Homo sapiens
gataaaaagggcatggtgttcttgatgaggcagacaaaacctcacggcatggctcatcccctcttttaattatccagttcatttagtcagctgtgacccaggactttgggaggtcacctgcagtatgaaaggaaggcatagtggctgctgacccacggcttggctcggggataggaaatggccacccaggccaacgtgtccttttacaaatggaagctggataaaagggctgagtgtgatgtgtgggtctgggaagycctcgtgatgccctgagcttccttgaacctcatcataaaaaagtaattgtatctgagaaattggccagctagccagcttctctgatggctcattcactggaacagagagagctgaggctctgcaactgaaagttacaggtaatggctactagcatgccgcccttgggaactcataattaacatcagtgatggtgtcagacccctgggtgcaccccacctttttccacacttgctgaccatttaatacacatggggtaacctttggggcatcctgccattatgtctgcacagcctctgggacatcatctttaggcagggggaaaaggtcaggaaaact

SEQ ID NO: 864459 - DNA, 594 bp, Homo sapiens
gataaaaagggcatggtgttcttgatgaggcagacaaaacctcacggcatggctcatcccctcttttaattatccagttcatttagtcagctgtgacccaggactttgggaggtcacctgcagtatgaaaggaaggcatagtggctgctgacccacggcttggctcggggataggaaatggccacccaggccaacgtgtccttttacaaatggaagctggataaaagggctgagtgtgatgtgtgggtctgggaagtcctcgtgatgccctgagcttccttgaacctcatcataaaaaagtaattgtatctgagaaattggccagctagccagcttctctgatggctcattcactggarcagagagagctgaggctctgcaactgaaagttacaggtaatggctactagcatgccgcccttgggaactcataattaacatcagtgatggtgtcagacccctgggtgcaccccacctttttccacacttgctgaccatttaatacacatggggtaacctttggggcatcctgccattatgtctgcacagcctctgggacatcatctttaggcagggggaaaaggtcaggaaaact

SEQ ID NO: 864460 - DNA, 638 bp, Homo sapiens
ggggggatttttgaccccaaaaaacttaggtaacagaagcaaaaatagacgaatgagattgcatcaatctaaaaagttcctgcacagcaaatgaatcaatcagtagagtgaagagacaacctatggaatgggagaactatttgcaagcaataatctgataaggagttaatatccacaatatataggtaactcaaacgactcactagcaagaaaaaataaataaaataaaaataagcaaaggacccaaaaatacatttctcaaaggaagacaaacaaatggccaacagattaatgaaaagatgttcaatatcactatttatcaggaaaatgtaagaatggctattatccaaaagacaaaatctaacaagygttgatgaggatgtgagaaaaaataatccttgtttaatattgattggaatgtcaagtggtacagccattatggaaaatagtatggagattcctcaaaaaataaaaagtagaaatactttctgatccactgtattagtctgtttttgcactgctgtaaagaactacctgagactgagtaatttacaaggagaagaggtttaattaactcacagttctacatggctggggaggcctcagtaaacttacaatcatggcagaaggcaaagggg

SEQ ID NO: 864461 - DNA, 645 bp, Homo sapiens
ctttttgttaggtttgagatcctttcactcctaagggctcaacccacagactgtgccacccccctgagacccacccacaatgaacatccccctagtatttttcagtcaagaaagaaaaagaagatgcccagtatgagtgaatagatgtttgcagaccaacaaattcagctttttttagacaagccaggaraacctgagctacctatcagttcagttagaatcatgcagacacatagtagtttcttatccaaagttgttcgggacccttactaggaattaagatgcagatgcccccacaactgctctatgcattaacattgcatgttctactgcagggtgaggtcacctcctgggcctcataaccatgaatagcacttggacagtcacagagcctttgtccatcaaaaattatcacagcaatcctgggatttatgtaatatttgccttccctcacaggtaaggcaactgagactaaagaaaatcaagtgactttcctactgacagagttcatcattggtaatgccaaatgctctgtattgaaccccaccccaaagttcttatgcagaaatcttaaacctgagtacctcagaatgcaccgtatttggagaaagactctttacaagacttaaaatgaggtcactgggg

SEQ ID NO: 864462 - DNA, 591 bp, Homo sapiens
ctggtcctgcactatctctgtctctactcacaccaacaggaacagagtgtcctaccaaggtctcctaaaagctgcagagctaaaacattctccttcccaggccctcccgaataaggacaaaggctaagttgtctcctaccaatggtggctgagtatgcaaacgagacagtcatcaggaggcctggacagagaacactcagctacctttagcrccataattctgattccaatatagatggaataaataatagtaatcagaacaacaatgatactggcaaagagcttcaagcttcaaggcttacaaagcacttttacttaccttttctcacttaatcaaattcgcacactctgtatagcagatattgttatggtgcccaattaatagatgagaaaactgaagctcagagagaatcagcattagtaataaaggctcaaaagctaataaaaaggagctggggttacaagcagattgatgtgggctgggcacggtggctcacacctctaatcccagcactctgggaggccaaggcgggtggatcacttgaggtcaggagttagagaccagcctgtataacatggtgaaaccccatc

SEQ ID NO: 864463 - DNA, 666 bp, Homo sapiens
gatggctcacattataatggagaaatattagggggatatttcaatagccacccagaggagaaacagcagctataagaatgccacagactgtttccaaggagaataaaagtgacataaaaaagggggagggggctgaaaagggggtaaaaatgcttcagggggaaaaaagtccactccaagaatatacgcgaatgcacaagctgtttgctagcttggttctctagagaaggggagtaacaatccccaatatgtgaactccacaattacagcattattaatttatacagcaccagagaccacacatgagacctcatggtaattaagttacagataaagccaggttacttttcctctgaatataaacaactgtgttctgtttaacatacactcaaaagaaaaactggtggattttaaactaaagaacagtgtctggtaaacctataytcaatgaagatctgtcagtaatataatgtttaaaaaaaaaaaaaaaaaaagaactgcccagcaatagattcaggagagaagtagaatgatgaagatttagtcagtaagctactctcttagagagtaggcaaattggaggcaggaggtttaatgagtctctcctataaggcctgaattagaaatgtgcaaatgttcaagcaaatgctggacacggggataaaa

SEQ ID NO: 864464 - DNA, 633 bp, Homo sapiens
agcaagtcactaggttcaaccccactctaagggaagcgattacacaaagacatgaatacaaggagacagagatcactgggagccattacaggagctgcctaccaaagacagaaagagattagtgaatatttctaaatatttatattttttctctcaccagtgagtttgcaagcctcttgaaggtctaccacaggtaaggtgaccgtataatttatcatccaaaccagaactcttttgagatcatgaaaagggtggcggcgggggtactacaattaactacagcagggcaacaaagataaacagaactgtcctaggcaaacccagaagtatggtcacctgagycaaagatcatattgctgggtgtcttcctcaaccattggcacaatgccaacatataaggagtaattaatatatcttgcttatggaatggcaaaatgattccaagacacacaaaggtactcgggccactcgttggctgagtacagtcgttctcaataatttttcatcagagtctaattagggagggcaaaaacccctcttaatccattgaatcctacttttcaatcaaaaagcaaatccctaacaacatggagacatcactctaggaagtctcttaaatcccaacagagggat

SEQ ID NO: 864465 - DNA, 671 bp, Homo sapiens
ggcccttttcttaaggacctaactctccagttagggacacaagcatgaaaacaaaaatctgtaacatgtctggtaaattccctaacagaagtaaatgtagagtgcagaggcagcatggagaataggtagttgactccatcaaatacggtgggagggggcaaagtttgcatttaaaggacagctggagtctacctggtcaagtgagagggggagaagggtgtttaagtattcattttgaaatatgggtcaaagatgggaggatctaaataaaggaatttttactgtattcataaactgtttgtaacatgccagtggaatctattgaatcattgaagcattgctagagaataactccaatgtttccatcatagaagacaaatatttaaggcgatagatatcccagttacactgatttgatctttacaaactacatgaatgcattaaatgatcacatgtaaccccaaactatgtgcatctattatgtatcaataaaaataaaaacagaaaaaacaagtgactagactgagatcygtaaaaaattatcctttcccatagttcatatctactggacaatttctgcctggctgtatcaccaagatactaccttctaacatcatcaaggccctttgggggacaagataaaagacttgtccccattccagaaacagtct

SEQ ID NO: 864466 - DNA, 745 bp, Homo sapiens
gatggtggctcacacctgtaatcctagcactttgggacgccaaggcgggtggatcacatgaacccagtgagaccagcatggacaatataatgagtccttacaaaaaataaataattaactgggtgcggtggtgtatgcctgtcaccccaactactcaggaggctgaggtggatgtatctcttgagcctgggaattcaagaccaccctgggcaacatgacaaaaagccatctctacaaaaaaatacaaaaagtagctgggtgtggtggcacgcacctgagttactcaggaggtcgaggcaggaggattgcttgagsctgcgaggttgaggctgcagtgaggcatgattgtaccaccgcacttcagcctgggagagagagcaagacccttcctctctaaaacaacaacaacaacaacaaaaagaacagcactgaatccaaatgaagccatttgataccattttgtatccaagaatgcccttcatttctctttatttatcacaacacttggcaatatttcatcagctggtggccagccagcatccctcttcttgcctcctcctcctccttcttcctaagtagaggcctttccattccttcttatcacttcctgcaattggaagagtaggatgtgaaatttcaacctctgaacatggctgttctgacaaccatggccataatttggttttatccatttggcttcatcccactcattcttccccatccttacaataatcctgagctctct

SEQ ID NO: 864467 - DNA, 541 bp, Homo sapiens
gaatctaagtaatcatcaataatgtgatacactattttatgtatctctaagaaagaaaaaatgcccccatttaaatcttgtgtaccattgactgtaagatatatcccaatttcagagatgttaaaatgtgggcagaaatgtgactcttaaaattgagaaactgcagcttgrgctccactatggagtcactcactgagagcagacgtgaaataacaaaacagccatacattagggttgctgaagataccataggtaagcaaggagacaaatagggacagggagatatttcttttttaattttttttatttcaatacttcttggcatacgggtgatttttggttacatggataagttctttagtggtgatttctgagatttagtgcacccatcacctgagcagtatactctgtacccaatgtgtagtgtagtcttttatccctcactcccctcccaaccttccctgcccccgtgagtccccagagtccattatatcatacttatgcctttgcatcctcatagcttagctcccacttataagtg

SEQ ID NO: 864468 - DNA, 638 bp, Homo sapiens
gaagagatttacttgatggcccctgggctagacattgtgtcatcttttctttttattaagaacttgttatctaggttttcaaaagtgtacttataatacactttactaaatagtttgtagagttgcacaatgtatgcctgtataaaaaccctgttaaaaatttcaaagtttgcaaactggaagaataagtgagtggctcatttaatttattttaatcagttatatcaggaaaatgcaattatattgaagggaaccctttgcagaagcagagagcaattaggttttgcgtgcagagtacttttttttttaaagcccatgtctgcagcattaaagaaaagcataatgtcaatcatcttgatttcaaattcctttagtgcagtccttaaacagtgcaaaaattatagaaagctaaagctatttttstcaagattgtgtgcagctgttttctgcaattcttgaacattcttgatataaatgtgtttccaaaggtacccgtttttaaaagtaaaaattactgcagtaatgctcttaaccttattttaaatagacattttcacatcatctcttaaagagaaaaacttaccaaagaggccccttgagtgagctaaagtttcactaaatttaagtaatgggatttc

SEQ ID NO: 864469 - DNA, 611 bp, Homo sapiens
aaaaaaaaagaatagtcttatttcttttttcctagcctacatgaattttatgtctttttgcttgctttattgctctggctaagattttgaatctgatgttgaataaaagggtttagtgtgaacaattatgcctgttccccattttagagagaaagcattcagtctttcaccactaataataatgttacctgtaggtttcctgtagatgtttatgattaggttgaagaagttctatctgtattagtctgttctcacactgttaataaagacatacctgggactgggtaacttacaaaggaaagagatttaatggactcacagttacaaatgcttggggaggcttcacaatcatggcaaaaggcaaaggaggagcaaagtcacatcttatatggcagcaggcaaaagagagcatgtgcaggggaactcccctttataaaaaccattagctcttgtgagacttattyactatcatgagaatagcatgggacaaacctgccccccatgattcagttacttcccaccaggcccctccctcaacatgtgggaattatgggagctacaattcaaggtgagatttgggtggtaacacagcaaaaccatatcaatcttca

SEQ ID NO: 864470 - DNA, 571 bp, Homo sapiens
gtgctgggcgtcctattaatattgggaatacaggtgcttcggatacagttccattctttggggaattcacgggttagtgggggaaatcaacacacaggaaattacaatcaagtgcaatgatcaccgacacagagaaagcaaagcgtgccccaatcctttgccactcaaactgtggtcctgacaccagcaggaccatagcagcaacagcacctgggagctggttaaaaatgcaaaatctcaggcctcactgtccctaccgaagcaaagtctgcattttcagatccttcgtgactcgaattcacattcgaatttgagggacactactacagaagactaaagtagggttaaaaaaaaacatcctgtttatgtgagagtgaggtgtttcctggaatatggggcttgcagtggtaaaactgggrcagcctcaggcaaaccggaacagttcatcatcctaaacagagggttcactgagctatgacttgaggggtcaggagcaacttccaggatcacatgaagcccgagatggccatggaggagttagacagtgaaaaaaggctgatgagggaggatg

SEQ ID NO: 864471 - DNA, 656 bp, Homo sapiens
gtcacctttgctgcagttcccaacaagttccacatttccatctgagaccacctcagcctggactttgttgttcatatcactatcagcattttgggcaaagccattcaacaagtttctagaaagtttcaaaatttcccacatttttctgtcttttttttttttgagacagagtctcgctctgttgcccaggctggagtgcagtggtggtgtgatcttggctcgtggcaagctccacctcccaagttcatgccattctcctgcctcagcctcccaagtagctgggactacaggcgcccaccaccatgcccggctaattttgttgtatttttagtagagacggggtttcaccgtgttagccaggatggtctcaatctcctgacctcatgatccgcctgccttggccttccaaagtgctgggagccaccgcacccggccttttctgtcttcttctaagccctacaaattgttccaacatctgcctgttacccatttctactccactctacyggtatcaattttctatattagtccactttcatgctactgataaagacatacctgagactgggcaatttacaaaagaaagaggtttaatgcacttatggttccacatggctggggaggcctcacaatcatggcagaaggcaaggaggagc

SEQ ID NO: 864472 - DNA, 640 bp, Homo sapiens
ccggcccctagagatcaatggaggtaaacatatctgagagagagaggttgtcacctccacccatcagagatacccaaatctcagctccagcccagataaaacctctgctatgtgtgtgcaatcctaaacacacacactcacagtatgaaaaattgaggaaggtgtttaaaaatcacccaaatcacctcctttgagagggaaaacactatatacacttcccatggtttttttcttacccttctttctaagattatgtggagaaagagaaataaamatatagatttaatggttgaaacatatgtacatgcagttgtataccctacttttttgtttgacattatatcataagcattttcttatttcattagaattctttacatcatttttgaatgattcataataatttaccaaatggatatactacactctaccattgtcttaatggtgggatattaagattagatctaatttaatgctgtaacaaacattattgtctctatctctgattattttcctaggctgtatttctagaaatggaattcctaagacaaagagtataaatattttaaagttttgataacgcttgccaaatgctccctaaaaaattatttttctatcatctacatttgaaaactcctgt

SEQ ID NO: 864473 - DNA, 661 bp, Homo sapiens
cagacataagaggagtttgacattgacctcccagcctttgactgtataaagagaccgcttaaggcactttgagttagaagctcagaccgcttgagagctatggcatccctgaagcatgtcatgaccctccttggagtcaatgccagggaatggcagaagggcaggttgtatagcttccaccrgggaactcccttccccagtcctgtagccctgagcacaggctaccaacagggctcttggctcccaatgctccttgtcaagacactgatgagatcgacagagctgccttttgatcatgtcaatggttcagctcagcctaagtgatggactcttcaatgccatcctcatagtggtcttctcaggacagttctagggattcattctaggaaggaggacctggtgctttaagccagacaaaatgctagggaaggagttgatgctttgctcagcactcctgatgctcattttctggtggagtcttccttgaggtgcccagcctggaactgaatggggtgccacacacatcttacactagcagtagggtaaccaattgtcctgatttgcatgggactggggagtttcctgggacaagagactttcagtgctaaaactgggagagtcccagggaaattaggatggttggtcaccctagattcacggg

SEQ ID NO: 864474 - DNA, 627 bp, Homo sapiens
agaacatgaaggtgctgcttctctcctcttcacctcccactttcccagtcatctagatgtcaaatgaagctctgcagagaaaacataagccccacaagggcatgaatgtgaaagtgtgtgtgtgtgtgtgtgtgtgtttgttggtggcaggtagtgggggctgagacaacggaggagaygggatgggagtgagtatacctcatcaaagtaactgacttggcaaatacacttatgaaatctttcttgcatattaaagaagtcaccctcatcctttatatagtttttgttgtctccattccccttcctctttgaaaaacgaaacacacagaaaaatataaaggctaataaaacacacaccttgaaatgaccaaatgttatccttttgtcgtactggcttcagatttttctatcatgaagtaaatacaaatgacagatagttacatctccttcgttctccctgatcctgttcacttctctccctccccttaggtaaggaccatcatgaagttcctgttttactttctaattcttttagcacacaaacacattcataaacaatgtctgaattattgttctgtgtgagttgacatgcattggtacttattcagcttgctgtattcactcagc

SEQ ID NO: 864475 - DNA, 627 bp, Homo sapiens
aatcccagaaaagtggtgtttatggctgttattataaaccaaccagatgcaagttgatgcaaacttttgaaatcctaaagaaacagaacagttcgttaaatgctatgttaagagcttttgcaagatccacttccatccattatttattcctctttggtttaatcacactttgattagcaaaaccagaagcatgatgtagttgtctttatgaaaatcaacgactagaattcctgagaattaaattaaccaagggaatggagataccacaaattcgctatttccttttttaaataatgtatttatttagyaaaacagctagcttaccaggctaggtaaagctatcatcaaatctctaattcatgtgtactggatcctcacaacctccttcaagatataagaagttcaataacccaataccactggggaaagtcaaggtactcacatacaatgtgtcgtattctgattttagaactaaatagtgagattatgtacttgactatatccttaagataaaatctagaaccaaaacaaacaggtatgctatgaaaaatattaagaattctaatggtcattaccataggaaagtgttagtaaaattgtgctagtagtcataatgaaaataataat

SEQ ID NO: 864476 - DNA, 542 bp, Homo sapiens
attgtgcacatgtaccctaaaacttaaagtatattaaaaaaaaaaaaccctggaaagtaatttaggcaatactatcctggacatagaaatgggcaggatttgacacagacactaaaagcaatcgcaacaaagcaaaaatgagcaaatgggatctaactaaactaatgagcttctgcagagtaaaagaaaaactatcaacagatcaacagaataaacagaccactcagaaaatgggagaaaatattttcaaatgatacatttgacaacggtctaatatttagcatctataaggaacttaggcaaatttacaagagaaaaacaaacaaccccatgaaaaagtgggcaaaggacataaacagacacttttccgaagaagatatacaygcagccaacaaacatatgaaaaaagctcaacatcaccgatcattagagaaatgcaaatcaaacccacaatgagataccatttcacatcagtcagaatggccattattaaaaggtaaaaaaaaaaaaaataacagatgttggcaaggttgtggagaaaa

SEQ ID NO: 864477 - DNA, 605 bp, Homo sapiens
ccttcacaggagtacctgtgagaatcaaataaataatgattataaaagtgatatatcaatattgatacgattttgctgtgtccccacccaaatctcatcttgaattgtagctcccacagttctcacgtgtctcatgggagggagctggtgggatgtaattgaatcatgggggtgggtatttcctgtgctgttctcatgataatgagtaagtctcatgagatctgtggttttataaaggggagcttccctgctcaaattctttcttcccttccaccargtgaaacatgcctttcatcttctgccatgattgtgaagtctccccagtcatggagagctgtgagttaattaaacctcttttgcttcataaattacccagtctaagatatgtctttatcagcagtgtgaaaaggaactaatacacatatatacttacttacctacagaactttttagattgcagaagtaaaactatttcccaatgcacataaaaaagtagaaaggaagagatgaaatcgtgttcaatactattagtcaaatacaacagctcttacctaggtgagactgtaagttccctgaaggcatcgtccacacctgtatctactaag

SEQ ID NO: 864478 - DNA, 697 bp, Homo sapiens
catttaaaaaatgttttgtttcatttgcttgttgtcatctcttataaattgtttctgtcctttacaactcttagggctgtgttatataccatgagaagcctcagagaacaataaacatgcaagtagaaaatttaccttttttatattcataacagaagaaaaaaattcttacaatattgtatgagaagataaaaaagggtgacttgaaacagagtaataattttgaaatctacagtgggctcttatataggagaaggctataaaatattctgccaaaatgctaaaattggagaagaaagaaaagtggatatggaatttagttatcaaaaatggctttctggttataaagaatttgctcattcaaaaagtttgctgaatatattaaagaacctcttttttgaggtgtttttttttyagttccccagaagtctaggttttttcctgtttgggacattagaagctatattccacttaaacacagagaaaaggatggcttgagttgttggatcaggtctgtgtcaaatttcctgtgtgagattgggctacctgcttgcctgttctgggcctcagtttacccatttctaagatgaaacacatggcttgtctggtcctgctcacttgccccatcagctcccttgctctatgtatagtggctgtctttatcttcctaaaacttgtcagccttatttatagctta

SEQ ID NO: 864479 - DNA, 556 bp, Homo sapiens
ttttggaagtgaagtgtgatgggacagtagagcacatgctgagctctgagagccactgctcacatgtggctctgcttccttgggatgtactcagctcctagtctccattcctggcgacctgggccctgcccagcctccatctccctacctccacaccatggctactgccattttcaatccagagtggcaaccagatcacactggtaggatggagactgagttccaccatcagcctctttctcagtggagctctggcatattccctgggcaccttggggtggggtgaggtggtgggcatctttgcctccacctggcatcactgtgatgcatttagtgggtaactcagcagcagcctcttgcctacrtcttatctagatactgaaagtgtgctgttgtattcagaggttgtaatacctggggtgttgcctgtctgcagtgggttaggatagtgaacctgtgtgaacttggtattctcacccctcatcaagacctaatagaactttgttgcactggttcctacaaattgcagagctcttcctacttccatcattatttt

SEQ ID NO: 864480 - DNA, 615 bp, Homo sapiens
ggacctaatcagtggagcgcatgtaacatcctgtgagattcctgggaaccacaagtttaaatcccagaagctaaactctagtctcttcatcttctgattatagtcagatgaatgaactaatgatggaacttagtggtagcttggatttgaccttggagtctgactgcctatgtctttcattttgacggactgtgtttgtagaagacagatcaatgggataatagtttcatggtcattttcatttataagatcacacttggagatgtcttttatcttttaagaagaatgagtactctcytgaaaagaatatttaaactgttgtaaggaattgtggttgagacgtaggcttggggtcagatctgggtttaaattcctactccttgctagttggattaacttggcctagttacttaacctcttgagccctcatttacctcatccgtaaaagtgtctgttgcaaatgagaaagttaaattaacacttactggaatttctggcacattgagactattctaccaatgagagctttaataattcagaacaaagacctcctaacaccccctaacactttctaacttcactgtttagaagatgaggagtctcagagaaagaaag

SEQ ID NO: 864481 - DNA, 615 bp, Homo sapiens
ggacctaatcagtggagcgcatgtaacatcctgtgagattcctgggaaccacaagtttaaatcccagaagctaaactctagtctcttcatcttctgattatagtcagatgaatgaactaatgatggaacttagtggtagcttggatttgaccttggagtctgactgcctatgtctttcattttgacggactgtgtttgtagaagacagatcaatgggataatagtttcatggtcattttcatttataagatcacacttggagatgtcttttatcttttaagaagaatgagtactctcttgaaaagaatatttaaactgttgtaaggaattgtggttgagacgtaggcttggggtcagatctgggtttaaattcctactccttgctagttggattaacttggcctagttacttaacctcttgagccctcatttacctcatccrtaaaagtgtctgttgcaaatgagaaagttaaattaacacttactggaatttctggcacattgagactattctaccaatgagagctttaataattcagaacaaagacctcctaacaccccctaacactttctaacttcactgtttagaagatgaggagtctcagagaaagaaag

SEQ ID NO: 864482 - DNA, 621 bp, Homo sapiens
cctataaacagacttgagctactgatatctccactagaaactgcaagctactgacgtctgaattacagagttaactttactactgtctcctgaatcaatccatcaaatatctgcaacaccctgtccactcaggtgagtgcagccagtgataaaatggatccatatgacagtccttacccttaaggagggacaagatttacaaacatggattaattagtgaataacaaaatacatgcattttgttgtactgamttcaacatgcataatgcaggtgatttgtcggaaaaagaggggattaccaatcaacttttgcaggaaattctctttagacggggtgagaaacgggacaaagtagaagccgacatttttgaatatctacaataacagtgataattgcatcagtaatgataatagatttttctgagcacctattatgctcagtcagcattgtgccagtccatgctttacctgcattgcccttatcagatatgtgatctcatttgtctcatccatgtatattttgaataggcagaaaaataatcttagctcaattttgtagataacaaaagattgagaaaataaatacaaactgcccaaattcacgttcattcattcaaaact

SEQ ID NO: 864483 - DNA, 622 bp, Homo sapiens
acagaggttatactgttggtccaaggtcacagagctggtgagtggtagagctaggattagatctcttgtccctcctgtgctaatggtctttccacatttctactcaagttcttgttttgtcgtttctattgcttttagactctatctggagtgttcctggtctcatttctacctctatctcaaagcagagattaagagccacctgctttttgaaaatgtccctttcccctcagataaaggcatgggcagmaagtagaatcccaacactaaaaaagctaggagaggaccttgggaaaagaacccacaagttgctgagcagcaaatgatgtttgttgttatcattaccttgcttgtgtgatactggaaacagacttctgtttattatgttaatgaatcctctgtgattctccattgcttgtgcataattaagatggccttttaaaaaataccttcctctgaagtttgggaaaactaaagtgtttgtttggattggtaataactagtaacaaaaaaatatggcaactgcttccaaaggaactgcaggaaatgagctatctgctagcagaaggaggatgctgaggaggacccaatgaccataactctgtaggggtgcaggattagg

SEQ ID NO: 864484 - DNA, 636 bp, Homo sapiens
gcattcaaaggtatgtttgtttagtcatcaaatgaaccgagatttcctgaagctagaagggatcttcaaggtcatttaggccagtagttattaaactgctttgttccggtagtatctttctgaaaaacaaaatcttatatgaagggctactatataaggtggttaagaatagagctgctgtggttgaagagagagttgatagaccaggaggcctggcctctcctcagctgacttgtggacattcttgggtaactacgattgatctagaggcaagatcagctaacttttcccataaagggcccataaagggccagtgagtaaatacataggatttctttataactattcaatgttaccatttaccagaggtacagtcatgagcagtgtatataaaagtgatagtgactacattccaataacactycattaacaaaaacaggaaggaggtcagatttggcccatggaccataatgtgccaacctctgatctagagcaacctaactatttcacaagtgaggaaatgagccccagaaaggacattggatggctgcatttattaaggctctgctaccagtttaatttcctgcattctataataagaggtatcatttttttaggacatacatgatcatatct

SEQ ID NO: 864485 - DNA, 658 bp, Homo sapiens
ttaggtgcacatgataaagggctctctatgactacatcccagaattatgggtacacccacccagtcacaaatggccctggatgactacagtcctctgtgaggaatgagtttccctcccaagcttatggcatgttagggagaagactgatgcacgactttgcaaggagacagagccagaaagtcacttgatctctcaaacacaactgtcagaacagtcactgcattcttacatgaggaataagtgaggaagtagagagattcatggaacatgcttctgattaataggtgcccttctatgcagactcagtgacagagaggaaagaaaattgcttggatatttcagraagtcagcagtgctgccagaactagaactcccagtgttcctggaggccaggacatgtcctccgacaacattctacattgacctcatggcaaacactgtgctttttattgttgacttctgactctgagggtctccatgacataagatactgccaatgtttaaaatacaaaaaagcaataaacaaccttcattgaactcaattagcaccatatagttgaggaaaacaacctccctccctaaagacccaggactatttctaaaagactgtgcctgaaatataagataagcataaatctttagttcttctcaagctat

SEQ ID NO: 864486 - DNA, 698 bp, Homo sapiens
ttaccattattaccattagactgtgtataaaggaatttggtttagatatttctataccccctgtgcctagcatcatgtctttgacacagtaagtgtttcataaatgtctggtgagctgaatcatggtgaactgctatttcttccatctttcttgaacttctactctgcagagcctcttatatctgtcagctttttgctttytacttcatgcaaatttccatattctttgttttaaaatatatctatctgctcactctaaatctagtttctcaatttcttttcttttctttttttcacttcccctgttttgtttgtttgcttgtttgtttgttttattttttcctaagggctgaaaatgaagtaagaaacaagataagttattttctatttacatgtagcttactttctagtggatgagaaaatgatatacagataacaagtaaatatacatactctgaaaaaaatcagtgtacgataatagacaatatagattaattggggatgggcgagctattttagtaggttgaatggtttctctgatgagacttcagtgatagatgagatgaatcaaaaagccaaataaaggtgtttccaggtaaggtacataaagtaaaaggtcttgactctggaataggcttggagcttaccacgaataacaagaagagagagtgtgagaaaactcagcccatgagactgag

SEQ ID NO: 864487 - DNA, 621 bp, Homo sapiens
aaaagtttattttttaaaggagaaaattagtcaagagagggattgttaattatggtggacatcatgattgattctcaaatgttcaagtttattggtcctatccagtggttctcaacccagggacaactttacccccaagagaacatatggcaatgtttggagawtttttttatttgtcataactggtgaggagtgctattgtcatctagcaagctagggataatgcttcttcaatgttcagaatagcacccccaggaccaagaattgactggttcctaaatgtcaatagtgccgtggttgagaaatcttgtttttagtaaatcatgctgactcttctctctttaccattgatgggttcaggaatccaacaagccaatgagtgtatctcattgtgttggtgcctcttattcatcgaaaggtaggcacacatccaaaataggctaaaggaagaagcacatttcaagattgggaattttgttccctggtcaaggtacacagagaaaaacaacatcgcattttccccatgttctgaactttaggaagtgagtctgatattaaagttcatatttcaaaagtaataaagaggagggacagaaaagattccagttcttgaagacactg

SEQ ID NO: 864488 - DNA, 648 bp, Homo sapiens
gtcctcttgatgaactgatgcttttattgttatacaatgaccgtctttctctcttgaaataatttttgacttgaagtctattttatctaatgtaagcatagcaacccctgttctcttttgactactatttgcaagaaatgtcttcttacatcccttcactttcagctgtgtgtcctttaagctaaaatgggtctcttataggtagcctatagttgagtcttttcttttgtcaatctactcagccactctatgtcttttgattggatatttacagtcaatgtcattattgatacggaagaatttactactgatattgggtaattgtttcctggtggtttaatagatcctttttttcctttcttccttgtttacctttgtggtttggtgattttctgtagtgctratctttggtttctttctttttctcatttgtgtatctctgtaatattttttttctttgtagttactgtgaggcttacataagatattttgtagttataatagaccattttaagctgataacttaaatttggttgcatataccttttacctttaccctccccccaactatttatatttttgttgccacaatttatatgttttatactgtgcattccttaagaacttactgtggctacagtcattttt

SEQ ID NO: 864489 - DNA, 647 bp, Homo sapiens
aaacaaaacaaaaaacaagggaggatgtgctctgtttctgtaattgctctaaccttgttttattttgatatgagatttcttggcctcatctcagatagcaacaccaccctacactttctcctccacaccctttgcaaatagaattccaaaaggtagttcaggcactttagagttcatcctgggaaatggctcaycttgagggcatttcagtgcagtaactgagatttcgtctgctccttcccgggccgccgcactgcccatcccctgcccagtgatttccccaggaatccggggacggcaggaaaagagctccatccacagccagcccctcgcctttccggggacggccctcagccctgagggctgcccgtttaccgtgcgcatcccccggccaagcatccccgcaaggcgcccctcaccgccaactttccccactggaaactcttctccgagcaaccgttaaagatcattgacctcgcgaacgcctcttcctgaggtagatcacgtaagatctctccctaactcccactttcccctccagaccagacgtcgcagtgcccacatctcactcaggattgagctaccccgaaagaacaagtgcgcccggagccgccacgggccagaagtcctcgcctccagagcgaaga

SEQ ID NO: 864490 - DNA, 647 bp, Homo sapiens
aaacaaaacaaaaaacaagggaggatgtgctctgtttctgtaattgctctaaccttgttttattttgatatgagatttcttggcctcatctcagatagcaacaccaccctacactttctcctccacaccctttgcaaatagaattccaaaaggtagttcaggcactttagagttcatcctgggaaatggctcaccttgagggcatttcagtgcagtaactgagatttcgtctgctccttcccgggccgccgcactgcccatcccctgcccagtgatttccccaggaatccggggacggcaggaaaagagctccatccacagccagcccctcgcctttccggggacggccctcagccctgagggctgcccgtttaccgtgcgcatcccccggccaagcatccccgcaaggcgcccctcaccgccaactttccccactggaaactcttctccgagcaaccgttaaagatcattgaccycgcgaacgcctcttcctgaggtagatcacgtaagatctctccctaactcccactttcccctccagaccagacgtcgcagtgcccacatctcactcaggattgagctaccccgaaagaacaagtgcgcccggagccgccacgggccagaagtcctcgcctccagagcgaaga

SEQ ID NO: 864491 - DNA, 667 bp, Homo sapiens
ttcttacatggcagcaggtgagagagagtgagtgtgtgaaggaggagcaatcagacatttataaaaacatcatatctcatgagaactcacttagtattacaagaacagcatgggggacactgccttcatcatctcatcacctcccacctgtctctcaacaagtggggaagatgagatttggttggaaacacaaagcctaacaatatcaaccagtgacttctgtgtctttccccatcttccatttgccaaataaaaaaatttattgagactatttyaatcatatttgactgttctttattgaatgtggcccaagaggtcaaaaaatgattttcttatagatcactggacatcaaggacccacttgtgaacatggtggaatgcacagcacatgactcacagatcctgcacttcgggtcggatacagtaactccatgggactttggtctttcttgcttggggttcaggttagtgtgacttctgtgagaagaaggatgcacaacacagattgggccacagctgtggacttgggcaacagcagttgtctgttaaattctattcttcttttcttcctttaacagaactatcccttgagttgtagttgggcaagtggctggattttccagcctaacttatatcaatttcctttattcctataaatgtcaagttt

SEQ ID NO: 864492 - DNA, 667 bp, Homo sapiens
ttcttacatggcagcaggtgagagagagtgagtgtgtgaaggaggagcaatcagacatttataaaaacatcatatctcatgagaactcacttagtattacaagaacagcatgggggacactgccttcatcatctcatcacctcccacctgtctctcaacaagtggggaagatgagatttggttggaaacacaaagcctaacaatatcaaccagtgacttctgtgtctttccccatcttccatttgccaaataaaaaaatttattgagactatttcaatcatatttgactgttctttattgratgtggcccaagaggtcaaaaaatgattttcttatagatcactggacatcaaggacccacttgtgaacatggtggaatgcacagcacatgactcacagatcctgcacttcgggtcggatacagtaactccatgggactttggtctttcttgcttggggttcaggttagtgtgacttctgtgagaagaaggatgcacaacacagattgggccacagctgtggacttgggcaacagcagttgtctgttaaattctattcttcttttcttcctttaacagaactatcccttgagttgtagttgggcaagtggctggattttccagcctaacttatatcaatttcctttattcctataaatgtcaagttt

SEQ ID NO: 864493 - DNA, 591 bp, Homo sapiens
gcacaatgctgaaagagctaaccagtgttatatattcagtcttagttgaaattatgcatttattttttaaacactggtgtgcattgttttaaaaatgtataaaataacagttaagaatttaagaatcataagaatgaggctaaataggaaaaaaaatttgcaatgccataacttttatgatgaaacaaatatatttttatcatattttatgcataatatgtactaatactttttgaattcaatgaaatgtggaagagttttgtgattctgatcttactaaagcaattgtttcataaacaaaacaattcaggattgcaaagatggtaaactattaaaaaggtctgtcrtttaaagtttcattttattaaatatcacattatatttatttctttcaagaaattctagatagggtatgagggacatttctaatactgattgggtattaaataattcaacacccaagagttgtgatcaaacagatctgtaggcatatgtaagtaccactgaggtgaaagtgccaaccaaagcaattagattgaaaattaatgtctggaggtaatcagtggaagaagtggctgtggaccttcccat

SEQ ID NO: 864494 - DNA, 619 bp, Homo sapiens
tcaaggaatgagatgtaaaaaaaagggtgggaggaataaaggataaaatcatttatggagcacctacactgtgaagatgcttacgtaaggcttcatatatataatttaatccactttttactcatatgcataaatcaatgttggtcccatttatagatggaaaaattgagatgtaatgctattaaataatgggccacaggaataataacatttacaatggcaacaataataattaccaatagttaatacttatggaaagtctagtatatctcasgcattgttctagattttttacatacattatgtaatttaattttcaccaaaaccacatacagtaagtgttacttactttttgcagaagcagaaatgggggctcaaagagtaccaagtgactcccaatgtcaaagtaaaaggcagttgggatttaaatttaggcctgtgtgggtccaaaacctatgttctttccactatacccaacttaaatagggagatcaatgcaccctggttcccacacttattgggtaatggttacagatccaattagggtgggcacaaatgggaagtttgttcatcaactaaacaaatgagattttcagaatatgtaaggcaaaattttagg

SEQ ID NO: 864495 - DNA, 619 bp, Homo sapiens
tcaaggaatgagatgtaaaaaaaagggtgggaggaataaaggataaaatcatttatggagcacctacactgtgaagatgcttacgtaaggcttcatatatataatttaatccactttttactcatatgcataaatcaatgttggtcccatttatagatggaaaaattgagatgtaatgctattaaataatgggccacaggaataataacatttacaatggcaacaataataattaccaatagttaatacttatggaaagtctagtatatctcaggcwttgttctagattttttacatacattatgtaatttaattttcaccaaaaccacatacagtaagtgttacttactttttgcagaagcagaaatgggggctcaaagagtaccaagtgactcccaatgtcaaagtaaaaggcagttgggatttaaatttaggcctgtgtgggtccaaaacctatgttctttccactatacccaacttaaatagggagatcaatgcaccctggttcccacacttattgggtaatggttacagatccaattagggtgggcacaaatgggaagtttgttcatcaactaaacaaatgagattttcagaatatgtaaggcaaaattttagg

SEQ ID NO: 864496 - DNA, 647 bp, Homo sapiens
aactagcaggcagtatgatctaaataacaattctttatagccacatccagagcctttgcaagaagtgtatgaattaaaattaaagtaactataatcaggcagaaatcaccaaaggatttcattgcttatgatttttattgcaatcattaaatatttgatatgtgtaaataaaaccratttaagatcatgattaaactctgaattttggatgtgatatgttgatcaaagcagtgcttttgaaaggaacaaagaaacatcataaaaccacagagaaaattccagtccaagcccttgtaggccaaatgtgtgtatatgagcttcgtgcccacaggtacatgaggaaatgaagatcagttagtgaagatctcttaaacaagaggtaacatgagtttctgtgagaagattcttaaggactttgaggaaatctagtacacagtttcttactttatttttcaaagttcctccatgattgaaaattatcaagcaaggaggttgcctctcccttctctgctgcgggatgtagccacgagattttgctggaattactacctggaatgggcccggaactagtcttcccaattaggataatctgtatctctcacagccatatggacgggtgaatacgtgtcctaaaattgtccctgtca

SEQ ID NO: 864497 - DNA, 601 bp, Homo sapiens
gtggacaaaaagtctcccttttgccctcataagactccgcacaacaccaagccaccctctttttacagtactttcgaaatcatgtatggccgaacttttgtcttagggcctccacccttaccagtctctgagccatttgggaattacctcccctccttaatccagacagtctttcattcatgaaacagcaaatgaggccatgcccctccctgtcaacacctccttgtcctctcaacataactgtcttgcagacacagacatgtttatctgccaactcgaccctcacaaaaacctataaccaaagcaaacaggcccctacactgtgatactaagcatgccaattgcagtgagagtccaaggactcccccactggatccatcgcaccagggtcaagctcacccccaaggctactccttcctccaaaactttaacagcaggcaacaccctcagagtccctgtayataataacctaaacaacaacaaaaaaacgatccttaaaggtaggaagaaggcaaagatggccacaggacaatggcctctgcaacagatcatcaaatattacggtcctgccacttgggctgaggatggttcatggggttat

SEQ ID NO: 864498 - DNA, 537 bp, Homo sapiens
acatggatggtctaatttctgtgctttaagtttatccaatattggtcacaggcttattctgagccagttactgcccaaggcactaagagtctcaaagtaagtaagaaaccagctctgctctcgaagaacttagggtaaatagaggtagtcaaacactaacagatgagggaaagctcttcacaggcaggaaggtgccatgcagctccagagcttgtagcttcacctaaggattcaatcaaggcttcctggtagggatgacccttcaactagtcttgacagatgaaggcaagttgtctatttaaggaaaagtgggaagggcttttcggcytaggttatagtatgaatgaagtcctcaagggttatagcactgcaatgtatgcctccaaaattcccatgttgaagcctaaatcccaatgtgactgtatttggagacagtgtttttagggggtaagtatttgtaaattaggtcataagggtggagtcctaatccaatagaattttaactttataagaagagacagagatctacaccaatat

SEQ ID NO: 864499 - DNA, 508 bp, Homo sapiens
acaatcaaacagtagatttaagaatgaagataacctaaactaacactaggacaatccaagttaggtttagaacaacctatagcagcctgagctataagtagatccaaaggaagattggctgaattaatggatagctaaataatggatacgtttccatgctgacatcatggaataaccactttatgctgagttctcagtgcctgagagattataatagttgggtaaaccatggtaatatttcacattctcctgactgattgaatgtttaacttttcatctgttctaatagtggaagtgtaattgaaagtggaccttactagtatstggaactggagatacagaagaacatttagtatatgaatgagagttctagtgtacccactgccttgattaagtaagcagtttaacttgggtttttcaaagtagcattgggagaattagttgtatagtgctttaaagcagcttgagctatttaaaaagagttgctattatacatatggtatgggaa

SEQ ID NO: 864500 - DNA, 567 bp, Homo sapiens
ttgaaggaaaataatttgcattatcattattttaaaatactttccatattgtttttttctaagcactgagaaacgaacataacgaccctcagaaatagctgtcctcaaataaactgacaaataattgttctaaaagaacatacatgtgtacgcctatttatgcatgggggtatatgaaaacaaatacagtcacgtgacacattaatgacattttgatcaatgacagatcatgtatatgacagtggtcccataakattataatggagctgaaaaattcctattgcctagtgacatcacagccattatgctacaattgcctacagtattcagtccaataacgtgctgcacaagtttgcagtctaagatcaataggctaaaatacagcctagttgtatagaggctatactatttaggtatgtgtaagtacactttatgatgttcacacaatagcacaattgcctaacaatgcatttctcagaatatagccttgtctttaagtgacatatgactgcatatatctgagaactatattctgtattttgttacattctttctaaaatatattat

SEQ ID NO: 864501 - DNA, 598 bp, Homo sapiens
acaaagttcagcaaactccgagtaggataaataaaaagaataccacctaggctcatcttggtaaaacttctcagcatctaagtcaacgaggaaactctttaaagcagacaaaaaccttcaaaggacagtaataagactggccaattactttcaagggtaaccarcttctcaacatgaaaaatatttacaaaaaaggcaatgcaatgacatctaagtgctaaaaaaaaaaaaaaaacctgctaacctacaactctacaatcaccaaaatattcctttaaaaaatatttttaaatggtttttttaatgaaaaaagtcattgccaacagaccttcacaaagagcattctgcaaaagaaggaaaattttcctataacaacaaacaatcaaaaaaaaaaaaaaccaacacataaaatggaaatgcaggaaagactcaagcactctggacaagacaaacatgtgaagaaacatacaaagatattgactacataaaactatgtgtaatggcttatagaatttaaaatattttaggttttattatgtgacaatgtaatacaaacaatatgatatggttaaatagaattaaagagttcaagtgtttt

SEQ ID NO: 864502 - DNA, 677 bp, Homo sapiens
catgccatgaaaagtggattttatatgacaacccgctcagttgttagaccaagaagaagctccaaagcccttcccaaagccaaacttgcatcaaaaaaaaagtcacagtcactttttggtagtctgctgctagtctgatccactacagctttctgaatcctggagaaactattacatctgagaagtatgctcagcaaatcaatgagatgcactgaaaactgcaatgcctgcagctggcattggtcaacagaaagggcccaattcttcacaaagcctgaccacacgtcaagcaaccaatgcttcaaaagttgaatgaattgggctacgaagttttgcctcatttgccatatccacctaacytcttgccaactaactaccacttcttcaagcatctcgacaactttttgcagggcaaacacttccacaacgagcaggatacagaaaatgctttctgagtattcgtcgaatcctgaggcacagatttttaccctaccgcgataaagaaacttatttcttgttggcaaaaatgtgttgattgtaatggctcctattttgattttgattaataaaggtgtgtttgagcctagttataatgatttaaaattcacagtccaaaactgcaattacttttgcaccaacctaatatgtttaattttaacagttttatcatagaataa

SEQ ID NO: 864503 - DNA, 677 bp, Homo sapiens
catgccatgaaaagtggattttatatgacaacccgctcagttgttagaccaagaagaagctccaaagcccttcccaaagccaaacttgcatcaaaaaaaaagtcacagtcactttttggtagtctgctgctagtctgatccactacagctttctgaatcctggagaaactattacatctgagaagtatgctcagcaaatcaatgagatgcactgaaaactgcaatgcctgcagctggcattggtcaacagaaagggcccaattcttcacaaagcctgaccacacgtcaagcaaccaatgcttcaaaagttgaatgaattgggctacgaagttttgcctcatttgccatatccacctaacttcttgccaactaactaccacttcttcaagcatctcgacaactttttgcarggcaaacacttccacaacgagcaggatacagaaaatgctttctgagtattcgtcgaatcctgaggcacagatttttaccctaccgcgataaagaaacttatttcttgttggcaaaaatgtgttgattgtaatggctcctattttgattttgattaataaaggtgtgtttgagcctagttataatgatttaaaattcacagtccaaaactgcaattacttttgcaccaacctaatatgtttaattttaacagttttatcatagaataa

SEQ ID NO: 864504 - DNA, 601 bp, Homo sapiens
catatatttaacataaagggaaaggttgggaggagaaacaaagcataatgtatcctatacaacagataaccagaagttgcttacacagaaagaggatcagagcaggttcattgctgctttgccttattagctaatcatcatgttatgctaatcaggagtgaggtgataacctcttgagtggcactgtggcagtgtgctgctgaatgacaaaatgcacccaatgctgtgtggcaggctggcatgtgggcaatgacacataccacagcgggacagaccctggattgaattcctgctctatgcagtgtgccatctatggcctggagtaatttacttaacccctcttagcctcagcttccttgtktgtgaaatgggagtaacaacactcactccagtagataacattggttatttacctatcatccatttcccttcctcctcctttccaacagaatcacgatttcattcagcttttcccaacttttacttccaaagagaaatcgtgattcatctcaagcagtatatgaaagtccgtggcactgttaatggttcagagaagggcatgtgctcccagttggtccaattagactggaagagagatatt

SEQ ID NO: 864505 - DNA, 686 bp, Homo sapiens
ttgtgatcaccttctgtttacggcaaattgaacgtctcttggaaacctggaagggctggcaagttcaggctttcttttcctcattgccacaatttactgggatgaagagtggtttctcactttaagtggggagttctctagaattacccccgctttctttttgtctctctgaaggaaattagaaaccatcttctgccaccacactcactttatgggtgtgtcacatgcggtatgtcaagkgttacagctcaggtttgttagcgtctcatccactggaggaaggattcttaatcatatatgggcattggcattgccagggcagcttttgctaaatgcttataggaattgtttagaagctctcccagtgcctctgataagcacctgttggtggttatactacactggcccataagagacgtcaaaaaaggtttgcctcctcatctaccccctttctgtaggtatctgttagcattctttcacagtaagcagcagaaactgacatttgttaatttagttaaaaaaggaatttattggaaagatgttgaataattgatagtattataaaaaaaagttgaccaaccaggatttggaaatcagggaagccataagaatcttagtcaaaaccttgtgagctatcttgtttggggtccttccatcagatgtttcagctctgtgtctctgcattc

SEQ ID NO: 864506 - DNA, 600 bp, Homo sapiens
cacatgcctaagtggcactgtccaaggaagaagctcctccttgcagttggactgaagtcmagagtgggatgaggggccgtgatacagcacggaaaacatacactacactttctcatgaagtagttaccattaactgagttaatttatgtaaaacacctagaacaatacctgcccccaataaggctatatgtgtgtgtttgctgctattatttgtgtgactattacatgtgcctggtgcttctccaggctctgtaggtaacactctcatgagacttactttcagctcacaaaacatgccttgtttatgtgtcaaagctctgattcttgatactgtccaagttcttttgccaggagattctcagcccccatgtttggggatggccaggggacatggccccacttgactgcctgccttgccagtatctctgatccattttggaggcctgccctgccatgctctgcttcccaggatcctgaacaaggatttgagaactaaggtttgaattctgcatatgaaacagtcaaactcaagttgtccatctgctgggaaaagaaaatagcttcagagcaaagtcacttgccttttaataattgatggat

SEQ ID NO: 864507 - DNA, 466 bp, Homo sapiens
aagagccccagctgggctcccagcctgcaaccaccacttactgctagccacgtgagtgaaacatcttggatgttgttatgaactgaatatttgtgtcctttcaatatcagtattttaaaatcctaatcctcaatatgaaagtatttagagattaggccttttggagggatttaggtcttgataagattagtgccctcagragatataggagaaagcttgcttcttctctctccccaccatgtgaggatacaatgagaagacggctgtctgcaaacctcatcataaactgaaacaattggcaccttgatcttggacttcccagcctccagaactgtgagaaatacatttctattatttaagcacacagtcttcattcaacagcctgaactgagagagacatccagcccagtggagccttcaaatgacttcagccccagtttccatctgactataaccacatgataga

SEQ ID NO: 864508 - DNA, 623 bp, Homo sapiens
aaatacagtctctgtcaggcctctgagcccaagctaagccatcatatcccctgtgacctgcacgtacacatccagatggccggttcctgcccttaactgatgacattccaccacaaaagaagtgaaaatggcctgttcctgccttaactgatgacattatcttgtgaaattccttctcctggctcatcctggctcaaaagctcccctactgagcaccttgtgacccccactcctgcccaccagagaacaaccctcctttgactgtaattttcctttmtctacccaaatcttataaaatggccccacccttatctccctttgctgactctcttttcggattcagcccacctgcacccaggtgattaaaagctttattgctcacacaaagcctgtttggtggtctcttcacagggacgcgcatgaaatttggtgcagtgactcggatcgggggacctcccttgggagatcaattccctgtcctcctgctctttgctccatgaaaaagatccacctaggacctcaggacctcagacccaccagcccaaggaacatctcaccaattttaaatccagtaggcggcctcttcttactctcttctccaacctctctcactatccctcaac

SEQ ID NO: 864509 - DNA, 573 bp, Homo sapiens
catgggagaaactgccttcatgatccaatcacctcctactgggttcctccctggacacatggggattatggagattacaatttgagatgagaattgggtggggacacagagccaagccacattataagcatagctacttctgatattttttggtgtccattggtgtgraatatctttttctgtccctttattttcagtctatgtgtgtttcataggtgaaatgtgtttcttgtaggcaacagattgatgggtctcttttaaaaaatccatttagacactctatgtcttttgattggagactttagtccacttatattcaatgttatttataagcaggaactttctcctgccattttgccatttgttttctggttgctttgtggtcttctcttccttcttttcttccttcctgccttccttttactgaaggtggttttctctgctaatatgttttagcttcttgctttttattttttgtgtatctgtggtatgttttttgatttgaggttagcatgaagcttgcaaaatatcttataacccattattattttaaactgataataacactgattg

SEQ ID NO: 864510 - DNA, 626 bp, Homo sapiens
aataattacagttgtcttctcaacccctaactaaactgatggtaaatggtggacgacaacctgaaatcttatccctgtcttcatgtatcagttatctgttattgcatgattaacttatataaaaacctagtggcttaaaataatatttattcacctaaggcatcagtgagcctcttgcgtagttctcttttattttaaactaaaatcagctgtgtgtcattttagcctccactaattttgtctggcttctgctggggctcattcacatgtctgatgattggctgactgccattcttgggtgactgacatgactaggacacctctcttgcatcatccagtaggccagttttgttttgcattcatagcacagcaggagtacaagagaaaaattggaagsactcagatctcgtagggcctaagcttgcaagtggcacacaacttcatactgcaggccagattaagtcatgtggccggcacagagacgaggatgggaaaagagaatcaccttttgatggaagttgaaaactcacattaaatagggtgtacatacagggagagatgaaacattagaaaaatttctgcaataaatctacaacacataatttgggtaaaactgtgcaattttg

SEQ ID NO: 864511 - DNA, 610 bp, Homo sapiens
atcaacatcagtatcacaaatgctatgcaacaatgaagtcaagaggacaaatatttaccaatttgattcccccaaattctaccacacagatgtgatcagttgacagtttcatgcattaaagatttgggtctataaatttactctatgtctctgctgattgccaatcytacctatttttttctatataaatatcccacaatgatagtgacagtagatgaaggcagatatactcaattcacaagctaagagtcctggttagataaaatgtcaagataaacgctcataataaagtgaaacctaagtcagtggattcaatattatataattatttgtgtagttaatactcaaaatcccatatgctttctctcatttaatttctatgttaatcatgttacatctagaactgccattatttcaaatcataatttattgaagtcattaagtgattagaaacatagaactagggaataagaagcaaacatgagtgagttaaatccacctcaactgtaacttttgcacatttgaaaaactttggggctgtgtgcagtggctcacacatgtaatcctagcactttggaaggctgagatgggacgatcacaaggtcaagag

SEQ ID NO: 864512 - DNA, 590 bp, Homo sapiens
ttcaagttcatccatgttgttgcaaatggcaggatttccttccttttaaagattgaaataagattttgttgtatatatttaccacctgttctttatccatgtaaccatacagggacattagttgtttccattatgtcgtgttcttatcacaaacacacacacacacacacacacacacacacacacacacacacacacaaaaacaacaataaactccaaaaataagtttctaggaggaagctttyggaggtgatgaataaatttatggcattgatagggatgatgatctgatagtttcacaggtgtataaatatatccaaacacagcaagtggtacacataaaatatctacaggttcttaatgccaatcataccttaataatgtgattttttaaactttttttttaagagaaagaatttaattgtcacaagaattattttagcaggaataagctgggcattctagtcccaagaacaacatcatccctggcacagaaagtagggggcaggaaaaataaagatctttcttctccactctacattaaagctacaaagatgctttctgataggaggacatgctgttattttgtt

SEQ ID NO: 864513 - DNA, 641 bp, Homo sapiens
tccttttgactccacttgatgaaagaaagcatcctgttcctaacacaacacttgtcaatatctttgctgcttcatctagtacagcacttccttctgttatattataacagtgataattttatttcagacaaaagtaatttcatggttacaaagtgaaaagtatttcagtcaagatatctttattctgtgtgctaactcaaaatgyacataattatgtatttttgaaatcaaactaaaagtagttatgtaaaataaattagtgtgtttaccttctctcattaaataaggaagacaatctcaaatattcatttcagtgaagtgtgatgaagggcagactttttatagcatggctttttatttttggctttctgacatccatttcccctttctagcagtgccctaatttcaaaataagaaattagctcttcttcgttggtattgggctggtggattgtaatcggaagttctttctccacaaacgcaaattgggctaatctgatgatcctgtcattcacttggaatgttgagcaaaagatcaaaaggactgaaaattcttggagtttctgttacaacaagtggcatcggtgttctacataatgcaagaatgagcttgctgggcttgactctgtttgccacatggg

SEQ ID NO: 864514 - DNA, 615 bp, Homo sapiens
gaagaatagattaaggtcttcctttgtccacatcaaatcattattattcaagtgcctctaccagaagcttcaaggcatcttttctcaccagtgccaagttcaggcttgacaagagaaacttgagagggtttcaggtgcttgttagcctcgtcgtggtttgggccagaaagtgggcagaagagcttttcaactgaaagtccacttaactagcagtttgaaccaaaataacatttggtgacattttgaacaaaaatacacagggccacagatttcaattctcatartcaccctaagcaacaacagttttagggcagatgacagtttttggcttgttttaatctagaatcattccatcttctctttccattggtaacttttcattccataacaaaattgttcatttttgtttctaaaggaaatatagcattttgacagatttgtactgatggtaaaaactgataagaatagaagagtgtgggttccaatccacaacttactacactacacagttcttatgactttaggaatgatctgagatgttggtttcagccacatcctctgaaacatgggagctgtaatgagggcttcctctctgaccttgattaccaggataca

SEQ ID NO: 864515 - DNA, 645 bp, Homo sapiens
cattcttgaggtgtctttccaattcttaactgctaataccttgaaaaacaaaaaacgaataccaagtcccattttgtaaagtcattctgtgataccttgctaagaaaggccaagaaaggacaaactaggctataaatattggcttctgaaaagttcctttataccagaagaatgaatagcattacttaaccaatagggttgtttctacaaacatatttagatcactttttgagccaggtaytatacaccccagtgaacttcactcagaaatttaggggagcaagtgtttgagatgtatggtcccactcacactatggatatagaggacactcacgacatgtggtcatccatttgtttttactttcaacaaatattgatgaaatatcaattccatgttaagcactgtgctaaaagaagaaatttatcagaaagcacaaaacaactcagtcttaagtggaggagatgggtattttaaacaataaaatttaatttaaaatttttttaaatattaaaaagtgctgttctacgttgaaagtaattggtaagggtgatagaaaacagggaaggtttttatgagcaaacaacaactgtctatttctgaatattttctggctcagagatatctcaaccttccaagtaaataag

SEQ ID NO: 864516 - DNA, 624 bp, Homo sapiens
taagcactgtgctaaaagaagaaatttatcagaaagcacaaaacaactcagtcttaagtggaggagatgggtattttaaacaataaaatttaatttaaaatttttttaaatattaaaaagtgctgttctacgttgaaagtaattggtaagggtgatagaaaacagggaaggtttttatgagcaaacaacaactgtctatttctgaatattttctggctcagagatatctcaaccttccaagtaaataagcartgcaatttcatgaaacgaatactagcattaaaattagacaggagttaaaataaactttcaattggtcaagttctttcatcttcttgaccttcagttctctagtcagtaaaatggaattgacactgtcttaaagggttgtttacagaagtacaataatgtcaagtgtgtggcacatagtaagaattcaatgaattatagaattatatttggtattgtgtttatttctgccaatggtagccataaatagtcgtgtttgttgagtctcagtctatgtgactctttaggaatgtaaaaataaaatatttaagctaatatataaatttatactggagcttataaatttgtataatatacaaatttacattccctgcc

SEQ ID NO: 864517 - DNA, 624 bp, Homo sapiens
taagcactgtgctaaaagaagaaatttatcagaaagcacaaaacaactcagtcttaagtggaggagatgggtattttaaacaataaaatttaatttaaaatttttttaaatattaaaaagtgctgttctacgttgaaagtaattggtaagggtgatagaaaacagggaaggtttttatgagcaaacaacaactgtctatttctgaatattttctggctcagagatatctcaaccttccaagtaaataagcagtgcaatttcatgaaacgaatactagcattaaaattagacaggagttaaaataaactttcaattggwcaagttctttcatcttcttgaccttcagttctctagtcagtaaaatggaattgacactgtcttaaagggttgtttacagaagtacaataatgtcaagtgtgtggcacatagtaagaattcaatgaattatagaattatatttggtattgtgtttatttctgccaatggtagccataaatagtcgtgtttgttgagtctcagtctatgtgactctttaggaatgtaaaaataaaatatttaagctaatatataaatttatactggagcttataaatttgtataatatacaaatttacattccctgcc

SEQ ID NO: 864518 - DNA, 538 bp, Homo sapiens
ttttactcaataattaaaattgattttactatatgggtaacttccatgttacttcagaaacgtaacttccttgattggttttcaattctgatacctcatgaatggcatcacttgtcaattattggtgttacagaaaaaaaactggggcttttcagggcaaattcttgagattttttttttaaggctttaatcaattacatggctttcaacaaaagctgccaccttgtgactggaggagtttcaataaagcattataaaagcaaaccatactgataacatggttatcagtataaccatgcaaggtactgttctaagtgcyttacatgtgttaacccaaccaccctatgaagtagaccttgtacattttacatatttaaaaactcaggaagtctgcgcatggtggctcacacttgtaatcccaacactttaggaggccgaggcgggtagatcacctgaggtcaggagttcaagacccagcctgaccaacatggagaaaccccgtctctactaaaaatacaaaattagttgggcatggtgg

SEQ ID NO: 864519 - DNA, 593 bp, Homo sapiens
aagactgacaatacagactctttgtggcaataagataccaaattataaataggacctaatgtcacaccagacaagggctaagttatgcacccctataagtcatgctgaccgagtgtaatggttaacaacttttttatcttaaacattcctttctgccaactccaaatttttagacaaagctttactctttaactgattgcaaatttaaaaatctctgaacccacctatgacctgtaagtccctgcttcaagatatcccaccttttgggccaaaccaatgtataacctccatgtatcaatttatgaatttgcttattaactcctgtctccctaaaatgtaaaaactcaaactataatctgactgccctgcgtgcactttcttaggacctcttgagactgtgcttccctgggccatgstcactcatattggctctgaataaagctctttaaaatgtattacagagtttggtattccattaacaatgcattcctttgaactgcctccccctgccaatcctactctcaccctcaaaaactatgttgatgcctcaaaaaacctacaaactttaaaggaatattccattttcattacat

SEQ ID NO: 864520 - DNA, 593 bp, Homo sapiens
aagactgacaatacagactctttgtggcaataagataccaaattataaataggacctaatgtcacaccagacaagggctaagttatgcacccctataagtcatgctgaccgagtgtaatggttaacaacttttttatcttaaacattcctttctgccaactccaaatttttagacaaagctttactctttaactgattgcaaatttaaaaatctctgaacccacctatgacctgtaagtccctgcttcaagatatcccaccttttgggccaaaccaatgtataacctccatgtatcaatttatgaatttgcttattaactcctgtctccctaaaatgtaaaaactcaaactataatctgactgccctgcgtgcactttcttaggacctcttgagactgtgcttccctgggccatgctcactcatattggctcygaataaagctctttaaaatgtattacagagtttggtattccattaacaatgcattcctttgaactgcctccccctgccaatcctactctcaccctcaaaaactatgttgatgcctcaaaaaacctacaaactttaaaggaatattccattttcattacat

SEQ ID NO: 864521 - DNA, 639 bp, Homo sapiens
gagttcttgcaggccgctcaacctttctgaggctagacgttcatgggcaaaatgaagaggcctgcttggtaagttttatagacagcctcttagaaaacactttgctaagtactaccatgaataatagaacaagcaaatatatccattggcctttgagaggtaataaggtcatgagagtttgctgcttctttctctgctctcaaccatttgaagatacaatgagaagacagccatctgcaaaccaggaagcaggcccccaccagcctccaaaatgatgacaaaagtctgttgttgatgttgcccagtctrtgataatttgttacagcagcccaaactaagacaatatctataagcctacagttttttatagtctacttgccaaggaagagggcaagatagcacacaaataattactacacaaactctaaaatgctttcctcctctaaaaattatttctatatgataaaatttactggcaactagaaaacaaagaaaacttgaaatgagagaatcattaaaattcttgccaatattttccataattatgaaacacagaactgtgcaaagcactatagagagaaataaaaggaaaatccaaaacttcttaaaatattcttcacatgggccaggcgcggtggc

SEQ ID NO: 864522 - DNA, 639 bp, Homo sapiens
gagttcttgcaggccgctcaacctttctgaggctagacgttcatgggcaaaatgaagaggcctgcttggtaagttttatagacagcctcttagaaaacactttgctaagtactaccatgaataatagaacaagcaaatatatccattggcctttgagaggtaataaggtcatgagagtttgctgcttctttctctgctctcaaccatttgaagatacaatgagaagacagccatctgcaaaccaggaagcaggcccccaccagcctccaaaatgatgacaaaagtctgttgttgatgttgcccagtctgtgataatttgttacagcagcccaaactaagacaatatctataagcctacagttttttatagtctacttgccaaggaagagggcaagatagcacacaaataatyactacacaaactctaaaatgctttcctcctctaaaaattatttctatatgataaaatttactggcaactagaaaacaaagaaaacttgaaatgagagaatcattaaaattcttgccaatattttccataattatgaaacacagaactgtgcaaagcactatagagagaaataaaaggaaaatccaaaacttcttaaaatattcttcacatgggccaggcgcggtggc

SEQ ID NO: 864523 - DNA, 639 bp, Homo sapiens
gagttcttgcaggccgctcaacctttctgaggctagacgttcatgggcaaaatgaagaggcctgcttggtaagttttatagacagcctcttagaaaacactttgctaagtactaccatgaataatagaacaagcaaatatatccattggcctttgagaggtaataaggtcatgagagtttgctgcttctttctctgctctcaaccatttgaagatacaatgagaagacagccatctgcaaaccaggaagcaggcccccaccagcctccaaaatgatgacaaaagtctgttgttgatgttgcccagtctgtgataatttgttacagcagcccaaactaagacaatatctataagcctacagttttttatagtctacttgccaaggaagagggcaagatagcacacaaataattactacamaaactctaaaatgctttcctcctctaaaaattatttctatatgataaaatttactggcaactagaaaacaaagaaaacttgaaatgagagaatcattaaaattcttgccaatattttccataattatgaaacacagaactgtgcaaagcactatagagagaaataaaaggaaaatccaaaacttcttaaaatattcttcacatgggccaggcgcggtggc

SEQ ID NO: 864524 - DNA, 473 bp, Homo sapiens
gtcagcatcatccttataccaaaatctggcggagatacaacaaaaaaaaggaaaacatcaggccaatatccttgatgaacactgatgcaaaaatcctcaacaaaatacttgtaaaccgaatccagcagcacatcaaaaagcttatccaccacgatcaacttggcttcatmtccaggatgcaaggttggttcaacatacacaaatcaataaatgtgattcatcacataaacagaactaaagataaaaaccacatgattatctcaatagatgcagaaaaagccttcaataaaattcaacatcccttcatgttaaaaactctcaataaactgggtattgaaggaacatacctcaaaataataagagccatatatgacaaacccacagccaatatcatactgaatgggcaaaagctggaaacattccccctgaaaacccgcacaagacaagcttgccctttctcaccacccctattc

SEQ ID NO: 864525 - DNA, 473 bp, Homo sapiens
gtcagcatcatccttataccaaaatctggcggagatacaacaaaaaaaaggaaaacatcaggccaatatccttgatgaacactgatgcaaaaatcctcaacaaaatacttgtaaaccgaatccagcagcacatcaaaaagcttatccaccacgatcaacttggcttcatatccaggatgcaaggttggttcaacatacacaaatcaataaatgtgattcatcacataaacagaactaaagataaaaaccacatgattatctcaatagatgcagaaaaagccttcaataaaattcaacatcccttcatgttaaaaactctcaataaactgggtrttgaaggaacatacctcaaaataataagagccatatatgacaaacccacagccaatatcatactgaatgggcaaaagctggaaacattccccctgaaaacccgcacaagacaagcttgccctttctcaccacccctattc

SEQ ID NO: 864526 - DNA, 641 bp, Homo sapiens
cctttccctaaattcaagtatttgtattactgataccacagttatttctaacttggtaagcaattaactacttaccaagtaaatgtcagggaagcacacatcagttcaactgccacacaacagaatactttagctacaacagactttacttctccaaatastcttctgccttggaaatatacaagatataattttgaaaaaaaaaaaaaaacaaacctcaagaacttaaataaaaattagagtttaatgcaatatttcttctcattgaaatctacccccacccaaagaagaataaaagctatctagtcttgctcagattagaagttatagataaaattctgggctgggtgcagtcactcatgcctgaaatcccagcactttgggaggctgaggtgggcagatcacctgaggtcaggagtttgagcccagcctggccaacatggtgaaaccccatctttactaaaaatacaaaaattagccgggcatggtggcccacgctgtaatcccagctactcaggaggctgaggcaggaaaatagcttgaacctaggaggcaggcaaaggttgcagtgagctgagatcgcaccactgcactccagcgcaggtggcagggtgagactccatctcaaaaaaaaaaaaaaa

SEQ ID NO: 864527 - DNA, 641 bp, Homo sapiens
cctttccctaaattcaagtatttgtattactgataccacagttatttctaacttggtaagcaattaactacttaccaagtaaatgtcagggaagcacacatcagttcaactgccacacaacagaatactttagctacaacagactttacttctccaaatagtcttctgccttggaaatatacaagatataattttgaaaaaaaaaaaaaaacaaacctcaagaacttaaataaaaattagagtttaatgcaatatttcttctcattgaaatctacccccacccaaagaagaataaaagctatctagtcttgctcagattagaagttatagataaaattctgggctgggtgcagtcactcatgcctgaaatcccagcactttgggaggctgaggtgggcagatcacctgaggtcaggagtttgagcccagcctggccracatggtgaaaccccatctttactaaaaatacaaaaattagccgggcatggtggcccacgctgtaatcccagctactcaggaggctgaggcaggaaaatagcttgaacctaggaggcaggcaaaggttgcagtgagctgagatcgcaccactgcactccagcgcaggtggcagggtgagactccatctcaaaaaaaaaaaaaaa

SEQ ID NO: 864528 - DNA, 613 bp, Homo sapiens
ctaacttggtaagcaattaactacttaccaagtaaatgtcagggaagcacacatcagttcaactgccacacaacagaatactttagctacaacagactttacttctccaaatagtcttctgccttggaaatatacaagatataattttgaaaaaaaaaaaaaaacaaacctcaagaacttaaataaaaattagagtttaatgcaatatttcttctcattgaaatctacccccacccaaagaagaataaaagctatctagtcttgctcagattagaagttatagataaaattctgggctgggtgcagtcactcatgcctgaaatcccagcactttgggaggctgaggtgggcagatcacctgaggtcaggagtttgagcccagcctggccaacatggtgaaaccccatctttactaaaaatacaaaaattagccrggcatggtggcccacgctgtaatcccagctactcaggaggctgaggcaggaaaatagcttgaacctaggaggcaggcaaaggttgcagtgagctgagatcgcaccactgcactccagcgcaggtggcagggtgagactccatctcaaaaaaaaaaaaaaaaaaagctatagatagaatt

SEQ ID NO: 864529 - DNA, 680 bp, Homo sapiens
tatatgcctgccaagctctatgcaatttacatagatgattccattcaatttcacaacaattctattaaggagatactataattttcctcattttatagtagaagaaaatgaggcattgaaagggtcagtaacttacacrgggtcatgaaaaatctactataagattaattttcccagatcttattcatcctctctcccttagcaagctttgttttcacagttgcaaatactattttctgtgatattgtgattatatactttcaacaacgatctcctgaactcaacctaacattttgaactgcccactgtctatctctactggcccatagcactcacaagcaatatcttcacatcaaatatactatcctaacccaaaaacatactcctttttttttatgttcactatcattactaacattacactactcttgtcctctataccagatggcttggagtcatcttcactgcacattccattagccatcaagtctttaggctatttccataatgtctaccacatctgcccacttctttccattctcacagctactaatatagttcacatcctcattcagtccttcatttggtcactcactatttgctcaacaaataattatctttatcattaacctgaacactggcaatatccttctaagaggtctctaccataagtctcaaca

SEQ ID NO: 864530 - DNA, 597 bp, Homo sapiens
ggactgcctgaattcaggaggtgcaggttgcaggttgcagtgagctgagatggtaccactgcactccagcctggaggacagagctaggctccatatcaaaaaaaaaaaaaaaaatgccacctgaaaaaaaaaaaaaaaagattctagctagctatggagtctcacacctgtaatcccagcactttgggagatcaaggtaggaggattgcttgaraccaggaatttgagggcaacatagtgaaaccccatcttcacacacgcacacaaaatagctgggtgtggtggtgtatgcctgtggtcccagctcatcaggaggctgaggggggaggattgcttgagcctggaagatcaaaactgcagtgagctgtgattgcactactgcactacatcctgggcaaaagagtgagtccctatctcaagaaaaaagcaagtgaggccaggcacggtgtcttacacttgtaatcccagcatttgtgggaggccgaggtgggcagatcacttgaggtcagaagttcgagaccaggctggccaacatggtgaaactacctgtctctactgaaaatacaaaaattagccaggtgtggtggcgtgtgcctg

SEQ ID NO: 864531 - DNA, 498 bp, Homo sapiens
ctccagtcagacatcattttctttcattaggaagaactttctttttagcatctcctataatacatgttcactggcaacaatttccctgaacttttgtgtgcataaaaatatactcattttatatcattatttttgaatggtattttcagtggataaagaattctggaccaggcgcagtggctcacacctgtaatcccaacactttgrgaggccgaggtgggcagatcacaaggtcaggagttcgagatgagcctggccaacatagtgaaaccccgtctctactaaaaatacaaaaattagccgggcttggtggtgcatgcctgtagtcccagctaccaggaagcctgtggcaggagaattgcttgaacctggaaggcagaggttgtggtgagccaagatcgcaccactgcactccagcctgggcaacagagaaagactttgcctaaaaaaaaaaaaaaaaaaaaaaaaattctggatgcccagaacattttttctctc

SEQ ID NO: 864532 - DNA, 673 bp, Homo sapiens
actataacgctatagttaccaaaacagcaagattctggtataaaaataggggcatagacaaatagaacagaatagagaacccagaaagtatttacagccaactgatcttcaacaaagcataccaaaacataaactggggaaagggcacactattcaataaatggtgctaggaaaactggcaaaccacatgtataagaatgaaactggattcccatctctcaccgcatacaaaaatcaactcaaaatggataagacttaaatttaaatgtgaaaccataaaaattctagaagattacatcggaaaaacttctggacgttggtttaggcaaaaaattcatgattaagacccaaaagcaaaaaataaataaataaataaataggacctaattaaactaaaaagcttcagcacggcaaaagtaataatcagccaagtaaacagacaacacacagagtgggagargatatttgcaaactactatgcattcgacaaaagactagtgtctggaatctacaataactcaaacaaatcagcaaggaaaaaaaaaatcccatcaaaaatgggcaaaggatatgaatagatgtttctcaaaagaagatatacaaacagccaacaaacatatgaaaaagtgctcaacagcactaatcattagagagggaaatgcaaattaaaacc

SEQ ID NO: 864533 - DNA, 604 bp, Homo sapiens
tttgaaaaatacagagtttaaaacaacagcttaatttgactaaacttagaaataatcactatggaggaaattttttaaagagaataaattttttcatatgaggagagaaaaacaggatacaatggatgccacaggtttgaacacactgcctttcttatatctaccctcttcactttcagggaaattcttatgtttgcaaggggacttcaggggcatctgttctagggagatattaatgctttcaattcatgattgagagatttggaaatgagaaagaaaaataaacatatgtcaggggaaaatgtgttttgtgagttgaaaggggtcrttaacaatgtactgtaaagaatgactgtaaagctctcataactatatccacattgctaccatataaaatatgtctaaaaatgttccttcctcttaaattaaaagttaactgcatacagaatatccagtgaaaatgaaatgcaagacaaagcactgacttcataagaaattaggtcaaaccaaaaaaaaatggatgattaaaattttctgctaatcatctctagatattattaaactatgctgaatgtaaaacaccacatatatttgagtcttctga

SEQ ID NO: 864534 - DNA, 604 bp, Homo sapiens
tttgaaaaatacagagtttaaaacaacagcttaatttgactaaacttagaaataatcactatggaggaaattttttaaagagaataaattttttcatatgaggagagaaaaacaggatacaatggatgccacaggtttgaacacactgcctttcttatatctaccctcttcactttcagggaaattcttatgtttgcaaggggacttcaggggcatctgttctagggagatattaatgctttcaattcatgattgagagatttggaaatgagaaagaaaaataaacatatgtcaggggaaaatgtgttttgtgagttgaaaggggtcgttaacaatgtastgtaaagaatgactgtaaagctctcataactatatccacattgctaccatataaaatatgtctaaaaatgttccttcctcttaaattaaaagttaactgcatacagaatatccagtgaaaatgaaatgcaagacaaagcactgacttcataagaaattaggtcaaaccaaaaaaaaatggatgattaaaattttctgctaatcatctctagatattattaaactatgctgaatgtaaaacaccacatatatttgagtcttctga

SEQ ID NO: 864535 - DNA, 588 bp, Homo sapiens
ctaaggcattaaaaaaaatgtgaccttcactaaagttcccaaaaagttcctcatttccatctgagacctcattagcctggccttcactattcatattactaccagcattttgttcataattacctaattggtctctaagaagatccaaacttttcctgatctttctcttttcttttgagccctcaagactcttccaaccactgcccagtacycagttccaaaggtacttccacattttcaggtctccttatagcaatgccccactccttggttccaatattctgcattagtccattctcacattactataaataaatacctgatattgggtaatttataagaaaataggtttaattgacacatggctctgctgtctgtacagggagtgtaaatactgaatacctgagacaggtctcagtcaatttaggaagtttattttgccaaagttaaggatgtacacccatgacatagcctcaggagctcctgaggacatctatccaaggtgctccaaacacagtctggttttatacattttagaaagacatgagacatcaatcaaaatatgttagttgaacattcatttggtcc

SEQ ID NO: 864536 - DNA, 649 bp, Homo sapiens
agatattttaaaaacattgtttgtgttacctaggaaagataaaatactaatcacattgcttgattcattcaaaatgttcatactacattaaaagaatagaaatcctgtgatgtgttcttaactccatttgcagtgaggatgcaaatgttagtaaaatgcatgtgtcatcatggtgctcataggctacttgaagtgtagggtatgtagacactgtattacaagctgttaaaggcacatggtactggctgggcacagtggctcatgcytgtaatcttagcaattttggaggccaaggcaggcggatcacgaggtcaggagaatgagaccattctggccaacattgtgaaaccccatctctactaaaaatcaaaaattagctgagcgtggtggcacacgcctgtagtcccagctactcaggaggctgaggcaggagaatcacttgagcccgggaggcagagattgcagtgagccgaaatcatggcactgcactccaggctgggcaacagagcgagactctgcctcccagaaaaaaaaaaaaaagacacatggtaccaggaggtaatggagagggctttcttacttaagaatggagtagctgacacagtgcagaagtgtagtaggagatggtccgagagccaaggagaggtaa

SEQ ID NO: 864537 - DNA, 595 bp, Homo sapiens
tgggattacaggcgtgagccaccacgcccagcctagcctactcttttaagcattagcaaataagaacagaagagtagtggaaatgtagtcgataaatgtaaatatataatattgctgatttttgagcaactgcagaagatgggtaactctatgtgacctaaatgttagaatccacattttaggaaagagatagatgacttayaggaaacttgggctacatgtaccacagttacagatctgcacacaagaaggaaacagagtatcaagagatgaaactatgagccagaaatagaatgcttaagtggaatcttaagaaagatggatattatatatgagattcaacaggcaaagacagaatggaggcacccagacacaaacaagaatgccatgaagtacagtcaggatcattctgggagtgtttgaagaattgaacaatagtatgctattaaatggctcgtggaagaaaacaaaaacaccatttgtagcacaccaatttccatgatattaatataaccaccaagccccatgtcaaggtaagaatgttattagttagatcatgaagttcctgaaaatttgtcatctagctcttgaaaac

SEQ ID NO: 864538 - DNA, 655 bp, Homo sapiens
gtttttttttaataataatttctgttaaactattaagagagagattagacagacagatagataaagatagattctattgcttctaattctattttactaaagattttggtactaaaaagtggttctagagaaacagaatgttaaatctgwgtttgcttaattgattctggggtttgtgaattggctatttaactagatttaaaaatactgactcatggtggctcacgcctgtaatcccagcactttgggaggccgaagcaggtggatcacgaggtcaggagatcgagaccatcctggctaacacggtgaaaccccgtctctactaaaaatacaaaaaattagctgggcgtggtggcgggtgcctgtagtcccagccacttgggaggctgaggcaggagaagggtgtgcacccaggaggcagagcttgcagtgagctgagatcgcaccactgcactccagcctgggtgacagagcaacactctgtctcaaagaaaaaaaaaaaaactgattcctcattttctagtagagtactgatagtctatagtataatatggcaataaagatataccaagtatctctattgtatactcctaatcaaccacttggaagaagaaaggaactgggtcactggatatatgacactttcaaacatttt

SEQ ID NO: 864539 - DNA, 655 bp, Homo sapiens
gtttttttttaataataatttctgttaaactattaagagagagattagacagacagatagataaagatagattctattgcttctaattctattttactaaagattttggtactaaaaagtggttctagagaaacagaatgttaaatctgartttgcttaattgattctggggtttgtgaattggctatttaactagatttaaaaatactgactcatggtggctcacgcctgtaatcccagcactttgggaggccgaagcaggtggatcacgaggtcaggagatcgagaccatcctggctaacacggtgaaaccccgtctctactaaaaatacaaaaaattagctgggcgtggtggcgggtgcctgtagtcccagccacttgggaggctgaggcaggagaagggtgtgcacccaggaggcagagcttgcagtgagctgagatcgcaccactgcactccagcctgggtgacagagcaacactctgtctcaaagaaaaaaaaaaaaactgattcctcattttctagtagagtactgatagtctatagtataatatggcaataaagatataccaagtatctctattgtatactcctaatcaaccacttggaagaagaaaggaactgggtcactggatatatgacactttcaaacatttt

SEQ ID NO: 864540 - DNA, 540 bp, Homo sapiens
tgtccccaggctaagtgcagtggcatgatctcggctcactgcaatctgcacttcctaagttcaagcgattctcttgcctcagtctcccgagtagctgggactacaggtgggcaccatgcccagctaatttttatatttttagtagagacggggtttcatcatgttggccagaatggtcttgatctcttgacctcatgatcttcccgcctcagcctcccaaagtgctgggattacaggygtgagtcactgtgccgggcctcaatttgcatttctaagtgataactgaagtccaggttcaaagcaggcatttgaggaatacatgagactaaaatacataaataattctagattcaattctagtttcagaaaatacatacgaatattaagaaacttgcagtaaagttttaatttaaaagaaatacattttatatttattttattttctgttaagtagtgcttgcccttagcttatctctttaaacctactctatttcatttttggattaaacctaatttgtgttttaaaatatgacactaatt

SEQ ID NO: 864541 - DNA, 566 bp, Homo sapiens
gttaaaattaattattttaaagctaattttccatttcatggaaaagtatcagagttataagattgcaaattttatccgccacctcctatatatcccagttatatattgtatacctgtaagatttttgcacacttatgtgtgctgcattagattccaatatttaaaaactagaattagaaaaatcttacaatcagctaagaaaaaaaataggagacatatccaaataataaaatcaatgttaatgccaaacagaagccacgtgggtagtagaaaaagtgatcctaagcactgagaaaacaaagcaaatgcaatccatgggacaattgatcctattttcaaaagtgggaaagcctatttcttgatgctgctcagaaagagcrtgtacatagcagacgtaactttgtcttcactcaagtcatatacctatgtaatctccagattccttttcaacacagtgaccaaattctctgaatattaatatctgaataatatcaccatcacttgtttgcttcaaatagtggctaaaaagagatcatcttagaagacttccttgaaccattcttgtg

SEQ ID NO: 864542 - DNA, 558 bp, Homo sapiens
aattggtgctcaataaatgttacattttctttttaaaactttttaaaattcgcatattttcttaaaaatctctaaatattaaaataaaaatactatattatacttttgatatattaactgaacccaatgtttaaggaatatcactaaacagaaagaaactaagataatttaggaaaaaaaaaactagtttaaagatagaagtacttgctcacatatgtggttgaatcattttaacttatagtcagaaagtatttttcacatcttatgcactggttatggctggaagatttttatatgtttatctcagatttctggggcaggaaaagggaaataaatttaataatctaacaactaagtccctttgaatgcaatttttttttttttttgaaacagtgtatccttctgcagcccaggckagagtgcagtggcatggtcacagctcaatgcgctcgacttcctgacttcatgagctcaagtaatcctcctctttcagcctcctgagtagctgagaccacaggaacacagcaccacaactggttaatttttaaaaatattttt

SEQ ID NO: 864543 - DNA, 662 bp, Homo sapiens
caaggaaactctgagataatatatttgtgttttattaacccactacagttgtggtaatttcttacacagtaatagaaaactaattctatgtatttcatctgttttgtggagaattcagtttgctaaaaaaaaggaaaaggaagtagagcagatcactaccatcacattttcatttcaaaacaaggctgtgcatcattttgaagactggagttgaatggtatgcagattgaggtcctttatgacagaatagatggatgaacttggtggttggctactgaggtacaagcaagakacctcagattaggatggtggtagcagatattgtgtagaaaggacagatgttagagccatttttagggaacattgaagaactggaataatggacatgaatggagaagataggcatccatattggaccagcccctgtccacagtattgaagatatccttatatgtaagtcactttgggacatcagatatcagatataacagtagagaaattgagaaggagaccattcagtatatttcccacttttgtttatgtagttgcattatttatgatgcaatcaaacctcatattttcaccattattttatatttttgttcgatgtttaatagcccatgttaagtcatcatagatataagagtaacaaagcccaggca

SEQ ID NO: 864544 - DNA, 629 bp, Homo sapiens
aaggggtgatttccatctttgggctactgtaaatagtgctgccatgaacatgcatgtaaatttgtttgtttggttcttagtttccatcagttggggaagataactagcagtgggacttctgggtcctatggtaattatatgtttaactttttgagcaagtgacaaactgagttttatagaagctkgcacattgaacatttccagcaatgtataaagttctagtatctccacatccttgccaatacttttttaaaaaaacaactgtagccagccaggtgtggtggttcatgcctgtaatcccagcactttgggaggctgaggtgggtggatcacttgaggccaggagtttgaaaccagcctggccaacatggcgaaatcccatctctaataaaacaaaaattaaccaggcatggtggcatacgcctgtaatcccagctacttgggaggcagaggcacgagaatgcttgaagctgggaggcagaggttgcagtgagccaagattgcatcactgtgacagagcaagtgacagcctgggtgacagagcaagactctgtctcaaaaaaacaaaaataaacaaaaaaacaatgaagtggtgtctcattgtgctcttgatttccattttcctaatg

SEQ ID NO: 864545 - DNA, 650 bp, Homo sapiens
tgagtctaaagcttaaccataattttctttttttatttttattttttatttttttgagacaaggtcttactctgtttcccaggctagagtgcagtggtgcaatctcagctcactgcagcctctgccccctgggctcaagtgatcctcctgcctcagcctcccaagtagctgggactggaggtgcaaaccaccatgcctggctaatmaaccataaaaatttttcatttttatgaagtccaacttattccttttttacagattgtgcttttggtgtcatgtcaaagaattctttggttagctcttggtcctggacattttttaatgttttctcctaaaaatgtagtagttctacatttaatatttaaatctataatccatctttaattatcttttgcaaagaatgtgaggcttaggttgagtttcttttttgttaatatttttaatgtccaattacgccagtatcatttgttgaaaataatattctttcttcattgaattttttacgtatgtcaaaagtcaatattgtgtgtggatctatttccggactctattgtgttccattggtctgtctaccgtttagccaatatcacactgtcttgataattgtagcttaatagcaagtcttgacatactccaatgttgttcctttt

SEQ ID NO: 864546 - DNA, 600 bp, Homo sapiens
ggatggggagagaagggttgactaaaatggacagaaggagggatttttgggcggtggtggaacttatgaagtaaagcactaatcttctccaaagagaggtttggcccttgctctcaactcctgggagatgacctctaagcctctgaaatttcctgcttgggaagagtatctttgtttacctggttgccttgggccatgccagatatgctaacaatatgttttatgatgggggcccttaggccatgcggtatgaactccacctgtgcagactatggtcacccatgtggatagtcaatcacgtctatgtgattgaacccaagtaaaatatctggacaccaaggtttgggcaaacttcccttattggcattattctgcatattgtcgcaaattgtttctgaaagaaataggtgctgcctgcatgatttctctgaaagaagacaactgggagctctgtgcttggtgyccactggaccctaccctatgcagttcatccctctactgactttgttctgtagcctcctgctgtaatatactgtacctgtgggtataatgccttttctgagtcttgtgagtaaattattaaacctgagggtagtgttt

SEQ ID NO: 864547 - DNA, 642 bp, Homo sapiens
ttgggcattaaggatgccaaaattcatgttgaagattcttcaaggggtgcatttttttttcctggtgtagacactggatacatgtgctttctggatcctctcccttcaattgtacaaagcttagcagaagtcacttggcaagtctaagactaactgtggctgatcacctgcacctatttgtctcaatgtgatgcctgagccctgtggaattgtttctacttgcttcatagatctggggaaaaactatggttgcacttcttgtatttttccaaataattgttcgagaggaccacttttcttattaacagaaagtccagaatcactgttaattccttttccacaacactaattttccacaaccttgagggtttgattaatttgggaaggggggctggggttagcactgcttccaaatgccaagtacaaagcaaaccagaatagtggttgagtccmccgctgcccttgcttcttgctgctgcattcagttgtcagatggttggtgaatggaccactgtctgtccagggctcactagtgccctcttagaatcctaggctgaaactcttcatttcacacccatgtggccagaggcttttctaaaaggacaaccactgagctaagatatatggtgattctggcttcag

SEQ ID NO: 864548 - DNA, 623 bp, Homo sapiens
tcaatgttcatcagggatattggtttaaaattctttttttgttgtgtctctgccaggctttggtatcaggatgatgctagcctcataaaatgagttacggaggattccgtctttttctattcattggaatagtttcagatggtatggtaccagctcctctttgtacctctggtagaattcggctgtgaatctggtcctggactttttttggttggtaggctattaattattgcctcagtttcggagcatgtgattggtctattcagggattcaacttcttyctggtttagccttgggagggtgtatatgtccaggaatttatccatttcttctagattttctagtttatttgtgtagaggtgtttatagtattctccgatggtagtttgtatttctgtgggattggtggtgatatcccctttatcatttttattgcatctatttgattcttctctcttttattctttattagtcttgctaccagtctatcaatttcattgatcttttcaaaaaaccagctcctggattcactgattttttgaagggtttttttatgtctctatctccttcagttctgctctgaccttagttatttcttgccttccgctagcttttgaatgtgt

SEQ ID NO: 864549 - DNA, 627 bp, Homo sapiens
tgacctttgtatatgaattgggcttccccacagcatgttgacctcccaggtattctaactttttacacgtttattcaggaactctaagagtgagaattccagttaaaaaataaaagtagaagccacgtgaacttttatgagctagtctcaggagtcacatggtaacacttctttctactctgttggtcaaagcagccaaaagtccatgggtagggacatagacttacttctcgatgggctgaattttttttttttaattgctgtggtcacgttaccaaaccaccatcarttagatcactgtcagctatgctcacattgcatcagggtaggttgatgaagactgaagaaactgatgggatcacagctaaagagagctcattaggtatcacattggcctaaaaatgagctttctgagagtccaaagtatagtggccaaaagagtggagaaaactcagtcttgctctgagctgttatttgtgatgacctaatccagggtttcttataatgctgcagaagtttccaggcagtggtcatgggcaaagctaaccaggaagaagattatgatgatataatcttgttttctgattatagatcatggttgagagcatgagctttggaagcagacag

SEQ ID NO: 864550 - DNA, 558 bp, Homo sapiens
ttttgcatttgctgaggagtgttttacttccaattacgtggtcaattttagaataagtgcaatgtggtgctgagaagaatgtgtattctgttgatttggggtggagagttctgtagatgtctattaggtccacttggtccagagctgagttcaagtcctgaatatccttgttaataatctgtctcaytgatctaatattgacagtggggtgttaaactctcccactattattgtgtgggagtctaagtctctttgtaggtctctaaggacttgctttgtgaatctggatgctcttgtattaagtgcatatatatttaggatagttagctcttcttgttgcattgatccctttactattatataatgcccttcttttttttttttttatgtttgttggttaatgtctgttttatcagcaactgggattgcaacccctgctttttttgctttctgtttgcttgctaaatattcctccatccctttattttgagcctgtgtgtgtctttgcatgcgagatgtgtctcctgaacacagcacactgatgggtcttgacttttt

SEQ ID NO: 864551 - DNA, 611 bp, Homo sapiens
ttcagatggggtttttgtgtgaacattctttttgtttatgctgatgctattcctttctgtttgctagttttccttctagtagtcaggcccctctgctgcaggtctgctgcagtttgctagggtccactccagaccctgtttgccagggtatcaccagtggaggctgcagaacagcaaagatttctgcctgttccttcctctggaagctttgtcccagaggggcacctgccagatgccagctggagctctcctgtatgaggtgtctgtcgaccccttttgggaaatgtttcccagtcaggaggcacagggttcagagacccacttgaggaggcagtctgtyccttagcagagctcaagcactgtgctgggagacctgctgctctcttcaaagccagcaggcaggaaaatttgagtctgctgaagctgcacccacagctgccacttcccccaggtgctttgtcccagggagatgggaattttatctataagcccctaactgggcctgctgcctttctttcagagatgccctgaccagatagaaggaatctagagagctacttttcattattattttgttaatgatagcacttctggctatgtccagagcacaa

SEQ ID NO: 864552 - DNA, 611 bp, Homo sapiens
ttcagatggggtttttgtgtgaacattctttttgtttatgctgatgctattcctttctgtttgctagttttccttctagtagtcaggcccctctgctgcaggtctgctgcagtttgctagggtccactccagaccctgtttgccagggtatcaccagtggaggctgcagaacagcaaagatttctgcctgttccttcctctggaagctttgtcccagaggggcacctgccagatgccagctggagctctcctgtatgaggtgtctgtcgaccccttttgggaaatgtttcccagtcaggaggcacagggttcagagacccacttgaggaggcagtctgtcccttagcagagctcaagcactgtgctgggagacctgctgctctcttcaaagccagcaggcaggaaartttgagtctgctgaagctgcacccacagctgccacttcccccaggtgctttgtcccagggagatgggaattttatctataagcccctaactgggcctgctgcctttctttcagagatgccctgaccagatagaaggaatctagagagctacttttcattattattttgttaatgatagcacttctggctatgtccagagcacaa

SEQ ID NO: 864553 - DNA, 588 bp, Homo sapiens
ggaagatacagttattgaaggcaaataaactcatgggaagaagaggccggcaaatcccttggttatgtctgtacagccaagattaggcagcaggcatacttctttttgaaataaccaaacttaggcaacacccaagggcccatgactccatgattaacatgatctgtggcccttttaatattattccaaatttatttgatgggatgagtccacttgattccattttcacatccagaattgaaacttctgagctctcaaccaacaaagacccaaatgcttcttttcttaattagtataatgaggcttttggcttctgctttatgacaagtaagtgaatttgccctttyggtgacatgtccttaaaggagtgatctaaaggcttgtgcaacaatcccttcaaggtagaaggccattaaaaacagttgtccaactatgaaattggttattgattaatatcccaacaagaagatcattacattatgaaagaaagggaagcaacatttatgttcttggccacatcttactgagggctttaaatatagaacatgtagaattattgctacttgagaagaagaatgatagttagaa

SEQ ID NO: 864554 - DNA, 628 bp, Homo sapiens
tgtttctttaccaccttacttcacatgaacttttcttccattccacctcagccacttacttgcatggccatactttagatccacatcatttaaaaccaccctatcttcacaatctcccttgcaaatatccagtttccatgactctcagttcattgaccccaccactttaactttccatcaacacctcccccactttgttctttcctcatcacacttggattctgcaggtcatcgttacacccaaaatatcataaaagccctcaatgctggtgttcctcactccttcatattatttcacatccagatggaactcatcataaatacctcttaagtgcctgtgcacaggcatttgacaaattctagaagaaacctcagtcctcaaacctcaaaggtgacacaaatcctggaccagaaccctcctacatttctctggycgtcttgcttctgaagacatggagatcactacgttcagccttctattctttgagatatggtcaccatccgctccttctcaagttcatcaatacttcattaataaaggacacaacctccaccaaatatataagcctgcatttgtcctttctccttgcctcctgctacaaccaaggaaggcttttcttttttcatg

SEQ ID NO: 864555 - DNA, 666 bp, Homo sapiens
gctgaggcagagttcccaagaaatgcttgctggtgctagtagtataaatcatcactggtataataataatgttttaactgagtgatttgtcccttgatgaaatggattcctgagctttgaacttgttcaggaaggctacaatcaagttagtcacagtaattgatggaagtttggtaaaagatatttaaatattaatcaggggaactttaagatcccttaggctctgtagtcccagcactttgggaagccgaggagggcggatcacaagatcaggagatggagaccatcctggctaacacggtgagaccctgtctctgctaaaaatacaaaaaagttggccgggtgtggtggcrggcacctgtggtcccagctactcgggaggctgaggcaggagaatggcgtgaacctgggaggcggagcttgcagtgagccgaagtcgcgccactgcactccagcctgggtgacagagcgagattccgtctcaaaaaaaccaaaagaacaaaaagcaaagatccctcaggctcgtagctctatgattctaagaatgaagccctaggaaagtaaaacagcacttaagtcattttaccttgggtctcctccagcaaaggcagtactctgggaggaaatttggctccagagacctcttctcctattcttctgctacag

SEQ ID NO: 864556 - DNA, 615 bp, Homo sapiens
attggtgaatgttactgttaaaagttctgtggctgtttagaaatgctattttacagtaatgatataaaagacactgtccctgctcttgatcctaaatagggagaagaatatgtaggtgagtatattaggaaagtgctataaaggaggtggcattgccacatcatcaccaacatcatggggctttaaaatcatagcccaaggttgaattctggctctgctcattaatagctctgagacctgagcaagttggtacttaatgcatgatagtatgaaataaaatattatttcatctccttctcctcttcttctttgcccccatcctttttatctgttgaataatgtttgttatgggacccagagggagataaatacyttgagagaagaggctctggagttctttacaggagagacatttatgctggaggggtatggtcatgaaggataaataaaaatttagtagatgaggaggtgcatttagggaacagagagtattctgggccaaagcaaagggtatatgccaaggaaaatgaaacttccctcagggaagagttttaagggttggtaatagttggtgtggcattcaagggcaagaatacagtgcagttcaaaccatgg

SEQ ID NO: 864557 - DNA, 615 bp, Homo sapiens
attggtgaatgttactgttaaaagttctgtggctgtttagaaatgctattttacagtaatgatataaaagacactgtccctgctcttgatcctaaatagggagaagaatatgtaggtgagtatattaggaaagtgctataaaggaggtggcattgccacatcatcaccaacatcatggggctttaaaatcatagcccaaggttgaattctggctctgctcattaatagctctgagacctgagcaagttggtacttaatgcatgatagtatgaaataaaatattatttcatctccttctcctcttcttctttgcccccatcctttttatctgttgaataatgtttgttatgggacccagagggagataaatactttgagagaagaggctctggagttctttacaggagagacatttatgctggaggggtatggtcatgaaggataaataaamatttagtagatgaggaggtgcatttagggaacagagagtattctgggccaaagcaaagggtatatgccaaggaaaatgaaacttccctcagggaagagttttaagggttggtaatagttggtgtggcattcaagggcaagaatacagtgcagttcaaaccatgg

SEQ ID NO: 864558 - DNA, 634 bp, Homo sapiens
tatagacataaataccattaatattttgatgcatacactttgagacaaataaaaatgtatctggtatgtacacaggaaaaatatgtagatacttttaaaataaaatgagatgatactgtacatactctcctgtaatctgcttttttgcacttaatacatcataggcatctctgtawgtcaaaaaatatttgataccattttttaatgtcaggacggctgaattccattgtataactgtggcataacttaacaaattcctttcttagacttttaagttatttcatttttttcataaaagaacataacagcccccatctcataaaattattggaaatattaaatgagatgaagtacttaaattacttgacacagatcctttcacgtaataaatatggagtggaaattagctattttataatttaatttttgttattataatacctcttatctgaaatgctttggaccagagaaatattagatttgatttttttggattttggaatatttgaagactatataccagctaaacattccttatctaaaaaatccaaaatctgaaataatccaatgagcatttcccatgagtatcatgtcggtactcaaaaagtttcaaattttggaacactttgaattt

SEQ ID NO: 864559 - DNA, 626 bp, Homo sapiens
ccagagaataaatgatatactctagtatctccaaccctcttcttttaacttacccttttctgaggggatggctcccagggggccatatctatataatctgattggaaggtggggaggggtaagagggaggtctaaagctacatttgtcaaaactaagaaaatgttccctgtgcacatccaaggatggagagaggcaagtggagactaaaggagcagctcagcctttcattttmtaccactggctgcttctgaaatcatatctccccaacccgcacagtgcagaacactctggtgtgcaatcgtcagagtatcacttcttggtcggacactggtcagacaccttaactggaatcaaattacctttcagtgaatgcagaatcgatttcattttctcaggcccactcctgaccttgtgatctgcttaccttggcctcccaaagtgctgggattacaggcgtgagctaccacgcctggccgagacagggtctcattcttttgcccaggctgcagtgtagtggtgtgatcacagctcactgaaatctcggagggtttccttgtacttccttttgctcatgtcctactttcaaaggcccagcttatgccccacctcttctaggaaaccttcc

SEQ ID NO: 864560 - DNA, 636 bp, Homo sapiens
gaaggcttaatcctacagcctggatggtaccaattatttgcgtggtatctggtggtttttctctgagggataaagcattgttgccacttatcagtactgtggtggaaatataattggtcatcagaatgaggtggactatgaaatttctaaccattgggcagtggagctgagactttctgcaggaggacagtggtagagccttagatcaatcctgtgacactagaagattttgcayccatgaaaggtgataagaatctgctttggacaacaggaggaggcactgggttttgaagatgtgggtttgaggtgaaattggaacacataaattgaattacttcacagctagggaggctggaattcggtgagaaagccctaagctgtagcttttggaattagactgggtgtaatagatgatgacaaaatcatagactaaggattctctgagggagatatgatcctttaatcttacttattgtcttctcccaatattagttcaactgaaatttgggggagtttggaagaagtaaagatgttctagccttaattatttcctgtagcacttggttttcctctgtgtgcttcaggattaagcgatgtttatagacctccctctgttatcttgtttttgcatctatt

SEQ ID NO: 864561 - DNA, 647 bp, Homo sapiens
tcctctctaatgactctttctttgctttgggtagtttcttcacacacgagcaccaattgttaatcttctgatccctttatccagctctcctgtgcagtagtcctgcaggcaccagccagtttagtctctatttcctttcagctctgtatcctcaactcgtaattgcttcattgagattcctctttcctattcctagaatctcttacaatgcaaaaaccaaggccaactacagactttaatttatttattttccatctgtcaggaatctgtccttcagtgcctcgtgtcctagtgtcatgtttacatatttgtctgactatttttgttgtttcaggtaggagaatatatcttatctggttttccttgcatcctattgtttgaaagtagaagttgactttatcttttatcgtgccattgtacttacgttttatacttctttttcctatgatacctcctaaagtctacactagaatacgttgtcattattctactttttgyaagaattccaatggacaagatttgtgctctataatactacaaatctttttagtagataagaaagcactgacttaaactgtcaatgggtaacagtaaaaagatcagtaaaaataattttttttctgtcatttgatagtaggcattcccaa

SEQ ID NO: 864562 - DNA, 670 bp, Homo sapiens
tcgttcaggcatccgctgatatccattcacaaaggacatgccctccacctcatgtctaccctgtgttgttttatgtgagtaatcttacagtattaaaatctagtaggagtctctttactcagcacttgctcaaagttctcagctgaggcttttgttgtagggagacaccatgtctttgcgggatgggtccttccttcagccctgggcaccaaggtgtgatagtagccatagaaacgtggaaagcgaggagaatcttctgagcacagggagggaagggcagttccacatcctcctctctaaggcggcgcctccttctccccaaggtggtcaggacaagcccttgctgtctgcctggcccagccttgtggtgcctctaggacatgtcattcttcggtgtcactcttatcttgggtttaacaacttcagtctgtaaaaggaaggtggggtgcctgtccctgagctcyacaacagaatattctggaacagccttttcatgggccctgtgacccccgcacacacagggacatacagatgtcggggttcacacacacactcccccagtgggtggtcagcacccagcaaccccctggtgatcgtggtcataggtcagagggctcctgtcttggattctccttgtcccacctcctgaatcccagagcttctgttgggc

SEQ ID NO: 864563 - DNA, 616 bp, Homo sapiens
aggacagtttcagaggagatttagctaaggagatctctgtcttccaaacctctctgtcttgcacaggtttatgtaataacaatgattaataaaaatagtagattctgaattttgttttggaataaaattaataaggctgcgtgcttctgagagagaaatttgtaaagtggcagacagggacatcaagaactctaattaccacatgccctagaacccatctgaggagaaaagatayagtctcagacaagatagttcctcctcgagatgcctgattaatgtcccctgactaatcttccccagtgcccaagtgagaaagggttagaagttaaccagtcttccctattatagtcacacatgtgcctcatattattattaaacatgtgagatatgttattttagatatgtgggattaagggaactatatttatatctatacattattaatattggcttaagtgtatgtattttaaagtagaatgttagcacatgcccattagctgtagtaggctacagtatgcttgctttgggcagcaagagccaattgcacacctctctactcaacttccagttaggtgaagccaaactggtaacttgaaattggccatgaagggagtat

SEQ ID NO: 864564 - DNA, 616 bp, Homo sapiens
aggacagtttcagaggagatttagctaaggagatctctgtcttccaaacctctctgtcttgcacaggtttatgtaataacaatgattaataaaaatagtagattctgaattttgttttggaataaaattaataaggctgcgtgcttctgagagagaaatttgtaaagtggcagacagggacatcaagaactctaattaccacatgccctagaacccatctgaggagaaaagatacrgtctcagacaagatagttcctcctcgagatgcctgattaatgtcccctgactaatcttccccagtgcccaagtgagaaagggttagaagttaaccagtcttccctattatagtcacacatgtgcctcatattattattaaacatgtgagatatgttattttagatatgtgggattaagggaactatatttatatctatacattattaatattggcttaagtgtatgtattttaaagtagaatgttagcacatgcccattagctgtagtaggctacagtatgcttgctttgggcagcaagagccaattgcacacctctctactcaacttccagttaggtgaagccaaactggtaacttgaaattggccatgaagggagtat

SEQ ID NO: 864565 - DNA, 638 bp, Homo sapiens
gtgaggactgcctccggagacttgcaactgacctgcagccattcccaggcacatgactagttggaagcatgcacctgctattcttgtgtttcactcaaaaagaaccatggatgctgtgccagcttccataaaactggtaaagaaatggtatgtcaaacacctatccccaaaatgttatgggtgatgaaagcttctgggataaggaggataaataaaaaaaaaaaattccagtccaacacagctttaggaccagaaygctagagatctccttcaacattctttctatacaatgaaggaaaatgaggataagacagacaattttatttgaaaatattgcccaaaatgaggtctccttctcttccgtcaagtcacacacataattatgatgttatcctttacacccttaatgggatgcagtgaaatcagctgcagagtggttagtgcctggcctttggagtcataattacctgaatctgagtaccaactccacgttctctctgggcaacactgcagacattgtataacctcattgggccttagtttcctcacttaaaatttggggatttcagggtctacttgacagtgttattttgaggattaaatgagatgaataagcagagtgcttagcgcaatccaga

SEQ ID NO: 864566 - DNA, 638 bp, Homo sapiens
gtgaggactgcctccggagacttgcaactgacctgcagccattcccaggcacatgactagttggaagcatgcacctgctattcttgtgtttcactcaaaaagaaccatggatgctgtgccagcttccataaaactggtaaagaaatggtatgtcaaacacctatccccaaaatgttatgggtgatgaaagcttctgggataaggaggataaataaaaaaaaaaaattccagtccaacacagctttaggaccagaacgctagagatctccttcaacattctttctatacaatgaaggaaaatgaggataagacagacaattttatttgaaaatattgcccaaaatgaggtctccttctcttccstcaagtcacacacataattatgatgttatcctttacacccttaatgggatgcagtgaaatcagctgcagagtggttagtgcctggcctttggagtcataattacctgaatctgagtaccaactccacgttctctctgggcaacactgcagacattgtataacctcattgggccttagtttcctcacttaaaatttggggatttcagggtctacttgacagtgttattttgaggattaaatgagatgaataagcagagtgcttagcgcaatccaga

SEQ ID NO: 864567 - DNA, 644 bp, Homo sapiens
ttattcaaagaacagaattgctgatgtctcctaaagaatacaagaccaaacaagaatttactttgcataagaacccaaaatgaaaagataatcctctaaatgccctgatgagcctttggaaaggacagagtttttytgaaggactcgaaggacttttgcacggattaccatgtttttcccctcatgaatttgcttcttatttcataaaggaagacataaatattctaaatcatgagcaaaaaaagaaactatatccaattctaattctgcattcttttattctctaacttatagctctggctctcaaacattaaatcctgtatcagtagacagagctgcaggtgttaacaaccattcctgtaatcttaagtgaacttaatgtgactcttaaatgccctctagtccagatggtatgtttcctttatttggtattttaatgtggtagtatatttaaaacaaagaactatttttagacttgttggtctaaaccacttgttggcaagtggtttttacatccaggtatttagaagaatgttagaaatgttaatgtgaaaaggatcattatcaatcatcagtttttttgttgttgttattgagtgtgtgccaaacaggaggtgctggtattcatgactttattagttaca

SEQ ID NO: 864568 - DNA, 644 bp, Homo sapiens
cctgtggatatcatacttttttgttattatatcctgaattgcattggctttttttggttttgttttgttttttgagatggagtttcactcttgttgcccaggttggagtgcaatggcacaatctcagctcaccgcaacctctgcctcccaggttcaagtgattctcctgcctcagcctccctagtagctgggattgcaggcatgtgccaccacgcctgactaattttgtgtttttagtagagacagggtttctccacgttggtcaggctggtctcgaactcctgacctcaggtgatccctgccgccttggcctcccaaagtgctgggattacaggcatgagccaccgcgccyggcctgcattggctatatttataataccaaatttgtgttgagttttgagttaatgtcttctagttatcaaaacaggtttgatccattctttgcaagtacctctaacttatctcaagtggaactaattagttttgcacacagattggtgctctctaggctatttccctgaaatttatcttgttacataagtcagatatcaaggagttatgctaaactccttttcctatcaaactcctaaaatgcccttttctctgtctatatttcttagacatagttacattataaatgtaac

SEQ ID NO: 864569 - DNA, 553 bp, Homo sapiens
aatgactactattggaatgggtcttaactagggtaaactaaatggcttatgttattttttaatgtaacatttgacacatatacaaaaatagatgtggcagatataatttataaattacaatatgcctcccatttaaggattaaaatattaggtatttctgaatccagctagggaatgcttttctattctacctcctaaggtctctcccagaggtracctccatcttgaattttagctacatcaatctcttcctcttctttaatagtttgttacataggtgtctctataagtgcactatttgcttttgcttggttttgaactttataaacataggatcacacaaaatttagtgtatgatttactcttttttctcaatattatttcctaagatttatctacattgctgtatatagtttctttattttcactgctgttcaatattttgtcatggaacatatcacagttcattaatcctttctcttgtttatggacattgtgttatttttacattttcctaaaatgaatagtactattgcaaacattctagtacaca

SEQ ID NO: 864570 - DNA, 667 bp, Homo sapiens
ttatctatgtcttgtgtgaattttagtagattgaatcctttttagatttagtcagttttatctaagttttcaagtttatgagcatagagctattggttatgttcttttattattcttttaatgttcatgggattggcagttatggtctcttatttatgatgttagtaatttgtgtcttttttggttagtctggcaaaagtttatcaattttactaatattttcaaagaattatattttggtttcattaattttctctattgcattctgttttcaatttcacagatttctgctctagtttttatgtcttttctactgcttactttgggtttaatttgctcttctttttctggtttcctaaggtgaaatcttagactaytgagtaaagagctacttcttttctaatatattaatttaatgctataaaatttctctaagcatcactttcactatatcccataaattttaataaatcatattttcgttttcattttgttcagaatattctaaatttcttttgaaacctcttcatcgatctatgtgctagttgtaagtatgttcttaatttccaaatatttgaggaatttccagttatctttcttgttattggtttccagtttaactccactgtggtctgagaacacactttgtatgatttctatcctttta

SEQ ID NO: 864571 - DNA, 617 bp, Homo sapiens
atatcagagggtaaaatttcccctgattcagttttgtcttcctccttatttttggtcttgctagggactctttcttaaataatatctgaagcttgcaattttttaaagctggaatcctctgatatatacaggagactaattgatgtgttggtaagttgtaggggaagaagggttccatagcctatgattaggattcagtctttaagtgagtctgtatctataactgcccagtgggttcattttgcacactacccagatagagccaatttatcaagacaggggaattgcaatagagaaagagtttaatacacatagagccagctaaacaggacactggagctttattattactccaatcagcctctctgaaaatttggaggctaagctttttcaaggatagttttgtgggcaggggcctatgggaatgggctgctggttrgttgggaatgaaatcacaggggtatggaaaatgcctcctcatgaggtgagtccacttctgggtggggaccacaggactagttgagctaagagtcttgggtccatgtggggctgcctggtcatcagaaatgcaaaagcctgaaaagatatgtgaaaaggtcaatcctagtttctacaat

SEQ ID NO: 864572 - DNA, 667 bp, Homo sapiens
agtcccagatgttttttaaagaaatgtctacaaactgttctataccattcatcccaccaactggtttgaggttgcagagacaactgaaatgtttcacaaataagtaagaatatgcaaaataagatatattaaatatgaaaatcctaagttcattctggtacttatgttttcttttgcattgatacaaaaattctggaattgtcttcagaacatccagatactttttactaatggtattaggcaattataaaggctctgataactcataaaagagaaagtatacctttcttccaagaaagcacattgaggagctcaaagttcgaaaaaactatactaaaaggtttctcttcacttttcaaagaatagcaataacaaagagttactgtgacaaccgtattctagtttttcttctatatattgaccaagatgtatagtatctcccatttaagctcaggcaytcagtccttctcaaatatggtcaaaaacagttactttaattttgttttgtttcatttcattttaattttcaaatcattgtggattgataatttttaacatagacaattgctcataatgtcatcacagtatcaaactgttacaaatgaatacaaatgtttactctcaatttctctattaatcttgtctcaaagtgataatgaatatgaca

SEQ ID NO: 864573 - DNA, 655 bp, Homo sapiens
cataagcctggttctaaaatcaagccctggaaagcaaacaagaacagtgttattgtctgaatgtttctgtccccccaaaatttagatgatgaaacctaattaccaatgtgacggtattaggatggagccttttggaggtgattaggtcatagtggcagagcacccatgaatgggattagggcccttataaaagaggcccagacagattccttatctcttccaccatgtgaggacacagctagaaggtgccatctatgaaccagaaagagagccctcatcagacactgagtctgctggcatcctcaccttggacttcccagtctccagaactgtgagaaatmgatctctgttggtttctgtttataagccacccagtttatggtattttgttatagcatcctaaacagactcagacaaacaacaaataaattgttgctaaaaccaaaaggattaagagaatattcaaagccaaagcagttagtgaatcctgcgacttgagaagacaacaatgggcaaggaattaaatagccaacatgtgggaatagtttgaaaaactgctcaaaattgaggtaacaggggcgaatgttggtatgaaaggcaggcacatgggaaacagtattagttcatacattaacttgaggatggattgaagagg

SEQ ID NO: 864574 - DNA, 632 bp, Homo sapiens
atttataagatatgggtcaggaaacaccaacacatttaaactcaggtaactatatggtaaacaaaggtggaaaaaagaggtagcttccattgaaacatctaataattactagctctttcaaggctaaaaacagtttgtctccatgaagtcactttaatctagtccaattgttagacaaaaacattttacaatgcagacatttttggaaggcaattgaccatgtataaaaaamatctgtatttttcaagcaagatagtggagtgttaaattttctgttgaggtcagctctccagcagtgtatttgatgatttcattgacatcctgctgcagtttcttttaaggactggtaatttgaagtttttggtttctctttttaaattttcatcacttctgttagagacaaaaatatgggttccccttacaagtgattgtttaaaaatgtgaaagtcaaacaaacaattagtgtcctaccagattgtcaatactaatggttatgagaattggaatggtgaccccaggacaagcagtctttttggaaacatttgcagtgatggcctggaaaatgtgaggttaagagaatatgagaggtaatcttctatggcaggagagcctgcttggaatcttcctaaaaa

SEQ ID NO: 864575 - DNA, 585 bp, Homo sapiens
cctttttattcaggtagattcaattaaaatcacacacatttattttctttatatacctaacaccaaacagtattcaggataccaaagggaatatagagatatgaaattctaggttctgccattaagcagttttctgtttgtwtgtttgtttttgagatggagtctcactctgtcacccaggctggaatgcagtggtgcaatctcaactcactgcaacctctacctcccaggttccagtgaatctcctgcctcagactcccaagtacctgggattacaggcacatgtcacaacgccctgctaatttttgtatttttagtagagatggggtttcaccatgttggccaggctggtctcgaactcctgacctcaggtgatctgcctgccttgacctcccaaagtgctgggattacaagcatgagccactgtgcctggcctcattaagcagtttttaaaagttagttggagaataagcagatgtgtaaatgagctactctaggtgctatagtcaaggggaggaggagaaggagagaggtcagaggaaggagggtttatacctccttcagagagtcaatgttggcttcatg

SEQ ID NO: 864576 - DNA, 585 bp, Homo sapiens
cctttttattcaggtagattcaattaaaatcacacacatttattttctttatatacctaacaccaaacagtattcaggataccaaagggaatatagagatatgaaattctaggttctgccattaagcagttttctgtttgtttgtttgtttttgagatggagtctcactctgtcacccaggctggaatgcagtggtgcaatctcarctcactgcaacctctacctcccaggttccagtgaatctcctgcctcagactcccaagtacctgggattacaggcacatgtcacaacgccctgctaatttttgtatttttagtagagatggggtttcaccatgttggccaggctggtctcgaactcctgacctcaggtgatctgcctgccttgacctcccaaagtgctgggattacaagcatgagccactgtgcctggcctcattaagcagtttttaaaagttagttggagaataagcagatgtgtaaatgagctactctaggtgctatagtcaaggggaggaggagaaggagagaggtcagaggaaggagggtttatacctccttcagagagtcaatgttggcttcatg

SEQ ID NO: 864577 - DNA, 718 bp, Homo sapiens
gtgggggtaaagataacaaaaaatgtgaaatgcaatacaaattatgagaaaaaatgagctaaaataagatcatatactgtctgagtaaccccacatctggaagtaatccaaactatggaggaagtgtatatattaattgcaacacaaaggagacaacattaatttacagaagaaaacaaatagtggtgtacccactcagtgtttattgtaggaagttaagagatcacatccctgttccgctcagcttctaaccaacggagcagacaaaaagggtcacatcaggatcaaagctttattataacagtaaatctgtcagttagggctgctataacaaattaacatagactrggtggcttaaacaatatttattccttgcagttctggaagctggaaggtccaagatcaaggtgcgggcagatctagtgtctggtgagggcaggcttccttgttttcagatggccatcttctcattgtatcctcacacagtggagcgccagagagacaggataaagaagccctctctgacctcttcttgtaagggcactaattccattcatgaagcctccaccctcacaacctgattatctcccaaggctcccacctcctaacactatcacctaggaggttaaagtttcaacatatggatctttgggggacccaaacattcagttcataacagagtgactcttctcttcctcctcccaattgaggatagttt

SEQ ID NO: 864578 - DNA, 625 bp, Homo sapiens
agaaagaacaaaatgttggcatgtcaaaatcaggacatgacctaaaagattattatcagtttatcctcccttcctaacccttttccacatggcattcaaagaggtcatgaaaagtggtgttggatatcagtaagagaattaacctgggagcaaaacactcagtttctttatatatatatatatatatatgtatacacacacacacatatatatatacacacatactttaagttctgggatacatgtgcagaacgtgcaggttcattacataggtatacacgtgccatggtggtttgctgcacccatcaacctgtcatctacattaggtatttctcctaatgcaatccttctcctagctccccaccccctggcaggccccagtgtgtgatgttcccctccctttgtccrtgtgttctcattgttcaactcccacttatgagtgagaacatgtggtgtttggttttctgttcttgagttagtttgctgagaatgatggcttccaggttcatccatgtccctgcaaagcacatgaactcatcctttttttaatggctggatagtattacatggtgtatatgtgccagattttctttatccagtctatcattgatgggcatttgggttg

SEQ ID NO: 864579 - DNA, 652 bp, Homo sapiens
ggcggccagcatcccagaacctgcaagtactctgccacagacaatgatcacgcaccctgccatatgacactgctgctgctgctgctggcacatgcgaacaaggatggatcccactgccaccacccatgaaatgctttggctggcaccatccatagaggtgtagtgaccagtggtacaggagcatctcagcctyagtgcactgggttcctaacctcaaggaaccaagaacaaagtcagggtccaataccagtcccccagatttagagcatgcagtccaggagtggggagttgagccttggtcccctaatatcttctagaaacaaagccagtcaactgaagccaccttataccaccatcaaaccctcagggtcattaaataaggtaaaagaaaaaaaaaaccattcaaaggaaagcagcttcaaagattgaaggagcatcagcccacaaagatgagaaagaaccagcacaagaattctgacaacttgaaaagccagggtgccttcttccctccaaacaaccatgctagctctccatcgagggttctgaaccagactaagatggctgaaatgacagaaatagaattcagaatatggatagaaatgaagatcattgagatggaggagtgtattgaaactcaatccaggtaaactaa

SEQ ID NO: 864580 - DNA, 636 bp, Homo sapiens
ccataccagaacctgaataaatattcatccaaagatatacaaatggccataggtatatgaaagtgtgcttaacatcactaatcgtcagggaaatgaaaatcaaaatcacaatgagatagcacctcacacctgctaggatggttattatgcggaataacaagaagaaataacaagtgttggcaaggatatgaaggaaagggaacacttgcacattgttggaaggaatgtaaattggtgcatccattatggaaaacagtrcagagggtctttaaaaacttaaaaatagaacaaccaggtgacccagcaatccctctcctgggtatacacccgaaggaaaataaatcagcacctcatagagatatctgcactcccatgttcactgcagcattattcacaatagctaaaatatggaaacaacctaagtgtcttttaatgaatgaatggctaaagaaattgtggaatattatttagcctttaaaaaggaagaggttctgctcttttttgtgataacataaatgaacctggaggatattatgttaagtgagataagccaggcacagaaaaaaatactgcataattttacttttatgtagaaccttacgttttaaaaactaaatacatagaaacagtgactag

SEQ ID NO: 864581 - DNA, 608 bp, Homo sapiens
cattactgtgctcaaagtaaccaggcactcaggactaaggccagctagactgaggacttggcatcagcccaagataaacagacagtcataagtgttttaaattgaccaagatgaaaagggacactttccttggagatagaaaaggctctgaggaatatgagaatgtactgatgataaagcactagttaatatgtattaatgtaatatgtattatgtattaatgttgacagacaccatgctacgtattaaatgctttgttcatttcargctcacagtgcatctttgagttagtactatgaaaggaagtatagcttcatgtttagactaaccaagtctgagttgtaatcccagctctaacacccatcaactgtgtgatctttggaaaatatcttaacctgtctatgcctcaattttcttacttgtaaatgaggaagatagtccctgtctcataatattgctactattaaataagttttcataaaattcttagaacacagattgacacatggtaaatacaatataagacattctattactgttggtatccttcaacagtaggtaaattgagatcttccactgtctcatgtaaaagtttcagaaagatgagt

SEQ ID NO: 864582 - DNA, 589 bp, Homo sapiens
ctaacactgggagatgggaaagtgactagtggcataagatgttctagttgttttagcttgatgatcaacgaattccgagaaaacgttctccaaccccacattctgtctttcaatgtaagcagcacagcggtgaggctcaggaagtctgtcacttgagccagcctcacacaggtggggtctttttcaccaaaaggagttaggtcaggagggtgatttctgagagagagagaaggcactgacactccccaggctccttggggaagaaactccaaaaccgtaatagttcttggcttgttttctgctgtcttctccatctgaactccagggacttcttgatgatctcaaaggatgctcccttgacagagggtggggtctatgagtgtctttaatctcttcagcatgtgggaggcccagaggaggaagagaggaaaatcttcrgcttcatgagggttgaaagcttgtctagaatcaggtgccttctctgtgtggttttttggggaagcatatatataactgagactggaattgggaaaagaattacaccaacacagacaagcatgcactaacaatgacgattttagcatttagg

SEQ ID NO: 864583 - DNA, 554 bp, Homo sapiens
gctaaagcttctgaggtgtgtcatacaatagtcacgattagcctattgaagacataaatgtcggttatggaagctcaaaaagacagtaaataaatatgaaggcatgaaacaaaatattgggcagtactgcatatttgaagttttgtaagcaagtgagatttgtattttatcatgagctggaattttatatctttacttagaagcatagactattagtggtactccacaaacaccacaaatagtattcattcctctcttcatttattaaaaaayatataaatagatatatagacatgcagaaaacttttactctcgcctcctctttatgcatggttttgtgtgtattgcttgaatactctcactgattttaaaacacagtgctttttctatggatcttactctttggaaattttactttattttgaaataaaaactactttactatatgttatttgctcataatgtacaaatagttttgagtgcctattaagtatgatgcactacacggtgaaaacaaagcctggaatcctgacttcttgagctttacattctaa

SEQ ID NO: 864584 - DNA, 603 bp, Homo sapiens
ttcctttcagtctattctgtatgtaactcaattgcctttttgcctttgctaacacagaaatccattaaaatttttaaattaatggacattttaattacatcttcttccttagtactaataaaaatttatatactatgtatatgaatatgcatctagatgactatttcaatatcaatatatgaggagataaaatgaattttccacaaactatgattctgtgtcatctaaacattagcttgcacaggccttttaaagaargcagagtgaggactccctggccagtgttctctaccatctcttctgcctaccttcttttctctcatggaagtaagaaaagaatccatttcatcaaaggttgaacattccacttcatccctgaattctctcttgctttgagttcttaggtacatctatattagatatcactttctcctctgcatccccaatgcccttttccctcctcagcatacctgatcctctgtccttgctgacctttgtatgtgtgtgttttctcccttgatgacatatccctcttcagctattgctctatttatattcagaatcccaggcaagcaacataaatagatgtctccaaggagtaag

SEQ ID NO: 864585 - DNA, 564 bp, Homo sapiens
gtctcatccaaatctctattgttgtaaccaaagacccaatttgataatattaagaggtagggactttagggagtgattatgtcatgaaggctccatctgccctcatgaatagtattaaaatcctaattttagggctcaagagaactagctaagcccttttgcccttctgccttttccaccatgtcaggatatagcattagtcccctctggaggccactgcattcaaagcatcatcttagaaccagagactgggttctccccagacattaaacctgcaggttccttgatcttggccttctcagcctccagaaatgtgagaaaataaatwtccattcttatataaaatatacagcctccggtattttgttttagcagcacaaatggtctcatacacacattggcaatgtaatgaaactcagaaaaactctaggctctccactgagtctaagttccatttcattttggcttcctcacttcagctgcttttattgatgtcaccagttgccaaattcaacacagagcaatgtgctctcttttgtactttgaattatacaatactgtgga

SEQ ID NO: 864586 - DNA, 672 bp, Homo sapiens
attggaattgtttttgcagaatttgaaaaagttccttagatataactaggtttctatttattagcctatataaacacaaaaataagagaaataaatgtaagtggtaaaataattagacttggtgactacatcaaaaagttttacttaaaactttggcagatttaataataaatttcagtgaagtttttatagatatgaatcttccggttgaattyttgactttgaataacttaatcaaatgcggctctggattgcataattatagtttacacttgcataattgcatttttatacttttgccttatttgaagtattaaagtaattatttattatttgttacactatacattgaaattaatgacctagtcacacactcacttatatatatttgtatgtcttatggaagttattcatacaaaatgttgagattttaatgaattctaattgatactcaaacttgtcatattcactctatatgcatttcataatttttggtaagggtgtggctatagaggttagccaattcacatcaatttttaattatatactttttcaaaaactataatcttctcagtgttactaattatgaaattcataaaataatatccatgaaatgacttgggtgataatccagtaattatcaatagtcacttgctatcatattcggatgac

SEQ ID NO: 864587 - DNA, 697 bp, Homo sapiens
taaaagctctcaggacgagactaattcacagctgaattctgcaagatgcacaaagaaaatcttgtaccaatcctgctaaaactgttccaaaaactgaggagggaatccttcataactcattctatgaagtcagtataaacctgataccaaagccaggcaaggacacaacaaaaaaggaaaactgcagatcaatatcccttatgaacatagatgcaaaaatccttaacaaaatattagcaaactgaatccaacagcacatctaaacaacatgatcaagtgggtttcattccagggatgcaaggatggctcaacctatgcaaatcatcttaatagatgcagaaaagcatttgataaaattcagcatcctttcacaataaaaaccctcaacaaactaggtgtagatagaacatacctcaaaataataaaggccgtatatgacaaacccaaagccaacataatatggaatggggaaaaagtcaaagcaytccctctaagaactggaacatgatgaggatgcccactttcaccactcctattcaatatagtaatgcaagtactatctagagcaatcaggcaagacaaagaaataaaaggcacccaaatttgaaaatataaagtcaaattatctccgtttggttatgatatgatcttatacctaaaaaatcctaaaaaattctctcaaagactcctagatttg

SEQ ID NO: 864588 - DNA, 660 bp, Homo sapiens
gtgcaaatattcctaactaaattgtcctaggtgaattctaaaattatttggcatatctgagtatacatcagttggaagcaacccaggaagttggcttgatggcagaaaagctagtgtctgacttgaaaactaagccctttaagacaaactggagacagctgtaggaatctgggggtgagcctgttactagagtttctagctgagccagggaaggagagagtttagcacacattctcaccccattggtgtgctcctagaacagctcagtttatgggatagcagtgagttacagggtgaagccatggtctgaaaggttttacaggtagatcaaattttctagctcatgacacactgyttttatgtttgagtcatttgtgagaaaatcgcccaataattttgtttattcccaaggaaatttgtgggtttttgttttgacaaagagttgatgttgcaaatggtggttggtactgtatggatcagggtttcttttggagccagactccttcagtattattaataataacataagggtaaaaatgcctacttttcattagatacttactatgaaccatgcaccatgtaaaatcaagtacaaggattatctcttttcgtcccttaacaacattttcaggtatatagatccactttgctgatagtgaa

SEQ ID NO: 864589 - DNA, 588 bp, Homo sapiens
ccagattaacaatcagtctgattttcctaaggtactgtatttagtgaggggctacttataactatctcattctaaatctctttccatatggctttatctcccatcagccaagaaagttttaaagtgttttctataggtccagtcctatcctatctatcctgccctatcgtatcccaccatattccatcctaccataacctaccctatccttactctaccctatgccaccctaccctatcctatccatctatcccatcctaaaaacacctttcctgggtgctgctgttccctcaagatctggccaccatttcttttcttctctctactgataaaactcttgaagtagccrtcctcctctttcagtgacacatttttatttttatttttaactccatgtattatacttgggctttccaggcaccacaccattggggaaactccctccaaagtcactggtggcctctcagcccttatcctggttgatctctctctctctctctctctggcattccttacactgttgatcatctccctgccattacccccaaaccactgtcttccttcctcctgtaggctccaatgacacct

SEQ ID NO: 864590 - DNA, 679 bp, Homo sapiens
atcagtatttcactcactgaccattgtttccaaaatggaaccctataaattcagaactaaatgaattcttggatgttcacaattgaaataataatgagatattagaattaaacttaatgattagttatctaccaaaaattgtgtttaacatataagttctttcacaagactacatagaatttgtaagaaaagactaccttcgaaatcatctttgagaaaatcaggatttttggtgcttattttacaggttggacctgagtagccagggtcacatatacatttggttccattgatacagctcccctgtccattacacatctcctcacactggggaccgatgtagacattatcaatggcccatgtcactggctgagagccggcagggtaaaatccctggtaccatctgaaacggacagatctggaaaagaggacaagtctttcaaaagctaatcaacagaacaatataccttcaaagtatgcacatctgatcaatgaacaatgggmagcttctacctatgctcaacacccaagaaatagaaaacatttgccatttcaggaacaaaactccattcctcaatctccaggattttgccaataaagttcttgtttcttgtaagcttttcctgatcctatcagaatgtcaatgtttcacttgatcttcccatctttttcaatattg

SEQ ID NO: 864591 - DNA, 649 bp, Homo sapiens
agactgtgccagcctttatacccgcttctttggtagggggggtagagtggtagagggtattgatctaattgcctattccataattttcctaagactggcactgcatattcataattacgactagggatactgaactattttttgagtattcatagatattacgctcagtaaagttgttatttttactttattatatatatattttatatatatatatattttaattgagacagggtctcactctgtcacccatgctggagtgcagtggcacgattacagctcactgcaaccttttcctccccgggctcaagtgatcctccaacctctgccctccaagtagctgggactataggtgtgtgccacctcgctcggctaatttttgtactttttgtaaagacggggttttgccatgttgctcargctggtctcaaactcctgggctcaagcgatctgcctgcctcagcctcccaaaatgctgagattaaaggcgtgagccattgcactcagcaaattctaactcttttggaaaattataattttttttgctatacacaacctttctgtttccctattcttgactaactagaacttctcaaccctttatcacattggataattattttagtttcaaaaatattacaataaagtg

SEQ ID NO: 864592 - DNA, 576 bp, Homo sapiens
cccttccactgactcaccctgggtctaaggtgatattcaagaacccatgctatttgagccacctcttacttttaggtctggggttagtaaggtggaggaggcagattcagagtaggggctatgaaactgatgttggcatcttcctctcttccttttcagtctctctcaataactcctgacattcctgccttcctatttctcctcagaccatctctcttaggcaagcaataaagaggcrgtactaatacagtggttaagctcatgggctctggtgccagacaaactgtatttatttccagtatcttactgaaaccgttcgttcgaaggtcactcattctctcaaattgaaaaatccagtaaagttttttgtgaaacttttaaatttattactctctatagtttatgtcattgaaggccatctcttcctgcttgttaatctcctctcatctggcttctggataccatgttattctgaatcttctctctgcctgaatcctctcagtccccttgctggccatttctgctccttctgctattaaatttaggagtcctctctctccctctctttttaaacac

SEQ ID NO: 864593 - DNA, 682 bp, Homo sapiens
gagttgctagcctcagggtcacacagttactaaaaagctagaaactaggctttctggtttctcctttgaagtcctttctactatgtcctgtgtatcaaaggctcccaaagaatgtttgttaaataaaatgagcatgtgagtaaggtccctcaactggggagtagggaagtttaacaaaactatagttacttaaatgctgtaatgaataccgacaaggttttgaggttatcttcacttaagtaaatcagtttctgcattcttcccagagcctctttcccatctccagaaaaaaggctcttttatatgaaaggcagacacacatagccaaagtaagtggtagaatacttsagccacaaagttccttaaaagcaaattcatgtcaaagagccaagctacctagggaactgagccattttttgcaactgagcccatctctttaagagcggtttagtatataagtcaatatggatgaaatctcactattcatgtgccataagagaagctaatgcatccatatttgcatttcttagaaatctaagcaacattctattattttcaagggtcccacagaaaaaacagctctgcagagcttatttctagagaaacagaagagccatacaatgttgtttttgttttgataccattcagaagttatattcatctgaagaagaagaggtgaatg

SEQ ID NO: 864594 - DNA, 583 bp, Homo sapiens
tcacttagatataataactgatgtccaaatagaatttaaatgttgaatcctttttcactttcatctcacttacagcaatattgtggtataggtgtatcaataattttttttaattttaaaagtaaagaagcagttccagaaagatggaacagatgtacttttcctatcatttctgctaagtacagtaaaacaattcctgggtgttatatatataacatgaacattaaaagattcttgaaggtagagagaacaggcagaactgctagggacyttaggatgcaaggaacttcaaagtgatgagctgcctgggtcttctaacacaccaataatttcattaaaggtacagtgactaaatataccaattaaaatacagattggttgaatgaataaaaaagcatgaactatatgctatccataaactcacttcaagtataatgataaatatatgtaaaaagtaaaaatatgaaaaatatatacaatgaaaacagtcaaaagaaaacaggagtacctacatgaataaaataagtagacttcagaacatagaaaattagtagaaacagagagggacattaaaaatgatatg

SEQ ID NO: 864595 - DNA, 598 bp, Homo sapiens
tctgacctagcttatctggaagtagatcttaagacactcattccccagcgatctcactgtatactcaaaagtcaagaagaatctggacaaagaggccttgctaagttccctccagcttattagtactaggtcacatgccctttttgcaagagggttgcaaaaatagtttatcaatcagatgtacccaaacatattatttccaactctgtgtgctgttactaactcaggtgaaaatcttgctasatttgcatgtaaatgctgattagtaagcattactcgtgtattgattgatcatttctgcgtgtgcaaaatattatttctaaaagaaaaactgactgttgcacctttccttttctaagattttggggatactggtggtagcatagttctatacatcttgaaactctcagcagaacagggttttcttccacttacagagacttcaaaatgaggaaacagtatgaaagttttatatttcaaagctactgacattccttctttgctgctcaaaagtgaggcccagaacccatagcctttgttttagcagaaactttagagtcttttgatatataaaggcagacacaatacaagtacaaag

SEQ ID NO: 864596 - DNA, 582 bp, Homo sapiens
ccctgcatgcaatgcttttgccatgggcttatggaatgctttatccattgtcatggtatccctatatcattgcttattgatcaaggaactcatttcacagcaaaagatgtatggcaacaggcacatgcttacatatttcaatgatcttactatgttccccaccattctgaagcagctggtttgctagaagggtggaacagtcttttggctagtttgccctacttargtggcaataacttgcatggctggagcaagctccagaaggtcgtatatgatctcaatcagcttccaatatctggtgttgtttctccaggattctcaggtccagtaatgaaggggtagaaatgggagtggtaccactcacaattttcctgagtgtcccactagcaaaattttgcttcctgtttctatctgaggacagaccttatgctctgctattggtttcaagatcttagtttcaaagggaggaatgtttccatcaggaaaggcaacagtgattccattgagctggaagttaacaccttccccagccactttgggttccttgtgcctctgagccaagtagcaaagaagagagctata

SEQ ID NO: 864597 - DNA, 582 bp, Homo sapiens
ccctgcatgcaatgcttttgccatgggcttatggaatgctttatccattgtcatggtatccctatatcattgcttattgatcaaggaactcatttcacagcaaaagatgtatggcaacaggcacatgcttacatatttcaatgatcttactatgttccccaccattctgaagcagctggtttgctagaagggtggaacagtcttttggctagtttgccctacttaggtggcaataacttgcatggctggagcaagctccagaaggtcgtatatgatctcaatcagcttccaatatctggtgttgtttctccaggattctcargtccagtaatgaaggggtagaaatgggagtggtaccactcacaattttcctgagtgtcccactagcaaaattttgcttcctgtttctatctgaggacagaccttatgctctgctattggtttcaagatcttagtttcaaagggaggaatgtttccatcaggaaaggcaacagtgattccattgagctggaagttaacaccttccccagccactttgggttccttgtgcctctgagccaagtagcaaagaagagagctata

SEQ ID NO: 864598 - DNA, 582 bp, Homo sapiens
ccctgcatgcaatgcttttgccatgggcttatggaatgctttatccattgtcatggtatccctatatcattgcttattgatcaaggaactcatttcacagcaaaagatgtatggcaacaggcacatgcttacatatttcaatgatcttactatgttccccaccattctgaagcagctggtttgctagaagggtggaacagtcttttggctagtttgccctacttaggtggcaataacttgcatggctggagcaagctccagaaggtcgtatatgatctcaatcagcttccaatatctggtgttgtttctccaggattctcaggtccagtaatgaaggggtagaaatgggagtggtaccactcacaattttcctgagtgtcccactagcaaaattttgcttcctgtttctatctgargacagaccttatgctctgctattggtttcaagatcttagtttcaaagggaggaatgtttccatcaggaaaggcaacagtgattccattgagctggaagttaacaccttccccagccactttgggttccttgtgcctctgagccaagtagcaaagaagagagctata

SEQ ID NO: 864599 - DNA, 637 bp, Homo sapiens
taggccctttagctgtgacacccgacagacccattccatttgcttggttatctcttctccctcttctgggcctgaagtattcatttattaattttttttctcactagtaagtgaagcatattctcaaatactcagtttgtgctatttaatctgtaaggatgtacacattatggaaaataaaagctgggcygagatctcaagatgatgtgcctcccacctgctgtatgtcacacctcccttgacaaagtgaggaaatgggaacttgtccccaagaagctacaagttatttagagaagtagttatatttgtaatgcagttttgtagaaagttagatgtaaatagagtgtgaaaaatgtgacccaatgaggaattgtgggagtctgtaaggcatatcagctttccctcagaactaagcttcctgggtcctgggatggggagaagatatattttgcatatttctttgaaataaataggttatgcaaattatctgctttttctgtctgtatacattaggtcaattcctatgggccagttactgtcccttacttttctagtcattagtacttctttgtttttaattaattgtattctcttaagaaatatactgagtcccttcactatgcaacttcaacttaat

SEQ ID NO: 864600 - DNA, 637 bp, Homo sapiens
taggccctttagctgtgacacccgacagacccattccatttgcttggttatctcttctccctcttctgggcctgaagtattcatttattaattttttttctcactagtaagtgaagcatattctcaaatactcagtttgtgctatttaatctgtaaggatgtacacattatggaaaataaaagctgggccgagatctcaagatgatgtgcctcccacctgctgtatgtcacacctcccttgacaaagtgaggaaatgggaacttgtccccaagaagctacaagttatttagagaagtagttatatttgtaatgcagttttgtagaaagttagatgtaaatagagtgtgaaaaatgtgacccaatgaggaattgtgggagtctgtaaggcatatcagctttccctcagaactaagcttcctgggtcctgggatggggagaagatatattttgcatatttytttgaaataaataggttatgcaaattatctgctttttctgtctgtatacattaggtcaattcctatgggccagttactgtcccttacttttctagtcattagtacttctttgtttttaattaattgtattctcttaagaaatatactgagtcccttcactatgcaacttcaacttaat

SEQ ID NO: 864601 - DNA, 611 bp, Homo sapiens
ttttggtgtcagatttagttgattaaacatagcattattttaacaacctgtgacaggttacatagagaggatttatagaatatatcctgggattgcatcctccatccttaaaaatggtgcctggtgtgaggctattagtcaacaacatggtagaagtactagcaacagcacttacaatgtagtaagttaatttacratagtcttaatgcagcaaaattgttttagaagatagattacgttatcatgttatttttatcaatattgctaatgttctgacgtgtgttgttcatctttggatgccagtattctagaaaatagctgcaagcaagtgagtccagaaaaagagataactatcttgggttataaagatctcaacttcccaatcctaagagtaaccagtgacatgtcctccagaagatggtacaaagctttaaagtgtgacccctgctcttttgcaaatgttctaattaaaatgaagggagatttatgaccttaaggtatttaaaatgactcaagtggcatttttcataaggtaaagcaataatgacaagaaaatcaaacaatggacattgaaatacacagtgagccctgtgcttggaggaaaggctggg

SEQ ID NO: 864602 - DNA, 659 bp, Homo sapiens
catccatccctcctttccttttctttagaatcagactggtgccatggttttatagccatacaagccttttctggcctcctatttcctttcatacaagtttcttacatgaaatctggatatttttaatcccactttggcatctacttctctaaggactaagattattctattccatgtatgcttgctcattctcacctctgtccttcacagatatttcccacaaccaatatcttacactccaaattccatatcggcatctactttctagaggtccaaaatggacacatatttttctttgagtgaaactcaacaggaaagctcaaaattgkaagttcataaaatggatctcttctcattgaagcaagattcatagtccaagcgttcctttctcacttccactcccatcccactgctacccccagtggcaacatctttgagaaatgtttctggatgtggggaacacagttagaataataccagaagatattcctaacacattaaatgctataattttatagcatctaaatgtatccagtgaagtccatataaggtctttgtagtatcccctccgccggcaatctgaaattttccctggaattatcctgctccttgcacacatacacacaaaaaaatcccttcagagtcatcaaaagttattt

SEQ ID NO: 864603 - DNA, 622 bp, Homo sapiens
acactttttactcacctgaaaacattaacttgctgtaacaaatgttgagttctgttgccttacttaataaaactataattctgaggcagagtccaaaatcagtgggagaaggtaataaaatataaaattagcaatgaaatagagagtccccccatacatagcaattagtagaacaaaatagaaaatgttttagtgttttktttttttttccccagaatccaaatttttacaatcgaaactagtttgtgttcccttgttaagatgtagaagcgcagagatgtggttcaaatagagctgatcacaccaatgctacccaaaaagattatgacccagagccctcctcaatggattgagaagattgtttgcaacaccctgactggacatgtaaatagtccttaggaatttgcaaaaataatggctgaaaataaacaaaaacttacaaataaacaactcttcagctatagtttataaagctaattagaaatgataaaacaataatttttgttagattgactttcagtagtaaatataaagattttgccatgatatttttctaccttatttaaatatatacattaatttcatcaataaatgagattatatcatctcaacacacgtggca

SEQ ID NO: 864604 - DNA, 576 bp, Homo sapiens
ccacatttatatattattaggagaaaagtcgccacgtttgtataaaatattctaactctgataaaagtacaagatgtttcttgaccttagtcaactttggatttagtcactaagaaatctggctgatattttctttttctttctttcttctttttttttttttttttttttttttttcagtgaggcatccactctcctcttctggaragtatgcgttctattcttggaaaatgcaaaatttgattcaaaatcccaattttcttaataaaacacttgaaatctcagtaagaaaatgcataacaaggaaaattgtatgttgtaacagaaatttggagctagactcaggtgagtttaatctcaacctactagccacatattgataaataatcactaaacctcagtttcttaacataaaaaatggggataataagatccaaaaaggctcttgtgaagataagataggtgcttagtaaatggtcagtattcagtaaaggataatcatgataagtcccatcttataaaagaggaagaagcaacattaaattaggtgacttttccaaatgaagtagatcccaa

SEQ ID NO: 864605 - DNA, 681 bp, Homo sapiens
ctttttctttttattttattttatttatttatttatttatttatttatttatttatttatttatctgagacggagtctcactctgtcgcccaggctggagtgcagtggcgccatctcggctcactgcaagctccgcctcctgggttcatgtcattctcctgcctcagcctcccaagtagctggggctacaggcatccgccaccacacccggctaattttttgtatttttttttttttagtagagacagggtttcaccatgttagccaggatggtcttgatctcctgacctcgtgatccacccgcctttgcctcccaaagtgctgggattacaggtgtgagccatcgcgcctggcctggggggagatttttataataacataaataatattaaaacaaaactgtaaaaatgaactatctagtacttttaawctttgtagaattgttttgaattctaaaatttataacattacacagtatttaattttctttaagtcttaatattttgttatttcacttcatttaggccatgatcattgcaaggaaaaaaaaacacctttaaaactatctggtaattatatccctaatgataaattagaagaaaaatatcaacataaacataaaaatccagtaggaggaaaaattctaaagtgatatacataaaattgttgacaagtcaactt

SEQ ID NO: 864606 - DNA, 571 bp, Homo sapiens
aaccacatttgcaaacagactagatctacttcaaaaaacaaacttgaaatgataaatagtaagtactaaaattcttataaagccacaatttacttatcatatagcccttgtctaaaggaagtttctacattttaaatctagyttaatttttgaattgagttctggcatagagatcacatcaaacttcgtgaacgtgtgctcaagtaaggatattgaagatatctcacgtatatagcttcaaaaatgccagtgttgatacttttgatgagaaattatgtcttttgagccagctgcaaaagcatgagtgtcacagatgatacaataaaaaatatatagtcacatggaatgctttctttgtactacagagaatatttctagctattccatctcactatagaaaaaaaatctgctgaagatctagtggtaaaacactagatcttcaatgtgttgctcactttaatataattaagtagaaagtagtattacaaattgagtcataaaacatttatacagaaagaaaaaacaaggatgtcatgtggttattccctcttcccagtatagagaggagaaa

SEQ ID NO: 864607 - DNA, 571 bp, Homo sapiens
aaccacatttgcaaacagactagatctacttcaaaaaacaaacttgaaatgataaatagtaagtactaaaattcttataaagccacaatttacttatcatatagcccttgtctaaaggaagtttctacattttaaatctagcttaatttttgaattgagttctggcatagagatcacatcaaacttcgtgaacgtgtgctcaagtaasgatattgaagatatctcacgtatatagcttcaaaaatgccagtgttgatacttttgatgagaaattatgtcttttgagccagctgcaaaagcatgagtgtcacagatgatacaataaaaaatatatagtcacatggaatgctttctttgtactacagagaatatttctagctattccatctcactatagaaaaaaaatctgctgaagatctagtggtaaaacactagatcttcaatgtgttgctcactttaatataattaagtagaaagtagtattacaaattgagtcataaaacatttatacagaaagaaaaaacaaggatgtcatgtggttattccctcttcccagtatagagaggagaaa

SEQ ID NO: 864608 - DNA, 705 bp, Homo sapiens
caacagtaacaccaaaggttactgataatagatcatcataatcgatatgaaaataataaaaaagtttgaaatattgtgataattaccaaaatgtgacacagagacaygaagtgagtgagcacatgctgttggaaaaatggcactaataattttgctcaaggcagggttgccacaaaccttcaatctgtaaaaacgacagtatctgggaagtgcaacagagttaactacaataaaataaggcatgattgtaccttttcaggatgttgaaaaggtccagagcagggggcagggctgtgcctgaggatggaagtgtgctatttatgcactgaggcctccccataaccattatccttttcctggccctgcactgtgctgtaggagcctgacctctgaatatggtgttgctgggaggcattgctgggaagcattgctgggattctcgtgtcctgtagcttcaattaaattagaccaatgggaagtaggcaatgagaatgagggaagaaagaggtcagggtagttattccccagtgccctcccagtaagaaggaagttttggcagtaggtgtgttcttctacctatagccacaaatccagccaagaagccacactacgatgaccattcctagctctgctccctgccatgccccttcaagtgccttgtgtacagcttccttctattgctagtccctgggtgcatcaccagcc

SEQ ID NO: 864609 - DNA, 705 bp, Homo sapiens
caacagtaacaccaaaggttactgataatagatcatcataatcgatatgaaaataataaaaaagtttgaaatattgtgataattaccaaaatgtgacacagagacatgaagtgagtgagcacatgctgttggaaaaatggcactaataattttgctcaaggcagggttgccacaaaccttcaatctgtaaaaacgacagtatctgggaagtgcaacagagttaactacaataaaataaggcatgattgtaccttttcaggatgttgaaaaggtccagagcagggggcagggctgtgcctgaggatggaagtgtgctatttatgcactgaggcctccccataaccattatccttttcctggccctgcactgtgctgtaggagcctgacctctgaatatggtgttgctgggaggcattgctgggaagcattgctgggattctcgtgtcctgtagcttcaattaaattagaccaatgsgaagtaggcaatgagaatgagggaagaaagaggtcagggtagttattccccagtgccctcccagtaagaaggaagttttggcagtaggtgtgttcttctacctatagccacaaatccagccaagaagccacactacgatgaccattcctagctctgctccctgccatgccccttcaagtgccttgtgtacagcttccttctattgctagtccctgggtgcatcaccagcc

SEQ ID NO: 864610 - DNA, 697 bp, Homo sapiens
acatgaaataaatggacccataaccttagggtgttcccaggagaggagagagaaaggggagggttattgttctcccacagttatgcacaatgttgtgaacaaacaaggaatgcgcaaagttgctggcttctaataaccatttgtttatattttcacttcacatttcacattttcagtataaaatgtaagagaacatatttttaaaaagacctttacttttgagcctccagagggtaatgtcagcatgccagacgtgtctatgaaaggagactttagggaatggttagactgaaataatgatktgaacattaaataaatttaaattcaagctttccctttagcgatttcagttatttaaaagttaaaattagtgctattttatggaaaatagtttcaaaaatctgagttccagagagtacattaagttcaatttcaggatgagagcaaagtacaatgacttatctattatccaaaagaatacaaatattgagtatcatacaaagttctaggattaaaaaaacaaagaaatgaaataaaaaacaccaaagggaaattattagagatcttaaattcacctataagattttattcattagtctagaagtaataacatcaaattccactgaaatttaatattttcagtaacttttcaaattttattgttattacattattttaattttttatttttaacttt

SEQ ID NO: 864611 - DNA, 661 bp, Homo sapiens
cttgttttgattttacagctcataggtgaaaggaactcatttcagttgagattttggaattcagacttgggacttttgagttaatgttggaatgagttaaggctttaggggactattgagatgattatattttgcagtgtgagaaggatttgggatttggggagccagggktgtaataatatagtttggatatcacccccaaatctcatgttgagatgtagttctccagtgttggaggtgaggactggtgggaggtatttgggtcataggggcagatccctcattgcttggtactatcctcatgataatgaatgagttctcacaagatctggttgcttaaaaatgtgtggtaccccccataccctcttgttcctgctttcaccatgtgatgtgctggctcccgctttgcctcctgccatcagtaaaatctccctgatgcctccccagaagccaagcagatgccagcagcctccagtatttctcaggtatttctttatagcagtgcaagaatggtctaatacatgacctaattgtcaataccatgtattctctgatgtattaaacagacaaacaaaaatcacaaggaattgaaccaaaaaataatttgatttataagacaatttaaaaatatggtcttattattaactcagactttttgttg

SEQ ID NO: 864612 - DNA, 587 bp, Homo sapiens
taaaaatctatacttctaaatagcatataattttcagtctgtaagcaggaatataaaaagagccatcagacttaattagtaaaacatacctgatcactgatttaaaaaatgcatgaattcctataacctgctaaaatatacttctctaaatatttttaaaaaggaaagcaaacccaaaatcctcttttcagaaaakatttccttccttactatcaaaaaaattaattcttgttcaatattctcttaaatatgcatagtgagcatattatattttttataggtttagtttggttgtttcttaaatatccttttatttttagaaaaaattgatggcactttctggtatgttctaattgtgaaactaaaacattagattttgttatcaacaacataaattaccacctactgacttattctacctatcatttgcaagaatgctctgattttctgaggttttaaaatagtgcagaattgaggtagatttcatagtaattattctctcaatagaatgatgggtaaatagattaaataggcattatataatatatataatccaggcacagataattgtaattgactttatctac

SEQ ID NO: 864613 - DNA, 623 bp, Homo sapiens
aactgtgatacagagtagttagtttacattagtcagttgtatgtattctgtttacccatctgtaaaatgagaataataatatataccttacttggatttgaacttgcaataaagatacatccctagagaataggacgtatgtcttaatcactctgtatttccagcacccagccactcatgtgtacataatagctctcatgttcactaaactgaattaaactaagttacaatatattaaagtttatacatttttaatctctttaaatttaatgggttattaartgcattgctaactgaccatttttttttgcattaacaaccacattttttataaccaatgaatttggaagataagttgttataaagatagctatattcataaagagaataacatctggcctatttggatacctaaaataaattttttatttttgtatcagaaaaccaggtgtcttttttccaagctaatgttaggtcaacatataggcttaaatacaagttttccaacttgcttgtagtcatattttatttgtgtgtacatttttaatgtattttattctacctaaagactcatatcatgattctttaatgagctttgaggcaaagaaataatgttagaacct

SEQ ID NO: 864614 - DNA, 603 bp, Homo sapiens
tcagaatatcatccatgaaaatttccccaattttgctagagaggtcaacattcaaattcagaaaatttagagaacccctccaaaatactacacaagattctcaaaggtcataatgaagaaatgtcaaaggcagctagaaagaagggtcagctaacctacaaggggaaccccatcagactaacactagtcctgtcatcagaaaccctacaagcagaagagattgggggaattcagcattcttaaagaaaagaattttcagccaagaatttcatatatggtctaactaagctttcgaagtgaaggagaaataaaatccttttcagaaaagcaaaygctaagggaattcattactatcagacctgcctttcaagagatcctaaaggaagtagcagttatgaaaaggacaaactgttaccaaccactacaaaagcacatttaagtacatagactagtgacactataaagcaaccacacaaacatgtctgcataattacgagctaacaacctgatgacaggatcaaatccacacatatcaacactaaccttgaatgtgaatagagtaaatgccccaattaaaaggcacagagtggcaagttgaataaa

SEQ ID NO: 864615 - DNA, 603 bp, Homo sapiens
tcagaatatcatccatgaaaatttccccaattttgctagagaggtcaacattcaaattcagaaaatttagagaacccctccaaaatactacacaagattctcaaaggtcataatgaagaaatgtcaaaggcagctagaaagaagggtcagctaacctacaaggggaaccccatcagactaacactagtcctgtcatcagaaaccctacaagcagaagagattgggggaattcagcattcttaaagaaaagaattttcagccaagaatttcatatatggtctaactaagctttcgaagtgaaggagaaataaaatccttttcagaaaagcaaacgctaagggaattcattactatcagacctgcctttcaagagatcctaaagsaagtagcagttatgaaaaggacaaactgttaccaaccactacaaaagcacatttaagtacatagactagtgacactataaagcaaccacacaaacatgtctgcataattacgagctaacaacctgatgacaggatcaaatccacacatatcaacactaaccttgaatgtgaatagagtaaatgccccaattaaaaggcacagagtggcaagttgaataaa

SEQ ID NO: 864616 - DNA, 603 bp, Homo sapiens
tcagaatatcatccatgaaaatttccccaattttgctagagaggtcaacattcaaattcagaaaatttagagaacccctccaaaatactacacaagattctcaaaggtcataatgaagaaatgtcaaaggcagctagaaagaagggtcagctaacctacaaggggaaccccatcagactaacactagtcctgtcatcagaaaccctacaagcagaagagattgggggaattcagcattcttaaagaaaagaattttcagccaagaatttcatatatggtctaactaagctttcgaagtgaaggagaaataaaatccttttcagaaaagcaaacgctaagggaattcattactatcagacctgcctttcaagagatcctaaaggaagtagcagttatgaaaaggacaaactgttaccaaccactayaaaagcacatttaagtacatagactagtgacactataaagcaaccacacaaacatgtctgcataattacgagctaacaacctgatgacaggatcaaatccacacatatcaacactaaccttgaatgtgaatagagtaaatgccccaattaaaaggcacagagtggcaagttgaataaa

SEQ ID NO: 864617 - DNA, 644 bp, Homo sapiens
tagatacagaaaaggcattaaataatattcaacatccattcatttaataaccctctacaaactaggcattgaaggaacatatttcaaaataataaaagctatctatgaaaaacccacagccaacatcataatgaatgggcaaaagctggaagaattctccttgaaaactggaagaagacaaggatgtcctctctcaccactcctatttaacatagtgccgaaaatcctagccagagaaatctggcaagagaaagaaataaaagacattcaaatagaaagagaggaaaccaaactatccctgtttgttgatgatgtgattctatacctcaaaaacctcatagtgtgtgctcaaacgctttttgatcatatacacaatttcagcaaagcttcaggatatacaatcaatgtacaaaaatcagtagcattcctatacaccaacaacatccaagctgagagccaaattgagactgcaattccattyacaatagcaacaaaaagaataaaatacctaggaatacagttaaccaaagtggtgaaatatttctacaatgagaattagaaaacactgctcaaataaatcagagatgacacaaacaaatggaaaaatattccatgctcatggacagtacgaatcaatattgtaa

SEQ ID NO: 864618 - DNA, 626 bp, Homo sapiens
tctttccagccactctcttcataccataaactaggccttgatacctctcgtttgggccatttcaatagtttcctaactaattcctccatctccattctgttcctcccatgtttctgcttttagtctctgaaaaaccaaactttactccctatggtttttgttrgagttagttctgactctacctggaatcccttctctgagccactttgtctttgggtcccaatttgtccctttgggacagacggagtcccgctctgtcacccagggtggagtgcagtggtgcaatctcagttcaccataacctccgcctcccaggttcaagtgattctcttgcctcagcctcccaagtagctgggattacaggcacacaccaccatgaccagctaatttttttgcatttttagtaaagacggggtttcaccatattggccaggctgatctcgaactcctgacctcgaggtgatccacccaccttggcctcccaaagtgctgggattacaggcgtgagccaccatgtccggcctccttgcctgtcctatctttatgctccagctgaactggactacacgttgttccgatgtatcttctatctctaactccttgtttctgatgtcctctgaatatag

SEQ ID NO: 864619 - DNA, 598 bp, Homo sapiens
aagaaaagttcaattgctttttagaatcttttcattatacaacgggtcttccttagccaaaaatctagcgtggtagatagacaacattacataaaaatagctgccacttgaattatgactacaatgtgctaagcatgcagctatgctatttcatcttcacagttactccacccagtaggtattattatctctattttacagatgaggaaactcagggtaagctygggggacagagagggacatatgtttctgggtgccagactgtgtgggcaccacaaagatgttagcctttgcaaattttattgtagcagacttaacttgtgtggagagggggcaaaaatgattctattacattgggccccatttactctcactacatctttaagatttagcaacttcatcgaagtcatatggctttttagtttaagagctgagatttaaactaggtctatttgactcaagaatccagattcaaactaaataacctgctattaggcacataagaacagccataggatccaagttaaaaaccgccttacctttcaagggtcggggagaaggataaaggtactaacagcagataggaccttcagtagat

SEQ ID NO: 864620 - DNA, 598 bp, Homo sapiens
aagaaaagttcaattgctttttagaatcttttcattatacaacgggtcttccttagccaaaaatctagcgtggtagatagacaacattacataaaaatagctgccacttgaattatgactacaatgtgctaagcatgcagctatgctatttcatcttcacagttactccacccagtaggtattattatctctattttacagatgaggaaactcagggtaagctcgggggacagagagggacatatgtttctgggtgccagactgygtgggcaccacaaagatgttagcctttgcaaattttattgtagcagacttaacttgtgtggagagggggcaaaaatgattctattacattgggccccatttactctcactacatctttaagatttagcaacttcatcgaagtcatatggctttttagtttaagagctgagatttaaactaggtctatttgactcaagaatccagattcaaactaaataacctgctattaggcacataagaacagccataggatccaagttaaaaaccgccttacctttcaagggtcggggagaaggataaaggtactaacagcagataggaccttcagtagat

SEQ ID NO: 864621 - DNA, 646 bp, Homo sapiens
gaggttcaagacttcagtggaggacgtaactgcaaatgtggtagaaatagcaagagaattagaattagaagtggggcctgaagatatgactgaattgctgcaatctaatgataaaatttgaatggatgaagagttgcttytgatagatcagcaaagaaaatggtttcttgagatgaaatctactactggcgaagatgctgtgaacattgttgaaatgacaacaaagggtttagaatattatgtaaacttagtttataaagtagcagcagggtttgaaaggattgacttgattttgaaaaaagttctgctgtgagtaaaatgctctcaagcagcatcacatactagagcaaactctattgttaaaggaagagtccatcaatgcagaaaacttcactgtcatcttgagagattgccacagccacctaaccttcagcaaccactactctgatcagtcagcagccgtcaacattgaggcaagcctctctaagactcagtgaagactcagataatcattagcaatttttagcaataaagtatttttaaattaagctatgctcattatttttaaagacataatgctatttcacatttagtaggctacagtatagtgtaagcctaacttttatgtgcaatgggaaaccaaaaa

SEQ ID NO: 864622 - DNA, 606 bp, Homo sapiens
aatgcagtcgtgacatgtagatactcctgacttaaggctcatcctaagcaatgatatccatgaaatcaagatttctatgagctaccacatattttttcattataagacattaaaattaattcttaactgtattaatataaaatgctggttcaccctctacttgaaattatctcctgtgctcttgtggacagcccagcctactttgagaagggctggctgtgatgatttaacaggcttttcttattcctgaaatcccaggaamttttggggagtcagcaaggagcagattctcatatgattaagtttccagggtaccaaaagtaaccagaaagttgatctggatttgggaacttaaaggctcttgcccactttgaatcaactcaattttggcttaatgtgaagagatatcaagcaaggatggatggaaaattttggggctcagcatagctaactctatgttctcctgccatgctagccttaattccaaacagaaatccaaatctctgtgcagctggtgtacgagaaatatctcccactgtgtttcataagtgatttatgcaaaagctgtagtttcagccagactcttgaaattgtttttctcctcca

SEQ ID NO: 864623 - DNA, 610 bp, Homo sapiens
ttgctctgttgcccaggctagagtgcagtggtgtaatctcggcttgctgcaatctctgcctccaggattcaagggattcttctgtctcagcctcccgagtagtcaggattacaggtgcccgccaccatgcctggctaatttttgtgtttttactagagatggggtttcaccatgttggccaggctgctgtctaactcctgacctcaggcaatccacccaccttggcctctcaaggtgctgggattataggcatgagccaccacacccrgcccagtaaatttttaaaacaaaatagtgtggagcccaacataggaacagcaactctttattttgctttataaggttgcatttcaaaaaccttctaacatctctaaaatttcataaaagaaaggatattttaatccccaaaagaaggaaaataatctcaaaataaagaacagcttttaaaagtgaaggcatacagttgtatgaaaagctcagtacactttccttattttctcattttgctctgaaccatgtgaacgtcatcacctcctggtacagtactgacattgagaaatggcatgtccagagcctgagctcaatatttccctggatgtagtaaaatgct

SEQ ID NO: 864624 - DNA, 611 bp, Homo sapiens
tcagtaaccaggcaagggatgctccatgtttctcaccaagcagagaaaatgctatttcaacccagagtcagcacttacagggaacgcaataatttgagaagttgatgggtgtgagttagctgctagggaaagacaccaaatgtataaacactgacaaaacatgctaacatcaagagagggcaagcactcagattggtgcacacaggaaaacacagggcgaaaatgtggcataatttctcaatttttaacytaagtcttaccaatcaactcacaagaatagctatcagtgaggcaagtcaattgccttccttgaacatctttacaaacttgaaagatgcctcttgattgagttgtttgaagtacggtcctgagaaaagacaagggaatagttcccataacctgcagggacttcttttcaccagagggtttggcaagactaccatgagtttaaaataacagagttaacactgaaaattcactttattatgttttgatttcaaagaaaacgtagacttgtaaataacaatagttctttgtaacaatctgcatgacacttttattagctagtggaagtgggaggtttggttaaacaggaatccatgtgaatattg

SEQ ID NO: 864625 - DNA, 680 bp, Homo sapiens
ataaaaattatgttgaataaaacattgctgagcataaaatcaactttgaaattcctggtggacaaagaaaagcaggaagtatagtatatgtttcataggtatttaagaaaagaaagtatcttatttcatgaagagttttttagagaatactatctaatagaaatttggggcaaaatcagtataagcaggttatttaacaacataatgaagtgtggctgcaccagtagtttcacaaaatatttagaaatatttttgattgggctataccatatacaaatttttataaagcaaagtgataatatgtatacacataaaggtgttttcrtaagaaatatacataattatcaaaatacataactcccagatgattgtgagattcatatatagagtttagtaaatctagagtgatgtttcttaatatagactgaggatcatcaggattaggattacctggaatacttattaaaaatgaatattctgggagttcacctaaagcaatttaaatagtctttgcaggtgggaaccatgatgtcagcattttcaattctcacatcaaatataagaaccactgaagaatgccctctcagcctatttctatcattttcatcctattttgacttcagctggaagtttgagtgacagttaaagcaaaccattcaagtctggatgtggtggctcac

SEQ ID NO: 864626 - DNA, 702 bp, Homo sapiens
catgggtcaacagatactttgatgatgcttcatcactagaaaggtgttctctcttaccagtaacacaagctggaactcttgtttttcatccaggttttctcatttatgcataaaatagaattttttaaaatagggaaatattgtctgtaaatgacataggagatagatgcaatttctgtcaggaaaagctcaatgtaatcaccatcaggaagaagttaacattctaagaaattaaaaggcagattacaaaatgtaaagataaatgtaggtatatattctagcataacgcaatccattttgccttgggaattttgacaagtctattatgtaatgatctaaatcattaaaagtgtggggggagtagggaatgagttmctagaggttaataatgggaaaaaataacattgaaagagtaggatgacagttgagataatgtcaaatagaatgggaagattttgttctaaaagtaaaaggtcttgtcttttttgcttttatgtggacctaattcttccgtcttcttcattttcttcacttttaacaatatcagtaatagtgctcttggaaacccaaaataacaccagtaacatacactctcagggaatcagactgtggctcacagagttcaattcaacataatagacctttgttgatcacttgctacctgtcattgaccacagcagtaaccaaaaggtcaactttctc

SEQ ID NO: 864627 - DNA, 581 bp, Homo sapiens
gaacattttaagctacctgactatgagatagccaggtaatgcttcactttggtggactatcagagtagaccttaaacgacacatcaatgtggtttgtcacaaaaggctggaatacattttttatggagcaggaattaatctgtagtatattccaacaatgtaattagtctgaagaggaaataggcttttattagtgaaggaaatcctcatatrcagatagcaaaggtaagtgggaccagaccagggtctatcttggatatcaggatgagaagttgtgttattatttggaaactatcttttcagttatgttattttaagccataagtaaaatcatgttggtgatacatttaattaagaggtttatagcaaatgcatttataatactaagttctacagttcgaattttttattttatattacccagaatggaacactattttcacatgatattcagggttgcttctgtttatggaaagcactatataatcatatgcatgtgcacttgcaaatgagcctttatgcttattgccatgaaaaggtttagcaccacaactatcattctagacatcactgatagatcc

SEQ ID NO: 864628 - DNA, 568 bp, Homo sapiens
ttttactacatactactagcctgggaaaagatcaaaattcagaatttgaagtacgctttcccctgaatatctgaatatatattgatttgcatcatcataaagcagaaaaagcataagtcaaaccatcataactaggggactgtctgtatcttctgtgaggaaattcatgcaacagaaaccatgtcgtcatcgaaatttrttgttatttagtatttctgagtaacttccacttgatataacttctaaatcttccatgtaaattctttgtaaattataatgcctctatctcctgagtaaatttacataattaatttatacctaaatagagaacatcgaatccatctttgttttctctaatcttgtatagtaaggagcatttaaagtgttatagtttagaggcaagagctcctggaatatcaaataacacatttagatgagaaaaagttattagaaaggacaaaccagtctcgatgggagtatgaattgtgtgattcctatgtgttaaccttgaattgagggagggcacctaattttttatgccaaccccatatgactaatgctctaatgg

SEQ ID NO: 864629 - DNA, 655 bp, Homo sapiens
ataactctccatgcaaaattctggttaggctgctaagaataatgctgattattactatcatcagctcattttcactaaaaattaattcaatacatataatttactgaactttattatcaccgagtgctcttataggttttgcagggaaagggcacaaaggtacatgtcttgatatcaaggagccttaaaaggttatcctttggttttataacttttctgaccaaaaatttccagtgatatcctaatattgatttggtttatcaaagcctatctttgatctctatctgccctttcttcatcttgttgcatatgccatgctcttatcacatcatattttgcctcaatgtttgatctggaggctttggaaagactatccattttaaaaactgccaaatttaacaggatayacttaaagtctgtaaaaagattaagcctttgtgccagtactctgtggctctgtaatacttactttgaaagtagactgagtagtctaaataaatttttaattaagcatctgatttagataatttgggacagagcaaagttgtattttgggtatttttcttccctgtcattgacacttttaaacatattttcactaaaaatatgtgatttggctcttcttaatcttgacgccagtgttacatacttttca

SEQ ID NO: 864630 - DNA, 611 bp, Homo sapiens
agaccctgtctcaaaataataatagtaataataaggaaaaaataaagaaagagaaaaagaaaaatttgaatttattgtgctaagttttcttcgttaaatttatataatttcttctatagtatgtactgttaaaatgctttttacaatcaaatattaattaaatgtcattacgcattagcaacttcaattagaaattgaaacaaaacacaaatgcacatgaaaagatcaattattttcagagagaatagagtacaatactgaattttcaataattcaaaatttactttggttgccaatatagagctttattttaagtcctgattataattaggcttggtttatattaaataaggtactaagaatagtgacaatctctttgccttagcactactgagatatgtaagaagtcagaattayaagagactggaagaaaaaggaaggttcttaaacaataatccctcttacacacggttttgcttgttaccctagtcaaaaaatattaaacgaaaaatcctagcaataaacaattcataagtttaaattgcatgcccttctgagtagtgtgatgaaattttgggtcaccctgctctgttctgcttagaacataaatc

SEQ ID NO: 864631 - DNA, 639 bp, Homo sapiens
atctagtcacagactttgtaccattcacaaaaactaactccaaatggatcacaggcctaaatgtgaaagacaaagctataaaattcctaggagataacatatgagaaaatctagatgaccttgggtttagcagtgactttttacatacaatatcaaaggcacaatccataaaagaaagaagtgataagctgaacttcattaaaattaaaatttatactctgtgaaaggcactgtcaaaagaatgaaagargtcacagactggaagaaaatatttgcaaaggacttatttaataaagggctattatccaaagcatacaaataattcttaaatgcaacaataagaaaacaaacaacccaattaaaaaaagagacaaataccttaaaagatacctcccaaaagcaaatatacagatggaaaataaggatatgaaaagatgttcacatcatatgtcatcatggaaatgcaaattaaaataatgagataccactaacctataagaacaactccaatccagaatattgacaacatcaagaatgtgaagcaaagaaattttcattcattgctggtaggaatgtaaaatggtacaaccactttggaagacagttacgtagttttttacaaaactaaacatactcttg

SEQ ID NO: 864632 - DNA, 639 bp, Homo sapiens
atctagtcacagactttgtaccattcacaaaaactaactccaaatggatcacaggcctaaatgtgaaagacaaagctataaaattcctaggagataacatatgagaaaatctagatgaccttgggtttagcagtgactttttacatacaatatcaaaggcacaatccataaaagaaagaagtgataagctgaacttcattaaaattaaaatttatactctgtgaaaggcactgtcaaaagaatgaaagaagtcacagactggaagaaaatatttgcaaargacttatttaataaagggctattatccaaagcatacaaataattcttaaatgcaacaataagaaaacaaacaacccaattaaaaaaagagacaaataccttaaaagatacctcccaaaagcaaatatacagatggaaaataaggatatgaaaagatgttcacatcatatgtcatcatggaaatgcaaattaaaataatgagataccactaacctataagaacaactccaatccagaatattgacaacatcaagaatgtgaagcaaagaaattttcattcattgctggtaggaatgtaaaatggtacaaccactttggaagacagttacgtagttttttacaaaactaaacatactcttg

SEQ ID NO: 864633 - DNA, 643 bp, Homo sapiens
aaacaatgaatagaccatccagactgaaaattctgtagggaaacaacagatttgaatacactacataccaagtggaccaaacagacatgtacagaacatttcatacaatagcagcagactacacatttttattaagtgtacacagaccatctctggtatagatcgtatgttgagcacgaaacaaatcttaacaaatttaagaggagtgaaattatatcaactatcttttttgatatgaaactaaaagtcaatgtcaagagaaaaatttgaattttcacaaatatgtgtaaacaacatgttccaggacaacaaatgggttaaagaagaaagcaaagggtaaatcaaagaatactttcagacaaatgaaaattgaaacacaacatgccaacttatgggatgtagcaaaataagttcgaagaggggagtttatagtgataaacacctatgtgaaaaaamgaaagctctaaaatacacaaatttaaatctcaaggaattagaaaaataagaacatagtaagcctgaagtcagcagaaggaaggaaataaaaattaaagcagcaataaatgaaacagagactacaagaacaaaagtttaataaaagtaaaaagtcaagttttaaaaaaaagataaacaaaactggcaa

SEQ ID NO: 864634 - DNA, 622 bp, Homo sapiens
acctaaataaacatttctccaaagaagacatacaaatggccaacaggtgtatgaaaatgtgctcaatatcactaatcatcagataaatgtaaataaaagctacaatgagatatgtattagtccgttttcacgttactgataaagacatacccaagactgcgtaatgtataaagaaaaagaggtttaatggacttacagttccacatggctggggaggcctcacaatcatggtggaaggtgaaagacccgtcttacatggtagcaggcaagagagagaatgagagccaagcaaaargggaaaccctttataaagtcgtcagatctcgtgagacttattcactacctcgagaacagtatgggggaaaccacccccatgattcaattacctcccactgggtccctcccacaacacgtgagaattatgggagctacaattcaagatgagatttgtgtggggacatggccaaactgtatcaagatatgacctcatacctgttagattggttattttcaaaagcaaaacaacaagtgttggcaagtatgtggggaaaaaggtacccttgcataatgttggtgagaatgtaaattagtccagccattttggaaaacattatggagactc

SEQ ID NO: 864635 - DNA, 580 bp, Homo sapiens
ttgataatgtcctttgaagcatcaaagtttttctttttggtaaaatacaaagtagctatttttttctttggttatttgtggttttgaagtcatatctaagaaaccattgcaaaatccaaggccatgaagatttacccctgtgttttctaagaattttatagtttcatctcttatatttaggtctttgatgccctttgaattttttttctgtatagtataaggttgaggtccaaattcactctttttcatgtggatatctgtgtcccggcaccattgctgaaaagactattctttccttattgaattgtcttgtcastcttgtcaaaaatcaatggactataaatgtgagggtttgtttctagactctaaatgtgattcctttgatctccacgtctatctttgtgccacactatactgctttgattattatagctttgtagcaagtcttagaactgggaagtgtgagtcttgcaactttgttctttttcaatactgttctggctattttgtgtcccttgaatttcatatgtattttaggattagcttttccatttctgcaaaaaaaaaaaaaaaaggcagt

SEQ ID NO: 864636 - DNA, 590 bp, Homo sapiens
aaatcacctagctcctttttttttaagcaacttttgctggcatattttttattttttattttattttatcttattttttttttgagatggagtcttgttctgttgctaggctagagtgcagtggcgaaatctcagctcactgcaacctccgcctcccaggttcaagtgattctcctgcctcagcctccttgagtagctgggactacaggcctgtgccaccatgcccagctaatttctgtatttttagtagagacggggttycaccatgttggccaggatggtcttgatctcctgaccttgtaatccacctgcctcggcctcccaaagtactgggattacaggcatgagccactgctcccagccttgctggcatttttttttttttttaatttcagcttctattttggattcagggggtacctgtgcaggtttgttacatgggtatattgcatgatgctgagatttggggtatgaatgatcccatcacccagataatgagcgtagtaccaaataggtagtttttcagtcttttgccctcttcctctctccctcctctagtagtccccaatgtctattgtttccgtttttat

SEQ ID NO: 864637 - DNA, 582 bp, Homo sapiens
aggctagagtgcagtggcgaaatctcagctcactgcaacctccgcctcccaggttcaagtgattctcctgcctcagcctccttgagtagctgggactacaggcctgtgccaccatgcccagctaatttctgtatttttagtagagacggggtttcaccatgttggccaggatggtcttgatctcctgaccttgtaatccacctgcctcggcctcccaaagtactgggattacaggcrtgagccactgctcccagccttgctggcatttttttttttttttaatttcagcttctattttggattcagggggtacctgtgcaggtttgttacatgggtatattgcatgatgctgagatttggggtatgaatgatcccatcacccagataatgagcgtagtaccaaataggtagtttttcagtcttttgccctcttcctctctccctcctctagtagtccccaatgtctattgtttccgtttttatgtccatgtgtacccagtgtttagcttcctgcttataagtgagaacatgcaatatctggttttctgtcttgcactaattcacctaggataatagctttta

SEQ ID NO: 864638 - DNA, 655 bp, Homo sapiens
atctaggtctttacagaaaaagtttaccaatgcccatgatggaaataaggtcaagaattaaagtcaacgtgtagcactcttgagtggaggaaaataaagacacaatgggatactggggacttgagttctaatctacattctgggacaggtttaccctttcatattggataaatcatttcccctatctggatctcagtttccccatctgtaaggtaagaaagttagatgagaccagcggttttcaaactttgttttgttttgttttgttttgtttttagcccaggactttttccccaaaagtagactatggcaaactctatgcgtaaagcagataaagaaagagctattctgataagggatgggtgggaggtgtattaatctgttcttatgctgctaataaagacatacccaagactgggcaatttataaagcaaaagggtttaatagactcagagtttcatatggctggggagacctcacaatcatggctgaagrcgaattaggagcaaagtcacgtcttacatgacagcaggcaagagagcttgtgcaggggaattcccctttatcaaactatcggatctcatgagacttattcactatcatgagaacggcacaggaaaaacccgtccccatgattcaattacctcctgctggg

SEQ ID NO: 864639 - DNA, 655 bp, Homo sapiens
atctaggtctttacagaaaaagtttaccaatgcccatgatggaaataaggtcaagaattaaagtcaacgtgtagcactcttgagtggaggaaaataaagacacaatgggatactggggacttgagttctaatctacattctgggacaggtttaccctttcatattggataaatcatttcccctatctggatctcagtttccccatctgtaaggtaagaaagttagatgagaccagcggttttcaaactttgttttgttttgttttgttttgtttttagcccaggactttttccccaaaagtagactatggcaaactctatgcgtaaagcagataaagaaagagctattctgataagggatgggtgggaggtgtattaatctgttcttatgctgctaataaagacatacccaagactgggcaatttataaagcaaaagggtttaatagactcagagtttcatatggctggggagacctcacaatcatggctgaaggygaattaggagcaaagtcacgtcttacatgacagcaggcaagagagcttgtgcaggggaattcccctttatcaaactatcggatctcatgagacttattcactatcatgagaacggcacaggaaaaacccgtccccatgattcaattacctcctgctggg

SEQ ID NO: 864640 - DNA, 643 bp, Homo sapiens
ccaggacagctcaaaactcccaaggatgaatctgctggttggtgtttgtcttgccaggactccaggtttctccaagtgagctttatgatggagccacagtctttcctccttcccaatcatcctcttgcaccaagctggggagaagcagacatggggagggccagaaatgcaacaacgggtccctggcaggtagggcgtgcaggaaagaccatatctaaaactgttactgtctagaatgggtcacctggagaaatactcattgttttaggtttkgtacttgctgccaatagatcacagcagaataatctagaaagaagcatcaataggagtcagcacatcacatttacaataaatgtcttagtccattttgtgttcctataaaggaatacctgagactgggtaatttataaagaaaagagggttatttggctcacagttctgtaggctgtacaagaagcatagcaccaggatctgttgctggcaaggacctatggaagttttaacccatggcagaaggtgaagggggagaaaacatcacatgaaaagagaggggacaagagtgagagaggggtgccaggaccttttaagcaacttttctgccagatgtggtggctcacacacctgtaaccacagcacctttgga

SEQ ID NO: 864641 - DNA, 671 bp, Homo sapiens
tgaggaagcagccgccagcagacaccaaatccaccagtgccttgatcttgaatttccagcctccataactgtgagaggtacattaagtgactcattcaatggtattttattacagcagctcaaatggactaagacaccaggctttgtcttcttctctccctctcccttcctctccttctccatctcagtctctctatatctccttctctctctccctctccctctctcctccttccctaccctccttctttctcctttcttcttcccctttctccatgtctcctcactacctcatatggtcccagtaactctctactgtatcattgcagctttgtgccccaacagccctggagcttcatgtcccaggacacattttttcccccagggaatgctttgagtcaacctgatctggatcatgtgctctcaacttggactaatgactgacaagagggacaaaayattaggattgacccaatttgggtcgtatactcaacactccacaaaacaagaagagacagtgtttttaattagcaccctacctccccgccaaaaaatcacatgtatgctcttcaaaaaaaaaaaataagtaaaagaggcactgtcctcgttgaccaaacaaaagcactcactcccatgattaatggtgaagctatttcttttcaatcctgggc

SEQ ID NO: 864642 - DNA, 493 bp, Homo sapiens
tttataaaggaaaggggtttatttggatcatggttcttcaggctgtacaagaaatatggcaccagcgtctgctgctggagagggcctcaggacgtttcaagttataatggaaggtgaagagggagctggcatgttacatgccaagagagggaggaagagaagaaatggagctgccagactatgtttaacagccagatctcttgaaaactaagagtgagaactcactcaatctcttgaggatggcaccaagccattcatgagaggcccatgcccaygacccaaatacctcccactaggccccacctccaacactggggaccacatttcaacaggatatttggagagaacaaacatccaaaatatatcacaacctcaatgcagagttacattttaatgatgtaggaagttgaaaggtctccttcggttcacaatcaaacggccagtcttgtgattcccttgccctgagtgaataaaatgccaagaattttccttt

SEQ ID NO: 864643 - DNA, 567 bp, Homo sapiens
ttcttatttatcatttttggctctttttattgtacctgtggattcaagttaccatcagctgatatttccttattccagtgcagctttgctcccacctactggttttgtgctattattgtaaaataaatacatttctatatgtgtagacccaacaatacaattttaaacacatacacacacacacacacacacacacacacacasagcccacaattgcttttaaaattagttaagtaaagaaagaagaagaaatatgcatttacactattgtttttataattacaaaattatctacattggtgctctttaaattttgtttgtgggtttaagttactgtctaggccatttgctttcagcctaaagaatttattttgctattttttgtgaggtggcatgccagcaaggaattctcttagtttttgtttatctaagaatggttttattttactttcatttttaaaaaaacaatattgctggatataagattcttgcttgacagttttttttctttcagcactttaaatatgttatctcagtgcctctggcctccattatttctgatgaaaa

SEQ ID NO: 864644 - DNA, 654 bp, Homo sapiens
cctctcaaatccatcatccagcttcaactactcatggctactcttattttatccatactacacaaactcttccacaccccttctactggattattttgaggtaatggcaaacataatatcatttaaaaagtaaatacactagcatctatctataaaagataaggaattctttttaagcataatcataataccctatcaaacctaaagaattaacaataatttcttaataccatcaaatatccagtgttctaattttccaattgtcttataaatatttctattctctttacttaaattaggatcctaatragattcataccttagaattagctgatatgcttcttgagtttcttttcatctatagatataacatatctctatctcttttgatatttcctggctatgaattctattttgttatatattaggatggctacatttttgtaattaaattttttaaagattacaaaaacaatatatgagtaaatgttcataaaacattaaaacacatatggaagtgtgttttttgtttatataaatagaattctacaatgtttattattctgtgacttgcctttatcacttaacagcaaatactgaaacatatcctttttaaaatatcacagctttattgatatacaattcacatactat

SEQ ID NO: 864645 - DNA, 654 bp, Homo sapiens
cctctcaaatccatcatccagcttcaactactcatggctactcttattttatccatactacacaaactcttccacaccccttctactggattattttgaggtaatggcaaacataatatcatttaaaaagtaaatacactagcatctatctataaaagataaggaattctttttaagcataatcataataccctatcaaacctaaagaattaacaataatttcttaataccatcaaatatccagtgttctaattttccaattgtcttataaatatttctattctctttacttaaattaggatcctaatgagattyataccttagaattagctgatatgcttcttgagtttcttttcatctatagatataacatatctctatctcttttgatatttcctggctatgaattctattttgttatatattaggatggctacatttttgtaattaaattttttaaagattacaaaaacaatatatgagtaaatgttcataaaacattaaaacacatatggaagtgtgttttttgtttatataaatagaattctacaatgtttattattctgtgacttgcctttatcacttaacagcaaatactgaaacatatcctttttaaaatatcacagctttattgatatacaattcacatactat

SEQ ID NO: 864646 - DNA, 699 bp, Homo sapiens
agggaatgcatatgttaaatagcttgatttagtcaccccacaatgtatacaggcatagctcagagatgtcacaggttctatttcagaccactgcaattaagtgaatattgcaataaagtgagtcatgtgaacttttttatttcctagtgcatataaaagtaatgtttaggctatattgtattccactgagtatgcaacagcactgtatcaaaaaatgtacacacattaactytaaaatattttattgctaaaaatgcaaagaatcatctgaaccttcagaaaagcataatatttttgctggtggagggtcttgccccaatgttgatggctgctgactgatcagggtggtggttgctgataaatggagtggctgtggcaattttgtaaaataaaacaacaataaagcttacttcattgactgactcttcctttcacaagaaatttcttggtagcatgtgatgctgttacagcattttacccacagtaaaagttctttcaaaattggaatcactcctttcagaccctgccactgcttcatcaactaagtttatgtaatattctaaatcctttgttatttcaacaatgttcacagcatcttcaccaggagtagattccacctcaagaaattactttctttgctcatccataagaaataactcttcatccattcaagttttatgagattgaagcaattcagtc

SEQ ID NO: 864647 - DNA, 699 bp, Homo sapiens
agggaatgcatatgttaaatagcttgatttagtcaccccacaatgtatacaggcatagctcagagatgtcacaggttctatttcagaccactgcaattaagtgaatattgcaataaagtgagtcatgtgaacttttttatttcctagtgcatataaaagtaatgtttaggctatattgtattccactgagtatgcaacagcactgtatcaaaaaatgtacacacattaactctaaaatattttattgctaaaaatgcaaagaatcatctgaaccttcagaaaagcataatatttttgctggtggagggtcttgccccaatgttgatggctgctgactgatcagggtggtggttgctgataaatggagtggctgtggcaattttgtaaaataaaacaacaataaarcttacttcattgactgactcttcctttcacaagaaatttcttggtagcatgtgatgctgttacagcattttacccacagtaaaagttctttcaaaattggaatcactcctttcagaccctgccactgcttcatcaactaagtttatgtaatattctaaatcctttgttatttcaacaatgttcacagcatcttcaccaggagtagattccacctcaagaaattactttctttgctcatccataagaaataactcttcatccattcaagttttatgagattgaagcaattcagtc

SEQ ID NO: 864648 - DNA, 603 bp, Homo sapiens
tcctcctctcatcctaaataaaccttgttcctcaatataaactcagaaagcagtttcgtctataggttcagtgttttcaggggcagcagagattcagacagggtaagctcatcatttttacctcttcattcaccagcgtaagtgtgcttgctctcagacaaacattaccactaccaagcctgaattactctatctgggctrgcaacaatggcagtattaagaaaagataaaaaccatctaaatcatgctgcttggaactagttataaccacctttccagacacacagatacgtttccatgattaaagtataatgtggttggctgaaaggaactcagaaaatgatcgatatttgaacttaaaacgtttgatcacttgtcctgtgattttttttcttaaaactcaactcacattgtatttgtaagaacacagggaaagagctgagtaacaggacctagaggagatttttctttcctatcacttttcatgatggataggctccttaggaaagagaaagtatttaagggcttgccacgactccagtcatgttttaacctcattttataacccgtcaataggattgtgttacagactatctgactccc

SEQ ID NO: 864649 - DNA, 640 bp, Homo sapiens
ataaattacatgtgtagatgtttactctagggaaaccctgacaaaggtacacagggagccatgcaagaatgtcccctgcagaaatattcacaatcgcaaaaaaatacaaaacctaaatattaataaataagcaattaataaatacatggtggtatattccaatttatagcattttatttctttataaaaggaaaatctctatgttacaaatatttctattacttaatcagagtgatggatatagaagtttttatttgtgttttctgtattttaaaacattattttayacaggttgagcatccctaatctgaaagtttgaaatccaaaattctccaaaattcaaaactttttgattgccatcatggtgtcacaagtagaaaattccacacctgacatatgacaggttgcagtcaaaacacagtcgaaactttgtttcatgcccaaaattgttaaaacatactgtataaaactgccttcagtctatacatataaggtggacatgaaacaaatgaatttcatgtttatacttgtgtcccatccccaagatatgtcattatgtatatgcaaatattctaacatttgaaagaaattgaaatccaaaacacttctggtcccaggcatttcagataagggatataca

SEQ ID NO: 864650 - DNA, 687 bp, Homo sapiens
aagatttgtcgaacacttacagacactatgctaggcgctagggatgcacagttccaagaccaacctgttgccctcatggagctcacagctcggtggaagtaaaaaataagagaaacactattgaatcttgtcacacatgattagacaggaatttatgggatgctctgagaatccagaggaaagaataccttactctgcatgaagagacagggaatttttcatggaggaggatataattgagctgcattttgaaaaataaggagttttgaggcacacaatacataagagkaaagggcacagaacacaggacatgcaaaggcatttaaacacacaaatgtacacacagatgtgtttgggagactgtaagcagctggatatgcttccatctaggatgcaggctgggaatgtcaggaggcataaaggaagaaataggcaagaacagatgatgccaaggaaaggagttttgacttttgtctagggagatgaaggagccactaaaagacaggtagcaggcatggctatccttgctttcaacagacagcatgtccctaaagaagagaagatgagaggacccagttaggaaaggaaggatagcagtgggcggctagtccgtgcctgctgctctttcctctagtctctgttggatttccttcactccagcctcaatgtgccattcatcatcaatga

SEQ ID NO: 864651 - DNA, 668 bp, Homo sapiens
catgtccctaaagaagagaagatgagaggacccagttaggaaaggaaggatagcagtgggcggctagtccgtgcctgctgctctttcctctagtctctgttggatttccttcactccagcctcaatgtgccattcatcatcaatgacgccatcccctggggaagcgctgtagacactcgggattctcagatgggccagcccaaggaccacagcctactgccactcatggctggctcagtgcgtaaatgctgtcctgaacccaagagaagcatgaacttgggggaaccccagagacccacagtaagattcaaccacrgatgagtgtggttgagtgacactaaggtagtaaatattctaacagatataggttaaatttcaacaggtggtttactaacttggtaactgtgtgacttcaacaaggttatttcacttctccaagtctgaaggtcctcacctatcaaatggagataacactaacacctaccttgtatcctggatttattgaaagaaattatgcaattaattatatttcatctgtgcattcctggaacatggcaaatactcagtaatccataattataattattaacatttagcatcatgcagtcaagcaccttgcctatttctagagaagcttggaacctgagacatggtcctaaaagaactct

SEQ ID NO: 864652 - DNA, 644 bp, Homo sapiens
gaggtttattttgcaaggttgagaacatgcccaggaaaaacagacacaagtcacatgggatctgtggcctgtgctttttccaaagaggattttgagcacctaattatttaaaggggaaagaatgagcaggaggggcaagaggaacagtcaattatgcattcatcttacactcagtaaatctgcatcttacaraaaactgaagctggaccccttccttataccttatacaaaaattaactcaaaatgaattaaagacttaaatgtaaaacccaaaactataaaaaccctagaagaaaagctagacaataccattcaggacataggcatgggcaaaaattttatgataaaatcaccaaaagcaattgcaacaaaagcaaaaactaataaataggacctaattaaactaaagagcttctgcacagcaaaagaaaccatcatcagggcaaacaggcaacctacagaatgggagaaaatttttgcaatctacccatctgacaaaggtctaatatccagaatttacaaggaacttacatagatttacaagaaaaaaacaaacaactccatcacaagtgggcaaagtacatgaacagaacacatctcaaaagacgacatttatgtggccaacaaacatatgaaataaagct

SEQ ID NO: 864653 - DNA, 644 bp, Homo sapiens
gaggtttattttgcaaggttgagaacatgcccaggaaaaacagacacaagtcacatgggatctgtggcctgtgctttttccaaagaggattttgagcacctaattatttaaaggggaaagaatgagcaggaggggcaagaggaacagtcaattatgcattcatcttacactcagtaaatctgcatcttacaaaaaactgaagctggaccccttccttataccttatacaaaaattaactcaaaatgaaytaaagacttaaatgtaaaacccaaaactataaaaaccctagaagaaaagctagacaataccattcaggacataggcatgggcaaaaattttatgataaaatcaccaaaagcaattgcaacaaaagcaaaaactaataaataggacctaattaaactaaagagcttctgcacagcaaaagaaaccatcatcagggcaaacaggcaacctacagaatgggagaaaatttttgcaatctacccatctgacaaaggtctaatatccagaatttacaaggaacttacatagatttacaagaaaaaaacaaacaactccatcacaagtgggcaaagtacatgaacagaacacatctcaaaagacgacatttatgtggccaacaaacatatgaaataaagct

SEQ ID NO: 864654 - DNA, 644 bp, Homo sapiens
gaggtttattttgcaaggttgagaacatgcccaggaaaaacagacacaagtcacatgggatctgtggcctgtgctttttccaaagaggattttgagcacctaattatttaaaggggaaagaatgagcaggaggggcaagaggaacagtcaattatgcattcatcttacactcagtaaatctgcatcttacaaaaaactgaagctggaccccttccttataccttatacaaaaattaactcaaaatgaattaaagacttaaatgtaaaacccaaaactataaaaaccctagaagaaaagctagacaataccattcaggacataggcatgggcaaaaattttatgataaaatcaccaaaagcaattgcaacaaaagcaaaaactaataaataggacctaattaaactaaagagcttctgcacagcaaaagaaaccatcatcagggcraacaggcaacctacagaatgggagaaaatttttgcaatctacccatctgacaaaggtctaatatccagaatttacaaggaacttacatagatttacaagaaaaaaacaaacaactccatcacaagtgggcaaagtacatgaacagaacacatctcaaaagacgacatttatgtggccaacaaacatatgaaataaagct

SEQ ID NO: 864655 - DNA, 570 bp, Homo sapiens
cagctgaggaatggtgcaatggtatgaatgtacatgttcctccaaaattcatatgttggaacttaaccccagaagtgattacattaagaggagggcctttgaaaagtcattaggccatgaggactccactctcaggaatgagatgaatgctctttaaaaagaggcttcagggagctgtctggccygtccatctcttctccatgtgagcacacagcgtctgcccctctctggcccttcctccaggtaagcagacagcaagaggctccatctatgaaaagagtaagctttgtgaagcaacagaggccaagtctgctggtgccttgatcatggacctcccaggctgcagaactatgagaaataaatttctcttctgtataaattatccagactaaggtgttctgctataggagcacaaagggactgagacagatggtcacaccatggttgtcattggggtttgtgggtgtgtaaaccctaacttcaccctgtattcacttctgttgatagcatgcaatgtctgtaccacgtgttgagtttaattcctaataaaatgaaaccacctttgcaaaa

SEQ ID NO: 864656 - DNA, 651 bp, Homo sapiens
ccacctttgcaaaattatgacagtaagagaaatttgacatagttgactccatcttgcttctgacctccaagctattcttggtcattcctgcatacaggccaagctaactttgggagaaatttagtttatagtttaatcttaaggcaaggatgataatagccctccccaaaatgaaatcacctttctgaaactaatgaaaggccacaaggttcggattataagargggcttgaattctgctaagaggtaggtgtagttaagagataaccagccattgttctgaggtcacaagatttgtaacacaattggtcacacaatttgtaacttccccaattactcctgtagataacattactattatagaatctaagattggcctttgagatttttttttttcagacttgtgcattcctgaagactggctgcctccacctgaacctgagactcatgacaacctgtcctgcggtcccacccagaggcagactcagcacccgaggactgttttccacacccctgtgatttcctccccaaccagtcatcactccccattccctagacccctgctcaccaaattatccttgagaaaccataccccagccttcagggagactaatttgagtactaactccagttctcccacatgggccagcct

SEQ ID NO: 864657 - DNA, 590 bp, Homo sapiens
cttataacatattttgcatatgcactttaaaaagcattggtgaggcggtacgtggtgactcaaatctgtaatcccaacatttggggagcctgaggcaggaggatcacttgaacccaggagtttgggaccagcctgggcaaactttataaaaaaagaaagaaagaaaaaaagtattggtgagccatttgtttttatctcaaagtttccttcaaactctctggcttttggtgatttcagaatagggatttrtttttcccatttccttctatcttctttgtttttccattcatcctataaatttttctcaaaacatctggcccagggtcaccaggccctcctggagaagcctaatcatgtggcttcccccaatcagaactagcctgtatcatatttcaattgccagccagtttaatcatcccttctgtcgggaaagttaggcttatggataaatcaaagcagctttgcaacaaaagtcagggacagtataacttcccgggaagaactttgccttgcaaatatatagctttctccatcataaacaaggtcaccaacactacctttcaccttgatgagaaattcaaattttcaaa

SEQ ID NO: 864658 - DNA, 651 bp, Homo sapiens
agaaaaagcaagtacacatagttcctatacactctgcccaaccctaaatagtttctcttattattatttggcattgtgtggtgagttagtgtattagactgttcttatgctgctaacaaagacatacccaagactggatgatttataaaggaaagaggcttaattgactcacaggtccacatggctggggagacctcacaatcatgacgaaaggcgaatgaggagcaaggtcatgtcttacatggcagcaggcaagagcgcatgtgcaggagaactcccatttataaaaccatctgatctcataatttatattcactatcacgagaacagcacaggaaaaaccyaccctccatgattcaatcacctcccaccaggtccctccaatgacacatggggattattataattcaaggtgagatttgggtggggacacagagccaaactatatcattctgcccctggttcctcccaaatctcatgtcctcacatttcaaaaccaattatgccttccactgcccctcaaagtcttaactcattccagcattaacccaaaagttcaaatccaaagtctcatctgagaaaaggcaagtccctttcacctatgatcctgtaaaatcaaaagcaacttagttacttcctagatacaaagtg

SEQ ID NO: 864659 - DNA, 651 bp, Homo sapiens
agaaaaagcaagtacacatagttcctatacactctgcccaaccctaaatagtttctcttattattatttggcattgtgtggtgagttagtgtattagactgttcttatgctgctaacaaagacatacccaagactggatgatttataaaggaaagaggcttaattgactcacaggtccacatggctggggagacctcacaatcatgacgaaaggcgaatgaggagcaaggtcatgtcttacatggcagcaggcaagagcgcatgtgcaggagaactcccatttataaaaccatctgatctcataatttatattcactatcacgagaacagcacaggaaaaacctaccctccatgattcaatcacctcccaccaggtccctccaatgacacatggggattaytataattcaaggtgagatttgggtggggacacagagccaaactatatcattctgcccctggttcctcccaaatctcatgtcctcacatttcaaaaccaattatgccttccactgcccctcaaagtcttaactcattccagcattaacccaaaagttcaaatccaaagtctcatctgagaaaaggcaagtccctttcacctatgatcctgtaaaatcaaaagcaacttagttacttcctagatacaaagtg

SEQ ID NO: 864660 - DNA, 610 bp, Homo sapiens
agtaatggcatctaatatttatttaaatgcacatgtcccaaataaaaaaatttatattaaacaatttttatataatttttgctgagatgcctttcctgatatttggttcatttttatctccattgttttcttttcattagttgtaagtttacttgcatattgattataaaagtcatttaacaaattgaaagaattgatttaacaaatatatgacttggaagtattttctcccagtctgtggttgcctttttctctcttatcagtgggtatttcaaaaaatatgtgtgtgtgtgtgtgtgtgtgtgtgcacaaatttasacaaaaaacataaaaaattattcattcatagatcatgtatttggcattatatctgaagtctcattataaaatacactaatactgattatttattccatgtctctaatctcaggacacaatcaactcatgagtgtttagccttcacctattgattggaggaatatctgcctgagatatttggaatacttctataagaagacgtgttcttcttcccatcgtttctttgtttaatcatctattaaaatccatattggtttatggatgtctgtttcatactctgaagaagatccat

SEQ ID NO: 864661 - DNA, 610 bp, Homo sapiens
agtaatggcatctaatatttatttaaatgcacatgtcccaaataaaaaaatttatattaaacaatttttatataatttttgctgagatgcctttcctgatatttggttcatttttatctccattgttttcttttcattagttgtaagtttacttgcatattgattataaaagtcatttaacaaattgaaagaattgatttaacaaatatatgacttggaagtattttctcccagtctgtggttgcctttttctctcttatcagtgggtatttcaaaaaatatgtgtgtgtgtgtgtgtgtgtgtgtgcacaaatttagacaaaaaacataaaaaattattcattcatagatcatgtatttggcattatatctgaagtctcattataaaatacactaatastgattatttattccatgtctctaatctcaggacacaatcaactcatgagtgtttagccttcacctattgattggaggaatatctgcctgagatatttggaatacttctataagaagacgtgttcttcttcccatcgtttctttgtttaatcatctattaaaatccatattggtttatggatgtctgtttcatactctgaagaagatccat

SEQ ID NO: 864662 - DNA, 626 bp, Homo sapiens
cagcctgagagccgaggacacggctgtgtattactgtgtgaaacacagagtgaggggaagtcagtgagagcccaggcacaaacctccctgaaggggtcccagaaacgactagggggcgccaggacactgtgcacggggctgtctccagggcaggtgcaggtgctgckgagggctggctttctgccatggcctggggcagcctcatcgtcaaatttccccaaggaacttctacagatttacaattctatactaacatttgatgtctctaaatggaaaacggttatttttttgttcctttgtttttgtaacaagaggaaacaccctcacctccacagaagccagggtgtcactttgggggcagaaataatcctttcatggtcaggatgagagtcctgaggaatctcagggaaacctggagagtgttttccaattagactcagagcagagacctccatgggaatctctgattagaacaggccttgagctctgatgggagccaagagagaggctcacccagggtcagggtccttaaaacctgatggttttcacagctatcccctctcaacttgtaaaactgtgcccatctgactcagactgattcagctgaccctctttctgctgatcca

SEQ ID NO: 864663 - DNA, 626 bp, Homo sapiens
cagcctgagagccgaggacacggctgtgtattactgtgtgaaacacagagtgaggggaagtcagtgagagcccaggcacaaacctccctgaaggggtcccagaaacgactagggggcgccaggacactgtgcacggggctgtctccagggcaggtgcaggtgctgcggagggctggctttctgccatggcctggggcagcctcatcgtcaaatttccccarggaacttctacagatttacaattctatactaacatttgatgtctctaaatggaaaacggttatttttttgttcctttgtttttgtaacaagaggaaacaccctcacctccacagaagccagggtgtcactttgggggcagaaataatcctttcatggtcaggatgagagtcctgaggaatctcagggaaacctggagagtgttttccaattagactcagagcagagacctccatgggaatctctgattagaacaggccttgagctctgatgggagccaagagagaggctcacccagggtcagggtccttaaaacctgatggttttcacagctatcccctctcaacttgtaaaactgtgcccatctgactcagactgattcagctgaccctctttctgctgatcca

SEQ ID NO: 864664 - DNA, 626 bp, Homo sapiens
cagcctgagagccgaggacacggctgtgtattactgtgtgaaacacagagtgaggggaagtcagtgagagcccaggcacaaacctccctgaaggggtcccagaaacgactagggggcgccaggacactgtgcacggggctgtctccagggcaggtgcaggtgctgcggagggctggctttctgccatggcctggggcagcctcatcgtcaaatttccccaaggaacttctacagatttacaattctatactaacatttgatgtctctaaatggaaaacggttatttttttgttcctttgtttttgtaacaagaggaaacaccctcacctccacagaagccagsgtgtcactttgggggcagaaataatcctttcatggtcaggatgagagtcctgaggaatctcagggaaacctggagagtgttttccaattagactcagagcagagacctccatgggaatctctgattagaacaggccttgagctctgatgggagccaagagagaggctcacccagggtcagggtccttaaaacctgatggttttcacagctatcccctctcaacttgtaaaactgtgcccatctgactcagactgattcagctgaccctctttctgctgatcca

SEQ ID NO: 864665 - DNA, 638 bp, Homo sapiens
aagatctgcatctgccgtccaccacggagccccatcgtcttctgttatgctgtctttgaatcagtcccaactagattatctagaacactcttcgtgacttaggaaaaaataatggcaggctccactaacacctgtattatgccatgggagcaacacctaggctactgtgtgattgaatagatgagactacggtctagtcaaggtgacaggtaaaattgattgttgccattatgatattttattttatatttgtcaatataatcatgctcatattataaatattttttgagacggagtcttgctctgttgccaggctggagagtgcagtggcacgatctcagctcactgcaacgtcttccacctcccaggttcaagcaattctcytgcctcagcctcccgagaagctgggattacaggtgcgcgccatcatgcctggctaatttttgtatttttagtatcgacggggtttcaccatgttggccagtgtggtctcgatttcctgacttcgtgatctgcacacctcggcctcccaaagtgctgggattacaggcatgagccaccacgcccggcctagttttattaatgtctgtccataccagcaactacatacctatggggacattaatttacatctgcag

SEQ ID NO: 864666 - DNA, 511 bp, Homo sapiens
gttctgtggcccaggctggaatacactggtgagatcacagctcagtgcaggctcaagtgctcctcccgcctcagccacagtagtagctaggactacagatgtgcacaaccactcctggctaatattttattttttgtagagatggggtctcactatattgtccagattggtctctaactccttgactcaagggatccaggacaggataacaggtgtgagccaccacacctggctatgtgcatgaacttttaagacaaatacaaggctccacaaaagttaaggttttcccacctaatttccaggggatcttttggtgcaaggatgagaaacccttaaaastacccagacatctccaaagattcaagacagttcattcgggctgagccagcccactgggcagactgaccttcaaacaaggcccacccatgacatacaccagatggctctccaagaatctctccagttctcagggtccctaaggtactggacagagctaggaaagcaaacccat

SEQ ID NO: 864667 - DNA, 615 bp, Homo sapiens
ttatatacagcaaaaatagacaaaaacacaagaagacatacacaaatgttaaacctagagagaaatttgcatataagtaagtctctgaatgactggtagaacaaaccgaaaaataggatggagaggtttggaacagcatgattagcaaaattgacatatctgtcttttaatataggtagaaacagagttagataaaaaaaggacttgtctcggagcatgatttctgaaaatagtggaatcgagtttgaatctagtaagtacatataaataaatgtcttaaaactcytcttatgttagctaattaagaaatattattgtaatagacattagaaaatattttaataaattgagtgcatttcacacgctaaggaaatgatcttacttgatagttgaattagatacatatatacctataggtagtttaaaatatttctaataaccttatatacttttaaaaagcattgatatatgtttgcactatctggtctatagagtacacataccaaacatgattatagctcttctgctataaacttcaaatgtctaattaatacaaaaatctagaatgagaagagttctttgcaattttttttttttaccaaatagaatatagga

SEQ ID NO: 864668 - DNA, 494 bp, Homo sapiens
aaatagtggaatcgagtttgaatctagtaagtacatataaataaatgtcttaaaactcctcttatgttagctaattaagaaatattattgtaatagacattagaaaatattttaataaattgagtgcatttcacacgctaaggaaatgatcttacttgatagttgaaytagatacatatatacctataggtagtttaaaatatttctaataaccttatatacttttaaaaagcattgatatatgtttgcactatctggtctatagagtacacataccaaacatgattatagctcttctgctataaacttcaaatgtctaattaatacaaaaatctagaatgagaagagttctttgcaattttttttttttaccaaatagaatataggaaagatagctgcaaatatacctgacacacttatctgtgagtatggtggtagcctttttattttattttattttgagagtgggtctcactttgtcacccaagatggag

SEQ ID NO: 864669 - DNA, 494 bp, Homo sapiens
aaatagtggaatcgagtttgaatctagtaagtacatataaataaatgtcttaaaactcctcttatgttagctaattaagaaatattattgtaatagacattagaaaatattttaataaattgagtgcatttcacacgctaaggaaatgatcttacttgatagttgaattagatacatatatacctataggtagtttaaaatatttctaataaccttatatacttttaaaaagcattgatatatgtktgcactatctggtctatagagtacacataccaaacatgattatagctcttctgctataaacttcaaatgtctaattaatacaaaaatctagaatgagaagagttctttgcaattttttttttttaccaaatagaatataggaaagatagctgcaaatatacctgacacacttatctgtgagtatggtggtagcctttttattttattttattttgagagtgggtctcactttgtcacccaagatggag

SEQ ID NO: 864670 - DNA, 567 bp, Homo sapiens
ttggatgaaacttgaggatattatgccaagtgaaataagctagtcagtgagggacaaatacagtataattccatttgtataagagacttaaagtggacagaatcatagagatagtacaatgatgattgccagaagctggggggaggaagacatggggaagtactgtttaacgggtayagagtttcagtttcacaagatgaaacgagttatggagatggatggtagggatggctgcacaatgttatgactctatttagtaccactgaactgtacacttaaaatggttaacagagtacattttatgttatgtgtattttaccacaataaaaaaataaaataccttaggaacattttcctgaaagagtccacataaaattcattttaatgcatgtgtttatgcatagctttttatttttctcttttctatttatattccaaattagaatataatgctaatcaagcatagtggctgtgtttcttgcttcctctagtctgcaggtagcatacaaatgtaataaactactcattaatgtcacatctatttattttctgccttataccaagctt

SEQ ID NO: 864671 - DNA, 648 bp, Homo sapiens
caatcatattttccttttgacagtcacattataaagcatgatgtattgcaattaatctcaattagctgatgacaattaaaattaatagtttattattgctgataaagaatcatgactctcctgttctcaaacgtgaaaggaattctggtaattttaatacaaatttgcatattattactaattgatttaatctcatyggatttggttcatggatccaatttattaaaatattgataatgggataatgatttgtctccccatttcatttacactaaaagacacaattcttacaatggtctgcaagcccatcatgatctgccgcatgttaaccgccaaaattcttttatgtcttcaaccttgaacttaccagtggtcctggccacctcactgtcctctggacatgccaacatgctactgccttatgaccaagactctagttaatttcttagcttggaaagatagccctccatatatccattgatgagctcattcaacttcctcaggtctttactgaaacctcacattctcgatgagacctattcagtatttcaaactgcctcccagctgcaacagtccaaaaccccttagtcttctgtgtatttttgacaggatttattgagatataatttacatactgtagagtgcaca

SEQ ID NO: 864672 - DNA, 648 bp, Homo sapiens
caatcatattttccttttgacagtcacattataaagcatgatgtattgcaattaatctcaattagctgatgacaattaaaattaatagtttattattgctgataaagaatcatgactctcctgttctcaaacgtgaaaggaattctggtaattttaatacaaatttgcatattattactaattgatttaatctcattggatttggttcatggatccaatttattaaaatattgataatgggataatgatttgtctccccatttcatttacactaaaagacacaattcttacaatggtctgcaagcccatcatgatctgccgcatgttaaccgccaaaattcttttatgtcttcaaccttgaacttaccagtggtcctggccacctcactgtcctctggacatgccaacatgctactgccttatgaccaagactctagttaatttcttagcttggaaagatagccctccatatatccattsatgagctcattcaacttcctcaggtctttactgaaacctcacattctcgatgagacctattcagtatttcaaactgcctcccagctgcaacagtccaaaaccccttagtcttctgtgtatttttgacaggatttattgagatataatttacatactgtagagtgcaca

SEQ ID NO: 864673 - DNA, 543 bp, Homo sapiens
aaaaacaaacaacctcatcaaaaagtgggtgaaggacatgaacagacacttctcaaaagaagacatttatgcagccaaaaaacacatgaaaaaatgctcatcatcactggccatcagagaaatgcaaatcaaaaccaatgagataccatctcacaccagttagaatggcaatcattaaaamgtcatgaaacaacaggtgctggagaggatgtggagaaataggaacacttttttttttttaattttgatagagactgggtcttgctatgttgcccaggttgcttgtgaactcctgggctcaaggaatcctctcatttcagcctcttcaacagctgatattacaagcatgaaccaccatatgggctggaagctgatgtttaaaatactgagatcatatagatgacagcacctgaaaaatagacaacaccaagctttatgttaaaaggtgtgagggtatcaatattgttgtggctattggggaggaaaccattagtaaaaccagtaagttaaagctcttgctttaaactttggctttaatttaac

SEQ ID NO: 864674 - DNA, 543 bp, Homo sapiens
aaaaacaaacaacctcatcaaaaagtgggtgaaggacatgaacagacacttctcaaaagaagacatttatgcagccaaaaaacacatgaaaaaatgctcatcatcactggccatcagagaaatgcaaatcaaaaccaatgagataccatctcacaccagttagaatggcaatcattaaaacrtcatgaaacaacaggtgctggagaggatgtggagaaataggaacacttttttttttttaattttgatagagactgggtcttgctatgttgcccaggttgcttgtgaactcctgggctcaaggaatcctctcatttcagcctcttcaacagctgatattacaagcatgaaccaccatatgggctggaagctgatgtttaaaatactgagatcatatagatgacagcacctgaaaaatagacaacaccaagctttatgttaaaaggtgtgagggtatcaatattgttgtggctattggggaggaaaccattagtaaaaccagtaagttaaagctcttgctttaaactttggctttaatttaac

SEQ ID NO: 864675 - DNA, 543 bp, Homo sapiens
aaaaacaaacaacctcatcaaaaagtgggtgaaggacatgaacagacacttctcaaaagaagacatttatgcagccaaaaaacacatgaaaaaatgctcatcatcactggccatcagagaaatgcaaatcaaaaccaatgagataccatctcacaccagttagaatggcaatcattaaaacgtcatgaaacaacaggtgctggagaggatgtggagaaataggaacacttttttttttttaattttgatagagactgggtcttgctatgttgcccaggttgcttgtgaactcctgggctcaaggaatcctctcatttcagcctcttcaacagctgatattacaagcatgaaccaccatatgggctggaagctgatktttaaaatactgagatcatatagatgacagcacctgaaaaatagacaacaccaagctttatgttaaaaggtgtgagggtatcaatattgttgtggctattggggaggaaaccattagtaaaaccagtaagttaaagctcttgctttaaactttggctttaatttaac

SEQ ID NO: 864676 - DNA, 534 bp, Homo sapiens
tgcaacctaacatatttgtatgttagactctgggaattaggacatgaaaatttttgggaggccattctttggcctacagcagacataatctgtttacctgcagattaaagcgttctttatttttctgtctccctgtcttaatttttttaaaataataatatttgtagtaaagagaaagaaagaaaagaaaacaaagaaagaaaaagaaggaaggaaagaaggaaggaactaaagaaagaagaaagaaaaggaggaaatgagggaaggaagggagggagggaggaagggagaaaggcaggaggggagaaaaaagaaagcatgaacacaagaaagaaagaaggaaagaaagaaaaagaaagagagaragaaagaaagaagggaggaaggaaaggaggaagagagaatggtaaaagggaagaaggcacagaaacaaagaaaataaagaggcgaaggaaggaaggaaaaagaggaaagggagggaggaaggaagaaaaggagggcgggaggaagggagaaaaaaggaaagaaagcaag

SEQ ID NO: 864677 - DNA, 651 bp, Homo sapiens
ttaggttccacttgtctatttttggttttgttgccgttgcttttggagacttagacaaaaattccttgccaaggctgatgtcaaaaagagtattttctaggttttcttccaggatttttatagtttgaggtcttacacttaaatctttaatctattttgagttaatttatatatatatatacatatatatacacatatatatacacacacacayatatatatatatatatatatatcaaaaggtaggggtccagcttcttttttctgcatatggctagccagttattccagcaaaatttattgaatagtcttttcctcattgcttgtttttgacaaccttgtcaaagatcagatggttgtaggtgtgcagctttatttctgagttttctattatgttccattggtccacgtgtctgtttttgtaccagtaccaagctgttttgattactgtggctttatggtatagtttgaagttaggtggtgtgatgcctctggttttgttctttttacttaagattgctttacctattcaggctcttttttggttccatatgaattttagaatagtttttttttttttttctaattctgtgagaacgacattggtagcttgctagaaatagcattgaatctgtacattgctttgtacat

SEQ ID NO: 864678 - DNA, 617 bp, Homo sapiens
cacctacgatgcaggcctggctcattgtactttgcaattcatttatcctgaatgacagcttaaaataatcagcacatcagataggataatagagggcccataataatcaaaaattcaatttcctaatgtagagtacattttatattattgggcatattcaaaaccacttcaaaaatttttaaacaaaagcattataagaattatagctgcagctataactcagttgcttatacgtatgcatgtttataccaacgactctaacattcctacactatatttacagagagcaaaaaagcaacatatgcatacatgtacaatatgtgtttcacttaatgtccaactggctaatattaaccagcattcattaacttagaaccttgagggaakagagacatttctcatgcttcttggtactactcttctcctcccatctgtaaggtctctagtataatgtacaaagcaggcgattaataaatatttttatttgagttgacaatggctgggcaaacatttctttgtcaatccaatagctttttatttggtgctaagctttctttcgtgttaactgggttagagttatactgtgactatactaatttatgcccccaatagtagat

SEQ ID NO: 864679 - DNA, 604 bp, Homo sapiens
actctcaaatactttaaaatgcttcctgctccattaagaattccaatggtaaaagtcagagccaatttaaacaagagagagatatgtgtgtatatacatatataaatgtatatatatgcatatacataaaagtgtatatatatatatgtgtttgtgtatatatatataaaatatatacatttaaattgtatttcaacttttagtgtcttattgagattaattcctagaagtaacttcagrttacaaaaggaaaccaatttttctctgtgtttaaagaaattaaagaaattaaagaaagaaaaaatatcatatagcacaatcttaaaacacttgtattttagaaatgtcctgtttaataccatagccactaggcagatgtagctatgtaatttaaaatttattaaaataaaacaattcagttccctaatcacaccatccacatttcaagtgctcagtaatctgtgtggctagtggcaatcacatgggacagtgcagacatggaacatctccatctggcagtgttgttttggaacaacaacaaaaaacgctggtaaaataatgattgatagaactcatgaggagtcatcaactcaactagaaaaat

SEQ ID NO: 864680 - DNA, 629 bp, Homo sapiens
gtattactcactttaggttatttggttaaggagaagcttgaatatggaagtttgttggtttttgtctccaaaatgcatttagggttccccagcattccactttatcacattcaaaataattgggtaagtaggaaaagatataagcaaaatgtgtatgttaaaacactcttcttatatgttctgttcaacaccaaccactagaaaaatgtcacataatttccacagttaagtctatcccaacttgagccttaatttttggtggtagcagctgctattttgcgacaaaggtaaactcttggtgccaaaatttccaagaatgtttaggatgcatatgatttttggccactctggagaattttgaacgtagatggcaatgctgtctgaaaaatggatccctgtgaaagaagcataaagygtgaaatcacatttaattagccaagagtggctagtgtatgttgccattaaatcctttaaattacagcacatctgggcaccgtccatcccacaagaatgtatccaatgatgcctctgtcttacctgtgagtccagcttattttctcctaacttctcattactttttaactattcagtattcttggcataagaaatcaagaaaacacaagatgctt

SEQ ID NO: 864681 - DNA, 613 bp, Homo sapiens
taagcctcatggttgtcctggatttctgcctggaggtacttttctgctttggcttggacaggtggaccccaaaaggagtggaaacggttaaggaggccaagattggagctcctggttactgagggaggttggaattttgaggaaagctacccaaactatattgatggaggacagacaaaagtctgcagaaagatccaacgtgggatattgggattggctgaatatgcacaaaatgagactttgggaaacttagcagagattgtctgctacaggggtgagaactgaataatgataccagagatgaagtagggctaaaatgttgggrttctggctcagctagattggaaatacattgctgagaacctcaggcattctgctgagacccccaaaaagtcattctaatgagtaaggaccacaccttacaataatcaaatctaaaatggactcacctaacacaaaataaaactttcccaacttcaccatgcctgcaaataagtggcaaagttgtattctgaaccaaaatatttctgcccccaaggctggtgtccttgagcactctatttccattctagagtgggtccggccttctagcagatcaggaaactccaaaact

SEQ ID NO: 864682 - DNA, 613 bp, Homo sapiens
taagcctcatggttgtcctggatttctgcctggaggtacttttctgctttggcttggacaggtggaccccaaaaggagtggaaacggttaaggaggccaagattggagctcctggttactgagggaggttggaattttgaggaaagctacccaaactatattgatggaggacagacaaaagtctgcagaaagatccaacgtgggatattgggattggctgaatatgcacaaaatgagactttgggaaacttagcagagattgtctgctacaggggtgagaactgaataatgataccagagatgaagtagggctaaaatgttgggattctggctcakctagattggaaatacattgctgagaacctcaggcattctgctgagacccccaaaaagtcattctaatgagtaaggaccacaccttacaataatcaaatctaaaatggactcacctaacacaaaataaaactttcccaacttcaccatgcctgcaaataagtggcaaagttgtattctgaaccaaaatatttctgcccccaaggctggtgtccttgagcactctatttccattctagagtgggtccggccttctagcagatcaggaaactccaaaact

SEQ ID NO: 864683 - DNA, 613 bp, Homo sapiens
taagcctcatggttgtcctggatttctgcctggaggtacttttctgctttggcttggacaggtggaccccaaaaggagtggaaacggttaaggaggccaagattggagctcctggttactgagggaggttggaattttgaggaaagctacccaaactatattgatggaggacagacaaaagtctgcagaaagatccaacgtgggatattgggattggctgaatatgcacaaaatgagactttgggaaacttagcagagattgtctgctacaggggtgagaactgaataatgataccagagatgaagtagggctaaaatgttgggattctggctcagctagattggaaatacattgctgagaacctcakgcattctgctgagacccccaaaaagtcattctaatgagtaaggaccacaccttacaataatcaaatctaaaatggactcacctaacacaaaataaaactttcccaacttcaccatgcctgcaaataagtggcaaagttgtattctgaaccaaaatatttctgcccccaaggctggtgtccttgagcactctatttccattctagagtgggtccggccttctagcagatcaggaaactccaaaact

SEQ ID NO: 864684 - DNA, 643 bp, Homo sapiens
ttatggactttcatccccccaaaaaagtatatattaaaaatttacgtgaaactttgcataccacagagtaacattcaggtgatttgtccttggcacaaaagacctggcccacttcatttgagtgaaactcttcttggctctatcctcccctggaacacctggagaaaatttgtccactggagagcttagtaaatcgccctaaattccttaacatataggtatatgagccagtacagatcataagaaactcttaattaatagtgttgacaaattcatagatgtttccttcattaagcaagttatggtttccctacagcttctcaatgtatgaccatgagtatttgccaatgatatgggggtcctggttggggaactcytcatccttccttagtgagctgtttgcagagcatcttccatatttccctttattggcagagcccttatggcaatggaatcctccccactgttctactttctctgctgcccagagacagaccctaacatgtaggcttctatttctcatgtagatccccatactcctctgggcacttgggtattggctgaggatatatagaagtcctcactgaagcatttcagcacattgatagctggataaaattgcagagcagagctgcccttgccc

SEQ ID NO: 864685 - DNA, 662 bp, Homo sapiens
ctgtttgcagagcatcttccatatttccctttattggcagagcccttatggcaatggaatcctccccactgttctactttctctgctgcccagagacagaccctaacatgtaggcttctatttctcatgtagatccccatactcctctgggcacttgggtattggctgaggatatatagaagtcctcactgaagcatttcagcacattgatagctggataaaattgcagagcagagctgcccttgcccaagagtaatgtcaccggtgccctcaatgccaaccctcaggccctacccctacttcagtctgtttcctctgctgtggcttcttggactagccttaaatttcctcaagcaaacttggggaatgagaagttctgagttcagaatccttcctctggccacagagtatatctgactcattttcttaatgtttaccaactacttagaccactaaaaccaccagtttttaagtcttattacaacaaataataatatgaaatcaycatattatgcatgatattttcacatgccaatctgtcactgaatcatttcaagtcagtattctagagaaaacaatagtttgaatagttctttaaggtttgcagcaatggaactaatgcataaatagcatttcatcgaatgtccattcaaccatgaact

SEQ ID NO: 864686 - DNA, 661 bp, Homo sapiens
gaaaagaaaagggaaacagagtaagaaagcttattaaaatatatgcataataggccaggcatggtggctcatgcctataatcccagctctttgagagaccaacatgggaggatcgtttgaggccaggagtttgagaccagcctgagcagcagagcaagaccttgtctcaaaatcaagcaaacaaaaaatacgtgcataatataaaaaatttttctggtttcaatcyagtgaaagtgctcttcaattctctaccttttgccaaatgaattgggacaaaaatgccgaagcattacccttatggtagagttgccaggtttggtaaataaaaatacagcaaatgaatattcaaatttaactgggcattctggtttgtttgtttgtttgtttgtttgttggcaactctgtcctgtagggctcttgcttataggacatccttaagaacatggctctagacacagctctgtaaccttagtaaataatttaatctcattaagcctcagtttcctcatctacagaatgagttaataataaagcctacctcataggattgttttgagaattaaatgatttaatttatataatgctatacaaagtggtgtttcacacatagaaagtattcaattagttattattgctaaagagatggtgaattgtttaaatc

SEQ ID NO: 864687 - DNA, 638 bp, Homo sapiens
caaagatttgaattaatacctaggtcttgaatgccaagacattgacaaatatccacaagcatcaagaccatccaggaaaacaggacctcaccaaacaaactaaataaggcaccagtaacaaatctcagagtgacagagatatatgaccattcagacagggagttcaaaacagctgttttgagggaagctcaatgaaattcaagataacacagagaagggattcagaatcctatcagataaatttaacaaaggragaaataattttgaaaaagaaatttgggagctgaaaaagtcaactgacaaactgaagaatggattagagtctctcaacagcagaagtgatcaagcagaagaaagaatcagtgagcttgaagacaggctgtttgaaaatatacagtcagaggagataaaacaaaaaataataaaaaagaatgaagattgcctacaagatctagaaaacagcctccaaagaacaaaatctaagagttattggccttaaggagcagatagataaattaggatagaaagtctactcaaagacataataacagagaactttcacttcctgttagaagatgtcaatactcaagtacaagaaagttatagcacaccaagcagattcaattcaagtaagagta

SEQ ID NO: 864688 - DNA, 638 bp, Homo sapiens
caaagatttgaattaatacctaggtcttgaatgccaagacattgacaaatatccacaagcatcaagaccatccaggaaaacaggacctcaccaaacaaactaaataaggcaccagtaacaaatctcagagtgacagagatatatgaccattcagacagggagttcaaaacagctgttttgagggaagctcaatgaaattcaagataacacagagaagggattcagaatcctatcagataaatttaacaaagggagaaataattttgaaaaagaaatttgggagctgaaaaagtcaactgacaaactgaagaatggattagagtctctcaacagcagamgtgatcaagcagaagaaagaatcagtgagcttgaagacaggctgtttgaaaatatacagtcagaggagataaaacaaaaaataataaaaaagaatgaagattgcctacaagatctagaaaacagcctccaaagaacaaaatctaagagttattggccttaaggagcagatagataaattaggatagaaagtctactcaaagacataataacagagaactttcacttcctgttagaagatgtcaatactcaagtacaagaaagttatagcacaccaagcagattcaattcaagtaagagta

SEQ ID NO: 864689 - DNA, 688 bp, Homo sapiens
agcatagggttatgcaaaaatggacaaagcaaaccaaagcgaaaatggacaaatgagatcacatcaagttaaaaaccttctgtaccacacaggaagcaatcaacaaagtgaagatacaaccaaaagaatgggagaaaatatttgcaaacwatccatctgacaagggattaataagcagaatataaggagttcaactcaatagaaaaaaagaatctagtattccaatttaaaaaataggcaaaatatattaatacacattcctcaaaagaaaacatgcaagtggaaaacgtatatgaaaaagaaaaggtgctcaacatcattgatatcacagaaatgaaaatcaaaactacaacaagatattttctcaccccagttaaaatggcttttatctcaaagacaggcaataacaaatgctggcaaggataagaagaaaaagaaacccttggaaactgttgctggaaatgtaaattagtacaaccactatggagaatggtatggaggttcctaaaaaaactaaaaatagaactacatgtgatccagcaatctcactgctaggtatataaccaaaagaaaaaaatcaatattttgaagagatatctgcactcccatatttattgcagcactatacacaacagccaagatttgggagcaacctaagtatctaccaaaaaacaaatggataaagaaa

SEQ ID NO: 864690 - DNA, 688 bp, Homo sapiens
agcatagggttatgcaaaaatggacaaagcaaaccaaagcgaaaatggacaaatgagatcacatcaagttaaaaaccttctgtaccacacaggaagcaatcaacaaagtgaagatacaaccaaaagaatgggagaaaatatttgcaaacaayccatctgacaagggattaataagcagaatataaggagttcaactcaatagaaaaaaagaatctagtattccaatttaaaaaataggcaaaatatattaatacacattcctcaaaagaaaacatgcaagtggaaaacgtatatgaaaaagaaaaggtgctcaacatcattgatatcacagaaatgaaaatcaaaactacaacaagatattttctcaccccagttaaaatggcttttatctcaaagacaggcaataacaaatgctggcaaggataagaagaaaaagaaacccttggaaactgttgctggaaatgtaaattagtacaaccactatggagaatggtatggaggttcctaaaaaaactaaaaatagaactacatgtgatccagcaatctcactgctaggtatataaccaaaagaaaaaaatcaatattttgaagagatatctgcactcccatatttattgcagcactatacacaacagccaagatttgggagcaacctaagtatctaccaaaaaacaaatggataaagaaa

SEQ ID NO: 864691 - DNA, 544 bp, Homo sapiens
ataaggacaccctcaatataaccagtttttaaaatgttataacaatgtcaactttaacactgtacgtcttgtctttaaatcttaaggacctatttttcaatcaacaaatacttaacactgcaggcattctctagaaagctctatcacaaaatagatccctgcagagctcttgaaataggccctgttaagaccastagtattagaaaagaagtctatagaacattccagcgattcattgctctttgtttttgaagttctagccttaaactaagcccaaccttcaaaaaaccacatgatttgtccccaggaactctaagtctccattgaaacaatttactttcattgtgttgagccctcagctgctgtgaagtttgtctgtaaagaataattgtgtgaaaaatgtgtcaacatcctctctaaaagaaaatagatcatgttgcttatactgttcattatggttttacagtcccagaggcctgaattatcaaccagattcacgtaagagtcttcctcagcctcaaacttaatgattcacaaagaattc

SEQ ID NO: 864692 - DNA, 544 bp, Homo sapiens
ataaggacaccctcaatataaccagtttttaaaatgttataacaatgtcaactttaacactgtacgtcttgtctttaaatcttaaggacctatttttcaatcaacaaatacttaacactgcaggcattctctagaaagctctatcacaaaatagatccctgcagagctcttgaaataggccctgttaagaccactagtattagaaaagaagtctatagaacattccagcgattcattgctctttgtttttgaagttctagccttaaactaagcccaaccttcaaaaaaccacatgatttgtccccaggaactctaagtctccattgaaacaatttactttcattgtgttgagccctcagctgctgtgaagtttgtctgtaaagaataattrtgtgaaaaatgtgtcaacatcctctctaaaagaaaatagatcatgttgcttatactgttcattatggttttacagtcccagaggcctgaattatcaaccagattcacgtaagagtcttcctcagcctcaaacttaatgattcacaaagaattc

SEQ ID NO: 864693 - DNA, 612 bp, Homo sapiens
tgagaaccactttggtgtgaagttgaactgcagctgcacagagtgatataaagataaccatatatggtagagaagccctcagcagggtctgaagcaagaaggagaagtgatgtgctttgggtgtgtgcaaccctgccctcaaaattgggaatttcaaaaagttcatggaaaagtagaattaaaagataaaaatttaaaatataaattttgtctgtcaacataagctccatcaagttcaagacacatttgtaagtaatgataccagacatttagttcaaccctaaataactgagggtcctgggaacttaatcatgtcaacataatcatttttatattattaactgaagaaaaatgtgtggtcttaccagattttttaagattaagaaacaaaaagagccaaatcagaacyttaaggtaaatgcctaaggatttcccatcaaaactcccacaaaattccccttattttatgttacagtggagaaagactctctggtgaagctttccaactcatttttctgctaaacctttggctaattttctcaaaacaccctcataataagcagatactatcactctttgtccctccagaaatgcaaccagcaaaaggccttg

SEQ ID NO: 864694 - DNA, 683 bp, Homo sapiens
actcagccataaaaatgaataaaataatgttttttgaagcaacctggatggagctaggagccattattctaagtgaagtaattcaggaatggaaaatcaaatactatatgttctcacttataagcaagagctaagctatgggtacacaaaagcatacagtggtatattggacattggaacctcaaaaggaggggagggtgggagggtggtaaggtataaaaaactacctattgagtacaatgtacaccactcaggtgatgggtgcactaaaatctcagacttctacactatacaattcatccacataaccaaaaactacttgtacccctaaagctattgatttttttaatgagttattcattggtgaactgtagatttcyttgggagtgtttttcccatatacttttcataaaacatcaacagtttcaccattcttccacccaagcttcaccataaatttaacatttgttcttggtttagttttagcagaattcatgttgccctgatagaggctaatttcaaactgatgttttatccttcttagtttgtcaaattagatcatattcatatatattataacaagtcaagttcattattggtgcaaaataatatgaatatgagtttattttgatacaaaaaatgaaatccatgcatagatttttataatacacattttctttgaa

SEQ ID NO: 864695 - DNA, 671 bp, Homo sapiens
ttttcagcagacctaaggaaacctaaaggaacacctattgacaagaaataccaaaggattacattgacttgtaaatactaaaatttgtactgcatttctttagaatcttatgagaaccaatacagttttggtctatatttctctctgaaaaatggaaaaagatgaaaactattactgaatctttctgtgacttacagatagcttctgacctagaaamattttaatcaaatttaccaaatcataagctcaacatgggaagatgttttttaaattttgtattgtgataaaatatatataacaaaatttaccatcttaatcatttaagggtacaatttggtgatattaagtacattcataatgttgtgcaaccattaccaggtgttgtgcaaccattaccaggcatattgtgcaaccagccaggcgtggtgggcacctgtaatcccaactactcgggaggctgaggcaggagatggcatccatctatagaattcttctcatcttgcacaactgaacctctatatccattaaataaaaactccccagcctcccctctttccagtacctgtaaagcacatttctactttctgtccctatgtaccttataaaagggtatttgtatgtttgtgattgattttttttacttagcatactggcctcaaggttcatctatg

SEQ ID NO: 864696 - DNA, 656 bp, Homo sapiens
tgcattgctccatagagggagcccacactgaatcctacaagcccccaagtcctaagcagctgtgttgacattccctgcctgcagctgatactaggctgaggcagaagccactggcagcaaccttgctcccaccagcagaggggtggtcatgcattttcacatgccctgaagacaaatttcactaccacctctgcaggctgaagcacaagtgaagtgtatgacccccagccctctgtctgcaggttctcccactgaccgcatacrtgtcctccagcagggctgcagcacaggtgctgctgcctcaacccaagcattccactggcaacctagggaccagcccacccctacttaccatagccgggacctacatgcaccatcaaagggcttaaggacaagtccaccaggcctagctctgctccccttgagtacccaagcacgctattcaggggtctgtagattacccaccccagttcactatcattggcaccagaacacttctcccagagtctgaggtcattcccacaaaaactgctgctaccatcacagctggcacccacccacacatgctacctgcagactcgaattctgtgctgcctaacccatcacaaccaccatcaacaccaatgcagaccacttgtgtcccagagggttgtacc

SEQ ID NO: 864697 - DNA, 656 bp, Homo sapiens
tgcattgctccatagagggagcccacactgaatcctacaagcccccaagtcctaagcagctgtgttgacattccctgcctgcagctgatactaggctgaggcagaagccactggcagcaaccttgctcccaccagcagaggggtggtcatgcattttcacatgccctgaagacaaatttcactaccacctctgcaggctgaagcacaagtgaagtgtatgacccccagccctctgtctgcaggttctcccactgaccgcatacatgtcctccagcagggctgcagcacaggtgctgctgcctcaacccaagcattccactggcaacctagggaccagcccacccctacttaccatagccrggacctacatgcaccatcaaagggcttaaggacaagtccaccaggcctagctctgctccccttgagtacccaagcacgctattcaggggtctgtagattacccaccccagttcactatcattggcaccagaacacttctcccagagtctgaggtcattcccacaaaaactgctgctaccatcacagctggcacccacccacacatgctacctgcagactcgaattctgtgctgcctaacccatcacaaccaccatcaacaccaatgcagaccacttgtgtcccagagggttgtacc

SEQ ID NO: 864698 - DNA, 642 bp, Homo sapiens
aaacctaccaagacagaaaagtggttgccttttcactcatgacccagtgggaaaatgtaggaaatgagttttaagtgagaataaatgatgttatctaaaaatcttttttactaaaacagaaaaaaaaaaccttacaaatgattagaggacagggtttaaattttcatagtaatggaactatacaagtatacattttgtgcccaaaggacctagaagacaaaatgacacttcagaatttaatatctgtacctattcattctcctccccaagctctaagaacagaamaatcctgatgacatctgacagtccagagtccaagttagaagcattctaattttcctgtgtttatttcttattagaatggagaagaaaaaaaaattcataaccaagactataaccaggaaagaagcattacataaaagagggagccaaaactatactatagctaaatttttctcctcatgtctcttaattggacaattgagtccatttattttcaacactatgggtaagaaaggactcactgttgccattttgttgcttgttttctgtttttttttgttttgttttgttttgttttgttttttagacttcttattccttctttttatactgattttcttcatggttaagtgattttct

SEQ ID NO: 864699 - DNA, 562 bp, Homo sapiens
gcatgcacctataggtatccctctgacgcagtcatttcttttcttttgtgtaaacacccagtagtggaattactggattgtatggtagttctatttttaggtttttcaggaacctccaaactgttttccatagtggttttactacatcacacacccaccaacggtgtgtgagcatttctctttctctgcattcttgctaacttttgttattttctgtcttttttaataatagccattctaactggctaatcatcagggaaagcaaatcaaaaccacaatgagatatcatctcaccccaattaaaataggctgtcaaccttcaattcttttggaaaggatctgagtgctaatcacctttgactctgacagagcaaacctttgaacataytgggttgattatagttgaaaagaaaccacgtttaaaacaaaattattttacctcagaggtaaggataaccatgttggaaatcttcatagtagcacagaggtatagatactgaatatatttgagttctagcttctctgagacaaagtcattcattcactcaaatatttcgtgact

SEQ ID NO: 864700 - DNA, 666 bp, Homo sapiens
gaactacacacttagacttcctgaacggctgggcttcagtgaatagacactctgaggctgttcgtgagcaaaaaaggagagcattcagggtattttttttctcttgattcattctccgtttcagcacaaagtctctagtagtatttgtaactctctacatgtcagtttctgttgggagggctttgttccactgctccactttgttccttctgccctggagatgcaatggcttcccaccgttgctaggtgctgggtgactcaccatctctcattcatttgctcacatgatggttagtattaarcagctccttcattaacatccttcatttgaatcccttagggtgaatctgctttcctgccaggatagtagtatccacaagtttgttttttgttttttctttttttttttcccctttggaatacttcagtttctccagagaataatcctctaatattttttcagagaatggaggaagcatatgcctgactatgaatgctcataaagcaaggatcattggggtgggggttaaagtttccatatgtagcctttggctccatgttatcaccattttattgcagtagctctaccctgtctgctgctatccctggtatttttgagatttactttccacaaagtaaatgtccattttcttggtgggattgggc

SEQ ID NO: 864701 - DNA, 630 bp, Homo sapiens
ccattatggaaaagtgagagaagtgtgggaagtgctgcagtggaataatgaacagagagtttggtgtagagatgaaatcagacaatctctgtccacaaagaccctacattcaagacaggtggttagaatttaagatttaatatatagttaataatattgcattgtatacttgaaattgccaaaagattggattttgaatattctcaccacacacacatacaacaggataaatatgtgaggtaatgggcgtgttaattagcttggttgtggtaatcatttcacaatgtgtacgtatatcaaatcatcacattggatagcttaaacatatgcaatgttatttgtcarttatacctcaataaagctggggtgaaattttcacctaagagagtgtatattttatacaaaaatatgttattaacatttttattaattcatccaatgactctgcatttactaccttaaataaagaattaatagaataaggtaaaaaagaacattctagacggtgccaaggtctgtgcagggacagtgaacctgaaacagagtgacattttcaggggcaagcaagacatttaatgtagacacaaggtgagaaatatgcaagataagcacacgaggcaggccgtagtg

SEQ ID NO: 864702 - DNA, 539 bp, Homo sapiens
aggaagaataacagtcttcaaaatttttcttttaatatctccgaacaatttttttttttacacagggtcttgctctgtcacctaggctgtagtagaatggggtggtcttggctcattgcagcctcaacctcctgtgctcaagcaatcctcccacctcagtctcccgagtagctgggaccacaggtgcacgccagcatgcccagctaatttttgtattttttctagagattrgagctttgtcatgttgcccagcctggtctcaaactcctggactgaaaaaatctgcccacccaggcctcccaaagtgccagaattacaggtgtgagccaccgctccaggttttaaacaaattaagtacaggttatttttaaatggcatcatagatttttagttttatttggaaatttaatttgtttactatttcagcttccacaaacccaatttaattaacccattctattcatgaaaaatgtagcatgaaagtgtgagaacaagcagatggctcacagcaagttgccagggacaattcagtcccagaa

SEQ ID NO: 864703 - DNA, 599 bp, Homo sapiens
aaacatatgataaatatttgttgagtgctaggtttgccacaattagtgtctctgacacacatacatacacaaacaccctattgatgcaatttccccattttatgtaatatgtgtatttctagagcttaaagaaaaaattattctacatatttgaaagtaaaattctaatcatgaatacaggaccttgggacagcctctttggcaggctttgactaacctgcctgtttggaatatcagtagggaaacatcactgcttgggagacttttaaagaggaaaatatttggttctcagagatttttattttttcttctgtggctcctttttcctttccgtatctctggtctctgctccagtcatttcttctttatataaggtgccttcattctccttatcctctcccttcctaatgaccagctgcctctccccaamtaagcttccgagagaggcgcccactcaatattccatgtactcgtcctatgtttctttgttctgttttttcccaccccccactgacatttccctgatctgtgtcccatttccataggaaactttgagctgcctagaagtaatgaactaacaggaactgagattttaaaca

SEQ ID NO: 864704 - DNA, 636 bp, Homo sapiens
tgtaaaaagttggattcaaaatattcagctcactgaaaaccctttcttgaatgctacttgtcaaaataaagaggacccaatgtaacatatttatataaagtgttagtgtttaataaactgataagattggcagtacacaaaatcaaagtctaagttcctatgtatgtacagcatgtgaggccttcgcctatgctattgcattkaaaacatgtaatgtgtaaaagttacataagtaacattccttttagaaattttcccgaatattgctaagatgtccctgacaaagaagaatgaggtctctgtctacagagaattttaagtaaagaaccctagggattttgccaattgccttgtatttgcatgcaactaagaacattaccaatagcattttcttttgaaatactaattctagcactataataacaaatggtgtattagatgagttatttctacaatatttagaacactgactggtatactataagctttaatatttatcattattattgctgccaaaagcaatggttctagttaaaaagcatacatggccaacgttgtttactcacagattaaagtttttcatgtgatcaaaaagaccacaaaaaaccctaaataaaggtagattttttttcctta

SEQ ID NO: 864705 - DNA, 586 bp, Homo sapiens
attagaacactttcctccttactctatgaaggatattgtcttgcaggttgatctctttaatggatattggaccagactccaaaataccagctgaatgttacaggcttaccaagagtcagggtggtagatgtctcatgatcaatatctctgaactataaggcaaagttacagtgcctcctggttttaacagaggatgttttcagaggctgaaattggaagggatttgtgaattgtggcaagcttcaatttaatcattttgtctgctcagaaaatacccccatttgagagagaaagaacagttagctgccatagcttctaccgtgatcaagtgaatgtcatagtatcaatcaaatctacsaacattctgtaagcatgcttgactgtcactttaagttattacaggacacacagagcccccccattaccaagaaaggaatccaggtactcatgatacataccatttggatttttatcatccattgcaagtgaccacagaaaatactctcactttgagctaagtaattattctcaccaccacactgcttgttagtggcaaagtggagtctgaagccaagatctgctacct

SEQ ID NO: 864706 - DNA, 691 bp, Homo sapiens
cttattttggaagttgcctcttatgatctggacatttttggtttcctactgcctatcctgtgtcctttgcctcctgtagggtccaatctttgacagatatgacttaatggatggtgtgattttgttgtgtccccacccaaatctcaccttgaattgtaataatccctacttgtcaagggtggagccaggtgaagataactgaatcatgtaggtggtttcccccatactcttcttgtggtaatgaataagtgtcacaagatctaatggttttataaatgggagttcccctgcacaagctctcttgcttgccatcaygtaagacgtgactttgctcctcattcaccttccatcatgattgtgaggcctccccatccatgtggaactgtgagtgcattaaacctatttcctttttaaattacccagtcttaggtgtgcctttattggcagtgtgagaacaggctaacacaatggataatgtcttttccatctaataggggaattttgctattccagtgtaactctgccctgatggagtaagatatttcgtctttctgtcctaatagactgtgctttatttagctggctcaacctcttacccgaagcaagagtctcttctagattacttgagagatatcaaagtgttaagaatgcaggatctgcgattagaccacctgagttcatatctcaggtc

SEQ ID NO: 864707 - DNA, 610 bp, Homo sapiens
cagactacaaactattctctggctacctcaaatcttgttgaatatttagcctggctgacattacttttgtctttcaatttcctctgtcatttgtgcttttttctaacatggtacctgtctgcctggaatggtctgctgctcttttactcctttaaatgacttctgaaaactaaactcttgcaaamaaacaaaacaaaacagcaacaacaacaaaaacacctgttttgcccatttgaatctattttgcgcatggcttgcacaattcccttcacactatattctccttttccttacgtttgttccacttgtggaaaggatagtaacagtgttgacagtccataatatgttcaggtcacagtctgtcttcattattttgggtttattaaaattttcacaaggcacatcccatggcatcaaagtaatagcaataatgccagctggtttgcaggcaggggtctatgaggagggcttactgttaatgggtatagcagtggctttgttctatgctttgctttgcttatttacaggtgtagcttttaattgagatgatcaatgttttaaagtcatgaataatcaatttcacttatatattcatttattcactcattca

SEQ ID NO: 864708 - DNA, 578 bp, Homo sapiens
aaaaaaaaaactccaggcaaaacatcaaaataaaaaagtaaaatacttcctttaaatatacatttcctttcatttttagactgacttctttctacttcataactgttaatttcttccaagtgttgcctaaacatactatttctttttttgtttcacccctggtttacttttcaattcattgttacrtggtgaaataagtaccctcacaaaggaaacaacctcctcctgctaaatctgtccctatgttgctgaatctttcagcagcatttaacactctttatccccagtgacactttttttttaggaagaatttaaaacataaagtttaaatcatacaatgattacatttatgcccaccactgttgggaacagtccccccaaaatctggccataaactggccccaaaactggccataaacaaaatctctgcagcactgtgacatgttcatgatggccatgacacccatgctggaaggttgtgggtttaacggaatgagggcaaggaacacccggcctgcccagggtggtaaaccgcttaaaggcgttcttaaaccacaaacaatagcatgaacgatctg

SEQ ID NO: 864709 - DNA, 604 bp, Homo sapiens
cattaaaacattataatagtacttagaaatcaatactaatggaacagaatttacagttccttaacatataccagaatatcagaactcaaaataagataaggtacagatcaccagagaagaattcagtgtgtcatattttccagaaagaaccattaataaattgttagatcaattttgtgaaccacaggcagtttttttttatttgaaacggaatgggatggaaaggaaaggaatataatataatagaaaatattagaattcatcacataatactgaggataaaaattattttagacactttcatttcagttataggtatgtatataagtgttcacgtgtgtcagcgtgttctagattgtgatgtaaaatttattttttctcttactgtgggttgtgctccaaaaagtttgaatacctctccaataaataayttggggtaattaattaattgaaaaagaatcatctatttatatccttgtcttctgctaaataatgaaacaaaatatagatgagtattttttaagattactataataaatttaaatggatatatgtatataagatcgctaggaaaatactttagaagcataaaagggaagaaacc

SEQ ID NO: 864710 - DNA, 622 bp, Homo sapiens
agctaccaagacttggggcttgtatcatccaaaactgcagcccaagctctatcttgacccctgttagtcacagctagagcagctgggacacagagcatcaagtccctagactgtacacagcagagaaaccctgggcccggcccacaaaactattttttccccctaaacctccgggcctgtgatgggaggggctgctgcaaaggtctctgacatggcctggagacattttycccattgtcttagtgattaacattcagcttctcattacttatgcaaatttctgtagccagcttgaatttctcttcagaaaatgggattttcttttctgttgcattgtcaggctgcaaattttccaaactttatgtcctgtttctcttttaaaactgaatgcctttaacagcacccaagtcatctcttgaatgctctgctgcttagaaatgtcttctgccagatatcctaaatcatctctctcaagtttgatgttccacaaatctctaggacaggggcacaatgccatcagtctctttgctaaagcataacaagagtcacctttgctccagttttcaacaagttcctcatctccatctgagaccacctcagcctggatttcattgtccatatt

SEQ ID NO: 864711 - DNA, 622 bp, Homo sapiens
agctaccaagacttggggcttgtatcatccaaaactgcagcccaagctctatcttgacccctgttagtcacagctagagcagctgggacacagagcatcaagtccctagactgtacacagcagagaaaccctgggcccggcccacaaaactattttttccccctaaacctccgggcctgtgatgggaggggctgctgcaaaggtctctgacatggcctggagacatttttcccattgtcttagtgattaacattcagcttctcattacttatgcaaatttctgtagccagcttgaatttctcttcagaaaatgggattttcttttctgtygcattgtcaggctgcaaattttccaaactttatgtcctgtttctcttttaaaactgaatgcctttaacagcacccaagtcatctcttgaatgctctgctgcttagaaatgtcttctgccagatatcctaaatcatctctctcaagtttgatgttccacaaatctctaggacaggggcacaatgccatcagtctctttgctaaagcataacaagagtcacctttgctccagttttcaacaagttcctcatctccatctgagaccacctcagcctggatttcattgtccatatt

SEQ ID NO: 864712 - DNA, 658 bp, Homo sapiens
cactgaggtcactttcaaagctaaaaagcgctaatattgtatgtagttggaattatcacctttctttttataaagggtttatatattttaaaatttatgtaagcaatgaattaacattaaatgaaaaatgtaaatgaaatatgaataaaagggaaaaataataagtcacagatattctactgtcctgtcacagccattactagtatttggtcttccagacatttccatatgcgtgtatattatttaaaacagtatcaggctctctaacttacttttcttcctaaatacaatataaccaatgcctttccatgttattagtataaatgtccacaattataaatattttatgtgtatgcacaaaatacatttaatcaattccctcttttggrcttttaaattttgttgttgtttttaaacaaactgtggtaacactgtacatatatctttactaatttatctatctccttgatataagtgcacagatttgtgatcattaggtcaaaggctagatatttctttttagtaatttgatacattttgacaaattaccacacagaagccctgttctcatagggagttctacaggctatgtaccagagggtttattgtctccaaaccaagacaatcctaggagcctcattcctgttaatgtttgcca

SEQ ID NO: 864713 - DNA, 604 bp, Homo sapiens
actcagttctgtagtaacctcattagagaggtagataatgacaaagaaaaaaactccttgcaatttgtttttactatgttatagcaccattggtgcttcagtaaccactacacaaaaataattctgaacaattaggcattcactcctgaaaaaaaattgtagaatattatgttgtacgtttatatatattgacttgctcagtgctaacataaagcaaggggacagaaaaaaaaccaatccaccaatcagtaggcattttaaaaatatttaagcygccaccaacgcaccaatgtaaaattcacatgcacacaaaatatctccaagttctacaaccagcatcttaaattaactttgtttcttaatgtgccaaggaagggcagtgcaaggcctcagggtaggactctccagtggtcgtccccatgcagaaacattaatttgaacaacaatccatgcacagaaataccttcacaagagctaaggaaaccagatcacagtatttggttgtagtacaataataagaaaaggcacatggaagagggtaaggatgtcagtattacattacatgtatcactcctttcccaacccaaggtgccacagcacagag

SEQ ID NO: 864714 - DNA, 596 bp, Homo sapiens
caagccactttgcaattaagtacagccgcgcaactagttctcaccaataaaacctgagcagaggggatatgtgtcaagtcctggccaagagtttatgaagcaggtataccccttctacatactccctttttgcctgctgggtttaagtggtaaagaggcccagccaacagaagaaccataaakggaagacaaggttttttaaaattctgtgtggaagaaaatcacccaccaaccaggaacacacacattgtactgttatgtgagcaaaaccctctactatgtttgaaccattatacatttggttcaaatgggtgggtgggtcagtcatattcaagcctacaggaagagcaaaaggcagtggcatagaagctaattctctcaatgaataaagcatttatgcataggaagagttatagtagagccagtccacaaatctacctcacaaagtctttaaagtcaaggagggctaccaggaattgtgtttatataaggacttctgggtcctctgaaaataagtactaagggaatgtcagggctgatcaggacactggaacggacttaaacaaggatggagatggggaaactggcataactcc

SEQ ID NO: 864715 - DNA, 588 bp, Homo sapiens
atttcctttgcccattttttaacttgttttttgctttttaagttccttatagattctggatattagaactttgttagatacatagtttgcaagtattttctcccattctgtaggtttctgtttactctgttaatggtttattttgatgggcagaagctctttaattaggtcccattgtcaattttcatttttgttgcaattgcttttgaggacttaktcataaattctttgccaaggccaatgtccagaatggtctttcctcagttttcttctaggatttttatagtttgaggtcttacatttaaatctatcttgagttaatttttatatatggtgaaaggtaagggtccagttttattcttctgcatattcttcagttttattcttctggctagcaccagaagaactggcattattcaagcaccatttattgaatatggagtcctttccccatggcttatttttgttgattttgttgaagatcagatggttgtaggtgtgtggctttatttctagattctctactctgttccattggtctatgtatctgtttttgtacgagtacaatgctatttaggttactgtagc

SEQ ID NO: 864716 - DNA, 654 bp, Homo sapiens
ggtttctaggtatcatatctcagtgaagaaagataatttgacctcttcttttcttatttggatgccttttacttccttctcttgcctgactgctctagctaggactttccttattctttacatctacttatgtgctttacagtgagactgtgtagtttctcctaccaagaggtcaatccccttctctttaagctgaattttggctgactttgtgacttgctttggccagcaggctgtgacagggtgatatgccaattcatgatgaggcctcaagagatattgcagacttctgctctttcttagaaccctgccattgccttgtgaactagcatgctggattatgagagaaacatggcccagttacctgaaacacccaagccaataaaaaaatcaacttccaaaactctgagtaggctcatcctagattagccagttctaagccgactmcaaatgcacgagtgagcacagccaggctcagactgacagaaacaaccaactcattcgtagatatttgagtgataataaatgctgattgttttaaaccactgagttttgaagccatttgttatacagcaatagctgatacaccccatgtctactttcatcgaatccaatcttttgcctcttaattcccagctaaattaattgaaataa

SEQ ID NO: 864717 - DNA, 615 bp, Homo sapiens
gagaaaatgctttgcctttgaaatttgttgaacttgctttttatggaccagtatatggtccataaatatttacattttgtaaatatttcatttatacatgaagagaatatatattctgcagctgttaggcacagtgttcaatatacttccatttcatcaaattacttaatcatgttatccaaatattctattgccttaaagatttgtgtgtgttattctttcagttacaaagacagaaatctcccactgtgattttggctccgcctatttctccttatagttcagtccctttcacttyatatcttttgaggttatgttattagatacatacaagtttaaattattatatcttcttggtgaatcaagacttttatcattatgaagtgaaatctctatctccaataatgctcttttgccttcgtatcactttgtctgacttcaatataactacaccaacattcatttggttcgtattagcatgttgtattttgtccatatttttatttttactcttcctgtttgcctgttttagatttgtctctggtaaaagaatgtatagttagatatttttatccaatctattactctttgcctcttaattgcaatgcttggtct

SEQ ID NO: 864718 - DNA, 601 bp, Homo sapiens
actacaccaacattcatttggttmgtattagcatgttgtattttgtccatatttttatttttactcttcctgtttgcctgttttagatttgtctctggtaaaagaatgtatagttagatatttttatccaatctattactctttgcctcttaattgcaatgcttggtctgaatacatttaatataattatgaatacgttttggtttaaatccaacattttgtgttgggctttttatttatctgataggactaacattttgttttgcttactttctttttttagattaattacttttatctttttcctttctttttccatctactagatttgaagctatgtcctctgtttctattcttgtattgcttttcctagaaattccacatgcatatttcacatatcaaagtctaaagttaaccaacatcttcatcttcagaccagaacattagaatatcttacctccttttactcactttggatttatacattaccattgttttgcattttaattctttttaaaacatcatattatgattattaatattatttgggcaatgttcatttatttttacatacatatttatcaatttgtttgtcccttaa

SEQ ID NO: 864719 - DNA, 674 bp, Homo sapiens
cagaatggaggcataagccaagggctttgggtccttagtgttgggagtgagtggaccacgtaagggaaaggaaaaaaatctcgggacctccccaaattcttatgcaaaaggaaaggtgaagcctggggctgagtcactgtattactctcttccaaatgaatagctgttacattgtgcatcagccagatcyccatggaaaagtaaaaggcattaggtacctggagagcactgcccccaacagatcattcataggtaaatcctttcctggcctcccacaaacaaggacatgccagttgtaactataggtctacaatccaagtctagttcctaaactgaagtctgttcaattccacactgataacattgattacaagtttatcttcccaggtgcagaacaaagacaagagatcaatctttcctccacctacccagagacatctacataattggctcttgcttcactctctttttctcttcagaccttcaacttgtcttgtgtaaaatgtagatctactgggcactaatgaaagacacacaggaatataactatttgcctttctgcctagctgcccctcttcctgcatgccttccccactttacagaaatgtataaatactaaaccttctgaaagcctcttcaaatgggtgttttccctggatttgccctaaagttgg

SEQ ID NO: 864720 - DNA, 674 bp, Homo sapiens
cagaatggaggcataagccaagggctttgggtccttagtgttgggagtgagtggaccacgtaagggaaaggaaaaaaatctcgggacctccccaaattcttatgcaaaaggaaaggtgaagcctggggctgagtcactgtattactctcttccaaatgaatagctgttacattgtgcatcagccagatccccatggaaaagtaaaaggcattaggyacctggagagcactgcccccaacagatcattcataggtaaatcctttcctggcctcccacaaacaaggacatgccagttgtaactataggtctacaatccaagtctagttcctaaactgaagtctgttcaattccacactgataacattgattacaagtttatcttcccaggtgcagaacaaagacaagagatcaatctttcctccacctacccagagacatctacataattggctcttgcttcactctctttttctcttcagaccttcaacttgtcttgtgtaaaatgtagatctactgggcactaatgaaagacacacaggaatataactatttgcctttctgcctagctgcccctcttcctgcatgccttccccactttacagaaatgtataaatactaaaccttctgaaagcctcttcaaatgggtgttttccctggatttgccctaaagttgg

SEQ ID NO: 864721 - DNA, 674 bp, Homo sapiens
cagaatggaggcataagccaagggctttgggtccttagtgttgggagtgagtggaccacgtaagggaaaggaaaaaaatctcgggacctccccaaattcttatgcaaaaggaaaggtgaagcctggggctgagtcactgtattactctcttccaaatgaatagctgttacattgtgcatcagccagatccccatggaaaagtaaaaggcattaggtacctggagagcactgcccccaacagatcattcataggtaaatcctttcctggcctcccacaaacaaggacatgccagttgtaactataggtctacaatccaagtctagttcctaaactgaagtctgttcaattccacactgataacrttgattacaagtttatcttcccaggtgcagaacaaagacaagagatcaatctttcctccacctacccagagacatctacataattggctcttgcttcactctctttttctcttcagaccttcaacttgtcttgtgtaaaatgtagatctactgggcactaatgaaagacacacaggaatataactatttgcctttctgcctagctgcccctcttcctgcatgccttccccactttacagaaatgtataaatactaaaccttctgaaagcctcttcaaatgggtgttttccctggatttgccctaaagttgg

SEQ ID NO: 864722 - DNA, 624 bp, Homo sapiens
aatgggcaggaagaacccatcaggcagttgcacctgcaggatggtgccagttctttccacgaaggctggtcagatacccagaaagtatttctccactactacctggacgatgtgtctctctgtcagtctccagggaatggggtctgaatcaagtatttagtattcagcagttactataccgtcacctaatccctcattttcaatattttgccatgccttccagtggcctaactggccaccatgccacagaatctttactttatgctctccagaggagacctctccattcaatgttttgtgatttgagcaatggaatagaatctgatactggtgggctggggraggtccccggacactggtgggatctcgaccccagctgtggtgtccaggctcttgacaccatctcgagaaccaagtcaaggatgagtcagcaaatagtgaaagaagagatgtattgcaaagcagaaagtacacactcaagaaaggggagttcgggcatacccgagagagaacaatgggttctggggtttcatctcaatgggtttctttaaccaaggagtggaatattcgtgaaaattcctgggtaaaggtgatttctcggaactgtggtgccatccattttta

SEQ ID NO: 864723 - DNA, 624 bp, Homo sapiens
aatgggcaggaagaacccatcaggcagttgcacctgcaggatggtgccagttctttccacgaaggctggtcagatacccagaaagtatttctccactactacctggacgatgtgtctctctgtcagtctccagggaatggggtctgaatcaagtatttagtattcagcagttactataccgtcacctaatccctcattttcaatattttgccatgccttccagtggcctaactggccaccatgccacagaatctttactttatgctctccagaggagacctctccattcaatgttttgtgatttgagcaatggaatagaatctgatactggtgggctgggggargtccccggacactggtgggatctcgaccccagctgtggtgtccaggctcttgacaccatctcgagaaccaagtcaaggatgagtcagcaaatagtgaaagaagagatgtattgcaaagcagaaagtacacactcaagaaaggggagttcgggcatacccgagagagaacaatgggttctggggtttcatctcaatgggtttctttaaccaaggagtggaatattcgtgaaaattcctgggtaaaggtgatttctcggaactgtggtgccatccattttta

SEQ ID NO: 864724 - DNA, 667 bp, Homo sapiens
caactacaaatcaaaaccacagttagatactctatggctagaactggccactttggaaaataatttgatggcttctaaatatatgaaacatagaattgtcatatgacccagaaatttattcctaggtatacacccagattattggaaagaggtgttcaaacacaaattgtacacaagtatttttagcagcagtacctaaaatagccaaaggctgaacacaactcaaatgtcaataaaaatactattggataaacaaaatgttatatccatgaaattgaatgttatasagttataaaaagaaataaagtaccaatacgtacatgaaccttgatagcattatgccaactgaacgaagccgggcagaaaaggccacctattgtacgattctatttagatgaaaacagaataggaaaatctatagagacagaaaacagatttgtggttgcttaggattgagtaggggatgggtgcataggaggttaacagctagggaaggtggggtttctttttgaagtgatgaaaatgctctaaaattcattgtgatggtggctccacttatctgtgcatatactaaaagccactgacttgtagacattaatgtgtgcactctacactatgtaaattatatctcaataaatcctttcaaaaatacacagaagagtaaggg

SEQ ID NO: 864725 - DNA, 662 bp, Homo sapiens
gggtgcataggaggttaacagctagggaaggtggggtttctttttgaagtgatgaaaatgctctaaaattcattgtgatggtggctccacttatctgtgcatatactaaaagccactgacttgtagacattaatgtgtgcactctacactatgtaaattatatctcaataaatcctttcaaaaatacacagaagagtaaggggttttggaatgttgcagctgggatgcagtttgaaatactgaataggcctcatcgagaatgtgaagtttcagtaaagacctgaggaagttgaatgagctgatcaatggatatatggagggctatctttccaagccaaaaaattaactagagtcttgatcrtaaggcagcagcatgttggtatgtccagaggacagtgaggtggccaggaccactggtaagatcaagggtgaagatataaaagaattttggcggttaacatgaggcagatgatgatgggcttgcagaccattgtaagaaatgttgtttttagtgtacatgaaatggggagacaactcattatcccattatcaatattttaataaattggatccatgaaccaaatccaatgagattaaatcaattaataataatatgcaaatttgtattaaaattacaagaattacttgcacatttgagaaca

SEQ ID NO: 864726 - DNA, 594 bp, Homo sapiens
gagagcatcaggagaacttcccagaggagatgatttttaaggatttccatgaacagggaggagaaggggggaaaggagatactggtgaacagcaagtacaaaagtgtggacacgtgaaagtgtccttagcttgccccagaccagtcctggmagccccagtccaaacccacatccctcttggagccagggtggctccagatccatctcatacagcaccaaataatcccaggaatttttcccggcatctgaccctggggctgggcttggggcagacattcctttcctcctctttcctccaccactttgcaggtgccccttgtttctggattttgctctccttggtggtaccctggagttggagaaggtagataagcttccagtgcctgatccctcagcttctagaagatatttctttgcctctcctcacacttcctcattgctagataagaaccaccccttcttcaggctttgctcatgtggtcccctctcctagaaagccttccatccattcctgtttgtccaaatgcatccactcttccccagtggctcagcttccctacagctggaaggaagcatagcattttctgagctccc

SEQ ID NO: 864727 - DNA, 594 bp, Homo sapiens
gagagcatcaggagaacttcccagaggagatgatttttaaggatttccatgaacagggaggagaaggggggaaaggagatactggtgaacagcaagtacaaaagtgtggacacgtgaaagtgtccttagcttgccccagaccagtcctggaagccccagtccaaacccacatccctcttggagccagggtggctccagatccatctcatacagcaccaaataatcccaggaatttttcccggcatctgaccctggggctgggctyggggcagacattcctttcctcctctttcctccaccactttgcaggtgccccttgtttctggattttgctctccttggtggtaccctggagttggagaaggtagataagcttccagtgcctgatccctcagcttctagaagatatttctttgcctctcctcacacttcctcattgctagataagaaccaccccttcttcaggctttgctcatgtggtcccctctcctagaaagccttccatccattcctgtttgtccaaatgcatccactcttccccagtggctcagcttccctacagctggaaggaagcatagcattttctgagctccc

SEQ ID NO: 864728 - DNA, 635 bp, Homo sapiens
ttaggctgtttgaagttgccccacagctcatttatgccattatttttttttcttttctgttttttcctgtgggtttcattttggaatagtttctattgctgtgttttcaagtttatctgtcttttcttctgcaatatctaatctgacattaactccctctgatatgattttcatcttgcacattatagttttcatttctagaagttaaatttgagtcttaaaaatacatatgtatctcccaaatttttactaaacttgaacacagagcatacaaataatgttttaatgttcttgctactaattctaatatcagtttcagttctgggttggtttcaattgattgatttttctccttatkataagtcatattttccagcttctttacatgccttgtaattttgggttgggtgcctcacattgtgaattttaccttgctgaatgctgtagatatattttattcctataaatgttcttgaacattgttttgggacatatttaagttatttgaaaacagtttgatgttttcttgtcttgcttttaagatttgttaggtggagccagagcagtacttagtctagggctaagtattccctattagtgaggcaagatctttctactgtactctacccagtacc

SEQ ID NO: 864729 - DNA, 603 bp, Homo sapiens
caagcaaatttatatcttctctaaaataattcaaatgcttttcatgaggaatagcaggcaaggataaagatgaagtgataacacttcagagacttcacaaaatatcccaattaatctaggccataaacctacaacagatcctcacttctgagcayaggagcacatcccggctgaaaatcacaggaaatacccaagtcaaagcaaatcagccaataggtttcccaattcagatgcctagggaatttcactgtgtttctgagatgactttggtttaccacaatatccttagcgtctttattcctctttgccaagtatagattgagaaggaggtggtgtgaggcatgaaggaaggatggggcatggatcacgagacagactgggggttaaatgagaagtctccaggatgacagaaaaaagagaaaaaaaggttcacaaagtaccactttaaacaattttcacttttttcaacaaatgcatgtattcaacaaatattcactgagtgcccactaatgtcaggtgctagtctacgtactggaaatccagcactataggaaacaaagtccctgcagacacaaagcttatatccttgggccatccatactg

SEQ ID NO: 864730 - DNA, 557 bp, Homo sapiens
ggtaatagattatagaagggcatatatagaagccaggagaccagccagcaaagatggtgactagaaccagagtacagggagaagagactggattctggatgtattttgaatggaaagttatcaggattggcggagggatcagatgcagggcagatgagaaaaagaagtcaaagayggcaccaatatttcaacaggagctggcagagcagagctgccatttaccatgatggataggactgcaggatcttgttttgaagatctactattttgtgtatgataatctttgaggtgcctttttagttgctcaaggggagatatcaagagttagctggatatataggaccgagtttgggggagaagtctcactggggatgtaaacagaggagtcatcagctcatggtactggaagttgtgagactgaaagagatcacctagagagggattgattgtaaacttggaagagaaaatatccaaagattaagccctggggcactccagcttgatagagctcagggagatgagttggaatctgcaaaagagactgtgaggaagagtca

SEQ ID NO: 864731 - DNA, 619 bp, Homo sapiens
aggctatcagtgagaaactttcatgatgatcactgtggacaggcatgactccctacaataattaatagtaattagtcccattattttgccattattttacagataacactaatagcaatgatatttatagaaaacatttattaagcatttactgtatggaagatgatgttctaagatttttccattaaatagctcatttaatcctcacaataagcacttttagtagctacatttacagattaaaaaaacaaaactaagacagagaaataaattatccaatgccatacaactattatatggcagagttgtgtactcctccaaatttgcacccttactctctgatctgtaccaggtaggaaacaaaacaactaacaaaaaatacctttcccttaactccctaccaaaagcaatgatttacactgttgtatcttaaagcacaaggtagaactrttagttcctttactattgtcctttaatctggtccttgaaacttcatataatttgatatttagaaaattagatataattcactttttgttgcagaggcactcaagttaaaaattatgtgtatgcttacattcttggagggcatgagctattactgttctatatttggttt

SEQ ID NO: 864732 - DNA, 638 bp, Homo sapiens
agtgagaatatgacattactatgtattaaattatgataacatgcagttgcctctgataataactggtaggagcttagatttctaacatcctaagattactactaacacaattataagtgatacctaaaaatgatgtttatcctctacacaaataaactagaaaatctagaagaaatggataaattcctggacacatacatcctcccaagactaaaccaggagaaagtcaaatccataaatmgaccaataacaagttctgatactgaggcagtaattaatagcctagcaaccaaaaaaagcccaggaccagacggattcacagcctaattctaccagaggtacaaagaggagctggtaccgttccttctgaaactactccaaacaatagaaaaagaaggactcctccctaactcattttatgaggccagcatcatactgataccaaaacttggcagagacacaacaaaaaaagacaatttcaggccaatatccctgatgaacattgatgcaaaaatcctcagtaaaatatggcaaactgaatccagcagcacatcaaaaagcttttccacactgtcaagtcggcttcatccctgggatgcaaggctggttcaacatatgcaaatcaataaacgtaatcc

SEQ ID NO: 864733 - DNA, 527 bp, Homo sapiens
agagacagtggataaagtaggaagaggaggcatgcgcaagactggggggtgatcagaagtcaacacagcagattcacatccacaatggagtcacttttgcccccacaattgccaatgaaagaaaaaaggcaggaagtacaagcatcacagaaatttgcaaaacccaggccacatctgcaggaatgtgtgtagacagaagttaacatagcagcytgagactactcaactgcttataaggttggctcttggctaatgtctagaaacctggatttcaggagggctcctaccttcccagaacgggtacgagtggctcactgtgcctaaagtgtttgtgtaaatgatgtggcttatggtgaacactgctttccttctgggaggccggaagtttgatgtgggctaagcagaagatgcacacatgaccagcaccacccccactgtcccccaaccagccatctagtagaaacccagtctcaagtctctaagaagcttccctggtagacagcatttccacgtgctgtcacagttca

SEQ ID NO: 864734 - DNA, 585 bp, Homo sapiens
caataggtaaggaatagatgtagagtaggaaaccaaccacatctactgtagatagaggctatcattatctccattttacagacaaagaaactgagtcttggaatggttcattaatgtgcccactgtctctcagctaataagtggaaagctagggtttgaaccaaggcattcagactttacacgtgttctcatccactgcacaaaccacttggctatggcaaasacatgcctacctcttaataggaccctggagtcagttgaagtgaaagaaatgggtaaaaattttcttcaatttttatctttcttctttcccttagaagtgcctctttttctttttctttctttcttttctttttttgttttgtttttgttttttgagagtcttgctctgttgccaaagctggagtttaatgacgcaatcttggcttactgcaacctgcgcctcccaggttcaagtgattgtcctgcctcagcctcccgaatagctgggtggccagccaccacgcccagctaatttttgtatttttagtagaggcgggattgcaccatgttggccaggctggtcttgaggagtgcttctttttc

SEQ ID NO: 864735 - DNA, 632 bp, Homo sapiens
acacactgtttcttaattaggtttctggatgctgccacatggcacttgtcgtcagccggagctaagtcacacggccgtctgtggctgcaagggaactgacagtgtgtctcctttcctgggggttaacagtgttatcaccataaagaagggcaacatggacactgggaaacaaccagcaactctaccacacgtgattatatagcggaggaagctgttctgtaacaagtaataagacaaaaatgccaagggccctggcacacactcactttcytctttcttttttccctgcatccctcgctaaagccacagaaggagttacctggtgtgggtcaagaaacaaatgctaaattgaagaatatttcccactctccagagagagttaagggaaggctgtgttgctggcttcttaaatctcaccttgctgatgtccaaattctacagcacatctttcttcagcatggatctagattcttatttgaaaagcagcttcctctgggaataactttcaatgtccatcagatttttacattttcatttgaaagggtttctgagtttcctttcttttcttgcaagcagacgtctttactgggagaaaatcaggttggacctgcccatataacttgttgaagatg

SEQ ID NO: 864736 - DNA, 729 bp, Homo sapiens
tcccgttatggctctttctagaatccttcctacatatttgcagtccttcatcatcaacccttcctaattttacatgagtcaatgttcatattgctttggctgcctacacaccagttttctttttgagaatttcttccctccaatcattgtgaggccttggtggcaacataaatccagatgcctctctaaggaagcaaaagaggccacatccttttccctgccccagcccagctaggtggtgggcatatgacctgacattggccaaataatttcttccagggtgttgactcttgagtggaagaagtgataaaaacatgcagcagtttgctgacctcagggttcctgcttgagtttattcctctggggcctgctttcaaactccatagagcctcttggttcctgtctttttcagggcctcttttcagcctcctgcggactcagcagggctcccacagcattcartacatttccagagtttgttctgttgcttgcagccaaaactcttgactgatcacttgcccaccaatgacccaatgcatagaacaatagcactctgtattgtgtcttttggtagaggggctggggatggaggcatggatttgtagcctaacaaaacagcaaagagcttctaattgtaattttcccactagcactgcaggaatattaagttctaagttctttattgaagtaaaagttgaatcttcttcctccagccaggtccttatcaat

SEQ ID NO: 864737 - DNA, 729 bp, Homo sapiens
tcccgttatggctctttctagaatccttcctacatatttgcagtccttcatcatcaacccttcctaattttacatgagtcaatgttcatattgctttggctgcctacacaccagttttctttttgagaatttcttccctccaatcattgtgaggccttggtggcaacataaatccagatgcctctctaaggaagcaaaagaggccacatccttttccctgccccagcccagctaggtggtgggcatatgacctgacattggccaaataatttcttccagggtgttgactcttgagtggaagaagtgataaaaacatgcagcagtttgctgacctcagggttcctgcttgagtttattcctctggggcctgctttcaaactccatagagcctcttggttcctgtctttttcagggcctcttttcagcctcctgcggactcagcagggctcccacagcattcaatacatttccagagtttgttctgttgcttgcagccaaaactcttgactgatcacttgcccaccaatgacccaatgcatagaacaatagcactctgtattgtgtcttttggtagaggggstggggatggaggcatggatttgtagcctaacaaaacagcaaagagcttctaattgtaattttcccactagcactgcaggaatattaagttctaagttctttattgaagtaaaagttgaatcttcttcctccagccaggtccttatcaat

SEQ ID NO: 864738 - DNA, 581 bp, Homo sapiens
acctttaaaacatagcctaggccgggcacggtagctcatacctgtaatcccagcactttgggaagccgaggcgggtggatcacgaggtcaggagtttgagaccagcctgaccaacatggtgaaaccctgtctctactaaaaatacaaaaattagccaggcgtggcagcgcatgcctgtaatcccagctactcgggaggctgaggcaggagaattgcttgaacccgggaggcagaatttgcagtgagctgagatccagccactgtactccagcctgggtgacagagcaagactccatttcaaaacaaacaracagacaaacaaacaaacaaacaaaaaacaacaaagaaacacaaaacatattctggatccatccacttctcttcgtcaccttccctgctccctccctagactaagatgccaccatcatggcttgcctggaggacttgatgcttcctactgacctccctgctttcattctgccataccccaccaatgatctatgctccataaagcagccaaagtgtcttttcatattgtcagttggatcatgttactccactggctaaaacactatacaaaa

SEQ ID NO: 864739 - DNA, 671 bp, Homo sapiens
attgtttattcaattttggtcaggctgactgtatgctggtgccaatcatcagctgctgcagatggtgaggcctgggactgtgacttggttaatgtcacacaagcaaatggtcttcctttgtggactgctttcctttttgaatagcactttcaggagttcttccagagaagtacttttttttttttttttttgagacggagtcttgctctgtcacccaggcagtgcagtggtgcgatctcatctcattgcaaccttcacctcctgggttcaagcgattctcctgcctcagcctccygagtagctgggactacgggtgtgtgctgccacacccagctaatgttttgtatttttagtagagacgaagtttcgccatgttggccaggctggttttaaactcctgacctcaggtgatccacctgcctcagcttcccaaagtgttggtattacaggcacgagccaccgcacctggccagagaagtacctttatgttctcaacatgttaatgaatttaatgcagaactgaagccaaaggtgaggtggttggatgagtgaagcagttaagtgcgtatgttagacacatgttctatgtgggttatttccagactcaccttagctcagtgttgtgataatagtctcccttcagcctcatatcagagcctgagccaataata

SEQ ID NO: 864740 - DNA, 601 bp, Homo sapiens
atatttttacaaaaaaaagaatcttgctcgtagatatcacctttactagttaaccaagtatctacacatatgggtcttctgcaggtttcttgactaaattgttcaactttgaagtcagtggaagaagtatgtatatgaggccaggcgyggtggctcatgcttgtaatcctagcactttgggaagcagaggtgggcagacagcttgagcccaggagatcaagaacagcctgggcaacatggtgaaaccctgtctctacaaaaaataaaaaattacctgggtgtggtggtgcgtgcctgtagtcccagctacttgggaggctgagatgggaggatcacctgagcctggggaggtggaggctgcagtgagccatgatcacaccactacactccagcctgtgtgacagaaagagaccctgtctcaaaaaaaaaaaagtatgtatatgagaatgaaaaaagaggtaaaatggtatgagttttttttataattggtttttagaataaaaatataaattattactaaaacaaaataacagacatagaatgttagcaccacatggtttctcagatataatgcagtcacacgagtttctagatcattttt

SEQ ID NO: 864741 - DNA, 640 bp, Homo sapiens
atactgagctgccttttcccagaagcatccaactcttttataaccagtttagtttacacaccaagatatatatacatatatacacacacatgcatagaagtatttatatatacacatttgtatctacatgtacacacctacgtataattaacctcaggcagtcaaaatttctataaacgttaattataacagaggaaaaatatgaaaaaatgtccaaataataagtcatttgtctgtagaacttttcctaaatgacagctccygattctttaggttatctttctgcgaatctcaacagaagcacaatccctggggcaagacaagagactctaaaatcttagccaaccatacaaaaggcccgcagctgtatctgtacaatcccccattagagcgtgtggtcattagttccgcttctctctcacatatcacaatgcaaaatgagggccatgactgatgaaaaccatggagatggctctggctgtcaaaatgtatagcctctccagcagagctctagtgctctgcccatcctaaatcaagggctcaggactgctgcagcagcaaaccccttgttctgtggtgaaacagacgctacacatctggagagtgttttcgattatactgaattgagtcatgggtcctt

SEQ ID NO: 864742 - DNA, 640 bp, Homo sapiens
atactgagctgccttttcccagaagcatccaactcttttataaccagtttagtttacacaccaagatatatatacatatatacacacacatgcatagaagtatttatatatacacatttgtatctacatgtacacacctacgtataattaacctcaggcagtcaaaatttctataaacgttaattataacagaggaaaaatatgaaaaaatgtccaaataataagtcatttgtctgtagaacttttcctaaatgacagctcctrattctttaggttatctttctgcgaatctcaacagaagcacaatccctggggcaagacaagagactctaaaatcttagccaaccatacaaaaggcccgcagctgtatctgtacaatcccccattagagcgtgtggtcattagttccgcttctctctcacatatcacaatgcaaaatgagggccatgactgatgaaaaccatggagatggctctggctgtcaaaatgtatagcctctccagcagagctctagtgctctgcccatcctaaatcaagggctcaggactgctgcagcagcaaaccccttgttctgtggtgaaacagacgctacacatctggagagtgttttcgattatactgaattgagtcatgggtcctt

SEQ ID NO: 864743 - DNA, 653 bp, Homo sapiens
tatcaattaaaatatatgtgaggcatataaatgtatgtaaatatgtaatacacgtgtcatattttggctgtaattatattaattctttttttttcttgactggacatttctcatacaactgggtttcttgagtttctcrattagagaaaacagtttcatttgaattccaccaaaatgggattttcaaaaactataaactcagaaactataaagatgttacactgattagagaatgaaaaacaagatttgtttattcgaaagcaaacatttactgagcacttaaaataagccagaactgttataggcatgtggagacagaagcgaataaaacagacacaaatttctgtcttcataaaggaagagaaaaatcatatcctctcctttgctgtaatccaagctagaacttatggcacctgccaaccccaggggctgcatggggcttcaaggaaggtctcccccagcaagcccgaggaacagcctcagtttccctctcttggcctgcatggagttcccaactcacttcactttggactgagagaagttaactttttgctttccaaactggtctatcgtttttggacacaatataaaatgtaattttgtggtttatagttactcgaacagttgctctgaaggggcttaatgataaaata

SEQ ID NO: 864744 - DNA, 641 bp, Homo sapiens
gcttttccttttgtcccaccaagccacaatttaaaggagaaaactaaaagataagcagaggaaaaaatactgtcaggaaaaagataaaaagtggagttgccttgggtatgtgcccatttgattaatctatatgtggataattggaaattgattctgattataactatgacttttcccattcataaaagccccagacatttgtatcttttaagttctctgtatctataatatgtttttggtttgatacactaaatacagcatgtgttaaattgaagataacattatactcatatttaagcaaacaaacttacaaagatatctaccaattttgctgtgtaaagcaggataaagcctgagaatatggccataaaggctggatttgaacattcttcggcatacagcctgayttcaataaaataactcatttctagtgctttaaaagtttccaaagcacgtccacatagggcattatactcaattctaatcttgtaaatcaaagttcccatttcacataggagcaagttaaggctgagaggatgaattgcctgtccaagtggacacggctgactgttaagagctggaattcaaatccacagaaacctcacattcaattaacccttcattaaccagaaaaggcaagt

SEQ ID NO: 864745 - DNA, 668 bp, Homo sapiens
tctaattccgtgaagaaagtcaatggtagcttgatgggaatagcattgaatctataaattactttgggcagtatgacaatttccacgatattgattcttcctatccacaagcatgaaggagcatgtgcatggaatgttattccatttgtttgtgtcctctcttatgtccttgagcagtggtttgtagttctccttgaaggggaccttcacatcccttgtaagttgtattcctacgtattttgttatctttgtagcaattctgaatgggagtttgctcatgatttggctctctgtcttttattggtgtataggaatgtttgtgatttttkcacattgatgtggtatactgaggctttgctgaaattgcctaacagcttaaggggctttttggctgacacaatagggttttctaaatatacaatcatgtcatctgcaaacagagataatgtgacttcttctcttcctatttgaatacccttgtgtctttctcttacctgattgccctggtcagaacttccagcactatgttgcataggagtagtgagacagagcatcctcaccttgtgcgggtttttaaagggaatgcttccagctttgccccttcagtatgatattagctgtgggtttgtcataaacagttcttattattttgagatatgttccatcaa

SEQ ID NO: 864746 - DNA, 668 bp, Homo sapiens
tctaattccgtgaagaaagtcaatggtagcttgatgggaatagcattgaatctataaattactttgggcagtatgacaatttccacgatattgattcttcctatccacaagcatgaaggagcatgtgcatggaatgttattccatttgtttgtgtcctctcttatgtccttgagcagtggtttgtagttctccttgaaggggaccttcacatcccttgtaagttgtattcctacgtattttgttatctttgtagcaattctgaatgggagtttgctcatgatttggctctctgtcttttattggtgtataggaatgtttgtgatttttgcacattgatgtggtatacygaggctttgctgaaattgcctaacagcttaaggggctttttggctgacacaatagggttttctaaatatacaatcatgtcatctgcaaacagagataatgtgacttcttctcttcctatttgaatacccttgtgtctttctcttacctgattgccctggtcagaacttccagcactatgttgcataggagtagtgagacagagcatcctcaccttgtgcgggtttttaaagggaatgcttccagctttgccccttcagtatgatattagctgtgggtttgtcataaacagttcttattattttgagatatgttccatcaa

SEQ ID NO: 864747 - DNA, 670 bp, Homo sapiens
ggtatttcttctctcccaccttctgtgataggcagaattctaattctaaggtggactcactgacctttaccccatggtgttactccagtgattatgttatatcacacagtgaaagagagttgccagtgtcattaaggttactaatcagttgaccttaagaaaaggagatgacgcaagtgggtttaatcatatgaattttgtttttaaaaaccgaaaattttctcttgctgtaacaaagggggaagccagagagactggaagtgtgaaaaggactccaacactattgctggtttgaggatggatggagtcatgtgaaaagggatgcwgctggcctttagagcagagagtggctcctggctaacagccagtgatgaaacaaggatctcagtcctacaaccacaagaaacaactctgccaaagatctgaatgattttgaagtacattcttcttcacatcttccataagagaatacagctcagccaacatctagatttcagatttttaaggccctaagcagaagacccagtaaagcccaccagaacttctgacctataggactgtgagataaccaatgagtgtcattttaagctgaaaaagtttgcattaatttgttatagtggcaataggaaagggatgcacctccaaaaacttattaaattgatgcccataa

SEQ ID NO: 864748 - DNA, 670 bp, Homo sapiens
aggctttctaactaggaaaatgatacaagataatgcaccatattttttctttaaataaactatgayaattgcaactattttattacaattattttaattatagagatagcttaacaatgataaacccattgcatacacatctctctcatcctcatactacatatacttgtaaaaaaaaaaaaaaaaagagcaagtacaggtattgtcttcatgcaaatgagggaaacttaatcacacaatttgatgtgactcccttggtctttcaagaagtccatgaaagatctcatcaattgattctagagtcttctgacctccgtaagaacatgactctttcaagtcaggaaagtcatttcatttacctttgcattttaccatcaatcccatgccttgtattcaaaaggtgttcaataaagctgtgttggattgaattgaattttgagagagctggctggctaattaattgtgaaattcaggttctgaatcattttagaagctttaggatcatttgatgactattgtagaaacatcagtcaaaatggtagttagaagatacccatgaagaaacattgcttaaatatatatgacatatacttgtgatacctgacaacacaagtaacctgttacataaatagaaaagtagattccatcaatcaagtatgccctttgtcct

SEQ ID NO: 864749 - DNA, 670 bp, Homo sapiens
aggctttctaactaggaaaatgatacaagataatgcaccatattttttctttaaataaactatgacaattgcaactattttattacaattattttaattatagagatagcttaacaatgataaacccattgcatacacatctctctcatcctcatactacatatacttgtaaaaaaaaaaaaaaaaagagcaagtacaggtattgtcttcatgcaaatgagggaaacttaatcacacaatttgatgtgactcccttggtctttcaagaagtccatgaaagatctcatcaattgattctagagtcttctgacctccgtaagaacatgactstttcaagtcaggaaagtcatttcatttacctttgcattttaccatcaatcccatgccttgtattcaaaaggtgttcaataaagctgtgttggattgaattgaattttgagagagctggctggctaattaattgtgaaattcaggttctgaatcattttagaagctttaggatcatttgatgactattgtagaaacatcagtcaaaatggtagttagaagatacccatgaagaaacattgcttaaatatatatgacatatacttgtgatacctgacaacacaagtaacctgttacataaatagaaaagtagattccatcaatcaagtatgccctttgtcct

SEQ ID NO: 864750 - DNA, 705 bp, Homo sapiens
ttgcaaatgcaatgattctgataccaaaagatctgagaacacttgccccaaatcccacagctggtctcggaaaagtgagatgtagaacccaagtcctccaccacaaaacaaaagctctttccactgctttaatttcttcacttgaagaggattcagacaccttagtttccattcttatatcatttaccttttctctggccatttcttcaaatgtccatactgagaccaaggcctagtcagggacagcaaaaagcaataggcaccctaccaaggctttttaaacatcctgcaaggtggtttgggtcaaaggcaggtaaactgtccttaaccagagatgtgtttgcatagcccaaggattttagattataatgcatcaatcattgaaagaaaaagacagtgtgcatagttaatattcagacatcatattcctaaagaactctgaaatggtgtttaacaaagcaaaccattcccacttcaaagaataattccaaaaagcaaacattacatctgtgctatgctggttattaccctgcctctcgtgcattgtrtatcaacatactagacaacacatgctaaaaaattgctcttggagcccaacactatggtgggtaggactgtgcacatccctcaataaaggcagttgaaaccctcagaaggccaacccaagaggcttggtctcagctcagagcaggcctgggcatcctt

SEQ ID NO: 864751 - DNA, 614 bp, Homo sapiens
gcactttgggaggctgaggcaggcagatcatgatgtcaggagttcgagaccagcctggccaacacagtgaactcctcctctactaaaaatacaaaaattagctgggtgtggtggcaggcccctgtaaacccatctacttggaaggctgaggcaggagaactgcttgaacctgggaggcggaggtggccrtgagctgaaatcatgccactgcactccggtctgggcaacagagctagactccagctcaaaaaaacaaaacacaacaaaacaaaaaaacccgaaaatggatctagctgtcccatggctagactgggatgaagcctactaattgtcattcaccatggggctacccctccaagtcttctgcctaatgtctgcttagccaggttaacctgcctgaccacgaagtagagggtaagcttagctgcctaaacaaggccttcctctgactttaacagtctgttttggtttgtttttctaaatggaatgattatgacccagaaaggcatacagacttactcttaatttttttaatagtatcaaacatgccgattttataaagtacacaatctctagggcacatatatgcacatgccttggttgggagatattta

SEQ ID NO: 864752 - DNA, 614 bp, Homo sapiens
gcactttgggaggctgaggcaggcagatcatgatgtcaggagttcgagaccagcctggccaacacagtgaactcctcctctactaaaaatacaaaaattagctgggtgtggtggcaggcccctgtaaacccatctacttggaaggctgaggcaggagaactgcttgaacctgggaggcggaggtggccatgagctgaaatcaygccactgcactccggtctgggcaacagagctagactccagctcaaaaaaacaaaacacaacaaaacaaaaaaacccgaaaatggatctagctgtcccatggctagactgggatgaagcctactaattgtcattcaccatggggctacccctccaagtcttctgcctaatgtctgcttagccaggttaacctgcctgaccacgaagtagagggtaagcttagctgcctaaacaaggccttcctctgactttaacagtctgttttggtttgtttttctaaatggaatgattatgacccagaaaggcatacagacttactcttaatttttttaatagtatcaaacatgccgattttataaagtacacaatctctagggcacatatatgcacatgccttggttgggagatattta

SEQ ID NO: 864753 - DNA, 627 bp, Homo sapiens
atattgagtttttcagaataagcagtaatgttcagacacaactttgtaccgtaagcaggggcattgttaaaagtaggaaaaggaaattggtaattatcttccaaacctgactcccatttcatgaaaatgaaattgggatgggactagaagcaagaaacaaaacacctgtggtgctctggaagatttttccaccataaatggcaagaaggaagaacagacaaacacaatcttagattagcagccaataaagtcctcccatcctagtaccagatcatggctcctatgactaaataaagcactatttgtgaagcttcagtaatcgccctctttttaaaaaaaaaatataaagaggtaggttcaccgttgattaaaattgctcattttcaatacatctggcamtctggacttcacaaacatgttgactattcatcaggtaccttaggtaactgagaggaaaaattgtaaaagtgtcacgatagcaaaacacaagaagcagacctggttgtataagtccagggaaaatgggaccttcttaccagagcccacactcctgaagactcttctaaccagaagtaaacaaagtattcaaagtgaaatggcttccgggagtgggatgcccacccctct

SEQ ID NO: 864754 - DNA, 669 bp, Homo sapiens
tcgatattcacagcccttattgttttgcttggaatgtttaaatgctttagaacttactccctctgtgtaattcttgtctatcacaattgggccatttgctgaaccctgtgaactcctggcaggcagatcctgtgtttctctaaggcagctcctcccttctcccttcctcttggtagcttctgycctgccctggctccttctgcccagtagaccctttcttatgtctgcatgtcagctcacatgaacttcctgaagtcccaatcaatatccctgggtacacagattgccaaggcaacctctgctcaattcaaagtcacccagaatactctcagtctagcaagtgaaaggggaagatgtggctggcttagaacaaaaataacagagaggctggtaccaccaagcctctctatgaagccaaaaatcctataaaaaaaggaaaagatgacgtggatgctgtgactgcaaagaagaaggcaaggcctgagagatgcaagggaaaagtgggcaaccaacagcaaggaacaggagcaggaaagagagaggctgtcacaggctgagagagggcaaggcccacatttccacccacttcctcctccaaaaccccggcagcatctcaccagcaaaacctctgccagctccacactctagcagccagccacacccaggcca

SEQ ID NO: 864755 - DNA, 611 bp, Homo sapiens
acttacatagaacatcttatagttttaagtctattttaagctgataatttaaactccaaatgcattcaaaagctctacacttttacttctccaccccacctattttatgttagtgatgtcaaaatttccatctttttatattgtgtatctgttaacctattatagctatatagttaaaattgccccttgaacaacacaaatttggactgcataggtctacttaaatgaggattttttttcaataaaagtaacaccaagtgtgcctgcctcttccacctctttctcctctcccacctctaagacaccaagaccaacctctcttcttcctcctcctccttaggctactcaacatgaagacaacaaggatgaaaagacatttrtgctgacacacttttacttaatgaatagtaaatatagtttctctttcttatgatttttttattaacattttcttttttctagcttactttattgtaagaatgcagtatataatacacataaaatataaaatatgtgttaatcaattgtttatcagtaaagctttcagtcaacagtaggctattagtagttaagttttgggggagtcaaaaattatatgcaaatttttgaca

SEQ ID NO: 864756 - DNA, 611 bp, Homo sapiens
acttacatagaacatcttatagttttaagtctattttaagctgataatttaaactccaaatgcattcaaaagctctacacttttacttctccaccccacctattttatgttagtgatgtcaaaatttccatctttttatattgtgtatctgttaacctattatagctatatagttaaaattgccccttgaacaacacaaatttggactgcataggtctacttaaatgaggattttttttcaataaaagtaacaccaagtgtgcctgcctcttccacctctttctcctctcccacctctaagacaccaagaccaacctctcttcttcctcctcctccttaggctactcaacatgaagacaacaaggatgaaaagacatttatgctgacacacttttasttaatgaatagtaaatatagtttctctttcttatgatttttttattaacattttcttttttctagcttactttattgtaagaatgcagtatataatacacataaaatataaaatatgtgttaatcaattgtttatcagtaaagctttcagtcaacagtaggctattagtagttaagttttgggggagtcaaaaattatatgcaaatttttgaca

SEQ ID NO: 864757 - DNA, 547 bp, Homo sapiens
atgaagataatttcattctctggactcagagaggcagaaaacaaggaggggatatgaatgtgttggtcaaagtaaataagcagatgatttttatgataggctaaattgaactatcatagcctcatgattttgaaaagctctttccaaagctgaatttacctgcggagaggtgtttagaaacccccttttggtttatagttcagtcatgctcctatctccccccttcaacgtaacattctggatcaactgcccctgtgtaaccaattctcatacttaaagtataaaactrggaaggattttttcctccattctgaaaattaatctttcaccttaggaaaagatttatacttctgagtcatagaaaagccaacaccctccagcacttagaagcaacctcagaaaaagaaaaaggaatgaaaacagtgaatcaatttccctttccacacagatctgagagatgagatagttctcgtgtctgccaaggggcttccggctccgacaagttgagtcagcatgctgcaaatcgttctagatggtttttggacca

SEQ ID NO: 864758 - DNA, 637 bp, Homo sapiens
aagatagtcaaaagttggcagggaagaaagtcagggagaataaatatgaatgaactgaataagccacaaactattcaatcaatgtttaatcaagcaattgtacaatttagaatggccattgtcctgttttaattttttcaactaatctatccaagtgatcgtgtcattttaattgcaaaaatgaaaaagacctaggaaatcaagaagacagtgagtaaaaaggaacagctgggtgtgactgagttgcctgcttggargcaagcagaaagatgtaaagtgtttgaaaattccttccaccgttggattctaaggtgaggaaattaatttttaaaattaaaacacagacctaattcctttctactgacacctgcttagtgtatggactctgttcacttttgcttgaaacataaaagatggcttatctcagtcaaattctgtctaccccatagggatttcattctcagcatgccagaaacatttaatcctttctctttctctctctttctctctcccctcactctctcttctctttttgcttctttcttctctctctctctctctttccttctcttctaaaattttcccaaagcctacaaggacaccctatgtgcagtactttgttgaattagaggttaca

SEQ ID NO: 864759 - DNA, 637 bp, Homo sapiens
aagatagtcaaaagttggcagggaagaaagtcagggagaataaatatgaatgaactgaataagccacaaactattcaatcaatgtttaatcaagcaattgtacaatttagaatggccattgtcctgttttaattttttcaactaatctatccaagtgatcgtgtcattttaattgcaaaaatgaaaaagacctaggaaatcaagaagacagtgagtaaaaaggaacagctgggtgtgactgagttgcctgcttggaagcaagcagaaagatgtaaagtgtttgaaaattccttccaccgttggattctaaggtgaggaaattaatttttaaaattaaaacacagacctaattcctttctactgacacmtgcttagtgtatggactctgttcacttttgcttgaaacataaaagatggcttatctcagtcaaattctgtctaccccatagggatttcattctcagcatgccagaaacatttaatcctttctctttctctctctttctctctcccctcactctctcttctctttttgcttctttcttctctctctctctctctttccttctcttctaaaattttcccaaagcctacaaggacaccctatgtgcagtactttgttgaattagaggttaca

SEQ ID NO: 864760 - DNA, 414 bp, Homo sapiens
atgggactggagtctattcccagagaggctcaggacggtgtattgagaacaatggttttgagccctgattgcgcccaatgccctctcctatcacaaatgttttataatattcgttttttaaaagtggaataaaatttcaagataatagaccctacttatgcacgtaatttatacacactgccctcattactgtgatgatgaattgaagaagcgtgagataaaygcttggtcatgattatgttagaagacacaatgaattagacagaggtacacctataaagagatgcactacaaatataaaagtgaatgtgaattgatccaagtgtgtacctgtgatgattttaatggctaaaacagcattgcactcagcaacatgattttctgacatggttggcatagtaaagaattcctggt

SEQ ID NO: 864761 - DNA, 634 bp, Homo sapiens
aacaatcagtttaaatgaaaggggagcagaaagtaagaaagtgaaggaggcattgcagcttgcccagttccatatagattcggtaaatgtgaaaagctagtttaaacacttaataatattgatcttcctccaagggtttctttggagctgacttaattagtgtttattaaccattctccaccaaatacttgtctaataccttaaaagtctatttcagcagctataatctctgctagtgcaagaaaatgcctccctatcatgcytgctccagtggaataacaacttacatctacctacctaatgttcaaacaattggttaaaaagttaaaaattcaccaattgactgattattttgtttacacaaaattaaacaaattaattttttttagtaagctgaataaaaaacaacaaacttgtaaagatacagcagtaagtaccttttgatgcaaggagaacacaaaatattttaaccagtttgtgatgggttttaaggattttactatgagccaagcaaaaaaataattctggaaaataactcatataaaattaaaggttagagatgactgagtaccctcagataaaattagagcatatattcactgattaatatttataaagttgaacttttactttt

SEQ ID NO: 864762 - DNA, 634 bp, Homo sapiens
aacaatcagtttaaatgaaaggggagcagaaagtaagaaagtgaaggaggcattgcagcttgcccagttccatatagattcggtaaatgtgaaaagctagtttaaacacttaataatattgatcttcctccaagggtttctttggagctgacttaattagtgtttattaaccattctccaccaaatacttgtctaataccttaaaagtctatttcagcagctataatctctgctagtgcaagaaaatgcctccctatcatgcttgctccagtggaataacaacttayatctacctacctaatgttcaaacaattggttaaaaagttaaaaattcaccaattgactgattattttgtttacacaaaattaaacaaattaattttttttagtaagctgaataaaaaacaacaaacttgtaaagatacagcagtaagtaccttttgatgcaaggagaacacaaaatattttaaccagtttgtgatgggttttaaggattttactatgagccaagcaaaaaaataattctggaaaataactcatataaaattaaaggttagagatgactgagtaccctcagataaaattagagcatatattcactgattaatatttataaagttgaacttttactttt

SEQ ID NO: 864763 - DNA, 600 bp, Homo sapiens
gtaaatgatgaacttttagtgataaggatgtgtcaatctagattctttgattgtagcaaatgcattcatatggtgcagaatgtcaatagtgggaaactgtatgtgtgtaggaacaagaagtatatggaaactgtctgtactttttgttaaattttccttcgaacctaaaacccctataaaaataaagtttattaattatttttaatagcaagcaacttgtctaagtaacaccattaggaattaaaaataggtctatcttactccaaatatttctgctatgccattatgactatgaatcttaacaatcctttccagagtgcttaataaatgtttaatgttttaataattaygtatttttcaaaattgtgtcatcaaaaatttattttgacttactcatgcagtgagatgtttaatacttttgaaatatctacaaaacaatttttacaataaaaagaggtgagaccccatctctttttatttaaaaaattgtttggtagatgtttcaaaagtattgaatagaacttcctttcttactctaatatatctttctcatcagatattacattattttcttcatatctatttcactccactggtata

SEQ ID NO: 864764 - DNA, 748 bp, Homo sapiens
aaattccatctcattttatctgcaatgtctattccatctctgtagacaggcagagcaaagcttattatagttcacccttgttaatacgttttacctttcttaatttttaaatagcatgctgacaaagactctttcactaatagtctctcactgataagaccctcgagccctcttgttgaattggccttggtcttggcctttcatgtttatcctgtctttgccaggcctgcatatcccaaatttagaaagaatcctgccaaatcagcttagtaatagtccctctacctttgatatctaatcacccttgacatttgaacaagttcctcatctccatcattgatttataagtacttggcttatctttagcaagaatcttactgggtcactttagcaagaatyccccttcccttgatgtctcttcttagtaattttccatccacagatccctcactttgcacattggtcataaatccccacttgtccttattgtattcagagttgagcctgatctctctgccttgttgcaatagtctctaatgaagtcaccattactgttttaaaaagtattagagtaattttttctttaacagtgcttggttattaaaatgacagtaaaaagaatttaaaattaaacatcttaaaataggtctttgaaggtaataatcaaactaaataattgttcaaaggagaagtaatgaataagctgcatttttttcatccagcagtactcaatatactatactgtgaa

SEQ ID NO: 864765 - DNA, 619 bp, Homo sapiens
gttgtaccactgaaaccctatagcatatggaagcaactgatagacccaagcggtttaaaggcaaagcagtaaatagcacaaatggggaccagttcacacacaagaaaagaattaaagaaacataacatcctaatctcttctgctcattccactgtgagagaattgaggccagcccagcattgatttagaaatacaaaaaaatggtgttttccttttggatttaggtttgaggagtctatcatagtacaggcattgaaagcctaaagaaggcagatgagtaagaaaaaaatagaacaaacagacatttttgcaagtgtagagttacaaaattataggataggcgtcaggcaaagtgccagctctcyatgtggtagatgtagtttgctatcaaaattattacctgtaaagtgaaatcagcacaagcaggttcaggttaggtggggagagtctgaggaatttggcacaattgtgtacaatattttcattttttttaataagagaatgtcttactctttcaattgccattttgccatgtagtccaatatatgaaatagataaaagtaaaagtactttggattaaggcactatagagatgttgaaatgatgatcttctaatttt

SEQ ID NO: 864766 - DNA, 686 bp, Homo sapiens
ttcagttttagtctgcatctgagtgtgttcatttttcaaaagaatccagttttggagattttcatgagggtctaaaactctaataacgttataagccctttttttctatcaaagtgaacttgaaactaatcctaatgcactatgatagtatctgttccacgttttcttttgcaactttagtcaatcaatttaagatactttcctatgttagagttggcttgcgcggtgtcctagtcagctcaggctgctaaaacgaaatatcatagactggatggttgttatagaaaaaacttattcaatgacaattgttaaagcatggtaaggaagactgtattcaggaccattgtgatagttataaggaatactgcaacagagtcttgaagctgaggagagagattgaactctgcatactgtatgaacaagtgggaattttagccaaggagcagtgtgagagtcagtggatggaaaattactaagaggaaatgtcagaggtcaggggtgttctggctaaattaagttaayaggatttttactaaagacaagccacaatgatcagacatcagctgggggatggtagaggaggaggaatctgatcagatattgaagataatcagatatcgaggatggggagtcctggctaaactgatttagccaggttcttttgctaaaactggattttataagga

SEQ ID NO: 864767 - DNA, 561 bp, Homo sapiens
tcttagatttaagtccttgatccatctgtagttgacttttgtataaggtgagagatgaagacccagtttcattctcctacatgtagcttgccaatcatcccagcaccatttgttgaacaggttgtcctttccccactttatgtttttgtttgctttgttgaagatcagtaggctgtaagtatttgggtttgtttctgggttctctattctgtttcattggtctatgtggctaattttatatcagtactatgctgttttggtgactrtggtcttatagtatagtttgaaatcaggtaatgtgatgactccagatttgttctttttgcttagtcttgctttgtctatgcgagctcttttttggctccatatgaattttagaattgttttttctagttatgtgacaaatgttggtggtattttgatgggaattgcatataatttataaatttcttttcacagtatgatcattttcacaacattgattctacccatccctgagtatgggatgtgtttccatttatttgtgttatctataatttctttcagcagcgttttgtaggt

SEQ ID NO: 864768 - DNA, 674 bp, Homo sapiens
aaggcaaaaataattagactgatgttcaatttttttaaagagacattcaaagcaatcccataatgtagtaggattttcaaaaaattagtaaaataaagcgtgaaccaagtattttatatctagttaagcattccttaaatagaaaggttatagaaaaattcaagcacacatgaatttagggattgctctactaatgagaccttttagagaaactagaacatgctccatctaaacaagagatgcctggagaaaattcagcaagagaactaatagtgagcattttaatgtatgcaatttaaatttaatgctaaaacaaaagtaaggatgagggtggactactaatgtacargttccttatgttgtgataaagtataattttttaatggaaggagaaagaaaatataaagaagaaatttgaatgcatgcattgattgttgtgtagacaatgggagataaaggaaaacactgaaaactgacaaaccaggtggtaaaaaatgagcatgacaactgggaactaaaggcattaaaaggccataagtctaaaggtaataactagaacaaagttccatcctcccaaaatacatcaaagaaaatttgatcttattatatggaaaaagtaacataaaattataacataaaacacgtaattgtaaagtgttatgacagaaataaga

SEQ ID NO: 864769 - DNA, 573 bp, Homo sapiens
agaaataaaggcatttacccttaaaagagatcctccagtttgtgcctcagttccaaaatagcaattatatgaattgcttccaatttgataagttggttaatttaacttaattgtaatatgctctttatttctttagctttgccttcaagtccatctattcctatctttctaatatttgccagagtagtaaaaatcgatatgtttacaactcctcatcaattcaaaaaatacaacataacrgtagttattggtggaataattgtgccacaacacttatttcatatgcaaaatgttggtccatgatttatccatagaaatagaatagactgaaaattatgcctatacagccgattaaaaagtcttatcattgtgcttttattaaaggtaatctaaggagataaccagtgtcaataatttgccaaggcatgggttccacctttcaaaaactttataaataattcaactttaggtgaaggagctgatatttttaagtgaatgtgtttacttgatctacaaattcacgaaattttaaattcaaatgaagaatttgcctagccaattgctttacatttg

SEQ ID NO: 864770 - DNA, 648 bp, Homo sapiens
tgtctgccaaaattggctgcattattttcttttgccattttctcccttacttcatcagtagaaatgcgtcaacaatctctttattttcttagacatgggttaaatgtattactcaaccagagttgctcattcccaaaccacccatgcatccctagatttcttggctggcacaagtccatttgcttaccctcattgtaaatggrccttaggaaggataaaagacagtgtatattctcagagcactctttgatgattatctttgttcctattttatgcactcctctagagaagttacatttttctatttattccctccacagctattcttaaaattaacaaaaaatacatgttcttacctcccatcaaaaatgtatctaattccattttataataaacttcactattataaagtcattgcttatttatatacaatgcagtaattttcactctctttttaaaagttatcattagctctgtcatcacttcttccgaaattcctttccttccttctggtttttgttattttcataatagaaaattgtttataattctgtccaccacagtctgcaagtagtgaactttctgatttattattttgtctaaaaatgttctttttatcttaattttgaatgatattttagcagcata

SEQ ID NO: 864771 - DNA, 636 bp, Homo sapiens
tagcctatttaaactttataaatctgtttattatgtaaagaaaaatgtggttgtagatcctgggtcagcaaacatttttctttgaatggtcagatagcaaatattttaggctttgtgaatcacatggtctctgtttcaactattgaactcagccattatagcatgtaaacagacacaaacaatacacaaacaactgagtatgactgtgttctaataaaatttcatccattagaggaggtaggttaaatctgggccatgggccatgggccattgtgctgaactctgttgaatcacagattcttattcgtttttttttggtttttttttttttttttgattcatattagtgtyggtgtcatttggttgtccttctattttttaatttttttatttcaataactttaggggtacaactggtttttgattacatggatgaattgtgtgatggtatgaagtctgggcttttattgtacccatcagttagtgttcattgtgtagatcactgattcttattctgatttcacattcagaattcaggaatgtccattaacctcactgaaaatgtccacaacataactatgcgagagcttttgtaaatgtgtgagtctgcatatatgttaatatgtgtgagtctga

SEQ ID NO: 864772 - DNA, 638 bp, Homo sapiens
tagcacagcagcctgagatcaaactgtgaggtggcagcgtggctgggggaggggcatccgccattgctgaggcttgagtaggtaaacaaagtggccaggaagctcaaactgggtggagcccaccacagctcaaggaggcatgcctgcctctgtagactccacctctgggggcaggtcatagctaaacaaaaggcaacagaaacttctgcagacttaaacgtccctgtctgacagctttgaagagaatagtgcttctcccagcatggagtctgaaatctgagaacggacagactgcctcctcaagtgggtcactgacccccaagtagcataacttggagacacctcccagtaggggccgactgacacctcatacagccgggtgcccctctgagacraagcttccagaggaaggatcaggcagaaacatttgcctttttgcaatatttgtggttctgcagcctctgctggtgatacccaggcaaacagggtctggagtggaactccagcaaactccaacagacctgcagctgagggtcctgactgttagaaggaaaactaacaaacagaaaggacatccacaccaaaacccgatctgtacatcaccatcatcaaagaccaaagatagataaaaccacaaa

SEQ ID NO: 864773 - DNA, 566 bp, Homo sapiens
aattctcactcttatctacaaaactggcagactggcacccagacttcagactgttatttggttgaaggtggagtatcagcagagacctgcccctttcctcctagaagcctgtctgcctcctgctgccattcctggcacctaggctgcccatgccaaagggtaccagcaggcccgtgtgagccaccctcagtcccccctcagcctccttcttgtgctcaattgcattcaaagtctggagggggctgaggcagcaggggctgcctccatccatgaagtaggaggacctaattggtaggaatgagtcatgctcacctgtactgcrcccctagactaccatagttatcggtctctggattcctcagatgtagattacctttctagggcctcaaatcaaagattgggattgcctcaggagggtgtagggactcagtaattaagtcccagatggccctcaccaaattgcagagagcaaccagtggggcagcccctctgttgcttccctatgataagcaggtaaaactgtgggagccagtcttcttcaaacaagggagagaaagggagtgcag

SEQ ID NO: 864774 - DNA, 598 bp, Homo sapiens
tcaggctacaaattttctgaacttttatgctctgttttccttttaaaaccaaatgcttttaacatttggtcacctcttgaatgctttgcttcttagaaatttcttctaccttataccttaaatcacttccctcaagttcaaaattccacgaatctctagggcagatgcaaaatgccaccagtctctttgctaaaacatagcaagagacacatttactccatttcccaacaagttcctcatctccatgtgagaccacctcagcctgaattttattctccatattattatcagcattttggtcaaatccactctacaagtctctaggaagttccaaactttcycgcattttcctgttttcttctgagccctccaaactgttccaacctctgcttgttaactagttccaaagttaattccacattttttagtatctttacagcagtaacccactttattggtgcaatttacagcattagcctgttttcatgctgcatagacatacacaatactgggtaattttttttaaaaaagaggtttaattgactcacagttccacatgcctggggaaggttcacaatcatggcagaaagcaaaaggc

SEQ ID NO: 864775 - DNA, 649 bp, Homo sapiens
ggagagtattttgagattctatttaggtttaagggtgtgtgtgtgtgtgtgtgtgtgtgtgtgtgtgtgtgcatgcatgcgcacatgcatgcacgcatgtgtgtgtgatatatatctttataattaaatacagtctgtttatgagattccaataatgttattcatgactggtaaatagaggaatgatgtcactataacacagaatgtattttggtttacatgagaattttctgagaattttcatattttatgccaagtaccagtagttcaacacagtgcacagtgtcagctgagagcaataaaccaaacaaatgttgtayatatatgatgcaaattcaccccacattcttcccctttgccacagtctttgttctggaggtgttatcgggtggtcttttcaaatctttccacaactcaacagctccaactcttctttacattcccatctatggaggtagctttatagtattttaggtaaaaagatatatttattatagtgcttcattatttgataatttagtatgtatttaactgtacttgtagttttccttaggaattgttgttgtcagcattctggtttttattttcactgatattaagtaggctgttcttaattttattttttcttcataactctatgtctaatttt

SEQ ID NO: 864776 - DNA, 690 bp, Homo sapiens
atcacaaaaagaatttgattgattttaccattatgtaatatacgtgtgtggaaatatatatcctgcaaatatataaatttacattttttaaaagcatggtgagaaattataggttgaatggcaatatactgaagagttttaacaaatagctttggatgtgagtgtatggataaattttctgctttaaatgtgtcttttaatggacacatcctccttttgtgtgtatatatgtgtagtttataaacatccagaaacatatgtggatagataatttaacactctttcagatttaaacaaaaaggtatctgctaaaaccatgtcggtagttgttttcctgaaatgatattagaggttaatgaaaatatccttttatccacaaaaataccatttgttcctaaaatcccaccataagagatacttctagcttaagcaacacaggagttttgaagcctgtgaaaaatacagttctccctgaggagagaacatattccttgttggttctctacmtgacctggtgtgagaaatataccttatctcaaagaaatgcctttgagatatggaaggctgtggcttggagtctcatcaaattagataatggagacacggtctgctgacttccctttccaacccagtcccaatgtcatctaggacagcttggagctatcactaagtctatgtgtgcagtaaaga

SEQ ID NO: 864777 - DNA, 565 bp, Homo sapiens
gaaatagcaaaacatctcataactagtgcaagcgaacttggaaatagcaaaatatttctttacaattggcatttgcaatggttggaagataaatattttacagctcgagggaattcagggccttggggtccatgcaaacatccaaaagatatttagaaactacctacttttgccrgatactaggctctgcactggagaacagcccctgcctttaggcacagacacttcagtgaccaccactccctaaaacaactagaagtgacatttatgaacacgcatgcataatgtcttcttctttaacagtttacttggaaataacctccaacataccaaaacacagcaagaataagacagctttatcagatctaccaaccaccaacactttatcacatttgctttattatatattgtcattctcacttattcactttctcccacctccttctcttactactcctcttccttctcatcctcctcatccttccttctctctcttccctttccttacctttttcctccctttacccacatgcatttgagagtaagatacagacgctatttcccc

SEQ ID NO: 864778 - DNA, 565 bp, Homo sapiens
gaaatagcaaaacatctcataactagtgcaagcgaacttggaaatagcaaaatatttctttacaattggcatttgcaatggttggaagataaatattttacagctcgagggaattcagggccttggggtccatgcaaacatccaaaagatatttagaaactacctacttttgccggatactaggctctgcactggagaacagcccctgcctttaggcacagacasttcagtgaccaccactccctaaaacaactagaagtgacatttatgaacacgcatgcataatgtcttcttctttaacagtttacttggaaataacctccaacataccaaaacacagcaagaataagacagctttatcagatctaccaaccaccaacactttatcacatttgctttattatatattgtcattctcacttattcactttctcccacctccttctcttactactcctcttccttctcatcctcctcatccttccttctctctcttccctttccttacctttttcctccctttacccacatgcatttgagagtaagatacagacgctatttcccc

SEQ ID NO: 864779 - DNA, 539 bp, Homo sapiens
tgtcagtataccacccagaactccccaagatgtgagttttaacatagccatgactttgcctttcattttggccaaacttggtttccaatttctaaagcaggcttctgctcatatttataatgtgaaaattttcttaaatgttaacacttatgaaatcgttatgctacataaaaattcccctgagtgtgagatacacgaagaaatgcaagagatgaaaaataatttgctctatcacacattttcatatttaccattaggcattaaaagcttcaaatcaaaattaaatttcctatgtaaaattaaaaagacaaatagcatcagttccttaaattagcagaagcaggcatytgctaaagttctgaggtagacattcagtgcattttacaagaaatcaacaatatgtccatttcttccagtccttggatcgaaataagtccattcgttctcttcatctataacccaataaataagttttgatggccatctaatgcaaagataatgccctcttaaccataagctaaaaaaaaaaaaaaaaaaag

SEQ ID NO: 864780 - DNA, 536 bp, Homo sapiens
ggagaacacaaacattcagtctatagtatcccataataaaggacccagcatataagttctcaatacacatttgggtttattttttgaaactctaatcaattctattgatatatttgcctattttttcacaagcagcacatgctcagcttcagtatgtattgtaatatctaagagagtaagaactattccctattagattgttcttttacaaaattgtcttttctaaggttgtgaaatacctattttacatgaatttcagattcagattatcatgtttcatattaaaatccttgaaactttgaatagtattgctttgaatttatagattactttgagggaaactgacatctatatagyactgaggtttcactcacattaaaaacatgatgccttttccatttatttaaagatcatttttgtgccctttgatttaattttagtttcctttttattgtttttgaggctctttataggtgatttatatactttttaaaaactgctgggaatgtacatttttctattacactcgttaattt

SEQ ID NO: 864781 - DNA, 617 bp, Homo sapiens
tgtggaatcattcactatttgtaatgtagtatcagtagaatgaaatcttccaaattccaagtcactaacaataaattgccaagtaacaaacataagaacatagcctgtttctgttcccatatataacagactatcgcattttggttttgagttttgtttttgcttggttttgggttttgattttgttttgtttttcttatgtgtccaatgtatataaccactcctttcaaagggcattgttttcaggcagtttatatttgttttgcaataattttataacttaagatttttgtgcactttgttttcctacaaatgagatatgctgcatagtatgtattcatttatttctcaacgaataaaatacttcagtctttatttgcaactaccagtcactcagaatatttccaattagattaattgttttgtcrtctgaaatatgtataatatacatgccttccttttctatgtaacagcgaagaacattgcaaaatgcatatacaaaataagggcatccagaaaactttcattgtattagttttctggatccattccatggttcagggtaaattatacaatataaggctaggggaaaaggagaggatatgtcttcctgagga

SEQ ID NO: 864782 - DNA, 615 bp, Homo sapiens
gcaatagacttagacacccagacacaggaagctcaaagattcccaaacagatacaattcaaaaagatctccacagcacattagagccaaactgtcaaaatcaaagacaaaaaattctaaaaacagcaagagaaaaacatgtagtcacttataaggaaaccttcatcagatgaacagaaaatatctcattagaaaccctacaggcaaaaagataatgggataatacagtcaaagtcctaaaagaaaaaaaaaaaagccaaccaaggatgctatattgagcaaaggtatgcttcattaatgaaggagaaataaagcctttcccacacaagcaaatgcagagggaattccttattacttgaccagacctacagtgaatgcttaagggagtcttacgcctggaaacaragaaacaacatctaccatcatgaaaatgcaaaaggaaaaaactcactggtaaagcaaatacacaaatgaggaagagaaaagacccaaatgttaccactacagaaaaccaccaaaccacaattataaataataagaatgtaagaaaggacatacaacacaatctgaaattaattaataaaatgactggaataagtcctcacatatcaatagc

SEQ ID NO: 864783 - DNA, 564 bp, Homo sapiens
acctacagtgaatgcttaagggagtcttacgcctggaaacagagaaacaacatctaccatcatgaaaatgcaaaaggaaaaaactcactggtaaagcaaatacacaaatgaggaagagaaaagacccaaatgttaccactacagaaaaccaccaaaccacaattataaataataagaatgtaagaaaggacatacaacacaatctgaaattaattaataaaatgactggaataagtcctcacatatcaatagcaaccttgaatgtacatcaattaaacttcccactyaaaaaatagactagctaaatggattaaaaataaatccatgacccaactatatgtcgcctataagaaactcttttcacctgtaaagacacatgtagactgaaaagaaaaagacataaaaaatattccatgcaaatggaaatcaaaagcaagcaggagtagctatacttatatcagataaaacagactttaagtcaaaaatggtaaaaagagacaaagaaagtcatggtataatgaaaaaggaatcaattcagccagaggatataacatttctaaacat

SEQ ID NO: 864784 - DNA, 636 bp, Homo sapiens
aaatatcacatgtaccctataaatatatacaatatttgtaccaattaaaaaacagatacctctccaaatacacagtccctaggagaaaataaagaaccacatctccggagaaatcaatatgtggtacagaaaaagacttgtgttttccagaggctcatccctttgatgagggaagtcagaggagcttgataccatagatgttggcagatgactacatcaactccctgaggatctgaccccacctcgagagtctacagtattagaaggctgtagggagttgaacactggaaaygattcaagttctttatgtaaagttgaagaatcaatttgaagcatgaatggctggaaaataccaatgacctgtcacagatgataagtgatagtatttgtctgaatgagccaagtggtgggaaaaaaaaaagtttacagagacagcagatgttcactctgtctccactactgcccctctgacagcgttggtcaataggacacaaagtcatgtggaaatgagacctttgggcagagcctgaaagggagcttggttattacaggctttgggttgtacttccaggaagaccagaatctaaatgggtctctcctgtctctcccatgccgctgagacccaccagcaagggc

SEQ ID NO: 864785 - DNA, 661 bp, Homo sapiens
ggatggtgggaaaaattgtaaaataaaccttcttgaaaggccagaaggttttagcaaaagcctcaggatagagttatggctgaaggcagcctaatcctctttgagctatagcaagggtaattaacattggaatgtagaggagtctatctaaatagcttgtttaatcatgtggtcctaagactaacctttgccatcagcaggtgcatgactgctttctacttggggggttggcaatggtaattaccttctagtggtgtttacttgagacttttgtcatttaatgtgtgctgaataaatgctaagaaggccagtgagtcgggccaggctgcggttgccactgtttacagcactctccttggggtctgtaagcggcccagactctcagctggactgacaagcataatatctgtgtcagtgtatgttattcatctgttgttggatcaaggtctgtgggacggaccsctgcaacattggggattggattttaacatatgaatttggtgggaacacaaatattcagtgaataacaatgctattatgtttccattattttactgatgatcctttgtgttaaaaagttacaaaaattacgtagttctgaccaaagacaagatagatcttagcactccttaggtccatattgaaacatcccgccttccat

SEQ ID NO: 864786 - DNA, 581 bp, Homo sapiens
gcacctcctgcagactgggttagcagagacccacggtccagactgctgggtcccagagatggaaagaggcctatctagggtcttaatgaaatccaaaggctgctaaaacgagatattcctccatttctaatcactgcttatgggtgagatggtggagtgttccctctggctgtggatctccatcctcccctccagctttgtgtcaaggggtgaagggaaagggtgaataaaagaagtttgtgtgtttaagctgtgcctgtgttcattgtcattaaataccaccagcagtaaaagaacaagaagcatatgttctatagctgggtctgtgacgtgatgacctgagtcatcatccctggccttcccaaacacatgccctctaaaagtaacttctgtttgtgaatttcttaagkcacttaagaaataccctaaggtccctatatcatagctacctgcaaaataatgttccaacccagactgctgactctttgagaacagggaaaacacctcatttatcgtttataacacttcttgcatgtagtgcaatgcctgacacatagcatatgctcaacaatatttttaat

SEQ ID NO: 864787 - DNA, 612 bp, Homo sapiens
gatagataagaaggaagaaagcaggaagggagaaggatgagaaaatcatttagaagctattgcaattgtttaaacaaaagataaagaaggctggaaccagtgccactataaagtggaaatgcaaagcaggcacagatacctgcacagcaggaggtggtactgcctctgtatgggatctgccaaagacactccaacaacaaagcagggaaaacaggaaatagaaggagaatawggccaagaaaagacaatgggctcagtttcagatttgctgactttgaggtacaggggggcacatctagatgggagagggcaaacagagttggaagaaacaggattggaaagtggaagagggctcaggcctagaactatacctttgtatagtgatagagagatggctgaagtcgggctacagagattgtcccaacagctcagacacccaaatgttctgcgacaatcaggagagaaaataggagctgaagctagtggggatgctggtaattcattacacagtcacatgaaaaccggaaggaaactaaatatcaaccagaggaaatgttgtccattctccttcgaagggcatgtttggaaatgtatgaatgcatatttagtttt

SEQ ID NO: 864788 - DNA, 646 bp, Homo sapiens
catttaacttagatagggcactggtgtcctctcccacagatgaagatttttaaaatgcatatattatggttattagcaattcaaaagttattcttaccttaaaaaagtgctttaaagaaaagaaaggatggaaggaagacaggaaacaaggaagaaaacattttaaaagatccattcatggaagtagattcaacaaggaaatggggctgtcctgaaaacagggctaggagaagcatcagtgagtagaaatgccttgttagcttacagtcctgcatgcagaatggcgggatggagtagaatgggcttcctgccaatgacacttgttatstccttggaaagttggggccccctctttctcttgacagggaatgacagagacaccaagagtatcattgtccaattctcccatgaacaagccacattccagggaaaagaatggacagagtggttccataaattgaatcaggcagagccatgagcacaacatggcagaatggagccagtttcccagccaaagaaccactgggatcatctgtgcttacttctacaggcttcctgctttggtgcttctatccaaagagctgcaaacacgtacctacttgtgactgagcaaccatagtggactttcggtcacacagaggagaaa

SEQ ID NO: 864789 - DNA, 600 bp, Homo sapiens
taagtatcattcctgcagtaggggttaagataactccaactgataaagccacatagttggcacacagaaggaagataatgaatatttgttgaataaatgaaaagactaatttggttagaaacactcaagttcctttggccactcagacattcatgacagacaaactaaagacagcagttaggcaggtagctgttcaccamatccctattcttctcctcctccatttcctgtctacacagctagaccccattgcctagaatcactgccagttagtgctcaataacagaacgagagaagggatgcatttctaccacagttcaggcctacaatatctcttatgcctacttctccatgttttccccagtttgctggtttgatgtagacaagcactttggaagcaaggtagatggcagaatacggtctaaaatcattgcttatcatagaaccatctgctaatcaagaaacatgagtcctatactgtacatgagtgagttcaaaacttctgtttatgtgtgttgttatacatttgggggtagctatatgtaagcagcaaaccagtcaaaagagacaagggctccatctgtattggaagttcacaga

SEQ ID NO: 864790 - DNA, 574 bp, Homo sapiens
gcaaggaatttatccacttcatcaaagttgtcaaatttattgagataaagttgtttgtaacattttcttatgtatttcatatgtataggatatactgttggtactttgtgttctctcctttttattgaccagtctaggtagaaggttgtcaatcatgttgctcttttcaaataacagcttgagctttcttaattttttctttttattttttctattttattgatttytcctcttatcattactaatttcttctatctactttgaatttacattactgttttggtctagcttcctgaagtcattgtgtttggaacttttttctttcctactatgaacatttatagctgtaaatttcctctaggcactgttttaatagtattgcacacatttttaatatattgcattttcattcttgataaatttgaaatgtttcctactttcctctgattactttttgatccacaaatgatttagaagaatgttgtttaattttcaaatatacaggattttcctagatatcttattgatctctaatttaaatccattaaggtcaaagaacatactctttaagctt

SEQ ID NO: 864791 - DNA, 602 bp, Homo sapiens
tgtacttgaaaagaatatgtatattgcagttgttgcatggtgttctataaatattaattaaggcaaagtggctgatgttgttcaaatcctcttaggtccttagtgatatttttgtccagtttgtctatcaactgctgacgcaagaatcttaaaacctcctatgaytgtgaaaatatatatttctcctttttctcctatcaatttttacattttatgttttggaagtctacagttacctaatagttatttatgactgatgtatctttctgatgacactcttattatcagaaaatctcctttctctttcacaatatcctttttcttgcagttcattttagctaatattaataacaccactgcattctacttattcttactgtttggtacatcttacatacttttactttgaacctttttgtgtatttatatttaaagtgtatctcttgtacaattgcagttggagcttgcctttttatcaattctaataaccttttccttttaagtagaatgtttagtcctttaacatttaatgtaattattaatatagttgcatttgggtctagcatgttattatttgttttctaattatcacctttgctttt

SEQ ID NO: 864792 - DNA, 602 bp, Homo sapiens
tgtacttgaaaagaatatgtatattgcagttgttgcatggtgttctataaatattaattaaggcaaagtggctgatgttgttcaaatcctcttaggtccttagtgatatttttgtccagtttgtctatcaactgctgacgcaagaatcttaaaacctcctatgattgtgaaaatatatatttctcctttttctcctatcaatttttacattttatgttttggaagtctacagttacctaatagttatttatgactgatgtatctttctgatgacactcttattatcagaaaatctcctttctctttcacaatatcctttttcttgcagttcattttagctaatattaataacaccactgcattctacttattcttamtgtttggtacatcttacatacttttactttgaacctttttgtgtatttatatttaaagtgtatctcttgtacaattgcagttggagcttgcctttttatcaattctaataaccttttccttttaagtagaatgtttagtcctttaacatttaatgtaattattaatatagttgcatttgggtctagcatgttattatttgttttctaattatcacctttgctttt

SEQ ID NO: 864793 - DNA, 636 bp, Homo sapiens
ccatggagaggcttttgggagaggtgggtggtcttatgaaaaaaaccatgggcttggggcacgtcacagagctaagctattactagctgtgaaatcctaagtaaataatctgttctagcactcagggtttggttttctttcttccttttttaaaatgagaatagtaactgccttccatggttgtggtgaggattttaaaggaaatataaatgggaatatgcatatgcagtacccatgtgccattgcacagtacacaatgcccagaatgttgtaggtatttgatatacagccatcattgttacacagcacaggaagacaaaaggtcatcattgctgcctcgtgatagcgccctccctggtggatcttcttattacaatatagaaaagtcacataattccccacaggatgggttttattacatgaaasatctcaccacacaatgaagagattaacttaatgaatttatttgtgaatatttggcagagaatacaccactttgattcacaaaagaccagttatttaaaatctgcatttgtgaaaatatatatattatgtatatattatatatatttttatatatatattttatatacatatatttctattctgctacctgaggaagccactttgctgaaa

SEQ ID NO: 864794 - DNA, 737 bp, Homo sapiens
gaaatacataaaccaatgggtgtggttgtgttccaaaaaaaccattttttataaaaacaagcagcaggctgaatttggcccacagccatagtctgctgactccttcgctagatcagtgtttttcaaactacatattagaacccattattagtggtcagttttgtgaaatgtaacaaatattttgagtaagataaaatcaaatgaagtaaaatatcagcatatattccatcgaataaaaggacatatcatatgaaatatatgtatgtgtttgagtcaatattcaatttttttttgtaggctccagtcatggaagtttgaaggctgctgrtcaagagcaatgaaactgagtccagctttggatagtgtgtagtaatgaattaaccttgcccaaagagagatccggcctttgcccttggccactggggagtaacctctaagccctttgaaagttctgcgtgacaagaatgcctttgtttacctggggctttgggccatgcagaaagtctatcatgcagttccagtttgatttctagggccatgtagtatcagcttcatctgagagactggaggctgagaccagttgaccagggagccccagtaaagactctggataccaaggctcaggtgagcttccttggttggccatagttcatgtacattgtcacacagtgttttcaaaagtgtagtgctttccgtgactccactgaaagaggataactggaacctccatgttcaga

SEQ ID NO: 864795 - DNA, 346 bp, Homo sapiens
gagcgcatgcgttcgaagccattcgcgcgggcagtccctgcgtgtccccctgcgtgtccccccacgtgctccccagcgcgcgcagcaccccgcctctgcgcttccccgagcgtgcagcttccggtgagggcagccccacgcacagcccccmacaccctccccagcgcctgcagcttcggtgcgcgcagtccccaagcccacatgcgcagttctcaccttgcgcgcagccccacgtacagcccccaacacgctcccagccccactggcgcagaacccatcaccgcttgcccttcacgcgcttcattgggagtgcagctcccaccccgagcgcgcagctccacgcagc

SEQ ID NO: 864796 - DNA, 346 bp, Homo sapiens
gagcgcatgcgttcgaagccattcgcgcgggcagtccctgcgtgtccccctgcgtgtccccccacgtgctccccagcgcgcgcagcaccccgcctctgcgcttccccgagcgtgcagcttccggtgagggcagccccacgcacagcccccaacaccctccccagcgcctgcagcttcggtgcgcgcagtycccaagcccacatgcgcagttctcaccttgcgcgcagccccacgtacagcccccaacacgctcccagccccactggcgcagaacccatcaccgcttgcccttcacgcgcttcattgggagtgcagctcccaccccgagcgcgcagctccacgcagc

SEQ ID NO: 864797 - DNA, 346 bp, Homo sapiens
gagcgcatgcgttcgaagccattcgcgcgggcagtccctgcgtgtccccctgcgtgtccccccacgtgctccccagcgcgcgcagcaccccgcctctgcgcttccccgagcgtgcagcttccggtgagggcagccccacgcacagcccccaacaccctccccagcgcctgcagcttcggtgcgcgcagtcccyaagcccacatgcgcagttctcaccttgcgcgcagccccacgtacagcccccaacacgctcccagccccactggcgcagaacccatcaccgcttgcccttcacgcgcttcattgggagtgcagctcccaccccgagcgcgcagctccacgcagc

SEQ ID NO: 864798 - DNA, 626 bp, Homo sapiens
cacagctaccactctctgaagaatgaagccttgtttcatccacttattccgactaggacttgtttttgaaagtcagttttgggagggaaggggaaaatatttttttgtttgaaataaattataaacatcctctaaagcccaggcaatygatacagtctacgattacaaatatcaacaagatttttaaatcctccaggacatgagctatgtctctttgtaatgaacaactatacttaaaatgcgttctacttctgcagtactttatagttcattaatatgctttcacaataattcatcagcaaataatgaggataaatcaccatgcacatgcactgcgctagatgtcggatgacatgcacagctaatcagagctggaactggctctaaatgatgctaaagaaggtggcaccacctccaacaaacagttagagacattaagggtaaatcaaacccacatgaaaatttcaaactgaaactgtgaggtggagcaataaaggtaaggctgcctttaaatagcacatttataaaattgaaaagtaaacaggcttgccaatggataaaattttctacagacaacagataatatatctgataaaaaattcattttgaaagaactttttacagcc

SEQ ID NO: 864799 - DNA, 624 bp, Homo sapiens
aaagatgttgggattacaaaaatagtgttctcattgtcagaatatgcttaaagagtgtttagaagtgtcaggaggcatgcaacttagtttcaaaaggggagggaagaaactgggaaggaagaggggaagtacgtttgcatatagagagaggaagagggaggaaagagaaaatttgggggaaagcaaatttggcattgctgaatctgggtggaaggcatgtgaggttcattttactatttgtttcgttttttgtatatctgaaatttgttctaaataaaaaatcaagtagaaaaacaagaattaaattagaaaatgtcattaaagatgtggttccagttggatacagmgagtactagcagatattctgacctcctgttaaggatgatcatcatcgtgttacacttgctgatgtgtggtgtgagcagcacatttgtttaaaaaaaaaatgagcataaagagctgatgctctctaaaatcaatgtctcagagtctatcagggccaagagctgagagagggtgaagttctgcttctttgggaacagcaggcactcacagcttaggggttaagggcactccctcttgaatcttaaccacctgaattcaaatctgcaatgggaggagcaa

SEQ ID NO: 864800 - DNA, 624 bp, Homo sapiens
aaagatgttgggattacaaaaatagtgttctcattgtcagaatatgcttaaagagtgtttagaagtgtcaggaggcatgcaacttagtttcaaaaggggagggaagaaactgggaaggaagaggggaagtacgtttgcatatagagagaggaagagggaggaaagagaaaatttgggggaaagcaaatttggcattgctgaatctgggtggaaggcatgtgaggttcattttactatttgtttcgttttttgtatatctgaaatttgttctaaataaaaaatcaagtagaaaaacaagaattaaattagaaaatgtcattaaagatgtggttccagttggatacagcgagtactagcagatattctgacctcctgttaaggatgatcatyatcgtgttacacttgctgatgtgtggtgtgagcagcacatttgtttaaaaaaaaaatgagcataaagagctgatgctctctaaaatcaatgtctcagagtctatcagggccaagagctgagagagggtgaagttctgcttctttgggaacagcaggcactcacagcttaggggttaagggcactccctcttgaatcttaaccacctgaattcaaatctgcaatgggaggagcaa

SEQ ID NO: 864801 - DNA, 601 bp, Homo sapiens
ccaaacgcaacagatcttacttcattttaattttctcatcatgcttttctttttttttttttgaatactttagtattatgtagaggataatttctttacctgttttcttctctcctcttttttatttctactagtattaacttaatgtttgctgaaaaaattcttgtgttttccttataagattcaaacatggaatatctttaatatcccattatttaagagtagttactaattcctaaatttcccttttgttatacttgcacttcgactagctagtctgttctaatatttgaagtttagatctagaatataatattctccattatgcagttcagtgttttttttttatgcattcacagaacttgtacccatcaccacaatstattttagaaggtgttggtgaccctaaaaggaaatgcatactaatgcatttcccatacgcacccaattacaagaagactggtggcttttagaggcacacgtggccaatcctaacgcaactgaagttccatttgttaattagaaagagaaaacgggtattgaataggcaaatatagtcttgccacattctctgtcttgtgatccccttcctaggttagtg

SEQ ID NO: 864802 - DNA, 683 bp, Homo sapiens
gcatggggaatatgaccaagaaaaggcacaggtagaaataggaatgggagatgaaagcaggtcccttcatacctttaaaacacagacagcgagaggcctgaggtcatgcattttgcaggtgagagagagactgaacttaaggacaaaccttacctagcatctgcaagcaagggacgcctaagagacattcataacacaaatgtatatggtcaaagaggtaatagaaacaaaaagagaatgcttgggaaaagtacaaggtaccagacaggcgaggaaggaattgggtggacagtagagttcaaggcatggctaggtgcctaactaacatccattttctcttttattcttactgataggacctgattttattccaggtggcaatatactttgttaaaaaggatatatttccctgcttctcttaaatctataattagtaagtagaagtcatttggtggggctttctttctttctttctttctttctttctttctttctttctttctttctttctctctctctctctctctctctctctctytttttttttcacagagtctcactctgtagccaggctggagtgcagtggcatgatctcagctcactgcaccctttgcctcctgggttcaagcaattctcctgcctcagcctcctgagtagctgggactacaggcgcaggccaccat

SEQ ID NO: 864803 - DNA, 646 bp, Homo sapiens
cacacagtttttatattagcatagagaatttctataggaaggccagttgcagaattttgttggtctcccatatgatttaatttttaaatgtaaaggagcgtaagtatcagagtcatgagccacaaagcagccagtgctgtcttgaattttgtatattgcaccatattctaaacttgcaaagtctccaaaagctgcattgtattaaaggcatcacaaacatgaaaatcaaaatccaaggaatagatgacatgatatgccagtagaaaattaccatggmtgtacttcattgaaagggtagattttatattttatcttggcatttgcagaaaaatgagaagcaatttatcgataaaaacatttgaggctgtgctattcctgcctttgaacacgaaagaaaaacctttggtgctgacggggtggaggaacagaattagtgttcaggttttctgactattaatctattgtttggatgctttagtcttttgttttttttcaaaaaaaaggtgggggtaataaaaagttgttatgtcaagatttagcaagaattaagtgtgtttgtacaataatctttcaaaagaaattttgttatgcattttctactatagttccagatatgcaaatgcctgtgctgttaatatgcattcat

SEQ ID NO: 864804 - DNA, 605 bp, Homo sapiens
tttctttcaaagtctagaataactttttcactgagcagtttgcattttggccgccaatactggtacaagatccagtctaatatagtggcacatggctttcgattctgttattagccagtgtccttttctggaggaaatatatcattatatcattgttcttttgattcagagttcaagcattcccaggctgggctttctaccactggcaagatgtgggtttggcttgttggtggtgaagctaacttacattacaccggctcaattagttgcmccgctgctttctgttgaaaggtgttggacatcgaagagaacagaggggcagttcttcatcctgccctatttgaccctgctcgttcctcagctgctgaggcagcacatatatttggtggactgataaggaatgggaaacacatgatattgacaacatttttctgttctccaaagcaaaaatccttccagattagcacctcacttccaaatgatccatgttgggaggagtctgaaagagaattagtgaagaaagtgaaatcgaaataagtaaatatgttatgcatttgggattaaaggccagacaggacacctaaaaccagcatgtaactaactaa

SEQ ID NO: 864805 - DNA, 650 bp, Homo sapiens
ataatgactgactcccaggaatattagggaaacagcaatttacttaggtgggaatgctgaaaattgaaataaaatcaatcaaatatgattaatataatagggtgtttaggttaattggtgtgatgcatgtttattataaaaagttgttgctgaatscatgcctgttaacctttaaccctagagccttatttaacagttaacttacttaccagcaggatatcttcaggatttctctgctaggtctaagcatggagaggcaagtcctgacagtgacagaaatgagaaaaaaacaatttctcttgtttcctagaacatattttttcatggcaataaattcttctggggaaattctaatatagtgagaaaaataccgtgttcttacttagatgaactaatagaaaacaactataaatgttttcatagtattaagtttaaaattgcaaaactttgaagaaccactgaccaagaaattggaagaaacatgaactacagatgcatgcttttaatcttcattaacttgtagtaaatgtgcattatgtattctttatgtgcatatgtatacatgaaattgagatgtacattgtgttcttagatttttaaaatttaaatgcatatatttttaacattgagattttagtgagaccttgaaa

SEQ ID NO: 864806 - DNA, 612 bp, Homo sapiens
aactattgaatgaacataaaaatagaaaatagcaatgtttaagacacgcgctgttcttattttagaagatgactacacaaagccagcctaaagagagggataagatttcacattttattggcgtttagggaaactttataccctgtctctggaaaatcagaaagggaagtggttataaggaatccacataataatgtatgggaaagccaactagaatttacaagggaggggactctgctggtgaatcaaagagctgccaaatcacayattgcacaatttattaatcgtgggctgttccaccagccagcagtttcgccattttctcctcatttatgactctattcccactaacccactaaattatttttggtgcaaaatatgtgtcatgagtgaaaacacaacacaggacaaaattagaagaaagtaaacatttggcagctttcaaaagcttttttcaaaagcaggtggaatgggtccagattgtacattgtctacaagtggagcattagattttggccagggaatattatttgttgttaaatgctacataattctcagtttggtttttaagaaacaaggactcagcatggttttgaagtccaattactgtgg

SEQ ID NO: 864807 - DNA, 644 bp, Homo sapiens
ctaaaatgggtttttgttggtgaaactagttatataccttgctaacttgagtaatgaaatgggtttttttcttgatgagattagaggtcatcaagacatggattgcttaaattaactttacaactttattactcaagtaaagttgaggtccaaggtccaacagcatcagcatcacctgggagtttgtcagaaatgtaaaatcccaggctccattttggccttactgtatcagaatccccattttaacaaaatccccaggtgattcacatacactagttaaaaagcattctaactctagcaagacctgtgacttatagccttaatgcttgaggcttaaccttaaggggtctatccaatcatatctttgaatgctgttrgtcaaaaggtgacctaatgctaggactgggcatggtagtccatatctgtaatcttaggaactctagagctgaggtggaaggattgcttgaagccaggagttcaaggccacagtgtgctatgatctggcctgtgaatagccactccaatccagctgggcaacatgtgagaccccatttctaaatctgaaaaaaaaaattaaaaaaaggcataatgttgctctggaattttgcatttgctttgaataaaccttttattcaaagtgctga

SEQ ID NO: 864808 - DNA, 657 bp, Homo sapiens
tgttaggacatgtcactgaagtctcacctctatttgattattcttattctattcttaaatagtgagagtccagtatttaaccgtgtttatatcccagctcaaatatttactggtcatgtgacttgggtaagttactccccctccttttgcatcagattgctcatctgtaataagggtataatttttaagtgtgttttaaatatataacatattaattcatttaaagggatttaaagcaatgcttggcaaaaagaactactgaataaatactatgagtggttctttcactctgtaatgtaatttgttctacaaagattttaagacaaaaaactttacaagttctggactgtgtctccttacccttaaattctcacttaagttggtcaatttcccttaaacttctaagaatgtgcacattcctttaaacttctaaaaagacatgaataacaaggtagtcatctccaaagattatatctyactcaatactgcattgctgaggtattcataaagtgttttatctaaactcgtattttccaaaaagaattatatgtacctacaaggaaattccaagagaatgtataaagtcacagaataactgcaacaaatctatgtaaaactttaattatagaaaaatatttggaatatattttctaaaaa

SEQ ID NO: 864809 - DNA, 620 bp, Homo sapiens
atatcagttttatttttgtgatgaaattactactaaaaccatgtactttggaaagctcacagtggtttgaaccaagagaaaaacattgcttttgtcaccacactaaaagcaaaagtacctttaaaaaaaacttcaaaacaaaaagtcatatattaagtttatcttagaaactagtcatgagctgtctggcaatgtgaaattccgaactaagacagatgaactctttcctacttcaatacattaaaattttgtataaaaataatcatattaaaattwaaaaaatacatactagattttaaaagaaagggaaataccaggttctacaattatggagatagataaatcaaacttagagtggtaagaagtaggagcacacgagaatttcaacacacttggacattcacgggtctgatgggaaattctgtttttacgtgtatatggcagatgagaaacatgaccacaccattccaaggagagcatctttaatgaagcctgaaagcgtattttctccttgaaaagagaacacaattgttgactctggtctatggaaggatcataaaaaacaaaataaaggaaaacaaaaaacagaaaaccaaaaattttaagaagtcaagtatgag

SEQ ID NO: 864810 - DNA, 620 bp, Homo sapiens
atatcagttttatttttgtgatgaaattactactaaaaccatgtactttggaaagctcacagtggtttgaaccaagagaaaaacattgcttttgtcaccacactaaaagcaaaagtacctttaaaaaaaacttcaaaacaaaaagtcatatattaagtttatcttagaaactagtcatgagctgtctggcaatgtgaaattccgaactaagacagatgaactctttcctacttcaatacattaaaattttgtataaaaataatcatattaaaattaaaaaaatacatactagattttaaaagaaagggaaataccaggttctacaattatggagatagataaatcaaacttagagtggtaagaagtaggagcacacgagaatttcaacacacttggacattcacgggtctgatgggaaattctgtttttacgtgkatatggcagatgagaaacatgaccacaccattccaaggagagcatctttaatgaagcctgaaagcgtattttctccttgaaaagagaacacaattgttgactctggtctatggaaggatcataaaaaacaaaataaaggaaaacaaaaaacagaaaaccaaaaattttaagaagtcaagtatgag

SEQ ID NO: 864811 - DNA, 620 bp, Homo sapiens
atatcagttttatttttgtgatgaaattactactaaaaccatgtactttggaaagctcacagtggtttgaaccaagagaaaaacattgcttttgtcaccacactaaaagcaaaagtacctttaaaaaaaacttcaaaacaaaaagtcatatattaagtttatcttagaaactagtcatgagctgtctggcaatgtgaaattccgaactaagacagatgaactctttcctacttcaatacattaaaattttgtataaaaataatcatattaaaattaaaaaaatacatactagattttaaaagaaagggaaataccaggttctacaattatggagatagataaatcaaacttagagtggtaagaagtaggagcacacgagaatttcaacacacttggacattcacgggtctgatgggaaattctgtttttacgtgtatatggcagatgagaaacatgaccacaccattccaaggasagcatctttaatgaagcctgaaagcgtattttctccttgaaaagagaacacaattgttgactctggtctatggaaggatcataaaaaacaaaataaaggaaaacaaaaaacagaaaaccaaaaattttaagaagtcaagtatgag

SEQ ID NO: 864812 - DNA, 626 bp, Homo sapiens
tggtaataattcatgttttaagaaaattgatcagaacagagaattcagaaaggtacttattcaaacataagaacttattatatcacagagatattaatagcattataaatcaacaaagaaaagcatctatattcaacaaataaagatcagaaaattggctasccatagggaaaatagttagatgctttccacatatcttccacaaaataaactccagttgatttaaatacaaatcgaaatattaaaaatagagcattaaactttttttaaaaaagaagatatatttatgatagccatataagtattattatcaccattttccaaataaggcccagagaggtaaataaagctacataaggatttaggacttacatgtagccaggacttgattcgaactccatatgttttaataatcattttattttctctatttgactcaataaaatgaaactcttcaatatatcacaaacttatttttaacacaagcaagaaactgagagtagattgtcaagctctaacatgcaaatgattactgaaatttcataaagaaatctcacaaatcaataagaaaaatatttctgtaaaggatctttgatatatcagtaatcagagatatgcagattaaa

SEQ ID NO: 864813 - DNA, 626 bp, Homo sapiens
tggtaataattcatgttttaagaaaattgatcagaacagagaattcagaaaggtacttattcaaacataagaacttattatatcacagagatattaatagcattataaatcaacaaagaaaagcatctatattcaacaaataaagatcagaaaattggctacccatagggaaaatagttagatgctttccacatatcttccacaaaataaactccagttgatttaaatacaaatcraaatattaaaaatagagcattaaactttttttaaaaaagaagatatatttatgatagccatataagtattattatcaccattttccaaataaggcccagagaggtaaataaagctacataaggatttaggacttacatgtagccaggacttgattcgaactccatatgttttaataatcattttattttctctatttgactcaataaaatgaaactcttcaatatatcacaaacttatttttaacacaagcaagaaactgagagtagattgtcaagctctaacatgcaaatgattactgaaatttcataaagaaatctcacaaatcaataagaaaaatatttctgtaaaggatctttgatatatcagtaatcagagatatgcagattaaa

SEQ ID NO: 864814 - DNA, 649 bp, Homo sapiens
agacatcattactattatggtggcattattaacagagttcttcctgtattagaagatcatgcatttccccaccttagggacttaactcatcaatttggtgaaagttctaaatcgtgacctgactagcctagactgaagcagcagagttactaatctctcctcataataagtgcagaatctcgaaccactcatgtcacctctgcattgtcaataagcaaaataatagtgagcaatggcagatggagctaaaaagacatctaagatcttggtctccttgaaagagaaaaaaaagcccattcacagatagagtggtatgtgtgtgtttgaggttgaagtactgagaaaggaggagcaaggagaatgaatgacagatgtgaatattttgaaaaagtaaactggattattttttaaaaatacaataagaagtaactacaaactgtyatgatggaaagtaaaaaactatccattcatcaagagtcaaacacacttattttctttcaacctcaagaaaacacagtacttctttttgtctgctcaggcccttcttaatcatctttagctactctccttaatgcaactgtgtgcatctacatgggtaagactttcctattttaaataaaaaggaaacatctggattgatggaaatgac

SEQ ID NO: 864815 - DNA, 606 bp, Homo sapiens
ttgctcctgcctggatggcatccagcggtacgtcagaaccaacttagatactgactcgtgatggtgcacatctcttcccagctccacgttcagagacatcatgttggacctgggaatcgtttgaccctggtgggaaaatttacaacatgaaaatcagcaaatgctgcaaattaaaacgctttttatttttattttccagataaaaggtgattaaacatttaccagaccatcactgagtggtctctggaagtgtgatgtttggctctagtgacaccatctcgttaccaggaatacagacattagtggcacactgagagtgcagatggtggaggtgggagtgtgatggtgatgagaaatcctgagttctttatagcattcttcagctgcttaaccagccctggaagcacttcaccttcagatccyttcttatgttaactaatagatctacattgtttaaatatctactgctcaatatcttgttacttgacttgaagctgaaagtagcatgtacagtctgtgaaaacagacatagaatggactcaatttctccactaaagaaactctgaaattatgtttcattttattaaaagaggtaagaaaagagag

SEQ ID NO: 864816 - DNA, 631 bp, Homo sapiens
tataagaagtattagcattagagttcaactaggaaaataatcagaagcataaaaattagacatacaagatcaaaaatagaattagctaaactgtcatgattgcatacatagaaaatctaagagattaaaattctagagaaatcagtaaattggcaaggacaatctgaaatcaatatctttcatatagacacacaatagactagaagatataatggaraaaattccttttttacaacaatgattaactgaaacaatagaaatattttaaaatttgtctactgataagcttgcaagaaatgcacaagatctatagaaggcaaattttaaaatactactatattttataagagagactggaaaaaatgaaatttttataaaaggaaacccccccaaaatttaaagtaactgataaatttaatgctacttctatgaaatattagaaagatgtttctgtttcttaccagacaaactgatttttgcattcatatggaaaactaaaaacaaaggattaaaataaaataaattatgggagagcctagtactaccacattttaaaacacattcaaaagcaatagtagttaaaagtgtaagataatagtgcaggaagaaataaacagataatttgaaaaga

SEQ ID NO: 864817 - DNA, 639 bp, Homo sapiens
taattccaggagaacaccctaaacatctgtcattgactcttatgtaaatcctatactcatctgatgtgagagccagtagttccttcctagaagacagctggagatattgtttagcttacctttcttttggatggagagagaarttactccatattggaggactgcaaaatgggatgcccaaaacaagagaccaatagaaagaagagagagaatccatgagcaataggaccagggagagccaaattgagggtcccactggcagcgccatgacagcaattggaaggatctctttcactcggagaactgcctccaagctctgccagctgccagtgtttcatcagggcgaaaagaaagatgaagggagagaaaatacacaggtcatactctgacctctacaaacttacagaggtttctcctgaacccagacaccattttttgatgaggctgggaggcagcttttgagatgaagtggagaagggctcaaacctgatgaagtttgaattctgagttgactgaatatttacccaaaatataagatcagagaagatttttatcctgactggcaagttgaagcttgagctttttgtctgccccatcagctgaggaaatagagtaatatgaagcaacacaaacaataat

SEQ ID NO: 864818 - DNA, 602 bp, Homo sapiens
gaggagccaatggtgaaaatgtctccaggccatctcagcaaccttgatggtagtcttcccatcacaggtctggaggtataggaggaaaaaaatgcttttcccactgctttgtgctgcctctggacttggtgctttgttccaacttgtgctgtttcaactgtggtaaaaaggagcaaaagtacagcttgggccatggcttcagagggtgtaagtctcaagcctccatgtggtgtcagtcctgcaggtgaatagaatgcaagaattgaggtttcagaacctccacctagatttcagaagatgtatgaaaagccctggatatccaggcagaggtgtgatgcagtagcaaagccytcatggagaacctctgctagggtcgtgcataagggaaatgtggggtgggagcccccaaacagagtccccattggaacactgcctagtagagctgtgaaaagaggcaaccatcctccagacctcagaatggtacatccactagcagcttgcaccatgcacctggaaaagccatagacattccacaccagtgtatgaaagcagccaagacaggggctgtaccctgcaaagtcacaagggtggagctgctcaat

SEQ ID NO: 864819 - DNA, 604 bp, Homo sapiens
atacatattaaaattcaactcatttttgttactgttatttactcccatttaagtttcatacatgttacaattcaattgatatgtggcatttagatgccaactttctttgatctcagatattttattctcttctcttttcctgttttattttttccttaaaggcagtgtgaagtgatttagttatttcagacatatgtatttgatagaaaaggaaactgaggcaccaagggacttagagaaacttccaaggtcatatattgagttaatggagcaactgagagtagaatttaccatctctgagagcccaaggtgctrtcttgactgttgtgctaaaaagaaactatatatctttagaagagaaagataaataaatcccaatgtttcaaaaaaaaaaatcaacctcctttctatatctttcatggagacatttattcttggaccaaaatttccaaatgtaacttacgttttaaattttatatttatttttaattcaagcttatatgttcatttgttcttctcaccaaattggatattatattctttgcacaacgatgcttatgatcaatttctgactgaaactggtttttatgtaagtgctccacaa

SEQ ID NO: 864820 - DNA, 646 bp, Homo sapiens
ttgattaaaactcagtgctattcctgcccatggttcttggctccaccctctgggctattaattctatcctccaaatcagctttcctttttcaaaaaagattgcatgtgtttacagctgagtagtttcctcagcttgcttcctgccagtaaagttttgggagtctaatagcctcttttttcctcttgtactgtctctggaagtgtttttgctgatacaattatttttaaaactttgtgggttcactgtgaatctttttagggtccactagaatggaaaaaatccacatctacaaatctctgagataatctcatttctattttgtgcttctgttgaacctctaagaaacttaagtgcccttaagtttcttagaagttatatatatatatatgtaaaaaagttataaatatttggatttgaatcacactctcaacatttaatttagagagttttttttttgttttgttttgttttttttttgagacaaagtctygctctgtcacccaggctggagtgtagtggcgcaatctcggctcactgcaagctccgaaagggccttttatctaatggaacggtattcttgggtatggcctgagatcattctgaagtcaacaaatgactgtgcaactcccacccttggcttcatct

SEQ ID NO: 864821 - DNA, 566 bp, Homo sapiens
gttttaggacctggtttgttgtcctgcctaagatatggaaaatggcccttattgggacaaaagaggactgtaaaagtaaccagtcattttctggctgctttatttgagaatgaaccttgccttctgaatatttgagatcatgtccttgtcaactgtgtgaaacttgaaactctgcatttgggcttgccaaacgtaattctgtactggaaatggtcttccagctcatttttatttgcctctgctgactgttaattttctttttcaatttgaacaataacctacttccacagtctgagctgggatggttgcttcatatgtatgtttgaattgaaatcatacgaaaatattctcttaaaaaaaargagtttgatgcaaagttgagttccagaaatcctttggcatatcttgacagagttttagggtcatgtcaaaatctaatgccagcccatttttccttgatattaggttttgtcatgaaatgttcacacagtattagcatgctgggtttcttgcttaatgcatcatctctcatctatctatctatctatccttttctgttttgctgt

SEQ ID NO: 864822 - DNA, 650 bp, Homo sapiens
ctgtacccaatgtacacattatacacaatgctgtaccaatgctgtatcaatttgttgtaacagatctgaaattgcacagtgattgcaacttccataaaaacagaagttgttgattacaggaagaataattttaaatacaccaaaagctcttactagtattcaaaagaagacctgcaagtaaaatgatcaaacactgtatttaaatatttaggtaaaatcttacattttcatatgtcatgtgtcaccagattcccaaaagtcaggatgtgtttaaatcaaacattagggtggagagcaaggaagtggagtgaaggagaaagttttctggccaacactgtagaaaacacactgttatatctttgaaactctttttaaacctgtgatcctttacgttctctctctttcattcctccaccatggcrccacctttacaggttgccacagttttgatgatcatctctctcccaaccaagatggtggaaaaagcaaaaacgtggtgaatcttggagcaatccgacaaggcatgaaacgcttccaatttctgttaaactgctgtgagccagggacaattcctgatgcctccatcctagcagctgccttggatctagtaagttggtgaaagaattttcccaccctgccccccatcccaa

SEQ ID NO: 864823 - DNA, 586 bp, Homo sapiens
gtgagtggagcactcctcagctcctccctgagtagtaagtaattttggactgtatataatcggggagggagagtagcagttctttacatatcaaatacatcaaatggaaagggtggtggtatttagaagcccagagtcaatgtgagttataagatactcaccatataataattaattaactcagcaaatgtcttttgagggattcctatgtgacaggcatggttctcttagtgataacacaacaaaactcaactggagggctgcacctatttttccctttttccaatgaagattgtgtttgtatagtgattttttttccggatgtcttagtgtacagcattytaaggttgattgatgaatgattagtatttattgtatgcccaccgtgttgccaaaggaaaacactgaagctcagaaagaccgattaataggcaggactacaaagtcagcaaaggatggagccagactggaacccgggtctatcttccaagcccttcagttttgtattctaccatactgactctcttattaaaatattatgtgagaccatttactttaaagcatgcaataataataaattccatat

SEQ ID NO: 864824 - DNA, 644 bp, Homo sapiens
acatgcacaagcagtgatttctaattttttggtaatttattagcatgaataacactaataccaatgccagtttgctttaggaacaattccataagtataagaccatccataggatcatagaattctccctagtctgtgartggaggaaatctaatgttaaattattgagcctcataagtagacagttttagaaggagtgcatatataattctttttcaaaataggacactttcaagagtgaaagagttatcaataattatgtgaggaaaagagacataaaccaggactctcccaggaaaagaccttcagttaccataggtctaattcacacttacttccaggcttattgcatcaaatataattcatattggggcttaacatcacaagatatttaatgatcaatgcaaattaggtcctttcaaggagataggaatgcatgaaagaggaaatatcttatgattctcgtttgaatcataagaaaattagaaataatttagtaataacaaaactaaactatcaaattgtcctcttaatctagtggtaatgaattttttaaaaagagtctaactatgaaatgtagcataaaaaaatgcttgaatagtatttcattgttttgtatatgccacattttctttattcattca

SEQ ID NO: 864825 - DNA, 644 bp, Homo sapiens
acatgcacaagcagtgatttctaattttttggtaatttattagcatgaataacactaataccaatgccagtttgctttaggaacaattccataagtataagaccatccataggatcatagaattctccctagtctgtgagtggaggaaatctaatgttaaattattgagcctcataagtagacagttttagaaggagtgcatatataattctttttcaaaataggacactttcaagagtgaaagagttatcaataattatgtgaggaaaagagacataaaccaggactctcccaggaaaagascttcagttaccataggtctaattcacacttacttccaggcttattgcatcaaatataattcatattggggcttaacatcacaagatatttaatgatcaatgcaaattaggtcctttcaaggagataggaatgcatgaaagaggaaatatcttatgattctcgtttgaatcataagaaaattagaaataatttagtaataacaaaactaaactatcaaattgtcctcttaatctagtggtaatgaattttttaaaaagagtctaactatgaaatgtagcataaaaaaatgcttgaatagtatttcattgttttgtatatgccacattttctttattcattca

SEQ ID NO: 864826 - DNA, 677 bp, Homo sapiens
gactagattatatttgccataaggatcagaaaatccagaatgtagatggctgcaaaatagctgtttgagtaaaaacaactgatggaggaaatggtaacatattaccctattatctaagactgatataaagttatttctctaagaatatatttttctttttgcttcaaatttagagcagaaaagaaaattctaaagaagtaatcaatgtagaaaccaagtcaaggattttaaaaacatacatctataaaagcttaacacttattagatttccaagttgtaaaatctaactagaaagtcgacattcaaaacttaggatcctgttcaacttcttaagaatttgcattccaaatgagctataaatatagcatagtctatgcaataggttcaaattatcttgattgatggcccattcatgaactgattggcaattgtaacagtttatataatgctccaawcattacacacttatatgttgcattgtggcaaactatctagtaaagcatggattcaaattacttccgtaaatatttttctgttgcaaccaaaatagctaccgtttattgagcacatatagatactaaactcttaagatacattttttcactaatttaattagcaagactaatgactattataataattaataaactcaattcattctactgatgagaaaactg

SEQ ID NO: 864827 - DNA, 622 bp, Homo sapiens
ttctctaaacacgtagcataaaaaaatttaggtaacaactcaaggaatagtgctttttgccttttctatctaataatcaggttttaaaatagttacttggatttatatggaatgctcctatatgttttgacagatatcttgtttttctccattggctttatgaagatgagtataaaaagcacaagttggccaggtgtggtggctcatgcctgtaatcccagcactttgggaggccaaggcagcgggtggatcacctgaggtcaggagttcgagaccagcctggccaacatggtgaaaccccgtccctactaaaagtacaaaaaaaaaagaaaatagccaggcgwggtggtgggcaccagtaatcccagctacttgggaggctgaggcaggagaattgcttgaacccaggaggcagaggttgcagtgagccaagaccacgccattgcactccaacctgggcaacaagaatgaaactctgtctcaataaataaataaataaataaaattttaaaagcacaagttatatgcgcttgtaataattgaaagttactaaagaagtggtttcacagatgttgttttcattaactgctcattggataggatagtcagttagagcataatc

SEQ ID NO: 864828 - DNA, 647 bp, Homo sapiens
tttgccaaagttcataatatcttataggaatttccgaaattcctataacatataaatgatgccagttctagggaatagatgaactcattcaggctgagctcacaatggagagaattaaaaagtccaaaatgagacttagtgtagttttcatattgaagtgacaagtagagaaaaagggagatcagaaaaactaaggactagtcattggagggatgttcctaggagaaaatgttacagaagccacaagagtagatgttgcacagggttaaaatctgcatctgccaaatatgagaaaggagaagcattttacaatggatcgctcagtgactttgcagaatgatggtggatgctgaagatrgaacaaggtttcttgtgctgtacttcttcatttcacttttatataacagtggcaaattgcaatatcttctccagctcctgaaggaccatctgaaaataatttccccactcatagcttggggaactttgaatacaaatattttcctctagaaatgcctttcatccggggcacacgatgtttgtcaacatcatccatgataaaaaggcatctctctgtgctttggcatctcaccctgtcactccaacagctgtttctgaaagccagcttctacttttatttgttcacaacc

SEQ ID NO: 864829 - DNA, 644 bp, Homo sapiens
tctgcaagagactcatctcacatgcaatgacaccaaaggttcaaagaaaagggttggagaaaagtctatcaagcaaatagaaaacaaaaaaagagcaggggttgttattctgatttcagacaaaacaaactttaaaccagcagggatcaaaaaggacaaagaagggcattacataataataaagggttcaattcaacaagactcaacaacactaaatacatatgcacctaacactggagcacccagactcataaaacaagttcttagagacctacaaagagayttagataaccacacaataatagtgggaggctttaacacccgactaacagtattagatcaaggcagaaaactaacaaaaatattcaggacttaaatttgacactttaccaaatgaacctaaaagacatcaacagaacactccaccaacaacagagtatacattcttctcatctgcacgtagcacatactctaaaattgacctcacactcatccataaagcaattctcaacaaatttttttaaaaatcatacaaaccacactctcagaccacggctcagtaaaaatagaaatcaataccaagatgacatctcagaaccatacgattccatggaaattgaacaacctgctcctgaatgactttt

SEQ ID NO: 864830 - DNA, 614 bp, Homo sapiens
acttaaccctgtgcttcagggatgtgttgactaataagccctaataagaagtcaagtgaaaaaaaatgtaagtgcattggattgcaatattaagacaagatgaaaaaaaaacactgagctacagaagagttcatttgaaaggctaaaatctatgtcataatgtgaaaagaatattactaattacagagtagaacaggcactgttccaagtgctttatctatactgtagtaattttaaaacttgtccaaaatttctttgatactcctcctcattgagatttgaggtttatatcgctttctcttgactctggagccaccttaacgacttgcttataaccaataarctgcagcagaaatgttgctatgtgactttcgagactagataagaaaagactgtgcaacttcctcctggttctcttgggatgttcactctgagtgaagtgagctgtaaaaagtcaaactaccctgagactgacacttaggagaggccctgtatattcactccagtggacagtccaaactgagctcccagttgtcagccatcatcaactgtcaacatgtgagtgattcatctgctgtacatggcccattcaagtcttcaaaataacaacagcc

SEQ ID NO: 864831 - DNA, 603 bp, Homo sapiens
ccacaaagcctttacctacttaaaaatcttcagtggttctccctctgcctcatgataatgcccaacatattaagcatagaataaaaggtcaagcatgatgtagggtttaaattgctttcttgatttatagactgttggtccctactggccacctcatgatccagcatttgaaaccatgacagccattccctgaatatgcccttgctgattgctctattctcctttccycgctctattcctgtcatagtcctcaaaatgcaactttaatatcatatttaacatgaagctattccttagacctcaccatctagacttcattcctaccccctttgcatttttatagcatcttgtaactacctctcttataatacagggtctaagttttagccaggcgcggtggctcacacctgtaatcccagaactttgggaggcagaggcaggtgaatcacttgaggtcaggagttccaggccagcctggccaacatggcaaaactccatctctaatgaaaatacaaaaattagccaggcgtagtgcacatctgcagtcccagctactcgggaggctgaggcaggagaatctcttgaacctgggaggcacaggct

SEQ ID NO: 864832 - DNA, 603 bp, Homo sapiens
ccacaaagcctttacctacttaaaaatcttcagtggttctccctctgcctcatgataatgcccaacatattaagcatagaataaaaggtcaagcatgatgtagggtttaaattgctttcttgatttatagactgttggtccctactggccacctcatgatccagcatttgaaaccatgacagccattccctgaatatgcccttgctgattgctctattctcctttccccgctctattcctgtcatagtcctcaaamtgcaactttaatatcatatttaacatgaagctattccttagacctcaccatctagacttcattcctaccccctttgcatttttatagcatcttgtaactacctctcttataatacagggtctaagttttagccaggcgcggtggctcacacctgtaatcccagaactttgggaggcagaggcaggtgaatcacttgaggtcaggagttccaggccagcctggccaacatggcaaaactccatctctaatgaaaatacaaaaattagccaggcgtagtgcacatctgcagtcccagctactcgggaggctgaggcaggagaatctcttgaacctgggaggcacaggct

SEQ ID NO: 864833 - DNA, 614 bp, Homo sapiens
actcagtaggccattttcctcctgaaatatttctaatttgaggctaactgaaataattttcttaggctatatgataggctctttcattaatgaagagtaaattgttatttcttaagtgagtcagagccctttactgagctcagtcttgaattggcattctgtaggagaattagatgtggatttcctacagtagttgtcagttatcatgataagcctctgcatattaaatatttcctaagttcttttcactctgtgcataattatggggaaattacattttgattgactagaacagacacctgtctgtattttatcaggaattgcctkttcatatatccgtgtatgaattcttcagttttataatgttttcaaatgcagctaattccaacatcacaaaatagttactatagcaatttatttcatcttttttccccatttgacatttagagtcagaactaatcaataaagctgatgttcaccctctacctgccttaaaaaagtcaatatataaatagcaagcaaaacaatatattagtaaatcatttaatcaacctttagaattttgattggtgaccatatgttgcctgagttgatgaactcatttgggtagaatg

SEQ ID NO: 864834 - DNA, 663 bp, Homo sapiens
cattttcagagctttttagtagtctatacatgttattaaattttataaaaatgggcagtttgtgataatcctcctgacatataatagctttctaaaaaagttagaataattaacataattacttagtatttcaagcctactttttaagggtgacttgactaattataataactccttctcagggagagtcgagtagaaaataaatttttcttttaaggtcaacagactggaggtctgccttwtaaatacaggtgtgtaaagataagcaaaaaaagcccaagagaaaagtccattgcagaatagtctcactctgtaaataatatttggtcactattagccttagggctaacatgatctacgtgactatactgatgatttggaaaggtgatttttgaaatggcttcaggatgaaagtatttgaaattctggactttatatgtcacagtgggtgtgaagaggtaggttactaatggaaaattctttctgagagatataactgattatgattagtttctaaatcattaagctattttgagtcttctctgttttgcaataaccgctgtccatacaatggtgttatacctgatttccaaacctgattacatatcagaatcactttgggagcatttatgaattattgagccctacatgcagagatcttga

SEQ ID NO: 864835 - DNA, 584 bp, Homo sapiens
ggttccagcattcttcagtttgctgttagttccaaaattctagtagacaactctcatctgttcttgtctcttttcctattcttttttttaattaaagaattaatttttttaaaatttgtgataaagtacacataacatgaagtttactatctttatcgttttaagtgtacagtttagcggtgttatatatattcacactgttgtgcaaccagttccagaactttttcatcttgcaaaaccaaagctctttacccattaaacagcttcccattctcccctccccagtcagccactggcaaccaccattctactttctctttctataaattttgacttttctagatacttcatataagtggaatcatgcagtrtttgtctttttgtgactgacatttcacttagcataatgtcttctagcatgtgtcagaaattccttccttttaaggctgaataatcaaaaaaaattaaaattattttaaatttgtattgtggttctcctgttctttttgttgtttgagttttcctgtgttcctttagccattattttagtggagtagagataaacttctgtgtccaacgtggtc

SEQ ID NO: 864836 - DNA, 620 bp, Homo sapiens
gtggtagagacaactaaaatacccatgattacccatctttgtgtcctctctttcttctggggataactatttccccagagcatatatgcatttttcccatgcatgttcacataattttattatctacatgtcttccaatattagtattattatgtattatatrttatttacatatttggtatcttttttcccactttcagatgatccatgtttcccttctacttctattaccctgttcccaaatcccctcagtcccccagattctggaataaacagaattacagagaaataactgaactatgcttttctagtcccttttctttgtccctagagagcaaaggatgttatcctgagcacactagagtcccttaagggatacttttatcaaatttgggtccagatcataatgataactctgataacagtttcctccttattccttatctcctgttggctttatttcctccactgagagacagattttccccatgaaggaacttttctccaatatcaaataaccatctgccttcctcctacctcttatgttctgccatctcaaacataccacaaagtttcagaaagtgggcagtcacttcactgtctccaggtacagagatctg

SEQ ID NO: 864837 - DNA, 571 bp, Homo sapiens
caacattttaatggaacgaactgaggtttgcaattgctaatgttattctcccatcccagtttctacttgtttcttgtaaaaaaggaggtttctaaatcttgactgttgattgacaattaatgggctaaatttcccattagcaaacacttttcacatatacactaatattagtatctaaattatattaaaatctaatttggtagcaattgacttgaaatttgtgatacttcaacttgtgctaggttgtagttttgcttgtatcactcatagttactaaaaatgcaaaaggcaaatttgaaataactataaraataaacctttaatgaactttttaatatgcaatactcaattgtaaataaccattatctttactgaatcagatgtttcattaactgttagcagttatttcgagttatttatatatcacagaattttgaactaaagatcatctagctgaatttcctttatattaaagaagaggagaaaatcttaatactaagtatgtgtgagcctggagctgccatggagcatgtagagagagtctcctagttgataccaactcaggaaagca

SEQ ID NO: 864838 - DNA, 571 bp, Homo sapiens
caacattttaatggaacgaactgaggtttgcaattgctaatgttattctcccatcccagtttctacttgtttcttgtaaaaaaggaggtttctaaatcttgactgttgattgacaattaatgggctaaatttcccattagcaaacacttttcacatatacactaatattagtatctaaattatattaaaatctaatttggtagcaattgacttgaaatttgtgatacttcaacttgtgctaggttgtagttttgcttgtatcactcatagttactaaaaatgcaaaaggcaaatttgaaataactataaaaataaacctttaatgaactttttaatatgcaatactcaattgtaaataaccattatctttactgaatcagatgtttcattaactgttagcagttatttcgagttatttrtatatcacagaattttgaactaaagatcatctagctgaatttcctttatattaaagaagaggagaaaatcttaatactaagtatgtgtgagcctggagctgccatggagcatgtagagagagtctcctagttgataccaactcaggaaagca

SEQ ID NO: 864839 - DNA, 631 bp, Homo sapiens
cattgtctcatgttggtgctcaaaaaattttagattttggagcttttaaatggaaggatgctaaatctgtagtacatccccactgtgcagaggatgtcttaagactcaaccgcattccctctgttttctctagaagggcaagatggagtctgcacagctgggccatgacccaggaacactatgaggaggtgggctgctttgtatgattgctccaatattctgtgaagtgaaattcaaaatatactactacagctataacacagaatcttctaatcttccagatgctggttctcctgtagctgctcctctttaggtgaccctggtgagtgatggtggtttggggactatgatggaagctatgacccacttcatttaaaatcatccctgaagattggccagaaccattctggattcatttctgagtgagacacatggcggctgccctattttcttccctaggccttggatctgaggcctctttttgaatcctgycagccctgtcagcatttagaattcctaattatttttctaaaataaactctgagtcaagaggatctctcttccctctacatttccttctaacatcaattttctaaaattccaagagtagtctgtctcacctctgtcctca

SEQ ID NO: 864840 - DNA, 623 bp, Homo sapiens
atatcttggagaaaaagtcccagacaggggaaaaggcaaacaggcttccctctctccctcaccccatcacatctcaaaacttccatttgaaagcgcagctcaaggccacaagagcaggctgaccacaaggactacagcgaagtcgagagatgactcaattcttgattttcgtttcctggttccccctctccatccacagctctccttccttagctcaaggtgtcacatgtgggcggcctctgcctttcctccacggaactccagaacattccccagacattagctcattgatccttttccctggcagcaaacataatccctccctaccagatggagggccaggccattgggcagcagtgactgtccctggggagcagcgggaggagcagcccagcgcttgctcggtctgggagctggctgccaactgcacattcaggtgaatctcagcatccccatctggagaagatgcagcaaaattcacctaaacyttcatttagcggaagagaggtccaaagaaatgtctgtaagggcaacaatgaaaacgtaaaaaaagacaagggaaaaaaatctccaacctccctaagcttccctttttaaatcaatatttccttagtctctggtgg

SEQ ID NO: 864841 - DNA, 600 bp, Homo sapiens
tcctcaaaaagtgtttaagagagcataaagaggccaggcagggtggcccatgcctgtaatcacagcactttgggaggctgaggtgggcagatcacttgagcccaggagttcaagaccagcctgggcagcatgatgaaaccctgtctctacaaaaaatacaaaaaatagccaggcgtggtggcgcatgcctgtagtgccaactacttggtggaggtgggacactgaggcaggaggatcacttgagcctgggaggttgaggctgcagtcagccgtgattataccactgtactccagcctgggtgacagaggagactctgtatcaaaamcaaaaacaaaaaaaaaaaaaaaaaaaagagagagcataaagaatattttatttgttcagtcaaaacatatttgttcattggctggtgtgtaccaggtgctctgttaggttcaggggagacagcagggaataagaaacacatttgctgatggagtttatagtctaatgaaggagacaggtgttgaataagcaaatgagtgttaatcaatgtgctgacctcacatagttagtggaataaaatgaggttgactatactaaaaaatttgaactgggta

SEQ ID NO: 864842 - DNA, 600 bp, Homo sapiens
tcctcaaaaagtgtttaagagagcataaagaggccaggcagggtggcccatgcctgtaatcacagcactttgggaggctgaggtgggcagatcacttgagcccaggagttcaagaccagcctgggcagcatgatgaaaccctgtctctacaaaaaatacaaaaaatagccaggcgtggtggcgcatgcctgtagtgccaactacttggtggaggtgggacactgaggcaggaggatcacttgagcctgggaggttgaggctgcagtcagccgtgattataccactgtactccagcctgggtgacagaggagactctgtatcaaaaacaaaamcaaaaaaaaaaaaaaaaaaaagagagagcataaagaatattttatttgttcagtcaaaacatatttgttcattggctggtgtgtaccaggtgctctgttaggttcaggggagacagcagggaataagaaacacatttgctgatggagtttatagtctaatgaaggagacaggtgttgaataagcaaatgagtgttaatcaatgtgctgacctcacatagttagtggaataaaatgaggttgactatactaaaaaatttgaactgggta

SEQ ID NO: 864843 - DNA, 616 bp, Homo sapiens
ttttagagctatgaaaatagaagatcctggatttttcagtcatatgagccagtaaaattccctcttgctgaaattggcatgaattgcatttctgtcacttgaaacttaaggagatctagctaacacaaaaacaaaggtaccagtatcttgagtcctaaaaagaagaaacagaaatccatgacaatataaagaaattgattctacattcacaagtctttccacttccaccctgatacctttgtgttctccagtccaatttataaaatgaaggacctcaaaaaaacctcaaaaggtttaytcctcaaaaaacaggtaatgcaattacagaattcaatgattgctacatgccaagcacctagttggtttccttacataattatctcatttaattgtcaaaaaaatcctcacaaaatcctaccttgtttttacatgtgaggacagtgaggcttggagtggatcagtgctgtgtagaaactgtcaatttagttagcctgaggtcaggagcagtgctctcccaagagacgtcagaggagggtctcaacaggacaactgtcccactaatgaataagaaagctttctctttttactctccaatgcttactcattagagttctga

SEQ ID NO: 864844 - DNA, 633 bp, Homo sapiens
tcataacctccttgatttccttccactttattgttaaggatgttgcaggttttaataaaaaataggcattattttttgaaagtcatgtgagaatactagggctcaggaacattataaagctaggagtcatttcaattaccatcatgcagtaaacattctcttgattttaatgatagctgtattagatttagaattcaggcttcatttacataatcctcaaaagacggccccagaaatccattaaaggtcaccttactttcccatacataaaccaaattctaatctgttcattggtctcctcaaaagcatattccagggttttgtaaagcttactgcttattatactttcatctcaaatagaaaatctttccattttggctttccatcctactaaactccattccagtatgtattactcactcctcttcatgttacagtaaaagattaaatagtygtttactttttgatgtatgtaaaattgaaatctaggcttcagaagtattctttggaagtatcagtacacctagagctgaagcagcgtgggatgcagcaattttcactgtctgctcctggcttcatattaaaatcaggtatcacacagtggtcagggaatataatttatttgtgtaataa

SEQ ID NO: 864845 - DNA, 615 bp, Homo sapiens
aacttagctgaggtgtggtctaaagaataagtttacagaaaaaaaggccttgaaatcaactaaatttgtttcacaaaatgagtaaaaatatgtgtaaataaaaagtctaagcatgtacttctgtcttcttaaaatgtgtctttgtggcagctcattctatcttctttattataaatatccaattatagaaaaaggcagcaatgatctcttaactgccagatgagtggcttttctagtttgcattcttttaaccactcaggggcacatgtaaagttaaactctttttgatattctgtctttccttggcttacgagatagcgttttcctgaatctgttcactctcrgtctacatttctgatgtgtgtttgtcaccagtcacttaagtgttactagatcccggggccctatccttgagaatctcctttccttttctatttgtactcttctactctgatggcttaaaattactaggtgcacatgattctgatttgttttcagcccagggctttcctttgaatttctgactcacacttcctactagggcatagacatcaggtgtcccgcatatagtacatagggatatgaggcaatctagtgtagttagtgtcaagagca

SEQ ID NO: 864846 - DNA, 633 bp, Homo sapiens
gggaagagaatgggaaaaaggctattcctccattgctatttatttagtcattaagattttagtttttaagctctgtagattttcatcttcctagttcatgatcacccactatctcccccaaaatagcacatgtatgggttccagatgccacatttatagtctatagccctatctcagccagtcattacatgtctgagtaaaggtcaaaagcctgataaaaaccagaccaagcagattctctctcaaagggatttggatatgattcaatctcttagattgacagaggactcagatatgatttaatctcttactgtttaacggagaacatgtaaatgcagacacatgggttagtcatatatggtcccatatactctgacacaatgaaatytggtttagaaagaaacagagacaaaaatgggtcacgtcagatatcagattaattttaaatattcactgtttgcttaagctagttgagtggtatgttacttatcaccaaaaaaaaaaaaccacctagatttttaaaggagacaggaaatctgtaaaagcagactcccacagtttctagatcaaattcacgaaaatatttagtattatcaaatgaaatacatgaatattttaaatacagtgctttag

SEQ ID NO: 864847 - DNA, 521 bp, Homo sapiens
atgccctaaaacacaggacagtttctaaagaaaagaaacattttccttgttcaaactagaatttaactctcggctgttctgtggttaagatctacaacgtagaaacatttcaacagtaactaacacatgtggcgctttgtgtgtagcagccactgttctaagtattttgcataaactcatttaatactcaacccctacaatgccaacagacagctaacagaattgttcccatttctcgtataaagaaactgaggctcagagttaaatgatttgcccaataccaaataggtagtaaaaggataaaccaaaatttggatgacatactttggctagagtccatacctctaaccamtggaaattgtgtgtctttttattattattattattattattattattattattattattattattattacaagcatcagtattttttatgaatactcatttcacaatggcattgatttaaaaaaaatcctacacctacatttgcaatggttcaatctttctaataacct

SEQ ID NO: 864848 - DNA, 626 bp, Homo sapiens
ttgtgcctttctacatgtcacttccttctcctggaatgccttgctcctcatctccttgctgtaaaaatccttattaggcccatctcaaattctatttcctctgttaagccctccccggtaaatctagccaactatagtattgtctccacctactcattaaattcatcatcacttactcactttgatatttgatattatttatatgtggatacctttccattgttctctattgtttccatttagagaatgaactgaatagtattatctgatcaaatcacacttatccccaaactrcttagttggtgttagagtgccaataaataaagttcaaaatccttaacatagcatttgaaaccctctacaagaggctctagccaaccttaccagtttcatttttgtcttagtcatcttagtcaccacagatggggggcataaacaacagaaatttattttctcacggttctggaggctagaagtccaaaattaaggtgccagcatagtcagtttcttttgagggctctcttcctggcttgtagatagttgccttttcacagtgttccatggcaggagtaaagagagaacaagctccctgttataagtacctcttcttatgagagcactaatct

SEQ ID NO: 864849 - DNA, 626 bp, Homo sapiens
ttgtgcctttctacatgtcacttccttctcctggaatgccttgctcctcatctccttgctgtaaaaatccttattaggcccatctcaaattctatttcctctgttaagccctccccggtaaatctagccaactatagtattgtctccacctactcattaaattcatcatcacttactcactttgatatttgatattatttatatgtggatacctttccattgttctctattgtttccatttagagaatgaactgaatagtattatctgatcaaatcacacttatccccaaactacttagttggtgttagagtgccaataaataaagttcaaaatccttaacatagcatttgaaaccctctacaagaggctctagccaaccttaccagtttcatttttgtcttagtcatcttagtcaccacagatgggkggcataaacaacagaaatttattttctcacggttctggaggctagaagtccaaaattaaggtgccagcatagtcagtttcttttgagggctctcttcctggcttgtagatagttgccttttcacagtgttccatggcaggagtaaagagagaacaagctccctgttataagtacctcttcttatgagagcactaatct

SEQ ID NO: 864850 - DNA, 656 bp, Homo sapiens
ggcaacctacagaatgggagaagatttttgtaatctacccatctgacaaagggctaatatccagaatctacaaagaacttaaacaaatttacaagaaaaaatcaaagaaccccatcaaaaagtgggcgaaggatatgaacagacgcttctcaaaagaagacatttatgcagccaaaagacacatgaaaaaatgctcatcatcactggtcatcagagaaatgcaaatcaaaaccgcagtgagtgtgtcaccattaaaaattcactcctttgggttaatgagctactcacttaaacagagtcattcctagccaaagttgtaaaatacttaattttcctttagcacttrtatttagacttcccatttgatacccttcttttcttaaattggtattttgttagagagaaagagagagagatcagagaatgcttcggagaacatagaactaaaaaaaactcacaccagttagaatggtgatcattaaaaagtcaggaaacaacaggtgctggaggtgatgtggagaaataggaacacttttacactgttggtgggactgtaaactagttcaaccattgtggcagacagtgtggcgattcctcaaggatgtagaactagaaataccatttgacccagccatcccattactgggtatataccc

SEQ ID NO: 864851 - DNA, 621 bp, Homo sapiens
ttgtaacataggtagagagacaagaagatcttcaataaaatgatttaaaagtaatttggctaaatatgtaagacactttgtagcctatatgctaagaattcaaaataagtatttttttaaggggtagagaaaccagagatggcttcctggaggaggcggatcaagaactggatcatgtagagttaaaactggaaaaaatttgtggaggctggaaaagagtgtgtgcaggtaagcaaaggcgtagagrtgggaacaagagacatggtgtaggtgaagaatttgtgttgtagagaaacgaaggatgagatttggtaaaggggccggggtcagagtacagaagggcctgagtgccagactcgtaaatgctgtgcacaccttaggggctacggggctgctgtaggatctgaataagggagcatgtccagccacccccagcactcttttccccattaccaagcattccttctttaaagagcttattgctctctaaaataaacgtctggttatctgtttgcttctttgtagatcatctctgcagctagaatgtgagcaccatggggtcagggaacatgtgtctctgattcgcgataggacttttcccagtatctagaacaatcctga

SEQ ID NO: 864852 - DNA, 621 bp, Homo sapiens
ttgtaacataggtagagagacaagaagatcttcaataaaatgatttaaaagtaatttggctaaatatgtaagacactttgtagcctatatgctaagaattcaaaataagtatttttttaaggggtagagaaaccagagatggcttcctggaggaggcggatcaagaactggatcatgtagagttaaaactggaaaaaatttgtggaggctggaaaagagtgtgtgcaggtaagcaaaggcgtagaggtgggaacaagagacatggtgtaggtgaagaatttgtgttgtagagaaacgaaggatgagatttggtaaaggggccggggtcagagtrcagaagggcctgagtgccagactcgtaaatgctgtgcacaccttaggggctacggggctgctgtaggatctgaataagggagcatgtccagccacccccagcactcttttccccattaccaagcattccttctttaaagagcttattgctctctaaaataaacgtctggttatctgtttgcttctttgtagatcatctctgcagctagaatgtgagcaccatggggtcagggaacatgtgtctctgattcgcgataggacttttcccagtatctagaacaatcctga

SEQ ID NO: 864853 - DNA, 621 bp, Homo sapiens
ttgtaacataggtagagagacaagaagatcttcaataaaatgatttaaaagtaatttggctaaatatgtaagacactttgtagcctatatgctaagaattcaaaataagtatttttttaaggggtagagaaaccagagatggcttcctggaggaggcggatcaagaactggatcatgtagagttaaaactggaaaaaatttgtggaggctggaaaagagtgtgtgcaggtaagcaaaggcgtagaggtgggaacaagagacatggtgtaggtgaagaatttgtgttgtagagaaacgaaggatgagatttggtaaaggggccggggtcagagtacagaagggcctgagtgccagactcgtaaatgctgtgcacaccttaggggctayggggctgctgtaggatctgaataagggagcatgtccagccacccccagcactcttttccccattaccaagcattccttctttaaagagcttattgctctctaaaataaacgtctggttatctgtttgcttctttgtagatcatctctgcagctagaatgtgagcaccatggggtcagggaacatgtgtctctgattcgcgataggacttttcccagtatctagaacaatcctga

SEQ ID NO: 864854 - DNA, 609 bp, Homo sapiens
cacctggccatttggggcttctaactaaagcaaaaggtcaggatggatcaggcatcgagagaactgtggtctctgctgaggatacttacatttcccatacctaggcgtgagagaaacctgtcatccatccatccatccatccatctatccatccttccatccattcatccatccctccatccttccatctgtctgtccatccttccatccatccctccatccctccatccatccctccctctgtctatctattcacttatttattcattcagtgaatatttaaggagcacctacctgtggtagggcatattctatatgctggggatttagcagtaaacaaaatagacgttcttagctctgatacattccaatataaatagaagaccataaacaagtaaacttaaattaaaagamgggatagggctatgaagaaaaataaaccaagagtgtttatttcaaacacagtaatcagaaaaatgctctcccatgaagtgagggcaaaccccaatacatttaatgggaaaaccaaagtgatacttgggggaagagccttacaggtggtgccaagagcaagtgccgaggccctaaggcaggaggtacttggaatgt

SEQ ID NO: 864855 - DNA, 651 bp, Homo sapiens
cagaatcctataaaacactgcactgtttcaataagaagtgtgtctaatatccatattgaggatggaaagaaggtattatcttttgttgcagagacaagggaggtgaatccaactcatcatttatgctgttgattcgctttcctacaatattctcagcttttacccagtgaaaatgcttatttcctagcctagaggccaacaggttagggagtaaaacaaggatttgactgaatgtgggaggttagtgtttctgaatgggagagaactgaagttctttggaagaaatggtcaatcccctccatcagttgtggtaagmggagactacaacaaactcagcagccatcctgtattagtcaggattctccagaggaacagaactcataggatatatgtatatatgaaagggagtttatcagggagaattggctcacatgatcacaaagtgaagtcccatgatagggataggctgtctgcaagcaggggaagaaagaagccattggctcagtccaactccaaaagcctcaaaagaaggaaagctaacagtgagagcccccagcaatccactggtgtaagtcccagagtgcaaaggccaaagaaattgtagtctgatgtccaagggcaggaggcatcaagcacgggagaaagatgaaa

SEQ ID NO: 864856 - DNA, 604 bp, Homo sapiens
ggcatcaagcacgggagaaagatgaaagccagaagacttagcaagccagcttatcctcttcttccacatgctttgttctagccatgctggcagccgactggatggtgcccactcatattgagggtaggtcttcctctcccagtccacctactcaaatatcagtctcctctggcaacactctcacagacacacccagaaacaatactttaccagctatctaggcatccttccatccaatccagttaacacctaatattaatcatcacatatcttcaaccctctttwcctgcccatcatttactacatcagctaaaaattcaatatactgtcttttccagtaaattttgtagctagggtatccatgatgaagcccaacgagatataaaaagaactctgctggaggattttattaaggatttttcttctccttgataaacatgcagaaaaagaaacatgcaaaaaataaaacttgcttgctgtcttcgggcatgatcatgtgagaatatggtcatgcatcaataggatgcttgttgctttgaaaacacaccttgtgactatgggagaagagccaaaagaacaccagtgacacgaacaaagcacacgg

SEQ ID NO: 864857 - DNA, 604 bp, Homo sapiens
ggcatcaagcacgggagaaagatgaaagccagaagacttagcaagccagcttatcctcttcttccacatgctttgttctagccatgctggcagccgactggatggtgcccactcatattgagggtaggtcttcctctcccagtccacctactcaaatatcagtctcctctggcaacactctcacagacacacccagaaacaatactttaccagctatctaggcatccttccatccaatccagttaacacctaatattaatcatcacatatcttcaaccctcttttcctgcccatcatttactacatcagctaaaaattcaatatactgtcttttccagtawattttgtagctagggtatccatgatgaagcccaacgagatataaaaagaactctgctggaggattttattaaggatttttcttctccttgataaacatgcagaaaaagaaacatgcaaaaaataaaacttgcttgctgtcttcgggcatgatcatgtgagaatatggtcatgcatcaataggatgcttgttgctttgaaaacacaccttgtgactatgggagaagagccaaaagaacaccagtgacacgaacaaagcacacgg

SEQ ID NO: 864858 - DNA, 517 bp, Homo sapiens
ttccaatgggaatacaatcatcagagtaaaagagggcatattttattttaaactgacaactaagaagagttatgattgaacatgtacaaagatacaagaacaaaagtgaaaataaacactttctaacagataataaagacacaacaagaaaacrtagccatgaaaagacaaatggtgtagccacatattttaaaacaaggtaaaataaacaaagataaaagatttttaaaaaggtataaatctgaattagataacaatgatatagttaggcaataggtaaacaacataaagatgatataatgacagaacttagaaaagcattacatggtgcataacgatgttctggtcaacagcagtccacatgtatgacaatagttgcgtaagattatcatacagatgaaaaattcctttcacctagtgatgtccttgccatggtaactatgtagggcaaagtattacttaagtgtctgtggtgatgctagtgtaaaaaaacatactttgctgccagttgtataaa

SEQ ID NO: 864859 - DNA, 496 bp, Homo sapiens
gttcttgaaggaataataaatcagaacatatatataagattttcagtcaagaaaacttttccatttatagaaaataacatattagaatcaatataccaaaaggtatactaatcttcagagaataaaaataatttgggttaccattgattatagttgcatgggggaaagagcaattgacatgacatatctatacagaaatattttctagtagaagaaaatagaataatgcttttaagatacccaagggaagaaaatatgagccaaggactttatacycagccaaattttacttcatgtaccaaagcaatgcacaaactattagaaactggcaagaactcaagacattactttcataaccactttttgagtaacttaagataatggtgtcccaagcaaataagaaataactggaaaagcttcaccataaattctggtggatttcactaaacatactccattgtagaaagcaagtttaatacagagataagggaacggg

SEQ ID NO: 864860 - DNA, 590 bp, Homo sapiens
ctatgtatcaaggagataacatattcacttagatagaaagactaaaatttatccaaataagtttttcatatgataatttaactgtataattccaatggtatatattctaaggacaaaaaacattaaggtatcttgagctttccttattaggtttattatttgcagtggtactaacacagaaattccaacactattttgtatttattgtagaattgagaaaataagttwttatatattgatattgttaatatattaggatttttttgctgtagaagaaaaaatacaattatggaataggagaaaaagaagaaacatattgtggtgctagaattggaattgggagtatctgtctacaaaaaggatctaacaaaatggcaccctagtagcaataataattcctagcttaccaatatcacttttgacatatcattttacactaaaaggaacaagagctccttggagaaaaggctgattccagatcgagagcaggaaggttatagtgtgaccctcaactatcccgttgtgccaggaaataagaagaacctggagaactaacagagacatatcctgaggaaaccggcattaagagt

SEQ ID NO: 864861 - DNA, 590 bp, Homo sapiens
ctatgtatcaaggagataacatattcacttagatagaaagactaaaatttatccaaataagtttttcatatgataatttaactgtataattccaatggtatatattctaaggacaaaaaacattaaggtatcttgagctttccttattaggtttattatttgcagtggtactaacacagaaattccaacactattttgtatttattgtagaattgagaaaataagttattatatattgatattgttaatatattaggatttttttgctgtagaagaaaaaatacaattatggaataggagaaaaagaagaaacatattgtggtgctagaattggaattgggagtatctgtctacaaaaaggatctaacaaaatggcaccctagtagcaataataattcctagcttaccaatatcacttttgacatatmattttacactaaaaggaacaagagctccttggagaaaaggctgattccagatcgagagcaggaaggttatagtgtgaccctcaactatcccgttgtgccaggaaataagaagaacctggagaactaacagagacatatcctgaggaaaccggcattaagagt

SEQ ID NO: 864862 - DNA, 663 bp, Homo sapiens
ataaagaaagaaatcttaaaggcaactaaagaaaaaggtcagaaatgtacaaagggaatgttatcaggctaacagcagagttatcagcagaaatcttacaagtcaggagagattgaggtctattttcagcattcttaaagaaaatacattccaactgagaattacatatcccactaaactaagcctcataagcaaaggaaaaataaaatattttccagagaagcaagcaataagggaatttattaccattagaccagccctccttagggaagttytaaacatgtatatgaaagaatgatacttgctaccataaaacacacttaagtacatagtccgtagaccctataaagcaaccgcacaatagaaactacaaagcaaccagctaacaacttcacaataggatcaaaatgtcacatatcaatattaaccttgaatgtaaatggtctaaaggccccatttacaggcagagtttcaaattggataaaaaaaaaaaaaaaaaaaaaaaaaaagacctatctgtcttctgtctctaagagccccaccttacaggtaaggacacacatgcaggacaaaatgattggagaaagatctatcacataaacggagaacagaaaagagcaggggtcactattattatgttagataaaagagactttaaaccaa

SEQ ID NO: 864863 - DNA, 587 bp, Homo sapiens
aagaatattgctttagcattccataagactcccataaggaggagtaatggtctctagggggtttctctctggtgccatttggcctttcctaatcatttataggacaggaatgaggaagagatttaatctataaatggagaagcagaagttgcagcaacctatcatgtgactcaggccacatatccacattcctcttgatactggtgggctggaggaggtccccaagtgctgatgggacctcaactcagcaggtgtccaagctcttgacaccatccagaaaaagcattcaaggatgagtcagaaaatagtacgaagagttattgcaaagggaaaagtatacactcaggaaaggggcgcataggcagacttactcaagagtcttgtgatggagtctggggtttccacctttgtgggtttctttaatcaaggagyggaatatttatgaagattcctagaaaaagatggagatttctggaaactgtggtgccactcgtttttataacaaatacgagagttcccagaactgtcacggtgctcgtgggtgtgtgattgagtatgttaatgagcatataatgagatcctaggag

SEQ ID NO: 864864 - DNA, 626 bp, Homo sapiens
ggcatctgagtaagccacctgtaggtcaaagaagtaatcttcctagatccagtaacatatgggcatatgctttcctgggtcccaaggacagacatgctcagcccactgctgccaccaatggggccagaagactgacctacctggcatctcagtccccagaaaaacttcaccacagctttcactaataacagcattttaagccatcaaagaaatcacagacaccaccagtgctgttcatagctgaagaaatcatacagagactacactgctgcacaaaaccagaataagagcaaaagtgtcctacccaactgtattagtttgttttcatgctrctgataaagccatacctgaaactgggaacaaaaagaggtttaattgggcttacagttccacatggctgaggaggctgcagaatcatggcaggaggcaaaaggcacttcttacatggtggcgataagagaaaaatgaggaagcaaaagcagaaacccctgaaaaacccatcagatctcatgagacttattcactatcatgagaatagcacagaaaaaaccagcccccatgattcaattacctcctcctgggtccttcccacaacaagtgggaattctgggggatacaattcaagt

SEQ ID NO: 864865 - DNA, 626 bp, Homo sapiens
atgacatatgagacaccacaaagtgaccaaattttttaatcactcaggtcctggaaggtaaagagagaatgaaaggattagaaaatctatttaatgaaatgatagatgaaagcattccaaatccagaagagatttagacttccagatacaggaggcgctgagattcccaaatggatacaatgcaaaaagatcttctccatggcacattttagtcaaactgtctgaagtcaaacacaaaaacagaattctaaatatagcaaaagataagcattaagtcacctayagaggaacccccatcaaactaacagtgcatttctcagcagaaaccttacaggtcaggagagaatgagatgatatactcaaagtgctgaaaggaaaaaaataactaccagccaaggataccacatctagcaaaattatccttcataaatggagaagaaataaatttctttgcagagaagcagaagctaagagaatgcatcatcactagaccagccccacaagaaaagttcaaggaagtcccatatctggatgcaaacagttgacacttatcatatcatgaaaatacacaggccagtcatgtgactcatgcctgtagttccagcactttgggaggccaaggtggg

SEQ ID NO: 864866 - DNA, 618 bp, Homo sapiens
aaaaaatggattcatggaccaggcccagggccccactgctgcatgcagcctaaagacttggtaccctgcttcccagctactctagccatggctaaaaggggccaaggtacggcttgagatcttgcttcagagggtgcaaaccccaagacttggcagtttccactgttgagcctgcaggtgtgcagaagtcaagaattgaggcttataaatctctatctagatttcagaggatgtatggaaatgcatrgatgtccaggcaaaagtttgctgcagggtgagggccctcatgcagaacctctgctagggtagtgcagaagggaattgtggggttgaagcccccacacagagtccctactgaggcactgcctagttgagttatgagaagagggccaccatcctccagactccagaatagtagattcaccaacagctggcactgtgtgcctggaaaagctgcaaacactcaatgccagcccatgaaagcaaccaagaggcgggctataacctgaaaagccacaggggcagagctgcccaagaccatgagaacccacctcttgcgtcagtgtgagctgaatgtaagacatggagtcaaaggagatcattttagagctttaagat

SEQ ID NO: 864867 - DNA, 634 bp, Homo sapiens
cttgataacccagctcttccacttattgagctgcagaatcataggtcagttacctaacatctcaaaggctcctttccttgtttggggttaatgataggttcctatttcatagtgccactgatgtaaagattaagcaagacagcaagactgaagagcttggcccagagccatctacattctccctttgataagctaggctgtactaatcctgtggttttccagaagagccaggctctctctggtctcttttaagggcttatagtccccttcacttggccagaaacacaacctgccatgtccattgccttctcttggctccctcctgcatgtcttccaggcatgtattcagatgtgactttccttaagaagtctttcttattgttaattgtgttaagtgtgataacagttatgttgaaaacaagtttttaaatttaaagatgtgcaggaaagtatgtatggrtgaaatgaaataacgtccgatttgctttgaaataatacttcaggagaaaatgggaagaagaaagtacatgaaatgaggttggcaagatgctggtaactattaaagctgggatatgggtacacaggggtttaatatagaattctctttactttagggtatatttatatacagatc

SEQ ID NO: 864868 - DNA, 538 bp, Homo sapiens
ctgcacctagcttggtttctaccccatgccagtttattcaaatgcaaatccatctctattctcctgctggcttagacaactggagccttgccagccaatctgctcccttagcctgcttttgcatgagcctagaacttcaaaagtctgattccagcttcatcctcaagatccacaattgcctttctgcttgggtctgacccttactggtttttcatgcctctccccaacgtatgacctrtacgcccagggaatgcccccaaaagtcaggttaattccatctcattcaacaagggttgatctacattctacagttagagaaggggatagtggtggaaggctctgatgcactcagattgactaggatgtgagtcaaggatttcagggcttacaaccctgggcatcttctctaggataatggtgctttgaggaagttctggagaaggctactgctccacggccggtgctggctgctctgtaggcccctgtataataattttactgatgcttattgaaatacacacatacacatacacacaca

SEQ ID NO: 864869 - DNA, 641 bp, Homo sapiens
atttagaacagttccccatgtgggaatgataatctgccttttgaaaacttctttttgatatgtttttttttttaaatctgaataagaggagaatgaaagtgaacaaaatggaattaagttcgaagctagatcttttgtgataaaacatagggttttcagcacaggaaaatattgatcatgacatgtctcttacagggaagaaagatttattagctgtgcagtcaggagggagctgaaatcctgaagagacagtttctcaattcacctgaagggagtgtgttgcagcagaaaggaatgattttggtgaaaatttacctagtgagtgagaggatcacattctagtatttaattagccttcatcatcaccgtattttccagtttcaaataatttcaagtgacagatgatcttaagcaaaaccgtaccaacttgtgttcgaatctcacacctaccactgaggagctttgtgatctcaggcatggctggcaatgtctttgaggctaastgtcttcattaaataaggatattaatttatgtcccatagatccattgagaagacaaaatgtaaaatatctatgaagaagcttcttataaagcaatacacaaatatgtacattgttacgtggtcctctcattttcagac

SEQ ID NO: 864870 - DNA, 614 bp, Homo sapiens
gatttcaatttgtgtttccctgatgattagtgacattgaccatttaaaaatatatgtgtttacccattaatcatatgtacgttttctttggagaaatgtccattcaacttcttaacccatttttaaattgaattatttgttatttctttaactactgagttgtaggagtcatagattcttgaacttaatgaaatttgttatttgatctttttatgtttggcaattcccattaagcaaatcacttggctraggttgtaccttggaatagaaccaagtagtttcagttctaagtagcctttgaaaacaatatgcttttacctgaaagtggtctgtaaagattgtatgggcccttgataacatgggttggctacttacagaaaagcagatgctttgggtgagatatgcacctgcccagccttgtgttatgtggccttaatattttcagtgttaaaatcagttctaggccagcagacatttcttctatccaaggattttatgcacagagaagctgcatggaggagtagaattctggaggtaacatgatgatttacctgtggaaaagcgatgccatatttcacaaaggcaccattcatgagtaagagctgtaatttaca

SEQ ID NO: 864871 - DNA, 639 bp, Homo sapiens
tctgttgagtatctacatctaatttctctttgtgttgtattattttattgttgctttactgtctgaagttacaactataatatttggtttaaagaactctgccttactctagaattgttcataaaagaaaggtgatattttcacaccttttgagatacaattttattttcctctatttctgtttatttcacattgttcatattcctgttacggatgccaataggagagatgactagaaagtatatatgactttattccactgatttcaaagtcggtggtttacagaaaacataaagcataatgctttcaatgtttattggaaatattatttctaaatggcaagaaaaagacatcacatagaaagcagtaagaagatcaaatgacaggattgatatcgatatctagctgtagaaagactctagrttttaagaaatctcagtgttagtgctaaatttatctgtttattgtaggctcttagagtaggacacgttcaattaactaaaactaaattctagcctttgccctgcctcccttgttttaataataatacatgtttaaatgaaaatttataaattcacttttacctttcacactacagtgattcaacatgactaaagagaaaaaaatggtttaataagc

SEQ ID NO: 864872 - DNA, 533 bp, Homo sapiens
ttgcaatttttgtttcccagtttatagcttgtctttccagcctattaagagtgtcttttgcagattaaaagttttaaattttaatacaatttatcagttttttctttcatgaattatatttttggttttgcatttataaacttatcatcaaacttaggtcatacagatttttcttctgtgttttcttcaaaaaattttatagttttacattttacattcaggtctttggtccattttgagttaatttaagtaaaagtcatagggtctttctttttctgggttcattatttgcataaggatatcyagtagttctaataacatttgttgaaaaatatactttttcttcattgaattgcctttgttcatttgtccaagttttactaattatatttgtgtggttctttatttgggctctttttttaaaaaaaatatttttagttctggtgtacatgtgcaggatgcgcaggtttgttatataggtaaaagtgtgccatggtggtttgctgcgcctagcaacccatcacctatgtatt

SEQ ID NO: 864873 - DNA, 655 bp, Homo sapiens
aatgatatcctttcacatttgtgggtcctgcccatactccagaagaagagattacacgagagtatgcaccagtctggacatcttgaccaccttctcagaattttactcatcacacttccccttcccttccatcccatctcttcttcttcttggttgaggcttgtatgcacataaatatctaygtgtacctgcacctgtatcatatcataataacagcaaagcccatggaaaatagtaatagaattgtcaagcccatcaaaaaaagatttgtgatttttttctgacaacttaccgctcatgagaaagttgagataattccagctttgaaagatgcaagttcattcagacaagttgtttaaaaaaaaaacaacacagaacctttataaaggcgaatcataaaattgtactttgctttgggtctgacagcctattctgacataaactgagaagagtgtatgaagttctagattttaggcagagtatatgatgtcagcaaattttagttccttgctcccagctgacatgtgctttccatgtcttgtagaagagagatctcaggacttttctaaatcctgatgttcttgtggggacttaggttcttatggggggttcaagtggtctgcaaaatgaagaagttgtaaaaggtgctgtttga

SEQ ID NO: 864874 - DNA, 572 bp, Homo sapiens
ttgggatggcttttttgcagcaaagctaactgaaacagactggaaagttgggagctggcagccagttgattgggttaagttttattcctggagaagaaaataagtataatttatcctagtcaatttagagacatctaataatagttttctttctcactccaaaaagttaattttttggacttcttttatattagcagcaagaatgttaatcagaaagacatagattgcaaaccaatgtcagcacagaaaaactgacttaccatggcaactgagataaagccttggttttaaagttcatcctgaaatcaaaacaaccttgcagcaaattcttataatcttgaattgatttgtacactgttttcttgcttttaatctttttctccttctataaatacattcttttttaatttawtgcttatatacgctgattacctgattttttgaatagaatctgagtaaccacagcaaaaattctatattttatattcagaagtattttgatgattttattggtgaagaaatatatatgtgcgtaatattttattataatattttatgtttctttatggcct

SEQ ID NO: 864875 - DNA, 679 bp, Homo sapiens
catgtgtatatgttaatatgcatatgccctaaactccattttttggctcgggtttaagcatttattccttgtcaataatttatttatttttttttaaattttactctctctcatatcactgactcttagaaaatgctgttttggtctaacaattcagcaatgacaggtaaagataggttcaagccctagaaaggctcataaatatggccccagtaaagaaaagtaatratgaacaagatgtatggtggcaggcacaaacacaggaaactgatctgattttcttttttacaagccctaattctggtcctaccactgtaataatagatcttgctcgtcataggaaatgacagacacatcaggcatcagaagcatcatagaataagtggtttctggtatacttttcatcaattgatactaaaaattttaccagtctgtttcactttgtctgttaatatgtggatagcagggatgtctcatgagggcgtctggcaattgcagaagtctgaaccatgaagcggaacatttctatctggtccaaatgaagagacatcattcaaatacaaaaatagccaagtgccagcacacagattaatattccgccatgaaaagatgtgcactctgtctgccagcgcctactcacacatttgctgacaaacatgttctccccaggtggagtccc

SEQ ID NO: 864876 - DNA, 618 bp, Homo sapiens
gagaccccgctgggttctacatggtgtttagtactatccagattctaggaatatttgtggaaggtcacaaaatggtttactggaaagataatgttgaattgtatgtagtctctggtatttcctggctctttggccttttccaagtccttgctctttttgattccttattccctcatctataaaatccttttcctcacagtattttggcaaggaactgatgcatttatggccataaaaagaacttgcatggaggtactgtgtgctgaacaccaagagccatgttttaatagttcaagaaatgctccctgaacttagtaaaattacattgcaatgaaggcagtgcattttggtcggtgtgtgtatttggtgcatrtatgtcagaaaccggtgtgtttaagagaggtgttgtgatcaaagaagcacatttggcaactgaaggtaactgcaagataacatccatcctttcttgctcttctcaaacataatgaagggatactcagaaacagttctttacaaaccctattttctccacctatccgcttccccctcccattgttggttcctgtctatctttctctttcaagtgcctcagaaaacactattccttcagcactagcc

SEQ ID NO: 864877 - DNA, 618 bp, Homo sapiens
gagaccccgctgggttctacatggtgtttagtactatccagattctaggaatatttgtggaaggtcacaaaatggtttactggaaagataatgttgaattgtatgtagtctctggtatttcctggctctttggccttttccaagtccttgctctttttgattccttattccctcatctataaaatccttttcctcacagtattttggcaaggaactgatgcatttatggccataaaaagaacttgcatggaggtactgtgtgctgaacaccaagagccatgttttaatagttcaagaaatgctccctgaacttagtaaaattacattgcaatgaaggcagtgcattttggtcggtgtgtgtatttggtgcatatatgtcagaaaccggtgtgtttaagagaggtgttgtgatcaaagaagcacatttgrcaactgaaggtaactgcaagataacatccatcctttcttgctcttctcaaacataatgaagggatactcagaaacagttctttacaaaccctattttctccacctatccgcttccccctcccattgttggttcctgtctatctttctctttcaagtgcctcagaaaacactattccttcagcactagcc

SEQ ID NO: 864878 - DNA, 611 bp, Homo sapiens
tgtgccacacactggttatctttttccaatatcctttcttcctatcttgttttatgctgaaatttaggagggcacaggataaagactgcatttcccagcctcccttgtaactaggcaggcttcgtccgtcagttctcaagggtggataactgaagttactggctcctgcactcagaaggagaagcaagtcccccccgcctcctttctctcccttttcccagcagctggaatgtggctatggtgctagggagccaccattgacctgtcgatgatggtaacactgtactggtgtggtgcactcgggatgaaggaggctgggttcctgaaactgtgcaatttccaaatcagccctggtctgcrtatactcagctggtacacaggaaagaaattagctttctcttccttaagccactgttacttttgtctttgtgatgactaaagatcttgaaacttagacacacacaaaggtaatgccaaccctttgtgattaagggttttatttggatctataactcatgtggccagacgttgctgctgatatatcatgggagcttttggccatgtgtggcttgattcctaaggcactgtaaaaagacagaatttggaattag

SEQ ID NO: 864879 - DNA, 598 bp, Homo sapiens
tgatgtaaaagatgggttcccatggtctcaggcagttccacccctgtggctttgcagggtacagcctccctcttcactgctttcacgggctggcattgagtgtctgtggcttttccaggtgcacagtgcaagctgttggtgtatccaggtgttttcatacatcctctgaaatctaggcagaggttcccaaacctcaattctccacttctgtgtacccacaccacatggaatctgacaaatcttgggacttgcaccctctgaagccatggcctgagctgtaccttgcccccttttagtcatggctagagtgggtgggatgcaagacactaagttcttaggctgcaaacagcacgaagaccctgggcctagcccacgaaaccattttttcctcctaggcctcygggcctgtgatgggaggggctgccatgaagacctctgacatgtcctggagacattttccctaatgtctttgggattaacatttggcttcttgttacttatgcaaaattttgtagcaggcttgaatttctcttgaaatgggattttcttctctatcacgttgtcaggctgcaaattttccaaacttttatgctctgct

SEQ ID NO: 864880 - DNA, 694 bp, Homo sapiens
acatccacaccaaaaacccttctgtacgtcaccatcatcaaagaccaaaagtagataaaaccacaaagatggggaaaaagcagagcagaaaaactggaaactctaaaaagcagaacgcctctcctcctccaaaggaacgtagctcctcaccagcaacagaacaaagctggacggaaaatgactttgaggagctgagagaagaaggcttcagacaatcaaagtactccgagctacaggaggaaattcaaaccaatggcaaagaagttttaaactttgaaaaaaaattagacgaatggataactaaaataactaacgcagagaagtccttaaaggagctgatggagccaaaagtcaaggctcgagaactacgtgaagaatgcagaagcctcaggagctgatgtgatcaactggaagaaagggtatcagygatggaagacaaaatgaatgaaatgaagtcagaagggaagtttagagaaaaaaagaataaaaagaaatgaacaaagcctccaagaaatatgggactatgtggaaagaccaaatctacgtctgattggtgtacctgaaaacgatggggagaatggaaacaagctggaaaacactctgcaggatattatccaggagaacttccccaatctagcaaggcaggccaacattcagattcaggaaatacagagaacgccacaaagatactcct

SEQ ID NO: 864881 - DNA, 694 bp, Homo sapiens
acatccacaccaaaaacccttctgtacgtcaccatcatcaaagaccaaaagtagataaaaccacaaagatggggaaaaagcagagcagaaaaactggaaactctaaaaagcagaacgcctctcctcctccaaaggaacgtagctcctcaccagcaacagaacaaagctggacggaaaatgactttgaggagctgagagaagaaggcttcagacaatcaaagtactccgagctacaggaggaaattcaaaccaatggcaaagaagttttaaactttgaaaaaaaattagacgaatggataactaaaataactaacgcagagaagtccttaaaggagctgatggagccaaaagtcaaggctcgagaactacgtgaagaatgcagaagcctcaggagctgatgtgatcaactggaagaaagggtatcagtratggaagacaaaatgaatgaaatgaagtcagaagggaagtttagagaaaaaaagaataaaaagaaatgaacaaagcctccaagaaatatgggactatgtggaaagaccaaatctacgtctgattggtgtacctgaaaacgatggggagaatggaaacaagctggaaaacactctgcaggatattatccaggagaacttccccaatctagcaaggcaggccaacattcagattcaggaaatacagagaacgccacaaagatactcct

SEQ ID NO: 864882 - DNA, 653 bp, Homo sapiens
aaaggggaaacactctctccagaaggagtgcacccctgcrcataccttaattttatcccggtgaaacccattttcagcttctgacctctgaaccataaattttaaacccccatgacatgagtttacctgtgtaacaaaccttcacttgtacccctgaaccagaaataaatgttttaaaataaataaataaataaatctgtattgctttaaaccactacgtttgtggtaatttgttatgacagcaataggaagctaatacagtacccatagaacactttgttgtatgttaaaagaatgtgattggcccattagtagtaacagggaaacatttttcaagacacattgtcattgtttttaagacaatttgcaaaaataaattatgtaagtttttttaaacctccacaaaactaaactaaatacccatggatttatacaggtctataaatgcatgggaaaagatctggtaccatttctatgaaaccaaaacagtggtgacctctggggtagaggaaggctctaaagattgcagatactagaggacttcaaaaagtttacggaaagtggaactaaaagataaaaataaaatatgtaagttttatttcacatcaaagtcaagacaattttgtaagctatgatttcagccatttagttca

SEQ ID NO: 864883 - DNA, 616 bp, Homo sapiens
caagtttcaaactgtgctctgcagggccctaggagtccccagaacctcttaggggctcggataggagaaagaaatggggcaattaacaggtcggggctccaggatccccctccatcagaatgcttttactttcatctgattgaaaaagatgaaaaaaagccattggattaggagatattaaaatatctatgtgatctaagatttacacaataaatgtgtattaattttgttaagaggaaagaataaaacaagctaaaaacaacagtcctagagcattcaagcaggtaagggccttttgcaagtgaggcatagwggctcacagagttgagggtctgcttgtgtctcacagccgatccaccaagagccaaacagtgaggctcagggagttactccacggagcagcatatcatattaactcttaccacgttgcagagtgtaaagttccaagaacatgcatttggtccttactcttactctctgagggcctgccgatggagaggttgctgagaagcagatgggagagtgctcaaaaccagctctgggtgggacaggaaattcccctgaactctctgaatgagagggaccagctcagagaaaggagaaggaggtgtggaca

SEQ ID NO: 864884 - DNA, 657 bp, Homo sapiens
tcggttgcagatacaatagaagaaaaatttgtcccatattatgatatattcatgccctcactaaagcacatcattgagcttgctgttcagaaggaactcaagcttctgagaggaaaaattattgcgtgcattagccatattggtcttgctgttgggaagaaaaaatttatgtaagatgcatcaaatgtgatgcagctcttgttgaagacacaatcagacttaaataatacggaagataatgacccccagacctcttacatggtttcagcatgggctagaaagtgtaaaattcttggaaaagattttcaacagtagctttccctggttatcgagcctcttattaagactgcttcagctaaacctsatgctgctctcttagacacacaggatgtggagaatatgaatgatgatgatggctggcaacatgtaaatcttggagaccaacagcgttttggaattaaaacttcaggacttgaagcaaaagtaactgcttgccagatgttggtttactatgctaaggagttaagggaagggtttgtgaactatacagaacaagttgtgaagctgatggttcctttactgaaattttatttccaagacaatgttcgagtggcagcagcagagtccatgccttttctcctggaatgtgcaagaatt

SEQ ID NO: 864885 - DNA, 657 bp, Homo sapiens
tcggttgcagatacaatagaagaaaaatttgtcccatattatgatatattcatgccctcactaaagcacatcattgagcttgctgttcagaaggaactcaagcttctgagaggaaaaattattgcgtgcattagccatattggtcttgctgttgggaagaaaaaatttatgtaagatgcatcaaatgtgatgcagctcttgttgaagacacaatcagacttaaataatacggaagataatgacccccagacctcttacatggtttcagcatgggctagaaagtgtaaaattcttggaaaagattttcaacagtagctttccctggttatcgagcctcttattaagactgcttcagctaaacctcatgytgctctcttagacacacaggatgtggagaatatgaatgatgatgatggctggcaacatgtaaatcttggagaccaacagcgttttggaattaaaacttcaggacttgaagcaaaagtaactgcttgccagatgttggtttactatgctaaggagttaagggaagggtttgtgaactatacagaacaagttgtgaagctgatggttcctttactgaaattttatttccaagacaatgttcgagtggcagcagcagagtccatgccttttctcctggaatgtgcaagaatt

SEQ ID NO: 864886 - DNA, 666 bp, Homo sapiens
gagggagcagaaggaagagcagaagatgagatgagagaagagtagtggggccagaatcctcttgggtcttctatgcacagtcaagattgagggttttactttgagtgggatgggagctcactgaagcacagtttttaacttctctaagcaggaagagaggggtgaacagtgcttgtgatagggtgtgaggatagtcagtccattctaggascaagcagaaatgggttataaattatttgttcctgttttccatgtaacaatttccttcctttgatgtggagacaaaacagaaagaatgtttgctttggtagatcatcttcagagtccctctgtgcttaaggaggtgtatgcacattggaatgtcctgacatgagtgtccagggtgctgttgttgccttttttgttgcaaactcttgtccttgaggtgtttgccttctgatttgaacctaatcagggtattgaatactgtggctgctaagagatcatattttgcataagctgcttttgagagaatggtgaatgattgactcctcagagaaaatgcctagcagacctctgcagatggagaattccttatttcccgtatgtgtcattcccagttctttgtctagagagtcaagtattgaactaaacgatatttcagggtcttctctctcctccaagtca

SEQ ID NO: 864887 - DNA, 561 bp, Homo sapiens
tctgtatctcaacacaatctaccagggccctttcaaaataaacatggggacactgtaaaactagagtttacttttgatttgtcctttgcacttcatgaaaaattttcagtattctactttaggaagcaagtaactgctacacaagtaaacatttccaggcaaaaatagtcgaacaggcataatcactaaacgtaattccaattttgactgaaattgaaccccagatagtttgttttgctcacaggtttatgttcagatatttttattcatcagtagtgattttyaggctcaagacacaaacagtaatgtccaattattactactttatttcaattttttttttttggtgttaaaatgaagagtacaggatgacttaaattgttggttaacttataggttaagtgattttgcctaaatggcaatggaggactggattcctgtacagaatgcaagcacctcaataacaattatttttgcctgattcttcactgttgtatcccaaggacatagagaaatgcctaccacatggtaggcactcagtggctattggataaatgatgg

SEQ ID NO: 864888 - DNA, 534 bp, Homo sapiens
aaaatataataattaactgataagtatgttaaatagagcaatgtctatatgatattgaatttgtcatcctagtaaagtattaagatgtccttaaataacagatactaattagtatcttgtatacatattcatgtttctctgtaaataatgaaccaaaactgttcaatcatttatattaattcccaggttcaaccaygctgataattctttatataaattttcctgttagattgctggtatgatttctgtcttctaaatggatcctgaccaatacgaacaccaaattagtttcattactcattgagcatgcctgcatttggcagtgccaatatattttctcaggatttgaatggaaagaatacactgtattaccgagtttactcaatattcaaaaataatcaaaacctacaaaccccaagcttgtttgaacaacaaattaaatatacatgtcttcaggctaaatttttcactcccacttcaaaccaagtataaactgaattttaacacaatacataagcaggacatcttcaacac

SEQ ID NO: 864889 - DNA, 534 bp, Homo sapiens
ttgtccctatgttatcccaagtacatttttgtgccagatgtactccactgagttaaccaaggttttttgtttcgtttgtttgtttgtttttgtgtttttctttttaacttttcagatgtctgtcagggttcaccttggcatcaatttgccctgaaacttagctgtgctgggattattctccttgtcttggttgttactgggttgagtgtttcaggtaagtggggcaccatcatctgtttcataatacttactctacttccattacgyatcttagagcatctctgtaggggtgggttgcccctacacacctgtgggtgtttctcgtaaggtgggacgagagatttggaaaagaaaaagacacagagacaaagtatagagaaagaaataaggggacccggggaaccagcgttcagcatatggaggatcccgccagcctctgagttcccttagtatttattgatcatttgtgggtgtttctcgagagggggatgtgtcagggtcacaagacaattgtggggagagggtcagcagaca

SEQ ID NO: 864890 - DNA, 654 bp, Homo sapiens
cctctgggcccaagtcacctttctatcaggggagggaggctgtgctctcactggcttcttgttagaagttctgcctgccctacagcctgcactgagggctctcatcactgcttctgagatcttaatgggggtcaacgaagatgtgggcttctctgagtttagaccatccatctgccaaggaaaaccaagccctgagactgatagagatgagagaagagaatggtaatgtccccaagacagagcaggcaggaagtttgaagcctctgagggatacaggaaaatctaacctcaaagagaagaaggtaagaacaagwcaacctctgtcctcctgacatagggatcttgctgaaaaaataaatctcattgctgagctgagttaggcattggtaattcatctcaaggagatgaattttgatagggcagggatgatggaacaaactgcaatcacattgaacagaaataagggccatcatctagatatgctggactgcatgccctgggaaatgcagggaggtgtctgacatctgggggcaacaggcagaatctggcagaactttctggaagaggtagattgtgagctaatggcattttctcccttgctcaaaagcttacaaagtgctgtagcccaagaaaaagtgaagttgccacagcttc

SEQ ID NO: 864891 - DNA, 688 bp, Homo sapiens
tctgttcatcttttcctttgtaaattctccactataaatagttgttttcagcttcatgttttgatatttataaatataccaacacatcaaacgttttctacaatgtgctctactcagtaaaaggctcttagcattttgacatagcatttaccagcttgggttcctggtctgtaattttaagtggtgtctgaaggattatactggaattctgccagcctgaaatcatgaaaaggctttgagcaacaattcagcatctttttcaaatttaagaaaagctccatatggcataattattcaaagttaaggtcatagaaactacttaaacctttaaaatttataattaaaggattaatattaacttatgaagacattgtcattttggcttaagatggatttccaacctcacttttgttctttttacttttatcttttccatgactttttcctttgctaaaaaacrtgaagttttatatccttaaactttaaattaaatgttatcctcaggttagaattataaaattgattggccaacaatatcccgtatattttttattatgttccacaaatattggtgaacctaaagttgtcattttcctctggatatataagctatagcctggtgtaatagataatggcacctgtaaatataacaataatttaatttaccaggtaaaaacatacacaaata

SEQ ID NO: 864892 - DNA, 621 bp, Homo sapiens
ctgggattacaggcgtgagccaccgagctcagcatatactaccactttaataaagattttaaactaagggtattggtatataggggttgggttgcaaacattaaccctttgaagaaaatgtagaattggcttagttgaaacgatatgaaataggagtgaataatgaggatttatcytgagtgggccagggaaatagcttgattttgtttcacagattttcactaatgatgatcagaacaggaaggagaaaaatgccaagagaaaaccatttagcataatcctatagagaccaatagagaaaataactggatatggaaacaaaaatccagtgaatttcaggtcaaaagtgttcagaaaataagttgataaaaatatcaatgtcttcagatggagaaaatataagaagtaaaacatgcattcactgcagtgtctaaaaaaagaacaaaaagaagtaaagcaaaattcacattttagtgtaattaaatatgagaacatataagtgaaaaaataaagtgtagaatggtgtatacaatatttatgttaaaaaatgaagggatggtgtattagtttccttgggttgctgtaacaaagtaccacaaattaagtgacttaaaacaatgg

SEQ ID NO: 864893 - DNA, 660 bp, Homo sapiens
aacacatgaacaaaaggaatgggaggaatggcttttttccctttggatgtaataaatacagccagctcccagtttcaaactgccactcctgtcttctcttaccctgctctccttgagatcccttttgagaagtgcatcagcttctttgcacaacasatagatggggtcaggttagttttttgggttttttgtttgtttgtttgtttgtttgtttgtttttgagatggagtctcacttctttgccctggctggagtgcaatggggtgatcttggctcactgcaacctccatctcctgggttcaagcaattctcctgcctcagcctccctagcagctgggattacaggcacatgccaccacacacggctaaatctctttgtatttttagtagagacggggtttcaccacgttggccaggttggcctcgaactcctgacctccagtgatctgccccctcagcctcccaaagtgctgggatatcaggcgtgagccactgcgcctggccaagtttgttttgttattaaattggtataaaagatttttgaaaaattaagtcagtgattaaaaatcaagactacagtaatctctcaatttattttctcaaacatgaaatgctgacccagaaaaaaggtaagtaaaaattggtggtctatattaccaa

SEQ ID NO: 864894 - DNA, 660 bp, Homo sapiens
aacacatgaacaaaaggaatgggaggaatggcttttttccctttggatgtaataaatacagccagctcccagtttcaaactgccactcctgtcttctcttaccctgctctccttgagatcccttttgagaagtgcatcagcttctttgcacaacacatagatggggtcaggttagttttttgggttttttgtttgtttgtttgtttgtttgtttgtttttgagatggagtctcacttctttgccctggctggagtgcaatggggtgatcttggctcactgcaacctccatctcctgggttcaagcaattctcctgcctcagcctccctagcagctgggattacaggcacatgccaccacacacggctaaatctctttgtatttttagtagagayggggtttcaccacgttggccaggttggcctcgaactcctgacctccagtgatctgccccctcagcctcccaaagtgctgggatatcaggcgtgagccactgcgcctggccaagtttgttttgttattaaattggtataaaagatttttgaaaaattaagtcagtgattaaaaatcaagactacagtaatctctcaatttattttctcaaacatgaaatgctgacccagaaaaaaggtaagtaaaaattggtggtctatattaccaa

SEQ ID NO: 864895 - DNA, 654 bp, Homo sapiens
tggatacctcccgcttttggctgtcgacctgagtatgacaacggattggaggagattgtctttggctttgaaccctggataattgtggtcaacctggccatgcctttttctattttctatggaatgcacgcagctgcctccctctttgaggtctattgtaagatatagtctggktccacaagagaccgaggagtgagctaacaagagttcattggagccaactgggaatggccaggttggacaaatattgcctgacaaacatgagaagggccaccttttgtctgcaaagattgtgcttcctgtgggctggaactgcccatcacctctgatgaatgtaaacaagttagatcaaaatccataaggtggctggaatctgtccttggttagttaaatgctaatcaagcccaaattattttattgccttctaaatgatttagaagaatgtgattctggcttgggaaaaaatctatccagtttgtttttcataaaaagcattttctttgtgtcatttatcatgtgactccatacaaccttttcctgaccacctgcatagtaatttacactttaaaaatttatccttctcaaagcctatgaatttagacacaatcactattgtttctgaataggtttaatttcttgaagttatttttatca

SEQ ID NO: 864896 - DNA, 555 bp, Homo sapiens
acccccttcaagaagaagtgggaaggacatttcaggcaggggcaagtgcaaaggcacagggcctgaaagaactaggctgggagaagaggatggcattggaatgggtgggagaggggtctgctggggaaagctggggaggcaagagacgaggctggacaagcagattgtgaagggccacactgaggagctggggattagtacattaatttttattaattggattaatgattaataatgtgggttgcagggaatcatagggagtgtgaagaacactgtggttgtgttttaggaggattgccttggtggtagagcgttggatggaggagataggagtgggggtgaacacatcaacacagagagacctgcccaaaggctctggcagccatgcaagcaaaaagcgtcgaggacctsaattaggaggtggcactggagatggatagaaggggttggctggtggagccattttgagataatgaatcaataatagcttccatctattgtggattgtcaagatgtattattggctcacaatccttcctggccttctcacattcc

SEQ ID NO: 864897 - DNA, 603 bp, Homo sapiens
agtgtgctgctggtccacatcagaggatggggactaccatggtctgaaagtctgtgtctctccaaatttcatatgtggaaacttaatcaaggtgatagttttaagaggtggggcatttaggagctgattaaggcatttggacagagcccttctgaatgggattaatgaccttataaaagaaatgaagatgaacaaatgaccccttccaccacatgaggacatagcaagaagrcaccatcttaaagcagagagcaagccctcaccaagacactgaatctgcagatgccttgatcttagacttcccagcctctgaaactgcaaaaaaaaaaataataataataaataaataaacttctgttgtttataaattacccaatctaaggtattttgttttagcggctcaaaggaactaagacaaaggtcatggagaccatagggtgagtctcaagacttcccccagctctacttggctggtctcctgctggtattttccgtctgtagagaggaaaaagaactcccattttatcttgcttacctgcacttatgaaaagtcaaactgagtcatgttgagagccagggaacataggagtcggttcttcagca

SEQ ID NO: 864898 - DNA, 670 bp, Homo sapiens
agactgtgagtgtgctgctggtccacatcagaggatggggactaccatggtctgaaagtctgtgtctctccaaatttcatatgtggaaacttaatcaaggtgatagttttaagaggtggggcatttaggagctgattaaggcatttggacagagcccttctgaatgggattaatgaccttataaaagaaatgaagatgaacaaatgaccccttccaccacatgaggacatagcaagaaggyaccatcttaaagcagagagcaagccctcaccaagacactgaatctgcagatgccttgatcttagacttcccagcctctgaaactgcaaaaaaaaaaataataataataaataaataaacttctgttgtttataaattacccaatctaaggtattttgttttagcggctcaaaggaactaagacaaaggtcatggagaccatagggtgagtctcaagacttcccccagctctacttggctggtctcctgctggtattttccgtctgtagagaggaaaaagaactcccattttatcttgcttacctgcacttatgaaaagtcaaactgagtcatgttgagagccagggaacataggagtcggttcttcagcaggagcactcagctagttgaaggcaatgtggagtgatgggaagagagcagtgatgcagtg

SEQ ID NO: 864899 - DNA, 657 bp, Homo sapiens
gctcaactgagggatgcttcctttccaagctcactcatgtgattattagcaggttcaggttttggctggctcttggtcagacactcccccagcctctggtttcttgctactgggcctcttcatagaacacccacaacatggctgctggcttccatcagaacaagaaagcaagaaagcaagagagcaagagagggtgagcaggatggaagtcattttcttcttgtaacttctcagaggtgctgttcatcagtttcaccatattgtgtttgttaggarcaagacattaggttcagccaagatataagggagtggagaggattatacaagggcatgaataccaggagacatggatcactggaggccatcttaggggctgctgggaagcctgtcctccagcccccagtgattcacatcctccaccccatgcaaaatacacttgtgtcctgccaagatccctaaaaatctcctcccccttcagcatcaactaaagttcagaatctcatcaaatcaggtattggggtggggacttcttgagaatgactagtcacatgcagctcctagagtacagttcctctctctctgagagcctgtgaaactagagagacacagtatctgcttccatacgcctagcattaaatggtataacaggcatgggtt

SEQ ID NO: 864900 - DNA, 687 bp, Homo sapiens
cattgggaaataatacagaatcttctcgcactggaggatgcatcatgcacaggagaagctctaagaagtcctatcgagaaaacaggtgttgaacctgggtttgctgaacttatttcaccagagaccccatccattaacatctgcatcacaaagcacaattgggtaaacagtgatccagctgaagtctttccatttacagacacagacagaaaatgaggcccagaaaggttaattgactcactcaaggtcatgcgaccatctcctgaatcgtagagctgtgtgcttttcactgcccctaatgttgcctaatggttcacttagctatccattcacaggaggtcagaaactgaacacgggcctcagattccagtatcattttgactaaattatatataaaaattgatgtaccgaataggatttgctttcaatmtcactattccagaaatagtcattcattcaacaaatatttattaagtacgatgtgccaggagctgcacattttgcagtgatcaagatatggctgcacagaagactgacaataaaattagccttagagagatcaaaattgattgaactgtccttgataaaactgcttcaaatcagggacttgcaagaaattgcatattcacatttcatttgcttccattaatagtgctcatatttagatctgatggtaataatatgctc

SEQ ID NO: 864901 - DNA, 687 bp, Homo sapiens
cattgggaaataatacagaatcttctcgcactggaggatgcatcatgcacaggagaagctctaagaagtcctatcgagaaaacaggtgttgaacctgggtttgctgaacttatttcaccagagaccccatccattaacatctgcatcacaaagcacaattgggtaaacagtgatccagctgaagtctttccatttacagacacagacagaaaatgaggcccagaaaggttaattgactcactcaaggtcatgcgaccatctcctgaatcgtagagctgtgtgcttttcactgcccctaatgttgcctaatggttcacttagctatccattcacaggaggtcagaaactgaacacgggcctcagattccagtatcattttgactaaattatatataaaaattgatgtaccgaataggatttgctttcaatatcactattccagaaatagtcattcattcaacaaatatttattaagtacgatgtgccaggagctgcacattttgcagtgatcaagatatggctgcacagaagactgacaataaaattagccttagagagatcaaaattgattgaactgtccttgataaaactgcttcaaakcagggacttgcaagaaattgcatattcacatttcatttgcttccattaatagtgctcatatttagatctgatggtaataatatgctc

SEQ ID NO: 864902 - DNA, 663 bp, Homo sapiens
tcctcctgcctcagcttcctaaagtgctagtattacagatgtgaaccactgtacccggccataatacattttctttatccagtccattattgatggacatctaggtttctcttgcctttttaaaataaggaatggaggcagcttgtaataaaaatactgtaagtataaaattacaatataaggctggaaaatagacctatattctacaaatctacctactgaagacttgctgtgtgctaggggctgggctaggtactaaagattaaagtggaaagactcagtctctttcctctaaaaggtctcagtataatgggggagggagacaatgagcaaatctaatatagtgaacaggacaagtgctgagatgggcttgtgcaaggtgtactaggagcagggatccagaaggacttcagtgagtagtgagtgcttgaggtgaggcccagtgtcaatcaggagtgcttttagttgcaagtgacaggcaatttgattcacagtgtcttcagtcttawcaatgtttaattatctcctgagaattccagaggttggctgcttggggttggcctggcagctgaaccgtgtcatcaggcatccaggcactgttcatcttgtcacttgggtcgtgtggtgtttgttgcgacatggtcatgagatggctgcagctgc

SEQ ID NO: 864903 - DNA, 609 bp, Homo sapiens
ttaaaataaattttttcaccaagaaacacatcttattttctttgtacactctatgtagaattgtttctcttcttaacaatagttttagttatatcttaaccagaattttaattcttagtaattttaactcatagtgaaattctaagaagtaagcaattttaactattagtcatatactaacaatttatgagtacatattttatgattttttagaaacgtaggattttaaatggaaacatctttttttttttttttgagatggagtcttgctctgttgcccaggctcgagtgcagtggtgcaatctcggctcactgcaacctccacctcttgggctgaagtgattctcctacctcagcctcccgagtagctgggatcacagrcgagtgccaccatgcccaactaatttttcgtatttttagtagagatggggtttcaccatgtttgccaggctggttttgaactcctgaccttaagtgatctgcctgctttggcctctcaaagtgctgggattatagccgtgagccactgcgcccagcaggaaacatcttttaacgtggaacaggatgtatttacttacagatctaaatatcttttgtttttgtgaaata

SEQ ID NO: 864904 - DNA, 639 bp, Homo sapiens
tgtagttttgagtgagtttcttaatcctgagttctaatttgattgcactgtggtctgagagactgtttgttatgatttcattctttttgcatttgctgaggaatgttttacttccaattatgtggtcaattttagaataagtgctatgtggtgctgagaaatatgtatattctgttgatttggggtggggagttatatagatgtctatttggtctgcttggtccagagctgagttcaagtcttgaatatccttgttagttttcwgtctcattgctctgtctaatattgacagtggggtgttaaagtctcctactattattgtgtgggagtctaattctctctgtaggtctctaagaacttgttttatgaatctgggtgctcctgtattgggtgcatatatatttaggatagttagttcttcttgttgcgttgatccctttaccaccacataatgcccttctttgtcttttttggtctttgttggtttaaagtctgttttatcagagactaggattgcaacccctgcttttttgtgtgtgttccatttggttggtaaatattcttccatccctttattttgagcctatgtgtgtctttggatataaaatgggtgtcctgaatacagcacagtgatgagtc

SEQ ID NO: 864905 - DNA, 624 bp, Homo sapiens
tttaacatatcatgggatatataaataaattaacttccatcaattcctagactacttacactgaaattatggaccaaagctttctaattcaattcccaagtggtattaaaaccaaactgtattgtatttcaagaaattttatccayggttacaaaagtttaaaaacttatcaaacaagtgggaaaactgcaatttaaagataaatgattaggtttcctatttttttaagaccaactacaatgtgaaccataactacactaactgggtgttctctatcaaagtcaacactgcaaacaacaaagggtatcatctggccaagaaaaagataatttctgattccaattcaacacagctcctgtgtaacaggtgtttctctagttctcagctccacatttatgcttgagttatttctatgctagttgtagttttctttttaagttgcctctgggcaaagtaaacctttcataacagattgagaactgttccatttcctcaactttaagatacaattttgccccccaatatttctaaaaacaaatgtctcataatcaaaatgtaattgactgtactatttaacctccctcaaatcaaatttgattatatgtttcagagtagatcttatct

SEQ ID NO: 864906 - DNA, 624 bp, Homo sapiens
tttaacatatcatgggatatataaataaattaacttccatcaattcctagactacttacactgaaattatggaccaaagctttctaattcaattcccaagtggtattaaaaccaaactgtattgtatttcaagaaattttatccacggttacaaaagtttaaaaacttatcaaacaagtgggaaaactgcaatttaaagataaatgattaggtttcctatttttttaagaccaactacaatgtgaaccataactacactaactgggtgttctctatcaaagtcaacactgcaaacaacaaagggtatcatctggccaagaaaaagataatttctgattccaattcaacacagctcctgtgtaacargtgtttctctagttctcagctccacatttatgcttgagttatttctatgctagttgtagttttctttttaagttgcctctgggcaaagtaaacctttcataacagattgagaactgttccatttcctcaactttaagatacaattttgccccccaatatttctaaaaacaaatgtctcataatcaaaatgtaattgactgtactatttaacctccctcaaatcaaatttgattatatgtttcagagtagatcttatct

SEQ ID NO: 864907 - DNA, 632 bp, Homo sapiens
tttcaagcctaacaataaaatattcatcaaatatttgttcataaggttttgaagaaagtcacaataatatctgtttataatagctaatgtcaggtttcttcaggtctttgggattgggctcctacagtatttataataaaaggatctgagaagtcctgctttaaagataattgcttatctttgctttactcagcatctcaactttrtatccgtttcttattaatctctagattttctgagactaaaagtagtagtatctgacactttataagtgatcattaaatttttatcaaataaatgaatgaggaatgcaaagatacgatgtagtctttgcccttaaaaagtttagtatggtagaagaagtaagatatgcaaacaaacaacgaacaaataaacaaggcagaactttatcaagaccatgaatgagataccccaaagagaaagaatttcaggaaactgagaaatcacaccagcctggaaaggaggtcacatttcaatgaggctttgaaagatggagtatcatttcaataagcatttcaactttctgggatatctgcagatacaaggggcaacttttaccattttgtagcaattgtatagaaaagaaagcaaaggatttttagaaacagaat

SEQ ID NO: 864908 - DNA, 630 bp, Homo sapiens
tttttttcttgtaaatttgtttgagttcattgtagattctggatattagccctttgtcagatgagtagattgcaaaaattttctcctgttctgtaggttgcctgttcactctgatggtagtttcttttgctttgcagaagctctttagtttaattagatcccatttgtcaattttggcttttgttgccattgcttttggtgttttagacatgaagtccttgcccatgcctatgtcctgaatggtattgcctaggttttcttctagggtttttatggttttaggtctaacatttaagtctttaatccatcttgaattaatttttgtataaggtttaaggaagggatccagtttcagctttctacctatggctagccagttttcccagcaccatttattaaatagggaatcctttccccatttcttgtttttgtcaggtttgtcaaagatcagagggtkgtagatatgcagcattatttctgagggctctgttctgttccattggtctatatctctgttttggtaccagtaccatgctgttttgtttactgtagccttgtagtatagtttgaagtcaggtagcatctcactgatatttctttaaaaataaatgagtactgcactcatttatt

SEQ ID NO: 864909 - DNA, 608 bp, Homo sapiens
attgttttattcaagagtattatctctggagttaaagttgatactgttttaatactggytttgctattgtgagcaagttatttctctctctggctcttttctttttttttttttgtaaattgaaaataatagtgacacctttgttattaagttactttgtctattagtccattctcacactgctgaagaacacaccaaagactaggtaaattataaaggaaagaggtttatttgactcacagttcagcatggctggggaggcctcaagaaccttatgataatgggagaaggtgaaggagaagcaggtatccttttcactaggtgacggagagcaggaaaaattaccacttataaaaccatccaaactcatgagaactcactcactatcacaagaacagcatgagtatcattctgcctctggccccttccaaatctcatgccctttttatatttcaaaaccaaacatgctttcccaacagtcccccaagtcttaactcaagttagcattaacccaaaagtctaagtccaaagtctcatctgagacaaggcaaatccctgctacctgtgagcctgtaaatcaaaagcaagttagtaacttccaagataca

SEQ ID NO: 864910 - DNA, 608 bp, Homo sapiens
attgttttattcaagagtattatctctggagttaaagttgatactgttttaatactggttytgctattgtgagcaagttatttctctctctggctcttttctttttttttttttgtaaattgaaaataatagtgacacctttgttattaagttactttgtctattagtccattctcacactgctgaagaacacaccaaagactaggtaaattataaaggaaagaggtttatttgactcacagttcagcatggctggggaggcctcaagaaccttatgataatgggagaaggtgaaggagaagcaggtatccttttcactaggtgacggagagcaggaaaaattaccacttataaaaccatccaaactcatgagaactcactcactatcacaagaacagcatgagtatcattctgcctctggccccttccaaatctcatgccctttttatatttcaaaaccaaacatgctttcccaacagtcccccaagtcttaactcaagttagcattaacccaaaagtctaagtccaaagtctcatctgagacaaggcaaatccctgctacctgtgagcctgtaaatcaaaagcaagttagtaacttccaagataca

SEQ ID NO: 864911 - DNA, 608 bp, Homo sapiens
attgttttattcaagagtattatctctggagttaaagttgatactgttttaatactggttttgctattgtgagcaagttatttctctctctggctcttttctttttttttttttgtaaattgaaaataatagtgacacctttgttattaagttactttgtctattagtccattctcacactgctgaagaacacaccaaagactaggtaaattataaaggaaagaggtttatttgactcacagttcagcatggctggggaggcctcaagaaccttaygataatgggagaaggtgaaggagaagcaggtatccttttcactaggtgacggagagcaggaaaaattaccacttataaaaccatccaaactcatgagaactcactcactatcacaagaacagcatgagtatcattctgcctctggccccttccaaatctcatgccctttttatatttcaaaaccaaacatgctttcccaacagtcccccaagtcttaactcaagttagcattaacccaaaagtctaagtccaaagtctcatctgagacaaggcaaatccctgctacctgtgagcctgtaaatcaaaagcaagttagtaacttccaagataca

SEQ ID NO: 864912 - DNA, 608 bp, Homo sapiens
attgttttattcaagagtattatctctggagttaaagttgatactgttttaatactggttttgctattgtgagcaagttatttctctctctggctcttttctttttttttttttgtaaattgaaaataatagtgacacctttgttattaagttactttgtctattagtccattctcacactgctgaagaacacaccaaagactaggtaaattataaaggaaagaggtttatttgactcacagttcagcatggctggggaggcctcaagaaccttatrataatgggagaaggtgaaggagaagcaggtatccttttcactaggtgacggagagcaggaaaaattaccacttataaaaccatccaaactcatgagaactcactcactatcacaagaacagcatgagtatcattctgcctctggccccttccaaatctcatgccctttttatatttcaaaaccaaacatgctttcccaacagtcccccaagtcttaactcaagttagcattaacccaaaagtctaagtccaaagtctcatctgagacaaggcaaatccctgctacctgtgagcctgtaaatcaaaagcaagttagtaacttccaagataca

SEQ ID NO: 864913 - DNA, 612 bp, Homo sapiens
gagcgcctaaaggcttggccacattcttcacatgtgtagggtttctctccagtatgaattctcttatgtctagtaaggtttgcggaccagctaaaggctttgccacattcctcacatctatatggtttctctccagtatgaattattttatgtgtagtatggtttgaggagcagttaaaggatttgccacattctttgcatttgtaggacttctccctagtatgaattacctgatgttgatttaggtgtgaaagcatgcaaaatgatttgccatatttgttacatttgaaatgtttctttccagtatatcttgttttatctctattggaatttgaaaatttaccaaagactttgacatatttatgagtctgaaatattttgttttgggtagttgacaaacattggttaacttcactataacctctttgggcacctcacattcacccacacttttacrgcattttttaaattgtaatttctcatgtccacattttccatatgttcttggtattactttttggagtgaatctttgatgccctgctctggctgaaggtcttgggtgaaatgggaatgcgtaactgaaagacacaaaaagcacaagttactccact

SEQ ID NO: 864914 - DNA, 603 bp, Homo sapiens
cactgtaatattagccataaaaagaaggaaattctgtcattcgtgacaacgtgaatgaactggagggacattttatgaatataagcttgataaacaaagaaaaatactgtacaatcaatctcacttataagtggaatctaaaactgtcaaagtcatagatgcagaaagtagaatgatagtttcaaggggctaggaaagtggggagatgttggtcaaatcatgtwtacttccaattagattaacaagtctgaatctaatgtacagcatgagtggtaatgaatgtattaacttgattttgataatccttgcaaacgtacatacaaatatcaaatcattacattgtactccttgagtatattcaatttttgttaattacatatttaaaaatttttaaaaatgtgattccttcagaaaaagttacaaagtcagaagtgagcaaaatcagcacaatagatgcagaatcctggtattgcaggatttttgaaacacattttaagtttagactgataaaaccatcttagttgaaatatattctggacacattttacagtttagtttacattctctacagtgctctcaatcaatgcacagcatcttgttata

SEQ ID NO: 864915 - DNA, 618 bp, Homo sapiens
aaagtggagtaacttgtgctttttgtgtctttcagttacgcgttcccatttcacccaagaccttcagccagagcagggcatcaaagattcactccaaaaagtaataccaagaacatatggaaaatgtggacatgagaaattacaatttaaaaaatgcygtaaaagtgtgggtgaatgtgaggtgcccaaagaggttatagtgaagttaaccaatgtttgtcaactacccaaaacaaaatatttcagactcataaatatgtcaaagtctttggtaaattttcaaattccaatagagataaaacaagatatactggaaagaaacatttcaaatgtaacaaatatggcaaatcattttgcatgctttcacacctaaatcaacatcaggtaattcatactagggagaagtcctacaaatgcaaagaatgtggcaaatcctttaactgctcctcaaaccatactacacataaaataattcatactggagagaaaccatatagatgtgaggaatgtggcaaagcctttagctggtccgcaaacctcactagacataagagaactcatactggagagaaaccctacacatgtgaagaatgtggccaagcctttaggcgctcctca

SEQ ID NO: 864916 - DNA, 672 bp, Homo sapiens
attttgttacatttatacatctatgaaggaattatggcctgtggtattttgatatggcattttgctaatgtaccttgtgtaattttatatatttcatgtgtagaatacatttatatgagtccagaaagtggagtaacttgtgctttttgtgtctttcagttacgcgttcccatttcacccaagaccttcagccagagcagggcatcaaagattcactccaaaaagtaataccaagaacatatggaaaatgtggacatgagaaattacaatttaaaaaatgctgtaaaagtgtgggtgaatrtgaggtgcccaaagaggttatagtgaagttaaccaatgtttgtcaactacccaaaacaaaatatttcagactcataaatatgtcaaagtctttggtaaattttcaaattccaatagagataaaacaagatatactggaaagaaacatttcaaatgtaacaaatatggcaaatcattttgcatgctttcacacctaaatcaacatcaggtaattcatactagggagaagtcctacaaatgcaaagaatgtggcaaatcctttaactgctcctcaaaccatactacacataaaataattcatactggagagaaaccatatagatgtgaggaatgtggcaaagcctttagctggtccgcaaacctcactagaca

SEQ ID NO: 864917 - DNA, 672 bp, Homo sapiens
attttgttacatttatacatctatgaaggaattatggcctgtggtattttgatatggcattttgctaatgtaccttgtgtaattttatatatttcatgtgtagaatacatttatatgagtccagaaagtggagtaacttgtgctttttgtgtctttcagttacgcgttcccatttcacccaagaccttcagccagagcagggcatcaaagattcactccaaaaagtaataccaagaacatatggaaaatgtggacatgagaaattacaatttaaaaaatgctgtaaaagtgtgggtgaatgtgaggtgcccaaagaggttatagtgaagttaaccaatgtttgtcaactacccaaaacaaaatatttcagactcataaatatgtcaaagtctttggtaaattttcaaattccaatagagataaaacaagatatactggaaakaaacatttcaaatgtaacaaatatggcaaatcattttgcatgctttcacacctaaatcaacatcaggtaattcatactagggagaagtcctacaaatgcaaagaatgtggcaaatcctttaactgctcctcaaaccatactacacataaaataattcatactggagagaaaccatatagatgtgaggaatgtggcaaagcctttagctggtccgcaaacctcactagaca

SEQ ID NO: 864918 - DNA, 657 bp, Homo sapiens
ggccaggacaaagaggtcaagaagcatgttcctttcatctgctcagagtctgggaagtatagtatgattaaggacatgagatttgccattcagattgagctgtagctgtgctacttggtagagatatttgtcattggcaagttacttctcagaggttttgtttacttacttatctgtaaaattgtgtaaagaatcttatgcagagttttgtaattattgcagtcattgaatgcatgtaaagtgcctagctcagtgtctttcttatagttattgaataaaaatattaagtattattgttaatgaagatactggtgaaatatcccatgtcagatatggtccaacctggttaaccagattaggaaggtacttgggaawttggggacagagtctttaatggataaatgagagtgggtatttagaaaggcagtagaacatgctgcctagtgtcaaatactgacattaccccttattaactatttggcactagcaagttatttcattttgtttccaaactgtaacaataatgatacagattgaatatccctaatccaaaaatctgaaatctcaaatactccgaagtttgaaactttgaatgctgacatcatactcaaaggaaatgctcattgaaccaatttttggattttggattttcagatt

SEQ ID NO: 864919 - DNA, 579 bp, Homo sapiens
atactcacagggcctgggtggaagatgctcaaggggccttgtggggaagggagggagcagggacccagcctcttggggcctttctcttaagaggctccttcctctcctccaatcccatgccgccccagtctgttctcagagttagatacaagcagtcctcctccaaagattggtccttgatttccgtcccctattcacacactttatggagatgggtctcctctttctctgtgtgtcaaaccctcccaatatatctaaaatgaagagaatggagccaggcagtgtgctgcccagggaatcctctaacccctggccmgtggataaaccccatccccactccctctcatgctgcactaccaccagcgccaccagggtcaggtgttggtatcaggatgatgcaggcctcactaaatgagttagggaggagtccctctttgtcaattgtttggaatactttcagaagagaaatggtaccagctcctctttgtacctctggtagaattaggctgtgaaaacatctggtcctgggtttttctggttagcaggctatttattactgcctcaattttagaacttgtc

SEQ ID NO: 864920 - DNA, 646 bp, Homo sapiens
gattctatttttattttttcccacattgggaaatttctaatagtctaaactgacattctaaatttcatcaataagttctaaaaaaaatcttagattctaaataacaccataaatcatgaaaatttatagcaatcagtgttttatagaaattaaaacaatgtccatgaatattgaaaagttatttcactgaaatatactaaaaaatattctgtggagagtttgaaaaacactacttagaaataatgattggtaaattttggttatatatggtgttgaaggtaaacaactcayataatttcaaacattgctttataaattaagctagttatttaatatctctaaaattaagaaatagcttctttcggactttatttgttcaaaaggattatgaagagacttatattcaataataataagtaggcacatcacaagtaacattctgcaagagacgctaaagagtagactgcaacaaaaaaccaggtgactacattatactgctttggcaattacaacctccaaacactaaaaggaaagaaaaaaatatcacggaacatttttaaagacaattttaacacattttagccattcactaggttcttatatcagactgaaaaccaaaagttcgcacctatctaagattgcaggg

SEQ ID NO: 864921 - DNA, 646 bp, Homo sapiens
gattctatttttattttttcccacattgggaaatttctaatagtctaaactgacattctaaatttcatcaataagttctaaaaaaaatcttagattctaaataacaccataaatcatgaaaatttatagcaatcagtgttttatagaaattaaaacaatgtccatgaatattgaaaagttatttcactgaaatatactaaaaaatattctgtggagagtttgaaaaacactacttagaaataatgattggtaaattttggttatatatggtgttgaaggtaaacaactcacatwatttcaaacattgctttataaattaagctagttatttaatatctctaaaattaagaaatagcttctttcggactttatttgttcaaaaggattatgaagagacttatattcaataataataagtaggcacatcacaagtaacattctgcaagagacgctaaagagtagactgcaacaaaaaaccaggtgactacattatactgctttggcaattacaacctccaaacactaaaaggaaagaaaaaaatatcacggaacatttttaaagacaattttaacacattttagccattcactaggttcttatatcagactgaaaaccaaaagttcgcacctatctaagattgcaggg

SEQ ID NO: 864922 - DNA, 597 bp, Homo sapiens
tttctctttcacctagtacacctatatattactttgaaatttgaattgatcttccaagtacagagggaaactcatctactctttcaaattcagactcacctatggctatttctcccttgttttcctagaatttgcttaaatatacatttctatttgaatttccattgctcatgtgcatgcaaatacacacgcacacacacacacacacgtaatcttcggaacaaacttatccttcacttttattaacataccttttttaaatctataccattttactcagtttctttagcttacaaaaatctcatctatcaacttgactgatcaaaatayagtcaggtgcccaaattgtatggcccctcccaaacaaacaaacattttataattcttgttctcatgccaattatgcaatgtatctttctttaggaacttcatagaacttttgttattcttttaagacatctaatatggtcttctttttacattaacttatcagcttaaatgaactgctacttaatctaccttcattttaaaatgaaggccaaaattgttattgtattttaagatcgtacaaagtagtaaagctctgtatagttttaa

SEQ ID NO: 864923 - DNA, 580 bp, Homo sapiens
atactatgtaaatgtccataactgacttgtaggaacatttctaactttttagggtaatattctacaccttgattgttgtgatggttatatgactttgtacatttgtcaaaatgcaaagaattttaattctaaaaagaataaatttcactgtttgtaaattagtgctccaatatamctaacttttgagggaaggaggggagtgagggttgaaaaaaattacctactgggtacactgttcagtatttgggtgatgggtacacaagaaacccaatcctcaccatgacacctataatacccatgtaacaagtacatgtactccttgaacgtgaaatttttaaagagaagtaattgaagaaaattatagatagaaatgtccacatggccgcatgctttcttatctactgttacgtccaatgagaaaacttcagatgggtgttggattaagcaaaagataggtaaagtgctcagccacatttaagggtacaggagaggagaatctagtatattatggtttattgatgtatttattattctcctatctgctgctctcagttctaaatctcttttagatgaggttttc

SEQ ID NO: 864924 - DNA, 580 bp, Homo sapiens
atactatgtaaatgtccataactgacttgtaggaacatttctaactttttagggtaatattctacaccttgattgttgtgatggttatatgactttgtacatttgtcaaaatgcaaagaattttaattctaaaaagaataaatttcactgtttgtaaattagtgctccaatatacctaacttttgagggaaggaggggagtgagggttgaaaaaaattacctactgggtacactgttcagtatttgggtgatgggtacacaasaaacccaatcctcaccatgacacctataatacccatgtaacaagtacatgtactccttgaacgtgaaatttttaaagagaagtaattgaagaaaattatagatagaaatgtccacatggccgcatgctttcttatctactgttacgtccaatgagaaaacttcagatgggtgttggattaagcaaaagataggtaaagtgctcagccacatttaagggtacaggagaggagaatctagtatattatggtttattgatgtatttattattctcctatctgctgctctcagttctaaatctcttttagatgaggttttc

SEQ ID NO: 864925 - DNA, 618 bp, Homo sapiens
tacctgttattctaatagggatttcaaatcaacatttccaaaatgagctcctaatctgctcaccctctccctaacctgctcctccagaaatctgtcttactccacgtcactcacatttctaccctttcgcttgctcaagccaaaaccattgcattccactttgagtcttctatttctctaacagtcacatccattctctaagaaatactgtttttataaaatttcaaaaatctgtccacaatgcaaccacttctaccttcacagcttccaccctggtataagccactaccatgtctattatgatacacttatttgttttcctcacttctctcctgatttctatattctgctttaacagagtggccagagtgaamcatttaaaacttaaatataatcatgtcactactctcctcaaaacattccactcagagtaaaaaacaaagtcctcatggttgcccacaggatagtatataatctggccctcctgatgctttctgacatgttttcctaatccctgtcatgctttcttttcttgaacaacaccagcctccttaccgtttttagagcatgctagttgtgctcttgccctagggacctagactatttttttctctttct

SEQ ID NO: 864926 - DNA, 508 bp, Homo sapiens
gacacaagtcagctgttctgccagccaagtgttcactcacacagctcaccaacacttcaaatgccgtggatctgaaactgaacacctcatctttgcctccaaactggcttcttttcccaaatatactgtttctgacaattgttccagttcttaagcacataaacttttgcacacctttctgttatggtccctatatcataaataccatcgagagtttgagaacacaatttcttaactttcattttaggttcggaggtacrtgtgcaggtttgttacatgggtagactgcatgtcacaggggtttgatgtacagattattttttcacccagataataagtgtagtacctaataggtattttattttcttttttcttttctgagacaggtctggctctctcacccaggctggagtacagtggcatgattttggctcactgcaacctccacctactgagctcaagtgatcctcccactttagcctcctgagtagctgggaccacaggtgtg

SEQ ID NO: 864927 - DNA, 708 bp, Homo sapiens
tttgtgaaaaaatatgaagtacctaagtttgtgagataacacatagaaatttattaagagaaacagttaaaaatattataacaaaactattcagtttctactattatgctttaacatatatttgaaaatttgaaaaaatatttattgcatatatatgtatatrttacaataaaaagcctaaaatttataataatattttcaattagagttccaaacttttatccagaatattgattaaagatactgagctcatatttttcttcaatattataaaatacataaaattaacaaacgtaaaaaatacaggaattttttcctgtaacataaaaaacacaacttattcaagtgaatttcagaggattaatgaaaccattccaagcaaaattttaataatctaattacaagtatttttcagtatacttttaatattactgaatgaaaatagtaaaagaaatataaaagtaaatagtaaaataaatgagtggaaatggtaaatagtaaaacctccagattggtttgcctaagattacggtcgttaatgttactgttctatatagtgggtaacatttgtgtgaattctgtgggttttgtgtgtgtgtgtgtgtgtgtgtgtgtaagaggaactactagttgaaaggttaattgcaaaacagttcagtatcttttgctatggctgtggtattgacatacttaaatatattaataacc

SEQ ID NO: 864928 - DNA, 708 bp, Homo sapiens
tttgtgaaaaaatatgaagtacctaagtttgtgagataacacatagaaatttattaagagaaacagttaaaaatattataacaaaactattcagtttctactattatgctttaacatatatttgaaaatttgaaaaaatatttattgcatatatatgtatatgttacaataaaaagcctaaaatttataataatattttcaattagagttccaaacttttatccagaatattgattaaagatactgagctcatatttttcttcaatattataaaatacataaaattaacaaacgtaaaaaatacaggaattttttcctgtaacrtaaaaaacacaacttattcaagtgaatttcagaggattaatgaaaccattccaagcaaaattttaataatctaattacaagtatttttcagtatacttttaatattactgaatgaaaatagtaaaagaaatataaaagtaaatagtaaaataaatgagtggaaatggtaaatagtaaaacctccagattggtttgcctaagattacggtcgttaatgttactgttctatatagtgggtaacatttgtgtgaattctgtgggttttgtgtgtgtgtgtgtgtgtgtgtgtgtaagaggaactactagttgaaaggttaattgcaaaacagttcagtatcttttgctatggctgtggtattgacatacttaaatatattaataacc

SEQ ID NO: 864929 - DNA, 638 bp, Homo sapiens
taaatatcctaaaatataagagtcttttattctgagaactccaaggagataaaatgaaaaaggaagagggttgggtggaagagtgctgggaagtactgaaacaggaaagctctaagctagataacagattcattcacagaggttctgacagggggttttctgtccgcaggggctgccataacaaaatagtacaaattgctggtttcaatacaggtattcatttcctcacagttcagggggctggacatctgggatttggatgccagcatggtcagggtctgaagagggccctcttctgggctcacagaggctgcctcctctctgtgtcccacgtgacctygccttggtgtgtgcatggagagtgagcaatcaccttttccttttcttataaggacatcgattctatcagattagagcctcttccttatgactttaagccacttacccccaaaaagtccagttctctaaatatagccacactgagagtgaggattttgacataggaattttggcagaggtgggctttgagggagggaatttcacaattcagcccatatcaagggttttagcgtatgagacagaaaagcccacaatggcacgtggaaggagtaacacctagatgtttcatttttctatca

SEQ ID NO: 864930 - DNA, 638 bp, Homo sapiens
taagggaaaggtaaatgcgtgttttgggataatatgctaatactataaaaggttaagagaatatattcttactccagatataaatatttcatgaagtctccccagatttcttcttaaatcaaagcataatcagtcttgtttgcttacaggagtcaacttatcaaacattctattatagtccatgtcatagggatagttttgttctgtcttgtttttccttgttgtttttgatactgtgtatccagtcttatataacagcctattcagtctgtttattcctgtcttcttttgaaataaagatcctacacaaactggtaatactagaagtcttgctctgctcacttagatgcggagggctggcaggagtgatggtagaaggaaattactggttggtagtatctcatcctccaagatttccatctctgaatcaagkggaggaattatgaggctctgaaaatcatgatggaagatcagcagtagcaccaaacacacaaataaattcatgccaactaaaatttacagggatgctcaggtttttccaaagactttatctttttccaccaatgacaataacacatgtcaaaatatagaaaagaatcatatacctgagaaatagcccagaatcagtgagtatggaa

SEQ ID NO: 864931 - DNA, 691 bp, Homo sapiens
cattagacatgaaggatggaggatgtgctcagcttttgttattgaggcacaaagtcctaagcctcatggaagctctgatccactcgtcatctctatggcaaaaacaaaacaaaacattccctctaaaagttcccaatgaaagaccacatgcacaaattccatgttcttagttctttacaggatggaaacatgggaagtgataggtagactccttcttatatgccattcaattgtaaaactgcatgcagaactaagtactattattattacattatattttgtgtaatgcaagggagtctaataggagttggtcatcctgattgccacacacaaattactctgtaaattacaattcaatataatgaacrcagcattggaagcatgtgtgtaaggatcagaaatagctgaggaaaagcactgaatacttctatctgtaggaatctcattaaaacgggaaactctataggacatttcaagatagaattttttttagagatgttgttatctgaattaggcactttaaagtcttacgtaattaactttattggctgactttaaacatttagtctatttcaatttttctttcattgactgaattaaatactctttaatagcatttacattaagcaaaggacaaacagaacagatatgagtggcaacggtcacctaatcttacaattatccatgccta

SEQ ID NO: 864932 - DNA, 578 bp, Homo sapiens
gtgtctgaattcccatctttcagagggctattgctgtacccaccgtgtcttccatctcccacgttaactcccttgctaggctgtgacgatatctttgtcccttgcactataaccaagcctggactcatttacattttagagaccacgttggccaggtccaattctagaccatggagagtactggacttatttttaatatctataagttcaaatcatgaatcttgacccatcccragaggaacaacactgtcacgggagacagataaaattttctccctttatttctattaatcattgtcctacgcatcatattgtaccatgatttgttttagaattcgtttgtattagtttattgttgctataacaaattaccggaaatttcctggctaaaagctactaaggtagtcaataattagaaaaaattaaagtcaaatcatagtacctttctaattccatcaaaataaagcagttcttgaaaggcattgatgtttcatgcaagacgaaaaatgaagaacattactgttatccctaacatagtatgaagtacttcaaaagaaaaaacacacgaatgccatgtt

SEQ ID NO: 864933 - DNA, 680 bp, Homo sapiens
aaccattaaacttaacatggtcatcttttcttcatcttgtgttcacagtagtggcagcaattttccctccttttaccaggccttgacctcgtgcccttgctgtattagtccattcttgcactactataaagaaatacctgagatgagtaatttataaggaaaagagatttaattggctcatgattctttaggctgtacaggaagcatggcactatctgcccagcttctgggaaggccataggaaagctacaatcatggtagaggatgaagggggaagtaggcacatctgcaaggccagaacaggaggaagacagagaaagggtagtgccacacagtttcaaacacccagacctaatgggaactctatcacaagaacatcaccaaagggatggtgcttaaacattcatgaaggattcacccccatgatccaatcaccccatccccaaacyaggctctaccttcaatactgagtatgcaatttaacatgagatttgggtatggacacagatccaaactgtatcattctgtccctggcccctctaaaatctcatgtactcacattgcaaaatgcaatcatcccttctcaacagttcccaaactcttaactcattctagcattaactaagaagtccaaagtccaaggtctcatctgagacaaggctagtcccttccacctatga

SEQ ID NO: 864934 - DNA, 582 bp, Homo sapiens
ccattccctagttcccttttctaatgtctaggtgattcctattttcttcacttatttagtcctgattttacctcttgggctacacaatagaaagcaactttcttattttattttgtgtttgtttgcttgcttacagagataaggtcatactaccttgcccaggctggtctcaaacccctggattcaagtgttcttcttactttggccttccaaagtgttaggatgacaggagtgagccaccacatccagcctaacttccccatttggacgccccatrcctctgctccaattgtccactgtgcctttctccatccccccttacttcccattgcttcagattagtgaaatccgtcttacaaagattgacctagattttgcaggaggcttctttctctagcaacgtaaagataccagcctgattagtgtacatttgttgcctctgaagttttgcccttctcccagtgccagcccttgtatagagccctgccctggctcacggaggtcgccccttaaggggcctggagaaggatggagccgtgcttcttggaggaagacaagctgaagctagctttgcagctccaa

SEQ ID NO: 864935 - DNA, 530 bp, Homo sapiens
aaagtagcctattctcagcacttcagtttctagcagaataaattgatcacctgcgtatttctgcttctcttccatagggcttgggaggttgccttgggatcttgcacagattttttctttgaaagcccagagttgctgggtaattaacacccataggagcaaccttcaagcaataacaggctggaattgatgggtactcatgtcagttaaccmatccctccattctctgtggttcttctgagagtaaccagtaggaccagccccaaatgtcaacaatgacaaactgctcattaatactactatatttttctcaactcacgggtttatcttctttactcacacaagaaatctagaaacattaaactcatagagagtggaattgttgttaacagaggctgtggtggggcatggtgggtgagaaaggagaatgatggtcgggggtacaaagtttttgctagataggaggtgtaagttctaatgatctattgagcatcatggttactatagtcaataacaatgtattatatatt

SEQ ID NO: 864936 - DNA, 530 bp, Homo sapiens
aaagtagcctattctcagcacttcagtttctagcagaataaattgatcacctgcgtatttctgcttctcttccatagggcttgggaggttgccttgggatcttgcacagattttttctttgaaagcccagagttgctgggtaattaacacccataggagcaaccttcaagcaataacaggctggaattgatgggtactcatgtcagttaacccatccctccattctctgtggttcttctgagagtaaccagtaggaccagccccaaatgtcamcaatgacaaactgctcattaatactactatatttttctcaactcacgggtttatcttctttactcacacaagaaatctagaaacattaaactcatagagagtggaattgttgttaacagaggctgtggtggggcatggtgggtgagaaaggagaatgatggtcgggggtacaaagtttttgctagataggaggtgtaagttctaatgatctattgagcatcatggttactatagtcaataacaatgtattatatatt

SEQ ID NO: 864937 - DNA, 614 bp, Homo sapiens
ttgataaatgccacagatagaattatgggcagattaggtagagttggatagaattagggagcaggtcgtaagaaaattatggcaactgaagcactggcagtaaaggtggagtgaaagcgaaacaaaggtgtaaaatacaaaagagacatggagccaaggtttagcatatgaatgaatattatatataattgaagccccaamataagtggagataatactgggaagtgtagggtcaattgaagcccccaaataagtggagatgatactgggaagtgtagggtccttggttcttgtcttctcagagggaagaattcagccaagtgacacacagacacagtgaaacagtagcagggttttgttaaagtgacagtacactctgaaaactgagtcacagtgggctgctctgacaaacagacagactgggttgacactgaggaaccccctttatggaggtcttacaagattatttatgaaaggagtgtgaagaggtgttacttacaagcatgttttggatggtccactgggtatgcatgccttgtgactgtacatgctagtacatacattgtatgtctcattagcatcaaatataataagcaataggttagctttagtgc

SEQ ID NO: 864938 - DNA, 628 bp, Homo sapiens
gacaaaatacttgctggaaacactacagtaaaacctgaaaggaaaacagagctccgtcactttcacttgacctcattccagagtataacctatctcctggtacctgatatgcaggcattaacctggcaaatgcctttttttccattcctgtccataaggcccaccagaagcaatttgccttcagctgtcgaggccagtaatatacctttactgtcctacctcaggggtgtgtaaactctctggctttgtgtcacaatcttgttcacagagatcttgatcacttttgcstttcacaagatattacactggtccatcacattgacgacattatgttgattggatccagtgagcaataagtagcaaacaccctggacttatggtgagacatttgcatatcaagggatgggaaataaatctgactaaaattcagggaacttttacctcagtgaaatttctaggggtccagtggtgtggggcctgtcaagatattccttctaagctgaagggtaagttgctgaatttggcccctcctacaaccaagaaagagccacaatgcctagtgggcctatttggattttggaggcaacacattccttatttgggtgtgttactctggcccatttatcaa

SEQ ID NO: 864939 - DNA, 682 bp, Homo sapiens
tcaactctaaagtcaaaagtatcatctaaatatctaggtcacagatgtttgaaaatgtaggtacaattcatcttgaggaagtttctctccagctgtgaacctgtgaaactagacaacttatccacttccaaaatatgatggaggagcaggcataaaagtttagaatgaaactttttcattstaagagggatacatcaaaaggaacaaaggggtgagaggctgcaggcaagtccaagacctagcaaaacaacttctgttggaactaaagacatgaaggtagccctctctggcttggtgcccccacttctgggcctgctgggtgatggtcttgtcccacaagctttgctgggctggggcagcagccggacctgttgaaaccacagagatggctcaacctttttgaaactaaagtggaggcagccttgctcccagggcctttggtgggcctggtgatctctgaattaccttcagagtcactcttcccttatcttgaggaataaatcatagtcagtgctgaagagctctatagtccagtcctgtgcctttggtccaaactgactgcatctctgcttgcataataattccatctatattcctggcttctgcctatagggctggttaacatcatggataatctcttttaggagtgattgtccaaccacacccttggttttctcttgaa

SEQ ID NO: 864940 - DNA, 691 bp, Homo sapiens
accgcattccactttgtatttctatgagggtgactactccaggtaccttatgtaagtggaatcatacagtatttgccctttggtgactggcttgtttcacttggcctgatgttctcaaggttaatccatgctgtaatgtatgtcagaacttcctttcttttgaatgctgaacgataattctatcctatgtttctaccatattttgtgtatctattcatctaacatctcttctaacacataatttccttcctcagaaaccttcaatttttttwaacagaatacaatccaagatcttgggataattttcaaactctcaatgtcttatcaagcttatctcctaatgtcacttgccatatcttctgttctagccaaatttatttctgcagtgtttaaatatactgttatatccatgtttttggtcaaaccaaagtcccattctataaggctctcctctgtttccttacctggtttatattagtcactggagactctgctctgctcaaagtccaccccctccaccaaaatacctctgtccacccaaatctaaggtgagatatccttcctttaatgtcttatgccaagtcattttgttggtcaatgtgtgtggctgtcagtgtatggagacatcagtgttatcaatccactttgtattgttactggaatttctctttgtcatctcggtctatgatca

SEQ ID NO: 864941 - DNA, 593 bp, Homo sapiens
atacattcaacaaaaatgtcgcatccacccagctgattcatacactgtactcaatatgggaatacaacgtcaaacaagatggccatgcctcaggcgctcctgacaacacagtccagggagggaaatggacggagacccagagcacagcagagggcgctgtggcagagcaggcatcccagaggccagggtgtctaggctgagagttcyaaaagaaagcagctggtacagatgcctggaggcaaaaagaacagggcacactctgggaagccggaaaatattcaatatacactgaaaaagagggagtggtgagggaaggtggaaacacagggccagattctgtaagcccttgtaagctatgttaagaattttagatcttatcttaaatacaaagagaagccattgaaagtctcagggaagagactgatcggatttgcatttcagaaagcccatcacatgtgaatgtgatggggagaatgtacgcggaggaggggagttcagggtggtgacagggacactggttagagggctgctggtgaaggcccagccctggacagtggcaggtgccgcagaaataaggcaactgagagtttggt

SEQ ID NO: 864942 - DNA, 570 bp, Homo sapiens
tcttttattccaaggttttagaactgtggctgtgccttagcctgggattcgcaactactgtgttgggcacctccatcagtttggtttttattctgtcctggaagtttttactgtacattttaacattgattgctacacggacattctttctacyacccctttcagttagatgctctttttgtcttctcattctccaggccctcatcaacacagcaagtaattttcaggtaacattttttttccaagaaagttattttgtggatagtaatgtagtctttattattcacaagctctaagagacttcagccaaaagtacaaaaactatatttatactcagacttttccaattcttttcccagggctttttttttctcccctttatctcttagcccaaattcctaactcttcacacagtctattttagaaattagaaagctttttttttttttggagacagagtcttgctgtttcccaggctggcgtgcagtgacatgatcatggctcactgcagcctcaactccccagggcccaagcgatcctcttacttcagcctgctcagtagctaggacc

SEQ ID NO: 864943 - DNA, 570 bp, Homo sapiens
tcttttattccaaggttttagaactgtggctgtgccttagcctgggattcgcaactactgtgttgggcacctccatcagtttggtttttattctgtcctggaagtttttactgtacattttaacattgattgctacacggacattctttctactacccctttcagttagatgctctttttgtcttctcattctccaggccctcatcaacacagcaagtaattttcaggtaacattttttttccaagaaagttattttgtggatagtaatgtagtctttattattcacaagctctaagagacttcarccaaaagtacaaaaactatatttatactcagacttttccaattcttttcccagggctttttttttctcccctttatctcttagcccaaattcctaactcttcacacagtctattttagaaattagaaagctttttttttttttggagacagagtcttgctgtttcccaggctggcgtgcagtgacatgatcatggctcactgcagcctcaactccccagggcccaagcgatcctcttacttcagcctgctcagtagctaggacc

SEQ ID NO: 864944 - DNA, 664 bp, Homo sapiens
cattgaactatcactacttctcagagactgaagaagctgattcttttaataagttagaatggaaaacttaaatagaattgtataataaagcaaacatttcaatagaaacttctaaaacttaaaactgtatttaggtaggtttctcgatttacataaatgtagcataatgctctgtgcagaggaaattttttaaacattttactgaaagttattcttaagatatttaataactaaattgactaaagtgcactaaatataaagtcaacaaaaattaggagaggtaatttcycacttcagtgtcttgattgtggtaatcagtatacaatgtactggtataaaaaaccatcacactgtatacttcaatatctttttgtcaaatattttaaaattaaaagaataaaatggaaaaataatggtaactaaggatttcatatggatgttgaaataagaactaagattactattttatgtgagtctgatgttccttgagggttttaccccaattgctaaaaaaaaaaaaaactcattaaaaattcctttaagatgaagtggtagaagccagacctttaacattattggagcaatactttgaaagtaaatcacttagcagtcagaataacaatttggaaattgtgaccaaatagtcaaacacagctgggagacc

SEQ ID NO: 864945 - DNA, 605 bp, Homo sapiens
atacatcaagagctttttgttagtctctgtggagtttagtcacagtatgttgaggttctactgtgtgtcccttgctcaaagagttgacattctattctgggagatataagcataaaacacttgggtttctctgtatatcaacatctggtttactgacataatcaacagttcaactgtgaggcacaaacaytggaagaatagaaaaatatgtgatatagtgcttcctgtgcaccatgaacaataggtacaaatggagttcagagaagggataaatctaaggaactgatagtagtgttcaaggaggtttcctaaaggagatgggtacttaagaagggtcttgaaggatggtgggaaaaggaggaggacactttattcagtctgcctagcatgaactttggtagatttccttgattctatgtttctaagattttactctcatatttaaagatgcattgaatcagatagacctggtttccgattctgacttccttgcttaatagcagtgtgattctgagcagttgcttaaattgtcctgtgcctcaattaccttatcggtaaaataggcctgagaaatagtatcttcctcttagaatcacactaattga

SEQ ID NO: 864946 - DNA, 643 bp, Homo sapiens
ctaagcaggcttgacaacactggcttgaacctgaaatatgtttcttttcatattggccctatgtcctctttgtgggacatatatgtcagctcagctggtgggcaaaagttaggactggtaatgaccctaattaatgtggtataccctgccaatgagagaacgctctgggaatgtgagaggcatgtagatcatggggcaatatccaacattctcctctttgctctgtcctgtgtcctatccagcttcaaaaccctatacaaaagtttcagactgatggcccaatgagtgattggcataatgtttttaaaacatctaaatgtgaatgcctttaggaggattatgtactctagttttccatagcccccactacccactatcatatttcatctgcctgattcattcatttatattgtgtgcctggtctctaaaggcaactgattttgaaaaacctgccttgtgatcacrttttagtcttccttgtctcctccaacattcagtcagccttcaaatccttcagtccgacctgagacagtggccattcctctgtcatcctgttgttgccatcccaatccagatcctcattgtctcagatcttcctgattagaaattttctcctctagtccatcttgtatgctactgccaa

SEQ ID NO: 864947 - DNA, 637 bp, Homo sapiens
atgagacaaatgaaaaatgtatttttaagaagcatttcttggtttcagtaaagcagatttttgttgttgttgccatcattgttagatgttgttattcctcagtcatgagtttctaaatggctcagtacctttaaaaaagttatctaaatttagcctataatctcakcacattgggaggctgaggtgggtggatcacttgagctcacgaattcgagaccagcctgggcaacatggcaaaaccctgtctcttaaaaaaaacaaaaacaacaacaacaaaaaaaacccaaatattattagctgggtatggttgtgcatgtctgtagtcccagctactcgggaggctgaggtgggagcatggcttgagcctgggaggcagaggttgcagtgagctgagatcacaccattgtactccagcctgggcaacagagccagaccttgtctcaaaaacataaaaaagaaagaaaaattatctacactttttctgctatttcaataatgttgatccataagagaaaggtaaatttagtaggagttcctttgctattaaaattttgtgaagaatatggtctgtagctcagaatcatgttttatcacatacaaaaaaagctactctttaatatttgggcccttatacaat

SEQ ID NO: 864948 - DNA, 626 bp, Homo sapiens
taaggttcgacattgcaaaatactttgtatttgtccagtgtattttatctcaatcaaatgcacaagcttagaaatggactagaatctttacaccaattataggcatgatcatgtcagcttagtattttaaaaaattgactttacagtcccatttcaggatcctgtttagattttgttggacttctgtgttatatttctgtgtaacttggagtatttgtctaaatgtgtaggacctcaggtaattttatttctctgatttcaatgtctggtacatgttctccaacttacagacacattcasatagttagaagcatcatagtttatttgttctatttctatactctgggattaatttgtttctcagtacctgccttcctgtgaagccttccctcatcatttcattccaaacgctgaactcttattatattgtctatagcatgtgtaatggtggcagatatattataaaacttacatagatatccacattaacatcagcatgtatcataaactttatcatagttattttacatatttttctcagtgttcccactgctttcgcatagtagacccgtccccacccccattactgctaaagtggcctttctgaaagacaaattaaattgatc

SEQ ID NO: 864949 - DNA, 626 bp, Homo sapiens
taaggttcgacattgcaaaatactttgtatttgtccagtgtattttatctcaatcaaatgcacaagcttagaaatggactagaatctttacaccaattataggcatgatcatgtcagcttagtattttaaaaaattgactttacagtcccatttcaggatcctgtttagattttgttggacttctgtgttatatttctgtgtaacttggagtatttgtctaaatgtgtaggacctcaggtaattttatttctctgatttcaatgtctggtacatgttctccaacttacagacacattcagatagttagaagcatcatagtttatttgttctatttctatactctgggattaatttgtttctcagtacctgccttcctgtgaagccttccctcatcatttcattccaaacgctgaactcttattatrttgtctatagcatgtgtaatggtggcagatatattataaaacttacatagatatccacattaacatcagcatgtatcataaactttatcatagttattttacatatttttctcagtgttcccactgctttcgcatagtagacccgtccccacccccattactgctaaagtggcctttctgaaagacaaattaaattgatc

SEQ ID NO: 864950 - DNA, 626 bp, Homo sapiens
taaggttcgacattgcaaaatactttgtatttgtccagtgtattttatctcaatcaaatgcacaagcttagaaatggactagaatctttacaccaattataggcatgatcatgtcagcttagtattttaaaaaattgactttacagtcccatttcaggatcctgtttagattttgttggacttctgtgttatatttctgtgtaacttggagtatttgtctaaatgtgtaggacctcaggtaattttatttctctgatttcaatgtctggtacatgttctccaacttacagacacattcagatagttagaagcatcatagtttatttgttctatttctatactctgggattaatttgtttctcagtacctgccttcctgtgaagccttccctcatcatttcattccaaacgctgaactcttattatattgtctatagcatgtgtaatggtggcagatatattataaaacwtacatagatatccacattaacatcagcatgtatcataaactttatcatagttattttacatatttttctcagtgttcccactgctttcgcatagtagacccgtccccacccccattactgctaaagtggcctttctgaaagacaaattaaattgatc

SEQ ID NO: 864951 - DNA, 589 bp, Homo sapiens
acagaacaacacaatataataacagtgaaactacagggcaaaatctctgtttcaagagacatgttgactttagtacttcagccaagaggtaattaggaagtagtgaacaaaatgtgtacagggccagaaagacctgtgaccaarttcatgatagctattttctaaacataatagtaggcacgttacttaacactttcgagcctcattttttctatccacaaattaattgaccaaatatttattgaacaccaactatacagccaggtgcagtcttagctacttgggatacattgggataaaatgagacaaaaatatttctgccaggccctggtggagcttacattttatttgcgatagccccacaataaggagtaaacatgccgtgtaattgaattatggaaggtgatcattgttacttagaaaatagatcagaaaaagtgggatgaggagtgtaggagagaggtggtgggtggttacagttttcagtcaagtggtcagggcaggccagttcttgatagtacaatccttccagatattcaggccaaaaaacttggaatcatctttgactcctttttctcatacctcatgc

SEQ ID NO: 864952 - DNA, 589 bp, Homo sapiens
acagaacaacacaatataataacagtgaaactacagggcaaaatctctgtttcaagagacatgttgactttagtacttcagccaagaggtaattaggaagtagtgaacaaaatgtgtacagggccagaaagacctgtgaccaaattcatgatagctattttctaaacataatagtaggcacgttacttaacactttcgagcctcattttttctatccacaaattaattgamcaaatatttattgaacaccaactatacagccaggtgcagtcttagctacttgggatacattgggataaaatgagacaaaaatatttctgccaggccctggtggagcttacattttatttgcgatagccccacaataaggagtaaacatgccgtgtaattgaattatggaaggtgatcattgttacttagaaaatagatcagaaaaagtgggatgaggagtgtaggagagaggtggtgggtggttacagttttcagtcaagtggtcagggcaggccagttcttgatagtacaatccttccagatattcaggccaaaaaacttggaatcatctttgactcctttttctcatacctcatgc

SEQ ID NO: 864953 - DNA, 608 bp, Homo sapiens
aaggctgcagtgacctatgattgtgtcactgtactccagcgtaggtgacagagcaagaccttgtcttcaaacagacaaaaaagaatgtgggatatactgctcttgtgctaggataattgagttgtatttcaatatttttctgcmcaggaattttactacacagggaaaatgcttatgccctcaccaaggtgcatttataaatttaaggcccattagctaaacaatgaaagggatggaaagatttcggttgctgcaggttgtataagaagattttctatattagagtgttgtttaccctcctgaatcttgaagctacttcattttgagtatttacatctagttatgaaagttagttattactctttcagttccaacataacttccacatagaaacatttaaccagtatcatatgtaagttgtgtcataagtaagtgtcttataatttttgtaaacatttttatgtggtcttttcagtttaatattcttacctattctaaaagtatttgaaaaatgcaggaataattatttgtaatctggtttttatgtgtttttaccctcaatttacacatctttgaagttgccagactactcaggcattgctactaaa

SEQ ID NO: 864954 - DNA, 594 bp, Homo sapiens
atattgaaaaatattgtgccagcagagctaatgaaaagctttacttctttgttttacttttgtttttatgggtggtctgtggatgtgagggaacaaaaaagacctttttgttttttaaagttggcctgtacattataactataaaatgtataataagtaagttctrtcactgttttcatgcatcttctatgaatcatgaaatattttatccctaatgtgcattcaaatactagctgcttagctggaggtgttactaggtatttgtgtaaagagatcacttgtcttcaagaatatatgttatatatggaaaagtgatacttatcacttttttttttctttaccaatattttatgtcaaaatagaaacttccttacaattgttaagattgaaaaaaatggttacagatcatggcatcatctttagtaaattgggtgaataagacaatgatttaaatatgatgggtgctggcagtgaacacacatcagtttgtgtatgagccaagtagtgctctaagtgctttaaagactgtgcattgtttcttttaatcctcatgggagtcccaaaaatttggtactaatgttatctctcttttac

SEQ ID NO: 864955 - DNA, 678 bp, Homo sapiens
aagagtgtttttttttaaatttaaaaatgtacatgtatgctgtatgtactgttttaactgcaaaatatgtttaaatacaaaaataaaaaacatggctggacgtggtggctcacacctgtaatcccagcactttgagaggctgaggcaggtggatcacaaggtcaggagttcgagaccagcctgaccaacatggtgaaaccccgtctctactaaaaatacaaaaattagccgggtgtggtggcacgtgcctgtaatcccagctattcagggggctgaggcaggagaatcgcttgaaccctggaggcagaggttgcagtgagccaagatcacgctactgtactccatcctgggtgacagagagagactctgtctaaaaaaagaaaaaaaatgtaaaacatatattgtgacagttcataggaaaaagaactcactttgcactgaattaatcagggaagctttgtggggactgcaggattcaactrtcacttggggtagaaatagaaggcattctggattggagaaaaagttggttgcaattagaaattttttcttttaactattactcctgatgtaatgttagagttttctctgaggtaccatggtatacataattggtatagttttctcttaataatgactctttggggctcatgacctgatatatagttgtagatctat

SEQ ID NO: 864956 - DNA, 595 bp, Homo sapiens
tatttatgttaatctgagtaggagttgagctgtgcttaatgtttagtgtttcttgtagccataagtacgagaaacttttttttttacatattattaaatctccttatttttaatttttttattatactttaagttctagggtacatgtgcacaacgtgcaggttagttacatatgtatacatgtgccatgttggtgtgctgcacccattaactcatcatttacattaggtatatctcctaatgctatcccctccccactcgtccacaccacaaagggcccagtgtgtttcgttccccttcctgtgtccacgtgttctcattgttcaattcccacctatgagtgagaacatgyggtgtttggttttctgtccttgcgatagtttgctgagaatgatggtttccagcttcatccatgtccctacaaaggacattaactcatccttttttacggctgcatagtatttccatggtgtatatgtgccacattttcttaatccagtctatcattgacatttgggttggttccaagtctttgctattgtgaatagtgcctcaataaacatactgtgcctgtatctttatagcagcatgattt

SEQ ID NO: 864957 - DNA, 556 bp, Homo sapiens
actgaagtcttgaatccctcaaagtcgtctgtgaggattggaatcaacttcttccaaatgcctgttcatgttgacattttaacttcctcccttgaatcacaagtgtgttaatggcatctagaatggtgatcctttccagaaagttttccatttactttgctctaatccatcactatctgtggtagctatagctttacaaactgtatttcttaaataataagactcgaaagtcaaaattccttcttggttaatgagctgcagaatggatcttatgttagcaggcatgaaatcaatgtgaatcttcttgtacatctctatcagaacccttgggttactaagtgcattgtcartgagcaatactattttgaaaggaatctttattttcttagaagtctcaatattcagtataccatgctggaaacatatgtgctgtcatccaggctttgttgttccatttatggagcactagcaaagtagatttagcatgattcttcaaatccctcatgttttcagaatagtaagtgagcattagcttcaacctaaactcaccagcttc

SEQ ID NO: 864958 - DNA, 624 bp, Homo sapiens
accactgtcttctttttttttttttttccaactagtagcctgtgattgataataggtttcatttaacatacagtaatgtgtctacttcagcagaaataatagcacattctactgacagttacattggatacctttcaaaatgactttcaaaaatgacttcaaaatagaaaaataaatgccatggtaatgaaaattagggaggagtatatttttctcatatatatataattyaaaatctcaaaacatttgaggagaatatttaagtaaatgtattaaatggcagatttgtgtttggggatgcagcaagggaaaaacaagatcttaagaatagttagattgttatagaatttttgaaattctgaaattaatcattggagtggccataatatttatatatgtgttaaatttttggtaaataaatgtatcataatgtaaattggatggatttaattttactaaaatgaatttgagtctctggtagaattaagtttccgctctcaaaaatttttaaattgtcagtgtaattttaacatattcctaacaaattaaattataggctttattagtgttgctccatttggctgtggattattttgtttcttacctttggcttacatgtggaag

SEQ ID NO: 864959 - DNA, 645 bp, Homo sapiens
tctagagctcaaggagaaaaggagcccaggacagagttctgtggacacaaggatttagaggttgtaccaagaggaaagaaacagtggggtgggagaagaactagagagtgaggcatcagggaatccaagagaagccatttcaaggaggagaaagctaatctctatgccacctgcttaccaagtctggtaagatgacaacgaagtaacctttggatttgtcaagttggaaaacactattgactttgataagggcagactccttggatggttgagagcaaaccttattgaggtgggtttagagaagaactaacaaggtaaggaaatagttaagatgaaaagcttcagaaaatcagccagtaacaaagaacattatatattcaayaaattccttctatacagtacattgaatcatttattttaaaaaatttatttgacactatatgtcaggctcatagcattagactttgtttttaattgtttatttgttctgattagcacagcttctcatttttcatataaagctttttttaaagcattttgaaaaggctgtggcaaaagtgtttatgtatactcacaaaatagtatcagtgatatttaatgcgttttatctgattaatatcttcttggttcaaaatatcttaaatt

SEQ ID NO: 864960 - DNA, 527 bp, Homo sapiens
cccttgcagcttccttccttttccactaaaacaagcaccctaagtgtcatgaggccaccagaacacaccatgcttcctaaggtaacatggtaggatattaaatatttgaggaacttgacttatactttggtaggcagaaacacagggtatcagggacaaatataaatgctcatctttttttttttttttttttttggkgtgctgagtattttcctgtatctgcctggttaaaattcctgtaatttaatcaagaaatattattcaaaagaattcctggagaaaaaatgtccaaccaaaagagaaagtggtaaaatatttgcaaaatttaagaatcatattttcaaataattgtaatggaaaaatactctttataaaatcatagtaaaatgaatcatttaaaattgtgtgccacacatagcatcatcacagttgtgctaagatgcatgggggaaaaggctgaaaggaacctaataatggctatcattgggttggggattgtattagtctgttctcatgctgctataaag

SEQ ID NO: 864961 - DNA, 634 bp, Homo sapiens
cctggagtgcaaaaataggaagaatcaggactctggataaataagcctgccttcgttaggttcagtccttctcccagctgcattattcagtccatcccttggcatttaaggagttagaggaagaaattgtcttattcgtccttatgtagatgaatcwcctggttgaggagacaatttttaagaagagctgctgcctcttacagaagagtatggtttttgaaaagaaatcattttacctgtacaactcagtccttgataatggatactatgaactcatgcttccttgatgggtcctgtatttgacctttaacttcctaacacttctctatgaaatgttttctctcctttatgaccaagtcattcaacttgcagcatccaaccctatgaagggactattggatagagtggattttatctgactaaatattttaaaagatttgtgttttttaactgcttgatgaaatataattagccctgaaatggaaatggggagatccttgtcctttcctttttctgctgataactagctttgcaactcagtcaagttcctccacctctccagatcccagtttcctcaaaggtcaaagaggaattcattactcaatatctctaagctaattttttattataaaat

SEQ ID NO: 864962 - DNA, 561 bp, Homo sapiens
aaatccagaaaaacaacatcatctttgtattaattactctctgatgctttttgcctacttgttttggttgcttactctttgataatctctttattagctgataacatttatatcattttctgttcataaaatttgaatataatttagtcacatagttaatcaaaatgtgtgttttattattgaacatttggactcagcaccaatgaaaacagaatcctccaattacagtgttacacatatgaygattggcagatttttttcacagactggcacctggctccatacacatccaactttgtttctgcagcactgtgcacactgccaggcactgtatgacattttaatatgatgatatgatatgatctctggccctctctctgcctttgtacataatgctgagtgaacaacaagagtattcctggaaggacagtataatatcactgtataatgaagcaatgacacacactcatgtgaaacccactgaaccaaactgagtgtctctctaacttaacctccccttcgttggatccccaaagtgttcctggcagttgagtgctaccc

SEQ ID NO: 864963 - DNA, 365 bp, Homo sapiens
ggtcagcacaaatcaccccactaaacttacaaatcgacaagcaccaccacatacasaaagctttctaatcaactacttaattccttttttaaaaaataaaaatactatctatccagtctccatctttagttcttcacttttaatcatgcatgtaccataaagattatccgactatggtctataacaagcttgtccaacctgcagccaagatgctttaaatgcagcccaacacaaattcataaactttcataaaacattatgagactttttatgagtttttttttttttaaaaaagctcatcagctatcattagtgtattttatgtgtggcccaagacaatgcttcttccattgtgggccatggaa

SEQ ID NO: 864964 - DNA, 613 bp, Homo sapiens
ctaaatgagttcattgatttgtgtgtgtaaaagtgcttagtacaatgcctagacttatcatttatcaataaatatcattcttaaaactgaccataaaaatattagaaaagtagaatatctagacaatattttagaaaaagggagcttaaagaatttggaaaatgtcattcatctgtccaaatgtctgccaagctaaggctctcactacagrgagaggtatagtttagatgttagagtgtaaacccaattttttaatgtggtcatagttattaattcttcatgccttgcaaattgttgtaattcagtaaaagccttttttcatcctgaaatttaaaaaaattatctagtggtttcttttttgctttcatggattcactgtcttcaaataaacttttgaactttggggaatttatgccatatgaggtttgaggttttgactcaacttcttttttcccatttagatatacagttatggcaacctctcattgtataaatgtacgggttattatttaatttcagaaacaatcacaatatgttatcctattggatactagttacaagttttctttgttttatttagatttctgaaactgatgaaaaagaagacctgctg

SEQ ID NO: 864965 - DNA, 569 bp, Homo sapiens
aggttttgactcaacttcttttttcccatttagatatacagttatggcaacctctcattgtataaatgtacgggttattatttaatttcagaaacaatcacaatatgttatcctattggatactagttacaagttttctttgttttatttagatttctgaaactgatgaaaaagaagacctgctgcatgaaaacckcttgatgcaagatgaaattgcctggctcaggctggaaaaagacacaataagaaaccaaaacctggaaaataaatacttaaaagactttgaaattgtgaaaagaaagcgtgaagaccttctaaaggctctaaaacggaatggggaaacattagcaaaaatgatagcctgttacagtggacagcttgctgctctgacagatgaaaacacaacgctgcattccaaactggagaagcaaagggagagcaggcaaagactggaaacagaaatgcaatcatgtggttgtagactcaatgctgctctatgtgatcatgatcaaagtcattcatcagaaagagatcaagagcttgctttccagggcacagtagataaatgg

SEQ ID NO: 864966 - DNA, 569 bp, Homo sapiens
aggttttgactcaacttcttttttcccatttagatatacagttatggcaacctctcattgtataaatgtacgggttattatttaatttcagaaacaatcacaatatgttatcctattggatactagttacaagttttctttgttttatttagatttctgaaactgatgaaaaagaagacctgctgcatgaaaacctcttgatgcaagatgaaattgcctggctcaggctggaaaaagacacaataagaaaccaaaacctggaaaataaatacttaaaagactttgaaattgtgaaaagaaagcgtgaagaccttcwaaaggctctaaaacggaatggggaaacattagcaaaaatgatagcctgttacagtggacagcttgctgctctgacagatgaaaacacaacgctgcattccaaactggagaagcaaagggagagcaggcaaagactggaaacagaaatgcaatcatgtggttgtagactcaatgctgctctatgtgatcatgatcaaagtcattcatcagaaagagatcaagagcttgctttccagggcacagtagataaatgg

SEQ ID NO: 864967 - DNA, 569 bp, Homo sapiens
aggttttgactcaacttcttttttcccatttagatatacagttatggcaacctctcattgtataaatgtacgggttattatttaatttcagaaacaatcacaatatgttatcctattggatactagttacaagttttctttgttttatttagatttctgaaactgatgaaaaagaagacctgctgcatgaaaacctcttgatgcaagatgaaattgcctggctcaggctggaaaaagacacaataagaaaccaaaacctggaaaataaatacttaaaagactttgaaattgtgaaaagaaagcgtgaagaccttctaaaggctctaaaacggaatggggaaacattagcaaaaatgatagcctgttayagtggacagcttgctgctctgacagatgaaaacacaacgctgcattccaaactggagaagcaaagggagagcaggcaaagactggaaacagaaatgcaatcatgtggttgtagactcaatgctgctctatgtgatcatgatcaaagtcattcatcagaaagagatcaagagcttgctttccagggcacagtagataaatgg

SEQ ID NO: 864968 - DNA, 608 bp, Homo sapiens
atgaaaacacaacgctgcattccaaactggagaagcaaagggagagcaggcaaagactggaaacagaaatgcaatcatgtggttgtagactcaatgctgctctatgtgatcatgatcaaagtcattcatcagaaagagatcaagagcttgctttccagggcacagtagataaatggtgtcatttacaggaaaatttgaaygtttgtattctgattctttctctgcaactttccaaagcttgagagtaagtccagagtcctcgaaactgagttccattacagaagagaggctctgaaagaaaaggctttggtttttgaacacgtgcaaagtgagctaaagcaaaaacagagtcgaatgaaggacactgaaaaaatgtacaaaagtggatacagtacaatggaaaaatgcatagaaaagcaggaaagattttgtcaactaaaaaaacaaaatatgttgcttcaacagcaactggatgatgctcgcaacaaagctgacaatcaagaaaaagcaatacttaatattcaagccagatgtcatgctagagtagaaagccttcaagctgagtgcagaaagcaccgtcttttactagaagaaaacagtaaaatgtt

SEQ ID NO: 864969 - DNA, 608 bp, Homo sapiens
atgaaaacacaacgctgcattccaaactggagaagcaaagggagagcaggcaaagactggaaacagaaatgcaatcatgtggttgtagactcaatgctgctctatgtgatcatgatcaaagtcattcatcagaaagagatcaagagcttgctttccagggcacagtagataaatggtgtcatttacaggaaaatttgaacgtttgtattctgattctttctctgcaactttccaawgcttgagagtaagtccagagtcctcgaaactgagttccattacagaagagaggctctgaaagaaaaggctttggtttttgaacacgtgcaaagtgagctaaagcaaaaacagagtcgaatgaaggacactgaaaaaatgtacaaaagtggatacagtacaatggaaaaatgcatagaaaagcaggaaagattttgtcaactaaaaaaacaaaatatgttgcttcaacagcaactggatgatgctcgcaacaaagctgacaatcaagaaaaagcaatacttaatattcaagccagatgtcatgctagagtagaaagccttcaagctgagtgcagaaagcaccgtcttttactagaagaaaacagtaaaatgtt

SEQ ID NO: 864970 - DNA, 662 bp, Homo sapiens
gatgttttcctctgattaaagtcaatgtgtcacttataaaattttaagttataaaatgttaatatagactaatagtaataatatagtcatactactgaaataataattttaatgtatttatgttgcaacattttaagaccatgataaatcagatatatggaaatgctcatacctaaaatggtattttgaagttgattcaataaattggggtactttgacagttaatttcagatttcctagatgagctgaagtgtattccctatttcataattacttttcttcagtagctttaaatatgtcttagtaggtaaaattttgytcttcttcatgtcagtttgacttaaatctgaaactatttcaatctcaagttatgtatagatatgatcattctattttcaaaggcatctaattttacttataatatggggaaaatgaagtaaattttagccaaatcatatttgatttaatcttcccactggcatttataatttactttcatttttaaataaaaaatttgctcctaatttttatttcaaggctcaattactatcatttggatataactttgtccaggacaaaaagaggcatagctatctgtgatttattagtttgacactgcatccccattttcagactaaggaggatttcagactaacgaggag

SEQ ID NO: 864971 - DNA, 574 bp, Homo sapiens
ttaaagccactaatcaactgcctttgcattaatcaaaagagagatttgcctaatctaatcaaataacctctttgaaagctggagttttctccagctagtagcaaaagggaaattcatagcaagggaacatttcaatacactgttgctatctttgaagataaaaagagccaggagcaaaaaccaaagagtggcctstaggaactggaggtgacccaagccaataggcagtaagaaaatggtgagctcagcagggtgtggtggctcatgcctgtaatcccagcactttgggaggccaagggaggaggatcacgaggtcatgagatcgagaccatcctggctaacacggtaaaaccccgtttctactaaaaatacaaaaaaaaaaaattagccggcatggtggtgcacgcctgtaatcccggccacttgggaggctgaggcatgagaatcacttgaacccaggaggcagaggttgcagtgagccgagactgcaccactgcactccagcctgtgcgacagagcaagactctgtctcaaaaaaaaaaaaaagaaaaagaaaaagaaaatggcgagctca

SEQ ID NO: 864972 - DNA, 593 bp, Homo sapiens
attataattttaaagggtaaagatataaagttcattgatgggattgcagtcttcagattgcaccaaaccacttgaaaaacttgagaaactaccacttctcaagctttgttttagtatcaaacaggaatattcattagggcttgtgctttcattcttacagtatattttaataaacagaagttatttctcaaatgtagttgaatgctccaatattttcctttaygttcagtgctgtatctcaagaactcttttacaaaaatattatcctatattatctttttaagtataaataaaaataattacctttttaaaagcttatgagtttaggtggaaatatgaagggccaaaaggaattggaagacattttcctactatttgttctttctcttgattttcatgattcattattcttgtagaagtgaccttaccacagtataaggttcacttataatcactgttctgccttgtaattttaggtgaatttgttacaaaatattatgaaatctataggaaaggccaactttcaaagctattaagcatttgacttaacagttgagggcaatattattcagaaaaacttcaatctcattcct

SEQ ID NO: 864973 - DNA, 626 bp, Homo sapiens
ttatgagtttaggtggaaatatgaagggccaaaaggaattggaagacattttcctactatttgttctttctcttgattttcatgattcattattcttgtagaagtgaccttaccacagtataaggttcacttataatcactgttctgccttgtaattttaggtgaatttgttacaaaatattatgaaatctataggaaargccaactttcaaagctattaagcatttgacttaacagttgagggcaatattattcagaaaaacttcaatctcattcctcagcgcaaaaaactgaaataaaactttaccactgccaagtcattaaattgctatgtagaatggcaattcagtatattctgcctctatatctaacaaaaattcataggatttgatgatgaagtctacaaatgcaagtcaaaatcactgctgacactattatataatagttcactaaaacatgacagatttaaatattttctgcaaagtacctgctaataaataatacaataaataatcaggctttaaacacctgacatttaacaagctttgtaaatttgtccaactcaagtctttctgctccacagttatttttgccactatcaactgtaacacatcttagcggattcc

SEQ ID NO: 864974 - DNA, 484 bp, Homo sapiens
acctattcatccatcaaaagcctaagaaaaccatgaaaaatcattcacccttctttccaaaatgacttgatattactcccaatgtccttaacttttagagcaattactctcgctgaaaggctaatagtcttttttaaagtttattttctatggacacatctttggttaccttaattaaacataatttaattaactactgttggtaatggttttccttgcttggctaacaaataagccattgaaaaaacttactttaattatagcytaatttccattttttgtttttgagaagaaattctgctgtgataaaattttgttttaatttactatttttttttcttaccttttagttttattcctgttggttgggaatattgtgagaagtgcccagtctggcaatgttgacatatattatattcttttagcacagccatagtcttctagcataacaaatataatgctttgctatctaatttgttaataa

SEQ ID NO: 864975 - DNA, 617 bp, Homo sapiens
aaactctcacatcagtgtggttcttgtcaggttattcagccttatctttcgccacttaccatactctgcacctttgttctagcatccagccaaactagactacacggagctccacagtgatcatcctcacctccacctctttgcatttacttcttccctctatcctacatgtgttttccttccccttcagatatcaacctakgaattgcctctatcaaaaagcctacaatattgacacaaacctgggctagtatcccttctatgtcttccagtaagtggtgtcttatgcctgtcattgtatgtatgactctgtatgggaattgcctgtttgttttttcggattatagcatacagttgttgaggggtgcaccgtatcatctttatcttgttaatccagtgcttgtcctagtaccttagcacatggttgctgaatacatgaatgaagagtgagaaaccagaagctctgatacttaactgccatgataatgaaatcagtgtgcaactatgggcaaattatatttaatagtaattgcatattgtacatatttttcattcttattaacactgataaacttttcaacttatactgactttctctcagttaactgtgaaatcat

SEQ ID NO: 864976 - DNA, 625 bp, Homo sapiens
ttggaaaagcttgacattgcagagtaagagttcacccattgagcacaaagcctcagaagacctgaaacaagattctgccatctctgtgatcccaagatgtcagcccttgccccagcaatgctgagttttcttctacttkcccattaaaaaggaatgtaatggaagcgaggggagctctccatcttcttcctgaagaagaacctagtctctttccccttcctcatgaatgggcattagtgcctcagacagttgaggactgcagcaacccctccactccagaattgggtggatggattttcaatgggctaaccttggctttcacaattgagctttttcagacccccattcttcatgctgggaatgggatggctggacttggcagttttctttcccctcatctttcaccaggagctggactcataatttcctcaggacagactagctggcacattatacccacctcagttctttctctctgatccctggaagaagatccctgtaatctctgtaaaggttttgaggggataagggtgtttaaccacctcccaactttcttctttttattctgaataaaggaaaaatgcgcacagcacgcaatttcaagccagtttcagatcaaaacccc

SEQ ID NO: 864977 - DNA, 632 bp, Homo sapiens
aattcacaaactgattaaacactgggtaaaagaccagaacaaattccttaccaaagaggatatacagatgtcaaataaatataggaaaagatgctcaacaccatatgtcattagggaatagcaaattaaaacaaccatgaagtattgctacacacctattagaatgacctaaatccagaacattgacaacaccaaatgctrgcaaggacgtggagcaacaggaactctcatcattgctgatgggaatgcgaagtggcacagccactgtggaagacagcttggtggtttcctacaaaactaaacatactctcaccatatgatccagcaatcatgctccttttaatttacccaaacgagttgaaaacacacaaaaatctgcacacagatgtttatagcagctttattaataattaccaaaacttggaggctaccaagatgtccttcagtaagtgaatggatacataaatgatggtgcatccagacagtggaatactactcagtgctaaaaagaaacaacctatcaagccatgaaaggacatggaggaactttaaacgcatagtactaagtgaaagaagccaaactgaaaaggccacatatcgttgattctaatgacattcaagatggcattctg

SEQ ID NO: 864978 - DNA, 632 bp, Homo sapiens
aattcacaaactgattaaacactgggtaaaagaccagaacaaattccttaccaaagaggatatacagatgtcaaataaatataggaaaagatgctcaacaccatatgtcattagggaatagcaaattaaaacaaccatgaagtattgctacacacctattagaatgacctaaatccagaacattgacaacaccaaatgctggcaaggacrtggagcaacaggaactctcatcattgctgatgggaatgcgaagtggcacagccactgtggaagacagcttggtggtttcctacaaaactaaacatactctcaccatatgatccagcaatcatgctccttttaatttacccaaacgagttgaaaacacacaaaaatctgcacacagatgtttatagcagctttattaataattaccaaaacttggaggctaccaagatgtccttcagtaagtgaatggatacataaatgatggtgcatccagacagtggaatactactcagtgctaaaaagaaacaacctatcaagccatgaaaggacatggaggaactttaaacgcatagtactaagtgaaagaagccaaactgaaaaggccacatatcgttgattctaatgacattcaagatggcattctg

SEQ ID NO: 864979 - DNA, 632 bp, Homo sapiens
aattcacaaactgattaaacactgggtaaaagaccagaacaaattccttaccaaagaggatatacagatgtcaaataaatataggaaaagatgctcaacaccatatgtcattagggaatagcaaattaaaacaaccatgaagtattgctacacacctattagaatgacctaaatccagaacattgacaacaccaaatgctggcaaggacgtggagcaacaggaactctcatcattgctgatgggaatgcgaagtggcacagccactgtggaagacagcttggtggtttcctacaaaactaaacatactctcaccatatgatccagcaatcatgctccttttaatttacccaaaygagttgaaaacacacaaaaatctgcacacagatgtttatagcagctttattaataattaccaaaacttggaggctaccaagatgtccttcagtaagtgaatggatacataaatgatggtgcatccagacagtggaatactactcagtgctaaaaagaaacaacctatcaagccatgaaaggacatggaggaactttaaacgcatagtactaagtgaaagaagccaaactgaaaaggccacatatcgttgattctaatgacattcaagatggcattctg

SEQ ID NO: 864980 - DNA, 552 bp, Homo sapiens
tctgaggaattactatctatggcagttatggatgtatgaaatatatttcttaaatgagactcaaaagtttagatgactccatgggctgaagaatggttgttgtttcagccggcatgagaacaacattcattctccatcagagctcttgggtgaccaggtgcattgtcgatgagcagtaatattttgaaaggaatattttttgggcagtaggtctcaacagtgggcttaaaatattcagtaaaccatgctgtaaacagatgtgttgtcatccaggctttgttgttccgtttatagagcacaggtagagtagayttagtataattcttaaaggtcctagtatttttggaatagtaaatgagcattaacttcaacttcaagtcaccagtggcattagcccctcacaagagactcagcctgtccttcgaagctttgaagccaggcattggcttctcctctctagctatgaaggtcttaggtggcatcttcttccaaaagctggctgcttcacctacactgaaaatctgttgtctagtgtagcctccttcatcactg

SEQ ID NO: 864981 - DNA, 552 bp, Homo sapiens
tctgaggaattactatctatggcagttatggatgtatgaaatatatttcttaaatgagactcaaaagtttagatgactccatgggctgaagaatggttgttgtttcagccggcatgagaacaacattcattctccatcagagctcttgggtgaccaggtgcattgtcgatgagcagtaatattttgaaaggaatattttttgggcagtaggtctcaacagtgggcttaaaatattcagtaaaccatgctgtaaacagatgtgttgtcatccaggctttgttgttccgtttatagagcacaggtagagtagatttagtataattcttaaaggycctagtatttttggaatagtaaatgagcattaacttcaacttcaagtcaccagtggcattagcccctcacaagagactcagcctgtccttcgaagctttgaagccaggcattggcttctcctctctagctatgaaggtcttaggtggcatcttcttccaaaagctggctgcttcacctacactgaaaatctgttgtctagtgtagcctccttcatcactg

SEQ ID NO: 864982 - DNA, 610 bp, Homo sapiens
ttttgttaacccaggacctcttgttctctaattgtttaaaggaaataactcataaagtctgactcaagctagcattggtgagatcagagagctcagtaaaaattccacacttccatgctgcaggcaatgaagatgtcgctggaagggtgagaccacccaaggcatctctttggcaatgaactcatccttaaagcagacaygctctgaccaccagtgaattttcccttcagtaaaaatagagtcatatttagctggaaaggtagaagaaaagtaggagtctatctatatttaaaccatatggtctgaagtgaaatgagaacaaatctcctgacagattgatgttaggaaaattgaatgaaacacaagtgcttttcagcagatctaattcagaaggaggttacttggagttgtaacacagattctgactctcctttcagtgccaggttcaccgacatcttctgacatttctcctcctaagttgcattctgtgcgtaggggttgtccaagttgctctcctctaaaaaggggttccaagaggaacacattgagcaataatttatttttgaaataggagtttcataaaggtttcctttgcttttgagtttttaaa

SEQ ID NO: 864983 - DNA, 650 bp, Homo sapiens
tttatcccagcaccatttattgaatggggaattctttctccattgcttgtttttgttaggtttgtcaaagatcatatagttgtaggtgtgcagtcttatttctgagttctctattctgttccattggtctatgtgtctgtttttgtaccagtatcatgctatgttggttactgtagccctgtaaaatattaatagttcagaggtgggtagcatgatgcctccagctttgttctttctgcttagcattgccttggctatttgggctcttttttggttccatttgaattttaaaatagttttttttttctagttctgtgaataatctcagtggtagtttaacaagaatagcattgaatctataagttgctttgggcagaatggccatgttaatgatcttcctattcatgagcatggaatgtttttatgtttctttgtgtcatctctgatttctttgagcagtggtttgtagttctccctgtagagatctttygccacccgagttagctgtatttcttggtattttattctttttgtggcagttgtggatgggagtttattcatgatttggctcttggcttgactgttgttagtgtacaggaatgctagtgatttttgcacattgattttgtatcctgagactttgctgaagc

SEQ ID NO: 864984 - DNA, 650 bp, Homo sapiens
tttatcccagcaccatttattgaatggggaattctttctccattgcttgtttttgttaggtttgtcaaagatcatatagttgtaggtgtgcagtcttatttctgagttctctattctgttccattggtctatgtgtctgtttttgtaccagtatcatgctatgttggttactgtagccctgtaaaatattaatagttcagaggtgggtagcatgatgcctccagctttgttctttctgcttagcattgccttggctatttgggctcttttttggttccatttgaattttaaaatagttttttttttctagttctgtgaataatctcagtggtagtttaacaagaatagcattgaatctataagttgctttgggcagaatggccatgttaatgatcttcctattcatgagcatggaatgtttttatgtttctttgtgtcatctctgatttctttgagcagtggtttgtagttctccctgtagagatcttttgycacccgagttagctgtatttcttggtattttattctttttgtggcagttgtggatgggagtttattcatgatttggctcttggcttgactgttgttagtgtacaggaatgctagtgatttttgcacattgattttgtatcctgagactttgctgaagc

SEQ ID NO: 864985 - DNA, 525 bp, Homo sapiens
aaatcttttcctacatgaaaatcttgttcaaaagagaaaaccagattttaccattgcatcagtgtattattaatactaaaactaattttaataaaaccttataaacaaatcaacccaacccctgtcagtttttgaatacataagattttcataaaccttttataacctcttaaaagttttttcccaaactttctatatttatttagttttatctatatcatttccccttcaatttgaaacatttacataacttctaaactagataaaattattttttctcaataaacaccacattctcatgsctttctttgaatcttccttaccaaaaacacacccaattttccttgtacactttgcatacaaaaggatttctcttttatatagtagttttaattacatacattaattataatgttaatgttggtaacccttatttttaggatgttgctaattttaattgttatgtaccagacgcagatcctgggaaagagacagggctgtgaattcctggagggtctgacccct

SEQ ID NO: 864986 - DNA, 569 bp, Homo sapiens
attagaagtttgacataggctaaaattaagtgtaggtagggctgctccttttgtctgattctctagatgagaatcttttttcttgacttttgcagcttctagagatcatccacattcctcggctaattttcctccatcttcaaagccagcaaatttgcattcctctgctcagtgtttcagagtcacatctccctctgaatctgaagccactgggaaaaggttcttcaatgtcagtgactcatgtgacaagactgggctcaccctgataatccaggacaatttctctatcacaaggttcttaattttgttgcttctgcaaaggaccttttgccatgtaacatgttcataaattcttcgaattagggcatggatattttgaygggtcattagtctgcatagtaatgcagactaatactctttcctgaatgcattaatactattaatggttaaagagggaaatttcataagagcaaagaggctaattcattaggaatacaaaatagtcatacatgcctatgtatctagtaatagagatggatgaagcaaaaattgatcatgtgaattaaagg

SEQ ID NO: 864987 - DNA, 635 bp, Homo sapiens
gactcatgggacttcctgtagctgcagtggcttagaggtggcctccttcagccaccacccccatggaatgtggggctgtggcggacctgtgaactcccctagactagttccttaggggcagggcctggaattagcatggcytcacattcttctgtgctttctgctctaaggatgcttggctccagaggaagtaacctggactagatctgtgctctcctttcaaaccattgtgaagctgtattgcttccattccaaatcttgatggttcatctttaaaggtggaaacttctgccattttctaaggttcatccttgtgaacagtttcactttgagtaaattctcataatatctggatgacttcaaaaagctttgaaagagttgccaaggcacgaccacactgatgttttctaagtgctttaattcactttctcggtttattctagaaatgctatacacagcattgtacgtagtaaggtgcagattggtgcaaagttcacctaatttgatccaaagcaatatcagaggaaagtcctagttaacttcactttctagattatgtcaccttgatctcagatcctaatgttgcacatccagcaatccttcttagggccaggcttgaaatattttggcccctc

SEQ ID NO: 864988 - DNA, 667 bp, Homo sapiens
gatttagaaaaatgaatactgagaaaattctatgcttagaaaaggtaatacccaatgctggcaattatacaatgaaatggacattcatacagtgccagtggcagtataaactggcactgggatagacgttttggaaagcaatttggcagcataggtcaaaagccactaagtgcacactgtaactcaggaactatatttggatttttttttgtcctaaagaaattatccaaaaacatgacaaagctggcatttctgtgtgcacagaaatgatattgaaagatatttttcataawttttaaaagaaataaattgaatattcatctatactggagtaattaagtaaatgccatgtctactcattgggattttaagcagcaacttaaaagaatatatagaagtgttgaaaatttttatgattttatgttaaatgaataactaaattacatactagaaaataaacaaatttatgcctattataaaaatcgaattttaaattaatccccaaattttaaattcattccatgtgatacatttcccaaagtctttaaggcagtgcttctgaaaactgtattagctgcagagtagcttgtgttcatgtttttagttgatggaaacctaattcttggtaagctaatatacctcccaatcttggactggttatgggaga

SEQ ID NO: 864989 - DNA, 667 bp, Homo sapiens
gatttagaaaaatgaatactgagaaaattctatgcttagaaaaggtaatacccaatgctggcaattatacaatgaaatggacattcatacagtgccagtggcagtataaactggcactgggatagacgttttggaaagcaatttggcagcataggtcaaaagccactaagtgcacactgtaactcaggaactatatttggatttttttttgtcctaaagaaattatccaaaaacatgacaaagctggcatttctgtgtgcacagaaatgatattgaaagatatttttcataatttttaaragaaataaattgaatattcatctatactggagtaattaagtaaatgccatgtctactcattgggattttaagcagcaacttaaaagaatatatagaagtgttgaaaatttttatgattttatgttaaatgaataactaaattacatactagaaaataaacaaatttatgcctattataaaaatcgaattttaaattaatccccaaattttaaattcattccatgtgatacatttcccaaagtctttaaggcagtgcttctgaaaactgtattagctgcagagtagcttgtgttcatgtttttagttgatggaaacctaattcttggtaagctaatatacctcccaatcttggactggttatgggaga

SEQ ID NO: 864990 - DNA, 646 bp, Homo sapiens
ggtatgtcggtcaccattcatccaccttctaatctttccagaaagaggagtggtccattcagctctgggcacgtgtctaaatggagagccagattctcattattctcctggtcattggtagactctttcctttttttttttttttttgacggagtctcactttgttgtccaggctggagtgcagtggcacgatctyggctcactgcaagctccgcctcattttcctgcctcagcctcccgagtagctgggactacaggtgcccgccaccacgcccagctaattttttgtattttagtagaggcggggtttcaccatgttagccaggatggtctcgatctcctgaccctgtgatccgcctgcctcggcctcccacagtgctgggattacaggcgtgagccaccacaccaggcccagaatctttcctttacatttaaagtcaaaatttgaggcttctggtccagttcctgatttcactcattcatttattttgtgttgatctgacagaggagatagttcctcttgtgctctgcaagaaagtgagaaattcattgtttaagtgtctgaaagtattcatttttttccatatagaaaaaagtgaatgaacaactacagtcttcagattgcaaaaacatatcaaacctattt

SEQ ID NO: 864991 - DNA, 646 bp, Homo sapiens
ggtatgtcggtcaccattcatccaccttctaatctttccagaaagaggagtggtccattcagctctgggcacgtgtctaaatggagagccagattctcattattctcctggtcattggtagactctttcctttttttttttttttttgacggagtctcactttgttgtccaggctggagtgcagtggcacgatctcggctcactgcaagctccgcctcattttcctgcctcagcctcccgagtagctgggactacagktgcccgccaccacgcccagctaattttttgtattttagtagaggcggggtttcaccatgttagccaggatggtctcgatctcctgaccctgtgatccgcctgcctcggcctcccacagtgctgggattacaggcgtgagccaccacaccaggcccagaatctttcctttacatttaaagtcaaaatttgaggcttctggtccagttcctgatttcactcattcatttattttgtgttgatctgacagaggagatagttcctcttgtgctctgcaagaaagtgagaaattcattgtttaagtgtctgaaagtattcatttttttccatatagaaaaaagtgaatgaacaactacagtcttcagattgcaaaaacatatcaaacctattt

SEQ ID NO: 864992 - DNA, 671 bp, Homo sapiens
gcaaataattgtccattttgtttttgtgtcctttttatggagtttgttttttctatgcaacagtcacttttttggttataaaatctatcaaagacacttaaaagtgacttggactggaacataaaattgtttaagttctgtgggatcattgcaaactcacgstccattgatgtctgacagagtcttatttgactaaagaaatgtgactagcagtggtgttgcaatattcaagtagaagctttgagacattgtgcggttctaccatgttctcttttctttatccatggcgttggaaatgtcttcacagggcctactccttcaccaggactgtcagataaatactagcagaacagcaaccagccactgtgcaatgtacatgtagcaggaggaagaaatgcatgttttgcttctagaagtcattgagattttagggatcgtttactagcaccatgtaacttagtctaagcttcctgataaagtcacattccttctaaatggcatttcataattcccaagtttcttattctttgctatgcatttgtgttgctgttgtaaacaacatgccttgttttattctgttttcttctggaccattgtttatacaatgcagtgatttgtacttatttttttatgttgcaaaaccaaacatctgcactatgaacaatatcttt

SEQ ID NO: 864993 - DNA, 671 bp, Homo sapiens
gcaaataattgtccattttgtttttgtgtcctttttatggagtttgttttttctatgcaacagtcacttttttggttataaaatctatcaaagacacttaaaagtgacttggactggaacataaaattgtttaagttctgtgggatcattgcaaactcacgctccatwgatgtctgacagagtcttatttgactaaagaaatgtgactagcagtggtgttgcaatattcaagtagaagctttgagacattgtgcggttctaccatgttctcttttctttatccatggcgttggaaatgtcttcacagggcctactccttcaccaggactgtcagataaatactagcagaacagcaaccagccactgtgcaatgtacatgtagcaggaggaagaaatgcatgttttgcttctagaagtcattgagattttagggatcgtttactagcaccatgtaacttagtctaagcttcctgataaagtcacattccttctaaatggcatttcataattcccaagtttcttattctttgctatgcatttgtgttgctgttgtaaacaacatgccttgttttattctgttttcttctggaccattgtttatacaatgcagtgatttgtacttatttttttatgttgcaaaaccaaacatctgcactatgaacaatatcttt

SEQ ID NO: 864994 - DNA, 671 bp, Homo sapiens
gcaaataattgtccattttgtttttgtgtcctttttatggagtttgttttttctatgcaacagtcacttttttggttataaaatctatcaaagacacttaaaagtgacttggactggaacataaaattgtttaagttctgtgggatcattgcaaactcacgctccattgatgtctgacagagtcttatttgactaaagaaatgtgactagcagtggtgttgcaatattcaagtagaagctttgagacattgtgcggttctaccatgttctcttttctttatccatggcgttggaaatgtcttcacagggcctactccttcaccaggactgtcagataaatactagcagaacagcaaccagccactgtgcaatgtacatgtagcaggaggaagaaatgcatgttttgcttctagaagtcattgagattttagggatcgtttactagcaccatgtaacttagtctaagcttcctgataaagtcacattccttctaaayggcatttcataattcccaagtttcttattctttgctatgcatttgtgttgctgttgtaaacaacatgccttgttttattctgttttcttctggaccattgtttatacaatgcagtgatttgtacttatttttttatgttgcaaaaccaaacatctgcactatgaacaatatcttt

SEQ ID NO: 864995 - DNA, 658 bp, Homo sapiens
gaatacttttgttatttctgcgaagaatgtcattggtgttgtgatatgccttacttttaaaagttaaacagcaaattctcattaagttcaatttttttttcattttaaaaatacttggttctaaggagctgaaatttccactcattactcttgttgatggagcagcctggtcaggatcaagtatcaccagcacctagtgaggcgctgtcatgggctgaactgtgtcccccaaaatkcatatgttgaagtcgtacccctagtacctcagaatgtgactatatttggaaatagggtctataaagaagtaattaagttaagatgaggtcattagatgagtcttaatccaatatgtctggtgtctttatgagaagaggtaattggaacacaaacacacacagagggatgaccatgtgatgaggagaacacaggcagaacacagacatccgtgagcctaggagaggtctcagagggaaccaaccttgcagatgccttgggctcaggcttccagcgtccagaactgtgataaataaatgtgtgcgtttcagcctcccagttgtggtactttgctatggcagctctagcaaacaaatatgggcaccaaccaaacaaccaactatcatagtcacatggaatcaaggctcaggtgaaaggacctgac

SEQ ID NO: 864996 - DNA, 658 bp, Homo sapiens
gaatacttttgttatttctgcgaagaatgtcattggtgttgtgatatgccttacttttaaaagttaaacagcaaattctcattaagttcaatttttttttcattttaaaaatacttggttctaaggagctgaaatttccactcattactcttgttgatggagcagcctggtcaggatcaagtatcaccagcacctagtgaggcgctgtcatgggctgaactgtgtcccccaaaatgcatatgttgaagtcgtacccctagtacctcagaatgtgactatatttggaaatagggtctataaagaagtaattaagttaagatgaggtcattagatgagtcttaatccaatatgtctggtgtctttatgagaagaggtaattggaacacaaacacacacagagggatgaccatgtgatgaggagaacacaggcagaacacagacatccgtgagcstaggagaggtctcagagggaaccaaccttgcagatgccttgggctcaggcttccagcgtccagaactgtgataaataaatgtgtgcgtttcagcctcccagttgtggtactttgctatggcagctctagcaaacaaatatgggcaccaaccaaacaaccaactatcatagtcacatggaatcaaggctcaggtgaaaggacctgac

SEQ ID NO: 864997 - DNA, 586 bp, Homo sapiens
gcacttcatgttcaataacccatttagcctccactaaacttagatatacaatttttacctcatcttaccagtgaggaaactgaggttcaaagaagttaagagtcatatttccaaacccacacaaatgcatgtggctaactcaagattccagttgaggcatgccaaactcgagttttttctcctcgcaatgatgcctcattaggtcctgctggaagctgagggccctcaccacctgctgctgtgttcagctgtgtgtctacacaagagtrgatggtggtacctgcaacaggaacactctgcttggccactgtgtaaccaggccagaagctcaggcccaagcacagaattcaggccatcgtttcttaggggcacttgatttaaaaagtgtccatacacagtaacctagggaaaagatgagggggtcctgcagctttcaccccatagagaaaaatgcttttagttttctttcacaggaatgtctgaaggtaacaggcatagagaagaatcttcctgcaagcgtgtttgtgtgtagtgaacaatgattcctcacatttgcatagtatttgatagtttgtaaagcccttac

SEQ ID NO: 864998 - DNA, 681 bp, Homo sapiens
ggaacaaatggacttaacagatgtatacagaacattccatccagcaaccagagaatacacattctattcaacagtgcatggaactttctccaagatagaccatatgataggccacaaaacaaatctcaatacatttaagaaaactgaaattatatcaaggactccttcagtggaataaaactggaaatcaactccaaaaggaaccttcaaaaccaagcaaatacgtggaaattagataacctgctcctaaatgatcattgggtcaaaaatgaaataaaaaatggaaattaaaaaattcttccaactaaatgataataatgacacaatcaatcaaatcctctgggatacagctaaggcggtgctaagaggaaagttcatagccctaaattcctacatcaaaaagactgaaagagcacaaacacattctaaggtaacacctcaaggaactagagaagcaagaaycaaccaaacccaaacccagcagaagaaagaaaataaccaagatcagagcagaactaaatgaaattgaaacaatgacaacaacaaaaaaaagagataaatgaaacaaaaagctggttctttgaaaaaaataaaattgatagaccattagcaagattcatctagaaaagaagagagaaaatcctattaaattcagtaagaaacaaaatgggagatgttaca

SEQ ID NO: 864999 - DNA, 601 bp, Homo sapiens
ccgagtgtatgttaatgaactaatagcttgagtgaagacttcacaattaatattgcattaccttgcatttatttagcacttcacaatttacaaaatgcactcacttatctcattcgtcctcctgataatcctgtgagatgggccaggagacatgaactatgccccaagacacctgaggttccgagaggttaatgaaccgtgtttggyactggagagctgatattgcaccctacgttctctgatgatcttgatctttctactaccccagaagaaaagatggacctaggaagaaaaaaaacagtggggtcaattttgtcccaggttgtaggtaaatcaaataccaatatcctctacaattttcactgaaaaacaatacaacaaaatttgaatgattaatggatataaaaatatggggcgtaaggtggagatggttaatgagtacaaaaatacaattagaatgaataaaatctagtatttgacagcacaatagggtgactatagctaacagtaacttatcatacatcttagggaaatgaactagtggaattggaatgctcctaacacaaataaattataaatgtttgaggtgatggataccaca

SEQ ID NO: 865000 - DNA, 516 bp, Homo sapiens
ctggtacagtttctaaagttcgtcattactgatttttagttttattccaatgtggtctgaggagatatttaacataatttcaacttttaaataaattttgatatttgttttatggcctaatatatggtctattatggagaatgttccatgggctgatgagaagaatatatagtctgcagctgttagatgaaatgttctgtaaatgtctgttaggtccatttggtctgtartgcatattaaatcattgtttctttgttgattttctgtctagatgattttccagtgctaaaagtggagtgttgaagtacccagctattattgtattgaagtctatctctctccttagctgtaatagcatttgctttacgtatctaggtggtctggcattgtatgcatataaacttagaattgttacatcctcttgctgaattgatttctttcttatataatgaccttctttgtccctgtttatgttttttgacttatataagtataacttatatactgctgcctgct

SEQ ID NO: 865001 - DNA, 600 bp, Homo sapiens
cctgagcgatcaaaatcccaaaaatgtaactctggaaaaaataatttaaaaacgttttaaagacatttatttactcttttaaaaagggatttacttgaaacataaaaacatgaaagaacccttcataggccactttacataataaaaaggcaataataacatacatatttttgtaagtataagcaggtatagtartgacagttgcacaagtataacagttactagcaggcaaaccctattcataataaataaataaaaaagcaaaatgtatcgatgcttatcactatggttggtaattgtgtgccgtcggcttcttgactgcgatcatctgaaatactgtgacagacaatctaagtcttttgatgagatccatctaaaactataatgggtcaacaccacatattccttcatttattgaggaagttgtaatgtttttacatacatgaacaatgcttacacacaaagtcaacattgtgatagtgtgctttcctggagtgaaatttgcaaaaatgtataacacaagttataactcgaaaagtctttacacaatgtatatctccagtattggaaataaagcaaagatgagatacgtagcaacat

SEQ ID NO: 865002 - DNA, 580 bp, Homo sapiens
ctttttcttaatttttggatattcccaggctgtggagtttgtctgtgaaatttctcaaattgttgtaaatctccaaaatcttttccaatatatttattgaaataaatccatgtataagtggacctatgtagttcaaatccatgttgttcaaggatcaactgtattttaaagtattgcattgcaatgaatagctgatttttttgttggggggaggggtggggcatggctctccttggagaatacgttcatattcattttctatgtgacactactctttttgaaattcttccatgattcaatacgcaccaatttgagmattccctgttaaagtttctcatcttctgtgccatgcttctatgttgctttggatactcagaaatttattacacatgcactggtatacagaccacaaatttggtggaaacaatactggtaatcgaacagcaacactgttgcttaagtgtcttttcatcctacaatgcacagaattatttctgaaacagtaactttgctggcttctttaggcaaatgtggcttttatccatccattgtcagctggaaagagtgccaatgcagaaaa

SEQ ID NO: 865003 - DNA, 642 bp, Homo sapiens
gagtattttaccatttttttctcctgctccttttacatatattctccttgtcttgtgctctcatgggcagagaaaacatttaaagagttttgacaagctcataatgtggcttagaataaactgaatgaaaagtcaatatggatgatcatagctcagtgaattgtggaaatacactctagagaatggccagatattatgcacagcatgaaaacatttagaagctggttgaccatgggctgaacgtgaactagcaatgtgggaacttgaagcaatggtaaaaaatggattttgttaggccattataaaagaaatatragatgaatgacctatatggtaattctcaccccctacccccacaagaacaaatgaaccattatcagagaatttttttctcttgaggatttatgatttgtggatgtatctcgaggataaaaaccataaatgtattcatctatttacttaagtgtattaaatacctattaaatagcaggcattgtggcaggattacaaaggaaaatccagtccccatcttaaaaaatctaatgtgtagctttagaaattggccgatttaaaaaatattaaaattggaaagagatacatatataaaatcctcaaaatacaggcaacagaaatgcctaaccc

SEQ ID NO: 865004 - DNA, 601 bp, Homo sapiens
aacagggaattcaaaatgatgactgtaaagttgcacatcaaggtaggaaagcaatgcaagactgaaaattccaacaaagaaatagaaaatatctaaaagtaccaaacagaaatcatagagctaaagaatactataactgaattgaaaactttagtaaagaaatttgacaacagattctgcaaaagggaggatcagtgaatttgaagacaggtcactggaaatcacccaagctgaggagagaaaaaaaactaaaaagagtkaagatagcttagaggccttatgggacaacattaagcagaacaaattaggaattattgatatgctaaaagaataggaagagagagaaaacattttaaaagaaataatggcagaaaacatcccaagcctgaggagaaaatattcagaaagcttaatgtacatgaggtaaaattagtccaaagagactcacaccagggcacgtcataatcaaattgtcaaaagttagacaaagggattcttgaaagctgcaagaaaaaagcacattattatgtacaagggagcccctgaaagattatctggatttttcagcgccttgcaagccaaaagagagtgggatgctgta

SEQ ID NO: 865005 - DNA, 601 bp, Homo sapiens
aacagggaattcaaaatgatgactgtaaagttgcacatcaaggtaggaaagcaatgcaagactgaaaattccaacaaagaaatagaaaatatctaaaagtaccaaacagaaatcatagagctaaagaatactataactgaattgaaaactttagtaaagaaatttgacaacagattctgcaaaagggaggatcagtgaatttgaagacaggtcactggaaatcacccaagctgaggagagaaaaaaaactaaaaagagtgaagatagcttagaggccttatgggacaacattaagcagaacaaattaggaattattgatatgctaaaagaataggaagagagagaaaacattttaaaagaaataatggcagaaaacatcccaagcctgaggagaaaatattcagaaagcytaatgtacatgaggtaaaattagtccaaagagactcacaccagggcacgtcataatcaaattgtcaaaagttagacaaagggattcttgaaagctgcaagaaaaaagcacattattatgtacaagggagcccctgaaagattatctggatttttcagcgccttgcaagccaaaagagagtgggatgctgta

SEQ ID NO: 865006 - DNA, 622 bp, Homo sapiens
agcatgtaataagagtgaatacttattgagcacttacggtgtgctaatttgtgtgtgtgtgcgtaaaatttcacttcatcctcataacaacctatgaagctaaaaacaaaaagttaattatgcccaagctcatacagctgaaaagaagcagaactggaatgacccatccacctggcttcaaacctcacggtgctattgcctctcataggtacccatttctctccggcagccagttcattgaaataggaaaaaggtcacaataaactaagtatccgtttctgcttaagacctgtctattttgcagctaacacwctcaactcttttatttggagcacaatttaaatctataaaatatcttaaagctgggaaatgtcacagttcaaaacgtgtgttgaatgaaaggagaaaaagcactcatccaacattgcttctgctgatttgcagtttacaagtacagcctgctgcactaaacaatgtgctgtggataactaagcatcttgtgttccaacctgataagatgtagatgaaaatgaatgagaggcatgtgaataagaaaagtccacagggccttgtagtaatatattacctgacacatggaacatctaataaacatttgctgaat

SEQ ID NO: 865007 - DNA, 622 bp, Homo sapiens
agcatgtaataagagtgaatacttattgagcacttacggtgtgctaatttgtgtgtgtgtgcgtaaaatttcacttcatcctcataacaacctatgaagctaaaaacaaaaagttaattatgcccaagctcatacagctgaaaagaagcagaactggaatgacccatccacctggcttcaaacctcacggtgctattgcctctcataggtacccatttctctccggcagccagttcattgaaataggaaaaaggtcacaataaactaagtatccgtttctgcttaagacctgtctattttgcagctaacacactcaactcttttatttggagcacaatttaaatctataaaatatcttaaagctgggaaatgtcacagttcaaaacgtrtgttgaatgaaaggagaaaaagcactcatccaacattgcttctgctgatttgcagtttacaagtacagcctgctgcactaaacaatgtgctgtggataactaagcatcttgtgttccaacctgataagatgtagatgaaaatgaatgagaggcatgtgaataagaaaagtccacagggccttgtagtaatatattacctgacacatggaacatctaataaacatttgctgaat

SEQ ID NO: 865008 - DNA, 622 bp, Homo sapiens
agcatgtaataagagtgaatacttattgagcacttacggtgtgctaatttgtgtgtgtgtgcgtaaaatttcacttcatcctcataacaacctatgaagctaaaaacaaaaagttaattatgcccaagctcatacagctgaaaagaagcagaactggaatgacccatccacctggcttcaaacctcacggtgctattgcctctcataggtacccatttctctccggcagccagttcattgaaataggaaaaaggtcacaataaactaagtatccgtttctgcttaagacctgtctattttgcagctaacacactcaactcttttatttggagcacaatttaaatctataaaatatcttaaagctgggaaatgtcacagttcaaaacgtgtgttgaatgaaaggagaaaaagcactcatccaacattgcttctgctgatttgcagtttmcaagtacagcctgctgcactaaacaatgtgctgtggataactaagcatcttgtgttccaacctgataagatgtagatgaaaatgaatgagaggcatgtgaataagaaaagtccacagggccttgtagtaatatattacctgacacatggaacatctaataaacatttgctgaat

SEQ ID NO: 865009 - DNA, 505 bp, Homo sapiens
cagttttaccttccttcaaacttgaaatagtcacacacgacacactcttttgtgtctgcctaagattccttcatgttcactgtggcaagtgtagtcattgtatgaaaatatcacgatgaatgtcttcatactcctaatgaagaatatttactcatctcagaagagccaaaggtactagagctgacctagactttctattaaaataaaagcagtgttcctctagaatgacagagcagccytgatttagcaagctttcacatccagggttggtacatttaaaaagcatttctttcatttttagtttccagagatttcaaatgtattggatcaagtcattcttaatatattttttctcactttaatgcctatggaatgtgcagtaatatactttcttcagcccagaaattggtgaattttactagttttatcttaaacaacttttgaccttgttgattttctctattatatgtcggttttcactttcactaatgactgctcttatctt

SEQ ID NO: 865010 - DNA, 578 bp, Homo sapiens
aaaacagagggttccaataatagcaaaaaaaaaaaaaattgtgtctctgcctgtgtctctctttctccacatgttctcttaggacaaatagcctcttttaagtccctcttccaacgcattcactcaaaacacaaacacacacacactctactacataatgatttctggagtccccaggggagtctcagatgatgtagacttcacttgctctgtgttctgctactgtcagaacggctggcaccagagtttccaattcaccaaaacaaggtgaccagatttctttttcctattwcacagctcccaaagcacagcagttttaagtccgcaactctctcctgtctgctctgctcaaagccctctcccatgaatcagttttgtggattgggccacaggaggctctgaatgataattgtcatgttatcctcagctccattctcctctacaaaaccagaatcttactagaccaaacttggcttgactctctcattacatagtatgaggtgccttttttttcctcttacaaatctccacttccagagcctgttgccacaatcccaggcattgccagacatgcccaa

SEQ ID NO: 865011 - DNA, 638 bp, Homo sapiens
tgataccatttgtaaatatttaatgtacaaatgcatctagtttcaacacattactcttgaagccctggtctttgtttttggttagaaaaaaaaaagacactatatttctaggtttatttggattgaagtttctatatgctgtttgagaagaatcaaggcagtgtacagcatatattatgcaaccctgtggctaaggcagagggcctggtaggggttgcttctttacttccacattatgaagagcaaaataatccagtcattgattctattaatcaactgtgaatatgataagttcacatgatgttatgtgttctgggtttgttcctttttatttatttttactgtttattttaggtttggggggcacatgtgaaggtttgttacatagataaacacgtttcatgggggtttgttgtacatattgttacatcacccaggtattaagctcagtacccaatagttatcttttctgctcctcyccctccttccacacacccccgtcaagtagatcccagtgtctgttgtttccttctttgtgttcataagttctcatttggctcccacttataagtgagaacatgttgtatttggttttctgttcctccattagtttgctaaggatgatatcctccagctcc

SEQ ID NO: 865012 - DNA, 701 bp, Homo sapiens
cacagctgcctcttaaaagcactatctagtggcctctaagtcaaaccatacagcccaatataaagcctgctgacagaagtgcatagagctatagaagcaaatccaaaggattctatgcaacgtactctatggtcacactcccctagggagagggaaaagggaaagaaatatacaggggaagaaaaaaatcaatattcatatgaaaataattacaaaaagtaggagtattagcatcgccagatgagagtaaaacaacacaagaattctggcactatgaaatatcatgacaggatcaaacctcccctatcaatattaactttgaatgtagatggtctcaacaccccacttaaaaggcacagagtggcaagttggataaaaaatwaaaaaaaaatttaaaaaaaaaacaaagatccaaccacctgctgtcttcaagagactcatctcacatgtaatgacaccaatagactcacattcaagggttggagaaagatctatcatgcaaatggaaaacaaaaaagagcaagggtagctattcttatattggacaaaacagactttaaaccaacaaaagtaaaaaaaggacaaagaatggcattacaaaaccacaatgagataccatctcacattaattagagtagctattattaaaacgtcaaaaaataacagatgttcgtgaagttgcagagaaaagggaacacaat

SEQ ID NO: 865013 - DNA, 701 bp, Homo sapiens
cacagctgcctcttaaaagcactatctagtggcctctaagtcaaaccatacagcccaatataaagcctgctgacagaagtgcatagagctatagaagcaaatccaaaggattctatgcaacgtactctatggtcacactcccctagggagagggaaaagggaaagaaatatacaggggaagaaaaaaatcaatattcatatgaaaataattacaaaaagtaggagtattagcatcgccagatgagagtaaaacaacacaagaattctggcactatgaaatatcatgacaggatcaaacctcccctatcaatattaactttgaatgtagatggtctcaacaccccacttaaaaggcacagagtggcaagttggataaaaaataaaaaaaaaattwaaaaaaaaaacaaagatccaaccacctgctgtcttcaagagactcatctcacatgtaatgacaccaatagactcacattcaagggttggagaaagatctatcatgcaaatggaaaacaaaaaagagcaagggtagctattcttatattggacaaaacagactttaaaccaacaaaagtaaaaaaaggacaaagaatggcattacaaaaccacaatgagataccatctcacattaattagagtagctattattaaaacgtcaaaaaataacagatgttcgtgaagttgcagagaaaagggaacacaat

SEQ ID NO: 865014 - DNA, 540 bp, Homo sapiens
agactgaaggacttaaactgagtggggtggagcaacagtacaaagaaccacaagcaaacaaatgtctgtcataaaatctccatgttccttgcttaaaaatctgcaagctgattgaactcatgtcaagtcctgaggatatattatatttgacatcactcactacagaaattgtaaactttctaataaataacatagagcaggatgggacatttagtttatttaccttcatttatgcagaacccaaaagtattgcctgtgttttyccaggctccttcagcaaaacttttcttgtgaattcttgtaacaggaaagcaacaaacaaataccaagtagggaataattatagttatttcttaaaatggagatttcatttgtgatatctgcattctttctatagatgcagatttctttgagttttagatggtcaaaccccttgttatgatatagcatgatggttaaaaataaagtctttggagacagccaaatctgttttttttttctcttaatctgctacttgctagctagcattgtggctttgga

SEQ ID NO: 865015 - DNA, 608 bp, Homo sapiens
cagggtgttctgatgattcaggctcaggaatctgcatttcatatgaaaaggtgtaatgactctcacatgttgtttacataaataatattctgagaaacactgtctccccaaactccatgttgtccaatgaagaaactgacacccaggtgagattaactgatttactaaaggactttccattactttgaggaaggaagaaatagatgtagaacaaaaaggggcatgcragttgtggagcaagcacaaactgtcttttgcctcccatggacactgtagccatctcttttaaaattgatcacttactaatccatacatataattattttttaataaatttgcatcatcagaattgctgcatcacagaatattcacttttggaggatttcaatatatatttatcaaaattgtcttctacaaggcctatagcaatttacaatcccactagcagggtaagagagaagggtaatccacttcaacctcccaccaaatagtgggtcaggaggcgatagcgtgctatctggagctccggctaaatttgctggggttctgcagagtctccaatggaaggttaatttttaggcacagcattttgtttttgacacagacct

SEQ ID NO: 865016 - DNA, 657 bp, Homo sapiens
aaggtgtaatgactctcacatgttgtttacataaataatattctgagaaacactgtctccccaaactccatgttgtccaatgaagaaactgacacccaggtgagattaactgatttactaaaggactttccattactttgaggaaggaagaaatagatgtagaacaaaaaggggcatgcgagttgtggagcaagcacaaactgtcttttgcctcccatggacactgtagccatctcttttaaaattgatcacttactaatccatacatataattattttttaataaatttgcatcatcagaattgctgcatcacagaatattcacttttggakgatttcaatatatatttatcaaaattgtcttctacaaggcctatagcaatttacaatcccactagcagggtaagagagaagggtaatccacttcaacctcccaccaaatagtgggtcaggaggcgatagcgtgctatctggagctccggctaaatttgctggggttctgcagagtctccaatggaaggttaatttttaggcacagcattttgtttttgacacagacctgcggctgcatcttgggcttacaatatattttggtcagtttgttgtatccttaatccttgctactgatttgggataaaactagattatttcacaaga

SEQ ID NO: 865017 - DNA, 657 bp, Homo sapiens
aaggtgtaatgactctcacatgttgtttacataaataatattctgagaaacactgtctccccaaactccatgttgtccaatgaagaaactgacacccaggtgagattaactgatttactaaaggactttccattactttgaggaaggaagaaatagatgtagaacaaaaaggggcatgcgagttgtggagcaagcacaaactgtcttttgcctcccatggacactgtagccatctcttttaaaattgatcacttactaatccatacatataattattttttaataaatttgcatcatcagaattgctgcatcacagaatattcacttttggaggatttcaatatatatttatcaaaattgtcttctacaaggcctatagcaatytacaatcccactagcagggtaagagagaagggtaatccacttcaacctcccaccaaatagtgggtcaggaggcgatagcgtgctatctggagctccggctaaatttgctggggttctgcagagtctccaatggaaggttaatttttaggcacagcattttgtttttgacacagacctgcggctgcatcttgggcttacaatatattttggtcagtttgttgtatccttaatccttgctactgatttgggataaaactagattatttcacaaga

SEQ ID NO: 865018 - DNA, 557 bp, Homo sapiens
ggcattttctttcttctgccaaaattctgcaattctaaatccattcatgtaacagcaaatgtgtttgagtaatatcacatttaaaaggcccctactattaattatattaaagcaaaatatgttttacgtaatgaataattaataaccacttcatcatttatattttgagtaaatgtagagtttctcatacaggattttsttagagtagagtaaactctatccagacctagtccatatgataaaatgactctattgatgcttaaattcatgtatgtgatcatattaaattgcatattttgaagaataacttgtgatatacaatttctaaactgtctttattcacacaaagttccatgaaaatcagaaaatgaaagtacctaatctcacttcacagctggagccatttaatgacaaatactcaaccagaaaaaaaaaaaaagtgatagggagacagtaggcaagagaaacagaatttaaaactgtttggtaaaatgtagattaaaaacttcaaaaagataaaaaatattggtggctttagaatattttgaacaagttag

SEQ ID NO: 865019 - DNA, 557 bp, Homo sapiens
ggcattttctttcttctgccaaaattctgcaattctaaatccattcatgtaacagcaaatgtgtttgagtaatatcacatttaaaaggcccctactattaattatattaaagcaaaatatgttttacgtaatgaataattaataaccacttcatcatttatattttgagtaaatgtagagtttctcatacaggattttcttagagtagagtaaactctatccagacctagtccatatgataaaatgactctattgatgcttaaattcatgtatgtgatcatattaaattgcatattttgaagaataacttgtgatatacaatttytaaactgtctttattcacacaaagttccatgaaaatcagaaaatgaaagtacctaatctcacttcacagctggagccatttaatgacaaatactcaaccagaaaaaaaaaaaaagtgatagggagacagtaggcaagagaaacagaatttaaaactgtttggtaaaatgtagattaaaaacttcaaaaagataaaaaatattggtggctttagaatattttgaacaagttag

SEQ ID NO: 865020 - DNA, 648 bp, Homo sapiens
ttatcaatgccattcgtcaaaagtaataattggcagttagtatctactcttctttgtgtaatgtcttccaggatgttgggcacatatgaatcaggtgtcttctttccattcagtggtgttgagacatctatgcatctggctatttcagataaggactgtgagtgtggagtcttgataaatttacagcattctggccttttcaaaagaaagtgagttttattccagcagattcagggtataaagagagctgccgcctatgcccctgccatagaccctagatagctgccttcccccacccatagtgatgcctttaagtttgagcatacacccacataatcaaaaagtataaacaaagaatcaagtctggtgaggagaccccagcctgactcaaaggcttaagtagcagccagtggattcctgatgcttcagacaggaggaaaaaaaaaaaaaaagatctatggtatatctatctcttgtgccaagctagattcaraatctcgaagaaacaaaaaagtccttatttcatgtaaaagtacacctaacctagccaacccttaactaggatttgacaactcctattatgatagagcctcaaataaaaaattatactgtcatctgaaagcatgcacaattagagccagatattga

SEQ ID NO: 865021 - DNA, 686 bp, Homo sapiens
tttcttgcactttgcttgtagcccatccagtacccagctttctacaaggtgcttatttccattcacctacttgatacaagcctgaggcctgctctcctgctttgtgagggtgttaaatcttaaaccttagccattgtcagctccaataactcaccagggctgctgctgtaccataacaaacatgaccagtgctctgcacttcagctttatctttgcttctggcacctggatttcttttctttttttgctgatctactttattattttgctggaattggaagaaaacttactttttaaaataagtacatggtatattgtgggatgggtgcacatttattcaaaccattcagttactgattgacctttttttgtgttagtkttttgttttgcttttgcactacaaacatagatgctataaactttcctttctgtgtattttttgtagtagtgcctttatctatgggataatgtcccagaaatgatataacatcacagaagtttgaattgattaattctttactgcatttcaaaaaggttataacaatttatatttccaccagcaatgcagcctcgtggaaagatttattggtcttataaatataagtcagaaattaaagtctttttatcagagcattaatactttaattccatagcttctcagtaaagaaaatagtttggccattcat

SEQ ID NO: 865022 - DNA, 616 bp, Homo sapiens
cattgacaaaaaaattagctttaaaaaagaataatagccctattcataaattttcatctatttgaactcctttacataattaatatttagcaggaacaattgtatgtcattacacatattggtaagctaaatgcaattatgagagcacgtcacatttgggataaaaaatgataagactgacataccttctgacctcaatctccatggaaaataattcaagtaagataaattagacttagagaaatataggaacaagattcttgttaaagaacaagtcttgttataaatgccgcttgagtggagtaaagtctgttttaaaatccttgaatataattgactgtatgtctttttggaatgaaggctaaaatatccttaacatcaggaaatggattttaaacaggttaaatgattttatctgtaatttaggaactttacctttttgcacttttagctttaaatctcatcctccamagtctgagaagttctttaaattatgaaagttggtttatagatgtattttcacagaaccactgagtcctggaaattgttaaaggattatgccagattaatttttgattttgctacagacaatcaaatgctcaacatctatggagca

SEQ ID NO: 865023 - DNA, 607 bp, Homo sapiens
acattaaacagaaagaaacaattttatctgttgtaaagataggttgcccaaataaatcacacaatcaccaactcaggagatctgaattaggtttcattaataaaataaaaacattagtatttatcaatattcacacagaaccacagataaaactataaacaaggactttgtaccaaaaaaatttatcaaataaaggttttgggcctatcttaggctgtttagggtgatataacaaagtatcagagactgggtatgctataggaacagaaatctattccttatagttctggaggctgggaagtccaagatcaaggtgccagcagatttggttctggtgagagccagcttcacttccaagataacacctgctgttgcatccccacatggcagaagaggcgaatgctgtgtcctcamaaggtggaaggtggaaagcagaagggcacaaggaccaggcagcattttgaagcctcttttataaggggcactaattccattcacaagggtggggcccccataaacttaattacttccccaaaggtcccacttaatactgttgccttgtaggttaagtttcaacatgaattttggagggtacacaaacattcaa

SEQ ID NO: 865024 - DNA, 611 bp, Homo sapiens
tatttttgtaataggtcatgggaaatctgaaagttaatttactggcttctttggacaattcatatgttgccaaatcggggctattcaggaagcaatttaggccttagtagaactattactcatcatttcttcccacatactttctgaaattagaaaatttagaytgcagctgctctaggttggttcagtgtggctttttatcttaaacattttaattaagtaacttcagtgagctcatctctacctaatattctttttccagggcaggtccaggaacttcactcttccactacggtcttcaggctgagcaaaaagggagtaggatcagctggcattgcccaggtcacagtgatggctggatggtgtcacagctccaaagtcctaggctccttcttgctctgccaccttcctttagccactgccactctgtcctgccctccctccattctccttctcactcaccttttcaggactctgcagtacgttctcttcatgctttgtatgcgtactttactaaaaactcctaactcatcttcctgcttttcacataacctccttggatccatgcttcataccagcagagatttgatttcttcaaatatggaaataca

SEQ ID NO: 865025 - DNA, 615 bp, Homo sapiens
ataggtgtgggtcacagacatcaagtactttacaaggtaatagaatatcacaaggcaaatggaggcagggcgagatcacaggaccacaggaccggggcaaaattaaaattgctaatgaagtttcgggcaccattgtcattgataacatcttatcaggagacagggttttgagaataaccggtctgaccaaaaatttgttaggtgggaatttcctcttcctaataagcctgggagcactatgggagactggggtctatttcacccctacagcctcgaccatagaagacgggcacacctaggggggccgtttataggcctatacccccaggcgcgtattctctttcccagggatgttccttgctgagaaaaagaattcagtgatatttctcctgtttgcttttgaaataagagaaatatggctctgttctgcccrgctcaccggtggtcagagtttaaggttatctctcttattccctgaacaattgctgttatcctgttcttttttcaaggtgcccagatttcatattgtttaaacacacatgctctacaatttgtgcagttaatgcaattatcacatggtcctgaggtgacatacatcctcctcagctgacagga

SEQ ID NO: 865026 - DNA, 595 bp, Homo sapiens
agttagaaaatgaagaatctgtttctttatgtcactgagttttgttgacttcctgtaaggactgataatatagtatggactatgcaaatagggaatgttaaatgatttttcccatcatagtttattttgggttaaaatttctccttttgttgtaggctcattctaaaataatttacacatacatacaaacataaatatgaaaagatggacctttgacaataatgtctcatgttttatgtacatttatgtacayttttatcaatatgttatttatgacacagtgacaggcttctagtttcaattatcatgttttgaggtgacaaaacatcgattcctattcttcaatgagtagtataattgtgaattatcaaatgaagttacatatcttttatataaaagtctgaagctactagttactgtgtcttttatttttatacatttatctttctccatggatgttacctggtaataaagttaatattattaacattcttttcttcttttttcatagtaaataaaaatttttgttaaggatttagatgacacacatattttggaaacatataccatgcttgtctgttataatcacttaaaa

SEQ ID NO: 865027 - DNA, 676 bp, Homo sapiens
gattataggattgaacttgatgctcaaaaattaaggacatactgtgagatagataggcctactttcaaagtggggtggccccctgaaggtacaatagacaggaaattaattggctatgtgtttaaggtggtcactggagttggaggacaaccaggatacccaggccagtttccctatgtagactcttggcttaatgtgccacaaactcaccccaagtggctacagccctgcctatgatattgcaaggcattagtggcttggggcagcccaaccaaaggaagcagaggaacctaaagtccctagcatctcccaggaaaaggaatccccaaagcctcagctgaaaccagttcttcaggccccacctgaggaaatgggatrtctgccccccatatgtgccagtctacctgtttttggcaagaatacacaggaggcagagttgggagcatctgaagagtcgggctcggaggaaagtgaggctcagtctccccaccaagtggaacagaagcccccattagaaaaaaacaaagaagatggaaagggtgatgcagctaggcacctctgctctggccaaccatgggctttgcagatgccactttgagagaccaggacacaagtttttgatgaccaggggcagatagaaggtggtcctaggcattatgttcatcagcctttctcc

SEQ ID NO: 865028 - DNA, 623 bp, Homo sapiens
ccattggatcagagactactgagcttttccttccccaaagagactgtgcttatgttgccttgatgagcaccatccccagactccctgagaaaacaagcttctgtggatatcaaggcaccagaaaagcaaagctcaagcttctagaactatgtattgtgtatttaagtcctatctcctctgggttagtttctaaaatattactcctactactgccttgaggaactgccacagcagatttaaagctgtcatcacaggaaactccctactcacttcaaggtaaacactgattcaatagaattcaggctcttctgaacattccagagaagacagtcactgaagagctctatgtagatgtgaggcatatacttaacagaacacttcagttttcaggcacgagggacragtatcttcctctctagggactatgaagtagccaggggacatcgcatgcccttagagctccttaactttagatgcttctgcaagcagagctcatgctggaggaatagggccagtttaccagccctactaaaactgaccaagcagtcgttctttttgctagccagaaaggcacagtttggttttcagttctttacacattccaaaactttcccctgatctga

SEQ ID NO: 865029 - DNA, 595 bp, Homo sapiens
ttctggtgactgaatagataaggtattttattatctgtccgttgtatcatggtaacttcacacaaggcagcatatgatagccgattctgtcagtgtcctttagtgtgctggctcagatatttctcagcctagataaaaattcaagcccagaagagcaggcacaaattagacactacaggamagcaattgcctggttggactcagtggtgctcttacaggaacatatcaatcatagccatcagagtcacagccgcacaggccagtacctgagaacgttgcctgatacatgcatgggattcatgggagccactcagagctgctgcagacatcctatggctggggggattccagtgacagactccatgaggggcttgactatgggtcaaccagggaggaacccagggtcaggcgagaggatctttgaacgtcagcattcagggagaaggatgactacacaacatggaagataaaaagcacttttcctaatgattggcattcctactgcctctgtaattgcagaaaaaatggcaaggtaatcaaaaggggtaagtgtttgcatttcaatttctcaaccacattcttcctaggggccctt

SEQ ID NO: 865030 - DNA, 597 bp, Homo sapiens
gacatgagttatataggtgtgatggtatcattgagggttaacttgattgaaggatgcaaagtattgttgctagatgtgtctgatggtgttgccaaaggagattaacatttgagtcagtgaagtgggagaggcagacccaccctcaagtgtgggtgggcaccatctaatcagctgccagcatagaagcaggcatgcaaagggcagaccggctgagtcttccagcctctctttctcccgtggtgcatgcttcctgccctcaaacatgagactccaagttcttcagtttttygactcttggacctacactagtggtttgccttcagccacagactgaagactgcactgttgacttccctacttttgagattttgggactcggactggcttccttgctcctcagcttgcagacggcctgttgtgggacatcaccttgtgatcatgtgagtcaattatccttaataaaatccctttcatatataaatctaacctattattcctgtccctctagagaactctaatacagtaggtgtagaaacccaaaacttgggcaggcattttgtcccagtgaacaaatgagttgggacttcttccagcata

SEQ ID NO: 865031 - DNA, 587 bp, Homo sapiens
caacatagaactagaacacatgaaaatcttaataactcagtagaaaaatgccccaattcttgctcttggtttttaaaatgtccaatgccagaaagctgtctcatgctactacacctactgcaaaagcctctatagtgagcaagcatgggctcagagaaacagagggggtaagcgagggtttaagtgagggrctagtaacagccccagggttgatgtaaagccaccaccaaaaagcttaggtctacttaaagtatgatcagacttaaaagtcgcctggtacatcacaacacagtctacagtacatgatttaaagactcatttttcaagatgtccaactcttaaaggaaaaaagacaccattcggcaactgagtgacagaaaagcagcaccgtgtacagtagtgagaaagtattttaccatgtcacctccagatttcccatggacttggttgtaaaactctgacagctgtacgagttttcctggcttactttcctcctctgtggtaggctcagccctgttgtttttggagatactgccccaggacacatggacgccaccacttcactagccaggtcacccatgatccaa

SEQ ID NO: 865032 - DNA, 611 bp, Homo sapiens
ctcggccacccaaatcaaaaaaggatattcccagaagtcattacaaaagaagtctgtagtgcacaaggggggaagtgtctgagacgttcagaggagacagatcctcctgaagtggctcttctgaaaagggatgcctgccctgggtagagtctgctgctgtccttgagggagtctgcacaactgcagtgatgacttctgccccagaggttttgctggcctcccgggacagaatcacagcaagggctggggaagagacagtgcaatctccaaaggcagcctatggagtcagatggtgtgtggtctgccgaagtctccctgcaggcagaggtggttttgtttacctccagcttcatggtagaagagcctggatccagaaaarcaggaagggcacgtcagtgcattcttcttgccccctgcttgcaattttccacccctataccttgaaggtaatatcgagttcaccaagtgagttcacagaaacaaggtctaataaagcttcccatggaaatggagcaccagcaccaagggcacatgtatggtacttaatggcagaaagactctgtcaatgcactgactactgacctctggtcatcttcaccctgcttacaggc

SEQ ID NO: 865033 - DNA, 628 bp, Homo sapiens
cctttgtatcgtcagcaggttcccaggaaaaagtttttgtgggcataggcacagtgggctctggtgggcactctactttcctttttctggaccataaagtcaacctttattaatcacttcaactcctgataggtcccgggccaagctaagcagcctctrtgaatcatcacttcagctcctgactggtctttggccaagctttgagtggtcccaggccagggtcccaggccaagctaagtcataagttctccaagatggctcacagactaagcacattcccttcccctttctagtccataaaaaccctggagcccagctttattgggggcaccctgttcaggaccccccaccttctgctgacagagggctttctttcaacttatgaaacttttgctccaacctcacctggtgtccatgctccttaagcttcatggaggtaggacaaagagctcagggccttattctcagaaaagagactcttacaccttggtgcatggttgagactacaacagtagcagacacatggaatcaacctacatgcccatcaatgatatcaagcatatttccaagaagattcctagcacacagtttagtcagtggagaaagtgctatgtcagcaagtaaacca

SEQ ID NO: 865034 - DNA, 608 bp, Homo sapiens
atagccctggaggccaccctagctacagggttctttgtgggactgggtcaaagcttcagctgtaaaaagcccacaattcaccttcccctgcccaaccatgtttttcctcccttcccagtgtgattcccaagctcactcaactagtaaattttaatgcctgtatcttacagtctgcttctcttcaacccaaactggggctctaggcttcacaaaccccyttttttaatcacaaattgtagatgacataggaaatagaagatccttgatcttagaggagtatgagaactagtgtaaacccccttgatttaccaggactaacatatgatgtaattattggcaagtaaacactctttagctgactacaataaacagtgtcagggactataccaccttacccaggcaacaccctgtgtcaccctgtacatgtctttgtacattagatgggttacttcctttaagccgatgcagtaaatctaaagcctgttacgtaagttaacagttctttcatattgtcaagcctagatcatacatacttttgcttaaaggaggactgagaaatttcaatactggcctcaagacgacactttgtaatgctgtcagcacaaacg

SEQ ID NO: 865035 - DNA, 584 bp, Homo sapiens
tccctattacaggaaggcagtagaaagctccctgctgcagtggatcctgagcccatcccccacatgctgaaagggtgatcccagcctttagcattcttctggaatgactgggctgctcagggctacacctgtacctttttagtctacttgttttcaggcagagccacctttcagacaagaattcatggccttcaggataaaggaaaaactaaggaacatgtctgatagggttgacrgtgaccagaacatcatcccaaagggacgatcgagatgcattatccctggctgaagacatacagcaagatagagtcccagtcgcctccataagtaagctcaattccctccccacccacccccccgaccccttcactggttattctcgccaccctttcaccagttcagcatcttcctgtgggcttcctcaggacactttgaaattaggtactcaataacatgggcagattagtgaccccctgagatttgtaagtcttaatccttagatgctgggaacatgtttttgatatggcaagggggtatttgggagacagaactgaggttgctaatcagctaacgtgcagagatca

SEQ ID NO: 865036 - DNA, 584 bp, Homo sapiens
tccctattacaggaaggcagtagaaagctccctgctgcagtggatcctgagcccatcccccacatgctgaaagggtgatcccagcctttagcattcttctggaatgactgggctgctcagggctacacctgtacctttttagtctacttgttttcaggcagagccacctttcagacaagaattcatggccttcaggataaaggaaaaactaaggaacatgtctgatagggttgacggtgaccagaacatcatcccaaagggacgatcgagatgcattatccctggctgaagacatacagcaagatagagtcccagtcgcctccataagtaagctcaattccctccccacccacccccccraccccttcactggttattctcgccaccctttcaccagttcagcatcttcctgtgggcttcctcaggacactttgaaattaggtactcaataacatgggcagattagtgaccccctgagatttgtaagtcttaatccttagatgctgggaacatgtttttgatatggcaagggggtatttgggagacagaactgaggttgctaatcagctaacgtgcagagatca

SEQ ID NO: 865037 - DNA, 538 bp, Homo sapiens
agctcattttggcatcttggcaggactctgcacttgtggggctgtatgatggacttgcagatagaacaagtttaagtcgtctctccatccacttttacaaaaggcatcacaaggggaacggacctgccacaccacacactgtgtgacacttgtcctgaggctacaactctagggaccttgatttggcatcctagaaaaacatgaagccaagtttccctggctagccagatacctcttctttcttggggtgaataggttgaagggcatcagctggtacrtaacgaggacacattgccaagaccaggggggctcagcctgccgtcatcaggaggagggaaacattgagatgggactgccagtcctgcagcatgggtatttttctggcctcataacctccaccccacaacacagcaaaaggagcccatgacagagaagtctgaacaccacagacctagagcccaggggaacagactgcagtgagccaggcccacgcctggagccagtgcccatgccatccacatccagtggaacctccctg

SEQ ID NO: 865038 - DNA, 676 bp, Homo sapiens
catcccatccctacataggtatgtgttgatctgagcctggcatgtctccacacacggtatgaggagggttataacttatggctcttcacatggaaacaagcacaaacctagcaagcctctgcaggtgagagaatttccagtactcctcaggtgaatgcctcttacctgagatttaaagtgrtcaacacctgactcaagaatttctcttttcactgtatcagtttgccatgcttcccgacgacaacttcgtaacattcttggagtatatttgaatttgactgttggactcaaagatattgacgatgctgctttaaaaccaaacgttctgagctcttctctagtgcttcttccattagactgaacaactcagaaccacatgcaatggaacaaacctcctgccagagttcaagtggaaagaggcagatgctgccttccagttagagaacaagatctcagcctataaaatctaacataagccctagacaatagaatctgaacacactagaaatccttgacgatttctaactagtaagtttatgtttgtgttataaacatgcttaactggttctttcaaatgatcctgccatacccaaagtgctcatctgcactatctttccagtctcagtgggaacacattccagtctcagtcctgggcatcatccacacaatcccaaag

SEQ ID NO: 865039 - DNA, 612 bp, Homo sapiens
aactaagtgtcaggtagtggcaaataagtgacccctagagatatccttctcctaatgctaatgcttagaacctattaacatgttattcaacatggcaagagggaatgaagggaacacatggaaataatatgctcccctggatgatttctgtatcttcaagtcagctaattggccaccatgttatcagaaagtcaaagactaagaagagggaagcaaaagtgcaggtgagtgaaataattgaagatatacattcatctttgagatgaatgacgattctaactttgaacaataaaggggccacaagacaaacagtgtaagaaaccactggacaagtcagtcaaggaaacagtgtcctttagagaaataataagagcccaaccccaccatcttgattttatcaaagtgagaaccattttgagtttctggccaaacatgraaacaggcagtagtatcatgacagagctgccaggatttgtgaattacagttgagttcctactttatgatgttcaaggcagcagaagagccaagtgttgataggctgcacagtgactagaaaggtctggattgccattatagatacttcacaaaaaaattgattttaactgttgtat

SEQ ID NO: 865040 - DNA, 638 bp, Homo sapiens
tcctcatcaggagtcgtagtcagcacagctgctggcagaggcagcacactaaccacctgcacacgtacacacacgtacatgtaagtcttttcacaagcagctgtgaacctcctccatgggcagccactgttctggaagtggtctgagccaagagaagacatctgcatatagcattctgaagtrggctgagacctggacagccagacccagcagctgcttccacatcaaaggagcgagctctggctcatgcttttgccccagaggagacaggcaggcccagaactcagacaatacggggacaggaatgctttcagaattgtaccctttaaatcctgagtccttcctgcccagagaaggtgccattggtgaccgtggagctggaagcttcctgctctcttacctttgaaaaaaatgaaacatctcagaagcctaaggcatactcaccacatattctacattcagtcctttattctctcatggtgaattccaaagcagtgccctgaatatcacatttgtggaaaagtttccatagcaaactgtgacccagaagagatgcctgcttcttataaggtatcctgtgactcaggagaggtcatgcttgctctccccaacagtccagagggaaaagaacagagata

SEQ ID NO: 865041 - DNA, 638 bp, Homo sapiens
tcctcatcaggagtcgtagtcagcacagctgctggcagaggcagcacactaaccacctgcacacgtacacacacgtacatgtaagtcttttcacaagcagctgtgaacctcctccatgggcagccactgttctggaagtggtctgagccaagagaagacatctgcatatagcattctgaagtaggctgagacctggacagccagacccagcagctgcttccacatcaaaggagcgagctctggctcatgcttttgccccagaggagacaggcaggcccagaactcagacaatacggggacaggaatgctttcagaattgtaccctttaaatcctgagtccttcctgcccagagaaggtgccattggtgaccgtggagctggaagcttcctgctctcttacctttgaaaaaaatgaaacatctcagaagcytaaggcatactcaccacatattctacattcagtcctttattctctcatggtgaattccaaagcagtgccctgaatatcacatttgtggaaaagtttccatagcaaactgtgacccagaagagatgcctgcttcttataaggtatcctgtgactcaggagaggtcatgcttgctctccccaacagtccagagggaaaagaacagagata

SEQ ID NO: 865042 - DNA, 637 bp, Homo sapiens
aaaatgtaccagcaaatttaaaaggttcaaattctgatgccgtgtatgttggcacttgggattctccaggatgagccgaggtcatctcactgctcctgggtcccaggtgctccacacatctgcagaaagagcaaggagcagccctgccctccccatgcttgacaggaagcacctgccactctgaacgctccccgcaktatggcattgggactgtgctttggggaaaactcaggcttctgacatttttagtcctaagagacacaatctgttgtgtgtcacctaagcctcggtgtttgccatggcaactgacaaaccacttttgttctggtacaaaagcaatgggttggtggaaaagaatttcaggagatcttgggatccatttctcctgttccatgtcctccacacctcaggagctcccggtgattttatcacagcctctgttgccctgtgatctgcaggtcctgggagatgcatagctaagttgccaggacatcctggaagctgggaaatgacacattggttatcagcaaatcagatgctgatattgaggaaaggcagagatgattcccaccctctggattttttcagatttgtgaagaaattttttccaaaggaaaacaacccatcccagtaaggt

SEQ ID NO: 865043 - DNA, 637 bp, Homo sapiens
aaaatgtaccagcaaatttaaaaggttcaaattctgatgccgtgtatgttggcacttgggattctccaggatgagccgaggtcatctcactgctcctgggtcccaggtgctccacacatctgcagaaagagcaaggagcagccctgccctccccatgcttgacaggaagcacctgccactctgaacgctccccgcattatggcattgggactgtgctttggggaaaactcaggcttctgacatttttagtcctaagagacacaatctgttgtgtgtcacctaagcctcggtgtttgccatggcaactgacaaaccacttttgttctggtacaaaagcaatgggttggtggaaaagaatttcaggagatcttgggwtccatttctcctgttccatgtcctccacacctcaggagctcccggtgattttatcacagcctctgttgccctgtgatctgcaggtcctgggagatgcatagctaagttgccaggacatcctggaagctgggaaatgacacattggttatcagcaaatcagatgctgatattgaggaaaggcagagatgattcccaccctctggattttttcagatttgtgaagaaattttttccaaaggaaaacaacccatcccagtaaggt

SEQ ID NO: 865044 - DNA, 597 bp, Homo sapiens
tccctcaaatcgtgataaagtgatatctgcagagaaccaagtcctttcataaataggacattaatcgtccaagtaagacaaggtacacatacttcttaccagctcagagaatgacaagaagcatcccttacaaaactacctatagragaaaaaatttcaagtcccatttctctgtaatggaagagtggggcacgtggcaatgaaaagcaagaggcagtggatatcacaggagtgaggatcagaagcttctagcctcaggaaagtatgaggaaggtttcttcactaagctcaaggtcaggaagtcagttggctgggccttaggtcctgcgccctgaggcagggagctccagtaccgagatactggggctgcctaggggcctgtcctctgggcttgaaaccaaatctaactgcctccttctccccaatatggtggagagaaggaatggaggaaaagctgccctcaggcaacaggacacttggtatagcctggctccttcaggtttaatagtttcaacagtgtcaatggagcacacatggagcttgaagaacaagcagcaagggttctgtattctaagccttggagttttatggctctag

SEQ ID NO: 865045 - DNA, 597 bp, Homo sapiens
tccctcaaatcgtgataaagtgatatctgcagagaaccaagtcctttcataaataggacattaatcgtccaagtaagacaaggtacacatacttcttaccagctcagagaatgacaagaagcatcccttacaaaactacctatagaagaaaaaatttcaagtcccatttctctgtaatggaagagtggggcacgtggcaatgaaaagcaagaggcagtggatatcacaggagtgaggatcagaagcttctagcctcaggaaagtatgaggaaggtttcttcactaagctcaaggtcaggaagtcagttggctgggccttaggtcctgcgccctgaggcagggagctccagtaccgagatactggggctgcctaggggcctgtcctctgggcttgraaccaaatctaactgcctccttctccccaatatggtggagagaaggaatggaggaaaagctgccctcaggcaacaggacacttggtatagcctggctccttcaggtttaatagtttcaacagtgtcaatggagcacacatggagcttgaagaacaagcagcaagggttctgtattctaagccttggagttttatggctctag

SEQ ID NO: 865046 - DNA, 652 bp, Homo sapiens
gagagaaggaatggaggaaaagctgccctcaggcaacaggacacttggtatagcctggctccttcaggtttaatagtttcaacagtgtcaatggagcacacatggagcttgaagaacaagcagcaagggttctgtattctaagccttggagttttatggctctagctacatctgccttacaattgttcaaccatttatctatcagcaccaggcatcagacgacagcaaattcagattcttctaaggcaggcagcactgttttcttgccaataagcaaasaacagtggtcagtgtgcaaagcagaaggagctcatgtggctgcctcgtgaaagcactcaaggtgagaggctgcaaccacagtgctgtgttcagacttaatggacacgagggtaaaaaggcatttatattggaatactgatgctgcctgatgggggaagagcttcaggtagatttcctgagtcatgttccccttacaacacacaactttgctcagaagacactcctgaagtttaccttttgtaacatcagaaattcctgctaagtggatttcagcatcatgctcgtggctacaagtttcatgagcactatagcactaaagtacccactaggcacgtgggctggagtaatatcggacaattcatttccaaactgg

SEQ ID NO: 865047 - DNA, 612 bp, Homo sapiens
catgcaaacacagaaaagaaagcaagagctgaagaacaaagcaatgcatagatccctacctcatgtctgggaaatcagatctcagcccctatgttgccgtgcactggtatgattcagtcccttcagaggtgtgccacagggatttgttactgatgtttaaatacaaatgagtgtgcatattttttaaagtaatgttactagaagagaaatcactaatcttccaccttagtgtgttagttaagtattaggaatttagatcctcatcgaacctgccttccagtgccatccaagactcagagttgaccccaaaagtaaagcttctgccagatgtttgtaagagtaagaaggggtcattaaaggataggcaactgtggcagtatcccatttctaatgkacctactgatcatattctgatagtagtgttggcatgcggtgggttttgtcgctgctgttggcaaccggtgtctatcctctcctgcttcatggcacaggactctgagtttcctttagagaaccacccctcccacatttccatccatgggagctgagcccaccctaagcttcagctcctggcttacattgatctgcaaagtctaaccctgaggccatgat

SEQ ID NO: 865048 - DNA, 612 bp, Homo sapiens
catgcaaacacagaaaagaaagcaagagctgaagaacaaagcaatgcatagatccctacctcatgtctgggaaatcagatctcagcccctatgttgccgtgcactggtatgattcagtcccttcagaggtgtgccacagggatttgttactgatgtttaaatacaaatgagtgtgcatattttttaaagtaatgttactagaagagaaatcactaatcttccaccttagtgtgttagttaagtattaggaatttagatcctcatcgaacctgccttccagtgccatccaagactcagagttgaccccaaaagtaaagcttctgccagatgtttgtaagagtaagaaggggtcattaaaggataggcaactgtggcagtatcccatttctaatggacctactgatcatattctgatagtagtgttggcatgcggtgggttttgtcgctgcygttggcaaccggtgtctatcctctcctgcttcatggcacaggactctgagtttcctttagagaaccacccctcccacatttccatccatgggagctgagcccaccctaagcttcagctcctggcttacattgatctgcaaagtctaaccctgaggccatgat

SEQ ID NO: 865049 - DNA, 589 bp, Homo sapiens
atttaattctcacaataaacctttggaagaagggatgaaagtgttgcccattttacaaatgaagaaatgagatacaaagaagtgaagtaattttgcgaggatactcaggtagcaagtggcgtggccagccttccatccaargcagtatgactccagaatttgtattcataagtgctatactatactgtttctcaacatgaatggcttttgcacaaggattccatgccaattatttatttgtttgtttgttttgaaacaggatctcactctgttgcccaggctggagtgcagtgatgcaatcatagctcacggcagcctcaatctccctggctcaagcaatcatcccacctcagcctaccaagtaactgggactacaggcatgtaccaccatgcccagctattttttaaaattatgatttgtagagatggagtctcactaggttgtccaggctggtctcaaactcctgagctcaagtgatcctcccatttcagcctcctgaagtgctgggattacaagtgtaaaaattataataattttcattataattttgttccagatggtaaggatgtgaagggttaaactttaaag

SEQ ID NO: 865050 - DNA, 667 bp, Homo sapiens
ttttatctcccagaattcctacgtgttgtgggagggacccagggggagataattgaatcacaggggctggtcaatctcatgcaattctcatgatagtgaataaatttcaagagatctgatgggtttatcagcggtttctgcttttgcttctttctcattttctgttgtctgctgctctatgaratgtgcctttcaccttccgccatgattctgaggccactcccatgtggaactgtaagtccaattgaacttctttttgttcccagtttcgggaatgtctttgttagcagcatgaaaatggactacagtaaattggtaccagtagagtggggcactgctgaaaagatacccaaaaatgtggaagcaactttggaactgggtaacaggcagaggttggaacagtttggagggctcagaagaagataggaaaatgtgggaaagtttggaacctcctagagactggttgaatggctttgacaaaaatgctgttagcaatatggacaataagatccaggctgaggtggtctcagatagagatgaggaacttgttgggaactagagcaaaggtgactcttgttatgttttagcaaatagactggtggcatttcgcccctgccctagagatttgtggaactttgaacttgagagatgatttagggtatctggc

SEQ ID NO: 865051 - DNA, 511 bp, Homo sapiens
tgtggaactgtaagtccaattgaacttctttttgttcccagtttcgggaatgtctttgttagcagcatgaaaatggactacagtaaattggtaccagtagagtggggcrctgctgaaaagatacccaaaaatgtggaagcaactttggaactgggtaacaggcagaggttggaacagtttggagggctcagaagaagataggaaaatgtgggaaagtttggaacctcctagagactggttgaatggctttgacaaaaatgctgttagcaatatggacaataagatccaggctgaggtggtctcagatagagatgaggaacttgttgggaactagagcaaaggtgactcttgttatgttttagcaaatagactggtggcatttcgcccctgccctagagatttgtggaactttgaacttgagagatgatttagggtatctggcagaagaaatatctaagcagcaaagaattcaaaaggtgacttgggtgctgttaaaagcattccattttaa

SEQ ID NO: 865052 - DNA, 581 bp, Homo sapiens
actaggttgcttttgattttacaggctcataggcagaagggacttccgttgtctcagatgagactttggactgtggacttttgggttaatgctgaaatgagttaagactttgggggactgttgggaaggcatgattggttttgaaatgtgaggacatgagatttggaaggaccaagggtggaatgatatggtttggctgtgtctgcacacaaatctcaacttgaattatatctcccagaattctcacgttttgtgggagggacccagggggagataattaaatcaagggggccagtctttcctgtgctattctcctaataatgagaattttccttctctttatgaggcctattcacctgtgctgtctctttggaaaacctatgctcccatttgtttttaggaggggttcayttgttcaatttttaagaatatgcttgtgtctcacctaatctatgaagcctttcaagaataggtttatttgccaggtttatttgaatttctccactccatattgggggagagttccagcaaagctctggtaactctggtaaacttacttatttatacactcatcttcctca

SEQ ID NO: 865053 - DNA, 667 bp, Homo sapiens
cttttaattgaggcatttagcctgtttacattaaaggttagcatggatgtgtatagatttgatcctgtcattgtgttgttagctggttattatgctggtttgtttgtgtgattgctttataatgtcactggtcggtttgtatttaagtgtgcttttgtattaactggtagtggtttttcctttctatatttagtacttctttatttatttatttatttttatttttattttttgagatggaatctcactctgtcacccaggctggagtgtagtggcacgatcttgattcactgcaacctctgcctcccagattcaagcaattctcctgcctcagcctcccaagtagctgcgattacaggcatgtgccaccatgcctggctattttttttgtatttttagtagagacgaggtttcaccatattggccaggctggtctcaaactcctgaccttgtgatccacccacctcgacctcccaaagtgctgggattacaggcatgagccacckcacctggccctttatttcattttattttattttattttattttattctggagacgtagtctcactctgttgcccaggctggagtgcagtggtgtgatcttggctcactgcaaactctgcctcctgggttcaggcaattctcctgcctcagcctccaaagta

SEQ ID NO: 865054 - DNA, 652 bp, Homo sapiens
ttagtgacttataccaccaaaaatcttcactacttagtgctctattacactcttctgcattgggtaagttcactgtttttgttatgggctcttataagctgtgtattttcacatttttggaaaattgtttagatccataatagctgataaaagttgttcaasttgtcatcatacagccacagaagaaaaaatagtattacagtggatgcaaaaataaagtttagtgtctaggatccttcaataaaatctttgggtaagtagtgacttaaaacagaatgaaaacaaagaacagagaaaagaaaagacaagaaaagaaaaaaaggagagagagagagagaaaggaaggaagataaaaagagaaaaaagagagtggaaggaaggaaagaaggaaggaaagaaggaaggaagggaaaaaaaggcaactaggaatttatgggaagcctttgacattataaagaccatcacaaacatcagtgcaggtagaaaggaaggaccaatattgccattacttacattaagggctttgggcattttgaagagaatagaagagagagttcaaagtgcaacaatggtgcaggatcacaagaggactgttagttgaacctcaaattgcactgactcagttaatgcttccacatttctaggattggat

SEQ ID NO: 865055 - DNA, 652 bp, Homo sapiens
ttagtgacttataccaccaaaaatcttcactacttagtgctctattacactcttctgcattgggtaagttcactgtttttgttatgggctcttataagctgtgtattttcacatttttggaaaattgtttagatccataatagctgataaaagttgttcaagttgtcatcatacagccacagaagaaaaaatagtattacagtggatgcaaaaataaagtttagtgtctaggatccttcaataaaatctttgggtaagtagtgacttaaaacagaatgaaaacaaagaacagagaaaagaaaagacaagaaaagaaaaaaaggagagagagagagagaaaggaaggaagataaaaagagaaaaaagagagtggaaggaaggaaagaaggaaggaaagaaggaaggaaggraaaaaaaggcaactaggaatttatgggaagcctttgacattataaagaccatcacaaacatcagtgcaggtagaaaggaaggaccaatattgccattacttacattaagggctttgggcattttgaagagaatagaagagagagttcaaagtgcaacaatggtgcaggatcacaagaggactgttagttgaacctcaaattgcactgactcagttaatgcttccacatttctaggattggat

SEQ ID NO: 865056 - DNA, 646 bp, Homo sapiens
aaatcatagtaatttctttatagttttaatcacttgtaaaagatcaaattgaaaattataatttattcaagataagtcatctttcatctctctctcatgagacaggtaggagataagttccatagaggatattagatactgttctatgaccttaaatcagaaactatattttactacattttaacaataatattaaataagattaaattaaaatataattattctttaacataaaaaatgcaaaaataatttaataaggaaatcaaacgttttaaagatagactataacattttaatcttatataatcctcacaggaatagtttcttttccactagatacttagaataccaccactaagagyaacagcagctgaaaattaattgcaggcaagatgagtaggaatagtggcatagataaagagttgtggagaaaaacatctctttataatttattgaatactacacatgataataaaatttttgagagggtgcctcgccaacttctgctgcatgaaaactatgccataaagcaaatttacaaggagagaacaggaagggcagttagtaaacagggcaagattccatgattctccatagttggaacctttgataggccaatcagagagatttctttgccaggtttcag

SEQ ID NO: 865057 - DNA, 650 bp, Homo sapiens
ggactaatttagaacataggttcttaatttatgtggaacttcatagacctctgaggatgaaattcagaggtcagcacattatgaataaatgtgtattaagcaatatgctgtaagcatacataaaaagaggaatctatcaaatttctggccacaagaatatttctaagtacatttccttaygccagatacctgtccctctaaaataaataaataaaccaccacaaacaaaaacaataactttccatactggcctgatttgatgagaatgtatgtgcctactacaaagagccagcccttcacagttttagtaatattgtgtgcatttgcttatgaaattaaaaaaactctgatgaaaataattacatatatcttgtattagaaaaaaattaatcctactgtgggtaattttaatattcagtaaaattaaagttcaatataaacattatttgttggtatatagaataaagtcccttaaatattggaattccacaacttatttagtgtttggtgcacatataaaactcagattggtcaatatagttattttaaaatttggaacaaatttggcattagattgcaaagaaaaatatagcatagttgtctctttttaaaatatagtactgggatagtttacataatttttatttgga

SEQ ID NO: 865058 - DNA, 650 bp, Homo sapiens
ggactaatttagaacataggttcttaatttatgtggaacttcatagacctctgaggatgaaattcagaggtcagcacattatgaataaatgtgtattaagcaatatgctgtaagcatacataaaaagaggaatctatcaaatttctggccacaagaatatttctaagtacatttccttacgccagatacctgtccctctaaaataaataaataaaccaccacaaacaaaaacaataactttccatactggcctgatttgatgagaatgtatgtgcctactacaaagagccagcccttcacagttttagtaatattgtgtgcrtttgcttatgaaattaaaaaaactctgatgaaaataattacatatatcttgtattagaaaaaaattaatcctactgtgggtaattttaatattcagtaaaattaaagttcaatataaacattatttgttggtatatagaataaagtcccttaaatattggaattccacaacttatttagtgtttggtgcacatataaaactcagattggtcaatatagttattttaaaatttggaacaaatttggcattagattgcaaagaaaaatatagcatagttgtctctttttaaaatatagtactgggatagtttacataatttttatttgga

SEQ ID NO: 865059 - DNA, 693 bp, Homo sapiens
aatcttccgtttagtattttcagacagagggtgatctcaggtaactgaaatcatggaaagaaaacccacagatatgatgatggactactatatttgtgaatctccatcttgcaaataatggtatattactaattgccttatggagtaagaacaaatgtatataaatgaataaaattattgtttgaactaaattttttaaagttcaggggwtacttgtccatagggaattataatatatactatccacaataccttaattgggtttacttcattttattagattcaggagattacatttttagagtattggtctatttcatgattttcaagccataggtaaataggtaagatagctatggacaaagttcagtaatgtataacatcaacaaccaacaaaggaagaagccctttctgtctcaatcccacttccatgaagcctcaaacatgagttgtgatttagcacccatgcttgatgttaaaaaatctaggcagtaagtttcctccattataatttcaagactagctcacttattccagggacagagtttctgcacacttggccttctggatctcagccacaaagaggaggtaaaaagttcttcgctcataaacatttgccacaaagcctttctttaaaatagaatagagacatgtggatttgagtacaaatatgctccctacacaatacttttt

SEQ ID NO: 865060 - DNA, 693 bp, Homo sapiens
aatcttccgtttagtattttcagacagagggtgatctcaggtaactgaaatcatggaaagaaaacccacagatatgatgatggactactatatttgtgaatctccatcttgcaaataatggtatattactaattgccttatggagtaagaacaaatgtatataaatgaataaaattattgtttgaactaaattttttaaagttcaggggttacttgtccatagggaattataatwtatactatccacaataccttaattgggtttacttcattttattagattcaggagattacatttttagagtattggtctatttcatgattttcaagccataggtaaataggtaagatagctatggacaaagttcagtaatgtataacatcaacaaccaacaaaggaagaagccctttctgtctcaatcccacttccatgaagcctcaaacatgagttgtgatttagcacccatgcttgatgttaaaaaatctaggcagtaagtttcctccattataatttcaagactagctcacttattccagggacagagtttctgcacacttggccttctggatctcagccacaaagaggaggtaaaaagttcttcgctcataaacatttgccacaaagcctttctttaaaatagaatagagacatgtggatttgagtacaaatatgctccctacacaatacttttt

SEQ ID NO: 865061 - DNA, 693 bp, Homo sapiens
aatcttccgtttagtattttcagacagagggtgatctcaggtaactgaaatcatggaaagaaaacccacagatatgatgatggactactatatttgtgaatctccatcttgcaaataatggtatattactaattgccttatggagtaagaacaaatgtatataaatgaataaaattattgtttgaactaaattttttaaagttcaggggttacttgtccatagggaattataatatatactatccacaataccttaattgggtttacttcattttattagattcaggagattacatttttagagtattggtctatttcatgattttcaagccataggtaaataggtaagatagctatggacaaagttcagtaatgtataacatcaacaaccaacaaaggaagaagccctttctgtctcaatcccacttccatgaarcctcaaacatgagttgtgatttagcacccatgcttgatgttaaaaaatctaggcagtaagtttcctccattataatttcaagactagctcacttattccagggacagagtttctgcacacttggccttctggatctcagccacaaagaggaggtaaaaagttcttcgctcataaacatttgccacaaagcctttctttaaaatagaatagagacatgtggatttgagtacaaatatgctccctacacaatacttttt

SEQ ID NO: 865062 - DNA, 578 bp, Homo sapiens
actgagatctcttgagtttggcctataaaaactgcaacaattctaagcccagctgaatgattggtgcatggcttcttagaaaatgttcttcgccctacagttgttctttgctcagacttgtggaatttcaactcatgtatgtgcagatttgtatttggctggtttttaacaaatccttatggatatttctggaattctttctctacatagctcccttatctctggttctttatcccacacatctcagccatctctgccttcccaaatcatacttctcctcctcaatggatattttgctctgcttgtttctttcagtgttatcttgaaagagccttcaggcagaaagtcaaggcaaagttggagggtttatctaatatgtttattctcttatgaatcrcaattttgcctctcctgtcgtcagtcctgtgtgtaaaaacagctatttcacatatgtagtccaatttttaaattgtttgtagtaaaggaaaatctaataccagttagttaatttctcaaggtcagaagcagaaatcctccttgttttgccattttcttttattgttgttttctctaattta

SEQ ID NO: 865063 - DNA, 665 bp, Homo sapiens
tatgtttattctcttatgaatcgcaattttgcctctcctgtcgtcagtcctgtgtgtaaaaacagctatttcacatatgtagtccaatttttaaattgtttgtagtaaaggaaaatctaataccagttagttaatttctcawggtcagaagcagaaatcctccttgttttgccattttcttttattgttgttttctctaatttagttaaacatggaattttctcttgaatctaattttaacctattaatttttcatttagtaacataataagaaaaggaagatgcattatggtaagtttttgcttaccataccatgacagtattgttgttaggtgagacagacctgcctcgggctacagattgactgcttttagcttcaaatttatttttgattttaaatctgcttgtgtccccagatttgccttggaccagtggctacttgagtcatgttattctcatggcaggcccctggtgcacaagaggtcaagccaactgttccaggagcatttaacaactcttttctcatcacactcaacatcatttcattggcccaaacaggtaatatggccaatcccaaagtcaagttgtaggaaagtagattcctcctaccatgaaatatgataccaacccaaaattggagtgaagaattgcagacaacatttccc

SEQ ID NO: 865064 - DNA, 463 bp, Homo sapiens
acagggaagaaaatgctatagtccagtgattctcaactgggagtgacgttacctgagagggaacatttatcaatgtctggaggctattctgatttttatgactgggggattgtcatgtacactgatatctagtaggtagaatccagggatgttgtcaaacatcctacagtgcacaggacagctccccacaacaaagaattatcccatccaaaatgtcaacaatgtcactgctgagaaaygctgctgcaacctgtggttcaatttggaaatagtttgaataaatgttcaattcaaaataaataactgactgctatcaaaaaactcttcagccagaaaacatagttactattgaaagttgattttaatcatttgtaaattataccacaattaaagagaaaaaaatcattaaaatcaataaactaaaccatctaataataccctaagtagtgaaaatagtttctat

SEQ ID NO: 865065 - DNA, 554 bp, Homo sapiens
ccagggaactcttggatttcctatttcatttcagtaatgaagagaaaagttgccatctggctgtttcaaatgtatagagtttgtgcttctatatataaatgacagcatatggaaagggaggcttgtaatggagtatgtattcctagaatacttagaaaatttatccctttcaaaaggtgtactatctgcctcatccaacacattacttctaactccaaaaaatattaggacaaatatgaagtcatttctatgtattaaaaaatcctcaaagttctagtatcatttttaaaartgagcttatttgacactttcttttaaagaaaagtaaatatgaatgtatttttattctctcccaagacccactgacattatattggcagctaaggaggtatttgtatagaaatataaagagaatagttgaagaaagcttttaatagatttttaaaagtcaaagacatagtatagaagtggaaagtgatttaacagagcaagggaagctataactaagataaggaagagagtgtggtgagagaaaagaccatccaccctggaga

SEQ ID NO: 865066 - DNA, 554 bp, Homo sapiens
ccagggaactcttggatttcctatttcatttcagtaatgaagagaaaagttgccatctggctgtttcaaatgtatagagtttgtgcttctatatataaatgacagcatatggaaagggaggcttgtaatggagtatgtattcctagaatacttagaaaatttatccctttcaaaaggtgtactatctgcctcatccaacacattacttctaactccaaaaaatattaggacaaatatgaagtcatttctatgtattaaaaaatcctcaaagttctagtatcatttttaaaaatgagcttatttgacactttcttttaaagaraagtaaatatgaatgtatttttattctctcccaagacccactgacattatattggcagctaaggaggtatttgtatagaaatataaagagaatagttgaagaaagcttttaatagatttttaaaagtcaaagacatagtatagaagtggaaagtgatttaacagagcaagggaagctataactaagataaggaagagagtgtggtgagagaaaagaccatccaccctggaga

SEQ ID NO: 865067 - DNA, 554 bp, Homo sapiens
ccagggaactcttggatttcctatttcatttcagtaatgaagagaaaagttgccatctggctgtttcaaatgtatagagtttgtgcttctatatataaatgacagcatatggaaagggaggcttgtaatggagtatgtattcctagaatacttagaaaatttatccctttcaaaaggtgtactatctgcctcatccaacacattacttctaactccaaaaaatattaggacaaatatgaagtcatttctatgtattaaaaaatcctcaaagttctagtatcatttttaaaaatgagcttatttgacactttcttttaaagaaaagtaaatatgaatgtatttttattctctcccaagacccactgacattatattggcagctaaggaggtatttgtatagaaatataragagaatagttgaagaaagcttttaatagatttttaaaagtcaaagacatagtatagaagtggaaagtgatttaacagagcaagggaagctataactaagataaggaagagagtgtggtgagagaaaagaccatccaccctggaga

SEQ ID NO: 865068 - DNA, 586 bp, Homo sapiens
aagttagctggaatagctattcttatatcagacaaaacaatctttaaagcaacagcagtttaaaaagtttaaaaacagaaaaacacaagacccacttttaaaacaaaatactgcagtctgttgtctccagggaactcttgtattccctatttcatttcagtaatgaagagaagggttgccttctcttctaaagacaaagagrgacattatataaaagacagagagacattatataatgataaaaagactaagagagacattatataatgacaaaaggccttgtccaacaggaaaatatcacaatcctaaacatatatgcacctaattggagcttccaaatttataaaacaattcctaatagacctaagaaataagatagactgcaacacaataatagtgggggacttcaatacttcactgacagcactagacaggtcatcaacacagaaagtcaagaaagaaacaatcgatttaaactataccctggaagaaacagacttaacagaaatatacagaacattccatccaacaaccacagaatctacattctattgaaaggtgcatggaactttctccaagacagacc

SEQ ID NO: 865069 - DNA, 655 bp, Homo sapiens
ctagtaacatcatcaaagtatctcaccctgattccatgattatcaagaagtctccagataaaaatgaagctttctctgggaccttgaaaaaatactgatattgtagtctgctttatagtggaatattttattatattttaataaattgaaatatgtgttcatttatacaaatatatgtctttaaattcttcaaatggatattctaaactatatgtgcttttatgcctgctattcatgacctccatgggatgtatcaacacataaacacataataccattaatgtgaatagttctctttgggagacttaaattagcttgttgatccaaatgtgtctattctttcttaatwatttatagaaaatgaatatttattgtacatgtacagtggacagagcactatttttagtgctttatttttattatctaaatttgatcataccagcaacccttactatgagtctttctttctgggcctctcatttgcacaagttctttctcagcacaagcggggtccttacaccatgttatgtagtcatacagttggttagttttgcataattagattttaactgccatctgataagaccattcattctttccaaccccaattatcatctgttaaagttagcctatttgtctggaggcaatagagagt

SEQ ID NO: 865070 - DNA, 682 bp, Homo sapiens
gctcactgcctagacagagccaatttatcaagacagagaatagcaaaagagaaagagtttaattcaaacagaggcagctgtatgggggactggagttttattattactcaaatcagtctccctaagaattcgaggatcagagttttcaagtataatttggtgggcagggcctcaggaagtggggagtgatgactggagataaagtcatagagggtggaagtgagaaagtgagttgttcttgctgtcttctrttcatgggtgggatcacagaactgattgagcaagattaccagtctgggtggcatcagctggtgcatcagaaatatctcaagcactgatctttggttttacaacagtgatgttattcccaggagcaatttggggaagttcagactcttgcagctagaggctacatggctcctaagtaatttccaatcttgcagcgaatctgttagtcctataaaggcagactggtcttcaggaaaggagagggtttctttcagaaaaaggatatcacttttgtttcaaagttaatctacacactaaattccttctcaaggttagttcagcctctgcctgggaatgaacaaggacagcttagaggttagaaccaagatggaggcggttaggttagatctctttcactgtcataattaactcagttcttctttttttttttttt

SEQ ID NO: 865071 - DNA, 682 bp, Homo sapiens
gctcactgcctagacagagccaatttatcaagacagagaatagcaaaagagaaagagtttaattcaaacagaggcagctgtatgggggactggagttttattattactcaaatcagtctccctaagaattcgaggatcagagttttcaagtataatttggtgggcagggcctcaggaagtggggagtgatgactggagataaagtcatagagggtggaagtgagaaagtgagttgttcttgctgtcttctgttcatgggtgggatcacagaactgattgagcaagattaccagtctgggtggcatcagctggtgcatcagwaatatctcaagcactgatctttggttttacaacagtgatgttattcccaggagcaatttggggaagttcagactcttgcagctagaggctacatggctcctaagtaatttccaatcttgcagcgaatctgttagtcctataaaggcagactggtcttcaggaaaggagagggtttctttcagaaaaaggatatcacttttgtttcaaagttaatctacacactaaattccttctcaaggttagttcagcctctgcctgggaatgaacaaggacagcttagaggttagaaccaagatggaggcggttaggttagatctctttcactgtcataattaactcagttcttctttttttttttttt

SEQ ID NO: 865072 - DNA, 682 bp, Homo sapiens
gctcactgcctagacagagccaatttatcaagacagagaatagcaaaagagaaagagtttaattcaaacagaggcagctgtatgggggactggagttttattattactcaaatcagtctccctaagaattcgaggatcagagttttcaagtataatttggtgggcagggcctcaggaagtggggagtgatgactggagataaagtcatagagggtggaagtgagaaagtgagttgttcttgctgtcttctgttcatgggtgggatcacagaactgattgagcaagattaccagtctgggtggcatcagctggtgcatcagaaatatctcaagcactgatctttggttttacaacagtgatgttattcccaggagcaatttggggaagttcagactcttgcagctagaggctacatggctcctaagtaatttccaatcttgcagcgaatctgttagtcctataaaggcagactggtcttcaggaaaggagagggtttctttcagaaaaaggatatcacttttrtttcaaagttaatctacacactaaattccttctcaaggttagttcagcctctgcctgggaatgaacaaggacagcttagaggttagaaccaagatggaggcggttaggttagatctctttcactgtcataattaactcagttcttctttttttttttttt

SEQ ID NO: 865073 - DNA, 666 bp, Homo sapiens
tttgtgttgtatagttgtaccagtttagacaaatgcataatgtcatatatctaccattatagtattatatataaaactttgactcccataaaaattttctgggttccacctattcatcttttccactctcccaccaaaccctggcaagtattgatctttctaccctattttttgccttttccagaattccagatggttggaattatatagtatataaccttttatgcaggctttattcacttagctatacggatttaagtttcctccatgtcttttcatggatgcatagttcatttctttttattaacttttawtaaactatgtatggattttccacagtttttttatttattggcctatagaagaatatcttggttacttccaatttctggaaattctgaataaaagtactacaaacacttgtatgcaggctatttagaggacataagttttcaacttatttgggtaaatatctaggggtgcaattgttggaccatatggtaaagtgttcttactttgtggaaaactccaaaacagtcttccaaagtggctgtaccattttagattatcaccagcaataaatgaaagttcctgttcaatatccttccaagtatttggaggtgttagtgctttgacctttaactatattaatagatttatagtgat

SEQ ID NO: 865074 - DNA, 634 bp, Homo sapiens
ttagaggggagaatactctatggacctatcaatttatccacaagttaattaagtagtttcctttcagtgatacccagagctaataatattcacagcagtaatataatttgcaaactctcaacattttttaagtcttcaatttgtgctaataatagcacaaaatgattaggaaaaaatcatgytgaaatttaaaatatctaacttctttgatgtaagtttatattatggaaatatatatataaatttaatattaataagcatgcaattatatatttataatattgtatacaagttgtgtataccttaccaaaattccttgggaccagaagtgtttcagattttggattttttcagattttgaaatatttgcatatacataataagatgtcttagggatagaacccaagtctaaacatggaatttatttctgtttcatatacactttagacacatagtctgaatgtaattttacacaatatttttaataattttgtgcatgaaacaatgttttgactgcatttcaactgcaacccatcacatgaggtcaggtctgcaattttccactagtgatgtcactcaaaaggtttggatttgagaagatttgggattttggattttggggttagggatgctc

SEQ ID NO: 865075 - DNA, 634 bp, Homo sapiens
ttagaggggagaatactctatggacctatcaatttatccacaagttaattaagtagtttcctttcagtgatacccagagctaataatattcacagcagtaatataatttgcaaactctcaacattttttaagtcttcaatttgtgctaataatagcacaaaatgattaggaaaaaatcatgctgaaatttaaaatatctaacttctttgatgtaagtttatattatggaaatatatatataaatttaatattaataagcatgcaattatatatttataatattgtatacaagttgtgtataccttaccaaaawtccttgggaccagaagtgtttcagattttggattttttcagattttgaaatatttgcatatacataataagatgtcttagggatagaacccaagtctaaacatggaatttatttctgtttcatatacactttagacacatagtctgaatgtaattttacacaatatttttaataattttgtgcatgaaacaatgttttgactgcatttcaactgcaacccatcacatgaggtcaggtctgcaattttccactagtgatgtcactcaaaaggtttggatttgagaagatttgggattttggattttggggttagggatgctc

SEQ ID NO: 865076 - DNA, 588 bp, Homo sapiens
tgctaagattgcttagtaaaaatccacatattttttacatctactaaaatcctcattccccttccctgatatttaagtccttagcctgcctgtaaacagaattctgttacaaaaaaaaattcctcctcctttggtattttatcawatttatttcagtaattttttatccactgatttatttgcttattgattataaatcctgagttgtctgtgttcagagttatgatcgatttctgaaccgtattacaatggccataacatctactgcaatagtgttaaagtctttcttccgaatttttaacaaatgtcataatttttttaatttgacagtttcccaacaggatgtttgagtataaaaccagttttcagttccttcccaaaaatgatgtcaaccactgtgtagttgtatctgcctgacccttgcgtgtctaaaaaagtatgttcttatttaaaggggtgagggtggaagattatagagctaacatttttctaaaatgctgagtcataattgaaaccatacaaataaaagaggtagaatgcttggattccaacatttttaaccctgaggatacttcaatgtccatgatc

SEQ ID NO: 865077 - DNA, 587 bp, Homo sapiens
agtgcataagtgaataaaattttaaaacctgaacacatctctgcatgcagttcttagattgaataacagaggccagacacggtggctcacacctgtaatcccagaattttgggaggctgaggtgggcagatcgcttgagctcaggagtttgagaccagcctgggcaacatggaggaatyccgtctctactataagtacaaaaatttgctgggcatggtggtacatgctgatagtcccagctattcgggagacggaggcacaagaattgcttaagccctggaggcagaggttgcagcttaagtccctacttttaattattttggagatacacctgtaatggagttgctggaacatacggtaattctatgtagaactttctgataaactgccaaactatttttcacagtcaataaaccattttatattctcaccagcaatacaccagggtttcacttcctccacatcctagctaatacttgttctttttcatttctgttgttttgttttttatatagtcaccctaatatgcgtaaagtgatatgtcattgtggttttgcatactaagaaggcaacctactttatcatga

SEQ ID NO: 865078 - DNA, 616 bp, Homo sapiens
cacttctgaaactattccaatcaatagaaaaagagggaatcctctctaactcattttatgagaccagcatcatcctgataacaaagccttgcagagacacaacaaacaaagagaattttagaccaatatccctgatgaacattgatgcaaaaatccccaataaaatactggcaaaccaaatccagcagcacatcaaaaagcttatccaccaagatgaagttsatttcatccctggggtgcaaggctatttcaacatatgcaaatcaataaacgtaatccgtcacataaacagaaccgaagacaaaaaccacatgattatctcaatatgtgcaaaaaaggttttgacaaaagtcaacagcccttcatgctaaaaactcccaataaactaggtattgatggaacatatctgaaaataagagctatttatgacaaacccacagccaatatcatactgaatgggcaaaaactggaagcattccctttgaaaactgtcacaagaaaaggatgccctctctcaccactcctatttaacatagtgttggaagttctggccagggcaatcaggcaagataaagaaataaagtgtattccatcaggaaaagaggaagccaattgt

SEQ ID NO: 865079 - DNA, 616 bp, Homo sapiens
cacttctgaaactattccaatcaatagaaaaagagggaatcctctctaactcattttatgagaccagcatcatcctgataacaaagccttgcagagacacaacaaacaaagagaattttagaccaatatccctgatgaacattgatgcaaaaatccccaataaaatactggcaaaccaaatccagcagcacatcaaaaagcttatccaccaagatgaagttgatttcatccctggggtgcaaggctatttcaacatatgcaaatcaataaacgtaatccrtcacataaacagaaccgaagacaaaaaccacatgattatctcaatatgtgcaaaaaaggttttgacaaaagtcaacagcccttcatgctaaaaactcccaataaactaggtattgatggaacatatctgaaaataagagctatttatgacaaacccacagccaatatcatactgaatgggcaaaaactggaagcattccctttgaaaactgtcacaagaaaaggatgccctctctcaccactcctatttaacatagtgttggaagttctggccagggcaatcaggcaagataaagaaataaagtgtattccatcaggaaaagaggaagccaattgt

SEQ ID NO: 865080 - DNA, 624 bp, Homo sapiens
aaccagctgtccctcttgagaatcctgataaagcagaggccacccaggcctgggattgcaggctgggagcagagtttgggggtagaaggcaacctccaagatgttccttaatctctgtgccaggatcttggaagtcagagggtaaaagcacacctrcagctgtacttgagctgatgctgtggatacacactcctaaatctatgtggggacagttttgcctactaggaaaggtcaccccatgaccagactactggctccttttaatgggctgagcagtgttggcaggctgctggctctgcagggctcagtgagaacatctgcaacatggatcttctccatgaaccccaaggccatgtggcaagccctcctcccagggaatggacttaaagtgctacaagaggtcagatacaaagcagagttttcattcaaaaacctaaaacaggaaactgtttgaggggggtagtgaggaccgataaagatcatttcccagtggttttaaaatcaagggatgtaagaccacaatctgctaaagctaccagattataaatccatagttcaggacccaggaggtctattggcttgcacatggatgcctatgcatgtgcatgtttgtgttcgttgatg

SEQ ID NO: 865081 - DNA, 624 bp, Homo sapiens
aaccagctgtccctcttgagaatcctgataaagcagaggccacccaggcctgggattgcaggctgggagcagagtttgggggtagaaggcaacctccaagatgttccttaatctctgtgccaggatcttggaagtcagagggtaaaagcacacctacagctgtacttgagctgatgctgtggatacacactcctaaatctatgtggggacagttttgcctactaggaaaggtcaccccatgaccagactactggctccttttaatgggctgagcagtgttggcaggctgctggctctgcagggctcagtgagaacatctgcaacatggatcttctccatgaaccccaaggccatgtggcaagccctcctcccagggaatggacttaaagtgctacaagaggtcagatacaaagcagagttttcattcaaaaacctaaaacaggaaactgtttgagggkggtagtgaggaccgataaagatcatttcccagtggttttaaaatcaagggatgtaagaccacaatctgctaaagctaccagattataaatccatagttcaggacccaggaggtctattggcttgcacatggatgcctatgcatgtgcatgtttgtgttcgttgatg

SEQ ID NO: 865082 - DNA, 619 bp, Homo sapiens
catgggtggcagatactcagaaaacaatctgaatatgaccaacaggaaagagctggggcctccagtccccctcgccccaacctgcagattaaagtggtttctcagttgtctttcctggggctcatctgaagggggcaggaaaagcggtggcttgtgagagtcctggggaggtcggtggccccctcaagtcaggacgcttcctcctccttggatatcctacagcttccaccaagcgtcaactgtgaccaaagaagtctgtggacaagccttcattaaagacycttgtcttgtctggtaaacgtatctgtgaaaccccatacaccagtcagggtcacaagcccttctctaggtttccttcttgggaagctgttaactacctgttttcctatctgcctatctgcctgccagccctgtggggcaccgatcaacatcgggccttcagcctcctccctagggcctggcacacattagagacgcaatgcccagtgaatgagtgagtgaccctgtgaaccaaataatgaagaataaacactaggacaaggcaatatgagatttccccacaccgcatactttgtactgttggagcagtggcctagcagagagcattaggagagccctg

SEQ ID NO: 865083 - DNA, 619 bp, Homo sapiens
catgggtggcagatactcagaaaacaatctgaatatgaccaacaggaaagagctggggcctccagtccccctcgccccaacctgcagattaaagtggtttctcagttgtctttcctggggctcatctgaagggggcaggaaaagcggtggcttgtgagagtcctggggaggtcggtggccccctcaagtcaggacgcttcctcctccttggatatcctacagcttccaccaagcgtcaactgtgaccaaagaagtctgtggacaagccttcattaaagaccsttgtcttgtctggtaaacgtatctgtgaaaccccatacaccagtcagggtcacaagcccttctctaggtttccttcttgggaagctgttaactacctgttttcctatctgcctatctgcctgccagccctgtggggcaccgatcaacatcgggccttcagcctcctccctagggcctggcacacattagagacgcaatgcccagtgaatgagtgagtgaccctgtgaaccaaataatgaagaataaacactaggacaaggcaatatgagatttccccacaccgcatactttgtactgttggagcagtggcctagcagagagcattaggagagccctg

SEQ ID NO: 865084 - DNA, 619 bp, Homo sapiens
catgggtggcagatactcagaaaacaatctgaatatgaccaacaggaaagagctggggcctccagtccccctcgccccaacctgcagattaaagtggtttctcagttgtctttcctggggctcatctgaagggggcaggaaaagcggtggcttgtgagagtcctggggaggtcggtggccccctcaagtcaggacgcttcctcctccttggatatcctacagcttccaccaagcgtcaactgtgaccaaagaagtctgtggacaagccttcattaaagacccttgtcttgtctggtaaacgtatctgtgaaaccccatacaccagtcagggtcacaagcccttctctaggtttccttcttgggaagctgttaactacctgttttcctatctgcctatctgcctgccagccctgtggggcaccratcaacatcgggccttcagcctcctccctagggcctggcacacattagagacgcaatgcccagtgaatgagtgagtgaccctgtgaaccaaataatgaagaataaacactaggacaaggcaatatgagatttccccacaccgcatactttgtactgttggagcagtggcctagcagagagcattaggagagccctg

SEQ ID NO: 865085 - DNA, 633 bp, Homo sapiens
aggatgtttagcagcaaacttagccaatacctgctgggtgccagtagtagcatcccccagctgtgacaatgaaaatgctttctgacattgctgaatgtcgctggggggcaaaatcacctcagatgagaatccctgggctggacattactctggacttcagggtgggaatgtgaggcctccctgcctgagggtgactaggaatgtggaagggtgggcatggttatgcctgaaggaagtagatgagcttgccaagtgcctctctctttttagtcctgggattcttagataatactccttgacagacartcagggtgagatttcctcagagttactcagttccccatggaatttcttagctttggggatggggagacttgcaaataaaaccaattacacctgaaaaccccgatatcatctcctctttgcttcccaggggctcttggggtctctgtcaccttctagttgaaaagagctgagtcagagagcttgacagatggtgatgaaaatccagaaaactttcacttgtctggggagcaaagggagcccacacaccatacttttggctcctgccccaatgacccttcattcacgtggccatccaggtactctcgcagccagccagtcaagccccac

SEQ ID NO: 865086 - DNA, 583 bp, Homo sapiens
tttttactttttatcatgagacatttgattttttactattggcctcaatgaggtcagaaatgtctcttggtagatcctataaaaagagtgtctccaacctgttcaatcaaaacaaaggtttaactctgtgaaatgaattcaaacattgaaaagcattttcacagatagcttgttactagtttttatcgtgtgatatttgatttttyactcttagcctcaatttgctcagaaatgtccctttgtagattctattaaaaaaaaaagtgtttcttacctggtgaatcaaaactcaggtttcagtcagtgagatgaatccatacaccacaaagcattatcacagatagcttccttctagttttcattgtgggatatttgatttttcattataggcctcaatgtgcttagaaatgtccatttgtatgttctacaaaaagagtgtttccagcctgttgaatcaaaagattgatttagctctgtgagatgaatgttcacattgcaaaccactttcacagatagcttgtttgttgtttttatcatgggatattcagtttttcactagaggcctcaatggactcagaaatgc

SEQ ID NO: 865087 - DNA, 618 bp, Homo sapiens
tgtatgatctggtcatagacaccgtggatttcaactctccagagtctaaacgctgaaaacacccaacttgatttagtgccttacactctttatctccgatttttcaggacgacacctgttaaaatgttttgccacactttcggcgtgtattccgattatctttttggaaaatttgatcctgttaaatagactatacgtgggatcaacccaattcctgataaaatcggaagcataatgaactatctaatggcctatattagctcccagttctattataatgataaatgctaccgaactctcaccataaatatgctttttctgcgccccaaaggtaaacttaaccacaacaccctgacagtacagatagcaagtggcaaaactgagacagaaactcaagcctgcctcattacaacagcagcagtcttcaccgctgctggagctggcaaggtcaccaagtctgcccagaaagctcrgaaggctagatgaatatcatccctaatacctgccaccccactcttaatcagtggtggaagaacggtctcagaactgtttgtttcaactggccatttaagttcagtagtaaaagactggttaatgaaaacaatgcatcgtaaaacc

SEQ ID NO: 865088 - DNA, 602 bp, Homo sapiens
agtcatggaagcttttctagtcccagccccgcatctggtcccaggccaactagatcggcatgtttctttccaagaaaggggctatgggataggtcgagttagtagccccacgtgggtgcatttgtggcttccactgggccttcaccaaccactgagaaccaggctcttcactacggctttcatggggccatctgaattggcatctcagcgggtgagrgagctgagagatgccagttggggaggatggccacagagaggctggtgtggggaggttcatcccaggtgtgcctgtggatatggggtggggaagcagtgaggatgaacctggccccatgactcttccttggaggaagtggctgtcctgaccatcgctctccttccttcgtctggtagctgtggactgtggcattcctgaatccattgagaatggtaaagttgaagacccagagagcactttgtttggttctgtcatccgctacacttgtgaggagccatattactacatggaaaatggaggaggtggtaggtttcttctactggagaagagagagagagagtgagaaggtgttggagggtggatagcataatctgtgccagagaca

SEQ ID NO: 865089 - DNA, 609 bp, Homo sapiens
cggttttttgtttgtttgtttgtttgttttttgaaactgggtcttgctctgtcacccaggctgaaatgtagtagtagctcaattcacagctcagtgtagcctcgatctcctgggctcaggtgatcctcccatctcagcatcctgggtagctggaactataggcatgtgccacmatgcctgactaattttttgtatttttttttttagagatggggtttcactatgttgcctaggctggtcttaaactcctgggcttaagtgatctgcccacctcaacctcccaaaatgctggaattgcaggtgtgagccaccgcacatggcttattgtgtccttttcttgctattgggtacaactaccttgtctttcattttaaaggaatcattacgttatttcccagattactgtatacccagaaacttcaccaaggtgtcaagagttagtatcttcatgggatttatttctcaccttctggcatccatgtgtcttgccaaggactctaggatgcctgctactgcctgctgtttggattctgtaagcatgatatcatcaatgtaacatatgatgtcttgtgggatgttgaaattaactagattcttgtagaacaaatt

SEQ ID NO: 865090 - DNA, 650 bp, Homo sapiens
caaagcagtactaagaaggaagattattgctatatgtgcctacatcaaaaaataaaaaaacttcacataaacaatctaatgatgcatcttaaagaactagaaaagcaagagcaaaccaaacccgaaattagtagaaaaaagaaataaagactagagcataaataaatgaaattaaaattaaaaaatacaacagaagaatgaaacaaaaagtttgttttttgagaagatgaacaaaattgacaaaccttttgacagactaaccaggaaaacaagagagaaaacccaaataaataaaattagagatgaaaaaggagatattacaacctacaccacagaaattcaggggattattagagactactgtgagcaactatatgctaataaattgaagaaactgataaattcctagacaaatgtaacctgccaagattgaactatacagaaatccaaaaacctgaatagacmaataacaagtgatgagatcaaagccataataaaaactgtcctagcaaacaaaagaccaggacctgatgacttcaatgctaaattttaccaaatatctaaagaagaactaatactgatccttctcaaactattctgaaaaatagaaagggaaggaatactttcaaactcatttggtgaggtgaata

SEQ ID NO: 865091 - DNA, 605 bp, Homo sapiens
ataagctaacaacttagcttgtcacttgttgtacttgcagaaggcaaaagatggtttattattcactgaagtactagcagtagtcagaggaatatcatcgtactatttcttcaagcttcagtcccctcacagggataagatgagaaactgatgttacatgtgcaagtagtggtgtctatcaaaagagaaatctcaaaattaggaaactccagtcttaaaaactttgatcactgtgagtaacctgtccatcttgccttctgaagaagaagctttacactggaatgtaagcaaatatctctggagagaagaagaagaagagaagagtctttatctttaaacaaatctgccttytgaccaagagggataccctatttctaaatcccaaggctctttgccatgacctggtcttgggcaaagtgaacgagactcctagggcacaaaacgtaaaaaggcattcaataggttgcagggccctaaaaccaagtggctcctcaaactttgcaccctgcatgccttgctcacctgatcctagttgaggcccttctgtttgctcatcaaacatactgtttgctcacaagataagagctagaccatgcagaagtgca

SEQ ID NO: 865092 - DNA, 646 bp, Homo sapiens
ttttttgtgttgttttgtttaatttgaagaatgaggctctatctttgactctttattttttagtagtcatgacttaaaatttcttcaaagcattacattactttggaatggttattagcttcaactctttatgtttgcagttaatgktttattttattttttctcttaaatgttagttggtttctttggtcatcatcagatttttttattgttaatattttgtgttaggtctgtattcgttttctattactgcaaaacaaattgtcaccaaacaagacagccttaaagcaacacaaatatgttctttcactcagttcctatgggtcaggagtccaggacgggttatcttgataccaagtttatggtcttaccaggctgaagccaagacagcagtttatactaaaatctcatccgaggctctgggtcttctacaagatcaccggttgttgagaaaatttacttttttgcaactgtttaactgaggccttcagctcctggagattacctggtatttcctgggaggtgaccctcttcaaaatatggctgtatgcttcttcatgatctgcagcagtgtgtctgctattgccccgaaactttctggctcttctgtctctgaactctagaccctctttctaagactcacctg

SEQ ID NO: 865093 - DNA, 654 bp, Homo sapiens
cccattgtgccattcttatgcctttgcatcctcatagcttagctcccacttatgatgagaacatatgatgtttggttttccattcctgagttacttcacttagaataatagtctccaatctcatccaggtcactgtgaatgccattttatggctgagtagtattacatctcatatacatatatatatatatatatatayacacacacacacacacacacacacacagagagatacacacatacacagagatacacacacacactcacacacgcaccaccatttctttatccactcattgattgatgggcatttgtgttgtttccatgtttttgcaattgtaaattgtgctgccacaaatgtgtgtgcaagtatcttttttgtataataacttcttttcctctggatagataccatgtcatctagttttgaatgttactgtggatcagtctaaaacttctgcttgattttttttttgttctcaataatttggttttgtgattttgtttcctgaacatccaaaaagtgctttcttcatttttgaagtccaataattttactcatatacattgattgttttgtgttgatttttctggggtaaaataaaacttttaacctgtagatccaattattatgttatttctgggaagtttcat

SEQ ID NO: 865094 - DNA, 627 bp, Homo sapiens
ttagctgtattcctaggtatttgattctctttgtagcaattgtgaatggcagttcattcataatttgcctctctgcttgcctgttgttggtgtataggaatgctagccatttttacacattgattttgtatcctgacactttgctgaagttgctagtcrgcttaagaagctttttggctgagataatggggttttctagatataagatcatgccatctgcaaacaaagataatttgacttcctcttttcctatttgagtacctttatttatttctcttgcctgatcgccctggccagaacttccaatactatgttgaataggagtggcgagagagggaatccttgtcttgtgccggttttcaaggggaatgctttcagcttttgcccattcagtaagatattgtctgtgggtttgtcgtatatggctcttataattttgagatatattccttcaatatctagtttattgagcatttttaacataaagggatgttgaattttatcaaaggccttttctgtgtctattgagataatcacgtggttttgtctttagttctgtttatgtgatgaattatatttatttatttgcatatgttgaaccaaacttgtaacctggggaggaagcca

SEQ ID NO: 865095 - DNA, 627 bp, Homo sapiens
ttagctgtattcctaggtatttgattctctttgtagcaattgtgaatggcagttcattcataatttgcctctctgcttgcctgttgttggtgtataggaatgctagccatttttacacattgattttgtatcctgacactttgctgaagttgctagtcagcttaagaagctttttggctgagataatggggttttctagatataagatcatgccatctgcaaacaaagataatttgacttcctcttttcctatttgartacctttatttatttctcttgcctgatcgccctggccagaacttccaatactatgttgaataggagtggcgagagagggaatccttgtcttgtgccggttttcaaggggaatgctttcagcttttgcccattcagtaagatattgtctgtgggtttgtcgtatatggctcttataattttgagatatattccttcaatatctagtttattgagcatttttaacataaagggatgttgaattttatcaaaggccttttctgtgtctattgagataatcacgtggttttgtctttagttctgtttatgtgatgaattatatttatttatttgcatatgttgaaccaaacttgtaacctggggaggaagcca

SEQ ID NO: 865096 - DNA, 596 bp, Homo sapiens
gccatctgcaaacaaagataatttgacttcctcttttcctatttgagtacctttatttatttctcttgcctgatygccctggccagaacttccaatactatgttgaataggagtggcgagagagggaatccttgtcttgtgccggttttcaaggggaatgctttcagcttttgcccattcagtaagatattgtctgtgggtttgtcgtatatggctcttataattttgagatatattccttcaatatctagtttattgagcatttttaacataaagggatgttgaattttatcaaaggccttttctgtgtctattgagataatcacgtggttttgtctttagttctgtttatgtgatgaattatatttatttatttgcatatgttgaaccaaacttgtaacctggggaggaagccaatttgatcttggtggataagattttttgatgtgctgctggactcagtttgccagtattttattgaggatttttgcatcgatgttcatcatggatattggcctgaagttttctttttctgttgtatctctgctgggttttggtatcaggatgatgctggcctcataaaatgagttacagag

SEQ ID NO: 865097 - DNA, 613 bp, Homo sapiens
ggcaaccactaacccgctttctgtttccaaggatttgcctattttgggcatttgatacaaatggattcataaagtatatgatgctttttgtatagcttttttcttttcttttcttttgagatggattctcacactatcttctgggctggagtgcaatggcacgatctcggctaactgcaacctctgcttcctgggttcaagtgattctgctgcctcagcctcctgagtatctggaattacaggcacacaccacaacacctggctaattttttgtatttttagtaaagacggggtttcactatgttggccagactggtctcaaactcctgacctcatgatccacctgccttagcctcccaaagtgctgggattacaggcgtgagccaccgcacctrgccttgtatagtttttttcatcaagcataatgtctttaatatccatccatgttgtgtcccatattagtacatcattcctttttctggctgaatactattgccttgtatactacatcacatttgtcaatctagtcctccatggataggcatttacactggtttcactttttggctataacaaatgtttctatggacatgcatatacaagtttttgtgtg

SEQ ID NO: 865098 - DNA, 655 bp, Homo sapiens
tttattttaaatctgtaataatattcagaattagctcacaaaactggattacacaaagccagcaggtttaaaaatatttcaaagatgttgcttttatgcttcaaatccttgaaaagccaaatacattcacttctgaaactaagtcttgggtttygctgaaaaaaaaaataagaaaagtgtttaatagcacatatggcataattttatttgacatctgttttgtaacaaacaatatttagctcacttatttgctgaatgatacagtacacagtgcaaacaaaaagtccaatgaacagtttttccagagtttgtaatatatcaatatttattgcaaaagaatgcaaaacttaaacatttaagtgtgttattgattgtaatatgcaaaacattgattactgtatgttgccactgcaaaaaaaaaagtgtactaaatgccttctggggtatgaaaatgaggtgcatttcagcaagaggagctcacttgctccctttggtgacatttagtcttaggcctgccccccttcccccgtttgtgtcatcctattgaagacagctgtcaatatatttaggatgctttagctcatagcagcaaaaatggtgagactattggcttaattgtgaggagtgattgattttaatggaaacaacatttaaa

SEQ ID NO: 865099 - DNA, 629 bp, Homo sapiens
attacataatgaaaaaagggccaatccacaaagaagacatagcaatctagaatgtgtgtgcactaaacaaaagagccacaaaaatagatgaagcaaaacccaaaagaacagaaagaggaaataagcaaatccacaattataaatgaagacttgactacctctcttaacaattgatagaacaactagacagaaaatcagcaaggatatagaagaagtcaacaccataacaaataggatctaattgatatttatagattaccaccaaacagcagaagaatacacattcttttcaagtccctacctaacaatatcaagatagaccacattttaggcataaaacaaaacccaacacatttaaaagagttgaaattattaagagtgtgttctctgattacaatggaattgagctagaaattaaaaacagaagcgtaacaggaaaatctccaacacttgggaattaaacaacmcacttataaataatccatgggtcaaagagaaagttgcaaagaaactttaaaaatacattcaactgaataaaaatgaaaatataatgtggcaaaatgtgtggagcacggctaaaacagtgatgagagtaaactttatagcactaaatacatatattagaaaag

SEQ ID NO: 865100 - DNA, 685 bp, Homo sapiens
accttcatctcatgtagtaattcatacaaagtagatcacagatttaaatcaaaacataaatctataaaattcaggaagaaaaaacaaaagaaaaattctaagcagagtgcttacacttaacaccacacacatgatccatacaaggaaaaattgataaactgaatctcatcaaaattaaackgttgctctgcaagctatggaccggagaaaatatttgcaaaccacataaatgacaaagggctagtatctagaaaatacaaaagattctcaaacacagcaattaaaaaaatcaaacaatccaattggaaaacgggataaaagatatgaagagacactacaccagagagtgtacacagatggcaaataagaatatgaaaaagatgtccaaaatcattagctattagggacacaaattaaaaccataatgaggtgccactacccacctatcagaaaaacaaacatttaaaaatagtgaaacattaaatgctggtaagaatgcagagaatggagatctctcatgctttcctggcaggaatataaaatggtacagtcactctggaaaatagtttggtagtttctttaaaaactaaacatgtaacctagcagttgtactcctgagcatttatcccagagaaacaaagacttatgtttacacaaaaacctgttgataacagctttatttgta

SEQ ID NO: 865101 - DNA, 685 bp, Homo sapiens
accttcatctcatgtagtaattcatacaaagtagatcacagatttaaatcaaaacataaatctataaaattcaggaagaaaaaacaaaagaaaaattctaagcagagtgcttacacttaacaccacacacatgatccatacaaggaaaaattgataaactgaatctcatcaaaattaaactgttgctctgcaagctatggaccggagaaaatatttgcaaaccacataaatgacaaagggctagtatctagaaaatacaaaagattctcaaacacagcaattaaaaaaatcaaacaatccaattggaaaacgggataaaagatakgaagagacactacaccagagagtgtacacagatggcaaataagaatatgaaaaagatgtccaaaatcattagctattagggacacaaattaaaaccataatgaggtgccactacccacctatcagaaaaacaaacatttaaaaatagtgaaacattaaatgctggtaagaatgcagagaatggagatctctcatgctttcctggcaggaatataaaatggtacagtcactctggaaaatagtttggtagtttctttaaaaactaaacatgtaacctagcagttgtactcctgagcatttatcccagagaaacaaagacttatgtttacacaaaaacctgttgataacagctttatttgta

SEQ ID NO: 865102 - DNA, 626 bp, Homo sapiens
tgttccactggtctatgtgtctgttcttgtacaagtgcctgctgtttttgttactatagacctgtagcatagtttgaagtcaggtagtgtaatgcctctagctttgttctttttggttaggattgccttggctattgaggytcttttttggttccacatgagttttaaaatagtctttacttgttctgtgaagaatgtcaatggtagtttaatgaaaatagtgttgaatgtataaattgctttgggcagtatggccattttactgatattgattcttcctatccatgagcatggaaaggttttctttgttcgtgtcatctctgatttctttgaacagaggtttggagttctccatatagagatctttcgcctccccaatcagccatattcctaggtatattaatctttttgtggcaattgtgaatgggggttcattcctgatttggctcttggcttgattgttgtcggtgtataggaatgctagtgatttttgcatattgattttgtatcctgagactttgctgaagttgtttatcagcttcagaagttttggggctgagacaatgaggttttctagatataagatcatgtcatctgcaaacagggatagcttgacctcctcttcc

SEQ ID NO: 865103 - DNA, 626 bp, Homo sapiens
tgttccactggtctatgtgtctgttcttgtacaagtgcctgctgtttttgttactatagacctgtagcatagtttgaagtcaggtagtgtaatgcctctagctttgttctttttggttaggattgccttggctattgaggttcttttttggttccacatgagttttaaaatagtctttacttgttctgtgaagaatgtcaatggtagtttaatgaaaatagtgttgaatgtataaattgctttgggcagtatggccattttactgatattgattcttcctatccatgagcatggaaaggttttctttgttcgtgtcatctctgatttctttgaacagaggtttggagttctccatatagagatctttcgcctccccaatcagccatattcctaggtatattaatctttttgtggcaattgtgaatgggggttcattcctgatttggctcttggcttgatkgttgtcggtgtataggaatgctagtgatttttgcatattgattttgtatcctgagactttgctgaagttgtttatcagcttcagaagttttggggctgagacaatgaggttttctagatataagatcatgtcatctgcaaacagggatagcttgacctcctcttcc

SEQ ID NO: 865104 - DNA, 574 bp, Homo sapiens
ccaaggacatacattggagaaaggacactctattcaataaatattgctggaaaaactggatagccacatgctgaagaatgaaactagatctctgtctctcaccatagatacaaaaaaataaactcaagatgaattagacttaaatgtaagacttaaaactataaaactgctagatgagtacttgggggaaacactttaagacatcggtctaggcaaagattttatggctaagacttcaaaagcacagacaacagaaccaaaaatagacaaaaaggactatattaaactaaaaagtttctgcacagcaaaggaaacaataaacagagtgaagagacaacctataaaatgggagaaaatatttgcaaattataaatcaaacaagggactaatatccagaatatacaagaaatgcaaayaactcaacagaaaataaacaaataaactcataaaaagtggccaaatgacatgaatagacatttcttaaaagaaaacattaaataaccaacaggtatatttttaaatgctcaacatcactaatcattagggaaatgcaaatcaaacaataatgagatat

SEQ ID NO: 865105 - DNA, 635 bp, Homo sapiens
attacataatgaaaaaagggccaatccacaaagaagacatagcaatctagaatgtgtgtgcactaaacaaaagagccacaaaaatagatgaagcaaaacccaaaagaacagaaagaggaaataagcaaatccacaattataaatgaagacttgactacctctcttaacaattgatagaacaactagacagaaaatcagcaaggatatagaagaagtcaacaccataacaaataggatctaattgatatttatagattaccaccaaacagcagaagaatacacattcttttcaagtccctacctaacaatatcaagatagaccacattttaggcataaaacaaaacccaacacatttaaaagagttgaaattattaagagtgtgttctctgattacaatggaattgagctagaaattaaaaacagaagcgtaacaggaaaatctccaacacttgggaattaaacaacmcacttataaataatccatgggtcaaagagaaagttgcaaagaaactttaaaaatacattcaactgaataaaaatgaaaatataatgtggcaaaatgtgtggagcacggctaaaacagtgatgagagtaaactttatagcactaaatacatatattagaaaagaagaaa

SEQ ID NO: 865106 - DNA, 703 bp, Homo sapiens
accttcatctcatgtagtaattcatacaaagtagatcacagatttaagtcaaaacataaatctataaaattcaggaagaaaaaacaaaagaaaaattctaagcagagtgcttacacttaacaccacacacatgatccatacaaggaaaaattgataaactgaatctcatcaaaattaaackgttgctctgcaagctatggaccggagaaaatatttgcaaaccacataaatgacaaagggctagtatctagaaaatacaaaagattctcaaacacagcaattaaaaaaatcaaacaatccaattggaaaacgggataaaagatatgaagagacactacaccagagagtgtacacagatggcaaataagaatatgaaaaagatgtccaaaatcattagctattagggacacaaattaaaaccataatgaggtgccactacccacctatcagaaaaacaaacatttaaaaatagtgaaacattaaatgctggtaagaatgcagagaatggagatctctcatgctttcctggcaggaatataaaatggtacagtcactctggaaaatagtttggtagtttctttaaaaactaaacatgtaacctagcagttgtactcctgagcatttatcccagagaaacaaagacttatgtttacacaaaaacctgttgataacagctttatttgtattagccaaaaactggaaa

SEQ ID NO: 865107 - DNA, 703 bp, Homo sapiens
accttcatctcatgtagtaattcatacaaagtagatcacagatttaagtcaaaacataaatctataaaattcaggaagaaaaaacaaaagaaaaattctaagcagagtgcttacacttaacaccacacacatgatccatacaaggaaaaattgataaactgaatctcatcaaaattaaactgttgctctgcaagctatggaccggagaaaatatttgcaaaccacataaatgacaaagggctagtatctagaaaatacaaaagattctcaaacacagcaattaaaaaaatcaaacaatccaattggaaaacgggataaaagatakgaagagacactacaccagagagtgtacacagatggcaaataagaatatgaaaaagatgtccaaaatcattagctattagggacacaaattaaaaccataatgaggtgccactacccacctatcagaaaaacaaacatttaaaaatagtgaaacattaaatgctggtaagaatgcagagaatggagatctctcatgctttcctggcaggaatataaaatggtacagtcactctggaaaatagtttggtagtttctttaaaaactaaacatgtaacctagcagttgtactcctgagcatttatcccagagaaacaaagacttatgtttacacaaaaacctgttgataacagctttatttgtattagccaaaaactggaaa

SEQ ID NO: 865108 - DNA, 625 bp, Homo sapiens
agtagctggtctggtggcctgagaccttgcttcactgggggacagggctgccatcctcgaaggccagggtctgggcctctgggccgggagctcctccatcagcttgcagccctgggggaggcttgcagccctggaggccactccctctagtgacagaacccatacctctgggaactgcttcctctgcctgcatgccccaaacttggacttggaggttgtagatggccgtggcagggcccttgcctggcccctatcctcctgcagcctggcctaggcatgggtgacttacccagtgccagcaggctgcctcagcccgtgcccactaaaaaatttgttcctggccgggcgcagtggytcacgcctgtgatcccagcactttgggaggctgaggcaggtggatcgtctgaggtcaggtgtttgagaccagcctaaccaacatggtgaaaccccgtctctactaaaaatacaaaaattagccgggcgtgatggcaggcgcctgtaatcccagctactcaggaagcttaggcaagagaatcacttgaacctgggaggcggaggttgcagtgagcggagattgcgccgctgcactccatcctggacaatagagcaagactccgtctcaaaa

SEQ ID NO: 865109 - DNA, 625 bp, Homo sapiens
agtagctggtctggtggcctgagaccttgcttcactgggggacagggctgccatcctcgaaggccagggtctgggcctctgggccgggagctcctccatcagcttgcagccctgggggaggcttgcagccctggaggccactccctctagtgacagaacccatacctctgggaactgcttcctctgcctgcatgccccaaacttggacttggaggttgtagatggccgtggcagggcccttgcctggcccctatcctcctgcagcctggcctaggcatgggtgacttacccagtgccagcaggctgcctcagcccgtgcccactaaaaaatttgttcctggccgggcgcagtggctcacgcctgtgatcccagcactttgggaggctgaggcaggtggatcgtctgaggtcaggtgtttgagaccagcctaaccaacatggtgaaaccccgtctctactaaaaatacaaaaattagcygggcgtgatggcaggcgcctgtaatcccagctactcaggaagcttaggcaagagaatcacttgaacctgggaggcggaggttgcagtgagcggagattgcgccgctgcactccatcctggacaatagagcaagactccgtctcaaaa

SEQ ID NO: 865110 - DNA, 591 bp, Homo sapiens
agacacagataggctcaaaataataggatgaaggaagatttaccaagcaaatggaaagcaaaaaaaaaaaaagcaggggttgcaatcctagtctctgataaaacacactttaaaccaagaaagatcaaaagagacaaagagggctttacataatggtaaagggattaattcaacaagaagagttaactatcctaaatatatatgtgcctaatacaggcacacccagattcataaagcaagttcttctggactacaaagagacttagactcccacacaataataatgggagactttaataccccactgtcaatattagactgatcaatgagacagaaaattaacaaggatattcaggactggaactcagttctggaacaagcagacytaacagacatctacagaactctccatcccaaatcaacagaatatacattcttctgagcaccacatagcactcacttattctaaaattgaccacataattggaagtaaaacactcctcagcaaatgcaaatgaagggaaatcataacaaacagtctctcagaccacagtgcaatcaaattcgaactcaggattaagaaactcactc

SEQ ID NO: 865111 - DNA, 596 bp, Homo sapiens
cttccctgcccaccttgttttgcctttaaaaatcagctcataactgctgctaattgcagtgtatattcaggataacttgaatctatgctccagagttgcaatcctgaagtttgtctcaaataaactctctactaagattaactttgtctcagcttcttccttgtagggtgacaccaggatctcctttcctggtgctgcagggcttccctggaccctgtgcagcagagatatcccctccacacagtattgccagcatattatgtagaaaaatcattttccctttcaacaggaagcccagttcttaggattgttgttcaaaaatataatttaaagcttaaaactgagcacttgggtcttggcagatttcccatctttcctcacagtggcaratgtgactgtcaagagcctgggcagctgaggacaagtctgagcggggcagaggttgtgatcgtaccctggcctgtgtcatccccttgcagacaccagcccttctctatagaaccagggcatctgccagggattatttaggccttgggtgagggtctggcagggagcagtgcagtgatggagggtgtggtgtgtgtgtggcgtgttgg

SEQ ID NO: 865112 - DNA, 625 bp, Homo sapiens
tgaagggaaccagggaggtgaaagatctctacaacaagaaaacaataattacaaagcactgctgaaagaaatcagagctgacccaaacaaatggaaaaacattccatgctcaagaataggaagaatcaatattgttaaaattgccatatactatcaaaagcaatccccagattcagtgttattcctatcaaactaccaatgtcatttttcacagaattagaaaaaaaaacctattctaaaatttayaaagaactcaaaaagagcacaaatcaccaaagcaatcctaagcaaaaagaacaaagcaggaggcatcacactacctcacttcaaactatactataaggctacagtaaccaaaacagcatggtgtttgtacaaaaacagacacatagaccattagaacaggataaagaacccagaaataaagccacacatctacagctaactgatctttggcaaaggtgacaaaaataagcaataggaaaaggacttcctattcaataaatgattctaggataactggctatgtagatgccagaatgaaactggacccctacttatcaccatatacaaaaagtaactcaagagggattaaagacttaaatgtaagacctcgaactataaa

SEQ ID NO: 865113 - DNA, 621 bp, Homo sapiens
gaccttgcttcactgggggacagggctgccatcctcgaaggccagggtctgggcctctgggccgggagctcctccatcagcttgcagccctgggggaggcttgcagccctggaggccactccctctagtgacagaacccatacctctgggaactgcttcctctgcctgcatgccccaaacttggacttggaggttgtagatggccgtggcagggcccttgcctggcccctatcctcctgcagcctggcctaggcatgggtgacttacccagtgccagcaggctgcctcagcccgtgcccactaaaaaatttgttcctggccgggcgcagtggytcacgcctgtgatcccagcactttgggaggctgaggcaggtggatcgtctgaggtcaggtgtttgagaccagcctaaccaacatggtgaaaccccgtctctactaaaaatacaaaaattagccgggcgtgatggcaggcgcctgtaatcccagctactcaggaagcttaggcaagagaatcacttgaacctgggaggcggaggttgcagtgagcggagattgcgccgctgcactccatcctggacaatagagcaagactccgtctcaaaaaaaaaaaaattgttccca

SEQ ID NO: 865114 - DNA, 621 bp, Homo sapiens
gaccttgcttcactgggggacagggctgccatcctcgaaggccagggtctgggcctctgggccgggagctcctccatcagcttgcagccctgggggaggcttgcagccctggaggccactccctctagtgacagaacccatacctctgggaactgcttcctctgcctgcatgccccaaacttggacttggaggttgtagatggccgtggcagggcccttgcctggcccctatcctcctgcagcctggcctaggcatgggtgacttacccagtgccagcaggctgcctcagcccgtgcccactaaaaaatttgttcctggccgggcgcagtggctcacgcctgtgatcccagcactttgggaggctgaggcaggtggatcgtctgaggtcaggtgtttgagaccagcctaaccaacatggtgaaaccccgtctctactaaaaatacaaaaattagcygggcgtgatggcaggcgcctgtaatcccagctactcaggaagcttaggcaagagaatcacttgaacctgggaggcggaggttgcagtgagcggagattgcgccgctgcactccatcctggacaatagagcaagactccgtctcaaaaaaaaaaaaattgttccca

SEQ ID NO: 865115 - DNA, 603 bp, Homo sapiens
ttgtttgtttgttttttgagacaaggtctcattctgttatcctggttggcgagcagtagtgcaatcgtggttcactgtagcctccactccccaggtcaggccattctcctgcttcagccttcagagtagccgggactaaagtcacacaccactgggcttagctaattttgaaaaaattttttatagagacagaatcctgctaagttgcccaggttggtctcaaacccctgggctcaagttatctcccccacccctaccccacttcagacgcccaaggtgctaggattataggcatgagccaccgcacctggcctgcagtccataaagttttaatgaaataagagtagtcggtcaggtgcagtggctcacgtctataatctcaggactttgggaggccgaggcaggtggatcacctgaggtcaagagttcaagaccagcctggccaacatggygaaaccctgtctctactaaaaatacaaaaaaaaaaaaaaaaaattagccagacatggaggcaggtgcctgtaatcccagctattcaggaggctgaggcaggagaatcgcttgaacctgggagggggaggttgcagtgagccaagattgcgt

SEQ ID NO: 865116 - DNA, 646 bp, Homo sapiens
tgcagcagagaaagagtttaatcatctcatagggcagcaaaatgaggagatgggaggaaacctcaaatccacctccctgagagactggggtatgaagtttttaagggatctggatgtgtaatgggctaaagtgtgaggattgctgattggtcacaaagtaagaggtgaaactgtggaacagagagataaagaatctgcattcttatgctgagtcccttggcagggtcttcagatrggttggcgtttgctggaattcataatctgaaaagtaattttggggaaaaaggtccagtccgagattccatctataggagcaatgaaggaccaggtggtcagcgagctacctgactgttgattagttagcagctgcaagaaagtgggtcgaagtgcaccagcacagcctcatcaatgcctgactaaatctgcctaaagcctggattgtaattctcattaaccctgcgagggcagtttcaatctgtaaaataaagaaggtgggataaatggtccctatgaaaaggattacaaagcagtggtcccagggcatatccaacctgcagactaattctacttgggcctacatggtctttgaaaatgaatttcagttatgttccaaatagggatatccaaccctctaaaaatctggatt

SEQ ID NO: 865117 - DNA, 646 bp, Homo sapiens
tgcagcagagaaagagtttaatcatctcatagggcagcaaaatgaggagatgggaggaaacctcaaatccacctccctgagagactggggtatgaagtttttaagggatctggatgtgtaatgggctaaagtgtgaggattgctgattggtcacaaagtaagaggtgaaactgtggaacagagagataaagaatctgcattcttatgctgagtcccttggcagggtcttcagataggttggcgtttgctggaattcataatctgaaaagtaattttggggaaaaaggtccagtccgagattccatctataggagcaatgaaggaccaggtggtcagcgagctacctgactgttgattagttagcagctgcaagaaagtgggtcgaagtgcaccagcacagcctsatcaatgcctgactaaatctgcctaaagcctggattgtaattctcattaaccctgcgagggcagtttcaatctgtaaaataaagaaggtgggataaatggtccctatgaaaaggattacaaagcagtggtcccagggcatatccaacctgcagactaattctacttgggcctacatggtctttgaaaatgaatttcagttatgttccaaatagggatatccaaccctctaaaaatctggatt

SEQ ID NO: 865118 - DNA, 630 bp, Homo sapiens
ccctttttgacctttaagtattgacatggtgcatctgcagggctctgctagcctaaatggtgtgtatgtgcaaacgaaagtgccccctcagagtgcacgcagcctcacaggcccccagcttggagagtagatagtgggctggatttcagcccccatgcaccctccaacctaggtgtctttggataggacagagtctatgttatggcatgtagcaggcccctctctgagcccttccagagattagagatgtgctcttgacacccaagcccagtgtcktcaaatcccacctgtttccatgtcccacctgcttagccaggtcccccattcacttcaatccccataagctgggccctgcagacctccagctctttatccattgtccactgctaggctggtcagacataccttgtccacctctctggacccctttcctcttctcctcctcttgtctgccagctgctgggacatctctctcccactttgtagctctgccccacccccaggccagggttcagccatccctgcatgtgcttttcatgttcacatccaggagccattgtgacaattgggccatttttagggtgccccaaacactcaccttggttcacagaaaggcattgaagttctgct

SEQ ID NO: 865119 - DNA, 629 bp, Homo sapiens
ctccagggccacgcccccagcggacttggggtaccgcccaccgcactgctccctcgcctggcgtagggctgggcggtgggagagtgggtgagagtaagaaagatgaatgcagaaagggctttactctttagctagtggggtggcttcctttttttctggcacattaattgaktttggatttattcaatcaacattttaaataaagtcactgtagagatgatttaaattgtggtaacttcattgcagaagctcccaggcaaatgcggggagatacatttctttgggtccaaagaataaatgaacaaatcatgaagatattaaactataaataatttttgaaagaatcgatgtttgcatggatgtggatacaacagaaaactagaattaaagtttattttcctagaaagtgctccctagatgagtttttgaaactggtcgcagaggttttaagtggactccaaaaggaacttgagaaagcaaataccaagggatatactggtgagagtgagccagttttgtgtctaagccagaatttttgaggatggcagctagggtttgtgtcaggatccaacggctgtactttgtttcagggctatactttgtatatggtgtaccaggctaaaggctta

SEQ ID NO: 865120 - DNA, 589 bp, Homo sapiens
tgaagtgatagctgaatataaactattatcatgtggttaatattgttgttgttaacaaatccgttttttttccagaaatgaggaaagagaatgaaggaggttttcatgtaggatttttgggatgagaatgggggtttagattatcagaaaaaaaagggttaaatctttctaagatgtgtgaggattgtagctttttatggctaagttttaaggctctctgttcttgagtcagcaaaactagtggttcttttgttcattttgattacaaactaagttatctttatacaccataaaatcaawaatgaaaacactgaaaattgcaagacaaacttatctcagcagcttgcccagcatgaaaaagcatttgaaatcaaagaatgttacagtaacaggagaccatttctttcaactccttccatttaaacatgaggaaactgagactcagagatgagaggtaaaataacttgctcagagtcacaagagatgtttgagagaggctagaggtacttgagtctcagctgctcacgtccagggcactatgcctgcctctggactgtctgttttaatctccttgctctcaatttcacag

SEQ ID NO: 865121 - DNA, 564 bp, Homo sapiens
ttttggcaatttttattcttaattaactgaagtctattaaatctattttttctcattaaactaagaaatgaatattttagacataggaaactaaaaatattaaaatacagacaatagaaatcacacagagaaatacagataaactgagaacacaatttaatcagcatcactgcaaactacatttgtgttggttaatatcttacccaataaagatgtgtgtgktgggggaggtatgtgcacaaatatatacatgtgtttacagtgtattatatatacgctatatcatggataaaatgagtactatataaatatgggctatatatgcagaaatatatattcatatggttcatgtgtatggtttttattatcttattgtatttcattttacataatacgtgctttctgatgttatccttagttttcagaaacataatttcttaaatgctgcatagtccccatcttagaaatacatgataatttatttttccagtctataatttccatgtatttaattgaatcctaaatattctgtattgaaatgttgcaatatacattgatgttagt

SEQ ID NO: 865122 - DNA, 564 bp, Homo sapiens
ttttggcaatttttattcttaattaactgaagtctattaaatctattttttctcattaaactaagaaatgaatattttagacataggaaactaaaaatattaaaatacagacaatagaaatcacacagagaaatacagataaactgagaacacaatttaatcagcatcactgcaaactacatttgtgttggttaatatcttacccaataaagatgtgtgtggkgggggaggtatgtgcacaaatatatacatgtgtttacagtgtattatatatacgctatatcatggataaaatgagtactatataaatatgggctatatatgcagaaatatatattcatatggttcatgtgtatggtttttattatcttattgtatttcattttacataatacgtgctttctgatgttatccttagttttcagaaacataatttcttaaatgctgcatagtccccatcttagaaatacatgataatttatttttccagtctataatttccatgtatttaattgaatcctaaatattctgtattgaaatgttgcaatatacattgatgttagt

SEQ ID NO: 865123 - DNA, 615 bp, Homo sapiens
actaaaggactggaatcaggaaagatgtaagagtataaagaaatatatgaggaaaaataaaaggagttagagttgatttttcccagagaggaaagaaaaaataagagagtgaagagatactgatctcaggatacacagagcttattcatcttgtcacaggtaagaagaaaagatgggctacttagtattttacctaagagttgattacacgcaaggaaaaactcaycgggtagtctactgtttcaaaaagagaaagctgattaagaacttgttcaattcttattcttattgacctttaagaatagaacaattagtcaagagtagacctcttcgtggtcctaatgctgaatcttaaatgtaagttattaataactttatttttctgaagtttctttttggtcaaagatcctacccgagattggctgcaagacttcttagaaatgaaatggctgtaattacttagggaaccttgctgaataatacatagaaacctaatcaaattacaatataaatcacattcttttctctataattggttgcaattcagttaatatcatcaaacaattaccataagcatttataaatgatttgctgaagtatttggagaacagaatt

SEQ ID NO: 865124 - DNA, 610 bp, Homo sapiens
gtttgatataccaatgtatgcagccatcttttctttgtctgcctaaatgaataattctatacctagacatatcctgtgttatttttaaaacattatattaaaatttagtaattattaggttttatttaaaaatcttctgagatttcttttaactctacctataccaacctcagaataaaatagttatcctatgtgggtgggggaaataaactttataattattacaatcttcaggtatcttttaaaatatacggctaaaatatttgcatataatcgagtgtgaattggtaaaagtaaagaaaaatctttttttttttttttttttttttttttgagacaggktctcactctgttgcccaagctggagtacagtggcacgatcttggctcactgcagcctgcacctcccagggtcaagtgatactcctgcatcagccacccgagtagctgggattactggtgcccaccacaatgcccagctaatttttgtatttttagtagagacgaggtttcaccatgttggccaggctggtctcgaactcctgacctcaggtgatctgcccaccttggcctcccaaactgctgggattacaggcaaaaaatcattttga

SEQ ID NO: 865125 - DNA, 611 bp, Homo sapiens
agcatttttatttagaaattaagataacccagaaataatattcacactccatggaatttaaaatatattttttcttttcttaagagtgtgtgagaaagtcttacgagaaatggataagataacatgatttatcccatagcccaaattatatttggcacctaaaaaagcttttcaggtctatctacagataaatccaaagtgagctagtaatgtacagagttcaagagaggaccagatggtattcattatttttttccttcaggagaaatagttgtagttattattaaatataaactactttattactcctaattcagtctcacagaaaaatactccaaaaattccgacaatattttgttgcggcttaacctgaaaagctctgaaggttagtagtattattcaaatactgaagttacctgctrttcattcacttccatttgtttttagatatgttcttggataggtttaaactaaaagtataaatgctttttatgtttataatgcagtaataatggaagtatgcaatgtaaggagctctgtggacttgatgagactgattatttctttcttgctttccaggtcttgaccctgctgggccaaggttctccaga

SEQ ID NO: 865126 - DNA, 648 bp, Homo sapiens
gggaagggggtgtaagaacagggagtaggtacaaagatcacatgcttcaaagggcaaaaagcagaaatattgataaggttctatgttcagcagtgcatgtattgtcttgataaacatcttaaacaacaaaaaacagggttcaagagcagagaactggtccaaccacaagttaccagggcggagcttttccccaccctaggaagcctgagggtactgcaggagaccagggcatatctcagtctttatctcaaccacataagacagacattcccagagcggccrtttatagatctcctcccaggaatgcattcctttcccagggtattaatattaatattcctcgctaggaaaagaatttagcgatatctttcctgcttgcacgtccatttatacgctctctgcaagaagaaaaatatggctctttttgcccgaccccacaggcagtcagaccttatggttgtcttcccttgttccctaaaagccgctgttattctgttctttttcaaggtgcactgatttcatattgttcaaacgcatatgttttacaatcaatgtgtatggttaacacaattatcacagtggtcctgaggtgacatatatcctcagcttatgaagataacaggattaagggattaaagtaaagacagg

SEQ ID NO: 865127 - DNA, 648 bp, Homo sapiens
gggaagggggtgtaagaacagggagtaggtacaaagatcacatgcttcaaagggcaaaaagcagaaatattgataaggttctatgttcagcagtgcatgtattgtcttgataaacatcttaaacaacaaaaaacagggttcaagagcagagaactggtccaaccacaagttaccagggcggagcttttccccaccctaggaagcctgagggtactgcaggagaccagggcatatctcagtctttatctcaaccacataagacagacattcccagagcggccgtttatagatctcctcccaggaatgcattcmtttcccagggtattaatattaatattcctcgctaggaaaagaatttagcgatatctttcctgcttgcacgtccatttatacgctctctgcaagaagaaaaatatggctctttttgcccgaccccacaggcagtcagaccttatggttgtcttcccttgttccctaaaagccgctgttattctgttctttttcaaggtgcactgatttcatattgttcaaacgcatatgttttacaatcaatgtgtatggttaacacaattatcacagtggtcctgaggtgacatatatcctcagcttatgaagataacaggattaagggattaaagtaaagacagg

SEQ ID NO: 865128 - DNA, 597 bp, Homo sapiens
ggctttagcatccatctactcattgtatctagcatctaaacagcctccaggaactggagattacaactaaaagcaggctgacccagacatctcacacttggcttgttggctgactgatattatcaatgtgcttgtctccctgcttattcattcagtatagatgaaatgctgctgaaccctgggaaaacattcgatctagtttcatacaaagcacctaattataacttttccgttggaaacaggaaatgaatcctgtaatggcacagtggctaacaccagctttaaaaatgctaagtagagaatctaacacttaacaagaaaacaawataacatattgaaatatttaaaagtcactttgatggaaaaaaagcacaagcaaggaagacatgattctttttattctataatgttctctattattcattaattcaggaaaactaattttgaatgcagtgttaaacaactacataaagtgaaataaaataaaattaaaaagacaaagaaataaaatgtcacaaaccatagactccagtaaaggaataattcctagtttaaggtattctgtatgtacctggaccacagctgagatcacggttg

SEQ ID NO: 865129 - DNA, 597 bp, Homo sapiens
ggctttagcatccatctactcattgtatctagcatctaaacagcctccaggaactggagattacaactaaaagcaggctgacccagacatctcacacttggcttgttggctgactgatattatcaatgtgcttgtctccctgcttattcattcagtatagatgaaatgctgctgaaccctgggaaaacattcgatctagtttcatacaaagcacctaattataacttttccgttggaaacaggaaatgaatcctgtaatggcacagtggctaacaccagctttaaaaatgctaagtagagaatctaacacttaacaagaaaacaatataacatattgaaatatttaaaagtcactttgatggaaaaaaagcacaagcaaggaagacatgattctttttattctataatgttctctattattcmttaattcaggaaaactaattttgaatgcagtgttaaacaactacataaagtgaaataaaataaaattaaaaagacaaagaaataaaatgtcacaaaccatagactccagtaaaggaataattcctagtttaaggtattctgtatgtacctggaccacagctgagatcacggttg

SEQ ID NO: 865130 - DNA, 516 bp, Homo sapiens
taaagttccaaaatgatctgctttgactccaagtctcacatccaagtcatgctgatgcaagaggtgggctcccatggccttgggcagctctgcccctgtggcttttcaggatacagcccccctcctggctgctttcacaggctggtgttgagtgtctgcagcttttcaggtgcatggtgcaagctgtcggtggacctaccattctggggtttgaaggacagtagccctcttccatagttccactaggcaaggtcccagtgaagacttttgtggggctccaaccccacatttcccttctgcagtgccctagcagagattctccatgagggctctgcccctgcagtaaacttctgcctggacatccaggtgtttccayacatcctctgaaatctaggaggaggtccccacacctcaattcttgacttctgtgcacccacacgctcaacaacacatggaagctgccaggccttgggtcttgcagcctctgaagcaatggcctgagctgtatgtttgtcc

SEQ ID NO: 865131 - DNA, 583 bp, Homo sapiens
caagagctgatcactccttacctgttcaactcgccccttccccaggagttgttggaggccaggaacaaatcccagtgtgtggtagctcttagcagggttcccagcttcttcccccttcagcccagcatctgtgtcctccctccatacactctcaatgccttccctccaaagatctgctcggacagcaccagtcttcctgatgccycagtccctcagtggaagatattcctcttggctgcatctagtcggccatcttgctgcaactccagtcgtacctttttttaatcaagagattttcctctaaattccacttaccacataaaatatgctcattttaatgtttagtcccagtgtcccagacaattccaatttatactttcattattttaagaaaatataatttatatctgaactacactgtattttatgtagccagctaaacttacatcaagtcaaaattcaaatatctatgttgcctggaaacacagtttaaagagtaatatgtgtatttcataagataggaataattctacaacagaatagtcatggtagaagacaatgtttttaatagtttgtagctcag

SEQ ID NO: 865132 - DNA, 583 bp, Homo sapiens
caagagctgatcactccttacctgttcaactcgccccttccccaggagttgttggaggccaggaacaaatcccagtgtgtggtagctcttagcagggttcccagcttcttcccccttcagcccagcatctgtgtcctccctccatacactctcaatgccttccctccaaagatctgctcggacagcaccagtcttcctgatgcctcagtccctcagtggaagatattcctcttggctgcatctagtcggccatcttgctgcaactccagtcgtacctttttttaatcaagagattttcctctaaattccacttaccacataaaatrtgctcattttaatgtttagtcccagtgtcccagacaattccaatttatactttcattattttaagaaaatataatttatatctgaactacactgtattttatgtagccagctaaacttacatcaagtcaaaattcaaatatctatgttgcctggaaacacagtttaaagagtaatatgtgtatttcataagataggaataattctacaacagaatagtcatggtagaagacaatgtttttaatagtttgtagctcag

SEQ ID NO: 865133 - DNA, 588 bp, Homo sapiens
attcaattactgaggaagaagggggaaaagatattctctcccagtggggggaacatattttactatgttcttacttattttgtgaaatctttacaaatacgtattcacatattagttttataataaaagtaaataaacatagaaatttgggtgaaggaaatgagaattgaaaggaatcaaacctgacctttattttctcattgataaggtgaggttgataatgaaagaatgtgtgtgagttgaggagtttggtgagtaggagacaagtatggagcagctttatggggaytgtgcaggagaagttttgatgcacttgtaggacattagtgttccatgagatgcatcaaagctgcctctgctaaaactgaaaatgggtggtctcttctccatttacagaaaaacatccagttgttatttataacttttgcaactccaagtttctccaataagtgaagccatgggtaccagctgcaacttgcccattggcaagcatgggaagataagaaaacaatagaagaagcaaagcacagactcctccaaaataactaattgttcttagttgatatctttccttttttatggaacatc

SEQ ID NO: 865134 - DNA, 622 bp, Homo sapiens
ctgactgtggatgctaaattagattgcatttgttataatatgttgttataaacttcaagtaaaattgcttccaagttatttgatagaattaaatatttcaaagtttcctaatatcaggcaaagagcatggcatttgagggagagtgtgatggtgctggagtgctgaagactgtcaactaggcagaacatgaatacttccaaaagaggattgagctgaccatctgaggctggaaagtgcaaacgtgtgaacaactcagtcaagacttagatattcccagaaaaactyagtgcaatcaaggaaaggaacaagagacattgtgtcgtgagtgagagagacaagcagctgttgttgaagccactgcattgagctgtttgttatgcagttgctgaataatacagacctcctgcagcccagcaggactccctccccactttcccctggcataagtgtgcgattggatgagtaagacaaatgtggcagaagataaacaagggtggaggtggttatgaaatgttcattaaactgtggtgaaaattgaacatgagtttcagcctggaatgagaagcatgagaaaccaggaggggacccgcagtctgggaaataggggcagtataggaaatg

SEQ ID NO: 865135 - DNA, 621 bp, Homo sapiens
agtgctggatttacccattcatcaatagataaatgttgaacacctttttaattgtgtgccaagcatttccctaggcactgaagataaagtgatgaacaagacaaaaatgctatgcaaatgtgtctataattcaagcaaagaaacaagacaatacaaagagtaaaccaataaatatgccattagagagtggtaagtgctyataatgataagcccagtatgctggggcttaagaagagaggaagagtaggaaatcaggtagacagatgggggcagatcacatattaccctatgggccccagttaagaacgctgggttttattctaagtacacagtagctactgggtagtttaggtagggaagtaacatgatttgatgtgtatttagaaaatatcactggttgctctgtggagaatgaacaaaaagtgtaagaacggaatcaaagactacttaggaagctgctgcagtagaccagtggaagggagctcaactgtatgtaagacgtaggtgcacagagagtagacaaacttgagattcattctagaggcagagctgacaacacttagtggtggactggatctgcaaagggagggtaaatcaaggacggtgtgtcatccatttttt

SEQ ID NO: 865136 - DNA, 619 bp, Homo sapiens
taaatttccagctatcttccatttttgtctgatttgctgcttgtatccaacagttttctacttttttctagctactgcagcaataggagggctggattacagttttccagtggtcttgaaccatctgacaccttgtcgttgctgctattccatttttgtgatcaataatccagcactgagaagaccaaaacttttttagaacctcttcagaacaaggccaattgatatgtcaataaaggaactcactgtgagttaagtggaactcacaatgaataactacttagttagcaaaaaagcaatccaagagtgtgatttttgtttttgttttgttgccaatttagacttaattacacttaaaacataaatcrgctaaattaataatcattcatctatgactctatgcacatcacagaatatgttgagacattgtcattattacaactgaatagatgttctattttttctattttttaaaaagatagcttctctaggaattattcataacagctgcttcccacatgttattcgaatgtctaaacaatttttaaagaaggcattatcagtgaaagttgttattcaatattaatgtgtttatttacttggatttaacaacttatca

SEQ ID NO: 865137 - DNA, 577 bp, Homo sapiens
gaggtggtctcagatggagatgaggaacttcttgggaactagagcaaaggtgactcttgctatgctttagcaaagagactgctggctttttgcccckgccctagagaattttgaacttgagagagatgatttagggtttctggtggaaaaaatttctaagcagcaaagcattcaagagatgacagagcataaaagtttggaaaacttgcagcctgacattgcagtagaaaagaaaaacccattttctggggacaaattcaagccagctgcagaaatttgcgtaagtaacaagaagccaaatgctaatcaccaagatgatggagaaaatgtctccaggacatgtcagagaccttcacagcagcccctcccatcccaggccctgaggcctagggaggaaaaatgatttcctgggccaggtccagggccctcctgctgtgtacacccttggaacttgatgccctacatcccaggcactccaatcatggctaaaaggggccaaggtacagctcaagcttggcttcagaggatgcaaactccaagccttggcagcttccgtatggtattgaccctacggggc

SEQ ID NO: 865138 - DNA, 577 bp, Homo sapiens
gaggtggtctcagatggagatgaggaacttcttgggaactagagcaaaggtgactcttgctatgctttagcaaagagactgctggctttttgccccggccctagagaattttgaacttgagagagatgatttagggtwtctggtggaaaaaatttctaagcagcaaagcattcaagagatgacagagcataaaagtttggaaaacttgcagcctgacattgcagtagaaaagaaaaacccattttctggggacaaattcaagccagctgcagaaatttgcgtaagtaacaagaagccaaatgctaatcaccaagatgatggagaaaatgtctccaggacatgtcagagaccttcacagcagcccctcccatcccaggccctgaggcctagggaggaaaaatgatttcctgggccaggtccagggccctcctgctgtgtacacccttggaacttgatgccctacatcccaggcactccaatcatggctaaaaggggccaaggtacagctcaagcttggcttcagaggatgcaaactccaagccttggcagcttccgtatggtattgaccctacggggc

SEQ ID NO: 865139 - DNA, 635 bp, Homo sapiens
tctgttcatgtccttgggtcactttttaatggcttttttttttttgtaaatttaagttccttgtagagtctggatattagacctttgtaagatgcatagattgcaaaaattttctcccattctgtaggttgtctgttcactcggatgatagtttcttttgctgtgcagaagctctttagtttaattagatctcatttgtcaatttttgcttttgttgcaatttcttatgacattttaatcrtgaaatctttacccttgcctatctcctgaataatattgcctagattttcccctagggtttttatagttttgggttttacatttgagtcttaaactatcattaacatttttcacagaatttgaaaaaaaactacttcaaaattcatatggaaccaaaaagacaagtatagacacatatagccaagataatcctaagcaaaaagaacaaagcttcaggcatcatgatacccaaacttcaaactatgctacaaggctacagtaaccaaaacagcatggtactggtacaaaaacagacacatcgaccaaggaacagaaaagagatctcagaaacaagaccgcacatctacaaccatctgacctttgacaaacctgaaatgatttcctatttaataaat

SEQ ID NO: 865140 - DNA, 612 bp, Homo sapiens
gtgtaccatggctaccttagctaaaagagtctagaaaaacaagtgtttttggatggcacattgtcaattcaaacaaaattggggttcctttagtaagaaagcagggaataatgaatatttgataggcaagtaggagtaaatgtactgataaaggacatatagaaagagaagaaaatttggtaaagaagatggctttgagaaacaactacatttaggggcaggtaaaaaaaaaaagaataatcacaggaaagagaaaaaaagtaaccaaagaagtaaaacaaaaataggaatattgtcaaaaagtwattcatgtttttgcaatataattagatctgtaaaatgttttgacttatttctcaattacctttgaatataaggaaggtaattacattatgaatccataagtcatgaccatctgacaattgacattaacattcctcttcaacaggttacattaataaatacagaaaagcatagtgtccgttcctgaggcagacggctggggcaaaagaaagttctttacagacatctgatgctgtaactattagtcaactgacaaaaatttagataatttcaaatcacaacacagccagctgatgtgtccatttaaat

SEQ ID NO: 865141 - DNA, 627 bp, Homo sapiens
ttgtttttttcttggagaattttaaagatgtcagcttcagtgaatattataagtttggagataaatttaatataaatttagtaggagggccagatgtcattctgaagcagtgggactattctatacttctgaaagtgcccaaagaattaccactggcttctctctctcttttttttttaatatatmtatatttattatactttaagttctagggtacatgtgcaccaagtgcaggtttgttacatatgtatacatgtgccatgttggtgtgctgcaccctttaactgtcatttacatttaccactggcttctctaagctcattgtgatcttttttttctggggggtggaggcatcaatgtatctgtcttagaatgttaataacatttttttttttagtagaagtttgacattattgggtgcgtgctactcctaccagctttgtctgtgtcatctcacataatccttacagaaacattaggatatatagtcccttatttccatttatagttgaaggacctgagatgcagatagggtaagcaacttgcccaaagtcattcagttagtaattgctagagccagtgcttccagagtctgtgctcttaaccactatgctgctgagcttctca

SEQ ID NO: 865142 - DNA, 627 bp, Homo sapiens
ttgtttttttcttggagaattttaaagatgtcagcttcagtgaatattataagtttggagataaatttaatataaatttagtaggagggccagatgtcattctgaagcagtgggactattctatacttctgaaagtgcccaaagaattaccactggcttctctctctcttttttttttaatatatctatatttattatactttmagttctagggtacatgtgcaccaagtgcaggtttgttacatatgtatacatgtgccatgttggtgtgctgcaccctttaactgtcatttacatttaccactggcttctctaagctcattgtgatcttttttttctggggggtggaggcatcaatgtatctgtcttagaatgttaataacatttttttttttagtagaagtttgacattattgggtgcgtgctactcctaccagctttgtctgtgtcatctcacataatccttacagaaacattaggatatatagtcccttatttccatttatagttgaaggacctgagatgcagatagggtaagcaacttgcccaaagtcattcagttagtaattgctagagccagtgcttccagagtctgtgctcttaaccactatgctgctgagcttctca

SEQ ID NO: 865143 - DNA, 669 bp, Homo sapiens
attgaagactgtataattggataaaactcatagttttgtatttagtaagctcttctttggtaattaaaaatggacccacataatgttattctctgacttgaggtctgctgcgtgattaggtctttgtctctcgtgaaacttggcatacccataccctttctacactgtgtttcagtgaaactaatactaatgttcttcattatacatttatttcagttattatctgttttctcctttctaagtgtaagttaatcctttccttttcaaacagatactgtttttcataacttcacaaaaccgyaatatctcattgtctgcttctgtagagtcattttcaaaatgaaagcagtatttcccctctgtgtgatgataatcgtcaaactgtgcatcttgctgagaacatagttcaagtcaggaaaagaggattagaaggtgtcctaggaggtagagcaagtactgaagtttcttgtggttacttgtaataactttgtctgctagtcagtcatcagtatgctgaagtgcactgataggtgttatagtgtaatattactttaaatttaaaaatggtaatatagagaaattcccagtttttcaaaaagaaagcattacatgataactgtatgcctgtatgtaaattgaaatacaaactttattaccaaatttgtgtgt

SEQ ID NO: 865144 - DNA, 575 bp, Homo sapiens
ataaaatatcacatgcccattaccttacattagtggtaaatagtaatagaaggtggcttatatataccattttcattctttccttcctctaagatccttgatccttgatcttgatccttaagatttttagcttataactctgattctttccattttctatccctttccgtaatgtgctttgaagatataaaaagttgttaccaaataagtgactgattctcaatattatagctatgtrccatccatccattacttgattacactataaccagattttttaaaaagcactgcttacccctgggggccattcatataataagtgtattgtagaaattgaacattttctaatgatgtacactgtaatgaaattttacttgatattcagtacatgtatttgtcacttaaaggttctttctgtaaactgcttcagattcttttactattcaatttttaattcttaacatctgtaaagaacgttaatattcctctttataatcaatctttcccagttagccttaaaaatgtattccctacttttgcttcaggagatcattatttgcaaatgcaaagatttt

SEQ ID NO: 865145 - DNA, 575 bp, Homo sapiens
ataaaatatcacatgcccattaccttacattagtggtaaatagtaatagaaggtggcttatatataccattttcattctttccttcctctaagatccttgatccttgatcttgatccttaagatttttagcttataactctgattctttccattttctatccctttccgtaatgtgctttgaagatataaaaagttgttaccaaataagtgactgattctcaatattatagctatgtgccatccatccattacttgattacactataaccagattttttaaaaagcactgcttacccctgggggccattcatataataagtgtattgtagaaattgaacattttctaatgatgtacaytgtaatgaaattttacttgatattcagtacatgtatttgtcacttaaaggttctttctgtaaactgcttcagattcttttactattcaatttttaattcttaacatctgtaaagaacgttaatattcctctttataatcaatctttcccagttagccttaaaaatgtattccctacttttgcttcaggagatcattatttgcaaatgcaaagatttt

SEQ ID NO: 865146 - DNA, 575 bp, Homo sapiens
ataaaatatcacatgcccattaccttacattagtggtaaatagtaatagaaggtggcttatatataccattttcattctttccttcctctaagatccttgatccttgatcttgatccttaagatttttagcttataactctgattctttccattttctatccctttccgtaatgtgctttgaagatataaaaagttgttaccaaataagtgactgattctcaatattatagctatgtgccatccatccattacttgattacactataaccagattttttaaaaagcactgcttacccctgggggccattcatataataagtgtattgtagaaattgaacattttctaatgatgtacactgtaatgaaattttacttgatattcagtacatgtatttgtcacttaaaggttctttctgtaaactgcttcagattcttttactattcaatttttaattcttaayatctgtaaagaacgttaatattcctctttataatcaatctttcccagttagccttaaaaatgtattccctacttttgcttcaggagatcattatttgcaaatgcaaagatttt

SEQ ID NO: 865147 - DNA, 593 bp, Homo sapiens
ataaccagattttttaaaaagcactgcttacccctgggggccattcatataataagtgtattgtagaaattgaacattttctaatgatgtacactgtaatgaaattttacttgatattcagtacatgtatttgtcacttaaaggttctttctgtaaactgcttcagattcttttactattcaatttttaattcttaacatctgtaaagaacgttaatattcctctttataatcaatctttcccagttagccttaaaaatgtattccctacttttgcttcaggagatcattatttgcaaatgcaaakattttttacttagacttttgaaatcactcttagtaactttaacattgtttttaggtatgaaattgaaggctgtgaagtgatttgggccattaaagataaagctatagggaatactttcttcgatgcaggagcagctgaattcttgacttcaaagctcattgctgaaaaatcagaggctaaaattgcacataaaagaaccagatatacaactgaaggtaagtgtagcacctagctcattaattctcatacaaaacttttttaaaaccatatagaaaagggctacaaga

SEQ ID NO: 865148 - DNA, 593 bp, Homo sapiens
ataaccagattttttaaaaagcactgcttacccctgggggccattcatataataagtgtattgtagaaattgaacattttctaatgatgtacactgtaatgaaattttacttgatattcagtacatgtatttgtcacttaaaggttctttctgtaaactgcttcagattcttttactattcaatttttaattcttaacatctgtaaagaacgttaatattcctctttataatcaatctttcccagttagccttaaaaatgtattccctacttttgcttcaggagatcattatttgcaaatgcaaagattttttacttagacttttgaaatcactcttrgtaactttaacattgtttttaggtatgaaattgaaggctgtgaagtgatttgggccattaaagataaagctatagggaatactttcttcgatgcaggagcagctgaattcttgacttcaaagctcattgctgaaaaatcagaggctaaaattgcacataaaagaaccagatatacaactgaaggtaagtgtagcacctagctcattaattctcatacaaaacttttttaaaaccatatagaaaagggctacaaga

SEQ ID NO: 865149 - DNA, 567 bp, Homo sapiens
atcaagacactggcagattcaatatttgataagggctgttgtctgcttccaagatggtgccttgttgctgcattctcacatggcagaagaccaaacagcaaaaggacactagagtgcttccttcttttttcagatcatgaatccattcatgagggcagagctcctcaggacttaagcacttcttaaagacccwgtctcttaacaccatcaccttggggtttaagttccaacatatgaattcttcagggactcatatattcaaaccagaacagtgagagagctgagtttatgtgaggtcctgtcagtcactgttatgggcagctccaactgtgagtgtgtgagtgtgtgagtgtgtgtgtcttaattctcctgcacttctagtctgccttgaacgtgcacatgggaagagaaggctcaggccaccaaaaagaaacctttaggcaaagaagtgaaggcgctggcagttggaagttggactcaaaattatcctggtaagcttttagggaatttggagcagacactaacggtatcagggtctcctaagtcctaaagtgcatgagttaagat

SEQ ID NO: 865150 - DNA, 672 bp, Homo sapiens
cactgctgtccttagggatgtcctagaaaggggctgtagtgctgctgcagctgtccacttttgggtggtgcctgcgtattgtgcagacccatctgtgaaccaggcctgagtcttctcttcctctgtcaactgatcatagggagctccccacgagaccattggtgtagactggggaagagacggcagggtggcaggaatgaagaccatgagcatttgagccactttctcatgtaacttacttgtgctttcaggacctgcttgagcccartcacatatataccacttacgtttgatgatggaatgctgctgttcatgacccactttatggttagatgggtcagaaggcacccagttcattataggcagttcaggtgccatggtgactttatgacccatagtcaaacgttcagtttccatcaaagtcctgtaacaggccaagagctgtctctcaaaaggagagcagttatctgcagaagatggcagggccttgctccaatatcctagaggcctgcgctgtgattcacttgccagaggctccaaacagcatccctatctgtgactgacacctcaagcaccattggatctgctgggtcatgtgacccaagtgacagaacagcttgcacagcagcctggacctgttgcagagccttctcctattctggatcccactca

SEQ ID NO: 865151 - DNA, 653 bp, Homo sapiens
gttccagtaaatcccttggaaaattttgaactcagtccccagtctttgcctttatatatctttttacataaaaactgtggccccaaatgtgtccatctttcctctggcaaagagaaggccgagaatttggcttcctaacccagagcctggagatacccctgccacccagttggcgccctgaggatctyggctcaagtgtgggcaggcttggagccagtgtccaggcacttgtccagatctctggttggacagcccttcagaattcctaatgtaaatgatgctgtcacatctggtggagggtagagatatagccatcaagcgtatgcagcccatgttccaaactaagtctttctcaatcagcgtcaggacatctttaaggccaccccaggaacctacatgtaaaaatctgccagcatcaattatctagcgaccactacctctgaatcaggactgaaaagtagtgcttctcacaaagaagcgagcttggtccacatcagacctgaggggtttgatggcttaagggtgggaagctgggtgccctcattctcactcttccctgggtacatttcttccctacctctctgatcttccctcctgcttatcttgtccaaactgcaggtttgttttcacaaccttccattcattgaaatgcc

SEQ ID NO: 865152 - DNA, 653 bp, Homo sapiens
gttccagtaaatcccttggaaaattttgaactcagtccccagtctttgcctttatatatctttttacataaaaactgtggccccaaatgtgtccatctttcctctggcaaagagaaggccgagaatttggcttcctaacccagagcctggagatacccctgccacccagttggcgccctgaggatctcggctcaagtgtgggcaggcttggagccagtgtccaggcacttgtccagatctctggttggacagcccttcagaattcctaatgtaaatgatgctgtcacatctggtggagggtagagatatagccatcaagcrtatgcagcccatgttccaaactaagtctttctcaatcagcgtcaggacatctttaaggccaccccaggaacctacatgtaaaaatctgccagcatcaattatctagcgaccactacctctgaatcaggactgaaaagtagtgcttctcacaaagaagcgagcttggtccacatcagacctgaggggtttgatggcttaagggtgggaagctgggtgccctcattctcactcttccctgggtacatttcttccctacctctctgatcttccctcctgcttatcttgtccaaactgcaggtttgttttcacaaccttccattcattgaaatgcc

SEQ ID NO: 865153 - DNA, 619 bp, Homo sapiens
tgtaggaagttaccatcccatgacaattttattttactcttctttcctttgcccattagctactgcaaacttaaaattacctatagtggagagtggtaatagtctacttcaaaaacagcaaattcccagggatttgccctcacttttggaatcttagctaaatatttttttctctatgggatcaccctcttttgcatgtgactgaggcaagccttaaagatcaagctgatgttagagcagaggaactgctggttggtaaggatgcctcagagatgaaaaggagaggagggtggtctcagagaaccagaagaggagtgggwaagttggtcctggaagaggacttctcactccttccccaagccttgccctgtctcttgacctcccttgactccctgctcttccagctcagctttgtccatgggctggactgaatattgccagcaggtagtcataaggacccatgcgatcccctaaatcaatactgaatacaaaggaagctgttgtttctgcttctctggcaggagaataggaagtgaccactggcttgagaagggctgtgctaccaaagtaaaccatcacgggactggttctgaaatgatccaattccctgtctctttag

SEQ ID NO: 865154 - DNA, 621 bp, Homo sapiens
caccttacataattgttgagaggattgtttaaaatacatattttggccaggtgtggtggctcacaccrgtaatcccagcgctctgggaggctgaagcaggaggatcacttgagaccaggagttcgagatcaacgtgggcaacatgaagagacctcatctctataacattttttaaaaaaaaattagccaggaatggtggtacaagcctctagtcccaactacttgggagggtgtggtgggaggattaactggctccaaaagttcaaggctgcagtgagctatgattgtgccactgtactccagcctgggcaatagagtgagaccccatctctaaaataaataaatttaaaaaattaatacatgtggaacatttcaaaaacatgaaataatagggaaaacaatgtagtgaaacttcactttctttcatccaacttcagtaattgtcagctcccagttttgtgtcatctctattcccactcccagccccttcccattatttccccttaatgccagaatatgaggacttcatggcatggaacagtggcatggaagtgccctccagagtatctaacacatagcagatgcttagaaaatgtttgtggaatctgaactatttaatag

SEQ ID NO: 865155 - DNA, 566 bp, Homo sapiens
gagttggcaacaatagaaaactcattaataagtatttagtgagtacttcccatatgcaaggcggggccttaactcttctgtttgaagccataaataaaatgggctgtaacagagctttcacatcatgaagctatgttcactgtttctactggcacaccctccttgcccagaccaaagcggctaccctgggctgttagatcaatgtccaggactccataagaaagtctgtgccctggaaaggagataaaatcctaacaagcacattttgttctctctgagagtgatactcataaagtatttttaaacttaaaataaaatttgtaactccatttcatcttcacaaaaactgcatggccagcaagggmagtgttatacgctcactttactaaggttcagactcagattctacctctaaaatgtgaatctcttttgtgtgactttgatgtcagtttctcaccatctgtactgaagtggtgtgttgggtctccatcaggaaccccagtgagcattgttctggggcattgctcttgtctaccttatactgggtactccagagagctcagaga

SEQ ID NO: 865156 - DNA, 656 bp, Homo sapiens
aaggatttatagtttagcctgatactaatgactgaaaatcacattgactcaaagccagatctttcctcactgttgactgggagtggtgagatcaagaacttggcttgcagaccttgtctgtaaggattccctgccaacctggcccaagtcccttgctctgccccacgaattagcaggcaatccagggttggaaggaaatgaggctggatgcatgaagggaagctaaggagagatgacaygtgggatcagcaccatggcatttgcacgggtcttatcatttgatggttgggtttagctggaaaacattttgcagcctggaaggaaataatacctcataggcctgaagtctattcttcctttacctctgagggtgtgagagaagggtagacagagaaaagcagcaacagctggttgaggtgaggcagaaacaaggatgattatgttccatgccattacattctggtccattttatagatcaggatataagtcatgctgttaatcccatcatgctgtggaaaggctctgccccagtctcctttctctcatttcctccatggagtgccactctcctccagttgtaccctttcggagggaaggctgttggtcttgtggttgaccaatggaaacaggagttggagtacaatgctaccagctc

SEQ ID NO: 865157 - DNA, 632 bp, Homo sapiens
aagtattggttggaaaagaatagaaactacgaattgcctttgctatagttatcatggttaacatgtgaacaaagaaatgattaagagtcttgaagcagaccaggctggcttcttagtttgcctgcacagctcagcagttgtgtttaagtggttaacattaatgacacacagatatttaaaaaaaatagaaaattaaaacatcagttctaacatgatacagctggaaaatgatgcaaaaaaatattggaaaattaaggacaggcttacatgaaagattactaatttacatggaacagcctgggtactattagaaatgtggcagcgagtaaggaaaatagatcatctaccatctgyagacaattaaacccaaaactgctgctgcataatattttgaaatatccctctgcaccatgcaagcagtgctgcttacaactagacaactgcagcaactgagttaaaaatggtgtaacagtctttcacacattattaatgaacatattctagttttgttaagtgagattaacaaactaacagtttggtcagagaataggcagctcccagtgcattaacgcattacagagataattttcttaatatgacgtattatgcaattttgaatactgttataataa

SEQ ID NO: 865158 - DNA, 688 bp, Homo sapiens
tacttccaaacttgtcattaggaaaaattaaatgctatcttacttaagcctctttttctctgggtctctgataaaataaaccaatctgcttttttttttttttttttttttgagacggagtctcacactgtcacccaggctggagtgcagtggtgtgatcttggctcactgcaagctccacctcctgggttcatgccattctcctgcctcagcctcccaagtagctgggactacaggcacctgtcaccacctctggctaatttttktgtgtgtgtgtgtatttctagtcgagacagggtttcaccatgttagccaggatggtcttgatctcctgacctcgtgatccgcctgccttggcctcccaaagtgctgggactacaggcgtgtgccaccacacccggccaaaataaaccaatcttaatactgatacatgtgttttatctttaaacattaatttataatcatgtaattggaaaacaagagtaaaagcttgagaattatacatgaaataatatagtaagagaacataaacttctgagcagagcaggtatttttggatttcaatctgaatagaattccacacaatcaatgctaaagtaattcttgcctgttcatgacaattttttagtaatcttattttagcccaagctccaggtacagtttcaagcttagaaatctaaatgacatg

SEQ ID NO: 865159 - DNA, 617 bp, Homo sapiens
acatagtgagattctgtctctacaaaatttttttaaaaaattagctcagggtggtggctcacacctgtggtcccaactcaggaggctgagatgggaggatcacttgagcccaggagttcaagactgcagtgaactatgatggtgccactgcacttaagcctaggtgacagagtgagaccctgtttaaaaaaaaaaataggccttgcctggccactctacttacaagtctcacttaccccactccttatctaccttcccagctttatttttctccatagtacaaataagctacttattttmgttacattctatctcctcccatcagaaagcaagccccacaagaggagagattttgttaattttgttctccaaagcttagaaccttgcctggcttatcacagctgctcatgtggaatttgttaaatgaatgaagagacacatattcagcatgtacctgtgcactagtcatactgagggtgtttactgtgggatttagataactcgcctgcactaaaatgaactgtgtacaagtggcgtggctgcacaggagagcacgcatcaggccaaggcctgcaggagtctgaaagagctcagcttacggttatggttgctgacca

SEQ ID NO: 865160 - DNA, 694 bp, Homo sapiens
acactctgaagggcatcactgtagaaatatattacactgtaggaaacaaatggcaacttcataaccagaaatgtgtaattttggtaggctaattgcaactcacactgcatttctgggagtagaatacaaacactgtccccccaaaacrtggcacagcattacaagcattctatgtgcacaatatagatctcttacagttagataaaagggtaataaatggtattcataggaccactagttgtaggaaatttgtcctctttcctcacaatcctgaggatgctactgagaatggaattgatagcaaagccatttttcttcacactcacaccctctggccacactgatgcctccctgcttccctgaaagggtatcatgacaggccccgttggcatgaatcatgaggccagtgggtccactgtgggcccactgactcatgataagagatgagaatggcctccctatggagaagtgcactggctgtcacgcaggaagctcagtcagtgagctcttaccgactctcccactgatgcctgcagcatttttcattctgttctttttctgccagcttgagccaggtttccagcagagaagtctgacctaagggacgagcaagcccacttctagcctccagcacttcagcatcctatttaatcagtgatcctggctccttctacattcagtcctatttttctat

SEQ ID NO: 865161 - DNA, 562 bp, Homo sapiens
ggaactcctgacctcaggtgatccgcccgctttggcctcccaaagtgattacaggcacaacatgtttatcattgtgcccgcatgtcttgattactgcaactgcgtagtgaatccactcttgagtcatatttacacatcctccattcactagatgatccaagcactctgcactcccacctagggatggttaatttacctctagttgcagaaaagagcatttgtgtcccgtggacaatgcccagaagaaacagactgaatatcttcrgttcccttttcaaatgtcatctattcaatgaatcatttttctcatagggtgaagtgagagcttaccaagattctccccttgaacaaactcttgtcaggccccaatgagctctcttgttgactaggcctcaaccctggcctataaagacttgaacaaacactaacacagtttctaaaagctcgaggcttcatctgtaggatgatcctagcccctctgagagtgcctgcctgagaaaactccagacagagaatttgttgtttgttccgtggcaatcacttgaagatagggctccctgac

SEQ ID NO: 865162 - DNA, 628 bp, Homo sapiens
tcaggagtgtcacagtaggtagctagtcagacacaagtagggcaggagagggcccccccacccgccatcaaactaagaacatcagtcgaccatcaggtgatggtcaggaagtagttaaatgtctcactaaaataataattggtcataggtggcacatgggaatggcagtctcccagtagacagaaaaaacctgaaactggtgatcagcagcttcctaataagatctcaggatttgggcaagtgggctcaagcatgtgcactaagaggcaaaatggtggagtttaactggtatatgaccttcctctaggaataatgaacyggtaagggaagaaagctcaggtgagcatgcatacaactcccataaacacagtgtacatgcagcccctcccaagtgccggcaggccactgcgcattcgaacagcccaccccaagggaagaatcagggagaagtaatgcaagacctggaagcatgccaatgtataaaaccccaagtcaaaggtcaaaacatgcacttgactctctcaagttgcccgcttgacccttttccaagtgtactctatttccttttgtttctgctctaaagctttttaataaactttcactggtgctctaaaagttgccacagtca

SEQ ID NO: 865163 - DNA, 668 bp, Homo sapiens
tgctctttctttattgcaatgccacagtctcagtgaattggttttatctgtgcagcaggcagcaagaacccactgggcagttacgagtttacttccaaagtcatatttaatcttttatttgttttataaattgactcatattatttgtctgaccctggcccgattctaacacagcaaaatagatgctctgctggttttaccargtgttaagaaatattgtgaaaataataatcattcatatgctaatacttgttccaacagcatatatatcattaccattatatctgaaaatttcaacataattgccaccaccttcttgccaaattcttccaactgaaagccagttttccctctgagcttgtgaagcctttacccacacatcctatggtgttttatcattttcaatctaaaattgtctaggtacatggttaatggttccacttagactataatactcggcacctagcttagggctttgagtaagtagtcatctcaagtattctttgaatgaatcaatatgtctctctaccactcctaatccctgaactgagtacagttccttattaagaaagatgaaaacttaaataagcacaagaaaaacatatgtgtttgtgtgtatatgtaagtagatatacatacatacacacagtgaacattgtttcatgcat

SEQ ID NO: 865164 - DNA, 637 bp, Homo sapiens
atgattcttgactacttaaacgtaaggtatatttgtatttccttttccatgcatgttcacagagaaacacccacatgataaacaggacttttgcgtcttgcttgatctcttttaaacctggactgtgacatttcgcctgcagcctgagatattgggaagctaactccacatcactcagttgagtggaatattttattgattccattgcaatttcttccatccaagagtgccattttctccctgcgaagtgctgatataatttgcatcaggctgagcttccataggtgactccctgcatttcttggtagtttaaactcattctcgatgctatgccagccactttaagtagaacaacagaagtctgccacagtaaacaatcaagccgtttcacttgcatttttstaccatgttcaatgaatcttttctcccagttaatgtttcttagtattaacctaacaggaccagtcctagctttcagattgtgtgtgtgtgtgtgtgtgtgtgtgtgtgtgtgtgtgtgtgtgtgtttccaaagattatatagaaagaggctcttaaaaacctcaggctcagcttgtcatacaaatgacatgccactgtcagaattcctgtgttaatctctggaagacaaagccag

SEQ ID NO: 865165 - DNA, 565 bp, Homo sapiens
ttccccttgccttccatgaagatgatgatttaataaagctaaggttgtgatgatcatcgaaaaggctgcattttatgcatttttcacacctaaaaaatttaccctcttggtggcagagtctcagagttttctgaggatacttcattgttaaacaacttattttcaaataaatgattatgaaagtaataaatgttcatgtcagaaaatttgaaaaaagtgtagaaaaggccaaaggagaaaatgaaaatcacccataaggagacctcttcaggaagaaaggaatcctcttgctatttcaatataaagtcccttgcattcaattcagttcraaagcattcaccctccagacctctgtgttgggggtggagaggatgcatattggaataagactaagcccctgccttgaggacccagcagtggaataggggcaataacaactctgctcatatgaaatgctgctccactgtgaaggttccagcatgttcacacttgttacatttgccaagacactgagggctttggtgaacaaaacaggcttttaaaactccaataataggctaaataa

SEQ ID NO: 865166 - DNA, 608 bp, Homo sapiens
gcctgggaccccgaatgaccatgtggagcagagatgcttatcaatgaggtacacttgcattctaaattcaactctgtataagctagaaataaactattaagacattaaaaggttggtgcttatttgctacagtagctttttaacatttgtactaatttagtccccaaccaatatccagtatatctaattgtactggatagtacagtgatatctacttccatgtattgctatagaaagaggtttacttacaagaaaaaaaataaatcaatagatattacatcttttttttttaactttaagttctgggatacatgtgctgaacrtgcagctttgttacagaggtatacatgtgccataatggtttgctgcatctttcaacccatcatctatgttttaagctttggacacgttagatatttgtcctaatgctccccttcccctttccccccaccccccgacaggccccagtgtgtgatactccccccatagtgtccatatgttctcattgttcagctcccatttatgagtgagaacatgcagtgtttggttttctcttcctgtgttagtttgcccaggatgatagtttctagcttcatccatgtccctgc

SEQ ID NO: 865167 - DNA, 585 bp, Homo sapiens
caccttgaatggccctgaaactcaggatgttttgtggagttgtgtgctgacagataaccccttcctgttactggggtgtgtcaggtacagagtgattttggagaccacagtgggatgggaagtgccgatttgctcatcctcctgacagatgcaggcatgagagacaatgtgcttagatttttatccctgtgtgcaactcctagaatggttttgagagggaataggcagcttgcctttaggtaaccattttgaagattttctattgttgcttaaaattttttagttagaagtaagcacaatgcctaatatattcacttcatatttcattagtttattaaagggcaggggttttacwttccacagagacctattaaggggaataattttattaaaatccgaattattattttaaggcacataagttaatattcttatttgtgaagtgctccctctccctgcttagaatgctgcattgacaattaaaatataataaagatgattaataatgaataaacataatattaaaatatcataaaatatgcaattaaaaaacactaaaaaccctagctgagcagaatcattaga

SEQ ID NO: 865168 - DNA, 586 bp, Homo sapiens
aggtaatactacttacttgcctcagttttgtcatctgtaaaatgggaattaaatgttttttggctttgggggaaggaggattgcaataacgtgtgagaaaaatgcctatctggcacagggccatcacacaagagggcatgtasaccttcccagaaaagtgcttatttaagttaacacagactactgcaattgagtcacatacagttattagaaacaagtgggcggctccataatcaagcaataccatatcattaaataacatttaggagagacttctatttgctgggcattgtgtgaggggctaaggatggaggaacacagtctttgcaaaatgtcaatcactctgggtttttttctttagcttcaaggagcactggctggaattcttacacattgatgattaatatctaggtactgggtagctagaaaacggattttaaaaatatcaccaaattctgcatgatttggctttagaaagaagcattgatttcagtggggaaacttttgtctctcaaggttatgtttgtgagatattaggctacaaagcatgggcacgaggtcacgcattttactcatttaggcgttc

SEQ ID NO: 865169 - DNA, 656 bp, Homo sapiens
gcgctagtggattggagtggctcattacctagggagacatcagctagtgtgactaagggagtgcttgcactatccctcacccaacccaagacagtgcagcttacagcaacaaaagtgactccttcctttgcttaaggagagcagagcaaagagtaaagaggactttgtcttgcatcttggatactagctcagccacagtaggatggggcactgggcagtcacaaggacccaattwcaggccctagcttcttgatgaaatttctagacacaccctgggccaaaaaggaattcactacctagaagggaaggagtcagtcctggcaggatttatcacctgctgactaaggagactttgggccatgagtaacaagcagcaatatatagggaatattcagaccttcagctatggaatgtgctggcttcaagggtgactcatcacattctaaggtgtggtggctatggtgaatgatttattctatttgagaaaagcagagggaaaagtaaaagagagtttgccttgcgtgttaggtaccagctcagacacactaaggtagagcaacagcagactcttggggtccccaagtccagacctatgcttttggattgcatttctggacctattctgggccagagaggcacccactgtcctgaagggt

SEQ ID NO: 865170 - DNA, 656 bp, Homo sapiens
gcgctagtggattggagtggctcattacctagggagacatcagctagtgtgactaagggagtgcttgcactatccctcacccaacccaagacagtgcagcttacagcaacaaaagtgactccttcctttgcttaaggagagcagagcaaagagtaaagaggactttgtcttgcatcttggatactagctcagccacagtaggatggggcactgggcagtcacaaggacccaattacaggccctagcttcttgatgaaatttctagacayaccctgggccaaaaaggaattcactacctagaagggaaggagtcagtcctggcaggatttatcacctgctgactaaggagactttgggccatgagtaacaagcagcaatatatagggaatattcagaccttcagctatggaatgtgctggcttcaagggtgactcatcacattctaaggtgtggtggctatggtgaatgatttattctatttgagaaaagcagagggaaaagtaaaagagagtttgccttgcgtgttaggtaccagctcagacacactaaggtagagcaacagcagactcttggggtccccaagtccagacctatgcttttggattgcatttctggacctattctgggccagagaggcacccactgtcctgaagggt

SEQ ID NO: 865171 - DNA, 656 bp, Homo sapiens
gcgctagtggattggagtggctcattacctagggagacatcagctagtgtgactaagggagtgcttgcactatccctcacccaacccaagacagtgcagcttacagcaacaaaagtgactccttcctttgcttaaggagagcagagcaaagagtaaagaggactttgtcttgcatcttggatactagctcagccacagtaggatggggcactgggcagtcacaaggacccaattacaggccctagcttcttgatgaaatttctagacacaccctgggccraaaaggaattcactacctagaagggaaggagtcagtcctggcaggatttatcacctgctgactaaggagactttgggccatgagtaacaagcagcaatatatagggaatattcagaccttcagctatggaatgtgctggcttcaagggtgactcatcacattctaaggtgtggtggctatggtgaatgatttattctatttgagaaaagcagagggaaaagtaaaagagagtttgccttgcgtgttaggtaccagctcagacacactaaggtagagcaacagcagactcttggggtccccaagtccagacctatgcttttggattgcatttctggacctattctgggccagagaggcacccactgtcctgaagggt

SEQ ID NO: 865172 - DNA, 688 bp, Homo sapiens
tatagtgttttcatcttcatctcatcacagctgaaaacttgaaatgttttgacatcacaattagtatcaggaaaggaaatgggtatgttactaaatccactacaaagaaatgcacaaataattgagaaatcctctgcctccatttttataatatagtacacctgctttttcaagtattgagaaaataaaaaatataatagattatatatatttatataatgtaatatgtatattatatataatatattctaccaccgagwtaatttacattttatatttcagaatatttaaaatattttatgttttaaaatatttcatattttaaaatatgttctctctctcttatagacacacataatctttttgttcataaattgcttaaaaatatttttgatatgtgtgcagaaattcttgcttgtttctgaagatagtaactgtgacagatctaattttaagttagtgaatagatatcttaaagtgttactcaatggtccaaacaagactattttatttcccagtatattactcacttcccactctgccaaatgactgtttcacatatcttcatttccttctaaactttccagtacaccttaaattttcctgatatttatctgatgcttgttcctcataattgacggagaaaacataattattcaattatcatctaatcatgtatccaccacca

SEQ ID NO: 865173 - DNA, 621 bp, Homo sapiens
tgtgtccaagtgttctcattgttcagttcccacctatgagtgacaacatgcggtgggttggttttctgtccttgcaatagtttactgagaatgatggtttccagcttcatccatgtccctataaaggacatgaacttatcattttttatggctgcatagtattccatagtgtatatgtgccacattttcttaatccagtctatcattgatggacatttgggttggctccaagtctttgctattgtaaatagtgccacaataaacatacttgtgcatgtgtctttatagtggtatgatttataatcttttgggtatatacccagtaatgggattgctgggtcaaatggcatttctagttctagatcctggaggaatcgacacactgtcttccacaacggttgaactaatttacactcccacaaacagtgtaaaggyattcttattcctccatatcctctccagcatctgttgtttcctggttttttaatgattaccattctaactggcatgagatcgtatctcattgtggttttgatttgcatttctctaatgaccagtgatgatgagcttcttttcatatgtttgttggctatataaatgtcttcttttgagaagggtctt

SEQ ID NO: 865174 - DNA, 580 bp, Homo sapiens
ggtaaatgtaactatttgtaattcatttagtagtttagattttatcctgaatctttgtatatgagatatattggcttattcttgtttcaaccctgacaatctttaagctttttcatgttgcatgtacaaattgaggatataactggcaggcagccaagaatatgcaactatggtactgtatctattaaaatagtatcatgaatagtcagttaaaattatcctattcatgtaatctttctcaaaaaagaacataaaatgtatgattacttctactagagatggaccaatattttagtataagtaaatgcgagaatgtaaaaacaagtcattaaaatttgtcaacaattaaaatgaaaacaaacattttttccagaaaaatgttcagctctatttkcaataaagactatctttgaccaaaagaagaaaagaaagataaataatagtaatttaaactggtgttcagtataatccagatttgtggggctaccaggtttttttttatatttcacaatcatttgaagaagttccatttcaaaactatcaatggtgtttttgtaagtttccaaaatagacaattcca

SEQ ID NO: 865175 - DNA, 648 bp, Homo sapiens
tggctgtgcccacacctggtatccttcagcagcgtgcagccggaaggattccgtgcaggtgtgaccctaacccctctgttccagatgtactcccaacccagattcagctaggtagaaaacaggaaatgacgtgatcttggaagaggtccctgaggaggatggcctccctcacaccagcagagagaggccacaccacccctcctcatccacagaggccttaccgcaggtgaagttgggtctgcactcgccagggttggtcagtgtgggctggaggccacgttcacagtgaggcactgggggcaggtcacagctcactgggtcacacactgagggccagaaagagagacgtccatgcagagttcagaaaggttactcttttattacctgtgagtgggatgctacattcctattcatgcagacttctactgttttaggtaagtgatgatgatggagacagagattacatgrgttaggatagatagatagatagatagatagatagatagatagatagatagaatgataactagatacatgagatagatttgatagatagatacatacatacatacatacatacaggatagataactaggtacattagatagatagatagatagatggatgatagatagaggatagatgata

SEQ ID NO: 865176 - DNA, 655 bp, Homo sapiens
taatcctcctacaagatcttgaggtcctcaataatttttaagagtgtaaaggcattcaagaccaaaaagcgagaaccactttttgttctgatgggaaaggcatgaggcagagaactaatcctcgctctgccatgacacggttggtgggggtcagagtgggatcagtcctctgatcagaggagtctatcctagccctggaagttctggagtgckgcaccatccctccacttcctgtgccctggttgcctcatttataaaatggcagtaatatttgcactgtccacctgccagggtcatttccagagaaacagtgaaaagtatggattgctatccagtgtgattccaggaccaccaagaacaagaggaagtggcccacacatgcagagtcccagtgtccaggggaagaatctggtggtttcctgagcaacctttcccgggcaggctttctcttagctgagagtgccaatctggctcttcccttactgcccacagtgggcacccagggagacacccctgctcccgggccttgtttcagccgggagattggacagcaaacctgctccttccccagccccacaagagcccaccccagtctagaggcccttgggatagcagagcccagcaggaagaatccccagggccaagaaggggcatc

SEQ ID NO: 865177 - DNA, 655 bp, Homo sapiens
taatcctcctacaagatcttgaggtcctcaataatttttaagagtgtaaaggcattcaagaccaaaaagcgagaaccactttttgttctgatgggaaaggcatgaggcagagaactaatcctcgctctgccatgacacggttggtgggggtcagagtgggatcagtcctctgatcagaggagtctatcctagccctggaagttctggagtgctgcaccatccctccacttcctgtgccctggttgcctcatttataaaatggcagtaatatttgcactgtccacctgccagggtcatttccagagaaacagtgaaaagtatggattgctatccagtgtgattccaggaccaccaagaacaagaggaagtggcccacacatgcagagtcccagtgtccaggggaagaatctggtggtttcytgagcaacctttcccgggcaggctttctcttagctgagagtgccaatctggctcttcccttactgcccacagtgggcacccagggagacacccctgctcccgggccttgtttcagccgggagattggacagcaaacctgctccttccccagccccacaagagcccaccccagtctagaggcccttgggatagcagagcccagcaggaagaatccccagggccaagaaggggcatc

SEQ ID NO: 865178 - DNA, 637 bp, Homo sapiens
aaattttgttataatgatggcacttgctatgtattaagcactgctatgcttgttccatgtgttgatttaattctcacaacaaccctgtgaagtgagtactaatagttattgtagtagatgaagagtaacttgcctaaaatgrcatctttataaagtaatagagacgggctcctatccttttgtctgcacccttaaccttatgttattctgcctttcattgtattaaattagatgttgatggatatatatgaagtcaacaatattcatgtttaccaaaatcccagaaaaaacttgtggttcaagttcaaaggttccagagattcaatgtctactccatagtggtgattcaataaacataaattgaatacatgaatgaatgagtgaatgaatgaaagttattttccttacagaccctttgcatcaagagacttggtctttcaaacaatattgcagattctaggacttggaaatatttcattataatgattattggcacatttaattttctgctttcttggtcacaaaggatgaagcagatccctttcattgtcccccttcattcttctgattcctgacacacaacttgcttaggaaagaaactaaagatatctttatgctttgatatcctgcctctgat

SEQ ID NO: 865179 - DNA, 643 bp, Homo sapiens
accagaacacaggattttaatcctcatgttcaaggacagttttactccaagtatggcattgaacttattcttggaaacacacaagaatttatcttggagaaagaacccccaaataaagatcccagattttatgagtaaaccattccattccccagacccgtagtttcacacctccgtgggctctctaaacatcaacaaaaactccaaggatttgatgggaaaatggtgttaagtctcatgttgtttcaggaatttcccaatatgcactaaattaccttttgggccatatgaggccaagtggtaggaaatcattccattggacacagatggcagtcctaatgttcccaacagctgttgcacacacaygaaatcagattgggattaacacttaccttcagagtggtcgcgcccggatgggatggcttctctgtaatatataccaagcttagcttatgtctctgaaaccacatgacctcacaggtcttgggaacatttgatccaggaaatctgaacttaggcagaaatcataaagcatcaggtacatgttaagcaggaatttatctgctttttgtctgaagcagcctcacatccatccagcttttgtctgactctgagtgaaatatttataggcaagctgctttct

SEQ ID NO: 865180 - DNA, 570 bp, Homo sapiens
ctgtgatatatggagcacacacctttacatataaaaattaaactactggcccataatcagtatagctcgcctcatgatagattattctcaggctaaatttataacaggcactcaacaaaagtattcatcgcttatcccctaacattatctagtagctataggagccggtgacctagtaaataawaaaaaaaaatctttaggggtggaatgtaactatatgcagtagcggtaattctgctccatttgtaaggagggtgaaatgcgatatggtcatgtaccctcttggtacacaagttccataggctatagaaaaacaagtccataccctctgatatctgcattccttattcttgttatagcttacaaatcttctttagacacttaacagtgataattctcccagggaaactaaggaagcacatgagtcatgtttcttaactttaatgttgtataatctgaaaattatctatagatgctttttttttccattggtgctagaaaattccgcctaggctcaatcgatatccatttctaaacttctgcaagaaagctttaactgctttgacatgc

SEQ ID NO: 865181 - DNA, 649 bp, Homo sapiens
cagagagagcgccgtctggaacgtgctgcgcatcctggggctgcggccctggaagaagcactccaccttcggggacgtgcggaagctcatcactgaggagttcgtccaaatgaattacctgaagtaccagcgcgtcccatacgtggagccgcccgaatacgagttcttttggggctcccgggccagccgcgaaatcaccaagatgcaaatcatggagttcctggccagggtctttaagaaagayccccaggcctggccctcccgatacagagaagctctggaggaggccagagctctgcgggaggctaatcccactgcccactaccctcgcagcagtgtctctgaggactagcaaagtctggaggcagatgaatggtttctgaccctcaccagggctgtggaagggtgggggtgggtcattatagtattcaggatttacagtgcagtattcacgtgtaacttttaagttttcagtacagtgcttttatacctttaatgcaatgttgtattcatttgggtactattgtgtagtatttaggatgtatgcatgtttgtttatatgtaagcttggttggtgctttcgcttttgtgctacctttcttggatttttgtaccagagatgtgctaaactgatgaaatacattgagaa

SEQ ID NO: 865182 - DNA, 624 bp, Homo sapiens
tcctatccaactaccgaggacatttttcacagaattagaaaaaaactattccaaaattcatatggaacagaaaagagcccaaatagccaaggcaatcccaagcaaaaagtacaaagctagaggcatcactctacccaacttcaaactatactgcaaggctacagtaaccaaaacatcatggtactgacacaaaaacagatacaaagatcaacagaacaggttagggaatccagaaataaagccatatacttatttttacaaatgtgagaaaatatttacaaaatatgcatccaacaaaggcccaatatccagagtctataaggaacttaagcaaatcaacatgttaaaaacaatctcatttaaaaatgctgaaagaacatgaacagacatttctcaaaataagacatacacgtggccagcaaggatatgaaaaamtgctcaacatcactaatcatcaaagaaatacaaattaaaacatcaatgacatactatctcataccagtcagaatggctattattaaaaagtaaaaaaaacaaacaaacaaaaaaaagcacatgttgatgatgttgcagagaaaaaggatggctattgaggatataaattagttcagccattgtggaaag

SEQ ID NO: 865183 - DNA, 613 bp, Homo sapiens
atactaaacccagctcagggacattgtaacaatgaccaaaattgagctggtgcttgaggatgcatgggtagtctaacaagcaaatagctggggcagcatcttaccatgagggttgttctcattgtaatcagcatcctcttagatagaagcgctacatttcttcttaagtgacgaatttctgggattgcttcttttactctaagctaactcttggagatgaaaagtcaaccacagagagatcaccaagggtgagaagaggccctgggatggaagtctgaggcccctgaacattcaaagggtgggcagagaaagaggctgccaagggtgctgagaggcagtggctgttgagatgggagagggcagaggggagcggggaagatcaagaatgggaagtgggggcaaagggcagccccaygcaatgctgcagagaagacaaggaagtggaagccggggaggtcgcactggatttagcaatgttacttccgtccgtggccttagttgcatccagggagcagtgggctgacggatatatgaaggataaggaagaagagacaatggacagaaacataattcaagatatttggctgtgaaaagcaagagactggattatcta

SEQ ID NO: 865184 - DNA, 449 bp, Homo sapiens
cctggaagaacattgatgcaaaaatcctcaacaaaatactggcaaactaaatccagcagcacatcaaaaagtatatccaccatgatgaaataggcttcatccttaggatgcaaagttggttcaacatatgcaaatcaataaatgtgattcatcacataaagagaactaaagaaaaaaagccacatgattatctcaatagatgaaaaaaaggyttctgataaaattcaacatctcttcatgttaacaactctcaataaactaggtactgaaggaacatacctcaaaataataagagccatgtatgacaaactcacagccaacatcatactgaatgggcaaaagctggaagcattccccttgaaaaccggcataaaacaaggatgtcctctcccactactcctattcaacatagcactggaagttctggacaaggcaatcaggcaacagaa

SEQ ID NO: 865185 - DNA, 449 bp, Homo sapiens
cctggaagaacattgatgcaaaaatcctcaacaaaatactggcaaactaaatccagcagcacatcaaaaagtatatccaccatgatgaaataggcttcatccttaggatgcaaagttggttcaacatatgcaaatcaataaatgtgattcatcacataaagagaactaaagaaaaaaagccacatgattatctcaatagatgaaaaaaaggtttytgataaaattcaacatctcttcatgttaacaactctcaataaactaggtactgaaggaacatacctcaaaataataagagccatgtatgacaaactcacagccaacatcatactgaatgggcaaaagctggaagcattccccttgaaaaccggcataaaacaaggatgtcctctcccactactcctattcaacatagcactggaagttctggacaaggcaatcaggcaacagaa

SEQ ID NO: 865186 - DNA, 449 bp, Homo sapiens
cctggaagaacattgatgcaaaaatcctcaacaaaatactggcaaactaaatccagcagcacatcaaaaagtatatccaccatgatgaaataggcttcatccttaggatgcaaagttggttcaacatatgcaaatcaataaatgtgattcatcacataaagagaactaaagaaaaaaagccacatgattatctcaatagatgaaaaaaaggtttctgataaaattcaacatctcttcatgttaacaactctcaataaactaggtactgaaggaacatacctcaaaataataagagccatgtatgacaaacycacagccaacatcatactgaatgggcaaaagctggaagcattccccttgaaaaccggcataaaacaaggatgtcctctcccactactcctattcaacatagcactggaagttctggacaaggcaatcaggcaacagaa

SEQ ID NO: 865187 - DNA, 654 bp, Homo sapiens
tccatgaccaggcttgtttgtgccctgaacaatctgcacagcttcatatgaggtcctgtttaagatctttgcacatactgttccatctgactaaaacatctgtccctgtttcatgggactggctccctttcatctctcaggtcttggcttaaatatcatttcctcagagaggaaatacccttccctcatgtccattaatctttatttcagcaccctggtttttttttcttttttttttttgagttggattctcgctctgttgcccaggctagagtgcagtggcatgatctcagctcattgcaacctcgcctccccgcttcaagcaattctccacctcagcctccygaatagctgggattacaggcgcccaccaccatgcctggctaatttttgtatttttagtagagacggggtttcatcaccttggccaggctggtcttgaactcctgacctcgtgatccacctgccttggcctcccaaagtgctgaaattacaggcatgagccaccgtgcccgcccccactgttgtttttctaaaagcaccaaccatagtttgtaactactttctttacttgtcgtttgttagtctgctcccttttagactgtgagttgcatgggagcagggaatccatcccttattcactataatacccca

SEQ ID NO: 865188 - DNA, 654 bp, Homo sapiens
tccatgaccaggcttgtttgtgccctgaacaatctgcacagcttcatatgaggtcctgtttaagatctttgcacatactgttccatctgactaaaacatctgtccctgtttcatgggactggctccctttcatctctcaggtcttggcttaaatatcatttcctcagagaggaaatacccttccctcatgtccattaatctttatttcagcaccctggtttttttttcttttttttttttgagttggattctcgctctgttgcccaggctagagtgcagtggcatgatctcagctcattgcaacctcgcctccccgcttcaagcaattctccacctcagcctcctgaatagctgggattacaggcgcccrccaccatgcctggctaatttttgtatttttagtagagacggggtttcatcaccttggccaggctggtcttgaactcctgacctcgtgatccacctgccttggcctcccaaagtgctgaaattacaggcatgagccaccgtgcccgcccccactgttgtttttctaaaagcaccaaccatagtttgtaactactttctttacttgtcgtttgttagtctgctcccttttagactgtgagttgcatgggagcagggaatccatcccttattcactataatacccca

SEQ ID NO: 865189 - DNA, 660 bp, Homo sapiens
ttttgaaagacaaaaataaattgggaggaataaggttactcaatttcaagagttactgtgtatctatagtaatcaagactgtctgatgttggcagagagatagacatatagattaatgaaacagaacagagaatccagaaactaacccatactaataagccaactgagttctgacaaaggtgcaaaaattatccaacatagaaaaggtagtaccgtaacaaatgatgctggtgcaagtgaacatycagaggcaaaaaacaccaaaccaaaaaaacaaccctcaacttaagcctcacatcttatatatgaaatttaattcaagatggactacaaatttaaatataaaatgtaaaatgataccacttgtagaaaaaacatagaaaaatatcttcagggtctagtactaggaagagttttaaaacttggcaccaaaagcacatccataacattaaaaaatgacaaattggactttaacaacatgaacttactttttgtgaaagatcctgttcagcagctaaaaagacaagctacagagtgagcaaaaatattttcaaggcatacctctgacaaagaacaagtgtctagaatatataaagatttctcaaaactcaaccataaaaaccaaatatgccaatgagaaaatgggcaaaagacatgaag

SEQ ID NO: 865190 - DNA, 648 bp, Homo sapiens
ggaaaattggagagagtcaatgctgtagttaaagagaccagaaagacattggtgcaatgatatatgtcagatgtggtaccagttaaattgtggacattatctccacctttgtgagggggaggaaatttcctgacttcctgttacccaccaaaaccaccttttcctattcattgaggcatctgtgagccaaatttcyatgtaaacccaaatatttggcatcacagcatcacaagctctcataggaatgctgaatactggagttcagctacttttttttttttttttaactaagagctgttagcaacagtgtatacttaaaaatttccaaatcatatatcgtggtcatatcaaaagccatgctctctctccaggtgtatgtaacgggtctcagctttactcaaagttcaattgcaaacagtaataaaaacattggcatctcattgctcatttaatatttatgtagctgtcaccatctcaattctacacatttgaaacctcagagttggttggagttgaggtgagctgaaatcccctttgacagtaggtttttttggggatgctttcatccttaaataactttcaaaacaacactcagatagtggcaagagatcaaagaaatactctgttaccacaggggctgctgaaact

SEQ ID NO: 865191 - DNA, 563 bp, Homo sapiens
cacagtttaatgaaacttcagcatgtactcaaaagtgacgaaaacagcagttgtagagaaggaatcatggaggtacacaggtttgtaagttttcattttgagtaagtctgagggatgatacagttctatagatcagtgcaggtccatgatgaagggtaragctttatgtctttaagggtgtcaccccttagtgcacccaccttctaccctgtgggactccagaaaaatctgtagcatctatatttagaaggattgtaacaccagtttcttcaagtataaaactctgagactaaattctccttttatttaggttctccaccttcagtaatagtaattactgcattttaatgacactttccagtttaaaaacatctttatgtactcaggtttctacatataaagccaatacattcctgagcatcattaagattggtgggtgacagggatgtaaacaaaaataagaatttatctttgccctagaattatcatagcccagcatgcagatggataaagatacagataattacaataaaaatgtgatgctccctataacaggcacatga

SEQ ID NO: 865192 - DNA, 582 bp, Homo sapiens
accaactaagttggggcagggaggaagatgggataagggaaggtaacatttggtctgggttttgaagattgagtaggatttcactcaatcttggggcattccagggagagagattgagagctgaaaaatttgggcacaatcatgtgaaaaaatggatgtactgcagaagagaaagaagaggaaggcaagacgtaggggctgagggataggttgatatgcggaaggccttgtacgcaatgctgaaggtttatgagcaagggaatgaggtgatcagttcctggtttagtttgatgaccagtgttggtgtaaggagggtcattggagacatttaaatcttacaagctctgctgttcttactcatatttcaaatcagygagctgcttctcatactgtttcaaggactttgcccactgctagctagtaggagtaggaattgccacaacttagctatacaacctctgacttcaattcctgttgacccaacgtgtctgtgtggtgcgtggctccagcccacttgctttctgtagagcctttggtctgtaatatttggggtgatctgctcagctcattcactatcaacac

SEQ ID NO: 865193 - DNA, 734 bp, Homo sapiens
acaaagaaaaaaggagtaaagacactgtcagggttctctggaggatcaggactaataggatagacgcgtatttgaaaggaagtttattaaggagtattgactcacatgatcataaggtgaagtcccacaataggtcatctgtaagctgaggtgcaataaagctggtccaagttctaaaacctcaaaagtaggtaagctgacagtgcagccttcagttcgtggccaaagacccaagagccccttgcaaactactggtataagtccaagagtccaaaagctgaagaacttggagtctgatgttccagggcaagaagcatctgacatgggagaaatatgaaggccagaagatcagccagtccagtccttccacattcctctgcctgcttttatcctagccatgctggtagctgattagttggtacccacacagagtgagggtgggtctgcctctcccagtccactgactcaaatgtyaatctcctttggcaacaccctcacagacacgcccaggaacaatactttcatccttcaatccaatcaagttgacactcaatattaaaccatcacagacacaaataaaatcagaaatgaaagaggagacattacaactgataccacagaaatacaaaagatcagactactatgaacaactatagtccaagaaattagataatctagaagaaatggcgaattcccagaaacacacaacataccaagactgaatcaggaagaaa

SEQ ID NO: 865194 - DNA, 613 bp, Homo sapiens
tccactgactcaaatgtcaatctcctttggcaacaccctcacagacacgcccaggaacaatactttcatccttcaatccaatcaagttgacactcaatattaaaccatcacagacacaaataaaatcagaaatgaaagaggagacattacaactgataccacagaaatacaaaagatcagactactatgaacaactatagtccaagaaattagataatctagaagaaatggcgaattcccagaaacacacaacataccaagactgaatcaggaagaaatagaaattggcaatagaccaaaaatgagtawggaaattgaattaatgacaaaatgtttctcatcaaagaaaatccttgaatctgatggcttcattgctgaattctgccagtcatttaaaaaacagccaatacttcttaaactcttccaaaaaatcaaagaggagagaataatttctgaacttattttatgaggccagcattaccctgataccaaagccaaggaataacacaagaaaagaaatctacaggccaatgtccctgatgaatatagatgcaaaaatcctcaagaaaatactagcgaacccaattcaacagcacactataaatataattta

SEQ ID NO: 865195 - DNA, 613 bp, Homo sapiens
tccactgactcaaatgtcaatctcctttggcaacaccctcacagacacgcccaggaacaatactttcatccttcaatccaatcaagttgacactcaatattaaaccatcacagacacaaataaaatcagaaatgaaagaggagacattacaactgataccacagaaatacaaaagatcagactactatgaacaactatagtccaagaaattagataatctagaagaaatggcgaattcccagaaacacacaacataccaagactgaatcaggaagaaatagaaattggcaatagaccaaaaatgagtatggaaattgaattaatgacaaaatgtttctcatcaaagaaaatccttgaatctgatggcttcattgctgaattctgccagtcatttaaaaaacagccaatacttcttaaactcttccaaaaaatcraagaggagagaataatttctgaacttattttatgaggccagcattaccctgataccaaagccaaggaataacacaagaaaagaaatctacaggccaatgtccctgatgaatatagatgcaaaaatcctcaagaaaatactagcgaacccaattcaacagcacactataaatataattta

SEQ ID NO: 865196 - DNA, 584 bp, Homo sapiens
gtgggaaaaggactgtgagagaagcttacatggtcccctgaaagaatacaacaggaagacctaatttagaaaacggaatctgggaaaccccctactgccacctcccctgtcacttcatgttgtcccataggccataggcatctctgtggagacctaagtttctatagatgtttgaaaaccrctgatttaatcttattccctaatttcttcacagggagaactaaggtttaaagacgagatatgacttactcaaggtcacacaggtagttacggcaggaccagaactagcacaatagcctcctgacttcaggctaggtctctttcctctacataattctgtcttagtgaagaccgtggttctgctaccaaagtttacaatgacctcatccttcccaggtcatgggctcacaggggattgtatcactttggcttagtttatatcatgccatagttaacacactgtatagaacagacaagtcaagattttgacaaacacttgccattgatgtgaggcattttttagaatatagttaatctcatttttcttgacgggttcatcagtcattgtagtaaagagtctgaag

SEQ ID NO: 865197 - DNA, 584 bp, Homo sapiens
gtgggaaaaggactgtgagagaagcttacatggtcccctgaaagaatacaacaggaagacctaatttagaaaacggaatctgggaaaccccctactgccacctcccctgtcacttcatgttgtcccataggccataggcatctctgtggagacctaagtttctatagatgtttgaaaaccgctgatttaatcttattccctaatttcttcacagggagaactaaggtttaaagacgagayatgacttactcaaggtcacacaggtagttacggcaggaccagaactagcacaatagcctcctgacttcaggctaggtctctttcctctacataattctgtcttagtgaagaccgtggttctgctaccaaagtttacaatgacctcatccttcccaggtcatgggctcacaggggattgtatcactttggcttagtttatatcatgccatagttaacacactgtatagaacagacaagtcaagattttgacaaacacttgccattgatgtgaggcattttttagaatatagttaatctcatttttcttgacgggttcatcagtcattgtagtaaagagtctgaag

SEQ ID NO: 865198 - DNA, 643 bp, Homo sapiens
cccagacaggtaccatctcactgtcaatagcatcctctgctggcctgatcctcctctcactgactggtgagctccctaaggaccagcagtttatattggttttcacaggcatgacatgtgcatggcagacttaaattattgtgtgaggaaagaactgtaggaagagaggggagacagaatgctagagcacacatgttaaagagaaagcaagcagaaatgatgcacttgggagattgaagaggaaaggcagaaggagctcaggatgctaacactggagaagaacatcttyggagaatgtaagagcaatcttcaaatatttgaagggttttaaggtggataaagcatgacaagaactagaacctggattgaccagtgaaagaatgaggacattttcacacagaattttccagcatttcaattgtcaaagatgccctgacacagaggctttgtcatggaggtcattgtgtgcttggtggggatcagcgcctgggcggaggtggaatgctgggttaggtgacctcgccagcactgcccaatgctggaagtctaattgtcggtaaacataccaccagtaacaaggtactctggcatgaagccctactccatctgcctcatatcaggcaaaaaggaaagaaaattatct

SEQ ID NO: 865199 - DNA, 568 bp, Homo sapiens
acaaatattctgctctatttctttccccaactctacatttgttcggattaatggagactattccagaggcagggcatggagaaggctgagtatctgtacacagaatgcagacatgctgttctttgtgtctcatgaagtatggatgagctaaaaagctgaagacagctcaaagcagccaggagggcaggcagcctcagtaaaaaatttgtagtgaagaaaatctcgaggccttaaataaggacttctgtcagaagtgaagacwgtaacccacgggtagcacacctgggctcgagtccaccccgaggccagcttttgtgagtaaaatgttattgagacatcaccatacccatcattgcacataagttacagctgctttcactgcctggccgtagtaggtaccatagaaatccgctggtccacacgtcccaaggatttattatctagccccttacagaaaaactttgccaacttgctcctctaagaggtgaaaagggtcactttgcctgtgccagaaaatgagctccgtgaaggaggggtctgtccctgctgtattcagtaatgtgtctgg

SEQ ID NO: 865200 - DNA, 685 bp, Homo sapiens
tcctcaaaaaaataaaaatagaactgcattttaccgtgtaagtatgtataacaattacatgtccatcaaaaataaaactttaaaaaaaattaaagaagaattaataccaattatcctcagatgcttcaaaatattgaagacgagggaacacttccaaactcattatatgaggttgggtttatcctgacaccaacaccaaacaaagacactctaagaagacaaaactacaaaccaatatmtttttgactactgatacaagaatcctgaatgaaatgctatcaaacagaattgagcaacacattaaaaggaccatagagcatgaaaaagtatggtttgttcctgaaaaacaaggatagtttgacataaaaaaatcaatcagtgcaataaaccaaattaacagaatgaagaaaaaaaagcacatgatcatctcaattgatgcagaaaaagtatatgacaaacttcaacgcccttttgtgaaaagaagcactcaaagactcagaacagaagataacgaatgcaccacaataaaagccatgtataaaaacccgctggcaacatcacattcaatagtgaatgactgaaagcttttcctctaaaatcacggacaggacaagaatgcccactttaccacttctattgaatgtagtattggaatttctagccagagtaattaggaaagaaaaga

SEQ ID NO: 865201 - DNA, 651 bp, Homo sapiens
ataatgcaataagactggatattgttgtgggaaggcagggaccccgaaaggagggactggctgaagccgtggtggaagaacataaattgtgaagatttcatggacatttatttgttccccaaattaatacttttataatttcttacgcctgtctttactgcaatctctgaacataaattgtgaagatttcatggacatttaccacttcctcaatcaatactcttataatttcctatgcctgtctttactttaatctcttaatcccrtcatcttcttaaactgaggatgtatgttgcctcaggaccctgtgatgattgcattatctgtacaaattgtttgtaaaaacatgtgtgtttgaacaatatgaaatctgggcaccctaaaaagggacaggataacagtgattttcagggaacaagggagataaccataaggtctgaccgcctgcggggccgggcagaacagagtcatacttttcttattgcagaaagcaaacaggagaaatatcactgaattcttttcccagcaaggaataaacctgggaaaggaatgcattcccaggggtaggcctatggaaggccgctctgggagtgtctgccttatgcagttgaacataagggatgaaatacaccctggtcttctgcagtgccc

SEQ ID NO: 865202 - DNA, 706 bp, Homo sapiens
attttaagaaaagagtgtagatgctagtcaagccaaaagcaaaacaatgatcattacaggctgggagatgcatttttattaagagtagtttcatgttacagccagaaggaacgatacgctcccagttcatccattttacagacagtgtaactgaggcccagagaggacaagaaattcaaaaagtaattgaagacactgtagttgggtccctggtaccacattttgaacttgaggtttctcatccttaaacgagtatggtatttttcttttctttaacagtttaccctttagcatctgacatctactcactcaygtaagtggcagaggataatgcccctggtgtaggagtcaaagttttctcctttcttggaagcaagacaaatttcagccccttttcttttctctgtcattgttaagaatttctgaacaccataatcctttggaaaggttgagtgggttttactcactctgtgaaatgtagagggatttgaataggtcttgagctaaagaaacgaaatctctgttcagtgtttccacttaaactaaattccccctaatatttcctttcaatgcctgcttgactgaacttttctctacaaggctcatttttataagcaacattccaaacacagcactcttattatcccaaccactaatccttctcatttcttatgtactcatatcttatgtttgatgattgcctgat

SEQ ID NO: 865203 - DNA, 600 bp, Homo sapiens
gcctagaacttctaggcttaaaggatcctcccacctcagcttccttagtagtgaggactacaggtatgtgtcaccatgccctgctaatttttaaattttttgtataggtagggtctcattctgttgcccaggctggtctcaaactcctgggctcatgaaattctcccacttcagcctcccaaaatactgagattataagtgtgaacctccatgccttgcctgaatttatttatttaaacatttttggggggttggggtggagtctttagggttttctacacaatatcatgctatctccracacagataattttacttcttcctttcctatttggattcctattttttcttgcctgtttggtctggctaggactttcagtacaatgtttactagaagtagcaagagtggccatcttttacttgtttctaatcctgatcttagaggaagagctttcatattttcaccattcattatgatgtgctttaggcttgtcttacatggtctttagaatgttaaggtaccttccctctatatcttatttgatgaaagtttttatcaaaaaaagatgttgaactctatcacatcctttttcatctgcat

SEQ ID NO: 865204 - DNA, 665 bp, Homo sapiens
tggttattttgcctgttagttgatgcagtttctccatagcgtcaatggtctttacaatttggtatgtttttgcagtggctggtaccagtttttcctttccatgtttagtgcttccttcaggaactcttgtaaagcaggcctggtggtgacaaaatccctcagcatttgcttgtctgtaaaagatcttatttctctttcacttatgaagcttacttggctggatatgaaattctggattgaaaattcttttctttaagaatgttgaatattggcctccactctctccttgcttgtagggtttctacagagagatccactgttattctgatgggcttccctttgtkggtaacttgacctttctatctggctgctcttaacattttttccttcatttcaaccttggtgaatctggtgattatgtgtcttggggttgttcttctcaaagagtatcttagtggtgttctctgtattttctgaatttgaatgttggcctgtcttgctaggctggggaagttggaagttctcctggataatatcctgaagagtgttttccaacttggttccattctccccatcactttcagatacagcattcaaatgtaggtttgatcttttcacatagttccatatttcttggaagtttgtttattcattttcattctttt

SEQ ID NO: 865205 - DNA, 667 bp, Homo sapiens
gttaaaaaaacttgtccaaatttgtgtaatcttctggaattcaaacacaagtctgttaacctccaaagcctgtactctttctttaaaagaaaaatgccggtaatcccgttccttggggagcctgaggcaggaggatcacttgagaccaggagtttgagaccagtctgggcaacatagcacgacctcatctctacaaaaaattaaaaacttagccaggcatggtggcagtcccagttaatcatgaggctgaggtgggaggattgcttgagcccrggagtttaaagctgcagtgagccataatcacatcactgcactccagcctggacaacagagtgagacctagcctctacaaaaaaaaaaaaaaaagagagagagagtgagagaaaagaagaaagaaaaaagaaaaacgtatttgtctaattacaacaaaagttcttgatattaatagaaacccattcaaacttaaagagatagagaacagagttaaaagttaaagttcttcataatcctacccccacaagataaccatgttaataagacagagtatatatttctatattttctacgcataggctaccaaaccaagagacatacatataaattttttacacaaaaatgagaactgttctagaacttgctttttaaaattcttcttgaatatctttct

SEQ ID NO: 865206 - DNA, 649 bp, Homo sapiens
tcaaggtgaaatttgggtggacacatagccaaaccatattattctgcccctggaccctcccaaatctcctgtcctcacatttcaaaaccaatcatgcgttcccaacagtcctccaaagtcttaactcacatcagcattaactcaaaagtccacaggccaaagtctcagctgagacaaggcaagttttcaaaactaattatgccttccaaacaatygcctgaggtcttaactcattccagcattaactcaaaagttcacagtccaaagtctcatctgagacaagacaagttccttccacctatgagcctgtaaaatcaaaagcaagttagttacttcctagatacaatgggggtataggcattgtgtaaatacacccattctaaatgtgagaaattggccaaaactaaggggctacaggccccatgcaagtccaaaatccagtggggcagtcattaaaccttaaagttccagaatgatcccctttgactccatgtgtcacatccagattatgctgatgcaagaagtgagctctcatgaccttggacagctctaccctgtggctttgcagggtacaggccccctctcagctgctttcatggctggcattgagtgtctgcagtttttccaggtgcatggtgcagcctgttag

SEQ ID NO: 865207 - DNA, 630 bp, Homo sapiens
tggttatcttgcctaattcctagaagttggtcagtaactgagttcaagtggcatgacaatccagttccaacatgggctcatcctcccaacccaagacctttttaaaaagaaagggaagaagaaaagcaatcttagcctccacaatgattcccttccatttgccttcttccatcctggtgcttagatgaggttayggccctagcagaaatgaaatgaaatgaaactgtaagaaaaagtcagcaaatctaaaacactgctgcctgttatcagtgctagcagccttcattaagccactgggggcttggacaaagcaagtggagctagaacagcctctgctttcttggaatgtaccatcaaaataagaaactgctgaaatgaattgagcaagcagattcaagggggtaaagacagacaacaacacagcatgtggggagggaggggatgttatagaggagcctatgctgaaaataaatgatttttttataagtgtggttaactttactgaggctaaaattgctaaacaccgcatgtattttcccccctaaaataaaagctttggggaattttgatctgcctcacatgaaaagctacagaaaaggaaggtatgtgtgaaagcttttaaaattatta

SEQ ID NO: 865208 - DNA, 667 bp, Homo sapiens
gagccagatgcctgcagggttctctctttgccagcagctcttcaaagacttgtgagcccactcagccctccagagacactcttcactgcaaagcctcaggcagcctagccaggggaccctggagctgatgccacctggaatccctaccaagtgtgcaaagcagccacattctgggacagctggattggaggagggagcagaggctgaggttggcttccaaatcttccaagcagtgatctttttagtgaattgcttgagggttctctggctagacctggtgcaattacttgtgctycccctccatggagtctctctgtgcctttgggacagcctctcccccttctcaccatcatctttggtgattcatggttgttttctgcctatggatcagctgttcattcctgctaagggtcctataattagacagagcacaagagctacagctccctgtttgtgttttgcccagagaagtctccagggacactcagacccctacctactcactctcaaatctattcactgactcccacgtcagagaataaagatgaacaaagattgatctccctagcggagtccctcctcccacctttatgattcccttcatctttcccctcccccagactgaatgtcagtgtttgaaagccaagcttaaccctggggatttgag

SEQ ID NO: 865209 - DNA, 633 bp, Homo sapiens
gtaatttataaagaaaaagaggtctaatggactcacagttccacacagctggggaggcatcacaatcatggtggaagatgaaggagaagtaaaggcacgtctcacatggcaggagggaagagagtatgtacaggggaactgccctttataaaaccatcasatctggtaagacttattcactatcatgagaacagcatgggaaaacccaccttcatgatgtaattacctcccactgggtctctcccaagacatgtggagattatgggagctacgattcaaaatgagatttgggtggggacatagccaaaccatatcaaggggaaatggggaatcattgcttaatgggtataaagttttagttatacaaaatgaataaaatctagatatctgttgtacaacatagtacctataattaacaatacagttagccctccccatttgtgggttctgcatccacagactcaatcaactatggatttaaatttttttaattaaaataatacaaaaattaaaaataatataataaaaataatacagtataacaattatttacacagtgtttatattgtgtttggtattgtaaggaatctagacatgatttaaagtactgtcagcccctgtatccatgtgttc

SEQ ID NO: 865210 - DNA, 616 bp, Homo sapiens
agtcttgatatggtttggatttgcgtcccctcccaaatctcatgtcaaattataatccccagtgttggagaacaggcctggtgggaggtgcttggctaatgggggcagatttcccccttgctgttctcatgattgtgagtgagttctcacaatatctggttgtttgggagtgtgcagcacctcccacttcattatctcttcatcctgttctagccatgtaggatgtgcctccttcttctttgccttttgscatgattgtaagtttcctgaggactccacaaccatgctgcctgtacagcctgcagaactgtaagtcaattaaacctcttttctttataaattaaccagtctcagctagtttcttatagcaatgtgagaatggtgtggaagcagctttgcaaggggctaatgggcagaggttggaacagtttggagagctcagaagatgacaggaagatgagagaaagttttgaactttctagagacttgttaaattcttgggaacaaaatgctgatagtgatatggataatgaagtccaggttgaggtggtttcagatggagatgcgaaaacttattgggaactggagcaaaggtcacttttgttatgcgttagca

SEQ ID NO: 865211 - DNA, 616 bp, Homo sapiens
agtcttgatatggtttggatttgcgtcccctcccaaatctcatgtcaaattataatccccagtgttggagaacaggcctggtgggaggtgcttggctaatgggggcagatttcccccttgctgttctcatgattgtgagtgagttctcacaatatctggttgtttgggagtgtgcagcacctcccacttcattatctcttcatcctgttctagccatgtaggatgtgcctccttcttctttgccttttggcatgattgtaagtttcctgaggactccacaaccatgctgsctgtacagcctgcagaactgtaagtcaattaaacctcttttctttataaattaaccagtctcagctagtttcttatagcaatgtgagaatggtgtggaagcagctttgcaaggggctaatgggcagaggttggaacagtttggagagctcagaagatgacaggaagatgagagaaagttttgaactttctagagacttgttaaattcttgggaacaaaatgctgatagtgatatggataatgaagtccaggttgaggtggtttcagatggagatgcgaaaacttattgggaactggagcaaaggtcacttttgttatgcgttagca

SEQ ID NO: 865212 - DNA, 639 bp, Homo sapiens
gctttatttctaggttctataacctgttctattggtttatgtgtctattttgtaccagtaccatgctcttttggacactaatattgtagccttgtagtttgaagttgggtaaggtgatgcttccagctttgttctttttgctcagaattgccttggctatttggcctcctttttgttccatctgaattttagaatagttttttttttttctaattctgtgaagaatgtcattggtagtttgggaagaatagcactgaatgtgtaatttgcttggaaccrtatggccattttgacaatattgattattcttatccatgaacatggaatacttctccatttgtctgtgtcatctctgatttctttcagcagtattttgtatttcgtgtagagatctttctcctccctggttagctgtattcctagatattttatttttgtgtggctattgcaagtggggttgcattactgatttggcacccaactgggatgttgttggtgtataaaattttactgattttcatacattgatatcctgaaactttgctgaacttttttttatcagacctgggagcttttcagcagagactatgggggtttctagacatagaatgatatcatctgcaaagagatagttttact

SEQ ID NO: 865213 - DNA, 558 bp, Homo sapiens
ggatacagacacaagagtgatgttcagagtggaagtctaataggtgagaaaaggagagaagctctcgctacagagaagggtcctagagaaatgggttgccacttctgtgatgaaatgcagcgggtttgatagatgagcctgaggagctggtgtctgatttacrtagaatatgcaaaattggttggaccaggtgtgctatttgcatagggtgtgaaaatctggccgctcccacctaatcttttattatgcagatgggttctctgccttgctggcatcatgttgcctgtttctttactgtacacgtggtgaaaaagagaagggaagatggagcctccatgttgaacatacctggcccccaggtagccatcttctattggcacagctgctggcattcacctgtgcaatcttccagcttgcttatctatgtttgcaactcgatttttcaggctgctctttgttagaaaagaaatgattttttaagctgctttttgttaaaagggaaattctgctgagactcttttaccttcactatctgcctaaataatttctttctatctc

SEQ ID NO: 865214 - DNA, 600 bp, Homo sapiens
aagctgtaacaccaaaaataccttgctaacatgaaaccaaagacaagaagttagcttcaaataaagaccctgcacaaagccttgccctatgaaaacatctagaaaataagtctatttactgtactcagtgtgcgctgcagttaaaggaacacccacatgcagagatgagaaaaaaaccaatgcaagaactccaataactcaaatgaccacagtgtcgcatgtcctccaaatgatcgcagcagttcttcaacagggttcttaaccaggctgacctgactgaaatgacagagatagaattcagaatatggatgtaaatgaagatcatcaaaattcaggagaatggtaaaaagtgatccaagaaaactaagaatcacaattaaataatacaggagccgaaagataaaacagctgttataaaaaagaaccgaacatatctgacagagctgaaaaacacactgcaagaatttcacratgcaatcacaagtattaacagcagaatagacgaagcagaggaaagaatttcagaacttgaagattggctttttgtaataagacattcagacaaaaataaagaaaatgaatgaaaaggaaggaacaaaa

SEQ ID NO: 865215 - DNA, 636 bp, Homo sapiens
ttaggattattgaacatatcccctgaatataaaagaagttacacacacaagatcttactcaaggagctcccattctgtttagagaaacagacctgaatgaaataatttcagaatatttacaaaatgttcttccactatctttatgtaaataacaaattctgaagagaaaaccatataagtgagctggaatagtgagaaatgtcctcacctttagaatacatarccaccagaatcaggggataggtttctattaggtggggagatctagaacttcaagcctgtatttctgctttgtgaattttaggctgttgggattgtcagactcacagatctcattcatattagggcactagagcctagaatgtgtttctaaaaaccacatttcttaaacatcactcagtttataaaaattatttttaaggttccatatgctaactgctgaatcctttgacatggactttgaatactccctataaagaaatttgccacattcaaaagtggatatgtaattaagatatttcaaatgctaactacttgtgcagttaaaattaattttgttataaaaattatcaaaaatttgaaaatttcagctaaaggtgaatggcacgttctttcaatgtcatatatgtatgaagg

SEQ ID NO: 865216 - DNA, 669 bp, Homo sapiens
gtttattgtacctaaatatgatatgaattttattaaaagtattattttacgcttttttaatatgcttaattatatttgaaaatcttgttttattcttttgaaataaagcagttcaaacatgcatacctgttagaattggaaaaggaaaaagtgtctccacaaaacaaaagcaccttatttctgtgtttttgaatgtgtgtacatgtgagtacttaattatcatcacaaaaagatggaggttgaagacaaaaaaaaagaagagcaaattgmtagaatgaagtcccagaggatgtagaagaaagaagggttctgatgcatgattcttggctaggaggagcactgcttcacctgaaagagaagaaaggggattttgaaagacaggtagatgtagatgttgtgactacttcactttagacaaagtttctcatcttacttgagaaaaaaacaaatgctggctttcatcagatttaagcagaaaaaggggagtccactgaatctatagtttatccattttttgcaacagaaatttaatttataaagttttaataggccagatgtttatggcttattgtattataattgtttattggttccagctcttgtaagcacggttacttgatgagaccgagatcttcataatctatattctaacgaactatgtgctaacaa

SEQ ID NO: 865217 - DNA, 637 bp, Homo sapiens
tgtaatcccgtttccaacgaaatcctcaaatctagccaaatatccacttgcagattccacaaaaagagtgtttcaaaactgttctgtctaaagaaatgttcaactgtgttagttgaggacacacatcagaaactagtttctgggaatgcttctgtctagttgttatgggaagatatttccttttccaacgtaggcctgaaagcgctccaaatgtccacttacacacactacaaaaagagtgtttcaaacctgctctaccaaagggaatgttytactctgtgacttgaatgcaaacatcccaaagaagtttctgagaatgcttctgtctagattttacctgaagacaatcccgtttcccacgaaatcctcaaagctatgcaaatatcctcttgcagattctacaaaaagagtgtttcgaaagtgctctatgaaaagaaaggttcaactgtgtcagtagagggcacacatcacaaacaagtttctgagaatgcttctgcctagttgttatgggaagatatttcctttttcaacataggcctgaaagcgctccaaatgtccacttccagatactacaaaaggagtgattccaacctgctctatgatagggatgtcaactctgtgtcctgaatacaaacat

SEQ ID NO: 865218 - DNA, 615 bp, Homo sapiens
tcaggttctcagctccccaacaaatttttttgatcgtaatatatatgttgccttcataggagtccctagaggggatgcctaatgaatttaaggcctgaaaccaaatagctgctgggtttcagtcagcactcctctcatgatcagctatyaataaaaatgtggattggattaattctatttattattatcaacagaaattcatcaattatactcgggacacccgagtttaattaactagccagttacatgccaccagctgaatggcctgggaaaagaggcttgagctagacatgatactagcagataaagggggcatatgtgttatgctgggtgggaaatgttgtattttcattcccaacaatactgccccagattgaactattacaaaagcattacaaggacggaaaactctcaccaacaaactggcagaaaatgctggaattgatgaccgatttactggttggctagaaggttggtttgggaaatggaaaggcatggtagcttcagtccttacatctctcataattgtagcaagggccttaagggcagtgggatgctatattatcccttgtatactggaactagcacaaaggttaattggaacagctattaaca

SEQ ID NO: 865219 - DNA, 615 bp, Homo sapiens
tcaggttctcagctccccaacaaatttttttgatcgtaatatatatgttgccttcataggagtccctagaggggatgcctaatgaatttaaggcctgaaaccaaatagctgctgggtttcagtcagcactcctctcatgatcagctattaataaaaatgtggattggattaattctatttattattatcaacagaaattcatcaattatactcgggacacccgagtttaattaactagccagttacatgccaccagctgaatggcctgggaaaagaggcttgagctagacatgatactagcagataaagggggcatatgtgttatgctgggtgggaaatgttgtattttcattcccaacaatactgccccagattgaactattacaaaagcattacaaggacggaaaactctcrccaacaaactggcagaaaatgctggaattgatgaccgatttactggttggctagaaggttggtttgggaaatggaaaggcatggtagcttcagtccttacatctctcataattgtagcaagggccttaagggcagtgggatgctatattatcccttgtatactggaactagcacaaaggttaattggaacagctattaaca

SEQ ID NO: 865220 - DNA, 640 bp, Homo sapiens
gagtgttacaagttacaaaaaatctcagtttctctttacactgatacacataatttatcacaggaaaactgaattaacctaaggttcagtattgcagggatttaaaaataagaatttttaaactaatataaaagaaagaaaataataacttttcaaatctaaaagttgagtaagtttcgggcctttcacatttcatcctaactcagttgattttatagacttcctggggtcacttctgaacgagactttagatgctcagctgctcagcacagtcaagacaggyttatgtttagaacagtgccagaatgtgagctcctcatttgcacagtggtcagcagggcatgtctttgtaacatggagtaaattcctgcaacatgctatatttggatacctaaagcaacaccctgaacttgagttcggatattagtaattgtaccaaagagaaatatacacttttgctcatgagctccttctctttaattatgcaagaattacatgtaatttttagagacactaggtaaatgctggcaaatgtttgaacattcagaacttaaaaattaccaaggtgttttgttcccaacagtggtacaggggacactgagggaaggctttattacctttcctattagaaactccaatc

SEQ ID NO: 865221 - DNA, 530 bp, Homo sapiens
aaacctgagtgtcctaggaagcctgtgttttctttctcaaaagtttcatttttcttctcatctcaaattctgatatcatcagtttggggtggaaagagtaaatctgggaaggattgagccccaggaaggagcccattcgatctggtgctgtccccaacctaccccacatgcatacaaacctccagctcagcctgcaacagccctgactctatcttgctggctgccaggaagtcaacccaaygaggctggaggccacacctgctatctccctccatatttgttcaataactttgttctgggattctccgttgaggccttcgaatcttttttctcaggagatccatgtaaaagtgtccttaggctgggcacactggctcacacctaaaaaaagtgtcttcatgagcaaaagaaattcccttttatccttctgatatggtttggctgtgtctccatgcaaatctcatcttgatttgtagctcccataattcccccatgatgtgggagggacccagtgggagataattgaatca

SEQ ID NO: 865222 - DNA, 532 bp, Homo sapiens
aagagcctaaagcatgaagatcttggggctcagaatcaaacctgagtgtcctaggaagcctgtgttttctttctcaaaagtttcatttttcttctcatctcaaattctgatatcatcagtttggggtggaaagagtaaatctgggaaggattgagccccaggaaggagcccattcgatctggtgctgtccccaacctaccccacatgcatacaaacctccagctcagcctgcaacagccctgactctatcttgctggctgccaggaagtcaacccaatgaggctggaggccacacctgctatctccctccatatttgttcaataactttgttctgggattctccgttgaggccttcgaatcttttttctcaggagatccrtgtaaaagtgtccttaggctgggcacactggctcacacctaaaaaaagtgtcttcatgagcaaaagaaattcccttttatccttctgatatggtttggctgtgtctccatgcaaatctcatcttgatttgtagctcccataattcccccatg

SEQ ID NO: 865223 - DNA, 621 bp, Homo sapiens
ccatgttggccaggctggtctcaaactcctgacttcaagtgatccacccaccttggccttccaaagggttgccattataggcatgagccaccatgcccggccctaagtttttttttttaagagatggggtctcactatgttgtccaggctggtctcaaactcctgggctcaagmgatcctcccgcttcagccaagtagctgggactacagatgtgcagtactgtgcccggcttatttattttcatttttgttgatttttgagcactataaaaaatataagatgtgctttgcaggtgtcagctcatttaatcctcaccaccgtgttatgaggcaggagcttttattatcttcattttatagatgagggagggaagcccagagaggttaagacacctgctcaaggtcacacagctaggaagtgagacacaagccttcccccagggctgcgttactatgaacatgattggcctggaggtgggaggggagtgcattgattgaaaagagaatgggtggagacagacagcgggagagaaagaggtgaaaaacggtccattaactgcctacaaaatgtggcattgggtgagcttcattcactgtggagtgatcctaaaatttttcttc

SEQ ID NO: 865224 - DNA, 590 bp, Homo sapiens
ccttccctgcccaccttgttttgcctttaaaaatcagctcataactgctgctaattgcagtgtatattcaggataacttgaatctatgctccagagttgcaatcctgaagtttgtctcaaataaactctctactaagattaactttgtctcagcttcttccttgtagggtgacaccaggatctcctttcctggtgctgcagggcttccctggaccctgtgcagcagagatatcccctccacacagtattgccagcatattatgtagaaaaatcattttccctttcaacaggaagcccagttcttaggattgttgttcaaaaatataatttaaagcttaaaactgagcacttgggtcttggcagatttcccatctttcctcacagtggcaratgtgactgtcaagagcctgggcagctgaggacaagtctgagcggggcagaggttgtgatcgtaccctggcctgtgtcatccccttgcagacaccagcccttctctatagaaccagggcatctgccagggattatttaggccttgggtgagggtctggcagggagcagtgcagtgatggagggtgtggtgtgtgtgtggc

SEQ ID NO: 865225 - DNA, 593 bp, Homo sapiens
actcaacggagatagagagtagaaggatggttaccagaggctgagaagcatagtaggggggcagtttggtagggccatggagggaagtgaggatggctaatgggtacaagaaatagttaaaaagaatgaataagaggtagaggtactatttgatggcacaacagggtatttgtgctgatagcacaacagtagtatttgtactgataacacagtttgtactggtagcacaacagtagtacttgataccacaacactgcaattgtcaataattgacaattattataatcaataataatttagttgtaccttttaaaataactgaaatcatataattcaatttttgtaatacagagtaaatgcttgaggagatggataccccatttaccatgctgtgattgttacaygttgcatgcctgtatcaaagtatctcatgtaccccatttatacacacaactactgtatacccacaaaaaataaaaataaatgtgatataataatcaggtatggttttgctggggtatatattacatcgctgtattttgcctagtctataggattagggggaatagctgtggtaaattcccacagaggca

SEQ ID NO: 865226 - DNA, 654 bp, Homo sapiens
gacaaagagacttaggggtacaatttgctctaaatcagtttaaccaccttgcagcttctcgcattacagtcttaatctagcacattagcaagattagtacgtggtttttgcaattaaattgcatattttattatgtctccttctttcatgctatataaacttccaggaaattacagactcataaactttggcataaagcaggaggcagtaggaagcggaaaaaccagaaagatgtttgggggcagctctgaattccacattccatattttaatgtgatgttaaaaagtcctccattaatacccccattagggtaaagaaatttcaatgactagatgaaagatgagcctctcaatgcgtataactggggtccctggggattatggggctttttttattactaagaaggaaagtttaaggttttaatatagatgagttggggatggtaagttattgtgctctaagagcaagaaaaatgcattttcttctgagctcctggcttcaccatggctycaatatacacgatttgagatcaggacccatttttagtaaactagagagtgaaaatccatttgataagggcatgtctggtgagctatttcctgtgactttgtctttgtgatttgtgaggaactcatcctcccacatgcagaccc

SEQ ID NO: 865227 - DNA, 659 bp, Homo sapiens
ctgctgagagatccgttgtcagtctgatgggcttccctttgtgggtagctagatctttctctctggctgctcttaacatttttttcttcatttcaaccttggtgaatctgacaattatgtgtcttggggtttcttttctcaaggagyatctttgtgttctctgtatttcctgaatttgaatgttggcctgccttgcttggttagggaagttctcctgtataatatcctggagagtgttttctaacttggttccattctccccatcactttccagtacatcaaactgtggtcttttcacaaagtctcatatttcttggaggctttgttcatttcttttcactcttttttctctaatcttgtcttctcactttatttcattaatttatgttcaatcactgatatcctttcttccacttgatcaaattggctattgaagcttgtgcatgcatcacaaagttctcatgccatggttttcagctccatcgggtcatttaggttcttctctatactgtttattctagttagccattcgtctaaccttttttcaaggtttttagcttccttgcgatgggttagaacatgctcctttagctcagaggagtttgttattaccaaccttctgaagcctacttctgtcaactcgtcaaactcattctcag

SEQ ID NO: 865228 - DNA, 620 bp, Homo sapiens
ctaaatgccccaattaaaagacacagactggcaaattgaatacccattggtgtgctgtattcaggagacacatcttacgtgcaaagacacacacaggctcaaaataaagggatggaagaaaatttactgagcaaatggaaagaaggaaaaaaaaatcaggggttgcaatcctagtctctgacaaacagactttaaaccaacaaagacccaataagacaaagaagggcattacataatggtaaagggaacaattcaacaagaagagctaactattctmaatatatgtgcacccaatacaggagcacccagattaataaaacaagtttctaaaggcctacaaagagacttagactcccacacaataatagtgggagactttaataccccactgtcagtattagacagattaacaagacagaaaattaaaaagaatattcaggacttgaactcagctctggatcaagtggacctagtagacatctacagaactctgttccccaaatcaactgaatatacattcttttcagtgccacatggcacttattctaaaatcgaccacataatttgaagcaaaacactcctcagcaaaagaactgaaatcataacaaacagtctctcag

SEQ ID NO: 865229 - DNA, 633 bp, Homo sapiens
ggcaaaagctggaagcattctctttggaaactggtacaagacaagatgccctctctcaccactcctattcaacatagtattggaagttctggccaaggcaatcaggcaagagaaaggaataaagggtattcaggtaggaagagaggaagacaagttgtctctgtttgcagatgacatgattttatatttagaaaactccatcatctcagcccaaaaacyccttgaactgataagcagcctcagcaaagtcacaggatacaaaatcaatgtgcaaaaatcacaagcattcctttacacaaacaatagacaagcagagagccaaatcatgaatgaactctcattcacaatcactacaaagagaataaaatacctaggaatacagctgacaagggatgtgaaggacctcttcaaggagaactacaaaccacagctcaaggaaataagagaggacagaaaacaaatggaaaatcattccatcctcatggataggaagaattaatatcacaaaaatagccatactgcccaaagtaatttatagattcaatgctatccccatcaagctaccattgacactcttcacagacttagaagaaactattttaaatttcatatggaatcaaagaagacccccct

SEQ ID NO: 865230 - DNA, 536 bp, Homo sapiens
caaggaatccatgtgatgggttgtcacatgagtgaataataaactttactgtgtttccccatttacagcagtgacttactgagatggacatgaagtggcacctcccagtttccccctcaaaaaaggtttattgccccaattgctgctagcacataacccccaactctcccttcaaagactgcctctgctacagagctaccttctggagtcatgcccctcctagagcagcccacatcccagtattgaagcagagaagyagaggggtatagaggcccacccccatcactactgtgtcacaactggcccctccgtttgcccaatcctgcttcctccctcttcctgcctcaggtttagatcccaatggcactccctgataaacctcttgcacactaactccatctcagtgtctgcctcctgggggacccaacctgcaacatctaccctgactaaagcatggtttgacagagctgctgtgactccagccatcacaaccacattccagacagcagtttggagaaatgggtgaagaaggcatc

SEQ ID NO: 865231 - DNA, 580 bp, Homo sapiens
tgcctgctatttctgactctgcctcttaccacctggatgacctaaggcaagttatttaacctctctgtgtcccagttgacttatatgcaatataagcataataataatacctaccttttaggttgttaaaaagaaaaagttaaatacatgttagatgcttagaagagtgccttttaagtgtgcagtactaccattatgctaacgatcaacyggagtatcacacctgtcatttctatgacaccttcacagtctctattccatctgatcccaataataatcacataagatgtgaaatccttatgtgacaaatgtagaagctgaggctcagaaaggcttcttcctgtaggtcctacaaccaggaggtggtagaactgggactcaaacccaggacactaattgtgaaggtcaagctcttccaggtacacaactgccacttggggcggggaggtgtgagtgtaggtgcgtgctgtgttttcaattattcgtggactcagagcgacgaatgaatgagtgaaggagtgaagttcattgaaaccatattccatggaggaggataggatgtgatatttgctaagtacct

SEQ ID NO: 865232 - DNA, 601 bp, Homo sapiens
gattgaaaagagtgcaataatactaggaaaagaactggtttttcctgcctgcttggcaaactcctactcatacttcaaagtcctattaaaatatacctcctacaagataccactctccaggaagtcattctcttcctactaggtgtcccctctgctctttatacatccctcttttgaagctcctatcttgccacaggaatcatttttgtttgtgacttggtttcactcgatagactatgaggtccttagtatctagcattaaaagtgcctagtataaggcttagaatacagaagctgctcaataaatgctaagtggatgaattagtaaatgaatgaatgaaataaaacaatagaacatgtggactagaaatgaaactgaaacacttggatttcttttcctcccatggggcagctgtgtctttcagagtaattyttcaatatgacttaactccaccttactattcttccactcattcattcatgttaaaaaaaaaaaaaaaaaaaagtcgcccgagtactcccatcctagaatctgtggggctaaattaacctgaaagataacagacttggatcgtgccccatgagcctcatactcctgcaa

SEQ ID NO: 865233 - DNA, 655 bp, Homo sapiens
atgtcttgattctggctcatagtgggttaataggaattaacatgtggccagacttctgacttgttgagtttagggccaatttcatgcagtgactgcaatataggagacattcaataaatatttgaagtaattaattattcaattgtgctaagggctgcttacytagtctccttagtttccaccaatcattttccagattgcaacatcagtgatcactctaagccacaacactgaccgcttcattccattgcatatgcccttccatggctccctattgcctttgggacaaagtgagagctcagggctataaccgaggatcattacatgcaccaccaccagagactggttcctccctaccagaagcctccttttttaccatccccattcacactccaggctccaaccatagtgaacagcatgcagaactcctagcctgacacggtaattcctgccaccatgccctagcaactgcattggctcaactatgaactactttcttcttctatctgcctgacctctacccatttgtcaagacagagctcagatactgatccatcaggaacccaccctgaaaacagtcatatctccctctggaacagggttagacaacccatcctctgggtgctgcagctcctatgcttgccccatgaactca

SEQ ID NO: 865234 - DNA, 601 bp, Homo sapiens
gttagcctgaggaagttagtagcttggaatgtctctttaggttttcggactattttttactcatcagtaaaatgagagggtaagataggaggtaacaaacacagacatccactaaacctgttctgtgctagatgccatgctttgacaatgcagcagtggagaaaatatggttttttgatagakgcatggcaataaattacaatacatcatgctatctgcaaaaagtgctacagagacagaggaggaaaggatgaattgtgtttcgatgatctttaagattcctttcgccgggcgctgtggcttacatctatattcccagcactttgggaggctaaggcaagaggatcgcttgaggtcaggagtatgagaccagcctgtccaacatggtgaaactccgtctgtactaaaaatacaaaaattagctgggtgtggtggcaggaacctgtaatcccagctaattgggaggccaaggcaggagaattgcttgaattagggaggcggaggttgcagtgagctgagatcgcgccactggactccagactgggtgacagagtgaggaagtctccatctcaaaaaaaataaattcctttcagctctggta

SEQ ID NO: 865235 - DNA, 551 bp, Homo sapiens
gtggagaggaaggagatggaattcagagggacttgggagacaaaataaaaatgacagaaacaggagatcagtaataatggaagaaaggacccatggaagagaagaagggagaagaggtagttataagtgctggagaaaagcattgyttttagtgtaattcttcattgtacatatgaattttgttgacaggtacacttcatgtatacttcatgtgtgtacatgaatattattcactctctctcctttgacctccactagagctgtaagacaggctggtcatttccgagttaccgaccgtatagtaaagatgaagcagactccctctcttggcatggctctttccttgaagccccactgtggaactccattaagaagccaccaagttgcttttggcataggtcacccagagtcactgccactccttggcaggagaaggggtactggcttcctgtgacaaaatgaagagtgtggccagggtacattaatctattgatgcattcatgaggcatcagaaggaaaagataggaggggagaagactcaaaaggaagtt

SEQ ID NO: 865236 - DNA, 551 bp, Homo sapiens
gtggagaggaaggagatggaattcagagggacttgggagacaaaataaaaatgacagaaacaggagatcagtaataatggaagaaaggacccatggaagagaagaagggagaagaggtagttataagtgctggagaaaagcattgcttttagtgtaattcttcrttgtacatatgaattttgttgacaggtacacttcatgtatacttcatgtgtgtacatgaatattattcactctctctcctttgacctccactagagctgtaagacaggctggtcatttccgagttaccgaccgtatagtaaagatgaagcagactccctctcttggcatggctctttccttgaagccccactgtggaactccattaagaagccaccaagttgcttttggcataggtcacccagagtcactgccactccttggcaggagaaggggtactggcttcctgtgacaaaatgaagagtgtggccagggtacattaatctattgatgcattcatgaggcatcagaaggaaaagataggaggggagaagactcaaaaggaagtt

SEQ ID NO: 865237 - DNA, 616 bp, Homo sapiens
gtatatatgtgtatatgcatatgtgtgtatgcatatatgtgtatatatgtgtatatgcatatgtgtgtatgcatatatgtgtatatatgtgtatatgcatgtgtgtatgcatatatgtgtgcatatgtgtctatgcatgtgtgtatgcatatatgtgtatatgcatgtgtgtatgcatatgtgtctatgcatatatgtgtatatatgtgtatatgcatgtgtgtatatatgtgtatatgcatatgtgtatatatgtatataygtgtatatacatatatgtgtatgtatgtatatatgtgtatatacatatatgtgtatgtatatatgtatatacgtatatatacatatataatatatctatgtgtgtgtgtgtatatatatatatatatataaaatttgcaagcatttgtgagaaggtaacatttggaaattactaaatggtaacccctaaatttccctccaacctccactatcatattcagctgcaaacttccactcactttatcacattaccctgccttacttttaaaaaattttcttcacaaccttctaggtgaagtcaggtcatttacacatttgcataattgctattcatttttttccgccaacttgtaat

SEQ ID NO: 865238 - DNA, 595 bp, Homo sapiens
actgtgaaaggaatgaggaattgctctctgtaatatcagggagtgatctctaggatatattttattgagtgaaaaaagttaagtgaagaaaagggcagttggcgactgtgtatctaagtaatgggaagaggaaatgtagctataaataactatacagtcatgcatcacttgatgacagagatgtgttctgagaaacacatcataggctattttgtcgttgtgtgaacatcatagagtacacttacacaaacctagatggtatatatctttttatgtgtatatattttttcatatggaaatccaaatgtactagcacaatggtgctgaatatcagttatttcccctagcaatgccaatatcaagtgccatgtatcaacttgttacatgtgttcccttatactcttaygggactaccatcatatatgcagtccactgttgacctcaacgccattattcaggacatgagattaataaatgtacatatatgtgtaaataaatattattgtcatcagaggtgattttgcctcccaggggatatttggcaatgtctggaggcattttgaattatcaccactaagggaagataccttagttg

SEQ ID NO: 865239 - DNA, 680 bp, Homo sapiens
aaatagttaacatttcacaggaattcaactactggtgctatactttatacataatacattatcctgttaaatgcattgactattagacaaggaattatgaatcatttgtcaaataatatttatctttcaatggaatccattgtgtccacaattgcaaagcaatattgaagggtactaagatagtttgggttgtcagctaggacatgaaaaatgtaggtttactatacagaactggatatgataatatattcattaaagttatgttctaactgttcaatagacttctagtagattaatttaaatagttccccataccgtgctgcatcaggatttgatttgtatgccatctgttgcaatgcacttggttttacttgcttgtcaatgagaaatactrcttccaaatgtcttcatggttttgtccatactggactttgggttatgatttttcaccttctactcccctgaaatcattatcctaaagtaactttttttaggcacctattttctggggatcaacatgtaaaaaaacatttatattgtcttgaggagttgtcaacaacaataaattgaaataaaaaagaaatgtatgattttctctttctagaccatatcactgattttcccactggaatattgggcagccatgtgggtggaaaacttgacaattgacaacctgttag

SEQ ID NO: 865240 - DNA, 626 bp, Homo sapiens
cctcagtaccaaatttctgtgataggctgtattagtccattctcccattgctataaagaaatacctgagactaggtaatttataaagaaaaataggtttaatcagctcacagttccacaggctgtacaggaaacataatgctggcatctgtttggcttctgaggaagcttcaggaaacttacaataatgatgaaaggtgaaaaggagcccacacttcacatggccagagcaggaggaagagaaagrtagggagatgccacacacttttaaacaaccagatttcatgagaactccatcatgagaatagcaccaaagggatggtgctaaaccactcatgaaggatgcacccccatgatctaatcaactcccaccaggttccacctccaacattggggattacaatttcacatgagatttgggtggagacacagatccaaaccatatcattccaccttggttgctgccaaatctcatgtccttttcacttcgtaaaatcccaacatcccccaaagtcataactcattccagcattaattcaaaagtccaaagtccaaagtctcatctgagacaaagctagtcccttctgctgatgagccagtaagataaaaaacaagttagttacaccc

SEQ ID NO: 865241 - DNA, 611 bp, Homo sapiens
tcacaggttctggggattaaaatgtggccatcctgggcgggggcgggggcagggggcgggggtattctgtctactgctggtagtatttgtcagatttcttcactataaagttaccatttttttttccattccacattcttttctttgtaagtgaatcattaaattaacaccagtggaaggagaataaagttccagcctctaaagaagrtatatatacaaacaaacattcacaaataaaatatggaattcttctgtaaggaagacttgtctcttctaccctacttatttattcaatcgtttatttctattagtattgactcatggataaaaatcagagaaaacggtgggattagtgcacaagagcacagacagaggggaaatggttaattcctttattcattcattcagcaaatatttattgagtaacttgtctgtaagaaatggttgtaggtgctgcgattaaagcagtaaacaagttgaacaagatgcctggcctcttggagcttctattccagtgaaaggggatagaaaataaataaagaaggaaaatatctaatagttggaatgatgagtcttatggagagaattaaattgggatggtgtgacaatag

SEQ ID NO: 865242 - DNA, 611 bp, Homo sapiens
tcttccaattcttacatgtgacagatgaggacaccacttgacaaatagtaaaggctaaatatttttaaacatggaatgacctgattcccagccctgtattcccttgacattctacaccatgaagacatgattatacattacgtcagtacaaaagtctgggcttattcctagaatctatactaaattcagttagcctactttacagtcttaaagactgtcacttaatattaaattacttaactataagtaagagttaactgtgggaaacaaaagaaaactactctaaaccattttactgaataaaatcaccatccagtaattgttrataaatggtacaacttctacaggtatttactgaaagcttactatgtgcaaaatcttgcattatgtacaatacaggatataaaaatacattagatacagccagtcactctctgaaagggctcccttaggcataagcaaataaaggctcaaattacttcaatgcagaaccaaacatgataaaattcattgcagtggtaaagtagttcagaggcaagaagctctcctgatcttgtgattggattgatcagatgaggctttatgtagggtatggaattcagtatgggtct

SEQ ID NO: 865243 - DNA, 611 bp, Homo sapiens
tcttccaattcttacatgtgacagatgaggacaccacttgacaaatagtaaaggctaaatatttttaaacatggaatgacctgattcccagccctgtattcccttgacattctacaccatgaagacatgattatacattacgtcagtacaaaagtctgggcttattcctagaatctatactaaattcagttagcctactttacagtcttaaagactgtcacttaatattaaattacttaactataagtaagagttaactgtgggaaacaaaagaaaactactctaaaccattttactgaataaaatcaccatccagtaattgttaataaatggtacaacttctacaggtatttactgaaagcttactatgtgcaaaatcytgcattatgtacaatacaggatataaaaatacattagatacagccagtcactctctgaaagggctcccttaggcataagcaaataaaggctcaaattacttcaatgcagaaccaaacatgataaaattcattgcagtggtaaagtagttcagaggcaagaagctctcctgatcttgtgattggattgatcagatgaggctttatgtagggtatggaattcagtatgggtct

SEQ ID NO: 865244 - DNA, 616 bp, Homo sapiens
ttccaagctatcgcctagttgttctcctggttgttcagcctgggctcatgctgctccctctcccactcaccaagacccacaaggaccactccatacccagctcagccccatcccctcagatagtcctgtctctttcctcaggtgaccaggtgcatattttggtgtaaggaccttcactgcacctgggaatgcctactggtcaccttgttcacagagaccaaggcatttacttgatatgagtgcccttggttcactgtctacatggccagggagggagtgaataataggcttttcacttgctgcaagggccagttctcctggccccatggctctagggatggaggatgctgcaggagacacacccctcacttcccagctgaggagtgtgggtcatctcagggcaatttcactgtccctgcatgccccatctcctcagctctgcaaataccaagcagtgctgcctgcctaygggacagtgggctcaggagtggccaggtagtccccagaatgcccttggcaggcccctcatctagcttctcccacagctctgtagcaagagttctaaacttttttgagtgtggagactgctgagagtaagagctgtgggccgttttcc

SEQ ID NO: 865245 - DNA, 647 bp, Homo sapiens
atattctattcatagtaccccaaactgtcgtgaccatgaacgcaaccataaagtgcctccacctattaaacctaaactagttgtacctaagacaaatgtgaaaaaaatggatccaaacattttaaaaacaattgaagctggtattggtaaaaatccaagaaagcggacttcccaggtgcctttggcacatcctgaagatatgaatccttcagataactatgcggaacccattgatacaattttcaaacagaagggctattctgatgagatttatattgtcccagatgatagtcaaaatcacattaaaattcaaaactcacttgyaaataacacccaaggagatgaagaaaatggattttctgatagaacctcaaaaaaatcacggggaatggaggccttcaaaatacaaatataagtctaaaatcatgtttagtaaagccaagtcatactataggagaacacattcagatgcaagtgatgatgaggctttcaccacttctaaaacaaaaagaaaaggaagacatcgtggaagtgaagaagatccacttctttctcctgttgaaacttggaaaggttaggtattggtaatcctgcaatcacttctgaccaggagttagatgataagaagatggagaagaaaacccgca

SEQ ID NO: 865246 - DNA, 604 bp, Homo sapiens
aatataagtctaaaatcatgtttagtaaagccaagtcatactataggagaacacattcagatgcaagtgatgatgaggctttcaccacttctaaaacaaaaagaaaaggaagacatcgtggaagtgaagaagatccacttctttctcctgttgaaacttggaaaggttaggtattggtaatcctgcaatcacttctgaccaggagttagatgataagaagatggagaagaaaacccgcaaagtgaaaggagataaaaagcagaaaaagaaaactaagaccttcaatccaccaacatgtagaaattgggaaagtaattactttgggatgcccctccaggatctggttacagctgagaagcccataccagtatttgttgagaaatgtgtggaatttattgaagatacagggttatgtactgaaggactctaccgtgttagcrggaacgaaactgaccaagacaatattcaaaagcagtttgatcaagatcataatatcaatctagtgtcaatggaagtaacagtaaatgctgtagctggagcccttaaagctttctttgcagatctgccagttcctttaataccatattctcttcatccagagcta

SEQ ID NO: 865247 - DNA, 535 bp, Homo sapiens
tatcctgtttgtgaatagagacacattcatttatttatttttgatctgtatgtcatttatttatttctcttgttataatttacttggtataacctccagtgcaatgttggaaagaagtagtgagagtaaacacccttaccttatgcctgaccttgggaggaaggtattcattctgtcttttactrttaaatctaatattagctgtggactttttgtagatatcctacatcagattgagggagtttcctactattcctagtttgctgagagttttatagttgaaaactattttcaatagttgcataattcattgttaactagaatatggtctatgttggtgagtgtttcatgtgtacataagaattatgtgtttcctgcaactgttaggtggagtgctttctaaatgttaagtagattcatattatcaagtaggttagtgttattagaatctgttatccaggtcctctatattcttactaaaattttgtctactgattccatcagtcaattagatagcaaagttaaaatatccaac

SEQ ID NO: 865248 - DNA, 645 bp, Homo sapiens
gctaggtaatacccagttcatatagccaagcagtttgaagattgagcccagctcaggtggtggaccctacttagcctaaacctgtaatggtcatccctcaagatttcacatttaagccatggaaattggctaaaggagtaagcatgtgaccttatttgggccaatcaaatgaaagtaaaaaatttggagggattctgggaaatgtttccttattagtagttgagaaacacaggaaggtataatattcttccctcagactttgttgcatgcagatgtgaggtcagagactggttaccactttaggataaaaccagtgcccagaggaagggagagccaagggaatttcaggggaaagagactcatcaccagaaagagcaaccctaaatcaggccttctttagactcccagttaggagggcaatgaatatttttgtaggtttagccaatttaartttgacattctcttatttgctatagaaagcatcttaactaataaaatgtccaagaaatacatgtatgaggagggaaaaaaaaacaccaggtaggctgtttataaaggcaaattttggaaggtggcaggatgatctgttatctccccacactccagcctttgggttacagtggggagaaagctgctgatagtttc

SEQ ID NO: 865249 - DNA, 604 bp, Homo sapiens
actgactcacttcttatgctactgcacaaaagctgagggagttgacatttaaactcatgtgattaaacaattcataagtcttttaaaactgtacattttgacatgaaaagaatgcaaaaatattcacaagctacttagctagtgaattakgagcttttaacagaaaaagaaaataaaagaaggctttttattttttcaaagaagtggttgtatacaaccactttctcaagttttctggtatgtatttatgagattaaatgtataaaagaatgtggtgtcttcaagcagttaaataacaagctcctgttgagaaaacatcttgtagcaacaaaagagcttttaattccaaatttaataaatggagggaggggagcttttgatggtaagaaatggaaaagacagaagaaagaacatttgagggatggtggagggtaaacaaaacagcactcagcctagaaggtattcattttctgtccttaatgtaaggaaaaccataaaaacatctgcagttgaagattcagaaaattttcacagagaacattgggtttttataaacaacaaaaagagtcacatcaaaatttccttccttgaaacatttatgtaa

SEQ ID NO: 865250 - DNA, 604 bp, Homo sapiens
actgactcacttcttatgctactgcacaaaagctgagggagttgacatttaaactcatgtgattaaacaattcataagtcttttaaaactgtacattttgacatgaaaagaatgcaaaaatattcacaagctacttagctagtgaattaggagcttttaacagaaaaagaaaataaaagaaggctttttattttttcaaagaagtggttgtatacaaccactttctcaagttttctggtatgtatttatgagattaaatgtataaaagaatgtggtgtcttcaarcagttaaataacaagctcctgttgagaaaacatcttgtagcaacaaaagagcttttaattccaaatttaataaatggagggaggggagcttttgatggtaagaaatggaaaagacagaagaaagaacatttgagggatggtggagggtaaacaaaacagcactcagcctagaaggtattcattttctgtccttaatgtaaggaaaaccataaaaacatctgcagttgaagattcagaaaattttcacagagaacattgggtttttataaacaacaaaaagagtcacatcaaaatttccttccttgaaacatttatgtaa

SEQ ID NO: 865251 - DNA, 645 bp, Homo sapiens
gaatcacatctattgttttgtgtatgatgaaccaaccttgcatcccagtataaagcctactttattgtgatggattagctttttgatgtgttgctggatttggtttgctagtttttgttgaggatttttgcgtctatgttcatcaaagatactggcctgaagctttctttttttattgtgtctgtgccaggttttggaaacaggatgatgctggcctcatagaatgagttaggaaggagtgcctcctcctgaatttttggaatagtttcagtaagaatgataccacctcttctttatacattgggagaattcagctgtgaatttgtctggttctggactttttctagttggtatgctttttattactgattcaatttcagaactgattattgatctctttagggattcaatttcttcctggttcaatggaggtcatatatttccaagaatttaatcatttgttctagattttctagcttgtgtgcatagaggtgtccatagtagcctctgacttttttttgtawctctgtggggttggttacaatatctcttttatcatttttgattgtgtttatttggatcttttcttatttttttcatatcagtttaactaatgatctatcagtcttatttattccatgcaac

SEQ ID NO: 865252 - DNA, 569 bp, Homo sapiens
gtgaatttgtctggttctggactttttctagttggtatgctttttattactgattcaatttcagaactgattattgatctctttagggattcaatttcttcctggttcaatggaggtcatatatttccaagaatttaatcatttgttctagattttctagcttgtgtgcatagaggtgtccatagtagcctctgacttttttttgtaactctgtggggttggttacaatatctcttttatcatttttgattgtgtttatttggatcttttcttatttttttcatatcagtttaactaatgatctakcagtcttatttattccatgcaacaaccaactcctgaattcattgatcttttgtatgttttttcacatcttgttttttgagctttttgttttgttttgttttgtttttagttgtcctttgattttggttatatcttatcttctactcgctttggggttggtttgctcttctttctctagttccactaggtatgatgttaggttgtagatttgagatttttctaacttttaatgtgggcagttagcactataaacttctgtctta

SEQ ID NO: 865253 - DNA, 569 bp, Homo sapiens
gtgaatttgtctggttctggactttttctagttggtatgctttttattactgattcaatttcagaactgattattgatctctttagggattcaatttcttcctggttcaatggaggtcatatatttccaagaatttaatcatttgttctagattttctagcttgtgtgcatagaggtgtccatagtagcctctgacttttttttgtaactctgtggggttggttacaatatctcttttatcatttttgattgtgtttatttggatcttttcttatttttttcatatcagtttaactaatgatctatcagtcttatttattccatgcaacaaccaactcctgaattcaytgatcttttgtatgttttttcacatcttgttttttgagctttttgttttgttttgttttgtttttagttgtcctttgattttggttatatcttatcttctactcgctttggggttggtttgctcttctttctctagttccactaggtatgatgttaggttgtagatttgagatttttctaacttttaatgtgggcagttagcactataaacttctgtctta

SEQ ID NO: 865254 - DNA, 501 bp, Homo sapiens
agtcctgcccagtgagatgtaagcttactattttgtgacagtctttctgggaaggctgcttaaagggagccaataagtcaaggagaaaggataatcgtttatccttccccacctcttcctgctacaacagaagggatggctggagctatagcagccaatttagactatagataaactcaaagaaggaagctccatgctaaaaatggaatataggaagaaatagactgtatcaccgataacgtcctcgtgccaccagaatgatttatcttcaaacttctcttttaactgaaaaaaaaagtaaacttctgtyttgattaagccactctcattttcattattatttccttccctggttatacacatttaaagcttattccaactgatttagtacttggaagtaagtttcttcaagtatcagaaactaaaatgtggcactaaatgtgtaatggaagcagagctgcataggtgcatagcaatgactcagataatgaaagccaaaaa

SEQ ID NO: 865255 - DNA, 612 bp, Homo sapiens
atgactaagttccctgaggcctccccagaagccaagcagatgccagcaccacacatcctatagaactcggggacaattaaacctcttttctttataaattacccagtctcaggtgtttctttagagcaacgcaacagtctagtacagcatgattgccggaaragagaatgaaccactccagcacatctcactgctcctcccagccaggctgtgctgacatcgagcctaacagaaaatgctgctgaatgcattaccaagattcatctagcactgaaagggagaagccaccatgaaataacaaactccaaaggctgaataacacacaatcaaagaacaaagcagagtgtaaggataagtagcatcacagagagatgggagggagaataatagatgtaaaaaatcaaatagaaatcatgcagagtaaaaattttattgagagaaaaccttagtgtatcagccaaataccatttgatatacgtaaaatgtaaattacagagcaatgaaattaccctttggaattcctcaagaacttagtcaaacaatgaaaaagttcagaaagcatgaaaaacatagaagatagatctgggatttgtgatattagtactatatgaa

SEQ ID NO: 865256 - DNA, 612 bp, Homo sapiens
atgactaagttccctgaggcctccccagaagccaagcagatgccagcaccacacatcctatagaactcggggacaattaaacctcttttctttataaattacccagtctcaggtgtttctttagagcaacgcaacagtctagtacagcatgattgccggaagagagaatgaaccactccagcacatctcactgctcctcccagccaggctgtgctgacatcgagcctaacagaaaaygctgctgaatgcattaccaagattcatctagcactgaaagggagaagccaccatgaaataacaaactccaaaggctgaataacacacaatcaaagaacaaagcagagtgtaaggataagtagcatcacagagagatgggagggagaataatagatgtaaaaaatcaaatagaaatcatgcagagtaaaaattttattgagagaaaaccttagtgtatcagccaaataccatttgatatacgtaaaatgtaaattacagagcaatgaaattaccctttggaattcctcaagaacttagtcaaacaatgaaaaagttcagaaagcatgaaaaacatagaagatagatctgggatttgtgatattagtactatatgaa

SEQ ID NO: 865257 - DNA, 580 bp, Homo sapiens
cagtgtcaagtgtaaaacacacatataattggaattgcagaagaagaatagagattggatgaggcagaaaaaaaaatgacatacatgaaatttcaccaaggtagaatgtgtgccgggccataaaataagtttaaatacatttcccagaaaggacacataaagaaggaaatacaaaaaaaaattaataagttgaattcatcaatgtaaaaaacmtttgtccatcaaaaacaccattaagagaaagaagaataaagagcagactgggagaacacattgcatatatctgacaaaggacttgtatccagaatacataaataatttctacaaatcaatagccaaaagataaatcaaccaataaggaaatggtaaagaacttgaacagacacttctgggaataattaatttgaaaagccagtagtacaggagaaaaagaagctgcttgacattataagttatcagagaaaataattaaaactcattagaatggctaaaattaaaatggacaacaccaaatgttgacgaagatgtggggcacctgacactctcctacattgctgtgctagtggggaaaagtacaaat

SEQ ID NO: 865258 - DNA, 625 bp, Homo sapiens
gacagtattagcatagaaagaaattaatttaccattatattcctaaatatattttaatctttcctaggaggagatgggatgtacttacttttttttttttttagatggagtcacccaggctggagttcagtggtgcaatctcagctcactgcaacctctgcctcctgggttcaagccattctcctgcctcagcctccagagtagctgggactacaggcgcccactgccacacccggctaagttttgtgtttttagtagaaaccgggttttgccatgttgtccacactggtcttgaattcctgacttaaggtgatccacccatctcggcctcccaaaatgctgagattacaggcatgagccacygcacctggcccatactcacactattaaccaagaagttgggagtttaaagtacaaggcaaaaagtacaacagatattttaagacaatgtgaggcatggaaatccttatgctggagggttagctgtgtcttaaaggctgcagagatgaaagcagaatgcattgtccttggtcccactggtaggaaatgcgtgagccaaggtttttcagtcctatgatagagttacttaggaccatgttgtacagcaagacatgagtgcatgcca

SEQ ID NO: 865259 - DNA, 687 bp, Homo sapiens
gtcacgcattcttgacttatttatatatccctccatcctattcagacttccactgatggcaaatgatgtatctaagtccttggcatcaggcaaactgcctggggaagaacacaccactagcctacaaaagcaacttgtgaaaagtggaggatatccatgaactgcattagaatgttgttttttcataaaatgcaaacatctgtatcatcagactcagttcaacagtattctctagaagcattcaactgaaatcagtgtacagaaggaggcgtcataaattgtagttatgaacacatgaggcatgatgacaggagccccctcgtggctggagattttgacatatcccttttaccagcagagaacagaggatttgtccttgctttcgtttaaatcgagaagaagagattaaacatgtatgtggttggtaatataattaagctgaaatctaaagtaggctagtttttatygctacaaccataagttttgattatttaaagagccaggctggaggctgcagaggaagaacagatataatatggtatgttcatacactcacatacccacttgcttctctcacctgggttgaaacccccaccaccctgcacctgtcacctgtagcctcttagaatagcctcctaaacagcattcctgcttccacacttgcctattatgaggcgctcatgacag

SEQ ID NO: 865260 - DNA, 687 bp, Homo sapiens
gtcacgcattcttgacttatttatatatccctccatcctattcagacttccactgatggcaaatgatgtatctaagtccttggcatcaggcaaactgcctggggaagaacacaccactagcctacaaaagcaacttgtgaaaagtggaggatatccatgaactgcattagaatgttgttttttcataaaatgcaaacatctgtatcatcagactcagttcaacagtattctctagaagcattcaactgaaatcagtgtacagaaggaggcgtcataaattgtagttatgaacacatgaggcatgatgacaggagccccctcgtggctggagattttgacatatcccttttaccagcagagaacagaggatttgtccttgctttcgtttaaatcgagaagaagagattaaacatgtatgtggttggtaatataattaagctgaaatctaaagtaggctagtttttattgctacaaccataagttttgrttatttaaagagccaggctggaggctgcagaggaagaacagatataatatggtatgttcatacactcacatacccacttgcttctctcacctgggttgaaacccccaccaccctgcacctgtcacctgtagcctcttagaatagcctcctaaacagcattcctgcttccacacttgcctattatgaggcgctcatgacag

SEQ ID NO: 865261 - DNA, 611 bp, Homo sapiens
tacaaatgcataaatattgggataatagaatgagacagttaattcagtctcaagagtgtaaacacattttattataattaatgatcacagaagaaaatatcttttttagaggaagtggcaaatttcaaacatttttgcagaactaagcttgctacacacacatggatgagaagtttaaacttcaatgaattaatgaggaaatgttatgggctataaaatgtagaatctgatgatcacttcttaggtgatcaggacagctgcagtagagcgggatggtgtgtacatggaggcggtgcaagctctccgggagcaggggcagtgtctgctttgttcagtctggaatccactgccagcacacaacaaacactcaataaatgctccctcaaggaaaaatgggcgattaggagccactcagctcaaaaatatgtcttcatcgtacaaattcyttagaagttatttctttgcttataagattgaagatgggtatggctgactagttccataaaaaatatatatatttagataaatcagtgagtctgaaagataccatggaagagtcaaacagaaatttctactacattccatcaactgtgaaggtgaagaatttttct

SEQ ID NO: 865262 - DNA, 604 bp, Homo sapiens
aaaaaacaaaaacaagtaagttgcactttccctcacttacctacattacttttgcaaacccagccagaaaaatgaattagtaaagtaaatttatttatttagataagaataaatcaaaccacagaactttcaaataggactaacagtaatttctagtaggcgtggctaaagagttcctagttcctacttaaaatttagttgggagtargggaataggagggaatactgcttaaatgacaaccaccgggcattcatgtaataatactttgaacattatttataaaggacttggcatgggggctcacgcctgtaatctcagcactttgaaaggcagaggcaggaggatcacttgaagccaggagttcaaaaccagcctgatcaacatagcaaggccctgtctctatgaaagaaaaattgtaaaattagtcaggcgtggtggcacatgtctgtagtcccagctacttgggaggcttaggcaggaggatcactcgggcaggaggatcactcgaagcccaggagttcgaggatacagtgatccatgatcatgtgactgcattccagcttgggcgacagagtgagactatttcaaaaatcaaggggtttg

SEQ ID NO: 865263 - DNA, 596 bp, Homo sapiens
ttggttattcagatattcacaaacatattaaaatatacaataaggctctgcctatgtaagtgatgtgccatttgcagtatgagtaacaaaaacataacttcaaaatggtagggttgtctgatactcccacaacaatttttaaaaactaagtatttttagagattaggtatatggaaaaattgaattgatattaccaagagcttctaaatgccttctcaatccctcctcaccatatacacaatttcccctgttattaacrtcttgtgttactatggtaatttgttacaattaatgagctaatattgacacactgttttcactaacatctataattacactgggatttactctttgtgttgtacattctgtgggcttaaacaaatgtgtcgtgacaggtatccaccactgtagtaccatacagaatagtttcacttgcctaaacataatccgttctctacttaatccctccctccttcctcccaggtcccaagtaaccactgagctttttactgtctccatagttttgctttttccagaatagtaggactcataaattatgtgcctctttcaaattgtcttctttcacctaacaatat

SEQ ID NO: 865264 - DNA, 655 bp, Homo sapiens
tgctgccttcaagagactcatgtaatgtgcaatgacacccacagactcaaaataaaggcatggagaaagatctatcaagcaaatggaaagaaaggaaaaaaaaaagagctgaggttgctattctaatttcagacaaaacaaactaaaccaacaatgatcaaaaaggacaaagaagggtattacataatgataaagggttcaatttgacaagaagactcaactatctgcatatatatgcacccaacacaggagcaacaagattcwtgaaacaagttcttacagacctacacagagacttagatcgataaccacatcataacagtgagagacttcaacaccccactgacagtatcagatagatcatcaacagatattcaaaagctaaacttgacacttgatcaactggaactaacaaacatttacagaacactcacatccaacaaaaaaatttacatttttcttacctgcacatggcacatgctctaaaattgaccacacaatcggccataaagcaattctcaaaaaattcaaaaaaatgaaatgataccaaccatactctctgaccaaagcactctaaaaatagaaattaataccaaaaaggtctctcaaaagcatacaattacataaaaattaaactggctcctgaatgactttt

SEQ ID NO: 865265 - DNA, 632 bp, Homo sapiens
atacaagaaactgactttccttttgttcctaagcagatagctacagataaaaggttaaatatctccacaggtagttactctctatgttcactttatcttatgtaaagtgctgatttactgagagccagatgaatacataattgattcttcccctacctgctccttttctcttgcaacatgtggatttggtagtgtgactatatcctccctcttttctctccagcccactttccccctttaaatattgaaaccctcaaaatcatctttggagaaaggtacaaaccacagactgtttctgtaattccctgtttatttcttctgggcatgtccttagtgttgkcaaaataaacttctaaattgattgagacttgtctcagctagtttttggtttacagttacatagcaaaaagtactttgcaaatatgattaaagttaagtatcttgaggagtttacctggattatcccagtggtcccagttgaatcgcatgggtccttaaagctgtagaacctttcccagcctgtgatcagagacagacatgatgagaaaagaaaggccagagagatgtgatgttgctgccttgggaagggggcctctagaatctggaaaaaaaacaaggaaacagttccttag

SEQ ID NO: 865266 - DNA, 632 bp, Homo sapiens
atacaagaaactgactttccttttgttcctaagcagatagctacagataaaaggttaaatatctccacaggtagttactctctatgttcactttatcttatgtaaagtgctgatttactgagagccagatgaatacataattgattcttcccctacctgctccttttctcttgcaacatgtggatttggtagtgtgactatatcctccctcttttctctccagcccactttccccctttaaatattgaaaccctcaaaatcatctttggagaaaggtacaaaccacagactgtttctgtaattccctgtttatttcttctgggcatgtccttagtgttgtcaaaataaacttctaaattgattgagacttgtctcagctagtttttggtttacagttacatagcaaaaagtactttgcaaatatgattaaagttaagtatcttgaggagtttacctggattatcccrgtggtcccagttgaatcgcatgggtccttaaagctgtagaacctttcccagcctgtgatcagagacagacatgatgagaaaagaaaggccagagagatgtgatgttgctgccttgggaagggggcctctagaatctggaaaaaaaacaaggaaacagttccttag

SEQ ID NO: 865267 - DNA, 647 bp, Homo sapiens
attataatttctttcccatcacaccaacactttcctactgccaagaaaatgtttctcaaaggaaactaaagctaggctcagtaacttttataatacctcctatttatctagcattttatagttttcaaagcactttcacacacgattacatttgatttgagccttgaaactcctgcaaggtaagaaagtcagagttaaaagcataggctctggaaccgggctgcctgggaaggaatcccacctctgctagctttttgtgcctcagctgcctcatctgtaaaatgaggatgatggytgtatctatatcatgaacacactgtaaacaataattgagttaacacacgaaaatcgcagagagcagagccttccatacagtacacatgtaataaatagtagctattatcattatccctattttataattgccagtcagaaaattaagaaacaatattatgtgacttgctcaaaggtgtcctggaatagtggatctaggactcaaaaacaaggtattttaaccccaggtcaaaaatgtttcaatgtacaacatgtagaattctgagtataaatataacaaccataaagcagtcaacctccctgtgattaaaacagcaattaatttatttatatccagtgataagctagacatc

SEQ ID NO: 865268 - DNA, 605 bp, Homo sapiens
cacctatgcccaagcattccctgcccagtgcaattcagacttgtgtgtagacgtggacgctaatatattttagctgccttaactttcttatcctggactaatgttgcttcagtcccacatcttgtacttacagggaaaggaaattgtaaatagaaactgcccatttcattccctcacaagtcattttctgtggcacactaacttcaagcattctgaastcaggaataaggagaaaaaacaattttatgaatctataagacattttccctttgattgtcatctcatgatccttcattaaatgtaggggtaaagtgtaggaattaagctagattaccaagagtggtgaagaagtaagatcttccacatcactgccacttctcacacacttaccctataagtatgagggtggagagagaagttcatgtcagaatgtgcattcattattttcctctatttcagtctttaaagtaatactttcaatccctagccagtgtgctattcctgttgcctgttaacttgatttagttaacttggatgttaaagcttgaagactacctggagatccacaaaggcatgaggaacagtggaaaagacttgtggcaaag

SEQ ID NO: 865269 - DNA, 630 bp, Homo sapiens
aaggcactaccatgtgctgaattcctttagaaaacaacatctcattttaaacctctcaacaaccctgtaaagtgaaacttttcccagataaggcaatggaaacttcacataaagtcacacagataataaagtgtgaaaccagaattcaaatccatgtccatctgatttcaaagtcaaaggctattaatcactacacaaagtaatatttattgttaaaccaaagtatacctaagtaggagtaaccatgtaagttatttatgaagagcttactatatgcaaggcactaagtggaactcagttaatcttaactgttaccctacgagataggtactattactatgtcattttgctaatgagtaaattgtgggtgagacaggctaaggcccaaaattcaaatgtagatccttctgattccaaaacctataccaatagtatttgccccaatgccaaatgtcacttgtctttaggattattttaattcaaatgttagcctagttaggacacttgacactatcctgctcctycatgcacagtcagcaagagcactggagggacagcagatatcctatgatcaaaactgaaattgactggaaggcaaggcaacatttgcaagctagctctcttctctgg

SEQ ID NO: 865270 - DNA, 670 bp, Homo sapiens
gataaaaagtatatgtttggggagataatatgaacagtatgtaatattaacaatatatatattcaacatcaacacacattttagaagctgtctaggcaaaagcacttatggtgattaggacccaggcctcacagaaactcaacactaatgataagttttcttttcctttttgtgcttctctttttcttcttttttttattttattattattatactttaagttttagggtacatgtgcacaatgtgcaggttagttacatatgtatatatgtgccatgctgctgtgctgcacccattaactcgttatttagcattaggtacatctcctaatgctatacctctcccccsccaccaccccacaacagtccccagagtgtgatgttccccttcctgtgtccatgtgttctcattgttcaattcccatctgtgagtgagaacatgcggtgtttggttttttgtccttccaatagtttactgagaatgatgatttccaatttcatccatgtccctacaaaggacatgaactcatcattttttatggctgcatagtactccatggtgtatatgtgccacattttcttaatccagtctatcattgttggacatttcggttagttccaagtctttgctattgtgaatagagccacaataaacatacgtgggcatgtgt

SEQ ID NO: 865271 - DNA, 657 bp, Homo sapiens
ggcttttgagtacttgtgtccatttttaagaattttactcttgccttgctttcaaggctctcctgttacatttgccaggttacttgacctattgattttgggacaggttggatgagtttctttctatacatattcagttataggtgctgtgaattttcatagggatgtattcagcagaaactcaagcaagcagaaatgccaggtcaggagatgtaggtttgtgggtcatctgctgagaggtgataattgatttactgaaggttcaatagcctataaagcagtgtgacacagtgttgcctaaggatgctctctggtaaaagtaagtatacagcttttgctactcgcaaacatacaaagcaagaaggaggacagtcaaaaaccgcgtcatatcacttaggtcctatctgcatcctctatattatgctctgtagtttatttcttagtgtaatgtaagttttattggtcttccagttctttgctttgaaaaaacatatattatgatccagaattttaataacrtacttctctagaaaaaaaagacaccatcaaattattatctttcctatcatccagatgctattcagtaaatcattgttttacttcataggatagtaagtggccaaaaaaaaaaagatacatatttttcaaagtttttaa

SEQ ID NO: 865272 - DNA, 486 bp, Homo sapiens
cacgtggaactgtgagtccgttaaagctcttattctttatgaattacccagtctcgcgtatgtcttcagcagcagcatgaaaaaggactaataaacactttggtgtccttgtggacttttacaatgtagtgtttaggaatgccactggtgcagaatcacaataatagsttctgctgaagctaggcttcattcatacaggatctgggctgaagtttttccttcttacagctattatcggggaaaagagagtttgctgaacacatgaacagggttaataaagtagcaaggattggggaagatttcatcaatgcacagttgccaagcactttaaatgaatcagtttttagaactgtatcttattgatttggtaaaaatcttagagcagaagtggaacctagagactaaaagctctaaatgctttattttgcaaatgaagaaactgaaaaaaaaaaaaaaaaaaaaagcaaatgatgattctcttaagtg

SEQ ID NO: 865273 - DNA, 661 bp, Homo sapiens
ctttacatgataaattatcactaagattttatctttcggtcaaaaactgtgaagatcttaccccctctcacaagcttacaggtcaacctgtctcagtttcatggttattggtagaagacatgagatgcctaggtcagagaccagtgacttttttatttatagcaataatggtaagccaactatcagcacatgtaccagttcactgaaggctgttggccctctgtatctgtgggttccacatccctggattcaaccaaccatggatagaagtattaggaaaaatartctcacaaagttccaaaaagcaaaacttgaatttgctgcatgttgagtattacattgaatccgtggaatgaagtgatatgcaggcattgtgttaggtattataagtaatctaaagatgacttaaaatatacaggaggattgcatagattatatgcaaatacgacatcattttatatgaggaacttgagcacccatggattttagtatccatggctggggggcacagggggtggggtgcagtcctaaaactaatcaactatacttagtggtttgcatttcttttttttttatatactttaagttttagggtacatgtgcacaacgtgcaggtttgttacatatgtatacatgtgccatgttggtatgctgcaaccat

SEQ ID NO: 865274 - DNA, 660 bp, Homo sapiens
ttaactaaattttagttcctaatgcttttttcaattcagtatgggtagaggaaccctgtacctccatgatcaggatgtatttttaaaagaaaagccagcagaatgtgctgatggttgagatgtggtttataaaagaaagtacccctagagttttttccagtcattagttgagatagacaaattagacagtgggaaatagagcattaatctgtcagtcaaccataggattaagagaagacacacggcagttcacagacacatttcttccaatttgagcatattggttttaaaatgaaatatatatatgaaaatgagtatcccaaccaaagataattactagaaaagtttttgtgtatacatttcatacgaaaaatttaaacttgcttttttagacattgactcragagtatcttcagagtgaagtctacctaattggctaagatagatttacactatgtttcctctgtgttcttattataccttgaaaagcctccattgtagcagtgtcacaatgtggctttgttgcacagttgacccttgaacagtgcaagtgttagaagcactgacacctcgtgcacttgaagacttgcccataacttttgactcccccagaacttaactactaatggcctactgatgactgaagccatactgataaaa

SEQ ID NO: 865275 - DNA, 660 bp, Homo sapiens
ttaactaaattttagttcctaatgcttttttcaattcagtatgggtagaggaaccctgtacctccatgatcaggatgtatttttaaaagaaaagccagcagaatgtgctgatggttgagatgtggtttataaaagaaagtacccctagagttttttccagtcattagttgagatagacaaattagacagtgggaaatagagcattaatctgtcagtcaaccataggattaagagaagacacacggcagttcacagacacatttcttccaatttgagcatattggttttaaaatgaaatatatatatgaaaatgagtatcccaaccaaagataattactagaaaagtttttgtgtatacatttcatacgaaaaatttaaacttgcttttttagacattgactcaagagtatcttcagagtgaagtctacctaattggctaagatagwtttacactatgtttcctctgtgttcttattataccttgaaaagcctccattgtagcagtgtcacaatgtggctttgttgcacagttgacccttgaacagtgcaagtgttagaagcactgacacctcgtgcacttgaagacttgcccataacttttgactcccccagaacttaactactaatggcctactgatgactgaagccatactgataaaa

SEQ ID NO: 865276 - DNA, 599 bp, Homo sapiens
gtcttcatcctcatcatcttcatgctgagtagattgaggagatggaaaaagaggagggtttggttctgctgcctcggggaggcataggcagagctggtggaggaagtggaaaaggaggcagaggcaggcatactcagtgaagctttacaaagtatatcataatttctgtctgacttttttgctttttcatttctctaaaaatgtttytacataacaccagtccttcttctacagtttactttagcttcagtgcccatatcgtagaagggttcagttgtaaaagaggtcaaaagccgtattgtgtaatgcgaacccttcttccaggttgtctaatgtcaacttgttttctggcactgcttcttcttcatcttcttcatgatctggtacttgtttggaaggactcatctccatgaaatcatgaatacttcaagttatcttttgttaattcctctggtgtggtgtctatttgctcttgaatttctccaagatccatatcttgaaacccttcacctcttcccatttttttttttttttttttgccaaatccacaaattatttcacaatttccttgactggctctctcattaatcatgtaaagc

SEQ ID NO: 865277 - DNA, 677 bp, Homo sapiens
tcagcttaccctctgactacagtgacctcagacaaaatacgcttcctggccctgtccagttctgactttttataaacaagcacttatccaagttaaagggatattttcaatatctactgagtccacagatattaaatatctcctctcttctttaaaattgtggcattatctttagaatataaaaggaaaataacacacactctccttgaaaatagagagcctaaacactctgcaggaaatatttaaagctatagtttttgtttgtttgtcttgaatgcaagtggcctggactttgacttgctttgagtctttgaccttcatgacttcagtacagttcaaccctgacagttttgaagtaggtatgtgcctagatctgccctastccctgctggaatgttgaagaagcaaaggtccaggccctcagagcacttgccacgtacttgccaacagatacggggcggagacttgagtcaacgtaagagcaagtgtgtgccgggtgatccgacactgcagagcgccagctagaccctaagcgtgtgctaggggctgaccaagccgttctttcctcaaaaacttggtggggagggtatttttaaaatcacacaaatatttaagtacagattatgatgactgcctcaaagcagtggctcttcagcttcatcaagcttcagagtcca

SEQ ID NO: 865278 - DNA, 577 bp, Homo sapiens
ttagactcaagtctcttctgtatgtgttataactgcccattccataagatacagggcagtgaatttgtgagccttgaaaatatttactttagaaatgagaagtatgacttttcaacgttgtgtcatcaacttctgtaaattttccagacctataaatacttgcagaaaaaaaatgaaaggagaaggcaacttgayttagcagttgggtcagttagcaatgcctatggcaagctgtagtaattcccttacatagatttgtaagactcatttctatgatttaaatgaaggcatacacttaacctctttagggtgtgaaacagcttttacaaaaagagacaaacttaagaaacagtgtggccctccaagagtgttcattttccatatcataccatttgtaataagctattctggctgggatttacttgcaagcattggcttttaagaagagatggtttcacacatcaaattattcacttggaggcactttctgggttgaaggaatggaatggagagtgcggcagtgagtagatctctcagtgacggtgatgtgcctctcccagaagaaatttcaaaatgc

SEQ ID NO: 865279 - DNA, 619 bp, Homo sapiens
aatagttgaatatagttatccaggaaaacaaaggattcattataacgatttagtaccaaggaaagccatgaggctccctacggaaagtgggctttctgttactttaaacgtgtactttagcttactagtaaattgtagccagttgtagaactcatacattggaatgactagacatgtgaatagtaaaattagggataggggccttactggtaatgtaacggtaaccttaagcaaaaagcaagcaaggaaataaaatatctagaaaaataaagaacaaaataatgcattataaagcatgataatccatagtcttttcccgtggatcctcagtagaagctggctatatcttatctaatcttttgtcatctttagtccaaagattttaatggaagttatctcttctgaaaattgactgtttctggagggatctcaagaattctcagctggagatctstggtaagggccatcttccagtgatccaggcaaggtttttgagagtcatacatacagggactaacttcatggagttatacgactctcctagtagtgaacagtatccaattgggttatttctaaaagtttttaggtcatacaaggattgcttggaagaatgttgaga

SEQ ID NO: 865280 - DNA, 655 bp, Homo sapiens
aattcgcttgaaaaataaaacagtagagattacagagggagagcttgttaagcagtaaagatgatgtttactttttaaaaagtgttcatcttgaataaattacacaaagagctaaaccagaggtcatgtgctattgatcagtgggccttacccagctccaaatgtgtatcattttgctcatccattgtttgaaatagggcaaatttaaaattcaaaagatttcacataaaaatctaagtttctgaaacttctttaaaaatgtggaaatctggtgaagctttgtccacatggtgacacccttgaggagaaagcagagaaaggcagtgaagattgtaggaactggagtcaaactgcttctgtctaaagccagctctacctccatgcacagaayacttcctaaaatgagacatgcccattcacatcaaaataatagcaaatgctacttttagtgatagcattatagtttttaagcatttaaaaattattttaaaatattgctttttccattttatttcttctttttaaaatgtcttttggatgttttataagatgaattagttagaacatattgtacatatacacatagatatatgatctccacacaataaacatatctttaagtctccattttatcagttaaaaagtatgcatgttt

SEQ ID NO: 865281 - DNA, 655 bp, Homo sapiens
aattcgcttgaaaaataaaacagtagagattacagagggagagcttgttaagcagtaaagatgatgtttactttttaaaaagtgttcatcttgaataaattacacaaagagctaaaccagaggtcatgtgctattgatcagtgggccttacccagctccaaatgtgtatcattttgctcatccattgtttgaaatagggcaaatttaaaattcaaaagatttcacataaaaatctaagtttctgaaacttctttaaaaatgtggaaatctggtgaagctttgtccacatggtgacacccttgaggagaaagcagagaaaggcagtgaagattgtaggaactggagtcaaactgcttctgtctaaagccagctctacctccatgcacagaatacttcctaaaatgagacatgcccattcacatcaaaataatagcaaatgctacttttagtgatagcattatagtytttaagcatttaaaaattattttaaaatattgctttttccattttatttcttctttttaaaatgtcttttggatgttttataagatgaattagttagaacatattgtacatatacacatagatatatgatctccacacaataaacatatctttaagtctccattttatcagttaaaaagtatgcatgttt

SEQ ID NO: 865282 - DNA, 640 bp, Homo sapiens
aaaatatatcagagccaaatgatggagtggcagtaaaataccaatactgaaatgctcaaccaagaggcagtgtaacctgtacatgtgcagacaagaaaccaacatagctttgatgagagttattcgaagtactgccatttcttcatggtaaagaaatcaagcctttcatttagtcatatttagaaaccagctgaaattctctgtgtccattctagacatttaaatgaaaaaatgtggaaatgcttgtatagcaaggagggccacacaatcaggcttgatttctgacaggaagaaaaactacatggtatggctgacttcaaaatgctcatttttatgcatttaatgttctaaaactgagatgtgttttacaatcagtgtattcattaaatggggtagtatttttccctttccattcaaaatagtaccttaggattgaaaagtacataataatttacttttgaatttactttttagrtgacacagattacaaaaaaaattataaagcataattttaagtcgtaataaaaagaaaattgtttgcaactactatttgtttttgaaaagctaagcaagtctgtcatgatttttttaacacataaatcaagatttaaatatcaaaatatagagtaacaaagtaaag

SEQ ID NO: 865283 - DNA, 539 bp, Homo sapiens
aggataagcaaataatcagagcccagtagaataaaactgatttagcacaggtttttaaaaaattcacgcatcatcttcaaaagtaggttacttacagctctgggatttaacaaaactatttacccttcttttctaattaattttcaaagctctcttcactaaattttcttacccttttatctcttatcatgatgcctctcattcattaacaccgtgttgcattctatctactcctgttgagagggaacaaaaggagaatcttcgtgctgaaacactggagaagcaagaagagaggaagcatttcttcctgcaggacaggactgagacagttggaaatatttcatattgttttgggttcctcagatccttsccaatgattctctggtcaattcatacaaggtagttggatgtgatccctcccctctgatagcaaaaaaactgagtcagaatggcaagtatggaccaagtacatgggctctgagccagtgatggcaatgccaggttatcttggctatatgaagttacccctgcctttcttt

SEQ ID NO: 865284 - DNA, 629 bp, Homo sapiens
gcataaacatttaattcatatagacaagcaatctcttttttgattccttgttcaactggaaccttgatcatttgattttcttagtagtttgcctacagggaaaaagtagatgggtcaaattaatgctagtattaggttcacttggcaattgtgtttttcattgtgaattagttacttttctggtctttttgtcagttatttggttgtataattagcataagtgagtgtcctcaaacataaccaattccagaacactggcaaattcaaattctgcctcttaggctaataaccagtctctggtctcaatgagttcaacaaggcaaatattacttggtaagatatagtagtagtcatttcttagttccatcacttaccttactttttaaacattgatatcaaatataaaaagagttgtgttaaagtgataygtgtttcttttcctgatctggctaatgggatagtgcgtacaataccaggttaattgatcaaactctgtcagcaggggacggggataagtgacttaaaggagctgacctactaggatcagtcccatatttaaaataatgttttaaaattttaaaaggtttttatttctagctcaatgaaaatattgaaatctattgctattt

SEQ ID NO: 865285 - DNA, 622 bp, Homo sapiens
tacattcaaactcaagttcaaaacaaccaggaaataatattttacctattagtgatggagagaagagtatataacaagctaagaaaataagtaaaaccagttatagtctagtcagcatttttgggtccattctcaggttttacagccaagcaagaatgggttgttttgaaggagaccagaaaaagrttgagtttatttgtttgtttgttttgtttttttttttttttgtaaattggttataattcagtgactttgctgaaactaacaaagtcttctcgcagaggttagcaccctgctgtgaacagtcattttcttctcaaatattatttcatggcataatttgtgattctcaaattttatgtattttaatggaagttacaaactgtgatagttccacataatttttcatgctacttattttttatggctatccttatgtcaaaagggaaatgaaaataaacttaggtttctaatataacagttataaatgaagtgcaatattttaaatccagacatttcttgaagtcacgtgagggaaagatgccagactcaccaatccctgcatctggaagctgcaggagagagattctcaggcacaaagaagtttagcgtacacatgacc

SEQ ID NO: 865286 - DNA, 601 bp, Homo sapiens
gctctgggttgttcactcaaacgtggcacacacttagagatggttattttacccttatttgcttcaacatttgattaaagctggtcaccctctaatctgctgctgctcttaagtgtcagaaccctgttcttgttcatttctgtgtttctcacctcagcacartaactggctcgtattctgctcattatttgtactgaatgtatgaagctattgtaattattaaacataagtactcaaaatataattttttaaattatactaattctgattataattacatctctagcaaaaaaaaaaaagaagaaaacattaggggttcatttagttttaaatatatgctatatcacgtgggtaacaaaaaaagaaaaaggattaagaaagtagaccagagacacagtgcctgataagttaacttaccagcaaattttcctgttttcttcgcattttccttgcttgacaactttttcaaaattataaagcaaatgagcatttcttgtaagaagttaaaccgtacaatatacaattgtctccccttctgtattagtctattttcacaatgctgataaagacatacctgagactgggcaatttacaaaagaaa

SEQ ID NO: 865287 - DNA, 606 bp, Homo sapiens
tggcctgcttattatttctatctttggctgtataatgactataggttatgtccatcctgagatgacaaaatgtcctctacttcttatgtagtctgttttttttaatttgtcttgaggatctcatgcttagtagtcatcaaaggtcatttttttatactgatgacaatccaagtcattaatcaaatacattgtcaacctaaacataaacaaagtatgtataacttcagatgaaaggaggaactcataaaaagtcccaatttatccctaaattcaacgaacatttattgggcattgccacatgatggggaatatcactatgcctgcaactaggaataagaagagataytgtaaaaccctcctaaaatctaaaaatgctcaatagtttgaaagactcatcttaaaaattattttctcattcacaggcaggcaccagccatttttcaaatcttgattaacgttaggtcatttaaatatgaaccctttaaatctaggagacagtatatggtagttgaaagaattcattcatttaacgagcattttattgagtaccttctaggttctgagtacatgaatgaatgagctccctacttagggaaattgttttca

SEQ ID NO: 865288 - DNA, 540 bp, Homo sapiens
gcagggtatgagatgggaatgagagtgtggactgagttgctgtcaaaggggggtgtcggggccactgaggatgggctagagatcactgatccccaacttgaccatatagggcctctcggtttttccttacttttatatttgaaagattttttttctacctgataagtattgattaattcatttttctttttaaattaatggcattcataattgtcaatcagaaattgtgataaacatgagatgtctgatgttaccatactgaatcaaaataattgcagccaacagtaaagaaagttgccattttacttgacatgtgaagctttcttgtgtgtgaataactaaatgtttacatacacgttaaccttttggaaatactgaaaattgaactgatctctsttattacattcacagacttcctaggaatccagagacccccaagtggggagcaactggatttagcaattgccgtaagttcccatctgcttctaacattctgtgatttgtgaacacagcattacaactaataaaatcgaccagtta

SEQ ID NO: 865289 - DNA, 582 bp, Homo sapiens
tggggataattggacaaattttttatattcgaactacttttaagaaaagtaactattgggctatatgtgtctaactgatatctaactcagacctgttaataagcaaatccttcatgccctttccaagattatcagtcaaatgatctaattaatgttaaaatgggkaacaaataatattttccatgtcaattcactttcaaattagcatattatgtactatgaacaattgccaagtctaagtagtgggtatacacatgtttgttgtaccagtctttggtttttttttttgttttttttttttttgagagagtctcgctctcttacccaggctggagtgcagtggcacaatctcagctcactgcagcctccacctcctgggttcaagtcattctcgtgcctcagcctcctgggtatctgtgactataggggtgtgccaccatgtgtggctaatgaatgtatttttagtagagacagggtttcaccatgttgaccaggctggtcttgaactcctggcctcaagtgatccacctgcctcagcctcccaaaatgctgggattacaggcatgagccaccatacccacc

SEQ ID NO: 865290 - DNA, 582 bp, Homo sapiens
tggggataattggacaaattttttatattcgaactacttttaagaaaagtaactattgggctatatgtgtctaactgatatctaactcagacctgttaataagcaaatccttcatgccctttccaagattatcagtcaaatgatctaattaatgttaaaatgggtaacaaataatattttccatgtcaattcactttcaaattagyatattatgtactatgaacaattgccaagtctaagtagtgggtatacacatgtttgttgtaccagtctttggtttttttttttgttttttttttttttgagagagtctcgctctcttacccaggctggagtgcagtggcacaatctcagctcactgcagcctccacctcctgggttcaagtcattctcgtgcctcagcctcctgggtatctgtgactataggggtgtgccaccatgtgtggctaatgaatgtatttttagtagagacagggtttcaccatgttgaccaggctggtcttgaactcctggcctcaagtgatccacctgcctcagcctcccaaaatgctgggattacaggcatgagccaccatacccacc

SEQ ID NO: 865291 - DNA, 579 bp, Homo sapiens
cagaacaaatacagaatttatattgtgaattactccttcttttactaaaaaaaagtctttttatcgagttgttggcatgacgtgattactaactagtagttatatatatatttatatatatataaaattactcatatatatgcatatatatatatacatatgagattatttgaagtagaaagtaggttttctaggaaaaaataaaaaataaaaccaaagaaaaatagagttaataayctttacaagagtaatatgatatttaattatataaatgacatattattcatatgttttatgtcatacagtattaatgtataatattatacataataatacatttttataaagacccaaatatttttcctatatggtctataagcttagaaataacaattgcttttattatatcaaattacaagctagctctaagaagtcactcttactaattagggttgaataacaaagacaattccaattgaaaaagggcacggtttctaatgagagatcagtaaatagttgttgaataaatgtataaaaagttatgaaagcttccactttttttctaagagcatgtagctt

SEQ ID NO: 865292 - DNA, 579 bp, Homo sapiens
cagaacaaatacagaatttatattgtgaattactccttcttttactaaaaaaaagtctttttatcgagttgttggcatgacgtgattactaactagtagttatatatatatttatatatatataaaattactcatatatatgcatatatatatatacatatgagattatttgaagtagaaagtaggttttctaggaaaaaataaaaaataaaaccaaagaaaaatagagttaataatctttacaagagtaatatgatatttaattatrtaaatgacatattattcatatgttttatgtcatacagtattaatgtataatattatacataataatacatttttataaagacccaaatatttttcctatatggtctataagcttagaaataacaattgcttttattatatcaaattacaagctagctctaagaagtcactcttactaattagggttgaataacaaagacaattccaattgaaaaagggcacggtttctaatgagagatcagtaaatagttgttgaataaatgtataaaaagttatgaaagcttccactttttttctaagagcatgtagctt

SEQ ID NO: 865293 - DNA, 579 bp, Homo sapiens
cagaacaaatacagaatttatattgtgaattactccttcttttactaaaaaaaagtctttttatcgagttgttggcatgacgtgattactaactagtagttatatatatatttatatatatataaaattactcatatatatgcatatatatatatacatatgagattatttgaagtagaaagtaggttttctaggaaaaaataaaaaataaaaccaaagaaaaatagagttaataatctttacaagagtaatatgatatttaattatataaatgacataytattcatatgttttatgtcatacagtattaatgtataatattatacataataatacatttttataaagacccaaatatttttcctatatggtctataagcttagaaataacaattgcttttattatatcaaattacaagctagctctaagaagtcactcttactaattagggttgaataacaaagacaattccaattgaaaaagggcacggtttctaatgagagatcagtaaatagttgttgaataaatgtataaaaagttatgaaagcttccactttttttctaagagcatgtagctt

SEQ ID NO: 865294 - DNA, 608 bp, Homo sapiens
ctttctctctggctgcccttaacattttttccttcatttcaactttggtgaatctgacaattatgtgtcttggagttgctcttcttgaggagtatctttgtggcattctctgtatttcctgaatctgaatgttggcctgccttgctaaaatggrgaagttctcctggataatatcctgcagagtgttttccaacttggttccattctccccgtcacttttaggtacaccagtcagatgcagacttggtcttttcacatagtctcatatttcttggaggctttgttcatttctttttattcttttttctctaaactgcatgaatccaggagctcattttttgaaaggatcaacaaaattgacagaccactagcaagactaataaaggaaaaaaagagaagaatcaaatagatgcaataaaaaatgataaaggggatatcaccactgatcccatagaaatacaaactaccatcagagaatactataaacacctctacaaaaataaactagaaaatctagaagaaatggaaaaattcctcgacatatacactctcccaagactaaaccagcgagaagttgaatctctgaatagaccaataacaggatctga

SEQ ID NO: 865295 - DNA, 582 bp, Homo sapiens
gacttcttgatctcacatttctagtcttcagaactgtaaaataatgcatatctgttgtgtaaaccactcagtttgtagtatttgtgatacaatagctctagcaaatacatatagccttttataaaattgtattttagaaggcatatggttttcctcagttaaatgtagaaaaactttattttcatatataaaattaggtttgaggttatcagtgaaataaatacatctctaatttccacagtcttttttagtgataccaaaaactaaaactgccaagcaaaattctttgtagttcagcttttctgagggtcctccctgtcttccyactcattactcttttgtaacctgttctgatctttatttcgctatcttaatttcaggtgcccagtactacattgtatccttaatttaaaaagaaatcacaacataaaccctcaatttgtcaacaaattttacaagagcatatattagaatgggtgttcaattgtgtttcctctcttaaaatttaggacttaaaaattatttttacctctttgtggaaaggaaaactttgttcccacttaatgtagattcagttgtgct

SEQ ID NO: 865296 - DNA, 582 bp, Homo sapiens
gacttcttgatctcacatttctagtcttcagaactgtaaaataatgcatatctgttgtgtaaaccactcagtttgtagtatttgtgatacaatagctctagcaaatacatatagccttttataaaattgtattttagaaggcatatggttttcctcagttaaatgtagaaaaactttattttcatatataaaattaggtttgaggttatcagtgaaataaatacatctctaatttccacagtcttttttagtgataccaaaaactaaaactgccaagcaaaattctttgtagttcagcttttctgagggtcctccctgtcttcccactcattactcttttgtaacctgttctgatctttatttcgctatcttaatttcaggtgcccagtacyacattgtatccttaatttaaaaagaaatcacaacataaaccctcaatttgtcaacaaattttacaagagcatatattagaatgggtgttcaattgtgtttcctctcttaaaatttaggacttaaaaattatttttacctctttgtggaaaggaaaactttgttcccacttaatgtagattcagttgtgct

SEQ ID NO: 865297 - DNA, 580 bp, Homo sapiens
acctctaaccaaggagatgaaagatctctataaggagaactacaaatcacagtttaaagagatcatagatgacacaaacaaatggaaaagcattccatgctcatgggttgaaagaattaatatcattaaaatggccatactgctcaaagcaatctacagactcartgctattcctatcaagcccagcaatgttatctttcacagaaatagaaaaactattctaaattcatatggaaccaaaaaagagcctgaacagctagagctttcctaacaaaaggaacaaagatgggggcatcacattatctgacttcaaactatgctataacacataatcaaaacagcatggtactggtacaaaaacaaagacacatagacaaatggaacagaatagagaacccagaaataaagccacacagctacagtcatctgatctttaacaaacttgacaaaaacaagcaatggagaaaggacttcctattgaataaatgatgttaggatagctggctagccatatgcagaagaattaaactgaaccactatctctcactatatacaaaattcaactgaagatggattaaat

SEQ ID NO: 865298 - DNA, 654 bp, Homo sapiens
gaatttccaattggttcttctttctttggcaattagcagaatttatctaataaataagaagtcccagactccaagtggctccaggatagactaattcattcacttacaaatacagaagcatcagtgatgtaaagcagaaatgtgagccaatttctaaaaaaggcatcagtaggggaaaggtatactggaaatttacttgtccaggagactacactaggccagatcatggactctctggtttcattttyagaaatattttttgtaaattttattttttaaaattatactgtaaaatttacctttttggtgtgaagttctctgaattttaacacatacatagatttgtgtaatgaacactgcaaccaggatttaaaaccttaccaccatgtaagtctctttaccctcctccctatatgttagagttggcatgtattacatctccttatgttgaaaatcccagtggacaatggtataatttttgcacccaatcatcaaatataccatacaggaccaatgggagaagaatctatttatttactcagatggaaaccaacctgtgaaaatgctgagatggtggtggtagataggggctggaaggcagtgatttgctatgtcgtagtgctacaactgtaaaacctagatcccagatattga

SEQ ID NO: 865299 - DNA, 685 bp, Homo sapiens
gaaacgattctgtgatttgaaagaaacaataaaacaacttttggagatgacatgtttacatggtagatgatccctttgtaaaaaaaaaaaaaagatagtattgagaatgcataagtttgtatattgatggttcagcagcaatgataggaaggtgtaaaagctttacacaataagttcaatttgaaaactctaaaattgaagtartacatttttctattcacagacactcttttatatgtaaaggtttgcctggagttctggaatccataataaaaatgttgtcaaaatgatacatctattaaaattcaagcctctacactccaattctatttttagttttatttaaagcaatgggagcagaacacaacattccactgttttatactgaagtatgctgattgtaaaaagaaatttatcaagagtttgtaaattaaaagtattatgtaaggaagtcactatatgcagtccatgcttaagaattagggggttatggttgacctccataaaggcagagtatatacataaattatttaaatttatctacatggactattctctttaattattcaatcattttcttattagtatggattcaggttacttactttacactttgagtaagtatccataatactttatgggtagctcaaatgggtccatcttggctatggagagctcttttact

SEQ ID NO: 865300 - DNA, 637 bp, Homo sapiens
aagtatgtatgtatgtatgtgtttatttatccatctatatttaataactgaaagacttgaaacaagatttccatgctcattttgagatgagttaaagacatggtacttgaaatttatttagtttaaaaatgtcaagttcattaaaatatgagggccactggtgagcagcaggtctacataactattgaaaacctctatccttttcagtgttaatgagagtatgggcttttaaaacaacagcaggtaaactagcttaagtggctagaaacaaatgctttgtttgacactgtgatatttctaattgttctatttattgtgctacacattagccagattatttgagtgggcttgttagtaacaggytcatgcacaagcacactgagtgtatgaagctgttagcattgcacagatcatccacatgcagcaaacactgcaggaggtactcacacattgctttccagctttaattggaattttatattaagagttccctgtgaagggaatatttagtctcaattggacagacaacagaaaaccacagtaatgcaatttttatccttactgtcaattcagctcaaatgtatctatttatttgtttattccacaatattgctataaaattaaaaataatctttaa

SEQ ID NO: 865301 - DNA, 603 bp, Homo sapiens
tttgacatagtctacccaaatgagaagaaaccagaaaaacaattctggtaatatgacaaaacgaggctctttaacgcccccagaggatcacaatagcccaccaacaatgaatccaaccaagaagaaatttctgaatttccagaaaaagaattcagaaggttgattattaaccaattaaggaggcaccagagrgaggtgaagtccaacttaaagaaatcaaaaacatgatacaggatatgaatggaaaaatctctagtgaaatagatagcatcgattaaaaaataacaatttcaggaaatcaaggacacacttagagaaattaaaaacgccctggaaagtctcagcaatagaatcaaacaagtagaagaaatcacttcagagcttgaagataaggcttttgaattaacccaatccatcaaagacaaagagaaaataattttaaaaacatgaacaaagactccaagaagtttgtgattatgttaaatgatcaaacctaagaataattggtattcctgaggaagaagagaaatctaaaagaaatctaaaagagaaatctaaaagagaaatatacttgagggaataatcgaggaaacttccttggcc

SEQ ID NO: 865302 - DNA, 691 bp, Homo sapiens
agcacatcaaatagataattcaccatgatcaggtgtgttttatcctagggatgcaatgatagttcagcatacacaaatcaataaatgtgattcactacgtaagtagaagtaaaacaaaaaccatgtgatcatctcaatagatgcaggaaaaacatttgagaaaattcagcatcccttcatgataaaaaccttcaacaaaggcatcaaaggaacatatctgaaagtaataaaagtcacatatgacaaacccacagccagaatcatattaaatggggaaaagcagaaaacatttctcctaagaactggaacragagaaggatgccactttcaccattcctattcaatatagtactagaagtcctagccagagaaatcattcaagataaagaaaaaaaaaaaggcatctaaattaagaaagaggaaatcaaattatttctgttcactagtaagataatcttatacctagaaaattttaaagactctgtcagaggacacccagatttgataaatgactttagtaaagttttaggatacaaagtcaaggtacaaaaatcagtagcatttctatacaccaacaaggtgaaagctgtgaactaaactaagaactcaataccatttacaatagccacacaaaataataaaatacctaggaatacgtttaaccaaggaggtgaaagagctctacaagtgg

SEQ ID NO: 865303 - DNA, 695 bp, Homo sapiens
aaacaaaaaaaattcaaaagataaatgaaacgataaacctgttctttgaaaagataaaattgttagaccattagcaagatggaccaagaaggcagaagatccaaataagctcaattacaaatgaaatgggagatattacaacccataacacagaattgcaaaagataattcaaggctactatgaacacctttatgcacataacctagaaaaccaagagggggtggataaatttctggaaatatacaaccttcctagattgagccagcaggaaatagaaactccaaacagaccaataacaagcagcaagattgaaatggtaattagaaagttactaaaaaaaaaaagttcaggaccagaaggattcacagctgacatctatcagacattcaaaaagaattggtaccaatgctattgatactattccaaaagatagagaaagagggaattctccctaaatcattctgtgaagccagtatcaccctaatagcaaaaccaggaaaggasgtagcaacaacaacaacaacaaaaccaccaccaccaacaacaacgaaaaacaactatacaccaatatccctgatgaacatagatgcaaaaatcttcaataaaatactagctgactgaatccaacagcatatcaaaaagataatccaccatgatcaattgggtttcataccagggatgcagggatggttta

SEQ ID NO: 865304 - DNA, 695 bp, Homo sapiens
aaacaaaaaaaattcaaaagataaatgaaacgataaacctgttctttgaaaagataaaattgttagaccattagcaagatggaccaagaaggcagaagatccaaataagctcaattacaaatgaaatgggagatattacaacccataacacagaattgcaaaagataattcaaggctactatgaacacctttatgcacataacctagaaaaccaagagggggtggataaatttctggaaatatacaaccttcctagattgagccagcaggaaatagaaactccaaacagaccaataacaagcagcaagattgaaatggtaattagaaagttactaaaaaaaaaaagttcaggaccagaaggattcacagctgacatctatcagacattcaaaaagaattggtaccaatgctattgatactattccaaaagatagagaaagagggaattctccctaaatcattctgtgaagccagtatcaccctaatagcaaaaccaggaaaggacgtagcaacaacaacaacaacaaaaccaccaccamcaacaacaacgaaaaacaactatacaccaatatccctgatgaacatagatgcaaaaatcttcaataaaatactagctgactgaatccaacagcatatcaaaaagataatccaccatgatcaattgggtttcataccagggatgcagggatggttta

SEQ ID NO: 865305 - DNA, 637 bp, Homo sapiens
ccaagctgccatctgtgacagaagcaagtcataattcttcaaaatagtacttcaaattgaaatggttggactatcttgactttttaacataataagtgaagtcacacacaactgaggggagagtgtgggcatgagttagtgattagtaartagaatactaagtaataaggaaaaaagaaaattattaactctgaggaaaaaatttattaagcaataatgagaaattgtcatagtttcttacatgcctcattagtgaatatcacttacaaggcaataatgatatacattttgaatactgagctaaaaattatgatacattgagtatgcaattaggggtggggggtgaaagaatgaggtgtcaatagacaatgactaaaaattttaaagttaagaagtaacaacataaatatatcatttagaaatgttgaatacatcaggaatattttcatatttctgcatggtcaaggctttctgaacaatggaaattgacatggataaagataatgtcctttttttccctgccttctccatttgctctttacaccctaactacttgtctgcttcactgtgaagccatctgctgccactcaaagggtaacagggtaacaaaacctttcttgtctcccccagagcctaa

SEQ ID NO: 865306 - DNA, 608 bp, Homo sapiens
tgctgattacaattgggtttcctgcaactgtggctgcagaagaactgaagcctccattacaaaggcagaaaactgggggaatgcacatgaattcaaggtagaagggaaaagcaagtggagtgtgtagacttggatgaaaaggattcacaattttccatatagttaaacacaactttgcatatcagtcagtaaagggagtcaaatatatggtttggaaaactctggattattgcgaagcaagctttattatccagaatcagctcaagaaggtagtacctactgtagaagacaaggtttccttctgataaaatgatattttctgtaccaacccttgtctcttgcagagttgacaaatagcaaataagagtagagtaatacaaattataataagaaatttacatatcattgtttttctaggtaaaaaggcaaaaagctcacaccttaaayggcagccatatttttgactgaaaatgctgtcttagcgatgtcatatacatcgcaatgataatcatcagcatccaactttgaaacatccacttggcatcctattagtggcagtatgaatgatcagggcacggttccctatggcagtattaatgatgcagtgg

SEQ ID NO: 865307 - DNA, 585 bp, Homo sapiens
gaaaactaacaaacagaaaggaatagcatcaacatcaacaaaaaggatatccacaccaaaaccccatctgtaggtcaccatcacatagaccaaaggtagataaaaccacaaagatggggagaaaccagagcagaaaaaccgaaaattctaaaaatcagagcacctcttctcctccaaaagattgcagctccttgccagcaacagaacaaagctggacagagaatgacattgacaagctgacagaagtaggcttcagaaggttgataataacaaacttctgagctaaaggagcatgttctaacacattgcaaggaagttaaaaaccttgaaaaaaggctagacgaatggctaactataataaacagtgtggagaaaaccttgaatgacctgatggagctgaaaaccatggcacgygaactttgtgatgcatgcacaatcttcaacagctgattcgatcaagtagaagaaaggttattagtgactgaagatcaaattaatgaaataaagtgagatgacaaggttagagaaaagagagtaaaaagaaatgaagaaagcctccaagaaacatgggactatgtgaaaaga

SEQ ID NO: 865308 - DNA, 655 bp, Homo sapiens
atttcacaaaaatggaagagaaaaaaattgacaaacatacaatatttggatgatagtagcagagaatatgctagacttgaagaaagatgtaacaccttggactaaacatggactctgggctgggtgcagtggcttatacctgtaatctcagcactttaagaggctgaggctaagargctgaggcaggtggatagcttgagcccaggagcttgagaccagcctgggcaacatggcgaaaccccaaacccaccaaaaatacaaaaattagccaggtgcgctggtgcattcttgtagtcccatctacccaggaagctgaggcgggaggatcgcttgagcctgggaggtcaaggctgcagtgagccgtaatcatgccactgcactccagcctggccaacagagcaaggccctgtctcaaaaatataaaagaaattaaaacaaatgaatgtggactctgaaaaaaaaaaacatgtctacactaaaacttatagatgaatatatatagcagcattattcataatagccaaaaactaaaacaacctaaatttccatgacctaggaaacagataaacaaattatagtacaatcctacaatggaatactgctcaacaataaaaaagaaaaaattacttatatatacagcaacaaagatgaacct

SEQ ID NO: 865309 - DNA, 565 bp, Homo sapiens
gagaatgttttggatatgaaagttcacaaaagttaagaattacttctacatttcaggcttgtataactgaatgcatagacgtgccatttcttaaaatggagaatactgggtgtaaataagttgtaggaaaaagatcttgagttcagttttgaacatgataatctggagatgcatctgagattaccaagtggctatttcaaataaataatggtacataagtcacyggaataacaagttcctcttagctagagaattgtatttttaaacgattatgtacagttgttaattttaggcttacacagttgaacatccactctgttcaagagtagagcaataattttaaagttattctctggtctcagtctagtgaggagatagctattaatcaaatattcacacaaataagtgtaaagacctgtgataagaactgtgaagcagtccattggatttagtggggttaatgttattgatgatcacccttcacaaattcctcccccgatgatcactgaaactctccaaaagcattggtgtaggctgaagtaaaggtagtaggtgaagaggtggt

SEQ ID NO: 865310 - DNA, 608 bp, Homo sapiens
acaaactcatagaaagaacacagctgagagatagaggagatacctacaataatagataggattgctgataagttgtaaagagataggctagaaaacctaattgacgagtttggtcttagatgggaggagaggtgctcctgtatttagcaggatagaaggaaattagtatgggtgaaggtgtcaggaggcttgtagtatcctttcctttctagtgagccttttgagagtgttatgtgaagacctctattttttatatttttattttgaaataatggtacaatcacacagtagttaccaaaaaatctttttactgtgctttatattcttttaattattttctattgatgcatgataggtgtaygcagtttcagagtgcatgtaataagttaatacattcatataatttgtaaatatcaaatcaatgtatttacagtatccatcatcttaaatatgtattttctttatgctgaaccatttaaacgattctcttctattttaaaatacgtaataggttattataaactgtagttatagtactgattaatccaacactaggtcttatttcttccatcagaccttatatttgcactacaaatcttctatcttca

SEQ ID NO: 865311 - DNA, 643 bp, Homo sapiens
atattaagaaagtcataaggaagagaaaatacacttacaatgctgtactgtatttattgatatctaagtttacataatttgtttacaagatgaattgcctaaaatggtgggaaactgcagctgcagacctatctagggtacatatcaagtaattcaacttgttttttaatgtcattttctctgcytcttgggagcacttccagcaacactagtggcacttcatatgagtcccatggtgttatttaaggtttatggtattacactaaacacgatgaaaaacaggcaatagccatgagagataactttttactgtgacacgcaatttactgaagagacaaactgctccgcacaagtgtttagcatcacagggcattttaagtagatactcccgacacttgagctcagggcaatagcaatgggaggtggctgtgaaattattacagtaatatagtatttactatagctaatctatgcagttatgatttaatactgcatctttacatttgtttacattactcttgactgtgaatgtcactgtgtatggtctgtaagtgtttgtgggggtaatttttaaataatggatttatgtatgttttatggtagtaaatgataaaacagacaaatatctacatatattttatgc

SEQ ID NO: 865312 - DNA, 620 bp, Homo sapiens
tcaaaataaagggatggaggaagatctaccaagcaaatggaaaacaaaggaagacaggggttgcaatcctagtctctgataaaacagcctttaagccaacaaagatcaaaagagacaaagaaggccattacataacggtaaagggatcaattcaacaagaagagctaactaacctaaatatatatgcacccaatacaggagcacccagattcataaagcaagtcctgagtgacctacaaagaaacttagactcccacacattattaatgggagactttaacgccccactgtcaacattagacagatcaatgagacagaaagttaacaaggatatccaggaattgaactaagctctgcgccaagcagacataatagacacctacagaactctccaccccaaatcaagagaatatacattcttctcagcaccacactgcmcttattccaaaattgaccacatagttggaagtaaagcactcctcaaaaaatgtaaaacaacagaaattataagaaactgtctctcagaccagagtgcaaacaagctagaactcaggattaagaaactcactcaaaactgctcaagtacatggaaactgaacaacctgctcctaaatgactac

SEQ ID NO: 865313 - DNA, 642 bp, Homo sapiens
aacaactaatttaaaaatctttatctatattaacctgaataacttatctctaaacatttactctaaaactttatgagtaggaaggagagtctgcaagtaatggttcctttgaccactaagcatcattgatatatttagttttttatcatgttgatacatttagtaaactttcaataattaccaaagaattctacctcatgtatagtcacatacaagcagtagcaaggctgacaaaaatcaaaacctctcataatttctccttgtagcaaatttgctgatactaagaagtgctcctaatagtaaaagattactctacataaagttgtcgcatttctttttttytttttttttttttttttagagacagggtcttgctatgttgtccaggctggtctctgactcctgggatcaagcgatactcctgggattacaggcacaaacccactgttcctggcttgctgcatttctttaaggggcagaagggcagggtggaataatttgaagaatagcttgtttatatctaatagttcttttcaagtttctggaattgaacaggtatctttaagtgaggataagaaaataataattaagataaccctgatttgtcattcaaatttccctatgtggtcgatgaccccactt

SEQ ID NO: 865314 - DNA, 618 bp, Homo sapiens
tcctgacctcgtgatctgcctaccttggcctcccaaagtgctgggattacaggcgtgagccaccacacccggccccttcaaatacattttaaacatataaaattattgtatattacctatgactgcatgcatatgtaagtagtgaaagtatgtaagacatgcgtagggacaatgtatgactatttcagaagagtggccacatttagtagaagaagcagatggtagtgaggcattagccgtttttataatgtttctgtttttgttttctaaaggggctttaaaccatatgtagcraagtattaatatgtgtttaggtatttttgtacatgagtacttgcattaacagtagtatatcccatacttttctacacgtttgttttatctaaataaaagtgaattaaaaattaaagccttaacccactttttctgctaaaagcttcctcatcaggcagaatctcaaatcattcacagctaatatttacatttagtagttgagaaatatttttccatctggcattgaggtaaggatgctatttttaagacaatacattattgtgtattactattttataaaagataacacatatgccatgaagatagtatgcaagggactgagaa

SEQ ID NO: 865315 - DNA, 594 bp, Homo sapiens
gtgccagttttcaaagggaatgcttccagcttttgcccattcagtatgatattggctatgggtttttcataaatggctcttattatattgaggcatgttccttcattatctagtttattgagtttttaacataaggggatgctgaattttatcaaaggccttttctctattgagataataatgtggcttttgtctttagttctgtttatgtaatacatgtattaatttgcatatgttgaatcagctttacatcscaaggatgaagctgacttgactgtggtggttaaactttttgatgcgctgctggattcattttgccggtattttattgaggattttttgcattgatgttcatcagagatattggactgaagttttctttttttgttctatctatgccaggttttggtatcaggatgatgctggcctcataaaatgagttagggaggaattcctccttttcaattgtttggaataatttcagaaggaatggtaccagctcctttttgtacctctggtagaattcagctgtaaatccatctagacctgggctttttttggttggcaggctattactgccttaatttcagaatt

SEQ ID NO: 865316 - DNA, 651 bp, Homo sapiens
gtttcattcatttgatcttcaatcactgataccctttcttcttgttgatttaatcagctactgaagcttgtgcattcatgtcatagttctcgtgccatggttttcagctccatcaggtcatttaagggcttttctacactggttattctagttagccatttggctaatcttttttcaaggtttttagcttctttgtgatgggttcgaacttcctcttttagctaggagaagtttgatcatctgaagccttcttctctcaactcgtcaaagtcattcttcatccagctttggtccattgctggtgaggagctgggttcctttggagggggagaggcactctgatttttagaattttcagcttttctgctctgtttttccccatctttgtggttttatctacctttggtctttgatgatggtgacgtacagatgggttttggtgtggatgtcctttctgtttgttagttttccttctaacagtcaggartctcagctgcaggtctgttggagtttgctggaggtccactccagaccctgtttgtctgggtatctgcagcggaggctgcagaacagcgaatattgctggacagcaaatgttgctgcctgatcattcctctggaagcttcgtctcagaggagtacccagccatgt

SEQ ID NO: 865317 - DNA, 617 bp, Homo sapiens
caaagccaacatggacaaatgggatcacatcaagttaacccatttatgctggaggttgcaaattttttgtgcgtgagaaatcagatcttggtgatgaccttgagcagtaggatataaatgactcccacaagcttagcgttccaatagtagaacacaaggcataaatgggttaaaaagtttctkcttctacagcaaaggaaacaatcaacaaagtgaagtggcagcccacagaataggagaaaatatctgcaaactgcccatctgacaagggaataacctgaaaatgtaaggagctcaaacaaccccataggaaaaaatctaatagtaaaaaaaaaaaaagatggcaaaagatttgaataagtaatactttaagtcttagaatttcaaagataagataactctggaaatgaaacacctctcctgccttctttgttaatatttactgagtgctttgcatgatgccttgctcacaataggcttgcactaaatacacatttctgttttgttttgttttgttttgagacaggatctcaatttgttatccaaggtggagtgcagtggtgtggtcacagctcactgctgccttgaattcctgggctcaagtgacccttcctcct

SEQ ID NO: 865318 - DNA, 595 bp, Homo sapiens
cattctgagtggggaggacactggtgggccatggctgccctgtctgtgcagccctggtggaagggggacttctctctctggtcctcatgcaaccccacagaagaacgattggctgtgagtggggaggggtgactagattakctggtggggttttgtgcctgctctgttgggtgggggtgggggcatgtgactgtcagcctcaccatgaggacctggagagagggggccttcccagatggctgggagggttggggagcctccaccaggccagcctgggatgctaggcctgctgatctggggggcatttgcagctccggctgtggttctggccttcctaactgcacgcctgaggaagccccggctcctggtgagcctcattcccctgccagccatcctcccaggggttggaagttgagggtcatgacagacctgaggggacttaggtgggggactagcagaactggtgtctcagtaacaaagattcagtccaacccagggcagacaatgtcccacagggaaacgtgttttcccctcctgtcaagcaaacgaaaatgtgacccggctgcacacactcactgggctttcgggggcattt

SEQ ID NO: 865319 - DNA, 679 bp, Homo sapiens
aaaatctgatatcagctataggtggcaatgtttaatccattatgagaatgtacaattttgacatctttttcaaactttaaggacactgataaagaaaaaacgtttttgttccaaagcacctcaatagagtaaattttagaatgatatgaggaggcaaatttaaagtcaaatagcttgcagtcattctgatgtgtagcatattggaaaaacgagactagaactaagtttaagttggtaacataaatcgggtaaggcggtttgatatatttgagatgaagatctcagtagtgttcctttccatcataagaattactaaacacttaatgtttgcaagtatttaggagagaaaggcgttttctactgcttccttcttgggctgtcttccccagctcctcccttctgcctctggcyccaagagccagatctgttaaggaacaaacagcagcagtcagatgggggcaaagaaagactcacaaggaagcttttacacattgaaagagggtgacttacactcttgtgtaatttctcctgagatatctgaacattttacagaggtactgggtggacaaaaaggattttaaaaagataggttctatctttgttaacattagtgtttggtccttaaacattcattgagagataataaagagtttaattgaatttaaaacacacacataca

SEQ ID NO: 865320 - DNA, 638 bp, Homo sapiens
ccttgtagttatttttctgttcagcttcttgtttatcccggctgttttcccacctcaagcagttgcaatgttaaacagttaccactaattgtttccaacaaataccatggagaaaaagctgtttttagagtatgaactctcagtataaaaataataataataataataataataataaggaaaagccatgcaagttggggtttccagggaacttccaaataagtcagataatgacaattctgtggctataggacttttgaggaagtccaaacccaaaatttgtctgcccctcccaatggctatgaagctgctggttttgatgcctacattgattgtgaggacttttgttttcaaaggttctatagatctagagagagaaaacaatagaaaaatggacagttgaagtgccgcagtttcctgttattaccacaatcttaccacaatacttttaytgaataaatacttcttgagtttggttaattttcagagtactgaaaatatttatttcacttttttttggtcagtgttttcattgcttgtataaaggattaaattattggacatcattactctgttattcctgctgatcttaccctttgaaatcaatctgaatccgaaaacaaagggaaaattaagat

SEQ ID NO: 865321 - DNA, 663 bp, Homo sapiens
aatacctgaattattaaaaatgtgtaaagagtaaatatcaattaaatttcccaaagtttcaagaaaatcataaattacaaaagtagtccagaacctagaaaaaaaaaatgaaggaaactttcccagtctgttctataataatgctatacttgatccccaaattggatgaatacagaattcatgaatataaaaaacagcsaagaaaaaaaaaaaactaaaggacaatcttattattaagtatagaagaaaaatgtaggcaaatatatcaaatatcaacaaaggtaaccaatagatgtacattttattttgtaatagataacctgttaaaataatcctaaatcctgaacaaatatgttatatctcagaaatgcaataatggttcaaaattagatgatctattaaaaaaattaacaaatcaataaaagaaacaatgtatgatcatctcaatatagaataaagtatttttcaaatgattcagtatccattcttaataagtatttgaatttgaatgaaataataaatgcccaaagtttgtttgttttgtttttgttttaaagcaaaaacaaaacaaaacaaaaaacaggaaggcaatgaagattttgaggaggaaaatttaggacagtgtttttcaaccttggggttgagaaagctttccagattgac

SEQ ID NO: 865322 - DNA, 661 bp, Homo sapiens
aactgctcttctcaagtgtacatggaacagtcccagggcaaaccatatgtttggtgataagacatgccataataaatttaaaaggactaaaatcatacaaagaatatttcccaatcacaatgggattaaataggaatccataacagaaaaaattttggaaaattcacaattacttkgcaattaaatgacctcctaaataaccaataggtcaagaaaaaaatagaaaacaaattaaaatttactttgaaataaattaaaataaaaacacaatatataaatgcaatagataccactaaaacagtgctaagagagaaaattatagcagtaaacaattatattaaaaataatttgataaatggtgctggaataactggctggccatatgcaaaagattgaaactggatcccttccttataccatatatgaaaattaactcaagatggattaaagacttaactgtaaaacccaaaactataaaaaccctggaagacaacctaggcaatatcattctgacataggaacaggcaaagatttcatgatgaagactccaaaagcagttgcaacaaatgcaaaaattgaaaaatgggatctaattaaactaaagagcttctgcacatcaaagaaagctatcaacagagtgaacagacaacctacagaatgg

SEQ ID NO: 865323 - DNA, 666 bp, Homo sapiens
agatcagattgggcaacacagcgaaaccctgcctctataaaaagtgcaaaaaaattagctgggcatgttggcatgtgactgtattcccagctactcagggggctgaggtgggaggatcacttgagtccaggaggacgaggctgcaatgaactgtcatcattctactgcacttcagcctgggtgacagagtgagaccgtcttaaaaaaaaaaaaaaaaaaagagaaagagagagagagagacaactcaattgatagtgaaaaacccatgaaaagatcaccatcattagtaattacagaaattcaaattaaaatgagatactactttgtactcaaaggatgattasataaaatagacagtagcagtgatggtaagtacatggagaaattggaactctcagacattgttgttaggactgcaaaatggtgcagctgctttggagaatggtttggaagttcctcagagtgttaaatatagacttatgatatgaccttgtaactacattccttggtaagtatccaagagaaatgaaaaaacatatactcacaaaaatttgtatatgaatgatcatagcagcattattcataatagccaaaatgtggaaacaatccaaatttccatcaactgctgaatggataaacaaaatgtggcatatccatgagttgaga

SEQ ID NO: 865324 - DNA, 600 bp, Homo sapiens
gctgaatggataaacaaaatgtggcatatccatgagttgagatattatttagcaataataatgaatgaagaattgatacatactacaccatgggtaaagtttataaatgtgatgaatgaagaagtttttcataaaaggccacatatagtatgattccgtttatatgaaatatccagttactcaaattcataggcacataaagattggtcatttccaggggcttggagagggaatggggagtgactgcttatggatacagaatttctttctgaggtcatgaatacgtctgaatattagatagcagrgatggttgcaaaattctgtgaacatacaaaaaaactctgctgaatttaatatttttagagggtgactgttattgcatataaattattcctcaataaagctatttaaaaaaagttgagtttgccccacccctagatttgtcatgcccagagacgcctgaatgtttgagatctctggaagtgacctaatatgagacaatataggcatatagaatgctaaaatcaaaataatagaaaactgggctttgcatggccctagttcatatcttgtctttaccttaaagtaaaaattcttcac

SEQ ID NO: 865325 - DNA, 621 bp, Homo sapiens
ccaggaaatcaatctcacatctgcctctttggcttactaaaattcgtggtttatataaaagaagargaaaaatataactatgtatgagacaacaggaattagggagggagagggaagaggagttggtcaacaggaagcaggtagttgcttaggcaatcatgatgggttaggagtttggtgtctccttgaccagatttggtgatctggtaagttttagttccttggcattgtctgggaggtctgatcgttggtttcctgagaaaggaactctgataagacaaatgtaactttctcatgttttaaaacttggagggtccatttctatgtttattcaaaagaaagcataaacatcagttctattggacaattgggccagtttcaaaacgaggggtcatagggaccctgaaggtctgaatttcttctctgataatttatgaaatataaaattaggtccattctccaggcaattcaattaaatttaatattttatctgttatctgtacaaatggaattagaatacactggctaataggagttatgggaataaaacctcaagattgtaattcagtgggatgtattctaagtgtaagggggcacgaagaaataactgcctctggaaga

SEQ ID NO: 865326 - DNA, 629 bp, Homo sapiens
ccaaatctgaattggtgatgcctaatcttggccttatttttaaagacaacctcagatggtattattggtgggtaagtgatttggtgcaagctttctgcagactgatttgacggtaaacatttaaaaaatcatagaattrcatgtatctttggactctccatgtctactgttaggagaacttcctaaggaagtagcaaaatgggcacaaagatgtaaatgcaaaaacaatcatagcatcattatttataatagtgaaacactctccttatactaggaactagtttaataaaatacagcatacccacataatggtacagtgggggtcctgaacacacaccagcagccaagccacaggcaccagagtgacacttagcttcctcggatgtgctttccccctaaacacagcatttactatcaacatactttgaacactacttttatttcctatttctgtattgatgtatttacataccctgtgtctctaaaactgctttctaaatgctactaggattcttgtcagctttcacaaaccagtcacttttctttaagaatgcacccccattcctgacataatctcactaacaataattgtaggacattaggcaggaaccacaaatccaaaggtgaag

SEQ ID NO: 865327 - DNA, 629 bp, Homo sapiens
ccaaatctgaattggtgatgcctaatcttggccttatttttaaagacaacctcagatggtattattggtgggtaagtgatttggtgcaagctttctgcagactgatttgacggtaaacatttaaaaaatcatagaattacatgtatctttggactctccatgtctactgttaggagaacttcctaaggaagtagcaaaatgggcacaaagatgtaaatgcaaaaacaatcatagcatcattatttataatagtgaaacactctccttatactaggaactagtttaataaaatacagcatacccacataatggtacagtgggggtcctgaacacacaccagcagccaagccacaggcaccagagtgacacttagcttcctmggatgtgctttccccctaaacacagcatttactatcaacatactttgaacactacttttatttcctatttctgtattgatgtatttacataccctgtgtctctaaaactgctttctaaatgctactaggattcttgtcagctttcacaaaccagtcacttttctttaagaatgcacccccattcctgacataatctcactaacaataattgtaggacattaggcaggaaccacaaatccaaaggtgaag

SEQ ID NO: 865328 - DNA, 613 bp, Homo sapiens
ataatgtagtttcagcattgctaacccatattcctataagaaacaaatttaccaatgagagtacggcttccatgtataattatttttgtgtttagcctcagtatctagttaaaaataattatgttccaaaactactgaggttagttctttttttttctgattctgatcactgtgacaatgttattcatttataatgcaatcaggttcatttgctactgtttgtrttccattttagattttcccacatctggctgggtttaagtattttttgagtctatgaaatgttactatggttttatgaatcagagctatgggaaggtatctcatagctccctcttcacctttgctcctccattctcattccctcctctccaacccttccccactcctcatccaccactggtatccagtctctttcgtttctggtttatccttcctaaatttcctttgcacaatgagcaggcttgctctctagatatagatatagatatagatggtaaaatgtgatgcaatgtaaaaaaatggtaatacacacactctccatatattacctttttttacatttatattttatatcaccttcttgcttgcatgaaggatagcatactataga

SEQ ID NO: 865329 - DNA, 634 bp, Homo sapiens
cggcttagccattacttgtctaacagaattaccacagggagtgaaccggcccccaagcagcagggtgctagagcttatcgtccccaagtcctataaagtcagccatccctggattaagctctttttatttcttgactgtttaatgtcgtgcatattgtaatcagcattttaattcaggatttgggccttccagcagttttccaaagggcacacattttgaagtcaacaaattaatgagtgttcttttcttcagtcaccacaagttctctgtgcactgagagaatatttttattctaccgaccacgttaatatttaagccgacgctaccctrtgggttgacaacatagaagcagaggcagacagtggggcagccctgctcatgcctgaagaagggctgtgtgggttggcagtgagaaagagaaaagacaaattatgtgacattgactttaactgagacaatgtgcaaaccaatacttctgcctgagaacaactacacattttaagggaccagcacattaatatccctatctttacaattacatagagtgctcaaaaaagggggtatggactgctagtctacaaaactaacaaagatcctaactataaaccaatgaaatatgaaagttgttttaaa

SEQ ID NO: 865330 - DNA, 634 bp, Homo sapiens
cggcttagccattacttgtctaacagaattaccacagggagtgaaccggcccccaagcagcagggtgctagagcttatcgtccccaagtcctataaagtcagccatccctggattaagctctttttatttcttgactgtttaatgtcgtgcatattgtaatcagcattttaattcaggatttgggccttccagcagttttccaaagggcacacattttgaagtcaacaaattaatgagtgttcttttcttcagtcaccacaagttctctgtgcactgagagaatatttttattctaccgaccacgttaatatttaagccgacgctaccctgtgggttgacaacatagaagcagaggcagacagtggggcagcmctgctcatgcctgaagaagggctgtgtgggttggcagtgagaaagagaaaagacaaattatgtgacattgactttaactgagacaatgtgcaaaccaatacttctgcctgagaacaactacacattttaagggaccagcacattaatatccctatctttacaattacatagagtgctcaaaaaagggggtatggactgctagtctacaaaactaacaaagatcctaactataaaccaatgaaatatgaaagttgttttaaa

SEQ ID NO: 865331 - DNA, 634 bp, Homo sapiens
cggcttagccattacttgtctaacagaattaccacagggagtgaaccggcccccaagcagcagggtgctagagcttatcgtccccaagtcctataaagtcagccatccctggattaagctctttttatttcttgactgtttaatgtcgtgcatattgtaatcagcattttaattcaggatttgggccttccagcagttttccaaagggcacacattttgaagtcaacaaattaatgagtgttcttttcttcagtcaccacaagttctctgtgcactgagagaatatttttattctaccgaccacgttaatatttaagccgacgctaccctgtgggttgacaacatagaagcagaggcagacagtggggcagccctgctcatgcctgaagaagggctgtgtgggttggcagtgagaaagagaaaagacaaattatgtgacattractttaactgagacaatgtgcaaaccaatacttctgcctgagaacaactacacattttaagggaccagcacattaatatccctatctttacaattacatagagtgctcaaaaaagggggtatggactgctagtctacaaaactaacaaagatcctaactataaaccaatgaaatatgaaagttgttttaaa

SEQ ID NO: 865332 - DNA, 644 bp, Homo sapiens
gagttggcggagagtcagcaatgcatttctggaaattgatctgaataaagcaggtgaacattgtcatttgaaccccagagcatagacactttcctagctgtagctgcctgagtgttgagttttgcaatcaatttgtactcaaaagaaaaatgctgtcataatatgaagtgaaatgatatgtctttgcactgctcaaaatacttaggtaaaattatgggtgtctttatttttttatgctgaagagtgggtatgtatattggataaactactcagcaagagttgggtaccagaagacaacccagtaaaaagcatccaagtcaacagtcagctccataaggagtgattctcttctccttcagtaattaagcattcaaacccagtaaacagcttggtgggaatgattttatgacaaatgaccgagagcacatcaaccataaaactcagctcggcaraaatccctcaagcccaggaaactcaatcaatgtagagcaggcaacagcctcagctgtggcagcattctctcactacgaatcacataaatccaaggaggccagagctgctgctccgctaactctgacacaagacacaagacaggaggagggcacgaggcttctcacggggagacagaaaaggaaggcaggcga

SEQ ID NO: 865333 - DNA, 473 bp, Homo sapiens
gggaaagagaccagaaactatgcagaagaatcagatgcaaagggaagactgaaagagaaatgaaggaaaggttaaaagagggatagatctcaagccatagcttaagtcattccaatacagttcccagaatttacctagatcctttaaaaaaaatcttcccttttgattcaaatttggttttagtaggctcagctaatttcatacattactcctagatgtcagattttaactggctgtgcaagaaaacataggaasacccagatactttgtttgtttggattcccctagaggcagacaatgagccaaggattttagaaaacgttgttcattttggaaggtaggaaacagcagtggggaagggagaaatggagaaattagcacagggaagaaaaaagcatcctgtaataaaggatggactaagaagccagatatacaatgagcctagtcatgtgggaaaactttcaaaacgtgtg

SEQ ID NO: 865334 - DNA, 473 bp, Homo sapiens
gggaaagagaccagaaactatgcagaagaatcagatgcaaagggaagactgaaagagaaatgaaggaaaggttaaaagagggatagatctcaagccatagcttaagtcattccaatacagttcccagaatttacctagatcctttaaaaaaaatcttcccttttgattcaaatttggttttagtaggctcagctaatttcatacattactcctagatgtcagattttaactggctgtgcaagaaaacataggaagacccagatactttgtttgtttggattcccctagaggcagacaatgagccaaggattttagaaaasgttgttcattttggaaggtaggaaacagcagtggggaagggagaaatggagaaattagcacagggaagaaaaaagcatcctgtaataaaggatggactaagaagccagatatacaatgagcctagtcatgtgggaaaactttcaaaacgtgtg

SEQ ID NO: 865335 - DNA, 596 bp, Homo sapiens
ccaagctctccaaattacttcctagacaaaaatattcaacaagtatagtcatttgttggcatcaggatctgagtttttgatcagccattatctcttctcggagtcgggcatcctgtacaagttttacatgttgtatctcctgggccattctcgtttctaagcagctttcttccaaactccatttgtcccacgatacttcagcatttaccaggagaaatatctctgctttgcasatgctagaaacaaactcaacttaagtgaacacagagtgtgactttaagacccaactcccaagtaaggtggaattctgctttcatatgtcactctaccttccaacaaactaatctgaggtcatatattaagggttgcaagtctaaagttagaagagaatgaggtactttctacacacagccaagaaccctttagaagcccatttccctctagggttttgataatattcccagagacagaagtattaggctttccaggcagctgtatataaacatcttctttgtttctatgtctaaactggcactttaaaacattttaatggattgctgggaaggctcctacaatactatcttcctcacctttta

SEQ ID NO: 865336 - DNA, 596 bp, Homo sapiens
ccaagctctccaaattacttcctagacaaaaatattcaacaagtatagtcatttgttggcatcaggatctgagtttttgatcagccattatctcttctcggagtcgggcatcctgtacaagttttacatgttgtatctcctgggccattctcgtttctaagcagctttcttccaaactccatttgtcccacgatacttcagcatttaccaggagaaatatctctgctttgcacatgctagaaacaaactcaacttaagtkaacacagagtgtgactttaagacccaactcccaagtaaggtggaattctgctttcatatgtcactctaccttccaacaaactaatctgaggtcatatattaagggttgcaagtctaaagttagaagagaatgaggtactttctacacacagccaagaaccctttagaagcccatttccctctagggttttgataatattcccagagacagaagtattaggctttccaggcagctgtatataaacatcttctttgtttctatgtctaaactggcactttaaaacattttaatggattgctgggaaggctcctacaatactatcttcctcacctttta

SEQ ID NO: 865337 - DNA, 651 bp, Homo sapiens
gccttctctcattgttcacaagaacctgaacatgtccaggcactgtactttgatttcagtttatctagtgatagttccaccttcacctacttgggaacgggaagagctaaagcagatcttaagacaagtcgtgattttatctcctttgcaaagttaaaaaaaaaaaaagaaaaaatagcgttttatttttatttattatttttttacaaatgcaaaaatttgcttttgcctctttacaggtagtaatttgaaagcacactacttaaaacctaatggaaatgttacataaaaccagagtcacaatgaattcaaaaatttcccttgctggggtagggggtaggaattagtggtattctagagmaaacgggtgagatcttgctatgcatgaaacgcaggatccatttttaataacagtaaaaaaggaaatttactgccccctcctggctctgtgtaacaaagttctctcatatttaacactgaataacataatcacgtaggagtcaacacggaacaaatcttaattcctctctctttgccgagacagaaagggtgatttgcaatgctgaaaggataatgaaagggccagtgttattatttaacataaaaaatagatttcctggtttccctcaagtgtttatcatcagatacagg

SEQ ID NO: 865338 - DNA, 567 bp, Homo sapiens
gaggctgaggcaagagaactgcttgaagccaggaggcagaggttacagtcagcagagattgcaccactgcacaccagcatgggtgacaagagtgaaactccaactcaaaaaaaaaaaaaaaaaatggaagatgccttctcgccrtcctcatatcaggacaacaaggcaaggaggtctgtaaagcctcttttataatggcactaatcccattcatgaagtccctgccaccatggcctcatcacctcctaatactatcacccggggtataaatatttcatataaatgttcagggtacacaaatattcagaccatagtagaggcaaatatccacttctcccaaacggttaagtgaaaatcctacttgccctcagcaatgggccaaggtggagcccacttccaacttcctattttcctgatggatcatgactgggtgagtgctctgtatctggccagggtgtggagctggaaacaatggtgagaacctcgtgcagaacatacaggtcagtaagctaagatcttgagtacgtagctggaagactctccagaagtctaggggagcctcatcac

SEQ ID NO: 865339 - DNA, 592 bp, Homo sapiens
gtgtgagtctgttttgcctccctgtgggcctatttcctttctccctcacctagcaaaaaacaccaataattatgatatagaaaggggcaacatgggattttcaaaagacatttgagtgaaatgaaaatgtacaggtgagagtaacygggaaaacaggtgaatgccacctgggagtttgctatcctccaacaagaaaatcaccatcatgactgcaataaaagcccaggaacagagaccctgagctggtctgggagacacactctgatataatttgactgtgtccccacccaaatctcatcttgaattgtagctcccaaaatttccacgtgttgtggaagggacctggtgggacataactgaatcatgggggtggttccccccatactgttcttatggtagtgaataaatctcatgagatctgatggttttataaggggaaatctctttcgcttggccctcttttctgtcttgtctgccgccatgtaagacatgccttttgccttccaccatgattgtgaggcctccctagccatgtggaaatgtgagtccattaagcctctttttctttataaattacccagtttcaggtatg

SEQ ID NO: 865340 - DNA, 751 bp, Homo sapiens
tgatctcccaaaccacagtaggcactcttttcaatctctttcaccaacccctcttctcctttgtagtgcttatctctctttagttatataggtatttactaaaaagaggtagtaaaatacagtagttaagtgtcctaagaccacatggcctcaggcaagttatttacctcttctgcctgtttttccatctgaagaatgcaaagaataataacagtaaccttctcctgtggttgtagaaagactgagttggtgtatgcagagccctcagcacagagtctgcccagagcccctggctgagactgtgtagggaattgggggcatttatgcaaaatgaccactgagatgccacccaacacaaaaatggcacaaatgccaataccattgtggaacaagctttgacgttctcttcacagcagaggttagcttcactaacctttaaagttacttccaaatctgagattctgtggctcygtctgtgttccagggacaaaaggtgcctggctgtgggggaacttacattccccaggattttgtttttatacagggacaaggcagtgtaaattcacacaaccttttggaaagcagtttggcagcatgtaccaaaaaagacataaaacatacagaccttttgatccaataattccatttctgggaatctatcctaaggaaataatcctaaatagggataaaggcttatgcacaaaactttcaatgtaatctcatttatactaggaaaaaatagaaacagctt

SEQ ID NO: 865341 - DNA, 632 bp, Homo sapiens
taacctaacattatttcatctaatattatttcctgtccattcaatgctaaatttccaaatagctcagtgggtacatggaaattcattatctacttgatctctgttttttaatatgtttaaaactttcgataattttttttttttagaaagggtcttgctttgtcacctaggctggagtgcagtggtgcaaacatggttcactgcagcttcaacatctcgggctcaagccatcctcccacctcagccttctgagtagatgtgcctatacatgcactccagcaatggctggttttttatttcttttttatgtatttatttatttttgtagagatggggttttgccatattgcccaggctggtctcaagcgatcttcccaccatagccccccaaaatgctggaattacagttatgagccaccacgtctggccaactttctataagtttttaagttttttacgttttaaaatatgagaagtgatattttggrcaaggtaaagtattatgatctgggataatgctatattgttaattcacatttatccacaaggatggatatttatgtagattaaaacactggattgtcttctacatgtgaagtagaaaccaggtatcagtgaaggctgtagagcaa

SEQ ID NO: 865342 - DNA, 602 bp, Homo sapiens
ctttctataagtttttaagttttttacgttttaaaatatgagaagtgatattttggacaaggtaaagtattatgatctgggataatgctatattgttaattcacatttatccacaaggatggatatttatgtagattaaaacactggattgtcttctacatgtgaagtagaaaccaggtatcagtgaaggctgtagagcaaagactcttttggccaccctgcagggacctgagttccagttctggtttagcataaataggttatttgggcaagtcacttcttactgaatctggctttttatctgtgaaacaggaaactcaagcagataacctctgagatcccttcttctctaacagtgtgaaattcccagtgcagtgtaagaactgtgagttgagatcctgtcttcgctttcaagctgtatrttcagggcccagcacagtgcctggcacacacaggggtcaatgacatttgttcattccatgagtcactgaattgccttttttaaatatgcaaactccttttctcataagaacccacctctttccctgcaatgaaagcagattcagtttagaaaccaaactgagtcatttcagctggttgaa

SEQ ID NO: 865343 - DNA, 613 bp, Homo sapiens
agatggatggaaggatagaatgaatgaatggttggatggaaggaagaaatggcatggaagaagaaatctaggtagaaccatttcatggagaactataaagaaatcctttctgatctagtttcaatacctaaacatagactaactcttacccccataatcctccactctacccaagcatatgtctgactaaatagggagaaggacaatgactcatcccttctttccactcttaatgtgtggaacctaagcatgtgagcaaattcttcatacaaacaggaagagtaactatacattattacagctagtccatgattatctatcacccaattcagcatctcaaacaaacattactatagaaaatccaaactttcaggcmgtgaaggcctttttgtggacagcattgtaaaattgcatcccagaatgtatgatttggtctcaaggaattttcaagagggtgagacctcaaacaatctagtccaacactttcgtttcaaggattgggaaactaaagccagagagatcaagccctttcttaaaattcacctaactaatccatggctgaactggggttttatcccaggtctgtttgctgctttgcccagtaagtttggat

SEQ ID NO: 865344 - DNA, 597 bp, Homo sapiens
ctttcaggaagggtattgcctttatttattgcaaagatggccaccagcaactcaggtttgcattttgcagtccgagcagggggaaraaaattatctttctcaataattcccatgaaatacctggaaatgacagccttttgattctgaatggttctacttgaatcatgagcctatccctcaaccaacaattggccaaggaaatgtgatgttgccattgaccaggcttacatcacaacccagcactagagctcaaagaaaaatccatctcatctaaatcacatggacagaggtggtaggaggaggaagaaattatttcccaaaggaaaatgaagatttcaggtcaagaaaaagagagattaattaattggcagacaaaattaactagagatttcctaagctgttttcatataaaatcaaaaccacatttattttgtctgcatgatgcaaaataaacgtgttgctagaatgatttttccctgaaataatctaatttttgataatatttggtcagaattggctaaatatttcatactgtaaaagcctggcatctgtgatgatctcatcctacaggctgtcataatgctgatctccaatggc

SEQ ID NO: 865345 - DNA, 597 bp, Homo sapiens
ctttcaggaagggtattgcctttatttattgcaaagatggccaccagcaactcaggtttgcattttgcagtccgagcagggggaagaaaattatctttctcaataattcccrtgaaatacctggaaatgacagccttttgattctgaatggttctacttgaatcatgagcctatccctcaaccaacaattggccaaggaaatgtgatgttgccattgaccaggcttacatcacaacccagcactagagctcaaagaaaaatccatctcatctaaatcacatggacagaggtggtaggaggaggaagaaattatttcccaaaggaaaatgaagatttcaggtcaagaaaaagagagattaattaattggcagacaaaattaactagagatttcctaagctgttttcatataaaatcaaaaccacatttattttgtctgcatgatgcaaaataaacgtgttgctagaatgatttttccctgaaataatctaatttttgataatatttggtcagaattggctaaatatttcatactgtaaaagcctggcatctgtgatgatctcatcctacaggctgtcataatgctgatctccaatggc

SEQ ID NO: 865346 - DNA, 576 bp, Homo sapiens
atccatggtacatatacactgtggaatactatgcagttataaaaaagaataagatcatgtattttgcaggaacatggatggagccagaagctattatcctcagcaaactaacatggaacagaaaaccaaataccacacattctcacttataagtgggagctaaatgatgagaactcatgaacacaaaaaagggaagaacagacactggggtctacytgagggtggaaggtgagaggagggagaggatcagaaaagataattattgggtactgggcttaatacataggtgatgaaataatctgtacaacagacccccgtgacacgaggttacctatgtaacaaacctttacatgtatcccccaacctaaaataaaagcatttaaaaaaaaaaaaaaaaggagcccgtaaatccaattcattcctcagccaacacataatgacagccctgaaaggagagattaaaaagctactctcagttgttaactacattgctgacctcatgttttccttcttgtttccttgagagatcaccagtcagtgtctcatgataccagcagttaccatttactgtgtgcc

SEQ ID NO: 865347 - DNA, 652 bp, Homo sapiens
aagatctagccccaggaattccaataatcagctttgtgtgacttttagacaaatcacctaaatcctttaagcctctgattccacactggattggtggtggaaagtaagtgctgtctttctccaaactcatggcagacattggtaayagatagaagcatttcttcccactgtgccccagggcagcctcagaattctcaacaaagtctccaggtccatccatcaacaagcatgtacccttgagatgaaatcaacttgccttccctgaattaaaggagcctttggttacccttccagttctaacgaaagtttggaaactcttgtattctaattcaataggcaaggctatacctagttttgcactcccaattaaaagcaaaacttggcaactgccttctgaaatcgctattttacaaaatcagagcaggagtaatgggtgctggagttctgcttggaccaggccttataggccattacttccagctgagtggctccaacagccctccagggccttggtggaggccagggtagatcctgacactggccctcagtgaagaacttgactccactctgcttcacgtctctgcttcttttgcatccatgggcttctcataccactcacaggtttcctcaccctgttatctgccttttctac

SEQ ID NO: 865348 - DNA, 626 bp, Homo sapiens
aaggacaatttcctaaaaacatataatatactaaaactgaaataagaagaaatgtaaaacctaaatattttggtagggagtaaagaaattgagtctgtggtcagaattctagttacaaccacccacacccatataccagttctcaaaaaaagatatacaaatggccaatacgtacaatggagcatgatgctctacatcactactcatcagggaaatgcaaattaaaactacagtgagataccacttcataccttctatgatggccataatttaaaaaactaaaaatggccaggtgcagtggctcacaygtgtaatgccagtactttgggaggccaaaggcaggcggatcacctgaggtcaggagttcaagaccagcctgtccaagatggcaaaactctgtctctacgaagaatacaaaaaaaattaaccaggcatggtggcaggtgcctgtaatcccagctactcaggaggccgaggcgggggaatagcttgaatccggtaggcagaggttgcagtgagccgagatcgtgccgctgcactccagcccagacaacagagcgaggctcagtctcaaataaaataataataataaaaaaaactaaaaataacaagtgttggcaaggatg

SEQ ID NO: 865349 - DNA, 642 bp, Homo sapiens
gcattgcctctcccctgattcttcccttgggatgggctgtccgtatgcacagtggcctgttagtggttgggaggtgagcatgcgcagtgtgtttactggagttgtatgcatgctcacctgaggtgttcttcccccaccagtctagcattcctagaggaaggtcatgtaccagttaaatgctgccattttgcctcttaatgcacatgcttgagaccactctcccaactcctgagatcttatcaggaacctgctgatcaccagtttcaggtgttttctatctattgggaaactgcccttccctggtgccgactgcaaccaattattattttagagagacagttaactttctgaccatcagctgatggtcacctgacattcctagtrggtgggtgtgttggggaggaagccctctcctgttctgccaatgcctgatgagccacctactgtaacacttccagcagctctgaatatctctgtaggctccgcagatagtagttaagaacatgcaccccaagtcatactgactacaggacccatttcaatcgatgatctgtgacttggccaggttcttcgtatctctaagccttgatttcctccagttagaatggggataataataatcatgtacgtagtgtttttgca

SEQ ID NO: 865350 - DNA, 615 bp, Homo sapiens
ttattttattctatggactatatatttaatgtttgaattgtcctagatttggccagagcgagttccctcaagctagtctctacatataagagaaattcaaatctcaaaatattattcctctgtcaccaatcagacttccgggattcactttcctggtgtcaaatattcttttttcagaaaatgcatcatgagtttatattaataattttaaacataattagtaaagtaaatcttctgaaaaaaatctaaattattttggagcaatattctattttgagatcaactttattaatatgggtatcaagagataaatttagattaaaaatattaccatttaatgtacatgattaatagatatggttatccaaagtaactttgataatcaatccagattttatagaagacaaagttttcatycgtctcattcaagttcacttttatacctaaagttgcaaagagtattcaagttgaaaaaaggatatgatatcaagaaatctgactgatatacactcatccagaaataaagaggttatggaaggctctttctacagctatttctcaacttacatacaaataaccactgtcaattgttcacttaaaattccaaactccaac

SEQ ID NO: 865351 - DNA, 624 bp, Homo sapiens
aaaaaaaaaagttatactctgcctcagagttgcccagaagcttaaaaaaccctataggtagtctgaccactcacattattgaaaagaaatacaacacatgaacatatacagacacaaaaaccacacaaacaccacttcaagaataagattctcctgaaatctaaacactccatagttgttaacatctaagaggcttgaacaatgaagcatgcatagctgaaatgtgatgaaacctcaacctgagatctgttatctttcctttgagggctctaagcagtttcacttttgcatgtattattctcaacattcttgcaaattaggkgggcattgctgctgttaccttcattttacacacaaaataaggaacggagtaataaagtaatccaaagcttgcataaagtaatccaaaaaatttatcaaagccaagactaaaattcaagtctcatgatgttcactttctttctactgtaacacacagccccaggagaaaggattaagcaaacagctgttccaggtagatcaaaaagcctctgcataccttcccttagggaaaagtgatgaatttactctaatgggagggtaatgtttgaaattaatttaccaatgaaaattggccttagtcct

SEQ ID NO: 865352 - DNA, 551 bp, Homo sapiens
ctacctctctggctgctcttctcaatctcctttgctggattctactctttttctaccatctaggctctttaggactctgtccttggacctctcctctttccacactcatattatttgatgattctttctaatcttatagcttttaattccatctgtgcactcttgattcacaaacttatacctccaggccagatctccctttggaactccagtcatatttccaactgcctaattgacacccttctgggaaatctaagagattgctcagagtttgcacgcctcaaatgagactctgggacttctgcaaagtctattctatcgtatttaatggcaactctgtccttccagttgctaggacccaaatatcttagtcatccttgactattcttttttttttttcktatggcatgcatcagatccaccaagaaatcctgtaggttctcccatccaaatatattttgaatcaaaccacttctctttcatcattattaatctgtgtcataccatcatcatttctcatctgaattattccagtagtgtgtcctcttaat

SEQ ID NO: 865353 - DNA, 653 bp, Homo sapiens
gctatgatttgcatgtatatgtccctctgaaattcatatgttggaacttaaactttaaggtgatgctaataagacatgaggacttttgggaagtgattaagtcatgaaggctctgcccttatgaatgggattaatgcccttataagagaggcttctgaggctgtgacaggatgatcaactaagccttggaggtggaggctgcagtgagctgtgatcatgccactgcactccagcctgagtgacagggcgagtctctgtctcaaaaagaaaaaaataaaatatcattcgtatccatggtttcaaatatacrtatgcatagatgacttacagatctttgatttgagccccagtcttgtatattgagggtctgcatggtatctccacttggatgtttcaaaacaactgaaactggattaacaattatccctgtcatatctgcctctagctggaggaaactctgggaaaattcctctgtgttttttgttggcttacagtaattctgggatgagactgcctttagatagttaccagcccactaatgcaaatgctaatggaatgcttttccattctggaaaagtatgaaattgaagagcagaggctactggtgcctgttccacactttctcatccacccgaagtcatttgcagagagtt

SEQ ID NO: 865354 - DNA, 630 bp, Homo sapiens
tattcctttactttcttaataaatttgctctcactttaccgtatggactcaccctaaactctttcttgcacaagatccaagaaccctctattggggtctggatccggagcccttttctgtaacagaagatggaaacttgtttttcttttcatggtttgtgtgtttggtggatgaatcagaggtcagacttggtcagactctacagtcagccctttggaattagggatttttttcccaataaccaaatagtgaccaactcttctcctggcagtgggaatattaaaattgttcttttaggcctggctgattttcatcttgtgatgatgttttaaaaaagcagtcctattgtgttctctsatagtatctctctctccttgactccattcaaattgtaggtggttctcaggaatgctgtctagagatgtggagaccaaggtatatttagtcaaattttagtatcgacattcggttaattagagctatttgagattgaatgggagacactatgtcaaaaaagactcttaaaagttaaaattcaagctttgattactaactccatgcctattttcctgagaagtatctgatgtctgcctgaaacactgtaattcctttcttctttctttttttaat

SEQ ID NO: 865355 - DNA, 587 bp, Homo sapiens
gaattatttacaaatttcagagttcttgaagtcagctctgtgatggttaattttatgtgtcagtgtaactgggctaagggatccccaaatagttggtaaaactttaaggtgagtctgtgagagtgtttctggagattagcatttgaatcagtagactcagtaaacaagattgccctcatcaatgtgagtggtcatcctccaatccattgagggcccaaagagaatgaaaggcagaggaagagtgaatttgctctctctcttctggagctgggacatccatctactcccrtcctcagatatcagcattcctaattttggggccttcagaattggatccgtacttacactattgcccccaccctacagttctttggcctttggacacacactgggacttacaccatttacgtccctggttctcagaccttcgggcttggctttccttggcctccagctagcacgtgggagattatgagacttctcagcctccataattacttgagccaatccctcttaacaaatctctttatacttatctacatatagtcatgcattgcttaatgatggggatgcactctgagaaatgc

SEQ ID NO: 865356 - DNA, 587 bp, Homo sapiens
gaattatttacaaatttcagagttcttgaagtcagctctgtgatggttaattttatgtgtcagtgtaactgggctaagggatccccaaatagttggtaaaactttaaggtgagtctgtgagagtgtttctggagattagcatttgaatcagtagactcagtaaacaagattgccctcatcaatgtgagtggtcatcctccaatccattgagggcccaaagagaatgaaaggcagaggaagagtgaatttgctctctctcttctggagctgggacatccatctactcccgtcctcagatatcagcattcctaattttggggccttcagaattggatccgtacttacactattgcccccaccctacagttctttggcctttggacacacactgggacttacaccrtttacgtccctggttctcagaccttcgggcttggctttccttggcctccagctagcacgtgggagattatgagacttctcagcctccataattacttgagccaatccctcttaacaaatctctttatacttatctacatatagtcatgcattgcttaatgatggggatgcactctgagaaatgc

SEQ ID NO: 865357 - DNA, 659 bp, Homo sapiens
atatttaggatagttatgtcttcttgcaaatgtcattttaatccttattttactagaattattcattttgctttctgttttcctgacttctgtgatacccacactcttggttcttcttgaaactatctgatggtttctccactgtctcatttgtagatacctctgccttttttcacctcttgaatgttagtctttttagctgtcagtgttctgttcttgkcacacttctcctctatgtaatattctgatacacttacaaagtagtaaatatgtgtttgatcaattagacaataaataaatagctgcccccatttgtttctagagtctctttgacacccatatgttgataactcaaaagtctacatcatcttgatgatctggacttacatatatttcaacataccagagttacagccatatgttacctagacatttataatgcaataaacaaaatgaactcatcttcggtattctctatttcaatgattagacctacccagtccctcaagttagaaactaactacactttttttgtcctgctcccttaccaatcccaatacaatctatcacaaaattctgcctgtgttttcttctaagattctctcattcatttttctctccatctctaacattgcttgatatcaggcactgatcatgcc

SEQ ID NO: 865358 - DNA, 615 bp, Homo sapiens
ttcacaaacctgccaagtaaagaataaggtatgattaggaatcagatgcttactagtagacttcctggagactaagaatcagaaggctgaatggaatttaggtgacaatgctgaagatttttctaagagggtgatgtatttaggttaagtaacaaacatgacagttaatttgagttgtgtgctttaggttgttcatagaactgagaaactgggatcagaccaagttaccatggcactatttctgttttaaatggtctggtaaaccacctgtctaatctattartcaaaatgtgctgatatgttgtagtgattaccttattatctattcctaataatactcctacaatgtgttttcagcccatattggagtatggctaatgcactatgttaatattcttttgctagatatgttcattttaaagttgtcaattactttttgttgttcctcaagttcttgtgtatttttggcacatgccatttaagtgtatttttttactatattttatgaaaataattttacagctacctcatgtatcagcccaaaatgttagtaaatgacttgtcttcctacaactctggatgagatatatctatatctgccttttaggggctggt

SEQ ID NO: 865359 - DNA, 636 bp, Homo sapiens
taaatattatataacagagtaataaataatgtttacagtgggaagcagtcttatcttcaaaaacaacttttctagttgtgattataaaacaatcttgcaaataaagaagtgcagctcaatgaaatgtaaaagcatgccacttcaacataatttagctagttgctttatcttgacacatttcttgattttcatgatattagtgtaaaatataaatattttcatacattttccataacccgattgctctttctttccaaaataatgatgaaatggaacaagaaaaaattgtctcccagcaaatatttagacatgtgacattttrtgtttttaaaggtcattgatattttagggtatttatcttaactacttaatatttttaattgcttgaattgccttcagaaggtgactacttttctatttggttgcatacatggaacccacaataataatatgtatgaaaattttcctctttataaataattcatgcaaattcaacaatacaccctgaaaagtaaatatttatcacctgcgtgtaatatggaaaacatttagtgttattaagaagtaaccgattgcaatgaatagaagaaatctgttttaatgtggtaagtctacctcccttaagatacagtttgt

SEQ ID NO: 865360 - DNA, 663 bp, Homo sapiens
ttaaaaggcacttacactcggagccaagatagccaactagacacagccatttggaacatgtgatgctgagggactggaacatcaggtagactggcagattccaagcagatcttcagagggaaggcactgggagtggacagagggaggatacagacactgggctgaaggggaagggagctgggaaacctgcacaggactactgagcaccaggacctgttcctggcctccagcaactcctggggaagaagtgaatttaatagatgaggagtggcttgctctcacaatgaacctctggaatctgggcagcaagaagccctgacgcccccatggactcttgagttggtgatgagagatgcttagagcagtgctgagagcaggctccagctagtgaagagcacagagggtttggtgtgtcaacgttagcagtggagcgtggcyagtgatacccatcgcccaaggctcaccatgttctctaggagactttagccatggggtaactgtaggaactaggtagagcagggcggtcatgcccctgagatggagccagtaccatctgagcaccctctgtctgctggcctctcctggggccccaacctggccattcctgctaggcagcatggcctcagatgctcaaacggggtgctcctcaagagtcctcatcgt

SEQ ID NO: 865361 - DNA, 592 bp, Homo sapiens
taggatttaaattggttttcactcagaatatcttcacctagtgttctctttgttctgaaatatttaatcgaaatagtgatgttaggagaaataattgagatccaaacacagaagcactttttcttttatttttatttgaaatgaaataattgcacatatttatggaatgcagagtgatatttcaacacatatatatggtatgtaatgatcaaatatgggtaattagcatacccatcacctcaaacttattatttctttgtattgggcacattcaaaatcttctcttccagttatytgaaaatatacaataaattattgtggactgtacttaccctacagtgctgtagaacactggaacttatttcttacatctagctgtaattttgtacctgctaaccaaactctccatatcctctcctctcccatatccttcagggtctaatagccacaattctactctctacttctatatgctcatcttcttatctcccacatatgaatgagaatatgaggtattgtttagctttatgtgcatgacttctgcataatatactgtcttgcaggctcatccctgttgctgtgaatgacacaa

SEQ ID NO: 865362 - DNA, 655 bp, Homo sapiens
atgtggcacacacttttagacttagcatttctatacttctcttgtccatttgtgcagaaaggtggagagataattcagaaagagagctagtttaaagctagaataaaccatgcaaacacattttttttctaatttttgcaamttttctccaatatcctgaaggttaaacagaggttattctgttctgttttctatacccatgctaaggttcaagaaactataaaagaggctggctgactatctctcaaaaggcttcctaggagaggttttccatggccctgggtctggacttcacctagaaggatttaaatctgagttgattaacaagatgatatccttcatggaaaaactcacaggggcaaagctcaaaataagcttgttatgtatataaaaaagacaatttatcaatttagaaaagatgccctgaatgcctgtatgtgtatgtgtgtttgtgtaattttatatattaaataatatataattttaattgacagataaattgcatgtatttatcagcctatatttttcatgacatagtttttcctctggaaaaggtaagtagaaatctaaattaaaagctgtatattgctcaatgaatttgaaattgagaaatgtgtgtagttcaaatattttgtctagctacctatagggatat

SEQ ID NO: 865363 - DNA, 655 bp, Homo sapiens
atgtggcacacacttttagacttagcatttctatacttctcttgtccatttgtgcagaaaggtggagagataattcagaaagagagctagtttaaagctagaataaaccatgcaaacacattttttttctaatttttgcaaattttctccaatatcctgaaggttaaacagaggttattctgttctgttttctatacccatgctaaggttcaagaaactataaaagaggctggctractatctctcaaaaggcttcctaggagaggttttccatggccctgggtctggacttcacctagaaggatttaaatctgagttgattaacaagatgatatccttcatggaaaaactcacaggggcaaagctcaaaataagcttgttatgtatataaaaaagacaatttatcaatttagaaaagatgccctgaatgcctgtatgtgtatgtgtgtttgtgtaattttatatattaaataatatataattttaattgacagataaattgcatgtatttatcagcctatatttttcatgacatagtttttcctctggaaaaggtaagtagaaatctaaattaaaagctgtatattgctcaatgaatttgaaattgagaaatgtgtgtagttcaaatattttgtctagctacctatagggatat

SEQ ID NO: 865364 - DNA, 635 bp, Homo sapiens
catgttaccatttatcatcatgagtattgtgagttttagccatgctgataggtgagtaatggcatctaatatttatttaaatgcacatgtcccaaataaaaaaatttatattaaacaatttttatataatttttgctgagatgcctttcctgatatttggttcatttttatctccattgttttcttttcattagttgtaagtttacttgcatattgattataaaagtcatttaacaaattgaaagaattgatttaacaaatatatgacttggaagtattttctcccagtctgtggttgcctttttctctcttatcagtgggtatttcaaaaaatatgtgtgtgtgtgtgtgtgtgtgtgtgtgtgtgtgtgcacaaatttagacaaaaaacataaaaaattattcattcatagatcatgtatttggcattatatctgaagtctcattataaaatacactaatastgattatttattccatgtctctaatctcaggacacaatcaactcatgaatgtttagccttcacctattgattggaggaatatctgcctgagatatttggaatacttctacaagaagacgtgttcttcttcccatcgtttctttgtttaatcatctattaacatccatattg

SEQ ID NO: 865365 - DNA, 546 bp, Homo sapiens
tgagatgctcgaatgcttcatgaagctagtctttgccttgctcacccaccacatggctgcatacctcattctttccagatgtaggacacgaacttgggcaaagtcgccgctggccacagagggttctggccagaaaaagcaacaccccagtgatcccgaaacaactatggtaaatactgtaggccatggtaacacagtagtatttgtgtatctaaacataaaaaggtatagataaatagggaagcatattattgtggaaccaccattgtttgtgtcatctgttagtggcagaaactttgttatgcagagcataactgtatttaaatttstgggggaaaaatacagccacccaagaacataaaattgataaaacacttcttatgaaatggaagatagagaaatactttcccaggcaaagaaaaactgaagaaattcatcactactagaattacctcacaagaaatgtcaaagggtctccactaggtacccaatagaatgagctcctgtttcagccccactctggcatctgtcctgtgattgttctgt

SEQ ID NO: 865366 - DNA, 546 bp, Homo sapiens
tgagatgctcgaatgcttcatgaagctagtctttgccttgctcacccaccacatggctgcatacctcattctttccagatgtaggacacgaacttgggcaaagtcgccgctggccacagagggttctggccagaaaaagcaacaccccagtgatcccgaaacaactatggtaaatactgtaggccatggtaacacagtagtatttgtgtatctaaacataaaaaggtatagataaatagggaagcatattattgtggaaccaccattgtttgtgtcatctgttagtggcagaaactttgttatgcagagcataactgtatttaaatttgtgggggaaaaatacagccacccaagaacataaaattgataaaacacttctwatgaaatggaagatagagaaatactttcccaggcaaagaaaaactgaagaaattcatcactactagaattacctcacaagaaatgtcaaagggtctccactaggtacccaatagaatgagctcctgtttcagccccactctggcatctgtcctgtgattgttctgt

SEQ ID NO: 865367 - DNA, 601 bp, Homo sapiens
ctaatttataagtgtagaaggaaagatgaaaatagaaattaccagttgacaaacaccacagtattaattgtaggcaagaatcatcaatagatcctaaaattactggggttaatattctgagaaaaaaaatatttgcatagcctcaaartatatccccatgaaagagagaaagtaataacttcgtagggaagaaaccgtaccttaactatgtgatcaaagacaagatcacgaataacaatacatattgacatcacatatctcccggtatgatgctctgagaagatacaatgctgcttttgtggtattcttgccaaatacatataacctgaatttatcagaagaaaacatcagacaaacccaaatcgaacacattctatacaataactaaatagtattcatcaaggttatgaaagacaaagaaaaactgaggaattatcctagatgggaggatactaaggtgatatgaaaacttgattctggaacagaaaaggacattagtgattcaagtggagaaatctgaagaaggtctctaaatagttaatactattaaggttaattccctataatgtggttatgaaaggtgttaacattagaaaaggaa

SEQ ID NO: 865368 - DNA, 579 bp, Homo sapiens
cgttgtcaaagcgacatggctgttattgtcaagtagctggctctgcacaggctctaatcatttaaatgcatcagattttgccttttgtctttagacaatgtgtcaagagttcctattacagtggtgggattgtgacccctgcccctttggttcatggtaaaaggcagccccacatgacagattttcctggttttgaacactccagctaatgaccaggtgagaggacaataatcttgttagtgtctatgtcaagttttgttctgtgatagaataattgaacccagaccctckcttcctcatctcagctcccacctggagaagaaacaggaactttgtgggtggacaaatgggaagcaggaacctgggatcaggaggaaataaaggcatcatctggcttttagaaaaaccaggtacaatagagaagaactgttttattatcagagttaggggtgctttaaagtcttgatccaaagacttacaagctgcagaattatttttgcagtatacctcttaaaaaataaacccataaaataatactacacagtttttgtaggtgtatatatttttgtaaatacaaag

SEQ ID NO: 865369 - DNA, 580 bp, Homo sapiens
tggcacaaggatttgaactcatgttcccctggttctaaagcccatctgcatggtaccactagcttctcaagcagcgttgcacccgaggggaactgggtagtatgcctttttagacacttaatagcctggagcatgttttgcatgctggaacaggatattttcctttcaaaagcctattaaagaagaccaaagacaaatttagttgaaaaacagtgtgttttttacaggsggttgggagggacaagtttaaaagagcagaatgacagtctgttttgttttcttcattttaattgaattttgttttgtcagaagttcgtctcctcctgtatgcatacaccacttagacctgtgggcttgctacctctttccattttcatccaggcatagagaggagattgcttccagaaagagtgcacaggcccttgaagttttactcttcaaataattaaaggcttaattccagccccaggtcagccatacacaatgccagctttcccatacacctgggagaaaaagcttgccatcaaagtaaacaattccctctcatctcagttccaagagtcatttggagaacatacat

SEQ ID NO: 865370 - DNA, 560 bp, Homo sapiens
ggaagtagcatcaactggatttgttgctactgtgagggggactgtgagggaagattcatgagggttgtgcagagggaagaatgcaatcaatgatgacttttaggttctggctttaactactgggtgattccattaaatgagttgtaggaaaggagagatttaggggatcaaatcaagcgttyggtgtaggcattttaagcttgagattcctatcagacaattatgagaatacctgcttgcctactgagtttttgactattatctggatttctccttcttatgtcctaatgcctaaatgggtgctcaatcccaaaggcttccataattaggaataaatctgtgcccctatccattcttcagttttgttgctggaatttcctggctgcatgtttgtagccaggaaacataccagagtttcagtatgtttcagaccagagtttgtagctctcaatttccccagctccattctgcatggtgctgggttcccatttccctctctcttcctgaccctgtgtttctgcagttgtaggatgccttgggaccaagtcaacacaagtcaa

SEQ ID NO: 865371 - DNA, 560 bp, Homo sapiens
ggaagtagcatcaactggatttgttgctactgtgagggggactgtgagggaagattcatgagggttgtgcagagggaagaatgcaatcaatgatgacttttaggttctggctttaactactgggtgattccattaaatgagttgtaggaaaggagagatttaggggatcaaatcaagcgttcggtgtaggcattttaagcttgagattcctatcagacaattatgagaatacctgcttgcctactgagtttttgactattatctggatttctccttcttatgtcctaatgcctaaatgggtgctcaatcccaaaggcttccataattaggaataaatctgtgcccctatccattcttcagttttgttgctggaatttcctggctgyatgtttgtagccaggaaacataccagagtttcagtatgtttcagaccagagtttgtagctctcaatttccccagctccattctgcatggtgctgggttcccatttccctctctcttcctgaccctgtgtttctgcagttgtaggatgccttgggaccaagtcaacacaagtcaa

SEQ ID NO: 865372 - DNA, 600 bp, Homo sapiens
tcacttaattgctactcctttaactgtgtagttaccttgcacttggcatgtttactgggtgggacaaaaatcaagggtctgcttgaggacttttggagaggagacaaatccaaataccttctgacttgggagccacttacaagcttaggyccaatctgtatgattggagaaagtagcccaggactatcttttcatatagatgcagaggcgcagaacaaataaagccccattctttgataatttacctggggttcagaaagtttattctgagcttaattccataagatcttctccaaatatatgttgcagtcactggctccttcttggcatttgagctaacatggaacattttcctctctagccctcctagttctgtgatttagattgaccatgagggcaaggtaatagaggaggaaggtgaggaaaggaccagaaatatgatgtgtctgcagacagcaggagtatctagtcttgtaagctgttgcctccctgatgcagccctagattccctagaaaggacctgctcctgcccccaccagttgccatggcagcaggttccaagtaactccagcccaaagttttacacttaagaggcatgca

SEQ ID NO: 865373 - DNA, 512 bp, Homo sapiens
tcttactcattcactaactactaaaagttttgtacaccaaattaaaatttctcagaaagcttggtcatataaacaaaagaaatacattctcttcccacaacaatcatttctttttcctaaataaactgattaaagattctaacaaagagaaaattccccattgatgaaatcagtttctcataactagctgtgtacattktttattacgtaacagtaaaaacatgaaacctatcaagtttgctaaaaccaaatattgcaggctaagacaagactttcagattggcctatcatttaatagaataagaaaagacctccttaattctgtttccctttcttaaggggtaagtatcatctgctcattaactgacaaatggtgtggtcaagtagcaaggctgcagccaaaagacctacactggatatctgactccttatctttcatgttgtgtgaccttgagcaagttactttaacctttttaagcctctgtttttttcttctataacagagacagtaa

SEQ ID NO: 865374 - DNA, 562 bp, Homo sapiens
aaggcagctctcctgagggtgggcaggtgagagggatgatcggttagtaattggcccaccagtggatcttgcacctcacctaaccaacaactgccattctccacccttctctggcacaaaatgcaattcaacataagcctgatgggtgttctgttcccacatgggttaaatacaggccgacagccttataactttttgctcttacaaactgaaagaattttaaaacaccatatatccccttaaatttatgaagttgaaatctatattcttactttgcataagtttgaatagttttaagaacatatatttccagcatcttgtaaacatcgacaactaaaaattacatttttagtttaaccagtgaagtctaaataccacaatgtatccatgatatctaaaaacygtaatgattaaataatcaccatcatctacttaaaaaatacaggaacaagctccttaacgtttttgaagaaacttttaattttagaataattttagatttacagaaaaattgcaaagaaaatacagagttctttcccctgctcttttcctgttgtttttc

SEQ ID NO: 865375 - DNA, 599 bp, Homo sapiens
tgcctggaagtggtctagtatagtagtatggaatcatgtacatatagtttagtagtatagaatcaacaaccaaaattgacaaggtccttataaactagataaagagacaaggaataatccaggatttagttccagatgtttttgtttatttttgttttattaagattttctttaaaatgtattagagctggacagtatggctcctgtaggcttggatattagtaactctcattgttcagaattaagcttatactaaagttgtacttggtgtgggcaatgtttttttctgccagaatcatatagtaaaagacatctgtgattgtttttttaaagttgaagttaagcagttagtctccttggcttactacttttattaaatatcaatgctgatgtcattttctccacaraccaacatcctaaatgatttttatcaggacagataaactctcaaatacagaaagcaggtcttttcattatcctattgattaaaagcaaaatacaaaaaaattagctacatgatacaggcacacaacaaaaatctttgtcaaattttaacatggcacaggtttcaaaataaaattatcccttttagaactggc

SEQ ID NO: 865376 - DNA, 598 bp, Homo sapiens
agaatcttcaagattagccacgtaaagttgtgccacttagatatgatttcactttcacttccttacttaggttgttggttcgataattgatattactgaataccagacaggctaagaaccacatcactgatttacactctcctccacatttaaccgaaaagtgaccaatcaaaaagyatcacaactcaggttgatgtgcattcagtctatcccatggtatctttgtctcttttcaaatcacaatactgatgttccaataaatgatgtttattatcaggccatgagccatcaagaaaatactaaactctgcttagaacactgtttaagaaggttggaaaatatatatcaactatagacagttttcttagaaggaaaatcaacatgttagcacataacaaattaacatacaatctgggtaactgaataatatataacggcatgcttccataatagatgaagaattatggaatctctgtttgcaatccaatgtgggtaagaagaaatgtattcattcaacaactattcaaacatttgttgaacaaatgatatatgaaaggataaaagaaccagtctagaagaggaaacttgtgatcttcag

SEQ ID NO: 865377 - DNA, 591 bp, Homo sapiens
tcattattttactaaaatgtgctacgtactactctaggtgtttttcacatattaattcatctcaccctcaaacaatcttatgagatagaaaatatcattatgccccttttgaggaaacagccacagggaggggtaaaggaacttgcccaaggtcacacagccagtaaatggcagagccaggattcaaacccacgcagtctggctccagagcccacatatgtaagcactatactattaagaagacaacaattcctatacttactagcttcatgaaagtaaaaacatttgcaggttttgctttgaaagatccaagtgaatgctactagaaaaatacaaagaataatgtactttttttatcttaagcacyagccaaggaaacaaagaaggagcagaattcactgtacccaagtactgtgtggttattttgatacaagtcaacaactacagcagatgctggtatccatcttcctgacaggtgacaggtagtaccaacactcttcagatcatgagacctcaaaatactcattttatcctgacagcaggggtgagaaataacatgtaaatcatcatggggagatggaggcctaagta

SEQ ID NO: 865378 - DNA, 599 bp, Homo sapiens
gttttataatatctgcacattttctcaaatgatgaaagcaaatcaacagcattaagccaaatcaacagtttaattacagctactctctatgcaaaatccactgcaaccaagcaggtcacagctgaggttgctgtgtcacctcctaaagactgggctgccagaaaaacctcagatcatttgcaagtactgaaacatgaaggaaatttggggctcagtaacagaagaactgatatacttggaacattttcagaaactctttcctatgccgacccttactcatcttcctgaagacacaaccactcattcaytcagtacttctggcttgctcactgtgtaccgggcactgtgctaggcatgtggggaggggacagttgggggcagagtcatatcagacacaggcacagcccctctagaactcacagacattctcagacctaagcataaattcagggcacagtcctatggaagtaaagggcttagaatcaaaatgcagatacattaatatgcaaatgtgcttttcataagaacatatcacaggttgcacacgctcaaattacacttgggaaaatgatccaacataactgacacacactattaca

SEQ ID NO: 865379 - DNA, 667 bp, Homo sapiens
aaataaaggaattggaaacagtaaatcaacagagaaaaacataaaaccaaaagctgattgttaaaaacatcaactaaaccagtaagtctctagcaaggctaaataagagaaaaagagagatgaaacaaactactcatataaggaatgaaagaggggacataactacagattacatgaacattgaaaggataataaaggaatactaggagcaacttcttatccaccaatttacctattggataatayagataatacagaccaattccttgaaagacacaatctgccaaaatttacatgagaagaaataagcaatctgaataggtctatagcaattcaataaattcataaataattcataacctttgtaaaactggaagcagagggcccagatgggttcactggtaaatcctatctgacattttaaggaagaaattttaccagttctctgtgatctctttcagaagatagaggcagagaaaatgctttctaaatcatactatgacccaaacttactcttaaaaagaaaacagacagagacattgcaggaaaactatacaccaatatctctcatgaacatagatgtaaaaatcaacaagatataagcaaatcacattcaacaatgtgtacaattaattatacaccatgaccaaataggatttatcgcaag

SEQ ID NO: 865380 - DNA, 640 bp, Homo sapiens
ccccattctgaacttccaggccccgatcaatgaatacatctgaaggctatgaatactataacaaaaagcaggagatgacatatgacctaagatgtgtgccaaatgtttggggaacttagacattgggacaatcccatctaactgaaggattcataataaaattcacaaaaggagatcttaactgaattgtgtgttgaaggttgagctgagattgggagtggatttatagaaagaaggaaatyctgagataactgagagggagttaagtccaggatatgtttagggtgtagggaatgatccacgtgttaggcggctttcaagatgacccgcaatgatccccacttcctaatatttacactagtgtgttgtcacctcccattcagtgtgggatgaccccccacccaagtaacttgcctctaatgaacagaataaggcaaaagagatgagatgttatttccatgattagattacaaaagaatgacttctatcttgctgtgttctttctattgccgtcttggcttgcaaaccttgatgaagtaagcaaactaccatgctggaaaggccatgtgccaaggaactgaagactgccttcagtcaacagcaagtaagaaactgaggcttgtattccaacaaccagcga

SEQ ID NO: 865381 - DNA, 640 bp, Homo sapiens
ccccattctgaacttccaggccccgatcaatgaatacatctgaaggctatgaatactataacaaaaagcaggagatgacatatgacctaagatgtgtgccaaatgtttggggaacttagacattgggacaatcccatctaactgaaggattcataataaaattcacaaaaggagatcttaactgaattgtgtgttgaaggttgagctgagattgggagtggatttatagaaagaaggaaatcctgagataactgagagggagttaagtccaggatatgtttagggtgtagggaatgatccacgtgttaggcggctttcaagatgacccgcaatgatccccacttcctaatatttacactagtgtgttgtcacctcccattcagtgtgggatgaccccccmcccaagtaacttgcctctaatgaacagaataaggcaaaagagatgagatgttatttccatgattagattacaaaagaatgacttctatcttgctgtgttctttctattgccgtcttggcttgcaaaccttgatgaagtaagcaaactaccatgctggaaaggccatgtgccaaggaactgaagactgccttcagtcaacagcaagtaagaaactgaggcttgtattccaacaaccagcga

SEQ ID NO: 865382 - DNA, 640 bp, Homo sapiens
ccccattctgaacttccaggccccgatcaatgaatacatctgaaggctatgaatactataacaaaaagcaggagatgacatatgacctaagatgtgtgccaaatgtttggggaacttagacattgggacaatcccatctaactgaaggattcataataaaattcacaaaaggagatcttaactgaattgtgtgttgaaggttgagctgagattgggagtggatttatagaaagaaggaaatcctgagataactgagagggagttaagtccaggatatgtttagggtgtagggaatgatccacgtgttaggcggctttcaagatgacccgcaatgatccccacttcctaatatttacactagtgtgttgtcacctcccattcagtgtgggatgaccccccasccaagtaacttgcctctaatgaacagaataaggcaaaagagatgagatgttatttccatgattagattacaaaagaatgacttctatcttgctgtgttctttctattgccgtcttggcttgcaaaccttgatgaagtaagcaaactaccatgctggaaaggccatgtgccaaggaactgaagactgccttcagtcaacagcaagtaagaaactgaggcttgtattccaacaaccagcga

SEQ ID NO: 865383 - DNA, 667 bp, Homo sapiens
aaataaaggaattggaaacagtaaatcaacagagaaaaacataaaaccaaaagctgattgttaaaaacatcaactaaaccagtaagtctctagcaaggctaaataagagaaaaagagagatgaaacaaactactcatataaggaatgaaagaggggacataactacagattacatgaacattgaaaggataataaaggaatactaggagcaacttcttatccaccaatttacctattggataatatagataatacagaccaattccttgaaagacacaatctgccaaaatttacatgagaagaaataagcaatctgaataggtctatagcaattcaataaattcataaataattcataacctttgtaaaactggaagcagagggcccagatgggttcactggtaaatcctatctgacattttaaggargaaattttaccagttctctgtgatctctttcagaagatagaggcagagaaaatgctttctaaatcatactatgacccaaacttactcttaaaaagaaaacagacagagacattgcaggaaaactatacaccaatatctctcatgaacatagatgtaaaaatcaacaagatataagcaaatcacattcaacaatgtgtacaattaattatacaccatgaccaaataggatttatcgcaag

SEQ ID NO: 865384 - DNA, 667 bp, Homo sapiens
aaataaaggaattggaaacagtaaatcaacagagaaaaacataaaaccaaaagctgattgttaaaaacatcaactaaaccagtaagtctctagcaaggctaaataagagaaaaagagagatgaaacaaactactcatataaggaatgaaagaggggacataactacagattacatgaacattgaaaggataataaaggaatactaggagcaacttcttatccaccaatttacctattggataatatagataatacagaccaattccttgaaagacacaatctgccaaaatttacatgagaagaaataagcaatctgaataggtctatagcaattcaataaattcataaataattcataacctttgtaaaactggaagcagagggcccagatgggttcactggtaaatcctatctgacattttaaggaagraattttaccagttctctgtgatctctttcagaagatagaggcagagaaaatgctttctaaatcatactatgacccaaacttactcttaaaaagaaaacagacagagacattgcaggaaaactatacaccaatatctctcatgaacatagatgtaaaaatcaacaagatataagcaaatcacattcaacaatgtgtacaattaattatacaccatgaccaaataggatttatcgcaag

SEQ ID NO: 865385 - DNA, 589 bp, Homo sapiens
gttcttggaataacaagtgatttttcatttgatattggtattatggatattatataaggagaccctggaacatttttaaaccttttgttttagctggctttctctggtagcactttagcagggaaagggagacaccagcttctttctacaaggtatgaataaaaatacaacttccccactcagcctctgttgacacctaaggggtagggattttgattactgctgcatggagaagggagattcagagccctgctaggtcttctccatggataactaactgtattagcctgttttcatgctgctgatgaagacatacctgagactgggtaatttataaagaaaaacaggtttaatggacttacagttccacatgattggggaggcctcacaatcatggcagatggcaaaggcacatcttacatggcagcagacaaragagaatgagagccaagtaaaaggggaaaccccttttcaaaccatcagaccttgtgaggcttattcactaccactagaacagtttgggggaaactgccccatgattcagttatctcccaccaggtttctcccacaacacgtgagaatgatggga

SEQ ID NO: 865386 - DNA, 590 bp, Homo sapiens
caactataattttaattaagtctgaaactaaaatgttagaaattattcagccagaatttgaggtaacctaatatcagatttttactaatattttaggaacataaattcaacctttgactcacccttaaatttatggagcatatttatataatatagagaaaggtaaaatgtatctctagtaactacaaagttctttccatagaaatctaaaaatcctgtatctactggttccgatcaaacaacaaattcctctggtactgtgacttcaggctccgaaagaaaacatcgttcaaggtcatggaggactaaaaggaaattcaacaaggaatatctctgaaagtagaaaaaggaaaaataaagaagccaaagtgggcttataaggacacaaatctcaaaaataaacctatggaaaatgcgtagagatgtaaatatccaggaataggtwaaaaaaagggtgagagcccctaaatatcttccaggaaagctcatctaaatcagtctcagtgttggaatcaagccgacctttgggtgactccagggttttcatttcctctaaggcttcggacccagaacttccagagtgacaaaga

SEQ ID NO: 865387 - DNA, 603 bp, Homo sapiens
gccataccagaaactaaaattcctcttccacaaggtgggtcatagaaaccagaaccccatttccccaaagccagccataatacaatatgactctaactctccctccccttctgtgtaaaaactggccataaagaaatgatctgacctactttgtttgactgtaggtcatcagactcccattccagagagggtcctgtcccacacccagaaggaaggaacgctgctcagagaggcaaagagaatctagatagataggccttgctgggtttcctcactcaatctattagcatcagatctccctttttgtccaatcatatttttttacataactctccatactttgttgaacctaagcataaaaatggaccattttccctgtatctttgggtcttcatcctgaagactccagggtcacataaaatgatgatcaaataaatctgtatgccttttctcctattcttctacctygtcagtgattttcagcgaaccttcagagggcgaagggtaagttttcccttggcccagacaccagcaaatgtaagtaaagtatttttctgagtcctgtgagccactttaacaatatgaaacagggggaaggggctg

SEQ ID NO: 865388 - DNA, 587 bp, Homo sapiens
ccaaggctttctctctgattcacaaaaaacattaaaattcaagtactgtattaattgggatatattattagcagcttcaacagagaccccaaatagcagtagcttagatgggaaagtttagctctttttcatatgaaagtccatgctggcactgtgaagtagtcagaggttcaggttccttccatatcatcaccttatcatccctagggtgctgacgtggcccgaaaggggtctcagctatgcctatgttcatgggtcaagctgaaagtcatcgaaggattgagaacaaggatatgggagaaataacaagacaagtctctgyagagactgcaatgcctctgctccagtggagttgagatcagatttggataatcaaagacatgtgacacgaattcagcacccatagtagatggtaattaagcccacagcacttcgagtagtgaggaaaccatcaggctatgggtggtgtagacaagctaagtaggtgtaaagtagtaaacatatttgtgtatatatatgtgtgtatatatatatatacacatatatatggtatatatgtgtgtggtatgtcactgtggtgtgtgtgt

SEQ ID NO: 865389 - DNA, 592 bp, Homo sapiens
aaccatgaatcttgctgaacacagcgagaaaaaatgtagaaaggaatagcagagattgggtagaggaagaaggagaacccagtgagctaccaaaagcacatcactgagggacatttgaggagtagggagaacatcagaaaggacaataaattgaaattgagacctgtccccagacagcagccatcaactgccctcaagtagcagtgtctggacacagactcctggacccrgaagatgctctcgtacactcaccaacagaccagtgcgcttcccaacaaggccgcagaccactccacggcccagccgccctcctgggacagccaccatcttcctctcccttttccatcttgaatggcaattaggagaaggttaactgagtgtctttctcccaggaatcctcttccacttttcaaaatcacagcattagcaaaagaaaatcccagcttaggctaacaggtaggaacgtggtgcagccctgggagctgctgttggaagtggggagattgggtgaatcttcccagcgggaggttaatactcatcattcgaagttgcagctgaggcccatttgagtgacaggcagccgggagctgaa

SEQ ID NO: 865390 - DNA, 592 bp, Homo sapiens
aaccatgaatcttgctgaacacagcgagaaaaaatgtagaaaggaatagcagagattgggtagaggaagaaggagaacccagtgagctaccaaaagcacatcactgagggacatttgaggagtagggagaacatcagaaaggacaataaattgaaattgagacctgtccccagacagcagccatcaactgccctcaagtagcagtgtctggacacagactcctggacccggaagatgctctcgtacactcaccaacagaccagtgcgcttcccaacaaggccgcagaccactccayggcccagccgccctcctgggacagccaccatcttcctctcccttttccatcttgaatggcaattaggagaaggttaactgagtgtctttctcccaggaatcctcttccacttttcaaaatcacagcattagcaaaagaaaatcccagcttaggctaacaggtaggaacgtggtgcagccctgggagctgctgttggaagtggggagattgggtgaatcttcccagcgggaggttaatactcatcattcgaagttgcagctgaggcccatttgagtgacaggcagccgggagctgaa

SEQ ID NO: 865391 - DNA, 652 bp, Homo sapiens
gaacagaccaataacaggctctgaaactgaggcaataattaatagcccaccaccccaaaatagtccaggaccagatggattcacagccgaattctaacagtggtacaaagaggagctggtaccattccttctgaaattattccaatcaatagagaaagagggaatcctccctaactcattttatgaggccaacatcatcctgataccaaagcctggcagagacacaacaaaaaaagagaattttagaccaatatccctgatgaacatcaatgcgaaaatcctcaagaaaatactggcaaaccgaatccagcagcacatcaaaaagcttatccaccatgatcaagtcagcttcgtccctgggatgcaaggctggttcaacatatgcmaatcaataaatgtagcaaggctggttcaacgtatgcaaattaatgaacataatccgtcacataaacagaaccaatgacaaaaaccacttgattatctcaatagatgcagaaaggcctttgacaaaattcaacagtgcttcatgctaaaaactctcaataaactagatgttgatggaacatatctcaaaataataagagctatttatgacaaactcacagccaatatcatactgaatgggcaaaaactggaagcattccctttgaaa

SEQ ID NO: 865392 - DNA, 556 bp, Homo sapiens
acatttgcagaaccattgacaagggggtctgaggagtcaattgtgatagcattaattttctaattttgatgattgcattgcgatttcaagggagaatgtccttgtttgttagaaatacaaaataaagcattatgtcagcaacttgagttcaaacaggtaagtggaggagggggtttctttgtaatgctcttgacaatttctctgtaagtttcagactgttcamaataaaacaaggaactccaatatatacaatctaactaactggtccatattcttcaaaaatatctgttacaaacatacacaaaaaaagctgataaactgtttccaggtaaaggaggctaacaagaacttaaaaactaaatgcaatgggtaatattgaattaaatctgggaccagaaaaaaataataatattataaaggatattattgggacaattgatgaaatttgaataagatctgaagattatatatcaatgttaagattcctaattttaatcactgcaatgtggcatgtaggtgatggccctcaggaaatgcacgcgaaagtatttaatag

SEQ ID NO: 865393 - DNA, 556 bp, Homo sapiens
acatttgcagaaccattgacaagggggtctgaggagtcaattgtgatagcattaattttctaattttgatgattgcattgcgatttcaagggagaatgtccttgtttgttagaaatacaaaataaagcattatgtcagcaacttgagttcaaacaggtaagtggaggagggggtttctttgtaatgctcttgacaatttctctgtaagtttcagactgttcaaaataaaacaaggaactccaatatatacaatctaactaactggtccatattcttcaaaaatatctgttacaaacatacacaaaaaaagytgataaactgtttccaggtaaaggaggctaacaagaacttaaaaactaaatgcaatgggtaatattgaattaaatctgggaccagaaaaaaataataatattataaaggatattattgggacaattgatgaaatttgaataagatctgaagattatatatcaatgttaagattcctaattttaatcactgcaatgtggcatgtaggtgatggccctcaggaaatgcacgcgaaagtatttaatag

SEQ ID NO: 865394 - DNA, 634 bp, Homo sapiens
actatttttaaaacagactagggaggggagctgccgaaacaatccccaaacttctcacttcacacttctgaggaatgagatggggtagaagtagggacaagcatgaagggaggtgtcatgttttatctttatcttttggcactgtttgaacttttattatataaaatacaaccacataaacaaatatgtaattttttaatacagacaaaaaaatgatggaacatctatataatgttaccaagacagctgctaggaatgagatagagctacttccattaacatgtaagaaaactatgacctatttttttaaggcaatttgcagagtggcagggaatataaatcattgttgcaaaaaacatctaaatagttcacataygcaacgtagtaactataagccatgctacttctgcacagaggattaaggaaggacttgtagacacttgtctgattattttatgagtttgtgttcacttataatctttaaattaatcttatgtgaatatattcttattaaaaaatcaaataatatatgtattgcttttatgatttaaaatacatattactgtggtttagagaagaaattgtttcttaaaggacaattcctatttctttcttcagcctcaagagtcagaaa

SEQ ID NO: 865395 - DNA, 622 bp, Homo sapiens
acccccttcacaggaagccatgctccccacagaatatcatcacccttctattgagtactctctaccttccccattacgttcagatgcttcctcagacatttataaagtgttctattctggggtctgtttagggctctctattctgtttcactggtcttcaaattatcttgatatccctaaactaatagctgctttataaaacatcttaaaatatggcaggcctccttcttaaccttttcttaattaaaattttctttgccatttttaacttgctctttcaaattaccctttggcaagtcctattgggattttaagtggagttttagtaaagctgtaaaataacttagggagagttgatgtctttargatagtttttatatccacctgcatgtggtgtttctctatttcatttatacctgtcggtcaaacttgttttggttttcttcttgtgagcaccaaccttttgtttgaagggaagaagacaacattattatttgtagatgatatgatttttttacctaaacctggaagagttatttaaattgatgagggttaatcttcatatagacaaaaataatccacattaataactttcctatataccaaaaccagctcattagaa

SEQ ID NO: 865396 - DNA, 590 bp, Homo sapiens
cctgaatctggggcaagtatacctacatcttatgaaactttggctccttgccagccttcctggtcatcttcacatatttgctggtggccagactagctaccattgcttctgtttctctgagctttgctgagcatgcaatggttcccttttaccctggctgtgcctcactgccccctgctgtgctcaagaatgtggctgtcaccagcatcctcctgctgatggtggctaactgctggagcttgaagctggccaccatgctgacaaatgtgtgcatggctaccaaagtattctcattgctggtcatccttggagcgggggtggtgttgggccagggccacatatgcacggaagcccttctgtctgccttccaccacatgatgctgcargcggggcacattggcatggccttctagccttctaccagggcctgtggtcttttttttctttttttttttccttttgagatggagtctcgctctgttgcccaggctggagtgcagtggcacaatctagcctcactgcaacctccgcctctcgggttcaatcgattctcctgcctcagcctcccgagtagctgggattacaggctc

SEQ ID NO: 865397 - DNA, 583 bp, Homo sapiens
ttccagcactggagtgatgaggaatttgctgctatgcctatgtggtggttggggcaatttcctttgccctcagaatccccgattttagacagagtcttgctctgtcacccaggctggagtgcagtggagtgcaggctccttgcaacctctgcctctccagttcaagcgattctcctgcctcagcctcccaagtagctgggagtacaggcatgccccaccacgccaggctaatttttgtaagaatccccgattttagggctgggagggacytgagaggacccacctcatacgagaatccactggtgtgcaattggcttcactttcacaaattttccacgtagcccaccaggcagtgtgactggcaaggcagagcagcccaacgaggcttcctgggagaggagtctggagccaagcctccaagggcagatgcagcctgtggcaacacagctatgtggagcagcatgaacaatccagacaccaaaaagggcaaggcatgtctgcgccacaaggaaatatgtcagtgagtgagagcagcctcatcgctggggctgatcacagggacctgaagtgagtcctgagatta

SEQ ID NO: 865398 - DNA, 583 bp, Homo sapiens
ttccagcactggagtgatgaggaatttgctgctatgcctatgtggtggttggggcaatttcctttgccctcagaatccccgattttagacagagtcttgctctgtcacccaggctggagtgcagtggagtgcaggctccttgcaacctctgcctctccagttcaagcgattctcctgcctcagcctcccaagtagctgggagtacaggcatgccccaccacgccaggctaatttttgtaagaatccccgattttagggctgggagggacctgagaggacccacytcatacgagaatccactggtgtgcaattggcttcactttcacaaattttccacgtagcccaccaggcagtgtgactggcaaggcagagcagcccaacgaggcttcctgggagaggagtctggagccaagcctccaagggcagatgcagcctgtggcaacacagctatgtggagcagcatgaacaatccagacaccaaaaagggcaaggcatgtctgcgccacaaggaaatatgtcagtgagtgagagcagcctcatcgctggggctgatcacagggacctgaagtgagtcctgagatta

SEQ ID NO: 865399 - DNA, 583 bp, Homo sapiens
ttccagcactggagtgatgaggaatttgctgctatgcctatgtggtggttggggcaatttcctttgccctcagaatccccgattttagacagagtcttgctctgtcacccaggctggagtgcagtggagtgcaggctccttgcaacctctgcctctccagttcaagcgattctcctgcctcagcctcccaagtagctgggagtacaggcatgccccaccacgccaggctaatttttgtaagaatccccgattttagggctgggagggacctgagaggacccacctcatacgagaatccactggtgtgcaattggcttcactttcacaaattttccacgtagcccaccaggcagtgtgactggcaaggcagagcagcccaacgaggcttcytgggagaggagtctggagccaagcctccaagggcagatgcagcctgtggcaacacagctatgtggagcagcatgaacaatccagacaccaaaaagggcaaggcatgtctgcgccacaaggaaatatgtcagtgagtgagagcagcctcatcgctggggctgatcacagggacctgaagtgagtcctgagatta

SEQ ID NO: 865400 - DNA, 485 bp, Homo sapiens
cagttgtaagtttttctttcccatcttatgactttctgacttgtcctatattttgctctttcctagtcattctactttaggacaagaatttgccatacaagatgctctctcacataaaatttctttccttcataacctatcttacataaatatatcttcatatccacaactttttcttttcttcttttttttttttttttttttggagatggggttttgctcttgttgcccaggctggagtgcaatggtgtgatctstgctcaccacaacctctgcctcccgggttcaagcaattctcctgccgcagcctcccaagtagctgggattacaggcatgtgccacaacacctggctaattttctatttttagtagagacggggtttctccatgttggacaggctggtctcgaactcctgacctcaggtgatccgcctgcctcggcctcccaaagtgctggaattacaggcatgagccaccatgcccag

SEQ ID NO: 865401 - DNA, 625 bp, Homo sapiens
agatcctggaatggttatggaggcaagttttaagacctctagcactgccctagcttactttagccaagatggagtaatttacagcccattaggcccttaaaatttggcttgcttctgtgttctcctggagtttcccagctccttctaaagaggtttcaggaggctgggtgcagtagctaacatctgtaatcccaacactttgggaggccaagacgggtggatcacttcaggtcaggagttcaagaccagcctgggcaacatagtgaaaccctgtatctactaaaaaaaaaaaaaatasaaaaattagccaggtgtggtggtaggcatctgtaatcccagctatttgggaggctaaggcaggagaatcgcttcaaccagggaggcaaaggttgtagtgagccaagatcatgccactgctttccagtatgggcaacagagtgagactctgtctaaaaaaaagaaatagaggtttcaggaaactttattacttccagaatgttacttgtgtgactctgaatctgatttcataagctcagggaaatataacttgatctatattttaagccttcatcctttaggtaggaaacttattcccagtgagtttaggaattcccactcatcactg

SEQ ID NO: 865402 - DNA, 616 bp, Homo sapiens
gatttttggctttgtttttagattaagaaagcttttctcagtttcttagttaattatgaacatgcactatcacatcatcttggactcaattcaaaaacttatctaaaacatgtagttactgggaaattccagattaatttcctgcaagttttagttagttaacgattgtgttaaacacttaagagagcagctcctagatgactaaacctgctcrgctgaaatcaaatgctctcatgcttccctgaatggacacacacagagtctcttcacctgaggaataaagtgtaaggtgaggacccggttcttacctaagagaacaaaatagcaaagacacctctatagctttgagaatacggacatgttgggccgggtgcggtggctcatgcctgtaatcccagcacactgggaggccgaggcgggtggatcacctgaggtcagaagttcaagaccagcctggtcaacatggtgaaaccccatttctactaaatatacacaaattagccagacgtggtggtgggcgcctgtaatcccagctactcaggaggctgaggcaggagaattgcttgaatgcaggaggtggaggttacagtaagctgagattgcgccattgcgctcc

SEQ ID NO: 865403 - DNA, 640 bp, Homo sapiens
atggggttcccacaagctgagcaacaaagaaacaatcaaagaataacttcttttctgaggtaactatgttaacatttcaacagcttaattaaatttcctaggaactagtcataacaaccataaaacattcatcagcagattccaaaatggtttttatgagacgatgccactatggaaagaaatcttattcatataaaacctcttgggtcaattataaagggacaatctctgtgacaaaggaactgtggtaacttgaggggctcaatagctctgtgattcctagatcacagaggcttcaggcattcaaggcctactgaagactttacacaaacttaaagacatacttagtagaagttcaccaatgggaaaaaaatccaaacactggcagtggggagatggtaactcaatgaaggaattagatgttctaactaaaatacgcgcaatgaaacttttaaaatgcccaatttggcatctgttatactaacacagctagygaatttcctttgaatttgaaaaagattttctgacttcaaaaataaatttggaaataaaaatgtcctaagaagtcatgcctctcccaagatgagatataatgaatgccctagcagctctaataaaattcatagtcagctttaagcag

SEQ ID NO: 865404 - DNA, 617 bp, Homo sapiens
agggcataagtgggtgttttggggggaattggtccccagaatttgtagtccaagacatgggtaatttgaaaaagcctcctagggcaatgcttttcagactctcatgtgtgcaggaatcacctggagattctggtttakaagtttggggtagggcccaagattttccctttctaacaagctcccaggtgatgcccatgctggtccatggaatacaatatgagtaacaagaagctaggtctgtaaaggcccagataggaaatatttttggctttgtgggctgtagagcctcctttgcaactactcagctggtgttttatcaggaaagcagccatagacaatatgtaaaaaatgagcgtgactgtgttccagtgaaattttatttccaaaagttgagagtggataggatttggcctgtggctggctgtcatttgctgaccctgagttaggtgattctcatgtgctcccttctgtaaagataatctctggtgcaaggaagggaaggcttgtactagaagtctacgatttcaggagttcagaaaggattgcactaaatcccttactgccaaacacagatttctctctgctcgtaattattcagatcttcaactaatatttgg

SEQ ID NO: 865405 - DNA, 655 bp, Homo sapiens
atccctgttgggtcaataattagttggtatgtgactaatgtattgggaagatgcccggtggtctatgatattgggattttttttttctttttgattctttgggcctctgaagataattcagcagtttaccagaggagtacccattctgcctgctccttccctctctaacttcctttctccctccctccacaaatatttatttgtacyttgtttgtaactgaagataagcacctctgaaatcaggcctgttggcatatgtctaaatactctttaactgagagacatatattcaaagaaacgtttttatatgtccataaactgacacatagattgtcaaatccctaataacaaggttcaaattagaatcctgacactaatgttttcaaatgttctaatacaggtcaccgtttttcctggtacaactcttgtgagtcttatgtgtgtgcatgtgttcgcatgcaactgtgtgagatgctttgttaattaacattgtgaagctaagtgctcagtgaaaaaagtactagagaattgcatattgtccttacagaattgtttgtaaatacaatcaagtaaaagctgtattgaaagaggtaggccttgttcagagccatgttactaatctcaagtctaggggtttgctctgagtgtcttggtg

SEQ ID NO: 865406 - DNA, 655 bp, Homo sapiens
atccctgttgggtcaataattagttggtatgtgactaatgtattgggaagatgcccggtggtctatgatattgggattttttttttctttttgattctttgggcctctgaagataattcagcagtttaccagaggagtacccattctgcctgctccttccctctctaacttcctttctccctccctccacaaatatttatttgtaccttgtttgtaactgaagataagcacctctgaaatcaggcctgttggcatatgtctaaatactctttaactgagagacatatattcamagaaacgtttttatatgtccataaactgacacatagattgtcaaatccctaataacaaggttcaaattagaatcctgacactaatgttttcaaatgttctaatacaggtcaccgtttttcctggtacaactcttgtgagtcttatgtgtgtgcatgtgttcgcatgcaactgtgtgagatgctttgttaattaacattgtgaagctaagtgctcagtgaaaaaagtactagagaattgcatattgtccttacagaattgtttgtaaatacaatcaagtaaaagctgtattgaaagaggtaggccttgttcagagccatgttactaatctcaagtctaggggtttgctctgagtgtcttggtg

SEQ ID NO: 865407 - DNA, 644 bp, Homo sapiens
actattgtctttttcttttttccattgctttttctgtgctgtctggagaatcactttccataccattgggtcttcttttccccagttaatataccagagcctttctgctcattcattctctacatttcatgcctctctgaagtattaatacctttctctttacactggttacagatgtatatgcaaagatcaagtggatagattgtgtttgctgagaaactttagtgttgaaaatgcaatgcaaatctttaatgtaagtttactgtatatttgagtgtattgtatatttattctccaatataaatttagcaactttcacattatgaatcactaagccttatgtttctccaaagaagggagcatgacttctcaaaatacaatattgttttagaatgaaaatttgtttcatgaccaatgcaaatcagttctgaaattccaaactccctcagccttgamtaactttaaaatgcaaatgctacccataaggaacaaatgtcttttcaattattaaaattgaatttcaagatttggtttcttatgataaaaatgtttgaatatatctgaaaaatctttcttaaatcctactattaattaaaaaggataaaagcagaaagttgcaggcaataacaagaacaaagattgag

SEQ ID NO: 865408 - DNA, 644 bp, Homo sapiens
actattgtctttttcttttttccattgctttttctgtgctgtctggagaatcactttccataccattgggtcttcttttccccagttaatataccagagcctttctgctcattcattctctacatttcatgcctctctgaagtattaatacctttctctttacactggttacagatgtatatgcaaagatcaagtggatagattgtgtttgctgagaaactttagtgttgaaaatgcaatgcaaatctttaatgtaagtttactgtatatttgagtgtattgtatatttattctccaatataaatttagcaactttcacattatgaatcactaagccttatgtttctccaaagaagggagcatgacttctcaaaatacaatattgttttagaatgaaaatttgtttcatgaccaatgcaaatcagttctgaaattccaaactccctcagccttgaatarctttaaaatgcaaatgctacccataaggaacaaatgtcttttcaattattaaaattgaatttcaagatttggtttcttatgataaaaatgtttgaatatatctgaaaaatctttcttaaatcctactattaattaaaaaggataaaagcagaaagttgcaggcaataacaagaacaaagattgag

SEQ ID NO: 865409 - DNA, 601 bp, Homo sapiens
ttttgggaatgaattagcaactcttaaatttctctccatttcctatttctagtaattagctcagtgtcacagctaaggttttcttactgacttcagcatggagacttagcagttacggaaaggagaggctagagctttccaccaactgcatgtcactggtgactccaagagagaatccaacaaatcaactactaataatccttactatttaaaccgtgttcactattatccaataacttggctctcagttatatcttcttaagaattctaataaggcatttagtttatacaaaggaggagtctgatctatgcagtggacatgagagacaaccaaagttttgttcctctttccartggcatagagaaaaaaataaaatttaggcagaattagaattcagaatgcctgggagttcctccagccttgggaaattccaggtgagaggggaggactctggagctttttaaaaagaccctagagttcattttacccaacaattttatttcataaatgagaaaactgaggcctagagaagtatggcttaccaaggttacaaactaaattatggcagttttagctcatggcttatgttagctagactgc

SEQ ID NO: 865410 - DNA, 588 bp, Homo sapiens
gagatcttctatgcagcccccccagggtctgttctactgcagaccctggatctcctataacagaactataacagaacactggatctccacagaaagccacaaaggcccagagatgtgttcgcacagatgtcatcatccctcttctagtccctgcaggagcctcatgggagatcacgtgaccagtatttcacagctctttcccccagcacagaaatayctgccgtgttgagaggcctgtccatctcctagtccctgctagagcctcatggacaatcacgtgaacagtatttcccagctccttctcccagcacaggaacaccctgccatgttgagaggctcactcaagagcctcatgatctgcctgctacctagcaatagctttgttacataggttgattctgccttgtgcctagaaaataaatcatgtttaggattaataatagtttatataattaatatatgtgccatgcttgagccaacacattccatcacttatcttcaggctggctgcctcctgggagccactaggtctcgagctgcaggctgagcatgctgggtaacaatgctataagtctgcttactggaccc

SEQ ID NO: 865411 - DNA, 646 bp, Homo sapiens
ccaatcttctgtaacgaggtagactccatttagaatctggtgatgtatcgcatacaagttagattgcttgacaagtcacaccaaggtttactcaaagtcactgccattatggtatataatcacaggctcaccagtgtcccacaagggtgaaggcagaggttaatggttttctttttatttgcattattacttgatctctggctttcctggtgagatgggtttttataagctcttcccatctcacttttygaagtgtttttaagctattttaaggctgttttataggtgccttttcttatgtttgttttgtatgctagaaagtaagtaaagaggatccaggatatgagctattgatactaccaggcacactgaagtaagtattaagtcttttattgagctttctaaatggcaaagtatatttcttttttatttaaaatgttaaaaaaaaaagtggtcaattctaactaactgccctaaatgtatcaaaaggcccttagaagttttcttctttgccaccatggtgaatccttcaagcaaattgattttaagcttgtacaacaatgtgaatgcaatgacactaaagtgtacacttaaaatggtacattttatgtatgtatattttaccacaataaaaaaatagatttta

SEQ ID NO: 865412 - DNA, 646 bp, Homo sapiens
ccaatcttctgtaacgaggtagactccatttagaatctggtgatgtatcgcatacaagttagattgcttgacaagtcacaccaaggtttactcaaagtcactgccattatggtatataatcacaggctcaccagtgtcccacaagggtgaaggcagaggttaatggttttctttttatttgcattattacttgatctctggctttcctggtgagatgggtttttataagctcttcccatctcactttttgaagtgtttttaagctattttaaggctgttttataggtgccttttcttatgtttgtttwgtatgctagaaagtaagtaaagaggatccaggatatgagctattgatactaccaggcacactgaagtaagtattaagtcttttattgagctttctaaatggcaaagtatatttcttttttatttaaaatgttaaaaaaaaaagtggtcaattctaactaactgccctaaatgtatcaaaaggcccttagaagttttcttctttgccaccatggtgaatccttcaagcaaattgattttaagcttgtacaacaatgtgaatgcaatgacactaaagtgtacacttaaaatggtacattttatgtatgtatattttaccacaataaaaaaatagatttta

SEQ ID NO: 865413 - DNA, 633 bp, Homo sapiens
caggacatgtggttgagacacaaacagctctgagactaaatgcctgcccccaagtgagctggagacaatgaaaatctctacctggtaacccagtgggagggagcaggagcaggtggcatgtgggcagaggcttgtccactaaatgtggaaagaaaagcagtcatgtttttacgtgcagggaaggaatgaggactttgctgacagcaaagggtgatggatggtgtgggagactgcatggggcgtgagtagtaatgtgatagagggtgcacattacaggcaattacaatttgaataagttatcaatggaaagaagtagaggagtggaaaactgttttattaaccccctgaagttacgttcacagcattttgaaaaagtttatgaattgccgtcaattacaatcccggcgacaaatgcggatgctgggagaatccctgattgyagcttctgtagcaggcaatgttttatggggacaatttaaaacaacagtcttatgtattttaaaacagcaaaggaggaagaaaaaggaagtgctcagggagcatagtgaatttacctgctcgtgagcaataaatcttacttatgatttttcggtgttatctgtttttcttcttttgatagtgtacaacatttct

SEQ ID NO: 865414 - DNA, 575 bp, Homo sapiens
atatcagaagctcgtgatttcctcaccattgaaagggagataagattgcccaacctccctggctcaaaaggttggataataagaagtgagagaagggaaatacaaagaagagtggagtcgttgcagaagggtttgtggagggggcgagagggtactaggatgctatgtggtttccatgtattacctcatttagctcataagtatatggagtaggtattcccattttgtagatgaggaaactgatgttctgagagattaactgaatcactctaggaaaaacgtgtcggaagtcagttgagcccaggtgtgcatggcatcaaagctcatgtttttcaccacaccaggtcctctgtgttttytcagatacagaactattcattaccatcacctgggaacagcttggaaatgctaattcttggctcagcctacacctatgcattcagaggctacggttaacaagattcccaggggattcctatacacattctaagttgagaagcataaaacttggggacaaaagcctcccctatttgaatctgacccctccatttgttggccagttgacactgaataag

SEQ ID NO: 865415 - DNA, 663 bp, Homo sapiens
gtgtaagtctactatttcattgttttctatttgttctctgtgtttctcttttctttttctgccttcctgtttgttacttgaattttttttaatttagtattttgatttatctatggtattttgaatgtatttctttgtatagctttttaagtgattgctctaggtattacacacacatgccacacacactcacacaatcatagtctactagtctcattttaactgtccatgtgaagtgtggaaacctttatgtaatcctccctttatgactctttaccctcccctatttataattttaaatattttgcctacatgtagttagaaccatgtcacacagtgttataatttttatttcaatcatcagacagaatttagraggctcaaaggagaagaaaagtctatttgtccacatttttgcttactgtgttgttcttcctgatgttttgatttctcttttaaaaagtcattttctttgtttagggaaattttgttagccattatttgaaggtaggtggtctggcaataacttctttcagttttctttcatctgaaaatatgttgagttttcctaattcctgaaggacattttcacagataagaattctagattgacagtcattttctttctgcatttaaaacatgttgtgccacttcctctggcct

SEQ ID NO: 865416 - DNA, 676 bp, Homo sapiens
atttacttacagaagggattatcacattggatgagaggctgaatttcatagacctcaaatgtccttttccaactctgagattttatgtgtctatgttttcatttccaaatagaaaataacccttatcattgctaatggtattcccttaaggaagttacttaatctttctatttctcaatttcttatttktagaatagaatggattatattccctacatcctaggatgggtgtgagatttaaacaaagaatgcatgtaagatgttcagcacagtgtagtaagacgttaatggtgctcactgatagacatttcttatttgggacataatagagtgacatttcctgactcacttgccattggaaggggctatgtgactaagtctggccagtgagctgtgagcccaataaggtctgtgacttctggatcagggcactgaagtgtgcatgtgtgacttctggcacagcaaccataacattcaacatggtggctgctcagtcagcctgggtcccgagcatcccagccaacataatggcaggtactgtgagagggaaataacttgtggtgtactaaggcacttgaaatttggaggtgtttttttactgttctgtaacttcatctacattgattgatacgcacattgttttatccaagataataataactaatagtacttgggc

SEQ ID NO: 865417 - DNA, 675 bp, Homo sapiens
gatgaacactatgcacagcagagagtttaaggaccttagtcatgtttcctaccaatcagcggttggcttcctattaaacctttctcgatgttctggacctctagagagccattctgtgctgctatgcaatctataatgactcttcaactaggtttctattcatttccaagtcttccctaccactgagatacttcaaggagatatgagtggatcatgaataaatatcctaaaamtaaagacagttaagtcaattgcactctcaatattatcagactattttaactaatatgctatagacaaataattcttcagaatggtgtttgctttgtgtgtgtcataagagattcttgtctttagagaattagggaataatattaaaatgaataaatagtaaaggtgggaatatttttaatattattaaaataaataaatgattaaagtagggagcatgtttgaaggtccattttaaaaaatatatgtagacagaggaaacctaagagttaaaatactgagtgagttttgctctgcatcagtggaggctataaaatgcagtatttatctgtatatgagttctataccaatgtgatctatctctctaattagatagtcaactatttttaaagagctgcaaataagccttacaagaatgtcataaatgcattccatttagaaaca

SEQ ID NO: 865418 - DNA, 675 bp, Homo sapiens
gatgaacactatgcacagcagagagtttaaggaccttagtcatgtttcctaccaatcagcggttggcttcctattaaacctttctcgatgttctggacctctagagagccattctgtgctgctatgcaatctataatgactcttcaactaggtttctattcatttccaagtcttccctaccactgagatacttcaaggagatatgagtggatcatgaataaatatcctaaaactaaagacagttaagtcaattgcactctcaatattatcagactattttaactaatatgctatagacaaataattcttcagaatggtgtttgctttgtgtgtgtcatargagattcttgtctttagagaattagggaataatattaaaatgaataaatagtaaaggtgggaatatttttaatattattaaaataaataaatgattaaagtagggagcatgtttgaaggtccattttaaaaaatatatgtagacagaggaaacctaagagttaaaatactgagtgagttttgctctgcatcagtggaggctataaaatgcagtatttatctgtatatgagttctataccaatgtgatctatctctctaattagatagtcaactatttttaaagagctgcaaataagccttacaagaatgtcataaatgcattccatttagaaaca

SEQ ID NO: 865419 - DNA, 612 bp, Homo sapiens
ggggccatcgcgagtgtggaggctgtgaaggccccaagttctgggagcccatgttatttatgggtgctcaaacaggtggtgaggatgtcgagtgaatgagaaacatatggctgtttgacataatgggagtactagaagcaagaagccagcaagtctagcagacatgcaagccctgcctcagcttctctcccaacactcagcttttctccaacagatgtgtatgaataaggcttattaataacaaagcctggctccacaggtgagagggaagatgtaacttaatctactggaagtcaccaacatagccctctaaaatgagtcattattttgactcraaaatgaacagattaaaaaatgtttcagctaatcctcttagctatttgatgtacatcaagcatccagatgttcacaacatccaagctgcaattttttgtgtgttatttaaaagttttacacttgcatatattattcctttcctcaaagacaaagtatagaacccaaactggactttttaaattcactccttaaaagtgtggtaacttaccattccagagctggtgggtccccgattattggcccatgggttgtccactttgtggttttgctgttagg

SEQ ID NO: 865420 - DNA, 638 bp, Homo sapiens
aattctgaaactatcattgcctgtgggttgggttgaaatgaaggcacgtgggtgtttcaagggtatgttctgtgacaaagagacagaatagaaaaatccaaagtcatagcctggagctaatacagtaatatgaatacataaaacaggaaggacaagaatataaaagtgaatttggggacctgagaaagtcaagaaaatgattggagaaatacaatttgggagaccactttagaacccagccctcactgggcatggtggctcacgcctgtaatctcagcattttgggaggctgaggcaggtggatcacctgaggtcaggagtttgagaccagcctggccaacatggtgaaacccgtctctactaaaagtacaaaaattagccaggcatggtggtgggcatctgtaacgccagctactcrggaggctgaggcaggagaatcactggaacccaggaggcggaggttgcagtgagctgagatcatgccactgcactgcactgcagcctgggtgacagaacgagactctgcctcaaaaaaaaaaaaaaaaaaaaaaaaaaaaagaacccaggcctccaatggtgcgatcaggtgccaggtactcttgtctactgtgctgaccatatgctgttgaggtcatcac

SEQ ID NO: 865421 - DNA, 676 bp, Homo sapiens
gccactgcactccagcctgggcgacagagcgagactctgtccctaaataaataaataaataatctttaccttgaatattgagatgggttcaatacaatctcaatttagaatacttaaaagatgaaaagttccataaaataaattttctaatcaacagaaaacattttgttaagatgttgctgatgcaaataattctagcatgtatcactgttagttttctatctttgaaaactatcattcaactaccatcgtagttactagacttccattcaggatcttgcatgcctaagagtcatttcactgccaaaaatgaggaaatatagaaaactgagctgtgtttttatcatctaccatttcaaaaaaccctgtggaaaaaatatttcttttagcaaatctcagacattatcttgacttatatgtaagatgtacctctctctttaaatccaagtgcrttgaaacttctggctcataaggtaatttttttttttaaataattaactaaacccttaaaactacatagaagtctactttgttttataaattaaccccattattttaggaattaatatagctttgtcttgtgagatgctgaagttatttttcctggttcttaatattcagtctttccgcttatctatttaattcctgatcactagccaaactatatactacagtt

SEQ ID NO: 865422 - DNA, 671 bp, Homo sapiens
ccattcatgggatggaattggaggtagagaaggggtgggagagtggggctggggatggtgtcacctaaaccacaggggagagaaacttagtagtatgagaggaagccaaggaagctgagaggaagacagtatcttttcaacctcagagtctactcctttttctgaaaaaaaaaaaaaaaattacatttcttcttttggcccatgcaaatgaagaagtctcctctgagttaaagattcaactaatattatgttaatgtatgttttggtttctactgaagttatgcattgttttttaaacatttgttcaatggcctttaaactttattgccaggctttcagttcttgaaaggagctcattagattttcattaactcaccagctttcactcaatactagggaccaaagtcctaccgggccattctgcaaggcccttacagtcaaatcattaataatttccagytgaacacacttcagcagtgtattctcagcctctttattaccaccatcctaaggagttttttcagataagttttccccctaattgcccttttcccacaacatttcaattccaaagatatactacatattcatttatgtaactgtggccttttggagggtcacaaaccattgtaatatttaagattgtccctcagcccaaaccaaactttcct

SEQ ID NO: 865423 - DNA, 680 bp, Homo sapiens
agagtggcacattgaataaagaagcaagacccacttgggtgcagtggctcatgtctgtaatcccagcactttgtgagaccaaggtgggcagatcgcttaagcccaggtgttcgagaccagcctgggcaacatgggaaaacctcatctctataaaaaatgtaaaattagtcagacatggtggcatgcgcttgtagtcccagctactccagaatttgaagtgtaamgatcacctgaactcaagaggttgaggctgcaggaagccataattgtgccactgcattccagcatgggtgaaagagacagatcagtctcaaaaaattaaaacaaacaaacaaacaagacccaactgtatgccatcttcaagagacccatctcacaaatgcaatgacacagataggctcaaagtaataggatggaggaaaacttaccaagcaaacagaaaataaaaacaaaacaaacaaaaaaatagcaggggctgttattctaatttcaaacaaaacagactttaagtcaacaacaatcaaaaaactacaaagaagggcattacataagggtaaagtgttcaattcaacaagaagacttaactcttctaaatatatatgcatccaacacaagaattatgtgtgtacccagggagcaccagggagcacccagattcataaaaacaaattcttagagac

SEQ ID NO: 865424 - DNA, 680 bp, Homo sapiens
agagtggcacattgaataaagaagcaagacccacttgggtgcagtggctcatgtctgtaatcccagcactttgtgagaccaaggtgggcagatcgcttaagcccaggtgttcgagaccagcctgggcaacatgggaaaacctcatctctataaaaaatgtaaaattagtcagacatggtggcatgcgcttgtagtcccagctactccagaatttgaagtgtaacgatcacctgaactcaagaggttgaggctgcaggaagccataattgtgccactgcattccagcatgggtgaaagagacagatcagtctcaaaaaattaaaacaaacaaacaaacaagacccaactgtatgccatcttcaagagacccatctcacaaatgcaatgacacagataggctcaaagtaataggatggaggaaaacttaccaagcaaacagaaaayaaaaacaaaacaaacaaaaaaatagcaggggctgttattctaatttcaaacaaaacagactttaagtcaacaacaatcaaaaaactacaaagaagggcattacataagggtaaagtgttcaattcaacaagaagacttaactcttctaaatatatatgcatccaacacaagaattatgtgtgtacccagggagcaccagggagcacccagattcataaaaacaaattcttagagac

SEQ ID NO: 865425 - DNA, 611 bp, Homo sapiens
gaggtgaaagatctctacaacaagaaaacaataattacaaagcactgctgaaagaaatcagagctgacccaaacaaatggaaaaacattccatgctcaagaataggaagaatcaatattgttaaaattgccatatactatcaaaagcaatccccagattcagtgttattcctatcaaactaccaatgtcatttttcacagaattagaaaaaaaaacctattctaaaatttayaaagaactcagaaagagcacaaatcaccaaagcaatcctaagcaaaaagaacaaagcaggaggcatcacactacctcacttcaaactatactataaggctacagtaaccaaaacagcatggtgtttgtacaaaaacagacacatagaccattagaacaggataaagaacccagaaataaagccacacatctacagctaactgatctttgacaaaggtgacaaaaataagcaataggaaaaggacttcctattcaataaatgattctaggataactggctatgtagatgccagaatgaaactggacccctacttatcaccatatacaaaaagtaactcaagagggattaaagacttaaatgtaagacctcgaactataaa

SEQ ID NO: 865426 - DNA, 611 bp, Homo sapiens
gaggtgaaagatctctacaacaagaaaacaataattacaaagcactgctgaaagaaatcagagctgacccaaacaaatggaaaaacattccatgctcaagaataggaagaatcaatattgttaaaattgccatatactatcaaaagcaatccccagattcagtgttattcctatcaaactaccaatgtcatttttcacagaattagaaaaaaaaacctattctaaaatttataaagaactcaraaagagcacaaatcaccaaagcaatcctaagcaaaaagaacaaagcaggaggcatcacactacctcacttcaaactatactataaggctacagtaaccaaaacagcatggtgtttgtacaaaaacagacacatagaccattagaacaggataaagaacccagaaataaagccacacatctacagctaactgatctttgacaaaggtgacaaaaataagcaataggaaaaggacttcctattcaataaatgattctaggataactggctatgtagatgccagaatgaaactggacccctacttatcaccatatacaaaaagtaactcaagagggattaaagacttaaatgtaagacctcgaactataaa

SEQ ID NO: 865427 - DNA, 598 bp, Homo sapiens
ccatacttattttaagtttggcctaatgagttctgtatacatagctagttgtaacctaacttaatgtgtaaaaataactgtaacttaacccaagactatagtcttataacatgtaactatgtcttagccaatgaaaacagctgagscttcagccaatcagaggctgaaagctgccaaaacatgactatatgaggtaaatgccaacagcagccaatcaggctgtttctgtgcacttctttttctctagctgtaaatgtaacctgcacaaatggtggcatggagtgttctgagccatttttggtgcaaactgctgcctgattcctaaacggtttctttgctcaaataaactctgctaaatttagcatatgtaaaggttttttttaacagattagtgtaggaaatgcaatctgaagtagaacgtccatcaaaccccagaagcatggagtgcccaagcacagcgacccaccaggtccattgtgcacacagatctctcacagcagcaggggtcctgggcaagttctctctcaaattttgaagctccaaggatttgtgttttgagctatgcatttgtttacctttgtaagggtttttattttta

SEQ ID NO: 865428 - DNA, 644 bp, Homo sapiens
atcacagctcaattactacattaggaaatccaataagtatacaaatcaagtgtattcccttttttcgtgttttttgtttgtttgtttgtttgtttgtttgttttttctgacagagtcaccctctgtcatccaggctggattgcagtggtgtgagctcagctcactgcagcctctgccacctgggatcaaaaaattgtcctgcctcaaccacctgtgtagctaggattacaggtgtgcaccacatttcctggytgacttttgtatttctagtaaggatggcatttcaacatcttggccatgctggtctggtctcctgacttcagatgatccacctgccttggtttcccaaagtgcagggattacaggcgttagccaccatgcctggcccgcaaatgtattcttgcagttaataataacaataacttgtaatctgtggctgtgtgcaataaactattttaaactaatctcatttactaaacattttcatgagtcatgtgaacttgattgtctatttctaggatttttaggagtatgtaattcacaataatgctcatttatctcttagccaatttggatagcacccttttaagtgatattaaaaattaacttggtactaacatccagaggtagaaatatatcacaca

SEQ ID NO: 865429 - DNA, 601 bp, Homo sapiens
atgtttttcttaatctcattttatttttggattgctctttgttactgtgtaggtatataattgacttttgtatactgatcttgttatctgcaattctgctggacttaattattagttctgatttatcagaattttttgtatacargatcatgtcatctgcaaacagaggtagattcacttttttcctttccaatttagatggctttttttttttaattttcttgcccaattgcccctcatcaaaatcaaactcccagtaaaatgtcaaagagaagtggcagcagtggacatcctagccttattctggatcatgaggaaaatgcattcaggtttttgcattaagtttcatgttagatttggggtttgtgtagatgccttttttcaggctgaggtattttctttctattcccacctagttgagtgcttttatcgtagaaaggtgttggattttataaaatattttaccacatctgttgagattgtcatatggtttgggttccttaattgtatcagcattgcatagctgattcttgaatattaagctaaccttgcattcctgagataaatcctacttggttatgaaatgcacctcttctcatat

SEQ ID NO: 865430 - DNA, 601 bp, Homo sapiens
atgtttttcttaatctcattttatttttggattgctctttgttactgtgtaggtatataattgacttttgtatactgatcttgttatctgcaattctgctggacttaattattagttctgatttatcagaattttttgtatacaagatcatgtcatctgcaaacagaggtagattcacttttttcctttccaatttaratggctttttttttttaattttcttgcccaattgcccctcatcaaaatcaaactcccagtaaaatgtcaaagagaagtggcagcagtggacatcctagccttattctggatcatgaggaaaatgcattcaggtttttgcattaagtttcatgttagatttggggtttgtgtagatgccttttttcaggctgaggtattttctttctattcccacctagttgagtgcttttatcgtagaaaggtgttggattttataaaatattttaccacatctgttgagattgtcatatggtttgggttccttaattgtatcagcattgcatagctgattcttgaatattaagctaaccttgcattcctgagataaatcctacttggttatgaaatgcacctcttctcatat

SEQ ID NO: 865431 - DNA, 607 bp, Homo sapiens
gaatctaaactagtcagcaatctgctatttccctatgctacaggtcaggaggaccccaaatttgcaacagaatcatccacaactgctccaaaaaatgtgatatgctctgatatacattaaaaaaaaacaggtatgggctggctctgtatgctgaaacatataaaacactggtgaaagaaatcaaagtagtaataaagaaggatacattgtgttaatgtattggaagactcaatatgttgtgttaatcttccccagcttgatctatatatttgatgcaattcctatcaaaatctcaaaaaggattttttgagataaagcaaacttacatccttggatagctaagacaattttgaaaaagaagtatataatgggaggaatctrtcaacaatgttttaaagacttattacacagccaaagtaatcatgacagtgtggtatttgcctagggatagattcataaaaaatgtagaaaaggaagcccagaaatagagtcacactgatttgaatatgatgcaatatctcacaaagctggcaaacacaaatcagtggaggaaaaataaccttttaacaaattgtgctagggcaagtggacatccataggttaagga

SEQ ID NO: 865432 - DNA, 605 bp, Homo sapiens
aaataaaaatagtaaaatccagttatatgttgtctcctggaaacccatacttgacataaagacacaattactacggaagagatggaataaagctgtgcactactaaccctagtgataagactgctggaatggctatattaatatcagacaaagtagagcaaaaaaaatggaaaatakcaactgatgctcaagttgttctggttagcagtacaaactctggaaccagactttctgagttacaatactgtcacttctatttttttcttttaactataaaataaatgtccacattgctaacaagcatattaactagcttattatgcttgcttcctttgcttttggttgtggtgggtatttatttgtttattttttaagacatgatctgcccttgtcacccaggttggagtgcagtggcgtgacctagactcactgaagcctcaacctccaggactcaaatgatcctcctgccttagcctcccaagtagctgggaccacaggtgcatgccaccatgtacactaatttttgtgttttttgaggagatggggtttgaccatcttcctggtctcaaactcatgagctaaagtgatccacctgcctcagcctt

SEQ ID NO: 865433 - DNA, 616 bp, Homo sapiens
tagccagtgcatcactgcatctgaataacaaaaaatatggtagatttctgcccctttgagatttcacttaaatacgaagcactttctccttctgatgtttaaaaacatgctgaaatttgtaatatattagtaacaaccactgtcccacccaaatgctaagcagctgcttctcttctctgaaaatcagaatcaagagagggagtttctaggctcaagactcgggaaaagccacccctgatatccagagatttatgttaagakccccagctgagacaggcagaggtcaaggtaggctgaagaagctgatctgagatggtcgagggctgctcctacttaccttgcctatttgccaccctcacagttttgaaactcgttcaaaaagtaaatgcttttgttcacctctttaacagcaccatttctggtctcgttttcaacactacgtcctttgctttgcaggtaaaattgcttattttcttgcctttttatgactaaagtaggcttgcagtttggagtcaggtgactgcactagctgagtcatcttcccttgaaaacaccaaggcattcttcctccctacagagtcacacatcttagttccccaaaacgctcagccacaat

SEQ ID NO: 865434 - DNA, 644 bp, Homo sapiens
ccaagctagggaaaactaacacaacatattcagtcttcccatccatgaacatagtgtatctccctttatttctgctttgatttctttcaccagtgttttatatgtttcagcatacagatcccatatctgttttgttttgttttaatgtacaacaaagcatttcatgttctttggagcagttgtagatggtactgttgctaaattggggtactgctgacctgtggcatggggaaatagcagattgctgactagtttaggttcacttcaactgttcagtgcctaggaggttgggtggtggtasatgcttaactcccccactggagcctggtgaccggataacacaagatagtggggagggcaggtaagaagcacagtgcaatgaaccctacttagatctggctctttaaaaactgttgtcgttgggttgacctggatgctcagcttgctactggactctgctgacactggttagggaactggactgttgccctctgttcatgccaagtgggtaataaaagattagatgcctactctgcctttagagggaatcagagcatcactgatctgggagaagcttgtctctctacatggctccacagaaaccgctgtagtagttttttctgtggtgtttgtctggaatagct

SEQ ID NO: 865435 - DNA, 644 bp, Homo sapiens
ccaagctagggaaaactaacacaacatattcagtcttcccatccatgaacatagtgtatctccctttatttctgctttgatttctttcaccagtgttttatatgtttcagcatacagatcccatatctgttttgttttgttttaatgtacaacaaagcatttcatgttctttggagcagttgtagatggtactgttgctaaattggggtactgctgacctgtggcatggggaaatagcagattgctgactagtttaggttcacttcaactgttcagtgcctaggaggttgggtggtggtacatgcttaactcccccactggagcctggtgaccggataacacargatagtggggagggcaggtaagaagcacagtgcaatgaaccctacttagatctggctctttaaaaactgttgtcgttgggttgacctggatgctcagcttgctactggactctgctgacactggttagggaactggactgttgccctctgttcatgccaagtgggtaataaaagattagatgcctactctgcctttagagggaatcagagcatcactgatctgggagaagcttgtctctctacatggctccacagaaaccgctgtagtagttttttctgtggtgtttgtctggaatagct

SEQ ID NO: 865436 - DNA, 663 bp, Homo sapiens
ggaagagaaagaagtggttacttcgagacatttctcattccaagaaactgccatgggaaagtcaataagcttataaacatctgaacaaaacttgagaggaaccctaaacaattttgaagaaatctaatggaagagttctgaaagtktgcctaccaaaacaatcctgacgagagagacaaaaactgcatatattagagctgatgctagttgccatcaggcaccatgatgtgtctgtcaattctattctcttgtaacaaccaataaccctgcattgttataacacacaatatttactatattcatctgccccatagaaaacttgtcctgttcaatgaatgaacaaaaagtcaaacagtgaggaatttcaagagaaagctactatattaaaaatattctcaacttgaaatcaatattataaagtctcataaatgtctccaaattcatgaaaaagaaaaagctagaaagtcagcttcaaataaagaccctgcacaaagcctcccattcacaattgttacaaagagaataaaatacctaggaatacagctaatgaggggtgtgaagaacctcttcaaatagaactacaagccaccgctcaagggaataagagaggacacaaacaaaggagaaggccagggcattgaccatgatcaccacgaaaggtgt

SEQ ID NO: 865437 - DNA, 667 bp, Homo sapiens
ttagtaaatattttctaatatagcatttacatttctttgatgatttttttccacatatatttttacttgtatccttgttagttcctctaggaacttacaatgtactatttttattatttttttttttaagagagagtctcactctgtcacttgggctagaatgcagtggtgtgaccatggctcaccagaccatcaacctcctgggctcaagtaattctcccacctcagcctcccaagtcaccttctgactacagacacacaccacaatgcctggctgatttgtgggggtttgtttgttttttgtagagatggggttttaccatgtggcccaagctggtcttaaactcctggcctcaagcaaaccacccacctcactctcccaaagtgctgggattacccwtttttttttttaatctttaagctctgttggacttgaaacaatgcacatcttatcagaatgagcatctgatttatactcactcaattccactgagaaatagaaacattattcaaacatagctctattcccttccccctgccttttgtggtattgctatacacattatatctataaatgttagaagtccaacaatacattgtcacaattattactttatataattttatatatacctttaaagaagttgagagaagaaccaatgtacat

SEQ ID NO: 865438 - DNA, 575 bp, Homo sapiens
agaaggaagcaaattaaattatgacttgtgtttctgtgtatgcttattcatatctgctactcctaagtatcatcaatcttgtgtcaacaggtgagaaatttgtctaaaataaatcaattccattgagcattataaatttatactaatgtactttggacatagccaaacatagyccaatttttcatatggccattattttaatgttttattgaataaacgcttggggaaaagttccttacaaatatctgtagaacagagatgatatacagattatatatattccaagtaattcaggcttccagattaaactaaaccctagaaaagtcaatgcagtgtctatgtcactgaatcttagagaattatgttagtaattatgaatggcattatctattacaaataaataagcagagttgtagaactttagaactagaagggactccagaaatcagcaaagtctagtttagatgagcagtctgaagcccagagggataagtggtttaactactttaatgtaactagccaatggcataattagggctataaaatggggttgggggagcaataataattagcat

SEQ ID NO: 865439 - DNA, 575 bp, Homo sapiens
agaaggaagcaaattaaattatgacttgtgtttctgtgtatgcttattcatatctgctactcctaagtatcatcaatcttgtgtcaacaggtgagaaatttgtctaaaataaatcaattccattgagcattataaatttatactaatgtactttggacatagccaaacatagtccaattwttcatatggccattattttaatgttttattgaataaacgcttggggaaaagttccttacaaatatctgtagaacagagatgatatacagattatatatattccaagtaattcaggcttccagattaaactaaaccctagaaaagtcaatgcagtgtctatgtcactgaatcttagagaattatgttagtaattatgaatggcattatctattacaaataaataagcagagttgtagaactttagaactagaagggactccagaaatcagcaaagtctagtttagatgagcagtctgaagcccagagggataagtggtttaactactttaatgtaactagccaatggcataattagggctataaaatggggttgggggagcaataataattagcat

SEQ ID NO: 865440 - DNA, 630 bp, Homo sapiens
caaaacatacaaaacatcaaccaggtgacacctgatataattaataggaactcactaaacacaaatgatctaaatatgagtcatatccagagctggacattttgtccttattaaagtaattatgacagctccaggaaaaaattcaagtgcttattcttctggtcatattttttccaattctyttaaagttaacattgctaaggttaataagagtgcaaaagagactctaaatctaggaaagagtagttatgtttttctcttaaatttttaatcatttaacttttgatatggaatttccatatcattggacttcatggaataactacagactaatggttttgggctttgtatctaattagaaaaacatgtttcttctttcattagttgtctagttcaacactgcatgacatactattcattatccaatactaaattgtataatgagccaaaagagaaaaactgtactggggaaaataaatctggaacaatcacctcagtaggtaatattagtttgtattgccaaattcctgagtaaccaagcatgaatagtagccttgattttctttgacgatatctgaatagaggagaaacttctctatcacaatagacagatggtttagatcattgctt

SEQ ID NO: 865441 - DNA, 630 bp, Homo sapiens
caaaacatacaaaacatcaaccaggtgacacctgatataattaataggaactcactaaacacaaatgatctaaatatgagtcatatccagagctggacattttgtccttattaaagtaattatgacagctccaggaaaaaattcaagtgcttattcttctggtcatattttttccaattcttttaaagttaacattgctaaggttaataagagtgcaaaagagactctaaatctwggaaagagtagttatgtttttctcttaaatttttaatcatttaacttttgatatggaatttccatatcattggacttcatggaataactacagactaatggttttgggctttgtatctaattagaaaaacatgtttcttctttcattagttgtctagttcaacactgcatgacatactattcattatccaatactaaattgtataatgagccaaaagagaaaaactgtactggggaaaataaatctggaacaatcacctcagtaggtaatattagtttgtattgccaaattcctgagtaaccaagcatgaatagtagccttgattttctttgacgatatctgaatagaggagaaacttctctatcacaatagacagatggtttagatcattgctt

SEQ ID NO: 865442 - DNA, 620 bp, Homo sapiens
acacagggagacaataaataaagctctggctttaaatgcttccaaatctgttttcttacccttattctattgttatagaggtgtaagttacctctcctaaggttctactttcaattgattaggaaagtacaccaaatctaaatgwgtttatcttaaaataacaaaatggacttaaaatatgtaaagtaaaacgtagttgatctattcaaccaccattccaaattctttctctaatttctctttgtttccttctgggactcaaattagatgtgcagtgggcctttgctttctagcccccatttcacctaacttcacattttgtccctgtcaatttgtgctgaattcttagcaatattttcagatatatctttaaattcactaattatcccttttcctgctgctttcctcatctgctctcattcactgagtttttaatttcagtgataacagtttttgattctagggatgtattttcaaacttattggcttttgatgttttttgttgttgtgatgtgatgtttttatttcttcttttatttcttaaaaccatttaaacattattttttataatacataggattatttaaatatctaaagtccttggtgaccaaattcattct

SEQ ID NO: 865443 - DNA, 620 bp, Homo sapiens
acacagggagacaataaataaagctctggctttaaatgcttccaaatctgttttcttacccttattctattgttatagaggtgtaagttacctctcctaaggttctactttcaattgattaggaaagtacaccaaatctaaatgagtttatcttaaaataacaaaatggacttaaaatatgtaaagtaaaacgtagttgatctattcaaccaccattccaaattctttctctaatttctctttgtttccttctgggactcaaattaratgtgcagtgggcctttgctttctagcccccatttcacctaacttcacattttgtccctgtcaatttgtgctgaattcttagcaatattttcagatatatctttaaattcactaattatcccttttcctgctgctttcctcatctgctctcattcactgagtttttaatttcagtgataacagtttttgattctagggatgtattttcaaacttattggcttttgatgttttttgttgttgtgatgtgatgtttttatttcttcttttatttcttaaaaccatttaaacattattttttataatacataggattatttaaatatctaaagtccttggtgaccaaattcattct

SEQ ID NO: 865444 - DNA, 620 bp, Homo sapiens
acacagggagacaataaataaagctctggctttaaatgcttccaaatctgttttcttacccttattctattgttatagaggtgtaagttacctctcctaaggttctactttcaattgattaggaaagtacaccaaatctaaatgagtttatcttaaaataacaaaatggacttaaaatatgtaaagtaaaacgtagttgatctattcaaccaccattccaaattctttctctaatttctctttgtttccttctgggactcaaattagatgtgcagtgggcctttgctttctagcccccatttcacctaacttcacattttgtccctgtcaatttgtgctgaattcttagcaatattttcagatatatctttaaattcactaattatcccttttcctgctgctttcctcatctgctctcattcactgagtttttaatttcartgataacagtttttgattctagggatgtattttcaaacttattggcttttgatgttttttgttgttgtgatgtgatgtttttatttcttcttttatttcttaaaaccatttaaacattattttttataatacataggattatttaaatatctaaagtccttggtgaccaaattcattct

SEQ ID NO: 865445 - DNA, 668 bp, Homo sapiens
aacatgcgccatctgaaagaacttagaaaagggcagctgttgagacatctgagggaaaaagtccctcttgagtgtcacagaaatccacaccaagaaaaactaaaagagaagtaaactattaatatcttcagtgaaactagtgttaccccaaatgtcaaactgtaaggctctgtcaggcgcagcaaactatgagccaaatcaaggatggaattaggaattgataagagacctttgtttgttcttctagagcaaattttaatgaacaagaaagaggaagcagggagtaactaaaaagcatctaaaaagagtgttgtctaaagaatcaacaataaataatagcttggagccattgcgcaatgaatgacttcaytaagaatctcatatatctcctgctcacagtcaaagggaaaaatgtgaaaatgcagaaaaacatgtctctcagcaaacagtaaaccagatttaggagaacggtgatctaagacaacacattttaacggaaacttacttcctccagtttaagctttacctcttcacatcattcctaagtaaatatatgagtcagacacaattgttccctttcaagaataaacaagactctaaaaggaattagtgtatgatttatgcataagcatgtccctttctaaacatctcccaaaaaagaaaagtaa

SEQ ID NO: 865446 - DNA, 666 bp, Homo sapiens
cttttagattaagtagccaatgcaattctgaaggtagaaacagaacaccaaccttctctggaacccagaataagtataagccagaaaattacccattgtttctcttaacagttctggcttgaatgtgaaatgggaaaagttcccttatccccttgcagggtgtgagatgggggtgtggctggcttcttcagtgcctccctgctcaaacctctaggggagcttacaggcgggcaggctgtggggttcagatcccacagcaatgtctaggggtgaatgtttgcagctgaagccccagtaggcatgtgttacagtgtgctcttttagttttgctcttctagtttagccgctctaggtgccttgtgttagtcaactcaattagacccctgccttatcacaaggacagtggrctttctgtatcctgaggttcttgccttggtgtactggaagaatcagatcacatatgggcttggagaatgagtgcaaggttttattgagtggaaatagctaccagcagatgggagagtcagaagggagatggttttcccctgaagtcaggctgctcagtggcccagactgtcctccagctgccccagccaaactctgcattgttctgtcagtcagtggcctaccagcatgctggtgcctgtcagtgtgttcctctcaatg

SEQ ID NO: 865447 - DNA, 575 bp, Homo sapiens
ttagtttgggaccattaagggggcaagtgagtataacgggctctgcatgagcttcttccctctctagtatctctttccattccccaaccctgatccccagaatgagtgaaggtgaaacaaagggaatagaaataaacacggaataaagatgttaccagcctggacagttttaatctgtatgctgacactccaaatgttttctctctttttttttttttttttggactacttctatgggtttttcaraaattctgctcctggggtactctgcagttgtctgatgtgtgatgtctcctttggcaatcctgcttgcaaatcactgtacctcacccctcacaactccccaggtaccttttttttttttgctttctactctatacttccagcttcttttcattgaggctgacttgcctgtggtaagaagcagtcttaggtgaattttattttaggatggttcccaaatggctgctttgtatgagatcttcatccggcccacaggaaacactcccttcagcctcaccattgctggaagtgtggcttaatctacacatctgcttttactctgtggttatgtg

SEQ ID NO: 865448 - DNA, 575 bp, Homo sapiens
ttagtttgggaccattaagggggcaagtgagtataacgggctctgcatgagcttcttccctctctagtatctctttccattccccaaccctgatccccagaatgagtgaaggtgaaacaaagggaatagaaataaacacggaataaagatgttaccagcctggacagttttaatctgtatgctgacactccaaatgttttctctctttttttttttttttttggactacttctatgggtttttcagaaattctgctcctggggtactctgcagttgtctgatgtgtgatgtctcctttggcaatcctgcttrcaaatcactgtacctcacccctcacaactccccaggtaccttttttttttttgctttctactctatacttccagcttcttttcattgaggctgacttgcctgtggtaagaagcagtcttaggtgaattttattttaggatggttcccaaatggctgctttgtatgagatcttcatccggcccacaggaaacactcccttcagcctcaccattgctggaagtgtggcttaatctacacatctgcttttactctgtggttatgtg

SEQ ID NO: 865449 - DNA, 563 bp, Homo sapiens
caaaattaaaaacatttttgcttaacataatactatcaaaaaagtgaaaggataacccataatgtgagaaaatttttgcatatcatatatctgatggaggacttgaaagaagaatatataaagaactcctacaattcattatttaaaagatacattaccccattaaaatatrggcaaaagatctgaaaagacatttctcccaagaagacataaaagacacaaattgaaaaaaggccatgaatgattatcaagaacatagttattaaagaaacacaaatgaaaaccataataagatatcatttcatgcccactaggatagctataataaaaaagacagacaataacaagtattgataaggatggagaaaaatcagacctagctaccttgctaatgagaatgtaaaatggtgtagccactttggtaaacagtttggcaatgcctcaaaatgttaaatcccagcaagttatttccaggatatcaacaaagttattctaaggtttatatggagagggaaaagaaacagaaaagccaacacaatattgaaagagaagaacaaatttgg

SEQ ID NO: 865450 - DNA, 585 bp, Homo sapiens
ttgaaagcttagagtaaataatctaattatttacagctgtaaataattcaggcacacttggaagataagatgagcctattaccaaattgaacaatttcaagttactaaaacactccctaggcatcactcaaacgacacatctccagtttacccccattagccagtggtggctgtgactttcagggtgtycttttcatgctaggcaataggaccagtttttactgggttatcagagacaacaactccaacaaccctgcaagaatttaccatggtacccacaggattccaatcttcgtgcccagaagaggaataccccctccaccctaacacagggtgtgaacccagtgctctgagctgagagcgtggatgaggctgtgctcaagaagatgacagaatgaaagcaaggacagagagaaggagattcgtgtattcatttccaagttaagccctgctgccttaaatatatctggtttcttaactgggaaggaaatttcctctacactttgaaaaatggaaatgcattggttagcacgagaagaacatctttgaggcaatctatttttgaatgcaatctaattcctctct

SEQ ID NO: 865451 - DNA, 696 bp, Homo sapiens
cacagtggctcacccctgtaatcccagcactttgggaggctgaggcaggaggattgcttgaggccaggaagttgaggctgcagtgagctatgattgtgctgctgcactccagtctgggcaacagagcaaaaccctatctcacaaaaacaaaaaaaaaaacaaaaaaaaaaaagcaagaaagaaagagagagaaggaaaggaaggaagaaaggaagaagaaaaaaagaaaggaagaaaaaagaaaaagaaagagaawggaaggaaggaaggaagaaaggaaggagaaaaagagaaaaattactgctaaaagtctcttgggtccagccagaaagacctgaagtttttctgtgacttttactgagtttctctcagtttttgtcaactaatcaagcccaaatgtctttcttttccacagcaattgtcccaagctttcttggatttcttcagttattttcacatcgtatttatatctgttgtggaagtgtaagccctcggagaggaggttataagcctcaggaatatttgtagcttcaacccttactcagggtttgccattttcaaggaactcaatagatatagattgaaaatgctcaatagatgtttattgaattagctagtgaagtaggaaagaataaatttcaataagaagcagttttgaactcctgttaagcagtgaatttctagggagaaatcact

SEQ ID NO: 865452 - DNA, 661 bp, Homo sapiens
atattcaggtagaatttctgggttgggaggctcctaagagtctcccaagcaccaagtggcttcccagcaggtacagggatgtggggaggcagggagagctgctaatgagccttatctcacagtgtatctcggtgtgagatgtacaacggatgctccgaggatgccatttcagatgagctggccaccgtcgggccatctggcctccccgtgctgagctcaccttccggagagtaacgctcttggaagtgcagactcagcacagagtagcacaggtgaacctgctgtggaagccaagaacaagggagatgaggaagtgagtccatgtccacgtggttttgtgcttccccctttgtcctgacatggaagataggggaggggaggatgagctggtctctctgccttttctcctcctctctggtaggagatgggaacagagtgaagctttgctgttttctgttttttkgtttttttgattttttttttttttgagacaggctcttactctgtcacccaggctggagtgcagtgatgtaatcttgcctcattgcaacctggaactcctgggctcaagggatcctcctgccccagcctcccaagtagctgggactacaggcacacaccactgcacccagctaattttttgttttttgtagagacaggg

SEQ ID NO: 865453 - DNA, 652 bp, Homo sapiens
tgagatggtatctcattgtggttttgatttgcatttctctcatgatcagtgatgttgagcttttcttcatatgtttgttggttgtatggatgtcttcttttgagaagtggctgttcgtgtcctttgcccactttttwatggggttgtttgattttttttcttgtaaatttgtttacgttcattgtagactggatattagacctttgtcagaagggtaagttgcaaaaattttttcccattctgcaggttgtcagttcactctgatgatagtttcttttgctgtgcaggagctctttagtttaattagatcacatttgttaatgtttgcttttgttgcaattgcttttgacattttcatcatgaaatctttgcctgtgccagtgtcctgtatggtattgcctagattttcttctagggtttttataatttgggggtttacatttaagtctttaatccatcttgagttaatttttgtctaaggtgtaaggaaggggttcagtttcaagtttctgcatatggctagccagttttcccagcaccatttattaaatagagaatcctttccccgttgcttgtttttgtcaggtttgccaaagatcagatggttgtagatgtgtggtcttatttctgagttatctattctgtttcgttg

SEQ ID NO: 865454 - DNA, 691 bp, Homo sapiens
gctgtagtttgctgatccctgctctagagccacactgttcaatagacataaaatgcaaaccacacatataattttaaattttctactaaccacattaaaaaagtctaataaaacatgtgaaattaattttaataagattttatttaatgaaatatatctaatgttttatcattttggctcataatcaatataaaaatgttttactttttttttttggtactgagtttctgaaatccagtgtgtattatacacttacagygcacttcaatttgggcgggccacattttaagtgcttgggagccacatgttccaattgtggccagtggtgaccatattaggcagcacagtcctagagagttgctcttcttttgcatggttaaaactggcttattagagtcaagactccaaattcatgtacatcacttttcctgacttaatactggtgagaatccagtcacacaggcacaaccttctgcaaaggacattgggaaatgtattctctggctgggtagccctgtgctctgctaaaatttggtgggcacagttctgtcactaaggaataagggcaggaaaggtgttggtagacagaaagttttgccataccatctaaattttattaattttcaacagtcttctctctgattctaaagtcacagtctggcctgaggctgatcctgaaaggcagtctgtt

SEQ ID NO: 865455 - DNA, 691 bp, Homo sapiens
gctgtagtttgctgatccctgctctagagccacactgttcaatagacataaaatgcaaaccacacatataattttaaattttctactaaccacattaaaaaagtctaataaaacatgtgaaattaattttaataagattttatttaatgaaatatatctaatgttttatcattttggctcataatcaatataaaaatgttttactttttttttttggtactgagtttctgaaatccagtgtgtattatacacttacagtrcacttcaatttgggcgggccacattttaagtgcttgggagccacatgttccaattgtggccagtggtgaccatattaggcagcacagtcctagagagttgctcttcttttgcatggttaaaactggcttattagagtcaagactccaaattcatgtacatcacttttcctgacttaatactggtgagaatccagtcacacaggcacaaccttctgcaaaggacattgggaaatgtattctctggctgggtagccctgtgctctgctaaaatttggtgggcacagttctgtcactaaggaataagggcaggaaaggtgttggtagacagaaagttttgccataccatctaaattttattaattttcaacagtcttctctctgattctaaagtcacagtctggcctgaggctgatcctgaaaggcagtctgtt

SEQ ID NO: 865456 - DNA, 691 bp, Homo sapiens
gctgtagtttgctgatccctgctctagagccacactgttcaatagacataaaatgcaaaccacacatataattttaaattttctactaaccacattaaaaaagtctaataaaacatgtgaaattaattttaataagattttatttaatgaaatatatctaatgttttatcattttggctcataatcaatataaaaatgttttactttttttttttggtactgagtttctgaaatccagtgtgtattatacacttacagtgcacttcaatttgggcgggccacattttaagtgcttgggagccacatgttscaattgtggccagtggtgaccatattaggcagcacagtcctagagagttgctcttcttttgcatggttaaaactggcttattagagtcaagactccaaattcatgtacatcacttttcctgacttaatactggtgagaatccagtcacacaggcacaaccttctgcaaaggacattgggaaatgtattctctggctgggtagccctgtgctctgctaaaatttggtgggcacagttctgtcactaaggaataagggcaggaaaggtgttggtagacagaaagttttgccataccatctaaattttattaattttcaacagtcttctctctgattctaaagtcacagtctggcctgaggctgatcctgaaaggcagtctgtt

SEQ ID NO: 865457 - DNA, 577 bp, Homo sapiens
ggcaagtccaagcccccatcacatcttatcaggtgccttctgtagcctcaccttcttgctccctgtcttgcttgctagagtctgtcttctatgccagcatgtcctttggaaacagcgtagccaatcttgcctttcagtggctttccattgcagtgaaaatgaaactcgaacttcttaccatgccctgtgaggcccctgctgccttctctgatatccagcctgtcaatttcctcttagatctctctctctctggccacctcagcctcctttctgctccttgaacacaccaagccctttcctgccccagggcctttctgcctyctgtttcctctctgcagggtgaccttcccaaccttcccgtgatgtgccacctccactcctcaaagacagcactctctgcctcctctctaaaccctcatcctgtggcatctccttcatgacactcctccccatgtatttacttgtttaatgtcatctcctacactggaagggaatcttttagaacattggtgtcaggcaaagtggctcatgcctgtaatcccaccactttgggaggccaagatgggaggatgacttg

SEQ ID NO: 865458 - DNA, 687 bp, Homo sapiens
gtggggtgtgggaagacaatttcatagattacaactttttgtaatctaactctgcccgaccaaagcagtatttaaggatatacttacaaaatgccaattgcatcaaacattcagtatacagtttatatagttatatatatatatatatayacacacacacacacacacacgcatgtatatatacacacatatatattcacacacagacatgtaggtagatagatacacaaatagtaagcatatatatgtatatatatctgcatggatatagttagcatattttattcacgtgtcatgtggcagaacagccagattattgacattttatttttttcaccaggtgttttattttggcttcatgttgcaagcctcaaaaaaaggaagctcttttgactgtgcagtggggaaaataattaagtttcattctgctgagaggccgtgtcagcaacactcagtaaaaaatgcagggtaaggtgtagaatatgaaaattgcaatgtgctaacaaatggaaaactttccactgtcaacaaattagagtgctccagtactcttccaaacacttcttgattatttttgcttttcattgtgaattctgagaccagcctggagtgaggagaaagaggaagccaaagtagaaacaaagaacaacatttcctgtccttttggaaaactttcatagggccacg

SEQ ID NO: 865459 - DNA, 618 bp, Homo sapiens
aatggaggtagaagggccagtacattttgacaattaccacagacagaataggatcctgagacaaatgcagctacacccaggcccaagggatgttgtggaactataccattccaaaagacgataccaacatgaaacacaggtgataaagattaaaataaaatcaacaaggtgatagaggccactcctcacagtaggtatgtgtgtatctctgtcagttctctgatgatgggaagggaagtaaagtaaaggaaaaggcagttatatgaaaagagagggaggtaaggccctgcaggattgagagccagagtgacagatctacaggatgacatttgggataaggactactaggtaagaactgagcactgaagacatatgtctctgtccaacaccctaactcacatgcaaggagtaaaaagktcttgatatttatatgggttgggaaaggggaacttggtatcagggtttagattgccagaactcagatggaaagagagtgtgattagtgtggagtggcagtgacacctcaaaaaggaggcagacaaaggaatcaccttcaaaaaggagacagacataggaatcacctccagcctacctcagcatgatgttgtttgcatctca

SEQ ID NO: 865460 - DNA, 617 bp, Homo sapiens
gcaccactgcactccagtctgggcgacagagcaagaccttatttcaaaaaaaaaaaaaaaaaaggtgtccagaaaagagaagttttctgagtcctagaaataggaccctgtctcgcattttccagccaagcacctgacccatctctttgtgttactctctgctcttgccccacatagttggcaggaagactccgtcaaagggtcagtctgtggtagaatctataaaccatagcctgacggatctgagtgactgggctttacactggaattttctgtggcagcccctttgcccctatcaccacagccttcctgcctggcagctgcagacagaatattcgcaatagtcaaagcccaataagactccgttctctgaggctctgggcctgccctgtccgattgctttagggccaaccaggaagggtttacttggcyggctagggaggaacttttacaattaaaaaaaaaaaaaagttgtcagtgacaaagcctttagaattctggaggattcctaagggtagctaattggaaaaaccatttgccccctttaatgactcccccgcccttcccggcccccagccttatccgagagcagccaccctatctgtaaatggcgacca

SEQ ID NO: 865461 - DNA, 617 bp, Homo sapiens
gtgaattccagtaaagcagtactggtggttggggagggaatttacaacagaaaatgcctatataagagaagaagaaaggtcttaaattaataaactcagcttttaccataagaaacaaaagcagcagccacacacaaaaaaaggtaatttaaagtgaagagaagaaaggaaataataactatcagagaagaaatcagtgaaatagaaaatagaaaaatgattttaaaaaattaataaaaccagaagcagcttctttgaaaaaaatcaataaaattggtaaacttacagccagattaattagtgaaaagggagaggagatatagattaccaaattcaggcaatacagaggtgacatcattacgattttcaggatatttaaaggataagggaatactatatacaaccttatgtcaataaattcaacatcttagatgaaatgaaagaattccttgaagaaacaaactaccaacaytcactcaagaagaaataaataatctgagtagccctattacatatttttatttattttaaagtttaaaactttcccagaaagaaaactctaaaatctaatgactttactggtgaattcttccaaacatataagaaaataataatag

SEQ ID NO: 865462 - DNA, 580 bp, Homo sapiens
aaataacagcgattttgtttcctctctgcagttctcatttagctcctccttgctactcatcacatcatccaaacacacattgggacaaaaatagaaaaggagacactaacataggtaaacagatggattgatggataaaattcatttaaaaatattatattggataatattttaattctgatgagttatgaagaatgtttttaaatccttgtaaataacccccaaatggaaaatacgttattttcctttggtaggacaaggaaggttcatgtaataaaaggttatagagttcaagcctatacaattatcaaagtactagaacaagagcgtatttcytgaattttggaagatgttcttcagaaacaataaagggactactcagtttcacactagtcagtaaaccttggaactcactccaccaagcaagtgtagggtttcagataaaggctgaatatagcagcaagttcaaggacagtttggagactttcaggcatggcaggaactcagtggggagctggaaagtttgaagaatgcctccaatttttctcagcgatggatggtaactgtgctttctacaaca

SEQ ID NO: 865463 - DNA, 781 bp, Homo sapiens
gtgaagaatgtcattggtattttgatagagactgcattgaatctgtagactgctttaggtagtttgggcattttaacaatattagttcttccaatccatgaatataggatattttttcatttttatgtcctctttaatttttttctcaatgttttatagctttctttgcagagatctttcacttcttttgttaaaattttcattctctctttattattccagtccagttattcctcctactgtccaggaggcctatgcagatgcaactttctaattgaaaatcttattctaatatttcctaaaaggatcttatttctcatgtacgtatatgtcctttgtgaaaaagatarttttagtaggagagcatatgatctagacaacttttctttcaagggacacattaatagggactctaccattttttaaattaattgagatataaattataaaaagtcatagataattccctcccaaccacaaattctaacagacaaactataaataattttatgattcttctgactgaagccaaagacaaatcacagaaaggtacacatagatagatggcatgatgatatcctcttctttatttttagtattttaaatcatcaccacacttcataattgttattttctactctcttcctttgggtctttttagtcatctttggtttttttgtgtgcaagaaaacaaaatgtaagtgaaaataaatagggaggagaaaaataccttaaatagaaattgcctagttgaaagtaacttgtattgttacatacatgg

SEQ ID NO: 865464 - DNA, 613 bp, Homo sapiens
tttgtctacaaaaagactggagctgggtcaataatgctaatagcagcagcaggcaggaacaacctaggcagatagggcaggtccctggtaaaatcccaccttcaagccaaggacagtttaaagcctagctacaagtcccaagtaaatccatggaccacattgagaacctctcttcccatttggcatgcttttctctgactgatccccacccttcacctatttttcatatacctacccttccctaattggtgttttacactrtcatgcccacctttgagtggtgcctttgtttcagcattttttgcgtattcacaaaccagtcagcatgcactccctcattctgaccccataaaagtccaggacccagtgacactgaaagaggcaccacttgacttcaggtgggggaccaccctcacatcctctctctgctgagagctgttttatcactcaataaaacttgtctctgccctcctcaccctttgattgtcagcataacctcattcttcttggacacaggacaagaactcgggaaacgccgaacatgagtatgagctgtaacacaggtggactggggcatgcccaagccagctgtgggctgagccagtgtgcaagc

SEQ ID NO: 865465 - DNA, 613 bp, Homo sapiens
tttgtctacaaaaagactggagctgggtcaataatgctaatagcagcagcaggcaggaacaacctaggcagatagggcaggtccctggtaaaatcccaccttcaagccaaggacagtttaaagcctagctacaagtcccaagtaaatccatggaccacattgagaacctctcttcccatttggcatgcttttctctgactgatccccacccttcacctatttttcatatacctacccttccctaattggtgttttacactgtcatgcccacctttgagtggtgcctttgtttcagcattttttgygtattcacaaaccagtcagcatgcactccctcattctgaccccataaaagtccaggacccagtgacactgaaagaggcaccacttgacttcaggtgggggaccaccctcacatcctctctctgctgagagctgttttatcactcaataaaacttgtctctgccctcctcaccctttgattgtcagcataacctcattcttcttggacacaggacaagaactcgggaaacgccgaacatgagtatgagctgtaacacaggtggactggggcatgcccaagccagctgtgggctgagccagtgtgcaagc

SEQ ID NO: 865466 - DNA, 613 bp, Homo sapiens
tttgtctacaaaaagactggagctgggtcaataatgctaatagcagcagcaggcaggaacaacctaggcagatagggcaggtccctggtaaaatcccaccttcaagccaaggacagtttaaagcctagctacaagtcccaagtaaatccatggaccacattgagaacctctcttcccatttggcatgcttttctctgactgatccccacccttcacctatttttcatatacctacccttccctaattggtgttttacactgtcatgcccacctttgagtggtgcctttgtttcagcattttttgcgtattcacaaaccagtcagcatgcactccctcattctgaccccataaaagtccaggacccagtgacaytgaaagaggcaccacttgacttcaggtgggggaccaccctcacatcctctctctgctgagagctgttttatcactcaataaaacttgtctctgccctcctcaccctttgattgtcagcataacctcattcttcttggacacaggacaagaactcgggaaacgccgaacatgagtatgagctgtaacacaggtggactggggcatgcccaagccagctgtgggctgagccagtgtgcaagc

SEQ ID NO: 865467 - DNA, 628 bp, Homo sapiens
aggaatatatgtccttacaagattgctacatcttgttcattgctaccttcttcatcccagtcaattccttctttattccgggcagcagtgcactgacactgacacattgatgttctccttgtgagaattagcctatcacattcatttatatccacttaattgctgctgctattgttyagtctgttaacttccagctagggtgcaattcacgtgaacactggggaagcacaaccattcgattagttctgcaaagtagattaaaatcttctggctaattggagattgtccataccgctgccttccttccaactctaggttgaacaaatgttacgtgttcaagggagggctcttagttggaatatggaagccttgactggacccagtagcattttctgagcatgtttgtgtatgggacactgtgctaggcaccatgccagcaattatcaccaatctggtctttgcctgcaacctgcaactagtcttttgattggcagcttgccttcttcattttcataaggagcacatgcacactggagaaactccaacttggtacatggctaaatcattagtatcccaaattggtaagaatttcattttgaaacacaagcagtaagaaaaatcctataaa

SEQ ID NO: 865468 - DNA, 621 bp, Homo sapiens
aaaaaaaggctgagcatgatggcatgtgcctgtagtcctagcttctcagaaggctgaagaggaacagggggtcgagtctgcagtgagctttgatgatgacactacactccagcctggtcgacagagcgagaccttatcactaaaaaaaaagaaaaagaaaaataaaargaaattgtttaaatataataacaatcctttttttccctgataaatgggaagattaagttctttccttcttcccaccataggggactaggacgtcacctaggaagaaaaaatattcagcattttaactcattgggcaagtattcaaaataaattgttccaagaagcaaagttaatttatgccagtcgaatagaaaataacattagtttcattcattgtgtttccaagtaacctggaagaataacaatgactaaaaattttgtgtgtatgaatctaaatatttttcctgatttgaaagactgtgctagacactgaatgattattttcatttacatggtataagcaattcactttctcatacatcttaaaagtctacctacatgagataagaattatgctgttttatattaaaattgatataatttcatgaatcatttttattgactgatgattta

SEQ ID NO: 865469 - DNA, 621 bp, Homo sapiens
aaaaaaaggctgagcatgatggcatgtgcctgtagtcctagcttctcagaaggctgaagaggaacagggggtcgagtctgcagtgagctttgatgatgacactacactccagcctggtcgacagagcgagaccttatcactaaaaaaaaagaaaaagaaaaataaaaggaaattgtttaaatataataacaatcctttttttccctgataaatgggaagattaagttctttccttcttcccaccataggggactaggacgtcacctaggaagaaaaaatattyagcattttaactcattgggcaagtattcaaaataaattgttccaagaagcaaagttaatttatgccagtcgaatagaaaataacattagtttcattcattgtgtttccaagtaacctggaagaataacaatgactaaaaattttgtgtgtatgaatctaaatatttttcctgatttgaaagactgtgctagacactgaatgattattttcatttacatggtataagcaattcactttctcatacatcttaaaagtctacctacatgagataagaattatgctgttttatattaaaattgatataatttcatgaatcatttttattgactgatgattta

SEQ ID NO: 865470 - DNA, 621 bp, Homo sapiens
aaaaaaaggctgagcatgatggcatgtgcctgtagtcctagcttctcagaaggctgaagaggaacagggggtcgagtctgcagtgagctttgatgatgacactacactccagcctggtcgacagagcgagaccttatcactaaaaaaaaagaaaaagaaaaataaaaggaaattgtttaaatataataacaatcctttttttccctgataaatgggaagattaagttctttccttcttcccaccataggggactaggacgtcacctaggaagaaaaaatattcagcattttaactcattgggcaagtattcaaaataaattgttccaagaagcaaagttaatttatgccagtcgaatagaaaataacattagtttmattcattgtgtttccaagtaacctggaagaataacaatgactaaaaattttgtgtgtatgaatctaaatatttttcctgatttgaaagactgtgctagacactgaatgattattttcatttacatggtataagcaattcactttctcatacatcttaaaagtctacctacatgagataagaattatgctgttttatattaaaattgatataatttcatgaatcatttttattgactgatgattta

SEQ ID NO: 865471 - DNA, 589 bp, Homo sapiens
gtaaagtgagatattattggtatattttattacttgtctatgagaagctgaacaaagtaagaggcataaatgaattcagttttacagtactttgttttaaacaaatgtcactacctacacacacatacctaattatcagttcttacacattctgccaaatatcaaacctatagttcataagccacacacacaacaggmggtaaatatattccccctaatttaaaattttattgcagaataccctctgcactatgttaacctacactaaatcacagcctacactctcagctttaccggtgtttacctacttctgattcaaaaagaaaacagtcctaactcctgtttctacatatctatagtaataaaaattttaaaaagagaatgactatatgtaagaaaggaattcaaaacaatggcataaaacggttgactttaactgtaacagcgaataacagattaatccaagacactgttttttggtgtggtttctgaaggttctatgttctgaatgtcagggtttctttgcatatttttgtacatttcaaagactcccgcagcagcaatgcagaaattaacataaagatgaagg

SEQ ID NO: 865472 - DNA, 630 bp, Homo sapiens
ataaaagcaaataaaaaatttagaataaacacccaacatcattctattgtgcaaactgttttttcgtaatagaaatttttgcttaataatattatgttttatgtcaatccacgatgaatggacatgtcgggtttctatggctttgtctcctttctcttccaaacatgtagtatagaccagggrttcccaacccctggcactggcaccggtctgtggttaggaaccgggccacacaacgggaggtgagtggtggcaagtgagcattactgcctgagctccacctcctgtcagatcagcagtggcattagattctcacaggggcacaaactctattgtgaactgcacatgtgagggatctaggttgtgcactccttataagaatctaattaatgtctgatgacctgatgaacagtttcatcctgaaactatccctcctccacccccatctgtgggaaaattgtccatgaaaccagtccctggtgccagaaaggttggggaccactggtatagattatctgttgaaatatttcaaatctagaaactcgaatgaaattgaggtgggttctctgatccactggtcccacccagtacctggggtgtgggctttaaccatcacactatcatgtccta

SEQ ID NO: 865473 - DNA, 608 bp, Homo sapiens
acaaagacctctatatagaacagctcactgtcaattcaccaacaactgtatcatctaacatccacttactgaatattcagcttatctgttgactagtttgtttagaactcaatcccttgttgaatggctttgtaattgtttgagttctctctctccctctctctcttactggctctttctctttccctctctctccctctttataaattcttagaattaaccaataaaacacttagtttgtcttaggcaatgctgcttaatattatgccctttataattgatagaaccgttttgtacacttttattttgtatgtacatctayatctacatatttatatctatatagtacctatatctacatagatatacatatttatctaccgtacttttcaatattttaagcactttttaaaatctaaagacttattcttttatgtttgattttaagggaattaatttaagatgggctaaagatttggagacattttcctagtagagaacttataagaatgctggataaattttttaaaataataatttaaatgcatggcttgattcaatggaaagtaagaaaagtccttggaggctaggaacaaagataagttaag

SEQ ID NO: 865474 - DNA, 505 bp, Homo sapiens
accttgatataacatcactcttgagtagtagtaataataataatttgttgagctcttgttatgtgctaagttctatgttagaaccttcctgcattagtttgctagggctgttgtaacccagtgccacaaattgggtggcttaaagcaacacaaatttattttctgagctccggaggcttaaagaccaaaacgagtgcatcaacagagccaaatctcgaccataccacaagttacttaacaccccgtagaccttagtttctttctgtttttaattattattatagtttaggttctagggtacatgtgcacaaygtgcaggtttgatacacaggtatacatgtgccgtgttggtttgctgcatccatcaactcatcatttacattaggtatttctcctaatgctatccctcccccagccccccaccccgcaacaggccccagtgtgtgatgttccccgccctgtttccaagtgatctcattgttcaattcccacctatgagtaagaa

SEQ ID NO: 865475 - DNA, 573 bp, Homo sapiens
gtttcatttaaaaatattttatatggcataaggctattggatttttggaatcttaaatctacaaagatgttctttcagctttaaaaacattttctatttcattcataaagatcatgtttatttggcctacttatggccactcaaaaatgctgttttaaaggaaaatatttttaaagttgactagagtttagaatttacaacacagataaaatattctctatcttaatatgttactaaactggataatttatgcaattaaaatattgyacaaaggaattgctctatgcctcatcatggttttatttttcttaacacgatcttaaaatgcttctttaactcatttcaattctagaagtaataaggatcaaccacatttttaaagacattaatcttcctgaaggtgattacagaacaaatttgagtttggaatttgattgtgggagtgagttcctgtctagttcctcctgtgtcagaactaaaaaactgtggctttattattctgttcaaagtgaattctcaccttatcaaacacatgcataataatatctatgcctaaaaatgttaccactactg

SEQ ID NO: 865476 - DNA, 564 bp, Homo sapiens
attctagaagtaataaggatcaaccacatttttaaagacattaatcttcctgaaggtgattacagaacaaatttgagtttggaatttgattgtgggagtgagttcctgtctagttcctcctgtgtcagaactaaaaaactgtggctttattattctgttcaaagtgaattctcaccttatcaaacacatgcataataatatctatgcctaaaaatgttaccactactggatgagataaatcaattttatattatttaatattttaatcacttcttcctcattatgattagcagagkaatgactttggataacagtgctttatcagatgtgtatgttgcaaatacatcctccaagtttgtgcttctcttctcattctcttgatattgtctttcacagagcgtaagtttttaattttaatgaattacaacttctgaattacttctttcatgaatcatgcctttggtgttgtatctacaaacatcactatatcctaactcatctaggctttcttctgtgttattgtctaaaactttctatgacttttgtagtttgtatattgcattt

SEQ ID NO: 865477 - DNA, 557 bp, Homo sapiens
tcatgtggcctccctagtataaatacatacttggatatttttggttcaattatatttacctggattctcatttcggaactcaagcaccttgcttgtaaggatgaggtctttgttatatacataaagcaatataattatgtaatttatattgaaacttgaaataacttgaaaacaatagactcctgtaagccatgatggcacacagtattcattccatgtaaattatgatactattactgctgctagtaaaaaagacaactgaaaatattatattaaattasataatagtgaaatctcagttacagggtgtacaagctgccagattatcacacaggtatgcacacacatagttatgagactagaaactaatcctttccccaagcatcaaccccaacaaggttaacttaggtagagagactttaagaaggtccattgtgatggattgtacagattcaggaaattggaccaatggacctcaaaaatcacgaggttcctctattactcataggaaaagagaatttggggatttctcattttcctgaagcactacagtttct

SEQ ID NO: 865478 - DNA, 643 bp, Homo sapiens
attaaaaggaagatacagagatttcctatatactcatgcatagcctcccccattatcaacatcccccaccagaggggtgcattggttaatgactgatgaagcaacaatgatacatcataatcactcaaaggtaataatttagagytcattcttgctgttgtacattccatgggtttggacaaatgtataaaacatggattattataacatcatccggagtgtttttactgcccaaggtttgactcctttgagtacataacaaggagcacaatttctagatcacatagagtatgtttagtttcataagcaatttggacccttcttttatgctatacatgaaaatcaactcaaagtggactaaagacttaaacgtaagacttgaaattgtaaaacgcctagaagaaaacataggaataaaagctcctaaactttgatcttgacaatgatttttttcgatatgccataaaagcataggcaaaaaaagccaaaataaaatactaccatatcaaactaaaaagcttatgcacaactaaagaaaaaaaattaaatatcacagaaaaactgaatagcaaacaaaacaacaaataactagatgaaaaaataagcagaggacctgaatagacatttctccaaggaagacata

SEQ ID NO: 865479 - DNA, 643 bp, Homo sapiens
attaaaaggaagatacagagatttcctatatactcatgcatagcctcccccattatcaacatcccccaccagaggggtgcattggttaatgactgatgaagcaacaatgatacatcataatcactcaaaggtaataatttagagctcattcttgctgttgtacattccatgggtttggacaaatgtataaaacatggattattataacatcatccggagtgtttttactgcccaaggtttgactcctttgagtacataacaaggagcacaatttctagatcacatagagtatgtttartttcataagcaatttggacccttcttttatgctatacatgaaaatcaactcaaagtggactaaagacttaaacgtaagacttgaaattgtaaaacgcctagaagaaaacataggaataaaagctcctaaactttgatcttgacaatgatttttttcgatatgccataaaagcataggcaaaaaaagccaaaataaaatactaccatatcaaactaaaaagcttatgcacaactaaagaaaaaaaattaaatatcacagaaaaactgaatagcaaacaaaacaacaaataactagatgaaaaaataagcagaggacctgaatagacatttctccaaggaagacata

SEQ ID NO: 865480 - DNA, 528 bp, Homo sapiens
gctcaccctacttctgccaccactggggcctgaagactgggctcagttggtgtcctaagtccccagcaaaacttcaccacaacctcaactaacaactgtaccctaagtcactcaggaaatcacagaaacaactgaccctgtgtactgccaaagatgacatacaaagaaaaaactaccctagggacccaaaatcaaagccaaagtattaaattcaataaacaggatacatgatcctcaggaaaaaaactcgcctacaaaagcaatttcaaaattttggaacaagtgactgctacaccaggtacacaartatcatcaggacacaggaaacatgaaaaagtagggaaatatgacaccaaaggaccaaaacaattgtccagcaacagatcttaatcaaaaagaattccctgatttgccagataaataattcaaaatattggttttaatgaagcttaatgagatgcaagggaaatttgaaaatcaacacaaatgaaatcagaaaatcagatcaagatatgaaggagaaattta

SEQ ID NO: 865481 - DNA, 643 bp, Homo sapiens
atacagtaaagaatgttggcccatcttgttggcccatcttgaggccaatagagagctatgaaaggggattatgcagaaaactggccatgatcaagatattttgaaagagtgttttgattttaacatgaaaaatgaactggaaatttttaagggggagtgcaaactgtacacagggaacgctagccaggaaagcagtaatactggctacagtggctgaaagaatgacttggagtaatgggagcagggcataaatgtayggccatgaacaaactgtggcaggtgagggttgactacaacacacacacacacacacacacacacacacacagacaaacacacatgtctgtatcctgattaaaggttttcagggactttatttttaaacttctaccatggctttaatctatcctgttatcttttagctggtattggctccagttcagagttttataaaactgatcttattgaaacccttcagcctaaaccaaaccttaatcaaaaacatggttccttctgattcttccaatgctaatttatacagtagtaaaaatgctgtcctaaattagctttaatcttcatttgtatcatatcatttacaattgagttaacttgttaaatataactgattacagattaagctttc

SEQ ID NO: 865482 - DNA, 608 bp, Homo sapiens
tctctaacttcaaagttaagtaaatgggccttaaaagtagcccttaagactgcgtaaggattagcaaattaaactcagagatgactcaaatgtactttaactataaagacattaagagaggcttgtcggtggcataaagggtcagtaggatacagaaaatgttgctgcttgtttgctttaattgaacaagactcagttatattttagactgaaaagaaggatcctttagaaagacagctggtatagaggaatacttgatggaactaagtctcttaggatataagaaaaaggaaccaatgggcactatttgaaatctcacatttggaaaaggagtctatttcttcttctgatgcaagayagaaaaaaccatgatggtaagacaatctgaaaatgaatactgaagttgcataattatatgtgcatacgaaaatttggttttagagttcaatataattctaggtaaaattaaggaatccatagcacaccaatttttaaaaaatcaaatctcttggtaacatttcaaaatattaaattctgtatttaactcaacacaattctaatcttagtataaaacatagccagcttttgtgctttggactatatatgaa

SEQ ID NO: 865483 - DNA, 608 bp, Homo sapiens
tctctaacttcaaagttaagtaaatgggccttaaaagtagcccttaagactgcgtaaggattagcaaattaaactcagagatgactcaaatgtactttaactataaagacattaagagaggcttgtcggtggcataaagggtcagtaggatacagaaaatgttgctgcttgtttgctttaattgaacaagactcagttatattttagactgaaaagaaggatcctttagaaagacagctggtatagaggaatacttgatggaactaagtctcttaggatataagaaaaaggaaccaatgggcactatttgaaatctcacatttggaaaaggagtctatttcttcttctgatgcaagacagaraaaaccatgatggtaagacaatctgaaaatgaatactgaagttgcataattatatgtgcatacgaaaatttggttttagagttcaatataattctaggtaaaattaaggaatccatagcacaccaatttttaaaaaatcaaatctcttggtaacatttcaaaatattaaattctgtatttaactcaacacaattctaatcttagtataaaacatagccagcttttgtgctttggactatatatgaa

SEQ ID NO: 865484 - DNA, 632 bp, Homo sapiens
ctctgccaagaaattagttttgtgaatcttcaacatttgtttttctaccacctgaagctagccatgggacctggtttaaagttcgttcatgccattttttttccaaattcacttactttcataactgaaaatgacctcaaagaatgattaataccctgtgggggtccatgacataaatccgatccagtgtgcctgatgcaagctctctcagaaggaatgttacagctatattgccgtggaaacctggtgacactgagcagaccaccagatataaaatcttcaaaagrcataactacttaacttggactcaaatttatgtttacttgacttgttaccaacaaaatggagtgaactattttccctagaaattgcataatgcgttgcaaaactaccaagaataataatagaacaatgaatgataggtcatttttatttcttgggtctctttatgttttttcctatcttagggaaaggtagtatagtaagggcaatgaatgatgggggaaagtaggtatcaaaaatctcttaaatgtgtgtctacacaaggtactgggccaaaatggtaggttttgttcaaaacattcgtaagggaaatctttaatatagttgaaagaattattttgtaggaatcc

SEQ ID NO: 865485 - DNA, 609 bp, Homo sapiens
acacttcctgatccagcagcactaaggagtgttagtgagcaacatcaagtgagtaaaattcccctcattcactttatgtaccaaaatacacattgctgcacattggatgctatgatatccccaccaagtcagggaggagaatggagttcagaaattatttcaatgccaatgcttacagacgaayttaagccatcattcttacataaagtgcagtaataggaatactcagattcttcaacaggattaacttagcgtgaaaacagttaagtgtttggtacgatattagaaaagagacattcattgacattaatctttctgtgacagtctcggaagataatcttttcctggttttagcttttaaaaaaatatacaaaagctttacatgtattacattcttaaaggatctgattgcttctctttataacaaaagcatcttgtggtgccaggaaataaggatgtactcagaaaaggataggcttatgtcaaaagggcacaggagccaagctaaaatcttccccaatggccaaaactggaattatctgggcaaaagtaactgcaatattactggattataactattatataacataaatacctcacataaataaa

SEQ ID NO: 865486 - DNA, 609 bp, Homo sapiens
acacttcctgatccagcagcactaaggagtgttagtgagcaacatcaagtgagtaaaattcccctcattcactttatgtaccaaaatacacattgctgcacattggatgctatgatatccccaccaagtcagggaggagaatggagttcagaaattatttcaatgccaatgcttacagacgaacttaagccatcattcttacataaagtgcagtaataggaatactcagattcttcaacaggattaacttagcgtgaaaacagttaagtgtttggtacgatattagaaaagagacattcattgacattaatctttctgtgayagtctcggaagataatcttttcctggttttagcttttaaaaaaatatacaaaagctttacatgtattacattcttaaaggatctgattgcttctctttataacaaaagcatcttgtggtgccaggaaataaggatgtactcagaaaaggataggcttatgtcaaaagggcacaggagccaagctaaaatcttccccaatggccaaaactggaattatctgggcaaaagtaactgcaatattactggattataactattatataacataaatacctcacataaataaa

SEQ ID NO: 865487 - DNA, 550 bp, Homo sapiens
gccagtgacctgttaggaacgaggccacacagcaggaggtgagcagtgatgaaccaacaaagctttgtctgtatttatttacagtcactccccatcatgcagattactgtctcagctctgcctcctgtcagatcagcaaaggcattagattcttttgggagggggtaccctattgtgaactgcatatgyaaggaatctaggttatatgctccttatgagaatctaatgcctgaagacctgccactgtctcccatcactcccagatgggactgcctagttgcaggagaacaagctcaggctaccactgattctacattatggtgagttgtataattatttcattatttattaaaatgtaataatagattcatgggcaagatagccaaataggaacagctctggcctgcagctcccagcgagatcaacacagaaggcaggtgatttctgcatttccaactgagatacccggctcatctcattgggactgcttagacaatgggtgcagcccacagagggtgagcagaagcagggtggggtgttgcctcacccg

SEQ ID NO: 865488 - DNA, 627 bp, Homo sapiens
gatagtattaggagaaatacctaatgtagatcacgggttgatgggcgcagcaaaccaccatggcatatgtatacctatgtaacaaacctgcacattctgcacatgtatcccagaacttaaagtataatttaaaaaaagaaaaaaatagtaataataataaagtacacaataagcataatgcacttgaaccatcctgaaaccatcaccccctacctccaaaaccrggtctctgaaaataactgtcttccatgaaactcatccctggtgccaaaaaggttggggaccactgttctacattataaacgcccccatgccttcctttctctacacccagaggctctgagaatttaattctattagctgaacagtaaattaaaggtaagagaataaacctcacactggtaaatctctatgacatcctgcccactgcagaagtttctcaaatctcattgattcatataactcgttttgactgaatataaaagataaatagctgtgtcttttgacttctgtttaacgcagcttcaatatagtacctgtccatccaatagagagaactgtaatggtgattatctaagccaagtgacactgccgtttcccacatattttcaccccaatttctgagag

SEQ ID NO: 865489 - DNA, 662 bp, Homo sapiens
ttattgattttgttcctaaacaaggtctactgccaaaaattgagtcagaagtgggtctttccaaaatagttttaaaataaactagaacatgcaatagccctttctttctgcggttgtaaaatggttttccattgtattctagtcagtgatgtaatattgtaactagttttacccttcacctccaggggaatattcagttcttgaaagagaaagaaaataatgtcttataacatttaatgtatagatgaaacattatgtacttgaaaatattttctgtgccttgatcttaaaccaccataatgtattagaacaaatagcaggttatgaattacttaatataacttctcacatttatgagaaattctgctatagattcaacaactgtaattcrgagccatgtatgcacccagttctctatgtattcattcaacagatatttatggagagtatacaatgtatattaacaccatgacagtttctgggggatgtagagctacgttaaggcaggcctgatttaggtacctacatacatttttcatttctctccagaaaaaacttgagtcactatcattttctgagctctgtagttaagtggttaaaattggaagataaggcatgtacacccctcctcaatgtggaaaatggaaagggagagtaagttc

SEQ ID NO: 865490 - DNA, 603 bp, Homo sapiens
gatatctaaaagatggagtgtgttcaaatggaagtttatattcaaattattaactaatatttgcctttctacctgtatttcagttatacataaggttcagtttgaaataaaggtataaaacattggcttatctgaacayaaatgataacccagtgcttttggagaaatgtcattatcataaccacatagtgaatcatatcccatggaaattcataagaaagaaattatagaatttcaatagtgtgacaaaagttcaagtgaaatgttaaagggtattgtataaccttcttcataaattttaatttgctcattattctctttgaaaaatatacataattgataataaatgaagtaaccaggttattagactttggcctaagaaactggagccacaatataatgtgtattcacagcggccacttttccaaaactgaaatgctaaacaagtctaaaaaaatatccagcctaaatgagcagttggtaaagcaatcagcctttcacactggaacaagcaacaaacatatgcaatgaccttagcgtttctcttttgatttatagcaccttggaaagcagcttaacaaggtgacacagaacttccagagc

SEQ ID NO: 865491 - DNA, 657 bp, Homo sapiens
atgcaataagacaaaatattaaatagatcttcttttcatgcttgctggtaatctgtaaatatacctaaaaggcatcaagagattaacaccgcattattttatatgactacgccaacaatttgcctctataagatatatatggtagagtgcaatttttacagtgcaattttgtaayctttcttatttcagtataaattagtataatccacaatttaacatccaaatatacagttactttgtctatgaaatattttttagatataaactaaaaagctcaggttaagaggtaaatacagcttcaaatatatggggtgttacctgaaaaaaacacatatttaggaagttattttctttttatttatctaagcctaaatttttaaattataaattaaaggtagtcaggatgctggaaagaaattaattctgcatcaacacttttaaaattgcataagaaattaagtagagatatttctaattctaatatcggtgataaatttacaaggaaacttgtcagaaaatggataggctggtaagggagatgtgattatgcacattatttagaattttttaatgaaataataaaatgtttcttatatgagaatgtctgattattatcaaaaaggaaaaatgtctgagtcataaatctgtctgtctatt

SEQ ID NO: 865492 - DNA, 476 bp, Homo sapiens
ataacaaaaaagaaaacgagaaaaagatggcagcctgaataacctatttgtgactgaatttattgtattcgtgtatccttattttacttgatgtctcatttagaagtttgagctctcctatctctttggttgccctttctcaacttcctttgccaattttgcttcttataccmaattaaatgttgaatgttttagtccatccaggctgctataacaaaataccacagtctgggaggcttataaacagaaatttatttgtcatagttctagaagctgagaagaccatgattaaggcaggtttgatgtttggagaaagcccgctttctggtttctaaatagcactttcttgctatgctctcccatgatggaagaggctagctagatctgtggtgtctctttcttaagggtgctaattctattcatgagagctctatcttcatgacctaattaccgccccaaagtcacacctcctaata

SEQ ID NO: 865493 - DNA, 632 bp, Homo sapiens
taattaaaatcacaataaatttctgacaaatcagtgcaaaagataaaggaagcagtctgtataacaaaaaagaaaacgagaaaaagatggcagcctgaataacctatttgtgactgaatttattgtattcgtgtatccttattttacttgatgtctcatttagaagtttgagctctcctatctctttggttgccctttctcaacttcctttgccaattttgcttcttataccaaattaaatgttgaatgttttaktccatccaggctgctataacaaaataccacagtctgggaggcttataaacagaaatttatttgtcatagttctagaagctgagaagaccatgattaaggcaggtttgatgtttggagaaagcccgctttctggtttctaaatagcactttcttgctatgctctcccatgatggaagaggctagctagatctgtggtgtctctttcttaagggtgctaattctattcatgagagctctatcttcatgacctaattaccgccccaaagtcacacctcctaataccatcaccttgagagtcaggatttcaacatacaaattttggggaaaacaaacattctcgccatagcttttgagaacatcaaggcttggcccaaggc

SEQ ID NO: 865494 - DNA, 548 bp, Homo sapiens
acctcacgttcaagcaagtctgagtgcatggatctaacagctcctggctttagaaagagttctctatgtgtgtaaaaacctaagaactagtttgttttccattaaaagttgtgctttcttctctttacagcaaagtccaaaatgagatttagaagactactgcwgtgcgaagaagccaagttatcactaaaatagatggagcaaaagaatttaacaatgctttcacagctgagtatttaatcctgtagaaagatgatggctctgattataaagagataatgatgcagaatgtacgagaagggaatttgaatttctaagaaaaaatgtttgagaaggagaaaactgcaaattctgtgagaaacaatgttttaagtgccttctaataaggtgtttcttaagatgagatggaaaggacatacttcctccttatctaggtacagatgttactcacttgtgtaagactgagatattaattaaatttgagcatgctaggtagagcaaaggccaagaagatacctcacagatagccataaattacccctagaatc

SEQ ID NO: 865495 - DNA, 458 bp, Homo sapiens
tttctaattttactttgcacattctactctgattaattatgtgctgatcttaccttttaaccttcaaaaccaattcctattattcccaattataaagtttggtggaatacctcactaacaaaaataatttattatatgtgtctatataatcatattttagttagttctttgatatccatacaagataggtattgcacagcctgatatgtaaaattctaagtagttacgaagtaacagaagcattgggtggccacacaaagycaacaacttctgagcaatggagaaagtttttttattaaagtactcatatattttgtttttgcaaaaaaaatcaaaatggtccattttactagtctcaggattgctactcagtgcaaagagagagttcaaagaggaaacactgttgcatagcgtgtacttgagaatcccgtagttgtgtcatggctgggcatttattt

SEQ ID NO: 865496 - DNA, 551 bp, Homo sapiens
aaaaactggagctttatgagtggtgagtgatggttcgcacagttcaagattgacggcacaaaggtttactagctatgctggtggactcattcaggaagagaatataggagacaataattggcaactatgatggccaggtattatggtctcaatgtggggtgggaggcagaacattagaatttaagggagaaatcttgaaattgagttatagaaggcataaaataacaaactctccacatctttggtggactgctaagctatgccttaagttggagacctgtgactgaccaatgaaaagtagaagagattcttgagtcatgagtaaaatccaagtcacttgtgattttgaatgtagtcctctacctacgcarcccagttagcagacagtggaagccttacaaatttgaggtgattcagcatagtttctgcccaaatcactgggtaaatgtgaaaatactcaatcctctagggatcaagctacagacatgttgagtggagatatatgcagctatacgcaagaggaaacggatttcccaggatgaatctaatca

SEQ ID NO: 865497 - DNA, 585 bp, Homo sapiens
aaaggcaagaaagggaaaaaaataaatttgaacattgaggactttggcgggtcacagtttgaagaaccactgtagctcgtttttcttgttttctttttttttttttttttgtacatagactaggtaagaaaaaaatttagtcttctactgacatgacttttctccatttgctcaaccastttggtggttaggaaactctaagtcttatttgaagatttcaggcaactgaccagcacatagttgaccttgagttatttagaataactaaactaatgtgtcatggaagaagtgaaagaaatgtattagaaattctgctagtggagaaccattctgaaggttgaaacagcccaggatgcagtgcgtatttctcacctcattaacttacacaaaaacatgccattgtctactacttttcaaattaagcagcctggacaactcttaaaaatggttaatttgacccactccatgaaacagtcaggttcacctctgcagttgtaaatataaatcttgcttgatttgataatctgcagtgattgaaaacatttttgtgaaaatgtagaacacataggtaaaaaagaaatgaaa

SEQ ID NO: 865498 - DNA, 571 bp, Homo sapiens
agcagtctcatagtgctaaggagattaaaagaggagctcaatacccattgaggaggtggagcactagcagacatcccaggcttctagttaggaatgatagagggctatgcctggtgtggggctggaacagaggtggatcaagccttayaaattaactccactctgattatcaaaagaatggctatccttcctttgaagataggtaaaataattataatcctctctaatgttttatacagaacatatggcatttgcttgatagctacagacaagacaatcccaagacacaaaagaacaagatgatggaaatggacatatagattatttagttagtagactgatcatatgtaaatcttagatctaaagtagataacaataacttaaacttctccagagaactgcaaaacataaaaatgaaataaatggaaattaaaggctaaaaatataataatgttatgaactaaattgatgaatttaatagcagactacacacagcaaaagagaaatcagtagaaaacatccaggtaaatatgagaataaaactggaaaatgagaacaaaatacttattag

SEQ ID NO: 865499 - DNA, 571 bp, Homo sapiens
agcagtctcatagtgctaaggagattaaaagaggagctcaatacccattgaggaggtggagcactagcagacatcccaggcttctagttaggaatgatagagggctatgcctggtgtggggctggaacagaggtggatcaagccttataaattaactccactctgattatcaaaagaatggctatccttcctttgaagataggtaaaataattataatcctctctaatgttttatacagaacatatggcatttgcttgatagctacagacaagacaatcccaagacacaaaagaacaagatgatggaaatggacatatagattatttagttagtagactgatcatatgtaaatcttagatctaaagtagataacaataacttaaacttctccagagaactgcaaaacataaaaatgaaataaatggaaattaaagsctaaaaatataataatgttatgaactaaattgatgaatttaatagcagactacacacagcaaaagagaaatcagtagaaaacatccaggtaaatatgagaataaaactggaaaatgagaacaaaatacttattag

SEQ ID NO: 865500 - DNA, 687 bp, Homo sapiens
aagactgcagagcaatttgaacttcatatactgttggtgctatgttcattattcactatagtatattttttggtgcccaaacagaagatgcattcagttaacatctatctattaactcacatttatggtctttgccgttatattttaaattaatttctaaaatttcactgtatttcataaatgttccatgggcagaaatttttaacaaaataaattcagtatttgttaaagaaagaagagtgaactacatatgctgaagccaaaattgctcatggtgaaggcaacatgtgttattttctctggatggagttgcagcttaacaaattttctctgatgtttttctatatttccgtattaatgctaaaatacagccaaatgttcctctcaaatttgttcaattttcacttaggtcayggaaatactgttttttactttcttgccaatactattctttttttttttcaaaaattgcacgtatacatggttcaaacaagcaaagagtgccggagatattacaaggaaaaatagcagcctcctgtgccactttatattaccccaattcctacattcaactctgttatttggcatttatttccatgtttccaaataacacaatactgttatgtattgttttcatttcagctaaaacttgacttcttagtatggaaaatcttcatttagttcttg

SEQ ID NO: 865501 - DNA, 687 bp, Homo sapiens
aagactgcagagcaatttgaacttcatatactgttggtgctatgttcattattcactatagtatattttttggtgcccaaacagaagatgcattcagttaacatctatctattaactcacatttatggtctttgccgttatattttaaattaatttctaaaatttcactgtatttcataaatgttccatgggcagaaatttttaacaaaataaattcagtatttgttaaagaaagaagagtgaactacatatgctgaagccaaaattgctcatggtgaaggcaacatgtgttattttctctggatggagttgcagcttaacaaattttctctgatgtttttctatatttccgtattaatgctaaaatacagccaaatgttcctctcaaatttgttcaattttcacttaggtcacggaaatactgttttttactttcttgccaatactattctttttttttttcaaaaattgcaygtatacatggttcaaacaagcaaagagtgccggagatattacaaggaaaaatagcagcctcctgtgccactttatattaccccaattcctacattcaactctgttatttggcatttatttccatgtttccaaataacacaatactgttatgtattgttttcatttcagctaaaacttgacttcttagtatggaaaatcttcatttagttcttg

SEQ ID NO: 865502 - DNA, 687 bp, Homo sapiens
aagactgcagagcaatttgaacttcatatactgttggtgctatgttcattattcactatagtatattttttggtgcccaaacagaagatgcattcagttaacatctatctattaactcacatttatggtctttgccgttatattttaaattaatttctaaaatttcactgtatttcataaatgttccatgggcagaaatttttaacaaaataaattcagtatttgttaaagaaagaagagtgaactacatatgctgaagccaaaattgctcatggtgaaggcaacatgtgttattttctctggatggagttgcagcttaacaaattttctctgatgtttttctatatttccgtattaatgctaaaatacagccaaatgttcctctcaaatttgttcaattttcacttaggtcacggaaatactgttttttactttcttgccaatactattctttttttttttcaaaaattgcacgtatacatggttcaracaagcaaagagtgccggagatattacaaggaaaaatagcagcctcctgtgccactttatattaccccaattcctacattcaactctgttatttggcatttatttccatgtttccaaataacacaatactgttatgtattgttttcatttcagctaaaacttgacttcttagtatggaaaatcttcatttagttcttg

SEQ ID NO: 865503 - DNA, 646 bp, Homo sapiens
gataaaaaacaatacccatgcattcatacagaaaagaagggtggatttccatattcaaatacagtaggagactctgcatttacgggactccttcccttgatgcctcaaaatgagctagtaggaagagtggctccagctctctcatcaggaatggctacaactccccataggtatagcagctctcactgctctcagcaacaggaggtgtgctgagactctacacccagaggtctgggctcctccaagtctccaagtgctgggcaactgatatttctagcaattcacccaatggttagtgtctaatcttagactactaggtgtctgarttcagttctcttcattgaagactgttctcctgcttacatcatacaaagagagagcaacagggttgtgaaaccctttataggaatatagcccctctgtttatccagctattccctgccccagcatacttctgtcacaattctgctggactctgagagaacagaggcctgtgtacctgctgcaatcctgcaccaaatgctgtttgctgttgtttgaacatggaccattgcaagagagtatcaaacaaaatttatcagaagtcctgctatggactgaatgtgaatgtttgtgccctctcacctcaaattcatatgttgaagcc

SEQ ID NO: 865504 - DNA, 672 bp, Homo sapiens
agtgttggtaagggtatgctgtgatggttaatattgagtgtcaacttgactgggttgaaggatgcaaagtattgttcctgggtgtgtctgtttaaggtgttgccaaaggagattaacatttgatcagtgggctgggagaggcagacccacactcaacctgggtgggcaccatctaatcagctgccagtgtggctagagtaaaacaggcagaagttggaaagaagaattggctgggcatggtggctcaygcctgtaatcccagcactttgggagaccaaggcgggtggatcacaaggtcaggagatcgagaccatcctagctaacatggtgaaaccccatctctactaaaaatacaaaaaaattagccaggcttggtggtgggcgcctgtagtcccagctaccagggaggctgaggcagtagaatggcgtgaacccaggaggcagagcttgcagtaagccgagatcacagccactacactccagcctgggtgacagagcaagactgtctcaaaaacaaaaaaaagagagagagacttgtgagtcttcctgccttcatctttcccctgtgctggatgcttgctgctcttgaacatcagactccaagttcttcagcttttggactcttggactacaccactgccaggggctctcaggccttcagccacagactga

SEQ ID NO: 865505 - DNA, 620 bp, Homo sapiens
cacccagaactattacatgaaataaagaaaaacaaactagcacttacagagaaaggctgatactctttattcttaagtaccaaaatttactactaaatgcttctggtatttcttaaacccttaataactgaaatatcttcacctactttttaaattaaatataaggtctctgtaatttttttaaaaaacaaaaagtcattgcataagactttgatcaatacaaaattaataytgcaggtacaatgaaactctggagttggttcacaataaaaaaagattcaatatacttgtaagtactgccaaaataagcaggaacttactcttcatcagagcagtcagatttttcttctgtctgtaaacagagcaaaattcaagacatttcaatactggagaatctctaatgagtggttagtaaaatacccacctttctgactgccactggatatcaaaaaattactcacttctgactcagtaattacccaccaaaaatttagatcaagtggtcctcacgtcacccaaattagtacctgacaaggaatgcttttggcaaggttggcagctgagaaacaggaagtgagttgcaaaacattattaaaacttgaaaataacagctttaaagg

SEQ ID NO: 865506 - DNA, 478 bp, Homo sapiens
cacaatgcatctctcttctttcccttctggaggaagagtggcgtggtggagaccctgggctttggaaccaggtggttgaaatcataactctactattaattagttgcctaacataaggaaagcttctaaacgatcctggtcctcagtgtttcattcaccaaatggcaacaatatctcttcattatgtttctgtgatgagcaaatgaagcctagtatagaaacacctaccaccttgtccctgttcttcgaacacacattggagartaatgctactaaaaatgtgcattgcttttattcatggccatgtgcaaaagagacaaggctttgacctaatcttgcctcaggctttggcctccaactccaacaataaatacacacgtctctgtttacaactccataaacagggacatgtgtttctgttaacaatgcatgctctgggctgtctctgtgatcaattattttatatcattttcaaatt

SEQ ID NO: 865507 - DNA, 578 bp, Homo sapiens
aaattgaaattgtggctttccccaagattatggaataatcttgtagcctactaataagttgtgttggttaattgccaggctattttgcatatagttaagttgtgcacataaaaatacacgtgatgaaacatgtagtgttttataacccagagcaactaacatgytcatacctaatgcatgcacacacactgtaacccaggacaaattgctcgtgttagttactaccacaggctggcaggccagaaaatacatttggtgcctaatatgcataagcacagaaatatggtcagactcattactgtaataaagctatgatttgccaacaggatcagaggaaacacacttgaagcagtctgtcccttccgttagttcatgtgccataaagcaataaggttgtaagaagggtgaatcctcaattcagttgtgctaccttgtctgggttatttgaacccttatttgccttaaggggcccatttgcttgtcctaatgtgtacacagtgataatgtagccatttacgcaataaggaaggcctgcaaaacagtagtctgctcagcagtaacatggggtagcaagagtg

SEQ ID NO: 865508 - DNA, 643 bp, Homo sapiens
tttgacacttagaaatttcttctgccagatactctgaatcatctctctcaaggtcaaagttccacacatctcaagggcaggggcaaaatgatgctagtctctttgctaaagcaaaacaagaatcacctttactctacttctcaacaaatttctcatctccatctgagaccacctcatcctggactcattgtccatatcactatcaacattttggtcaaagccattcaacaagtctctaggaagttccaaacttttccacatttttctgtcttcttctgagccctccaaactgttcctctgcctgttaccaagttccaaagtcacttccacctttttaggtatctttatagyagcaccccactttctgtatcaatttgctgtattagtctgttctcacactgctaataaagaattgcttgagactggataatttataaaggaaagagatttaattgactcacaggtcggcatggctggggaggccttaggaaacttacaatcatggcagaaggggaaagcaaacacatccttcctcacatggcagcagcaaggagaagtgcagagtgaagttggggaagtcccttgtaaaaccatcagatctcgtgagaactcactcactatcatgagaacagcatgcaggtaa

SEQ ID NO: 865509 - DNA, 537 bp, Homo sapiens
ttccgtgattgccagtcaatatctaataatgcagcttcttttctgataggaaaggctgtgctggtgggactttggtctgcccaagcacctgatagcttatctgctttaaagttatattaatacattagcattctatttttattcatcacttgcaccattgagtcagacactgtcaagayccacttttggtgcctgaaaagtcagacaagggcaaaaggttaattcactaaagaaaatctgctttgggggatcatgtaaggatgatagcaaggtcttcccctggaaagcctcccctctcttactgtggaacccctttaaacatctactaaaggctattgcaatagtataggtggacaaaacacccatattcaaggtaccacaggaatactgaaaattttgttctgaatcacaaaatcaattccactctttatgacagtacccagaggtctctctcagaagccggatggtcagagtcagtgctgaggtctgcatccttcccccttcatcattcattgagtccatttagcaaacagcttg

SEQ ID NO: 865510 - DNA, 631 bp, Homo sapiens
tgagaaatagattcctgttttttaagcctcactgtttgtggtattttgttttcgtagcttaagctaagatagtaaattctgcaatattatgcttctagtttataatcactttgattaccctatgtcatttgcattactgggtaaattttattaaaaagttaccaattactaccaaaaggaaaggtggcattattttgattatgaytatgttaagtctataaatcagttcaaggatatttgacatataatttctattggccattctgatgcatgaacatgatatatctctctccatttctttaggtttcctttcatttgtatctgcagtggtttgtagttttcggaatataaatcttacatatataaaaatttatccttaattatttcatgtttttgtcattgtactttgcttatatatagaaatacaataaattttgtatattactttgtattcttaactgtgttaaattcacttcaagtagtttttggtaaatctcttagaattttctaggtacacaatcaagtattctgtgaataaagaccattctccctattcctttcaaattgtatgtcttttgtgctttcttgtgtgtgtgtatgtgtgtctgtgtgtgcgttttgctttgttttg

SEQ ID NO: 865511 - DNA, 612 bp, Homo sapiens
aaaggattataaacctactatacaaacccaaaggattataaacctactataaagacacatgcacatgtatgtttattgcaacactgtttacaatagcaaagacttggaaccaacccaaatgcccatcaatgatagactggataaagaaaatgtggcacatatacaccatggaatactatgcagccataaaaagggtgagttcatgtcctttgcagggacatggatgaagctggaaaccatgattctcagcaaactaacataagaacagaaaaccaaacactgcatgttctcactcataagtgggagttgaccaatgagaacacatggacacagggaagggaacatcacacactggggcctgtcggggggtggggggctaaaggagggagagcattaggagaaatacctaatgtaaatgacgggttgatkgtgcagcaaaccacccacataggtatacctatgcaacaaacctgcacattctgcacatgtatcccagaacttaaagtatattaaaaaaaaaaaaaaaagctccaaggatcaggttaaaggataagtgtctctccacatatgcaagattcccaaatacttcagattttatgccttgtttggaat

SEQ ID NO: 865512 - DNA, 527 bp, Homo sapiens
gagattatagaatctctgtaattgctagcacatctcaagatgaccaaaagtcatcaaaaatttgtaaatggcaaagagaagggaataaattattgttatttccaactattttactctttttctctcaaaggataaagaattctagttttccataaaactcctgaaagaaaatataggaataaatctccatgacattgggttaggcaatcaattctayaatatgacaaaaaatgcataaatgacaaaagagaaaacagataaatgggatgttatcaaattaaaatcttttgtgctgcagatgataccatcaagaaagtgaaaggtcagcccatagaatgggagaaagtatttgtaaatcatatacctgatatggagcttatatctagaatatataaagaccttttaccctgcagttattaaaagataaccagattaaaaatgagcaaaggatttgaactaaccttcctccaaagaaagtatacaaaaggttgataagcacatgaaaaaactcaacattattggttatt

SEQ ID NO: 865513 - DNA, 527 bp, Homo sapiens
gagattatagaatctctgtaattgctagcacatctcaagatgaccaaaagtcatcaaaaatttgtaaatggcaaagagaagggaataaattattgttatttccaactattttactctttttctctcaaaggataaagaattctagttttccataaaactcctgaaagaaaatataggaataaatctccatgacattgggttaggcaatcaattctataatatgacaaaaaatgcataaatgacaaaagagaaaacagataaatgggatgttatcaaattaaaatcttttgtgctgcagatgataccatcaagaaagtgaaaggtcagcccatagaatgggagaaagtatttgtraatcatatacctgatatggagcttatatctagaatatataaagaccttttaccctgcagttattaaaagataaccagattaaaaatgagcaaaggatttgaactaaccttcctccaaagaaagtatacaaaaggttgataagcacatgaaaaaactcaacattattggttatt

SEQ ID NO: 865514 - DNA, 656 bp, Homo sapiens
gagcgctctttctagctgcagagaaccagagagatagaagaactcaatttgcctttgtaggctttaaagatggaagtagggggctttgcctcaaggagtgcaggaggccttgagaatctgtaaaaggcagataaatctccagaaaggaacacagccctatgccttgattttagcctagtaagaaccacattgaacttctgccctacagagctgtaagatagtaattttgtggactyttaagccattaaatgtgtggtactttgttacagcagcaatggaaaacagatacaccacttctctctataggaattgctcatctctgtctctgggactcaggaccacctggattttttccctaacaggtttttgtatctcgaaatagctaatctctaggagaagaacttggcatgttggtaccttttaattcccaaaagaggttcacttcaaattttccaagtccttcctccagaaaccttcaaattcctcaaatcaatagcttccctgcaaggaaaacaacaccacaaaaaatattcacattttggagatcctgctatatagcattttctcagagtttcttcaaattatattcctttaagttaattactagatgggtttatgagttatttagtgaactggaatgctatagaaggcacaga

SEQ ID NO: 865515 - DNA, 552 bp, Homo sapiens
ttacaaaaattggctacaaccctgacacagtagcatgtgcgccactttctggttggaatggtgagaatgtgctggagtcaagtgctaatatgctttggttcaagggacaaaaagtcaccagtaaaaatggcaatgccagtggaaccatgctgcttgaaactctgcaatgcatcctaccaacaactcatccaactgacaagaccttaagtcggcctctccaggatgtctacagaattygtggtattggtactgtttctgtgggctgagtggagactggagttcccaaacccagcacagtgctcacctttgctccagtcgacgttacaactgaagtaaagtctgttgaaatgcatcatgaagcttcgagtgaagctcttcctggggacaatgtgggactcaacgccaagaacatatctgtcaaaaatgtctgtcatggcaacgttgctggtgacagcaaaaatgacccatcagtgggagcaactagcttcactggtcaggttattatcctccaccatccagaccaaatcaatggtggctatgccgctattctgg

SEQ ID NO: 865516 - DNA, 642 bp, Homo sapiens
gaggattgaaagcacatttcaggccgaaagatcacagaaaggccttatccaagttggatatggataaaaggtgaatggttctcagacaggtgggagaaatgggaaaggcatcatgggtgggtggaaacagcttaagcaaaggtgagacctcaggcatccatgcacacctttcagggaaatttcaaagaagcaatggatttctggttatgttctctatctcttataaagccccagtttgtatcaaagaacaacaacaacaaaaacaaaaacaggaaggaagaaagaaaggggggagggtcctacaactacccttaggttcctccccttattgctagctgataagtaaattaaagacattaggccccaaaccattascacaaagctttccaaagatcttcagatctgatgtttgcttagaatattcatctgagattataataataatggcataaaactgtataattatttacttgaacatcaatatgtaaattatatttatagtgggctttcccatgtatttgtagatgatttgaatctcctaattccaccagtgttacagaaaaacgactgaatggtatttgttaaagcatggagacaaagactttgtcaggataatgacaggcacagggaccttgcagtcaa

SEQ ID NO: 865517 - DNA, 546 bp, Homo sapiens
gggcagagggagagatctttgggaaaggggcttggaagtagttctttcttctctccccccggccacctatctgcctcagagagaaagaaaagtaaaacggaaagcttttgtcagagatcagcaaactctgactcctattagatgcactttcgctttgrggattggtagtaattaacagagtgcttggtggaggtgtggggtagggagctagttaactccttctggccactagggttcttttagtaaattattataatacataaagcggtgccctagtgaccagaaagaatctaggacttggtctctagtaataatttgtagactggaaaaatctgaccaaataagaaaggtcacttgcttttttttaaaaatgctaaaaatagcaatgattaatatgagtgaaaaaagggagaaattatatggacactgtttggccagacttacaactttacatttttccttttttttttttttttaagcaaaacaaaactttcataagaagaagagagaatactagagactaacaagctaagttttcagcctgga

SEQ ID NO: 865518 - DNA, 544 bp, Homo sapiens
gaccaatgcaattagggttcttagcagaaattgagccaatgggatttgtacatatatacagaaagatttattataagtgattggctccgtgattatggagactgacaagtcccatggtctgcagtgggcaagctggagacccagaactgttgatagtgtagtttcattcctagtccaacagtctcaaggccccggaakagctgatgtttgaatatgagtccaaaggcaggaaaaaactgatgtatcagcttgaaggctgtcagacagaagaaattccctattactaagtctttttgctttattcaggccttccactgattggatgaggcccaaccacattatgtagggagagttctttgtgttttggatgcaagtcttctatcagatacactttttacagaaatttcccactagtctgtggcttgtcctttcattcccttaacagtgtcttttgcagagcgaagttttaaattataatgaagtccagtttatcactttttctttcatggatcatgcttttcatattgtatctaaatagtcattg

SEQ ID NO: 865519 - DNA, 675 bp, Homo sapiens
ttaattcccttggtcatcgaatctctctgactttaacctcatgattcactgtgtttctgtcttctctccattgctcttgtagccttactcagacttcattccattgtaaacaatttccccttattctcaacttcttagaagacctctccatttacatttcttctccaagagctggttttcctctttggcccatcttctacactccagataattttgggagaaggtagcgatgctgttgacattttcttgtctagccagtgttcccaacaggtacgtggcttccagtggcagggaatctttgatgccctttggtccttttggttgctgtcagtactgtcttctgtttctctcccttgtgtattgggagagctttggcacacagctagtagtcttcttcattctccgtttgtcattcctacatgatgatgtgcagggaatgtccactatcctggtccaaagttgttctcagtcatatggccaccagtacttcttcagaaatacacacaagggatattctctagacttcatcatcactcagartggtttcatttgagagtcttcaatttttttttccatgttccacaacaagctgtggcaaacctttatttctagcacacagtctttgactgtaacgagatctcctgttgacccatccttttttgtcggtctggcatt

SEQ ID NO: 865520 - DNA, 576 bp, Homo sapiens
gctccagaaagatgtatcatggatattctgcttttgtgcatcctccctgcatagaattgaggctgtgcctactctggtttcagaagcatgcagcagagtacataaagttaatctgcaaaaggtttcagacactcatcagggagcttcctgcatgggctgagaaatgccaagaccccacgcctccagtaccwcccctaaggaggggctcacaatttgtaacatttttaaacagttggaatatcctccactagagagggtttggtgaaagtagtacttttgtacacagatgatagcaagataaattagtgtaacacttttcaaaacccacttggcaatgtgtatcaagagctataatagtatgtatcctgtttgacacagagattcctttcctgagaatccattgcaaggcaataaacaacaagcaaaaaaggaagtagcattaagcacaaaaatatttcttgtattactatttttcaaaaatatttcctcataacaacctaaatatccaaaggcaggaaggagtttttgtaaactgtggcactttcactgggaagaatactatgtagccattattag

SEQ ID NO: 865521 - DNA, 778 bp, Homo sapiens
aagattacagcgctaataaatggtagagtaagggcttgaaactacaaattagttacttcagtcaacaataaattattgtgtgagttgatgggctaggaatttgctagacattggaaataaaaaatagaacagggtaaaaggggaaactatatgaattaacccataaaactttcctgagagtcattagataattaatgtgaagatataacttgttcatggatgggaaggctacttattgtatatatacaaacattcctaaattatttttataaatttagtgctgtttcaaaaatatgattattttattaaatgtatcaaaatgactgcaagatttctttgagaaaaaaacacaactatagttcaaaatatacaatgtattttttaaaggaagcgtaaagccatgggaattctctatttgacagtccaaactaccaccagactaaaacaagcaaaacaatgtagcagatggatacatggtatgaagtagatagcagcaagccagactcatatctatgggaatttagaatgtgatacagataatatcacagatttccagggaagaaaatggttaattgrtaaattggtcttaggaaaattgctttacaatttgaaaatatacacttaaaacattaccttgtcatttacactaaaataaattgttaatatcttaaagagatcaatttaaaaatataaagccattaaaggacatgtaaatatatatgtaccatatctctaatgggtaaagactttataagtataaaaaatgtgtagaagcaaa

SEQ ID NO: 865522 - DNA, 608 bp, Homo sapiens
ataagaacattgaattaaaatggcatagaggtaggttacagttttagctatatgaatgtataattatatgtttattgacatcaaaaatgtgacagagctttcaaagtagctacgagttggctgtacttttatatctttgatttgaccttaaacattgaaaaagctggtaatctttgcttgcagctagaacatactatataccacctgctaaatgtctttctaatgaaaacaataaatgaccgctattaatgctagagatcaagaagagtttgtatccttgcaattttaggttttgtgggctttgtggacatgtgaaaagaaagtacaataaatatgtttttattgaagaatttgggtccagtctaaaagagagcaaaatggcttagaagaaaatgcatattcagtttttctttaggttaatgtatagttgcttgaatataataggctaacaatgggagmcagttaatatttctttcaactaagttgaaactttagaagttgactcattaatatttatatagtggctaagtcttaggtctttaattttattctcaagtgagaaaatgtaatgtattttggtgggtctacagattgtccatgtgaggaag

SEQ ID NO: 865523 - DNA, 582 bp, Homo sapiens
ccatcaacccatactctacgctacgtttttctcctaatgctatccctccccttgccccccaccacccgatgggccccagtgtgtgatgttcccctccctgtgccaatatgttcccattgttcaactcccacttatgagtgagaacatgtgctgtttagttttctgttcctgtgttagtttgcggagaatgatggtttccagcttcatccatgtccctgcaaaggacatgaactaatcctttttttatggctgcmtagtattccatggtgtatatgtgccatattttctttatccagtctgtcattgatgggcatttgggttggttctttttttttttatttaagttctagggtacatgtgcacaacgtgcagatttgttacatatgtatacatgcaccatgttggtgtgctgcagccattaactcatcatttacattaggtatttctcctaatgctatccctcccccctccccccaccacacaacaggccccggtgtgtgatattccccttcctgtgtccaagtgttctcattgttcaattcccacctatgagtgagaacatgtggtgtttggttttttgtc

SEQ ID NO: 865524 - DNA, 628 bp, Homo sapiens
tgcactagtaacctgtaataacatttttttttttttgccttcctagcttcccttaatccagttgcctaaactgacttatctagctctattgaaaaccggtgtctgcatttcacttcttgctgcaataattccctgttaattgtgacctccttgtatggattgtgttttattctttgctgctagaattattttatttcatgttcctgctgcattgttcacctgcgtggcttgctatacccctgacaccaaccatcatcagatagtttccacctttttttggctgccgtgcygtgcatggcaaataactttgtattgccactactttactgtatgtacttgttaattctggtgaatttccccccttgccttcttctggaaatgctcctgaatggttgcctaaagccactggcctaaccagttgttagctttcactcgtcctggaaagaatccatcccatcacccgttgaccccagtactaccaggaaaacatttagcactaaaactaaaccaaagttattttgattattggccaattctaaaagctccttagaatcatggggtacctcagaggaacaattataaatgccactggcctgtaaatatgttgaattgacttattggttaattg

SEQ ID NO: 865525 - DNA, 619 bp, Homo sapiens
gtcaggccttcatcaccttagaatattcctttcagtacctcatatgtctaaactttattagaggcatgaaagacagacaaggcaaagtatttaatagtccagagtgagtaaatgaccagggtttctttcagcttggtggtaagaatagctccccatctgttctcttactcatctttccccttcgctccttgctcagtcttcctcgatctcagcctctttcttactaatggggcatgtgccaatcatatcctggcctcagggcctttgacctcgggctcattttacctggaaaattctctcctcaaaagttgcatagcttttgcrtggctacctccttcacttcaggtctctgagccaaatgtcaccttattgcgtagtccttccctgaccagcccatgtaaaatacaactgcttccttcctccacatcctcctgccttatgttcctttgtagcatttatcactacctggtatgctgtattttattcattttttgtttactgtctatctcctgctcctgaaatgtaagttccatgaaagcaggaatttgacctgttctgtttctcttctagattccacagtctgaaaaagtgcctaggatataggaggcattcaataaac

SEQ ID NO: 865526 - DNA, 658 bp, Homo sapiens
actcccgaaaggaaaagggaattttcacagagcagcttgctcaggattatttatggatgtaaaaatttgccatccagggttggtaatagctttgtccaagagtcctgagtgtttgtgtgggaagctgtggttgtctttctgtgtcatcaaccccaaaagagtatttctgagcaattattcacaatttgattaaaattctttagaggctatttaaacttgcctttttatttagcaaacctttattgaacaggctcctgtaccaggcaccacaataagcataaagatgaatgagaccrcacacttaccctaaggtgaattataatctagtggcagagagagagagatttaaacaaataatactaatacaattcactaagaatagactcagcactctaatgtactgggggaggactagttattgaaaggaaggaaattcttccaggggagacagtgaaagaattctagaaaaagagagagtttgagttaagccttgaatgatgagcaggaaaatactgatgggtggagaaatgaagaggctgataaacctcctgatataatcacagaaacaaaggcaagaagatgtggaaggaaaggaggtgcttgaagaacagtgaatagccccaagaagatagagtttaaggtgtataagattacagtg

SEQ ID NO: 865527 - DNA, 541 bp, Homo sapiens
ctaaggtcatgggagcccaccccttgcatcagcaggccctggatgtcagacatggagtcaaagaaggttcattttggagttttaagatttaatgagggccctgcactcattaaatgaaaccttgaatggggcctgtggccccttggttttggacaatttctcccacttggaacaggaatatttacccaatgcctgtacccccattgtgtcttggaggtaactaatttattttttattttacaggctcaaaagcagaagggacttgccttgtcttagatgagacttcggatttggacttttgagttaatgctggaatgagttaaaacctsgggggactgttagaaagtcatgattggttttgaaatgtgaaaaggacatgagatttgggagggccggggcagaatgatatggtttggctctgtgtccccacacaaatctcatcttgaattgtaatctccatgtctcaagggagggatctagtgggaggtgattgcatcatggaggcagttccccccatgttgttctcatgatggtgagtggg

SEQ ID NO: 865528 - DNA, 637 bp, Homo sapiens
tgatggtgagtgggtttatatgagatctgatggtttaaaagtggcacttcccccttcactctctgtgtctccagccaccttgtgaagaaggtgcttctcctttgtcttccactacgattgtaagtttcctgaggcctccttagccctgtggaactatgagtcaattaaacctctttcctttataaattactcattytcaggtagatctttatagcagtgtgaaaacggactaatacacctattttatgataatatggggaaattatactttattaaattgctggtgtaaatatgaaatgtcacagttcttttgaaaataagctgaacaatatgtattaaaattagtaatctacatatttttgcccagaaaccccactcctggaattgtcttagagccacaaatgtgtgatgatatgtgtaaaaggttgcttcctgcaattttgtttgtggtggtaaaaactgaaagcaatgtaaacatccatggacaagggaatggttgaataaattatggtacattctcattatggaatattatgtaacaatcaagaggaatgaaatacagctattttagttgatttggaaatttttatgaaatagtgttgagatcatattggtgtgtctggcatgaattgtgttc

SEQ ID NO: 865529 - DNA, 637 bp, Homo sapiens
tgatggtgagtgggtttatatgagatctgatggtttaaaagtggcacttcccccttcactctctgtgtctccagccaccttgtgaagaaggtgcttctcctttgtcttccactacgattgtaagtttcctgaggcctccttagccctgtggaactatgagtcaattaaacctctttcctttataaattactcattttcaggtagatctttatagcagtgtgaaaacrgactaatacacctattttatgataatatggggaaattatactttattaaattgctggtgtaaatatgaaatgtcacagttcttttgaaaataagctgaacaatatgtattaaaattagtaatctacatatttttgcccagaaaccccactcctggaattgtcttagagccacaaatgtgtgatgatatgtgtaaaaggttgcttcctgcaattttgtttgtggtggtaaaaactgaaagcaatgtaaacatccatggacaagggaatggttgaataaattatggtacattctcattatggaatattatgtaacaatcaagaggaatgaaatacagctattttagttgatttggaaatttttatgaaatagtgttgagatcatattggtgtgtctggcatgaattgtgttc

SEQ ID NO: 865530 - DNA, 637 bp, Homo sapiens
tgatggtgagtgggtttatatgagatctgatggtttaaaagtggcacttcccccttcactctctgtgtctccagccaccttgtgaagaaggtgcttctcctttgtcttccactacgattgtaagtttcctgaggcctccttagccctgtggaactatgagtcaattaaacctctttcctttataaattactcattttcaggtagatctttatagcagtgtgaaaacggactaatacacctattttatgataatatggggaaattatactttattaaattgctgrtgtaaatatgaaatgtcacagttcttttgaaaataagctgaacaatatgtattaaaattagtaatctacatatttttgcccagaaaccccactcctggaattgtcttagagccacaaatgtgtgatgatatgtgtaaaaggttgcttcctgcaattttgtttgtggtggtaaaaactgaaagcaatgtaaacatccatggacaagggaatggttgaataaattatggtacattctcattatggaatattatgtaacaatcaagaggaatgaaatacagctattttagttgatttggaaatttttatgaaatagtgttgagatcatattggtgtgtctggcatgaattgtgttc

SEQ ID NO: 865531 - DNA, 707 bp, Homo sapiens
tttagattttctaaaagtaggacctactgtagaaaaataaatacataagagatcatggaaaaatggtgtttgtggccaagtaatcattgtactgagatccctaaaataaaatgtgaccaaatcaggcatatgtgctctagaagaaactgttttccaaatatgctatgttgttcttttggtactttgattgtggtgacaggtcagtgaagctataattggttttaattagcctttctacagttgtaatattctttacctacatgcaaactgtcaaaaaaggaaggaaacggagggagggagagaaggagaaatgttggttcattttccacctttatcgaaatgccaaataaattgttttcaacctgtcttacaagcaaatgccctactttccagtataaatgagggggaaatatgtctccgtgacagctcttacagggaaatagctgatyccttcagcagcagacaatgaactcaattctgtcttttgtgcaataatgtgtggtttccagggcctgaagaggagaaaatctcctacatcccctccctagcttctggtaaaattttatctggggggctgtcagaaactaaagaaaattcatacagataaccaaatgcatttaaaatgcaaatgttttatattagtaggcagatacagactgtatctatacatgtgttatatattccataaaggagtagtagggcaattt

SEQ ID NO: 865532 - DNA, 624 bp, Homo sapiens
taaaaacaaagataaatagctgggacttaattaaactaaagagcttttgcacagcaaaaggaacagtcagcagagtaaacagacaacacacagagtgtgcgaaaatcttcaccatctatatatctgacaaagaactaatatccagaatctacaatgaactcaaacaaatyggtaagaaaaaaaaatcccattaaaaagtgggctaaggacatgaatagacaattctcaaaagaagacatacaaatggccaacaaacacatgaaaaaatgctcaacatcactaatgatcagggaaatgcaaatcaaaaccacaatgcaataccaccttactcctgcaagaattgccataatcaaaaaataaaaaaacagtacatgttggcatgaatgtggtgaacagggaaaacttctatgctgctggtgggaatgtaaactagtacagccactatggaaaacagtgcagagagtccttaaagaactaaaagtagaactaccatttgttccagcaatcccactactgggtatctacctaaaggaaaagaagtcattattcaaaaaagatacttgcacatgtatgtttatagcagcacaattcacaattgcaaaatcgtggaaccaacccaaatgt

SEQ ID NO: 865533 - DNA, 624 bp, Homo sapiens
taaaaacaaagataaatagctgggacttaattaaactaaagagcttttgcacagcaaaaggaacagtcagcagagtaaacagacaacacacagagtgtgcgaaaatcttcaccatctatatatctgacaaagaactaatatccagaatctacaatgaactcaaacaaattggtaagaaaaaaaaatcccattaaaaagtgggctaaggacatgaatagacaattctcaaaagaagacatacaaatggccaacaaacacatgaaaaaatgctcaacatcactaatgatcagggaaatgcaartcaaaaccacaatgcaataccaccttactcctgcaagaattgccataatcaaaaaataaaaaaacagtacatgttggcatgaatgtggtgaacagggaaaacttctatgctgctggtgggaatgtaaactagtacagccactatggaaaacagtgcagagagtccttaaagaactaaaagtagaactaccatttgttccagcaatcccactactgggtatctacctaaaggaaaagaagtcattattcaaaaaagatacttgcacatgtatgtttatagcagcacaattcacaattgcaaaatcgtggaaccaacccaaatgt

SEQ ID NO: 865534 - DNA, 601 bp, Homo sapiens
aaattgaggaacattcaacaaaatacctaaccagcacccttcaaaactatcacagtcatcaaaaacaagaaaaggctgagaaattctcaaagccaagaggagcctaatcacacatgacaggtaaatgtaatgtgacatcttagatggaatcctaaaatagaaaaagacatcaggcaaatcgtaaggaaatctgaataaattctagtctttagttaagaataatgcatcagtattcatttattaattgtaacaaatataccataccaatgtaagcttctaataatagaggatcctgcrtagggtatatggaaatgtactatgtttacaattattctgtacatctaaagctgttttaaaattaaatatttatttttgaaaaattatctaattacaatgagcatgaaaaatattttaaagaaaactgaaatccaacagttctaagaaagtaggagcaaggatcatccaaaaggctttgaaacaagaaaacacactggacttggagtctctctactgattcccctgatggggttacacacttatctttgaaactctgtttaatgggattgaaaacaacatggatatgttctgttctggtgggatc

SEQ ID NO: 865535 - DNA, 626 bp, Homo sapiens
attcaatagatttaacagcacacttaatcatgcagaaaatagaattggcaaacttgaaagcagattatttgaagttagccgattgtaggaacaaaactaaaaaggaattttaaaaaactgaataaagcataaagggaaccatcaagcacatgaatagattaattatagaagtcccagaataagagcaacaatgaagaaaaagtttatttaaagaaatactggctgaaaaccccaatcttgaaggaatatggacacccagatttataagttcaaaagattcaaagcagaacccatgaaaaaagaatactctgacacaatgagatcaaactgtcaatgccaaagaaagaggactttgaaagraacaagagaaaagaaacttccctcatatcttaggaaatatctgtaaggtagctatcaccagaagactgttaacagaaacctcacaagccaagagagaggagaatgttgtattcataatgctcaaagaaaatacatagtcaaattcagaatgttatcatactataatggtgatggtaaatcattttaactccagtataaaagtaaaagacaaacatattaaaaaataaccatagctacaataatttgttaatgcatacacaatctaa

SEQ ID NO: 865536 - DNA, 657 bp, Homo sapiens
gtggttcaatgtatgcaaatcaattaatgtgatatagcatgtcaagagaatgaaaaacaaaaactatatgattatttcaattgatgctgaaaaagtatttaataaaattcaacatcacttcatgattaaaaaccctcaaaaaactggacatagaaggaacgtatctcaacataatacaagccatatacaacaaacacatagctggtatcatactaaaggaggaaaaactgaaagccttttttctaagatctggaacatgacagggatgcccattgtcaccactgttattcaacatagtactgaaagtcctagctagagcaatctgacaagagaaagatataaagggcatccaaattagaaagaaagaagtcaaattatcctctttttcagatgatatcatcttatatttggaaaawcctaaagactccacaagaaaactattagaattgacaaattctgtaaagttgtaggataccaaaattaacatacaaaaaccaattgcatttctatatgccaacagtgaaaaacatgaaaaagaaatacaaaacgaatactatttacaatagctacatataaaattaaatacctaggaattaatcaaggaagtgaaaatctctatgacaactataaaacaccaatgaaagaaattgaagagga

SEQ ID NO: 865537 - DNA, 665 bp, Homo sapiens
tcatgggatgggtagaatggcagggactacttcttatattctaatgtgtgggaaaaccagactaggaattataacagcacccccacttcaaaaataattgatttacaattaatgtcttggcactgttttcagagcatagtggcacattttcagggaagtctgagcaagaattgtaaattggcctccaggcatgtaaatgttattgcataattaactgagacagagattaaygtgaccaatttcacaaaaacaatcctaattagggtgctgtatcttgagaggtttagttttaacccaagcacccacagaatgtactggttcagctctgttttgacacccaagtttccaaatccagtgacgtctaaagacttcaagaagtcacgggcttgaatggagaaggcacttgagacatcctaaagaatgtctaaggagagtgcagccatcattgaagaccatttggaaactgtgctcccagggagatgctcgcttatgtctggggaagatgttttcctctatcaaatctctgatcactctgatagtatttatagtaaaagtaactgcacatgttcagaaatcacgacttccctatgaagtgtcatgaagttaatgtatagtttttcttaccactgtatcatttctctaaacctcccaggcctagataatct

SEQ ID NO: 865538 - DNA, 666 bp, Homo sapiens
agtcaaatatttactattagataggggactaagataggccagacactggtcaaggggaaaggcatgttagcaaaagcaaggagatagcaagctcgcaggaaagctaaaaacaatagctttcaactttcattacaaataatgagaattggtatctgtgtaactcaaaggtcattcaaggagacccayaaatgagcaaatgtgttttgcttggtcttttaagagttaaactagttctgtcatcactttaaaatcctgacattccctcccatcccccaaaaatctattttttaagtattcttcaaaaatagagacatctgatttcactcccaaacattaacaaatacagtaagttgaggattcccatttacattggacacacaattcccattcatcctggtctatttcatttatttatgtcactgggttaacccctgcaggtatttgagagtatgacccttgactggggtagcccttcacatttacaagcattatttcttttgcaactggagcagtataggaaaggggacatggataaatcctgtttttgattctttttccacaatgcagaggaaaccctaggaagaaggtgtaggggtaccaggttgacagcaaacaacccaaacaagggcacttaggggacaataaatttgtgcaaagaaaggaatg

SEQ ID NO: 865539 - DNA, 581 bp, Homo sapiens
attcaagacagaaggatttataattaggaaggaaaaaaattaaaatattttggtaagaataatagaaaggaatgacgtttaaattttgatagaggattgggtgaagaaaagaaaaaataaccaactggtcagccaaaaawtttttttttttttttgagacggagtctcgctctgtcacccaggctggagtgcagtggcttgatctgcgctcactgcaagctccgcctcctgggttcatgccattctcctgcctcagcctcccgagtagctgggactacaggcgcccccaccacgcccagctaatttttttgtatatttttagtagagacggggtttcacggtgttagccaggatggtcgagatctcctgacctcgtgatccgccctcctcggcctcccaaagtgctgggattacaggcgtgagccactgcgctcggccaaaatattttcacatagtgaggaaatagcattagagatgacaaaagcagatggatgatgagctaattagaagtgtcaatgtctaagggctatctgcatcagccaccatgatgtttagacaactggcaggagttaagatgatga

SEQ ID NO: 865540 - DNA, 585 bp, Homo sapiens
atgggatgtaggcccagtccatgaggaagccttgtggtggcatccagcataacttttgataaagtgtgtcatttgatttctgaatttctattataagaaagacatttgttgcaattataaccaccatttttcagtactggaaggtaatagatttcttccttgtcttgtatgcttctgtttgtttctcagtgtttccagaactcaggcagtgagatgagttattaattgaattccctaggtatccactgaaatagaaagcatctataattaatgatattatttctcttatttgtttcttatcttttgcattaaatatgattactagtaatattgtaagaaggagctaaaataggaggctgttttatctsatcttgggatgacctgattttaaatcacagaaaggttatatttgctataagattctggtagcttgcatttatcaattttgaaatactttcagtaaatcttgcttataaaattgtgattatattgttatgaatgtaatatatttgctctatgatattaaggtgattttctttaatatattgaaacttcattaaacagtaaattgtgtggctgtgcaca

SEQ ID NO: 865541 - DNA, 677 bp, Homo sapiens
agtcttgaacattaccaccagatttatattattgatacaattttgatattatgtcactattttggatagtgtttttcaataatgcattcattagtttaatcatttgttcagtctgccatttgtgatacagaactaagtcttagtgtttgatactaagaatgagaagtgatttccttcaaggaatgtacaagttagtagcttgatgcttttctgagaacacatccaaattgcttcacttatgtttatgcaagcccccattacttaaattttagcaccaayatgcttacttaaactgatcatctgcatttcagaaagtctgccctacactctgcctcctaattctttctggcatttctttttccttgaattcccccactctatgtactaaaatatttacctttaaaaaaatagctcaggcaccacttttgcatttaaacttaccctgatcatattattttgaattatttcaaaataaaataatgccaataataatacatagttcataattagaagtgtttagcatgtatacagcactgtgctaaaagctttacttgggttatctttttaatacttgaaacaactgatttattaattcaacaaatatgtattggacacttataatgttctataaactgacctgaagctgggatgcaacatagacattgtaatgaaccagt

SEQ ID NO: 865542 - DNA, 654 bp, Homo sapiens
tacatttacctgctccatctagtgtaagtattttggtcacaattctcacaaaataaacattctttaaaaatgaaaaagaaaaactagtatgtttgtgaaagatgttccaaaccaaccaaataaatacacccacaagtaacaacaaaaacaaaattaatagaagtaaaaattaaaagaagaggcctaaaagagtaatgttttttaagccaaattttagattaaaaaaaaaaatcagaagagagtcaattttcatgggtgctaagatagtagaaggaaataagaccttcatgtatactctatgacatttaaaaaacagtgattaattgttttcagaaaagcctcagctgggtcaaaattttctcatcaaattagaaaatgttagtgaaatttggaaagkcttaaggtgtaatatgatcagtttatataccactagacagaaataagatttgaaagaaaatttggagctcaagtaaatataaaaagacctccaaatatgtcttcataaatataaatatatgtcatataaacataccaagaagctatgacacgctaagactgagaaataagaagagtgtggccagacaatgaagggtactaaaagccaggaagattgtgggaggaatttggaattctgtaatagtttaaaagtttgta

SEQ ID NO: 865543 - DNA, 631 bp, Homo sapiens
tttcaacagcaagaccaggggtttccaatagcgggagaaagctagggcagagcatatttgaattctttatgggacatcattctttgatgaacccttgagggtacacatttcttattaagaataaatgttataatatgttaactgagtaaggaaaattaacattgtcccaatttattcatcctcaaatttaggattaaatgtgctttatataaattataagttattattcttacacatctgagtagagctagctttctgtatacacagtaactgatttgtttccttcagatcatttkcaaaattcaaatatatctttttgaatctttagaagtggcaaacaaagaaaaactcaactcttctgggttttttttgcttaaatattttcctggtgataattcttctgcacctatttatatttaacatatactgtatacatacccatatcattctctctctatataaatttaatcactttatatgtacatagcaatttaattgtatcactttttttcacagtatgtcttttttttttttttttttttttgagagggagtctcactttgtcattcaggctggagtgcagtgacacgcgatctccgctcactgcaacctctgcctcctgggttcaagt

SEQ ID NO: 865544 - DNA, 631 bp, Homo sapiens
tttcaacagcaagaccaggggtttccaatagcgggagaaagctagggcagagcatatttgaattctttatgggacatcattctttgatgaacccttgagggtacacatttcttattaagaataaatgttataatatgttaactgagtaaggaaaattaacattgtcccaatttattcatcctcaaatttaggattaaatgtgctttatataaattataagttattattcttacacatctgagtagagctagctttctgtatacacagtaactgatttgtttccttcagatcatttgcaaaattcaaatatatctttttgaatctttagaagtggcaaacaaagaaaaactcaactcttctgggttttttttgcttaaatattttcctggtgataattcttctgcacctatttatatttaacatatactgtatacatacccatatcattctctctmtatataaatttaatcactttatatgtacatagcaatttaattgtatcactttttttcacagtatgtcttttttttttttttttttttttgagagggagtctcactttgtcattcaggctggagtgcagtgacacgcgatctccgctcactgcaacctctgcctcctgggttcaagt

SEQ ID NO: 865545 - DNA, 638 bp, Homo sapiens
ggtttgtataagcagtcaaaatgaatagaaagaaaatgtatacatctgtcatctatctaagttaattaatttgtatgacacaccgtttttgagtaaaaataacacaggaataatgttatctcctggtaagctgaaactacttgctaatgaaactcaatttttttctggtcaggttaagattttagacatacttgycatattacccaaggagaacactattttagaatattgtttttcccttgtgctgatacatgtttacttctctgtgcttttggtattaatacagtagtatttgttacaaacatttatattgcgattgtgtagaatattacccttaatttttcaggatacattttgtattttatatgcaaacctattcgtaattgattggtgctcaggactatcagtgtttaactccagaacgttctaagacatagatagtaagtacctacgtattttcatggtgatcttgcctaattctaatgtactgtaagataatcaagttcatataatttgtctttgggattttgtaacaaagccatttcagataataaaacatagaattcaaataaattgaatattggcttgcaaaataaactcaagatttgttatcacatcacatatattatagatagaca

SEQ ID NO: 865546 - DNA, 565 bp, Homo sapiens
aaactactttaattattgcaaaatgtttcattgaaatatgctatctcttaacttattggtattatctcaatcaatcatgggtcattccatggaattaataggggaatacttaagactttagcagagcaaataatgctttaactaccttatccaaatgtcttaatacagataaaagcagattatgaaatgcatctgtagcatctttgaagatttttaaataataataggcatagaataatgagtggttttttttgttttcaccaatattatgtttaatcaattccttactacccaagggacrgatgattcaaagaactttttctgtatattgccattgaaactgagagtacagatcattgatattcttgtgaatgacacaaacattgccaaattcctgacggtagatagaacctaatgttaaaacaatgacatgaacatgcctatttcaataattcttacagcaccattcacaatttccttatctctttttatttttaaaaatatttaattacttgaaggataagggagggtctcttccaaaaatgtcaatacctgtgagcttaac

SEQ ID NO: 865547 - DNA, 606 bp, Homo sapiens
gattactggagcctgggaagggtagtaggtgggtggggagtaggtagggatggttaatgggtgcaaaaaagtagaatgaataagacatattatttgatagcacaacagggaggcaatagtcaataataatttaattgtacattttgatataactaaagtagtataattggattgtttgtaacaggaaagataaatgcttgtgggaatggatacccaattttccatgctgtggttattacattttgcatacctgtacaaaaatatcatgtaccctataaatacatgcacttatatgtacccaccaaattttttttgaaaaagctaakacaccatgatgaaatacactttattcttgagatgcaaggttggttcagaatatgcaaatcaataaatcacataagcagaagtaaaaggaaaaaacacatggttatctcaatagacacagaaaagactgctgctgaaattcaacatcccttcatgttaaaaaccctcaacaaactaggaacgaaattaacatacttcaaaataattaaagccttctatgacaagccagcatcatacttaaccggcaaaagctgaaagcatttctcttgagaactgaaacaa

SEQ ID NO: 865548 - DNA, 606 bp, Homo sapiens
gattactggagcctgggaagggtagtaggtgggtggggagtaggtagggatggttaatgggtgcaaaaaagtagaatgaataagacatattatttgatagcacaacagggaggcaatagtcaataataatttaattgtacattttgatataactaaagtagtataattggattgtttgtaacaggaaagataaatgcttgtgggaatggatacccaattttccatgctgtggttattacattttgcatacctgtacaaaaatatcatgtaccctataaatacatgcacttatatgtacccaccaaattttttttgaaaaagctaatacaccrtgatgaaatacactttattcttgagatgcaaggttggttcagaatatgcaaatcaataaatcacataagcagaagtaaaaggaaaaaacacatggttatctcaatagacacagaaaagactgctgctgaaattcaacatcccttcatgttaaaaaccctcaacaaactaggaacgaaattaacatacttcaaaataattaaagccttctatgacaagccagcatcatacttaaccggcaaaagctgaaagcatttctcttgagaactgaaacaa

SEQ ID NO: 865549 - DNA, 606 bp, Homo sapiens
gattactggagcctgggaagggtagtaggtgggtggggagtaggtagggatggttaatgggtgcaaaaaagtagaatgaataagacatattatttgatagcacaacagggaggcaatagtcaataataatttaattgtacattttgatataactaaagtagtataattggattgtttgtaacaggaaagataaatgcttgtgggaatggatacccaattttccatgctgtggttattacattttgcatacctgtacaaaaatatcatgtaccctataaatacatgcacttatatgtacccaccaaattttttttgaaaaagctaatacaccatgatgaaatacactttattcttgagatgcaaggttggttcagaatatgcaaatcaataaatcacataagcagaagtaaaaggaaaaaacacatgrttatctcaatagacacagaaaagactgctgctgaaattcaacatcccttcatgttaaaaaccctcaacaaactaggaacgaaattaacatacttcaaaataattaaagccttctatgacaagccagcatcatacttaaccggcaaaagctgaaagcatttctcttgagaactgaaacaa

SEQ ID NO: 865550 - DNA, 616 bp, Homo sapiens
aaaactctggtttggagatgtcaagtaggatttaatagagaaagatctaagttctttgaattttgtgtttcatgttgtaactccatatctagtcatttagacatttatgttttataaagagtcttttgatctgattatgcctacatggctgaattctcttataaaacacggaaggtggttcgcaactcttctcttagtgtgcaaaggggaactcagtggagttggacgggggatgcataggacagtggggcaggtgaactggacagaaatccaggaatccagagagaaaaatctatctcaatttgcagtttaaattgacctttcaagtaagaattgcctttaaggaaatgcttttgtgtcaaaatggtttaaaacaactattttaaaccaatgttccccatcctgtgcactggggacacctagggacaggaatttatttctactttcttttttyttttcttttttttttttttttgagatggagtctcgctctgcccaagctggagtgtagtggcgcgatctcggcttactgcaaactcagcctcttgggttcaagggattcttctgcctcagcctcctgggtcgctgggactacaggcctgcaccaccacgcccg

SEQ ID NO: 865551 - DNA, 475 bp, Homo sapiens
tatcttactcttacccttgtttgcagtagatggcagaactgagaattgaccaggcataaatatcaagaatctatgctttttctactttaatatcaagtgtatgtgtatgtgtgcacatgcgcatgtgtgttttacatgctttatacacctgaaacattgagttagtcattggcaagtctgttagtggaaagtatgaagtacaacgtgttaataatttggttcggttccattaacctttattgagcatctagtgtaagcaatggaagaaatatctgaataataaaatctttgcccaaaaaattcgtgytctatgttgggagacaatcatttataacctagactgataagcacaatatgagtacaccagacaaactggcaaatagaaacaagatgttgactctgccagggatggggtaagatgaaatgaatgatttccgagaacagttatggagaaggtgacctgaggcaatgtttt

SEQ ID NO: 865552 - DNA, 698 bp, Homo sapiens
aattgggagttttctggttgccaagttttaatgccatggctggccctccatggtgctttatgcaaaatcccactgatttgggttggggaactaagaacttaattacactaagactattgatagagagatctgttaaactggctgtggcaaaacaaaacaaaaggcaagaaacgcrgaagactgaaggttggtgtccaattccaatatgctatgcctctagaatcctaaatgtctagaagttgtctttcaaaaatgttcatacatccatgtatgtctacatagatgtatacattaaatggccacatcgtctatgggtagttgaactaaattttcttccaggagtcttaaagctatatacaagaaagcaacaatcaattttattttcaatcttttgaatagtattcaaaactgctaattattcttgttttttactacaactgtatggtagcttaggtatagtttggactagcctgggagcttaactaccaataactgtgctgtttatatgacaaatgtcattcagaatttctaacgagcaacttaaaactgaaagcattgcttttttttttttttgggggggttctctataagcagtattacacattttagtattacattcaaaattgttgctaaggtattgccactagcattctttctgtctttgtcagaggatattggaataaatcttaaaaaaggca

SEQ ID NO: 865553 - DNA, 660 bp, Homo sapiens
tctgccctctgaattccctcaagaaaactggcatttcatttaatggaaaccttcttcataaccatcctcctccagtgaaagcagtcatttgagacattagtgcatgtgtaggttcattatgaaacctaaacacttccattagataaaagacctaaaatgattatgaaaaatgttctttttcttccaaattgctctaaatcaaacactcagtagtayaatatgttttaggttaattagtttaatccagttttaattaaactgatgtttccatgccaacaaatggtttttaaattgttgaaatcttgatgttttggaatatgactaaaattaattacctaagagcatttgactcaatttttggaaatgtgtagtgcacttttagcatcaatatagcaatgattttaataatggcaacaaattatgattaaaaactttgactaaatgttctatatggtttccattaatttccatatttttaaatgtattttttatgatgcacatatactactcagattaaatataatttaacaacgacaacaacaaaaaattagttacagagacaccaacacaggcacacacatgtcaactcactattagccctaaataagccccatttcaaaatgttcaaagtctatttcctggtaatatttgtctgtgtct

SEQ ID NO: 865554 - DNA, 633 bp, Homo sapiens
tctggtttggagggtttctgctgagacatctgctgttaatctgacaggttttcctttatagattacctaatgcttttgtctcacagctcttaagattctttccttcatcttgactttaggtaacctgatgattatgtgcctaggcaatgatctttttgtgatgaatttctcaggtgttctttgagcttcttatatttgaatgcctagatctctaacaagaccaaagaagttttcctcaattattccctcaaatatgttttccaaacttttagattaatcttattcctcaggaactccagtttttctttggtttgttcatttaacagaatcccaaacttcttggaggcttcgttcacattgtttttattttttgtcttttctggattggattaatgtgaaagctttgtctttgagctctgaaattttttcctctgtttgttttattctattgctgagacttgcagtgcattttkcaattctcttagtgtgtccttgatttccagagttgtgattgttttttgtttatgctatctatttcactgaagaatttctctttcaagtcagtttttgatttctttaagttggacttcacctttctcaggtgcctccttgattagcttaagtattgacctt

SEQ ID NO: 865555 - DNA, 579 bp, Homo sapiens
cctctaatttgctctcagtgtgccactcaactttttctgttctcgaaggacatccctgagttttaaattggctgttttctttatttattatcaaagactaacattaagacaacacagaaaataatgttgcatttcaaagcaacagctgtgctggtttcaacagtgctttattaaaagtctctaagttgtgtaccacattgagtttttaactttcagagaacaacaccaatttttatccacttcaccagatttttaatgagcagtttctcccctgatgtctgtgtcagagggtggagaggtatggtttttcrtttccggctgtttcaatttaggagataatcattattttgtgtactctaacatcaccaataaatctgattagggaaaattctgacacaagaaatggctgagttgacattgatttttaaaagacattgataattactctagattgataaacctcatctgtttcaacaacagatgctttccactagaagtcccacaccataatttatcttcatttttcctgctgtattttttacccatcatcctgtacattctggagcatgtaggaataaa

SEQ ID NO: 865556 - DNA, 668 bp, Homo sapiens
ttggaactttgcaaaactctcttctttgatagctggttcctgttattcttccagtaggagttcttccaatagaaggaagctgtctgaggaaaaaggacatgctacatctatctgattcctattcctgtcacaatcaccacaacaccacttcaccctggaagcagtagagctgattggaggagcagcagctgattccagtttgcagtctttccacatacatggaagtcatattctggcatctcgcaggtagcactagaaagcatcgctccttagagagctgagtctcagatttcacaggattcctcctccaaacttgtcaatttgaataattccaacctggtctttttgtactccagtcttacaggtggcagctgcttctttctgtgatagcctagtgcctcctttttgtctttctagttctctaagacccagtttacaatttttaaatcaaaactctgttcaataatctgatgaagtttctrtattttgactagagcgactgataaagaactgtttttaactgtgataaccattaaataaacattaaaataattacagatttgttgttgatgcttgttagaaaactgtccaatgttctacaggaacttaatctttgtcaagcacttctctaagtgatgggagtgaaaaaggcaggtggatcattgacc

SEQ ID NO: 865557 - DNA, 668 bp, Homo sapiens
ttggaactttgcaaaactctcttctttgatagctggttcctgttattcttccagtaggagttcttccaatagaaggaagctgtctgaggaaaaaggacatgctacatctatctgattcctattcctgtcacaatcaccacaacaccacttcaccctggaagcagtagagctgattggaggagcagcagctgattccagtttgcagtctttccacatacatggaagtcatattctggcatctcgcaggtagcactagaaagcatcgctccttagagagctgagtctcagatttcacaggattcctcctccaaacttgtcaatttgaataattccaacctggtctttttgtactccagtcttacaggtggcagctgcttctttctgtgatagcctagtgcctcctttttgtctttctagttctctaagacccagtttacaatttttaaatcaaaactctgttcaataatctgatgaagtttctgtattttgactagagcgactgataaagaastgtttttaactgtgataaccattaaataaacattaaaataattacagatttgttgttgatgcttgttagaaaactgtccaatgttctacaggaacttaatctttgtcaagcacttctctaagtgatgggagtgaaaaaggcaggtggatcattgacc

SEQ ID NO: 865558 - DNA, 650 bp, Homo sapiens
ttggttttatgttgctttttaaaaacacaatcttaatttatttctagtctactaacagctgagaaaaggctgttagaaatacatgtaaaacaagattccatagctatgaatgggaacctgaatggattaagtgcttgggaattagtctgcatattgagtgatatgacttacgactcttcaaaagttttcttgcttcttactccacatacttggtatttctacaaggtatatttggagaattattgaaggctacataggtgagttgtcataacataagagggccaattttagactctatccatatattaaaatrctaatagaatcttaaaatatattaaaatactaatagatgtctcacaacaaaccctagaatgtgggttctatccttttaaagataagtcaaagcatgagaggatagaaaatcccccacttcatgatcccacaggtaataaattctagcccaggtattttgaaaacagagcctcttacccattatgtgcctcaagtgaaggcatacaactagacatttctccagcacaacattttgatcccatgaaagccacagttactatgactgtaagaaacagaaagccaaaatcaccacccccaaatttgcatattttattattaaagctctttaacatatagtt

SEQ ID NO: 865559 - DNA, 625 bp, Homo sapiens
atttattaattttactatgttaaaaatgaacaactcaataaatacatacagtataataataatatgcccccttgaaatttcttaatttcagaaaaaaaatcagaatggtatcaatatctccagtgttgaccaatatttatttaattagagctatgagagagctaaggttgtttctaaatgcagggtagtggatctgaagagaattgtggtaaccctaaggtttgatacaacccagtaaccctgcatgttaaatgcttatgccagtggtaatgcctcagttttttaaacctagaatcattataaagactctcaatcataagtctctctaatccttatatggaactatttgaagttctttaatggcaaacgttaaaatactttgttctagtcataacwtgaaccaagaggaagtttaaccttattcctagaactaaatttcaagagccagctacatttcactattgatcaacttcaaaattaggtggcataatcactttcatgaagcatattagagaatctcactctgccagcatgaatgccttctctgttgtctattatatattatcaccatcacttaaaaatttcaccatctttattccactttttcacttgaaaatttttgtat

SEQ ID NO: 865560 - DNA, 629 bp, Homo sapiens
acagtaagtaaaaacgtatccgtttttataaaagacagaagcttattcaagaagatcagagaattaaacagaataaattcaaaaaatttctgcccaagtgacagataataatcagactactaaaaaacaaatacaagaaaaaaaatcctaaaataaattacaaagaaaggatgcattaaatctatagagaaacaatggttcaaataattgtggatttttcatcagaaaccatggaggcatgaaggaagtgaattgacatttttaaaatgctagaaaaaatctttccagaatgtatgtagagggaaacaaagaataaaaaaaagacatatagttaaaaaaaaaactgtaagaaatgaaaatggaatagtaaaaaatattaaatatacttagaaataggagactaaaaagactcatatcttccagaagatagcaagaaaaagaraagagaaagacaaaatataaggaacagacagaaaacaaatcataaagtgaaagacctaaatacgattatagtcatatgttgcttaatgatggggatacgttctgagaaattcattgttaggcaattttgttgctgtgcaaacatcatagagtttacttacacaaacctaattggagtagcctactac

SEQ ID NO: 865561 - DNA, 655 bp, Homo sapiens
cagattatatgatgacatatttataattctaaagatgtgtctgttataaataagtattgcaactagagttgtcttctttttagcttcaatgtcatccaaacttgcaaatccacattttacttttccaatattcatttgaatcaatataaatttgttaattttagatcagatggaataaaaagctgcaggctctttgaattatttcctcagagggagtgaattggtgttatcaggtaggcrtaaagtcagccttgaagaaaagctaccagatctataatcttcactccatgcctccatattaggcagcttcaagcaacacatttaacttctcctagcctttatttcctcatatttagaaggggagagatgaaaattcagttgtagaatagtggtcctcagaccttggtgggcagaaaaaaaaaatccactaaaaagtaatgtaataaatggggaaaaagttgtagttattcctggcctagccctcagagattttattttatttttattttttgactcggcagtccttgttgaaacatttcaggtggctctgacagagatgaaacttgggctttgaagaacacttcatgctcttgtgaagagttaatgaataaaatcacttactgcatagtggatacttgtaaaggaattatgacac

SEQ ID NO: 865562 - DNA, 602 bp, Homo sapiens
gtgaagagcaagaaccagtcttgtatttaccaggaacatttcatctcaccagaaatgcagattgatattggaaccaaacataaagaggatcttagacagagagccattgatcagtatagtgctgtgggaatcgaaagaggccctaaagtcttgttgaaataatcctaataaatgaaactcatttgggaaatagtaaaatggttttctctttcataaagcactattgcctcttggccagtgttttgcaaggaatggtgtgtatcaggaatacttaggagagctttaaatatagttgttcaatytctattccggaaaagctgattcaaaaggtctagggtaaccaggcaggtggtgggcaaaatgtataagaagacactactagaggcttctaagatgatggccatgccatttctcctccaaattaggaactttgattgctctgggcctcaatcagtagttcttggagagaatgggctagctggctgattcatcattcaaaactaaaggtagcaacagttaaagtgtcagaatgttttttgcttttaagagaagtatccacaaaatattaatattgacttaggatactttttaaagtaaagagt

SEQ ID NO: 865563 - DNA, 602 bp, Homo sapiens
gtgaagagcaagaaccagtcttgtatttaccaggaacatttcatctcaccagaaatgcagattgatattggaaccaaacataaagaggatcttagacagagagccattgatcagtatagtgctgtgggaatcgaaagaggccctaaagtcttgttgaaataatcctaataaatgaaactcatttgggaaatagtaaaatggttttctctttcataaagcactattgcctcttggccagtgttttgcaaggaatggtgtgtatcaggaatacttaggagagctttaaatatagttgttcaatctctattccggaaaagctgattcaaaaggtctagggtaaccaggcaggtggtgggcaraatgtataagaagacactactagaggcttctaagatgatggccatgccatttctcctccaaattaggaactttgattgctctgggcctcaatcagtagttcttggagagaatgggctagctggctgattcatcattcaaaactaaaggtagcaacagttaaagtgtcagaatgttttttgcttttaagagaagtatccacaaaatattaatattgacttaggatactttttaaagtaaagagt

SEQ ID NO: 865564 - DNA, 617 bp, Homo sapiens
tactccctaaattttagggaaaataaataataaagacacatgcacacatatgttcatttcagcactattcacaacagcaaatctttgattgactctctgtcaatagcaaatctttggtttgctattgtgaatagtgctgcaatgaacattgtgtgcatgtgtgtttatggtagaatgatttatattcctttgggtatatacccagtaatgggattgctgggtcaaatggtatttctggttctagatcattgaggaatcrtcacactgtcttccacaatggtcaaactaatttacactcccaccagcagtgtaaaagtgttcctatctctctgcaggcttgccagcatctgttacttttttgactttttattaatagccattctgactggcaggagatggtatctcattgtggttttggtctgcatttctctaatggtcagtgataccaagctttcttcatgttctttttggccacaggtatatcttcttttgagaagtgtctgttcatgtcctttcctcactttttaatgggattattttgtaaactataaaaattaagttgttttacatccttattctttatatttaaaacatgattaatatttctataattcttt

SEQ ID NO: 865565 - DNA, 649 bp, Homo sapiens
ggcactgagaaatatctgacaccacacagaagtatgtatgtgattcagattgatttctgatgggatctcctaaggctacaggttggtcctttaattctgccgctattttacctacttcctcctgcagcaaaatatctgctttctgcttgctttatgtccacattatttattactttactttagaagagtaatcaatctaaaccaattgaaggcaaaagaaactaaaatatgtttgtaacatcttggtsagactgggaagagatttctggagatatttccaaaatagatattcataaaatcatttttcaacaattcacacactttcgaatgtgagtttagtagacaagtgtacataatgctcattgttccaatctcaattatgagtttatttttaagctccttggcttatacaatgaaatcctatctttaatcccatacttgcaaaacaagttggcctcttgtaggaaagacttagtgtgtctatttctacattctcttcctctcaagtatgaacattttagacatctctcacaatttaagagttacgtgaatcataacttcaatccacccattatgccatctaggcataaccatttaatcaaagggttcaacaagggcactaggtatcaaaggtttgtctttgaaggag

SEQ ID NO: 865566 - DNA, 466 bp, Homo sapiens
gccagaatagtcagtttagagaggaacacaaccaacctgatagagctgaaaaacacaacatgagaaattaataatgcaatcacagtatcaacaggggaatagatcaagcagagaaaggaatctcagagtttgaagactatcattctgaaatgagacaggcagacaagaaaagataaaaamcaatgaaaaggaatccctccaagaaatatgggattatgtaaaaagaccaaacttacaacagattggggtacctgaaacggacagggagaatggaaccaagttggaaaacatactttggtatatcatccaggagaacctccccaaactaccaagacagggcaacattcaaattcaggaaatccagagaactccagaaagatactctatgagaagatcaacctcaagatacataatcatcagattcccaaaggtcgaaaagaaagaaaaaatgttaagggcagccaga

SEQ ID NO: 865567 - DNA, 667 bp, Homo sapiens
tatattctcttattattacattactcctaatagaatataagtcctatggaagcagaaattgtagtctgttattcccagtgctatatattcagggtctagaatagtttctggcactcacttaggagttatttgttagatttgtagacatttatggtactaaaggtactgggatattatttatatctctcaggatttctaatctcttaaggaactctttctcctctcctctcctctcctctcctctcctgtcctctcctgtcccctcatcctccccttccagcctcctcctctctcattctcctcttcctttctcctacttttccctcccttctccgtctccttctcctcctctcctccmtgcacttcccttccctcctctcctcatcatctgtcttctctgtctcctgtctctctctttctctttctcacaaaagctacatttgcttgttagtttgccttcttataagttgacaactcagtgggaaggcacagggtgaaattttcccttccagacctttgtctagggctcaccattttcacctttgtaataatataaaatagaaaattaacatttaggtatggtcttggggaaaagttaaggctgcctttagtgttattagcctctgatgcccgcctatagcctaggaaaagggtgccttctctgcag

SEQ ID NO: 865568 - DNA, 649 bp, Homo sapiens
caggcgtaagccactgcacccgacacctaattgaatttttatgaactctatagtagagcatctcttctatatgactaccttttacagcacttactaaggtatatcataactttttgtaaatgattattgtcttcagttcatattgatgtagaactaaaatattgtcaaatttgcctgtttaaaaacatgctccaggccaggcgcggtggctcatgcctgtaatcccagaactttgggaggccgagkcaggtggatcacctgagatcaggagttcgagaccagcctggccaacatggtgaaaccccatctctactacaaatataaaaaaaattagccgggcgtggtactgggcgcctgtaatcccagctactcaggaagctgaggcaggagaattgcttgaacccagaagatggaggttgcagtgagccaacatggtccctctgcactccagcctgggtgacagagtaagactccgtgtcaaaaaaaaaaaaaaaaaaaaatgctccagttatccacataataaaaaataacaaaaaaatccctgcaaatgtcttactatttaaattaccataatccttcgcattgtttttctttgccaaataacaattttaagtccatcacttaccatcaagtgataaattacttacaa

SEQ ID NO: 865569 - DNA, 627 bp, Homo sapiens
aaaactccttattaaacagagtctgtgtcttgaacctctctcagttgtgagctcttgtttttatacagaagccctgttgatatagtggtaaggtgttgggagggtaaccattctatcatcttacgattaaatatatgatttcagtagatttgtgttcctgggctgtaacattcagaataaatccttagcccccttttttcttttccttatatgagataggaagtttaggcggggctagagttggctggttgcccctagttcacaccagatacggccctgttagagtaggtttccttgaagggcaggccttttttatgctttctttgggcatatttcaaaatatttgctaaagtcagtagaagaaaggcaggattcataaaattctaaaacaataaaactgactagagagaaaaatgatagttatgggaaaaaaacaaaataattttttgccataattatgttgtgaatttcaacacaatatrgttattatctcagaaaatagatcacaatgaattcagcagaaataaaaattcaaaggtaaagtagaagaggtctgtgttgaaattaagcataagaaactgcaaattttaaaagaaagatattaagcataacaaactgcaaattctc

SEQ ID NO: 865570 - DNA, 627 bp, Homo sapiens
aaaactccttattaaacagagtctgtgtcttgaacctctctcagttgtgagctcttgtttttatacagaagccctgttgatatagtggtaaggtgttgggagggtaaccattctatcatcttacgattaaatatatgatttcagtagatttgtgttcctgggctgtaacattcagaataaatccttagcccccttttttcttttccttatatgagataggaagtttaggcggggctagagttggctggttgcccctagttcacaccagatacggccctgttagagtaggtttccttgaagggcaggccttttttatgctttctttgggcatatttcaaaatatttgctaaagtcagtagaagaaaggcaggattcataaaattctaaaacaataaaactgactagagagaaaaatgatagttatgggaaaaaaacaaaataattttttgccataattatgttgtgaatttcaacacaatatarttattatctcagaaaatagatcacaatgaattcagcagaaataaaaattcaaaggtaaagtagaagaggtctgtgttgaaattaagcataagaaactgcaaattttaaaagaaagatattaagcataacaaactgcaaattctc

SEQ ID NO: 865571 - DNA, 607 bp, Homo sapiens
tgatggtcttcatggtctgaactagtagttcagcggatttgagcgctacctttctggtattctatccctgggcctcagacagagagaatgtgatcactagcttgggaaatagcatggccagttctgagcaagagctgggaaagtgatagtgtgagtcttgggttctcccattcctggggcttctcccttacctcaagaaaatgtggatgggtaatgaggctcctctgtccagggaatactggctttccagctactccagatacctcacaggtattccctctgctcaactggtaaccaaccggtcaacaccaacatgacaagaacctgacatgacacctaattcctctgcttccagggcctgtcactgcccctctgtcccaggaggaggtaatcatagacrcgttgctgcttacaatgatgctgagttcattcacagccaacttacagtttaactcctagttctgaggaaagccagtactaaaaaaaaaaaaaaaaaaaaaaaaagacaattacagttcacctgttgagtaaattcatgatttactagtgatttctgacttttattttttcatctttaaccggaatgcagaccttgtttcattaggtt

SEQ ID NO: 865572 - DNA, 607 bp, Homo sapiens
tgatggtcttcatggtctgaactagtagttcagcggatttgagcgctacctttctggtattctatccctgggcctcagacagagagaatgtgatcactagcttgggaaatagcatggccagttctgagcaagagctgggaaagtgatagtgtgagtcttgggttctcccattcctggggcttctcccttacctcaagaaaatgtggatgggtaatgaggctcctctgtccagggaatactggctttccagctactccagatacctcacaggtattccctctgctcaactggtaaccaaccggtcaacaccaacatgacaagaacctgacatgacacctaattcctctgcttccagggcctgtcactgcccctctgtcccaggaggaggtaatcatagacgcgttgctgcttacaatgatgctgagttcattcacagccaacttacrgtttaactcctagttctgaggaaagccagtactaaaaaaaaaaaaaaaaaaaaaaaaagacaattacagttcacctgttgagtaaattcatgatttactagtgatttctgacttttattttttcatctttaaccggaatgcagaccttgtttcattaggtt

SEQ ID NO: 865573 - DNA, 662 bp, Homo sapiens
tgcctggtctcctactgaaaatattggcacaatggcatttattgctaattgtaaactaccctcataacaaaggcagacattattgtttttccttataattacttgcaatagtccccgtgttaaccctattttaatagtaatctaaggactatggaataaggtttattaagaccacatgcttcagatctgtgcagactttgttggaataatgcttgtgggtatagaaatttcactcttcaagaggtggtctattttcttaagttgaaattggcattgtgtcagtattttgctttcatctgaatagctgtttctctgctcctttatttcatttttttctgagagcagacttttatttggagcatggatcagcatgcccacatttagaatatttcatatcatatcagcttgtttgtaccacacacaataagaggcatctggcatctttcagaaaggctggargaagccacttattgatgctgtgtatggctggccctccctcgccccatgtacaaggtctttggtgaggtatgggttggtaaacagaaaaagcagtggccaaaccatgcttatagctgtggcctgtggtgacacaggacacatatctatctgtgtgttcttctgtggtcagtgctgtcatccctgggaagagatttcagcatggt

SEQ ID NO: 865574 - DNA, 637 bp, Homo sapiens
ctgcatcccactgcttctactagattgacaagatgaggcaccttagatccactgtggaagtatatgtaccacatgggcttctattaaggcatgagtatagaaaggggaaatggcccaaaccagagagttgcacagagttttggcatccacaaactcagtgcagaggaggaaggattgatcaaatgagcttatttggttcccttcttttctccttcctccctctttccatcttttctccctctggcttttaaccctggttgtgaaacaaaattaccaattcagtttttttatttgcctttttaatgtttttaagaatgcctgtgcccaagcactgaaacaatttctgggaatggagcctgaacagctttatttgtaaaaagcaccacaggcaattctayagcagggccagatttgagaagcacagagctcctctatccaaaagtaaagcaccagtggacaagaggaccaaatgggacgtgcccagctgtaggctcaaccacaaattgtcatccatctccattaagtgataccacagaatttgtataccacctctcagagtcattattaacttcccaagaatgccacagtgttctgagggacgcagatacatgccaccaacatatgagaacattcttgg

SEQ ID NO: 865575 - DNA, 639 bp, Homo sapiens
gctttatagaatttctgatttctcaatgctttattaaaggatcagcaggggttaggcagttgtagtgtaaattatataattgcagccaccacaaatgtatataatggccctcggtcgcttaccagccctctcaggggatacagattgaccatagttactcaactcacaggcaggaagtcccagaacatgctattacttccttctatagcatcrtagtctgtgcattcttctacagattatcccaggcaatgaattgcatttaatattgctttgggtaatatttcttcttctgactcccttttgctagcactcctggaaatagctgaagcacagtacaaatacttacattgcaaaattatgttaagaatttcacttaacgtaaactgctccctagctcatatatcaaacatgaagtgggtagattgaacttccgtttgctgggcaacctcagtatgttacccatctacttctcccacaaccgttgccactttatctcttcccttcctggacacgatcttagtttcctagagcaccacaaactgcaaggcttaaaataacagaaatgtattctctcagtttaggaggccaaaagttgaaatcaaggtgttggcagggttgattccttgcagaggctctgag

SEQ ID NO: 865576 - DNA, 639 bp, Homo sapiens
gctttatagaatttctgatttctcaatgctttattaaaggatcagcaggggttaggcagttgtagtgtaaattatataattgcagccaccacaaatgtatataatggccctcggtcgcttaccagccctctcaggggatacagattgaccatagttactcaactcacaggcaggaagtcccagaacatgctattacttccttctatagcatcgtagtctgtgcattcttctacagattatcccaggcaatgaattgcatttaatattgctktgggtaatatttcttcttctgactcccttttgctagcactcctggaaatagctgaagcacagtacaaatacttacattgcaaaattatgttaagaatttcacttaacgtaaactgctccctagctcatatatcaaacatgaagtgggtagattgaacttccgtttgctgggcaacctcagtatgttacccatctacttctcccacaaccgttgccactttatctcttcccttcctggacacgatcttagtttcctagagcaccacaaactgcaaggcttaaaataacagaaatgtattctctcagtttaggaggccaaaagttgaaatcaaggtgttggcagggttgattccttgcagaggctctgag

SEQ ID NO: 865577 - DNA, 639 bp, Homo sapiens
gctttatagaatttctgatttctcaatgctttattaaaggatcagcaggggttaggcagttgtagtgtaaattatataattgcagccaccacaaatgtatataatggccctcggtcgcttaccagccctctcaggggatacagattgaccatagttactcaactcacaggcaggaagtcccagaacatgctattacttccttctatagcatcgtagtctgtgcattcttctacagattatcccaggcaatgaattgcatttaatattgctttgggtaatatttcttcttctgwctcccttttgctagcactcctggaaatagctgaagcacagtacaaatacttacattgcaaaattatgttaagaatttcacttaacgtaaactgctccctagctcatatatcaaacatgaagtgggtagattgaacttccgtttgctgggcaacctcagtatgttacccatctacttctcccacaaccgttgccactttatctcttcccttcctggacacgatcttagtttcctagagcaccacaaactgcaaggcttaaaataacagaaatgtattctctcagtttaggaggccaaaagttgaaatcaaggtgttggcagggttgattccttgcagaggctctgag

SEQ ID NO: 865578 - DNA, 676 bp, Homo sapiens
ttactatttttgactgcaccttacacctatgggagcaggtggtatgaatgagagatgggaagaaggggtaaactttctttctaaagtaggattatatcaataacccagactcacaggtgtaacttgctgcttttcagttgtccgcaggaaaaccagtgtaagtcagttcattcctgctgtgtgatcttgaaaagtcaccttaattaccttaattacttccatattctgttggaagaaaagaaaatgaatgtaaagcacctaacgtcatgccaaacaaataggaaacrctcaacaaatggtagatttagatgattctcttcttgtctgttatctattctattatccatttgttattcctagaagtgaaaataagtattacacctttgttgataattttctcccataaccagttcccctgcttactcccattgcttgctgtgtttcctagcttctaaaacacatatttttttccacatttggaaaatcctggaattgcaattcattttataattggagtaaagggaagcatgccagctctccagaatggcatcacctgtgaaggtgtgctccaagccacatgttcaaggtatctcttcttctgattgtcaactcaggtgagctatttgcattggcaataccacatacatctaaattttaacttaaattggaatcacta

SEQ ID NO: 865579 - DNA, 676 bp, Homo sapiens
ttactatttttgactgcaccttacacctatgggagcaggtggtatgaatgagagatgggaagaaggggtaaactttctttctaaagtaggattatatcaataacccagactcacaggtgtaacttgctgcttttcagttgtccgcaggaaaaccagtgtaagtcagttcattcctgctgtgtgatcttgaaaagtcaccttaattaccttaattacttccatattctgttggaagaaaagaaaatgaatgtaaagcacctaacgtcatgccaaacaaataggaaacgctcaacaaatggtagatttagatgattctcttcttgtctgttatctattctattatccatttgttattcctagaagtgaaaataagtattacacctttgttgataattttctcccataaccagttcccctgsttactcccattgcttgctgtgtttcctagcttctaaaacacatatttttttccacatttggaaaatcctggaattgcaattcattttataattggagtaaagggaagcatgccagctctccagaatggcatcacctgtgaaggtgtgctccaagccacatgttcaaggtatctcttcttctgattgtcaactcaggtgagctatttgcattggcaataccacatacatctaaattttaacttaaattggaatcacta

SEQ ID NO: 865580 - DNA, 625 bp, Homo sapiens
gaatgagatttgaataaagttaaggcaaaggccatcttcttgctgctattcttgttggtgaagatggctgcagaaatgagtattttcaggtgcctgtggctgtcagacttggccttgtaagtgtctagaagcagttgtggcagcaacagcaatgccttcctgacctctgcttgcagcagctatagttttatgtccctgtactaatttgttcagagtgaggctcctgactcctgatctaccatgctgtctaggaattttgcagccagctaagctactgcattcaatcccattctacatgaaataccaggtttctgtttcctgcagtcaactttgactgatatgaaaatagtcataaccacataaatgaagagttatagtttactgagtatctattaaatgccagacaaattgaggatcagtgagataactkgtacaagttcataaagctaacgaatggcaaaaccagtgtttgagtttcggtccatctgtttgcaaagctagtacacaaagggcagaaactgtaatatgtccatttctattttcaatttttaaaaagaatgaaatcatgtcctctgcagcaacatggatgcagtcagaagccattattctaggcaaattagaacag

SEQ ID NO: 865581 - DNA, 652 bp, Homo sapiens
gacaagtgaagatgaacccccagtgactactaggaaaatcttgcaggcaggaaaccaggagagaaaggtaaaagtgctaatggtggacattaaaggcttcttagaaagctgggtgcctggctctattatggaagcagtcatgctaatcacgacacctgacatggattagcatgtcctcttggtcagcctctgtgctggggactttacatgctctgttttatttaatccttgcaagaatcttgtgaaggaggtatttttgttatcaccattttacagrtaaaaaaaaaccctttgctcagggatgtcaaataattttcatatgagaattagtgagaagtagaggaaagagtcaaaccagctccaatgtcagtgtccaaatcactggatttactgcatccccaagatgttttgatctcactggagataagacagacctataggatgatatttgttgctggagagatgaccatttggtaactaaagcaaatatgagctttttaagaatagctttactcttctggatatttgctcatttagggttccaaacatggatcagttcctatttttttctgatacttgctattgctccttattgcttctggcataagattcaacctctcaagtaaagttaaagttcagtattctctctggc

SEQ ID NO: 865582 - DNA, 633 bp, Homo sapiens
gatggttttaacaggggtttctgcttttgcatcttcctgattttctcctgccaccaccatgtaaaaagtgccttttgcctcccatcatgattctgagtcctccccagtcatgtggaactacaagtccaattaaacctcttttttcttcccagtctcatgtgcgtctttatcagcaacatgaaaacagactaatatagtaaattggtaccaggagtgggggtgttgcagaaaagatacctgaaaatgtggaagcaactttggaactgggtaacaggcagaggttgggacagtttggagggctcagaagaacacaggaaaatgtggaaaagtttgtaactttctagagacttgttgaatggctttgaccaaaagcytgatagcaatatggaaaataaggtccaggctgaggtggtctcagatggagatgaggcacttgttggtaactggagcaaaggtgactcttgctatgttttagcaaatagactggcagcattttgcccctgatgtagagatttgtggaaatttgaacttgagagagatgatttagagtatctggtggaagaaatttctaaacagcaaggcattcaagaggtgacttgggtgctgttaaaagcattcaactttttaagggaa

SEQ ID NO: 865583 - DNA, 564 bp, Homo sapiens
gctctcctatggagtggctatcttggtaggaataaactaaacacagcttagacaagagccacagggacatctgtgaataaaagcaagttttctgtatggggaacacctggccatggccggacacttaggcattaggcagtctaccaggataaagawgtatcccttgaaaggcatgctgtaaacatccagaaactgccttccctggagccctgtcgtcagggcagggctagagtttatagccactctccagggagagacttcaagaccaaattagaaagaatttgtatctttaatatttacaaaacactatgttactgatttttttcttttgccttgggcatcaacatggctcagcatagcattattactgagtctgtctttattgcaataaaatgttacttatcccttcaacaaatggtgctgggacgactgcatatccacatgcaaaagaatgaaattggatccctgcctcatgccatacacaaacattaactcaaggtagatcatagacctaaatgtaagggctaaaactgttgaactcatagaaggaaatgccagagtaaa

SEQ ID NO: 865584 - DNA, 595 bp, Homo sapiens
tataacagctttgatgattggataaaatggattccgtcctattgtgcctcatcagtctccattttaaaaaatcaccagaaaacatagggtttgattttgagacaagacaggagtctgagccataagggagcactaggtttgtgtgtgtgtgtaatccacactcaatatctcaggctaggaagcagggcacacattcatctccagctaatttttatttatttggaaccattcagatcaatctttgtagaatcagcaaacacttcaggtacacaactttaggtgttaagtgcctcctctgcttcctgctagaagtgggtctcttgagagtcatctgtttttaatctgcaggagaggaacgactcagagggagccgtgcctgcctggcatttgagctctcctccttaggaaatgagagtcctcaaagtccataatctggttttgtttgagtcactcggttgyctgtttacaaacggggttaatgagctcaggggtagaaccctcttgtgggcataacccctgagtaccttctctgaaataacacaacatcaaccagaataaaagtcattgctgttggtaatccgactacccttggttt

SEQ ID NO: 865585 - DNA, 644 bp, Homo sapiens
gttagtgtattagtctgttctcacactgctaataaagacatacccaagactggctaatttataaggaaagaggtttaattgactcacaattacacatggctggggaggcctcacaatcatggctgaaggcgaatgaggagcaaagtcatgtcttacatggtggcaggcaaaagagtttgtgcaggggaactcccctttataaaaccatcagattttgtgagacttattcactatcatgagaatagcatgggaaaaacctgccccccatgattcaattacctcccactgggtccctcccttaacatgtggaaattacaggagctataattcaagatgagatttgagtggggacacagccaaacaatatcattttgccctggaccctcccaaatctcatgtcctcayatttcaaaaccaatcatgcctttccaacagttcctcaaagacttaactcatttcagcattaactcaaagtccatagtccaaagtctcatctgagactaggcaaggcaagtatcttctgcctataagcctataaaatcaaaagtaagtattagttactccccagatacaatgggggtaagacactgggtaatccattccaaatgggagaaattagccaaagcaaagggctacatgcccta

SEQ ID NO: 865586 - DNA, 684 bp, Homo sapiens
cctgattattgaaaagttgagcaccttttcatacgtttattggccatttggatattttcttttgtgaagtgtctgttctcgtcttttgcctgtttgtctggcatatttctattgatttgtaggtgttcttatacattctggatactggccctttgttattagcgttaaaaatatatgttcttaccatgtgacttgccttttcactctactagtagagccttttgataagtggatattcttaactttttttttttttttttgagatggagtctcgctctgtcgcccaggctggagtgcagtggtgtgatctcggctcactgcaagctctgcctcccgggttcacgccattctcctgcctcagcctcccaagtagctgggactacaggtgcccgccaccacgcccggctaattttttatatttttagtagagacggggtttcaccgtgttaaccaggatggtctcgatctcctgacctcgtgatccgccygccttggcctcccaaaatgctgggattacaggtgtgagtcactgcacccggccttcttaactttattgaagcccagtgtatctatttttcctttatggtttgagttcttttgtgttgttaaataaatctttgactacctgaaggtcacaaaattgcttttttatgttatctttgagatacttgattgtttcacctt

SEQ ID NO: 865587 - DNA, 556 bp, Homo sapiens
ccatgaatgatcttttgtatttctgtggtattggttgtaatatctcccgttttgtttccaattgagtttatttggatcttcttatttattttcttggttaatctcgctaatggtctatcaattttgtttatcttttcaaagaacctgctttttgtttcatttatcttttatatatttttttgtttcagtttcatttagttttgctctgatctttgttatttctcttcttctgctgggtttgggtttggtttgttcttgtttctctagttccttgaggtaaactgtttatttgtgctcattcagactttttgatgtaggcatttaatgctatgaactttcctcttatcactgcctttgctggattccagaggttttgataagttgtgtcactattatcattcagtttaaatgwtttttaaattttcgtcttgatttcattgttgatgctacaatcattcaggagttatttaatttccatgtatttacgtggttttgagggttccttttggtgttgatttccaattttattccactgtggtctgagagagtacttgat

SEQ ID NO: 865588 - DNA, 622 bp, Homo sapiens
aggtagatttccttttctcctccaaatttattaaggtttaattgataaaaattttatagatttatgatatacaacatatttcgataaatgtatacattgtgcaatgattaaatcaagctaattaacatatccatcaccttatatacttatcgctttttctagattacttttgctcaggagtggccaaacttagtttctttcaaagttcagaasactctgtggatccttcagcacttaaagaccaccatacagaatatcatttttccattctcattttaaaaaaatgagattctattacaaaaaggaatctacaaaaaaaaaacccaattcaaatggatttagcttcttgtgttttctttgataaacacagatcctctagaaaaaaaatatagtacttgattttagtccccaacttcatttaaagtgacgcatacttatttgaaagaagataaaataagagatgcttgttttctctctttggatgtaattattagcatttgaaatcagaggccaaaaagacttcatgctttgacttaggattaacagtctcttttgaacagaactatcacttgtctattcaacttagtaaagtaattgcttctttattctccttgaaatgttg

SEQ ID NO: 865589 - DNA, 609 bp, Homo sapiens
aaatagagacttaaaaatacaaaggatcaacaaaacaaaaatttggctcttcaaaaagataaataaaattgataaaccattggctagtttaaccaggaaaagaagagagaagcctcaaataaaatcaaatgaaaaatgacacattacaactgataccatagaaatacaaaagatcatcagagactattatgaactactatacgcttaaaaagcaggaaaacctacaggaaatgaaaaatttctagaaacatacgacctaccaagattgaatcagaaagaaatagaaaacytgaactgacattataggtagcaagatggaaagaataataaaacatctttcaacatggaaaagtccaggaccagacaaactgacagctgagttctaccaaactaatactaatctttttgaaactattcccaaaaactgaaatggggagaattctccctaactcattctatgaagctggaatcaccctgatcccaaaatcagacaaggacacaacaaaaaaagaaaactacaggcctatatacctgatgaacacaggtgcaaaaattctcaacaaaatactagcaaacagaatccagtagcatatcaaaaagataatacaa

SEQ ID NO: 865590 - DNA, 599 bp, Homo sapiens
ccttaattttttttttttttgctacatttttccttttttcactccatctggttcttcctccaattttagaagtcccgggcagctgagcttggagtttaagggatgctctcagattctcagattttattcagagaaatcctctatgaaactctcaggcttcaagagctcctcaccatgaaggcaccatgatgaatgaaaggggtcttttcatttgaaatatttaaaaagtgacataattgttgggatgtgaggaaaaggagaccaggggaaaaggagaagaaacaaaacactttccagagcttcccaagaagtaagacaagaggaactctcagaacatcccttaggaggwcaacacttttatccattgttccttaattccatgttagcaaagtttgcagtccagagcttaacctgtgacaattctgggtgggcttgactagcctgaggcagaagccagttcttctgggtctactgaaacaaattattaaaatcataacagaaaaattgtatttgaaggagtttgtttcatgagaactggagctcctgtaaatgaattttcttagatctatagtctctatagtcagagtgagtggtgggaa

SEQ ID NO: 865591 - DNA, 640 bp, Homo sapiens
acagtaaaactccatttaaagcttacattggctttaaatccaatcccagcatcttgttgtgggatggcattgaagtgtatctcagtaggaattatcagtcagcccgacagtcagtccacacaagcttcttcttcaccttggttcctctggttgggcacgcctaacactatttaaaagcaattgagataaagaccccttggaactccaagggttagcgttcttggtcatatcgcactaagatttttcctctaacaaagaactaagcttagcgaagttgaaaatccctattagtcatcttagaagccaaggcaatacttcatgattctttagtaaatatttgttaaaactgtgatttaatttattaaatagytatttttgtatttctaatttaatgaaataatgtagtgggtcctctattcaggaaatttttcattagtacatatgcacttgttactctgattcagacgtttgatgtaaaaggcccagctgagtggctaaaattgtctttttataggctgaaaaacaaaacttttctgcaagcctcttcacttctctaacctcctcttctactttgctatagtttccactatttctagcatcatctattctaatctatgcaataatgaaaactggtcacttc

SEQ ID NO: 865592 - DNA, 628 bp, Homo sapiens
aattgaggtatcagagtgactaggtaatttactcaaggttactcagctatcagtgacagacaggggaattaaataagactctggctctggagcccaggaaaatcagaaccaaattttctagtttggttccttttacctatatttatgaactaaattgggacttggacataaaacatcacaaaccacaatatatgactggaagccatctgtgattttactctggtgaataaatttattttcattggcataatctaaggacttagcattgctggttttaatggcacctctggttcctatagatacagtggtcgaaagggtaagctttgcagctggttgcagtggggtcaccatgaaaacatccctaaggggaactcatttaattcaagaacatgaaatcattcattcatgagtacatcatgcacatgaccatatatatgtgcctgtaatacatacrtgtccatcccattcctttatttctttttggcttataatagtaatgttctttctatgtaggaatggagaattttataattgaaaaatgtatatttagccagagcacagacataaggaatatatcaaatagcacattcactgtagctagcttggcttaaatatagcacgatgccaa

SEQ ID NO: 865593 - DNA, 678 bp, Homo sapiens
gatgctccccctaagaaggagacttttgagcaaagatctggatgaagtaagagaacatggaaagatgcatccataaacagtgcaaaggcccagtattgggcagaaagctggaattcactaggaaagcaaatagagccaaacaaaaggggagaggataaaagaggatggggatgaagtcagagagataggtggaggttggctcacataggccttgtagacaaatgtcagagtagcagtcagcatatgcccgactatgctatggtaacaaacaaccctgaatctcaacggctgaaaacatgaaaggtttattttttgctcacatcatgtctaycacagttaggttggaggctctgcactgtgtcatcctcatcccaggaaacagatgggcagagaaaccactgtcaaaatcactgccaaacatattatcagagaaaagacatctctgaaagatctcatatcagcaattaatgttccagcatggaaaggacacatagcacttccacaaacaactcactggccagatctagtcatataaccacatgcaatgatggcggaggaggagagaagggacaggtgtgtgtgggcagggagcacaattctaccatgtgtccactatgcagagacctataaatattttgtaaacagcatgcatgaatcctatggtaaaattgttggatt

SEQ ID NO: 865594 - DNA, 678 bp, Homo sapiens
gatgctccccctaagaaggagacttttgagcaaagatctggatgaagtaagagaacatggaaagatgcatccataaacagtgcaaaggcccagtattgggcagaaagctggaattcactaggaaagcaaatagagccaaacaaaaggggagaggataaaagaggatggggatgaagtcagagagataggtggaggttggctcacataggccttgtagacaaatgtcagagtagcagtcagcatatgcccgactatgctatggtaacaaacaaccctgaatctcaacggctgaaaacatgaaaggtttattttttgctcacatcatgtctaccacagttaggttggaggctctgcactgtgtcatcctcatcccaggaaacagatgggcagagaaaccactgtcaaaatcactgccaaacatattatcagagaaaagacatctctgaaagatctcatatcagcaattaatgttccagcatggaaaggacacayagcacttccacaaacaactcactggccagatctagtcatataaccacatgcaatgatggcggaggaggagagaagggacaggtgtgtgtgggcagggagcacaattctaccatgtgtccactatgcagagacctataaatattttgtaaacagcatgcatgaatcctatggtaaaattgttggatt

SEQ ID NO: 865595 - DNA, 590 bp, Homo sapiens
acaaacaagaacaaaactaaaattaactcattaattccatttttgtttcacagtaagaaattataagacaccagtttccaaagtaactataagctttggattttagatttgtgtgctattttcctttgtacaacatttcaaatataactttatggcccagcactgttagccaaatgttaaccttcaccsacaaatcccaaagacctgttaggatcaaaaactgatttgggttcctgctagaacttctctacctgcacatcataattttgacctcagtcctgaccaagtcaccttcccagattacacgcccctcataacttcttaaacagatgcctttgtaatacttataaccttttccacacttttgagtacgtatgtctggggtgaaggagagaatctgaagctgtattctcacagcttcaggatacatagagatacagatctattttttttttaagtaaggcattttccgaagaacagatgctgaaagtcttctgcctccaacacccttcttgcagcattttagcacacaatgaagcctctttctaacatggtgatgaagtcttttgaggggttctggggctgggaat

SEQ ID NO: 865596 - DNA, 688 bp, Homo sapiens
gcagagtggcccagacatgttctcctgctgatggcagacagcaagaatgagtaagttccatcattcaacctttctcaagcctctgtttgctccatatttgtggttatcctattggccatgcatgtcacatggctgggctcagagtggcaagctactgcacagtcacatggaaaagtcatggacacaagagggtaaataactggggaattaaccactggagattttgactctacaaaggcaatggagcaccttgaggaattcaactgcagtttactcattttataatctcagcccctgtgatataagctcaataaatgctttatccatgaatgaatgaatacataaatgaatgaatagcagtcctactctgaagtaggctgggctatcttgctactttttggagaaaaagtgtacttagtttagtctaacagcatagaggaaaaaaaacatgttctattactaaacagatttatttttttttmtctctctcagaaaagttcctactctaaataaaacaacagaattcctgggcactattcatgttagagtgatatggaagcaccccaaacaaaacactacgagaatattttggggaagaaaacagatcaaattgtgctgaatccagcttctagcctcagcctgatgctgtgctggattagctatgcccccgtcaggcaattatatggga

SEQ ID NO: 865597 - DNA, 584 bp, Homo sapiens
accatgtttggagataaggtctttaaggagtgattaagttaaaatgagcccttacagggtgaagtccttctcccatatgactgatattcttgttagaagaggaagagacattaagggtactcatgcacatagaaaggccatgtaaagatgagagaaagtggatatctgcaagccaatgaaagaggcctcagaagaaaccaaacctaccaacgcctttatttcgaacttttaaggctccagaaatgttagaaaaagaatacattctgttgtttaagccaccaaatttgtggtatttttttatggcagccctagaaaactaacagtctccttcctcttgggtggtatgatacagatggtgtgttacagtaaaagtggaccgccaaccaaataaatatcttccagtaagtaggcmcaagaacaatcattcaatgtatgctataagctcaagaattatggcatcttttaagttgttactgaaagggtcaagaatgtagatgagacatgtagatgtcttatatattggcaggattcaattagatttctaattggagacaatgagaggctgttgtttggaatcctcagct

SEQ ID NO: 865598 - DNA, 700 bp, Homo sapiens
ttcaattagatttctaattggagacaatgagaggctgttgtttggaatcctcagcttgaggtcctgttacagtgggttacttagggctgactagattcttacaccctgttcatgataaggttaatgtgctgtagagcatttctagccaatctacacatcctaaacactacttatrttagttatgattaaaatgttttaatattaaatatccattgtactaattagtggtatgcagccatctctgtatatgagtttctaatttgaatcttccaaatgtaaactcagcacttgattttggcatttagatattaatcaccagtccctagggcatcaggtgaaatcaacaaatccatacatgtgtgtcgtacagtttatgaggaagtactttattttattaatttaatgttttcagggttttttatttgacttaatttcaagacttacagaaaagttgcaagaataatgcaaaaaaatctccagacacccatacctttcagacaaatttattctttcctctctttctcaatctgtatcctcaccccaaaatattttctagtgcattttcataaaacataactttgtataactgggaaattaacatttacgaatggtgattcctaatttcattattccttcaacagtttttaattggctttctactacaggggaaagctttctcttcctttttatacatctgtat

SEQ ID NO: 865599 - DNA, 583 bp, Homo sapiens
cctccccactccccccaccccacaactgtccccggtgtgtgatgttccccttcctgtgtccatgtgttctcattgttcaattcccacctatgagtgagaacatgcggtgtttggttttttgtccctgcgatagtttgctgagaatgatggttcccagcttcatccatgtccctgcaaaggacatgaactcatccttttttatggctgcatagtattccatggtgtatatgtgccacattttcttaatccagtctatcattgttggacatttgggttgsttccaagtgaatagtgctgcaataaacatacgtgtgcatgtgtctttatagcagcatgatttgtaatcctttcggtatatacccagtaatgggatggctgggtcaaatggtatttccagttctagatccctgaggaatcgccacactgagttccacaagggttgaactagtttacagtcccaccaacaatgtaaaagtgttcctatttctccacatcctctccagcacctgttggttcctgactttttaatgatcgccattctaactggtgtgagatggtatctcattgtggttttgatttgcac

SEQ ID NO: 865600 - DNA, 638 bp, Homo sapiens
cttctattttatttctgagggtctgaaatgaaatcccccttttatgcttgatattgaaaaaaagtatatcctcacttttttcttggtcagtccgtccagatatttttgaattctattgatcatttcaaggaaccagatttggtttcatttattttctctatttctttttctatttcattaatttcagttattttttrttgttccttttttcttgtgctttaatttgtttctctttttctagcttcttaagttgaagacttagatcattagtttgagaccattctatatgtctagcataaacatttaatgctataaattttcctctaggcactattttagcttcattctgcaaatttatctccattctcatcaatttcattcagttcaaaatattttatcgtctacttcagactttttctttaacctgtgtctatttagaagtatgccatttagtttgcaaatatttcggtactttccagatatctttttagttttgatttctactatgatcaaataagatattttgtattatttctattttttaaatgtgttatagtttgctataaaagccatgatatagctcatctaggttcttgtttaggtggatttaataagaatatgcattcagctgttgctag

SEQ ID NO: 865601 - DNA, 688 bp, Homo sapiens
ggacaattcaaatgatagagctaccaggtacctttaattttcactgggaatgttaaactttcaagaaaaccattaattctggccatcatgttgagttttgtctattttgttctgttttacttattgagttccaaataaccaagatcaactttttacaacaatctactaaattttaatgaaattaccttagtttttttagttagactgagcctttgtccaaaatcagaggcatatctaagccttcttgaagaaagtaatgaccataatgattttgcctaattttatctrcttgcaacacttcacctgtatttgtcattttgtagaagtcagatctccttcatcacttgctctttgcagagttaatttgaaaagcatgaaatatctagaggtaaaactacaacatacatatcccatgctgtgtacaaagtagattgtatctcaaactttctgatacagtgatctctgtagaaaagaatatgaaaataaaaacataaattgattaaacagagataactaaaaaggtttaaacaatgttcaagaatactctagttactttgtagctatctaagatagcatcagccaactagatgtgaattttgagaacagagggcaactctgataaaataggctttttctgttttaatgtagtggatgttggtttctgattctaaaatggatagttctgttt

SEQ ID NO: 865602 - DNA, 629 bp, Homo sapiens
aatcaaggttacaaaatactttacatttgcacaaataatcacaagaaaagaaggtatggtaaaaaacaaaatgttacagaagttcagagatggaagatatcacttctggcctccaagtttcataaagaagtgaccttttgaatcagatgttaaaagatgaaaaaggttttgctaggtagaaatatgtataagtaagacatttcctgcaaagtaagtggcacaaagcataataaaaatgggaatgttcaaggactgttaaggagacagaaaccagrtcagttaggcatagtgtacttcttggtattaagtctgggaccagatacataaggccttgaatgccaagatgagaagtttccttttatttggaattaaattcaagaacatttaaaattcgggaggaaacgtggatatatagagatagaatgataaaagaaattgacaacatgttaatgtttaggaagtctaggtgaaggttatacaggaattttttgtaaaattcttgcaagttttctgtaagtctaaaattatttcaaaaaatttcaaaagctacatttgttttaaaataaaataaaaagcttcgaggaatacagtagcaccatgagagcagtgttttaggatggctgcacaga

SEQ ID NO: 865603 - DNA, 650 bp, Homo sapiens
cagtagcaccatgagagcagtgttttaggatggctgcacagagcacattttgttggtagaaatttggaaagcaccacatggttattatgagatcctggagataaagtcactgtagcccaaactggggtaaagatgaagaataagtaacaaatgtgagagatgtaacataggaggaaccaatagggtttgggggtgtattagatatataatatgaaggcagaaaaatttaaaagggctgttaagaatcccagatagatatgtttatggacttgatggtgatgatggtttcacggatatatatttattcccaaacacatcaaattgtacacattatatttgattcattgaattatatatattgtaggtagctttttacatgtcaatggaagctcaataaactcaataaagtgttgtkttttttttttaagactatgatatattcacacacaaaaactgattttcaggtaggtgaaagaatcataataatcatgaagaaaagtaaaggtcaaagtaatacatgtgattttatataaactgagtttaaggtgactatgggacatctgagttgaacaggatgaatataaatcattacacaaaagtgataaagctttatggcatgagtatttatggtattaatgagtatttgccag

SEQ ID NO: 865604 - DNA, 653 bp, Homo sapiens
tcccatgctgtgtacaaagtagattgtatctcaaactttctgatacagtgatctctgtagaaaagaatatgaaaataaaaacataaattgattaaacagagataactaaaaaggtttaaacaatgttcaagaatactctagttactttgtagctatctaagatagcatcagccaactagatgtgaattttgagaacagagggcaactctgataaaataggctttttctgttttaatgtagtggatgttggtttctgattctaaaatggatagttctgtttacgataaaacttccaccaggaacaactacatcagtaatatatttaacagcattctttttattattggatatcagagaagctaacttgtcagtaataagggattgaaratcatgtgtttccagcaattttaataatatggggtatatatattttcggaaaatcatctgcctatggagaagtgaaatatttagcaatattaaaatacttacatttgatctctttgactatcaaaaataaacaaatcccaaattctgccatttggtaaaattcactaggtaaaagtcacattcctgataaatatatacacacacataaaccagtgtgtgtgtgtgtgtgtgtgtgtgtgtgtgtgtgtgtgtgttggctgaccagt

SEQ ID NO: 865605 - DNA, 639 bp, Homo sapiens
ttgttctgatacagacgatgcttagaccacactttaaggaacaccgcagaagtgtttcttattcgcagaataaaaggtttcatttccaaaaactgtttcgccaattagatcttctgttcatttatcccaccttctttactattgctgctttggaagaaaatcagattattgttggaaaattagaaaacacaggtgaataaaaatgaaaaatmaaactcacatccagagaaataactcatgctaaactgttaattttttgtgtatattcttaaaaaatgtatacatacacataatataaaatatttgtgtatatgtctatactttataggttgtttagttcacttaataaatcataaatgtctttgcatactggcaaatccataatatcttcatcatcacttttaatggttattccattaaacagatgtatggttattcagccagtgccctaacatcgaatatttagattttctcccaatagttctatcttataaaccaaacctgtgatgagcatttctgtacatatgcctacttgttcagtcatttcctaaggacaaattcctagtagcagaattatcaagtcaaaggataatagattttaaggctttgataaattgccaaatgtccccaagaaatgtt

SEQ ID NO: 865606 - DNA, 651 bp, Homo sapiens
taataaggcatctttagagttccaacactaaagttgtgctgagaccattttctgggtttttagcgccttcagaggcaaagcagaaagtagcatcaaatttctcctgtgaaaacttctttgagtgttaacttgttctgaatggaggcaggtaaccctgttctgagctgacaaaatcaaactttacttgatgcatggacagagaagcccagtggagtttgatccaggcacatttaggtacattaccttcaaagagacctgctagagactacaggagttgctggaattttggatcaaagggagacaggaaatagcaycagtatattttttttcctgaaaatgaatgttatttcagaaaacggaagcatgtttgggctgagaggacaggttgccagttgtctgaaccagtcattccaaccaggcttcacacttctgcaaagaagagagggtgagtttacagggagagggtgcagtccttttcaaagacaagtaatggcattagtgttcaaaaagcagataatctcagttaccaaactggtgagaagcctggcaaatccagcaggggtggaaggagggaacagtggggctgcagatactgctaacaaggagtgcaccatggctagcagtgagtcaggctcacctgttatcgcctga

SEQ ID NO: 865607 - DNA, 599 bp, Homo sapiens
ggctctctggggtttcctgagccccaggagaaatgtgaaattgtcttgcaaccagacaaactgtcaattaagggaagagagatctccctcccattgatcaaacaatgtaaaaatacaagccttcctcaggggtagatcaacctggctctgggcactggccccagcaagactttgacctgatccaagagggtttgaaatgctaatccactcattcctattccagacattcacagattagggctgctagttgatacaatctacactctggaaaatagcaacctgattacaattggttttacatgctcccaggagccaggggyaaggcctcttccattgcaacttgcagctgaccaccagaatgacttaggcagtgggcctccaggataaatctctgacctctggctgctcagccctctttcaagcctagacattggcagaggtcttgaagccaagcggggcagggccttctggactgcctgtgatctcctgctttaatctctgttgctcctgatcctgctgccccagataatctgaaaggagtcttgcaaatggagctaacgacatgccttgaaggcttttgctggtgacatcctcactga

SEQ ID NO: 865608 - DNA, 599 bp, Homo sapiens
ggctctctggggtttcctgagccccaggagaaatgtgaaattgtcttgcaaccagacaaactgtcaattaagggaagagagatctccctcccattgatcaaacaatgtaaaaatacaagccttcctcaggggtagatcaacctggctctgggcactggccccagcaagactttgacctgatccaagagggtttgaaatgctaatccactcattcctattccagacattcacagattagggctgctagttgatacaatctacactctggaaaatagcaacctgattacaattggttttacatgctcccaggagccaggggcraggcctcttccattgcaacttgcagctgaccaccagaatgacttaggcagtgggcctccaggataaatctctgacctctggctgctcagccctctttcaagcctagacattggcagaggtcttgaagccaagcggggcagggccttctggactgcctgtgatctcctgctttaatctctgttgctcctgatcctgctgccccagataatctgaaaggagtcttgcaaatggagctaacgacatgccttgaaggcttttgctggtgacatcctcactga

SEQ ID NO: 865609 - DNA, 576 bp, Homo sapiens
cttctttcattctctttgccttaagaaggaggatatttcacactcttccattttttctcttggtcacatcacttcataagccctctggaatccttaacctatcaatcatcctcttcctctcttgtgttgattctttgtaartattattgtctccttttactaaaagtaaagttttcctcagtcttgtctgccttttgagtgaattccagtctccaatgtgtatgaagaatggtctgtattcttcctcatcttcaattgctacccaagcagtacaatctaatttttgatctgacatcttccatcactgtacctttcactgtgtgtcagtgattggcaatcttccaatggccacattcatgggttttttcttagtcttcctcttatccaacctctctgtggcagtgactttgaccctcctctccttggtgtcagaggtgttccctctttgggttccccactcacttctctggtgctacttccccaattcccttttctggtatctttctcttgcctggtccttacatgtagcttgctcccagtctcatctccagccttctcatcttataatccactctt

SEQ ID NO: 865610 - DNA, 645 bp, Homo sapiens
gtgaaaccagtcacttttcttcacagaatagaacctattagaaaccaaaacctgggaaaacaacggcctctctgtatctgcagtggctgcagagattttcctgccatgccagggaaccccactcccaaatggtgtcgaacagttacctgtcatgtagagcaatatgaagataacatttttctgattaatgatgttgatcacatttgttctccactggataaatgttggaatcaatgtccacataatacttttaaaatctatcaagtatatatgatctttccttggtcatttggatgctatgatcactgaaaatgggaatctggcctcactgactggtcagtgtgaaggggtggcaactccattgggtctgcattagaagtcggtataactttgccgaagaaaattctagcagaggcrtatatttatctgtctatcatctatttacttatctatttatcgtctactttcttttttttttttgaaacagatcttgctctgttgctcaggctgaggtgcagtggtgtgatcgtagcttactgcaacctcaaactcatgggatcaatcaatcctctcacctcagcctcctaagtacctgggactacagacacacactaccacatcaggatgattttaaaaaaaatttgt

SEQ ID NO: 865611 - DNA, 645 bp, Homo sapiens
gtgaaaccagtcacttttcttcacagaatagaacctattagaaaccaaaacctgggaaaacaacggcctctctgtatctgcagtggctgcagagattttcctgccatgccagggaaccccactcccaaatggtgtcgaacagttacctgtcatgtagagcaatatgaagataacatttttctgattaatgatgttgatcacatttgttctccactggataaatgttggaatcaatgtccacataatacttttaaaatctatcaagtatatatgatctttccttggtcatttggatgctatgatcactgaaaatgggaatctggcctcactgactggtcagtgtgaaggggtggcaactccattgggtctgcattagaagtcggtataactttgccgaagaaaattctagcagaggcatatatttatctgtctatcatctatttacttatctatttatcrtctactttcttttttttttttgaaacagatcttgctctgttgctcaggctgaggtgcagtggtgtgatcgtagcttactgcaacctcaaactcatgggatcaatcaatcctctcacctcagcctcctaagtacctgggactacagacacacactaccacatcaggatgattttaaaaaaaatttgt

SEQ ID NO: 865612 - DNA, 645 bp, Homo sapiens
gtgaaaccagtcacttttcttcacagaatagaacctattagaaaccaaaacctgggaaaacaacggcctctctgtatctgcagtggctgcagagattttcctgccatgccagggaaccccactcccaaatggtgtcgaacagttacctgtcatgtagagcaatatgaagataacatttttctgattaatgatgttgatcacatttgttctccactggataaatgttggaatcaatgtccacataatacttttaaaatctatcaagtatatatgatctttccttggtcatttggatgctatgatcactgaaaatgggaatctggcctcactgactggtcagtgtgaaggggtggcaactccattgggtctgcattagaagtcggtataactttgccgaagaaaattctagcagaggcatatatttatctgtctatcatctatttacttatctatttatcgtctactttcttttttwtttttgaaacagatcttgctctgttgctcaggctgaggtgcagtggtgtgatcgtagcttactgcaacctcaaactcatgggatcaatcaatcctctcacctcagcctcctaagtacctgggactacagacacacactaccacatcaggatgattttaaaaaaaatttgt

SEQ ID NO: 865613 - DNA, 556 bp, Homo sapiens
gggtgcatgggtcagccactgtctccaggacgggtccctgcctctccaactggcagcgctgagctgagaacccagtcctctccagcaagacccgagctcactttcccaagtccagctgcatttgtgccctcaacaaaccatgccagcctccaggtgagttcaagtcttgtctccagaaaacactgtacccagatttcagccctctctgctccttctaccctagaacatcacaaaatgccagatttttagagcaaaaaaggggcctgaccaactctgcagytgaattttagcatactaaaaatgaaagttctcttttacaggataagaaaccaatgcttctcattgcttggctgtgcaagaccagctccaaaaccctccttgtttgcctttccaatgtgcagaacttcaaggacacacagttaaatcaagcatggttcctggcccagaaattccatgcacataggtctacaagtacactaatatccgtcatggtaaatgttatccctccatttatagttttttatttcagtgaaatatatgtaacataaattttgcc

SEQ ID NO: 865614 - DNA, 608 bp, Homo sapiens
tgcttctggtgaggcctcaggaagcttccactcatggtggaagacaaaggggagctggcctgtggggatcacatgaggaaagagggagcaagagaggggtgggtagggggtaggttcattgtaacaagcagctctcgcgctgtgagaaaggcatgaagacattcatgccttgggggatccactcccacaacccaaacacctccccmaggtccacctccaacatcaaggatcagatctcagtatgaggttttagggatcaaagattcaaactacagcactggcattccatccagcacctatgtccatctgaggctgaataatccagctgtcatgtgggttaactccccaagccccttgtgtggccctcttcctagtctacaggtgctagactctggagcagtgcccatgatgcagaagtgcagcccccagccccaggtgtttgcccctgcatctggcatctgagcaggagaggaatctggggtaggaggcctggtaacctggtttggaggtcaatctgttcccggggtttctctctggcacacaagtctgacatatcagaccctcctctggacacggtggacagtttttccatttgcactgttggtttt

SEQ ID NO: 865615 - DNA, 595 bp, Homo sapiens
tattgaacactaagtgctctaagaataaatcataaacaagccagactgtgtcctcagaaactcacattctagaaggggggagaataagtaagcagtgacgtaaattctgcaacaagggcgagcttggggcacttcattccacataggcaatgtccctaattcagccttagagggccagagacagcttccctacaggagctgagtcctacaggtacatccacagtttctacaccttttctcacctatcaaatgcagcagcttttgtgtgcaatgggattatagttacaggtaaaagggaagctcatagattttccatgtttaggacagcatgcttctgacatttaatgctctaataacttgaaggccagactgctattaakgtagagtctcagagactgttgggttgtagtagaaagaaattggaatgtaagtcaagagacttggccttcagtgtttgctgtctactgttaaatttggttagcctaaagctgcctccttatatattttaaattcagcctaacatttctccatatatagtgaactgtaacctaactgcatgtgtaaacaggtgtaacgtgctcttgtaacaaggagc

SEQ ID NO: 865616 - DNA, 546 bp, Homo sapiens
aaggagagtctgagctcaggcacgcctagctccaccccacctgctggtccttccctatctaccctggtagcggaagacaaagggtatataatcttgagagttctatttccctgcccaccaccggtccctctccacactactatggctgatgctttctggaaattggaacctcctggcaggtggccaaccggcacaaaaatagagcattaaaccaccaaagctgaggaccttcacggagtccattgcgccctcygccacctccaccggaacaggcgcaggtatccatggctcaaagacccataaacagctcacatcagaggactctgtagaaaacccccagtaccagcctggagttgggtagactcactgagtggctagacccagaagagagacaataatcactacaattcagctcacaagaagccacatctataggaaaagggggagagtactacatcaagggaacatcccatgggacaaaaggatctgaaaaacagccttcagccctagaccttccctctgacagagcctacccaaatgagaagg

SEQ ID NO: 865617 - DNA, 591 bp, Homo sapiens
agaattgcctttcacctcctgccatgattctgaggcctccccagccatgtggaactgtaagtccaattaaacctctttttcttcccagtcttgggtatgctattatcagcagtgtgaaaacgaactaacacacaagggacataccttaatgtaataaatgccacgtatgacaaacccacagccaacrtaacactgaaaggggaaaagttgaaagcatttcctttgagaactagaacaagacaaggatgcccaccctcaccactcctcttcaacataatactggaagttctagccagagcaatcagacaagagaaagaaataaagggcatccaaatcagtaaagaggaactccaagacacataattgtcagattcaccaaggttgaaatgaaggaaaaaatgttaagcacagccagagagaaaggtcaggatacctacaaagggaagcacatcagactaacagtggatctctctgcagaaaccctacaagccagaagagagtgggggccaatagtcaatattcttaaagaaaagaattttcaacccaaaatttcatattcagccaaaataaacttcataagtaaagcagaaa

SEQ ID NO: 865618 - DNA, 642 bp, Homo sapiens
ttaacgatattaagtcttctaatccatgaacatggaaagtctttccatttgtttgtgtcttgcttaatttctttcatctctgttttgtaattttcagtatataaatctttcacctccttagttaagtttattcttaagtattttcttcttttcggtgctatcataaatgggattgtcttcctaagttctttccagtagttcattgttaatgtatagacaggcaactgatttctattatcacactttttaaaaaktattattatatgtgtcaagaagtatggaaattcttgttgttcttcttcttatgtggaacttttattacaaaacaagtttaaaaaaattagaaaatagaaacagacccagtgttacagcagcccggatagaaaaaaaaaaagacaaaacagacccaggaatgaaagagattatagaatgagcagacaaggacataaaaacagcaattataactaactatgttaaatgaccatattagtaatatgttgctgtgtaacaaattagcccaaaatttaacagtgcaaatagtaagcatttattactttatattttctgagcatcaagaatccaagaatatattagctggtggttctggctcagaacttaatcattttaataatgtaatatgat

SEQ ID NO: 865619 - DNA, 642 bp, Homo sapiens
ttaacgatattaagtcttctaatccatgaacatggaaagtctttccatttgtttgtgtcttgcttaatttctttcatctctgttttgtaattttcagtatataaatctttcacctccttagttaagtttattcttaagtattttcttcttttcggtgctatcataaatgggattgtcttcctaagttctttccagtagttcattgttaatgtatagacaggcaactgatttctattatcacactttttaaaaagtattattatatgtgtcaagaagtatggaaattcttgttgttcttcttcttatgtggaacttttattacaaaacaagtttaaaaaaattagaaaatagaaacagacccartgttacagcagcccggatagaaaaaaaaaaagacaaaacagacccaggaatgaaagagattatagaatgagcagacaaggacataaaaacagcaattataactaactatgttaaatgaccatattagtaatatgttgctgtgtaacaaattagcccaaaatttaacagtgcaaatagtaagcatttattactttatattttctgagcatcaagaatccaagaatatattagctggtggttctggctcagaacttaatcattttaataatgtaatatgat

SEQ ID NO: 865620 - DNA, 647 bp, Homo sapiens
tgccaggcaaaattatattgattctcctcaggtgccacccccaacttcccacttctggtaccaatttactgtattagtccattttcaggctgctgataaagacttacacaagaatgagaagaaaaagaggtttaattggacttacagttccacatggctagggaggcctcagaatcatggcaggaggtgaaaggcacttcttacatggtggcagcaagagaaaaatgaggaagaagcaaaagtggaaatccctgataaacccatcagatctcataagacttattcactatcatgagactagcatggggaagactgacccccatgattcaattacctccccttaggtccctcccataacacatgggaattytgggagatacaattcaagttgagatttgggtgaggacacagccaaaccatatcaccatctctatggggaaaaaaaaaaaattctttaattagctggccatggtggagcatccctatagtcctagccactcaggaggctaacgcaggaggatggcttgaacccaggagatcgagcttatagtgaactatgaccataacattgcagtcaagcctgggcaagcaagatcctgtctctgggaaaaaaaaaaaaaaagcaatcagtgaaagaagaaatcaca

SEQ ID NO: 865621 - DNA, 586 bp, Homo sapiens
aatagagaaaatcagtgaaattaagagttgactttttgtaaagtttagtaaaattaagaagcttcatcaggctgatcaagaataagagaaaatacaaataaccagtatcagaggaactaaaaaaaggatatcactatgaatcctactgacattaaaaatagtaagaaatcctcagggccaggcatgatggctcatgcctgtaatcacagcactttaggagactagagatttggggatcaattgagcccaggagttcaagaccagcctgcacaacacagtgtgaaccccgtctctatgaaaaatttaaaaaattttccaggcatggkggcaagcacttgtagtcccagctacttgggggactgaggtgggaggatcacttgagcccagcaagtcaagtctgcagtgagccatgattgtgccactgcactctggatgacagagtgagactctgtctcaaaaattgatgatgaagaagaaaaaggaggaagaggaggaggaggagaaggagaaggagaagaagaagaagaaatcattagaaatcgcttatgtcaataactttgacaatttagctgaaataaatgaattc

SEQ ID NO: 865622 - DNA, 608 bp, Homo sapiens
caaaatagaagaaattcctgaagcccaaacctggaggaacaagatgagatacaggcagttcagagctgaagcttgtcttctttcttattatctcttccgcctatcagagctaaatagcatctgaagccagtcttacatcatctaaggcctgagacggaaagatttttctctctggaatctgagcagatgaataggtttaacaatagtaacatcgagaagaatatattgcacttattcaaacaaaaacaggatgcttaaaaagtggtaattcaaaatctaaaaaagtttttcccacagaartagagagcaaagtggtggttaccaaaggctggggtggttgtggggagagggagttgggaagatgttgatcaaaggatacatatttacagttagacaggagatctattgcagttaggaggaataaggtcagatccatcgtgtaggacagtgactatagataatgatgatacatggtattcttggaaaatgccaagggagtggatgttaactgttcttaccgcaaacaaatggtggctatgtgaggtaatgcatttgttaattagctagacttaaccattccacaatatatatatactcaaaacatcata

SEQ ID NO: 865623 - DNA, 563 bp, Homo sapiens
gagttctggagattggttgcacaacagtctgaatatacttaacactactgaactgtacatttaaatggttaagagggtaaattttatgttatgtgtattttaccataatttaaaaaagtgtgacaaattccaggaaaactatgaagtaaatgataagtgmaaaacaggtttaagttaataagctttaaaaattaaaagaaatcccattaaaaaaatcaaatggggaaaataaatcaaatcataatgggaaaaaaatgggctggacacagccattaacctcaccccaacaaataagatgaaggaataaatttcaagattttgtcagaaatatggaacgactcaaaaattctacagccaatcaagcctttgtttacctgcaataacaaaaacaagccacttttaatatttttatttttaatttttgtgggtacatagtaggtgtatatatttgtggggtatatgggatattctgatgcaggcatgcaatatgtaatagtcacatcatggtaaatgggtacgcatcacctcaagcacttatcctttctttgtgttacaaacaatcc

SEQ ID NO: 865624 - DNA, 624 bp, Homo sapiens
atgaaacaaccaaaaatcaattaacaaaatgacaggaataatccctcacatatcaataacaaccaagaatgtaaacagattaaactttccacttaaaagatacagcctggctgaatggatttaaaaacgtgatccaactatactgttacccacaagaaactcatctcatctgtgaagaaacatgtagactgaaagtaaaaagacagaaaaagatattccatgcaaatgaaaaccaagaatgaacacaagtacctatacacatgtcagataaaatggactttaaattaaaacagtaaaaagagataaagagggtcattacataaygataaaggaatcaatccaggaagatgtaacaattctaaacatatacaccaaacacagaaacaactagatgtataatattattagacctaaaggaagagacagattccaatacaataatggttggtgacctcaacaccccactctcagcattgggaaaaaaattaacaaataaacattggatttaaactacactttacacaaaaatggacctaatagacatttagagaacatttcatccaactgctatagaatatacattctttgtatcagcacatggaacagttcccagaatagaccaca

SEQ ID NO: 865625 - DNA, 656 bp, Homo sapiens
taaaagctcaattagaattctatttttaaaaataatacatacagcttctgaaagaacatataagatgccaactaatcaataccctggataaaaacttccaaaatgactaataaataccctggataggaacttccatataaaaattcatataaatgtagccaacaaatgcagaacaagattwagcttttaacatatgctaaccttctttggaaattaaatattttacctggaaataacagtggttttttaaagttctatcttcagactttctccttggtttatagctctttttactttatataacacttacatgtttcagctgattaataacaactacgcaggaacattcaattccagaggcaattttaatgtagtcattgataaaatacaagctatcataataaaactgtttaatttacttaaaaaaggaatgcagttctaatcacatattcatctgttatacttttcttgtaaatttcccttcggaaaccaattttaaacttctaaaccacctcaatctgcacacttaacagtaaatcacggtaatatgtgtatgtattctagctctcttgaggcaaaacaagcatttaattttaacagacactactcatggggtgccaaagttaatcacacaaaaccagaagtatggctcaatg

SEQ ID NO: 865626 - DNA, 661 bp, Homo sapiens
ctgcctcgctccttcctgtcattctgatggacactccctgcctgctccttggaggttttccatgctataggtagattgttttcctcccaggtagcactgagcagtttgcctccctctgcttttcctttggttttctcaaggtgtcctctgaggactacctacaggaggggcacctgtgtgactgatggaaaggtagattcctgggcctcctccgctggagccactgaatcaaaatccctaggggtgaggccatgcaatcggattttcatgtcctggaaartttcagcaccattgttcctcccagccctgcatatgcaacaacaaagggatgctttaaatgtgtgtgggagtggttataaccggaacaagtgcttttgaggcaaggtggtctcctttaggcccctcaaaaatgcaattgaggagactagggctctgggaacttgggcatcctagtagagaccattacaaagtgatggagttggtgggaggagagagatgtctgactcccaggtaccctttgcccttcttccttcatacctctttctccaatgtgcaaggttaaaaaggcattgaatcttacgatgttcagatgtagttcctttaaaaaaagatcagtacctttttgagggctcaaaagatccatatctagttagtacatgaa

SEQ ID NO: 865627 - DNA, 661 bp, Homo sapiens
ctgcctcgctccttcctgtcattctgatggacactccctgcctgctccttggaggttttccatgctataggtagattgttttcctcccaggtagcactgagcagtttgcctccctctgcttttcctttggttttctcaaggtgtcctctgaggactacctacaggaggggcacctgtgtgactgatggaaaggtagattcctgggcctcctccgctggagccactgaatcaaaatccctaggggtgaggccatgcaatcggattttcatgtcctggaaagtttcagcaccattgttcctcccagccctgcatatgcaacaacaaagggatgctttaaatgtgtgtgggagtggttataaccggaacaagtgcttttgaggcaaggtggtctcctttaggcccctcaaaaatgcaattgaggagactagggctctgggaacttgggcatcctagtagagamcattacaaagtgatggagttggtgggaggagagagatgtctgactcccaggtaccctttgcccttcttccttcatacctctttctccaatgtgcaaggttaaaaaggcattgaatcttacgatgttcagatgtagttcctttaaaaaaagatcagtacctttttgagggctcaaaagatccatatctagttagtacatgaa

SEQ ID NO: 865628 - DNA, 551 bp, Homo sapiens
aaagcatgaatgtgcctattttaattttaatgaaagaaacagaaaatgtagaaattatttctatgggatgcaatattcatgctatagctgccatagactttctgggaatcctttttgcttttcttctttgagttgttgcaggatcgctagagcccaggagattgaggctgcactgagctgatattgtaccaytgcactctaccctaggcaacaaagacagacactgtctctaaaaataaataaaatattattcaagttacatataagtgtgaatttttgttcagtggcaattccatttagagtactttttatgtaccagcaaaaaatatataaactatgtttgattttagaaattaaaatatgataggctatttaattttatctgaaaaattacaacttgcatggaaacagacattataaagaggaccctggagactaagttacaggacacatactaattaattttaaaactcagttaaatgatgacagcacttcacataaacacataacaatataaagtgagaactgtaactgttctttctttcaatatt

SEQ ID NO: 865629 - DNA, 551 bp, Homo sapiens
aaagcatgaatgtgcctattttaattttaatgaaagaaacagaaaatgtagaaattatttctatgggatgcaatattcatgctatagctgccatagactttctgggaatcctttttgcttttcttctttgagttgttgcaggatcgctagagcccaggagattgaggctgcactgagctgatattgtaccactgcactctaccctaggcaacaaagacagacactgtctctaaaaataaataaaatattattcaagttacatataagtgtgaatttttgttcagtggcaattccatttagagtactttttatgtaccagcaaaaaatatataaactatgtttgattttagaaattaaaatatgataggctatttaattttatctgaaaaattacaacttgcatrgaaacagacattataaagaggaccctggagactaagttacaggacacatactaattaattttaaaactcagttaaatgatgacagcacttcacataaacacataacaatataaagtgagaactgtaactgttctttctttcaatatt

SEQ ID NO: 865630 - DNA, 655 bp, Homo sapiens
ttatctccatatagccttctctgaataaaaaccagtgaaaagtatttgtttatttctcacaaccactctccccccagttatctgtctgaatcttctttagagccattgaagtatttacaactaacagtaaaatatttgcatacttaaaaatatttgccttctatgttaaaaccccttgaaggtcactatcttgtttgtttcttctttatgttcctgtatgatgcttagtacaaaactgttaacatttttagtgttcaagaaacatttgttgaattaaattgaatcaccataaaatacattacacgcttaaaaacttcaattctccatctaatgtctgccaaataacccttagctcctttaatctcgactcaaagccttattttccaacttacaagttattttatttgctcttacttgaagcagaagaataaagaaagtggggagatgaggaagagaaatgcaagatgtaggttctatgaaggcacccaraaaagttaaatcatgcatgtgatctaaagaaaaaaatctgagagccgcagtcctcagaaggcttgtgcatgcttcttgaagtagcaagtggttttatccattatatgaaaagcatttatcacatggtcagcctttccatttttaaagaaaatatgtttttgagttt

SEQ ID NO: 865631 - DNA, 666 bp, Homo sapiens
aagattagattacatttataaaagagattgacaacacacacccgtgtgtgtgtgtgtgaatgtgttgtgagagatcaatttattttcaaaagaaataattaaggtgttaacagccttaggctcaccaaggtttccatggactatctagtattgctacctgtttaactttcctgtaaccagcggtggtaattggtgtgtttattggggatattcccttggctaaaccctactgaagcatctgttccttgtaaaatagtgtctgagctaatcagcctgggaagtcatctagccctgtcctatcacattttcatagattttatgtgaacattttgttggtaactcttattataattttttgttatattatttatatctgggtctatagggttttgaaagcctactttcattagaaggggtcctctgaaggactrttcattgatgcagaagacagttaattgctctgtccattttaatggaactcatgaaaaacatcctgcatacttactgtgtgctacataatttctgtgagaaataattaatttttaaagtttttaaaacataaatgataacttgtattacatttaacaaaagcattattttgccttcagtgatgtcctttgtagaaatatgaatttcaaaatacatcttgcatctggatgtctaaat

SEQ ID NO: 865632 - DNA, 644 bp, Homo sapiens
agagggagaaaaggaaggtaagaggaaaaaaaaaaaaggcagaagaagtatgagatcctggagcaattctaagaaagtttcagcaaagatgatggggagttctcaagccaaatgagttctcagtggagtccactgtctccaagaatgcgtcggccctggtatcctgcctcaatcagtcgtggcaggaaaagccggcaggatgtgtggtctcatcatgaaatgagtgacagatttcatagcacagtgcctggagttgttgatcacttacacacttcctgctgtttctgatctaagagacgtatgttcatgacagccatactttgtaacaacagaataaactcyaagttttattttttctaaaataatgtctgaaattgaatactaatatgcttatctctcatcatgttactctccgttttatgtcgactttgagatccctctcaacctggaggaaataagatatatcactatatttgtttctaatagttttaataatatttagggttagattgagcagggagaaaaaggacctcatatatgcatgcacataatacatatgcaaatacataatatatgcatatgttgtatataatatgtaatatatggtatattaatcatgatatatagtatatatgtttatatgt

SEQ ID NO: 865633 - DNA, 630 bp, Homo sapiens
actatgggcactcacacttctttattctgaacttacttgactccccaactgatgtcaacacaattgctcagtctttttaccttaaaaccttttattttcttatgttctctggcagctgtctcttctgcttttctttttccttctcaatattcttcctcattctttttattttctcttcattctttgttagtgccctttttttgaaactgatgtctaaagattggggcccmattctgattgatatttcaccttattactttcagagtaccctatactttttgcatataatgtatcagcttttgccattcatttttaggattaaaatcctcccttaccctcaagatagaaactccttgatgactgagaccatgtttgtttgtttgtttttcagaatctgtagcatttcctggcataccacaggcatccaataaattagtgaattatctaatgaatgaacttgatctgacgtgaagcaccctactcctagctcaattccctactgaccggctcctaatttcagaatttctccaatttttgctatttttcttatagtgacaatttcttctgcccaaggagagaaggaacgagtccagaaaagaatgtgtaatcgtgaaaaatgaaatctcacct

SEQ ID NO: 865634 - DNA, 631 bp, Homo sapiens
aatacacctgctcaattcagtagttttccacttgggtttctataacaatacctgagggtaatttattataaacaatttattgctcactgtggaggctagaaaatccaagatctagatagcatctagaatcaaagatagcaccttctagatgtgtcatcacatggaaaaatgggtgaaaatacgtctcttagacctgttttatttttgggacagggtctcactctgtcacccaagctggagtgcagtggtgcaatcttggctcactgcaacctccgcttcccaggttcaagtgattctcctgcctcagcctccagagtagctggaattatcagtgcccaccaccamgcctgactaaatttttgtatttttaatagagacggggtttcactatgttggccaggctggtctcgaacccctgaccttgtgatccacctgccttggcctcccacagtgctgggattataggcgtgagccaccacacctggcatcttagacctcttttataagggcacacatttcattcatgaggacacagctcttataatctaatcaacttccaaaggccccaattcttaataccattactttagggaataggtttaacatatatgaattttcagtggacatatat

SEQ ID NO: 865635 - DNA, 631 bp, Homo sapiens
aatacacctgctcaattcagtagttttccacttgggtttctataacaatacctgagggtaatttattataaacaatttattgctcactgtggaggctagaaaatccaagatctagatagcatctagaatcaaagatagcaccttctagatgtgtcatcacatggaaaaatgggtgaaaatacgtctcttagacctgttttatttttgggacagggtctcactctgtcacccaagctggagtgcagtggtgcaatcttggctcactgcaacctccgcttcccaggttcaagtgattctcctgcctcagcctccagagtagctggaattatcagtgcccaccaccacgcctgrctaaatttttgtatttttaatagagacggggtttcactatgttggccaggctggtctcgaacccctgaccttgtgatccacctgccttggcctcccacagtgctgggattataggcgtgagccaccacacctggcatcttagacctcttttataagggcacacatttcattcatgaggacacagctcttataatctaatcaacttccaaaggccccaattcttaataccattactttagggaataggtttaacatatatgaattttcagtggacatatat

SEQ ID NO: 865636 - DNA, 631 bp, Homo sapiens
aatacacctgctcaattcagtagttttccacttgggtttctataacaatacctgagggtaatttattataaacaatttattgctcactgtggaggctagaaaatccaagatctagatagcatctagaatcaaagatagcaccttctagatgtgtcatcacatggaaaaatgggtgaaaatacgtctcttagacctgttttatttttgggacagggtctcactctgtcacccaagctggagtgcagtggtgcaatcttggctcactgcaacctccgcttcccaggttcaagtgattctcctgcctcagcctccagagtagctggaattatcagtgcccaccaccacgcctgactaaatttttgtatttttaatagagacggggtttcactatgttggccaggctggtctcgaacccctgaccttgtgatccacctgccttggcctcccacagtgctgggattataggcgtgagycaccacacctggcatcttagacctcttttataagggcacacatttcattcatgaggacacagctcttataatctaatcaacttccaaaggccccaattcttaataccattactttagggaataggtttaacatatatgaattttcagtggacatatat

SEQ ID NO: 865637 - DNA, 631 bp, Homo sapiens
aatacacctgctcaattcagtagttttccacttgggtttctataacaatacctgagggtaatttattataaacaatttattgctcactgtggaggctagaaaatccaagatctagatagcatctagaatcaaagatagcaccttctagatgtgtcatcacatggaaaaatgggtgaaaatacgtctcttagacctgttttatttttgggacagggtctcactctgtcacccaagctggagtgcagtggtgcaatcttggctcactgcaacctccgcttcccaggttcaagtgattctcctgcctcagcctccagagtagctggaattatcagtgcccaccaccacgcctgactaaatttttgtatttttaatagagacggggtttcactatgttggccaggctggtctcgaacccctgaccttgtgatccacctgccttggcctcccacagtgctgggattataggcgtgagccaccacaccyggcatcttagacctcttttataagggcacacatttcattcatgaggacacagctcttataatctaatcaacttccaaaggccccaattcttaataccattactttagggaataggtttaacatatatgaattttcagtggacatatat

SEQ ID NO: 865638 - DNA, 517 bp, Homo sapiens
attttccttctgtgacatggatcctggatcctcacaatcctgatcaaccattctcacagtgcatacctactaggatggcctcatcatggaatacatgtaaatattgtcttagattagttttcctctgaaagcaacctgagtcaaagacttggtgcatatagtttatttgggaggtgatcccaggaagctcaagtgaagaagggtaaaaagtgcaagaagggagaaaagccagtaaagtatgtgttaatgagctgactactgctgtgggcaatggggctccattacactggggascctctgagaaaccatgtggaacacacctcagaatcattctgcaggtgctgggaggccgaggtgtgtatccacccatgctcattccccaactaggagaaaactacgacaggggcattaatgcccagcatttcttctttatgctttgctgcaaaataagcataaaggtgttgggaaaaaccctctggcaaagcagagagatgtaggcttttgaggtagagagctg

SEQ ID NO: 865639 - DNA, 626 bp, Homo sapiens
ttagacatgtgtgcatttgttcatcaactcaatgcctgtctggaacaaatattttactttctagttgtctctttttacatgattgctcacagttatttttcctagatgtgcaggtatcctaaacttacacagtcatctttcaacacagatatcaaatgtcccttgtttcaaccagagacaagctatccagatacttgagtcttactcatattgtccctggcagagcacagagcactgatctaaggcacagtatgacaaatgtgagcctttcacttaggtagtcatgtaacattcatccattcgatcattcattcaatcaagcagtcatttaactgatatttattgagcaagaacctaatatgggccaagtattactctcagctctcacaaaatagcartgaataaaataaagttcttggttttgtgcaacttacttattagaaagtagattgaggggagacatacatatcttttaggtgttaataaattatatgatgaaaaattaggtaggacaagtagaaagaaatcactgggaagagaacttgcctcaataggtagagtggcaggaaaagcccctaacactaaggtgtcatttttgtaaataaaatgtgggagtggcccatgca

SEQ ID NO: 865640 - DNA, 645 bp, Homo sapiens
cggggatggagggcatggcaaagaatccgttttttcctggtgtgatctttatgccagaggacaggaaaaggtataaactcagtcaaccttagcattgcagtgtgctggcttcaggaatggagcatgaagaggaagccctgggcctctcttctgtcccacaatgtttctggtcaaagggaaatatgaagcaacaagtcatgattgcagaaaggagagatggtggctcagccccagggctagcaagtgtgaagaaagtaggaacttctccctagggctcacctggtggaagtctcaggctctcacgataacttttaatgtcaactgcatggtttctcctctctgtaggatgccctcttggctcttgcaatccccatccctctggaaccccttccccagamcacaggattccacttgaatgctgtcctgattcactgcagtggttggagactagtgttttgatttgtgtcctagacatcccagaacacattttattttaactatagagacatcagggtacctggtactgcacaccaggtatctacagtcacactttttcaatgggcataaactcttaacctcattacacaaagcctctctgccacatgaaaacctgggtccactattctaagtaacttccttcaggag

SEQ ID NO: 865641 - DNA, 689 bp, Homo sapiens
gaattatgttaggtgtttttgtgtctatattcaggaaatatagagttttttaaaataataattttgcctggtgttattatttgagtaatggcgacctcataaaatgagctaggaagtatggcttcctccttggtattcagaaagaatttctggagaaatggcattattccttaagtattttgtagaaatcaccagtcaatccatctgagcctggaattttgtgagaaggttgtaatcacaaatatccataaagctcttcagcttttctatttcttcttgtgttctttgtttcaagcaatgtgttattttcattttctggcctaaagtcttttataatttctccatagtatctcattagtgtttgtagggtctctagtattgtttcrtttttcattcttgatattggcaaatatgtcttttttttaacctgataactctagctaagcatctaacaaagttattaatctttttagtaagacagctttggattttattaatcttttattgtttacatattttccactttcttgatttttactctcaattttatttttttcttctacttaatttgggtttaatattttcttttttgtaataaggaaggtccagatttttcaatttagattttttctgttttcgaatataaacactttaagctaaaaaatttcctcttataaactactttagct

SEQ ID NO: 865642 - DNA, 522 bp, Homo sapiens
tatctgtaatttccaaaatactgtagtatttttgcattaaatggtaaattatgttttaaataaataagaaatgagaaaaaagcatttaatagtttctcacattgttctttccagtccttctcatttatttgtgtagatttgaatttctaactgatattattattatgatgactttgacctaaagaactttctttaacatgactgtgcttcargtttgttggtgataaatgatctcttactctttttgactgaaaacgacttctttatttaaacttaatttttaagaatatttttgctggatattgaattttagtttgacagttttatcctgtttctcacttaaagtgttgtttgattgttcctatcttgcattgcttctgatgaaaatgtagttcttatttttacctttgatgccatgtaattaatgtgtttttaattctagctgttttatttaaggtcttcttatttcaccggcttataactacaggtataccttattttattgtgctttgctttattgca

SEQ ID NO: 865643 - DNA, 564 bp, Homo sapiens
aggaaaagttcttgaaggaaattaaaagtgctcctctagtgaatatgcaaattatgagggtgatgcaaccttattactgatatgtagaaagtttgaatggtctggttagaagaccaaaccagccacaatattctcttaagccaaaacctaatccagagcaaggccctaactctcttcagttctacaaagkctgtgagaggtgagagctgcaaaagaaaagtgtaaagccagcagaggttggttcatggggtttaaggaaagaagccacctttttttttttgagacacagttttgctattcttgcccaggctggagtgcaatgtcgtgatctcagctcactgaaacctccgcctcccgggttcaagcgattctcttgcttcagcctcccaagtagctgcgattacaggcatgtgccaccatgcctggctacttttgtatttttagtggagatggggtttctccatgttggtcaggctggtctcgaactcctgacctcaggtgatctgcctgcctcggcctcccaaagtgctgggattataggcatgagcaccacacctggccaaa

SEQ ID NO: 865644 - DNA, 611 bp, Homo sapiens
aggaatttaactcagttatatttcaccgcatgttctccctcccaatttttatttttatattaagtctatcggaatctttataactttaaataatatacttacatctcaatttcttggcccgtcaccttttacagtatgtctaacttacaaagtgtaagttcaggaaaatacacaaggcagacttccttctgccttgtaatggacactgtggtgtggcgtgctgcccagatccctttcaggaccaaggccttgattccccaastttggggagtgctggcagctaagaggtctcagctgagtccctctccaagaattgcttttggctgaagggagttacctggagattatgtgagagattatgccacctcccagagggcagcccatatccagtgactggtcagtatgggttatgtgttataatggtgtagccagcctattggcctcaatggagcaactttgaagagccatctgcctcctcccaaacttcttgcagcattgactggggccttgtatctactcactcctcccctgcctggtcttggctccctcaactctcacaggtgatgtttctgagaacactctccaacaacctccctatacccaagtcttag

SEQ ID NO: 865645 - DNA, 615 bp, Homo sapiens
catggatacaaaaatcctctaggagccgtaacttcctgtcaatcctaaaatttaataaggcaaatgtttggcttcgagccatactgggaataaggtaaggccttttgaaaaagccacgatgcccaggtgagggttgaattgatcactgagaaccctacaaatgcgctcatggcaaggctgggaataccctacacttaccctctcggtcatttacttcagagtctgcggggcattctaatccgcgttgtcatttgctttgtgccacattcctaagaggtaggcagggcaggttttatcatcctctgtttacagatgaagataatgaaggtcacatagctcaagtgagctacccagggccacagacatacaaagtggtagaaccagaatttaaatcttggttggtctgactccaagtgtagtatttgtttcactttttctttctttctttctttcttttttttttttaactgtttctscattctgggttctgaccaggtgaccttgaatcataaagattcagggcctgtcttgagctgctcaatatggaaggcatcttttctctaaagagtgtgagctccctgccaagcagcacaggcgcttaataggctttcagag

SEQ ID NO: 865646 - DNA, 625 bp, Homo sapiens
gcaatcaacacagatgacttctgtgaccaaatgtggggagttttccccatacaccgagcaagcaatcagttctgcagcagacaccagctgagtatcctccaattcagttctgaccctgtctgcctggagatagcatcagctcctacaggttgagagctcaatcccacaagactccaaccaacttcagatgccagtcgcaagtccaggcatccagaacttctggccactggcttcaagttaggttcccacgaccctctctttggattggacaaatgtgctagaatggctcaaagaactcagggaaacacttacatttactggcttattataaaggatattgcaagggatacrgatgagatgcatagggtgaggtacgggggaggggtgcagagcttccattccctccttgggtgtgtcatcctccaggaatcttcttgtgttcagctattcagaaactccccaaaccatgtcctcttgagctttttatggagacttcattggagagccatgattgacaatcatgtagaaatgcagctggacaaaaagggtccaattacatgatctagtatgagtcacatgatctaatactaacaggctaagcagagaaacccagcaagacctgtct

SEQ ID NO: 865647 - DNA, 645 bp, Homo sapiens
tccatggcctttccccacccctccctgaataccagacacacagacacacacagaattaatttgagccacacaaagccagtcttgtcacactccaggctaggaaatgacaggctgcattatctgtgcccagctattcttttgttggcactaacaggaaggcttcctactatctctgccatctctccctatctacagccccaggcggcagccccagcarccccagcaggtgcctccatcctgaatcaggatgggcccctcccctgttcagacagttttgttcctagaaggaagtctcacatccaagctgcacagggctccaggaggaaggtctcctccttactgggggcagttagtactgggaggatccagagaaaatggatggcagctcatacctggtgtccctgggctgataagaggagcctgatccccaactttagaggaggctccagcctgctgggagcatcctgaccaatcttataggacaagtgtggtcctgaggctgtttctcagcctctcagtaaaacagcctctctcctcactccctctttcccagccactacagagagcccctcccaactcccttcagtgagaagagtctgcaaagatcccacctctgctctatgcctgtcctttccagcatcataa

SEQ ID NO: 865648 - DNA, 602 bp, Homo sapiens
gctgaccccaaacctctaagaaggctgaactggaatgggtcagtaatttcactccagcatagagaggtcagaagagccccaaaggagaagaaagaaagaagagaaaatagaggtcgaaggggggaagaaggaagagatagagagggatctcccaccatcccagacctaagcaacagaccaggtggagttttcttctcctgttcctttggatgcccccacccctacacatttttcatattaccctttccagaatctggaatgaaaattccacccrtgaaacagctcacccaaccccacttcccaccaaccaccacaatgggactctctctgctcatagatcacctgcccatattaacaaatatcaatcactatatttcacataggcagggaaataagcaagctctagaccctggagacaaagaaggaaggatggaattgctgagagaaagaagagtgaagtgcctaaagttcacttttgaggtttataaaacatttttaagactgacatctgacctctgaaggctctgcaatccctttttcaggtttatttccccaggtgctgaagaagtaagagggaaaaggtccaaacatcagttttaggg

SEQ ID NO: 865649 - DNA, 584 bp, Homo sapiens
aagtttagttggctatgtcaatgagacattcaggaggatatgcaaagtaagctttaattagcaatagactagtgaagtcagacagcaagtatgaatctaggagtcacacaatattgatgctacttaaaatcacaggaagcaagatctatgtagtgagactatagaaaagagaagcaaaaggcccagagcacaaatagagaaaaaggaatcaacaaagaatgctaaaaaggagtaacaggagaaggagcagaaacgaaagaatgcaaaatgacagaaaccaatagaaaagagagtccggaaaaaaaatgctaaatgatccagagagrcctaataaagtgactgtttaaagtgtttcttacatttggtagttggtgagtttgtagactttggcatgacagtcacagtttcagttatgagttatgggatgaaaatagattggagcaggttgaagatcgatgggatatgagaaaatgaagacagcatgtgcagacaactctttctagaagctttgctgtgaaagaagaaagagaaatagggagttaggctaagtgaaagaagccagacccaaaagttgcattctagat

SEQ ID NO: 865650 - DNA, 665 bp, Homo sapiens
tttttattcttttaaatatgtcttttgatgaacacaaggtcttcattttaaggcagttgaatttatcaatcttttcctttatgaactcttggactaagcctgtcttctagctattgttttccgcctatgtctccaactgtccccccatctttgatcccccctattgtctccatataaacatcttttctatgctctggacacatgacttcaactgctcactcgatggctccacctccatatcccacagtcagtccaacaccagtttatcccaaaatgaactcatccctccaagttcaccttccgccaccctaccacccctarcttgtatttcctaactccatgactgacacaactatccaccaatcacaaagccagtgtcttgtgaatttgccctgactgctctttctcttataaggatccagtttttctgattctacaatctaaaccttgccccactctgtcttctcctctacatctccagtgccagaatgtaagttccatgagaccagggaccttgtccagcttgttcattaccacaatatcagtaagggatggtgcttaacagcatgaattttgcagcccaattacctgattcaaatcctgactccatcaattattaggtatctaagtaagtggaagttatatgacctcttctcccgcagttt

SEQ ID NO: 865651 - DNA, 621 bp, Homo sapiens
gatggaagaagcctgaagcagagaacaaggtcttggggaaacctagaagccatgggggtgggaaaaagaaaagtatctgttggaaaatagaatgatagaaagatagggaaaaaactaaggaagccaaaggaagagatatttcaagaagaaataggtggccaaagctgcccaatgctaaacaaaacaaaacaaaacaaaacaaaacccacaaggagattcataaaagaaagaggctgggtacagtagttcatgcctgtaataccttgggaggccaaggtaggaggattgtttgaaaccaatagttcaagaycagtctgggcaacatagtgagacccctccacccccacccccacacacaaaaattatctgggcatggtggcacatgcctatagccccagctactccagaagctgaggtgggatgatcacttgaaccccggagttcaaggctgcagtgagctctgatcgcaccacttcactccagtctgggtgatacagtgagacctggtctcaaaaaaaaaaaaaaaaaaaaaaaaaaaaatttaaaaagccagacctgaggaggttaaagagaggctagttactgagttactgggcaatggaaacattgggtggggttttt

SEQ ID NO: 865652 - DNA, 621 bp, Homo sapiens
gatggaagaagcctgaagcagagaacaaggtcttggggaaacctagaagccatgggggtgggaaaaagaaaagtatctgttggaaaatagaatgatagaaagatagggaaaaaactaaggaagccaaaggaagagatatttcaagaagaaataggtggccaaagctgcccaatgctaaacaaaacaaaacaaaacaaaacaaaacccacaaggagattcataaaagaaagaggctgggtacagtagttcatgcctgtaataccttgggaggccaaggtaggaggattgtttgaaaccaatagttcaagatcagtctgggcaacatagtgagacccctccacccccacccccacacacaaaaattatctgggcatggtggyacatgcctatagccccagctactccagaagctgaggtgggatgatcacttgaaccccggagttcaaggctgcagtgagctctgatcgcaccacttcactccagtctgggtgatacagtgagacctggtctcaaaaaaaaaaaaaaaaaaaaaaaaaaaaatttaaaaagccagacctgaggaggttaaagagaggctagttactgagttactgggcaatggaaacattgggtggggttttt

SEQ ID NO: 865653 - DNA, 719 bp, Homo sapiens
cgtgcagcatcttagccatgccttatcctggaagaacgaggcagctcacgtgggcatgggggtaatgagcagggaggcaattacagactcttaggttctcaccgctaacagtgtggtcagtggaccagcagcagcatcacgtgggagcccgttagaaatgcagactctcaggtccttcagccacagccctgatgaatcagaatcaccgtttcaaggaggtctcaggcgggccgtttcaggttccgagctcgctttgaggctctgtggatgttttgcagcatattcaattttgttttgttcaaaggtcacagtgacaactaagtttgcagcgggattcaaatccgagctccacagtgtaataaatgtgagatcttagayaagtgcttaacctctctgagttaatcatctatcaaataatgaaaagcactataagccaactcttcaactttcaggacattgttcacccgaaacccgaaatccaataactgtgcactgtcttctaacacagccataatttacctagatgtactgcttagaaatgtctcactctcatggtgaccttagttctatctgtccctagagagccgcaagaccattttgtctggaggttctctgctcactggacaatagggacagtggaattgtcctcatccttgtgcttgagtctttggaaaccaaatgaccccagaaatgtcatgaaagagatttttaggtcccag

SEQ ID NO: 865654 - DNA, 634 bp, Homo sapiens
gtgggaggggcacccaggacactgaagaaatctcctggtcagaacaccttgtatgaacaggactcctagggaaaggggtttcctagtccggctaggggttggaggtagtgctacaccagggacctcccttggtttgggtgaccatcgctatgactctgttttccaaaccaaacctgggacatgtaaaatgacaagtgcaggtgtctttacaggaagaacaagctgaaacacagataactctcaacataggaaaggagtctatcccacagccttttctaatcttyttatttaaaaacacgaattacaggtaattttcctaatgaaacacatttaaaaggcatcttttgtggtctctgtatagagtgtatgggggacctgttcatgtctacatcctagccactgttagtttcaacataccactctatttcaaaacttcccttttctggcaaagatccaaaacttactaaaattcttttgtcttctttcccatggtcaggcccagcagttggaattctttttgaggccattttcccaagtctttatcacgtcacaagacttgctgtgtacatggcaaaaggaaggcccaacagagccacattgggaagtgggccctggggagtctgctgagacactg

SEQ ID NO: 865655 - DNA, 622 bp, Homo sapiens
caagatacaaatgcctggttaaaatggatcaaatattctgtgcacacattaagcaaaagcaattgttatgcttgtgcacgcggccagccagaggcccaaattgtccctttcccactcagatggtcttctagttgaccaggcataaactgtatagtagctcttttccaagaccccacrgcctagggtaataaatcctgctgagctctctctctgctatttcttaaagtccaacaccctgtgggtcaggccccaagagccatccagcctccatctcctagcgtcaattttacctcgtgtctctcacgacaaggggaaaacttggcatttcttggagacttaatgggatacagtgagcttaagcctttccaagatcttaccagtcagtcttcccttgttcatctttgagcaaatatatggtggtattgtggtggacccttactggacactctgccaagtaactggaacggcacttgcactgttgtccagttggctatccctttcactctggcatttcatcgactagaaaaagaaaaaccacaacactgtaaaataagagaagccccttatgtgtcttttgactttcaagtttatttagacacaactggagtcccacgggtggtac

SEQ ID NO: 865656 - DNA, 622 bp, Homo sapiens
caagatacaaatgcctggttaaaatggatcaaatattctgtgcacacattaagcaaaagcaattgttatgcttgtgcacgcggccagccagaggcccaaattgtccctttcccactcagatggtcttctagttgaccaggcataaactgtatagtagctcttttccaagaccccacagcctagggtaataaatcctgctgagctctctctctgctatttcttaaagtccaacaccctgtgggtcaggccccaagagccatccagcctccatctcctagcgtcaattttacctcgtgtctctcacgacaaggggaaaacttggcatttcttggagacytaatgggatacagtgagcttaagcctttccaagatcttaccagtcagtcttcccttgttcatctttgagcaaatatatggtggtattgtggtggacccttactggacactctgccaagtaactggaacggcacttgcactgttgtccagttggctatccctttcactctggcatttcatcgactagaaaaagaaaaaccacaacactgtaaaataagagaagccccttatgtgtcttttgactttcaagtttatttagacacaactggagtcccacgggtggtac

SEQ ID NO: 865657 - DNA, 622 bp, Homo sapiens
caagatacaaatgcctggttaaaatggatcaaatattctgtgcacacattaagcaaaagcaattgttatgcttgtgcacgcggccagccagaggcccaaattgtccctttcccactcagatggtcttctagttgaccaggcataaactgtatagtagctcttttccaagaccccacagcctagggtaataaatcctgctgagctctctctctgctatttcttaaagtccaacaccctgtgggtcaggccccaagagccatccagcctccatctcctagcgtcaattttacctcgtgtctctcacgacaaggggaaaacttggcatttcttggagacttaatggsatacagtgagcttaagcctttccaagatcttaccagtcagtcttcccttgttcatctttgagcaaatatatggtggtattgtggtggacccttactggacactctgccaagtaactggaacggcacttgcactgttgtccagttggctatccctttcactctggcatttcatcgactagaaaaagaaaaaccacaacactgtaaaataagagaagccccttatgtgtcttttgactttcaagtttatttagacacaactggagtcccacgggtggtac

SEQ ID NO: 865658 - DNA, 622 bp, Homo sapiens
caagatacaaatgcctggttaaaatggatcaaatattctgtgcacacattaagcaaaagcaattgttatgcttgtgcacgcggccagccagaggcccaaattgtccctttcccactcagatggtcttctagttgaccaggcataaactgtatagtagctcttttccaagaccccacagcctagggtaataaatcctgctgagctctctctctgctatttcttaaagtccaacaccctgtgggtcaggccccaagagccatccagcctccatctcctagcgtcaattttacctcgtgtctctcacgacaaggggaaaacttggcatttcttggagacttaatgggatacagtgagcttaagcctttccaagatcttaccagtcagtctkcccttgttcatctttgagcaaatatatggtggtattgtggtggacccttactggacactctgccaagtaactggaacggcacttgcactgttgtccagttggctatccctttcactctggcatttcatcgactagaaaaagaaaaaccacaacactgtaaaataagagaagccccttatgtgtcttttgactttcaagtttatttagacacaactggagtcccacgggtggtac

SEQ ID NO: 865659 - DNA, 682 bp, Homo sapiens
ttccaccatgcctggttaattttacatttttagtagcgagggggtttctccatttttgtcaggctggtctcaaactcctgacctcaggtgatccacccacctcagcctcccatagtgctgtgattatgggtgtgagccaccccacctggcaggggtcrttattttgtgagttactgtaagggcttgagttggttggcctccaacctggaggtggcagctttaagacagcatcagctgtggtaatatgggggtatgcaagcttgccaccaggtcacctggataagtattcatgtttttcaggcaatgagtgggaacatagagctcccaagagagtatgtcttttgtcctcagctaccagggtgggtagagtaagaccatcaggtgagggcagggttggacatgtctgagctcagaccctccttgggtggggcttgctgcagctgctgtggggttgggagtatggttctcaggccaatggagttatgtttccagggggattatggctgcctctgctgtatcatataggtcaggatggaagtgaaggaaagccagcagtgacaggcctcactcagctcccatgaagccagcaaggccagtttcactcacaccctacccaccaacagcatcaagtttatatccagttggtgagcagtactgagatcttgccccaggctataagcct

SEQ ID NO: 865660 - DNA, 682 bp, Homo sapiens
ttccaccatgcctggttaattttacatttttagtagcgagggggtttctccatttttgtcaggctggtctcaaactcctgacctcaggtgatccacccacctcagcctcccatagtgctgtgattatgggtgtgagccaccccacctggcaggggtcattattttgtgagttactgtaagggcttgagttggttggcctccaacctggaggtggcagctttaagacagcatcagctgtggtaatatgggggtatgcaagcttgccaccaggtcacctggataagtattcatgtttttcaggcaatgagtgggaacatagagctcccaagagagtatgtcttttgtcytcagctaccagggtgggtagagtaagaccatcaggtgagggcagggttggacatgtctgagctcagaccctccttgggtggggcttgctgcagctgctgtggggttgggagtatggttctcaggccaatggagttatgtttccagggggattatggctgcctctgctgtatcatataggtcaggatggaagtgaaggaaagccagcagtgacaggcctcactcagctcccatgaagccagcaaggccagtttcactcacaccctacccaccaacagcatcaagtttatatccagttggtgagcagtactgagatcttgccccaggctataagcct

SEQ ID NO: 865661 - DNA, 682 bp, Homo sapiens
ttccaccatgcctggttaattttacatttttagtagcgagggggtttctccatttttgtcaggctggtctcaaactcctgacctcaggtgatccacccacctcagcctcccatagtgctgtgattatgggtgtgagccaccccacctggcaggggtcattattttgtgagttactgtaagggcttgagttggttggcctccaacctggaggtggcagctttaagacagcatcagctgtggtaatatgggggtatgcaagcttgccaccaggtcacctggataagtattcatgtttttcaggcaatgagtgggaacatagagctcccaagagagtatgtcttttgtcctcagctaccagggtgggtagagtaagrccatcaggtgagggcagggttggacatgtctgagctcagaccctccttgggtggggcttgctgcagctgctgtggggttgggagtatggttctcaggccaatggagttatgtttccagggggattatggctgcctctgctgtatcatataggtcaggatggaagtgaaggaaagccagcagtgacaggcctcactcagctcccatgaagccagcaaggccagtttcactcacaccctacccaccaacagcatcaagtttatatccagttggtgagcagtactgagatcttgccccaggctataagcct

SEQ ID NO: 865662 - DNA, 622 bp, Homo sapiens
ggcaaccactaacccgctttctgtttccaaggatttgcctattttgggcatttgatacaaatggattcataaagtatatgatgctttttgtatagcttttttcttttcttttcttttgagatggattctcacactatcttctgggctggagtgcaatggcacgatctcggctaactgcaacctctgcttcctgggttcaagtgattctgctgcctcarcctcctgagtatctggaattacaggcacacaccacaacacctggctaattttttgtatttttagtaaagacggggtttcactatgttggccagactggtctcaaactcctgacctcatgatccacctgccttagcctcccaaagtgctgggattacaggcgtgagccaccgcacctggccttgtatagtttttttcatcaagcataatgtctttaatatccatccatgttgtgtcccatattagtacatcattcctttttctggctgaatactattgccttgtatactacatcacatttgtcaatctagtcctccatggataggcatttacactggtttcactttttggctataacaaatgtttctatggacatgcatatacaagtttttgtgtggacctattt

SEQ ID NO: 865663 - DNA, 622 bp, Homo sapiens
ggcaaccactaacccgctttctgtttccaaggatttgcctattttgggcatttgatacaaatggattcataaagtatatgatgctttttgtatagcttttttcttttcttttcttttgagatggattctcacactatcttctgggctggagtgcaatggcacgatctcggctaactgcaacctctgcttcctgggttcaagtgattctgctgcctcaacctcctgagtatctggaattacaggcacacaccacaacacctggctaattttttgtatttttagtaaagacggggtttcactatgttggccagactggtctcaaactcctgacctcatgatccacctgccttagcctcccaaagtgctgggattacaggcgtgagccaccgcacctrgccttgtatagtttttttcatcaagcataatgtctttaatatccatccatgttgtgtcccatattagtacatcattcctttttctggctgaatactattgccttgtatactacatcacatttgtcaatctagtcctccatggataggcatttacactggtttcactttttggctataacaaatgtttctatggacatgcatatacaagtttttgtgtggacctattt

SEQ ID NO: 865664 - DNA, 700 bp, Homo sapiens
tgcccaagtgccagaaataggcagggtcggaacatggaaccttcaggtctggataccccgagcctagtgggtttgatgcgtctgggcggtgctagctttgggaccatcattgaattctgctgtttgagggtgggggtcatgaaggaccttcactgccacactccctgggaggccctgatttggagggggagcccactgtggaccctgtctctgcagtgaaagtttctcagttcaagcctctctcacctgagcccaggccgttccccttagcagtgccatcctgtgtcttcccagtcttctacgtggccacgatttcctgggttcctccaccccctgcaattggagtgaatattcgcctcttcctgcagaagacaccctgggggtctctagccagagcctcactttcctttggtacattaaaatatgctaaatgaaaaataatgagcatgtaggaagtaataacaggaatcacctaattaaattaggaaacagacatcacatcgctgtaatmtgaaaattgatattaatagaaacggtcccagaattgttatgctaaaagttcctaggggcggggaaattaaaaaggagagcagaatagaaaattgggacaatcatgtccaataagagtgagacttatgttttaaaaggaactacagtaacatgctaaaaatagaagaggagatctaatgaagtcatggac

SEQ ID NO: 865665 - DNA, 700 bp, Homo sapiens
tgcccaagtgccagaaataggcagggtcggaacatggaaccttcaggtctggataccccgagcctagtgggtttgatgcgtctgggcggtgctagctttgggaccatcattgaattctgctgtttgagggtgggggtcatgaaggaccttcactgccacactccctgggaggccctgatttggagggggagcccactgtggaccctgtctctgcagtgaaagtttctcagttcaagcctctctcacctgagcccaggccgttccccttagcagtgccatcctgtgtcttcccagtcttctacgtggccacgatttcctgggttcctccaccccctgcaattggagtgaatattcgcctcttcctgcagaagacaccctgggggtctctagccagagcctcactttcctttggtacattaaaatatgctaaatgaaaaataatgagcatgtaggaagtaataacaggaatcacctaattaaattaggaaacagacatcacatcgctgtaatctgaaaattgatattaatagaaacggtcccagaattgttatgmtaaaagttcctaggggcggggaaattaaaaaggagagcagaatagaaaattgggacaatcatgtccaataagagtgagacttatgttttaaaaggaactacagtaacatgctaaaaatagaagaggagatctaatgaagtcatggac

SEQ ID NO: 865666 - DNA, 604 bp, Homo sapiens
cgcacagttactcacatgcaaatatttgcacccactgacaagcttctgttgctgtagcaaaggaagaatcaattcaagcaaagctttcctgcgagtgggcactctctccagtatctacctggagatgcgggtgtgggtgcccgtgggtgtaaatggaggaggatttctgacttggcagcctgcttcccacagtgatggggtgtggcaggcawggccaccctggctccctttctgcccccctagggcaccatggcagccacactcagcaagggtccctttggagaggggcctggcctggcccagcaagggactctgcagattcgccttccctgctgcctctgtgtcacagcgatgtccccagtactaggagagggacccaagagtcctgagagcattcaaggaggtggcatccaggggtgtggtatgggcaatgatgatggtgtgagcactcagtgcctactgtgtaccaggcactgtgttttacatgctttaccaatatcctcatgccagagcctcgctgtacccgtctctattttatagatgaaaaaactgaagcacagagaggcaaagtcacttgcccaaggtcacacagccaggaagtatc

SEQ ID NO: 865667 - DNA, 616 bp, Homo sapiens
gtcagctctgcatcccagcatgcttctggttgccttgacaactcaacaggttaaacttcttttctgggcatcagtgtctgctcaggcaggaggtgacagaacccctggaggtgtgcagatcttcagcaggcagatgactcagagctcaggctgaccttcaccttgctgggctagctggccttgggttgtccctggctgcctgcatgagcttacgatcatgtccaaccagctgcctctgcctcctatccctcctattcatccatccattcatccatctgtttatccagtaagcagtcattgagcacctgctgtgtgcctggccycatgctagcttctccaggcaggtacatgagttcctggccctctctccaggtcaaacaggaataagctgggaggtcaggaagtccatagaggctttacacctggcatatgtgtgggtccatttagaaagatactctcaacacatgcaatgttgcaagcctgtcacccaacgtctaccagacccttcttatagatgcgtcatttgcaaaaacaaaaacagtctgttttctttcacttaacactgcagggtggacctcttaacctctttccatatcgagacggatttttttcaccc

SEQ ID NO: 865668 - DNA, 609 bp, Homo sapiens
aagcagtcattgagcacctgctgtgtgcctggccccatgctagcttctccaggcaggtacatgagttcctggccctctctccaggtcaaacaggaataagctgggaggtcaggaagtccatagaggctttacacctggcatatgtgtgggtccatttagaaagatactctcaacacatgcaatgttgcaagcctgtcacccaacgtctaccagacccttcttatagatgcgtcatttgcaaaaacaaaaacagtctgttttctttcacttaacactgcagggtggacctcttaacctctttccatatcgagacggatttttttcacccatttcagtggctttcagtgttcgttgtaaagatgcaccattagtttatttagccagctcctttctggttcatatttaaactgtttgtagttttatggctattcctgaattatttctgtttcctcygatgtcatctttttctgtttgcttcttttgatgtctcttgtggtggaggctgtcctcagatgcttgatgagccctagttacccattcatagttgagagtggagcaataaacatgtgattgattttgttttgtttttgagacagggtctcactcggt

SEQ ID NO: 865669 - DNA, 582 bp, Homo sapiens
atggaaactacatactacctactgaccacaaagttctggaaacgtggagtggatgaatcagactatcaaaaatagtttaggtaaagtgtgtcaagaaacaggattaaagtgggtacaaggtctccctatggtattaagattagatgtaccccttctaaaagaacaggatattccccttatgaaatattataccataggccccctcccatactacagggactccgaggcactcctcgagggctaggtgaaattgagttacagagatagctacaggctttaggaaaaattacacaaacaatttcagcctgggtaaatgagargtgccctgttagcttattcttcccagtttaccctttctctccaggtgatcgggtgtggatcaaggattggaacgtagcccccttgcggccatggtggaaaagaccccagaccatcatcttgaccactcctacagttgtaaaggtagagggaatcccagcctggatccaccacagccatgtaaaacctgcagcacctgagacctgggaagcaagaccaagcccagacaacccttgcaaagtgactctgaagaagacgacaaac

SEQ ID NO: 865670 - DNA, 629 bp, Homo sapiens
gtatatctaccaaaaattctgctgggatttttgtaggaattttgttaaacctgtatatcaatttgggaagaatatctttactgtattgaatcctctagctcatgaacatggtatgcctctccatttacttaggtcttccttgatttctttcataarcattttgtagtttttggcacagaagtcttctacatattttgttagacttatacctaagtacttgggttttttaaagcaaatgtaaatggtatttttaccattttgcatttttaatttctgatgtccacatgtttgttgctattatttagaaatataattgatttaatatgtttatcttataaactctactattagtttagaattttttgtagattacttgtggttttagctatagacagacaattgtgtcatcaggacagttttatatctttccttccaacatgtcttttatttccttttcttgcctcattgcactggctagaacttctagcactatattgaaaaagggcagtgagagtggacatccttgccttgtttttgatcttagggaagaaacattcagtttttcaccattaagtatagtgttagctgtaggctatttgtagatgctctttatcaaattgaggaagttt

SEQ ID NO: 865671 - DNA, 672 bp, Homo sapiens; identical to SEQ ID NO: 864242

SEQ ID NO: 865672 - DNA, 672 bp, Homo sapiens; identical to SEQ ID NO: 864243

SEQ ID NO: 865673 - DNA, 672 bp, Homo sapiens; identical to SEQ ID NO: 864244

SEQ ID NO: 865674 - DNA, 672 bp, Homo sapiens; identical to SEQ ID NO: 864245

SEQ ID NO: 865675 - DNA, 598 bp, Homo sapiens
taaagaaagaccaagagactcatttttccatctgcccactttaaattgtcacttctcctcccttttgatggatttaaaagtaaaatccttatcagaaatgactatcagatggagtttcgtatcaaaaaccatggtctcctaaagggaggagacaaacttcagaaaaaatataaagcgacagaagtttggagatgatctgtattcaaagcacctgatttcatcagatttctcattagaaacaagtgtccccatcaatgtaggataaagcattcctctcacaccaaatgaatacaaaatgtcamggtgattagcatagacgagcttgtgagtggcatataacagaaataaccttgataaggttcctatctccaaatttggagatacgcaccgaagagatttatcaaataccaaacacatttcacaaaaagcatttagaggaataaaggttatatttggaagaaatggacaggaatgtgcattctgaacctcagatatgtatacctaactctctaatagacatccacgtggatgccactcagcaaaacctacctaacttcattacttcttctaccctcaatgcctcaaccttgaatctcgt

SEQ ID NO: 865676 - DNA, 570 bp, Homo sapiens
ctatcccatcaaaaatattcatgatggtggtggagccagaaatctctttgcactgctccatttgctttcagtcacagtgatttactgaatgccaatcataaggcactctgctaagagtatggaattcagaagcgaatcaatcaagcttcctgcctgcacagaactgaatgtcatacagaagacagacaaaaaaactaattatgagggaatgccatgggaacacatgataaaagcaacagactttaaggattctaacattctaaggttcttctaggattctgttattaaatagattcttcttcttcttcttcttttttttttttttagacagagtcttgsactgtcacccaggctggagtgcaatggcgcgatctcagctcactgcaaccttcgcctcctgggttcaagggactctcctgcctcagccccctgagtagctgggattacaggcgcgtgccaccatgactgactgatttttgtatctttagtagagatggggtttcaccatgttggccaggctggtctcgaactcctgacctcaagtgatctgcctgcctaggccacccaaaa

SEQ ID NO: 865677 - DNA, 590 bp, Homo sapiens
gcatcttctgtgattttgtttttcttaatctagtttcagaatcttaacagcttctgtaatcttccaaagattctacaggactttcttatatgacttgcttagagcaaatgaaaataaaattatatttctctggcttctcacaaattcttggaggttgtccatatttcctcaaatgatgggccaccggaaaggtaatctcatgttacggtgatttactgaatcttttatttatttatttattgagacgtagtctcgctctgtcgcccaggctggagtgcagtggcgcaatcttggctcactgcaacctctgcctctcgggttcaagagattttcttgcctcagcctcccgagtagctgggattacaggcacgtgccaccacacccggctaatttttttatattttcggtagagatgggkttgcaccatgttggccaggctggtcttgaactcctgacctcaagtggtctgcctgcttcagcctcccaaagtactgggattgcaggcatgagctaccaagcccagccagaatcttgagtctaattttggcaacccccagtgcatttcatggaagggatagttagagctaaca

SEQ ID NO: 865678 - DNA, 608 bp, Homo sapiens
cccaaggccacataaatagcttgtaaatggcagacctaggactctgaactctgttctacctgactcttttttttgagatggagtctaactctgttgccctggctggagtgcagtggcacaatctcagctccctgcaacctctgcctcccaggttcaagtaattctcctgcctcagccacccgagtagctgggtttacaggcacattccaccacgcccagctgatttttgtatttttagtagaaacagggttttgccasgttggccaggctggtctcgaactcctgacctcaagtgatctgactgcctcagcctcccaaagtgctgggagtacaggcataagccaccacaccctgtccaccggactctcatctgttgacattttgctgcttttgttctgagtttgggtctttcacaaaccttacctgcaggatttctaaagctcatgatgctgcaaggtgggcgatatttagacccgctttatagatgaagaaacaaaggcatttggccaaagtcacatggtttgttgacagagccagtactgaaacccatttggtatgattcccagctccatgattactatcattattcttattatttcaaatctgta

SEQ ID NO: 865679 - DNA, 642 bp, Homo sapiens
tttgaggggaggaacactcaggtgtagcacaactttccaggtactcaaagccccaggggagagaaacaataatacaaattcaaaggatagctaaatacacagagacctgtcattaaagcagaatcagacatgaactcagatgaaaacctcaaatcccccagagtcccccagtctctggcaagcctgatacattgaatgtctgtgccttcctgtggkagatttctttcgttcttcctactgcccaaattaattgttttagagtcccctgctatgacgggtattctgaaaagacccaatccactgatttgtaaattttagctaatgcacctcttcaaagactattccaatcttaaaaaatatcacaggatgagaaaaagccactgggcaagaagttatcagaaatttgtccccttactctctgtgttctatggtgacagaaggggatggggtgaagaagttgctataatttttgtgcttattcaactttgttaaagcttttctgtctcagtgtagaacatctcatccctgcagcatgggagataccctaaagcctcctaaacctcgcaagtgttcattgtataatttgaagctaccgtagggcagcaataggaggggggtgttctggctactgtaacatccgga

SEQ ID NO: 865680 - DNA, 692 bp, Homo sapiens
gtccatatcccccaggagaacacagtctagtagataatgaaagcatttatcacctataaaaagtggatgccaggctggaaaaaaatgccttttccacaatgggaaaaagggatttcatagacaagtgtggttccctgkgtctgtgaattggtgccaggttagatccagtagaatcaacctgagactttactaaacacaaacagtagagattccttgacattacctcctagaaattctcattcagtagtactgagatgaggtccagcaatccatatctttgacaacctctttacacgtagctaggtttgggaatcacaattgagccttgctcctatagactattatgttgaaagaccaatggatttatggtcagattgaccagagttcaaatctcactctactcatgtgtgcagttagaaaacagtccacaagactgccctcactgtgatgccaactacagcgtttggaaatccctaagaccaaccttccttctgataccaattgcaatttccgagatctgcaatactactctcaggataattttccagaaagactcaaaggactctgaacgttgttatactcacaattatgatttgtcatcgtgaaaggatacggattaaaactagacaagggaagagatgcacagcccagagcgcaagcaagttccaaatgtggagtttccagttgtcctc

SEQ ID NO: 865681 - DNA, 635 bp, Homo sapiens
aaatacttttggggaataaaaggatgagaaaaagaatttaaaaaggaaacaagcatttattgaatactccttattgtctagcactgtgaaggcattttggcatggattatctcatttattcctcaaaataagtcttagaagtgattatcctcatttccactgtgtggataaaaaaaaaattgagtccaaactcagccatctgccttcatctccatacttctaacagtggmagtattgggcctttctatacacagtcaactgggagagagggtctctgtcttcaaggggcttatgctccttctgtgggatttgtggcaggaaaaccatccatacttgagatgaagcctcgcaccttcacctctgagctgtgaccttggacaagttgctttatttctctgaaccccatttcctatctgtaaattcaggataatacaatgtgacctgcaggaatgttgtgagaattgttaactaaatatgtgtgtgaaacagaggatactagaggctggaaaggctgggtggaagggagggaagggtgagaagagatttgcaaaaggatacaaaattgcagctagataggaagaataagttctagtgttctgtagcactgtaggataactatagttgacaataatata

SEQ ID NO: 865682 - DNA, 604 bp, Homo sapiens
gaattccttggggagatggatttgagagtctccttccatctcctttcttggcaccctgtgatcattaaactctttctctgctgcaaaccctggtgtctcagtgcgttggtctgttactatgcagcaggcatatataccttttggtccattgactgctgataactcatagctgactgcctccctagaaagagtgttgccccatccaaggtcatgtctcttcattctgtgcaacaactggtcagagttgaggcacacaagactgcctcccttgcttccatttggaacatctttgagggtccaccccagttccagtgcccccacataagaccacctgcagcttctattgtcactgcagttttccctacttcctccctttgtccagcttgcttccttcccatccttatatctgttgttctcaaaaccactccccaacaaaatccctgcatgtgaatctctgctyagaatcttttcccctgggagcctgactcacaacataagtcttacaaggttctccatgacctggctccagctcaatgcccagtacaaagtggatgttcagtgagtaccttggattgattggctcattggctggttgcttggttgg

SEQ ID NO: 865683 - DNA, 592 bp, Homo sapiens
tcaccagtgcagcccaactggagaatcctgcattaactatccagagtcattcttaagaatatgagctgtgaaatcagactcttggggatttgatatctagctttggggatagccaaaaaatgggctttggggtttacgtctgctgctgtcatttagtagccacrtgaccttaggccaagccttgctaaggctcagtttcttcaactgctaagtgggtatagagacttcatagggctatcctgaggttggaataaagtaagtgcccagagctgcttcttggtgtcaggttcagctcctaggtctcgaagaattcccaaagagcatccggatcttgaaagatggctgctgtgttgagaaggatttacagatcatacccaagggtgtcaggaacagagttaccattgattagcaatgtgtaccataaatatgggtgtcttagtctgttctcatgctgctaataaagacataccccaaaactgggcaatttctaaaggaaaaaggtttaatggactcacaatttcacatggctggggagacctcgcaatcgtgggggaaagcaaaggagaagcaaaggtgcccgtcttccatggtg

SEQ ID NO: 865684 - DNA, 592 bp, Homo sapiens
tcaccagtgcagcccaactggagaatcctgcattaactatccagagtcattcttaagaatatgagctgtgaaatcagactcttggggatttgatatctagctttggggatagccaaaaaatgggctttggggtttacgtctgctgctgtcatttagtagccacatgaccttaggccaagccttgctaaggctcagtttcttcaactgctaagtgggtatagagacttcatagggctatcctgaggttggaataaagtaagtgcccagagctgcttcttggtgtcaggttcagctcctaggtctcgaagaattcccaaagarcatccggatcttgaaagatggctgctgtgttgagaaggatttacagatcatacccaagggtgtcaggaacagagttaccattgattagcaatgtgtaccataaatatgggtgtcttagtctgttctcatgctgctaataaagacataccccaaaactgggcaatttctaaaggaaaaaggtttaatggactcacaatttcacatggctggggagacctcgcaatcgtgggggaaagcaaaggagaagcaaaggtgcccgtcttccatggtg

SEQ ID NO: 865685 - DNA, 660 bp, Homo sapiens
aggattacaacttattagatacagacacgaacctagacattgccaagatctgagagggcagatagtttcctttcttatgaatgaaaccaacttcattcttttcataatagctgctatgttggggaggattcagagatcagacccaggttcatcaggagagtgcctaactgattagtgatgtctgtcatggatgtaggcatggggaggggaggctgatgcttgattgattagcgatgtctgtcatggatgtaggtatggggaggagaggcctatgcttgattgattaatgatgtctgctatggatttaggcatgaggaggggaggtatgtgcatgactgattagtgatgtctgtcatggatgtaggcataaggggtggcttgttgtctgattagtgatgtctgtcacagatgtaagaatggggaggggaggcatgtgcctsattgattagtgatgtctgtcgtggttataggcatgggaaggggaggcaggggcaacctgctctttcctccctaggcttggctgcatagtaaatagtcagtggaaactgtatttttattgctggttatttaagtcactgttaagtcaaagtaagaaatatttctttgtttgaaggaggctagaaataagtgaagaaagaaaagtggctgatttcttttaaa

SEQ ID NO: 865686 - DNA, 623 bp, Homo sapiens
ctgttttattcaaaattctaaagggaaattattctgccacaaaaattctcatctgttaagtagcccttaaatgactttttttttttgcctttgcaaaaacaaataaaaccattttatttgtgtgtgagttagaacattgaaatgttgagcctagatttttaaatgtgtcgtgatttttgcttctcttgctcagtcctcttttctacttctttctgccttttttatttctaattttattttattattttttagtcttttattttaagttcagtggtacatatgcaggtttstaacataggtaaacttgtgtcatgggggttcattgtacagattatttcatcacccaggtattaagcctagtacctacccactagttatttttcttcatcctctccctccttccaccctccaccctcagatagggcccattgtgtgttgtttccctaccttttcttaggaaccagaagccccaggcattggaagtggtcaaggcatttttttctttgacccctgggaaggtcttttcttagtacacaagcaacaagaacttcagacagagagtatatgatgctgcattacaacctgaaccattggagttctgtcaaaagaatattgaagagatc

SEQ ID NO: 865687 - DNA, 579 bp, Homo sapiens
cagcagtgtttaccgtagttctacaaactcactttcgaagcgtgtttgtcttccatgttacctcgttagacatcaagttcctagtaaacatttaggatgagggtaagggtaccacaaggttgtgggcacagtttttgagtttgttttgtgttaaaagggcctgtggaggattgtgtttgtgttctgggactgccataacaaagtagcacagacttctctcacatttctagaggcttaaagtctgaaatcaagatgtctgctgggccatgctccctgtgagggctctaagaaggaaacctacctggcttgtccacagcctccgttggttgtcagcatccttggcattccttggtgtgtattgtcattgmcccaccttcttcctccatcacctggctccttctctgtgtgtctgagtctatgtgtctccaaatctccctctctttataaggacaccattccctggatttagggcccatcctgagccagtatgacctcatcttaactaattatatcggcaaggaccctatttccaaataaggtcacttctgagtatctgggtaaacataaattttcagagga

SEQ ID NO: 865688 - DNA, 667 bp, Homo sapiens
ttcccagcaagctatttctagccacccttcacctccaccaaccttaacctcacaatcacttctggatgttcttgtagcctacactgtggattgttctaggctctttaattttctgttttccacgaaagtctgtaagcttgatgaggataaaagccatgattgccttgcttaccctcactgtgaatgaatgaatggagtggtgcagaaactcaagagcatcatgtacatatggaacrtgctctatggtttttaatgaaaatatgtggcagtattggctgggctgcagtgcatacagtggagtattattcagctataaaaagaaggaaatactgtgttcgtaaaaacatggtgtgaacccaggagacagagcttgcagtgagccgagatcgtgccactacactccagcctgggcaacagagtgagactctgtctcaaaaacaaacaaaaacaaacaaaaataaacaaacaaacacatgggtaaacctgggggacaccgtgctaagtgagataagccaggcacagaatgacaaataccgcatgatctcactgatatatggaatctaaaaagctgaactcttggaagcagagagtagaaaggtggttggcaaggtttgggggtgggggaaatggagagctgttggtcaaaacacacaaatttcagtaaaaa

SEQ ID NO: 865689 - DNA, 667 bp, Homo sapiens
ttcccagcaagctatttctagccacccttcacctccaccaaccttaacctcacaatcacttctggatgttcttgtagcctacactgtggattgttctaggctctttaattttctgttttccacgaaagtctgtaagcttgatgaggataaaagccatgattgccttgcttaccctcactgtgaatgaatgaatggagtggtgcagaaactcaagagcatcatgtacatatggaacatgctctatggtttttaatgaaaatatgtggcagtattggctgggctgcagtgcatacagtggagtattattcagctataaaaagarggaaatactgtgttcgtaaaaacatggtgtgaacccaggagacagagcttgcagtgagccgagatcgtgccactacactccagcctgggcaacagagtgagactctgtctcaaaaacaaacaaaaacaaacaaaaataaacaaacaaacacatgggtaaacctgggggacaccgtgctaagtgagataagccaggcacagaatgacaaataccgcatgatctcactgatatatggaatctaaaaagctgaactcttggaagcagagagtagaaaggtggttggcaaggtttgggggtgggggaaatggagagctgttggtcaaaacacacaaatttcagtaaaaa

SEQ ID NO: 865690 - DNA, 667 bp, Homo sapiens
ttcccagcaagctatttctagccacccttcacctccaccaaccttaacctcacaatcacttctggatgttcttgtagcctacactgtggattgttctaggctctttaattttctgttttccacgaaagtctgtaagcttgatgaggataaaagccatgattgccttgcttaccctcactgtgaatgaatgaatggagtggtgcagaaactcaagagcatcatgtacatatggaacatgctctatggtttttaatgaaaatatgtggcagtattggctgggctgcagtgcatacagtggagtattattcagctataaaaagaaggaaatactgtgttcgtaaaaacatggtgtgaacccaggagacagagcttgcagtgagccgagrtcgtgccactacactccagcctgggcaacagagtgagactctgtctcaaaaacaaacaaaaacaaacaaaaataaacaaacaaacacatgggtaaacctgggggacaccgtgctaagtgagataagccaggcacagaatgacaaataccgcatgatctcactgatatatggaatctaaaaagctgaactcttggaagcagagagtagaaaggtggttggcaaggtttgggggtgggggaaatggagagctgttggtcaaaacacacaaatttcagtaaaaa

SEQ ID NO: 865691 - DNA, 457 bp, Homo sapiens
tttagtgactgccctgttggattttggacttgcatggggcctgtagtccctttgttttggctaatttctcccatttggaatgggtgtatttacccaatgcctctacctccattgtatctaggaagtaactaacttgcttttggttttacaggctcataggcagaaaggacttgccttgtctcagatgaggctttggacttggacttttgagttaatgctggaatgggtcaagactttgrgggactgttgggaaggcatgattgcattttgaaagtgaggacatgaaatttgggaggggccaggggcagaatgatatggtttgactttgtccccacccacatctcatcttgaactgtagttcccataatccccatgtgtcgtaggaggaactcagtgggaggtaattaaatcatgggggtggttacctccatgctgttctcatgatagtgagtgagtt

SEQ ID NO: 865692 - DNA, 442 bp, Homo sapiens
aatgttctctgttgaaaaagctggcttcaatttattgagcaagatgctggtgttatcatctaacataaaacctatcttataataaagtgttgacacatgtaatgagtactgtactgaaaaatggtggtatgtatatggtttgtactgattatgtatcgcttttataccatcaaaaagttgaaaaatcataaagttgaatcatcctaaaatgggtacattctgtactatgtttccaaggcttcrgaagtgttgcatacacattcctagccagctgatagtgctaggagccaacagtagtctcccccgggggccaagaggagggcgaaatctctactatggtatatgatgttctcgtgggccaagtatgagggtgatatttcattgttggcactgggtttctggaatccatcctcttcaccagggagatttaatgaaccaaatg

SEQ ID NO: 865693 - DNA, 698 bp, Homo sapiens
gaaacacttctgaatttctattgtggtcatacttatgtataactacacatgtgatatcatcacatggaactacacacacacacacacacacacacacacacacacacacacacacacgagtacttgtatacctggcaaaatatgatcttgtatatatgtacttgtatacctggcaaaatacaatctgtaatacaatacatgtatattgtatatatgtacttgtatacctggcaaaatacaatctgcagattgtaccattatcagttttctagttttgatattgtactgtatttatataagttaacattgagagaggcwagtgaggggtgtctaaaaccttcctgtaaattccttagtaacttcttgtgaatttataattatttcaaaatttaaaatgtttttaaaaagccatatttgaaaaattttgaaatcattctgctactgtgcaaaacagatttgatgatgtcaatattattttaaaagttgtatgcattgaggagaaatgataatatacaattcattgctctacatgcaagtaacttgagcaactaagaaacaaagtaggacagagttttgtaatccttacctaggcactactttatagccacatgaaatattaacaggtagaagggtaaaatacataaatcattggtgcaggaaggatatttaaaatacttaatatcttttatggtctggac

SEQ ID NO: 865694 - DNA, 698 bp, Homo sapiens
gaaacacttctgaatttctattgtggtcatacttatgtataactacacatgtgatatcatcacatggaactacacacacacacacacacacacacacacacacacacacacacacacgagtacttgtatacctggcaaaatatgatcttgtatatatgtacttgtatacctggcaaaatacaatctgtaatacaatacatgtatattgtatatatgtacttgtatacctggcaaaatacaatctgcagattgtaccattatcagttttctagttttgatattgtactgtatttatataagttaacattgagagaggcaagtgaggggtgtctaaaaccttcctgtaaattccttagtaacttcttgtgaatttataattatttcaaaatttaaaatgtttttaaaaagccatatttgaaaaattttgaaatcattctgctactgtgcaaaacagatttgatgatgtcaatattattttaaaagttgtatgcattgaggagaaatgataakatacaattcattgctctacatgcaagtaacttgagcaactaagaaacaaagtaggacagagttttgtaatccttacctaggcactactttatagccacatgaaatattaacaggtagaagggtaaaatacataaatcattggtgcaggaaggatatttaaaatacttaatatcttttatggtctggac

SEQ ID NO: 865695 - DNA, 606 bp, Homo sapiens
aaatgtggataaaccagacactttatagggtggtgatgatgtgaagtaggcatcacagcaaattggttaagaacaaggaccatggagacagtctacatcgcgtgaaagtctgaatcttgtcagtttttttgactactgtattctcagggtttagaatgattcccaggacataatacatgaccaataaacctctgttgaataaacagaatcaaagagccctgrctatgtctgactttttggcaagtatttacctctaaaagtctcagtttcataaagtaaggattaagtgaatggagtaaaaacgcttaacagatgaactattgttgttaaggtaacgcgaatacacccttaaaaaggtgggtccttgatatgtaataactcatttgaattcacatattctcatttgaatttacaattaatatactgcctatttcaaagataatgttaatgaagatgatgagtcaaagagattactggttttacacagtattatacatttaaaagtctcctgaaaattatgaaacataagacattattactattttaaagcatgtttggaagagtgtgttcacttgaaatttaaaattatgctgcataaaaatattt

SEQ ID NO: 865696 - DNA, 606 bp, Homo sapiens
aaatgtggataaaccagacactttatagggtggtgatgatgtgaagtaggcatcacagcaaattggttaagaacaaggaccatggagacagtctacatcgcgtgaaagtctgaatcttgtcagtttttttgactactgtattctcagggtttagaatgattcccaggacataatacatgaccaataaacctctgttgaataaacagaatcaaagagccctggctatgtctgactttttggcaagtakttacctctaaaagtctcagtttcataaagtaaggattaagtgaatggagtaaaaacgcttaacagatgaactattgttgttaaggtaacgcgaatacacccttaaaaaggtgggtccttgatatgtaataactcatttgaattcacatattctcatttgaatttacaattaatatactgcctatttcaaagataatgttaatgaagatgatgagtcaaagagattactggttttacacagtattatacatttaaaagtctcctgaaaattatgaaacataagacattattactattttaaagcatgtttggaagagtgtgttcacttgaaatttaaaattatgctgcataaaaatattt

SEQ ID NO: 865697 - DNA, 606 bp, Homo sapiens
aaatgtggataaaccagacactttatagggtggtgatgatgtgaagtaggcatcacagcaaattggttaagaacaaggaccatggagacagtctacatcgcgtgaaagtctgaatcttgtcagtttttttgactactgtattctcagggtttagaatgattcccaggacataatacatgaccaataaacctctgttgaataaacagaatcaaagagccctggctatgtctgactttttggcaagtatttacctctaaaagtctcagtttcataaagtaaggattaagtgaatggagtaaaaacgcttaacagatgaactattgttgttaaggtaacgcgaatacayccttaaaaaggtgggtccttgatatgtaataactcatttgaattcacatattctcatttgaatttacaattaatatactgcctatttcaaagataatgttaatgaagatgatgagtcaaagagattactggttttacacagtattatacatttaaaagtctcctgaaaattatgaaacataagacattattactattttaaagcatgtttggaagagtgtgttcacttgaaatttaaaattatgctgcataaaaatattt

SEQ ID NO: 865698 - DNA, 614 bp, Homo sapiens
gtacctctgctaccaccaccactatcattattgctaactggcattcctacttgcagcacaatatttgctataagatcgttaggtagcataccagatttaaacataattgaacatgtaagatccactcttacatggttcaccaggtaacatcaaaacataatactctaaattaaagaaaagcataagaaagatagacaagcctgcaggtctaattatcttttctattaattctaaaaattctaaattatagcttaatctaatcgtggcctktctttaagccttggaaaattaaacaattgactgtgttgattagtatattgccaacagctgtgtccccctgtgtcctctcccttagtagaaagaaatggtccttttatcacacccgttgtcaaagatcctcatctctctctctctctctctctctctacctagaagcagtataatttaggattaggagtataacctatggactcaaatagaggcttaaagctgttttgtgccacatagtagctatgtaagttgaagcatgttataacgtctataaaacagggataataacagtgcctaccacacagagttgttctgaagctgttaaatgggatgttgcttacttt

SEQ ID NO: 865699 - DNA, 603 bp, Homo sapiens
aaaatcacccgattcctcacagcatccatccaatctggagaagagtcctactgccttgagctctcttcaggatcacctactataaagccaaatcctaaatcttcctactgagatggctcatagtgctccatggagtgctctcttcctcatttctcaataacgagttaataaaatccatctttctttgactataggtgtgttcctggtgaccttggctgaagggcattgccatcttgttactgatgtgacacataaaaaagacyacctggatttttatcaaatgcaaaacctactatatatttcctatgacctataaaacacaagtataatatgtcaatgtattaataggatgatgcaaatttggacattaaatcctttaataagggcctatttgtgtgtttgttaccatgaactgaaaatcattttctgatggaaatcttgcttttggcttacctagagtttcacccttaacttctactatgatctgagtatttgtccctcctatccttgatagtgttaggaggtgaggcctttgggaaatgattgggttttcagggtgaagcccacgtaagtaagattagtgcctttacaaaagaggcccaa

SEQ ID NO: 865700 - DNA, 680 bp, Homo sapiens
acttgaacagacaggctttgctaagttctgccaagttattatcattaaatcataccccctttgtccaattacatttttccacgactctcccatttccatcaaacttagcataaaaatacatagtttggccgggcatggtggctcatgtgggtaatcccagcactttgggaagctgcggtgtgaggggtgtgagaatggcttgagcccaggagttagagaccagcctgggcaagatggtgaaacckcatgtctacaaattaaaacaaaaaaattaaaatcagccaggtaaggcagcgcagcctcagaaggctgaggtgagagggttacttgagtccaggaggttgaggctgcagtgaactatgatcactgcactccagtctaggtgacagagtgaggcactgtcagaaataaataaataaataaataaataaataaataaataaatgaatgatagaggacggttggatggatggatagatagatagatagatagacagatagatagatagatagatagataggtttaactacttcttgggactttgtttccttatgaaggcttccatgtcacataaaactcaaccagggaccctaagagggtggaggaatatctttcattccttttagtacaaacaggcccaagtacatatcaaatttagtttcatatgtagatgataaaa

SEQ ID NO: 865701 - DNA, 648 bp, Homo sapiens
tccagaggaaaagaacatccttatctctgaagacacagggtcacagagaggaacttgaacagacaggctttgctaagttctgccaagttattatcattaaatcataccccctttgtccaattacatttttccacgactctcccatttccatcaaacttagcataaaaatacatagtttggccgggcatggtggctcatgtgggtaatcccagcactttgggaagctgcggtgtgaggggtgtgagaatggcttgagcccaggagttagagaccagcctgggcaagatggtgaaacctcatgtctacaaattaaaacaaaaaaattaaaatcagccaggtaaggcagcgcagcctcagmaggctgaggtgagagggttacttgagtccaggaggttgaggctgcagtgaactatgatcactgcactccagtctaggtgacagagtgaggcactgtcagaaataaataaataaataaataaataaataaataaataaatgaatgatagaggacggttggatggatggatagatagatagatagatagacagatagatagatagatagatagataggtttaactacttcttgggactttgtttccttatgaaggcttccatgtcacataaaactcaaccagggaccctaag

SEQ ID NO: 865702 - DNA, 682 bp, Homo sapiens
tttctattgcatttatatattttacaacctccactcttaccactaaccactactgggtggactgaagtctcaaatactaaaagcacataataatgcaaaatgttttgagaagagtattgcaataaaaatcagtaaagctattaccatgtttaaaaaagaaaatctagtaactattaaaggccttaaattcaatatatgttagcatatctggaaagctcttcaatcataatgccctatatttgcttaccagtttatatttttccaaaaartatatatatatatgatagcttatattatgcctcacaggaagccagagtaagaggcacagaagataataatcttgtcacatgaaacatggataaatcgaatctcagtgagattgaatgacttacaggggtcaacttatggttaggggcaaaacagggtgggacataaatgtcactcttctgatacctttgcccagggccatgtgcactttgctgacaaacttgtcccaatagtcaccaaacatactggtttgggaagtgtgtgaagtctcctgttggcaccaacatgggctgatttcacaggcttcaggactggattcatccgtttacttatgggaactgcatatcttcatatcctgaagttgtgatgacaactctaaaatgtttgcaatggaagcttaaaagaaccttgtagg

SEQ ID NO: 865703 - DNA, 669 bp, Homo sapiens
caaacatactggtttgggaagtgtgtgaagtctcctgttggcaccaacatgggctgatttcacaggcttcaggactggattcatccgtttacttatgggaactgcatatcttcatatcctgaagttgtgatgacaactctaaaatgtttgcaatggaagcttaaaagaaccttgtaggaagatgcagactaaaatgggagcacttgagggaatgaggagagtatrtgaagcaataccctctctatctataggtgagaagagccctggggatgaagttgtctagaaccaatgctaagaacaagcaaccgttttgctcactattgtctaagtatcttcacatattcccatttccatgcccttctcaagctttccccttacagaaacacactcccttctctttcctgtgtgaaagccacacttcctcttttggaatcctccacttaaagaattgtgggtttgccgccgggcatggtggctcacgcctgtaatcccagcactttgggaggctgaggcgggcagatcatgaggtcaggagatcaagaccatcctggctaacatggtgaaaccccgtctctactaaaaataaaaaaaaaaattagctgggcatggtggcaggtgcctgtagtcccagctactcaggaggctgaggcagaagaatggtgttaatcg

SEQ ID NO: 865704 - DNA, 669 bp, Homo sapiens
caaacatactggtttgggaagtgtgtgaagtctcctgttggcaccaacatgggctgatttcacaggcttcaggactggattcatccgtttacttatgggaactgcatatcttcatatcctgaagttgtgatgacaactctaaaatgtttgcaatggaagcttaaaagaaccttgtaggaagatgcagactaaaatgggagcacttgagggaatgaggagagtatgtgaagcaataccctctctatctataggtgagaasagccctggggatgaagttgtctagaaccaatgctaagaacaagcaaccgttttgctcactattgtctaagtatcttcacatattcccatttccatgcccttctcaagctttccccttacagaaacacactcccttctctttcctgtgtgaaagccacacttcctcttttggaatcctccacttaaagaattgtgggtttgccgccgggcatggtggctcacgcctgtaatcccagcactttgggaggctgaggcgggcagatcatgaggtcaggagatcaagaccatcctggctaacatggtgaaaccccgtctctactaaaaataaaaaaaaaaattagctgggcatggtggcaggtgcctgtagtcccagctactcaggaggctgaggcagaagaatggtgttaatcg

SEQ ID NO: 865705 - DNA, 669 bp, Homo sapiens
caaacatactggtttgggaagtgtgtgaagtctcctgttggcaccaacatgggctgatttcacaggcttcaggactggattcatccgtttacttatgggaactgcatatcttcatatcctgaagttgtgatgacaactctaaaatgtttgcaatggaagcttaaaagaaccttgtaggaagatgcagactaaaatgggagcacttgagggaatgaggagagtatgtgaagcaataccctctctatctataggtgagaagagccctggggatgaagttgtctagaaccaatgytaagaacaagcaaccgttttgctcactattgtctaagtatcttcacatattcccatttccatgcccttctcaagctttccccttacagaaacacactcccttctctttcctgtgtgaaagccacacttcctcttttggaatcctccacttaaagaattgtgggtttgccgccgggcatggtggctcacgcctgtaatcccagcactttgggaggctgaggcgggcagatcatgaggtcaggagatcaagaccatcctggctaacatggtgaaaccccgtctctactaaaaataaaaaaaaaaattagctgggcatggtggcaggtgcctgtagtcccagctactcaggaggctgaggcagaagaatggtgttaatcg

SEQ ID NO: 865706 - DNA, 669 bp, Homo sapiens
caaacatactggtttgggaagtgtgtgaagtctcctgttggcaccaacatgggctgatttcacaggcttcaggactggattcatccgtttacttatgggaactgcatatcttcatatcctgaagttgtgatgacaactctaaaatgtttgcaatggaagcttaaaagaaccttgtaggaagatgcagactaaaatgggagcacttgagggaatgaggagagtatgtgaagcaataccctctctatctataggtgagaagagccctggggatgaagttgtctagaaccaatgctaagaacaagcaaccgttttgctcactattgtctaagtatcttcacatattcccatttccatgmccttctcaagctttccccttacagaaacacactcccttctctttcctgtgtgaaagccacacttcctcttttggaatcctccacttaaagaattgtgggtttgccgccgggcatggtggctcacgcctgtaatcccagcactttgggaggctgaggcgggcagatcatgaggtcaggagatcaagaccatcctggctaacatggtgaaaccccgtctctactaaaaataaaaaaaaaaattagctgggcatggtggcaggtgcctgtagtcccagctactcaggaggctgaggcagaagaatggtgttaatcg

SEQ ID NO: 865707 - DNA, 593 bp, Homo sapiens
acacctggaatggagaagatgcaccatatatataaatacacatatatgtgaagttatatatatataaatatatatgaagttatatatgtatatataaatctatataatatataataaataataatataaatgaagttcagagctcagaagattgaagattggtctgagaaagaaataaaatttggagggttttcaacattttgatactatctattttttaaaaatacatttagttgtatatatttaaggtatacaatatgatattataaaagatacatatatatgtatatatatatagtaaaatgttgactatagtggaacaagttaacatatccatcatctcatgtagttacccatttttgccttccccacttctcayggcaagagcagctataatctactcatttagcaaaaatcctgaatataatacaccattattaactgtagtcctcttgttgttagatcttttgacttgttcatcatacatgttttctattttgtctcctttacccacatcttccattttctacgctccaaaactctgtcattttattctccatctctttatattaggcctttaaaaaaagtgtcca

SEQ ID NO: 865708 - DNA, 614 bp, Homo sapiens
ttcacatgcaattaatattgatatttccgagttgtaaaattttgggctgttccttggttttctaaatattttcctttacatctaaatccaggtggataagaaacacaggaaccctcttctcttccctacaccccacctctagtcatccttctactggattctcaagagtagccactctkaagtgtagttttccttctattttgatgcacaaggtatctctgagtctttgcctaggctgctgtctcttcttaaaccaccctttgagcagtgctacctgcatccctcatctccatcatctggctggctcctaatagctatctgaagtcagctttgcccttcaaaccccaagaccacccgaagacccaaacccagtgttctttcttcacattcccatggcaaacattgtgggctcttatgccacactgtttccattgtgggctcttatgccacactgtttccattgtgtttctaactccatgtattatatctgtttacgatccctcttctccaactagatagtgacctcctagaaaatatctcatttaccttcgtagttacaatgcctagtacaaaataagtatacttaaagtacacaataaaggctcataaagatg

SEQ ID NO: 865709 - DNA, 650 bp, Homo sapiens
cgatgacaaacccaacgagaagaattgcagggtcttgacaatgcttctccctgcatttggcgcaggtaatcaggaaacatgaatttcctatttccagccaggcacttcttggaataggtgcaggatcatctacaggcgcagctgctgctgtacttgaggggtcccagaacccagacacatctctttgagcagccaaatgagtatcttcccaaccactaccacctcattcacttttttttcagcctgaaatattaaagtaagtccaaaatgtctttaaaattttaaacttaattwtaccccttggaatctatgctttggaaaactggtatttttttcctttaaataaaccaatatctggaatatgtacatacatacatgcatatgtatatattgaaatatgcttagaaaaccactttactatagcttgcagcctagtatgaaaaagaaaaatccactgttcactctttcatatgcttttaaaaagcttttcagaatatacctagtgagctgttgtctgttcagtgacgcatacgcttgtttgtgaagcaaatcttatttcttctcttaacagtaacctatgggtgcgtggagagatgaaaatgatttctacctttttatccttacattgtgtgctcttttaaaggtgaatc

SEQ ID NO: 865710 - DNA, 655 bp, Homo sapiens
gtaagatggtgctgagggaagtggaactgaggctcacagaaatactggcattgtgaggtgatatatgcttatagtcccagctacttgggaggatgaagtgggaggattgcttgtgcccaagcctgggagatcgaggctgcagtgaatccatgatcatgccactgcactccagcctgggtgacagaaaaaccctggttcaaaaagaaaaacagaaaaaaaaaatactggccttgggacatcctaagagtattcactctctgaatttttatctaaacattctttcctaactgccacacaacrcaatgggcaagctccctcactgccttccgattaagggaatgaaagctccttgaggaccagtgctgtatatcctgccatcctcacagttagctaagtgtccttgcatttggcagagacttagtacctatttatggagccaaagaaaaagaaagagaaaatggtaatatgctatttgttttcaagttggttttctctctcaattctaagatttccactgcaaaagaatctctaaacatttttgttctccacaatttgccattaccttttctattatacatacacaaagtgagactatatgctgtctttccccatttttgctgccccttccctgatacatctttattaggtttaaatt

SEQ ID NO: 865711 - DNA, 577 bp, Homo sapiens
agtcaattacagacttcagagttgttaaataatatgtgtctctcttagtcaccactaatagactctaattaatcttatctggcatgaagatttgcttccggtttacctaccacaacttccaccctcctgtaaaccatcccttctacctgctttgcactcctctcccaatttatgtctttgttcagtcctctctggaatgttgctcccttttctctctaactgaccagatcctggtcatcctggaaaatccagtttaaatgtttgctctgcatgaggaagtgttctctgcttccctgcaatggcatactatcttttctgagtttgtcaccctactcagcactgtcctgggcaataatcacacagygtgtacacgtctctccactcatcagtaagctccctgaggatggcagacaatgcgtcttttcattctttatggaaatctgcctcatctcacagggtaaagacgtaaaacacatgtaatgcatacattctttggacctaacaacttaatcgaatcattataacaatagttaatatttcaggatttttctaaagtctttaaaatataaagtaaaaa

SEQ ID NO: 865712 - DNA, 645 bp, Homo sapiens
aacacacctcttctctaccttgccttttcaattcatatttatttgcttttttaactcatagcttagatgtcattttctttgtaaaaccttgctttttaccatgagtctaggtgatgggctcctgtagcatttttctttgtaaaacctttctttgcaccataagtctgcctttctaattggctcctgtagcatcccaccgaaatgaaagtttctacttagttgtctggatccacttctgaattacagaaactctggttgtcttgatcactgctgttgtgctagaacctagtacggcacctgsaatataagaaatattctaaataattgttgaattaattaattcataaattagtgaattgttttagaactagttgaaaactaaacagaagtaagaaattaggttgagagaattaaggtgcaaattatctaaattattcataatgtctattttgtgtcatcaattattgaaaaaattcacttgtaaacacgacttttacatgtctgtgatagacttcattaattactgcccattcttcatttctttctgtatctatgccatttttcaagtaagttagcaaagctctctcaccgtgggcaggatatatttctctacctcttaaccctggtttcaacctcgaggcatgc

SEQ ID NO: 865713 - DNA, 645 bp, Homo sapiens
aacacacctcttctctaccttgccttttcaattcatatttatttgcttttttaactcatagcttagatgtcattttctttgtaaaaccttgctttttaccatgagtctaggtgatgggctcctgtagcatttttctttgtaaaacctttctttgcaccataagtctgcctttctaattggctcctgtagcatcccaccgaaatgaaagtttctacttagttgtctggatccacttctgaattacagaaactctggttgtcttgatcactgctgttgtgctagaacctagtacggcacctgcaatataagaaatattctaaataattgttgaattaattaattcataarttagtgaattgttttagaactagttgaaaactaaacagaagtaagaaattaggttgagagaattaaggtgcaaattatctaaattattcataatgtctattttgtgtcatcaattattgaaaaaattcacttgtaaacacgacttttacatgtctgtgatagacttcattaattactgcccattcttcatttctttctgtatctatgccatttttcaagtaagttagcaaagctctctcaccgtgggcaggatatatttctctacctcttaaccctggtttcaacctcgaggcatgc

SEQ ID NO: 865714 - DNA, 660 bp, Homo sapiens
ctcttattctgtggctagacagaaaattgatctaatgtatttagggggcaatttggcaatttctattaaacgtaaaactggggaatctatttgagcccaggattgactttctaggactccatgtacagctataccaatacacatgtgcaaaatagattttcagggatgagctgggcttcatcatttataaaacaaaaggtgagaaacaaaataagtgtgttcatcaacagggacattgtcaagtaagttatggccaggatttatgttctgtgaggaatgatcaaatattttgttttgtttagcaaattctataaaattcttgaacatcaaatcagggaataattttgactttgaatgtatagggagtcaattttattacagatgcaaaattttgggattcagatttttaaaactgtctttagaataygtattgagttggatgtgaggaaagagaaaattaagtcctaaatcttgattttgtatttaagtaactacattgagaaaatgcaaagtttaactgcttcatactaaaattaacagaataagttattagatgatctaagtagctatatttttcttcctaatgttaacaattaaccatgataggagcaattcgtctacaaaggggaaggaaattaaatggctttgataatacatttt

SEQ ID NO: 865715 - DNA, 601 bp, Homo sapiens
caagcttgcaggccacgagccaccatggccttcacgcctattttgttgggcctatctagtgggttcaaagattgagctcatattgagaaactgagaggatccacatgtaaattcttctgtccaagttatcttggaaaatcagcaaaactgggcttttgtcacccatcttatgccaatttctgcaaagtggccatcagctggagcttgggcagggcaagagctggctgtccagcttgctccccgtaacccctcccatctctcagggcatgaagaggcaccaacagggcccacactgacagctacatgtctatctttttagactccttccttctagtctcaaccacagcaatgagaacacaacttaggcagagattccatgaattaggtaacagatttcccatcctttaagcagatgagtgagggaccatctcctcacrggccaggggtgcctccctgtcccagctggggcactgcagttggtttttatcaatggggtgagatctctggcaggtccagtacagcacacagagctggtgaagttcacttctgcaggtaggtggctctgctgccctgggagtctctttttcactggaggcagctg

SEQ ID NO: 865716 - DNA, 561 bp, Homo sapiens
tatccttcccaaccctgaacaccaagactttcaatcagatagaaaagaagaagccgcaatttttcagtatcatttctcctcaccattccagtgttccgtaagagaaaatgtacagtcagccgatgcacgcttctgccttagaatactggtgatgaaaagcgtgggttgacatttctaaaatagcaataattactttaggcagcactttrctttaagattctttccaatctagattctgaaagaaacactatttgtacaaaaagcacaaaaggcctaggaaagcaactgctgaacaacgtgcttaccacaagtgtgtgagctgatgcatctgtggaccctgataacacagaggagacccagaagctctgggctttccaggaagtgtccggaggagggtcaatgagagagcctactcttatagggagtctcagctgactgtgaaccctgcaggcctagtctttcacctagccctccaccaattatgcctggctgctcatctttcattttccaagacaagaacctggaataaaaaaaaagatgtgcattgcctttctttttcat

SEQ ID NO: 865717 - DNA, 564 bp, Homo sapiens
atgctaagtgaaataatccagttgcaaaaaggaaatactgtatgattccacttatgtaaggtattagagaggtagtcattatttaatgggtatagagtttcagttttacaagatgaaaagagttctggagatggatggtggtgctggttgcacatcattaatgtatttaatamcactgagctgttcactttaaaaggattaagatgataaattttatgttatgtgtatattataataaaagttagaaaaaaattgtcataaaactaagtcagatattaagaacaatcagaattacttctgtcttgtttacagtcatcatatgaaaaacaaattgtttatctagcatgacacctgttatgggttgaattgtttccctcaaaagatgctgaacttctaacccttggtacctgtgaatgtgaccttatttggaaattgggtctgcacagatgatcaagttaagatgaggtcattagggtgtgccctaatccaataatgactgtgtccttatgaaaagggaaaagagacaggtatatagagaagatgtgaattcacagggagcgcaca

SEQ ID NO: 865718 - DNA, 512 bp, Homo sapiens
gtggtcgagagatttcctggcatcaaatacatggaagggacttagcgtaggtcctgcttagcacatagtaagtgctcagcgaacttacttaccacttattacttaccacccctgcctgaagcagggtggggccaagggattggctggacctcagccactacccctcccctcacatggagccaggccccacctccacagattgggggcttggggacacgtcttctgtgctccatgctctcaggtcccagtgaggctgarcgctgaaccatccaagttggcagggccaggacaaggacccaggagctctggtgcccaggagtcccccgaaggggggctcagaggaggtgcgtgcggggctggtgccggtgcccccgaggcccacgtgcagccccgctctgtggggcctttgcccagcctcctggtccttgccagcgctgcatggcgtttcctgccggagtgctggtcactgagggctctcagacaaggaatgacccaggggctgggcccagcct

SEQ ID NO: 865719 - DNA, 599 bp, Homo sapiens
ttacaagaaattccccaaatttgataactacagccataaattttctgtgactttaatagaattttcattttattggtttagacctaccgcagaagaatcagatcccgctacaaaaagggagtgtctgaactccttggtttatcaatagagaaagatgctctctcctgggatacaaataccttgaacgcagcctccgtggtctcaggctgactcctccgacagctgtgtgcctcgcctccctctgaacaatggtagcagctgcatccaggctgtacagtctttgcacacagctcttgacccataatcttstaggttcaaggagaaaacccgcacttgaacctttcccccactgcctctcctatccttgttctctccctttttgccagaggtcagcagcgtggagctttcatatgactcacatgatggctctgcctggagcagcctcacaacttcagcagtttttccttatcagtgcaagaaactccacatcagacagggattgcttgcattcagatgtgcacaactgaaaacgaggcagctgttattgaatagaataaaatttggcacagttaaggttcttgttctggccacaagttagt

SEQ ID NO: 865720 - DNA, 580 bp, Homo sapiens
caaattacaagaaacatggaggacgcagaagttaaataacaccacaaggaatcaaataggcaaatcaggaaggacaaaaatctctaacagatttctctaacaaatcaatggcattaaataagaagaaaatgaagagaatttaaaagacttaagggccaggcccagtggcttacgcctgtaatcccaacactttgagaggtcgaagtgggacaattgcttgatctaggagttcaagaccagcctgggtaacatagtgagaccgcatctctacaaaaactgtaaattagccagatgtggtggcatgcacctgtggtcctagcaactgggaaggctgaggtaggacaattgcttgagttcaggaggtcaaggctgcakagagccatggttgtgccacagcacttcagactgggtgacagagcaagatcctgtttcaaaaaaaaaaaaagacaaaagataaaaaatgcaatatgtagatattgtttggatcctgatttgaacaaattaactgtaaaatgacattcctgaaagcagtattgaaattcaaatatggtattagatgattttaagaatttatttttaa

SEQ ID NO: 865721 - DNA, 580 bp, Homo sapiens
caaattacaagaaacatggaggacgcagaagttaaataacaccacaaggaatcaaataggcaaatcaggaaggacaaaaatctctaacagatttctctaacaaatcaatggcattaaataagaagaaaatgaagagaatttaaaagacttaagggccaggcccagtggcttacgcctgtaatcccaacactttgagaggtcgaagtgggacaattgcttgatctaggagttcaagaccagcctgggtaacatagtgagaccgcatctctacaaaaactgtaaattagccagatgtggtggcatgcacctgtggtcctagcaactgggaaggctgaggtaggacaattgcttgagttcaggaggtcaaggctgcatwgagccatggttgtgccacagcacttcagactgggtgacagagcaagatcctgtttcaaaaaaaaaaaaagacaaaagataaaaaatgcaatatgtagatattgtttggatcctgatttgaacaaattaactgtaaaatgacattcctgaaagcagtattgaaattcaaatatggtattagatgattttaagaatttatttttaa

SEQ ID NO: 865722 - DNA, 590 bp, Homo sapiens
gtaactgaaggctcaagggagtaaaatccatacattaatggcaaaccctagggacagagattgtaatattaggtgtaatgaggtagggccaatgactgagcctactttgatcacctctcccatgaaatgatttgacacagaacaatagcccattgatatttacttttgttttggcatgaacataaaactttatatgaatactgatttcagatttctatctttccgtgaatactgatttgtgaatgccagcttagctttatcagacaaacccacagagttccttaaatattcagacttccaggtctcaactgtagagattctgattcagtaggtctggtttagggtctgtaaatctgtatatacaaattccctggataccactaatgtataactaaacttcaaaactgacrgcatgctcagcaaggcactaattgactagaaaacatccattgaatacaaatttagtacggatactagtttaagaaaccttcagactatgtgtctgtaacctacatgtttaatcctaacagcataacccattagattataaacaccatgagatcagggatgatgtccatctgattcactgt

SEQ ID NO: 865723 - DNA, 645 bp, Homo sapiens
tagtcaatttggctcgtgacaccacagagatgtgactttagtcaatcctggaggtggtcttcatgtattactttattctgtaagattcccaggtgcattcagacttcccatattttatatcaatttcaatgtaggacactatttgaagatggttggattacaataaacttcaatccaaaatttcattccagagagaaagatgtgttcctgtttagcagagatatttagtacttagatcaaaaatgatatatccagccttctttttcaacaaataagaaggagcaacatataaaggcaaaaacttggctaagccctgtgttgcctacatctcacgttaggtctctgccaaatcttgctcttctgctctagacactgactgtttyagaaaataatcatgctcagaaaaatgtgttctaattagaattattcaaggaccattttagattaatgggaacaataaaatgtaaccatttcacaataatgaaactaagctgagaactgtatagtcctaacgtttgtgtactgaaatacacattgtttatagcaaatatagggctttagaagatcttattaatatttttaggcccatgaggcggtaatggagtacagaaatctggattcatctcatattaaaattgcaaggtt

SEQ ID NO: 865724 - DNA, 568 bp, Homo sapiens
aacattgaatgtgtccgatgacaatgatctcatttattcccaaattgttccttctgtatttggttttatctgatagaactattctaaaccataggtaaacgtctatataataattgatcccacgtcatatgtgtgaacaaagcattaaaataatcatacctatattaaattttcatcaccacagaagagttatatcgagtgaaaatgttggcatgttacctgtaagtattgctctatttttatttaaaaagacaacaccaataagacaaggcaagacaggtaaattgtggttaagtaagtagcatgttttgtgtagctctcatctatttgagctgttggtgaagcggcagcygacaattgtaattggagtctaacaggcaaattttagtaatacggataacagatatgtcttcaaaaatatacatgccctcataatattcagagaatgccacatttgtgcatgtatatggttattcccacataccagctggggtaactcagatcatctaagttgctatttacaaattcttattttacttttgactctaatgttacccaaaaaaatgtg

SEQ ID NO: 865725 - DNA, 620 bp, Homo sapiens
cacccagtatcaagtcatcatcccacctcttagcctcccaagtagctgggaccaaagaagtgcaccacggtatctgttcaatttttaaattttgtagagatggggtctcactattttgcccaaactggtctgaaactcctgggctcaagtgcctcctagagaamtgagattacaagtgtgaggcactgggccccaaatttcacttacttattttgaaaacaagttgcagcccattagagaagttccagaatccacaggttttgtataggatggggatgaaattcttacttcctactccatcaacaccatcagccaaaggaaagagaacacattgctctgggctgcagtaggtattatggactgaaagacataatttcaaaacttatatggggagaccctgactctcatgtggctgtatttggagatagagcctatcaacaagtaataaagatgcaacgaggtcataatagttgggccttcatcctataggactggtgtcctcataacaagatgaagaaacaccagttatatctctttctctctttctttctctccctctctctttctctcttttattgtggtaaaaacccttaatatgaaatttatctgcttaaatattt

SEQ ID NO: 865726 - DNA, 607 bp, Homo sapiens
tcacctctaaatggttgtctgggctctctgtatcactttgtgaccgcagtgacgcaggtcaatagtgttttcaatgagcttaagggggcacacacctcagtatcaagagcacacagcacaaggcctggaacgtagtaggcatttaatgtgtatcaatgaggctgggcacggtggctcatgcctgtaatcccggcactgtgggaggccgaggcaggcagatcagttaagcccaggagttccagaccagcctgagcaacatggtgaaacccagtctccacaaaaaatacaaaaatttagctgcacgtgatggcacacgcctgtagtcccaactacttgggaggctgaggtgggaggatcccttgagtctgggaggtcaagkctgtagtgagctgtgatcgtgccaccgcactccagcctgggcaacagagtgagaccctgtatcaaatatatgtatatttggatgggataaatgatcaggtgtgtagtttagaaggctattataagggtgtcaataaggctgaattatataacatatattctttccatagaaaattaaaaggaaaaatgaaaaattctgcaaagaacagggtttgtatatgctcagtct

SEQ ID NO: 865727 - DNA, 681 bp, Homo sapiens
ggaagatttctgactggctgcaatgggaacaacacaaaatataatgaggaattccttagtatggcaatccttgcaaaagaagaaaataaagaaaacaaaacccatgatcctctctgtaggcagcgcactcaccaggagacaggaaagctagaagcaccgctagggcccactgcatgccttcctctctgaggccttggaaggaaagggaccagatgaagaggagcagaagatcctcttaaaactcaggccccactcaacaaggaagtgatccctagcacagaagacagtaggaggagctggtcttcctgagacacaagcagagagaagtgactgaggatctgtctaagaggactcccaagccttcctccctcccagaaggattggtgcctgggaggacctgcagaggagctcctgcctctcttgctcaggtccgttctccggcgccctcttgtggcagctgagagcaggccctctgcagaagagagccaggggccaggagagctcaggcctgcagcagagggaatgcagatgtagsggaagctgaccctggagtcagcaggcccagccctaggagggggcagtcccacagcaggctcacaccctgcccttcagagttgcagcagctaatgctgatgccaggaccttgtcctgccaggaagtctctgattagggaactgaacc

SEQ ID NO: 865728 - DNA, 632 bp, Homo sapiens
gtatgtgacaaaaagtatacaccaaggcagacacaaaaccatcttataatcatgtgttgtatgattccatttatatcagctctctagaatagataaatccatagcacattggcaggtaccaagggcctggggaggggaagatgggagtcactgcttaatggctatggggctgtgatttgaggtgatgaaaatgttttggaacgagatagaggtgatgactgtacaacactgtgaatgtactaagtgccagttaattgttacttgaaaatggttaattttattttatgtgaatttcacctcagaagaaaagtacatgccaaaagtaatacttaaaagtcactgggcatctatcacctaaaaatggctcctcaatagtggaagaacaacctgaatcytgagttcatgttcacatagatttataacaacactctgaataaacaatgacatttattaaaaagtctcacttggccctgtttgagatggggctttggaaatcacactccagaaggcagggaagatgccgctactagcagttggtaggtggttaatgaatacttaatatcagccacatctcaaaacagcagtggccccatatttcagagatggccacctacaaacccagatcaacctgc

SEQ ID NO: 865729 - DNA, 618 bp, Homo sapiens
taagaaactaacttgaagtatgtagacacaaataggttcaaagtaaaaggatataaaggatgcaccatgccaatctaacaaaaagaaagctgtagtaattacattaacaataaaaaaagtagatctcaaatcaaagaatattgtcatggataaagaggatcattgcctaaacatttatgcactcaattagagagcttcaacataaagcaaaaaccaagaaagctgtaaagaaaaataaaaaagcacacacacttttataggaaagacttcaatattcctcattcaataattgaaagaacaaatggagagaaaataagcaatggtataaaagatttagataacactgtgactaaatttgacctaatttacacttataacattctatccaacaacagcagaatatatattcttttcaagtgcacatggaaatgtaacatgataagcagtattctgggtcatyaaataggtctcaactaattcttttttaaaggtcctatctgagattttatttccaaaaacaaacaaacaaatgaacaaataaacacaatggaacctctttcttgcacagacaccagagacaatgctaaagttcccagtataactctattataaagacac

SEQ ID NO: 865730 - DNA, 618 bp, Homo sapiens
aaaaaatactggtgtacttcctttccttggtcttgaccttaaatttgaaaatcaagttttatttgtgttttcaggtagatcttgccatcctggggtgatacttgcccccaacctctttttcaacattacttctcctttggctctttctccaattctggaaatccaactctcaagtcacattctttataacacattttagatagcatctctattagatttgaccagttaactagcataattgctacacagctactagaatggctaaacttcaaaatactaacatcaccaaatgctgataaggatgtgaagcaacagaaactctcattcattgctgttggaaatgcacaatggtacagccactytggaagagagtttggcagtttcttacaaaactaaacatagtcttaccataccagtcaacaactgtactcctagatatttacccacatgagttgaaaacttatctcaacacaaaaacctgcacatgaacatctatagcagctttattaataattacccaaacttggaagcaaccaagatgtccttcaataggtgaatgtgtaaataaactgtggtacatctggacaatggaatattattcatcaagaaaaagaaatt

SEQ ID NO: 865731 - DNA, 723 bp, Homo sapiens
cttccataacatagaatgggcaacaccttattatttattgttgtctttgtccattttctgttgctatgaaggaatactggaggctagagaatttgtaaagaaaagaggtttacttggctcatgattctgcagtctgtaaaagaagcacagtgccagcatctatctgctcagtttgtgatgagggccccaggctgcttctagtcatggcagaaggcaagcccggtgtgcagagatcacatggcaggagaggaagcaagagggagaagggggaggtgccaggctctttttaacaaccagctttccctggaactaatagagtgagaactcaattatcacccctcacagggagggcattaatctattcatgagatatctacccacataatccaaatacttcccattaggccccatctccaacactggggatcaaatttcaacatgaggtatagggkgacaaacatccaaactatagcagctctgaaatgaaaatgtgaaagtattcatcttatggtttctaatgacctaagggaatataattcagtggaagcattcctttgagagattgaaacaatgagtcatggatatgcatttttctaatggtttaaattggtgaagaagagaacatagaatgcatacagttatgaatggacatgaatataagaggtcagttgatactaaattgtctagctgggaatttgataacacacatttcaagagcctgct

SEQ ID NO: 865732 - DNA, 748 bp, Homo sapiens
attttcactttctctccattatttgaacaaaattacaataaatggtgactgtcctgttaggcatcttgtcatgtacatatgcacaaaaggatacatgtttactactctacataaataggattgtccttaatgtactgtagcattgctttttttctactcaacaatgtcatgaatctcctttctgatcagttgttacaatatacattataattttcagtggttgccacattatatgtatgtaccattatgcaaccagtgcttatggatgaatatttagataatccccaattttttattttaaaaaagaactattctttgaacatccttgcatggtttttcaaacttaactatatgaccaagcaccacagtcacagtatcacagtttcttcatctgcaaaatgacagtgttatagagcatrcttagaaagataattctgaagtttaaatgatacataatacagagcatatccaactgcctggcacatattaagtactcaataaatattagctatatcaccattattatcactgttattctactactactactattacatcttcttaggataatttcctagaagtgagattgctgggtcaaaggttatgtacatttcatatttttgatacatgattgctaaactgttgccccaaaaagttacttcagtttctgtcttcaagagtactcattttcccatccacttcttccttgctcagtagaagaggcttccctcttcctgcaagggtttat

SEQ ID NO: 865733 - DNA, 631 bp, Homo sapiens
tgagaaaaataaagaacaaaggatgatttaaaaaatggtcagggcctcagagacctgtgaggcaccatcaaaagcataatgagagctgcagaaaggaggagagaaggaggatcaaaaaagagtatttgaagaaataactgccaaaacttcccaaatttgattaaaaayatgaacttgcattcctaagaagttcaaggaactacaaataagataaactcagagacccacacccagatatatcataatcaaactgttgaaagccaaagacagagaatcctgaaagcagcaagaaaaaagcaaattatcatatacacaaaaaaaactttgaaagattaccagctgatttctcatcagaaatcatggaggccagaacggaataggatgacacattcaaaacacagaaataagaagactgtcaaccaagaatcctatatgcatcaaagttatccttcagaaattaggaaaaaaataaaatattcccagctaaacaaaaactgagagaatctatcactagcagacctggcctaaaaataaatactaaagggagtccttcagggtgaaatgaaggataataactgaacccatatttaaaaaataaaaagcacatgtaaaggttacaacataggtcact

SEQ ID NO: 865734 - DNA, 626 bp, Homo sapiens
gagccagcaatggggcccatatcttctgttcacaacctagaactcttcagtgttctacacaaaagattagctaaacaccatcaatattataaagctgagattgttttcatctaaaaataggcattcgtgactgggaaaatctagttcttttaacgagtatatgagttccgtcttacggaagtactgggctagacaaccatttgtcagaaagattgtagaagggaatttgaacaaccagtagatgttcaacttcaatgacctctaaagtccttccacctctattatttgaccctggactgccctggaactggcacctcagttagccagggcatttgcagaggcattgtgcaatatcctgtgggggtcccctcttctactgtaggtttgactctgccctgctgtttcaggcattgctctatatccaatttacatgcaatcaaatactctragcatagaaagtgtaaggaaatgcagttctgtcatttccaaagacagactacactgcttagctttcaaaattgccttgcctaaatgagcactccataactgagcctccacattcagcttttacagtttgttcatgtactatgctactatcagaattaattatgcagcatcttcatgag

SEQ ID NO: 865735 - DNA, 723 bp, Homo sapiens
ttatcaaatatgtgtgtttaaaaagactggaagaaaacgagagaaaataatagcttctattgtctttgggtaataagatcatgtgtggtttcccctttatttttatttattttctccatttttttcccctacattttctgagtgttctacaacaggcctgcagttcttggataatcagaaaaacagcgagagagagagagagagagagagagagagagagagagagagagwgtgtgtgtgtgtgtgtgtgtgtgtgtagcagcatgcagatgaggcgaaacttgtttgcttgctttggtgggagaagttgtcattttaaagatgcaggtgcttctctaacaggaaaagcaaagcacattccctttatccgggcagaaccccagagctggcctccatagctatgcacctgggaacaggcatcttgtgttgatgaaggctgtccctggaaatatcccttggaatgcagaattcacgattcacagcaagagtgtgggtgagcacacagtgggagaagcctcttggaggaaaagggatggagaccttgactccttccctttcacatttttaagaaaaaatttgattgacaataatatacatcagaaaagtgcacaaatcataaatgaactcggttaaactaacaccaagatcaaggcacagaacattccagaagctaccttgtgcccccgcccagtcactgactctcccaagagtaacttctcttct

SEQ ID NO: 865736 - DNA, 584 bp, Homo sapiens
ataagaaaattactattctatattctctaaaatataaacatcgtaactgataagagttttgaaaaaaagaattaaacaatggacctaagtcatagacaatattattatctgaaggcagcctaattatttattatagactgcaatcatattaactttaattcaagtctccctatatcatttttaatgtaagtttaatgcaaagaacagcagttattacagtataagttattaaagttaataaaaccaataaaasctggatttgtatttcagacttaaaaaacccaaatttatatggagaaagtcatataaagcgatgacacagctatacccctgttatcagaaaacaacacaattgaattgtactggaccagctcaagttgtcatatcatgttgctattgtttcttttgaaataaatagctttatttttcatgagccaatgtgacactccagtgcaaaaattatattccatgccatggcagcagagaagagaatagatgtcaccactcaactaaacctgaaaaatcctttggaattcataattattgaacccacatactctgcaccttgttcacgggccactctg

SEQ ID NO: 865737 - DNA, 721 bp, Homo sapiens
caggaggctgaggtgggagcattctttgattccagggaggttgaggccacagtgagtcatgatcttgccactgcactccagcctaggcaccaaagtgaaatcctgtctcaaacaaagaaagaaataaacaaaatcccccaaaactgaagtctagcattcatgaaaagaaggccaacccacaaaaggaaaatgagcacccccccaaaaaatatggaraattcaagaaaaggaactattaatggatcttatatataagatgcttggctttatcataataaaagaaataaaaatttaaattataacacaatgccactttcactaacatattggcaaagatcaaagcatttgatgacacatatgaattgataaggctatagaaaagcaagtactcataaataactgtgggagagtgaactggtacaacttctcaagagggcaattttgcagtatcaataaaaattactcttgaatgtatacattggtcaaaacttatacacactaaaaagagtaaaatttatgtaaatcatatcttaattttttaaaatgagaaaagttagtattagtcttctcaaaataaactttatgttacctttagagagaatgaggttgatctatagttactggtgtgcaataaactctaagatatattaagtgaaaacaataaaatcaactatttgaacccaagtttctttattctcttttcatgttactgtgcttcctt

SEQ ID NO: 865738 - DNA, 718 bp, Homo sapiens
ccttgttccttggtcattggatttcttcaattatagattttattgataaggaatgctcatttacaagttcaactatcataacagtgacttggatgtcttttctttaaaatctaagatgataaattagcaataaacgtgctggaaatctttaagtctagttacctaattatggggattccgaatcaaggagccaactgcttttggcaagtggtcacactgtccagtgtatcaatagtaaaggtgaatgtgatgtaaggtcacagccaaaagactgtgttccaggaagtgactcctcaccagacaccaaatcttgtccttgcgtcttgattttggacttctcagcctccataactaagaaataattaatttctgcggattacctatccagtttatggtattctgctataacaacccaaattaagatatttagtaaataatttattagcacctacgatgcagcaggaaatatgctaaatgattagggagagcaataattttcagaagattaaaaaagctttccaaaaagacatagcacttgagaagaactttaaagaaagggtagaagttccatgggggaaagtktggtggtggggaagtttaacatactggatacaataaagatcttaattcacagataaattataaagtgcttgaagtaagggactatatgttctcttaatctttgtgttgatcccacttttgcacagcctctacttta

SEQ ID NO: 865739 - DNA, 569 bp, Homo sapiens
gaatgtgttatcaacagacctgttctacaggaaatgctaaaggaagttctttgggctaaagagaaatgacaccggagtgcacgttaaacttcagaaacagaggaagagcagcagaaatgattaatatccatgtaaataaagtagaatctatttcttgtcttagtttctttaaawgatatttgttaaaatttaaaaaatcagcataatacagtagaaaaacataggtgttggagtccgagtgacctgagtatttaccactttcttgcaaggtaactttggaccagttactgaaactcctagaagtctctttttctgtaaaatagagatgtttgtgtccatcctttagaactattagaagaatgacttacaatgtatgtgaagtgtgtggcatataataagaaaccaataaaaggcatttctttttttctttttctctttgagacagagtcttgctctgtcatacaggctggagtgcagtcatgtaatcacagctcactgcagcctcaagctcctgggttcaaacaatcctcctgccaccttcacccaaagtgcagggattataggcatga

SEQ ID NO: 865740 - DNA, 724 bp, Homo sapiens
tctcagtcagagggagagaagtgaaacagaagaaaaattacaggtggctcttccccaagtcctctctacaatggctcttacacttttaaaagccaaccattaaatgtgtgtcccatttctgtgatgtctcgtgccccagacgctctcggtactgatgactttagtttgcaagyctggatttagagagcatcaaactaggatcaaaatgagagacgcaaaataagaaaatgctccctaagaggtgaggaaacataatgagataaaggaaaatagggggctacattactgaaatatcctcattccagagatcacaacaaaacaagagtagttaaatgcataatgaagtcagaatcaacaattagtaacaaagttgagctctaagaatcaaaatgaaatggtggtggtgccttgagacattatacatctgactagcagtagaaaatgtaataattttgcaaattatactgggaggttggttcatccttaaaaggtatgcagtattatgtgtcatctgattttgatgtgatttctagaaagagaaaggtaagttaaaaataaagattccattttaatgcatgtttactcttgcctttgtctggaatccaaaaacgacaacatgttcttcccatttactgcagcagtattatttttatataaagtttgaaaccatgtgcactgccaaggcacccctccaagaaggtaagcccgatattcccatctatca

SEQ ID NO: 865741 - DNA, 753 bp, Homo sapiens
acaaaaagagttatacagaatctcaatcactggtcccccactcagagttttaaatttaaataaagtgcttcaatagatattatttttaagactcttgattttatttatgtttataataatttgaacaacattcagtcccaaataagtcaggtaagaagacactatacatgactctatagctgtttctgtcttcaatctagaacactatgagcaaatcaacagtaccacattaagttgatgtcattaaaaccagaagcaagaaacttgtcatctaagtcagcataggcagttctatcacaggtaaacctayaatttccattaagctcttagaaatattgtaaatagctcatgatcctttattactacctttgaggcccggttgaattctatggtatagcaatagggaatttcccaaattgagctttactgatttagcacagcaaaacactattaccctattagctttttaaaaattaaaacataagcacatctaaatttaaatacaaatatatttgcattatgagatttacttctaaaaaaatatgttgtgtgaagagaagtccatgtcataaggggcctcatcagtgtaagtacctggattccaaatgatacagaaggcatgccctaccaatgcatacaagaatgaggtccagccttccatttccaaataagtctggtgcagttttcagttgtatttgatgataaagctcccacttataagtgagaaacactatgggtgaatattatatagtt

SEQ ID NO: 865742 - DNA, 654 bp, Homo sapiens
caatacgttagctaaaatactccgaaaagatgagataatctctttaaaatactgtataatagccagaagagaaaaataacttcatttattcataagaacttaaattacagctaagaggggacttttcactattaactattacatattagcatctaagtttttagtcaagtagttttcagctctgcctaaatatacattggtgcatattctactttgatttcccgaagtcagggatcaagtcctgaagtatagaaattaagacattaaagacttcaaagggttaggcacagtggctcacaactgtaaccctagcactttgggaggctgaggcaggaggatcacatgagcttgggagttcaaggccagcctgaacaacagagtgagacctcccaatctctccaaaaaattttaaaaaattagctgggtgtgatggcatgttcctgtggtcccagctactcgggatgctaaggcaggaggatttcttgagcccagaaggttgaggctgcagtgagctaaratcacgccattgcaccccagcctggggaacagagcaagaccttgtctcaaaaaattaaaaaaaaaaaaagaaaaaaaaaactcaaagagaatgttcgatgtataaaactactaatggaaataaaaaataatgtatca

SEQ ID NO: 865743 - DNA, 597 bp, Homo sapiens
ttcttacttgtccttcaccctggaggcttctgaagaggcctgaatatctggcttaaagtgagtgatgctacttgaaatgaaaagcaaggcgattgcaaatcactcttctgcacaggcttggaataagctatggcatggctgatgaacagattcaggtatttaagtgagtgtgatttccaagcaacaatttctaaaccccacactgttgttgacctccatcacgtgattggacatgtttatgaaagtgcatgtggtagaatgaaatgcactgagaagaatactgaagtcatttttcaatagcacagcaatattactgcaaaacgaagccacattactccaacgagcagtggagtccagcctcacacacttcctctgcttaacagtctgagtccactctagaaaaggacctttccacttcargaaagaggctctgggtttggttggaagaaagctaatgaggtaggtaatccaatgtgtgtgctcaggtaaagtcaaaacctatgaaaagacttgaataaatggcaccagcctatacttttgtcttttccattttttcctctctctttctttttttttttttttttaggcatagatgta

SEQ ID NO: 865744 - DNA, 649 bp, Homo sapiens
gtaaataaaatggaatgttttttctggcagcattttgaaccctcagctactgggtctgtattaaacctgaaaatacaagggatttccattcatgggaaatgagatgaaggataaagctaagtgaccttttgagaacactttaaaattatattctgtttattgagttcatgtcttggtctaaggttcagaatgatattcattttgtatraatacttttttttctcaaatcattgtgaagaaaatcataagtgtatgaaaatattgtataaaatgaaaatattcctttgaatgtttagggaccacacatgcttttaggaactaagagatacaattctccctttggatagctttaagaattaggggaagtcatttaaattatccaagcctcagtttccttatcataaaatgtagggctgtatctagcttgtctcaaaattactatgcaattacaaatctatgattctttgaacctaccttagattgaggagttacatgtgcatttacacagcaaatgatcacataactgcagagagcatctcagtaaattcctaagaaatcatttgacaatgtaaccaaataataaatagctacaatagtctaacacatataagaaggtaacaaaatttttcaacttggtgcaggaatgatg

SEQ ID NO: 865745 - DNA, 642 bp, Homo sapiens
atatcttggctgcaaggagacttttctccaacttgatcaagcatatgctaacagtgtatttacccaggatggtaacagcttatacttattgcatgatttctctgtgccaagcaccaaacctgtttgggtgatttatgtgaattattcaatcctcattagataggtgctcttatcatcctctttttacagatgaagaaactgaggcacataatgcttataaatagtaataatcaatactttttgttcccattttttttcttctcctggtcttccagtacatttctgtctccttagcaacstccatccagccataactacaacctcatctaggctttagtgtctccattatcctcgatcctaatcacaaagttatctgttggcagtagagaatgggtttatgtattccatcagttatttattactgcataacaaacaaccctggacatttgtgaattatatttaagacaatttgatgtgcattttatcacaattttaattttttaaaaaatttaaagtcataagtcaataaaaagtttacttacttattattttgtgggtcaactatttggcttgagcttagctatagaattctgctagtttaccaggggtcactcatgcagctatagttatctggtggctcaa

SEQ ID NO: 865746 - DNA, 642 bp, Homo sapiens
atatcttggctgcaaggagacttttctccaacttgatcaagcatatgctaacagtgtatttacccaggatggtaacagcttatacttattgcatgatttctctgtgccaagcaccaaacctgtttgggtgatttatgtgaattattcaatcctcattagataggtgctcttatcatcctctttttacagatgaagaaactgaggcacataatgcttataaatagtaataatcaatactttttgttcccattttttttcttctcctggtcttccagtacatttctgtctccttagcaacgtccatccagccataactacaacctcatctaggctttagtgtctccattatcctcgatcctaatcacaaagttatctgttggcagtagagaatgggtttatgtattccatcagttatttattactgcataacaaacaaccctggacatttgtgaattatatttaagacaatttgatgtgcattttatcacaattytaattttttaaaaaatttaaagtcataagtcaataaaaagtttacttacttattattttgtgggtcaactatttggcttgagcttagctatagaattctgctagtttaccaggggtcactcatgcagctatagttatctggtggctcaa

SEQ ID NO: 865747 - DNA, 607 bp, Homo sapiens
agaagcttgaagccactgtccaataaaaatgagttagccaccctagatttttaggtctccaaaaagagattgtgggctctcctttcctggtgataaaggtgggcacaataagctgattatttttgcacaaaacttggtattttcatgcagtattaagagtggccagaatcacattaactctgccccttatggaaattgctgtgacccttatttcctgcaactggaccaactgtcaattgtctttgaatgtgaaagatggtggtgatctctttgtatgcaggcagaatgtgtttcaaaatggacaaccagttgtgaacactttgcaggaagagccagaatccccctccagaagctcctcccttccctcttcttattgcatagaaaatgccaggaaagtttaaaattaatggtgaccaattgaaaaagaaaaggaaatcaaagaaacattccctgagaagcagccttatttstttcactttacataaaagcaccgacaggtcctgtcagctctggtttttgtagagaggatgggaaggagaaaagcccatgcacaggacagaaaacatgtttccaggcacaagcaatttttttattattttaaatctgt

SEQ ID NO: 865748 - DNA, 641 bp, Homo sapiens
cacctgcatccttttgaatacttggaaagtcttcccaagaaggatgggtacaaacaagcccaaaatgcaaagactacaaggaataactcttcaacttccagacacagtcaaacatccacaagcatcaagatcatccaggaaaacatgatctcatcaaatgaactaaacaaggcaccagggaccacccctggagaaaaagagatatgtgacctttcagacagggaattcaaaagagctgtgttgaagaaattcaaagaaatttaagataacacagaaagaattcagaattctatcagacaaatttaacaaagacattaaaataaaatgaatcaagcagaaaatttggagttgaaaaatgcaattgacatactagagagtatatcasagtcttttaatagaataattgatcaaacaggagaattagtggcttgaagccatttgaaaatacacagtcagaagaagcaaaagaaaaaagaataaaaaacaatgaagcatacctacaggatctagaaaatagcctcaagaagacaaatctaagaattattggcctaaaagaggaaagagataggggtagaaaaggataataatgagtaacttcccaaacctagagaaagatatcaatatccaggtgcaagaaagtt

SEQ ID NO: 865749 - DNA, 599 bp, Homo sapiens
ttcatataaagatgcacacagaccaaaaataaaagaatggaaagatattccatgttaataaaaatgaaaaaagagcaggaggagatatgcttatatcagacaaagtaaatttcaagacaaaaaccataagaagaaacaaagaaggccactatataatgacaaagaggtcaattcagcaacagaatataacaaatgtaaatatatatgcacccaatgccagagcacccagatatataaagcaaacaytattaaagctaaagtgagagataggcaccaatacaataatagctggagactccaacactacactttctgctttggatagatactctagacagaaaaacaaagaaatattgaacctaatctacactatagaccaaatgaacctaatagatatttacagaacatttcatccaacggtttcagaatacacattcttttcctcagcccatggattattctcaaaggcagaccatatgttaggtcacaaaataagtcttaaaacattttttaaaaccccaaaaatatatcaaccatcttttcttccacaatggaataaaattagaaacaaataacaagaggaatattcaaaactagag

SEQ ID NO: 865750 - DNA, 619 bp, Homo sapiens
gctttttttaatctacaacctcctttatgcaggtctaagattaaacctcctttatgcgggtctaagattaaattatactagccttaacctttctaaatatatcttaatatatgttaaataaatccaaaagaaaatttctctctcttctacaaaattaaatatttcaataaattttaccctagaaagtcaaaactttattactgtaaaaacaaaacaaatgccaaatccctttggaaagcttgccaaacactgaaaagtcctatttattggaaacaagcacatcttgccagtgtcacactctcagcatccaaaaatttggccgyctccacaaaattccttttcttggacaatagtaacagtcacagcttatcacctcctgttggtggggcctaaagaagcttccattggtttaccaataaaagcgggcaactcttctcaatgtctcccaacatcttttcaacgtctaggaaagtagaatgcccaccttcgatatggaaagctctcacttctttcttcccagagaatgtgctagctgaacttcaggctctcaatggcactgggaaagacttgctcagaccattagatggaaggcagtatttctttgtacattttaatagtg

SEQ ID NO: 865751 - DNA, 610 bp, Homo sapiens
gttaatatggaaacaggataaagatgtccaggattagcacttcttttcatcagtatatagaaggactagccagtgaaataaggcaagttacagaaataaaataaataaataaaactgtttatatcctcacatgatatgactttaaatataggaaattgaaagaccctataatctaattaatcagtgtatttggaaagattacttgatataaagtcattatacacctgaattgaatatatactagcaacctacaatagaaaattaaaattttaaatattcataatagcatcaaaaacataaaatacatagagtaaatctaatgaaagaaatctttctgagataaattaatgaagacctatataaataccatgtttctgaattgcaagacttaactgtttttgtcaatactgacttgatctaagagtcartgcaatttcaagcaaaacctcagcaagcttcttttacctatgagacactctgtttaaagaaagaggctaaacacagaaaaaatcatatatataactccatgtatattacattcagaatgtatttacgttaatagatatataacagataatatatactgtgaaattcgtatctggtctttgtt

SEQ ID NO: 865752 - DNA, 634 bp, Homo sapiens
tgtgtgagaacagaggaaaaacatggtttgagagttttctccaagaatctatgataatagaaggcagaatattggttacctctgtagggggaggttattgactagaaagggacatgaaggagctttccagggtgctggaaatattctaggacctggttacataagtgtacacataaatacaaattcattaagatttacgtagtttattgcatatatgcatgttgtgtctcattttaaamacgctattttactctaaaacaagcaacaaagagtaccttgcatttatatcaattaaattttcatctcacaggtttagctcaatgctccaaaccattatgagaattgtgactctgagtccatcatcatgggtaatagctatctattatttaaattgaatagaactggaccaagaacataacttgtagcatcagaaaatttacagaaactcattgggtatttcattcaccaaaattatcctaactttctacttgtgcagcctacatttattcatcttgtcacaaggttatcatggaaaaactttgtcaaatgattcactgaaatagactagacctcattgatctctcaaatgatactattttactcatattaattggatactttatatccttagata

SEQ ID NO: 865753 - DNA, 609 bp, Homo sapiens
gcctatctcccaacacagaaattttcctaaatgtaacctttcccactgtccatctgctaggtgtgccttcccaggcatcccactgttcccacctgacaaactccaaatcatccttcagcatctcttctgggtgatccccaaatccctctcctcccgctacacaactggctgagctgcttctgctttcctatcctggtcagagagaaccaaagcttcccctcgggtagatgatccactatagagttattccatggttcctagaataagcttcatgctacagatcrtaatctagaacactaaatatagctagaggttcacattaatagaaagagaaaaagaaagaaaggaaaagaaaaaaacaacaaatatttttaatgtatttgcaattttttcaacattaatacctggccattttttttaatttgaaaacgaagttggttggcgagatagccttcaatactctatgattaaaacataacataatggctggaatttactaagttttcaatgtcttatagcccactccttttatgccttagtaaaaaaaaataatatttcattttcaagaggcttttctctaatgctagtttcactatgtgcactttgtaa

SEQ ID NO: 865754 - DNA, 686 bp, Homo sapiens
atgggatcaacataagtgtccatcaatagataaatagataaagaaaatatgatgtatttttacaaaatgaattactgctaagccttaaaaaaggaggaaattctgtcatgtgtaacaacatggatgaacctggaggacattacgttaagtgaaataagacaagcatagaaagacaaataccacatgatctcacttttatgtggaatataaaaaagttgagctcataggagtagagatagaaaaatggtggctccaaggagctggggaattggattgggattggagagatgttggtgaaagaaaacacaattttggtgcaataggaagaataagttcaagatacctattgtataacatggtgactgtacttaataacaatgtattgtattcttgaaatttgctgagagatttttagtattctcaccacaaaacataagcacacaaggtartgcatatgttaattagcttgatttagatgttccacaatgtatacatatttcaaaacattatgttgtacttgataaataggtaccattttatttgtctattaaaattagttaattaactattcaattttttaaaaagagaaagaatgcttttggaattagtaggggaatgaagtttggaatagggataaaagagaataaatgagtgtataaagaaacaagtggacaaacaagaaaagg

SEQ ID NO: 865755 - DNA, 686 bp, Homo sapiens
atgggatcaacataagtgtccatcaatagataaatagataaagaaaatatgatgtatttttacaaaatgaattactgctaagccttaaaaaaggaggaaattctgtcatgtgtaacaacatggatgaacctggaggacattacgttaagtgaaataagacaagcatagaaagacaaataccacatgatctcacttttatgtggaatataaaaaagttgagctcataggagtagagatagaaaaatggtggctccaaggagctggggaattggattgggattggagagatgttggtgaaagaaaacacaattttggtgcaataggaagaataagttcaagatacctattgtataacatggtgactgtacttaataacaatgtattgtattcttgaaatttgctgagagatttttagtattctcaccacaaaacataagcacacaaggtaatgcatatgttaattagcttgatttagatgttccacaatgtatacatatttcaaaacattatgttgtacwtgataaataggtaccattttatttgtctattaaaattagttaattaactattcaattttttaaaaagagaaagaatgcttttggaattagtaggggaatgaagtttggaatagggataaaagagaataaatgagtgtataaagaaacaagtggacaaacaagaaaagg

SEQ ID NO: 865756 - DNA, 617 bp, Homo sapiens
aaatctttaaaatactagcaaacttaatccaacagcacatcaaaacactaatccaccacattcaagtagggtttatccctgggaggcaaggttggttcaacatatgcaaatcaataaatgtggttcatcacataaaacagaactaaaaacgaaaaccacatgatcatctgaatggacacagaaaagactttmgataaaactcaacatcctttatgtttaaaaaaaagcactcaacaaactaagcattaaaagaacatacctcaaaataataagagccatctatgacaaacgcacagctaacatcatactgaatgagcaaaggctggaagcactcccattgagaactggaacaagaccaggatgcccattctcaccattcctatccaacataaaactggcagtcctaaccagagcaatcaggcacaaggaagaaataaaaggcattcaaataggaagagagaaagtcaactacatctctttgcagctaatattattctacatctagaaaaccccatagtctcttcccaaaagctcctacacatgataaacaacttcaaagtttcaggatacaaaatcactgtaaaaaaatcagtaacattcctatacaccacaaagtc

SEQ ID NO: 865757 - DNA, 652 bp, Homo sapiens
tgctatccactattttctcactaaaggagaatatccatgtatagaaataaatgttgttggggaggggacagaggaaagagcctgatatctgtaataaggagataatagagttcgacatgtaaagaaatccaaatttaggaggctatcttttatttagttcttcgaacgcctcctaaaaatgactgtcagaaatgatagttggggcagaaatattttaatgatcagtaccatagaaagcaagctgttagcatgaaggacctctacggtaggaaatcaatttttaaaatagaagtataaagaatcttttctcttaactcyaaccatgatggtgtaggtcaaaaagctatacctcattctgagcagggatgaaaagatataaaaataggattatcagacttcaaaagtgtcaaaagacaaaattacaacaaatttagtttaacgatataaattggcttttatttgtgattctagaatcgggcaacacctcattctgtaagacaggatgagtgttcccatgagctgagcagaggaggttggctttacagatagaaaagagctgaataaagcagcaacagaacaaaaagtagattggtcatttcaaagttactttccttgtgaaggctaaagcagaagggacttccttatcatgcca

SEQ ID NO: 865758 - DNA, 652 bp, Homo sapiens
tgctatccactattttctcactaaaggagaatatccatgtatagaaataaatgttgttggggaggggacagaggaaagagcctgatatctgtaataaggagataatagagttcgacatgtaaagaaatccaaatttaggaggctatcttttatttagttcttcgaacgcctcctaaaaatgactgtcagaaatgatagttggggcagaaatattttaatgatcagtaccatagaaagcaagctgttagcatgaaggacctctacggtaggaaatcaatttttaaaatagaagtataaagaatcttttctcttaactccaaccatgatggtgtaggtcaaaaagctatacctcattctgagcagggatgaaaagatataaaaataggattatcagacttcaaaagtgtcaaaagacaaaattacaacaaatttagtttaacgatataaattggcttttatttgtgattctagaatcgggcaacacctcattctgtaagayaggatgagtgttcccatgagctgagcagaggaggttggctttacagatagaaaagagctgaataaagcagcaacagaacaaaaagtagattggtcatttcaaagttactttccttgtgaaggctaaagcagaagggacttccttatcatgcca

SEQ ID NO: 865759 - DNA, 554 bp, Homo sapiens
agagtgtgtgtaagtgttcatgaaagatctagtcatttaaaagtgtgtgcaaccccccacaactccatcactctcttgctcctgctctggccatgtgacatgcctgcttccccttcgccttccaccataattatgaatttcctgaggcctccccagaagmtgagcagatgccagcaccaagcttcctatacagcctgtagaaccatgagcaatttaaacctcttttctttataaattacccagtctcaggtatttcttcatagcaatgcaagaacgggctaatacactcatcttaggtgaagtttcttaaaaggttctgaatctttattgtgagaaatttctacttaggaatcatttctataaataggactgtttgactcaaggctgacattgtgcctcatggtcttcatggcatatgggactctacatatgtgttagttgtgttcatcctaaacctttaatctatcattttacttaagcctttttttttctcttgtgcttgtaagtcctcatagaacaacttgttctattaactcatcaagcctactcaataa

SEQ ID NO: 865760 - DNA, 663 bp, Homo sapiens
tccactcatatactttatgctctaataacacttaaccgctatcgtggctttcctgttccccaccccccacacgccgtctcattttcatctgctgcttctccctcttacacatccttcatgctggactcaagagcgattttgtccaggaagccctccctgcctcctttttgtcggtgctgtcatagcttcccgggtatgtcctcagtgagtcattcaacttcaccatcctctaagcccttgaagtccaaacccttgcttacccatctttgaatcctcaagacagggtggtgactggcggagaataggtgttcagtatttgttgaactgaatggaatgcatcctatctgcatacttaacatcttgggcacagaatgtagagagaactaaagagggttcctgtcctccccagacagacttgacagtcagaaccccaaagtatagagaagttraaatgaactacggcagtagcccagaaaaggaaaacatgtgtctgagggcaagaaaagaattcatcaaaacggtagtgtgtgagggctgggtgcctgtaatcccagcactttgggaggccgaggcaggcggatcgcttgatctcaggagttcgagaccagcctggccaacatggtgaaaccccttctctacaaaaaatacaaaaattagcccggt

SEQ ID NO: 865761 - DNA, 540 bp, Homo sapiens
cctctgtgggcaacgcattagagctccccattagtttggcaaatattttctcaaagttgcaccagaatctaagactcttcctacccaatcttcctttcttcccttctcatttcacaaatgtgagacctgtattgcagactgacagctctgcctgccttctyctgctctctccctacttggtattttatggacattgctcccaagaaatctcttacacttctaattctttcttgacatctgctccccagaggactcaggtaaccatatctttcctataactagaatgctatatctgtatcgcattgtgtttgtcttcttattaaggtatcagaagagctcaatcagaaatctgttgttgggtctacaaataagatgtggtcagttccttgaactccaatcttgtagttctctcaagcttaccatgcactttcctcccttctctactacccttacctgatgtactcctatttatatttcaggaccagattaagtatctcttcttctaggaagccttctctgacctgatctcacccataagct

SEQ ID NO: 865762 - DNA, 596 bp, Homo sapiens
atttttctcatgaatctacagtcaccaatttaggctgtgtttacatgagtggctcttctgatctcagctgggctcactcacatatttgtgagcttggatattttaattgaaaaatcatatcagctatgtaactctgcttctggsagttgaatggataacagctgggtgatagaatacttgggccatgcatctcccaccatcccctaggcagtccagatttatttatacagtacgatcatgaggttccaagaaagcaaacagagcctagctcagacacagtaaaacatttttttgttgttgtttgctgtattccacaggtcaaagcaagtcacaggtctagcctcacgtattgaggaaatagacttcaccccttgatggaggatactgcaaaatcacactacaaaaatgttggatatagggaagaaaaaaataattgtggccatttttcaaatatactgcaatgagtatgcataagagccaggtaaacatgttaactttatccttacttggattggagtcttagtaaaagaaagcttttcctgtactcaaaaatgagggtttatatttttctcccatcagatgagcaaatattttaa

SEQ ID NO: 865763 - DNA, 611 bp, Homo sapiens
aaataaggaaggagagaggagcccagagaggctgcccagtgcagggaaaggtaagtgaaagatccccaaaaggtccacattcccaccacagactcctgcgatctcagtgacaggagagcccttgaccttccaggccctgagattaacttagggagctccaaggagacagcacaaagtttttctccagaaacaaagctgaggctggatcccacacctgccccagacctaaggagcttaagcagaatactattttgagagcccaacccccacccacctgcatcctgccccggggctcaacagcccttgcatctccacatctytggggccccctgacatcctccacccgcagccttactagctgctgccatcaggcctgaagcatgagccacaggcagcaatccatcactcctggcagtggggctgacacacatttgcacacaccctgaggacagattcttacctacagccaccaccgttgctggctgctgccactgggctgaaaagcaagccgtgggcaacaaccctgccagccccagcaatggtgctgctgtgcgtttacatatgaactgaggacaagctcccacacccacagccccacctgtggccaaaac

SEQ ID NO: 865764 - DNA, 545 bp, Homo sapiens
gagcaaactaagaaagtgaaaggacatgaagacacatcacgttacacatcctgtccattccttttccacagtaggatccataggccaagccttgatcatttcatccatgcatctcacattcgatgaactgcccaggactttcttcatcacttctcaacatttggaccaaaggtgttttttccctccaccatttccttaagcctgtactagtttgttttcacactgctataaagaactacctgagactgggtaatttataaagaaaagaggtttaattgactcttaacaggcttaacagaaagcacrgctaggaggcctcagaaaacatggctaggaggcctcagaaaactaacaatcatggtggaaggcgaaggggaagcaagcacatcttcttacatagtggcagaacagagagagagcagggggatgtgccatacttttaaatcatcacatctcctgagaacttacccaccatcacaagaacagcatgggggaaatcatccccatgatccaatcacctcccacctggtccctccctccacaaa

SEQ ID NO: 865765 - DNA, 625 bp, Homo sapiens
acactgcaaagccattctaccacaacatgttgatcccaaatccatattgagtgactgtctagaatttaggaattagtgacaagcccagggccaactctctgaaaacagtgggcaaagaaatttagaaaagcagttagtattagctgaagaagactctagtagaaaatcagtcctgaaatatttttttctttatgcattgcatagagaaaaagagagattcatgttctrgaactgtcttcacaaatcataaattcacttaatgaggaagaaacacctgaaagttcaaatcatatgtttaatttattgcaaacccttgaaatttaggacacttagttgtatgccacaaaggccaataaactgaccataaaattctgagatttttctttgaggtttgtcttaatattagttcacagtcaacctacatcaataatctcctacaatttaataatattcagagtaaaatctttactgtcaggattgtaaaaacagatgttaaaatgagggtaagaattaagaagacatcaatgaattcaaagcttaaaagaacttaacatgagaatgagctgcaaagggaaataataaattatagatgtgtcacttttaaaaagtcatgttcagtgcagaa

SEQ ID NO: 865766 - DNA, 665 bp, Homo sapiens
tcaaataatccccagattcggggctgtaaaaaagatcaactgttgatgcgttcctctcaccccagtgcaaaacactttgtcaagggctctcaaaaacatatcagatcctatgaggctcctgccctgattttccagaaaaacagaatgtttaaaattttcagctttatttcaaaatactagagaaagtagaaaatatgataatacaagagattaatgaaggttcattacacaatcacaagggattttataaagtagaattgattagttgacctmtgtataggtcacactaagtgctgttagaaaacaaagccaaaggaattactgtgaaccggaaagacttgggaagccatcacagagagaaggatcagaatcagaatcaatcaggttttcaaagatgaataggattatgacaggctgaataaaagagaaaagtctttcactttgccaaacaaaatgtaaaggtgagaaaatccagaaggcaggaagttgaacaatttgactgaactagagggtaaaagtgaaccacaggagaaaagattgaaaaagagcatattgtgaaagaccttgaaggtaaatttaaattttgacttctctgataaaagaaaggaaggaaaggagacagagagggagaaagaaacacctccttgatgctccaaacctgacag

SEQ ID NO: 865767 - DNA, 665 bp, Homo sapiens
tcaaataatccccagattcggggctgtaaaaaagatcaactgttgatgcgttcctctcaccccagtgcaaaacactttgtcaagggctctcaaaaacatatcagatcctatgaggctcctgccctgattttccagaaaaacagaatgtttaaaattttcagctttatttcaaaatactagagaaagtagaaaatatgataatacaagagattaatgaaggttcattacacaatcacaagggattttataaagtagaattgattagttgacctatgtatasgtcacactaagtgctgttagaaaacaaagccaaaggaattactgtgaaccggaaagacttgggaagccatcacagagagaaggatcagaatcagaatcaatcaggttttcaaagatgaataggattatgacaggctgaataaaagagaaaagtctttcactttgccaaacaaaatgtaaaggtgagaaaatccagaaggcaggaagttgaacaatttgactgaactagagggtaaaagtgaaccacaggagaaaagattgaaaaagagcatattgtgaaagaccttgaaggtaaatttaaattttgacttctctgataaaagaaaggaaggaaaggagacagagagggagaaagaaacacctccttgatgctccaaacctgacag

SEQ ID NO: 865768 - DNA, 628 bp, Homo sapiens
aaattatggattaaaggaaggagtggagggtttatttaacttactaaaattatctgttccrttacacaagattctctgaagttttcctttaaatggtgcatcagtacattaaaaaatggcaggatttaatggcatggatgaaattactatagtgtcccaaatctccttattttagatagtgaacctttggatataattcagtaagtttaccaggagtgtttgactctggtaaatattggaggtgtgagcagacagcacagaaccagtgagtcgtgtcacctcccagggacacaaaaatgttttccttttgttctaaacggtcttagattgtaagatcagcaagcataatttaaaagaatacccaaatgaataaactttattgttttaataaactcgacaaagcaatcactgacatgaaagtggaacttaattaaagttgaagcatagatagatgagctggaactggagaggaagcaccattaaaaccaaagctcttttctttcatgccctctagccccaaacacacaaaacaggccatagtgtgcagagagatgtcagtcccctattaggataacaataatcatattaataataccatagcccattattatgattataaagaattaat

SEQ ID NO: 865769 - DNA, 628 bp, Homo sapiens
gttacacaagattctctgaagttttcctttaaatggtgcatcagtacattaaaaaatggcaggatttaatggcatggatgaaattactatagtgtcccaaatctccttattttagatagtgaacctttggatataattcagtaagtttaccaggagtgtttgactctggtaaatattggaggtgtgagcagacagcacagaaccagtgagtcgtgtcacctcccagggacacaaaaatgttttccttttgttctaaayggtcttagattgtaagatcagcaagcataatttaaaagaatacccaaatgaataaactttattgttttaataaactcgacaaagcaatcactgacatgaaagtggaacttaattaaagttgaagcatagatagatgagctggaactggagaggaagcaccattaaaaccaaagctcttttctttcatgccctctagccccaaacacacaaaacaggccatagtgtgcagagagatgtcagtcccctattaggataacaataatcatattaataataccatagcccattattatgattataaagaattaattatattgaactgtgttgctgatataataatgaccactttactgaagtaattctcaagggc

SEQ ID NO: 865770 - DNA, 614 bp, Homo sapiens
acttgctcctctctgcttggaattctcctttcccttagtatttatctccatataacagactacatattttattcatatgcttctttattagctattttaccctctagaatctagacttcaaagacaaagatctttgggttttctactactatatcttcacattttagaatagggcctggcatgtcagtattcaataactactctttaataaagaaaaggaagcaaggaaagaaaggtgtctaatatcaagaagctggaaaaatacacacaaaaatattattcagtagtgaaacatgaatgtaactatgtgaaaaacatatgcaattcttagaaatataatttgagtgacacaagcaagttgcagaagactatatacagcataatacccaattataaggaaagctaaatagtatattgttaagaatactttcatatgtgataaaaataaaatactatttttttwaaaaagggattaatttggttcccaggaaatcctcgcctctagctctcacatatggcttaccccacaatataatagtgtatgttatttaaagatgcatatataaatatacagtggagctatgaaaataatacaggaatgtagtgtacacttg

SEQ ID NO: 865771 - DNA, 618 bp, Homo sapiens
ctcaccattgctgaattcttttactaggtgttgatgctaattcatcactggattttcttaactctgcctgttgctcttttggactttgaggcatgtggttctatttcagtgagttacaactccagctctcatcttttaacagcaaactagagaacatctcactcttcatctctgaggacacagtgttctcttcattttaacatcaaaaagtcaccagagagaagacccaaaggcttttctctttggaaaaggaatctttaattgtttcagagggtgaggaatcttcagctctctctggacttgattgtcctcatcattaaatgggaagacttyacctttagcttgattttccagaacacatcaagccccgtatggtcagtgtttccctgttatcatccacttatgtgtatgggttgaaggtactttaagttgtgagccagctgctgcccatattgggtcaccaatgcacttgtcaagcccatgtaaccacatgaagtttgatagaaatataaacatttattttgaaataattccatgtgcacggttggaaaaacagtctcccttccctgagaggaatgagtaatttctcccttttcaagaagtgtacagtagaaaatg

SEQ ID NO: 865772 - DNA, 665 bp, Homo sapiens
acgagaagagctaactatcctaaatatatatgcacccaacacagggggacccagtttcataaagcaagttcttagaaacctttaaagagacttagacacccacagaataatagtgggagactttaataccccactgacaacattagacagatcattgagacagaaaattaacaaagttattcaggatctgaattcagctctggattaaatagacctgatagatmtctgcagacctctccacacaaacacaacagaatatacattcttctcattgccacatggcacttactctaaaattcatcacataatcagaagtaaagcactcctcaacaaatgcaaaagaactgaaatcataacaaacagtctcttagaccacagaacaatcaaattagaactgaagactaagaaattcactcaaaacaatacaattacgtggaaatcaaataacctgctcctgaatgacttctggctaaataataaaattaaggcagaaatcaagaagttctttgaaactaatgagaacaaagatacaacacaccggaatctagggcacagctaaggcagtgttaagagggaaatttatagcactaaatgtctacatcaaaaagttagaaagatctcaagttaacaacctaacatcacaactataagaactaaagaaccaa

SEQ ID NO: 865773 - DNA, 638 bp, Homo sapiens
tcttctaagtttgcctgctcttggttctgtctgctctcgggatgcacacattatctgctcccagccaagtggaacgctccctggggaagattcatggagaatgagttagcagagctctagcagtggctgggtgcatgagactttctgattcaggaggaaagtatctggaagtccacagagagcagaaataaaaagccactttctcaaatcacctccctcagtcgtgatgctaatattttttatcttcatckttctgcctcctgtgtctccattcctcagatggctttgaacccaggaagaaaatatatggattgtatattgtttttctattattgccaaaacaggtaaccacagccttagtgacttataaaaatacattgtttcattttatagttctgtaggtcacagcttccgggaattatgacatggacatcttaaggggctgttattccacctaacacaggttataggctgtctgataccccatgaaggctcagtgcttcctaccttgggagaaaccggcaggaagcagttagctgcacaaacccaatccgtcctgattttgttccaaaagcctaaatccactgtggagatttgctatgtgacttgggagatttaaagagaaggagtgcaggaag

SEQ ID NO: 865774 - DNA, 621 bp, Homo sapiens
atgtagtggctcattaacattctctcaatatgagctgtctatgagctatcgtttccacaatttcctggtacaaagagaatttatgttcataatgatgaagctgaagctctgattgcatgatccccaaggtactttgtgcttttatcaaagaaaaattgtttgttcattgtagtgtctatctgtggacaaatacctttcagttaaacagaatatttttagtaacagtgaaccccaaatgtgtcacacagtctgaaatacctaggactttatctctgatgttactaaagacatcaactaccacacctggcactggtagcagcaccatccctttgccccatgcctagtgtgtagctcaagtctttgggcttgacatcctgaamccaaggaaagaggctgagtggaggagagtggagttcatcatagcttagactgtaaagtcagacacaagtctgaaacgttggttttcacatttcaactagctcattacagcctagtaggtaccggaccaataaaaataaggatgatttccacagcctttttaaatactcagaaaagagtcttaagcacttgatgggacttaaaaatcccagaaagtgattctcatccctcacagaatatgaa

SEQ ID NO: 865775 - DNA, 621 bp, Homo sapiens
atgtagtggctcattaacattctctcaatatgagctgtctatgagctatcgtttccacaatttcctggtacaaagagaatttatgttcataatgatgaagctgaagctctgattgcatgatccccaaggtactttgtgcttttatcaaagaaaaattgtttgttcattgtagtgtctatctgtggacaaatacctttcagttaaacagaatatttttagtaacagtgaaccccaaatgtgtcacacagtctgaaatacctaggactttatctctgatgttactaaagacatcaactaccacacctggcactggtagcagcaccatccctttgccccatgcctagtgtgtagctcaagtctttgggcttgacatcctgaacscaaggaaagaggctgagtggaggagagtggagttcatcatagcttagactgtaaagtcagacacaagtctgaaacgttggttttcacatttcaactagctcattacagcctagtaggtaccggaccaataaaaataaggatgatttccacagcctttttaaatactcagaaaagagtcttaagcacttgatgggacttaaaaatcccagaaagtgattctcatccctcacagaatatgaa

SEQ ID NO: 865776 - DNA, 619 bp, Homo sapiens
aaaatggttccaatcgcctaccttgcaagacacttcaggttcaaagaatttcccttgtaaaagcaacaagggagttgtcagagttttccatttagatcaacaaattcaagttcttaccatggaaaattcagagaagactgtagtggttctccttgcttgtggctccttcaatcctgtcaccaacatgcacctcaggttgtttgaactagccaaggactgcatgaattgaacaggaagatagagagttgtcgaaggcataatctctcctgttggtgatgcatacaagaagaagggactcatgcctgcccatcaccaggtcatcatggcagaacttgccaccaagaattccaaattggtggaagttgatacatggaaaaattttcagaaggagtggatagagrctgttaagatgctaagatactatcaagataaactggaggctagtgactgtgatcaacagcagaactcacctacactagaaaggcctggacgaaagaggaattccatgagctgaacaaagacaagcttctagtcaaaagagatccctagagccaaaaacaaaaggtgcaccaaaagtcaagctgctgtgtggggcagatttactggagtcctttggtgt

SEQ ID NO: 865777 - DNA, 502 bp, Homo sapiens
gttgaaaatctgaaataaaaatggagagtcatagtacaattctgcaaaacttagggtgtggtcaaattactgagtattgttcattttattttgttgttattttcatcttgtactacattacagtcagagaatgtatcctccacaagrgctgcatattgcagggtattgaactcttccattgttccaggggtcctatgagtggtgggaaacaaatgctaactctctgtagaatacttgtttgttaatttatttgtgtgttcctgatctctctagaactataaaaaatgtatttgtcttccattggtattgtgtttttcagcttctcctggattctatcaactgtatattttaattatcttatgtattttgatgttgatatttcatgtaagggatacatgtttttatattgtcttttaatattgtgcccttcataaataacaaatacagtataattagtgcatgtaagataaataaataaatatagcttttgcgtaaattaaag

SEQ ID NO: 865778 - DNA, 644 bp, Homo sapiens
gtattttaaagaaaacttcagacattatatgtttgtactcataaatattaatacgtcaatatatgtctctacccgagggtgacttttagaaatataccctcataactatcattagtggtaaaattaataataatgtcttaatattatactctwtttttccctggtcatctcaaaaatgtctatttgcagttggtttctagtcagaatccagggtctaaacaagacatttggttggtgtgattctccttttttttcttgttatatatgtgttgagtaaacaggcaaaaaaataaagaatactatattttacatttcagatttggcccattgaatctttatggtggcatctagcaaaatctcctatgactccttctgtatttacctgttaactgttcatgatatcttaaggcttgattgattgctgtgcaattttttggcaacaaaactgttgaattgtatcaggattcaataatctctgaaaataccactttttgtgatgttaagatttatcagtgggtccattgttaatggcctagcaattataacattgtttcctgtcaaccttttatcctgatagttttactcacccactagttgcctagattcattatttcatcagagtttaataagggtgacttatgttc

SEQ ID NO: 865779 - DNA, 644 bp, Homo sapiens
gtattttaaagaaaacttcagacattatatgtttgtactcataaatattaatacgtcaatatatgtctctacccgagggtgacttttagaaatataccctcataactatcattagtggtaaaattaataataatgtcttaatattatactctttttttccctggtcatctcaaaaatgtctatttgcagttggtttctagtcagaatccagggtctaaacaagacatttggttggtgtgattctccttttttttcttgttatatatgtgttgagtaaacaggcaaaaaaataaagaatactatattttacatttcagatttggcccattgaatctttatggtggcatctagcaaaatctcctatgactccttctgtatttacctgttaactgttmatgatatcttaaggcttgattgattgctgtgcaattttttggcaacaaaactgttgaattgtatcaggattcaataatctctgaaaataccactttttgtgatgttaagatttatcagtgggtccattgttaatggcctagcaattataacattgtttcctgtcaaccttttatcctgatagttttactcacccactagttgcctagattcattatttcatcagagtttaataagggtgacttatgttc

SEQ ID NO: 865780 - DNA, 644 bp, Homo sapiens
attgctaccaaaagcttttctcagtcttgttttttacattttagatagcagagatagttgatctatcaaactctacaaggacccaattttcttcattctctttgttcccctttgtttgtcttcaacctctttgattcttacttgatatttctttctcatattactttgctaagagctgaagagaaatgctaacagtattgccacttcatgtactgtttttctaagttctcctatactacagtctaactggaggggtgtgtgtgtgtgtgtgtgtgtgtgtgtgtgtgtgtgtgtgtctgtgtttagtataacttgaatttctctcattttagcctccaatatgaatttcttgtctgttccttaaaagatctctaagttaataatayatattttagctttgggtacgtaagattgtactttattactaagctacatgtcagctattgaaataaagcctaaagttttattaaaacctgcagaattcagctacatcacaaatttaaatccccacttccagatcttgctgaaaaaaaatccagtgcaatcacctatatttttctgctccctcttatgtcaaataggtctgtgaagattttttttcttacaagtcaatctttgcctcagcccatcctgctgagacaaat

SEQ ID NO: 865781 - DNA, 668 bp, Homo sapiens
taacagtgagtctatattgccttattttttttggaaaaaaataatttttattagaaaaaaatctttaccttccataatatgcatccttcaaaagtttcttatatttgcaggtatctctagaaagtatcctgtcattattgactaggtgcgtgggtacagaaaccaaatatgatttatttagatgtaaaatctactcataattgtgcttctggaatttgtatggtagaagaactctgaaagattaacacagtaaaatacaaaggcaagttgtaaattgggcacacaaaagtgaaaggtggatattttccatgtgactttataaaaagcagagccaggtcattgtgttatttttattttaaagttaaggtagaagataaagtaacttcttctcttttcatgattaagtttgtgcaggttttgtggtaaaatttatctcttctttaaaagtaatagcaaaagggaataaagtttcctatacctaaggckagtacagaattctaacacagatgaaatttctcttcatgcaacctccaacataaattcaggttcataaatttcaactttttatttaggtgttctataaaaatgttaatctaagtgaatttagtagatctccatttatttatatcaaaagctctgtataccacatatgtgaattaatgattgtt

SEQ ID NO: 865782 - DNA, 700 bp, Homo sapiens
tgaataagtctcaagagatctgttgcttttataaagagcagttccccagcacacgctctcttgcctgacaccctgtaagacatgcctttttcttccaccttgattgtgaggcttccccagcaatgtggaactgtgagtccattaaatctttctttctttataaattacccagtctcaagtatgtctttattgcagcatgagagtggactaatacacatcgattacccaacttcaaactatactacaaagctacagtaaccaaaacagcatggtaccggtacgaaaacagacccatagaccaatgggacagaatagagagcccagaaataaagctgagcacctacaactatcttatctttgacaaagtcaacaaaaaaaaagaaatggggaaaagatyccctatttaataaatggtgctgggctaactggctatctatatgcagaataatgaaactggacccctacctatcaccatatacaaaaattcactcaagatgaattaaagacttaagtataagacatcagactataacattcttagaaaaaaacctaggaaatatccttcttgatactggcgttggcaaataatttatggctaagtcctcaaaagcaattacaacaaaaataaaaatttacaaatgagacctaataaagagcttcttcacagcaagataagtgaccaacagagtaaagagacacc

SEQ ID NO: 865783 - DNA, 700 bp, Homo sapiens
tgaataagtctcaagagatctgttgcttttataaagagcagttccccagcacacgctctcttgcctgacaccctgtaagacatgcctttttcttccaccttgattgtgaggcttccccagcaatgtggaactgtgagtccattaaatctttctttctttataaattacccagtctcaagtatgtctttattgcagcatgagagtggactaatacacatcgattacccaacttcaaactatactacaaagctacagtaaccaaaacagcatggtaccggtacgaaaacagacccatagaccaatgggacagaatagagagcccagaaataaagctgagcacctacaactatcttatctttgacaaagtcaacaaaaaaaaagaaatggggaaaagattccctatttaataaatggtgctgggctaactggctatctatatgcagaataatgaaactggacccctacctatcaccatatacaaaaattcactcaagatgaattamagacttaagtataagacatcagactataacattcttagaaaaaaacctaggaaatatccttcttgatactggcgttggcaaataatttatggctaagtcctcaaaagcaattacaacaaaaataaaaatttacaaatgagacctaataaagagcttcttcacagcaagataagtgaccaacagagtaaagagacacc

SEQ ID NO: 865784 - DNA, 617 bp, Homo sapiens
tcataaggatcctaagggaatcagcactcccaactttggtggcgtttcagggttggctggagcagagtgctatgggcacaccaccatggtcaaaactcaatcaggaaatgcaggatggacatatccaaaggagaacaaagtaaagaataataatcaytgtgataagaagccagtgttgcaggcaggaaaatcatagcttgcataaataaaaaagataagccaagcacagaaatgtgaatgagaaaaatccagagcagtgtggtcaatctgatgtataaagcaagcctctaatgtgagccacatacctgatttttagttttctgttatcctaatttaaaatgtaaaaagcaacaggtaaaatcaattgtaataaacattttatttccctgtatatatccaagtattaatatttcaacacataatcaatatagaaatttaaaatgaggtattttaagttatttagttccattctaagacttcaaaatccagtgtgaatttttcacttacacaacatcttatttcagagtagccacaattcaagcgctcaatagcacatgtggctactggttgttgtattgacagtgcaggcacaaattcataaaggtgatttaatgggt

SEQ ID NO: 865785 - DNA, 617 bp, Homo sapiens
tcataaggatcctaagggaatcagcactcccaactttggtggcgtttcagggttggctggagcagagtgctatgggcacaccaccatggtcaaaactcaatcaggaaatgcaggatggacatatccaaaggagaacaaagtaaagaataataatcattgtgataagaagccagtgttgcaggcaggaaaatcatagcttgcataartaaaaaagataagccaagcacagaaatgtgaatgagaaaaatccagagcagtgtggtcaatctgatgtataaagcaagcctctaatgtgagccacatacctgatttttagttttctgttatcctaatttaaaatgtaaaaagcaacaggtaaaatcaattgtaataaacattttatttccctgtatatatccaagtattaatatttcaacacataatcaatatagaaatttaaaatgaggtattttaagttatttagttccattctaagacttcaaaatccagtgtgaatttttcacttacacaacatcttatttcagagtagccacaattcaagcgctcaatagcacatgtggctactggttgttgtattgacagtgcaggcacaaattcataaaggtgatttaatgggt

SEQ ID NO: 865786 - DNA, 678 bp, Homo sapiens
ggctttgttaatttgtacagaaatgtgttgttttctatgttttttttcctagtctcattattaatattttcttcagtctacttcttgaagttcaaccaaaatttattcaagtttttcattcaatatttggtttcagtaatttttagcttcatttcctaatatattaattttaaagctatgggtctctctttaagtataactttgccatcattaaaatgttcttactttgtgtgtgtccgtgtgtgcatgcgtgcatgtgtgtgtgtgtgtgtgtgtgagtgactgatagggacaggaggcagggaaattctgggcagaagagggtgggrccccggtgagtggcccacccacaagcctggaaccacggcccaaaaagagaacatacattcctgttttcctggttgactgttgccttttccaaaaccactcatggcccacccccatgccaaatcctgtgcccttaaaaaccccaggctctgcaggcagaagagggagaaaaggagaggcagtgggacatgggagactatggttggatgttggagagaagcagcttgacttcagagggatgtcttgatggtgtagtttcagagaggagtcccgccagggattatcttcctactctgcccacttttcagctcccctttccactgagagccactttcatcagcaataaaatcc

SEQ ID NO: 865787 - DNA, 625 bp, Homo sapiens
gtatcagccattaaacaacagcaacaacaaacaattgcaggcttcatctccatctacaatgctgtgttttgattatatcgttttttggtgagaagaaatagaagtagttgagggaccaggaagtgggtcccctaagattgaggaggcattcttctggatttttaaacatttccttgagatttatctgcctcattaacaatggcttttgtcttagaagtgtctttgattttgtatactgacatgatttcctgtactgttatgaatgcatgctgtccttcagtaagcccatcaaacattcttactatgttgtaactgcctgacagattcatcttgctgtccaaatagggttaacttacaagacagggaattacaatagasaaagagtttaataaagctggttaaacagaagacaagagagtttaaagcgttggctaaacagaagactgagaaatcaacttcttcaaatatttggaggctaggactttttaaagaaatttctttaggtgggtggctaaagaatgggtgctgctgattggttggggaggcaattggagcagtatggaaaatggcccttctgctctgagtcctcttctgcataggtgctacaggattggttgagtattga

SEQ ID NO: 865788 - DNA, 625 bp, Homo sapiens
gtatcagccattaaacaacagcaacaacaaacaattgcaggcttcatctccatctacaatgctgtgttttgattatatcgttttttggtgagaagaaatagaagtagttgagggaccaggaagtgggtcccctaagattgaggaggcattcttctggatttttaaacatttccttgagatttatctgcctcattaacaatggcttttgtcttagaagtgtctttgattttgtatactgacatgatttcctgtactgttatgaatgcatgctgtccttcagtaagcccatcaaacattcttactatgttgtaactgcctgacagattcatcttgctgtccaaatagggttaacttacaagacagggaattacaatagagaaagagtttaataaagctggttaaacagaagacaagagagtttaaagcgttggctaaacagaagactgaraaatcaacttcttcaaatatttggaggctaggactttttaaagaaatttctttaggtgggtggctaaagaatgggtgctgctgattggttggggaggcaattggagcagtatggaaaatggcccttctgctctgagtcctcttctgcataggtgctacaggattggttgagtattga

SEQ ID NO: 865789 - DNA, 616 bp, Homo sapiens
agcattttgaagaatgttattaggaagaaatttatttttagttttgacattgtttcttgtttttcttcctttccatttctgtcattttcttctgtctaatttgtctcctattcaatccaacaatattaaagctttaaccatttctactaacaagtcatatgagaaagatacaaataagtaaaatttaaaaaatataaaacaacaatacccagccaaaatgttgataattcccctttataatcaatggaattcccctggaattctatcagttcccagatatgttttctcttaagaatgatgcttcctccctcatgaagagagtacagaagggaatagaaaagattctcttctctattcttcttctttctattttttatttttttttgaaaataatctatgaatttctraaagacagaagaaagaatgtttttaatatacaagtaaatactgcctttataagtaaatgtgccagaagatcaaccagggcaactctgatgtcttcaatgattttgttcttaaatgatgtgactttttttttttttttttagcaaaagttagactttcagactctcagcaacagataatgcattactttcccagtatgttcatggcataa

SEQ ID NO: 865790 - DNA, 565 bp, Homo sapiens
gggtagtgggtggatgaatggcagatagctgaaagaacactcgggggccataggcaggtgaaatgtagttttattcagcagctctctcatcagcagcttaatcacattagctctctcacattgttcacctttatctccgctgtctgctccagctctgcggcgcctgctgaccccatgcctacaacagcatggccggctctcccttgccttcagggtcagcagcttaactctttctgtctctgggcaccagcaggagtcctgccatgactcctctctgtcttgcagatggacacctctggttctctctctttctctgggtaccagygccatgtcaagccatgcccaggagcccttacagtgtcagcagggcagttataccttctacagacaatagtggctcagagccaagtatgaacttacataaacagattatgtaacaagcagaatatgtgcctgcaccctaaacttgctgagtcatgcaggcctggatgtctgccttggcctaattcttgaccaaagcacatccatgtaccttacactctacccactaggttgagggagacat

SEQ ID NO: 865791 - DNA, 690 bp, Homo sapiens
taatttcatgtacatcaagtttaaatgggagcccctggttaactacctgcagggcttgagcctgctgaatagcctgcttggctattggaaaaggctgcctcagtcttatccaaatctaaggcaagaggggcgttgccacttttaaatctgcaagagaatcagaagttaacataacatcatcaacaagactatgacatagagtggggctatgcatattgccctgtagcaacactgtgaaagtccattgtcaccctccaatgaaggcaaactattcctggttctctggacaagaatcccagttccattgttaagcagtccagcaagtctgtgacagatggtacagctgccaagcygtgtaaaacatccccagccagaatgtcctcaggcatgggagagacatacacagttcatgagcggaaaaccaagcagcagataccaagatgcaaagatacaggtttcgctttcactgaccagtcttcataaccatcaataactgcagctctgcccagaaacttatccgggttcagagtccagtagattgccaagtccacatatggtctttggtcatccagtgcccccctaagccaggcatcttggtcagtctcttatcaaacagaaaaggctttacacttccacctaactgcagcaggcagtctgtgaactggaatgcttgggcaggactgggttgcg

SEQ ID NO: 865792 - DNA, 690 bp, Homo sapiens
taatttcatgtacatcaagtttaaatgggagcccctggttaactacctgcagggcttgagcctgctgaatagcctgcttggctattggaaaaggctgcctcagtcttatccaaatctaaggcaagaggggcgttgccacttttaaatctgcaagagaatcagaagttaacataacatcatcaacaagactatgacatagagtggggctatgcatattgccctgtagcaacactgtgaaagtccattgtcaccctccaatgaaggcaaactattcctggttctctggacaagaatcccagttccattgttaagcagtccagcaagtctgtgacagatggtacagctgccaagccgtgtaaaacatccccagccagaatgtcctcaggcatgggagagacatacacagttcatgagcggaaaaccaagcagcagataccaagatgcaaagatacaggtttcgctttcactgaccagtcttcataaccrtcaataactgcagctctgcccagaaacttatccgggttcagagtccagtagattgccaagtccacatatggtctttggtcatccagtgcccccctaagccaggcatcttggtcagtctcttatcaaacagaaaaggctttacacttccacctaactgcagcaggcagtctgtgaactggaatgcttgggcaggactgggttgcg

SEQ ID NO: 865793 - DNA, 574 bp, Homo sapiens
aaagccagagcctgtatttgagcataattatgagattcatatattaatggagtaatttttagaaataaatggccaaagacattttaaaattataaattttttggaaaaataatggtgttatctaatttgaatagaatttactgtgatgctcagtatgttacttagaattaccatgtgattaatttttaattcccagctttttattgaagttctccaccttgttatctaactatgtaactatgttcatcatgtttattttaatatccttgtctgataactccagtatctacatcaactgtgggtttgtttctattrtcttttctgttttctggctttgatacacttggtctctttccttggtatgtctgataattgtctaatgggatgctgtctgcctgttatgtataaaaattatggaggtaatctctagatactgttttctttgtcatgagagaatttccctgttgcctccttcaaccagagagaagggatagaatatattaatgcaattcagcgagagatggagcttgtttagaattgcagtttcatcttagtaaaagttggtttaacgttg

SEQ ID NO: 865794 - DNA, 574 bp, Homo sapiens
aaagccagagcctgtatttgagcataattatgagattcatatattaatggagtaatttttagaaataaatggccaaagacattttaaaattataaattttttggaaaaataatggtgttatctaatttgaatagaatttactgtgatgctcagtatgttacttagaattaccatgtgattaatttttaattcccagctttttattgaagttctccaccttgttatctaactatgtaactatgttcatcatgtttattttaatatccttgtctgataactccagtatctacatcaactgtgggtttgtttctattgtcttttctgttttctggctttgatacacttggtctctttccttggtatgtctgataattgtctaatgggatgctgtctgcctgttakgtataaaaattatggaggtaatctctagatactgttttctttgtcatgagagaatttccctgttgcctccttcaaccagagagaagggatagaatatattaatgcaattcagcgagagatggagcttgtttagaattgcagtttcatcttagtaaaagttggtttaacgttg

SEQ ID NO: 865795 - DNA, 550 bp, Homo sapiens
tagtaagtgctgtttctataagtctttgcactagcccacggatgcatggtatgacacaacacccaacaagaatgagtacacctgttatggctgtaagagaagtaagaattgaggctatgattcctttctatttactgaaccacctctctagccatcttaagaaagggttgtcgactccagaatttttagttaacttattasataaagcagtaagtccttgtagggcccttgttatgttcccatcaagggcagtgttgtttgggatgagggtacaacactgagttttaatcataacaaacactatcttttttggctaatatcatttctgtggccattctattcttccaggccatctgtctagtaggccccaattgttctgctattcctttgacaacatccctgatgtaattgataaatcgctgttgattataatagatgtaatttatccaatctatgtttttattgatagtcaaccaccaaaatattgactcaaatcctgcagttatttgatcccaggctttaaatttatgtggtacccttgtgagcctaa

SEQ ID NO: 865796 - DNA, 648 bp, Homo sapiens
ctatatatactatgtttttcctatacatatataactataataaagtttataaattagacacagtaaatgattaacaacaataactaataataaagtacagcatttataatgatatgctacaaaaagttatgtgaatgtggtctatttctctctttctcaaaatattttattatactatacccacctttcttcttcttgtgatctattaatctgattatcaaggcagctaataaatgactaatggacaggtagcctatatggcatggatacactaatcaaatggatgatttacattttgggcaatatggagtaggatggtgtgtgatttcatcatgctaaacagaagagcatgcaaattaaaatttatgaattgtgtatttccggaatttcccatttagtatattcagactgtgattgactgtgggtaactgaaaccatggatagcaaaactgcagataaagggagamtactgtattaccttttatataaggattaaaagtaatttacacacctttgtagagttacattaatccatatatgtttatatatctacctttgcttgtgagatttatgctcttatattatttttagagcatttttgtttaaatttgtagaactcttctaatcatttattgtaagacagaccta

SEQ ID NO: 865797 - DNA, 631 bp, Homo sapiens
tattctttgagaataacgaaggttgtctttgtagtcattaatttctcaatcttttggggaccatttctggttaatgctgaaaaagaataatataaaagcactcatggctgctgtctggaaagaatgaatgttttcgcaaatggatatggttwtgtattttttagaaatagccgccaaatgctacatctttttatagttttataaaagggaactttacatactcaactcttattaagaaaaaaggtgctcaggctgtttaggctacttgcaatattttgggaaattatatgtatcagaaccttaattgctcaatgctcttatacttttcctttcgcctgtattctggtccttgcttcttcctctgatttacctgaagcttgctattttagccatgaatcatccaccaatctgtattatccacacttgcaacatttaggaacaatcactccttcctcatagctacgatctgtatatctccctttcctttcatctttctctatatttcttgctgctttttttcttttcctctttgtctgttgcatgggaactatcattgccaaatatacttctctttactaactgctgtttctcttctaatattatctgatataactatatctgcatcatcttg

SEQ ID NO: 865798 - DNA, 637 bp, Homo sapiens
tttgagaataacgaaggttgtctttgtagtcattaatttctcaatcttttggggaccatttctggttaatgctgaaaaagaataatataaaagcactcatggctgctgtctggaaagaatgaatgttttcgcaaatggatatggttttgtattttttagaaatagccgccaaatgctacatctttttatagttttataaaagggaactttacatactcaactcttattaagaaaaaaggtgctcaggctgtttargctacttgcaatattttgggaaattatatgtatcagaaccttaattgctcaatgctcttatacttttcctttcgcctgtattctggtccttgcttcttcctctgatttacctgaagcttgctattttagccatgaatcatccaccaatctgtattatccacacttgcaacatttaggaacaatcactccttcctcatagctacgatctgtatatctccctttcctttcatctttctctatatttcttgctgctttttttcttttcctctttgtctgttgcatgggaactatcattgccaaatatacttctctttactaactgctgtttctcttctaatattatctgatataactatatctgcatcatcttgttatatgattt

SEQ ID NO: 865799 - DNA, 645 bp, Homo sapiens
agagggatctggtgagtcagagagagggatggcttgaatccgtggttcccatgcctagctgtgcagcctcttggacattctagagccctacctgagcagaatctctacagacagtgcctgggaattagctataacctaagtgagttttmaatacaagcgggagtatttttggttgggtgtgcatctaccaggcagaagttggggctactagacattttgcaacacctagaacagcacagcacaacaaattgtcctctatccttaaaaaaaaaaaaaaacctttcaaacatctcaccagacctcaatggagataaaaatctgagtctgaagcctagctctgtttgtcatataaacacaaagtatttttcgcacagttttaatacgtataaattttccagaaaagcagctaccatgtcaattgaggacaagttaaacttgattttcttctgtaagtttataaaagatctttcaccatgggaggaagaaaaccacatccccaacagcaatgccactcatgttatttggctctccagcgaggcacaagctgtttcagcctgcatttgcagctgctgcattaaagacttctctgtgtatagctcaagcatctgacaactcctttctgtcttctagctcagtcgtgtctac

SEQ ID NO: 865800 - DNA, 601 bp, Homo sapiens
tcatacacaaagctctggtttcctaacatgcttagtgattagaaaaattttaaaactcttaacaatctctgagagtacccagccagcgaggttacagcgaggctagcagctctcatttgcactgaccgagcaacagtctacaacatctcccagcaacaaatagctcagtgaagacagccctgctgatggcatgctcgcttgaaatatttaaaaaagagagagaaagagaaatactatggcacaataagactctctgtctccagggcgtttgttytgttttgttttgtttgatgaagcagtttgaataagaaaaatcaagaaaaccactacttccgttatcacctacctcatgttaagtgcatggaattatcatgacactattcctaagaaactacttttactttatgctgattctgaagttcttataccaagtaaattaatgatgtttgaaaacaaaaagaaagcaaatgtcccacctcaatccaaaacattccaagatgcactatacatccttggctttagaacaaacaagataatcctttttgagaagattatcagcaatttttttctcttgtgtttttctaacaaacaaaatggatca

SEQ ID NO: 865801 - DNA, 585 bp, Homo sapiens
cctgtctttgactcagtagttccattcctaggtgtctactcaagagaataaaaatatctgcccatgaaacagctgtactgcagagtaagtttaaaaataatagcccaaaattagaaagtgcccaagctgcaggagaactggtaaactaactgtggcacagtcacacaattgaatagtgctcatgatctactggcgcacacaacatggatgaatcccaaaacatcattctgagtgcaagaaactagacacacacaagcaygtactctatgctccatttatatgaagctccaggaaagaccttcaaatctataatgatagaaatcaaaccaataattttgtaggactggggtaaggggaattgaccaggaaggggcagaagggaatcttttgaggggttagaaatatcctatatcttgcctgttgtggttattacacaggtctatacatttttcaaaattcgtcaaactgcacacttaaaacaggtgcattttcttgtttgtgaattagaacaaaataagttcatctttaaaaatcagattgagaaaataaaacaagacctgagaagcactacaacaaacaagcgca

SEQ ID NO: 865802 - DNA, 642 bp, Homo sapiens
tagacaccggggtgcagaaatgaatcaaaccacctagggatgccatggctcagtgcatcatctccgtgaaaacagagcttgagttttgccagaaagaaatgtactagaggccagaaaaaaatgagcaggccctgtttaagaagcaggtatcctcactcttccattatcaagcatgttaacatacctacaccccatatcacattaatttaagacaacctcaaaaagctgggttgtggtagccttactgctatgtcctacagatctttcaccattaattcacctgtttttgcagttttcttttagtattttggagtctaatttttttttttgtctgaatcatttctttgggcctttgaaaagcttgtaagacctaagcacaaggccttttaatggccatcaataamacagcctgactagttcaacacaaagtattttccttagactacacaaactaaatcccaagctattattcactttgaggcagtacacagcataacacaaggtatcagaggtgtgttggcccatcaattggaatcacatcatagcagaaactcaaaggggagacccccacatcctcccgctcccagtcctaggacagtgccctcctgactgacccctgtgagtatgccccagatatgaaag

SEQ ID NO: 865803 - DNA, 572 bp, Homo sapiens
attgtgtcacatatttatgatgtgtgtgtgtattccagtaaaactactaggtaattggaagaggaggtaggatggattttactcgcagtcgtgttttgccaacccctgctgtacaccacaagccccactctgatttaagaaatgatttctagatcttactggtggccaatgactagctttttgtgacaggtagaaaaagtacatgaaagttgctattatacactacgtgctttcatgaaaatttagagtatttttgctagccgattatgagaactctagtttccattgatggctaaaagttttgctttccttaaatggctggtttaaaaaattattttggatattctagtaattttcagggtaatctttttttaaagtgsatttttggcctattgttagaggcaaatctttaaattatttataagttttaggtctgctgtctaggagccagggttggagtcagacaccttagaaatgtacctgatgctctctctgttctactgtggtgaactggcatggaaaccactgtggtgactgagcatcccatatgcttgaaattctaagcaacatcc

SEQ ID NO: 865804 - DNA, 669 bp, Homo sapiens
taacatagcataggtcttttacaaactgcctcctgtgtgcctatgagccccatcccgcccactctgcctttcctccctgcatcactccagctactctgaaacacactgcaccttcctaaatgtggaaaggtaaaattgccagacttttcataggatgcccagtgaaatttgaatttcagataaacartgaataatgtgtgtggttatacaatatttgggacatacttttactaaaaatattgcatgacacatacttattcttaaaagttgttcattatctgaaattcacatttaatagggcatcctgtactttccgttgctaaatctggcaaccctacagatgtgagctgttcactttcagctcctgctcagcccccagctggatcactacagctccccctgactagctccctggcctgcaagactcagcccagacatcagtgcccctagaaagcctaggctaacttctctgcaccatacacacctaggatgggtcagatgtgcctgctgcaggctcccgcccacctgtcacacctctctcacaccacacactttgcaagtatttgtttacctctctccagtactagactgagcttcttgaggtcaggcactgtcttactcaccacgacgtggcttcagtgccaaaaacatagtataatcacagtttac

SEQ ID NO: 865805 - DNA, 637 bp, Homo sapiens
tcttatgttgggggtttgggtcaattcaaacttttgataaattaatggatgaatattttatatataaattcttgaatgtttgactagttcattaggatatagataaaaatttactaaagtaaaataaatttaaagaaatatggccaaatttccctacctaataactacagggtctttatctagttatatttgtgtattattgttctaaaaatatcattgctctttgataattaaaaagaaacaatcttgttttcatttagatttttttagttcctagagaggctggacatcttaatgttatttgctattttcataaaatattaaatttatgaattatgttttcctaggctttgttaatttaaatttaaaytgagggaagggaatctttctataataaggccatgaactcacttctacaaatatttataaatatttactcatttttatattctttatttttattctattggttgtggttttaaaatatatatatacggatgtaataaatgttttatgcagccaaatctattacaaatttttcttttgtaatattgtattgatttgtatgcctggaaagtcctttccccatcccaaacccagtcagctacttattcttccttattttatagcttaatca

SEQ ID NO: 865806 - DNA, 637 bp, Homo sapiens
tcttatgttgggggtttgggtcaattcaaacttttgataaattaatggatgaatattttatatataaattcttgaatgtttgactagttcattaggatatagataaaaatttactaaagtaaaataaatttaaagaaatatggccaaatttccctacctaataactacagggtctttatctagttatatttgtgtattattgttctaaaaatatcattgctctttgataattaaaaagaaacaatcttgttttcatttagatttttttagttcctagagaggctggacatcttaatgttatttgctattttcataaaatattaaatttatgaattatgttttcctaggctttgttaatttaaatttaaactgagggaagggaatctttctataataaggccatgaactcacttctacaaatatttataaatatttactcatttttatattctttatttttattctrttggttgtggttttaaaatatatatatacggatgtaataaatgttttatgcagccaaatctattacaaatttttcttttgtaatattgtattgatttgtatgcctggaaagtcctttccccatcccaaacccagtcagctacttattcttccttattttatagcttaatca

SEQ ID NO: 865807 - DNA, 633 bp, Homo sapiens
ctcaaagcaccacttcatggctacagaaattgctgaagtaactatataaaggaaggatgtaaactgttataacaggcatcacaatcaatgtttgaaaaatactttcttaaatggacaaactgcaatcattttacaggaggcagaaaggatgactcaaatatctgtcaatgcacagcctcattactgatctttaatatcttcacattacagaatcatgtgactttaggaaattcatgcatgatttgactcaacttactcatctttagtgagggctaattgactgcctggaaccaagtataaatacattatctctagattttcagttaagctttggttgttattgttatttttgggttttgtcggcttttggggttatttttctatatcataattcttctctaaattctaccaaatttcagcctttgatgaaagaaaaactaragacaatgtaaaaactccaaaacaaaatatctgagatatctggaactatcattactcttttaaaatcagtggtctaaaacgtcaaaatagggttaacatctaagtttatacggatatgaatgagaaccaggaaaaaactgctttcaaagagagcaataacactaatttatgttgtgcataaattatctgagc

SEQ ID NO: 865808 - DNA, 594 bp, Homo sapiens
ggaggggataagagaaatgctgtttatcattaatgggaacttctcttggttgccttttggatccttcaatcttgtataatcccactgggaagtcaaagtaatgcttacaaagcaccatccttttaatgtctattaattgattatcagttcttttgttgcccatgaactgtactcagaagtctgtggcacttacatataaatatctgtatcttgtagaaagagaaggtacatagcaagtaagtaataaaattaccccagaacccatatgctcccaaaccattctgacgtctgtaactattcttttttgagacrgagtctcatgctgtcacctaggctgtagtgcagtggcccaatcttggctcactgcaacctccgcctcgcctgtaactattctttacatcacggaattaacttagaataggaaacctccagaagtgtacctgtccccaaatttcaggcaacttcataagcatttctggattttgtctataggtatccttaaaagtgtacaaacttaaaacagaacatcgaaagtcagtgacccctaattatattacttctccttcacaaaacatatctttcaaatcaacaagc

SEQ ID NO: 865809 - DNA, 568 bp, Homo sapiens
aaacatcacattaatatcattaatattaaacgcaattctcactttctttccgtcctcctttaacaaacactttcccagttgtactcaaccttcatgctttctttgttcccacagtctgtgcagagatggattgctacattttctgagtgtaatttctgagtcatatttatctttatcatttctcagtttctttgtcctcttttgtatgatatattgaagtttcagagaaactcttgctcatgtccttatcttacaccaaactaggcactctctcagaaaacakaaaaaactcttatatttagccaacattgatggagtgagaacttgaaatgtgtaactcctttatctaagcatatttaaggtaaaattgaaaattattttgctacataccacataatgctagcgtctgctatgtgttatgtataatactagcctttaaaggagcaaagatgagtaagacttggtaattactctcaagcagctaatgatttggtggcagacttgctaatggatgcttgtatgttccatggatttagagaaatgctagagaaggaaactcagccagagg

SEQ ID NO: 865810 - DNA, 579 bp, Homo sapiens
aattgacttaaccggcaggcccccactccaaataaaactggtttaaagattgccttgagatcagaaattaaggcaaatgcttatgactgatgcaatgtaatacaaaaattcaaaatatgctttgccacccggcagactgattctcatttagataagcacccataccttccgaaaccaagggctcacataagtgaaatggtctaaactgcattaatcagcattcatccttcagtgagcaggtcaaaggcaaggagcccaggtgaggtgcacctctcatagacttgcrtagctctctattctttatgattatgtttgtgtggccttttttgttaacgtcatgaccctaccagagtatggtgtccatgagggcaaggcctgtgtctgcttcaaggtggctggcacataggaggtgtcttaacagacaggattggatcaaaggtgtcaaatgcaagggggttgcaaaaaactcagtaactaaggtaagtcagatttaaatgcaatatttatagatataaaggtcaatgcaaaaaattactgatgaatataatatcaacattttaaataatagaggatcgatat

SEQ ID NO: 865811 - DNA, 579 bp, Homo sapiens
aattgacttaaccggcaggcccccactccaaataaaactggtttaaagattgccttgagatcagaaattaaggcaaatgcttatgactgatgcaatgtaatacaaaaattcaaaatatgctttgccacccggcagactgattctcatttagataagcacccataccttccgaaaccaagggctcacataagtgaaatggtctaaactgcattaatcagcattcatccttcagtgagcaggtcaaaggcaaggagcccaggtgaggtgcacctctcatagacttgcgtagctctctattctttatgattatgtttgtgtggccttttttgttaacgtcatgaccctaccagagtatggtgtccatgagggcaaggcctgtgtctgcttcaaggtgsctggcacataggaggtgtcttaacagacaggattggatcaaaggtgtcaaatgcaagggggttgcaaaaaactcagtaactaaggtaagtcagatttaaatgcaatatttatagatataaaggtcaatgcaaaaaattactgatgaatataatatcaacattttaaataatagaggatcgatat

SEQ ID NO: 865812 - DNA, 666 bp, Homo sapiens
ataaaattaaacagatcaatgcaacagaaatatgcctgtcggctagaaataatctcaagtatatatgagaatttaagatataaaagtgggtgtttccattcagttgggaaaacaagacttgagtatccggtaaatgtagtaaatgtttactggcttcgtatttgtaggagaaaactaagatggctatacatattctaattctgggtgtattaatgatgtcattaaaaactagaactgtgtgtatgtgtgcgtgtgtgtgtatgaacaaattaagatgagtcttttaggcatagaaaaagacataacatcaaaactggaaattagaaagtaagatatgtttgtcaatatgataattcaacagtccygaacagcaaataaaacagtgtaaacaaaatgaaaatacgtaacaaactgggtaaaaatatctgcaacatatgtgataaagtgttgctgcacttatatataaaggaacagttgtcaaaggataaaaattgtcaaaaggatatttatattttcgtcataaaagaagtagaaatggccagcaataaatgaaaagatgatcatttagcaaatacatttaaattaaaaaacaacagtacagtgtttttctcacctatgagattaacctatgcaaacctaaggattacattcaatgctgagcattga

SEQ ID NO: 865813 - DNA, 666 bp, Homo sapiens
ataaaattaaacagatcaatgcaacagaaatatgcctgtcggctagaaataatctcaagtatatatgagaatttaagatataaaagtgggtgtttccattcagttgggaaaacaagacttgagtatccggtaaatgtagtaaatgtttactggcttcgtatttgtaggagaaaactaagatggctatacatattctaattctgggtgtattaatgatgtcattaaaaactagaactgtgtgtatgtgtgcgtgtgtgtgtatgaacaaattaagatgagtcttttaggcatagaaaaagacataacatcaaaactggaaattagaaagtaagatatgtttgtcaatatgataattcaacagtcccgaacagcaaataaaacagtgtaaacaaaatgaaaatacgtaacaaactgggtaaaaatatctgcaacatatgtgataaagtgttgctgcacttatatataaaggaacagttgtcaaaggataaaaattgtcaaaaggatatttatattttcrtcataaaagaagtagaaatggccagcaataaatgaaaagatgatcatttagcaaatacatttaaattaaaaaacaacagtacagtgtttttctcacctatgagattaacctatgcaaacctaaggattacattcaatgctgagcattga

SEQ ID NO: 865814 - DNA, 612 bp, Homo sapiens
cgtgttttgttggtgttttgttttgattatttataacataataacatgtgtttattactgaaaactgcacaaataaagataatcaaaaatcacccataatcctaccaccagaactaaccactgtttatcatcttagtgtatttcctttccaacctatataatatgtacagatagttggatgctattttaattctaagcaaaattgaaaatatttgaagctgttgtcaaagaggaagtaccctggtttgagtattttaactcatcatctttcagaaatgaaaaataaaaataatagaacttgatactagtttcttttttaaaactagattttgttgtttctgtgwttccagcttttactggtataattttccttttttgacttgaattcatctcataatacctctatttcacttctttttcttctctggtactttaggccttatgcttaaaaatgcttttgatactttgggctttttttaacataacaggttattcctatagatggggcaagtaaaatatttgggtttatgtatgaatctttaaaattatttttataattataaagttattaaagcctggagtgcagtggcaccattacagctcactgcagcc

SEQ ID NO: 865815 - DNA, 654 bp, Homo sapiens
agcacagctaggctgcccacatggctgttagtggatcttggatgatgatgcacaagcacttatcattcatctaattgatcactcagctgctcacatcaggcttgcctggtggtttgattattatgcaagtttttttcytaatgtgataaaatatatgtaatgtcatatttatcattttaatcttaattgtacactaataagtgtacaatttagggggcatcaaatacattcgcaatgttgtataaccatcactattttttcattatctctgagaaaaactcagtgcatgataaataataactccccccatactgtctccccctgcctgcctggctctggtaacctctattctacttcctctctgtttgagtttgcctgttctaggtaccttatatgagtcgaatcacgtatttatttgtcgttctgtgtctggcttatttctttaagtatagtattttcaaggttcattcatgttgtagcatacgtcaaaatttcattccattttatggctgaataatattctcttgtatgtacacattaccacattttatcaatcagttcatctgctgatggacacttaggttgtttctacctttaatatttttttattttaaaaatctgagtaaaaagtacagaccttgccatataaggaaa

SEQ ID NO: 865816 - DNA, 654 bp, Homo sapiens
agcacagctaggctgcccacatggctgttagtggatcttggatgatgatgcacaagcacttatcattcatctaattgatcactcagctgctcacatcaggcttgcctggtggtttgattattatgcaagtttttttcctaatgtgataaaatatatgtaatgtcatatttatcattttaatcttaattgtacactaataagtgtacaatttagggggcatcaaatacattcgcaatgttgtataaccatcactattttttcattatctctgagaaaaactcagtgcatgataaataataactccccccatactgtctccccctgcctgcctggctctggtaacctctattctacttcctctctgtttgagtttgcctrttctaggtaccttatatgagtcgaatcacgtatttatttgtcgttctgtgtctggcttatttctttaagtatagtattttcaaggttcattcatgttgtagcatacgtcaaaatttcattccattttatggctgaataatattctcttgtatgtacacattaccacattttatcaatcagttcatctgctgatggacacttaggttgtttctacctttaatatttttttattttaaaaatctgagtaaaaagtacagaccttgccatataaggaaa

SEQ ID NO: 865817 - DNA, 515 bp, Homo sapiens
attatacccattgcatttttggctttattttctgttctcccaccatctctccctagatgtggcacaatcacagaagtggacagtttttggcatatgtctgtttttctttattgattgcagctttaattttattattatatttggtagcacctcaggtttttgttcccaaggatatgttttctgtaccatgtttattcttagagtcttttagaacccagtatgtaatgcattttaaattctcattataagatgtgcaaggttcagaaagtccttgttctaacaggaatcaatttttatttttatttttttttaatttttaaatttttttttttttttgagatggagtctyactttgtcacccaggctggactgcagtggcgtgatctcagctcactgcaacctgcacctcccaggttcaagcgattctcctgcctcagcctcctgagtagctgggattacaggtacgggccaccacgcctggctaatttttttttttttttttttttttgagatgg

SEQ ID NO: 865818 - DNA, 515 bp, Homo sapiens
attatacccattgcatttttggctttattttctgttctcccaccatctctccctagatgtggcacaatcacagaagtggacagtttttggcatatgtctgtttttctttattgattgcagctttaattttattattatatttggtagcacctcaggtttttgttcccaaggatatgttttctgtaccatgtttattcttagagtcttttagaacccagtatgtaatgcattttaaattctcattataagatgtgcaaggttcagaaagtccttgttctaacaggaatcaatttttatttttatttttttttaatttttaaatttttttttttttttgagatggagtctcactttgtcacccaggctggactgcagtggcrtgatctcagctcactgcaacctgcacctcccaggttcaagcgattctcctgcctcagcctcctgagtagctgggattacaggtacgggccaccacgcctggctaatttttttttttttttttttttttgagatgg

SEQ ID NO: 865819 - DNA, 675 bp, Homo sapiens
ggatgacagtgagcataggaaactctttgagacattttgggaaaaagcagagcagaatgatggagaaatagccagaggggagagtggagtggtgtgagcgaaatttttagatggcataagtaatgggagtcatccaccagagggaacattttgatgataagggagaaacagaagagaattgctgttgttgatgtctttgagcaggcggtaggagatatgctttagtattcaagaagagagcttggcctgacctaggaccataaacagctcatccatagaaatggtaccacgagggaagatggagtatggggcacagctgagggtggagcatatggcaggcacttgtggaagttctctcctaactgttattttctcagtgaaatgagaaatcataagcagagagcagggtggggaagggggcattgggaaggagagagtagaaagcttgaaaagtttccatgagagttggagagcaaacagattaggtaaacrtagtgtgatcagcattaaaggccctcttaagttaaaggtcatatatttgaagtgcttctggggtgcgggtccagattagacagagggttggatttaacagcaaatcaagagggggccaagggacagattataaggatggagtgtgacatgtaagctgtttaggagggagatgaggaaatgaag

SEQ ID NO: 865820 - DNA, 669 bp, Homo sapiens
aattcctgtaatacatatgatacctttcaggatctattaggaaatttctaaaagaagaaaatccaattatggaagataattgccatctaatttcaaaggaagaatcatccctagtgacttctttatgacacaacttgtkttgttgtcacttatggatgaaaaacatacctatagtcttgttgattttgcttagtctcagtaatcattgacttgtatttgttgaatgatttcagtagggtcagatgccatatgaggatgtttacagagcagaaataaaatcaaagaccatggtttgtgggccaggagggttgacttgtgctgcattttatctcagagtaatcttcaatcagcaggctcagagttctcagaatagctggtattcattccctattacccagttatagaaaagaagctttaaggcatacacacacagtcatacacatgtatgtatacatgcagacatatatacacacacacactgttgtttgtttttgtttacagattagtaaaaccaggtgccaaatttattttgatatatgtcaagacttgtcttacaggcaggatgtccaggcttctcttgctatgaatccttgaagatctctgtcttctgaaaaagatgcatgatgctaccccactacgattatctactggctgaattgtagccttatt

SEQ ID NO: 865821 - DNA, 669 bp, Homo sapiens
aattcctgtaatacatatgatacctttcaggatctattaggaaatttctaaaagaagaaaatccaattatggaagataattgccatctaatttcaaaggaagaatcatccctagtgacttctttatgacacaacttgttttgttgtcacttatggatgaaaaacatacctatagtcttgttgattttgcttagtctcagtaatcattgacttgtatttgttgaatgatttcagtagggtcwgatgccatatgaggatgtttacagagcagaaataaaatcaaagaccatggtttgtgggccaggagggttgacttgtgctgcattttatctcagagtaatcttcaatcagcaggctcagagttctcagaatagctggtattcattccctattacccagttatagaaaagaagctttaaggcatacacacacagtcatacacatgtatgtatacatgcagacatatatacacacacacactgttgtttgtttttgtttacagattagtaaaaccaggtgccaaatttattttgatatatgtcaagacttgtcttacaggcaggatgtccaggcttctcttgctatgaatccttgaagatctctgtcttctgaaaaagatgcatgatgctaccccactacgattatctactggctgaattgtagccttatt

SEQ ID NO: 865822 - DNA, 669 bp, Homo sapiens
aattcctgtaatacatatgatacctttcaggatctattaggaaatttctaaaagaagaaaatccaattatggaagataattgccatctaatttcaaaggaagaatcatccctagtgacttctttatgacacaacttgttttgttgtcacttatggatgaaaaacatacctatagtcttgttgattttgcttagtctcagtaatcattgacttgtatttgttgaatgatttcagtagggtcagatgccataygaggatgtttacagagcagaaataaaatcaaagaccatggtttgtgggccaggagggttgacttgtgctgcattttatctcagagtaatcttcaatcagcaggctcagagttctcagaatagctggtattcattccctattacccagttatagaaaagaagctttaaggcatacacacacagtcatacacatgtatgtatacatgcagacatatatacacacacacactgttgtttgtttttgtttacagattagtaaaaccaggtgccaaatttattttgatatatgtcaagacttgtcttacaggcaggatgtccaggcttctcttgctatgaatccttgaagatctctgtcttctgaaaaagatgcatgatgctaccccactacgattatctactggctgaattgtagccttatt

SEQ ID NO: 865823 - DNA, 638 bp, Homo sapiens
acccagaaaggtggggtgtgcgacacttgccaacctcaaatccaggtcacttggtgagaaataccccaagtaactgtgttgcttgagaatcaggagcctggaacattgtgtttttcttactctttgaatagccgaggcctcctccccaagtagatccaggttcattgccactctctttactcccagtatgtggccacttttggggggagttagattaaaggggtggggtcagcaaggaggggaaggcgaattgataaggccaaggccagagtgtgaacatctaaattgtttattctatgtagtcttcagaaacatccataagttctaaatcaaggaacatctattttatttcaccatcattarttactgtacaattatatttaaaatcctataagcttttacagttttctgcatgctttcctttaccatctcttatgtcatccttacagcacgtatgttaccattttacaagttagcgaaaacttgaacatagtgttaaaaccatagccttctaatttctttcaaaatagattaaatggtaggatttatctggaactaatcgagaagattaattcatcagcttgagggacagcagaatatttgtgaatattttgttacgtattatttttcctgaaatg

SEQ ID NO: 865824 - DNA, 689 bp, Homo sapiens
tagcccctcctcttgaattgaagatgagtcattaaagcttcattcatttcttgagactgttactctaccaatgctaaaatcactgcactttcaataaggcattttaggatttctaagttatgtatggtaaacagctggatgaaaaattcaattgcattgtttttccaaacttacagatgattggtataaagaaggttaagtctttagataagtaatgaaaatgtttgctttacacaaagtagagactatacaatgttttatctcaagatgtattgatgtactgaaaaaatgcattttaaattttttccagaaaactactgagttacaaaaaatgggtcatcgtcccactttgttacacagtggaaatgataaatctaggtaggattttatgcstgaaagagaatcttaaaatgtgtcagtacatttttgtttcagatttagaactcaggttcttggagactatgaaatgtgtccagagtcacagagcaagaaagtggcatagctaggactacaaaacaactttttcaaaatcctgagactctcccaatagtttatgaacatgtatttatgtattacatatttattattgaacatgtatttctgtgtcttgcagtcactggttttgaaacagaattaagggatgaataggatataatgtctgctctcaaggaacccagtttcaatttcta

SEQ ID NO: 865825 - DNA, 592 bp, Homo sapiens
tatgccatttatagaggtccactcctctttccacaaacccctgcctctttgagtaaaactgtcctagtgactcatctaaaaatgggagcggatcacatcatgctgttggcgccctgggctttttcaaggaactcccagcttgaaacctaggaaactttcggaatatgagcaggggaacttatctttctattgttgatgcaaagcattgatttactttttaaattgtttattttatgaacacagtgagaaactcagctataaagctgtgtcatcataccagtgacttccwtaaactcaaaatcactgattgaacactttggacaagccttctcaatattcatctgtggcttgacattttagactggaaagtttgtttgagaaaatactcctaataatcaacagcacaaagcttcttcatgactgaaaagaagggtcttcttagaaagattgtgataagaagactgaaagaagtcgcctacatccagttcccttataaataaaactatagtttgtactatgatcactagacacctaccagaaattccaatcctgatgttcaattgacataaaatttacctgctgtagattacat

SEQ ID NO: 865826 - DNA, 597 bp, Homo sapiens
gaaattactccttattactaatccagtcttaaggatttacagaatgtttttctttcagatttagttaaatttcccagcatgcctctgaatgaggtaagaaacatacatgtcctagaagaaaaaaaaagtcagaaaaagtggcattttactgtatttcattattttgttattagaaggagaggacacaatttgatacaccagcatcagtcattaaaggtacgctcttgtgtgggggagctgtgctgaagggatagargccagtagctaatccactgttatacttttctagaagaataaacagactcctgtgaactaccaactttgagtattagattaggataaatccaggagggctttattccacccaaaattcaagtgaagacagagtcttcaaaaagccccaggatgaagaatcacttcctgagaatcagggaacatttacctttattaaccatcattagctgattccggcttacagaaattcccctgagaatgggtgttgaagtaatcactgctctctgctctacttccttaaaaagaaatcagttttaaatgatgggtcttcactctttccagacattcccagctccacagact

SEQ ID NO: 865827 - DNA, 550 bp, Homo sapiens
aaagagattgattaattctatttgagagaactgaagtcatgttttacccacctctgcttttgcacaaaacattcttcctgcctagagcacctttgcctggctattgttacagggtcttcaaagactccattcagatgtcacctcttcttaggagcctttcttgaaacttttggtctggattcattgtctctttttacttcatttctgtatttatatctgtgacatcatatattaattattgatgtgtgacctctttgctgaagtgtaagaccccagaagrcagggattcaatcttttatttcagcattcccagtgcctgaatgtcactctgctttcaaagaaaatgattaataaatgaattagttaatttagcatgatggtattgcaatttgtgtgcttatcagagttttatgattgaaggcaaatgtgatatttgtatattttgaccaccagtgttttacatcaagaaagaatagttatccaaaaatggaatagatatttccatgtactcatgtgaaaaattatctgtggggcttttcagaaaatgggt

SEQ ID NO: 865828 - DNA, 553 bp, Homo sapiens
acaacttctgtggccttcaacttccccaagctagcatgatgggtagattaatatgttcctttttggcaggaatgggaactaatttttttttaaagaaggaggaaaaaacacgttgtgctaaatcagtgattactatggcaacaggcactctatacatgttagaaaaaaagaagaaaaatgcaatcacagttctctaaagaggaagatagcagaaataggttcacaaactttwttttcaaaaatcaataaatatgtagtaggcatccactatatgctctgtataatcttatcgaaatgtctaacagaaacttgatgataaaaccaaatctgccatttgcttgctaccgctctgtttcagaaattcactcacacaccacacacacacgcacacacacacactaacagaaaaaccacaaagaaatagtatataccatattttaaataaaatagttaaatttcagtgccctgatgaatccacgttagaaaaagcaaatatcttactagcttattgggcagaaatacccaagttagaacaaattactctccctagaat

SEQ ID NO: 865829 - DNA, 640 bp, Homo sapiens
ttctatattttgtagcaattcaagtttaagcacttttatgcatttaattatactctcaaatgttctgccctaatccctaaagcgggttttgatgatttctaaggggcactactcatcagtggcataaacatttgtttatttggcttaagtgggaacatttttcaccatgacttgctttgaaaagggattatatacttttcagtcacaatttagagatgccaatttgagatacaaagtagctaaattgattaactggtatgagagattyccttagtagcccatcagtctcaactaattctttttttttttttttttttttttgaggcagtctctctttctgtagcccagactggagtgcagtggcatgatttcggctcactgcagcctccacctcccaggttcaaacaattctcatgtctcaggctccaaagtagctgggattacaggcacatgccaccacacccgctaatttttgtgtttttagtagagacagggtttcaccatgttggccaggctggtctcaaactcctgacctcaagtgatccaccccgctaggcttctcaatgttttgggattacaggcatgagccaccacaactaattcttaagtaccccaagttaatatcctcctgataagtcta

SEQ ID NO: 865830 - DNA, 640 bp, Homo sapiens
ttctatattttgtagcaattcaagtttaagcacttttatgcatttaattatactctcaaatgttctgccctaatccctaaagcgggttttgatgatttctaaggggcactactcatcagtggcataaacatttgtttatttggcttaagtgggaacatttttcaccatgacttgctttgaaaagggattatatacttttcagtcacaatttagagatgccaatttgagatacaaagtagctaaattgattaactggtatgagagatttccttagtagcccatcagtctcaactaattctttttttttttttttttttttttgaggcagtctctctttctgtagcccaractggagtgcagtggcatgatttcggctcactgcagcctccacctcccaggttcaaacaattctcatgtctcaggctccaaagtagctgggattacaggcacatgccaccacacccgctaatttttgtgtttttagtagagacagggtttcaccatgttggccaggctggtctcaaactcctgacctcaagtgatccaccccgctaggcttctcaatgttttgggattacaggcatgagccaccacaactaattcttaagtaccccaagttaatatcctcctgataagtcta

SEQ ID NO: 865831 - DNA, 640 bp, Homo sapiens
ttctatattttgtagcaattcaagtttaagcacttttatgcatttaattatactctcaaatgttctgccctaatccctaaagcgggttttgatgatttctaaggggcactactcatcagtggcataaacatttgtttatttggcttaagtgggaacatttttcaccatgacttgctttgaaaagggattatatacttttcagtcacaatttagagatgccaatttgagatacaaagtagctaaattgattaactggtatgagagatttccttagtagcccatcagtctcaactaattctttttttttttttttttttttttgaggcagtctctctttctgtagcccagactggagtgcagtggcatgatttcggctcactgcagcctccacctcccaggttcaarcaattctcatgtctcaggctccaaagtagctgggattacaggcacatgccaccacacccgctaatttttgtgtttttagtagagacagggtttcaccatgttggccaggctggtctcaaactcctgacctcaagtgatccaccccgctaggcttctcaatgttttgggattacaggcatgagccaccacaactaattcttaagtaccccaagttaatatcctcctgataagtcta

SEQ ID NO: 865832 - DNA, 686 bp, Homo sapiens
ggcttaaaacaacatacgtttgttatctcagtttccatggattagaagaccatgcagtgtttaactgggctccctgctcagggtctcacaagcctgcactcaaggtattggccaaggctggggtcttatgtgatgcttggggtcctcttcaaaactcatgtggtttttggcaaaattcactttctcgaatccatagacttcatggtggcttgcttattcaaagccaactggagaatgtctttgagtttcttctttcagtgaagccctggaccctcttcttaatgggttacctgattaggctaggctcactcgggataaactcttycttgagtaacttaaagtcaaataattaaggaccttaattacatatgcacactttcttcacttttgccatacaaaatagcccagtcttaggagtgacatcccctcacctttgccatattctattcataagaagcaagttgtatgtattgttcccactcaagagaagagaattatatacctggtcatggttcatgggggtcatcttagaattctacctattgcataatagagggcatggtaattataatagacatatggaataagtttccattttggaaattacaagtattcagattatttagttgacaggagagattttataagccctactcctcctgcattaaggacatatagaatctgct

SEQ ID NO: 865833 - DNA, 611 bp, Homo sapiens
ccacagaatatggaatccagttgtttttgatgtttgccatggtagtattatctatgaagaaaaatcctcagcatgacagtgagatttcccaaagggagaggagtttgtggcttccacttaaaaaggaaagtgtcacgtgtacttgtgtaaagttgattaatgcttcttacttgtaaattttgccaaggttaacagatctctgtggtagaacacacatacaccaatttaagagacacagcaactgggtgtttattttttctccccctcttcttttctttttcttccccttargatttctgtgaccatatatagccatggcatcagtttacattctggaggattaaagttttctgtttagattcttagaggaaagtctagggttgaatgtgattattataaatatttcttgatttctggtagcaagctatctaatctttcctgcattaagaggggtttatcataattttcttcttttcaaatccttggcctttgcagctgtcccttggaaaagcatttcatttgctccaaagagaataaacaatgcttataaattaagtcatgggtaggatgttacatcccagttccatgtacgaatatagtcctggtttttt

SEQ ID NO: 865834 - DNA, 614 bp, Homo sapiens
agaggcacacatgtaaatgccactaaataaataaataaataaacctcccttggaaaaacgtcttgcgtaaactcaacaagcaaataatgtgactgttcagagtcaatcagccttaaagaaatgaatgttataactcagggcccaaatacaatgctgtatttgcgtcagtaggcacagtcctcataacaactggttattaatcatccaagcgaggcgatgtcattattacctgccacaaaggggcaaatttaaaggaagtcttttgctctgatgggcttatttgcatgcatattttaagaaacatattgtctgtggtataaataaataactackgaacaactgacataatggtaaggcacggttttttgagttactgcttcagggtagcttgggatttaataataatgatagcttttgtttttaatcatttaccatgtgccagtttatttctcattgatcatctctaatcttcacaagtgctccacaagtgagtttggaggtctgttttgtagctttcttgcatttacagcacatagtttagtagtgacacaaaataactgtttaagtaaatgttagtgctatcatcatcatcatcatcatcatccctgcagtgg

SEQ ID NO: 865835 - DNA, 608 bp, Homo sapiens
tgccattttggaaatcgttatagtttaatgcaaaatgcctgaattaaaattctagttctgtcacttaagtatatatgactctagccagcttactttcatgaaccatttatttttctcatttgtaaaatgcgaatgataatatctccttgtagtatcgtcagaaaagtcagggacagtgaatacaaagtaattagcacagtacctgggacaagtagatgctcagtccatgatttcagtcattattgccatcagtgccctgagtagggcccttaaaccctgctctgtggttctggcataatgaattagaggacaaacctggctaacttcacatggagcccaagattatcagagcatcttccttctacattcttttttatttattttctattgaaagactctctcttctccagctttcttttttctayccatatttccgtgttagcatgcagattaatatttaaatttaaatgcttggtgttctttcccttgtgtagggcctctacaatgaaggtgatttttgttgtgcttgaatatgtgtcttttaattgtattggaaggatgggaagatgtacttccttgagtatgtccaaagtgttagggccctctta

SEQ ID NO: 865836 - DNA, 534 bp, Homo sapiens
accatgtgaagaaggtgcttgcttttcctcaccttttgccatgattgtaagtttcctgaggcctcccagccatgcttcctgttaagcctgtggaactgtgagtcaattaaacctcttttcttcataaattacccagtctcaggtagttttttataacagtgtgagaacaaactaatacaaagagttttatcwgcttcaattttttggaatagtttgagaagaattggtattaattcttctttaaactttggtagaattcagattaagcaatttggtcctggacttttctttgttaggagatgttttattactaattcagtctcattacttcttattggtctgttcagactttctatttcttcttggttcaatcttggtaggttgtatgtttccaggaatatatccatttcctctaggttttcaaatttattggtatattcttgttcatggtagtctctaatgattttttttttatttctgtggtatccattttgatgtctcttcttctgtttcttttttttttttctgagacag

SEQ ID NO: 865837 - DNA, 638 bp, Homo sapiens
agtggtttgtagttctccttgaagaggtccttcacatcctttgtaagttgtactcctaggtattttattctgtttgttttggctgtttgtctgttattggtatataggaatgcttgtgatttttgcacattgattttatatcctgagacttttctgaaattgcttatcatcttaaggagatttggggctgagactatacggttttctaaatacacaatcatgtcatctgcaaagagacaatttgacttcctcttttcttarttgagtaccctttctttctttctctagcttgattgccctggccagaacttccatactatgttgaataggagtggtgagagaggtcatccttgtcttgtgccagttttcaaagggaatgcttccagtttttgcccattcagtatgatattggctgtgggtttgtcataaatagctcttattattttgagatacgttccatcaatatctagtttattgaaagtttttagcatgaagtgctgttgaattttgtcaaaggtcttttctgcatctattgagataatcatgtggtttttgtcattggttctgtttatgtgatggattatgtttgttgatttgcttatgtcgaaccagcctttcatcccagggatgaagccaac

SEQ ID NO: 865838 - DNA, 604 bp, Homo sapiens
cagtgacaagctcagtttttcctgcaggcactttgaattccagccttccaatttgaacctaacaccattaacttagttttagctaccatgtttttaaaggcacaaaactctgtttctgtaaataacctgaacagaatgccacactcacactcatacctccatcattgcttctcattggccttagagacatttctcaggacttgaattataaaatwtcatgaacaaaccggcaaaccaaaaaatttgctccacaccatttaaaatgaaataaagttagtatttatcatttataagctttacagggaactttgctaaggagccagtgacttccatatagaaggcagtggtatattcaaaatttagatgaacgtatatgatgaaatcttatgcaactctgctaaagtttggagaacaattttttcacatgatgtagaggacacgtgtgctactgagtagcaaggaaataagtgtttagcagatttacaaatcccatgtctgctcctgccccagctccgagggtcacagcaccagcaggtgtatggctggaggcacctggtgtgggagcaggcagtgaggtccccacactgccagtcagctacaagca

SEQ ID NO: 865839 - DNA, 587 bp, Homo sapiens
tgtagtaattcagtcctacctcctcattgtgtcttctttactaagctggaaatcatgtggaaataaaagcaattttgctttcatgtagaagataaaagggaatggatatggcaagtggcccatatcgcaaacacccttgtgctcctggacagaatttcatcacatggccactccaagctgaggaaaactggaaaatgtggttgagccagatgcttgggaaaaagagaacttggcaattggccaccccaagtggtctctgccacataaggtcacaataaactgacactctagatccttctttggrcaataccgtggccacttccagactcttccttcctgacactgattgctatacctgaaccaagaagagggtggtgcatgttcattgaataaatgaatagaacttttactcttctcaactctctttggcaagctttagtcgttccctctaagtggatgtcctctcaaataacttcatctctcttctctccttctgagctccaaccttacattcccaattctttcctgggtaccttcacatgaggttcaaccatttcaaattcaatatgacaaacctaagctcagca

SEQ ID NO: 865840 - DNA, 587 bp, Homo sapiens
tgtagtaattcagtcctacctcctcattgtgtcttctttactaagctggaaatcatgtggaaataaaagcaattttgctttcatgtagaagataaaagggaatggatatggcaagtggcccatatcgcaaacacccttgtgctcctggacagaatttcatcacatggccactccaagctgaggaaaactggaaaatgtggttgagccagatgcttgggaaaaagagaacttggcaattggccaccccaagtggtctctgccacataaggtcacaataaactgacactctagatccttctttggacaataccrtggccacttccagactcttccttcctgacactgattgctatacctgaaccaagaagagggtggtgcatgttcattgaataaatgaatagaacttttactcttctcaactctctttggcaagctttagtcgttccctctaagtggatgtcctctcaaataacttcatctctcttctctccttctgagctccaaccttacattcccaattctttcctgggtaccttcacatgaggttcaaccatttcaaattcaatatgacaaacctaagctcagca

SEQ ID NO: 865841 - DNA, 504 bp, Homo sapiens
acagtcatgtgaacaagaaataagcctctatggggtcaaaccactgtaattttgtgatttgttacggcaggagggctcatgctaacaaatgcagcaaggattacaacttaaatcaaagcatctagctctctatctcctcctggtaagtactcaataaacgttagccagaaggaaaaagaaagaagaaagaaatagaacttgtgattatgagcagagaccctggctcacagccttccagggagctctaagatccaggacatccagctcttctttctttcctttgacacctgagacatatgagatgtattttctcayctaaagacaggaacattatttacagaaataaatgagtgaatgactcactgtatgtgagagagttcatgggcctcctgaaccctatctttgtacaacctgtgcatgtgcatatgtgtgcatgtgtgcgggcacacacacacacacacacacacatgctcactcatctcatcaccccattcccaatccagg

SEQ ID NO: 865842 - DNA, 647 bp, Homo sapiens
gaggagaccaaagacagctaccttctttatttgatatggtcacctgatgttagcttttggcctgcattgttcttcgtatttgtcactatcaatgtttgaagtagcaaatttgtaaaaatggccaggatcatgcagatctggtgtgcrgaggtatggtcccaatgtctgtgctggaggggatcttgtgaccctcaatcacacctcttatgttccaagtcacttattgtgatgcttaaggctaaaagtccaagtattttcagctcaagaagttagaagatgagctccctagatgcctgggcatccccaggtcaccaggttctttgaagtgatggtggtatttacggtagctggttcactacaagaagagaggtgatggacacatgaatgggaagagcaagtttctgaagctggtggccactatcaaagctggcttggctcaaggccaacatggcctgaaggcaaagtccagtgaccttggctcagctgtctcggcagaaagaagtgaaatgcctcctggacacctggtctttcattgatattcctgcagcccctggggcatgggcacagatagatgcccctggtctttgcccctgtgagggtgtgtgtgtgtgtgtgtgtgcacgtgtacatatctcaggaatctggct

SEQ ID NO: 865843 - DNA, 616 bp, Homo sapiens
aggaaacccatctgtacagttgatggamatgtaaactagtacagccattatagaaaacagtgtggaggtgcttcaaaaattaaaaatagaactaccatatgatccaggaatcccactacaaggtatatatccaaaggaaatgaaatcagcatgttgaagagataactgcaaacaggctattttatatgttagaaatacatctcagtgttatttgcacttgtttattttccaatttaggatatttatactaaagacactcaggaatccaaaacttctttaaaacaaagtaaattttgtcatccttgctattaattagtggggtggggagacagttctcaaaagaagattaaattggctatggctcaacagaaaaatactagaagaaactactccttaggttttgaatgagaaggcttagactctctgttcctggctctgccatggacgagttgtatggcatatggctttgggcaaatcatacattcacttagctttatgattggagcgaaataccactagaccctcttttagagtttagcagcctataaattatatgactactcagttttgttttatttaaaaaaaaaaaaaagcttgttactcagtgcagatgttt

SEQ ID NO: 865844 - DNA, 599 bp, Homo sapiens
tacaactaacctactgaacatcatagcttaccctggcctaccttaaatgtgatcggaacacttatattagcctacagttgggcaaaatcatctaacacaaggcatattttataacaaagtgatgaatatcgcatgtaattcactgaatactcaaactgaaaaacagaatggttgtacaagtactcaaagcacagtttctactgaatgcatttcacttttgcaccattgtaaagtcaaaaaatcataagctgaaccattgtaagttggggatcatctgtatttatttattttttattcatttactcactcactgatttatytttggctctcctcaatagactccccttcctgattgcaccctgatccctttttgagaagcttgttgagctttccgctatggaaacaaaagggctcaaccagtttccctcagctcaacacggccatgggaccttctgtgggaagggactgccatgggactgaccgtgacttaagcttagccagtgggatactctgtgtcagagctcacccaggactcaagattgtagataaggccaggtggctgtcactcattagcccagaagcagcccaggtggccttga

SEQ ID NO: 865845 - DNA, 679 bp, Homo sapiens
tggtcaacatcttgatttcagccttgggagaccccaagcagagaatcaagcagtgcccaggcttctgactcacaaaaactgtgaaataataaatgggtgctgttttaggtaactaagtttgaggcagttatggcagcaatacagccatctaccccttaccaaaatacactttttgaacatgccatgttctctctaccccagggcctttgcacaggctgctccctctgtctgtgatctctttctcaactcttcatctggctaccaccagttcatccttttggtgttagatcaaaaatttcacctcttgataaaagtagtctttatctaaagtgggtccctccattaagactattccaagaccctgtttgtctctttctgagtttttgccagagtttgtaattttcttttttcttgtttatttttccctatttggctataagtgcagaatataccatgactcaataagtaattgttsaatgaatatgaattaatgccttaccccattcaatcctcgtgaccaatctgcaaggtagatactattactatctccattttacagatgagaaacctgagaagtaaagagattaagtagcgttcccaagatcacacagccctcgctgatggagaccaagtatgaccctaaaagttcatggtctcagtctctgagctctcatgcccc

SEQ ID NO: 865846 - DNA, 580 bp, Homo sapiens
caggtctcaaccaatttttaaaaattgaaattatatcaagtatcttctcaagtacaatggaataaaactagaaaaataaggaaaactagaataaaactagaaaataaaaataaaaacttgggaaactatgaatagatggaaattaaacaacaagcttcttagtgaccattgggtcaagaaagaaattaaagagagaataaaaaaatttcttgaggcaaatgaaatttgaaacacaacataccaaaacctatgggatacagcaaaagcactgctaagagtgaaattaatagcaataaatgtctacatcaaraaaactgaaagacttcaaataaacaatctatcattgaagtagaaaagcaagaaaaaacaaaactcaaattattaggaggaaagaaataataatgatcagagcagaactaaatgaaatagagactaaaaataaaaatacaaagcaacaatgaaatgaaaagttgattttatgaaacaataagcaaaatctataaatcactggctagattaccaagaagaaaagaaataacacccagataagccaaatcagaaataaaaaaggagtcattac

SEQ ID NO: 865847 - DNA, 570 bp, Homo sapiens
atgaatagacaattctcaaaagaagacatacaaatggccaacaggcatatgaaaaaatgttcaacatcactaaccttgagggaaatgcaaatcaaaaccacaatgagatatcatcttactccagttagaatgaatcttattaaaaggacaataaatcacaaatgctggcaaggctgcagaggaaagggaactcattcactattggtaggaatagaagtcattaatgccaatagggaaaacagtatcgagatttctcaaaaaactaaaaatagaactactatatgattcaacaattccactactgggratatatccaaaggagagaaggtcagtatatcaaaaggatacgggcacctccacatttattgtggcactattcacaatagcaaagatatagaatcaacctaagtgtccatcaacagacaaatagataaagaaaatatgatatatatacaatgaaatactatgcagtactaaaagatgaaatcatgtcatttgcagcaacatgatgggacttgaggacattatgttaattgaaataagccagacacagaaagacaaatattgctt

SEQ ID NO: 865848 - DNA, 581 bp, Homo sapiens
atccctgtttggattgggtgggaaagagccaagaaagctttccaaattgggccaagtttaggtgaacagagttagccccacatggaagccagttttgtgagttcttttatgcacaacgccaagtagcttccaaagaaaattaagctgaagtcacccagactcaggagctaggaarggtattctgatactgccctgtttttctaggcatccattaaccttcatgttgtccctcctgtaaatgatgaatgggatcaagtgtgagctgaaagtgcaagagtagacattagggttggcttcaatgagagtttcaattggctttaagggtaaatagataaataaagaattattacctacatatagacatctgagaaattgtaggggtctctaaagagtacaactttattattaatatcagtattaactactaaaatatattgcttgcttgcatgtctggcgttgtcttaagcactttacgtgcaatctttctattaatgtttgtaatagctctatcatctaataatagctccatagaggcgctattattagtatcattacacagatgagcaaactgaagcttagag

SEQ ID NO: 865849 - DNA, 621 bp, Homo sapiens
tgagacaatgctggagcaagttaagaatttggggggctattggctgtattttggatataaaaaggactgcaatctggggaggccaagggcaaaatgctatggtctgaatgtttgtagccctccaaagtccatatgttgaaatcctaaccccaaggtgatagtactaagagatgaggcctttgggaggtgatagtgtcatgaggatggaacctttatgaatggaattagtgtccttttaggtgaggccccagagagctaccttgttccttccttgatgtgaggattcagcaagaagttgccctttatgaagcaaagagtaagacctcactagacatcagagctgctggtgccttgatcttggactccttaaccccaagaattatgagaaataaatttctgttgtttataagctacctaygtcatggtattttctcatattagtctgaacagaacattccaagatataggtagtgtcagcattataaaacgaattatgtgagatgtgctaatcggagaggaaattcagaaggtcaatctattgtatacagcagaagagaaaagttttaaagctagttgaaagaaaaagagttaacttagcaaatttaggggtagaatatactg

SEQ ID NO: 865850 - DNA, 639 bp, Homo sapiens
attagtgaagtcttgctgcccatataataactgtgtttagacatacacagaatatttcttaaagttctaaactctaagatttccaaacctgaagaagaaaatataaaataggtgttacccttgctataggagttgcccagcaaaagattctatttcccttttctccayagaagcaaaagtcatacagatatgttagagttagtggttcatgttttttctgtaaaagatatattttattcttgttttaccaatctagccagagaaatgttttgaacttgtttccctaagtaaaataaaacttgtaggactaatagtaggaggtcttaggagaaaattggccaatgaaaagcctcatctcccacttctgatataacagccttagtggagaggaccttaaaaagtcaagactaggttagtgcatcaataagatagcagaataagaattttcagtgctcatcctcttgcagaaatatcaatttaaataaccatccatgcagaaaaacttcctcaaagagctaagaaatacagcatctggatggggcacagaaataagaaaaaaagcattgaagagtgtaggacagtttcacgttatttatctcacctttccaccaatcccaggaagcacagcatgaagagagg

SEQ ID NO: 865851 - DNA, 589 bp, Homo sapiens
gcagaaagaacacacacacaaaaaaaacattcaagcaaggatactatactctgcaaatctgttcttcaaaaacaaaaaagataaggactttcctagacaaacaaaagccgaaagagtttatcaccactatatctgccttacaagaaatgctaaaaggagttcttaaagttaaaagaaaaaggttctaactaataacrtaagttgtgaaagtataaaacttactgtaaaggtaagaatatgtatttagaatatgttaatactgaaatggtgattaataaatcacatttaaccctttagtacaaacatcaaaagacaaaattatttttaaagtgtaactacaataatttattaatggatatataatataaaaatatgtaaattgtgacatcaataacataaaatgtaggagcagaagttaccatgtagagtttttgtatgcagtcgaaattaagttgttatcaggttaaaatatactgttacaactggaagactttatataagcctcaggataaccacaaagaaaatatctgtagtagacatacaaaagtaaagataaagaattcaaaaacataatactaaaaaaaaagcc

SEQ ID NO: 865852 - DNA, 609 bp, Homo sapiens
ttctgccttgaaatacatagatgttatctataatagtcatttctattgatctagatggtcactttcctatttgctattacacaggtatagacaatagtgaaagacaatgctccctgtacctcagatggtgcataataaaatgcccccacacccctgctacacaatacaattacaattatatttttattatataataaaaatgtttaaagcaccttccgatrtatttgtttcctgtaaggaaagtaagtctttcagattaattactatttagaggtttctccccactaaagaaaagctattgtttgttgtgcaattattttctgcctctaaaatatctcccacctaacacaagtgagaataaaagctttcggcttcctagctcactgaggattgacatttaaccttttcatgcctagacacatgtgggttactgagtacatgtggatcaccaaggaggaactccatggagcctgggaaggtcaacagaaggggccatagcggagagaaaaggcacaatactcaggtaagagaatttctaagacagcatctaccatcccagttctcaattctgagcgcttctctccttctgcataactacttctccaattc

SEQ ID NO: 865853 - DNA, 609 bp, Homo sapiens
gtcagttaatgtgcatgtggatcacccagtgatcttattaaaagtcatgctcaggttcagtaagtttgggatagggcctgagatcctgtgtttaccagaagctcccatctgatgctgagactgcaggttccatagactgcaaaagtgaaagatatgaaatagacatccaaggactgaggtacagagcaccccagtgttatgaggctggggaaataagagagacttagcaaaggagattgaaaagagataattagtaagagaggaggagaagcaggagagtagcatcctgaaacctacgtgaagaatatgtttcttcgtgtttgtcaaatgatcctcatggtcaagtaagacaagaactgaaaaataaccactggattaggaactatggtggtcattagtgattctgaaaagagtagttatagtggagtggtraaagcaaagtctggtaggattgggttcagaagggaatcaaaagatggaaactgaagaagtgaatgtaattaattttttcaagaaactgttgtgtaaaagggaacagagaaatagtaatagctggagagcaaacaggcttaagggaggattttgttttttctttttttttaagaggta

SEQ ID NO: 865854 - DNA, 626 bp, Homo sapiens
cacacctgtaattctagctacttgggaggctgaggcaggagaatcgcttgaacgccggaggcggaggtgcagtgagctgagatcatgcttggacaacaaaagtgaaactccgtctcaattaaaaaaaaaaaaatcttgaaatcattcttgactcctttatttctcacattccactcccatatccaacctatcatcaaaatcaattagctctaccacaaaaawtatctagaatctgatcccttctcacttaaccactactgtctcttatctacagagaagccaaagtaatccttttaaatagtaagtcataccatgtcactcctaagctcaaaggccctcagtgactctcatatcaatccaaagaaaagcaaaaagcaaaaagcaagactcttcatgctgtggcctgttacctctccactctcatctcctactactcccatcttgctcactctgcttcagccagactggcttcttgctagatccccaaaaatatccagcatgcccctgccttaaggcctttgtatgtgctgttcccttggcctgaacacctttctttccaatatccgctgggctcatcccctttgttcaaaaatgacattatcagaaaggccctgcatgaccagtca

SEQ ID NO: 865855 - DNA, 626 bp, Homo sapiens
cacacctgtaattctagctacttgggaggctgaggcaggagaatcgcttgaacgccggaggcggaggtgcagtgagctgagatcatgcttggacaacaaaagtgaaactccgtctcaattaaaaaaaaaaaaatcttgaaatcattcttgactcctttatttctcacattccactcccatatccaacctatcatcaaaatcaattagctctaccacaaaaaatatctagaatctgatcccttctcacttaaccactactgtctcttatctacagagaagccaaagtaatccttttaaatagtaagtcataccatgtcactcctaagctcaaaggccctcagtgactctcatatcaatccaaagaaaagcaaaaagcaaaaagcaagactcttcatgctgtggcctgttacctctccactctcatctcctactactcccrtcttgctcactctgcttcagccagactggcttcttgctagatccccaaaaatatccagcatgcccctgccttaaggcctttgtatgtgctgttcccttggcctgaacacctttctttccaatatccgctgggctcatcccctttgttcaaaaatgacattatcagaaaggccctgcatgaccagtca

SEQ ID NO: 865856 - DNA, 611 bp, Homo sapiens
gaaatgtcaaagccttagtagagctttcagtgggcatgttttttccacctaaggtgtccaaattaaatgtttgtaggtgacatgctgttcttaagagtagataatccccattccaaaccctgtgaactctgacagctgcatcatgatttctacaaatgtcagaagctcctatatcctcgtggtcacatttggctccgtcttccagtcttcattgcatctgcytctctgctctgtctcagggcagttgcttagtcttttgcctttgccactggttcatggaatatagcccttttccatgattttctcaaatactaacaacaacaacaaaacccacaaaagaacgtatttatgccagactttactgagggtttggggaactggagggggtttatattgcaacagtgcctggaattcctggtgttaaaagagctctggttcttttgctctctctttatttctcaggaacatcccccctactcctgctcaccaacttctgccattttcttatgcagagcaatcagctgcctccaattcttcccctgaacagcactgggccaggtgcatttctctgcccattcaaggattttactaaaactttgatatttcttgta

SEQ ID NO: 865857 - DNA, 611 bp, Homo sapiens
gaaatgtcaaagccttagtagagctttcagtgggcatgttttttccacctaaggtgtccaaattaaatgtttgtaggtgacatgctgttcttaagagtagataatccccattccaaaccctgtgaactctgacagctgcatcatgatttctacaaatgtcagaagctcctatatcctcgtggtcacatttggctccgtcttccagtcttcattgcatctgcttctctgckctgtctcagggcagttgcttagtcttttgcctttgccactggttcatggaatatagcccttttccatgattttctcaaatactaacaacaacaacaaaacccacaaaagaacgtatttatgccagactttactgagggtttggggaactggagggggtttatattgcaacagtgcctggaattcctggtgttaaaagagctctggttcttttgctctctctttatttctcaggaacatcccccctactcctgctcaccaacttctgccattttcttatgcagagcaatcagctgcctccaattcttcccctgaacagcactgggccaggtgcatttctctgcccattcaaggattttactaaaactttgatatttcttgta

SEQ ID NO: 865858 - DNA, 657 bp, Homo sapiens
gagaggaaacatgcatttctgctatctagcaaaataatacataaaaatacatcactttttaatagatgtaggggaggtgaattattcaatctggttaacacatgaaacagcaaatcttacatgtagtcatgaagttattgcttttggaaatgatctattggcctgctattatcaccaaaatggaaaggaataaagacaagctctgtaaacagttgctggagtttrggaggagaggaaagaggaggaaattaaaatgaggggagaaatctcacctgtacaaaaagcccagcagtcctgtttagcatatctctaatcattgctgacaacaacatctaggacttactatgtgcttcacacatattatctcatttaatctcaaatcagcccacaagggaggctgtgtatttatctaccgctaaggcacagagaggttagatagcttgcccagggtcattcagtcagtaagggcagagtctgactctggggattgtgcccttcaccttcgcattacattgccctccaggaaagtccaggaggggattttctttccccatataaatgcatgtaaggattccaatggctgtaaccattaggatatctttttcagaatgcaaagcgtcatcttgcttacagaagatatatgcagacatactgtga

SEQ ID NO: 865859 - DNA, 663 bp, Homo sapiens
tagtacttgaatgctctttgcttgttttatgtgggctttagttttgtgattccactgcctgggttccagtcttcggcatgctattattacaactttggacaaattacctaagcttactgtgactcagtttcttcatctgtaaaatggggataatgtaatagaacctctctaggaggcactgttgaggagastgagtgaggcacacataggaagtgctctgtaagagttagctgtgcatcctcccggcatgaggtcattgcctctttgcaacaagcacagcaattcttcatgttgactaaagcctgagtctcttttattttcaaaatatattctcccaccacttctcaatattatctctgaaaagaatattttaaaagagtaatgcacaagaaacagttgttcactttagttctttcatcttaaaaactataggaacaataggccaagagagaattacaactcaatttaacaaaaatcttataataacacatacacaattataaactttaaaaggtttgggggctcattgactcttctgaggcatcctttgttcagtgatactgaacagtgaggaactttttctgaagtggccgcctggcttgttttgaggtgaagtaagaaggtgtgatgaagatcccagctcacaccagcagatgactgctg

SEQ ID NO: 865860 - DNA, 508 bp, Homo sapiens
tttctatttccctcaattctttctactttttaaaaaatgttggccaggcatggtggctcacgcccataatcccagcactttgagaggccgaggtgggtggatcacgaggtcaggagttcgagaccagcctggccaacatggtgaaaccccatctttactaaaaatacaaaaattagccaggcatggtagcgygccactgtaatcccagctacttgggaggctgaggcaggagaatcgcttgaccccaggagacagaggttgcagtgagctgagatcatgccactgcactccagcctgggtgacagagcgagactccatctcaaacaaaacaaaaatttattttttagggacagggtatcgctttgttgcctaggctggtcttgaactcctgggctcaagcaatcctcctgccttggcctcccaaaatgctaggattacaggcatgagccaccgtgcccagcctcttctatttttattaatagtaactggaattctgtaaggaaggttc

SEQ ID NO: 865861 - DNA, 581 bp, Homo sapiens
tgactcatgtgtcccccctcctttttcctctcctgactttctcctcctaactgcccctgccaccagtcactctccctgccctctccctctgactggatggatgggacttttgtttcctgcaccttttcactctagttttatgttctttatatcatatattcctccttcacaatctcaagatgatatctcagccttaaggcagatgcagatgggaagaagatcaacttacacctaagagtagttatatcaataaagacttaaaaatattgtacatgaacgagatgtattttcatataattttctaaagtgttctagaaacagaaagggccattttgaacattttttgagagaagaaaagataagaattatgtccaaaataggattaaacagacttttaaatrtctcttcagtattctcagacatgtggtagcttatataaaaattgctcctcttggtcagtagtattttgtagcctctccaccacatgaggtcacagcttgcccaaagaatcaaaacctttcttttcagtttagaaaactaggtattcagccttatctaaatgggctgtctctgtcccctac

SEQ ID NO: 865862 - DNA, 540 bp, Homo sapiens
ggcacgaagtgggtgaggcaattccagatgacaagaaccaacccgaaccatctaatggaacctttgtcaaggttttcaaatactctagtgccctttaaaaatcattttctcctctgcccttatgtttttgtccagacttagaggtgaaagtgaaataatcgagggtgagatgctggctctattgactttttctcaaagggatgcgagctacaaatttcatgggaaatcctcttgctgagtaaaagcccttaagaacaggattggctacatgatttgcagaggccagtgcaaaatgaaaacatggagtttcttgttcaaattattaaaagggtcaaggagacaggcaagcatgaaacccaatgtagggcccttctgagcctgggraccctgtgtgactgcatagatcacacacccatgaagctgaccctgcttagggggtctctgaagtttcacactattctcattttctgacttaataatgtttcttcttccattttcaaagcttcagggatgtggtaattgtgtgtgtgcgcactattt

SEQ ID NO: 865863 - DNA, 632 bp, Homo sapiens
tatacatagcatagtcattaataggagcaagaaaggaaaaaatatgctaatacaaacattctaaatagcattaacaataaacagtagcccaaagtatgattattaatcttctgttttagagacatccatatgtcattttgtactygtgcatacttcagagaagtattagccaaagaccttgacatttaattgtaatgaaagacctaaagtgtttccagaagttttcaactgggtgcagaggtctattacactgaaagtgtaacaatgtgcttctttatcagctcttaccttttctatcttgagctgaaatatttgtactgagaaaaataatgagagctagattaggggatttgccttagtccattttgtattgctatgaaggaatacctgaggctgggcaagaatttataaagaaaaaaaagcaattgggcatctgaatgggtgaggcctcagcctacttctactttataatggaagatgaaggggaatcagggtgggcagagatcccatggtgagagagaggaagcagcaggggctagggggaggtagtgccaggctccttttaccaatcagctctcttagaacctaatagagtgagaactcactcactccccatctactcccatcccaag

SEQ ID NO: 865864 - DNA, 634 bp, Homo sapiens
tttccatgtggctgttttgttcagcaccatttgttaaaaagaccattctttccaccactgaattgccttggcatccttgttgaaaatttcttcttccttcatttttttcttttcctctttttaaaaattcagttgttgtctgtcatccagcagccgtctttctctgcacacatgctcttttttaaatctctttacttccatctctcttttctggtaacatgttctttttgttccaattgatcgttctcttaagtaggtttctctttaaaawtttttttttttttttacttcagactcagatccagtatcttaagcacattagttccttaagcaggggcagatgactttgtttcccccaactaggttaaagcctcctggcagcctagtctctttttattcctagcttggcttagaaaagccacagcctacctagtcagctcttcttggtgtcttacagagaggaagatccacacatttacaggagaccatgtttcatcttcctctctgggctgcaggtatgtctctgagccaagctcttcccagaaactactttgtggaaattaagagagcatctgcttatcttcagtcattccatgtcacccacagtgaaaattctctccatcaagattcccac

SEQ ID NO: 865865 - DNA, 625 bp, Homo sapiens
cttaggctcttaatgagtgaactatctttaaactcagatatcaataaaatatttttcaattttaaaatgcatttagtatttgaaaacagtggagaatttctcaatgattccatttattctgtatgcaagcagaatggcagatygttatatactaacaacttcaaaaattatcatggaaaattaaattacagcagaaatttatagattcagatgaatagggatggatgtaggaaaaggaaaggggcaattaaatttagtaaacaatttgaaccttaaattcttttgaaataatttttaagtatatacagtatcttaactcctccaaaatagtttctgggtagaaaccattgaagggaatcttggtgttttgctttttaaattatttttaaattttaatttgtaagtagtgacagctatttgtaagcaattaataggttcaaatccttaaaagctttcttcacagtttatataatgtagacattctttatagtttgtataatattctagaaaaatctcagttatctcatgaattcaatttataattttttaaaatcatagattgttgttgagttgtcaataagaccgcatttaattgttgtaaaacctatctctatcttatagtcac

SEQ ID NO: 865866 - DNA, 599 bp, Homo sapiens
tcggtgattttcatgtactcccaggttagggagcagtattctaacagagcttttccattttaaatgatgttacaaattatggagcagttaggggatttcaaattaacacatttattatgtgccttcatgtaatagacccttcagttcatagaatacaaattagagaagggacttgctcaaggtcatattactaatgacttatgggatgggaaccatatttctaacatctaaggttagaccctttggtattaaagaaaaaatagtacagcacaccaagtagggataaaggggttcaggatgmtagagctggctgtctcccaggttgtaatcctaaaccttcacttgggttgtgaggaacaatttaggagcaggcagattttctgtggtgctgaccatgcagaggcagggaatgtgatcggagaaggtgtctccagtcaccagcagccctctcagttctgtaactttacccaagtattttcttcagactttcaagcctttccttccagggatgggcttttcaagtttaacctctgaggcaccagttctaccattggcattttcctttctaaggcattttcaacggatgtttcaccacgttt

SEQ ID NO: 865867 - DNA, 566 bp, Homo sapiens
gaaaatataaaagagaaagtaaggtgcatggagtatataaagagagggttcaatttgcgttgaaaatgaactgtaggtgaaaagaatagccaatatataaagaaataatggctgagaatgtccagaacagataaaagacaaaaatcttcatgcttagaaaatatgagtcccaagcaggataaaaacctacataactcatagaaaaactgctgaagattaaggccaaagatcyttagaatagctagaaaaatttaaagagaaaatttgtaatttggtggagattacaattccaggaaccagaaaaaatgggtttgtactcacatctctcagactccaaagctcatttaccctgcagttgctctattctgctccctagtgtacttaatttctgacttttcatctactgctgagttattctaagcatatatgaaatgcccttggaaatatttttttctgttctaaaccactgcttttagtttttattctctgcttcttaaactttaaacgtgttgtttatttatttatttatttattattattattacttttcttgaggtggagtctct

SEQ ID NO: 865868 - DNA, 566 bp, Homo sapiens
gaaaatataaaagagaaagtaaggtgcatggagtatataaagagagggttcaatttgcgttgaaaatgaactgtaggtgaaaagaatagccaatatataaagaaataatggctgagaatgtccagaacagataaaagacaaaaatcttcatgcttagaaaatatgagtcccaagcaggataaaaacctacataactcatagaaaaactgctgaagattaaggccaaagatccttagaatagctagaaaaatttaaagagaaaatttgtaatttggtggagattacaattccaggaaccagmaaaaatgggtttgtactcacatctctcagactccaaagctcatttaccctgcagttgctctattctgctccctagtgtacttaatttctgacttttcatctactgctgagttattctaagcatatatgaaatgcccttggaaatatttttttctgttctaaaccactgcttttagtttttattctctgcttcttaaactttaaacgtgttgtttatttatttatttatttattattattattacttttcttgaggtggagtctct

SEQ ID NO: 865869 - DNA, 611 bp, Homo sapiens
ttgggagaactgatcctgaaggaaaaacaaggaataacacatctgatcttctaaagcaagttctaagacaaatataaattgttagaattactaggggagacctcaagttttagagtccaagaattcttagtttgaatctctaatgttactgtcttagacaatttcattaaggtctttgagccacagttctcttacctataaaataaggaaaataaaagtgcttaattaattaacagtgagaattcagattaaaatttataaacatgcttagtacaatgactgagatattagtattagtaaaataatttttgtatcctatttttaaaatcctattatttagaaaaaatkcatgtaagtctctctctcaaaagaagatatagtagtatcagaattattaatgttgcctttaagaatgtttttcctttattgttgttcttcttacattcctgaaaaccaaataataagatgataattcttctagtagtaatgaagttgatgatttattttctttatatgcattaatacctttcatatgatacatttgcttcaaatattcacaaaatagtgacctaaatcagaaaacataataatagctaagataaatgcttcct

SEQ ID NO: 865870 - DNA, 584 bp, Homo sapiens
tcacgatattgattcttcctacccatgagcatggaatgttcttccatttgtttgtatcctcttttatttccttgagcagtggtttatagttctccttgaagaggtccttcacgtcccttgtaaattggattcctaggtattttattctctttgaagcaattgtgaatgggagttcactcgtgatttggttctctgtttgtctgttattggtgtataagaaagcttgtgatttttgtacattgattttgtatcctcagactttgctgaagttgcttatcagcttaaggagattttgggctgagaggatggggctttctagatacacaatcrtgtcatctacaaaaagggacaatttgatttcctcttttcctaattgaataccctttatttccttctcctgcctgattgccctggccagaacttccaacactatgttgaataggagtggtgagagagggcatccctgtcttgtgccagttttcaaagggaatgcttccagtttttgcccattcagtatgatataattagttcttaaaagtgctttgtttacgttgaagtttaaaaatcaaaaagcaaaaggttca

SEQ ID NO: 865871 - DNA, 598 bp, Homo sapiens
aaatctttggggtgtatgcccaggaatggaattgcagggtcatatggtaattttgtttaactttggaggtgtcactaaactgctttccaaaacagctgaacaattttacattccatcagaagtatatgagggcttcaatttctccatatcctaacacttgttacttttaaaaaattattagtatcatattatctgaaatttcatgctctttaaaatgtagtcactgaagtcctaaatgattctatggacaaaaaataataataataaaaataaaaaactatcagaaaacaaatcaaaataaaagaaaacccaaaccatatttcctgcacattaagagaaatctttcaaaatctgcttctatgacaggatttcaaaattctcatttttatgataggcagacataggtaaaaacatrcaatattagaatacttctttttctttcttaatgttatgagtggagtattatacctaatataggaaggaacgtgaaggcttcaaaataatatttatgcaccccggtgagatatctgtgtgacaaagatcaaggaggtttaattagcaacttcttgactaaataaagttaaaggcactctctcag

SEQ ID NO: 865872 - DNA, 577 bp, Homo sapiens
ttgtacctctatttgcctgaaagagcacagtggaaaacgtttaaggttcttattttctaaagttttatatttctacaacattgagccagttttctagaggagagagactgaagaatggcagccatgcaaccggaaaattctgttactgtgatgcctgttcccacttagatagctttttcttattttgatataaaacctttcccccctttattttgatttttttagtcttaaataatcatattgccttgcttttattattctatttcttagaatttaagggtgttttcctgactttcctgatggatgamcttgctaaaaattccaggtactgctaaaggttcttacatagttcataatacagttatatcatctgcaaatagtgtcttttaggaaaaacattacttaacagttgtctaatcagtggagacccactgcacttccacctggaatgtactacattgggagttgctcctttaagaagcaattttcaaaaacagagcatctgactgtaagactttcatttgtggctcttatttaaaatcaatgacaatcttttcagtacacagtcttaatgata

SEQ ID NO: 865873 - DNA, 647 bp, Homo sapiens
taattgatctcagaaaattataagagaaaataaattgtttatttttccagcatatataaatggcaatcaaatttgctgtctagtttcacaggtttgtgataaacaactattgtagtcttttttcttctgaattgttttgctttgaagcatcccttctttacctctttaccttactaatcctttctggcttttttcctctcctttatggagagtttttagttttaagcatatgtttatttattaagtacctgtaattttcattttttagaaaaaaaatctaactatctttaaggtgaaaattctaaaaccaacttaaatrtttatttggaagaagtttcagtactagtacctttttgttttgccctaggtttagtagtgcctctcatctaggcttgtttttttaaatgtatcaacttatgcacttatactttcaatcatatctttggccaaggggaattgcttaggactaactctcaaaacaagctgagtcttatccatttgaaatcaatagaagagaaaacaattctgctttgttaaaagaatggaacaacaaacctcaaaagacaaatgacagtttagagccatgctgaaaacatttaataattaataggcagcaaataaattcatcaaattcctgattgctagca

SEQ ID NO: 865874 - DNA, 535 bp, Homo sapiens
tcaaagtagtagaggggattatttgagttaaatggaaaaaagtacagccaatcaaaagaagataggtaaagaaagagaaagaagtcaaatagtggaaagaataaaggagaaaaataagatgatgaaaaaaaagctagtaycattaatccaacaaatcattgtagcatactcttcaataaaaagaataaattgttaaactggattttccctaagatatatgtgttttataaaatattattaagttggcacaaaagtaattgtggttttgtcattacttttaattgcaaaaatcgctgttacttttgcaccaacctaataaaaatatttcaaaatactaagcaataaaacattaaattgcagtagaaaatttaaaatgtgacagtatgaccagagattttattaattttctttgtttataatagacaaagcaaatggaaaaacagaatataatatatttaaactatatagttaacaaatataatctaatagatacacataaaaccttgaaccaaacagttgaaaaatacgtattttt

SEQ ID NO: 865875 - DNA, 674 bp, Homo sapiens
tctggcctctgctgcttcagagggcacaagctgtaagccttgatggcttccacgaggtgttaagcctgcaggtgcacagaattgaagagtgaaggaggtttggcagcttccaactagatttcagtcccaggtatctttaggtttttttgttttttgagatggagttttgctcttgttgcccgggctagagtgcaatgkcatgatcttggctcactgaaacccctgcttcctgatttcaagtgattctcctgcctcagcctcctgagtagctgggattacaggtatgcaccaccacaccaggctaattttgtattttgagtagagatggcatttctccattttcgtcaggctggtcttgaactcccaacctcaggtgatctgtccaccttggcctcccaaagtgctggaattagaggcatgagtcactgctcctggccgggtatctttacagcaatgcaaattgactaacacaaaggtactcagaggaagttctgggcatccaggacggctgagagagtatgtaggtctgttaggaggaaacactgggacataagtgctccaaatgcattagcagaggccagtgtagctgagcataccagtcatgcatccaggcttgagatgaagtacggacacaagcaagagagggtctggtagcaaatgtcatgggacctaca

SEQ ID NO: 865876 - DNA, 674 bp, Homo sapiens
tctggcctctgctgcttcagagggcacaagctgtaagccttgatggcttccacgaggtgttaagcctgcaggtgcacagaattgaagagtgaaggaggtttggcagcttccaactagatttcagtcccaggtatctttaggtttttttgttttttgagatggagttttgctcttgttgcccgggctagagtgcaatgtcatgatcttggctcactgaaacccctgcttcctgatttcaagtgattctcctgcctcagcctcctgagtagctgggattacaggtatgcaccaccacaccaggctaattttgtattttgagtagagatggcatttctccattttcgtcaggctggtcttgaactcccaacctcaggtgatctgyccaccttggcctcccaaagtgctggaattagaggcatgagtcactgctcctggccgggtatctttacagcaatgcaaattgactaacacaaaggtactcagaggaagttctgggcatccaggacggctgagagagtatgtaggtctgttaggaggaaacactgggacataagtgctccaaatgcattagcagaggccagtgtagctgagcataccagtcatgcatccaggcttgagatgaagtacggacacaagcaagagagggtctggtagcaaatgtcatgggacctaca

SEQ ID NO: 865877 - DNA, 630 bp, Homo sapiens
gaaaagagataaacgtgttgatgggaagctttagtgataaagatagaaatggcattttacattttttgtttgaaaacagaataacaaagattgtaaaacctgtcaagaaagaaatgtagaatgaagcatgtttggtaaataagtttgtatacatgatgacaaaattaatawctggaaatttgaaaacagttattttgttgattcttccacattgtggcaataacaggcttgatattcccttctctttaaatagataatccttttcttgattcccccagggaaatcaatattaggataatacattgaaatacagatgtatatttcagtgatgagatatgcttgcaaaaataattggtatttattattagttatatataaaatcttagttcactagtatccatttccttgatttaatgaaaaatattttgctgtgggcattgtcttcacaaagggacatggtcttgtccatggcctaagattttatctgccaaagtttgcatgttgagacttcctcatatgttagccacatagtaggatacagactgtttctggtattttcatcaccttttccttgtagattaccccccaaaatcagcaacttcagccatccagatcacgcaccttctgaaa

SEQ ID NO: 865878 - DNA, 630 bp, Homo sapiens
gaaaagagataaacgtgttgatgggaagctttagtgataaagatagaaatggcattttacattttttgtttgaaaacagaataacaaagattgtaaaacctgtcaagaaagaaatgtagaatgaagcatgtttggtaaataagtttgtatacatgatgacaaaattaatatctggaaatttgaaaacagttattttgttgattcttccacattgtggcaataacaggcttgatatycccttctctttaaatagataatccttttcttgattcccccagggaaatcaatattaggataatacattgaaatacagatgtatatttcagtgatgagatatgcttgcaaaaataattggtatttattattagttatatataaaatcttagttcactagtatccatttccttgatttaatgaaaaatattttgctgtgggcattgtcttcacaaagggacatggtcttgtccatggcctaagattttatctgccaaagtttgcatgttgagacttcctcatatgttagccacatagtaggatacagactgtttctggtattttcatcaccttttccttgtagattaccccccaaaatcagcaacttcagccatccagatcacgcaccttctgaaa

SEQ ID NO: 865879 - DNA, 630 bp, Homo sapiens
gaaaagagataaacgtgttgatgggaagctttagtgataaagatagaaatggcattttacattttttgtttgaaaacagaataacaaagattgtaaaacctgtcaagaaagaaatgtagaatgaagcatgtttggtaaataagtttgtatacatgatgacaaaattaatatctggaaatttgaaaacagttattttgttgattcttccacattgtggcaataacaggcttgatattcccttctctttaaatagataatccttttcttgattcccccagggaaatcaatattaggataatacattgaaatacagrtgtatatttcagtgatgagatatgcttgcaaaaataattggtatttattattagttatatataaaatcttagttcactagtatccatttccttgatttaatgaaaaatattttgctgtgggcattgtcttcacaaagggacatggtcttgtccatggcctaagattttatctgccaaagtttgcatgttgagacttcctcatatgttagccacatagtaggatacagactgtttctggtattttcatcaccttttccttgtagattaccccccaaaatcagcaacttcagccatccagatcacgcaccttctgaaa

SEQ ID NO: 865880 - DNA, 667 bp, Homo sapiens
acctctttaaattcctaaacatttaatgattaaatacttaaataattgggataaattatttaaatatgttatatgtttccacaacttataataagaagtagaacatagaatatgctttttgaaactctggagcatttattggaatgctaattgttctcaagcacaaacgaagcaaagctctggagaaacatggcccagaagaatcttttttcaggggcagaaatgttgtgtgtctgtgctatccaatatgtggayacaagccacatgtggctactaagcacttgaaatgcggcaagtaaaactgacctcctacattttagatttaattctaattaatttaatttaaatatttgcatgatgcttgtggctactctattggacagtgcagatctagagagttgagttgtgagggttttaagatcttatgactaatttctttagttttttttttttctaattctgtctcttcaagaaaattccatgtagttaattggtagtacttgtctttagtgaacttcgtaactgctttctattttttgtttctaataagctcagaataattgtaaaaatacactttttagaaatacactcatattaaaagcagtcaatttgaatgaaaacacaattctttcttaagaggaaggagtatgtgctattgtataaagat

SEQ ID NO: 865881 - DNA, 667 bp, Homo sapiens
acctctttaaattcctaaacatttaatgattaaatacttaaataattgggataaattatttaaatatgttatatgtttccacaacttataataagaagtagaacatagaatatgctttttgaaactctggagcatttattggaatgctaattgttctcaagcacaaacgaagcaaagctctggagaaacatggcccagaagaatcttttttcaggggcagaaatgttgtgtgtctgtgctatccaatatgtggacacaagccacatgtggctactaagcacttgaaatgcggcaagtaaaactgacctcctacattttagatttaattctaattaatttaatttaaatatttgcatgatgcttgtggctactctattggacagtgcagatctagagagttgagttgtgagggttttaagatcttatgactaatttctttagttttttttttttctaattctgtctcttcaagaaaattccatrtagttaattggtagtacttgtctttagtgaacttcgtaactgctttctattttttgtttctaataagctcagaataattgtaaaaatacactttttagaaatacactcatattaaaagcagtcaatttgaatgaaaacacaattctttcttaagaggaaggagtatgtgctattgtataaagat

SEQ ID NO: 865882 - DNA, 551 bp, Homo sapiens
gcacaatgcataaagaaagatgctctttacttttctggctctttgagagagcagtgttgtcatatttccttcctggtcctaagatatgattgatactcctctctgctctactcagagcactctgtctggaggaaacacatgggacaatagcaccaatggcttytgactcctacctacagtaccactgcctttgttatatttgaccagtcattttctttctttgcctaggatgggaaggtatgagactcaataaaaaatacaacaaattgatgagttttaatagaaaagtgaaaaaatatataattttaatttattggagcctagtcatttttccaatatggtgtcccttagtcaatgttttttttttaatctattttagctcaacagaattgaaaaactatgactaacctcacaatagcaacaacaataacaaaaatctattgatgctccccatattttgagaactttgaataggatatattgtaaagaaaggtaaagatcaagaaatgtttcactgaaaaaaatacacttatttggaatttaagtgtaac

SEQ ID NO: 865883 - DNA, 626 bp, Homo sapiens
ctgcttaaagtttgcataatattcattgtttaaaaaaaaaaaaaaaaagaaaccctggatgttattcagaaaaatatgggagccaaaatatctttgctcagtaatttcttttgacaaaattttaaaaataaacttcataaatgtaaaataatatgaacaattcaacttgtaccaaaacatataaaatgagaataaagatttcctcttcacatctgacgtcattactctccctaaagtcatctsaagaagcaaacactaataacatctctctagacatctttctatgaataattacaaattaaagtataatcaataaatacatgagtagatgggtaaatggataaatgagtgtataggtaggtagataagtagatataaatattgtttctaaaactaaaaatataatacatataatttcttaagatttaggacaaatccaattttttatctccttgtatcttctcacagtcacccaactttaaccacttgcttaatttagaacttcagctgaagctattattgcctcatgtcctgttacactagctgccacagcctccagaatggtgttgagaaccagggtttatctggtcctccgttatgcctgaacaatcatttatgtcctgact

SEQ ID NO: 865884 - DNA, 565 bp, Homo sapiens
ggtgtctgccttccccagtgattatgcctggcttcagcatagcgtatgtcacacccctgaagcatgagtcacaactatgccagtgtccaggtctgaaccagctgaaacttggagtcttcagattctaacagaaagaggttcatataamctggatgtacagggagataaatgtcccatgggacaaacttgactaatgagggacaagagacaggaaggatccagcatataattttcatactttttcttcccttgaactatttcaaggcacagtgttccagtgacttctcaaggatgttctgcacacttatacagtcagttttattttcttgaagatttgggctcaatatattatatttgtttactgtctttccttgcctcacagtttttccttctttctttctttctttctttctttttctttctttctttccttctctctctctctttctttccttccttccttcctccctccctctcttctttctttctttctttctttccttctttttcttctcctctctctctctctttctttctttctttttttttacttttggtgccctga

SEQ ID NO: 865885 - DNA, 693 bp, Homo sapiens
gttttcttattcgtagcctgaaagaccattaatatttctttgaactctgaaattctgattccataagatgtaattatttcacatccattgaagtgtaaaaagtatagacagttttgtgcccctcttaggcactggttagtattgttccactttttcaagcatgcaatttttttcaaatgctatttcttcctgtcatctacgttattctgagggaacaggagagagaacagtttatactttgattcagatagcactggccctccataagagagtacacgttgcctgagaagaagacaagcaccattgggttttttaatttaatagccattgtattagtcagggttctccagagggacagaactaataggatctatgtatatatgaaagggagcttataaggagaattgacttacaccatcacaaggtaaagttccatgataggctgtctgctagttgaggaccaaggaagccagtggcagatcagtcygagtcccaaaacctcaaaagtagggaaactgacagtgcagccttcagtctgtggccaaaggcccgagggtccctggcaaaccactggtgtaagtccaagagtccaaaagctgaagagcttggagtctgatgttcaaggcaaaaagcattcaatacaggagaaaggctggaagactcagaaagtctgcttagtcatcttcttctgtc

SEQ ID NO: 865886 - DNA, 592 bp, Homo sapiens
gtgagggactatgctttgagggaccgtactatccggacccagatactatgctttttccatggtcctcgcaacccagagaccaggagatttcctctggtacctacactataagggccctaggtttctagcacaaaactgggtggccgtttgggcagacactgagctagctgcaggagtttatttgttttttgttttttgttttttctaccccagcagtccctggaacaccagagagacaaaacaattcattcccctggaaagggtggtgaagccagggagccaagtggtcttcctcagcagatcccaccccyacagagcccagcaagctaagatccactggcttgaaattcttgctgccagcacagcagtctgaagtcgacctgggacactcgagcttggtgagaggaggggcatccaccattactgaagcttcagtaggcagttttcccctcacagtgtaaacaaagcctccaggaattttgggctgggcagagcccaacacagcgtcacaaagccactgtaaccagactgcctctttagattcctcctctctgggcagggcatctctgaaagaaaggcagcagccccggtc

SEQ ID NO: 865887 - DNA, 651 bp, Homo sapiens
catggctgccgattaaattctctccttaggtgcgtttttaaaagtctagccatattttttccatataccagttatatccttatcagtagtctgctgtataaaacactcagacattcatacaataattgcaagtgacttttctttttttttcatggagtcttcctctgttgcacagctagagtgcagtggtgcaatcttggctcactgcaacgtctggctcctggttttaagcaattctcctgtctcagcctcctgagtagctgggactacaggcacatgccaccatacccagctaatttttgtatttttagtagggacggagtttcaccatattggtgaggctggtctaaaaytcctgaccttaggtgatccacccacctcagcctcccaaagtgctgggattacaggtgtgagccactgcacccagcctcaagtgaattttgatagataatgaggagatgggggtaagagagttacatttacatgctagccagaaatgatattttaaatgatgataagcaaggctatcactgatgagcaaaatgattacatttccctaacctttaaagaaaagagtaagttttgcacaatgataaaccataagacttgaactatacacatatataaaaagaacaggtatatatttcagga

SEQ ID NO: 865888 - DNA, 610 bp, Homo sapiens
tacagaacccatacatatctaataaataaagtgttaatatgcactcatttacagactagtaaacatcatatgtgtacctcatatgcaaatttctatgccattttatgtgtatacacatacatttctctgtgcatactcaatgagtcatacttaaaatgtatatgtagtattcagaattatgggcaaacacattcagtgcatatatttattaatattcaagcaaacaggtcatatttcaactttgaaaatataaataaaaaggacagtaattgagagacatgggtaaaygctgatcaatatggcgaagtatgtattaaagtccatttccatgtgcaattttactttccacatctttcgcacagctattctttctcagtcagaaccaataattatttaggcatttttctattatttctttaatgcaacttttaattcctgatttatctttccctctgctctagttcttcttttaaaaaggaaacacattttcagaattttcatctttgtttcctttaaaaaatacattatttacatcaatttcctaaccaggttttctgtgagatagcagacagccaaaacagaggacaaaagaagtgtctgacattcgagt

SEQ ID NO: 865889 - DNA, 590 bp, Homo sapiens
atcaaggacagaaggctcagaagaaaccaatcttactgatcaccttgatctcaaacttatagcctccaggaccatgaggaaataacaaactattcatttttagcactttgttatggcagccctagccaactaaaacagactataaagcttcaaatatcagttccgtaacttactaattatatgaatttgatactatatttacttcctatttgtctctatttacttatctataaaatgagtattttactagaacctactacatagtattatgaggattaaatataaaagaattagaatagtgactagcttgataatgttagctattataatttttataagyaatccttgaaaacctcttgggtacactgtagaaacagaagctcagtatttatagatcttattctgcattgagaatgtcatctcagactttttgaaggtctaaaaatataactgaaaaatagcactgatttggaaagagtttaggatcaaaccgagagacatttttgtttgaatttggttaagcatgggagcttagatttgaaagactacaagtggtaaggtgaagcagtacaggtctcaatgtaaaagac

SEQ ID NO: 865890 - DNA, 669 bp, Homo sapiens
cagatttgaaaccgtgataggtataaatgaattgtggtatggcctgattaaaaattttacttcatcatattcatactggagtctacataatttgggaagaagaaatattttgtcaaaactgatatatcccataaaatataactaacatactttgcagggaagcttaaggaaggcctgggagacaaaatggacaacaaatgtaacaataataatatttaagtgcaataaggttttttataatgtcattttttaaaaaataaagttttttataatgtctacataagggaaatcaacactgcattgactattagaattagtttgggggtctaatggactattcctgaaatttggactgaggggtcagattattaatggtagacctgaatttgtctcaaagaacaatgttttggaatctaataaaatctcttcagatactctctatttaactgattgcttgtttcaaaggtcaattcattttggaaaaagattatagatttttctcacattttatgacaacataaatgttgayaacttatgtttttgttaatgtatagtgttattcattatcaaaaacaaaaacaaaagcaagctatttgctaatagtcatgtcacaaatataattattatacatagaattatacagacccagttgcaatggacctttcttaa

SEQ ID NO: 865891 - DNA, 609 bp, Homo sapiens
ccaggatgaaatcacaagatgatggagaactgccctctcatgatgtgaagcatgtgctcagcagaggacaaattcgaggtaaattcaaggggccctttggacaagactgctattgcctctccccagtttggccacagtacagtgaaactctaggaaatgcctgtttttttggtgtcatgtgaccctcttctctcaagaagagtggcttattttgcaggggtgggtatgactcagatgcctgcacatctcaacccgcctccctattcactgaggattcatgatctacagaataataaggaacatagagccccacagcccaagaagagccaccaagacaatccaccaaagtggggagmcaaaaaaaaaaaaaaaaaaaaaaaagaattgctgaagtgtggtagccacattccttgaagtagactccacttataggcacacacacagaaatccaaccctcacaatactccctcagaaacacacagcccggcaactcccaaagttgtgcagttttgcgggaagccccaactgggagagagcaaccccaaggaaaaaaggcaggctatacctagaaatcacagtggggccagtttcaaaaagactcacccctac

SEQ ID NO: 865892 - DNA, 648 bp, Homo sapiens
ctttgtttttatgttgaaccgtatggtgtcttacagctttactgttatcttaaccaaccaatactttttttgcttttatatttccctcattcacctaccttgtggtgaagagaaacgtgttgaatcttctaggtttcttttaagtttttcatcgcaatacaaacatcctatttcattaaatatctaagcarttctgaattaagtggatacccttcatgttattccatttatttatcacagtattaggcttttttttttcatttagacagagtctcactctgtcgcccaggctggagtgcagtggggcgatcttggctcactgtaacttctgcctcccaggttcaagtgattctcctgcctcagcctcccgagtagctgggattacaggagcatgccaccatgcctagctaatttttgtatttttagtagagacggggtttcaccatgttggtcagactggtctcaaactcctgacctcgtgatccgcctgcctcagcctctcaaagtactgggattacaagcgtgagccactgcgcccggcgtaagcttgtttctttggcagcaatgtttgcagttatctatgtttgatctaattcattataatctaatgactttttctcaatgaaagtgtaattcaatgtttatagc

SEQ ID NO: 865893 - DNA, 681 bp, Homo sapiens
aacccactagtagcttataggtataagcattgcatttcatgatttagaaaggacaggtttaatgagtgatcttttattttaatagcacatttctctgccttatgtcctcattgatgacaagcacatgatgcaatgtatcatatgtagtaatgggatgtgtaatattcacagattgctgccatgtgttcttttagctttctgtcaccctccctgtaagaatggtggccactgcatgagaaataatgtgtgcgtctgtcgtgaaggatacactggtaggagatkccaaaaaagtaagacatcactaaatgtatttgtcaactacagctaaagccaagacaaaactgttgaatttaagggctgacttttcatgcttttaccttaaggcatctgtgatcctacgtgcatgaatggaggaaaatgtgtgggaccaagcacttgctcttgtccttctggttggagtgggaaacgatgcaacacacgtaagaggaatactcttaaaacactgaagctttcgtccttcatgggaatgtaaagcagagtttaaaacagagcatttttttcacttttgtttgcttggtctttttaaaatttttgcatatttattcttgctttaggagatacctctttgaaacacaaagagtttttactcttctgaactcattctttcaggttagcagaaga

SEQ ID NO: 865894 - DNA, 529 bp, Homo sapiens
tcataaaacttggattaaggtaccatgtttatatgaaatgtcacacagaaaaagaattgctttctaagttgtcacagaacacattagtttatgggtgttgttactgtaagtttacttcagaatattttgaagtttcttacaatgacatgtttacacattggtacagaatattctgaagtttcttacaataatttgcttacacatgggtacatacyttggttattactattattaattaggggatttttaaaagaatctatttttacctcttagatacagaagagtttaaaaacaaaaacaaacacaaaaagaatggttatattcatgcttatgccttctcatataaagaagaaacagtatgactggaaagcacaaggctgaaaattcagatgagtctgaatccaaatttgtggatgtatgaatatttgtacgcgtatgtgtatgcaggtaatccgttttcccctttataaggttgatgccgcactttaaggattgcatgccgattagggggatgttatgataaattttt

SEQ ID NO: 865895 - DNA, 606 bp, Homo sapiens
cataaacattttttagatctacatcaagaatctcaataaaattaaaatattaatcaatacactatccatttataattgacttaatggacctgtatatgttaataatgaagaaatgctgtggtttacaaattttatgtaaaatcgtccttatgaaagctaatgactcatggaaatgaaagtaatgtttagaatataatgtgagtttagaaaagcaagtaatttgataaattgatggcaagagattwaatttttggcttatgtcttggtgatatttcacatcaattaatttaaacatactttattcacagtctatttggaaaatactttgaaaataatgagtgtttaaaaattaagcaaaagtacttgaaaatgtgtaactttcaatatttatcttataattttatttatttattaggaataaggtcttgctatgttgcccaggctagagtgtagtgtctattcacactgaattcttataaagaattcagactatagactttgcttagttaatatatttgactgttttgtgtttattcatgctaacattgaaatgaaatacacgatagtatttaaaatttcaggttaaaactatttggggatatttgg

SEQ ID NO: 865896 - DNA, 573 bp, Homo sapiens
ggctcagaaaacagtattttaaaatgaaggcctccgcagcagcctcagagcaaaagtttttttctgaccttttcctgttcccctgtctctcagtcgtgttctccctggaggctagccataaaaactagaatctctcttccccaaggcaggtcacagaaatcagagccccttttctccaaagctagtcataaaacctaataatattactctatttttcccttgcytttctgtgtaaaaactggccataaagaaattgtctgacataccttgtttgactgtagatcatgagacccccattctagagagggctcttcctcacaccaaggagggaatgcatgctcagaagaatctagacagccagagtttccccactcagcccattatcattatatcttgccctttttgtccgatcatgtttctacatggctatccataacctaaacataaacattgacaatttcttctgtatccttgagtcttctgaaagctcccatgtatacatgttaaataaatttgtatgctttttcttctataaatctgccttttgtgagttgatttttcagagaatcttcc

SEQ ID NO: 865897 - DNA, 573 bp, Homo sapiens
ggctcagaaaacagtattttaaaatgaaggcctccgcagcagcctcagagcaaaagtttttttctgaccttttcctgttcccctgtctctcagtcgtgttctccctggaggctagccataaaaactagaatctctcttccccaaggcaggtcacagaaatcagagccccttttctccaaagctagtcataaaacctaataatattactctatttttcccttgcctttctgtgtaaaaactggccataaagaaattgtctgacataccttgtttgactgtagatcatgagacccccattctagagagggctcttcctcacaccaaggarggaatgcatgctcagaagaatctagacagccagagtttccccactcagcccattatcattatatcttgccctttttgtccgatcatgtttctacatggctatccataacctaaacataaacattgacaatttcttctgtatccttgagtcttctgaaagctcccatgtatacatgttaaataaatttgtatgctttttcttctataaatctgccttttgtgagttgatttttcagagaatcttcc

SEQ ID NO: 865898 - DNA, 612 bp, Homo sapiens
tgactattctgggtctattgtggtcccatataaattttagaattattttttctattttttaagaatgccattggtattttgatggggattgcattgaatctataacttgtttgtggtagtagggacattttaacagtattgattcttctaatccatggaatatctttccccttttttggtgttctctttgattttgttcatcggtgttttatagttttcaatatagagcgctttcacttctttggttaagtttatttctaggtattttatttataacattataaatatgactactttcttaatttctatttcagattgttcactgttggcatatagaggtactacwgatttttatgttaatttttgtatcctgcaacattactgaatttgtttaacagttctaatagtattttttttaatggagtctttgggtttaaaatataagatcatattatctgcaaaaaataatttgacttctttctaatttgcatgctctttctttctcttgttggattcctctggttaggacttctttaattctttatcctgcaaattttttgcttgcctaagcttgtagtaatttaaaatatgttgaactatgtctttattatt

SEQ ID NO: 865899 - DNA, 639 bp, Homo sapiens
ttaaaaatagatgccatctaggactttcacagctaaagaggagaagtcagtgcttggcttcacagcttcagaggataggcttactctcttcttaggagctaatgcagctggtgactttaagttgaagccaatcctccttatccttccttaaaatcctagggctcttaaaagttgttctaaatccactcaagataattagaattagaagtggaacccgaagatgtgactgacttgcagcaatttcatgataaaacttataaaaaaccaaaggagttggcctggtacrggagttgggattacacctgtaatcccagcactttgggaggccgaggcaggtggatcacgaggtcgggagtttgagaccagcctgaccaacacggtgaaacctcgtctctactaaaaatacaagaattagctgggcatggtggcgtgtgcctgtaatcccagctacttgggaggctgaagcaggagaatcacttgaacctgggaggtggaggttgcagtgagctgggattgtgccactgcactgtagcttgggcgacagagtgagactccatctcaaaaaaaagaaaaaaaaaggagttgctctttaaggatgagcaaagaaagtggcttcttgagagggaatctactcctggt

SEQ ID NO: 865900 - DNA, 639 bp, Homo sapiens
ttaaaaatagatgccatctaggactttcacagctaaagaggagaagtcagtgcttggcttcacagcttcagaggataggcttactctcttcttaggagctaatgcagctggtgactttaagttgaagccaatcctccttatccttccttaaaatcctagggctcttaaaagttgttctaaatccactcaagataattagaattagaagtggaacccgaagatgtgactgacttgcagcaatttcatgataaaacttataaaaaaccaaaggagttggcctggtacaggagttgggattacacctgtaatcccagcactttgggaggccgaggcaggtggatcacgaggtygggagtttgagaccagcctgaccaacacggtgaaacctcgtctctactaaaaatacaagaattagctgggcatggtggcgtgtgcctgtaatcccagctacttgggaggctgaagcaggagaatcacttgaacctgggaggtggaggttgcagtgagctgggattgtgccactgcactgtagcttgggcgacagagtgagactccatctcaaaaaaaagaaaaaaaaaggagttgctctttaaggatgagcaaagaaagtggcttcttgagagggaatctactcctggt

SEQ ID NO: 865901 - DNA, 644 bp, Homo sapiens
attttccatctgctgaacatcctgatttctgaaaaataactcaagaacgaatgtatcttttagtttctctagagaaccaaaacactctgagacgttgacttgcttgggtgacttgtttaagctacttactttgtagtttaaataatagttcttcccaaaagctataaacaaattataaactaaatagcttgtttaagctattaatatcttcttccttattgggttctttaattctcaaggctagctggaatttccttggaaagcaagaattttcctttattttcatgtggttattttcttggggttggtggggggctggcaaacccctaagtggggtctctgttcttacctttagctactaccaccttgatcagtsagcatccatcatcgtcaaggcaggaccctctaacagcaaagattgacttgctgaaggctcagatgatagctaacattttttagcaataaagtatttttaaattaaggaatgtacattgtatttctagaaataatgatattgcataattaatagactatagtacagtataaatataacttatatacactgcataaccaaaaaattgtgtaactcatgttcttgtgatacttgctttatttctatagcgtagaactgagtacacaatgtc

SEQ ID NO: 865902 - DNA, 632 bp, Homo sapiens
ctaaagctttttaataaacttgcactcctgctctgaaagttgcctcagtctctttttctgccttatgccccttcagttgaattctttcttctgatgaagcaagaattgaggttgctccagacctgcacaaatttgctgccactagcatgcccaccagtcaagtttgtgtctttggctctgagattgccttgaccaacatagctaataatttttctctacctaagcatgcaagaaaaaaacacatttctgaaaactttcaaaagccaaagttcatacttccggcggtaattgccatttactgctagtttctgcctgacttagtcaaacacctgaggcctccctacagaacccaatmctgtttctgttgtgactttcactcttatcggtgacttgtcaaccacacaccccaaggttggtactctcttttacagcacaatctaagcctggattcaaaggccaaaaagatctgggttgggggaacactcaatgcaagaagaacagagtctgatccaaaatgaagttgcagcatgtagcggtccataaggaagaaaggggatccatgaaggggtcaatggaggctctcctgtgttcctcaataagtctcataaattttcagcagcattttgggtccc

SEQ ID NO: 865903 - DNA, 632 bp, Homo sapiens
ctaaagctttttaataaacttgcactcctgctctgaaagttgcctcagtctctttttctgccttatgccccttcagttgaattctttcttctgatgaagcaagaattgaggttgctccagacctgcacaaatttgctgccactagcatgcccaccagtcaagtttgtgtctttggctctgagattgccttgaccaacatagctaataatttttctctacctaagcatgcaagaaaaaaacacatttctgaaaactttcaaaagccaaagttcatacttccggcggtaattgccatttactgctagtttctgcctgacttagtcaaacacctgaggcctccctacagaacccaatcctgtttctgttgtgactttcactcttatcrgtgacttgtcaaccacacaccccaaggttggtactctcttttacagcacaatctaagcctggattcaaaggccaaaaagatctgggttgggggaacactcaatgcaagaagaacagagtctgatccaaaatgaagttgcagcatgtagcggtccataaggaagaaaggggatccatgaaggggtcaatggaggctctcctgtgttcctcaataagtctcataaattttcagcagcattttgggtccc

SEQ ID NO: 865904 - DNA, 593 bp, Homo sapiens
tatattaaaaattgtaaccttaatagttagctttgaaatgtgttttaatagctctttttcactttttatttccactggtgattaaaagaatgtttttaatatttagtttctttataaatatatttaattgataaatacagaaaaccatatatgagtatgaattaaacatcacacggttgtgactaacccctactgactccaatggggatggcactatgtccaagaggacagaggagacccagacccaaagaacaaagacatagggtttatggaggacttacgtatggggcagtcaaggagtggtgggctagacaggaagaccgctactgtttgcagcatgcagtttacatrgcaattttcacttagcaccctctacctagcaacatccacatctagctcaaaacaaagggcctcttaattccttgcatatcctgcagtccacaaaatggaccagcggttcaggtgtccttcatagagtaagcctctagattggctgctcctgggttccttggctcagaactctgaaccaacactcttcttagaccatagagtatgcttaaattattgctgtcaggtgaatctgctctatacac

SEQ ID NO: 865905 - DNA, 634 bp, Homo sapiens
acaattgtagcttaacaaataggaataatttttctgacataacaatttcagaggttgagagtctgggtgtgatactgtggttctgtgatataatcagtggcctgggctcctactctttctactctatcatctaagcattcaattgcctttctcaatctkgctgactcatgatcctatgatagttgcttatatccaggcttacatctgtttcaggaaggaagaatgaggacaaagcagtgcctctttaggaaagcaaaagtgttccaaggaatcatcaacttttgttttacgagaaagaatttgtaaactaaaatctactccagagtaattaagttatatagttggacacactgttactacaaacaaaattgaggttttgttagtaagcagcaaaaaagaataaatattgagtaggcaactaaaagtatttgctacaaaaaatatatttacataggtagacagtatttatttttacttagcacaaagtgataatttacccaaaattgtaactagcaagagtaattaattataataatctttatataactatataatatataattacatataaagttaatgtaaataattaatttgataatctataaatcaccactttatgctacataggtacaca

SEQ ID NO: 865906 - DNA, 620 bp, Homo sapiens
acagtgagatcctatctctacaaaaaaattaaaatatttgttggggatagtggcacacacctatagtctcagctactcagtaggctgaagcaggaggattgcttgagcccaggagtttgaggctgcagtgagccacaattacaytactacactccagcataggtgactgaatgagatcctgtctctaaaaataaataaataaaatgctgctgaacaaccattggaaaaatggtttagaaaatttagaaggaaataaaaactttttgaaacaaatgaaaatggaagcacaaccttacaaaacctatagaatacagcaaaagtagtataagaggaaattttatggtaataaatgtctacactcaaaagtaaaaaaaattcaaattcaatttgaaattttcgagattcaatcagaatgaaatagaaaactgaaaccgaccaaaggagtaatgagattaaaacagtaataagtcttccaagaaagaagagccaaggactgtattcgctaccaaattctactaaacttatgtgaaaaaaactaatagttcacctcaaactatttcaaaacctaagcagaaaagaattcatcctgactcattctatgagaccattaccctgatact

SEQ ID NO: 865907 - DNA, 620 bp, Homo sapiens
acagtgagatcctatctctacaaaaaaattaaaatatttgttggggatagtggcacacacctatagtctcagctactcagtaggctgaagcaggaggattgcttgagcccaggagtttgaggctgcagtgagccacaattacattactacactccagcataggtgactgaatgagatcctgtctctaaaaataaataaataaaatgctgctgaacaaccattggaaaaatggtttagaaaatttagaaggaaataaaaactttttgaaacaaatgaaaatggaagcacaaccttacaaaacctatagaatacagcaaaagtagtataagaggaaattttatggtaataaatgtctacactcaaaagtaaaaaaaattcaaattcaatttgaaattttcgagattcaatcagaatgaaatagaaaactgaaaccgaccaaaggagtaatgagattaaaacagtaataagtcttccaasaaagaagagccaaggactgtattcgctaccaaattctactaaacttatgtgaaaaaaactaatagttcacctcaaactatttcaaaacctaagcagaaaagaattcatcctgactcattctatgagaccattaccctgatact

SEQ ID NO: 865908 - DNA, 570 bp, Homo sapiens
atacagtaataatgagatagctgaaaaagaaatcaagagggcagtctcatttataaaaactacaaaaaatacctaggaataaatctaaccaaggagatgaaagatctaaaggaaaactataaaacgctgatgaaagaaattgatgaggacacaaataaatgaaaaaattccaatgctcatggattgaaagaattcacgttgttaaagtcaccatacaacccaaagcaatctacatattcaatgcaatctctatcaaaataggaatgtcatttttcatagaaatagaaaaaaattaaaacttgtatgaaattgaagagctcaaatagccaaagcaatcctgagcaaaacaaaaaaactacaacaaaaaaacaaagctggatggargcatcatactacctgaatttaaaatatgttacaaggatctagtagcccaaatagcacgatattagtataaaaacaggaacatagaccaatggaatagaatagagaatccagaaataaatccacatttataggcaaatgcaagagcatatttttgagaaataatactctctttaataaatggtgctg

SEQ ID NO: 865909 - DNA, 618 bp, Homo sapiens
gaggacacaaataaatgaaaaaattccaatgctcatggattgaaagaattcacgttgttaaagtcaccatacaacccaaagcaatctacatattcaatgcaatctctatcaaaataggaatgtcatttttcatagaaatagaaaaaaattaaaacttgtatgaaattgaagagctcaaatagccaaagcaatcctgagcaaaacaaaaaaactacaacaaaaaaacaaagctggatggaggcatcatactacctgaatttaaaatatgttacaaggatctagtagcccaaatagcaygatattagtataaaaacaggaacatagaccaatggaatagaatagagaatccagaaataaatccacatttataggcaaatgcaagagcatatttttgagaaataatactctctttaataaatggtgctgggaaaagtggatatctataggcagaagaatgaaaataaacccttatcttggaccatacacaaaaatcaactcaaaatggactagagacctgaacaaaagacttgaaactataaaactactagaagaaaacacaggggacacactacatgacattggtctaggcaaaggttttatggctaagactctaaaagt

SEQ ID NO: 865910 - DNA, 642 bp, Homo sapiens
gccccagatcacagacgcaggagggacacaggcacagccagcagcagaagcatcagctgagccagcccacccctggcctacagaacatgccactgttccagcctctaagtttggggctggtttgttccttggccaaagccaactccgattgtttgagggtgggtggtgtggcagtctgggcccagcacaggacagagcagctgccatagtctagaaccacttacccatgggaggggaccccagctccccagagctccccarccacccacagcaggggcagagctgaagcctgcaggggtccagcctctcaggcagggatgtgagcgtggtactgggggagcctggcacagggcccttggggccaagaggagagagcccggctgccactcaggggagggggaagctgtgtccactggggaagccactgccacagcaagatagtagggacagacaggtgccgggcggaagctggagagaggaagccctgctgagggcaggctgtcctttcggagttggatggtgatgtgtctagtcaggctgtgagtccaccagcattgagagtccacccagaggctgggagtcctgattacaagctgagaggaacccccaccagctcccgagtgctgggcagtgctggccacc

SEQ ID NO: 865911 - DNA, 612 bp, Homo sapiens
agggagctcaactaaaagatagcttgggtatttggctttccatttctcccattagcacgaaagaaaacagaaccagtgactctgaggacattctccaaagtgagaatgctatttcatgagctgccacctatagttcttrctgcccacactgaaaaaaaaaaaaacaaaaatctgtgtgatttgccttgaaataaaataggaaacatgcagcctttaaagactaggatttgacataatacagatcaaaataaaataagtcatgaatcagtaggactttcacccagggctttgaagcctttatttttatgattattgccaccgcagagcagagccggctgcataaacaccatttagaatagctgaaggctggcatcgcataagaaaaatggcaaccagagcgatttccctgagggtccatgagtcctaattctgtttaatgtgacaattcctgaacaactctggcttcttcacagaaatatgcctgggaagttctgggagcctggctgcctagagcccgcctgagagtgaactagtcttcagtgtttacagacagagtgacaattcctgaacaactctggcttcttcacagaaatgtgcctgggaagttctggg

SEQ ID NO: 865912 - DNA, 569 bp, Homo sapiens
gggtatatacccagtaatggaattactgggtcaaatggtatttctggttctagatccttgaggaatcaccacataatgtcttctgtcttccacaatggtttaactagtttacgctcccatcaacagtgtaaaagcattgctatttctccacatcctctccagcatctgttgtttcctgactttttartgatcgccattctaactggcgtgagatggtatctcattgtggttttgatttgcatttctctaatgaccagtgatgatgagctttttttcatatgttttttggccgcataaatgtcttcttttgagaagtgtcttttcatatcctgtgcccactttttgatggggttgtttgtttatttcttttaaatttgcttaagtttcttgtagattctggatattagccctttgtcagacggatagattgcaaaaatgttctcccattctgtaggttgcctgttcactctgatgatagtttcttttgctgtgcagaagctctttagtttaattagatcccgtttgtcaattttggcttttgttatcattgcttttggtgttttagacat

SEQ ID NO: 865913 - DNA, 600 bp, Homo sapiens
tattggccattctggagtatgcaatttattagaaaacatttttcctaatgtggagttgctgatgggaaattaacaaaaagggcctgtgttagagcctagttggtctctacattctttccaggctcccttgacattctttaattcagtctagctggtgcawgaacttgacagtcgaggcaagataccctcattccatctgccattttgtttcttcagagcctaaatacagttttatcatttgggcagtgccctgtgtattgggcaaatatcctaatttgattttgacggcatcatctcccatctcaaatcttcaggcctctgtatctgtctaaacccacatggttagaaaatgcttttcttttctgttctttttttaagctggaatctgtcagcagaattttctgcgtttgcttttatttcctgggtctcttctttctgttctatatattcattttcttgtgtctttccctgaagctatgcatgttttgctttatgttattttccagattcaacttcatcaacacagtagacatcaaacccatttgttttcttcttttaagatgctaatgtttatccatttatcaagtatcatcgatgcac

SEQ ID NO: 865914 - DNA, 600 bp, Homo sapiens
tattggccattctggagtatgcaatttattagaaaacatttttcctaatgtggagttgctgatgggaaattaacaaaaagggcctgtgttagagcctagttggtctctacattctttccaggctcccttgacattctttaattcagtctagctggtgcatgaacttgacagtcgaggcaagataccctcattccatctgccattttgtttcttcagagcctaaatacagttttatcatttgggcagtgccctgtgtattgggcaaatatcctaatttgattttgacggcatcatctcccatctcaaatcttcaggcctctgtatctgtctaaacccacatggttagaaaatgcttttcttttctgttctttttttaagctggaatctgtcagcagaattttctgcrtttgcttttatttcctgggtctcttctttctgttctatatattcattttcttgtgtctttccctgaagctatgcatgttttgctttatgttattttccagattcaacttcatcaacacagtagacatcaaacccatttgttttcttcttttaagatgctaatgtttatccatttatcaagtatcatcgatgcac

SEQ ID NO: 865915 - DNA, 615 bp, Homo sapiens
agcaatcatctcaggggaactcctgagcaatcaaatgtgatgtcccctctcaacatcttcttctgacaaacggcaatcacgccccttccaggtgctattttcggccccaaagaaatggagaccggtttactgggaatctttcagaacacagcagcagatccagaggccttaaagggctactgagtacatctgctgggtgctcactgcatgctaacacttcagtggccatatgcattacttcatcatttaatctttgaaacaactccaaacggtgggcattctgttcctctttttataggtaagaaaactaaggcccagcgtcaacacggttcagtakaaacccaagtctgaagcctggtcctaagctctatgcacccctcaaattgggagatcacatagggaaaaaggagtgaagtaatgcaattaagtcttaaaaaaaaagggggggggccataaaaactaaaacaggagttcctaacctggggccataggtgccctgaaattggaatgacggatgtaagagcatttatctaaggagagagacacaagagatttggtggattcccaaaagtgtcttgttactcactccttgagggttaaaaatcatcaacctat

SEQ ID NO: 865916 - DNA, 514 bp, Homo sapiens
ctatttaagttcacatttaaattcattcaaataaaatatatcttaaaatttaggcagtctctgagtcccagtggtcacattctaagccacaggttcccagaggggacaatgcagacacagaacatttccatcatcagaaagttctactggtcagcacagtctagaggtcacttctacagccccttcttctacccattctacggcggggggggggggtggtggtgggacctagcagccctttcaagagaggcaggtgtcagtgactgccagggtagytctaaatccgcttgcaagtttaagcagccacagttatggggatgtgggaagaggagagagaaccatggagcgagagcttgtcatgagtgagggcctgcactggcttctctgtagggtcgctcattaggtcccgctacactacaaatggggagtgccctcctcccccctcatccctctccaactcctgcaccctcctctctcctttccttcagggtccagtcggcccagctgttgccta

SEQ ID NO: 865917 - DNA, 651 bp, Homo sapiens
tgatatcttactgtggttttaatttgcattttcctgatgattagtggtgttaagaatttgttttcatactattgttggccatttgtatattctcttttgagaaatgtctattcatgtagtttgcccactttttaatgagattacttgtttttttccttgctgatttgytgagttccttgcagattctagatcttagtcctttgtcagatgtatagtttgtgaatattttgtccaattctgtaggttgtctatttactttgttgattatttcttctgctgtgcagaagccttttcatttaattaagctccatttattatttttgattatattgcatttgcttttggagtcttagtcataaattctttgcctgggtcaatgtccagaagagtttttcctaggttttcttctcagatttttctggtttcaagtcttacatttaagtctttagtttttttctatttaagtatttaattcatcttgagttaatttctgtatatggtgagagacagggattcagtttcattcttctacatgtggctatctagttttcccagcatcaatggaaattttaaataagtgagatcaagatcctgaagcatttctttgaagaattgtaacagaagaggaaacatggctttaccagtacaatt

SEQ ID NO: 865918 - DNA, 619 bp, Homo sapiens
cagtagaagaaaggaaaaaaggaagagcctcatgcttgatctgacaccatggtccacgcagccctgggggagcccccagagccctctctcccccatcagtcagcaccatctgttaccagggtgtaaatggtgggtcctcgtcagtcctgggtgctgaggatggagctgactgggacagctctctgccccctaggactcacaagctcaggggagagagtgaccaggagacagcttgtgaccttactatgtgctcagtgcagtgagcagggtgcttggggccctgtgcccaatctaggctacagrgcccagggttgcagggttgcttaaagctccctgatggcccataatggccaggtcagtgggcaggtccagggcctgtcagaattaggcaagcctgtctttatgttgctttcattctttttaatcatcatgagatggaacttggcagatgtcagtggacagaggctggccaaaggaggttttcttatcccctgctaaattccttgctaggacacagtctgattttaccagcttaaaggtgggattctccaccttcctgagtggttcaagtatccagagctcagtggctcacccagggtgaatattatagtctcctggg

SEQ ID NO: 865919 - DNA, 638 bp, Homo sapiens
aatggaatgatagctagtcagttataggaactggtcatttattagttgtatgactttggccaagtcacttaacctctctgaactatacttttctcgtctattacattggaatattaataactcaaaggagggctacaattaagtgaaataatctgttattgtttgttgatcttaatattgataatattgatagttatcctatatattttctacaaagtatatactgtacttaaaatttactacttggattaaatgggatttaacaaagtctggatattaaaaatactttttaaatttatatagatcagagatacaagaggtttcagtggcttgaatcatctgggtaaagggaagatttgaataggcatggtagaaaaacaatgtccatattatccagtttaaaaggtggacacactttcatttaagtatgrcttagtatgattaatttagactaagtttaatcttaaatgatgatcaatgtcttgcttaaggactgttgtcctcacatttcactaagatagttaaacaaacaagtacaaaaatatataatctcatgttttagtaagtgtaatgaaggaaaaccagagaataacactgagagaaggccacccaatggagatgacatattaccaaatgga

SEQ ID NO: 865920 - DNA, 611 bp, Homo sapiens
gtatgtagaacactcaacaacagcagaaaacacattattctagtgcccatggaacatttgccaaggtaggtctgtatgttagacagtaaaacaattctcaataaatataaagtggttaaaataatacaaagtatgttctctgaccacagtggattgaaagtagaaatcaataacagaaaaaatttgagaaattcacaaatatgtcaaaattaaattacttctaaataaccagtgattccaaagtaataataaaacaatagagaaaaataacaactccagaagttggtactctgaaaaaaactgacaaatatttgtctgcactgaccaagaaaaaaatgaaagaagactcaaattaagagaggacaatactactgacttttccaaaataaaaaggattataaggaattatatgaacaaatgcatgctaacaaattaaataasttagttgaagtggaccaatttctagaaagacacaaaataccaaaactgattcaagaataaataaaaaatcaaatagacctataatatataaaaagattaactagttattaaaaacatcccacagagaaaagttgaggaccagatgacttcactggtgaacgctaccaaag

SEQ ID NO: 865921 - DNA, 612 bp, Homo sapiens
atgtctattattagtttatataaattttattttagtgaagaaaaagaaagatcatttattcattctttaaaaaagtattattttaaaaatattgttatatttaaaaacataaagatttctgatcagagccctaagtcttataactgataagtctctgtagagagcatcactatcttgaccactaacccctggagtcttctgtgtgcaaaattctagtcatctgtcccattcaaatgggtctcaartgtttgctagttcgtaagtgacctagtttgcatcatagttagctttaattttgtagttttatttccattgcagatttggcattatctagtgtctctatccttacttactatgttggtttaagccattcagaaaaatttagtcatatggcctgaaatagctatgatgtgtctgatatgagttgaaaaaatagctaaccaagatttcagttctgctcttggatttgaaaagcattggaatcagcagtttctataagcactttacttaagagagaagaggaatacagtttcattattaagcaagctgatgtgaagtaggcctttaaaaagaacagaacatgtagaaacttggtttctctcaagatcgttt

SEQ ID NO: 865922 - DNA, 626 bp, Homo sapiens
atacaaaacacagaactaattaagggacttagcaatgttacaggatatgaatcaacacacaaaaatcagttgcattttatacaccaacaatgaacaattctgaaaaggaaactaagaaaacaattccattacaatggcatagaaaaaattaaaatacttaggaatagacttcaagaaggaagctaaagacttgtacactgaaaactacaaagcactgctgaaagaaattgaagaagagacaaataaatggaaagatattccatgtttatggattagaagacaatattaagagtcagtacttcccacagtgatctacagatttaaagcaatccttttcaaagtcccaatgtttctttacaaaaatagaacaatcaatcctaaaattcatagggaatttcaagggacactgaatagccaaaacaatcttgaaaaagaatarcaaagttgaaagcctgacatttcctcatttcaaaccttacttcaaacctacagtaatcaaaacagtgcagcactggtttcaagaaagacatataagccaatggaatagaatagagatcccagaagaaacccttgtgtatatggtcatatgattttcagcaagaatgccaaaaccattcaatggggaa

SEQ ID NO: 865923 - DNA, 597 bp, Homo sapiens
ggatttgttagaataggataagggagccaggcaactggagcagacatcaaggtgggaacaccaggcctcagggtcccgcagttgctgtgcctgggctgccattgttccatctgtatctatgtcacgcgaggtcatatgagtgggccgggcacggtggctcacgtctgtcatcccagcactttcaggtggatcacctgaggtcaggagttcgagaccagcctggccaacatggtgaaaccctgtctctaccaaaaatataaaaattygccaagcctggtggtgggcatctgtaatcccagctactcaggaggctgaggcaagctaattgcttcaacccaggaggcagaggttgcagtgagtcgaggtcatgccattgcactccagcctgggtgacaagagtgaaactctgtctcaaaaaaaaaaaaaaaaaaaaaaaaccatatgagtgtcccattggctcagcctagattacagccccaccctggcagggtagtaggaggaaggcttagaactgtcttggcttctgaagagggcaggacagtaacccaatccaccttcccagaaacactgtcctcagtggggaggagggacaactcc

SEQ ID NO: 865924 - DNA, 597 bp, Homo sapiens
ggatttgttagaataggataagggagccaggcaactggagcagacatcaaggtgggaacaccaggcctcagggtcccgcagttgctgtgcctgggctgccattgttccatctgtatctatgtcacgcgaggtcatatgagtgggccgggcacggtggctcacgtctgtcatcccagcactttcaggtggatcacctgaggtcaggagttcgagaccagcctggccaacatggtgaaaccctgtctctaccaaaaatataaaaatttgccaagcctggtggtgggcatctgtaatcccagctactcaggaggctgaggcaagctaattgcttsaacccaggaggcagaggttgcagtgagtcgaggtcatgccattgcactccagcctgggtgacaagagtgaaactctgtctcaaaaaaaaaaaaaaaaaaaaaaaaccatatgagtgtcccattggctcagcctagattacagccccaccctggcagggtagtaggaggaaggcttagaactgtcttggcttctgaagagggcaggacagtaacccaatccaccttcccagaaacactgtcctcagtggggaggagggacaactcc

SEQ ID NO: 865925 - DNA, 583 bp, Homo sapiens
cagaagacggctccctcttgcataagtttagtacctggccttggtgtctccaataggaacccagaacagaggcatgtggcctgtgtccttgtccctctctgtgctggctcagactctgtccccctctgtgccagataagagagagtttctgtgccagatcagagaggktgtccctctgagctgacagagagagggacaaggcacagagaggaacgtggacctctaagagtttgaactcttctgagggtatcctctgagcaccaagggatatagcaacaatgataatcgcagggttttcttggcttattgatgatgctgggagcttatggaggcttctccctttagaatagaaactgatcgtgtagggctgtagctttccttgaagactgtaggctggctagtggagtctggaccatgggccctaccaggaccctagggctgtgttggtgtgcatttagtagtaaaaaggagctaatgagtggaaatacccagacaagcaagtacacacatccatgctcatatttcccacaagtgtgcacactctgtttccttgatcctaagatgctgctgactgtaacacaca

SEQ ID NO: 865926 - DNA, 568 bp, Homo sapiens
gggttaggacatcaacatatgagtcttgccatggagatacaattcagcctataacagggagaaacagaatctctcccatgagcttccatatctctgcccgtatctcggccaaatccatttattctgttgccagttagactggaggctctgtgacagcaacagtgatggattttgatcttcattcttctttgtagcatttgaagcagggccccacacaactgtgcatgttccataaatgcagatgactaagtactattggcaacgataataatagaaagattgtaatgatacaggatagagcarttgtggataaatccagttatgtatcttgcataaagcaaaagcagattggaaaaaattgaaataaaggggcataaatgtatatccattcattcattaatttattcattcattcatgtactttgttaaacagctgttcattgagcacttattatggtccatttggttagaggcgttgggttcacaatgatgtacaagacccttttccttacagaacttgaattctgaagagagagtgaaaagttaattaattaataacaccaggttg

SEQ ID NO: 865927 - DNA, 616 bp, Homo sapiens
gagcccaaagctatttcctatgctaatgactgccagtcaactctgcctgaaatttttaagcaggccgtaaagtcaggtgtcaacaggagaacattataaaaatggcactagataagggtcatttgtagagctttctattcctttattttacatttttcttctgtttgtccagagaaatcaattcagtaaacctatggactgtcttttaaaacgtgaattatggggttatttaagttctcatcgctggaaattctttttcccttagcacttccagtttcactattccccaagayttcaaattacaaatgtttcaacaaagtaaactttctaatgtacagtggatttccattttttccccatcacaaatagtgtggtgttccccactcacctgtaaagagactttaatacagtagttctctacagctctgaaggaggatagatgaaagtgtaacaaactgtaaaatcacaacctgtatgagactgcagagggacattcaccaaattctaaaaagccaaggtctagggaacgtctgcttttaagtaccaaagaggtagtaaaaaataaaaaccaaagaaaaatgaaatggtttactcaacatccagcggcataatgaat

SEQ ID NO: 865928 - DNA, 616 bp, Homo sapiens
gagcccaaagctatttcctatgctaatgactgccagtcaactctgcctgaaatttttaagcaggccgtaaagtcaggtgtcaacaggagaacattataaaaatggcactagataagggtcatttgtagagctttctattcctttattttacatttttcttctgtttgtccagagaaatcaattcagtaaacctatggactgtcttttaaaacgtgaattatggggttatttaagttctcatcgctggaaattctttttcccttagcacttccagtttcactattccccaagacttcaaattacaaatgtttcaacaaagtaaactttctaatgtacagtggatttccattttttccccatcacaaatagtgtggtgttccccactcacctgtaaagagactttaatacagtagttctctacagctctgaaggaggatagatgaaagtgtaacaaactgtaaaatcacaacctgtrtgagactgcagagggacattcaccaaattctaaaaagccaaggtctagggaacgtctgcttttaagtaccaaagaggtagtaaaaaataaaaaccaaagaaaaatgaaatggtttactcaacatccagcggcataatgaat

SEQ ID NO: 865929 - DNA, 586 bp, Homo sapiens
agcagaagatcatgccatggatttgagatccgagttggaaaggacaaaagagggaagaaaggaaagagggaagaaaaggaacacctaaaaagataaatgcaatgacctagttacatcagtaattttatttaccaagttttgaggacccagcacttttcatgacctgctaataatmatcatcagcccagaacagagacaacaactgggagtgaagtgatctctcccctcttcttgttccttctttgccaaaatgcccttgattttccccgattaattgcactccagttcttctaacatagagaatgccttctaaattaccctctggtgtgagagataatgtaatgtgtgagatgaatatttagctcctcaaagctccccaaatacttctttcaaaaatgatccactattttcttagcttgaatagtcttttcataccaacctcagtgactaccaaaacagtttaatgttattagaatatcatcaagtttcattatgtttaataagagatggtacaagagataattttaatacattttccccaaaattaaaatcacaagttgtaaaattaatcttagaagtgtcagtt

SEQ ID NO: 865930 - DNA, 565 bp, Homo sapiens
atagtcatgtgaataataatactagattagggactgcaggataaagtcagtgttaactccaggtcataatttgaaagctagacctgtaacctgccgctctaattacactagtcctctgtcccctgattacacatacatgtgttgtggctttcaatggaaggaacaaggcattttaaagaagcaacaaaagtgctcttgtcaattagagcagctattaatactaattgtgctttagaattctcacaacaacgttagagaccctaattaatacaccaccgttcacagagatatgatgaaacctgggtgttactcacaccagtctaataactagtctggttgtgatgtggactggctcagagttagaattttaagtaccacacagaaaagaaattagcattcttcagtctcctgttgcaatkggggtgagaggagctggcctgaactacagagctgtagtggaaggcacgtaaagcccctgaaaggggaatcttgctttccaaatcttttgataaatggaagggctttccaagtgttgtcaatctaaatgaacacagcagggagtgta

SEQ ID NO: 865931 - DNA, 647 bp, Homo sapiens
atggaaagaaacaactgttaccagccactgcaataagaggccaaattgtaaagaccatcaatgccatgaagaaaccacatcaattaatgggcaaaataaccaacaaacatcaaaatgacatgatcaaattcacacataacaataggaaccttaaatgtaaatgggctaaatgctccaattaaaagacacagactggcaaattggataaagagtcaagacccatgagtgtgtggtattcaggagacccatctcaggtgcaaagatgcacataggctcaaaataaagggatggaggaagatctatcaagcaaatggaaagcaaaaaaaaaaaaaaaaaaaaaaaaaaaaaaaaggcaggggttgcaatcctagtctctgataaaacagactttaaaccaacaaagatcaaaagagaaaacgaaggccattacataatggtaaagggatcaattcaacaagaagagctaactgtcttaaatrtatatgcacccaatacaggagcacccagattcataaagcaagtccttagatacctgcaaagagacttagactctcacataataataatgggagactttaacaccccactgtcaacattagacagctcaatgagacagaaggttaacaaggatatccaggacctggact

SEQ ID NO: 865932 - DNA, 537 bp, Homo sapiens
gaggaatcgccacactgtcttccacaatggttgaactaatttgcactcccaccaacagtgtataagcattaatttttctctacaacctcagcagcatttttttggctttttattaatagccattctgactgatgtaagatggtatcttattgtggttttgatttgcatttctctaaygatcagtgatattgagctttttttcatatgattgttggctgcatgtatgtcttctttagaaaactgtctgttaatgtgctttgcccactttctaatgaggttgtttgtttttttctgataaatttgtttaagttccttatagatgctggatattagaccatcacaaactagatgtatagtttgcaaaaattatctcccattctgtaggttgtctgtttactctgttgatagtttattttgctgtgcaaaagctctttaattagatataatttgtgaatttttgcttgtggtgcagttgcttctggcatcttcatcatgaaatctttgctcatggtatgtcctgaatggtatcgcctaagt

SEQ ID NO: 865933 - DNA, 586 bp, Homo sapiens
ccaaagtctaagctctgacccaccaagcataccaacacctcctccatgccttaaacagtgttagtctgtacagagaggacttgacaactctgctaatcagaatatttcttgaacaactaatggaagggataaagaaagaaaggaggaaggcagaaggaagrgaaggagggacagagtgagggaggaagacacaagtcactgctgccttgtgggagatgcactggacttagcatagctgccctggtgtcctggtcactgctctccccctgtggctgaatggcttgggacaggttgccagacctctatatgtcttcaccattaaaagagacgtttaagaaaggataaatttcttcttcctaaagaacctctcccagtccctttgtccaatcctggcatctcatttttcaatgcttacatagacctctcctctggggtcacctggcacaacaacgctttactaactgccttcaattcttaggtcatactgaggcattaggcttgccaacctggttgaagtgtgagatcttagagaaaaagaatcttctttcctcctcctttatcttcttttctcctcctctgcttcctt

SEQ ID NO: 865934 - DNA, 586 bp, Homo sapiens
ccaaagtctaagctctgacccaccaagcataccaacacctcctccatgccttaaacagtgttagtctgtacagagaggacttgacaactctgctaatcagaatatttcttgaacaactaatggaagggataaagaaagaaaggaggaaggcagaaggaagagaaggagggacagagtgagggaggaagacacaagtcactgctgccttgtgggagatgcactggacttagcatagctgccctggtgtcctggtcactgctctccccctgtggctgaatggcttgggacaggttgccagacctctatatgtcttcaccattaaaagagacgtttaaraaaggataaatttcttcttcctaaagaacctctcccagtccctttgtccaatcctggcatctcatttttcaatgcttacatagacctctcctctggggtcacctggcacaacaacgctttactaactgccttcaattcttaggtcatactgaggcattaggcttgccaacctggttgaagtgtgagatcttagagaaaaagaatcttctttcctcctcctttatcttcttttctcctcctctgcttcctt

SEQ ID NO: 865935 - DNA, 586 bp, Homo sapiens
ccaaagtctaagctctgacccaccaagcataccaacacctcctccatgccttaaacagtgttagtctgtacagagaggacttgacaactctgctaatcagaatatttcttgaacaactaatggaagggataaagaaagaaaggaggaaggcagaaggaagagaaggagggacagagtgagggaggaagacacaagtcactgctgccttgtgggagatgcactggacttagcatagctgccctggtgtcctggtcactgctctccccctgtggctgaatggcttgggacaggttgccagacctctatatgtcttcaccattaaaagagacgtttaagaaaggataaatttcttcttcctaaagaacctctcccastccctttgtccaatcctggcatctcatttttcaatgcttacatagacctctcctctggggtcacctggcacaacaacgctttactaactgccttcaattcttaggtcatactgaggcattaggcttgccaacctggttgaagtgtgagatcttagagaaaaagaatcttctttcctcctcctttatcttcttttctcctcctctgcttcctt

SEQ ID NO: 865936 - DNA, 640 bp, Homo sapiens
atctacccatgcaacatcaaatggtctactatattccaggcgttaaagtaggtgcaaaaatcaaaagaagaaatagacactatttccatcttgaaggagtttgttgtctggtgggaataaagactacttatcaataagcacaataatagcaagtagtcaatgatataataggtacattcatagtgctaacataatataaagatttattgaacacttactatgctcccaaccccatgctaagctctttacataatttctctcatttaagcctcatgatgatcctatgagacaggtgctataattttctcattttccacataaagggacttgttccacatcacatacctatgaagaggtggggctcttgaagctcaacactctatctccagaccttatgctcttaaacatcaagctacctactgctagctggaatcactgatgaagatatgactccagagaaatttacrgagttccctcagagagggtgacacttatgctgggccttaaaggagatcatcaaagagaggagggaaagaaaatttcaggcagttgcaagactgggtaccaagtcccatgtgtttagagaggagcaaacatttcttcagtatgactagaagatagaatgcatatgtgtagatgg

SEQ ID NO: 865937 - DNA, 598 bp, Homo sapiens
gctaacacggtgaaaccccgtctctactaaaaatacaaaaaaaaattagctgggcgtggtggcgggcgcctgtagtcccagctactgcgaggggggggggctgaggcaggagaatggcgtgaacctgggaggcggagcttgcagtgagtggagatcgcaccactgcactccagcctgggcgacagagcgagactctgtctcaaaaaaaaaaaaaaaagaattragatccaagagatagagagggattgggtctcatagagctatgggaattcaggtgaggatttgagatagaagggagacatctggattatggggaggcaagaagatcctcaggagaccttttggggtagtctaagtgaaagatgatgagggccagggaagtgaagacagagataaatagatttaagacacaacagggcaggatttgataaagttgacaggaatcttcaattattaaatgtagaaggtaagttaagaaagggatataatacttctaaggttttggtttgagtaactgtggggatagtagtgaaattgacagaaatggggaagaacataagaacatgtttttgggagctgcaaatcaagaattctgttt

SEQ ID NO: 865938 - DNA, 617 bp, Homo sapiens
aaattcattatgccgctggatgttgagtaaaccatttcatttttctttggtttttattttttactacctctttggtacttaaaagcagacgttccctagaccttggctttttagaatttggtgaatgtccctctgcagtctcayacaggttgtgattttacagtttgttacactttcatctatcctccttcagagctgtagagaactactgtattaaagtctctttacaggtgagtggggaacaccacactatttgtgatggggaaaaaatggaaatccactgtacattagaaagtttactttgttgaaacatttgtaatttgaagtcttggggaatagtgaaactggaagtgctaagggaaaaagaatttccagcgatgagaacttaaataaccccataattcacgttttaaaagacagtccataggtttactgaattgatttctctggacaaacagaagaaaaatgtaaaataaaggaatagaaagctctacaaatgacccttatctagtgccatttttataatgttctcctgttgacacctgactttacggcctgcttaaaaatttcaggcagagttgactggcagtcattagcataggaaatagctttgggct

SEQ ID NO: 865939 - DNA, 617 bp, Homo sapiens
aaattcattatgccgctggatgttgagtaaaccatttcatttttctttggtttttattttttactacctctttggtacttaaaagcagacgttccctagaccttggctttttagaatttggtgaatgtccctctgcagtctcatacaggttgtgattttacagtttgttacactttcatctatcctccttcagagctgtagagaactactgtattaaagtctctttacaggtgagtggggaacaccacactatttgtgatggggaaaaaatggaaatccactgtacattagaaagtttactttgttgaaacatttgtaatttgaartcttggggaatagtgaaactggaagtgctaagggaaaaagaatttccagcgatgagaacttaaataaccccataattcacgttttaaaagacagtccataggtttactgaattgatttctctggacaaacagaagaaaaatgtaaaataaaggaatagaaagctctacaaatgacccttatctagtgccatttttataatgttctcctgttgacacctgactttacggcctgcttaaaaatttcaggcagagttgactggcagtcattagcataggaaatagctttgggct

SEQ ID NO: 865940 - DNA, 630 bp, Homo sapiens
atctcagttacactaactagattaaagaccttctgctgaattaaagaaaaaatcaacacacagattatttgaaacaaatgtaaatatgcaacttttaagcacatagagaaatctaccctaaagttgatgttttttcaagttctcttggagcttacattccagtgggagaaaccygtgttaaacaaatacatagaagacaatttcagattgtgagctaggaaatcagggtagaggaatgggtaatattagagagatcagggaggcttctctgagaggtgacatttgagctgagatctgaaagaccaagccacagtcacatgaagacatggagttagcgttacatgcaaagcaaacggttaagtgcaaagtccctgaggctggaatgggcttaatgtcgtggagaaacaggaagagagtggaggagtgatgcgagatgagaatagtcagagaggaaggtagggccataggaagaagttttgatttttattccaagcacagagaatactttagaaagctaaacactgacttttaaaagccatcaacaaaggaaaaatatgcctaaggtgtgtgttttatatgggaccgaagaagaaaataccgaggcttctccccattttattcttccacatt

SEQ ID NO: 865941 - DNA, 630 bp, Homo sapiens
atctcagttacactaactagattaaagaccttctgctgaattaaagaaaaaatcaacacacagattatttgaaacaaatgtaaatatgcaacttttaagcacatagagaaatctaccctaaagttgatgttttttcaagttctcttggagcttacattccagtgggagaaacccgtgttaaacaaatacatagaagacaatttcagattgtgagctaggaaatcagggtagaggaatgggtaatattagagagatcrgggaggcttctctgagaggtgacatttgagctgagatctgaaagaccaagccacagtcacatgaagacatggagttagcgttacatgcaaagcaaacggttaagtgcaaagtccctgaggctggaatgggcttaatgtcgtggagaaacaggaagagagtggaggagtgatgcgagatgagaatagtcagagaggaaggtagggccataggaagaagttttgatttttattccaagcacagagaatactttagaaagctaaacactgacttttaaaagccatcaacaaaggaaaaatatgcctaaggtgtgtgttttatatgggaccgaagaagaaaataccgaggcttctccccattttattcttccacatt

SEQ ID NO: 865942 - DNA, 630 bp, Homo sapiens
atctcagttacactaactagattaaagaccttctgctgaattaaagaaaaaatcaacacacagattatttgaaacaaatgtaaatatgcaacttttaagcacatagagaaatctaccctaaagttgatgttttttcaagttctcttggagcttacattccagtgggagaaacccgtgttaaacaaatacatagaagacaatttcagattgtgagctaggaaatcagggtagaggaatgggtaatattagagagatcagggaggcttctctgagaggtgacatttgagctgagatctgaaagaccaagccacagtcacatgaagacatggagttagcgttacatgcaragcaaacggttaagtgcaaagtccctgaggctggaatgggcttaatgtcgtggagaaacaggaagagagtggaggagtgatgcgagatgagaatagtcagagaggaaggtagggccataggaagaagttttgatttttattccaagcacagagaatactttagaaagctaaacactgacttttaaaagccatcaacaaaggaaaaatatgcctaaggtgtgtgttttatatgggaccgaagaagaaaataccgaggcttctccccattttattcttccacatt

SEQ ID NO: 865943 - DNA, 630 bp, Homo sapiens
atctcagttacactaactagattaaagaccttctgctgaattaaagaaaaaatcaacacacagattatttgaaacaaatgtaaatatgcaacttttaagcacatagagaaatctaccctaaagttgatgttttttcaagttctcttggagcttacattccagtgggagaaacccgtgttaaacaaatacatagaagacaatttcagattgtgagctaggaaatcagggtagaggaatgggtaatattagagagatcagggaggcttctctgagaggtgacatttgagctgagatctgaaagaccaagccacagtcacatgaagacatggagttagcgttacatgcaaagcaaacggttaagtgcaaagtccctgaggctggaaygggcttaatgtcgtggagaaacaggaagagagtggaggagtgatgcgagatgagaatagtcagagaggaaggtagggccataggaagaagttttgatttttattccaagcacagagaatactttagaaagctaaacactgacttttaaaagccatcaacaaaggaaaaatatgcctaaggtgtgtgttttatatgggaccgaagaagaaaataccgaggcttctccccattttattcttccacatt

SEQ ID NO: 865944 - DNA, 648 bp, Homo sapiens
gcacatcctttcttagtcatgtatctttcaaatggcctgattatgctcctttgcaaggccccaagacatgtgttgaattattcattcaatattcattcaatattgttgtgttgcttaatttggcattatggtggcacagcattatatttagatacaatggaggacagsattgtgaaaacatggatcattcttcaataaggttttcttttcctctgaaatgtatccaattaatgggagtgggagcatttgccattccacagatgaacacctgcaatgtgctagtaactgtgctggatgctgaagatttggcaggaaattaaacaaacacagtccttcatggcagcacttacattctatttggggagtgccaccaaaaataaccaaataaacaaaataatttctgacttgagagaaggtgatgaaatgggagaatggggtcattttagatactagtggtcagggaatgaatgtctcagcaggtactattggcctgaaatttgaaaaggagagagccaccccttctccagttagcctggaagattgttccagatgatgagcatggcatttttaaggaaaagcaggaaggccagcctggttgaaggtagtgagctagggcttctaaatggagatgaaggtgtaaagcaggaa

SEQ ID NO: 865945 - DNA, 588 bp, Homo sapiens
gtgctggtagagtcatgttgctgctaactgtcctttgtatctcatctcattgatgaatcacaactggaagcatgacgtgcacaatggaagctgtcagggccatcatgttgcatgaattctaaacacattccttgcacatcagcagaggctggcaacagrttgtgaacatgccagtggaatcatacatgccttcatgtcctgctctggacttccttaggaaaggtctaagaagacaggttcaatttgggttttgttcttcttccctctagatgatgttggaagaaaactaaaagcacctgagggcctgtcaaagtcaatcacatttattcttggaaaccaagttcaccatagagggccagtcagggatatctggactctaaaatgatgagaacagtttgatcgtcaactcacaagtcttgttattttccaatggaggatgaaatcatttttgataggtggattccttagtgaggatgaagttagtccctttatgactaagagacagtttaatgtacaagtgtatatttacttcacagttccaattaagaaaggtagctgtgttctttccagcatatccattttgccttg

SEQ ID NO: 865946 - DNA, 571 bp, Homo sapiens
tgctaaaagattggtttatttacttccccaaacccaagtttttgtatttgagctttgttcttttctctctttctcttttttttttttttttgagacggagtctcgctctgtcacccaggctggagaggctggagtgcagtggcacaatcttggctcactgcaacctctgcctcccgggttcaagcaattctctcgcctcagcctcctgagtagctgggattataggcactcgccaccacacccagcttatttttatatttttagtagagacagggtttcaccatgttggccaggctgctctcgaastcctgacctctgttgatccacccacctcggcctcccaaagtgctgggattacaggtgcagccaccgtgcccggcctcttttctcttttttaaggctttcctttcagttttgtgaacctaaaaaaaaaaaaaaaaaaaaaaaaaaaaagcgttgcctgcagtgtgtaaggctttccactagtgctttccaaggacgatatcactgtcatcatctgtgtttaactcactcatcctcagctaaaaagctcctctcctctcccagtaga

SEQ ID NO: 865947 - DNA, 714 bp, Homo sapiens
aagtgccttctttataggatccaaatggtgttgactccctttggcagtgcttgtgcttgtggggatccagtgggaggacgtacaggagcacggcttctctgggcttccaaagtggttaacgtggaacattctgctcacctctcttcccagcttgaggaagatttccttcctcataatactaaggcaactatctcagtcgtttgctttccctaggctagaagagaaaggcataaacactggaaagtggaaggcaccaagagggctgtgtgtgtcctaccaggaaaggttattagacaacatgtagcccttgggtgggagggaaatgcaacccaggatggctttccaggtgcgtgggggtggcagggccgtgtggcccagcagagcaggtcaggcaatcggttttgcgtttctactctgagtttgagtcattactggcaggcttttcttctctgagacttattaaacagggccttagaaagttgttctttcataaaggaggctttccctggcaccggaggcagaaaattcaaaacagggatttctgacagaatcmttgataaccatggtacagatttcgttattttcttcatggcatgtatggctaagttctctggaaactaatgagggtgatcccagctttttttttcccctctgttcattgctggtaatgtgagctgtgtgtatccgtgagcaatcttttgctctaaatggtat

SEQ ID NO: 865948 - DNA, 614 bp, Homo sapiens
taacaaacccaggaggaaggaaaagaaagcaaaggaaaagcacgcattcacacacacaactttaaatgattaactactacaagctagggccccttaggggcttctaaatacgggatctcatttaatgctcacaaagttgctagactgatccacgctcagaaggatgacgaatttgggacttatccaactggcgcatggtggagtcaggtttattcgctcatccatttgacagggctcaacgcargctatgctaagacacggcaccttggcatactgagtattttaagatgaaggaatttgagagaactgcagaagcaggaaggtctctctggcttactctctcctttctcttctgaaacaggttgtaaaatctcaaaagaatttctggtcttctacgcacagcaggtcataaaacctcatgggagaaatgccctccctatacccagaggaaaggaatgtctgcctcaccgggaacagaaagaagcagcagaacaaacaggccttgctaagttctcccaattttattaccattaaatcatacttattttttctccagtggatatttctccattacagtttacctcttcatcaaacctaagcataaaaatacataa

SEQ ID NO: 865949 - DNA, 614 bp, Homo sapiens
taacaaacccaggaggaaggaaaagaaagcaaaggaaaagcacgcattcacacacacaactttaaatgattaactactacaagctagggccccttaggggcttctaaatacgggatctcatttaatgctcacaaagttgctagactgatccacgctcagaaggatgacgaatttgggacttatccaactggcgcatggtggagtcaggtttattcgctcatccatttgacagggctcaacgcaggctatgctaagacacggcaccttggcatactgagtattttaagatgaaggaatttgagagaactgcagaagcargaaggtctctctggcttactctctcctttctcttctgaaacaggttgtaaaatctcaaaagaatttctggtcttctacgcacagcaggtcataaaacctcatgggagaaatgccctccctatacccagaggaaaggaatgtctgcctcaccgggaacagaaagaagcagcagaacaaacaggccttgctaagttctcccaattttattaccattaaatcatacttattttttctccagtggatatttctccattacagtttacctcttcatcaaacctaagcataaaaatacataa

SEQ ID NO: 865950 - DNA, 614 bp, Homo sapiens
taacaaacccaggaggaaggaaaagaaagcaaaggaaaagcacgcattcacacacacaactttaaatgattaactactacaagctagggccccttaggggcttctaaatacgggatctcatttaatgctcacaaagttgctagactgatccacgctcagaaggatgacgaatttgggacttatccaactggcgcatggtggagtcaggtttattcgctcatccatttgacagggctcaacgcaggctatgctaagacacggcaccttggcatactgagtattttaagatgaaggaatttgagagaactgcagaagcaggaargtctctctggcttactctctcctttctcttctgaaacaggttgtaaaatctcaaaagaatttctggtcttctacgcacagcaggtcataaaacctcatgggagaaatgccctccctatacccagaggaaaggaatgtctgcctcaccgggaacagaaagaagcagcagaacaaacaggccttgctaagttctcccaattttattaccattaaatcatacttattttttctccagtggatatttctccattacagtttacctcttcatcaaacctaagcataaaaatacataa

SEQ ID NO: 865951 - DNA, 587 bp, Homo sapiens
tgattatggttatttttggagatcctaaatgactcactttagtcataaaacagaatgcctcagcaagtcccaaactaagcgctttggactgctgcaggacgatgtcctagacacagaggagctgcgtctgcaaactctggcaaggcggaccaggctgtttccacacctcttgggcagtagctcctcaccctgtccccatccttatctcactgcaccccatcgccactcccccacgccccttccagtgtcctcatcgcagttccagcccttaggccctccctcctaagctttcttttctctggcttaggacttctaaaaccaaccctggctgcttctctctcttctgtttttccttcctggtagctttgcttttcttgtctacttgtcccttgytcctaaaactatttttagttgaatggtggattttttttcaaagaaacctcacctaaggatagtcccccatgaccactgcccacatcctcctgtagcccttcctggccacagtccaagaaacatgacgggagttccaaccacatgatccctcagcagatttcaggtttggaagatgacttcaggcccaggcagca

SEQ ID NO: 865952 - DNA, 611 bp, Homo sapiens
ttcacttttaagtgctaaaacttgaaaatgagcagagaggcaaggctggaaaataaacaaaaaaacactcaatattctgagcgatgagagaatatgcatcaacccaagaatataattaaaaatactgaaaaaaaggaaaattcagggaagaaaaacgcttggaaattacaagtgtaacagcaaaaatgaaaactttaaatgagtggttttatttggggcctgaaaaccagtgaaatgttaatttttgtctaggttgatggggagcaaaacatacagcacayagaacacattagactcggaattcaggagacagaggggccacaagaacataatccctccaaattaacaaaatacagtgggaaaactttggatcaattcaaaccattcaattggaggatggaagcaattttatcttgttcaagtccactgtggcctcacttcataattgagtaatgtatatccttgtgttacacagttttgtttacttgttttgcctctaagtcttatcaaagtgcatagttaggctccttaagcagagggctaaattacatttttcttttgattttgatgtatctggcaacgtcctgacagctggcataaaaggaaggaaa

SEQ ID NO: 865953 - DNA, 631 bp, Homo sapiens
gtgtctcatgatcttcactgtgcttagatgaaaaacagttgtttcattttttgcttactataaataatgatgtaatgaatattcatgtattgacacacaatttacccatgtaacacacctgcacaggtaccccatgaacataaaagttggtaggaaaaataaataaataaataaatctgggagagaaacacacacatgtacaaaataaaataaaatgattccttttttgtcaaatttaatgttttctatatttttcaaattttgtaaaatggcatgtaattactttttagtttgaccaagagccagagcattttactttatraaggtattttagaaatggagttagtttaaagcattatgctaagagaaagaagccaaacacaaaggcaatgtattttctgattctgtttgtatgaagcatcaagaatagacagatctgtggagacagaaggtagattggtggtttccaggggctggataggagggagtgaatgtggagtgactgctatggtatgtggattatatctcaattttaaaaacttgagtcaaaatttttaaaagtaactgaggtagtttagtcattattaatattatccttcactgctactaatttaaaatttcttttttaaaa

SEQ ID NO: 865954 - DNA, 630 bp, Homo sapiens
ttgttcaaaagaacaatattaatctacaggccagattttagaaaaaagttattctacatattaatgacccacataaagtacatagcttgtgtttttaaatcctaggtcaaatactttttttacaaaataagaacctgatttttttttttttttacaacaaatacatgcaaaaaatgtatttcgttaagcagggatagtcagtcattctggatggtacttgaacttttcaaattcccataccattattcagctttaagaaatgcttgatgatgagctaaaggcaagcatgtgtgttttagtctaagaatattaataccattgctatcaaccctcaggaatgagtttataaattcaataatactatcatagtgcrtattataactatgcttctataatcagttttcctcatattatttcagaatacgaattgaaaaagttacctattatgacatatgcaaaataactatagttaacctggggaaaatacaaataatttatcaggcaaaaaaactcacaaaacaacaaaaaaagttttctgtgtcctcagcgttaattcattaaattcagtgaatctgggcttcacatacacacacatatggcattagtgagctaacccagtttgtactgata

SEQ ID NO: 865955 - DNA, 592 bp, Homo sapiens
tttgcccatgctagtttacattcgttaaattttacatctattaactaacttaatcctcaaaataaccttaaggaatcagcccctaaggataaacagctatgccttggcccctgtaatcctaagagatgcccctttgtgggcatggytgtccctggtgaaaacagaggcaaggagatacttcactgatcagaactaattggctaattgatatgcttcagacattttgccaagaaaaagagagtttaattaaaacaaaaaactatcagtagtactgggagttaaactagtgggagctgagaaatgtaagtcagaactgaaattaaaagagatctagaaagctccaacaatatacttagagggtattattggcagagtgatatactagataaaacatagataagaaagagttgaatttgtcaatataaaatgcaatttggtgtgagataaaagcaacacctcatattagaaaggaaaagtactaagataactgagctgatatttgaaaaaacaagttgaattcttatatatgtgtgaaatgacttacgtactaggttgtttactataataacatttttaatagcagaacattagg

SEQ ID NO: 865956 - DNA, 617 bp, Homo sapiens
gaaatccacaggctgagtatcacactgttaatctcagatgcctggttgggaaaggcacagcacagaggcctctgagttcttccagggagcatgtctcttggctagcctaaatgctacctttcattccctctttgcctccctccttcctcttcctccctcctttccttccttcttccttcctttctaggcttgagagcacatccacattattaaaaactccagatttacatttctcctctttaaagctcaattgtaaagaatgactccaagccttaaatatttaacaaagtaaaagagyagtttggattattaaccttaagcagagatcccggtttatgtcattgccaagatgctaatctaaggacaaagaacgctatctgtagtgacagtccctgaatagagagggccatttaatatcacctctccccaccactcaccaggcatgccaaaccatttttgccagtgcccaatgtgggagactcctgtttgtgagaataatgtagccagggtttaggtgaagggcactgtgaaagggggaaagaagagagaaaaggtaaacctaagcccactggagaaccataagaatgacaaccctggacttctggtcttggggtctc

SEQ ID NO: 865957 - DNA, 572 bp, Homo sapiens
aagctcacccatctaatggctgagacacaaatgcaaacaggtagttacaatacaacacactcaggtgagtaagtgggaacccagatgggggtggggaaggtctcaggatgccttgcaacctcaagggacagggactgcaggctgtacacagaagcccctcggctctgtggtcttcagtcatttctcatgctcgccctccccaggttcctctctgcaaactagcacatgtcctctggcaagctgggtgagcagttggctgcygcaccagccatctgttgctgctcctcgtctggggaggagaaggttaatgctttggctggttctcagtcacctcttccacagtgtgtctactcctacccaagttgcaaccacggctgaacatacccatctgtgcctcagtctcctgctctgtggggcagagataacagaactccattccgggagctggtgagagagagagagcactcactctggagcctctcatgtctgccggccactgagcgccaacagcccccgctccccttcctgtgttcttgctgcctgggacaggtctgggagattatcctatttcc

SEQ ID NO: 865958 - DNA, 592 bp, Homo sapiens
gctgaatgtgggattagagggcccagttgttgtaaaaggtgagtctggggtgatgggactgggttaccaggaaagggagggatcgacattagcagaaagatgggagatggcacccaactcttaactcactcaatttgacctttctggggctcagcttcacaaactgtaattcaaagaatggactgaattaggtgtgtagctttcaaatttatttgytttttttgaagtactttttttttttcttgaacaaaactctacctagacctcccatgtacaaagaacataaaagggagctcttcttggatgctgggagggaggtagccagaagcattgtagtgtccaggcctcctagttcctgccctcagctcagaagggcttctctgcaagtccactggggcttcctggaacatggtttgaaaccctctaaatggggcatctccattccctgttactttaaaatgctatggaaaagagaaagagcagatgactaggagacatctatttcctatgtatacctgagggcacttagtggagaaaagcaatcggtctcatttcctctgaaaataatatactttatctactttataattta

SEQ ID NO: 865959 - DNA, 604 bp, Homo sapiens
agagtgatttattattccccccagcttcattaaggtataattgacaaataaaaattgtctatatttatgatgttttgatatatgtgtacgttgtgaaatgattaaatcaagctaattaacatagccatcacctcacatacttaacaatttttatgtgtrtggtgagtacattttaactctactctcttagcaaatttcaagtaaacaatgcggttttataagctgtagtcactgtgctgtacattagatcaccagaacatattcatcttataactgaaagtttgtacctttttttttttttgagatggagtctcgctgttgttgcccgggctggagtgtaaaggcgcaatctcagctcactgcgagctctgcctcctgggttccagcaattctcttgcctcagcctcccaagtagcttagattacaggtgcccgctaccatacctggctaatttttatatttttagtagagatggggattttgccatgttggccaggctgatctcgaactcctgacctcaggtgatccacccaccttggcctcccaaagtgctgggattacaggcatgagccactacttctggcctgaaagtctgtactctttg

SEQ ID NO: 865960 - DNA, 632 bp, Homo sapiens
tagataatcttgataaaaggcttcccatgccttctttatggatttagattgcttccttattgaaaacgttcaagaaaataagaaatgatgggtactttaacgtaataaagtatttatgccttagtcctaaaatccatcatcttacttaatgggaaaactctagaggcatttccactaacatcagaaattcaacagggataatcactctatctgctactattcaacattgtgttataaatattagccaatgctgatattagccaatgcaatcttgataaagattagcccatgcaatcttgataaaataccctatgatccataaatagctatgcaaaatatcattaataataatyattatataactcattctagagattagagtattcaggaaccagactttttgtttttttagagacaggggtctcactatgttgctcaagatggtcttgaactcctggccgcaagtgatcctcccaccagaatctcccgaaattctgggattacaggcatgagccacacggttgctggccaagatctttttctcagtggttatagctaccgtggaagagaagcacatagcaaattttaaagtttctcatgacatccaactactctggctgataaatctaagt

SEQ ID NO: 865961 - DNA, 585 bp, Homo sapiens
aaatcaccatgggattgctagaaggtgcaggaagggaaagtggggaatagtagtgcagtggaagttaatgttgaggaggaggaggaagattgacgtagatttttaagaactctggtttttatgccttcttgcagaaaatttctccattatgcctatttcccaattgcagaggtgggtttgtgggtgaagaagtgtgtgtttaaagtaagattatatgatatgtgttttattgtctctgaaacaactggtcccatcagttgaaatttatcattcaagctttgtattttacagccacaatctgtgagaagttttaacggytgagtatatacaaaggtttatgaatacatcatataaagataaaatcctccttcttactgctcccaaagactttttgcaaaggagcaggcagttaaagaaagaggttgttaaacaatgcaagtcttaggggcactagtaaattcctctgcaaagcaaatagtgcaaagctgtttacaatcagaaaataatgaataaagattgaagatggataaataaaagctgaagtaaacagcagtttaaaaaatgcagagggggaacattagggtg

SEQ ID NO: 865962 - DNA, 596 bp, Homo sapiens
ttaaggttctggagatgattcacctaaaaaagagaagactcaggaatattggggcaatgagggagtgggggaataaacaaggaaggagttctagccttaatatgcggaggaaaatgttaattagaaccatgcaacaacctgatagatgacattacagatgaggtgtttttttgtcagtaggatttgaaatatcaggcacaatctttaagcatggacccaagattttgctccattttagacttgtagaatgtgcattccacaacaggaagaaaaaatatgcgtgtgaattatgatatatactgttctcttaaaatttaattgtttcaatcatgagatgaagcttgaaaataaggtgccattatattttataactattttcctcccacatccttagaagaagagatttttctgtgatatcgccyatgttctttttatagtttttaatgtacttacctttggggcacgatatgtagaaaaataaggcagtacttttgacaagtagcgtttattttctctttactctttggaatagtcattaaagtaacaagttaggaaatattaaaagcattttgtttctaagaaatatacattcttct

SEQ ID NO: 865963 - DNA, 606 bp, Homo sapiens
aacactgggggtgatggtagaggaagacatcgctatgtgctgctatgaggaagatggggacaggaacatgagaactatggtaggagtgttgctcttatacttggaaccatgagatatctatggaagtatgaataactgtcttagccaggcacagtggctcacgcctgtaatccccagaactttgggaggctgaggcaggcagatcacctgaggttgagagtttgagaccagactagccaacatggcaaaacactctctctactaaaaaatacaaaaaaattagctgggcgtggtggcaggtgcctgtaatcccagctacttgggaggctgagacacgagaatcacttgaatctggcaagcggaggctgcagtgagccaagatcccaccactgcactccagcctgggcaacagagtaagactctgtcaagaaaaacaacaacaacaacaacaamaaaaaacaagaaaaaaaacaggcaaaatccaaaaaactgtcttaggccctactagggtttgaatatggtttgtttggtcccaccaagtctcatgttgaaatttgattcccactgttggaggtggggcctggtaggaggtgtctgggtccttag

SEQ ID NO: 865964 - DNA, 577 bp, Homo sapiens
gtatctccttgtggttttgatttgtatttctctaatgatcagagatattgagcttttttttgtatgtttgttggctgcatgtatgtcatctattgaaaagtgtctgtttgtggtctttgcccactttttaatggggttgtttgtttttttcttgtagatttgtttaagttccttatagatgctagatagtaaacctttgtcagatgcatagtttgcaaaaattttctcccattctgtaggttgattgtttactctgttgatagtttcttttgctgtgcagaagctctttagtttaattagatcccatttgtcaatttttgcctttgttgtgattgcttytgtcatctttgtcatgaactgtttgccagttcctatgttcagaatggtgttgcttatgttgtattttttccacaatgaaatttaaaatacagtttatctagaaataaattgagttaataatatgcgagagggcttcaaagacaactataaagcattatttgtagaaattagagaagacctaaataaataaatgatattgtaaagatgtcatttcttctcaaaatgatctatagtatct

SEQ ID NO: 865965 - DNA, 576 bp, Homo sapiens
ctctgagattgagcagggctttttcagccattgtaaaaccagtgaggttttactgtcaatgaaataaacagtgttggggggctttgagtggagcagtgatgagttatgacttgaattcgtaaagattttttctggctgctggatggtaaacaggctggaaataagcgaaagtgtaagcagaaagaccactctggaagtaatgacagtaatccatatgagatatatgggggaggggacagtggaggtggttggaagtggttgaattctcgatactctttgaaagtagaagcatcaagatttcctggtggagcagatgtgagttgtaaaagaaaraatctcaaggatgactgagactcgtggctgagaagaagtatgacatgtattgacatgggaaagcctataggaagaaaagttgggcaaagctaggtcagaaaaatcaagtgctttcaacttgtgaagtttggaatacgtattagacatttaattacagaattcaggaatttagaaagatatctaggctggagatggagatgtacatttgggagttgtgtggatggtgtttagtcctgagaccag

SEQ ID NO: 865966 - DNA, 576 bp, Homo sapiens
ctctgagattgagcagggctttttcagccattgtaaaaccagtgaggttttactgtcaatgaaataaacagtgttggggggctttgagtggagcagtgatgagttatgacttgaattcgtaaagattttttctggctgctggatggtaaacaggctggaaataagcgaaagtgtaagcagaaagaccactctggaagtaatgacagtaatccatatgagatatatgggggaggggacagtggaggtggttggaagtggttgaattctcgatactctttgaaagtagaagcatcaagatttcctggtggagcagatgtgagttgtaaaagaaaaaatctcaaggatractgagactcgtggctgagaagaagtatgacatgtattgacatgggaaagcctataggaagaaaagttgggcaaagctaggtcagaaaaatcaagtgctttcaacttgtgaagtttggaatacgtattagacatttaattacagaattcaggaatttagaaagatatctaggctggagatggagatgtacatttgggagttgtgtggatggtgtttagtcctgagaccag

SEQ ID NO: 865967 - DNA, 558 bp, Homo sapiens
actgttatgaagaaatatatctcaggattaatagaaaaaatttcttatattggccaatttcaaatttaaccacaattcttaatacatttctctttgacatgaatttataaatagcaattataatgagtatggttctctaaatcaaataacctgttaaaaccaaatgatccaattacaggtttatattaaaaatgaatgaataargaaagctttttagctccttaagatgctatcattccttttatagaatgtcaagatttacagaatatcaggaaagtaatcaatcttcctttgattaggcttgtatcttctctttctttcaaatttctgcagacttttcatttgctggggggaaaaatggaaagctatgggacagtgaaagataacagttaagaatttccaaaggattcaaggatgtagaaacagaaatgactcaaatggtcatcacacttcaaattccatcataaaggctgaaacgctgtagtcctatcctgaactggtcctaatgatttagtgctcgattctaggcttgcacataggtaaacatgacgacattat

SEQ ID NO: 865968 - DNA, 635 bp, Homo sapiens
gggacagttttctatatttcatcaaaattgttagttaaaaaatggagcaaggtttacacaggccacttgaaacattattggatgttactaagaataagcattaggtagtgagcacaataatctttcatataatccgtccctaaagtgtgatcagttcaagcaagaagttagtgaatattattattaaaagatgaccagttgccataatagtagaaatggtgtcaaaaatacaagacaacagggtcccattgaattaagaatgrcttttaaaaacatcaccaaaaatagattctttgagcatattttagccacataaagtagtaattatcttaaatgttccaaaattgagccatgtaatattgaaagtgaacccacagatctttatagcagctcttcccctttttatagaaagcaaaatagtagaaaagataatcactggaaaacctaaataaataattttcatagtagtatcaaggaggtcttagaactgacattcaatgcatatgtttcccactccctatgtatgtccattattgaagatggtgaatgactagcctttctatggaatctgaaaatatgttaccatatgcttccacgccaaaggaaaacctgaatgaccatctcatcaatttcac

SEQ ID NO: 865969 - DNA, 656 bp, Homo sapiens
acaaagacacaatgctaatcctgaaatacactgctgttgaatgagaagaagggactaggctggcacagggaggggcctagaagggtgggtggaagcgggagtgcatgttggaaattttttctcattaaggttgtattagtcagggttgtccggagagacagaaccaataggaaatatatatacgtgtgcatatagatgtgcgcrcacacacacacacacacacacacacacacacatacagcagaggggatttattaggggcaatggttcaggtgagtatgagaagtcctgtgacagactgactgcaagctggagaccctgggatgcccatagcatggttcagtcaaagtccaaaggattcagacccaaagaagccaatggtgtaactcagtccaaggatgaaggcctgggaacctgggggagagggtgactgctggtgcaagtcccagaatccaaaagccagccagcctggagatttgatatccaaggtcaggagaaggagggtgccccagtgtcaggagaaagaggtgaatttgcctttcctctgcctttttgttctatctgggcccctagccaattgaatggtgctcacccacattggggatggatcttccccactcagtccaccaactcgtaacaccaatctctttgggaaa

SEQ ID NO: 865970 - DNA, 576 bp, Homo sapiens
aagggttgtactttgtactctaaaccacacccagaggaaacagcaaagtggccagacattccgcagatgaggacaaatgcaaaaaaatgagaccaaggagatggcacttcatgggtgaatgaaagatgccagtctctttcacatactatataatcaaaattttactttaagataagtggagggtggcatgctggctcacacctgtaataccagcacttttgggaggccaagttgggaggctcccttaaggccaggtgttggagaccggcctgagcaacatggtgagatcccatttytaaataataataatatgataataataataaacggatgttgtaaaatccctatttagagacctaatttgaaaatacttccccccccaccgccgcttttcctgcatgccttttttattgtaagcaagcacccaagcaccctagatattacagaggtttgtgatttattcagctaagacggtttgacccatatgtaagtataaaatcccagtatccccgactccctgaaagtggaactacaacacattatttccctcagataaaatgcaatgaaattctcttg

SEQ ID NO: 865971 - DNA, 602 bp, Homo sapiens
accctatcccttatttttgttttggggttttttgtttgttttttttttttgagacaagttctcgctctgtcacctaccctatcccctttttttgtttgtttttgggttgtttttttttttttttttttgagacaaggtctcactctgccacccaggttggagggcagtggtgtgattatagcttactgcagccccaacctcctgggcttcccacctcaacctcccgagtagctgggactacaggtgcacaccaccacacctggctaatttttaacagttatttttagtagagatgaggtcttgctatattgcccaggctggtcttgaactcctgggctcaagtgatcctcctgcccttggcctcccaaagtgmtgggattatgggcgtgagccaccccacccggccttacccttattcttgttatatcatggtcacagacggctaccagaaagaagattccttcccagaagttccagcagacttccctttacacctgactagccagaactgcagcacctggccatctccagctgcacaggaggctggacagcaagaaacctcacatggtatctcaaaacattattctgtctcccttctcctc

SEQ ID NO: 865972 - DNA, 622 bp, Homo sapiens
taaactggaattcggttgctgacccagccccagcctcggctttcttgttggcatcagggggcacagcactccgcctgtaggtatctctgtctgcttcccctcttgtgagtcttgcaggttgctcaccccctagacctttaggccgaggcctgccagcctctggatgactgtggtgtagggtggcaggcacaatctccgggggcagatgaaggtaccagtagaaacgtctccaggcaaactgttcctccatgcagcctcaggacttgagagactgcatggccttcatgacatgaaggttgggcacmttcttgtctgccagctctgggtgcttaggcatgtggacaaccttctttgccaccatgactcccttcttaaaaaggagttcataaacgggaatctggttcttcttaggcatcaacatctccatggctgtagggtctggggccagggctggaaagacctttagttctttttaaccactgtagttttcaagggtatcatcttgaactttcaggttacttacaatattttgctattacaagcaatactgccaaaaagattcttctcctatgtctccatggggataaaagcaagagtctctctagattctagacttagccct

SEQ ID NO: 865973 - DNA, 668 bp, Homo sapiens
acaactagtctatgaagtgggggtgtctgtaaaaacagcattattacatggttttgctgaggagagtactgtgccctaccactgtatgagtacttaaacaacaaccacaatagcaattgttaacagtgcattcattataaaacacccatttgatggcaggaccctcatgaaagacaatttggcaactgcacttacccttggatccagtcatttcatttctagaagtttatgctacagatgcagtacttacatgtgaagtcattggttgttgcaatgtgtgtactagcaaaaggttagaaacaatattaatgtcccacaatcatggtacatctatataatgaactgttatgtggccttgaagaagattaaaacaatccctttatgtactgatagggaagtatctccaagatattgttaagtgaaaaaagaaaggygcagaaacaatataaactactatgatttactttagaaaaataagtatacatggtatatatgaacttgtatatatattcaaattatatatatgaaacctgtaacaatgtttgccttctgggaggtaactgagaggctaggatgggagagaaaattattttccatgatctatccttttgtatcttggaattgagtatgtatcatctattaaaaattttttaactaaaaataccctt

SEQ ID NO: 865974 - DNA, 691 bp, Homo sapiens
ttttcagtacttttttccctggcaggtacacacatttaacatctatgaattgaggaagaagaataaaggaataatgatagaacaagaaagatagaaagacagagattgaagaatggttacaataacattttaattcagttcttcctaactacaatcaaaacaaaaacaaggaaaatttgacagtagattcttattttaatgtggttttgacatagagytggtgatctcatgggcaagtatggtacatctaaaacataatgcccacatgtaacagtttagtttgtctctcagatgaatgacaatattatacaaaaccatgtttacatttggtagaaaagtgccaaagagttttgctaaaggaagagaggaacctgacttaaatgtggaaatctgacaaagtgcacctaacctgcagaaactcagtttgatatttcagaaaatttgaaatttaatatagctattaagcaataggtaagattttcaaggtagggataagtgggaagaaaattatttaatttctgtggcctttcctacccggagcttctgttttgtttgttttatggtacattgttgttttagttcacctctcatagcctccaatagtcaccaggctttcctctagacgttttgaatgagttttctgtgtgcaatattttattacaatttacaaatgttttcctatgtaaagtcc

SEQ ID NO: 865975 - DNA, 691 bp, Homo sapiens
ttttcagtacttttttccctggcaggtacacacatttaacatctatgaattgaggaagaagaataaaggaataatgatagaacaagaaagatagaaagacagagattgaagaatggttacaataacattttaattcagttcttcctaactacaatcaaaacaaaaacaaggaaaatttgacagtagattcttattttaatgtggttttgacatagagctggtgatctcatgggcaagtatggtacatctaaaacataatgcccacatgtaacagtttagtttgtctctcagatgaatgacaatattatacaaaaccatgtttacatttggtagaaaagtgccaaagagttttgctaaaggaagagaggaacctgacttaaatgtggaaatctgrcaaagtgcacctaacctgcagaaactcagtttgatatttcagaaaatttgaaatttaatatagctattaagcaataggtaagattttcaaggtagggataagtgggaagaaaattatttaatttctgtggcctttcctacccggagcttctgttttgtttgttttatggtacattgttgttttagttcacctctcatagcctccaatagtcaccaggctttcctctagacgttttgaatgagttttctgtgtgcaatattttattacaatttacaaatgttttcctatgtaaagtcc

SEQ ID NO: 865976 - DNA, 679 bp, Homo sapiens
acctggaggcaaattcatatcctaaatgctatcaacaaagaaaagttaggaaaatcagaaaaaaaagatactattaaaaatgaaagcagaaataagtaaaaatgttttaaaaaataaaaatatactaaaattaataattgtaagaactagttcttgcaaaaattattggagtaaacattcaagaaactcaatcaagaaaaattcaagtatccaaaccttaaataagtaatgataataaaatgaaagaacatttaacatgaaaaagaaaagaaactataaagcattaataattaataaaaaaggaaaccataataatctagagggaaatctatatgaatatttaacttatttcatggtagattagtaccaccaaagcattaaagcaatggatgaaattaaaaaatagaaagcatgwtggatatatttaatgataaaatttataatgatacattaaagcgatcaaaacaaaattaatattcagatgacaaatacgtggacctgaatcaggacaactacaataaagatggagagaaaggagattcaagaaacacattacagtacaccaaaatgggaaaaaacagttgatttttatttgaatgttgtaggataatgatgccacaactaggacagaaaacccaggcttatacaggaaagatgatttcaatattcatctacatgc

SEQ ID NO: 865977 - DNA, 575 bp, Homo sapiens
gatttggaaatcactgaattgtccataatctgtcccgtagctgagtttcagatgaagaaaacatttttttccattcaatctcagaatgacatataataacattctctttcacagcatttagaaaataaatgggtatttttatgtgatttttttttttttactgtgctgttgctcttgttgttgttattcttgtgctctgggtcacagagtatttttattttcatttctgtttcataacattcacccactcattcattcaacaatcaacattttcagccttttctaagagcgaagcactatggcacacctggtagggataaacccatgaataacttgtggtccctccactcagataagtgcaacmtgtctataacttctctaagaaaaaaaggcattaataatgttcttacaaaagttataaaatggtgatttattttccaatatgcttttaaccttgggagtgaacttgttgaagtctctgcccatccttgcatttgaagcagactgtaaagcttttatctaaagaaattaggcttaacagtctggaaaactatgaggtggggaagattggggat

SEQ ID NO: 865978 - DNA, 575 bp, Homo sapiens
gatttggaaatcactgaattgtccataatctgtcccgtagctgagtttcagatgaagaaaacatttttttccattcaatctcagaatgacatataataacattctctttcacagcatttagaaaataaatgggtatttttatgtgatttttttttttttactgtgctgttgctcttgttgttgttattcttgtgctctgggtcacagagtatttttattttcatttctgtttcataacattcacccactcattcattcaacaatcaacattttcagccttttctaagagcgaagcactatggcacacctggtagggataaacccatgaataacttgtggtccctccactcagataagtgcaacctgtctataacttctctaagaaaaaaaggcattaataatgttcttamaaaagttataaaatggtgatttattttccaatatgcttttaaccttgggagtgaacttgttgaagtctctgcccatccttgcatttgaagcagactgtaaagcttttatctaaagaaattaggcttaacagtctggaaaactatgaggtggggaagattggggat

SEQ ID NO: 865979 - DNA, 646 bp, Homo sapiens
aggtgcattctggggagaagaagtggcagtgtgtgagactataaatgtaagtagagtcttcaaatactttgaaacgtgttggaatttggacttaatttaggagcccagaatggcagagacaagatgtgcatgtcaccacccacctcatgtgctcatggaagacatcactaatcaatcccagcactccttccagctagggcccatttcttctgcagacagaaatctgaggctgcctctctgattgattggaagtgataactgagatgaaacctatttctaacttttggcagagcctatggagcaagaaagagcttttaataaggattagaacatgatgcaaaacaggacaacagctgtatcctaaaaatctatatatttaaaacatttaaacaaataaaaagcaatacagaccaacttcagtgcctttccagtggaatcaaagtcacataatcaagattttctttgtttgttttaaacatgtttaattagttacyaatattgaaaagttacgagattcaaaatttgttgtttttcttaaacaatttgaaaattcaaatactgtgtcagtgttcccacctggcaatgcccacatccatctgatcagtagctgtggatttggctggacggggttcagtcccattcacca

SEQ ID NO: 865980 - DNA, 504 bp, Homo sapiens
tgatgttacagacacagaagcaacaacagactgagccttcctactcaaggtaatcagaaaagcccactgtgtatctgaaaggaaccacttcattactgtgctcttacgtgttatttaagtttcagttacaccacactgaaaaccatctggcttgccatgtgaagcttcagaagtacacatcccccactttgtttctgacattaccagatgcacatggggatgggcagtcccagggwagctgtcatgagcaatcgaaaacactaatggcattttattgccctgggccaaggcttgggctagggatggggcatgggtcccagttctagccactgagagacaaagagagacccactgggaattcttggaagattgtttttttccatgataaaatcaaatgcaatgtatgaagcctcttcttttaccacatttagagccacagtgtaaagagctgatgtctggtgctgtggcagccatcatgttaccatgaggtacataccttctaag

SEQ ID NO: 865981 - DNA, 626 bp, Homo sapiens
agcaatatttttacacttcctttgcatatatagtgtgtagaacatattacttgcttccctttttacttaatggtatgcacaaacatatttctgtggcttaattttttatgatatcccattatttgtaatttaagcaattgctatcatcatttcccagtgagctacatatttagattaattttagttttattttttccccactgaaaacaatgctatcataagtatccctcttgctaaatgttgtataaatccatttgttttgctaggctacattctttgtttctcgagatgtttttgttacactctttttgaaagtgcagaaattttaaggataaaacttgataaattatctcartattaacaggcttacacacacacctctgaaatcaagacttagaacattaccagcatgtcagaggttaccctgtgcccctctcaattgtactgactttcttcttttctgaaggaactcttaagcttaatttttggatgtgaagttatgtttaaaaggaagttcatttattaggcttttgaaacatactgccaaattttcctccaaaaaagctttacctgtctatcctatttctgttcactttcttaaacctctattgttatagtaaatacat

SEQ ID NO: 865982 - DNA, 593 bp, Homo sapiens
catgctgaccgtagccattaggctgatgccttttggatttaggtgtttttttattaaggtgaactttagaatgaggggcttgtccaagatggcgatgctcccactctgtcagcccctaaccctgcagaggccccagaagaagcagatctgcctctgttgcctctgagagtggaatgccctgcctcgagcaccactcacctgggcaggtcacatcagagccacttccctctaggcctcttgagggtcacggagtctgtgttccatgcctgctgctcataggaggtggaggactcaacatagctgatgttctggagggtcaaccatggaggaacatgagcaagaagggaaagaacagcatctgaaagtgggccagtctatctgctctgacttttgtmccttcctattcattccagaggcctcttagaaagaaccacgcagaccctgaagctcccagcttaaaatcttttagtggtctccatcaccttcactctgtgcaccagccctgcccacctttccagccacatgcccaccttctgcccctcatccctcacccaccacactggcctttctcctcttccttaaacacatcaggc

SEQ ID NO: 865983 - DNA, 654 bp, Homo sapiens
cattcaactactgaatgaatctgtcctgcagagaggttcaaggtcaggaggaagtaattttggaaattcatgaggccatgggtgggaaaggcagtgtgtttttctgaaccacccatgtgtctgggagtggcagaggccagaactgaggaaaaggagctcggtgactttcaaagggtagggattgctgccagtagcagatgctctcagtgccccacagcacacccctcttggccagcctctgtgttcaccactgtgatggacagctctacgtgagctcacactcagattacaacaaaccctcacctctcaagccagtcttgccactatctgccttagaaaagggctctttctgaggctgaagaagtcaatgggccccatgcacaagggcagcccagaggtttattsataccccaaagaacaccctcaaccaacacagtatagaagccagtggataaatgccccccatttcccattattcgggcagaaattctgggatgcattggttcttcagaggccccagtagaaccaagcccctactgcctacagtggcaatgccactcctgttggcttttccttcttctggtctcagtctcctcaggctctcactcatgcttcatgtaatgatttcccaaatcaaccacccatacctaagtc

SEQ ID NO: 865984 - DNA, 628 bp, Homo sapiens
tggaaaataaaaatctccatgttgaaaatattttgtaatatattatcaaattcagcaaaccttattaaacatggaataatatgttcagataacaaggattttcagtatataaattagatgtttattttgttttcctttctttcaattcctatgtactctgaaagatttactaattatgagtgtgttgtgattttcaccaataaattatgttatctgcttgggattttcaaagttgttacttttcagtcagcatcaatctgtcacctgttccagccacattcatctgcagtgattaattaattttgtagaaaagttgacactaccactgggaataattctttgttattttttatctcctgaggccatataatttaatactggatggttccatatagatttaattggaggaaaaaacttatatattattactaatgtgagaggaaggcttagagaaagccaaattgartttagaaaatatcatgcgtggcatttagcaatatctactataatagtctgtatattttaaaattgttttttatccaaataaactgcaagtgaacttcatgaaggaaaagtgcttttgtgtcccatacctagaacacaaactgccacatagcacatacacaat

SEQ ID NO: 865985 - DNA, 627 bp, Homo sapiens
ctttgcaggtatcatctctttaattttcataagacctctgtgagtcagaaattattttaaatttgtgcatactctgctagagccccaaaaggatacgagactaataagatgcacttaaatatcttctttgaagaagtattttaaaactaagaacagttagatagattttgtcaaaagcatacagccaaggagtagcagagttggaaattttacttaaatagatccaactccaaaggtcagactatatcgctcacaccatcagtaggaactgcagccagcagaaaagtgaccagggacccataggggaagtgagggtggaagcacagatcatgaatggggagaagcaactgctggctgaaaaacacagaaccaggagacagaaaaaccccttgcttgtatgtaattgatgcagtgcctcccaatgggagtactattagcattttggatgaaacaatccttcaytggacaggactgtactcacactgaggaatgttgcttaatgctttccccaaacacttaatgccagcatcatccctcatcattgataaaaacaaaaaacacctaacgtattaccaaatatcccttaatgaggtagggctgcttagaggaagtggaattttataatcc

SEQ ID NO: 865986 - DNA, 631 bp, Homo sapiens
aggtatcctctgagatatcttctatatgtttataaaatgggaatgactttgggactttggcaatttaagaatgacctacacaacttctggttgaccaagattccctgtcttccaggcagtgctagaacaaattggccaggtccttatttacattctcttggatgtactaactacacatattcagaccaacctcagatggtatgttttctctcctagagtttattagtatcattgcctgtgattcaaccttattgggcaggtgtagcctagtctttgttaggtccagagctacctcaagattgactaacctcttgaggcatttccaccctgttattttagattggttcttttagggctaatttcctccatcatgtgctgactttgtagttgagccttcagaaggtaatcttgtgttcsttgttcccaagtccttagaagacaacttgctatagccttgaggatggaaaataagtgtaataaacttggcacctagttgatgttcaataaatgttaattccctcttttaccttggggtatagaagacctttgcaatctatttatgaacaagtatttaataagggttggcagagagtagtgagttaataacagcggctgctatgtaaaacgtatt

SEQ ID NO: 865987 - DNA, 631 bp, Homo sapiens
aggtatcctctgagatatcttctatatgtttataaaatgggaatgactttgggactttggcaatttaagaatgacctacacaacttctggttgaccaagattccctgtcttccaggcagtgctagaacaaattggccaggtccttatttacattctcttggatgtactaactacacatattcagaccaacctcagatggtatgttttctctcctagagtttattagtatcattgcctgtgattcaaccttattgggcaggtgtagcctagtctttgttaggtccagagctacctcaagattgactaacctcttgaggcatttccaccctgttattttagattggttcttttagggctaatttcctccatcatgtgctgactttgtagttgagccttcagaaggtaatcttgtgttccttgttcycaagtccttagaagacaacttgctatagccttgaggatggaaaataagtgtaataaacttggcacctagttgatgttcaataaatgttaattccctcttttaccttggggtatagaagacctttgcaatctatttatgaacaagtatttaataagggttggcagagagtagtgagttaataacagcggctgctatgtaaaacgtatt

SEQ ID NO: 865988 - DNA, 654 bp, Homo sapiens
acaaaaggaaaccatgagagtcttggcaattgccagcactcaggcaggcatggatcccagaccccacttcgtgtttgcattaagccaatagctcattggagtaaggctttaatgggggaataggacctgatgtctggttttttgtgccagatattctttttattctcatctcacaagtatttctgaacatttgatattaattgtacaatttttcaagtacacacactggtaaaaccaagaaggatacgagaacatccttgtgctcttgggattttcactttagttagtaaatattcaatgtgatcattaagaaaagaaaaggagttatttccttatttactatacatttgataaatatctactatgtgcaaagtatggtgtaggtatgaaagaaaaatataactgaatatatgagccctctcttcagaaatcttcyaatatggtgcaagaagcagacggatggtgtggcaagaagaggaaaggaagagaagcaagggaagggaagtgaagggaaatgaaggagacgggaggaaggaaggaagctcagatgtaaatatggcctcccatttcattgttggattaccttgggacagctactgaactctctcaggctcagttttctcatccataaaataggcacaataatacctattt

SEQ ID NO: 865989 - DNA, 616 bp, Homo sapiens
agatatccatgctgaatccaggcataatggatgttatatttgccctatttgtgaatgagctctgccttttcctcagtgattttagatgaggtaaaaagtcttcctggtgaactaaataaacttttctgatgtatagctggctattgtgaaacactttggcaaaaacatacatctataaaggaaaccttcatttgtaaggatgtctgcttctctgtgtcacaggcaatagtctgaggactaagtcattagaaacacatacaatagaaaaygcattagtttaaatttagataacaattcttatctttgattaaggtccttttactggccatcttgtattattgggaactttatctatactcttatttcttggcttgggcaaatgatggtattcagacctaaagtctcaactttgtgccattaagatgttaactttctaccttgttttacttaagctatcagttagaaagttcaaatttaggttaaaaaatgtttagatggctataaaaatgggataagtgcagcaaacagcgatgagattaaaacaaagattaaatctatcaaagatcttatggatcaaagagatctctactggtcctccaacattacagggccccaa

SEQ ID NO: 865990 - DNA, 448 bp, Homo sapiens
acagcttttccaagaccacagatcaagacttctctgccatcatgaaactcttgcccatctaaattttttccttgcttatgcccatctctttggctgggcaggataatgctgtaattagaattttgcaatcactagcatctgtgggtaaattgatgaagagttgaatctttcacgccaaacctagatctgtgcatgatctraagaatcatttagttcagccagtaactttggcaacatctctaatgtaactgttgttcaaattgtactagtgaggtaagattcctagacctatttgttctcataaccttttttaatttaacctagtcattctatacaagaacctagaccaataagtatatcacaagacagatttgcaccaacatcccaaatggagtgtcttcgaaaactgacttatgtgccaggatagtatagttctcttttaatctgt

SEQ ID NO: 865991 - DNA, 592 bp, Homo sapiens
cttaaagaatctaaccaatcttggtgtctacaagatcacactttaagtaagtcgatcattctgcacaggaaatcctgcacacagtttattcgatactaactcaggttatgcttttccagagtgatggctcacatctttccaccaagccctttgtggaagtcgtttgtgttgtggctatagttgtctgtactggttaggaattacttcacttgagagtaacaatatcttactagaaatagtacgaaatgaagttttagtttttctctaacagtgaaakgtctgttttggtttagtgtcaaaatatttgggctctgggttagcgttctaagattcacttgactgcatgattatctctggctgcaactgctccaagaatcacatactttcacaattgcattcagaggcaggtttgggtatgggggcaaggagaagtagatcatgaggcagaatgtctctccctccagggcttctttttatggaggagaatctttccccaaaggcttctgaagctcattgttccttcctctcactggcctgaactgagctatgtgtctactgctcctacgttaagtagttagtttcatcttttctg

SEQ ID NO: 865992 - DNA, 642 bp, Homo sapiens
atttcctggttcatggatgactgtgtcttcacatagtgggaagggcaaatgatctcccaggtgcctattttataaaagcactaatcccactcatgagggcttcatcctcgtgacctaactacctcctaaaggccacacctcctaataccattaccttggggattaggatttcaacacataaattttgagggaatacaaacattcagaccatagccagaggtctaatgaatttccctcacccacttctgaaaaaaagttttacctccgtttgcacattcactccaatattactaatctacaaatattcctgttcttcagattattttctatatttaggacaagctcttaggtaaatctctagccctgtgatcctcagagttagagattttcttatcataaaagtggaagctcaggtaaaggtggtaaaagcaggtcttggtggtttgtaaaagccctttcagctgttgcarctgatgcttaactcaccacgggaggttcagaaagtgctttctaactaaaattaaatgaactccaatatgtcttctttttttattttgtaaaagtaggtgtattcgttttctagggctgtcattacaaagcaccactgacagggtggctgaagtgacacaaatatatttcttc

SEQ ID NO: 865993 - DNA, 637 bp, Homo sapiens
cattatattataagcagtgcgcggtggcttatgcctgtaatcccagcactttgggaagccgaggggggcggatcacgaggtcaggagatcgagaccatcctggccaacatggtgaaaccccatctctactaaaaatacagaaatttgccgggtgtggtaataggcacccgtagtcccagctacttgggakgctgaggcaggagaatcacttgaacccgggaggcggaggttgcagtgagcctcgatcatgctactgcactccagcgtggggacagagtgagactctgtctcaaaaaaaaaaaaaattataataagtgaaagaagccagatgcaaaaggccacatatcatatgattccatttatgtgaaacatccagagtagacaaatcatagagacagaaaaaagactggtggttgcccagggttggggagaggcgaagcgggagagactgtttaatgggtacaggtctccttctggggtaataaaaatgttcggcacttgttagtggtgatgattgcataacattgtgaatgtactaaatgccactgaattatactgttttaaatgattaaaatgattaattttatgttatgtaaattttacctaaatttttaaaagactttgggatgtttgccta

SEQ ID NO: 865994 - DNA, 644 bp, Homo sapiens
cttagtacgtaatgccagctctgtcatacacgtagtacacatgatctttcatactagacaaaggaaaggctcaggactattctcaccatgtgttagggtaggctaggttatgctgcagtgcaaatggccctgaagtctcaatgactcacaaaataaaggtccacttgttattcaggtgtcatatccatatcatccttactcctagactaaggctgatggagcagccctccatttggaacattactggtctcatgtcagaaaagagaccaggtgaaccacgamccagctttgcttagaaatgacatttttaactcacttctcattgacaaaagcaattcacatacccttacttgagtttaagagcatggagatgcataatcttcccacaggatgatggtggtggtggtattgaacatcagactatttaccaaaaagatatataatctgttatgtacctgttgtcattttttttctctaaaaaaaattattctagggtcactcccttctggcttttcataaggtcaaggaataaaagaccatttattgctgtagcgtgatgccaatcaaactttttccttctccccacccccatgttcttcccatcccaacatttacctggcaatttggtaaaatggaaggagcat

SEQ ID NO: 865995 - DNA, 601 bp, Homo sapiens
agaatttctgtttggttatttttttgatgtctccttggtaaatttctcattcatatcctgaactgtttttctgatttctttgtactgtttttcagaattatcttgtatttcactcggcttctttaatatcattagtttgaattctttttccaggattccataagtttttttttttttttcttctttgagacagagggcttgctctacttcccaggctgaagtgcagtggcatgatcttggctaacagaaacctctgcctcccagtctcaagcaatactcctgtctcagcctttcaagtaactggaaccacaggtgtgcaccaccacatgctgctaattttttgtagagacaaggcttcaycatgttgcccaggctagtcttgaactcttgagctcaagcaatctgcctgcctcagcctcccaaagtgctggaattttaggcatgagccacagcccctggcctaggatttcataaatttctttttgattggaatttgttactggagaactatcatatttctttaaaggtgtcatatttccttactttttttatgtatctcaggtccttaagttgatatctgcctatctggtataacagtcac

SEQ ID NO: 865996 - DNA, 601 bp, Homo sapiens
agaatttctgtttggttatttttttgatgtctccttggtaaatttctcattcatatcctgaactgtttttctgatttctttgtactgtttttcagaattatcttgtatttcactcggcttctttaatatcattagtttgaattctttttccaggattccataagtttttttttttttttcttctttgagacagagggcttgctctacttcccaggctgaagtgcagtggcatgatcttggctaacagaaacctctgcctcccagtctcaagcaatactcctgtctcagcctttcaagtaactggaaccacaggtgtgcaccaccacatgctgctaattttttgtagagacaaggcttcaccatgttgcccaggctagtctygaactcttgagctcaagcaatctgcctgcctcagcctcccaaagtgctggaattttaggcatgagccacagcccctggcctaggatttcataaatttctttttgattggaatttgttactggagaactatcatatttctttaaaggtgtcatatttccttactttttttatgtatctcaggtccttaagttgatatctgcctatctggtataacagtcac

SEQ ID NO: 865997 - DNA, 629 bp, Homo sapiens
gtagttttggttttcaacccattactttatgacttctctatagctactcttgtcgcaaactgaacaattctttctatagctgatctctctcttcccataccttatcacaggcagctaaaacattctaaaacactttcaacattcttccrggaatcaccttgccaatgtccaagtttattagatttattttctattatacagttaccatgggcaacaacagctttgtcaaatgttactactattcaacacagatcctcaatttcccagccttctagagcagtttcctcattacattccagcctccacaactgtttatttgcaaattttccaagctttggaaatagttcccttgctgcttttctatcctctgtcactcagtcctaaagacaatggctcatgtttcaggtttttagttcagcagcaccccacttataggtgtcaatttctccatcaatcagctcatgttgtataacaaaccacctcaaaatttagtggcttaaaacaacaatcatttgttcagctcagaattttgtggatccataatctgggctgtatttagccaataggttcatctgctggtgtgggctgggctcactcatgcttctacagccagctgctggtcagctgga

SEQ ID NO: 865998 - DNA, 573 bp, Homo sapiens
ccatgaattggaactagattctgccccagctctgcagcttactagctgtgcagccttagggaaagttactctcctgccttgggcctcggtttcctagtaaaatgaggggattggaccagatgacctttgctattacttcacattctaacaatctatgatcctggctattatttgaaaactcagagggattctagcaaagcttatggaagactacagwgttctttttttttttttttttttttttttttttgagacagagtctttctctgtcgcccaggctagagtgcagtggcagcgatctcggctcactgcaacctttgcctcccaggttcaagcaatcttcttgcctcagcctcccgagtagctgggattacaggcatgcaccatcacacccggctaatttttgtgtttttagtagagacgtcatgttggtcaggctggtcttaaactcctgacctcaggtgatccacccgccttggcctcccaaagtgctaggattacaggtgtgagccaccgtgcccagcccagtgttctgtttatagagcaaatacagatttttcactatttctgctg

SEQ ID NO: 865999 - DNA, 573 bp, Homo sapiens
ccatgaattggaactagattctgccccagctctgcagcttactagctgtgcagccttagggaaagttactctcctgccttgggcctcggtttcctagtaaaatgaggggattggaccagatgacctttgctattacttcacattctaacaatctatgatcctggctattatttgaaaactcagagggattctagcaaagcttatggaagactacagtgttctttttttttttttttttttttttttttttgagacagagtctttctctgtcgcccargctagagtgcagtggcagcgatctcggctcactgcaacctttgcctcccaggttcaagcaatcttcttgcctcagcctcccgagtagctgggattacaggcatgcaccatcacacccggctaatttttgtgtttttagtagagacgtcatgttggtcaggctggtcttaaactcctgacctcaggtgatccacccgccttggcctcccaaagtgctaggattacaggtgtgagccaccgtgcccagcccagtgttctgtttatagagcaaatacagatttttcactatttctgctg

SEQ ID NO: 866000 - DNA, 622 bp, Homo sapiens
attcctaaagagaagcttttttccctagaaaattaatttttgtcaccttgcaactggaagatcataactatataattcaatggtttctaaattgctttggccattggaaagcacagtctttttttaatctacgtgttcaaaattcagtcaactcaggtgactaaaagcatcctttatttctgcttcagacattttttgtcctatttttgtcttaaaatatcttatgctctattaataggaacagatctgctcaagtcctcttagaagtaggaagaatctaaataaaaaaaarcaacaacaaccgcaaatctgccctgttcatcgctatttctctaacacctaagacagtgcttggcactaagacagcgcttggcaatgctaagtctttgttttataaagaatgaatacatttatttgtgaattaaagttttccaatccgtatataactggattaaaagacatcatcatactgtgtctgatctagaaaacaatctatataaatacatacacacacacacacacacgcaccatacacacgccatgtttcaaaaggagtttgagacatttgttttctctatgtcaaacttcatatcacttgacatggagatgtgaactttcacat

SEQ ID NO: 866001 - DNA, 615 bp, Homo sapiens
atcctaccatcatttttgctgtcacataaaagatgctcctaggattttttaatgtttcactactcttcacaaagaaagaacagacttttaagtgtagtccagatggtgatggatgaacatgatatttctttgtcctttcccaagacagggtaattgtgcatcatgcatggcagtccgtggtcatttttaatatttaagtgatgtctgagttggagattaaaatttataaagagcagtgagatcccagagaaaaggatgggaggccactttcctttcaaatgttataaaagcagatgggcctcccattccagacttatgcattaaaacatttaagattctttgtgatattggaagcctacagaaagaacacacgttctctctctctctctcgctctcacacacacacacacacacactcacacacacattttgcattaattgatcatgaaggtaatttcagagggsaaaattaatttttgtttttaaaaacctataatgtaaccttaggacctagcatgttgactaaacaaataatgatggagaaacacagtaacaatcttaaatggagggaaataatgataactaccatgataatcattaccttgaaatattctc

SEQ ID NO: 866002 - DNA, 581 bp, Homo sapiens
actgcttcggggataatgggaaggtgtctggccagctgaaaattgctcccagtggatggaacatatcacttggaaaaaaaggccctaggaaataaagtagatgtaggagtcacatcatctttaattgaacctaagacagcattgattgtatataccattattttatgtatcactaaccaagaaaaaatgcccataagtaaccatgacacaatgctttcttaccacrtacaaattttattttaaacctacagagatgtttttggtcttaattaaatagatttttatcttatcattctttttcatacatcataaggaaaatactttgaagtaaattagttaagacttcttcccttcagaatccagcttttctgtattcagaatcattaatgcctgttttttccacatgaattcacattttgtgccattatgatcatttacaatgtggcacctcttaaaagaatctaagaagaaaatgaaaaccattttcgccgagctcttaagaagatattgcaattataaaacttgtttttgagtcctggttcagaaacatatctgattcttcacttccttcaaaccccctc

SEQ ID NO: 866003 - DNA, 614 bp, Homo sapiens
tcataccttaagttccttgaagcattccacagctgtaatcatttacttcaaaatgggtcaataggctagagagagggccttattttgcccctagcactttttagacttataaacgatgtttttatttatttttaaattgatgaaaactatatatttatgatgtacaacatgttttcaaataggtataccttatggaaaggctaaattgagctattaataattatacattacctcacatacttatgcatgttgtatttttaactagagasagtttttcttaaaaggaaataagttggccactgttctttcatcttcaggttaattcagaatttaaaatgactatatgcccagctgatatgcacgtatgaaaagtgaagcactgtactcctgaaatagattatgagtgtgaacaatggaaagaagatggaatggcacatctcaccactcaatcctgtaccattcaatatggtagccactagtcatacgtagctattaaatcactgacatgtggctaacccacattaagaagtgcagtaaccataaataccagatttcaaagatttagtatgaaaaaaagaatataaaaatcttaaaatttatattaattatatgtt

SEQ ID NO: 866004 - DNA, 637 bp, Homo sapiens
caacaaatggcttttaaaagcatgtgtgcatttttcaaatgtcatctaaagaacacagggatctttctacatgtttttcttcctcacttaaatgtggtttgtaaaattgttttcaaccttcaccagctgggcacggtggctcacacctataatcccagcactttgggaggccaaggctagaggatcacttgagcccaagagtttgagaccagcttgagtaacatagtgaaacctcatctctacaaaaaaaaawtttttaattaaaaaattagccaggtgtggtagttcatgcatgtagtcccagctactccagaggatgaggtagaggatcatttgagcccagaaggttgaggctgcagtgagccatggtcatgtcactgcactctagcatgggtgacaaaacaagaccctgtctcaaaataaaataaccctcaccatattagaatgcaggcatttgattaaagtaatccccccaacctttagcagcactttaacagttaatcttttgtaaattattgcattggttttctccatatgtcagaattatatatttttggctaagactcctctaagctattcttgcatttctcttgagcaactaatggaagtgttagcagtaggcatattacagaatggc

SEQ ID NO: 866005 - DNA, 667 bp, Homo sapiens
ggatgcccagaagacttgagaataataataagactaggggttgatttttattgactattattttacctgtacactttatgtagcgtttctgtggatgttgtagttttgtttcaggtcaaagatctttcaggccaagattcaacacagccatccttactaaaggaagtatttgtttgcattgcatgagccattgaatttataaggcatccctcagcgtgayggacaatgatgaaatggtactgagttaccaaagaaaatcatgcatttctttctgttatcagcatcggtttttacttaattaaaaagagaggagaaaaagaaaagttttctatgaagagtggtgaattagattttagcagcatcgagaagaaaaacactaggataatggcagaataaacaaataacagatgtggattcggagtctgaagatgagttttaatcctaattctggcatccactagctttgaggcattggttaatttcactgagtctcagtttgcgtatgtgtataatgagaagtgaacagggagatttctgtgattaaggattgagagattgtgcttctagaatgaaaagtggagggcttgggaagatgagggctgaagttgagtggaaaataactaatgctattttgatgacaaacttgggaatgggtgattagcagaag

SEQ ID NO: 866006 - DNA, 578 bp, Homo sapiens
tccttttaaaaacagaattgaaattctatcattgttcatacagtcattctttgttaatgtaaatacgaaacaataaaactcgttattaatgatccagatcctttaaagtggccataaaaatactgcacagttgaatgaataagggacctagtggctaattttgagtcatatgattgaaaggttttggttcctgaagccagtcacaggagactcactttgtgaccttggaagttaccaacttctctgagagtcattgttttccctgtcaatcgcaggtagtaggaattacttctagggctgttatgaagatctgtgaattaagaaatgcaaagagcctatcattccactggcctctgagaatatctaaggagagrgtaaaccttaaaagacaaaaagcaactgtaagcatctaaatatgtgaaatcctcactaaaatcttttgtgtaaggatctaaaatggaggagtctcttctctttaatcctccatttcatcctttcctgatcttctcccaacatcaagggcagacttaaagaaaagaaaccatagaaggacaaattgaggcttaagttgaaaaaga

SEQ ID NO: 866007 - DNA, 645 bp, Homo sapiens
tcaggtcctttgagacacctaagataagagagagactgggaagtaaagtatagatgttggtttggtatcatcaaataaaaggcactgccaacttcaaaaggaatgatctgtatttttccactgaataaattgatctttcttaaccgaatgtttttttctttttcttttttttagaaatagaaccaaaatgtacttccataaaaattttggccatattaagaaatatttcaatgctatcrtaagatttgtaactgctttgctagtttccagaaaccacagtttttatagtatactgctcaaatttgaaaagctgtaaaaaagaagtgagttttcctgtctttataataattataatagttgaaagttgcatgataccagtttttctatttgttctttatcagtgcagtaaaaatgcaagaattatatttggatgaaggactgtgtctacccaacagttccagtcttgattttgttaacctgtctatttaaagaaaagaagtagcaacagctatgtttcccgttggtaaacagaacagaacagccaaaatggatgtaggttctcagggagctggagtccttgtgacagtgcaaaagtcctgtggacatgggattggtgtggcaatggggccaactggaggacattca

SEQ ID NO: 866008 - DNA, 566 bp, Homo sapiens
atatatggcatatatttcataggaaagacagcaatcttgtatcagctttacagaggattttttattctgaattgttcatagggcttcatataattatcctctaatggtggccattttaaaaggaattctggtgatttacttattgtgtaaaatgagcagaccacatattaatagctcttattagttgcatacaaacaattggtgagagcagtatgatataatgagatgggccactttgtaagaaatttatgcttttacaagtagagggaaaaataaaatatataggactaattgctatgtagacacataggaaaatttatcccacgttcrtcccatgtttgtggcctcacagtccgctggtggggaaaaaacacgtatgtttctgtgttaatcaagttcaagatggagtatttggagtatttggagtgatgggaaaaggagcactcaaggcctattttaatgaagcctatttaatatgctccatagatggtagacagaagaaaaagagaccagaaaattatgctgatttcttaaaagatgggatccaaaatgcctcattaacatac

SEQ ID NO: 866009 - DNA, 566 bp, Homo sapiens
atatatggcatatatttcataggaaagacagcaatcttgtatcagctttacagaggattttttattctgaattgttcatagggcttcatataattatcctctaatggtggccattttaaaaggaattctggtgatttacttattgtgtaaaatgagcagaccacatattaatagctcttattagttgcatacaaacaattggtgagagcagtatgatataatgagatgggccactttgtaagaaatttatgcttttacaagtagagggaaaaataaaatatataggactaattgctatgtagacacataggaaaatttatcccacgttcatcccatgtttgtggcctcacagtccgctggtggggaaaaaacacrtatgtttctgtgttaatcaagttcaagatggagtatttggagtatttggagtgatgggaaaaggagcactcaaggcctattttaatgaagcctatttaatatgctccatagatggtagacagaagaaaaagagaccagaaaattatgctgatttcttaaaagatgggatccaaaatgcctcattaacatac

SEQ ID NO: 866010 - DNA, 560 bp, Homo sapiens
agtgctctacacctgagaactattttgactacctatcttaaaaggtacaaaagtcgagatactaggaactagttacagacctaacagcaccgaattaagcatttcttcctgatcagaaggactgaaggatttttggaaaagaaagaaccttttcactcattgtatgatttgacttcatttgcttattccatgtccagttatttaataccatgatcaaaaccagtttaatttcatgaaatgctgcacttaacaatgctaccacatcagctttgttttgtaatttctctattttttctaggtagattgmcttgagtcccattaaaagcagcttgtcatttataagtaaactacaaaaagaaggccataataaatattctcccccaatagcttcacagtttaaatagatgtccaagttgtaatattccttcttctgagaaaaccattcttgttctgtgtaagtcttcaactcatccatgttcagccaaagtttcaaacaaagatgctagcataaactactgctatgaaaactactaataacattatcctgggttcaaggatca

SEQ ID NO: 866011 - DNA, 604 bp, Homo sapiens
atggattcctattatacttagaataaaatccaaactccttaccatgttgtctgtgtaactgagcccttccctgcctctccagcttcctcttctgccactctccccaacactcactcaatacactacagccacatcacaactttaagtccctcgggacacaaaactctttctcccatactggggtcactgaacatgggcaagttcactctgtctagaatgttcttccacgagctctttgcacagccagctccttcttacctttcagtccaacttaaaacatcagctcttcagagragagactttctcaagctatcctatctcagtctcagtaccctgtacgtcaacagcaatcacataattttatttttgccacttaagactgaaagctcggggggggactagaaccttatctgtcttgtttgccctgaatctagcacagtgtctgaacagagcaggcgctcaataaatatttgttgaatgaatgaatgaataacagattaaggaaaactaagtaggcatttgctaagggctgataactaccctatccaatgtaactctacagaataaacatataaacttcagacaaaacaagcttttgtgtgtc

SEQ ID NO: 866012 - DNA, 617 bp, Homo sapiens
tgaccaacaatatttaagttaaaatcagtgagcaggatggtagaacacaggacttagcaaatcagatttcctatcagactggtggtttatactgtttctatgatatgggtaagttgctggctcattaaatttctcagtttctattcttttgtttgttttccaacaaggactacagtcatttatgctattgctcttttgtttcattcattaaataataataataataataataataataataataataataatgaaatgaagtggcacattggaagtaggactattatttcatgtcattgcccttctaatggcaggtagtctttaagaatggtctttcccaggcctagcaggccagttggtgtaataactacctttgaattcagrattttagacacagtcactataatgagcaaggtcaaccagatgtctgtttaatgatggtctaccagatgctgattggatagtgattagtcacatggaaggatgggtaagatcaattggaaaaagattcagatttacagagatgcttaaactttgtatgtttgtgggatgtgtttagtagtcagtttgggaggaaagagagccagggagaagcctgaaaatatatacatattccc

SEQ ID NO: 866013 - DNA, 513 bp, Homo sapiens
tcccagtcaactgactcaaatgttaatctccttcggcagcaccctcagagaaacacccaggatcaatactttgcatccttcaatccaatcaagttgacactcagtattaaccaccacaagtccaccccttgtcaacttgaacccatacacatctcctgagatcatacataatattagaataaagacaatgataaggtcataattatgccaaacacaatacaactatccttcatacaactggaaatacaccaatccccaacctaaatgttattacrtaaagttaacacttaaatgctgacatgaagtcaataaatcttctgtcatatgataaaggaaaaaagaaaataaaatgaagatattttcttagtacaagtgtatatgtgcacaaacatagtttttaaaaaaagaagtaggaaatactcatgacaattatagtcctcgtttctgcaactggtcacatggtcatagctggcattaatgagtaccttcttctgctacccattctgtattccc

SEQ ID NO: 866014 - DNA, 600 bp, Homo sapiens
aggtgggtgcattagtctctgttcttcttggtttgcctctcctagcataaaactttcaccctatgagcaggttgcagtgtgagcaattggattcagtatgctcatcctgctgcatggtagagcttctaccatatgaatgggttctatactaaagaagggagccccatatctctcagctaccctggcctggaattcagcttctgcaacagggaatctgggagtgggtttgagggtgggggtggggatgagaaatgccgatagcctggtcctcttggaatgatgctatagccctaaactaggagttgtggaaaagacagccctgtgatttttttttcattcacccatagtagagcttctattatgctgagctggaggacagagaagggagcaggtcatagctcaaatgccacagactgtcactcttcttaccgagatattcattttttaaaaatgtttctccatttgtcataytctcttaggacaatttccagagacttaaacattttaagaatcattttcaccagttatgatttgcaggggagagagtctgtagagctccttacattgcaattctggttttaataacttgttgttaaaaaa

SEQ ID NO: 866015 - DNA, 549 bp, Homo sapiens
cctaaattcctattgctcctttgaccatataatgttcaaattcactaataagtattggaaatgacatctacctttttcccaaaacttaggtttttggataatagagagcgagaaaatgaaaggcctatttctgaaagaagaagaaggcagagaaccatggcaggaaaagtctgtatcgcttgttctaacttaaggggtgtgtgtgtgtttgtgtgtctgtgtgtgtgtgtgtgtgtgtgtgcgcgtataggtactgttagctaatttttatgaatggcrtgctaatcagtggaaaagtttcatgtctacagaaattcttttccattggctctttaaaatatactaataactcaagacattttgcttccttttcagagatgattgtgcaagtcactggccaacaaccaagaaatcaaaatatctttccactggtacttaatcaattttctttgacttacctaaacaaaatctataagcaacatgtggtcacaacacccagaaaaaaaatgagagtgatcccatttttatgatgagtatgttagtatagag

SEQ ID NO: 866016 - DNA, 608 bp, Homo sapiens
tgatgtccattgtaactttcaatgatgctctaatatttggcagattaaaaaatagtctccatttgataatgtatgatcttgtatacagtacacccttatctcatacaaccctcaccccatacatgcaaggttactattttccccattttagagctgaggcttaaggaacttaagatcacaaagccattatgtggctgtcagatccttaacctgcactcttgacatmggactgtgcccaacctgctatgcccccttattaatcttttgtcaagaacttcacagatactcttgtctgtttatttctctgtattaccttagtattagtttgccaatgtatttggctgagcgagtaattacctgatcaagtatattctctttccaggttctctctgccagaggagactcttcttctaagggacatttattttttttacatggtagtcactccagataggcagattgtcacactagtagggaaaaatgccccatgtattttcataccttagtctcttcattagttccttcctccctgggttgtttccttataacatttgccgtctaaagtgtatcatgatttttcctcaactctgcagtgcttatattatttt

SEQ ID NO: 866017 - DNA, 608 bp, Homo sapiens
tgatgtccattgtaactttcaatgatgctctaatatttggcagattaaaaaatagtctccatttgataatgtatgatcttgtatacagtacacccttatctcatacaaccctcaccccatacatgcaaggttactattttccccattttagagctgaggcttaaggaacttaagatcacaaagccattatgtggctgtcagatccttaacctgcactcttgacataggactgtgcccaacctgctatgcccccttattaatcttttgtcaagaacttcacagatactcttgtctgtttatttctctgtattaccttagtattagtttgccaatgtatttggctgarcgagtaattacctgatcaagtatattctctttccaggttctctctgccagaggagactcttcttctaagggacatttattttttttacatggtagtcactccagataggcagattgtcacactagtagggaaaaatgccccatgtattttcataccttagtctcttcattagttccttcctccctgggttgtttccttataacatttgccgtctaaagtgtatcatgatttttcctcaactctgcagtgcttatattatttt

SEQ ID NO: 866018 - DNA, 607 bp, Homo sapiens
caatagcaaaaatttattctctcacagttctggctgtcagcagcctgaaatcagggagtcagcagagccgtgctccctctggaggctctagggaaaatccattccttgccttttcaaatttctggtgactctaggcattctttggcttgcaaattatcactacactctctgcttccaaagtcacattgcctcctactcttctgtatgtcttcttttatgtgtctctgtcccaacacttcctgtctctctcttattagaatacatgtgattgcatttagggcacacccagataatccaggataaattcctgctctcaagattcttaatcacatctttgccccattcatttcatttattcattttgaaggtaacattcataggttccagggattaagaygcagaaatatattttggcaggggtggggggggctaccattcaacccactctatagtggaaatcctggaaggaagggttcctcagagggattgagccccaaaatatgcatttaaaatatgcccaaagctttggctagctgtcaaactatactataagtgtgggacccaagagagcctgatcaaaaagaagcagctgaaaactgaaaaaact

SEQ ID NO: 866019 - DNA, 607 bp, Homo sapiens
caatagcaaaaatttattctctcacagttctggctgtcagcagcctgaaatcagggagtcagcagagccgtgctccctctggaggctctagggaaaatccattccttgccttttcaaatttctggtgactctaggcattctttggcttgcaaattatcactacactctctgcttccaaagtcacattgcctcctactcttctgtatgtcttcttttatgtgtctctgtcccaacacttcctgtctctctcttattagaatacatgtgattgcatttagggcacacccagataatccaggataaattcctgctctcaagattcttaatcacatctttgccccattcatttcatttattcattttgaaggtaacattcataggttccagggattaagatgcagaaatatattttggcaggggtsgggggggctaccattcaacccactctatagtggaaatcctggaaggaagggttcctcagagggattgagccccaaaatatgcatttaaaatatgcccaaagctttggctagctgtcaaactatactataagtgtgggacccaagagagcctgatcaaaaagaagcagctgaaaactgaaaaaact

SEQ ID NO: 866020 - DNA, 609 bp, Homo sapiens
gctctataattttgttactttatttttattttaataattcagaaggcagggccgggtgcagtttagttgctcacgcctgtaatcccagcactttgggaggctgaggtgggcagatcacttgaggccagaaattcaagaccagcctggccaacatggcaaaaccctgtctcaaataaaaatacaaaaattagctggacatggtggcgtgtgcctgtagtcccagctacttgggaggctgaggcaggagaatcacttgaacccaggaggcggaggttgcagtgagctgacatcacaccactgcacttcagtytgggtgacagagtgagattctgtcttaaaaaaaaaaaaaaaaaaaaaaaaaaagaaggcagtgtcacatttaaaaggcacagggttttgttttgttttgttttttggtaaaagctgattagggctaggaaggtttagttgccagatggaaacgtgacctatagtcttaagttctaaggctccttaggaacaatcaggtaacagtgatgcttattattgctctgcctcatcagtcctggagtgtcctggctgtccactggtatgtaaggaaggagttgttacctcctttgttttcaggtt

SEQ ID NO: 866021 - DNA, 611 bp, Homo sapiens
gttgaggatcagtacacaaacatttgtatttgaatacaattcttaacatactagaatgaaaatctcaaaagccatgttgttgtggtcttttctaaaacgattccagtgacttcccagcttaaaagcttggggcaaattttccttaagagctgttaatttacaatgtaatatcatataaattacctgcccaaattttcaatcttccgcggcatattaacaaagttattaggaaataactttggttatggactaccataaccaaakatattacagagtgcacataatccttttttttttttttttttttgagacagaatctcaataagtatccaggctggagtgcagtggcgcgatctcggctcactgaaacctctgcctcccaggttcaagcgattctcctgcctcagcctctcgaatagctgggattacaggtgagtgacaccatgcctggttagtttttgtattttcagtacagacggggtttcactatgttggccaggctggtcttgaactcctgacctcaaatgatcctcctgcctcagcctcccaaagtgctgggattacaagcatgagctaccacaccccggccgagtgcatagaattctgacagg

SEQ ID NO: 866022 - DNA, 588 bp, Homo sapiens
aatctaaggatccaaaaattatattgtacacgtgagaatctttaaatcacttgcttagtagaatgaaattgtatgttttttaattgccagaaattgaaagcaaatttctttcaacattccccttttcagtaagcatgtattgtgacctgggtactgtgtattatagtaaggtgtattatgacctggatactgtgctaggttctgtacattaactgatcttcagagcttctttatgagcattgataccctgcatgttcagtatacatcagaaaatctcaggctgcaagaataggatgaaaagtgagtatttgagaggcttagcaaaaaaggtaataataacagctaacagaatcccaatttccttgcatttttgtgattgtgctgtatgscagggtctttgcctatattatctcatttcacccgcgtgataacttatgaagtaggtacaggcagattgttcccatttcatagacgttcattgtacacatgaggacaccatagctcagtgagcctatttgactagtaggcgatgcagcaaggacgcactgccagcaatctgcctctggaacgaaggctttttattcaccg

SEQ ID NO: 866023 - DNA, 587 bp, Homo sapiens
atcctccttgacgttgtacccccagaagctggtctacccctcgctaggcctcccagaggccctcaaggactcctagttgattccgagtcccacgtcagggaactaccaccttacataagtatactttgcggggagaaaggcagataagaaaatagggcgccaaaccttctccaccaacagccgtcacaccccacgaggactgtcctgcgggggctttcccctgggagccgcagctgttctgccgtatgggggaggggaacgctttccaacagtcatctcttcctcttcaggccgccaacgccgaccgcaccacagtctcctccgcccaagccctgtcccctcccccgccccggcctgggtcggagccaaaccccacaggaatgcagcccggtcacatgcgctgcggcggtggacgtgcctctccccccgcgccccaargagacccagcgccatcttgccctgacgcagttacaaaagtcacgggagaaatcctgtctcctcctccgcgccagcgccccaaagttttgcagaggccgagccggggccctcacctcgcgcagggacagtagaaaatggtcagggaagag

SEQ ID NO: 866024 - DNA, 613 bp, Homo sapiens
gatattatttctaatcttaaggaactacagtaccaatttgcagacactgttttttcaactctcaggagtgttctaacaggattctctttttggtaggcaaagtatattgcttaatgttcatctagcaattacacactaaactgttcatatttcaaacaaagggcccaagggaacggaaaaaagaattgatttttatgacagcattacagagacrgttgaaaggcattacttaacctgtatattaggaatgttctgtgtcatatacaaagatgaagaagacacagtccctgtccttaaaggcacttatattttagtaagaaatacaaacaggtgagcaaataacagaatatgataggtgcagagtatggattaaactctgagcttcataaccttagtcaaggtggttaaaatgaacaaactcgcagccagactgtttgggttaaaaacccagctctgccacattttagctgttggacttgggcaagtttatttaacctctctctgcgtgtgaccttccctatgaaatggggataattatcaggttgctgctgagtcacagggttgctgtgagcattgtcagtcaggagatgcaaagcatttagaactgtgtctt

SEQ ID NO: 866025 - DNA, 674 bp, Homo sapiens
gttgtgaattcctcataagactatttcactcaaagagaatgacacggcagggagggtaggtcagacaatcctaaaagcaccatcactcctaatgcgtgtctgattccagcattaattaattctaactggaaactgcatgaagagtctctaattgaacacccagaggcagtggtctcaggcctgcacacagtgtgccatagyggttgggtttgaattctggctctaccacttactgactttgtgattttgggtaagttaacttttgagcctcatttctctcatctgtaaatgcgattagtaatacccactcagatgactgttatgagcattaaatgatatgatgcatataaatcacatagtacatctcacacatagtctactacatgtcagtaaatattcattcttactattgcagttacattgaatctgacctttctattggttaaaaaacaaaacaaaataaaaaaacaaaaacacttggagaggatttcttccctgccctgtagagttcatttccatgagccccctgagcagatctggcttacagagctaacggaagcttcttcaccgatactattccgaaaacggtattgggaaagagagtgacgagagagaaaggagagacagatagacagaaagagagggaattatagagagagaactcttactttctc

SEQ ID NO: 866026 - DNA, 632 bp, Homo sapiens
aaatcaaaaagttctttaaaactaatgagaacaaaacacaacataccagaatctctggaacacagctaaggcagtgttaaaagggaaattcacagcaataactgctcacatccaaaagtcagaaagatctcaaattaacaaactaacaaacatcacaactgaaagaatcagagaagcaagaacgaatcaaccccaaagctagcagaagataagaaataacaaaaatcagagctgacatgaaggaaatygagacatgaaaaaccagtcacaagatcaatgattccagaagttgtttttttgaaaaaaattagtaagatagataggctggtagctagactaataaagaagaaaaaggagaagatccaaataaacacaattacaaatgatgaaggtaatattagcactgaccccacagaaataaaaataaccatcagaagctactatgaacacctctatgtacacaaactagaaaacctagaagagatgggtagattcctggacacatataccctctcaagagaaactcctccccacctcattctatgaggctggcatcattctgatactaaaactaggcagagacacaacaacaacaaagcttaaagccaatatccttgatgaacactgatgca

SEQ ID NO: 866027 - DNA, 637 bp, Homo sapiens
ttcactatccctacaacctttatggatcagatttgtcccccagagtattgctgagactatctgtactgagaatggtaactctgttgagggacagggcagagaagtaactgaatgcctgaatgctttaggggaggagtgggcttaagtggggtgccatgatgcggaggtaggggaattaatggtcagggaatctggagcaacagacttaaagaccggtagatgggaagggcccagagagtatcccaaaaaaatgtgtccagaaaagaagggagggggttagatagctccctgtttctgcttcaaggttattgttctgkgattagcacaaggttactggattttagtgggtttttgtaggctggtttgggatcctaacaaacaatatatatatattttttccctatgggaaaaatcaattcctagttctaaattgccagcttctaaatggacttctggaacagtttatttctatgttggggactgcctgtaaacatgttgcttcctttcaaaaatgatttatgctatatttaaaggctagaaattcactcacatgttgtatagtccagatcttctcccatatagcttatatgtcaacaaattcctgtgaaagacacactgaaatataaaagggccaaag

SEQ ID NO: 866028 - DNA, 595 bp, Homo sapiens
cccagccatagtttgggggtattttgaatttactctaataatgacagaagcatatcacttacaaattttggtactttaactcaattgataacatcttatcaatcatgacacttatgtttcacgggtatgtgaggatcactactgtagcatttggggaataaacacaggaaaaaagtccagaaagtcatgaactaagtgtaaaacatgctgtatcttctctcttgtgtgagtattttaaagaaatataggaggatcaaagagaagagggacaagtgaggcttggaaaggtaggtagagccccagcgtgaagagctttgcatgtcaaaaagaaccccaaatattacagttgggttccaagtttaaatgagatatctgataatatgaggtacctaaaagcaacagaaagaggtcatctatttttaaaaaatattttacaactgtgtttgtaaawtacaaaaaaaaaaaaaaaaaaaatggtgagtaaacaccttttggaggaaaagcattcttctcaaactagatggtaagttaattgcaaactggatgatgtacctctgtcttgtggctgctccctgacagttcgcacagggttctg

SEQ ID NO: 866029 - DNA, 595 bp, Homo sapiens
cccagccatagtttgggggtattttgaatttactctaataatgacagaagcatatcacttacaaattttggtactttaactcaattgataacatcttatcaatcatgacacttatgtttcacgggtatgtgaggatcactactgtagcatttggggaataaacacaggaaaaaagtccagaaagtcatgaactaagtgtaaaacatgctgtatcttctctcttgtgtgagtattttaaagaaatataggaggatcaaagagaagagggacaagtgaggcttggaaaggtaggtagagccccagcgtgaagagctttgcatgtcaaaaagaaccccaaatattacagttgggttccaagtttaaatgagatatctgataatatgaggtacctaaaagcaacagaaagaggtcatctatttttaaaaaatattttacaactgtgtttgtaaatwacaaaaaaaaaaaaaaaaaaaatggtgagtaaacaccttttggaggaaaagcattcttctcaaactagatggtaagttaattgcaaactggatgatgtacctctgtcttgtggctgctccctgacagttcgcacagggttctg

SEQ ID NO: 866030 - DNA, 513 bp, Homo sapiens
agaaccggtctgtggcctgttaggaaccaggccgcacagcaggtggtgatggagggcaagcaagcattaccgcctgagctccacctcctgtcagatcagcaccggcattagactctggtaggagagaaaaccctattataaactgtgcatgagaaagatctaggttacatgcttctcatgagaacctaacaaatgyttaatgatctgaggtggaacagttttatcccaaaccatcatcatcattcccccgcaacaccagtccatggaaaaattgtcttccatgaaaccagtccctggtgccaaaaatgttggagatcactgctttacgtacttgggtgcagcctggtttgtctctggcttttccaggagaatcagccagtgctcctgcagccacccacggcttggggggtgagagtaagaaaagggcctatgggcagatggtgaaaatccagctgggagcaagaaggggtgggagccaggcaagatctcccttggggaaaaactcctcagttt

SEQ ID NO: 866031 - DNA, 644 bp, Homo sapiens
tcacactggaatgaaggatttacttgatctttgaaaacattttttttctggttgtaaggcaatatatgtacattatatagaacttgaaaattgcggggaaaatactgtgttagttatttgttgttgtgtaacaggttatctccaaaacccagcagcttaaaatatcaaacatctgttatctcactatcactgagagcagctcagccaggtggttcttttcttcctcttttatggtctcgtctgaaatatgctgggtagttctgactcagggagtctcaagaggttgcagtccagatgttgtcagggctattctcatgtgaagccttggcaggttgcaggatctgctgctttttcagcgttgtgatcatagctcactgctgccttgaactcctgggctcaagtaattctctagcctcagcctcccarctagctgggactacagatggattgcatcagtggcctgctagggtctggttctaagctcactcatgtggctgttggcaggaggccatggctgggcccctctatagtgcttctcaggacaaaatttcccttaagaataaatgatgtgagagaaagagcaagagagacagtgtccaagatggaaactacagccctttatatagcctcagtggggagtgacg

SEQ ID NO: 866032 - DNA, 688 bp, Homo sapiens
accataaacaattaagagtgtgtttataattgtgtatgttgcattactgcatatattccttacggaagaatatttccattttgtttagtcatcattgtgaactgaatgtctgatgattggaagaattttccacagatttgcttctggctctatccatttcaaatcttgtttctcttccactccccacatgctcctagtgccaggtattgtaggacaagtacctactcccataataccctgcaccttcatgccacagtgctggggaagcctgcacagtgggcagtagaaatattcctggaagccatacctatactaggatggctagcaacagtgtaactgtatacagagtagctataaactacaaaatatatacccaccaaccccaaaycaacacatccccaactcagtttgccttccaaaatagacatagccccaacttcattccaaaaatgtctgctgtcactttcaggcctacctgcacctgaagatttgtgatgaggaggagggagtggaaagagacagctgtcttaaccaatttcagtaaaaaatatcttacttttgaaactttgcaaaaatatatgaccatgtaaaagacattgatggggcctctctcggggcttttggaaggagttgagcaagtaaagagccctgaagcttcagcttcattaaagtcacagtaaatctgtct

SEQ ID NO: 866033 - DNA, 543 bp, Homo sapiens
ggctcagcattgccagatacctggagtacactacaacattttaactacaaattagaaatctgagttcctatgaaaaaccctgatttgtacatatcagccaataacttaaaaaattaaaatcaacaagtgggccactactgtgctggccaaacagtacatgtctataggttcagttattgggctgctggttttcagagtctgattttgacactgcctattttttctatgtcctccctgtcctcttccatgccttacttgatgattctgcccttattcttttggataaaaatgttgataaaatattcraaagtaggaacccaattctctgggtatgactgtatgcttctctcatggtcattggccacccctatgacatttatctagtcaagtttgcacatatagccattggtcataaagtagaatgagcaagaggctgtaaacgatgcactacaatccatctcacacaattaacctggtagaagtcttcatgtttatgtgctacttatttgttttccaaaatgcattcaaggagtgccagctgcg

SEQ ID NO: 866034 - DNA, 575 bp, Homo sapiens
aaattacctttaatacacctcagttttatttacttgccagtttataacatccttaggaaaagagattctaggattaagcaaaacaagggatgtttttaaatactgtaactttttttttttttttttttttttcttttgagacagagtcttcactctgtcgcccaggctggattgcagcggcgtaatctcgactcactgcaagctctgcctcctgggttcaygccattctcctgcttcagcctcccaagtagctgggactacaggcacccgccaccacgccaggctaatttttttgtatcttcagtagagacggggtttcaccgcattagccaggatggtctcaatctcctgacctcgtgatccgcccgcctcggcctcccaaagtgctgggattacaggtgtgagccaccacacctggctaatactgtaacttatttttccttcagcaaacattgagtacctttatgtgtccaggcactgtgaggccactaaggattcagaaatgaaacaattcctgctcacagatgatggaagagtgatcttacaagacaaatgatagaaagcagcatactcta

SEQ ID NO: 866035 - DNA, 697 bp, Homo sapiens
aaagagtatatttggattgtttctaccacaaagaataaatacatgaggtgatggataaccccccaagaaagagccacttaagtttttatttaagccagcagaagaaaataaataactaaaatcagagaagaaccaagcaaaattgagatccaaagaaccaaacaggatcaacaaaatgaaaaattgattctttgaaaggataaataagagtgatggactgctagctagattaaaaaggaaaaaaagaaagaagatccaaataagcacaactggaaatgacaaaggtgacattacaaccaaccccacaaaaatacaaaagatcctcagagactattatgaacacttctatgcacacaaactaaaaastatagcggaaatggacaaattcctgaaatcatacaaactcccaaaactttgaacagaccaataatgagttctgaaattgaattataatatttttttaaaactaccaaccaataaaaagccctcaaccagattgattcacagccgaattctaccctatatacaaggaacatctagtaccaatcctactgaaactattccaaaacataaaggagggactccttcctaactcattctttgaaactagtatcatcctgataccaaaatctggcaaaagaacaacaaataagggaaactacaggccagtatccctgatgaacatagatacaaaaat

SEQ ID NO: 866036 - DNA, 680 bp, Homo sapiens
acatagagggtaacaacagacactagggcctaccaaaggttggaggatgggaagagggaaaggatcaggaaaaacaactagtgggcacttggtctaatactgggtaatgaaattatcagtacaacaaactctcataacacaagtttacctatataacaaacttgcatgtgtgcccctraacttaaaacaggagttttaaactttaaaacaaaagtttaaaaaagcttgtaaaaaataatatttgtccaaagaaagagaaaataaaccagtaaaatagaagagaatgctcagggtaaaaaaaaatttttttaaatcacatgaatacaagatgtcatcagaagtcagtgggaaagaatggactacataatacatgtcactgcaactaaggttgtccatatgcaaaaaaaaaaaaaaaaaaaaaggtacaactgatcccaacctcactccatggacacattaaatcctaagtgtaaatattagaattttgaaagaatgggaaaagaatatttttgtgataatggagaagtgaattatttcctaaaagagaagtcaggggcacaaatcataaaggaaatggttgatttgcatttttgattataatagaatgttatattaaaattaaaaattatataagatgacacaaactaagttaaaatgcaaactctatactttgtataagc

SEQ ID NO: 866037 - DNA, 608 bp, Homo sapiens
gaaccaaagcatgaagtggggcctaaagacccagagtgcaaaaacgctcaagtgtacaaggaatctgaaggccaatcaagtgcatgaggaatttgaaggtcaaaagagaaaatgcctagagaggcagcacactgtaaagaaagatcaagggagaaatgaaaggagagaaaagaatgaacattttagggtatgaaagtgatttgtagaaatcttacatggtagtaagaaaagtataagaattcataatacataaacacttcataacaaaaaaaattggaagattgagtggatttaaaggartcctattcaaattcaaagaattaatgtttgcatctgtgtctaaagtcccagctctgcctaaacaacttcacaacacaaaatccagcctggctattcctccagacactagctttccgtgcttcagcaatataagcctgtttttattttctcaaacaccagctccctcctgcctcaaggactttgcaactttgcatgtatggttcctacatggttccttctgctaacatcttcttcccctcctgtattagttaaggttctccagaaaaatagaatcaatagggggatatagatacatctatatctctctg

SEQ ID NO: 866038 - DNA, 608 bp, Homo sapiens
gaaccaaagcatgaagtggggcctaaagacccagagtgcaaaaacgctcaagtgtacaaggaatctgaaggccaatcaagtgcatgaggaatttgaaggtcaaaagagaaaatgcctagagaggcagcacactgtaaagaaagatcaagggagaaatgaaaggagagaaaagaatgaacattttagggtatgaaagtgatttgtagaaatcttacatggtagtaagaaaagtataagaattcataatacataaacacttcataacaaaaaaaattggaagattgagtggatttaaaggagtcctattcaaattcaaagaattaatgtttgcakctgtgtctaaagtcccagctctgcctaaacaacttcacaacacaaaatccagcctggctattcctccagacactagctttccgtgcttcagcaatataagcctgtttttattttctcaaacaccagctccctcctgcctcaaggactttgcaactttgcatgtatggttcctacatggttccttctgctaacatcttcttcccctcctgtattagttaaggttctccagaaaaatagaatcaatagggggatatagatacatctatatctctctg

SEQ ID NO: 866039 - DNA, 544 bp, Homo sapiens
agtaagaaaagtataagaattcataatacataaacacttcataacaaaaaaaattggaagattgagtggatttaaaggagtcctattcaaattcaaagaattaatgtttgcatctgtgtctaaagtcccagctctgcctaaacaacttcacaacacaaaatccagcctggctattcctccagacactagctttccgtgcttcagcaatataagcctgtttttattttctcaaacaccagctccctcctgcctcaaggactttgcaactttgcatgtatrgttcctacatggttccttctgctaacatcttcttcccctcctgtattagttaaggttctccagaaaaatagaatcaatagggggatatagatacatctatatctctctggctttctgtgtctacctatggagagagaggggagggaaggatgaggaagagagagaaagaggagatttattttaagaaaattgtacgggctggcaagctacaaatccacaaggcaggctggaaatgccagcaagagttgatattccagtcttgagt

SEQ ID NO: 866040 - DNA, 500 bp, Homo sapiens
gattccgagttaagatcaagcatggacattcagccaagaagttagaagattttctaaaagtaggatttgaaacgtgtcacacagaaaccgtggaaggtttttcttcagtaggtagtaatacagttgtggtgggcctgagtgcatgagcttggagtactccttgacragccaggttccatcctcggttctataatttagtatatagcatttcacatttcagggtgactcaggttctgtaatttagtatatagcgtttcacattaagaatgttgactgatgtgtatcttaaaactaattttttaagcatcctagataatggtaagtcttttagagaaaattttaagctttcagtttcatcagatagccactttaaaatagaaatttctttctgttcgtggatttaaacactgccacacacacagaacttcataaataaaactttctgatattacatttttttaaattacgaattgaaaacaccacatacagaaaaatatgaa

SEQ ID NO: 866041 - DNA, 642 bp, Homo sapiens
agaagagaaagatcaatcaatagaaacatacacagaaatgacacagatgacaattcacagacaaagatttttaaagtgacatttacatattttcaaagatttaaaagaaatagagaaattgaagacataaaagagaaccaaatgaaacttacggagctaaaaagcatmacatctgaagtgaaaattttgttgactgagatcaatagcagtatatacactggaaaagagaggatcagtgaactcaaagacataggaatagaaacatgaaataatggctaaatttttcaaatttttataaaaagcataaacctatagatccaagagtattaatacaactcacatagtattaacacaaagaaaaacacattagggcacaccatattaaaattgctgaaaactagaaatagagagaaaaggtagccaaaggcagggggaaacatatttgttacaaaaaaacaaaggtgagaaaaccaatgacttcttatcagaaacaaagtcagccaaaagacaattgaatggtatgttttaaagtaccaaaaggggacaaaaagtaaacctagacttttatatccatcaaatatattgttaaaaataaaaacaaaatggagacattttcacataaacaaaagctgggataattta

SEQ ID NO: 866042 - DNA, 574 bp, Homo sapiens
ttgaaacccctaaagaatccataataaaaactattgcaactaatagatgaatacagcaaggttgcaagatacaggattaatataaaaaccatttttacctctgtatactagcacaatgaataatttcaaaaatgaaacttaaaacaatgttatttacaataggatcaaaacataaaataagcataaatctaacaaaaactgtgtaagarataaatgtttaaaatcctaaataaatgaagagatatactatgttcatgaatcaaaagattcaacattataaatcgataaatttccctgaagtgatctatagatacaatggaattctaataaaaatcccaggaagctttttaaaagaaattgacagggtgtttttgaaatttatggtgatataatgcaaagaaccaagattggtaaaagcaattttagaaaggaatttgagactttctataaagctacagaaatggagacagtgtgatatttacataaggatagacatataaataaatggaacacaataggcagtcaaaaaatataactacccaatggtaaattgacttttaacaaggatgtagag

SEQ ID NO: 866043 - DNA, 606 bp, Homo sapiens
ttaacaaataacattaaatgcttaatttattttaactacataacataaaatatgatttcccagcaaatcgatttttttaatgagatatatcatgtgtgaattagggtctaagtatttatgaaactattgactaaatttaactatgtgtcccggcatacacacacacacacacacacacacgcacaaacacacacacacacgcaattgtgactcaacatttaagattcttatattttaggttttttaaaaattaaagaattagaaacaccatttgacccagccatcccattactgggtatatacccaaagrattataaatcatgctgctataaagacacatgcacacgtatgtttattgtggcactattcacaatagcaaagacttggaaccaacccaaatgtccaacaataatagactggattaagaaaatgtggcacatatacaccatggaatactatgcagccataaaaaatgatgagttcatgtcctttgtagggacatggataaagctggaaaccatcgttctcagcaaactatcgcaaggacaaaaaaacaaacaccgcatgttctcactcataggtgggaattgaacaatgagaacgctt

SEQ ID NO: 866044 - DNA, 697 bp, Homo sapiens
aaagagtatatttggattgtttctaccacaaagaataaatacatgaggtgatggataaccccccaagaaagagccacttaagtttttatttaagccagcagaagaaaataaataactaaaatcagagaagaaccaagcaaaattgagatccaaagaaccaaacaggatcaacaaaatgaaaaattgattctttgaaaggataaayaagagtgatggactgctagctagattaaaaaggaaaaaaagaaagaagatccaaataagcacaactggaaatgacaaaggtgacattacaaccaaccccacaaaaatacaaaagatcctcagagactattatgaacacttctatgcacacaaactaaaaactatagcggaaatggacaaattcctgaaatcatacaaactcccaaaactttgaacagaccaataatgagttctgaaattgaattataatatttttttaaaactaccaaccaataaaaagccctcaaccagattgattcacagccgaattctaccctatatacaaggaacatctagtaccaatcctactgaaactattccaaaacataaaggagggactccttcctaactcattctttgaaactagtatcatcctgataccaaaatctggcaaaagaacaacaaataagggaaactacaggccagtatccctgatgaacatagatacaaaaat

SEQ ID NO: 866045 - DNA, 658 bp, Homo sapiens
gttgattttgtatcctgagactttgctgaagttgcttatcagcttaaggagattttgggctgagatgatggggttttctagatatataatcatgtcatctgcaaacagggacaatttgacttcctcttttcctaattgaatgccctttatttccttctcctgcctgattgtcctggtaagaacttccaacactatgtggaataggagtggtgagagagggcatccctgtcttgtgccagttttcacagggaaagcttccagtttttgcccattcagtatgatattggctgtgggtttgtcatagattgctcttattattttgagatatgtcccatcaatacctaatttattgggagtttttagcatgaaggttgttgaattttgtcaaaggccttttctgcatctattgaaataatcatgtggtttttgtccttggttctgtttatatgttggattacgtttattgatttgcgtatgttgagccagccttgcatccaagggatgaagcccacttgaycatggtgaaaaaggtttttgatgtgctgctggatttggtttgccagtattttattgaggatttttgtattgatgttcatcaaggatattggtctaaaattctcttttttgttgtgtctctgccaggcttttgtatcaggat

SEQ ID NO: 866046 - DNA, 521 bp, Homo sapiens
ttttacctcatatcttttagctgctacaggctaggatggactgtgatttacttcattcactctgtatagagtaatatttagtttctttctagattttgatattattaaacactttgtaatcaatacttttgcacctgtatcttagctaacagtaaatgtttatgactgactgaataaagatgtcaacaaatgaatgaatgaaaaccaatcaccagtgatttaagactccaaacacatggcgagagaagtaaaaaatgcattattccaaccttyttcatgttgtttagcatgcttcagaatggcaataaaggcagaggaattcttacctacgttaatgtagcaggtcattcacattagcatttctagagtttgttaaacccctggattcctgttcaagtaaaacatttgttttgattataaaacttaatatccactctgagagcctgtggaaatagaaggtagatggcaatgttactgccgtaagtctgaagctcctgagacatgaacaagatggtaatgtg

SEQ ID NO: 866047 - DNA, 595 bp, Homo sapiens
tataaggaaggggtccagttttggtattctgcatgtggctagccagttatcccagaaccatttattgaatagggaatcctttccccattgcttgtttttgtcagctttgttgaagatcatataattgtaggtgtgtggcctttctcataagcgctctctattctgttccgttggtctaggtgtcggttcttgtaccagtaccatgctgtttgggttactgtagccctatagtagagtttgaagtcaggtaacgtgatgcctccaggttttttttttttttttttgcttaggataacgttagctattcaggctcttttttggttccatattaattttaaagtagtttttttctagttctgtgaagaatgtcattggtagtttaataggaatagcattgaatctataaattgctctgggcagtatggtctttttattaatatagattcttcctatccatgarcatggtatgtttttccatttgtttgtgtcatctctgatttctttgaacagtgttttttaattctctctgtagagatctttcactttcctggttaactgtattcctaggtattttattctttttgtggcaattgtg

SEQ ID NO: 866048 - DNA, 629 bp, Homo sapiens
aggaaatttatattaggggataaacaaatgagttctgtgcctgcctctttaagtctcttcaatgccatgttcatttctcttttttgattaccaggtagtgctgtcctcagtctcttggggcatacttctttcccgatctggcacaaatgacccctcagggcttaaagacttgagaatgacagatgatcaaggtatgcatctcttaatcaagctgctgtatttgcccatmtaaagaactgtttaagaaacacatctagcagatctctgcctccaatgctcacatattatttaactccaacttttacttttgaaaaatctaaagaaaatcttattcaggctgcgaccaaaggagagggaaagctaaaaatgtcctatgcaggggaaggactttttttttttaattttaaattcagttggtgattttattagctgctggtctgaccttccagctaacttcaggattgtttaggttaagattgaaaatgtaaatttgcatggcaagagtgcttttccaaaggatgctgtttagatagctcttcaaattgttggatgataatgactattgtcccttacctttcaaagctgaaggaaggtctgcagcctgtttacctgcccagcttatctagtga

SEQ ID NO: 866049 - DNA, 613 bp, Homo sapiens
cagactttaccctaaacttcacactgctattcaattctgcacgggtaaataacttaaaaatagcttttaattagttatttgggacagaaacacaattctgtgcttaactgccactttgtgcagtgtgtggtttctctctacttgtatatatatggagttagaagtggcttttgcttgcaccacagtgctttgcatttggcaattgtttcaacatttaacaatgttgtttgctgtagaaaatgtccctcaagtaactaaaagttgtaagagagattgtttttctttrgtttgacaaataatgacaataccatgtttgatttgaatttttaatggtttattaatttttatagaaacctcttcctgttttgttttgttttgttttgttttgttttgttttgttttgttttgttttgataccgagtcctgctctgttgtccgggctggagtgcagtggtgtgaacatggctcactgcaacctccaactcctagctcaagtaatcctcctgactcagcctccccagtagttgggaatacaggcatatgccaccatgcccagttaatttttttttcttttgttgaggcaggggttttgctatgttgcccaggctggtct

SEQ ID NO: 866050 - DNA, 681 bp, Homo sapiens
taactgtattcttactgaccacattgaatccccaagaaaaatacctctaaaggaggaatgacaaagtgacaaataaatgcttacatatccttcagtcttccaggcttctattttattcctgggttcaaatattttctgttggattttcacttcttgaaattttcagtgactcctggaagaccacccttcttgggggatgtacccattgtgaccacagataatgtcaccatggaaaatcctgggcaagatgaccatggctgagaaggtcctttctatcacacttgacagaatcactrcctgattcttctttagatgcaatgagtcacaccacagattcgtctgggtcatttcagactccaggaaaatgtgtcactcgatttgtttccgagcaatgttttgtattttattgtatacatgtatatctaattgtaatctgatttctctaggttattctttttggctaatagagaatagatttttaaaaaatgctaattcatgttcctcaaaaggggcttctttttttcttttcctcggttgaaaagttagtgataattccaggtaattaagaacattttatggaaaaaaattgccaagaaagtaattgggctgggagcccagtgtgttacacctacactagagcctcatttttgacaaatctctgaaatgataacaataatgata

SEQ ID NO: 866051 - DNA, 571 bp, Homo sapiens
tcatctgccagatgtgtatggtggtatctttttttctgggttatgataatgattaaaagtagtcatgtttataaagtacatagcacagtacccagcctgtactcaataaacatcaataaactgtatattcacataaatactatatcgatagctaattctgtgcctcttaatatgtcttgaattgcctgtaacaggaaaatctgattcaaactttactataaaggctgaaaccatacagagactcattggctcacataagtggtaagcagagttagtcaggcctycaggttggtttgcttcagtggtgtggtaaggtaatatcatcaaggcccactcaccatctttctctccccactttacttctgctgttagctttatcctaaggctggcttctctttgcggttgggaggtggccgtgaacacttcctgggtctacatgtttccccctccaggagcctctcgaaaacgttaagaactctcctttcctagaagctccctgtgtctctttgatccaacttggcctatatatttagcctatatattcatcccaggccccaaagctataactaga

SEQ ID NO: 866052 - DNA, 583 bp, Homo sapiens
aaaagattattataatcagcacttcccttaagggatagtgtaggtatagaaggcattgccactaatcaatctaactaattaacaaaatcttttcttaatagttgattagcttcttaggtacttgcagatgttgtaaaatgatatttctctgtctagttaggaaccttctgaagtaattctatgtccaccactatcctgctgacagttcacttacgcctagttggcaagaaacacgacggggggtgaagcagagccatgtcattgtttggaggcaacaccattgtgattttctgtggtttaccaagttggctgtggcatgctaacataaccaratgtgggcttcctttaattatcagggagtaagtagagtggtaaacactgaggaatagaactaattgagtaaaggtgaaaatgctatttctgaaagtgagcaagtaattttttttttttttttttttttttttttttttacttttatcagtattacagagagccatacaagggaggaaaagggcaaaggtatgtggaaaatgttgcctgtgaaactgggaaactaccttgtgttttggctcctaacagatgc

SEQ ID NO: 866053 - DNA, 646 bp, Homo sapiens
ttcttgcttccatcattttctttttggttgtgatcaagcttttaagcttataaatactgtgtatgatgtacatttatcctgtgtgttgctattgtacagtactgaccacatgacaaaacaagaagcagtcaggaggtgggggagtgggttgtcatagcaacagactgatttgcaaaatgtaagcagtctgcagcagtgcaaggagaggraagagcatgtccccaaagtgtcataaatctgtctaaccgcagttgatgcatgagttacatttctacactaacctgcaagacaccgaaaagctaaacagagacttcttttaggtaaaataaacacaagctttacttagggtaagtaaaggcatattttgagctccagtcaactaaactttgattttttttcttagtttattcctttgtctgtccatcataatgggattacgtgtggcaatgggaaaagggagaatacaaaatagaggtgtgcacagcaggctgcggggcttagcccaggctaattgactatatccaaattaagtatgccatcacttgcagtgtgacaaatggatttgacttattcagtatacaaaaatagagatcattaatgcaatcatcagtggcaggcctagtgaagtgggcctaggaaaactgtc

SEQ ID NO: 866054 - DNA, 666 bp, Homo sapiens
cacacaccccaatttgtttcaaatcccaatttgtttcaaagctgacaattgaaggcatattgtagtgtggttagaggaaatagtaggcatttgattctatgatccttaaaagagttttttttttttttttgtttgtttgttttttaaggagtctcactctgtcaaccaggctggagtgcagtggcgcgatctcggctcactgcaacctccgcctcccgggttcaagcgattattctgcctcagcctcctaagtagctgggaccacaggcgtgtgccaccacggctggctaattttttgtatttttagtagagacagggtttcactgtgttagccgggatgatctcgatctcctgacctyatgatccacctgccttggcctcctaaagtgctggtattacaggtgtgggccaccgtgcctggccaaaagtgctcttgtatataagctactatcattcctgtataagcaatgctacaagcattaataaagtgatgggcatgtgagtttccactgagttttctgacttacagcaagattgactcttccttccattagcagaactgagttgtagaaataaaaggtacacacacatacgttaagataatagtttttttcatataacaagtaataatcatcatatatattcatgattaactcaccaggagtc

SEQ ID NO: 866055 - DNA, 641 bp, Homo sapiens
tcgtttagcattaaaattcatttagataaaattgccacaaacatttaaatgggaagattagttccccctcacgccttattgcactcgctcaatggttccgttaagaacattttacacgttggaaattccgtcttctcagacggcttgctgtttcctagttacccacattcaaagcaaaggcagcagcaaaggcagccgcagcagcagcagcagggaaaaaaaaaaagttttggcaactggtctgcaattcatccgctgctcgccccagtctcccctccgcccgctgcagtctgcccccaccccttccccttccccacccctacctctttcccctcattatgtaattcgcagagtccmgtcctcgaggaaacacgttgcctagttgtgtagtatttatatacaatgttaaaatacaaagaaagaccctaaagtcagtcgagtcggttcctctctgggtctccctctccctctcctgttctaaaatgaagatttagcttgaatgtgctgagtttctcacatcccgtaccctgaggccacaaggcacgttttttggctttcatttctgccaggacttttccaggaaattcaccactgcttttcgcttgtattagaaacgtgtgaaagaattcgtctgaaaagtc

SEQ ID NO: 866056 - DNA, 637 bp, Homo sapiens
ttctgtgctcaagtttcgtcatctatcaaatgggtctagcggctgttaactacctcagaaggcttttgtgaggagtcatataagtgaagcatttggaacagcgcctggcacattctcacttcctgatatatgttacaatgactacttcttccactcttattaatactgctaagctactattaataaagttcctttggctggatgctggaaggagaacatgggtcaaggttctgatgaactaactttccctgacagccccctcccytccccttctgcctgcctcccaggcagaagcagtggatattcaggtaggagtggaggagcagggaaatggcaactctttcctctctgttcaccatgattaataacatggttcatactcccttataatatattttttgttaaaaaagggaatggagaaatgagaaacaaatggcagtgggagtgtagccaagtggagaaactcagggccggacagacctggcaccagcactaagtagctgtgtgctgttggtgtgtttttgacctggccaaccctcagcttcttcatctgtgaaaaggagctaagcacagcccttactcagggggttcaccaagagtacatgaaataatgcctgtaatgcatttgttgtactga

SEQ ID NO: 866057 - DNA, 623 bp, Homo sapiens
tgttaatagtgaaaactatttttattttaaaaagcactggaaaatgtaaacaaatatagttttctccagagtatatgataagtggagatcattatggataattaacgctgaaaggaaaatgaacatgtaatggcttccaaaaattaaaacatttgtaactatcaagttaagttctaaaaagttaatttttaaatcagctggatttatctaaatatgcctggcaaggaaaaagatatatatatatatatatatatatatatatatatatatatatatatatatatmtatttactgtccttttagaactctataaagaaagtttaaaaccttaaataattttagcatttttaaaccaacttttggtgcctaggcaataagagttaatgcccagaaatgctaagtgctgtagtttctccaattttgcaacaaagaaatatatttattcacccctagattaaaataaagaaaatattctaaaaatcttttgaaatatataattcaaacaccacttccataatatttcaatgcatgtttgttagttttaaataattaggtttgccataaatgaaacaaaattcattaaaggaaaaagtaggactttaaaaggagtgatgaattatttt

SEQ ID NO: 866058 - DNA, 589 bp, Homo sapiens
gacaagagtgagacttcatctcaaaaaaccccagaaaaacaaaaaaacaaaatttaagatggattttagaggagacacaaatgccaagccatagcaaactcaacaatgtgcagggttagtgcaaggaatgaaagctatataaaacttttatacmaagtataatgccaacacagaggcatagaggaggctctccatgattgtgatttctctttttttcccaccctttcttctaatagcataacaatcaccaccatttattaattgcttaaaacatgccagaatctgatttgagtgctttacatgcatgatttgtgagagaggaactattatcttcaatttgcagatgagaaaaccaagatttagacatgttaaggacccttgaccaaatgttggtgctggggttttacatttgatgccagagtccaagcccttaatcatcatgctctcctgcctctcataactatgtctcttttaaaccatacactttctctaaatttgaagtagtaactcacgggtttacacaatactattgagtgggtgcagttgagagtcctaaggtgtggcaagggagacttaaaaacctgaacta

SEQ ID NO: 866059 - DNA, 589 bp, Homo sapiens
gacaagagtgagacttcatctcaaaaaaccccagaaaaacaaaaaaacaaaatttaagatggattttagaggagacacaaatgccaagccatagcaaactcaacaatgtgcagggttagtgcaaggaatgaaagctatataaaacttttataccaagtataatgccaacacagaggcatagaggaggctctccatgattgtgatttctctttttttcccaccctttcttctaatagcataacaatcaccaccatttattaattgcttaaaacatgccagaatctgatttgagtgctttacatgcatgatttgtgagagaggaactattatcttcaatttgcagatgagaaaaccaagatttagacatgttaaggacccttgaccraatgttggtgctggggttttacatttgatgccagagtccaagcccttaatcatcatgctctcctgcctctcataactatgtctcttttaaaccatacactttctctaaatttgaagtagtaactcacgggtttacacaatactattgagtgggtgcagttgagagtcctaaggtgtggcaagggagacttaaaaacctgaacta

SEQ ID NO: 866060 - DNA, 644 bp, Homo sapiens
gtgatgaaagttattgcatcaaacaaaactcaaaatttattccaggtgggatccaccacccctccccatgctatcttaacatcaaacacaaaactgacacaaaacaattctgtcctcctgatatactgaactttgggcacaagtagagggtgcattacaaagacatggtttcatacttgagtacrtgtgttggggaaaaagttttccacttaaatgtgatccatttaaggatagctaaatatatgctctcctgcttattatatttacaatcatttttatctcagcaaaagatgctgttatggtgaaaatatattacacatgtcctttgctgactgagagagttaaaatgaatagaacaataaagaaaaaaagaagaagaaaaaaggaagaaatcctaaactttattgccaaagccttacaaagacaaatatgggcagaacatatatttagagaccttggcaaaagaaaatggaaatatgagcaattagctgaatatatttagccaaaaatggttgagaatatttattctcttttaaaatcttaattgtccatcccgtcgtaggctagattgactgaattttctggacaaagtcataaagtttccttaactttgtgggaacatgggttgtaactactcagtaacc

SEQ ID NO: 866061 - DNA, 702 bp, Homo sapiens
tgcccagttctgcctctagaaccccaaatcaaatacatgaaagagtgctgggccctgccttttgcaatcaccatgaaggcaggctgactagtgcctctcatttacatatatatatcctattggttttgtttcactggagatccctaatacatatttttttaaaaattcagatttattgaggcatagtgcatattttctctttttagtgtacagttctgagtttttataaacatatacagtcatgtcaccactatcaaaatcaagatatagaacaatttcattacccacaaaattccccagcactcctctgtaggcagcctctttccccttcccccagaatctggcaaacactgatcttatttcttttcttatggtttcaccttttccagaatgtcatacaaatggaatcatataatatgcaacattttgagtttaattctttttcttcrcataacacatttgaaatttattcatgttattccatgtattagcagttcattcctttttattgatgagcaaaaatccattacatagatcatcatagtttattctctaggttaaggacactttgtttacatcaagtttttaacattatgaatagagtcactataaacaatcatgaacaggggtgtgtgtgtgtgtgtgtgtgtgtgtgtgtgtgtatggtaatcacctgacaggttcttcttgtccactgcacag

SEQ ID NO: 866062 - DNA, 648 bp, Homo sapiens
acaccatgctcactattcactaagtgactgaagccagcatttcttcacatgctcttagcagtctttatggggacttttattttaagaataacattaatgattttactaagagagctcaagaatttgagtattatgctagaactattaacaataatgtatataacagatactgttatctatgcctgccttgtagagcatgatgagtgggtgaatgagtgaacatgtaaaatagaaaacaaggaggacaattttcttatccataggaggctactcagtacttttttctctaagaaagaaattaatttagatgcaaaaacaaaaatgttctattatcaaggacaacgctcttttattaataacccctgtatccttttctrcctgagtgaatgctatgtaaaatcttattatattctgctttgctacaataatacacttcttcaattatcattatttatagagacttataaatgaagatggtgcattaaaaggaagaattcctgcctcagtgatacagagttgggagcttatttgatacatttttttgccttcaaatgcaggatgaggaaatccttctttcctctaactaagtgtgctaattagttaaatgtgtttgaaaagtcaaattatagtttaggttgatttagccaa

SEQ ID NO: 866063 - DNA, 594 bp, Homo sapiens
tgcctccttacatattttaagtgtggcctaagggcttttccacgtataataaactgtaacccaacttgatgtgtaatagactgtaacctactcttgtgacaagtagctgagtctcagccaaccacagcagctgagcttccaccaatcacaggtagccaactattcaaacactattccaataaagcaaatacaaagctgtaaccaatccagtcatttctgtatctcacttccattttctgtaggtcactttcctttttctgtccataaatgtatccaatcatgtggcagcctcagagtcactcagaaaccattctgrttctgagggctcccaagttcctgaatcatgctttgctcaaactctgttaagtttaattcatctaaaatttttcttttaacaggcagtgggagtgctccaaatgccaccatggcccacttctgcaaagctgccaaaccaggacctatgatcttaatcattccactagttagtcatcttcttatgaaagcccttacctgatctcccccaaccagcaccacacttaccagcggtgttgacaaaatatttgataataggggacggagatgaagggtcggagg

SEQ ID NO: 866064 - DNA, 595 bp, Homo sapiens
gcagtctgcctagtttatatcctgggtgtacttttacaagctgcgagggttaccgaaccaccctgtacctcagtttcctcatctgtaaagcagagtggtaattatggtagccaccccaaggggctgttgcaattaaatgggttcatccatgtaaaacacttaggataatgcctgtcatagaagaagcattcaataatgctggtcttatttgacagtttacagtcagtgtgggtaaatcagaaaactaggctggactagctgaagaagttgagcgcaagtgaggacctgggaagaatgctgtctgggaatgttccaagggaatctgtattgggttgaatattcctccccaaccccctgccaaaaatatatatatatatatgtgtgtatgtcctaactcccagagccygtgaatgtgatcttatttagaaaatggatcttcacagatgtaataaagttaagcatctcaagatgaaataatcctggatcatccaggtaagccctaaatcccttcacaagtgtccttataagacacagacacacaggagatggccctgtgaagatggaggcagagattggagtgaggcagccacaagcc

SEQ ID NO: 866065 - DNA, 647 bp, Homo sapiens
gcctgggtttctcagtttctgtcctccacacctctgcaaaatatggcaggacatgcttcatttttagttttaatccaaaagaatccagagtcattgggatcaacagttttgaaatgtgtggcttctaaggaaaaaccacagttgcagttccagtcctttacactttctaaatacccccttggaccatcagaaactatttaaaccttgtttctgagagatggagaygtcaactagagtagaccagactgtgaccacaaccaggtcactgcctgcttccaggcttgcatttccagcctgcatttccatatttaaggaaattaacataatacgaaatgaccatttctaaaagcatttaaaactttcttttaatatatgtagcaaaattcaagtccacacatttttggaccagatggtttctcaactctgcaaagtaggtttaaagtaatagttacttaagagtgccatatattttaaacacacagtgcttctgctaattaacacttcatgatttctcaagagtcccacaggcaatagttaccatttgtaaatggtgaaatatagtgtcaagaaaatgaatcctattttgctcccaaattgcagccctgggatgctatacatgagatatctcagcccttcccccagtgtga

SEQ ID NO: 866066 - DNA, 596 bp, Homo sapiens
tacccttgaccgaagaccggtcctcctttattgggaatggtcatcctcttccactgagcctgcagcttagggacggatgcacatggagtagtgagggaggaaggggacacccgcctagccagccagatcagctgaatcaaccctggcaatcgatggagtgacagatgccgcagccagatcaccctcacatcccctttatatatatcgaaacacaacaatcctatgagataggtaatattattatttatattttttatggtgaagaaaataaggaaagagaggttaaataacttgcaagaccacacagcttcagaactggtgggtgcaggatttgaatggagactgtgactattayactgtttaagaactgtgcccttgttcttaaacacctcgctacactgcctgttgcagtatgagtgtgtacgtgtgttatatacactgtattctttccctctttagttactgtttctcccctttattttctttctattcacctctcaccactaagcattttggggcattgtccagatttttttcattcatttgaatgagaatatcttactaatgagaatgagttcctccatttcatcccagat

SEQ ID NO: 866067 - DNA, 613 bp, Homo sapiens
acaagcaggcaagcaggtagattaatcatctaagatagattttgttttatgcagtctgtattagggatctatatagtccaggatgtgccatgtgattcaagaatgctaaaatgcacatctggagctctgtggaactgattttacttcacttggtgatcatggaaggaccctgagctgagagtcagaagacttaagctccagtcctgaacaggcaggtcaccttggcaaagttgttttgcatcttgggacctattttctcctctctaaaatgaaggttctctatggataatttctaagttctctcctagttttagcaatgtgagattctgtgtaatattagaactatatgaggcagaccatctggtttcttaaggttcaaactacattctagagacaaatcaagcaatttaaaatacacacacacacacacacacacacacacacacacacacacacacacacamccttgatgggacttccaggggatttgagtctcatgggcagaacttctgcatttggctgccacttgaagcaaagctttttgactgtgtacttgaggatgacatgtttggagagaaatagaatagctatggcatctcttaattataattta

SEQ ID NO: 866068 - DNA, 576 bp, Homo sapiens
tctgataagctggaagtaaaatgatgtctccattttagagaagaataactgagattcaggtgccaagatcacatgtctagaagtgaccacacccccaattattttttcacacttttcattaccagtgaatggatgggtttgttctgctattcaaagggcatcttgctcaaggctgatgtatatttgcatgctcctcagtaatggctaaatgttctcacaccacaagaaattactcatgaaaacacagtgtgaatgattaatctatatgctgctgacagatatgaatgatgaaaggatactttggagaagmatattttgtatattgtcataaaattttactaatgtttttgataagtgtaaaatatgtgaggagtgcttaggtagataaaatgaacttagagctggaagaggaggagcaccccagaaagagaacaatttctaaggaaaatcagaaggcgctggaacaggaatagccagaaaaatttacagaccaattacattgctcatgagtgtgatttattttctgcaagttcaaatttctcaacttgtacacctaattcaatgctgtccccttca

SEQ ID NO: 866069 - DNA, 716 bp, Homo sapiens
aaggagggaaacttagtagtcaagtggttttataaattgttgatgagcctataaatgaatcttctttttctaaagttaagttctcccctgacaagcaacaggaatagccatggaaaccaccctgtgacaatatggtattcattgtaagtggtccttttcacaattttccaaaagagattatagatggggtccagatggaggtaggtgtcaaaatacatttagtgttagacaaaaaacccaattatcaaaaatttcgttgttcatcatcatggctaataatgatgatgattaaagtgaggattttcatacagataatcttcttgtatatcgtctcactaaatcattataacaaacatgtgaaggcttcttttattcactgcaaggattggctgcggacttcaacagagaaacctcacatacttgcttcctttttgttttctcagaggtatttccagacactcccaytgactttcttcctcccctgcttgaaaaaaaatctttcaggcacttttgtttaggcaaaacagcacaatagagcattattatattacagttcactattacacagatcttaataatgtgtcaaatttccctcattattgactatagaggacaaggtgtgtgtgtgtatgtgtgtgcatattagagactatgactcaaaatagtggactccacaggctgcacggggtcattgtcctcacttctgtcacacgtgc

SEQ ID NO: 866070 - DNA, 648 bp, Homo sapiens
cctttttcaaattgctccttttctagtcttccccaactcagtaaatggtgaactaaggtcaccaaggcaggttttccttacttatttttcttacaccgatatccaacacataagtccatgctattgagcctgtcttttcatcatctcatctgctctcctttctgccaatcaccctaatccttttccaggattcctgcaagagtctcccagttgccctccccacacaacaaccagaataawttttttttttaaggaaatcagatgatcacatcaaaatttttcaatggcctcctgtcacacttagaataaaatccaacaccttccctgccttactttttctattcccctttgtccttggctgctgtcttctgactccatcagcttctttccttttcttcaaatgtgccaagcttcttcctgcctcaggattcttgaacatgcttccctctctccttggcatgtttttcatattgccagctcactcttgccatttaggtctcagtttaactactatttgctcagaatggcctttcctgcctacccaataccaagcagcttcttggtcactatctattgtacggtactaattaattctctaaatggctgctaccattagttaatatttttattgcctcagtcttgtggttg

SEQ ID NO: 866071 - DNA, 633 bp, Homo sapiens
aaagaactccaagctagtattctcatgtctgaagataggagggctcccaaggtagttacacaccttttgttacatatataaaagtttacttgtgggatgctgtttccctcacatcattctgtatactcatactagctcagtcttccaatgtgcaacatgattatgctgcaccccttcttggtcttcattaatgctccaggcttcctttccttcttgactcccaagcatttcttcttcctttgccaattttaataagaaccagtcagctcacctttgaccttgaagtcctaaggaggttgtagttatagtaagaaagatcataaatacaaggtgtcataccttgatagtgtcctgcagaggtcagagctatacttattctccctgcagtcacagggagcaattgatgcatttaaatccactacatttcacatgtcacatccatccactcttcacaatagtctcagattattctccagcatgcaatcatcatttccrctactggggttcaggtttgcattgtttcccttatctacactatgagccgcttaacttgtctttatgccaaccactatttttcttaacaacaatgaaaaaaattaattagaaaaattaattggatcacttatctgccct

SEQ ID NO: 866072 - DNA, 551 bp, Homo sapiens
tgtctcatctcttctcagaagacacattctttttttgtctcatcatatttccatgtatccttggtgcctgtttgaggattaaaatagaggagaagagtggatatgtggtgaccaatattaattaatttatatatatatatatatatatatatatatatatatatatatatatatgacattttcttgcacaatagactgggaaggagctactgtagtggacttaatgaagtataattttggggtaaacctcaattttaattccartctgtcacttactagctgtctgacttcaacaaaatgagtcaccttctgatccttagtttcctcatctgtaacatgggattatattaggtaacatacataagacacctgtaacacaatcagtgcttgagaagaatgatgacttttcttacttatccccatgttcacagtgcctgacacatcatagggttcaatgagcatttgctgcataaacttgacactgcctttgtcagatgcctcacctggttaatttcattttttatacaattattttgttttggaagagcttc

SEQ ID NO: 866073 - DNA, 503 bp, Homo sapiens
ggcctcatcttgcttgaaattctgactcaagggtcaatctcattttagaatattggaaaagatcaatggatatctttaactaaatacataaataaatttgatcttccccaacctctttattctaacctggtctagaaacagtgccataatgtactgcgttagagtgaaacttaaagaaactctagaaatataagatgtgggtttgactgataacttttgaccagcacttwtgcattgtggtttttctcatctagatgtattttctttgattatgtacacatttggcttcacagttttcagatccataatatccctttcactgccatctagtacaaatttcctgtacccttaaaaccaaccctactgttagagactgttcatctcactgaactgtagcccagaaagctgttctccagaatgtgctacaggaaccacgttaacaaactccttattgcaaacaaatcttcctgtcagttcactttctccattcccagattatattc

SEQ ID NO: 866074 - DNA, 465 bp, Homo sapiens
tgggctgcattccaacatactgaacacctaatctctggaagaagaaaggaattttattcagtgttttaagaaagtgattttaacttatatacagcatggaaatatgaactaaaaggaaaaataatccagtgacagtaacattatgcagaaaagctacttggtttcttctctctggggatttctacctttctarcattgtctaataagtctggctttcctgtagcaccttaccaggtctcacctatagtagaggtgactaagagtcgtgagcatgagcacaaagaggaatttcatttttcatcactgagttctgtgcgtagagctaaatgagaagcaactttggtattctgcacatttgattaattggcatcaaaaggcagcctcactagttccctaaggaagtgtggtaccttcacacataatcaagaatgtgttctctccaaagggattttaaagagaattaca

SEQ ID NO: 866075 - DNA, 465 bp, Homo sapiens
tgggctgcattccaacatactgaacacctaatctctggaagaagaaaggaattttattcagtgttttaagaaagtgattttaacttatatacagcatggaaatatgaactaaaaggaaaaataatccagtgacagtaacattatgcagaaaagctacttggtttcttctctctggggatttctacctttctagcattgtctaataagtctggctttcctgtagcaccttaccaggtctcacctatagtagaggtgactaagagtcgtgagcatgagcacaaagaggaatttcatttttcatcactgagttctgtgcrtagagctaaatgagaagcaactttggtattctgcacatttgattaattggcatcaaaaggcagcctcactagttccctaaggaagtgtggtaccttcacacataatcaagaatgtgttctctccaaagggattttaaagagaattaca

SEQ ID NO: 866076 - DNA, 604 bp, Homo sapiens
aaacagttacaaatatggtagataataatctatctcaataattatattaaatgtgaatgattaacacacatcaattaaaaagacagactgagaagagaaattaaaacaaaaagtcccagctgtatatggtctacaagaaacccatttaaaatataaagacacagattaaaagtaaagggatggaggctgggcgctgtggctcacacttgtaatcccagcactttgggaggccaaagcaggcagatcacctgaggtcagcagctcgagaccagcctggcctacatggtgaaaccccatctctataaaaaatacaaaattagacagtggcagtggcaygcacctgtaatcccagttactcggaggctgaggcaggagaatcgcttggagtcaggaggcagaggttgcagtgagccaagatggcaccactgcacaccagcttgagggcgacagagcaagactctgtctaaaaaaaaagaaaagtaaagggatggagaaaaatatgccatgttaacactaataaaagaaagctgaaatagttgtgctaatttcagtctaagcaaacatcaaaacaaagaaaactggcatggataaagagaattgttta

SEQ ID NO: 866077 - DNA, 579 bp, Homo sapiens
tagtcatttccattaggatcatttccattttctaatcataatgatgctggctcagaaaatactaagaaaggatacattctggatgtcaactcaaccatcatattgacgtttagttttctgagaacgcaaatctctttcctgattgagaaatcatggaaataatctttccaaggtatgatattagtaactggattatgtaaaaggacagagatctactttttttctaaattgtatagccactagaggagtattctatataaatrtgggtcagaactaatggtctactctacatgcctggagtgactgaggcaaatttctacaagttctcactcagaatttttcagaatgaagagcttcataaaaatgatgacgtttgaccaaaaatacaaacagtattttataaccttgtagactctgtttctgaacttttgtggccctttgattatatatatatattataccagttctatctttaagcatttgtaatctttatttctgaatgggtcttctatattttacctatctctttaaatactgatgcgggtaagagtttttaataactttatctcccatttcatc

SEQ ID NO: 866078 - DNA, 637 bp, Homo sapiens
agtagatattattaccattctattatttagaggaagaaaatgaaggagagagaatttaaataacttgacaaagttttctgagattttaagcttcagagctggatcaaaccttggtgggctatgtccaatgccctctgcttaaccctgcttcaagatcgtactgtaaagcacttgagatgtgctgagggagtgcggctccttccacttttggaaaacacatgagggtaaattctgaggcagtaaagcctgagaaaatcagggtagtctactgtgtctgtgtatctacattttgtcgtagggggttggttgtagtaaaccagagaacagaatgaggtgagaaggcatgaaagaaygaactcttttaatttgctttgttagcaagcttctgcactaagtccaagattatcaatgaatacaaactaaattcagaatttcttctttacataaatttccaatgcacacgaaaaaagcctcatgtattactcctcaatcatcttttctcaaacaggtcaataagatatctctgctactccagctctgaaagagctagggtgtgcccagctgtgaaaaagtacaaagagacttgaatttggagttaagagatatatattgaacacaaattctttcattaacttgt

SEQ ID NO: 866079 - DNA, 611 bp, Homo sapiens
ctttgacagtcaagttcatctatttttttttctcctctctgagttccaccatagcaaatgattcctttctgcttgacatctctgtcatctaattgtggttgagatttcccccgggattggttatgaatgaaggcagacaattgcagcagattgccatcttaaataacaatagaacccctggctcacagatgttctgtacactcgtggtaaaagaggagttctagtgggaaagtgggagtacaggtttggatgggaagaaaataatcagggactttcttattaggctaaccacggacattagcctagtacattcagagattactaacaaacaatgctatacctaacacactgtcctgatgtcctragacgaatcagcaatctcctttaaagtagtttaataaaagggattttacgaaaaaggaatagtgaaaatgctttcccatggcaaagctcttgtatattgtatttcttctcatggatgatttgattcaaagaaaggacattgtaaactatttatgaaaagactagtagcaatactgatgactagcattttactgaacatttaccatacagtaaatattgtgctaagttctgtatatttattaactctg

SEQ ID NO: 866080 - DNA, 657 bp, Homo sapiens
cagcttcatagttcacagccagtttgtatgcagaggggagcctgcaaaatcctttgaacaaattcagaatatagcaatcctaatgcttgaacaatccattagaaatctaaaaatatctcatcttcttcaggtgagtcacatggactcatacttctcacatgtaatgtcrtcacatttttctttagaaaattgtgtttacactgatttttcaatctgtacacaaggtttggtaatgttcatagtgggcaggtagaatcatgtaagggctctcttaataaatgacatgcttacttccatgacatttaagtaggagagctattggtcttttatagacagagttaaatgcaataaaagcaaatgtctctttcacagtaataccttatgtgattatttgttctctgtctagactcagaggcacgattgttttctaaatgtgaactcacatttgattttgtcataagctttcagtaaaacaccattttaagccttcagttagttctcgtttagaatatgttcatctaaaacagttgacctttgtttctagttctaaaattacatatcctttgtttttaattaagtgtcagaaagccagaagtactagtcaatacaaacaaacaaaaaaggatattttgttggacaacttttagacataagtaa

SEQ ID NO: 866081 - DNA, 629 bp, Homo sapiens
aaaacactctctcacaaaacaattgcaatttaagaaaataatctacaatatttttaaaaaacttaaaggcatatggcatgacttttcaaaattttgacttacccatggtatactgtcgggactctgggcttttaaaatagattaggtggtaatactgtgttttggtttgtatctggtaaaatagcaccaatatcaagtgtattatttttctttagcactttaaatgttccatatgccatccttggcatatttaaacctcattttattttatatgcaatttaataatttaggttgcagatgcctattgctttagttttatttgtgctgtcatattttgaagtagatgttgcttacacttcaaataatttttgtaattcattattatttggtttatttcactgaatggtaatgcttctatttttacattatcaatatttaatcttgatagatagctttattgtaaamaatgaaataagaaatttactgcactggagcatgataaaacattttaaaatgtctctacttgataatatttgtgttttatagggattcttcttctatacacagaagcttttcacatttactttttaaaaatgactgatgaaaacaagtacttaaaaacattctcc

SEQ ID NO: 866082 - DNA, 663 bp, Homo sapiens
tttgacatgagatttgggcaaggacacaaatccaaaccatatcagtaacaataacaatactctagagcaaggggttggcaaatatattctgcaaagggccagatagtaaatattttaggttttgtggactatatggtctttgtcacaacaactcaactcagttgtagaatgaaagcagccatagacaaaaaaatcaaaccgagtggccgtgttccaataaaactctagagaacagttcactggccctttgtaagaaggaatcaaggctgtattcacccacttctctacagtttcctacaggcctttgctgtcctctggcttcttaatcgagattgastggggtttccagatcataaggtctttttaaacatatgtcatgtaattctcatattaccccagtgaatggattgttccctggctttatggatgagaaactaatatcaggcacttacaggcccctgctcaaggccactaagtgaccaagaagaagcgctagtgtgaagccagatgttctgactttgtaggcaacttctcctgcaatgtgtatctttctatccgcacagatcataacatgaaaaattagcctcattttgaatgacttcgctgatagtgcctattgactactcatactttggatatgttgtttacttacttattcatcca

SEQ ID NO: 866083 - DNA, 632 bp, Homo sapiens
agtgctctggaagtgacctgaaacacctagggtagtgcgtctctttggtgaaagactagggggtgcatggcatctgtttttttcccacctagctgtgtctcaaatgtagtgaacctgtgaatattaggcaagaaactgattcactgcaaaactggaaaccaaggaaatacagttctggattgtaattctgatggggagctttaaaggtatatctgtgtcttctgatctcaacaaaaaccaaggcgaaatcagtccttccccaaaagggtgggatgcaaaaaggaggatttcccacctgagatgctttagtgaaatacagaattcatgggagactgaggagagtaatattttattcatttcttttagtgtaaaagctcttggactacttaaaataacagatatttagtccccattttcaaacataggtatctgggactgttgtttgtgaaaaggttctggaaagttctgacttagttgtggmgaatctaataacttaaacttctattccaggccaggtttcttcccctaatcctgaccagttactcaggggaggaaactggaactttaacagaaggggtgcatgattgattgccgttcccattaggccccaccttcaacattgggggtcacat

SEQ ID NO: 866084 - DNA, 560 bp, Homo sapiens
aaaaaagaggtgggcatagtggtgtgtgcctgtagtcccagctattcaggaagctgtggcaggaggactgctggagcccaggagatcaaggctgcagtgagctatgaccacaccactgcactccagcctgggcaacagagtaggaccctgtctcaaaaaaaaaaaaaaaaaaaaatttaatctgcatattttgggggaaaagtcccagtaattattagttagagaaataatagtaattactggtcagagaattcacctaaaaacaagtgaaccctggaagttattttttgctgcatggtatcttaaagaacaaactgggctaaaaagcatgattttttctttctttctttttytttttttttttttttttacatcatcttgccaatctttttctttttgagacagggtctcctgtgtagcccagactgaagtgcagtggggcactcacaggtgcgatcatagcacattaactatagccttgaactcctggactcaggcaatcctcctgtctcaaccttctgagtagctgggactaccaggatgggccactgcagctggca

SEQ ID NO: 866085 - DNA, 592 bp, Homo sapiens
tgaaccctcagcccatcttgtggaacatgggtcatacaggaagttgagaccctttgtttggggttaaatgaaggctaccaggtagagattgttatgtaaactgcatggttttaacaagcagtggtggttcccctctactgcctgctggcgctggacctccctgtatgcaagttcccctcaataaattctgtgtcttgtttgctggctctgggtcttttttttttttttttttttgaaatagtcttgctctatcccacaggcttgagtgcagtggtgcaatctcagctcactgaaacctctgcttcctgggttcaagcaattcttatgcctcagccccccaagttgttgggattacaggcgctgggctaatttttgtatttttagtagagatggggtttcmccatgttaaccaggctgatctcgaactcctgacctcaggtgatccacccaccttggcctcccaaagtactgggattatagcatgagccaccgcacctggcctgctctgggtctctttttcagcctcttgaaccttgtggcattcctactagagttgacaggggtctgtcatgacacccagtgcagaagtttc

SEQ ID NO: 866086 - DNA, 626 bp, Homo sapiens
tgtaatagtaacaaatagcaatatgtgaaaggagtagtcaaaggaaaataaattgtaatcttttcttatcctgagttctctcaagaaacacagcctgaggggctgcattgcttgcaggtttattttgggaattgattgcaattgatgagagtagaagcatgagaatagtgtgacagaaaaagagtgactgccaatcctgacacatgatattgatcttgccatttccagggcaattgtatatcaatcttgcttggggaccttctgaaaaaatgagtagactttcctttgacagtgtttcttaagggctggaatctgatcttttgtgcctccaatactcatgagttgctctatggaacttgtttcctttcaccttcaagattctcatctgtaagaatctctgagcagttgccacaggcytcccagatggtgcccaagaaacagaaggacagaaaggagaaggcaggcagttctactgagatgaggggctgccagagtccaccgagaccatcacaaaagtggagtgagctttgttacagctgcatcccagaaatgctttatgttcattttaattttcactgaactaaatattcacttgtcatttgattttgacccatcagtttttcaga

SEQ ID NO: 866087 - DNA, 622 bp, Homo sapiens
tgacactttccagtcttctatgtcctaggcagaaacagaaatcaaatattgctcttggtgtacgaccttggcaagcagcagtaagtgtagttctagaaacttacataaggtctccccaacaggccaaggcaccgaggtgtagatttggccaactcttaaatatgtaaatggtaattgcattatgcagaagttaaacatctctttagctgattttgcaattagtgttaaattagtgattagttaagaatagcctttcattgttmttctccagtgcattgatggtgcacagaaataaccactggattgtatttttcttgtaaatattacttcccccaacttctcaattgtttgagatgctgccccaattagtgctttcccttccattaatattccatcaagtattctttaagcccttgggtagtggtgctggcagaggtattacgggcagagaaggaaagccaacatccagccaattctggtaaaaatggatcacagcctcacagcagtgtagaaggagtctaatataatcaatcttccaccaaatagctggctggtctcttctagagcatagtatcatcaagagttcttcataggcctctgctgcctataatttgggcattcc

SEQ ID NO: 866088 - DNA, 601 bp, Homo sapiens
ctaccccactgaggttatattttgcaactgcttctgtattctctttgaaccccatgctatgtgtatttgtctgttttcacactgctataaagaaacacctaggactgggtcatttataaagaaaagaggtttacttgactcacacttttgaatgtctggggagacttggggaracttacaatcatggtggaaggggaagcaggcacatcttacatggaggcaggtgagagagaagtgcaagcagtgaaatgacaaatgcttttaaaactattagctctcgtgagaactcactcactatcatgagaacagcatggaggacaccagccctaagatacaatcagctcccgccaagtctctcccttgacacaggaagagaatgggaattaaaataagagatgagatttgagtgggacacagagccaaactgtatcatcatcaaatgctcaactaaaagccttcagcctgctggtgttggttgtctcaaagactattgtcaccaacattgtcaataggaatgccagaaacccacagacaatgctgctgttgttgatgaccttgcccagacttcatagttcgtagcctaagccctggaagtcccaga

SEQ ID NO: 866089 - DNA, 601 bp, Homo sapiens
ctaccccactgaggttatattttgcaactgcttctgtattctctttgaaccccatgctatgtgtatttgtctgttttcacactgctataaagaaacacctaggactgggtcatttataaagaaaagaggtttacttgactcacacttttgaatgtctggggagacttggggaaacttacaatcatggtggaaggggaagcaggcacatcttacatggaggcaggtgagagagaagtgcaagcagtgaaatgacaaatgcttttaaaacyattagctctcgtgagaactcactcactatcatgagaacagcatggaggacaccagccctaagatacaatcagctcccgccaagtctctcccttgacacaggaagagaatgggaattaaaataagagatgagatttgagtgggacacagagccaaactgtatcatcatcaaatgctcaactaaaagccttcagcctgctggtgttggttgtctcaaagactattgtcaccaacattgtcaataggaatgccagaaacccacagacaatgctgctgttgttgatgaccttgcccagacttcatagttcgtagcctaagccctggaagtcccaga

SEQ ID NO: 866090 - DNA, 370 bp, Homo sapiens
tttttccacaatttcagctctttctctacaggacatgagactcactcagggcaatcttagcagatttgaggttcagtatctgcttctgaagctaggagatagaatccccgagttcattattttctgtcatcactttgtccactgaasttaggagcaaccaactagcttcattatgttccttggctctccacatatggtcaaaggtattatgtacagagtcactaaactccttgactctcatgagcgatgaatcaggagtgtcaaatgtatttattttgcataactctctaaacagttcatgccaaggactatcagtgttctccatactattagaagtagagtccttagcatttttgggtctaatcatatt

SEQ ID NO: 866091 - DNA, 485 bp, Homo sapiens
tttgagcctatgtgtgtctttgcacgagtggtgggtctcctgaatacagcacactgatgggttttgactccttatccaatttgccagcatgtgtctttgaattggggcatttagcccacttacatttaagattaatattgttatgtgtgaagttgatcctgtcattatgatgttcactggctattttgctcgttagttgatgcaatttcttcctagcattgatgatctttacaatttggcatgtttttgcagtggctggtactggctgttyctttccatgtttagtgcttccttcaggagctcctgtatgacaggcctggtggttataaagtctctcagcatttgcttgtctgtaaaggattttatttctcctccacttatgaagcttagtttggctggatatgaaattctgggttgaaaattcttttctttaagaacgttgaatattggccctcactctcttctggtttgtagggtttctgcag

SEQ ID NO: 866092 - DNA, 693 bp, Homo sapiens
ggtgccaggggcattttagtcgttcagggaaggtaggggatatgtctaaaagccttgccttttagggtcctatttcatccatcagatgtgactacattctggattttcttccctggccagtctttggtcctcattgccatcaattctccttgctttggaaccagcctgtgcctcccagctstgacacttacagctgctgtgggcttcacctgaaacttctcatgtttaactgctacaatccagctgagcagttgatgatgtgaaaataggactgctttagttccccccttcacacttggaacctggggaaataagcggcaggaagactttttttgtcagctgcaagtttttttctggtcaaagcaaactgaattaaaaagcagtggttgaagtggcaaagatgcatgaatcagagagcttggtggggaagagatgtctgcacttgtgaagtaggttcttagaggtaaaatggggaaagggaagggtctctcagtgctactcccagcacatctactttgctccaaagcaaaagtcctgagaaactgggtaaaccacatttctggagcccaactcttaatgtcattgttaccatatgttcaaatgggttttattttcatcatgactgatttccagtcagcaaggacttagctttaattcattctccatcaccatttagaatcactgatctgatcc

SEQ ID NO: 866093 - DNA, 596 bp, Homo sapiens
agcaaactgaattaaaaagcagtggttgaagtggcaaagatgcatgaatcagagagcttggtggggaagagatgtctgcacttgtgaagtaggttcttagaggtaaaatggggaaagggaagggtctctcagtgctactcccagcacatctactttgctccaaagcaaaagtcctgagaaactgggtaaaccacatttctggarcccaactcttaatgtcattgttaccatatgttcaaatgggttttattttcatcatgactgatttccagtcagcaaggacttagctttaattcattctccatcaccatttagaatcactgatctgatcctgtgtacctacaacatctcaatggcttccaaggctcttaaaataaagacctgaatcctcaccatggggaccttacttcacctctgcagcctcatctcaagccactctctggttctctgctccagccacaaaggctttttccaagttccttaaaagcagagtgcctcacctcttctgctgcaggacctgtgtgcatgttatttttctctgctttatctctcttcctttctaggtaatctcattcagtcttaaggttttaaatgct

SEQ ID NO: 866094 - DNA, 700 bp, Homo sapiens
agtaagacttgaaatctgatagtttaagttttccacccttcttctatattgcttgatttttgttaggttgtttgcatatctatataaattttagaatcagctaataaatttcaataaaagtagaccctagatttttatytggattctagtgaatccgtaaaccatttgggggacaattaaaatcataatattaaatcttccaatccatggtcacgggacatttctccatttatgtaagttttctttaactcctttttgtaatgtttgtttttgtcagtgtagaggtcttgctcgtcttttgttaaatttattcataggttaaaaacatttttggattctgtggtaaatggcattgcattttacatttccttttttctactgtttgttgctagtgcagtataccaacagaaggaagacacattaaccttctcccacccaaactttttccatgacttaatatatctgcataaaatcataggaaaaagcttggaactgtacacaccaaactgacacagtggttatttttggggaggaggagagggaactgtgattgttgagaaaagatggtgttcaagagggaattgatctttatctgtcccgttttaattcttataaaaaagggaatgtttcaatgtattatttgtgtagttaaaaatctattaaaagaggccagttgcattggctgatgcttataatccca

SEQ ID NO: 866095 - DNA, 474 bp, Homo sapiens
ctgtccaccacacaaactgccaccttcctacaccgacttcttgtctataagaattccacatccttgccaacacttgctatggtcatgtttccattttctctaacttatggctgtaaaatggtatctgattgtggttttaacatgcatttcttgagatgcctgggcactcaggtactgacatgtctgagggacagasagtgggtctttgtctccctctggctggaagtccagagctccaaaatagaccatctcccagcattttttgagaaaatgggaaatgagtctttgttttgggttataataagataagcaactcatgtacaacaaaagttagcatctgctctgcacacaaggtttaatatttagagataatttaaaaccaaggaaaaggcagagttattaataaacacttggggggaggtgtgaagagagagtatgaaaatctccatttgaaaaagctactgtagttagcat

SEQ ID NO: 866096 - DNA, 665 bp, Homo sapiens
aattttgcaacaaatgcatcttcagcattagattcacaggaatgtttaggacatgcctaaatgatttagtattttatacctctgctcaaaagaacagttcatgtaagtcagttctatctgaagactgtcaatcaagcagaaactaaaagtaattttagaacatcatgattcatttacaaaaaagtttatctctagaattcaggagttcgcggttccaagtgatacactgatgggcmaagtttgaaacgcattaattgaaacaaggcaaattgctttcttatttagatatgaaatacagagcatttctggttacttttatttatgagctgctaatatttgaacatatgcaaagtctgaattgtttcccatttgccccagactttaaaacataattccttttcttaacgtgccacccttcagggtaaggagttgtaatgaacaccttccagtcacacagaattacaatgttctttatcttgcccagtactgaaaaaagaaaaaaaaaaaaaaacttccaaaggtttggaatcctgaaacctgtaaacaaaatctgtggagcagataaaattttaaatggcacaatgcaattaaagctgaattcaatttgagcgcaccctgtccatctgtcagagagaaacaaaagccgaggagctccattattgctg

SEQ ID NO: 866097 - DNA, 599 bp, Homo sapiens
gtttgaaggtagttcctctaaaatcattttggaagaaataaaataattaaaaaaataaaatacaaaaataaaataaattcggtaatttctctgatacattttgattaaaagactattcatttacattcacatttttatggtagtgatgttgaaactagcactaagctatatttcctagcacatatataaagagtgatccattgtgtttggagataatgctgttcaagatataaggtgtaggacaggaccaaaaattatcaaacagctaagtacagagtgaatattgtcaaggtagactgtcataaatcttggacttcgttttcctctagtaataatattttgtgttaagatttttatctttatttattcaatgactctgggttgggaaaaagaataaagtccacaaccagaaactagaaaatgctytaaagcgctatttagggaccgaaatgttgttggctacaactctctcagcacattgggcttcacttgaagaaactaacaaacctgtctgcaaatgagcacttgcttataagtagataaggactgctgaagtgtatggaagacagtggtttaacatcatttagaactcatcatta

SEQ ID NO: 866098 - DNA, 650 bp, Homo sapiens
taactttaagcaaggaaatggaatgaaatgtaaattggtgtaaacgtaaagttggagaaaaagactagagggtggcatctttaatagaagataatggcagaaatctagatttaaaaataacaggctgtaggagaacaatgaaagggaggatgaagagatgggtaagtgagccatactcaagggcacatggtgtttcaaaaacacctcccactatttggcttttatccttgaaagagagctcataagaaagtttcaccaggcccactgaagtggaaaagcataataatatacttggtgagtaatctaacttctttttctccaaaggctagtaatcacctataaattaaaataaagcacttaagttttatagcaaaaaacaaacaaactggcgattttcactaaaaccaaaaatgaaaaaaaaaaaaagtamaaacaaaataaaaaccctgattaagggtgcatttgaaatatatagtctcttctgcatggcttattcctgtgcctcgatctataacaacaaagcaatcaacaagcaaaccatatagtcaaattaaagtctggtattaaaagtaagcttgacttgattgaatcaaagcagttcatttattaagtttttcacttctcaacttaattccttcaaaataggaata

SEQ ID NO: 866099 - DNA, 650 bp, Homo sapiens
taactttaagcaaggaaatggaatgaaatgtaaattggtgtaaacgtaaagttggagaaaaagactagagggtggcatctttaatagaagataatggcagaaatctagatttaaaaataacaggctgtaggagaacaatgaaagggaggatgaagagatgggtaagtgagccatactcaagggcacatggtgtttcaaaaacacctcccactatttggcttttatccttgaaagagagctcataagaaagtttcaccaggcccactgaagtggaaaagcataataatatacttggtgagtaatctaacttctttttctccaaaggctagtaatcacctataaattaaaataaagcacttaagttttatagcaaaaaacaaacaaactggcgattttcactaaaaccaaaaatgaaaaaaaaaaaaagtaaaaacaaaataaaaaccctgattaagggtgcatttgaaatatatagtctcytctgcatggcttattcctgtgcctcgatctataacaacaaagcaatcaacaagcaaaccatatagtcaaattaaagtctggtattaaaagtaagcttgacttgattgaatcaaagcagttcatttattaagtttttcacttctcaacttaattccttcaaaataggaata

SEQ ID NO: 866100 - DNA, 618 bp, Homo sapiens
gagaagtaattttacatttgaaaaccttcatcaaaactgtactgaagacagcttgctatacttggataattccatttggtgactcccaactaggcaaaactttctgccctttagcaaatataatttactgaatgaataaataaaattaaatttataataactaaaaacaatatattcaatgcatgccaatttaaatcttaaattactccaactgaccaacagaaatcctgagatcatcaacatttgcmtaaaacctgctctataacttgttcaaaataacttggaaacactcttgatatgatacaactataccatatacttccatttctgaatttttttatacacagcaaagtagatgggttatttccaagtcaattgaataaagtattacttatatcaaaaaatacatagaaaatgtatgttagttatgatatcaaaagaaagaaactatgttatgcctagagttttaaacagagaagaattgtaaaggaacttgcaagtaagtttctttatgatttatgtccatttgtatttttttaagctccaattagctccataaagactactttagaggaataaaaacattcaaatatttggcagtctcaaacactcgtctta

SEQ ID NO: 866101 - DNA, 536 bp, Homo sapiens
gaaaagaggaagcgaaacaatgaaaaaagcattttcttctggaatgttcaattatctcaatagtagccactatcaacccatcattttctataagagcgacccatttctatcccagaggattagagcaagctgaactctcctagctctaatcaaacggaagacctcacttaaataattacacttaatagcttgaataaaatcacaatttatgattttggtaattgtttttgccagcttcatgcattagccttagtacaggctttagtattttcaaacatctgcattaaaagaggaaagcaatagcttagagatgtccacatccacatttaatatcccaaacactagggaactcacccaagcamactttctcctgcagttctaaataaaaagctttcccacccactcccattcccaacccgccacacacagacagatcgccaggggggtcttctttccttagtttataacactaaatcaatctcatgctaatttcagtctctctcctacaactgtataatgtttactaacttttccag

SEQ ID NO: 866102 - DNA, 665 bp, Homo sapiens
agcaaactaacgcaggaacagaaaaccaaacactgcatgttgtcacttgtaagtggctgctgaacaatgaaaacacatagacacatgggtgggggaacaacacacactggagcctgttgggggtgcaggggagggagagcatcaggaagaatagctaatggatgctrggcttaatacttaggtgattggtcgataggtgcagcaaaccaccatggcacacgtttacctatgtaacaaacctgcacatcctgtacatgtaccccagaactcgaaataaaagttgatgaataaaaatgatttaccttcatttaaatagcttagattctgttgcctataaatatagggcactaaatttttatttatgcaggataactgtcctggttatgccaaagatatattaaatacaatgtttaattgatgactcaaaacataccttaagtttatctttctagaactttgtatttcagaagataaagtagatgaggctgcatctgtctgcactgactttctcctcccaatgacaaagaacgctatctgttttgaagtgacttttaatttgttgaatattggtggtgagtggaaaatgaatgtaaatgaaatatcatattgctggagcaggtacaagggatgtgaatgaaagcttcctgttttatgggctgctgaga

SEQ ID NO: 866103 - DNA, 603 bp, Homo sapiens
ctattactgttgcatactgatatgcaagattttgttatactttcttgaaaaggcccattattttcatttggaaagggaaaaaataaaatagagattgccaccaattgcaaatgactaacactaataaatttaatgggtctaatagcagctgtgactgtggagttccttgtatactgaaatggggttataaacggtgttaagctcacaggctggccccggaagtctattgcaggcagaatgtggcaattctagratatcagtaggaccaaccttggtttcctatcatatctagagagtaaattaaaaatgttcaaactctaaatgaaaggatttgaagccttaggattcactgggcaagctaaactcagtaggaaggctgcccttgtgagcactcctagacttcatgcctttcacttctttttccctctgtttctaacctctcctattctttaaacttggaacttttccttttgttacacgcaggcactttcttggtaaggaatccctgagaaaagcttcttgagggggcagtgagcttttttggtcacccacatattgctgaagtagttaaggcctacaagatttatttataaaaatggctat

SEQ ID NO: 866104 - DNA, 603 bp, Homo sapiens
ctattactgttgcatactgatatgcaagattttgttatactttcttgaaaaggcccattattttcatttggaaagggaaaaaataaaatagagattgccaccaattgcaaatgactaacactaataaatttaatgggtctaatagcagctgtgactgtggagttccttgtatactgaaatggggttataaacggtgttaagctcacaggctggccccggaagtctattgcaggcagaatgtggcaattctagaatatcagtaggaccaaccttggtttcctrtcatatctagagagtaaattaaaaatgttcaaactctaaatgaaaggatttgaagccttaggattcactgggcaagctaaactcagtaggaaggctgcccttgtgagcactcctagacttcatgcctttcacttctttttccctctgtttctaacctctcctattctttaaacttggaacttttccttttgttacacgcaggcactttcttggtaaggaatccctgagaaaagcttcttgagggggcagtgagcttttttggtcacccacatattgctgaagtagttaaggcctacaagatttatttataaaaatggctat

SEQ ID NO: 866105 - DNA, 631 bp, Homo sapiens
cgtggaacagtaacaaatcattataaaccctctgggactggtgggtgtgtgatgatgcggggttgtttttctttttccccctcctctttgataagcccatcttttcagcccaggtacatttttcccattgtaaacagaaaatgrcatgggagggagtgtgtctcggaaacttgctgtattgttaatctgttattaggcaaaagtcttaacaccaggctgggtgctcagatgcctcattgtgagctggggatggaattatgcatcatgaataaaaaccgctgtcaacatgcattggtttcaaaacattagagcatatggtatgtgattatctgtattgtcaagtgcaataaagtgaatttggatataataaaggatgtaatattttagaaatttggtaataaactaaggaaaggatgacagctgaggttccttaaggccccagacacaaataaattgaagttactggtctctgtggccaagtggcagaatggccgtaacatggctatctgtgctcggtgattttcaagttggggaaagctctgctgtcgctcggttgccttctctggaggacgcagggatgatctggcccccatgctgggtggtgggagaggcggtggctcccgttggagac

SEQ ID NO: 866106 - DNA, 631 bp, Homo sapiens
cgtggaacagtaacaaatcattataaaccctctgggactggtgggtgtgtgatgatgcggggttgtttttctttttccccctcctctttgataagcccatcttttcagcccaggtacatttttcccattgtaaacagaaaatggcatgggagggagtgtgtctcggaaacttgctgtattgttaatctgttattaggcaaaagtcttaacaccaggctgggtgctcagatgcctcattgtgagctggggatggaattatgcatcatgaataaaaaccgctgtcaacatgcattggtttcaaaacattagagcatatggtatgtgattatctgtattgtcaagtgcaataaagtgaatttggatataataaaggatgtaatattttagaaatttggtaataaactaaggaaaggrtgacagctgaggttccttaaggccccagacacaaataaattgaagttactggtctctgtggccaagtggcagaatggccgtaacatggctatctgtgctcggtgattttcaagttggggaaagctctgctgtcgctcggttgccttctctggaggacgcagggatgatctggcccccatgctgggtggtgggagaggcggtggctcccgttggagac

SEQ ID NO: 866107 - DNA, 576 bp, Homo sapiens
gtggctacagcttctgccttggaggttgaactgactccattggatgtgctgaccgaactatgctgtatagcttctgtatgtggactactcggcactgaaatgtcttctgaactatcatctttatcagcagctgggtggaaaaaagaaaaattattcattttcytaaaatcggtaagaatgcaccagtatgctgaggcaatacacagagtaaaaagttagaaagtatcttacaaaactgattagacaagttggtattacagcaattgatataggtcatgaagtaggcaattttacctgcaataggtcaaaagaaggcacaaccatgcatatggaaacatctgggtgcccactgccttatggaatagagctgaagaaatatttgctaaatagtgttaaagaaagaaaatgagggagagtttggaagatagtctcttacagatacaatcaaacattaagtatcacatttaacaaactcagtctggttggcctacatgtcattcttattacaagataaaaatgtataaccacatgcataaacaaaatgaattcttacatacaaattatatcttcaaatta

SEQ ID NO: 866108 - DNA, 686 bp, Homo sapiens
gttccagaccaaagaggtagagcagcatgccatcattacctttcccttcctctggtcccatcatgtgaaagagcaggttgcttccaaaataactcagatttacctgtgtaaatctgatacattaagatccacttaaatatatttcaggtacttgatcttcatttatatcatctttaatgtgaggcaacctgaaatctaaccaattcctcaagatgctttacttcaaacccattctccctctgttctccttccctctctactccctttcttatgtgtggtttcaggtcagtgtgcagctggaagcctctcccgccttcctagctgtcccagtggagaaggaacaagcgcctcactgcatctgtgcaaacgggcggcaaactgtgtcctgggcagtaaccccaaagtcattaggtgagcaaaaaactgctagagataattstctactcaaagattgtatatggcagtgggaaccttatattgagtgctacttccttcaggaaaagaccactagatgctgcgatttttttcctttgccttttattctaagatgcctacaaggatatcctcaacatctccaccttgaattctcagtatcattcacctctcatttgcatgtttccgttcctgcttctgtgttttaataaaacaaaagtttacagagcattgaacatttctaaatcttgagt

SEQ ID NO: 866109 - DNA, 659 bp, Homo sapiens
tacatattttgtaatgtgtatttattgacaatttatttttagctatgcttgttattaatattttgtcttttaacccttgtactagagataaaattgctttaaataccatcattacagtcatagagtattttgaatatggctctatattacttataccattaaattttgtgcttttgtgtttttgtattattaattaggggccttttgtttcagcttaaagaactcccttcagtaattcctgaaggcaggcctaatgttgacgactcccttagcttttagtttgtctgggaatgttttatttctccctcatttctgaaagacagctttgctggatgaagaattcttgattccatgttgtttttatttttgttttccttcagtactttgaatatattattccactctccctcagcctgccgggttmctgctaaaaatccatggatagttgtattggaattcctttgtatgtgatatgtttctttatcaccttctgcttttcagaatttttttttgtctttgatttttgatagtttaattattgtgtcttagtgagcagttctttcatttgaatttcactggagacctctgtgcctcctgtacttggatgctagcatctatcccctaattagggaagttttcagcccttactgctttttttt

SEQ ID NO: 866110 - DNA, 651 bp, Homo sapiens
agttttaggcatttttagggggctgtgcacctgcaagtcaaatgttggagccacttcttcatcctgggaattctcttattccctttgcttctaggccccactccctgaggatttgactgtcttcttttaaatattagcatctgcttgatgttagaagggttgcttctctctcaagacagatttggtagttgaatgatctttttagactctctcttcattaacgttcccccaaataaactcatagatacttttatttagaaattttattgctgacatctgtagaagtatagttaagggtgagcaagataagtgcttgaggagttaaatgtttgcagaaatcttacaaaactgtgagtaacagtcccaaagtagagtttctgtctcctcttcctagakagttctcaaaagtttctcttagttggtcctgggagactttcttagattattctaagtgatagtctaagctcttcctatatacaactaatcctggttatgtgcttatgatgtgccaagcagtattctaaacccaatacccatagtatctcatttacacctcaaaaaccagccctagaggtatatactattattatccccgttttacagataaggatattgaggcatagaaaatgtaaacactgagctcctagtaac

SEQ ID NO: 866111 - DNA, 635 bp, Homo sapiens
tggtgcaacagtggtgacatgggggtctgggtcatgtgcttgtacagcatacttgtgccctgtgaccctgcttgtgcctcaccgcagatgtattatttcaatcttatcatgaattgttattgggcgtgtccaaacttattattcagggtrtgtatgccagtgccagctcctgatggggagttcttgcttcctggtcacatgattcctatgctcagacactcagtctccaaggcctaggaattgttttctggatagtatatgctagcatactaggaattgttttctgaatagtatatgatatagtttggctgtgtctgcatccaaatctcaccttgcattgtaataatccccatgtgtcaagggtggggccaggtggagataattgaatcatgggggcaatttctgccatactgttctcatgatagtcaataattctcacgagatcagatagttttataaatgggggttcccctgcacaagctctctcttgcctgctgctatgtaagacatgtcttgcttccccttcactttctgccatgattgtgaggcctctccagccacgtggagctgtgagtcaattaaacctctttcctttataaattacccagtcccaggtatgtcttaattagcagcat

SEQ ID NO: 866112 - DNA, 622 bp, Homo sapiens
gtgaattcaaatgcattgatccagatgtccccatcctaggttttaggttccatgccttcccaattaaaggtctctgactttggcatagcagacttgctgaggttaagaatttaaccttcactggagcatttgtatccttatacttaagttctggtctgattatcagctttttctgccccctggctttttgtgctgccaagtaggccttctggctttcataagtcaccttaaattggagataaaacatccttagaccttcaytgtctttctccattgcactgatgtcacccaataggagtcactcaattccatagtccttttaatggccatttccccagcacctctcaagctctttagatgttgtatctgccagtgaattttcttttactactatcccaccatgtttcaccaacaattaaaagtttaaaaattgtaccactgaagcctgccatggaatatctgtacttcatctaccagaagtgttggtatttttcttgccaggctgacactcagttggtccgtcttcaaaatcccattttggattcggcttcctaggtcaactcttaataccaactctctgaggtctaattccccaagaaatagaatgtgaggcagagaattt

SEQ ID NO: 866113 - DNA, 566 bp, Homo sapiens
gtgtatatgaaagggagtttattaaggagaattgactcacacgatcacaaggtaaagtcccacgataggcagtctacaagttgagagaaaggaagccagtggtggatcagccggagtctcaaagcctcaaaagtagggaagccaacagggcagccttcagtctgtggccaaaggcccaagagctcctggcaaaccactagtgtaagtccaagagtccaaaagctgaagaacttggagtctgatgtttgmgggcgggaagcattcagcacaggagaaagatggaagccagaagactcagcaagtctgctcttccctctactcctgcctgttttattctagatgcgctggcagctaattagatggtacccacccagattgagggtgggtctgcatctcccagtccactgactcaaatgttaatctcctttggcaacaccctcacagacacactcagaaataatactttgcatccttcaaaccaattaagttgacactcaatattaaccatcacaccactcataattccatccagcctttggggactctctttgaccaagactttaatt

SEQ ID NO: 866114 - DNA, 570 bp, Homo sapiens
atcagcctctgaggatcttcccagaaaagatccagcctttaaagtgagtgaccaagagttggtctttcttggaatcagaggtaagatggaaagttatgtagaagaagaattagtcaccaatgatgccctaatgataggctgggtggcctgagaggcaaaacacagagaaactgtgcttttaacctgttcatgctgttcctaaccctggtctcttattttatttataaatgcatataggtcacagggcgacttggtagakggagttttgataattagggcctctgctgttaaccctggtggctaaacaacactgagctcatattctgctcacactctcatggcattatctctgtaagttacaagacaactctgccatatcactacagtataaaccaattagcagatcagtctcacagatggaaccactgcagtgtccctggaatctgtcctctcctccctgtttcaacagctgccacactaattcagatccttctaaccaggctacacgcaccagctcttacatatccccctgccccctgcctctttcccttgcatccacccagcccaagg

SEQ ID NO: 866115 - DNA, 578 bp, Homo sapiens
tgtacatgcagtgatggatgtgtaccatgtgccggcagaagaagcatctcctttaacagccatggtttgctgcatatttattatgtattattatagtcttcattgtaagctagcccagagtgaagactgcagtgtgatttccattgtaatttcttattttcattcactctcagctttgggaaatgaggtgaattcgttcatgagggcattaaagaacccttttgttgtaccgtggctattcacctgtctttacctgacccatggagcataactagaaaggcgctaatatatatttctgaaaaattgggagacaaattcatgagtcaatgatattttrtcatggcttttgcattttattcactctctctctctctttttttcctgctgatagttctctctattagcatggaaatttgtagcacaacacagcatctcattgagtgctcactcaggatctggtctgcctgctagtgattggacaaaacaacaggttaaagaaaggagaacttaggaaggccaggctgaagtgggtgggggcttttctggccatttgtaacaaaactcttcttatttgatca

SEQ ID NO: 866116 - DNA, 583 bp, Homo sapiens
ttgcctgactctagaattgtaaataaaagccaattcagatcttcaagggaaatttgttttaattattgtcttttgattcccccaaattatgggtttattgccttgtaggacattaactaattttgcaactaacttagcaataattgctcagcattctttttttcccctctcccctacctggtgccctatcgttcttgtttttcctaattcttttgaactgagtttgtcatcctgctagttttcttaataatgagttatagaaaattcaatacatgctcaycatatatttgtataagaagaagaatgttttgaatattttgaaaattatgctttgacatactaccttcaagagtttttgtccaaagtgaatgagaacacatcagggaaacctcttagctcagtggctggcacagaatatgtttatttattttgctatttcctaagttaaagatgtttacacatggttcttgcccatgaagaagtaaagctctagctagaaaaacacaatgataacctgatggggttcagatcatcctaccccaaaatatggcaccctggcatttgagaaaacggtagaagtagg

SEQ ID NO: 866117 - DNA, 583 bp, Homo sapiens
ttgcctgactctagaattgtaaataaaagccaattcagatcttcaagggaaatttgttttaattattgtcttttgattcccccaaattatgggtttattgccttgtaggacattaactaattttgcaactaacttagcaataattgctcagcattctttttttcccctctcccctacctggtgccctatcgttcttgtttttcctaattcttttgaactgagtttgtcatcctgctagttttcttaataatgagttatagaaaattcaatacatgctcatcatatatttgtataagaagaagaatgttttgaatattttgaaaattatgctttgacatactaccttcaagagtttttgtccaaagtgaatgagaacacatcwgggaaacctcttagctcagtggctggcacagaatatgtttatttattttgctatttcctaagttaaagatgtttacacatggttcttgcccatgaagaagtaaagctctagctagaaaaacacaatgataacctgatggggttcagatcatcctaccccaaaatatggcaccctggcatttgagaaaacggtagaagtagg

SEQ ID NO: 866118 - DNA, 533 bp, Homo sapiens
ttttttgcaaaatgcttgtcttacagacccatcagtattaactatcataagttagtagtttcttattaatgcatcaacaatatcattattatcattatcaatgctattgagaacttactataggaaagagggtggctcatggccgccacccttatagcaaaagacagattaacaagatgaaagcacaacaaatttacctaaccaaatttttacatgacatgggaaactccagaaatgaagaaccaaagacccagggaaagctgtgtatttttatgaaaagtcatgtaggggagtgactggaggacaaaaggacgtgatctaatggtaataaactggggagaastctgcaaggtttgtttgcgcagatacttcttggcatctttgcaccttcctttctttcctctaggtgtttggcaggacatctgccacataagggtctaaaaacctaacttcagggaatagagaatttctctatggctgtgtttcaacagagaaaggtgagagagtcagagaatgacccttctgcttttgtg

SEQ ID NO: 866119 - DNA, 564 bp, Homo sapiens
taaaagattggtttatttacttccccaaacccaagtttttgtatttgagttttgttcttttctctctttctctctttttttttttttttttttttttttgagacggagtctcgctctgtcacccaggctggagaggctggagtgcagtggcacaatcttggctcactgcaacctctgcctcccgggttcaagcaattctctcgcctcagcctcctgagtagctgggattataggcactcgccaccacacccagcttatttttatatttttagtagagacagggtttcaccatgttggccaggctgctctcgaastcctgacctctgttgatccacccacctcggcctcccaaagtgctgggattacaggtgcagccaccgtgcccggcctcttttctcttttttaaggctttcctttcagttttgtgaacctaaaaaaaaaaaaaaaaaaaaaaaaaaagcgttgcctgcagtgtgtaaggctttccactagtgctttccaaggacgatatcactgtcatcatctgtgtttaactcactcatcctcagctaaaaagctcctctc

SEQ ID NO: 866120 - DNA, 580 bp, Homo sapiens
agtgccgtgttcttgggctaggtcagaaaggagaggtataaacattagatactagaaaagctcagatgaatgtttgcaatgtgattttaaagagagcagccctctccttttaagttagatcttagagggaaaaaaatatatcctgcactgcatacagatataactgaaaaagggccacagaagcaggtgaatatgcacsgcatgagggctgtgaaatggaggcctgcgattgtgttgcagcttacgttgtttagggtgagggagacgatggcaggctgactttagtgtgagctggaacatggatttttctagatcttttttccaagccttttccattagtgggatcagccctgtttccaacagttctggggaaatgggagagttatttgggctgcgtgctttattgactagagaccaaatggggccacagatgtcataatttccctattatcactttgctgagtgcttcctggcctcccttcattatcttgctccacattcacagttgtaagtgccttctttataggatccaaatggtgttgactccctttggcagtgcttgtgcttgtggggatccagt

SEQ ID NO: 866121 - DNA, 683 bp, Homo sapiens
ggcaaatataattggtgagtttctcatgttgccacgttcctcctccccgtgacttatttatgagtgttacatagtaatgaaaaagataggctgtaatgaactactgctaggcagaacattttccaatgttgctaagagtttcttttctttccaacaaaattgtttctttytctctccccataatcattagtctgtgttttgatgataaaacagaattagaaagttggctattcataattaatacctgtttactatacgaaatggtatttttgctagagaaaataatggtaggaaacagtacaaggagcgcttcggttctgtgactctcaattagcaaagccacattagttacctgcggtaggagtgtggtatcttaaatagctgtaatgcgatatgggacaccatgacagagtgtatctgaatgacatttcccgagatactccacacattgactgcttttcttgttttttactttttgaaataaataaaagatggaaacaaaattgtaataaattttctgaaacaataattatactagctgcaaatttgtaaagccaaaccaaacaaacagtacagttgtccaatttggcaatccccaatccaaaaaaggactgatattatcattttggaacattgactattcatggtttctaccttgaaaggagtccaaatatttttgatga

SEQ ID NO: 866122 - DNA, 683 bp, Homo sapiens
ggcaaatataattggtgagtttctcatgttgccacgttcctcctccccgtgacttatttatgagtgttacatagtaatgaaaaagataggctgtaatgaactactgctaggcagaacattttccaatgttgctaagagtttcttttctttccaacaaaattgtttctttttctctccccataatcattagtctgtgttttgatgataaaacagaattagaaagttggctattcataattaatacctgtttactatacgaaatggtatttttgctagagaaaataatggtaggaaacagtacaaggagcgcttcggttctgtgactctcaattagcaaagccacattagttacctgcggtaggagtgtggtatcttaaatagctgtaatgcgatatgggacaccatgacagagtgtatctgaatgacatttcccgagatactccacacattgactgcttttcttgttttttaytttttgaaataaataaaagatggaaacaaaattgtaataaattttctgaaacaataattatactagctgcaaatttgtaaagccaaaccaaacaaacagtacagttgtccaatttggcaatccccaatccaaaaaaggactgatattatcattttggaacattgactattcatggtttctaccttgaaaggagtccaaatatttttgatga

SEQ ID NO: 866123 - DNA, 572 bp, Homo sapiens
caaagaataaaggaagaagaattctattttagatattccacacaatagcaatctctgagagcgttagtcttcttgttgtgatgttttctgttacaaagtaaacaaaccaaccaacaaacatagaccctctccacgtttagtatttacaatacacttaataagtcaataaataaatcaaacatacaacaatgttttattcatttaataaattttactgaatagacactaagaggaatacatgtaaacaaataaaatatgtaataaaacatatttcctgccttcaagggacttgaagtctagtgagagaataggatatacattaatctcatgataatatatttcataaataattattcacaggtctttcagagcataatggygataagaggctggtgggaaggggcagataacattcaacaaacagttgtgtgtttgtatttgatgagtgaaggtgggtcagagatgagaaggatttcaggaggaggccagggagagatggaacaagcagagacatgaaagctggtctgaaacacagagtagcctgatgagacagaaatgtggcagtgtgtgga

SEQ ID NO: 866124 - DNA, 631 bp, Homo sapiens
atactgccaaaagcaatttacatatttaacgcaattcctgccaaaatgccaccataattcttcacagaaatagaaaaaacaattctaaaattcatatgaaaagaaaaaagcccacatagcaaaataaggctaagcaaaaagaacaaatctggaggcatcacattgcctgatttcaaactatactataaggccayagtcaccaaaacagcatggtactggtataaaaagaggcacatagaccaatggaatggaatagggaacccagaaataaactcaaatacttacagccaactgatctttgaaaaatcaaacaagaaataaaatggggaaaggacaccctactcaacaaatggagctgggataattggcaagccacatgtaggagaatgaaactggatcttcatctctcaccttatacaaaaatcatctcaagatggatcagggacttaaatctaagacctgaacctataaaaattctagaagataacattggaaaaaccctggtagacattgtcttaggcaaggatttcatgaccaagaacccaaaagcaaatgcaataataacaaaattaaatagctgggacttaactaaagagccttgcacagcaaaaggaagagtcagcagagtaaa

SEQ ID NO: 866125 - DNA, 464 bp, Homo sapiens
ttttgcaggctgtataggaagcacaatgctggcatctgctcagcttctggggaggcctcaggaaacttacaattacggtgaaaggtgaagaagtgagcacctcacatgactggagcaggaggaagggggagaggggsaggtgccacacacttttaaacaaccagatctttggagaactcactcacgatcacaagaacagcaccaatggggaaatccacccccaggatccaatcacctcccaccaggccctacctccaacactggggattacaattcaatatgagatttgagcagagatacagacccaaaccatatcagggctacagggcacttgctctttccttagtagttaccctttgcccagctccctggagtcttcctgtgcagatgcacagctttgtattcaaccaaagactcacggggctcccgatgcgaattcatagaacttcttcacagcactggtc

SEQ ID NO: 866126 - DNA, 625 bp, Homo sapiens
tctagaagaaatggataaattcgtggacacatacaccctcccaagactaaaccaggaagtagttgaatctctgaatagaacaataacaggttctgaaatttaggcagtaatagcctaccaaccaaaaaaagtccaggaccagaaagatttacagccgaattctaccacaggtacaaagaggagctggtaccattttttctgaaattattccaatcaatagaaaaacagggaatcctccctaactcattttatgaggccagcatcatcctgacaccaaagcctggyggagacaaaacaaaaaaagagaattttaggccaatatccctgataaacatcaatgtgaaaatcctcattaaaatactggcaaaccaaatcgagcagcacatcaaaaagcttatccaccacgagcaagtcttcttcatccctgggatgcaaggctggttcaacatatgcaaatcaataaacataatccatcacataaacagaaccaatgacaaaaaccacgattatctcaatagatgcagaaaaggcctttgacaaaattcaacagcctttcatgctaaaaactctcaataaaataggtattgatggaatgtatctcaaaataataagagccatttatgac

SEQ ID NO: 866127 - DNA, 625 bp, Homo sapiens
tctagaagaaatggataaattcgtggacacatacaccctcccaagactaaaccaggaagtagttgaatctctgaatagaacaataacaggttctgaaatttaggcagtaatagcctaccaaccaaaaaaagtccaggaccagaaagatttacagccgaattctaccacaggtacaaagaggagctggtaccattttttctgaaattattccaatcaatagaaaaacagggaatcctccctaactcattttatgaggccagcatcatcctgacaccaaagcctggtggagacaaaacaaaaaaagagaattttaggccaatatccctgataaacatcaatgtgaaaatcctcattaaaatactggcaaaccaaatcgagcagcacatcaaaaagcttatccaccacragcaagtcttcttcatccctgggatgcaaggctggttcaacatatgcaaatcaataaacataatccatcacataaacagaaccaatgacaaaaaccacgattatctcaatagatgcagaaaaggcctttgacaaaattcaacagcctttcatgctaaaaactctcaataaaataggtattgatggaatgtatctcaaaataataagagccatttatgac

SEQ ID NO: 866128 - DNA, 625 bp, Homo sapiens
tctagaagaaatggataaattcgtggacacatacaccctcccaagactaaaccaggaagtagttgaatctctgaatagaacaataacaggttctgaaatttaggcagtaatagcctaccaaccaaaaaaagtccaggaccagaaagatttacagccgaattctaccacaggtacaaagaggagctggtaccattttttctgaaattattccaatcaatagaaaaacagggaatcctccctaactcattttatgaggccagcatcatcctgacaccaaagcctggtggagacaaaacaaaaaaagagaattttaggccaatatccctgataaacatcaatgtgaaaatcctcattaaaatactggcaaaccaaatcgagcagcacatcaaaaagcttatccaccacgagcaagtcttcttcatccctgggatgcaaggctggttcaacatatgcaawtcaataaacataatccatcacataaacagaaccaatgacaaaaaccacgattatctcaatagatgcagaaaaggcctttgacaaaattcaacagcctttcatgctaaaaactctcaataaaataggtattgatggaatgtatctcaaaataataagagccatttatgac

SEQ ID NO: 866129 - DNA, 635 bp, Homo sapiens
acatattttaagtaaaacaaaattaggtcacagagcaatttgtgtaatgtgcttcatttcttataaaatgacaagaaaccttaatatatttttacagactctagctcctgtgttgtccaacatggtagctacaagacacatgtgaataattaaatttacattaactaaaactgagtaaatatttataaattataacatcactttttaccctataaatatatacaagtataatttgtcaatttacaactaaataaaaaataaatttgtaaagctaaatacaatagaaaatataacttctcagtctcatcagctacattttcagtgcttgataattgcatatgactaatggtaccttactgagtggtagggacagaacatttccaccgccatagaaatttcccagactgacatgccctagaaaattctagaagggtacamactgaattcatgaagatgaggagcgggagaagattattagcattttattttacattgcatatgattgacttgttaaaaatctgcattcttaatgatacaatttttaaatccaattaagtaaaagcaaaataagatattttgtttactttattcatttgggatgtgtttttagaagcctccacagtgctcattagaac

SEQ ID NO: 866130 - DNA, 626 bp, Homo sapiens
aagctctaaactgctttaagtgaaaaggtaaaagttcttgacttaaggaaagaaaacattttatgcggaagttgctaaggtctatgaaaagaaccaatcatgtatccatgaaattgtgaagaggagaaaagaaatttgtgatagtttctttgcggttgcactgctaactgcacaagttatagccacagtgyatgataagtgtttatataggccttggtactatcagtggcttcaggcaactatggcaggtcttggagtgtatcccctgaggataacgggagctgctgtatctttttggaaggacacagttcaactcataaggtgtgtcatgctttttttttttttaaattccaatctgacaatttaccttttatttaattatgatttgaccattcacaatgtgatgattgatatgattgagtttaaatctataattttgctgtgtgttttctacttattccatgtgtttttcccccaagtatctgcattcctttgaattaatctagtatcaactaattatttttatcttctttgttgtctggttatttacaactctttgttgtgttatttaatgagtgctctatggctcatctttcatttagtatagcttacttttaactagtaaa

SEQ ID NO: 866131 - DNA, 626 bp, Homo sapiens
aagctctaaactgctttaagtgaaaaggtaaaagttcttgacttaaggaaagaaaacattttatgcggaagttgctaaggtctatgaaaagaaccaatcatgtatccatgaaattgtgaagaggagaaaagaaatttgtgatagtttctttgcggttgcactgctaactgcacaagttatagccacagtgcatgataagtgtttatataggccttggtactatcagtggcttcaggcaactatggcaggtcttggagtrtatcccctgaggataacgggagctgctgtatctttttggaaggacacagttcaactcataaggtgtgtcatgctttttttttttttaaattccaatctgacaatttaccttttatttaattatgatttgaccattcacaatgtgatgattgatatgattgagtttaaatctataattttgctgtgtgttttctacttattccatgtgtttttcccccaagtatctgcattcctttgaattaatctagtatcaactaattatttttatcttctttgttgtctggttatttacaactctttgttgtgttatttaatgagtgctctatggctcatctttcatttagtatagcttacttttaactagtaaa

SEQ ID NO: 866132 - DNA, 623 bp, Homo sapiens
ctagtgggaaaggaatatgtaacaactaattctagtaataaaatgtgacagagttatgtacaaagtgttctgagagtccttctacagaacaatgagtactgcttgccagagaaggtgtgtatatttgcaggaagaggacaaagagattgaccaaagaggtggtatttgaaatagattttaaagaaatgagtaggagtggctagtaagtctaaaataggagacaacatatgcaccttaagtctagaataaattttaggatgtgtaagttctcagtactaccactgacttagttaataccttgttaaaatactttttaaaaatctatattctgaatctgtatcttttaggattayattaagttgtggtaattaatattgccactgattattccttctgttacagttttgatcaggaaatcagaaattctgtcattgataaaggaggcaaataaacattttagcttattggcaatcagaattattgcaaaaggttttcttttatccaccaaatggtagttgattctatgaaagaattgctgcccaggaactgtctgcacatctcagtaggaaatcagttatactgaagcaccgttaagagactctgtgcttccctagccaatctat

SEQ ID NO: 866133 - DNA, 575 bp, Homo sapiens
gtaattaaacaattagatattattataagcatttgggacttccctatcttttcttttaacttctaagagcagatgcgtactaatattatagatttggtataaatttgaattggatgtaatcataatattttgaaatgtttttatcaagtactagcatagttttctgttacatagaagacaataaatattagctgctgtcttcttcttctccctcctcctcttcctccttttgacccacctctttcttttcctctcctccttcccctttccttctcttcctcctttttttctttcttttgctttccttctctctctcytttactcaggaacaaagttatcagagtgtactgttatgtatgaaaattttttaaggcagaagacaagagaatgtgccttttttagaatcactgggaaaatatcttacagaatcaaactatttgaatctatatttttttttccagcaactggaacatattacctcatttcaaggttatacctgttataattgtattgggctttgtatgttatatttgagttgttttgtttaggtttgttctaatagtcccagctgctat

SEQ ID NO: 866134 - DNA, 549 bp, Homo sapiens
atgatttcatttacataaagtcccaaaacaggcaaaaataatccactgactgcctgagacccagttgctgaagatgccacatgcagggctctggttttcattccagctgaacccagactttcagtcatccccaccaaggtgccagacctgggaatgaagctatcttgctccttctagactagcccatctgccagctgaatggcactgagtgtcctttgtccatgtsttgtataatagacttctccagccaagcctgtccaagtttctaatagacaaaatcatggactgcaacaaaatggttgttgtattaagccactaggtcttgggtagtctattatgtaccaatgcataactggaacacctctcaatccaccagggttgaaacttccttgttttctcacactcatccttttccctctatacttcaattagagaagagctgcgtgtagttaagaacatgagcaatagagccagacatcctgggttcagagtcccacttagcagattgctagcaatatggcctcagctaattattcaagagctctaaat

SEQ ID NO: 866135 - DNA, 549 bp, Homo sapiens
atgatttcatttacataaagtcccaaaacaggcaaaaataatccactgactgcctgagacccagttgctgaagatgccacatgcagggctctggttttcattccagctgaacccagactttcagtcatccccaccaaggtgccagacctgggaatgaagctatcttgctccttctagactagcccatctgccagctgaatggcactgagtgtcctttgtccatgtcttgtataatagacttctccagccaagcctgtccaagtttctaatagacaaaatcayggactgcaacaaaatggttgttgtattaagccactaggtcttgggtagtctattatgtaccaatgcataactggaacacctctcaatccaccagggttgaaacttccttgttttctcacactcatccttttccctctatacttcaattagagaagagctgcgtgtagttaagaacatgagcaatagagccagacatcctgggttcagagtcccacttagcagattgctagcaatatggcctcagctaattattcaagagctctaaat

SEQ ID NO: 866136 - DNA, 569 bp, Homo sapiens
ctttggttccttaggcctcatcaagcaacccccttgtgagcctcccccttctgaatctccttccctattttcctgatactctccccaccacacacccttattcctctcctgcgcttagggaactctggcacttggaatggtgtagccaaactgtaatcatgccttcataacattgtattgacaggcatctgtgacaatttcactctcccacctgattcttagagtaatgtttaaaaatttttggaatatccactcatgtttctcttgaatctcaaccaatccaaaaggttcagctcagtgtgattttgtgtgtgacatttccartagttacacaccttagaccttggtccagcatgaggggataattaataagtacactttttctgcgggtgcttttggcaatactactcttaccactaatctctgagcataattgactacaaaaaaaatcatgtgctatttcataaaattccaagcatgtgcagacaccaggtagtatccaccaactttgggccaatactgcatacttggcatgtcataatgatttttttttaccccaggaagccatg

SEQ ID NO: 866137 - DNA, 717 bp, Homo sapiens
ttttagccatttatatgtctgcttttgagaaatgtctatccagatcttttgcccactttttagttggattatttatatttttgctgttaaattgtgtgaattccttgtaaattttggaaattagacccttgttggatgaatagtttgcaaatagttttttctattctacaggttgtctcttcaatctattgattgtttcctttgcagtgaagaagtttttagcttaatatagtcccatttgtctatttttgttgttgttgcctgtgttttggaggttttagccataaaatctttgcctagactgatgtcctggagtgtttccctatgttttcttctagtagttttatagtttctgctyttaggtttaactttttaacccattttgagttaatttttgtatagggtgagagacaggggtccagctttatttttctgcatatggttaccgagttcccagcaccatttactgaagatggtgtccttttcccaatgtgtttagtgtctttgtaaaaaccagttggctataaatacgtggatttacttcttggctctctctattctgttccagtggtctatgtgtctgtttttatatcaattccatgctgttttggctactgtagttttgtagtgtattttaaagttaggtagtgtaatgcctccagctttgtgctttttgcttaagtcctgactgctttggctattcagggtcttttgtgg

SEQ ID NO: 866138 - DNA, 717 bp, Homo sapiens
ttttagccatttatatgtctgcttttgagaaatgtctatccagatcttttgcccactttttagttggattatttatatttttgctgttaaattgtgtgaattccttgtaaattttggaaattagacccttgttggatgaatagtttgcaaatagttttttctattctacaggttgtctcttcaatctattgattgtttcctttgcagtgaagaagtttttagcttaatatagtcccatttgtctatttttgttgttgttgcctgtgttttggaggttttagccataaaatctttgcctagactgatgtcctggagtgtttccctatgttttcttctagtagttttatagtttctgctcttaggtttaactttttaacccattttgagttaatttttgtatagggtgagagacaggggtccagctttatttttctgcatatggttaccgagttcccagcaccatttactgaagatggtgtccttttcccaatgtgtttagtgtctttgtaaaaaccagttggctataaatacgtgratttacttcttggctctctctattctgttccagtggtctatgtgtctgtttttatatcaattccatgctgttttggctactgtagttttgtagtgtattttaaagttaggtagtgtaatgcctccagctttgtgctttttgcttaagtcctgactgctttggctattcagggtcttttgtgg

SEQ ID NO: 866139 - DNA, 731 bp, Homo sapiens
aactgtcatggtgctggtgggagtgtagcagtgaggacacccagaggccactctcatcaccatcttggttttggtgagttttggccggcttctttactgcaacttgtttttatcaggaaggtctttatgacctgtgtcttgtgccgacctcctatctcattctgtgacttagaatgcctaaccatctgagaatgcagcccagtaggtctcagcctcattttactcagcccctattcaagatggagttgctcttgttcaagtgcttctgacagttccttaaaactgtcygatgttatctgattttatgtgcatcatcctaaaatatgatattccagtgaaagccttgctaatataagtaatatttcaaattgcattctgttataaggacaagagattcttactgaacatatgtaaatacatcaccatgaaaataagaatattcaataaagatttccgaattctggaaggatcgggtggggagaaaaagtgaatgtttctggcggggcatggtggctcacatctgtaatcccagcactttgggaggctgaaactggaggatcacttcactggaggatcacttcagcctgggcaacacagtgaaactctcatctcttaaaaaaaaaaaaaatagctgggcatggtgatgcacatttatagtcccagctacttgggaagctgaggttgggggattgcttgagcccaggagttcaaggaagcagtgagctgtgatc

SEQ ID NO: 866140 - DNA, 597 bp, Homo sapiens
acaacaacaaaagtgaacccaaatgaaaactatggactctgggtgattatgtgtcaatgtagatttatcagttgtaaaaaatgtatcactctagtgggggatgctgataatgggggaagctacacatgtgtgaaaacagggtatataggaaacctgtgtgctcgattttgctgtgaactcaaaactactctggaaataaagtgtatttttaaaaaacattattgtattattatatattagcagaaacctgaggaatatgtgtaagtgtatttttggggtagtaaaccaaagaagatggaatatgacactcttatagtctcacttggggaagttgcttatatggaatgcctaaatgacgtggttacacttaaagattcyggatgtaaattttttgtacaaagaattatttgatttgtttgtttaaacttgaaatcaaccatggcctatgtttactgatgctcagatgtcaggacttttttgacataacataaaggaaaggaatcaaagacttaaggagataggaattttggagaagatttatcatgttacactgcacacatacgcagcaccaagtaacttcccaaaagtcccagagaa

SEQ ID NO: 866141 - DNA, 597 bp, Homo sapiens
acaacaacaaaagtgaacccaaatgaaaactatggactctgggtgattatgtgtcaatgtagatttatcagttgtaaaaaatgtatcactctagtgggggatgctgataatgggggaagctacacatgtgtgaaaacagggtatataggaaacctgtgtgctcgattttgctgtgaactcaaaactactctggaaataaagtgtatttttaaaaaacattattgtattattatatattagcagaaacctgaggaatatgtgtaagtgtatttttggggtagtaaaccaaagaagatggaatatgacactcttatagtctcacttggggaagttgcttatatggaatgcctaaatgacgtggttacacttaaagattctggatgtaaattttttgtacaaagaattatttgatttgttkgtttaaacttgaaatcaaccatggcctatgtttactgatgctcagatgtcaggacttttttgacataacataaaggaaaggaatcaaagacttaaggagataggaattttggagaagatttatcatgttacactgcacacatacgcagcaccaagtaacttcccaaaagtcccagagaa

SEQ ID NO: 866142 - DNA, 578 bp, Homo sapiens
ttagacattttgttgagggcattaataaatttaaaaaatacatgagcataatctacaattatataaaatttaattccacaaaaatatcgattttgtgcaaactattgctattaggtgagccatcgttcactagtagtgtgactttagaatcattacttaatatccttattcttggtttcatcatctgggaaatgggtacagtaatagtgtacccaatagtgatcttaaagggttgtaakatgtaaggaagaagatgcacaataatacttagcaccatgcctgacacatggtatacatccaatccatgaaaagtgttagcagaggattagtgttcccattaccttaaaaacaaaaatattaattttattgtggaaactgctgtaccacccagatggtggtccctaaaaactgaatgatgtgataagaaatctctggtaactcccacttctctattcccacaaaactatgatatcttctaagacactcctcactcccctagaacacccaaatagtttcctaattattgtccttgtcttcaagtttcctcctttctacagcatagtcttttgattaagaaa

SEQ ID NO: 866143 - DNA, 630 bp, Homo sapiens
taataactatcaattaattgagtggttactatatgtcagacaatgttctaagtgctttattatgcatctcatacctacaacaatactacaagctaagtactattagcctccctttacaaaaggagaaactgaggtacagataagtacgcatgttcacatatgtggtagaggcaggatttggacttagtggcctgacttcaaattccatgcttcaaccaccattcctagagccctgttgttcccagtataggctgccatttttgcattctatagaatcctattttttgttagtgtttactttataaacaattttacctaataaaaactgtccatttttttcataattccttctattgctttaagtctctcacaaccatccatctctgttatatcttggaattactctctttctgctttaaaaatatttaagttagacctctatttcaaaataagacataagagtaaacrtaaaattttttctttattatattattataaatataatattttaatgttacatatttattataatagtttttaaagtttcctataatctgattgtattatatatgtactatcataaattgataagaatctctattatattgcactaaacacttaaatactttc

SEQ ID NO: 866144 - DNA, 585 bp, Homo sapiens
ttggaagaaacaatcttctagaaactcatattaaacaaagttaaagagttgttttaatgtggaacttctccaacctgtaacattctgatgggctttataattccccatacagaaaatatagtttgcaccattttcttaaacttgttaaataagaaaacacttttgtaagtttaaaacaggaaaactaatatgttgaggaaatactatatattccatgcaatagagtgagaaaagctgatttcagtcacacatttgtttctttcttatgggcaaagtacaccattactttgtggttagtgcttgctgttaygtccaaggcatctatattattatgatgaccagatattcatggtttggtgccaacttcaattatgtggtcccattgtccctctgagcatgttagaacttttcagagtttgctgcccaatttttcattcagaaaatatattctctgcatatatggataaataatttggtaaatcaaaagaacataatcttccatagttaagaagttgtttctgccatttgttaaaagtaaccagataactaagaagcttacctgagagaaaataaggcacaacaggt

SEQ ID NO: 866145 - DNA, 626 bp, Homo sapiens
tcaactcctcctgcaaccacattgttgggtatggaaattctatacatttggttaaatgatttgcataatggagcagtatgcaaatactggaactcaggcccagagcttaggtctcttgcatttcccacacacttctctgaactcccgtcaataccacataggatactgcttagtcatacaatgctctgttgtttgggccaccaggcagattggaagctccatatgtgacagagaacattttcatatttaccatgtatctccaamatgccttttacagaactggccatgcttgcatgcatttattcacccatttctttaactaatgtgtatcaagagcctattatgtgccagaatccattatatatatactattctcacatattctcatacacacacacacacacacacacacacataaattatacaaggtccctgctctgtgaaaggtctctgcttaaatttgaatgagatgagacggtaacaagaaaaatatcagaggtgacaaatatgatttaaaaaactaaaataggataatataatacaaaggaacaaaatggctatattgaattgggtggtcagagaatacctctctacggtgatatctagacagagatctgaatgacaaa

SEQ ID NO: 866146 - DNA, 704 bp, Homo sapiens
aagcagcaaggccctgggcctagcccatgaaacaattttttccacctaggcctcctggcttatgatgggaggggctgccgtgaaggtctctgacatgccctggagacatttttcccattgtcttggtgattaacatttggatacttgttacttatgaaaatttctgcagccagcttgaatttctcctcagaaaatgggtttttcttttctatcacattgtcaggctgcaaattttctgaacttttatgctctgcttcccttttaaacataagttccaattccaaactatatatttgtttatgcataaaatctaatgattttaagagcacacatmttggatgctttgctgattagaaatttcttctgccagataccctaaataacctcttacaagttcaaagttccacagatctctagggcaaggcaaaatgccaccagtctctttactaaagcatagcaagaatcacctttgctccggttcccaataaattcctcatctccatctgagaccacctcagcctggacttcattgtccatatcactaccagcattttggccaaaaccattcaacaagtctctaaaaagccccaaacttccccacatcttcctgtcttctttggagccctccaaactgttcccacctctgcctgttatccagttccaaagtcacttccacatttttgggtatcttaatagcagtaccc

SEQ ID NO: 866147 - DNA, 672 bp, Homo sapiens
tttcactagtaaacttttcttcactggtcaaaataattaaattaatttattaatccatcagcaattttttcaggaacttaatgtggctcttatgacctatttaagtggttaaccaaaatattgtatttccaaaatggtaaataattatctagtccatctaaatgtttatgtatggatgactactggccttttcttctttattgtcccataaatgttttccaaatctttactttggaataggtacacagcttattacagaaaataattttcctatagacaagcaataggaaagatagctcattagttaacattttaccttaaaatttttatttttagactacccataaattcatcgcaaataactataaattgtattaacttatttaaataaagctaatgagtaataacacttaaaagaagcataaacattttgcttatcatattgaagatagcaggtaactgtaagagaggattaatttcaagatcaattataagtctacattttcagcagcttagcttstagaaattcacaagtcctatacctgataaaagattaccaatcccacccaaataagttgttgtctgaagtattactgttggaatgcctgccagccaaactgggatattcctttattccccaatcagcctattgttccttcgtttcagattttc

SEQ ID NO: 866148 - DNA, 624 bp, Homo sapiens
aactgaaatcaaaaattgggagtcaacctcgattctttcctctcctttatttcctaccggtcgtgaaatctttgctaatttaaactcctggatatctttggaattcatatcctcctttccctcctcattgtcatatctttcttcaaagttgtgcctgtattattgcaacattttaaaatttattttcctgaacttctgccatacttcttaaatcaactctatatgtgatcctcagagtgatacttctaagacacaaatttgatcaaccatggtaggctaaataatggctcccccaaagatatttacatcctaccctgtgaatatgytaccttacatggaaaaaggggctttaaaaatatgattgagttgagaatcttgagatggaaagttatccagtattatctgagtgggcccaatgtcctcacaagggtccttataaagtgagaaataagaggatcaaagtaagtagtaggtgatgtgacagcagaagcaagaggttggagtgatttaaggaagtgggagatcaggaagtgttaagcacaaagttaacttatacctttaaaaaaaaaggaaaattaaagacaacaagcagatatatacattatataaataaacacaagaact

SEQ ID NO: 866149 - DNA, 654 bp, Homo sapiens
taccataagtatttccatgtgcattaggtgtcaagaacttcacacacatcatttcattcccttatcatggcactcagtctggtgggtattactgtatctgtttcacaataggaaacccagtatctgagatgttcagtgcctttcccagttacccagttggtaagtgggaaagtcaggacatgaattttcagtgattttattaaaaaggcaggatgatacagtgatttaaaggcctaattctagacccaggttgcttagattcaagtcccagctctgccatactctgttagtataactttggccaagtcactatgcctcagtttcctcatctgtaaaatggggatcataatagtatctaccttatggtactattattttatttattgttattgtgaggatgaaatttgttactataaataaaatgcactgcctgacatatgcactayataagcattgcaattattataattgattccaaactcattgatgtctttatttcagtcttcctctccaccgagtgtgtgtgtgtgtgtgtgtgtgtgtgtgtgtgtgtgtgtgtgttgaaacttaacatctggaatggaggtggaaggcaagactgagagattggagatggcgtcagagagctcctagcaggtatgtcaaggctctgat

SEQ ID NO: 866150 - DNA, 563 bp, Homo sapiens
ctcatatctggaagccatttgtattacttatttttaaggtatttatactttcagtacattttttctgttgggggatcctgctttatttaatgatttctacaagatctttttatagtaataaaattattctttggttattttgatggcaaatgctttcccagtaagttgtttgccaattaatttatttactttaaagtattttctaatagaatcttttgaagttgtctcataaaaattcagaaagtattattttatactttcctatatcaaactgatgtatttaaaaaacacatcactcttatttattatcttttggctaaaattrtacatttcttaaaaggtacacagaaatttaagttttgtcagaattccagctctttgaggaaggaggtctgactatttactccccactgtgtcccaaaaccaaacctacagctgttcctagcacacagtaggtatactatttagttcaggtatactattttactaataagttcagtattattttggaatttgtatgaaagtagcaaatcagactcccaaatactttccaggaataaaag

SEQ ID NO: 866151 - DNA, 570 bp, Homo sapiens
gacaccagagtttcaatgggggctaccaccaggaggagctcctgagagcctctgccacacaagctgatggtaggagcccaggtgacaaaagagactgagggcacctcccaaggactactgcagagggtactgtcagaccccatgctgagggagaggggcagtggctgtgcctggccaggctagtgaccagagattatgtgtgttggttcttttctttcagagcatttatckcaattgcaatcagttaattacattattatatggttaaagtctgtcttctgagctggatcataacccccacagtccacaacggtttctattatctttacatttcccccccaacaccttgaatagtatccagcccacagtaactgctcaataagaagctgtttagttgagaaaaggaatgtcaactaccttttctaacaccttcaggatgaagaatgcacaaggaatgaaggttagaaagaggaaatagagattgctagtcttccatttcattcttccttgagcaatgtgtctcaaaatacgatgaagttgaaagctctaaaatgggcggaaatttaagta

SEQ ID NO: 866152 - DNA, 570 bp, Homo sapiens
gacaccagagtttcaatgggggctaccaccaggaggagctcctgagagcctctgccacacaagctgatggtaggagcccaggtgacaaaagagactgagggcacctcccaaggactactgcagagggtactgtcagaccccatgctgagggagaggggcagtggctgtgcctggccaggctagtgaccagagattatgtgtgttggttcttttctttcagagcatttatcgcaattgcaatcagttaattacattattatatggttaaagtctgtcttctgagctggatcataacccccacagtccacaacggtttctattatctttacwtttcccccccaacaccttgaatagtatccagcccacagtaactgctcaataagaagctgtttagttgagaaaaggaatgtcaactaccttttctaacaccttcaggatgaagaatgcacaaggaatgaaggttagaaagaggaaatagagattgctagtcttccatttcattcttccttgagcaatgtgtctcaaaatacgatgaagttgaaagctctaaaatgggcggaaatttaagta

SEQ ID NO: 866153 - DNA, 617 bp, Homo sapiens
agtatatgtgtttagcattttttcaaaaagtgttttgtgacacacaatattggctctttttccctgcacctgaaggcctaaattatagaacattagtttgctgggtctctattagttcaccaatggatgctgatgtctcaatttttcaaaagctttccagtgacttatgcaaagccctcaggaaamctgagtagcaaataggattagcatatttgtaaagacccagaagtaatgcattaacatgctgaggtgtcataagccccaatgaatatgttgataattagtgcttcttagagagcagctagatcaccttcctccatgctaatgatgtgcaaataatccttggtgaatctgaacatctgctagtgggtgtccccaagcaggatgcaatgacaggagacagatttatcaacattgctgttggattccaccaaaaacatactccagcccataaaaccttctatcaggcataatcatattcctagccataattttgctattgtttgcaatcctattttttttctatctatactaattaaagtcttggtgcacccaaagtagtttgtataaattacatgaactcataaaaatttcagtgttcatttgacatgaatcgt

SEQ ID NO: 866154 - DNA, 617 bp, Homo sapiens
agtatatgtgtttagcattttttcaaaaagtgttttgtgacacacaatattggctctttttccctgcacctgaaggcctaaattatagaacattagtttgctgggtctctattagttcaccaatggatgctgatgtctcaatttttcaaaagctttccagtgacttatgcaaagccctcaggaaaactgagtagcaaataggattagcatatttgtaaagacccagaagtaatgcattaacatgctgaggtgtcataagccccartgaatatgttgataattagtgcttcttagagagcagctagatcaccttcctccatgctaatgatgtgcaaataatccttggtgaatctgaacatctgctagtgggtgtccccaagcaggatgcaatgacaggagacagatttatcaacattgctgttggattccaccaaaaacatactccagcccataaaaccttctatcaggcataatcatattcctagccataattttgctattgtttgcaatcctattttttttctatctatactaattaaagtcttggtgcacccaaagtagtttgtataaattacatgaactcataaaaatttcagtgttcatttgacatgaatcgt

SEQ ID NO: 866155 - DNA, 617 bp, Homo sapiens
agtatatgtgtttagcattttttcaaaaagtgttttgtgacacacaatattggctctttttccctgcacctgaaggcctaaattatagaacattagtttgctgggtctctattagttcaccaatggatgctgatgtctcaatttttcaaaagctttccagtgacttatgcaaagccctcaggaaaactgagtagcaaataggattagcatatttgtaaagacccagaagtaatgcattaacatgctgaggtgtcataagccccaatgaatatgttgataattagtgcttcttagagagcagctagatcaccttcctccatgctaatgatgtgcaaataatccttggtgaatctgaacatctgctagtgggtgtccccaagcaggatgcaatgacaggagacagatttatcaacattgctgttggattccaccaaaaacatactccagcccataaaaccttctatcaggcataatcatattcctagccataattttgctattgtttgcaatcctattttttttctatctayactaattaaagtcttggtgcacccaaagtagtttgtataaattacatgaactcataaaaatttcagtgttcatttgacatgaatcgt

SEQ ID NO: 866156 - DNA, 692 bp, Homo sapiens
gcttgctcaaaaggactagatgccaccatggggaccccgctcaccagtggtggcctcgtcttttatagatggattcctcaaaatcacacttgccgcccttgtctccaagatttggatcacggtctagatgctcccaccctttctcctcaaaactgccacaccacagtctcaccaaccgccagggtgctctgccctttcgtgaccaaatccctgaagctaggtgagttttgcaagccctatgcacggcagtcccactccctgatgatcctaagatgtaagacctcacagaatttacaytggagcctaagtaacagtgcaccatgccaaagaagacagagttaaactaaacacaatccagggattctgacttactgacttcttttgcaacttgcttcctctctcagttcttctagaaatggaaaatttttcagatcaagaaaaactgaacagaacttgccagaatgacgaagctaatgacagtgattcattgatttattcaacaaaaatcacaataataataataggcatttacagagcattgtttctcttccaagcattttgtatgcattttatttaatcttcacaacaatcttatcaatgaggcttggagactataagtaacttccctaaagtttcacagctaaagagatctaagtctaactgaatcccaaacaagtacagcacgtgcttgc

SEQ ID NO: 866157 - DNA, 692 bp, Homo sapiens
gcttgctcaaaaggactagatgccaccatggggaccccgctcaccagtggtggcctcgtcttttatagatggattcctcaaaatcacacttgccgcccttgtctccaagatttggatcacggtctagatgctcccaccctttctcctcaaaactgccacaccacagtctcaccaaccgccagggtgctctgccctttcgtgaccaaatccctgaagctaggtgagttttgcaagccctatgcacggcagtcccactccctgatgatcctaagatgtaagacctcacagaatttacattggagcctaagtaacagtgcaccatgccaaagaagacagagttaaactaaacacaatccagggattctgacttactgacttcttttgcaacttgcttcctctctcagttcttctagaaatggaaaatttttcagatcaagaaaaactgaacagaacttgccagaatgacgaagctaatgacagtgattcattgatttattcaacaaaaatcacaataataataataggcatttacagagcattgtytctcttccaagcattttgtatgcattttatttaatcttcacaacaatcttatcaatgaggcttggagactataagtaacttccctaaagtttcacagctaaagagatctaagtctaactgaatcccaaacaagtacagcacgtgcttgc

SEQ ID NO: 866158 - DNA, 637 bp, Homo sapiens
atatctcttcatgtctcacagtctggccaaactgagatcaacctcagagagagggaatgttttatccagccctagattaaaatttatctcctggggcttcattacacatggtatgattaatcactgctcaagatgatcgatggtgggaatttccaatcccttccccagaagtatggtctagaactgtggtccaggcaagacagcttcacagtagcccttcatstgtttatacatcaaagtctgcatcaatgaatcttaattcaaacaagagtggagacaccagtagcagatcatattagctgtagttgtgccaaaattaaccaaatttacttccaatcttgcttcatcaaagattcaaaagttttagcatcagatctcacccactgtcacttagttacccaataatcaaaataatgacccctgattattgtcaatgactcaaatgatcctttgtgtgatctatttcacataatcctactgttgctgttggaggtttatgtgaaattgttgagaaggaagccccagatgtctaaccctctctatccttgacattcatgatcttgccaccactacacgttccacagctggtagaactaatctcactatatccattatcttgtttatgtcggtaatcata

SEQ ID NO: 866159 - DNA, 637 bp, Homo sapiens
atatctcttcatgtctcacagtctggccaaactgagatcaacctcagagagagggaatgttttatccagccctagattaaaatttatctcctggggcttcattacacatggtatgattaatcactgctcaagatgatcgatggtgggaatttccaatcccttccccagaagtatggtctagaactgtggtccaggcaagacagcttcacagtagcccttcatctgtttatacatcaaagtctgcatcaatgaatcttaattcaaacaagagtggagacaccagtagcagatcatattagctgtagttgtgccaaaattaaccaaatttacttccaatcttgcttcatcaaagattcaaaagttttagcatcagatctcacccactgtcacttagttacccaataatcaaaataatgacccctgattattgtcaatgactcaaatgatcctttgtgtgatctatttcacataatcctactgttgctgttggaggkttatgtgaaattgttgagaaggaagccccagatgtctaaccctctctatccttgacattcatgatcttgccaccactacacgttccacagctggtagaactaatctcactatatccattatcttgtttatgtcggtaatcata

SEQ ID NO: 866160 - DNA, 542 bp, Homo sapiens
tgagggtggaaagagcatggtacttttggggagctgatagtcattgtatgtggaaggcatgttgggggtgaggcctgaggaggtgaatgtggacttgggatgaggctataggactggcagggggccaggctgtggccccctgggtttgccactttagcacatggggctcattctgtgggtaactgtaaggcatgggaatagttgcagtagttaaataatgcagccaagtgtgtgtttcagaaaatgagtctcaccaattcagaggayggaccagagggtatgtgagagtacagtggggagactcatttgttcacttactggtagcaattttttttttttttttttttttttttttttttttttgtagacagggtcttgctgtgtcacccaggctggagtacagtgatgcccaagccatcctcccacctcagtctcccaagtagctgggactacaggtgtgtggcacaacatccagctaaccttttgtattttttgtagagcttgggtcttactatgttgcccaggctggtcttgaactcttg

SEQ ID NO: 866161 - DNA, 649 bp, Homo sapiens
cttagccttctccctgtggttatcttgtaaggctttgaagtgtaacttttgttttgttttgcttgctttccccctgcatagaaatttcccttaagggaagggtgggtctaaactacctttaaaatgagtttycactccctgaacaaggcttgtaaaagcttgagagaaaatgccaggggaaagcatggaaactttctggggataaactatgggtctccacctttgcacttaatcaggggacagccactaaccccagtagctgcatgctttctgccaccttcatctacctgagcaaaacttcaaggacatgtttatgctgaatctccagagagagcaatagaagcccagcttgagggaaatgactggaccttgattacttaggataaaaagagatcaatttatggtaggactatctatttatgtctgcacattcatcaggtttgcctaggaaaggagtctcagaaaatgtgttggaattgggcacttctgatgtctatcctattccttgtcttggttgataacactttctccagtccccagatctcattttaggaaatgagacttgttatcaggcatcctagagcctccatatttttctgagtctttctgtgtctgccggcaccattgacgttgttactattgctggttt

SEQ ID NO: 866162 - DNA, 649 bp, Homo sapiens
cttagccttctccctgtggttatcttgtaaggctttgaagtgtaacttttgttttgttttgcttgctttccccctgcatagaaatttcccttaagggaagggtgggtctaaactacctttaaaatgagtttccactccctgaacaaggcttgtaaaagcttgagagaaaatgccaggggaaagcatggaaactttctggggataaactatgggtctccacctttgcacttaatcaggggacagccactaaccccagtagctgcatgctttctgccaccttcatctacctgagcaaaacttcaaggacatgtttatgctgaatctccagagagagcaakagaagcccagcttgagggaaatgactggaccttgattacttaggataaaaagagatcaatttatggtaggactatctatttatgtctgcacattcatcaggtttgcctaggaaaggagtctcagaaaatgtgttggaattgggcacttctgatgtctatcctattccttgtcttggttgataacactttctccagtccccagatctcattttaggaaatgagacttgttatcaggcatcctagagcctccatatttttctgagtctttctgtgtctgccggcaccattgacgttgttactattgctggttt

SEQ ID NO: 866163 - DNA, 649 bp, Homo sapiens
cttagccttctccctgtggttatcttgtaaggctttgaagtgtaacttttgttttgttttgcttgctttccccctgcatagaaatttcccttaagggaagggtgggtctaaactacctttaaaatgagtttccactccctgaacaaggcttgtaaaagcttgagagaaaatgccaggggaaagcatggaaactttctggggataaactatgggtctccacctttgcacttaatcaggggacagccactaaccccagtagctgcatgctttctgccaccttcatctacctgagcaaaacttcaaggacatgtttatgctgaatctccagagagagcaatagaagcccagcttgagggaaatgactggaccttgattacttaggataaaaagagatcaatttatggtaggactatctatttatgtctgcacattcatcaggtttgcctaggaaaggagtctsagaaaatgtgttggaattgggcacttctgatgtctatcctattccttgtcttggttgataacactttctccagtccccagatctcattttaggaaatgagacttgttatcaggcatcctagagcctccatatttttctgagtctttctgtgtctgccggcaccattgacgttgttactattgctggttt

SEQ ID NO: 866164 - DNA, 598 bp, Homo sapiens
tatgggtctccacctttgcacttaatcaggggacagccactaaccccagtagctgcatgctttctgccaccttcatctacctgagcaaaacttcaaggacatgtttatgctgaatctccagagagagcaatagaagcccagcttgagggaaatgactggaccttgattacttaggataaaaagagatcaatttatggtaggactatctatttatgtctgcacattcatcaggtttgcctaggaaaggagtctcagaaaatgtgttggaattgggcacttctgatgtctatcctattccttgtcttggttgataacactttctccagtccccagatctcattttaggaamtgagacttgttatcaggcatcctagagcctccatatttttctgagtctttctgtgtctgccggcaccattgacgttgttactattgctggttttcctcttatattttctgtgaaaatgcttaggagcttttaagaactggtggccaccagagaggttaaacattataaacaatataaagcaaaggaatcttagtgtgctgtctttggggtgtgtcattgctgtacagcttctctttttttcctaaaaaa

SEQ ID NO: 866165 - DNA, 619 bp, Homo sapiens
ctattgttgaagtgtttctttttttgaataaaattttaaatagtattactattaccctaattatactatttatttcacagttaaattctttgcatctttttttttcttttgagaaaaagctaatgtgatatatatcttcataactgctattgcctttttaaaaatctctttttaaatgatgaattttacaacatccctgaaagcttaggtttgaggtgtgtgcctcttactaacatgaggtgtcagtgctgatctctaacgttgcttttgtgctacttgaattatcagttggcaaagcaaattcttgtccatgcagggtagggctrcacgtattttcagcaaggttttaaatttttttctctgttgagttaaaattatgtaaaaagaaaaatcaactgatgttaataatgctgacacctattaaataattactttggttttgtgatcattccatttaactgttgcaattgccccaattcatagttgagaaaactgtgactttaaaaagtcatgtgatgcaggtattgattagataaaccagtacggctccttgcagtgctgggtaacttgagcgtgttggctggatgatctctttgtgatgatgtttgtgttaacggcc

SEQ ID NO: 866166 - DNA, 619 bp, Homo sapiens
ctattgttgaagtgtttctttttttgaataaaattttaaatagtattactattaccctaattatactatttatttcacagttaaattctttgcatctttttttttcttttgagaaaaagctaatgtgatatatatcttcataactgctattgcctttttaaaaatctctttttaaatgatgaattttacaacatccctgaaagcttaggtttgaggtgtgtgcctcttactaacatgaggtgtcagtgctgatctctaacgttgcttttgtgctacttgaattatcagttggcaaagcaaattcttgtccatgcagggtagggctacacgtattttcagcaaggttttaaatttttttctctgttgagttaaaattatgtaaaaagaaaaatcaactgatgttaataatgctgacacctattaaataattactttggttttgtgatcattccatttaactgttgcaattgccccaattcatagttgagaaaactgtgactttaaaaagtcatgtgatgcaggtattgattagataaaccagtacggctccttgcagtgctgggtaacttgagcrtgttggctggatgatctctttgtgatgatgtttgtgttaacggcc

SEQ ID NO: 866167 - DNA, 602 bp, Homo sapiens
cagaaaactttcctaattaggacatgtagtctctgaaactttgctagtatagtgaaattcaactcaataaataagctttctgaactcctactaagcacaaagtattatgttaggtttctagtgagttgcaaagaagaaaagacattaaagttattgaccttgacaagctcacgatgtctttcatgagatctccagttctggttagtctgtcatttaattattcattcaacaaatgcatattgaacacctactatgggccagtccatgcacttggcactgggatgcactgagctagtaggagaaggttcttgcactcatragtttccatcccagtggagaagaaagacaaaaagaggtagtgacccataaaataacaagataattacagattgtggtaatggctgggataaaataaacagggtgacattttattatgacagaaatgcattatggcctggtttgatgtctttataacagttacatctattttttaagtgaattaaaagcagccacaggaaaggcaaagggcagaaggcgtttttgcttatcacctgcatctttgtttgctttcattagaataatgatgttccattagtcaatga

SEQ ID NO: 866168 - DNA, 639 bp, Homo sapiens
aatggctttttcatacctccgtggaaacttaaacaaaaatgctagctaaaacatttaattaagcagacttgaatctcaaggtaaccagagaagtgtttgactctctagacagacttgcagagaaatctccttaccaagttcaggcccaaaggtgaggtcagtatgagggggggctcagggatgaaatgttagtaggaaaatttccaaatcatatctatttgggtgtttctttaaaatgatatgcttaatccttttattgtccttgctgttgattaaaagtttgatttgaattaaaaaaataaaaggtgaaaacatgtcatttgggacttattttcagattaaaatcaggatagccaatcaataaatcttgaaatgattttctcagactgtgaacawtgtagacaagacatcgctgctctcctgcttgtgtaattttgcagtgtagacaaataacctcaaagagggataacgtgaatttggttaagaactagttcaagatcagacagacatgtgagggaatcccaactctatttgctcactgcttgtgtaatcttaaaccagctacttaaacccctctaaatttcagtttcctcatctgtaaaatgaggtaagataatagtacattcttcttagagtttg

SEQ ID NO: 866169 - DNA, 630 bp, Homo sapiens
ccctagattaaataatatgtttctattagttttttaaaattataatattaacaataactagcacttattgagcactcccttatgtgccagcaaatgtgacttacatgtatctgcttatttttccttacatgaaaccctctgaagtagatacaatgggtatcatccatgtttctcagacaaggaaactaaaacactggaatgttaaatcagtatttcaagactcatctaggaagtgccagatccaggactgggacctgggccatctgattttcagcacttgatctcaaactttccactgtatacctcctcaaggacatttttgtccatgtgacaagtagaaaaattccacagctagtttactgaccagccaagtcagagcttccctgacaccagtgtaatcataacacatgggrtttgaaactgtggtcaagaattttcagactagctctccaataagagaaacttcaaatatcaaaccccagggcagctcgttttcatcagggtcttttaaatgactgattcttggaccagtccattgatacattcattcaacaaatatttatcgggcccctcctgtgtgctagatatcgttctaaatgcttagaacacagctgtgattaaattaatgcc

SEQ ID NO: 866170 - DNA, 578 bp, Homo sapiens
tgtttcaaatattctagagtcacaactcaggtgctcactgaggtgctacccagcatcttcattcttgtgtgcatgacctctttaggttggactttttttttttttttttttttttgctatttctgtgccagtctggaaattgttctatagctcccatggcacagaggagtacggaacgttgtgtgagactgtctaaggtctcaggttatctaagtccaccatgcagccatttcttttcagagctctcactgctccctcttagttctcctgaggaaatgcacagaggtttgcattactccttgaaacttacctgaggttttgagattcaccagagctcagtccttaaattaraaatcagcaccctctttgacatttgccaatgactgtacttgcacaactaggttcttccaactttatctcctgcttgactgaaagaggagtaggaaagctttacttttcttatgtaaactccaatgtattctatttcattcctcgaagagtctaggatttttagacttaaatacagaaagctaattttgtatctttgatttctgattcatatcctttctctgaggcaa

SEQ ID NO: 866171 - DNA, 583 bp, Homo sapiens
ctacaagttgtttggtatgtgacttctcacctacaagaaatggtgagagcaggcagatatacccaatgagatagaaaataagaggcaaacacacaggacccccaccactggtatgtaatgtgagtgagtgggcggaagcaagtagattaagaggagcaggatatactaacaaagggcatttgcagtaatgatgtttggtgttgtttacccacataatctagtaaggaatttggttaagatgattagttacacattaaactattatttgaacatttgaacccagtcacttatggcattggttctttccttatctagaatgctttatatatctgagcttttataattttcayaccctgacacccctttttttctttactcttagaatattactttctgtcctgattctttcattccaacatcaaggtgaacaacttttaatttactattatttctgacctgtatagtttctaggaataatcttagatttacctgttacaggtacagttgatgagattcacacattttttaggattagtgttttaactgtagatacctaataaattctctttctaaagattgttat

SEQ ID NO: 866172 - DNA, 583 bp, Homo sapiens
ctacaagttgtttggtatgtgacttctcacctacaagaaatggtgagagcaggcagatatacccaatgagatagaaaataagaggcaaacacacaggacccccaccactggtatgtaatgtgagtgagtgggcggaagcaagtagattaagaggagcaggatatactaacaaagggcatttgcagtaatgatgtttggtgttgtttacccacataatctagtaaggaatttggttaagatgattagttacacattaaactattatttgaacatttgaacccagtcacttatggcattggttctttccttatctagaatgctttatatatctgagcttttataattttcacaccctsacacccctttttttctttactcttagaatattactttctgtcctgattctttcattccaacatcaaggtgaacaacttttaatttactattatttctgacctgtatagtttctaggaataatcttagatttacctgttacaggtacagttgatgagattcacacattttttaggattagtgttttaactgtagatacctaataaattctctttctaaagattgttat

SEQ ID NO: 866173 - DNA, 585 bp, Homo sapiens
tcaaggtacttgtattctaaagggcatatacagataatactctacaaacaagaaatggtcatttcaacaaagtgaaatgatgaatatatattgaataactggagtgggtagcaggtctctctggagtaacatttgagcagagacctaaatgctgaaagaaccagctatttaaagatctggggtgaaacatttttaaacagagggatctaaaagtgcaaacacttcagtgagatcatgaaattggtgtatctggagctcactgaacaagaagcgggacatacttaaagctgaggccagagagatggactggggccagggtcacactgatctttgtaggtttaaaaaagtaggaacmcggttgagggagctactacagtggtgtaggtgagagatgagagcaaagtctgagggacattagtggcagaggtgaacagcaatcaattcagaatgtggattggaattagagcctttaggacttgcagacttgcaaatggattggacatggcagagagagtaagagaaatcagaaagctttaggtctgagcaatgagattatcatgtttactgagatggagaagactgaag

SEQ ID NO: 866174 - DNA, 606 bp, Homo sapiens
tgccttctaattgttatcacctcatctaatttttaaactgtaactagaataatcttttcaagatgaaaatctgattatatcaaatatccattaaaataatgagaaggacatctcaaagttcagaacaggaacagaaacagaaaccataaagaaaagtttgataaagtaggtcatataaaaatatttctgcggacaagatcacactaaacaaaatcaaaagataaaatacacrcttggaaaattaaaaagtactgattttcttaaactataaagacactttaaagtagtcaaaaaagtcaaacaactcaataaaaaaaataggcaaagaacaagataggcaggtgcacacacagacttgcacacacacactcgcacaagcacaaatggctcttaaacattttaaaagatattcagtgttatttataataagagacagacaaattaacaacaaaatatgatacaattttttgcttgtcagagtagcaaaagttgaaaaaggtgaatttttactagtaatggtacagggaaaataatcactttctctattgcagtaacaaagaaacagaagaaactggtaacttcataatatgcgtcaactctatatgc

SEQ ID NO: 866175 - DNA, 606 bp, Homo sapiens
tgccttctaattgttatcacctcatctaatttttaaactgtaactagaataatcttttcaagatgaaaatctgattatatcaaatatccattaaaataatgagaaggacatctcaaagttcagaacaggaacagaaacagaaaccataaagaaaagtttgataaagtaggtcatataaaaatatttctgcggacaagatcacactaaacaaaatcaaaagataaaatacacgcttggaaaattaaaaagtactgattttcttaaactataaagacactttaaagtagtcaaaaaagtcaaacaactcaataaaaaaaataggcaaagaacaagataggcaggtgcacacacagacttgcacacacacactcgcacaagcacaaatggctctyaaacattttaaaagatattcagtgttatttataataagagacagacaaattaacaacaaaatatgatacaattttttgcttgtcagagtagcaaaagttgaaaaaggtgaatttttactagtaatggtacagggaaaataatcactttctctattgcagtaacaaagaaacagaagaaactggtaacttcataatatgcgtcaactctatatgc

SEQ ID NO: 866176 - DNA, 617 bp, Homo sapiens
atagtagtgtccttattactattgttagttggtaaactactacctgtcctacagagtcttgtcatctggtgaggtaaacaaggcattcacattcttatttaaacatcgtttacacagtcaagtatagtggtatgctggggctggctcatacaggctcctgagaaccaattctacgtattcctttccaaatttagagtagcttacaccactgaaattagaaaatgctacaaatcagaagacacacacacacacacacacacacacacacacacacacacacacrccccacagaggctattactaaacattaaccagcatgccactggttatgtgacaacaaaagttgaatcataaaccatgaactgtgagtaatactcaaatgacgagtaaaacaatgagcataaaaagaaagcccaactagcattggcccctctacatggtaggtgctcaatacaaaagtgtgctagatggtctgattgaggaaggagggagaaaatgagctaccaagaaaatttagggggaaaagtggcatttgagctggatattgaagaatgggtggaatttggatagtcagagaaataggagagggctgttcatggagaacaggatgaagacaa

SEQ ID NO: 866177 - DNA, 589 bp, Homo sapiens
ttctgtttcatgtctacagttcattctattcaatgttcaccactagggtgacagtttcccccatcacttcttggctgcagttcatcctctagtaattttattgtgcgggttcttggcaatactgtagtcatactcctggtgttcttgtttttcataaagtttgcctatagttttaatatttgagagacagattggctagatatcaaatcattggtcctcacatttcctggaggagtcatgtaggtgctgcctcactttcctctggtgttaacgattttggggggaaatttgagattacatttttttccattcttattgtgatgttttccctggctgccctaagrattcttcctttatctttaaaaccgttagcttcattcgtgcaggtctcaaagttgaccatttcacatcaatttcctctagcacataatgaagactttccacacatagattcaagtattctttcatttcaggaaaataaatgttttatttcattttatttttttgagacagagtttcgcccttgtcgcccaggctggagtgcactggtgcgatctccgctcactgcaaactctgcctccgggttcca

SEQ ID NO: 866178 - DNA, 589 bp, Homo sapiens
cagtggagaaaatggactgagtgatacgttctgtggacatatatttatggaaggcagcttgaaggaggtaatgagagttggggatcttttgtaatgtatagagtttgatatcagcaagaaggcacaggcctagactctgcttctagaatctcaatcttctgggagtgtggctccttggtgaatgccattgtaatggagaccaacccaagagagctgacctcaagccctctgaggaagacggaccgattcaaaggactgcaaatgacccacatatctgagcagagggtcttttagggtcagggagtatttgatataggggaatcagactagcagagccaagacacytgcatggaaactagcagaggcagtggagtgattttcattggagagctaagcctttccaaggagcagtagaccctaaccaggatacctgtcccacctgcttgtgtcaagcttcttaggccttccagatctgactgccttacttgacctgctcccatgctcacatcagccatgtgaattgaccagtcatagcttggcttccatcccatttttgcctaagaccagtatcaactcccacaaaccagac

SEQ ID NO: 866179 - DNA, 623 bp, Homo sapiens
cttacttgacctgctcccatgctcacatcagccatgtgaattgaccagtcatagcttggcttccatcccatttttgcctaagaccagtatcaactcccacaaaccagacacccttgaaaactccaagctggtgtcctcggctgtcatagtccatcaacgacagtctaacagagaagatttcatccatatctgcaaactgagctgaggggttgaaaataaggaggttatgaaagaaamcaataaagcaaagattgaaaggctctgcagaaaaggaaaagagaaaacaaaggctagacacaggttgtgttttccttcagagagcctgcataagcatctcagacttcagcaggatgtccagatgtcgccgaatgagaatacagccaaatgcagttcatgaacttgctcacgttttcagcgctgccgcagctgtgacctggaatttagccttaaactatggcagtgtgactttcaagggaaacgcgaacatttagttactggccaacagctttttgccagtgattcattcacaacatggggcagtcctactgaagtgaaattttattatttaattgatataatccaaaactccatgaagagttcattcattcattactcatttgcaa

SEQ ID NO: 866180 - DNA, 479 bp, Homo sapiens
tgagtctggtggggcaggattgcagggagttccattgtgttggagatgggaaggcaggtgagggctgatagctgagcaggacagacaagtgcaagaggaaatcaagagagggcatgaacccttcagactcccatggtcaggaaaggcttcccagagaagaaggctaaatcttgaacycataggacaggaggggtatccagaagtaaggggggcagcctcagacatttgtgtgtcttcaacactagcctgtcagcttcctgaggtcaggggccatgcctggcccacctgggatatcccacaaccagtgctaggagggactggccagtaggggtccagaaagtgtctgctgcaggaataaatgagaaatagaaagaggctggaggaaattgctaggacatccctagcctgaagggttcacctaattgcactgcttaagccaagatagacaggcaaggtccactttcaccagagtcagatct

SEQ ID NO: 866181 - DNA, 611 bp, Homo sapiens
ggtgagctggcagccatatcaacccaaggcccactcttcctgccatggttggtgggactcagtgtttagagaacagctggtacaggcttgaattcttagatcacatgctggtcacattgcatggctttgctgaaggtgaaaacttgctttcaatattaaaactagacagcgtaatcattgacagacagcagtgagatatctggtggagttaagataccttgggaatagayggctgcgtttggaatttatttgatgtgcatatgcagtctgtcatctttccagccaatcccatattgctgtcttgcctcttcattatctccccaacctgagagattaaagagaagcattttgtttgtcagctcagaagtaagcactgtccattacctgataagactgaagcagggtttaacaagccaatttgaaccaaatagaaaatgtcctatcatgctatcagctggtctctttgtttgcgcatactgtccctgtgttcttgataatctggtaaaacccagggaaacttagtatatatggattagtcagaaatgaatgctcactttggaagcctgctagaagaggtcaatgcatttctctacaggaagtgcctagattta

SEQ ID NO: 866182 - DNA, 611 bp, Homo sapiens
ggtgagctggcagccatatcaacccaaggcccactcttcctgccatggttggtgggactcagtgtttagagaacagctggtacaggcttgaattcttagatcacatgctggtcacattgcatggctttgctgaaggtgaaaacttgctttcaatattaaaactagacagcgtaatcattgacagacagcagtgagatatctggtggagttaagataccttgggaatagatggctgcgtttggaatttatttgatgtgcatatgcagtctgtcatctttccarccaatcccatattgctgtcttgcctcttcattatctccccaacctgagagattaaagagaagcattttgtttgtcagctcagaagtaagcactgtccattacctgataagactgaagcagggtttaacaagccaatttgaaccaaatagaaaatgtcctatcatgctatcagctggtctctttgtttgcgcatactgtccctgtgttcttgataatctggtaaaacccagggaaacttagtatatatggattagtcagaaatgaatgctcactttggaagcctgctagaagaggtcaatgcatttctctacaggaagtgcctagattta

SEQ ID NO: 866183 - DNA, 644 bp, Homo sapiens
agtatgtggatcacggaacagaaataacctttgacgtgtatatagagtcagaagctagactgtgggaaattcttctaattatcagtcatgtaaaattgcacagagagatcagtttccaccaatgcttatggaaaaacagaagctctctcctataagaatataatcaacaatgcagcaaatgcaatgatgcatacaccatgcatttgtttatgtaaatgcaacaaaagsaactttatctgaatagccatgtgtgcgaggcagctctggaataaacagcaaggagatccgtgtatacagttgcattttttatgcatctcaactatcaataactaaaataaatgttaatcaactatgctaaaagaagatcaaattattcttctcctttctctatgaaaatattacaaactattgttcggcccttcttccttgagcctcagactcagcttcctttccctggctgtcagcagcatggagctcttttctgaagataactatttgttatttcaaaatagaacttcaaaaatactgttgtccaatgaagaggtgtttcttaagctacgcagccaaaaacataggaatgaaagtattataaagttatgtcaagcagttatcaaaagtaatatgctatttttctagattttttt

SEQ ID NO: 866184 - DNA, 651 bp, Homo sapiens
ccaaaaatggcctttaagtgtccaagcaaaagaaagagttgtacatatcttacttaaaaactagaaatgattaagcttagtgaggaaggtatgttcaaactgagataggctaaaagctaggctcttgcactaaacactttgccaagttgtgtatacaaaggaaaagtttttgaaggaaattaaaatgctactccagtgaacacacaaataataagatagcaaaacaaacttcttgctgatgtgaagaaagttttagtggtctggacrgaagatcaaaggagccacaacattcccttatgccatagcctaatccagagcaaggccctaactctcttcaatttcataaagtctgagaaaggtgaggaagctgccaaagaatagcttggagctaacagagtttagttcatgaggtttaaggaaagaagccatctccagaacataaaagttcaaggtaaagcagcaattgctgatggagaatctgcagcaagttatccagaagatctagctaagatcactggaaaaggtggctacacctaacaacagatgtttaacatagacaaaatgccttctattagaagaagatgccatttagaacttctatacctagacaagagaagtcaatgcctggcttcaaagcttcacaagataagc

SEQ ID NO: 866185 - DNA, 677 bp, Homo sapiens
atcacaattcctatgtgtcatgggaggaactggcgggaggtgattgaattatagtcttacttgtgctgttcttacccgtgctgttctcgtgatagtgaatgagtctcacaagatctgatggttcttacctgtgcgggtcttacctgtgctgttctcatgatagtgaatgagtctcacaagatctgatggttttaaaaacaggagtttccctgcacaagctctctctttttgcctsctgtcatccatgtaagatgtgacttgctcctccttgccttctgccatgattgtgaggcctccccagccacgtagaactgtaagtccatcgaacctctttttttttttccccagtcttgtgtatgtctttatcagcagcatgaaaatggactctataaacctcagtgttatgtggctctgcaagatgatccaacatgttggaacagccacgtttaaaacatatatctcttgcctcttggtgccaaagctcttcctactacagctcatggcacttcagtgcaacacacaggtaccatgatacacatggcatgtaggacttagacacacacagaaaagagactgtcaacatgctagacaattctacaacgagcatagtgagttcctgagagcagggactttcagaaagcatgatggtaagccttagagatatacaagagccagtg

SEQ ID NO: 866186 - DNA, 624 bp, Homo sapiens
ctgaaataaaatataaagttaaggtttaatttagtaatattctagaaaatgggatatgtgaagctctaacagtttttatatttacagactattttagttaaatattttaatagtgtttttcgttaacaccttaaagaaaaaactcttccttatacattactatgatatcataaaagtagtaaaagtaattatgatgataactatattagtttttgatttgatgctgtaagaaattacaacaaacagtggttcaaagaacacaacagggctaaaaccaaggtgttcaaggagttgttaggctgcattcctttctagtgctccccagagagaatccatttccttgccctttctagyttctagaggctgcctacattccttggctcatggtcccctccctccatcttgaaagccagcagcactacatttctctgtacctcatttccacagtcaccttgtcttcttttactttaaggctccttgtgattacattgggtatattggggaaaatgcaggataatcaccttatgttcaggtcagctgatcaacaaccttaattccacccgcaaccttaattttcctttgtcatgtaacaaaatatttacacaagtactgggggttgggatg

SEQ ID NO: 866187 - DNA, 565 bp, Homo sapiens
gctagagctgtctcaaactggcactgtccaagaagtctaccagccggggtaaggagactcaggggtatatgtctgaggtcagaggcttagggaaataggtcagtgggaaaatcacctacattagtgactggtatagtaaggagcactctaaaaaatccacaaaagtagccacaaagattccttgatggccagattataccagataatgccagttaagtaaaatcctatcctattgaatcttgtctttgtctcctggttccaaagactgagaaataggagaaggtggaatcctgcctcccaccataccataggatgctccttgtggttcaggtccaacaggcagaaaggaagaaagctttcatttatattggattgcatattttagcccccgacaaacaagttgyttttttttttacccaaaagtgaccagaaagctatcagccagaaagctgagatgtcagggtgtggaagaggcagcctcaacagtttatacttgaaggggagagaagaaacaaagctgttttctgactgtgccatgttgagccccgtctagtcaatgaatgta

SEQ ID NO: 866188 - DNA, 628 bp, Homo sapiens
aatgagcatcctggctttccttggtgtactatgcctcctcaactctcattcagtgtgcctacgacccagacatgactaatcagtgcatttcttccccctggtgagctctgggacagctactgacacacacagggctaactagaactaagcctggtagagtgagcagtctttgttactggggttactgggagaatctaagcctggagcttctggcagccatcttgcttttctgtaagaatcaagtctgaagagaggaaccagaactgcacgagagagtrctgctgacatggagaccctgggtgcagctacatttctttgtggatgttcctctgaacattttagttgccaggagtcaagaaattatctttgcaaaactagtttgaaattgttttctttccattgtaactcacagtcttgacttcatattctattctccaatctctcatccacataacaatccatgttaccaccagttgtttctgctcaggtcggacacttgagtaacagggcagactgctggtgaaggaatggtgagtacagagctaaccacaccagtgagaagtgtgtctgacaccagcttatagacaggcatgttccagtctgttgctgcatggattttacaagtgac

SEQ ID NO: 866189 - DNA, 491 bp, Homo sapiens
ctttagtccgcaaataacatcactggtaagacagtctcttattaccttattaatgaggttgttaaaatgaggtaatttattttcctccttccacctttattctagccagcatcacttaaaaccatgcatttcaatattttccccaaagagctgagaagtctcttctgtcaaattggcactatattcctcaaaattatwcttcattttattttaaaacttattttggactcatcatatatctcagaagtaaaattttaaatataccacttccagacctgtatttttactttttatctgcaaattaccgcctcctaatactagtggcattagagcactttccacctgatttcaaatcagatttttctacgtccttgaaactcaattttctttctcttattttccagtggacttttaacacccagagaagcatagaatcttaagagggctgaccagtaatgtgaatcaatactggcttctgccacgatctttta

SEQ ID NO: 866190 - DNA, 707 bp, Homo sapiens
aacccaacagtttgatactcatgttcattctctttcaaagaaagacgaagaaaaatagtaagttcaccatttattggctgtctctgtgcctggcactattctgaatgcttcacttcagagtcttatttaattctcacaacattcctatgatgttatatacccattttgtaggtaaagaaactgaaaattaccacaatcaagcaacttgacccaggataggtaatggaagaattctcttccaacttaggtagtttgagaaggtataatggagaaagcgaggtttcattgaatttccattcattcggaccaactcagacagaagagcattccagacagcagaaatggtactagaaatggcacagtgattggaaagtgttaatctcaraaagtatgaacattccagattggctgagtataggggtcatattggtcaggggtggaaattatgattagaaaggttaaagtcagatgtgttaggacaaagagtttgcactgtatgcagtaggcaatagagagccactgaaagtttgagagagaggaatgactttgatcaaagcaattatcactgattcattcatctccaacctgtcataatttaataatctctgcttcaagaaatcataacttcagaaattatctatgtaagtttctccaagaacatgaatacttatatcttccatctaaacagcccattgttgttactgttg

SEQ ID NO: 866191 - DNA, 607 bp, Homo sapiens
actgcaacatctagtcatcgctactattaaagtctgacatctgtggaacaatgtcacatgtgaaaacctacaaacttcacagtcatagtattttctggacctggatgattgtttgtccactctgtaactagctgacttacaaactaggcatgatagctccttacattttataaattacacagtttgaaatagttcaagcaaaatataggggcagagaagttcataggccctttactattatttccatagttgattctgaaattcaccctataaaaggtttctcttgtcagatgtattctaaattgggttctgaattagcatacgcatatgctgatgaaattaacttccatgtattgtaatctcatatggttttgtgaaccgcagcttttgcttctaaaatttgtgtcaygaaggtcttttcttgtttatctcacatggttccattgtacttgagagttaatgagactgataaaaattcagtgaaaattgaccaattagagttcccatcccaacccctttttgggggtccctaaggacattactcacttttatgttaatattattgatagaataataaacagatttgtgtttgttgcacatcaatctt

SEQ ID NO: 866192 - DNA, 635 bp, Homo sapiens
tccatgtaggatcacagctgaaatcatatttatctgaaatttaaaattaagaacacacagcattaaccctttatagctcatgtaatattcttttatgttccatgtattccaaacctgctgcacatcacagaaagtataactagagcttttttttttttcatattcttcttctttctaatatataaaattttgcctggaaagacaatgagaacatcatagaattgttttttcccctgggggtaagaaacttttccattgtgtcataaaaatcttaaattatgtagctttttttttttgtcaagcatttattgtataaatacaaaagaagaaaaataattaatgcatggtaragctggtaagagaggcttaaacaataaaaagagttattatattaattcttaataagctatattaagtttgaaactgttattaaaaggtgaaagctctcaactttgatttttaaaaagtttgttttgttttccataaatgtaaaagcaattttgaataagggaaattgttgggggttaatttctgagatgtctcaattcaacagaactcaaatttattcctcgaatgaaatttaaacccaaagccatctttaaagatgattaatctgcaagatgtcttctataaaa

SEQ ID NO: 866193 - DNA, 577 bp, Homo sapiens
cattaaatgtactgaactgtactctttttcctttttgctttttattttttccatgcctttgggttattgcggaaaccaagttgatcttcctgtagttggtcccatgtgctggatttctctgtttactttcttgtgaaatgatttaacttattcctccatccccccaaatatcttgtttatgaagagtaacttctagagcagtgctttccaataggattttccgtgatgatggaaatggaaatcttccatatccgagctatctactacagcagccgctagctacacatggatactgaactcttgaaatgtggctagtatgactaaggtacaaaattttaattaaaatttaaatgaattaaatttcaacgtgactaacgtttatcatattggacagtgcakctggaggcttagttagattcaacatttttgaggaggagtactctggtaggttgaatggtggctccctaaaacagacagttgaccgttaaacaacagggtttgaactacacgggttcacttatacacagctttctttcaactaaacccggataaatatggtacttgtgggataaggaac

SEQ ID NO: 866194 - DNA, 653 bp, Homo sapiens
taaatgaagtattcatctctatggctacctgaaatcaggaatatatccaaattatctcagtgttctttacattgtatttcacagtactttatgcacgttaaataatttttatccataaatacaaaaagtttcattttggggggatatcttccagtatcattggatgagacaagtgtcagggtaatacttgacattgacaacgattataagaacagtactggagaacaaagaggaaytttgagaatcctgtttggtatgtaaaatcatccctaattacattatggggttacctatgttaaaatttattatttatgtctaattaccataaagtgctattaaaattttacatatcattaaatgtatcataataatttaaattatttgattatgaaactaacctcttaatcatatatgctcagtcttcattgtgctttgtgctcatgcatggtggcatgtctaacctttgaaaaactggaaggaattctgctcaaaaatttttctctcttaattttcttggcttgtttcattttatggttacactcttaatctatcttttttatttccaagcagagttctttcaaactctgtcatactaaagactactaattaaattttgttgtctccacctgatggagtattatgcagcagtgaaa

SEQ ID NO: 866195 - DNA, 576 bp, Homo sapiens
agtgaatgtttccccactggttccaaataccaattggggaattcaagccaatgataatgttcctaaaacatgaacagactttgtttttcaagctgttccagcctctactgccaactccttccctgggacccaccaaatacgaatgaactcgagatggagaggcarctctccatgaatctctcttgggggaacatgggaccggctcatctccagggcccttttagccactctaaccctttgctaggagctcctcaacctttgggacaccagggctgcattatctttcttattacagcgcccatgcatgcgtgtcaggcttttgccatgccagcaggtcaaagatgggttgcctacttactttgtgggatgctgcaatcaattaccttgctttggaagctagctcttgggaagccagcagaggtgtacttacaccttgttcctagactgtaaaacaagtttaagcttcgcatttcagagcctttcttgtccacagctcatgaaagggagcaactgattctgttttctttacccagcagcttcagccactggggaaatggagccatttgattcagctga

SEQ ID NO: 866196 - DNA, 576 bp, Homo sapiens
agtgaatgtttccccactggttccaaataccaattggggaattcaagccaatgataatgttcctaaaacatgaacagactttgtttttcaagctgttccagcctctactgccaactccttccctgggacccaccaaatacgaatgaactcgagatggagaggcaactctccatgaatctctcttgggggaacatgggaccggctcatctccagggcccttttagccactctaaccctttgctaggagctcctcaacctttgggacaccagggctgcattatctttcytattacagcgcccatgcatgcgtgtcaggcttttgccatgccagcaggtcaaagatgggttgcctacttactttgtgggatgctgcaatcaattaccttgctttggaagctagctcttgggaagccagcagaggtgtacttacaccttgttcctagactgtaaaacaagtttaagcttcgcatttcagagcctttcttgtccacagctcatgaaagggagcaactgattctgttttctttacccagcagcttcagccactggggaaatggagccatttgattcagctga

SEQ ID NO: 866197 - DNA, 654 bp, Homo sapiens
gtgcgtatccattgtatgtttttagatttgtggttaccatgaagctttgcaaatagtatctcatatcttattattttaaactgatgactccttaacactgattgcatgagcaaacaagcaaataataaaaactaaaagcaaaaagaaactaaaaaatctaaaaaaaagaaacaaaaagaaaactaatagaaatgctactctttaacttcatctccctgctttataacttttgttgtctctatcttattttactgtctatgtcttgaaaagttgttgtagttattattttatcttttcatatttctacttaagmgtggttcacacaccacagttacaatgttataatagtctgtgattttctgttttgtacattcaaatgatttttttgttgctcattacaaactttttcttgcatactgaagtactccctttagcatttattgtcagacagttctgatgttgatgaaatccctcagcttttgtctgtgaaagtctttacttcttcatgtttgaagaatattttcacctgataaactattcaagggtagaagttttttttctttaggactttaagtatgttatggactttaagtatgttatgccactctccccttgcctataaggtttccactgaaaagtctactgccagatgta

SEQ ID NO: 866198 - DNA, 669 bp, Homo sapiens
taggattatatgaggctaaaaagctcccatatagcaaaggaaacaatcaacagtgaagagacaacccacagaatgggagaaaatatttgcaaattacccccctgacaaggaattagcatcctgattataaaaggagcacagatatctcaatagcacgtgcacacacacacacacacacccctattaaaaatgggcaaaagtttgctgagsatgatggcttccagcttcatccatgtccctgaaaaggacatgatctcattcttttttatggtggcatagtattccacggtgtatatgtaccacattttctttatccagactatcattgatgggcatttgggttggttccatgtctttgctattgtaaatagtgctgcaataaacatacgtgtgcatgtgtctttatagtagaatgatttatattcctttgggtatatactcagtaatgggattgctgggtcaaatggtatttcgggttctagatctttgagaaattgccacactgtcttccatgttggttgctctaatttatatttccagcaacagtataaaagcattcctatttctccatagcctcaccagcctctattgtttcttgactttttaacaattgccattatgagatggtgtgagatggtatctccttgtggttttgatttgcatttctct

SEQ ID NO: 866199 - DNA, 710 bp, Homo sapiens
tgtgagaaacccacagccaacatcatactgaataggcaaaaggtttaagcattctccttgaaaactgtaataggacaaggataccctctctcaccactcttattcaacatagtactggacatcctacccagaacaatcaggccaagagaaagaaataaaaggcatccaactaggaagagargaagtcaaactcttcttgcttgcagacaaaatgattctgtatctagaaaaccccataatctttgccgaaaaggtccttgttctgattaacttaagcaaagtttcaggatacaaaatcaatgtacaaaaatcagtagcattcctatacaccaacaacatttacactgagagccagatcaagaatgcaactccattcataatagccactaaaagaataaaatggctcaaaatacagctagataggaagatgaaagatctctacaacaaaaattacgaaacactactcaaaggaatcagagatgacacaaacaaacggaaaaacataccatgctcatggataggaagaatcaatatttttaaaatggccatactgccaaaagcaacttacatatacaatgctattgctatcaaattactaatgacattcttcatagaactagaaaaaaactgttttaaaattcatatggaaccaaaaaagagcctgaatagccaagccaatcctaagccaaacaaacaaacaaacaaacaaa

SEQ ID NO: 866200 - DNA, 630 bp, Homo sapiens
agtaaataaagaaaatgtggtgtgtatatatacaccatagaatactactcagacattaaaaggaacaaagtaatagcactttcagtaacctggatggaattggagaccattattgtaactgaagtaactcaggaatggaaaatcaaacatggtatgttacttataaatgggaggtaagctatgaggacacaaaggcataagaatgatacaataaactttggggactcagycgggaagggtgggaggaaggtgaagcataaaagactacccattgagtacagtgtacactgttcaggtggtgggtgcatcaaaatctcagaaattaccactaaagaacttatccctgtaaccaaacactaccatttccccaagaactattgaaataacaataaaaaaaagtaatagccattctgacgggtgtgacatggtatctcactgtggttttgatttgcatttctctaataacctgtgatgtggaactttttttcatattatcattggctgcatgtatgtcttattttgaaaagtatttgttcatgtcatttgcccactttttaatggtttaataaatttaagttctttataggtgctagatattagacttttgtcagatatctattttgcatagtt

SEQ ID NO: 866201 - DNA, 630 bp, Homo sapiens
agtaaataaagaaaatgtggtgtgtatatatacaccatagaatactactcagacattaaaaggaacaaagtaatagcactttcagtaacctggatggaattggagaccattattgtaactgaagtaactcaggaatggaaaatcaaacatggtatgttacttataaatgggaggtaagctatgaggacacaaaggcataagaatgatacaataaactttggggactcagccgggaagggtgggaggaaggtgaagcataaaagactacccattgagtacagtgtacactgttcaggtggtgggtgcatcaaaatctcagaaattaccactaaagaacttatccctgtaaccaaacactaccatttccccaagaactattgaaataacaataaaaaaaagtaatagccattctgacgggtgtgacatggtatctcactgtggttttgatttgcatttctctaataacctgtgatrtggaactttttttcatattatcattggctgcatgtatgtcttattttgaaaagtatttgttcatgtcatttgcccactttttaatggtttaataaatttaagttctttataggtgctagatattagacttttgtcagatatctattttgcatagtt

SEQ ID NO: 866202 - DNA, 644 bp, Homo sapiens
ccattgatctatgtgtctgttcttgtactagtaccatgctgatttggttactgtatgcctatagtataatttgaagtcaagtagcatgtcttcagctttgttctttttgcttaggattgctttggctatttgcactactttttggttccatatgaattttgaaatagttttttctcgatctgtaaagaatgtcaatgatagtttaataggaatagcattgattctataaattattttggcactatggccattttaacaatatcgattcttcccatctattagcatggaatgtttttccatttgtttgtgtcatctctgacttctttgagcactgttttgtagctcaccttgtagagggytttcatttatatggttgtctgtattcctaggtattttttaatagcaattgtgaatgggaatgcattcctaatttgactctcagcttgactgtagttgttttataggaatgctagcacattttgcacattgattttgtattctaagaccttgctaaaatttttcaattttcttattttcttcactgactgactggtcattcagatcacaatgtttaattcccatacatttgtgttttgttttgtttttgaggtagagtctgacactgttacccaggcaggagtgca

SEQ ID NO: 866203 - DNA, 625 bp, Homo sapiens
atatctaatatacataaggaaactcaattcaatggcaagcaaactaataacccaattaaaaaaatgggtaaagaacctgaatagacattttgtcaaagacatacaaatggccaacagctgtatgaaaagatgctcaacatcactaatcataagggtaatgcaaattaaaatgaccatgagatatctccttctgcctattaagatggctatcatcaaaaagataaaagaaaacaactgttagattgtgcagaaaagggaacccatgtgcacttctggtgggaatgtaaaatgrtgcagccactgtggaaaacagtatggatgttgctcacaaaattaaaaatagaactaccatatgatccagcactcccacttctgggtatatgtcaaaaagaaatgaaattatatctagcagagatatctgaactctcatggtcaaggcagcattacctaaaatagccaagatatgtaaaacacttgtgttctttattagatgaaaaagtaaatgtgagctatatagagagacacacataaatacacatttgaatattattcagccttaagaagaaaagaaatcctgccatttgagacaaggtgaatgaaacttaaggtcattatgtgaaatgaa

SEQ ID NO: 866204 - DNA, 625 bp, Homo sapiens
atatctaatatacataaggaaactcaattcaatggcaagcaaactaataacccaattaaaaaaatgggtaaagaacctgaatagacattttgtcaaagacatacaaatggccaacagctgtatgaaaagatgctcaacatcactaatcataagggtaatgcaaattaaaatgaccatgagatatctccttctgcctattaagatggctatcatcaaaaagataaaagaaaacaactgttagattgtgcagaaaagggaacccatgtgcacttctggtgggaatgtaaaatgatgcagccactgtggaaaacagtatggatgttgctcacaaaattaaaaatagaactaccatatgatccagcactcccacttctgggtatatgtcaaaaagaaatgaaattatatctagcagagatatctgaactctcatggtcaaggcagcattacctamaatagccaagatatgtaaaacacttgtgttctttattagatgaaaaagtaaatgtgagctatatagagagacacacataaatacacatttgaatattattcagccttaagaagaaaagaaatcctgccatttgagacaaggtgaatgaaacttaaggtcattatgtgaaatgaa

SEQ ID NO: 866205 - DNA, 699 bp, Homo sapiens
ccccatctctactaaaaatacaaaaaaaattagccgggcgtggaggcaggcgcctgtaatcccagctgctcaggaggctaaggcaagagaatagcttgaacccaggagttggaggttgcagtgagctgagaccacgccactgcactccagcctgggcaacagaraggggctctgtctcgaaaaacaacaacaacaacaaaaccaaccaaacaaacaaaaagaacagccaccttatgtgccatgcactgattgggtttcttttatttaaatgggaacacaaatcttcaaagtccatgtgaaatactgagtaaaacctgcattatcttaagacagagtgtattttctggtctaacacctattaatgtatcataaaatagcactggaaacattccttcaggcccccccctcccgcccacacatacatacattcacacacacacataactttcattatttgtttttcaaaatacaaataagtcattatttagaaaataggacaccaccactgagacatatgaaatacttccaaaccatactctatcagacgtagcctgaagaggttgcaaccgcttaacagttaaagttagagagatacctctatttgcagctctaaatattccattagatgctaggtcctgtcagcacttcagtaccaaaagatgatcttccaagaaaagttatttctagttcagttggcac

SEQ ID NO: 866206 - DNA, 573 bp, Homo sapiens
taatcacaacctggtgttattaattaattaacttttcactctctcttcagaattcaagttctgtaaggaaaagggtcttgtacatcattgtgaacccaacgcctctaaccaaatggaccataataagtgctcaatgaacagctgtttaacaaagtacatgaatgaatgaataaattaatgaatgaatggatatacatttatgcccctttatttcaattttttccaatctgcttttgctttatgcaagatacataactggatttatccacaaytgctctatcctgtatcattacaatctttctattattatcgttgccaatagtacttagtcatctgcatttatggaacatgcacagttgtgtggggccctgcttcaaatgctacaaagaagaatgaagatcaaaatccatcactgttgctgtcacagagcctccagtctaactggcaacagaataaatggatttggccgagatacgggcagagatatggaagctcatgggagagattctgtttctccctgttataggctgaattgtatctccatggcaagactcatatgttgatgtcctaacc

SEQ ID NO: 866207 - DNA, 587 bp, Homo sapiens
cacagcaaggctggtaggagttacagcaagctgaaataacctaggtaatgtccaaaagtcaggcaggagaggtcaaaagtgatctcttgcccaaggttcatacagcttctgcctggatcatggtaaatgctcaatcaatgtgagttagaaaaaaataagtagaggtattcacttagctaagaatttgacatgggttcmcaaaacatatatcacagagacactgaaaacatttactctgtattctcagcattcttcgttgcattccacgatggtatggcatggtcataaaaagcaaactctttgaggacagagagtcctggattcaaatcatagggttttccacattctggctaagtaacactgggggttccatgttgccttcctcactgagaagccataaagcttcagtgagatggtggtatctgcatctttactgcttgcagcaaggcatgaaagataatagggacttcttagactaaatgttgcctttgtccataattaaatacctccctgggcaaatatactgatgagtagtagaatggacttaagcctcacaaggagatagggcatggtatcacattctccat

SEQ ID NO: 866208 - DNA, 632 bp, Homo sapiens
tactcaagacaggccaatgatactacatcctgggcttttgttgaaatggaaagtatgagctataaggctgatgtaagcttggagctttgagaggaccagcattttaaggggttcagcctgagaatgaagccagtacatgggaaagcagaaccaagagatggggcaagagatattgaatcctaatggcgtcatgtgaacactgggatatatccttctctgaagccagataacctaaacttttcagttatgtgaacaaaaatctccatatttgtttacatttgtttgtcaagtttttgttacttgcatctgagagatcagaataatacagaaaagaaaataataaaatccaacaatatcaatgatttctaatagkagagtctgatattcactcaaattcactaattccctaaaacattcctagagacttgtcatttgaatgaagctacctaaaattacggtgggaggtttttttttttccttttttttttttgacagttacatttcagcacatgaaattctcggctaccagattactttagacacaagtttataaaagtgcctattttataaatatttcttgaagtcctttttggttgttgttacaaaggagattgcataacttgttaattaag

SEQ ID NO: 866209 - DNA, 575 bp, Homo sapiens
attaatgaacagaaactgtattatcttagtcactatagctctatataagtcttgatatttgaaaatgtaaatcatctagttttagttttcatgaagccaatttcactattcttcaccctttgcctttccatataaattttgaatcagcttgtcaatyttcccaaaaggaaactcttaggatttttaaaatttagattgcattgaatctatgaaacaatatgggagagtttacatcttcatataatgaatttttaaatccataaatgtgatacagcttttctcttaagtttttagaaattatcacaataatgttttgtagtgcttctgtaatagcttataaatccttgtttagacttatttttaaatatataacattttaaaagggttttgaatggtaactttaaaaaatttgtttcttagttgatagctaaatttatttaatttttatagttgatctttaatgtccgtctgatactttatgtatatataaaaccatgcctggtacaaataataatagttttatttatatctttccaatgtttatacctttatttccttttcttgatttatttcac

SEQ ID NO: 866210 - DNA, 648 bp, Homo sapiens
ctacaaagtctcccttttcatttggaggaaaggtggtaattatttcccaaactcctacccatttaagcacataattacccagacagttcttcagtcactgccacactccttatattcaatgtcaatacttcagatgcttttccactgttgataattctccctgtgggcacatgctctttaaacatttatcttcaccaatattgaaaggcttgaatttcatatcttaggagaacagatattttctgactgataatccaaaactcccctataaccctttcacccacaactgtaataataattttattatctcttcttccaactccccaaagaatcttctaatactgacaaacaaatctgcttgtcatatgtggcagctaggctaattattttctaagagtcatgctcctcttaccatcataaatcattatgggctgtttccaactcccttgcattttgatgcgggttgsggggcaggcaatttagctcttactagtgcaatgtgagcagaaggatgtgtctcactttggggccaaagcagctgagcaggtgtggcttctccaccttctctatgtcccgttccaccccaactgggtgttaaaacctaaaacaagatggcaaggcctccaccggcctgggtccctcctccac

SEQ ID NO: 866211 - DNA, 631 bp, Homo sapiens
tattttatctttataatcaatcttctgaaatgctaacttgaaaatataaacagcacaattacttttttctcttttctttcccatttgaaatgtgtgcttgtgtgtgtgtgtgtgtgtgtatctgaatctgtacatataaatcaaatacacacacatatacttgttttaaaaaaatcctcaaagaatcaatcacatattacagaactgaaggaatattggagttcatctggtccaaagtgttggtattgtaaaatmactttcaaatttcacagttatccaaatggtaatgaatattaatacctaagaaaatcaatcaaagattaacattaagacattagattttaaaaatcattgcatttaatattttttatccattttcaaatttcagaaactaggtctatattgtcctatagatctaacaagcactataaaagaaaaattacaaagatttcccaatatacagatagacacataaatgaaaacttttaattgcaagagaaagggaactggattcatcagttacatgcatttagaaaaatctgtctcattcatcagcagcaatgaaggagaaaagttggcaacagagccaagtatacttactttctaagtagccaataattggaggcattta

SEQ ID NO: 866212 - DNA, 677 bp, Homo sapiens
gaacaagcccaggctggcgtgctggaggtgaaagatacatgccagagaactgagggaccccggtggacagccagccaacctcctgaagcaaaccctccctgccaatctgcagttgactgcaaacacataagagacccagaakaggataagcactgcccttctgagcccaacctaaattgctgacatgcagaatcagaaacaaaatatgtgtttttgaagtcacaaagtttagaggcggtttatcactcgcgatagataactggtacagacaacacgggtctgcctagaaagtgaaaaacatacgaaggcaaaacagtaagaggtcaagctttaggaggatattcccaattcctaggaagaagggggaaagctgtagacaagacaacagggcaatggcaatcagaaacattcaagtatataatatcagggaaccaggaacatgggggcaggggacacagaggataaaagtgggggtaggagaagtcaaggactcatcagggaagtatagcactgggcttagcagagaatctgcctagagaaggcactggtatttttgcatgaatgattgaagtttgatctgtcaaggcagagctcgctggagaagagtgagaagacagtgtcagtaacgtaacaaggaatagaagtggtctatggagtgttaaggagggcctgggtgg

SEQ ID NO: 866213 - DNA, 554 bp, Homo sapiens
cttccacccccacactactggtaattacgccatctagcttattctaaattttcgtcttcatatatgtctttcagaatgctttttttttttttttagatggagtctcgctctgttgcccaggctggagtgcagtggtgccatctcggctcactgcaacctccacctcccaggttcaagtgattctccttccttagcctcctgagtagctgaaattacaggcacgcaccaccatacccagctaatttttgtatttttagtagagacggggtttcaccatgttggtcaggcttgtctcgaactcctgacctcaagtgatctgccagcctcggcctcccaaagtgctgggattacaggcatgaggcaccgtgcccggcccagaatgcttyttaaaaatctttccatcttatttaaatctagatgttttaaagtatctacaggcaaattctagggcacatttaaatgaagtattttaattctgactgtataatactaaattagttaactggtatggtcatgaaatgtgatcatctgatttatgcagttttctcattagc

SEQ ID NO: 866214 - DNA, 669 bp, Homo sapiens
agggctttttctttttcttttctttcttttttttttttttttttttttgactgagctttgctcttgttgcccaggctggaatacaatggcgccatctcggctcactgcaacctctgcctcccgagttcaagcaattctcctgtctcagcctcctgagtagctgggattacaggcgcccrccaccacgcccagctaatttttgtatttttagtagaaatggggtttcaccatgttggccaggctggtcctgaactcctgacctcgagtaatccacccgccttggcctcccaaagtgttgggattacagacgtgagcccctgcgcctggccataacagggctctttctgtgggaagtgtcagaaactcaagtcaacctggcagaagcagaaaaggggaaataccatctcagtgaactgaaaactggaggcaggtctgttttcagctatgtctgaatccaaggactaaaataggatcatcaacaggactttatcccaccctctttcatttctcagctctgtttgtctcttttgtcggtggcactcttgagtggaacctctccacgtggaagccaggtgaccctgcctcctccccagcagttccaggctcatgtcactcttgttaccagcatttccagcacaaagagattttctctttctcaatttttccaac

SEQ ID NO: 866215 - DNA, 669 bp, Homo sapiens
attgaggtaaagtttacatagcataaaactaaccacttacagtgactcaaaggcatttagtacattcacaatctcatgcaactactatctctatcttgttcgaaaacatttccatcactcagtccaaagcaaaatcctctacccatttaacagtttatccccattttccattcttcccaactcctggcaaccaaccaccaattcatactgtgtctctatggatctatcttttctgaatatttaatataaatggaaccwtacaataggtaaactttatgtcaggcttctttcacttagcagaaggtttagatgttcatttatgttgtggtatgcatttgtacttcattcctttttgtggctaaataatatttcacttatggatatattacagtttgtttatccatttatcttttgatagatatttgggctctttcctttttttttctagtaattatgaatagtgtttctatgaacatacatgtacatgtacttgtttaaatacccatttccagtttttttgagttacctaaaagtagattgtggggtcatataagaattctctgtttaactttttgagagactacctgttcttcacaggggctgaaaaacttcacattcttgctggcaatgtataagagttccagtttctccacattctcatcaacactt

SEQ ID NO: 866216 - DNA, 592 bp, Homo sapiens
gaccaggatgcgtttctcaggaagcgcctgtcacaagctatcgatggtcttttaatcccgagttacttagcactgggcttactttctccctgagatgaccagtctccagtgattcctcagcttacacggcaaaaaacaagatgccaaatggctcttcttgataytggatgactgggtttaattcctgggatatggatttgccaacagatgcagcttcttgcacatataattccatgacttccaactttacctttgaaatttctaggaaggtgtctgctaatctgaagggatgctatgagattcttagacaaaaaaaattctctaaatttgtcactatttgcaatgctattatgtatgtcatgataatatcagctagtatttttgaagtctttgttttacatgttttatttgattttatagtcaaagaaaggcaaaaaggttgatatttttattatctctatttggagatgaggatactgaggtaaagaggtcaagaaacattcctgagatcacagagctagctcatggtggaactagaatagctaccatgctaaacagctgcacatactgagggattcaccactgcacaaag

SEQ ID NO: 866217 - DNA, 628 bp, Homo sapiens
tgggatttggcaaactccagccatttctagtcatttttacctgctgcatttgcatatacatatgatatctgttatcctaattatatctattttcccaggtacagacagacataccccagagttggggtgcccattagcagatcacacaggcctctgcagctgtgttttgattagcggaagaggttctttggcatcggagaactgaaatcaccttttagggtatgacaagctcagccgagcgtctcgcaaatgaaaatcagaggtttctctaaggaaggagtgagagcraccatacagaattaaaaggcgaataacctttaatggtttcaggtgtgaacgctcagtgacgctgaaggcctgccatccatgagacagcacgatgttccaggatctctccaggcccacatttacccccatatatgcctctggaaggaggggacagccatgggagccccccagggggagctcaactcaccatttttccaggctgggttccagcagggaagatgtgaaggtaaaggggccaaagatggctggaagagggagcacaagagtattatggatcatgatgcatgcccacctgccctaaatgacttgcaaacagtgtgaaaatccttatgcaagtcac

SEQ ID NO: 866218 - DNA, 635 bp, Homo sapiens
ccagaaacaccctcccaagacatggccttcttctaacctaccagacatctgctgggcatctacaccccggcacttttactcaggatctcttttcgtgtaatcctagcatttctgcccattttactgatgagaacaccaaggctcaggcaaataaacttacytaaagttagcatctcagcaggatatggtgttctgatgccaagaacagtgctcattccaaaaccctaatgttgtgggggggtggggtgggtttcatcagaaggagccttaggggaagaatctgtggaattttggttggtctattaccctctgttatctatatgtgtaacctactgccatcatcatcaccatcaacttcataatctcatcaaaagataatcatcttcattgctgttatgttatgagcagccagtgactgtgctacccaaataatttagatccattggccctttgctcaggatagtggtgaagagtggggaatctaaaatagatgtcttgggtttaaacaccagttcttcttcttaacagagtgagggtggcatcgggcttagtctcttgcccaatattgcacaggaagtaaatgatggtagtctggattaaacccaggctttttggtccacaaaatgcatgttatc

SEQ ID NO: 866219 - DNA, 588 bp, Homo sapiens
ggttgctcatattcacacaccctagagtagaggaagcagtaggaacccggacctcctcaccagagggctggggagggaagctgcagtctctggttgggaggagacgagcagctggccaaaggcccctttgtagaaactggccatgctcttcctctgggcgggaggytccagcctggagctccgggcctgcccctggctttcttctggccattgtgagcgtgtattgatcaggccgggaagcaataggcctgcagcagctgaagctctagggtgggccgcattgatcggacccccgccccaggatatttataggatgggctgggctagcaaataatcggggagagcttgtttaacgagggttcagggtgctcttcgctagctggttaactttaagtattggaaatggaattgatgcgcacataataatattatgattcatacaaaccacttctcaggcaactcaatatatttcattacctcctttctagcaaatgtattgatttctgttttgcggttttataacacaatttcaaggctgttgtgggtttaatgagccgtgttcttatgatgtttaaaaagatttgaagc

SEQ ID NO: 866220 - DNA, 572 bp, Homo sapiens
actttataaggttcatgagaggagtccatgaaattataaatataataagttggcatgaaagtgacgggtactcaatgcagaatggtcattatgatggctctgtccctccgcagccccaccctgcccacaaaatgtgctgcctgcagagaatccaggcatatcscactgcctttttcatattttaacagaaagttctacttaaatatacagtaagtcttctaatggaagttgtctttttttctttttttttttgagacagggtttcactctgtcacccaggctggagcacagtggcacaatcacagctcactccagcctctagttcccagcctcaggcgatcctcccatctcagcctcccgagtagctgggaccacaggcacatgaaaccactcctagctaatttttctatatttttttttgtagagatggggttcctccatattgcccaggctggtctcaaacccttgggctcaagtgatctgcctcccttggcctcccaaagtgttgtgattacaggcatgaaccactgtgcctggccagaagcagtctttgaatctaaatatatacatat

SEQ ID NO: 866221 - DNA, 560 bp, Homo sapiens
cttccacccccacactactggtaattacgccatctagcttattctaaattttcgtcttcatatatgtctttcagaatgctttttttttttttttagatggagtctcgctctgttgcccaggctggagtgcagtggtgccatctcggctcactgcaacctccacctcccaggttcaagtgattctccttccttagcctcctgagtagctgaaattacaggcacgcaccaccatacccagctaatttttgtatttttagtagagacggggtttcaccatgttggtcaggcttgtctcgaactcctgacctcaagtgatctgccagcctcggcctcccaaagtgctgggattacaggcatgaggcaccgtgcccggcccagaatgcttyttaaaaatctttccatcttatttaaatctagatgttttaaagtatctacaggcaaattctagggcacatttaaatgaagtattttaattctgactgtataatactaaattagttaactggtatggtcatgaaatgtgatcatctgatttatgcagttttctcattagcagagag

SEQ ID NO: 866222 - DNA, 640 bp, Homo sapiens
agctggaatagccatttggtagggtagatagattatttctccctgtgtatggtatctatgccaggtttcctagctctctcagacccagaccttaaataaactacctcataccatgtactgtatcagaatggatctgttgtatgcaactaaatctcaaatattcaaasagaaactattaactaacaataactttctctagaaaggctcacttcctcttctttgcactcagtgcctgctgtatgctctcatagttcatcatttttctcactgtaatattttttattattgctcaactctctcttacctcaccctctagaatggacatattctgatgacagtcccctgtaatttatccatattctgataaaagtatattgtgttgcctttggggaactccactctcccaatctcagcccaggtggttagggcatgtgacccaaacatggccaatcagcatactctatgaccttggttcaggagtaaattgtgatgtagggtcagaccaaggagagtatgcttgggacttcatgttagaactactgcaaacatggcattcttgcactgggctcccttgggtgacagaacataagtctggaatatcttgacagattagtatcatttgagaagaaattgaaaatta

SEQ ID NO: 866223 - DNA, 637 bp, Homo sapiens
tacatatttttcattcctttttctaccatccttgtaaaaaattcagccaaatgatggaaatgcatacacattcacatacactccagttctctcctccaccctcccactctccctgttgactctattgtcattacctccatctagaaggtctgaatttcattttttctgccactggccaattaggcaacctctgaacatcttcactctaagattctatttgttcatctatggaataagatcaataatttaattcttacctaccttcccagaaggatcactgtatccagtgaaatgtggctatgaaggtatttggggagaaataatgacccatctaaataaaagcagttattttactaaaacaaaaaatcattaggagggctcctgaacagagttaggaagttgaggctttatgctgaattgaaaattcttattagamttgagaagttctggaaagactcagtgtagattatccactgcttgttgagttatttattaaagatctattttccagaaataattacaaaatcagtattttcaaatgctccccaccccgtagagttttgttttttcagaacacaagcattggttcttgccaattgatggctcttgccaattggtggctcttgggtccatttgc

SEQ ID NO: 866224 - DNA, 741 bp, Homo sapiens
atatatttaattatcctgtgagcaaagacataaaaatgtgggggtattgataaacaagaatagcaaaatattgagaattgttacagcctagtgttagacacatggagtttatgatactattctctctacttttatgtatatttgaaagtttccataaaagttaaatttaaaaagaaatacttaawaaacttcatatttaatgatgagttactgaacactttcctctgagatcaaaagcaaataaagatgcctgatatcaccactccaacattgtaaggaagtttctaagcactataataaggcaagaaaataaaggcataagaattaaaaagaaatgaaacagccatcattcatggatgacacagtttcatgtaaggaaaatccaaaagtatctacaaaatattaaaattaattagtgaactgaataacgtctcaggacacaaggttaatacataaaacttaattgtattacaatatgccagcaaccaagaaaaagaaaataattttttaaagacattaaaaataccaggaataaatgtaatggaagataaatatgacttctttggtgaaaacgacataccactgagacaaattaaagataatctaaacacaattacttactaaacactattatgttatatgccagatactgctagattgaggatgtagtgataagtgaaaacagacacattctttgcccttcattagataaccatgcaaattaatgtagtattgtaaatg

SEQ ID NO: 866225 - DNA, 741 bp, Homo sapiens
atatatttaattatcctgtgagcaaagacataaaaatgtgggggtattgataaacaagaatagcaaaatattgagaattgttacagcctagtgttagacacatggagtttatgatactattctctctacttttatgtatatttgaaagtttccataaaagttaaatttaaaaagaaatacttaaaaaacttcatatttaatgatgagttactgaacactttcctctgagatcaaaagcaaataaagatgcctgatatcaccactccaacattgtaaggaagtttctaagcactataataaggcaagaaaataaaggcataagaattaaaaagaaatgaaacagccatcattcatggatgacacagtttcatrtaaggaaaatccaaaagtatctacaaaatattaaaattaattagtgaactgaataacgtctcaggacacaaggttaatacataaaacttaattgtattacaatatgccagcaaccaagaaaaagaaaataattttttaaagacattaaaaataccaggaataaatgtaatggaagataaatatgacttctttggtgaaaacgacataccactgagacaaattaaagataatctaaacacaattacttactaaacactattatgttatatgccagatactgctagattgaggatgtagtgataagtgaaaacagacacattctttgcccttcattagataaccatgcaaattaatgtagtattgtaaatg

SEQ ID NO: 866226 - DNA, 630 bp, Homo sapiens
ctattatttgggtctctgagggaggtctctcaaaccagaatccctcaaacccaactgacttctacatactttgaaaaaacaaagaaaataaatgaaagccaaaatatcactcataaattaatacagaccagcatggaagatgacccatcaggaatgatsgtcatgtgagcttactaatactgaatccccaaattaggaagacttaatttcctagtgttggcagcactgaaccagggacgcttcacctccccacttcttctagggtagaaggagaagcagagaaattatgctccctgtggacagctcacttccaagataaataaagtcagaacggagccaactatacccggttgttccattaacaattacaatcaaatgtcattccacctccccaagcaaaggatagagagggtaagaccataagtgccatacctaaggagttccctctgccttgaaggaaacatcaagagtagagaagaagcattcccatctctcaacacatactcccagccacttgctctagtcataccttagaggcatgcgactgatgggtgccaatggtctcctcttatgttcccagtgataaaaaaagaagccacaaagagattgtgaggaaatgatctaagagac

SEQ ID NO: 866227 - DNA, 593 bp, Homo sapiens
ggtttacatatgaatgccatacaatgtagaatacataaatacctataaacaaagcatgagcagagtggtgtgagtgtgtgagaaaaatactatttcaaactgagaagtaagaggaaactttatgaaatgattagtcctgaaacagaaatggaggatagatagaaatttgatgaaaggtgatttakaagcacactaaatagaaaaccccatgggaagactcagaagagaaaagggaattttgggggaacccaataagttctaaaaaaaggttgttaagggacgtaattatctatcaaaccataatattagattaagtagtttttaattctccaggattaattatgtagttttttattatatggtcctaagaagattataaacatcttgatttcatggaattctcctcttttcaatttaatagtgcacccttaataggagtttagtagtacacatttgacaatgagttaatcgtacccaacagagtgtaagttcctccactggttttcaaatgtattgaaaaagggattgtaaattcaataaaaagtttatttacatcattatatccagtttttagctaagttctttgtaatagt

SEQ ID NO: 866228 - DNA, 540 bp, Homo sapiens
gaataggatgcatgtttaatatttacaccacttttatttacttcgtttgaattattcaccatttagtgtggtttcattgtcacatacatgggaactaaaaacaaccatagaagcagaattttaaaatttcatttgtaggcaccaaaggtgttaaagtttattaattggggcacggtggcacatgcctataatcccagcactttgggaggccgaggcggacggattacctgaggtcaggagctcgagaccagcctggccaacatggtgaaactcsatctctactaaaaatacaaaaattagccaggtgtagtgaatggtgcctctaatctcagctactcaggaggctgaggcaggagaattgcttgaacccaggggacggaggttgcagtgagccaagatcgcgccactgcactccagcctgggcaacagagagagactccatctcaagaaaaaaaaaaaaagattattaattgagagtatgaaatgtatatttaaggttataagagtatttataataaatattcatagtattatgccttg

SEQ ID NO: 866229 - DNA, 605 bp, Homo sapiens
agccaatgaatgagtcctcccatggtgtggcattcaggggtcactgcagggtgggcagcaaagttgagcagggtcttctcctccctcaggagggagagcattaaggaaacacacagccacaacattatttctctgactgatggaaggttaatgtgtttgctgatttacaagatgggtttgaakatcacaaacttggactctccattcttgcttcacaagccttcaccgggaggacggtagtgtcatgacgaagggctacaaaggtactaggatgggatgagtgccccttcctagcagcccagatggagatgcctcctcctccagttggaatggagcctcagtgtccagacttggtcttcaggacacatattccagagtgggttatcatgacattcattgccacacaacagcctgtgaacacgttcctctgcagcttgaaatgaatttcccagctgccctcaagtacaaacttcatgcccttatgggccaacctccagacctttctctccagccagctccctctctgaaattggaaccgcctccctccagctataaggaccgtatccaaatggaaactccaaactcagaattccccagaattccac

SEQ ID NO: 866230 - DNA, 607 bp, Homo sapiens
attaattttctattgtattgtactgtggtcagagagcagagcctgtacaagttctgctttttggaacttactgagatttcctttgtggactaatatacaatcaatttttgtaaatgttttatgagtacttagagaaaagatatattttcttttggtagagtacaaaattgacatatatctcttaaagcaggttcctattatatctatgaaatccattattcaattcctctgmatcctaattcatcctttgcctactaaatctctcaaagactgagggtgatgtgttaaggtcttccactactcttgtgttcccatcacttcctctttgtatttgttacagaattagttttatatatttcacagctacattattcagcacaaaaagcacatgacgctatctgtgtcttgtttatcgcatgtaccatttatcgacattaaataaccctttctgtcctttgtttttctttttttttttgagatggagtcttgctctattgcccaggctggagtacagtggcgccgtggcgcaatcttggctcactgcaacctctgcctcctgggttcaaatgattctcctgcctcagcctcccgagtagctgggattaca

SEQ ID NO: 866231 - DNA, 663 bp, Homo sapiens
ctttatttttctttttcaaaattcttttagctattctacttcctttgccttttcttatcaattttataataatattgtctatagccagaaaaaaattttgcagggatgttggtaggaattacattgaatctgtacattattttaaagagaactgacatctttgctgtccagtcttccaatccctaaacgtggcatgtatctctatttatattgtaccattttaattcctttgacatttatactttaaaaattgttttcttagtggctcttctagggattgcatatgtgtctcacctcatcacaatcctcagaattaactaattccagtagaatgtagaaactttgttccaacagtgcatcaatgaatcctcctcctttgtcttatcattgtcatatatattacatctctctctmtatatatgtatacatacattacactcaacaatgcagtataaaaattattgctttatatacttttatgtcttttaaaagttaggagaagacacaagaaaaatatgtctacggagcctcttgcattagccacatatttgtaatttctaatgttttaaatgtcttcctgtttaaatttcttctttcttgataatgaaattttaaatttattaccagtggaactgtttcttctaatgagatcttaggtagaag

SEQ ID NO: 866232 - DNA, 663 bp, Homo sapiens
ctttatttttctttttcaaaattcttttagctattctacttcctttgccttttcttatcaattttataataatattgtctatagccagaaaaaaattttgcagggatgttggtaggaattacattgaatctgtacattattttaaagagaactgacatctttgctgtccagtcttccaatccctaaacgtggcatgtatctctatttatattgtaccattttaattcctttgacatttatactttaaaaattgttttcttagtggctcttctagggattgcatatgtgtctcacctcatcacaatcctcagaattaactaattccagtagaatgtagaaactttgttccaacagtgcatcaatgaatcctcctcctttgtcttatcattgtcatatatattacatctctctctatatatatgtatacayacattacactcaacaatgcagtataaaaattattgctttatatacttttatgtcttttaaaagttaggagaagacacaagaaaaatatgtctacggagcctcttgcattagccacatatttgtaatttctaatgttttaaatgtcttcctgtttaaatttcttctttcttgataatgaaattttaaatttattaccagtggaactgtttcttctaatgagatcttaggtagaag

SEQ ID NO: 866233 - DNA, 604 bp, Homo sapiens
aaatcaagctgctctgggagaggcaggggttgattgagtaggaagagtgctcatactccatcctagacactattctttacacagtggcccttgaggcacctgcaagcaaccctcaggtctctctgaagccattttggaaatgctgtcctagaagcacccttaagtgactgctttgatgtgagaataaggtggtcttcacagagaatcatgttggcccccatctgaaggaggtagaggaaggcactgagcttacacttaggcaagaactgcaaaaggttccatgtggaacctttctttttttaatttctgaaaatgtgtcagtttgaggcaacaaataactccctttatctcggggtaaaagaattttagaacctatttcatccttctataagatgtcttgaatactgaatgactcatccccaccaatattctaacaattaatrtgtgtgaattcaaatgcatgaactcaaatgagctatgtcctaatgtctgtttcctttcagcctgaactttccttagtatttcttataattcagatttgctagcaaataattttctcagtctttgtttgtctgagaatgtttttatttcaccttcatttttg

SEQ ID NO: 866234 - DNA, 615 bp, Homo sapiens
gaggcaggcctttgactcttggtgtcagaaagtgggatcccccccgccgccacccagtaagacaggttggttgctgatgacattatgaggtcactgattcctgtgcttctgtccactctcttgctttccctatttctcagtcttgtccctttaccccagaagccctgactcagggtccccttggagctgagtagtgagtgctctttttcttgagagcccaggtctgtgtgaactcctctccagtgagcctgctctgcttccctacttctggcaaggatgttcattttcaattctgcttgaaaaaaaagtggcatcacattggttgtcatgcccacacagggaaacaatgtgtcttctgccagattcacttaaaaagacaaactttaggtcttcttgggagagctgcctgccacctgctgtgatcygcgtcttcaggacagctttggctcgtgtgagcctggagatgctggagctgtgtttgttctgcttgaagttattgtaattactacaaaagacacatttaccataccctgctcagctccaggtgactaatcctcttgctggtaatagggaaaactcaggaatatcctgagagctatttaaatcatacccatg

SEQ ID NO: 866235 - DNA, 620 bp, Homo sapiens
ctttatagcaactctaagaggtagaaactagtagtagccccattttataggtgagaaaactaaggcatggtgcagtggcctgtccaggtcacacagctgtgggtactggctgtgcgtaatgatgaaccagacagaccaacagaagagctgccatcctaaccctcactaacygtatctgagctgtttctttgtttatcagtactaattccaagactgtggaaaacccccatctgtagctaacctgctctgagaatcgtgtgtttaaactgaaatgctcatcagggggaggacaatggcatcatagaaaaatgtcccaaaaaagtaatttgggggaaagacatttacacacttacacacacacacacacacacacacacacacacacacacacacacacacacacacagagtagtaacctgtccagctcacacagctatgggtaatggcaccagctgatgacccagaccgactggccacagagccaccatattaaccctcactaacggtatctgagctgtttctttgtttatcaatactgcacagttgaccttgtcttggtggcattctactcaaatcagtttcaaagacaactgaaaaaactttattggtccactgggaat

SEQ ID NO: 866236 - DNA, 653 bp, Homo sapiens
tatccctcatttaatttaatcttttattatgcaccttagaaaatattagctgtcttctttatattgatcctgcacatttttaataataaaatttatttgtaattagttcatattttttcttttacaatggatacaactgcttagtttggtaaatactattgagtagccaaaaacaaatgaaggcagttataaagtacccccaaccccccaaatttggaaggaactctctaggattttataacatttaaagtttattgtaaagttctttgccttaaaaacacaattaatataccaatgagtacataattaccagtaaaccttgagagaacagactggttgatagatatggcaattggatcatacaaggtggtctgattcagggatattagggagattttgtgtaagtgaataaaaactagggactacctaccaaaaacaataacttcagatttttaggtgttctgtatcaagagttgacaattttttktgtgtgtaaagaggcagtgagtaaatattttaggatttgtaggctgtacggtctctcttgtaactacttaattctaccattctagaatcgtagatgatacatatacgagtgaagtgaaactgtattccaataaaactttatttacaaaaacagatagcaggccaga

SEQ ID NO: 866237 - DNA, 647 bp, Homo sapiens
catctcaaaaaaaaaaaaaatgtgttggaagcattagagattaataattaagcacctggcctctgaagtcaaacagatctgagttcaagtccacttacaggctatgtattcatggcaagttgcttagttttgctgagctgcagtttcrtgtgtaagaagggactcatgacaccacttacagcacttgtaaagactgaatggggtcctacatgcaaagtgcttaccacagtacctggcacactatgctttgggaaaaaacaacctttctgccttgccttccagtttccctgtagacccaagtataatccataatccatctatgtccaatagcactttctgagatgatgggaattgcaacacaccagccaccaaccacaggtagctactgactactcaaaatgtggctgatgcaactcagaaaatgaatttttaatgggatttcatttgaattaatttaaatttaaacagccacatgttcctagtggctaccgtatttgttagcggagattgctttctctatggatgtatcttggccttttgaacaaaccaggaaaactatggtttaaaacgtggcctggactggaggtccccacttgacactaccatggaaccttgagcaagtcagttcactcctgcgcctcagtttc

SEQ ID NO: 866238 - DNA, 559 bp, Homo sapiens
gaattcaatatcagtggttaagagctgctacagatatgggaaaacaaggaatcctagtactgactatttgacttggaggtcatgtatttttttagttgactagtcaaatcatggctcacaaagctattgtatttagctagaactcattggcccaggaagtgttttttttttttttttcaaatgtattaacatcatttaaaaatcagkgtcttttaatcctttaaaaatatgaaatagaggctattttgggctggcatttctgttttataatgattggctgcagctgataaatacagctctttttagatgggacttgttctctaatttgacgtggtactcgccacctcctaaaggctctaacaaatataaataatattaggctaagatcagagatagcatagaaattctttttttttttttttttttgagatgaagtttcactcttgttgcccaggctggagtgcagtggcatgatctcggctcaccgcaacctctgcctcccgggttcaagtgattctcctgccttagcctcccgagtagctgggattacaggcatgca

SEQ ID NO: 866239 - DNA, 559 bp, Homo sapiens
gaattcaatatcagtggttaagagctgctacagatatgggaaaacaaggaatcctagtactgactatttgacttggaggtcatgtatttttttagttgactagtcaaatcatggctcacaaagctattgtatttagctagaactcattggcccaggaagtgttttttttttttttttcaaatgtattaacatcatttaaaaatcagtgtcttttaatcctttaaaaatatgaaatagaggctattttgggctggcatttctgttttataatgattggctgcagctgataaatacagctctttttaratgggacttgttctctaatttgacgtggtactcgccacctcctaaaggctctaacaaatataaataatattaggctaagatcagagatagcatagaaattctttttttttttttttttttgagatgaagtttcactcttgttgcccaggctggagtgcagtggcatgatctcggctcaccgcaacctctgcctcccgggttcaagtgattctcctgccttagcctcccgagtagctgggattacaggcatgca

SEQ ID NO: 866240 - DNA, 620 bp, Homo sapiens
cttggtgcaactgttttcacaatccctttctgaggctccctgttcactggaagttctgtgggtgtgcagaggtgcactgcggaggacattcacttttagctaatataatagcacattacacctctgagcaccctaggtgataagtaacaaacaattcagaaaacagagaccagggaatggagggctaggttcgggcagcaagccacatgtgggaagaggtctgggccaaggacattaacagcagaggagagctggggcagatgagagtctttaaggcaggggatgctaatgaaataggaagagagtggcagggatgagggggctatcagkgaagctggggtggggaggaaaaccctctgctcctatccctgtttggctctgcctgagataagtccctgagtcctgctgagcatatggactgggagcctgctgggaagacacagaagccccctgctaagccacagtctcaaataacaatgtgaatgaggactgccttatgcttgcagagcctgacttaattggtatttctcctaattatcagatttaatcaccacctctccagtgaaataatttttgactcaaatgagagattagtataaagaaagaacaagtcaaaaaaa

SEQ ID NO: 866241 - DNA, 598 bp, Homo sapiens
tctagttgcccaagctggagtgcagtgccatctctttttatcaggtgcaaactgctgaatatagactaaaaaatgatgttatcacattggaaatacagttgttaaaactgttgtgtaaagattaaattttgaaaaattgtgtacgtaaacttctaattatcatacatgccataacaatcgaatgagccagccatayatattaaggtggaactttaactagaatttgaattaagaaacagattactactatccaaccatgattaggggtgagaggactaatagaatcaacaagacaccagcaaaatttacttagtattaacccagaatccatttaagaattttctggatgagaattttatgtgtgcctcatacgctatgtatatatgtatgttacagacaaaatgctgtatttagatattcggagatgagaaaccctattcttagagaagttaatttgctgaaacttacagaataagtgacagaaccagaattcaaaagtcagtcctctcttctccctcaatagatagataaagtagaaatagctatattgatctctttctttctctctctttatatgtacatattatatttatagatg

SEQ ID NO: 866242 - DNA, 717 bp, Homo sapiens
ctatcaatccagcttcttcaggatgatggggaacatggtaagatgaattctatgagcatgagcccagtgtgtttgctacttatgactcactggatccaatcagcataatgtcataatgttgtcaatgaaaagagttgaactctgtaaaatatttgaagagatttattctgagccaaatacgagtggccatggctcatgatacagcactcaggaggtcctgagaacatgttaccaaggtggtcggggcacagcttggtttcatacatttaacagaggcatgagacatcaatcaaacacatttaagaaatacattggtttggtccagaaaggcaagacaaatcaaagtgggggcttccaggctataggtgaatttaaatattttctgctggacaattggttgtttgtgtctaaagacctgggattgatagaaagggaatgttcaggttaagataaaagattgtggaractaaggttattttgaagccttatactggctgcccttcgagacaacagatgacaaatgtttcctattcagattttagttaatttctttaggattgagagagtctggaagaaaaaaatctagctatgttaatagagattctttacatatgcaaatttcccccaacaaagaacagctttccagggctacttcaaaatatatcaaagaaatgtgttttgggggtaaaatattttgattttcttctttgtctagta

SEQ ID NO: 866243 - DNA, 717 bp, Homo sapiens
ctatcaatccagcttcttcaggatgatggggaacatggtaagatgaattctatgagcatgagcccagtgtgtttgctacttatgactcactggatccaatcagcataatgtcataatgttgtcaatgaaaagagttgaactctgtaaaatatttgaagagatttattctgagccaaatacgagtggccatggctcatgatacagcactcaggaggtcctgagaacatgttaccaaggtggtcggggcacagcttggtttcatacatttaacagaggcatgagacatcaatcaaacacatttaagaaatacattggtttggtccagaaaggcaagacaaatcaaagtgggggcttccaggctataggtgaatttaaatattttctgctggacaattggttgtttgtgtctaaagacctgggattgatagaaagggaatgttcaggttaagataaaagattgtggagactaaggttmttttgaagccttatactggctgcccttcgagacaacagatgacaaatgtttcctattcagattttagttaatttctttaggattgagagagtctggaagaaaaaaatctagctatgttaatagagattctttacatatgcaaatttcccccaacaaagaacagctttccagggctacttcaaaatatatcaaagaaatgtgttttgggggtaaaatattttgattttcttctttgtctagta

SEQ ID NO: 866244 - DNA, 718 bp, Homo sapiens
atgccactttccttcccaatccaggaaagaaggtgagtcagtatggaattaaggagataaagatatcaggttgttgttcttgtagaaactataagctcttagagaaaaattattaactcccatccccaaagggacaggggagctgcttctcaaaaaattggaaaacatatgacacttttagaaatggatttctgacaagaagaaagcctggcataccatcctcctagttagttgtctgttagacagtagatctcctagagcagagcaagaaaactggagacagctacagaagtgaagggaatagagcaacctgttttttacatctggcactttgagaatttctgagtttctcaaagatcagtgggatgccaccaaaggactaaactttcttgccagaactgcacaccatatattaaaatttacctcaagacaagaggatgacatccgcatgagctttggatatactccaagttacaggaatgaagaggaagggaaagttaartttaagggtgaccttccagacctgggaaatgcagtagagaaactctctaggattctcttaagaactcacacatgcaagccaacagagcaaacatttggatggctgccatggaggcatcatgagtctgtattagtttcccaaggctgccataataaattagcacaaattaagtgatgtaaactaggagatatgtattatctaacatttctggagtgc

SEQ ID NO: 866245 - DNA, 696 bp, Homo sapiens
gaaattgacattaggttgatggggataataattccatttttacagcaataaaatgtattctttttctagaaagaaagcaatttctaaaagcaaagtaataatgtaactattgatttaccatcaaaaatgtatgtctacctgatagttagtgaaaataaaatttagagatttaaaacaacactgcacaaatttataattattttcctccttcatctcaatagcttttaactgtgtcttatctctatcctgagattaattgacattttttacagttggagaatgactgatttttaaattttttactgacactatctaatactgctttggtcttctaaactctactctgaactgctgcaaagatacctytgtcctcataattccgtttacaaccttcttcattacctgtaacatttgaataagaaatgttgtccatggccttatgcttctcatgtagactttaaaaatattcccaataaacaagctctttattattataaatgataaattaaaaagatgaagaattaactgcattgctactctttttcctctagtttcctaagacatcatcacaagttgccttccagaagagaaataaataaatggattattaaagtctcaagagagaatggagcttattttctcctctcttagccactcactctcatcatctttgtaattaaatctttgcaattaaat

SEQ ID NO: 866246 - DNA, 692 bp, Homo sapiens
gggactctggctgaccgcaggttcatgtgctggtgggaactggagctgtgtccaagcacagctataggagctggcagcctgcatgtcagtagttgcaggggctaactgggggttatggacaggggttaggccagctatgtatgcctgtgttactgtggagaccaaggctggccgtgggcacatgcacacatccgtagctgcagaggtcctatgggggcatgcatgcagcagtgagagctggtaacagaggtcagatgactgcatctgtgtgctcagctgcagggactggagctaggcatgtaaacacagtggacaaggccagaaatgggagttgggcccagctgcttgtatatacacagctgtgggagccaggactagwgttatatatgagcctggctacaggcatatgtgctgcagtgggagctgaggccagggcctgcagtgtgggcccaggaccattttcaggcatgtgtattgtggctgctctgggtccctgggccaaggcacctgttatgacagcagctggtgtggttcctgggagggaaaaggaagatgagcagtggctcaggcacctggaaacagcaaaagcaaaaagctgtggaatcctccatggcaaaacctgcagggcatccattgaggctgtgttggttgttgatttcttcagtagcaaaagctgctaatgtctatgacag

SEQ ID NO: 866247 - DNA, 692 bp, Homo sapiens
gggactctggctgaccgcaggttcatgtgctggtgggaactggagctgtgtccaagcacagctataggagctggcagcctgcatgtcagtagttgcaggggctaactgggggttatggacaggggttaggccagctatgtatgcctgtgttactgtggagaccaaggctggccgtgggcacatgcacacatccgtagctgcagaggtcctatgggggcatgcatgcagcagtgagagctggtaacagaggtcagatgactgcatctgtgtgctcagctgcagggactggagctaggcatgtaaacacagtggacaaggccagaaatgggagttgggcccagctgcttgtatatacacagctgtgggagccaggactagagttatatatgagcctggctacaggcatatgtgctgcagtgggagctgaggccagggcctgcagtgtgggcccaggaccattttcaggcatgtgtattgtggctgctcygggtccctgggccaaggcacctgttatgacagcagctggtgtggttcctgggagggaaaaggaagatgagcagtggctcaggcacctggaaacagcaaaagcaaaaagctgtggaatcctccatggcaaaacctgcagggcatccattgaggctgtgttggttgttgatttcttcagtagcaaaagctgctaatgtctatgacag

SEQ ID NO: 866248 - DNA, 668 bp, Homo sapiens
cacaataatagtgggagactttagcaccccactctcaacactagacagatcaatgaaacataaacttaacaagaatatttaggacttgaagtcagatctggaccaagtggacctaatagacatctacagaactctccaccccaaatcaaaagaatatacattcttctcagcaccacttcacacttattctaaaattgaccacataattggaagtmaaacactcctcagcaaatgcaaattaacagaaatcataacagtctcagatgacagtgcaatcaaattagaactcaagattaagaaacccactcaaaattgcacaattacatggaaaccgaacaaccagctcctgaatgactactgggtaaataacaaaattaaggcaaaaataaagatgttctttgaaaccaatgagaacaaagacacaatgtacaagaatctgtggcacacagctgaagcagtgtttagagggaaatttatagcactaaatgcccacaagagaaagcaggaaagataatgcccacaagagaaagcaggaaagatatgaaattgataccctatcatcacaattaaaagagctagagaagcaagaccaaacaaattcaaaagcgagtggaagacaagaaataactaagatcacagcagaactgaaggagatagagacatgaaaa

SEQ ID NO: 866249 - DNA, 668 bp, Homo sapiens
cacaataatagtgggagactttagcaccccactctcaacactagacagatcaatgaaacataaacttaacaagaatatttaggacttgaagtcagatctggaccaagtggacctaatagacatctacagaactctccaccccaaatcaaaagaatatacattcttctcagcaccacttcacacttattctaaaattgaccacataattggaagtcaaacactcctcagcaaatgcaaattaacagaaatcataacagtctcagatgacagtgcaatcaaattagaactcaagattaagaaacccactcaaaattgcacaattacatggaaaccgaacaaccagctcctgaatgactactgggtaaataacaaaattaaggcaaaaataaagwtgttctttgaaaccaatgagaacaaagacacaatgtacaagaatctgtggcacacagctgaagcagtgtttagagggaaatttatagcactaaatgcccacaagagaaagcaggaaagataatgcccacaagagaaagcaggaaagatatgaaattgataccctatcatcacaattaaaagagctagagaagcaagaccaaacaaattcaaaagcgagtggaagacaagaaataactaagatcacagcagaactgaaggagatagagacatgaaaa

SEQ ID NO: 866250 - DNA, 547 bp, Homo sapiens
tacatatatatgcaattatatatatgcagttacacacagacatacgcataaacacataagacacacagacacacacatatatacacatatatacatacacacatatgtatgtgtgtgtgtgtgtgtgtatcgttttcccatgacatttttcacctaacaygctggactaaaagagccgtggctttagcttcagtactggtgtaaccattaccagctttgagaatatgctgtatttatttccaaaaatcaaaacatatatatcttttggtaaaattgagcaacatctagacatgtctgtctcctttcctgtaatatattccctagtacctaaaaataaccacttagagggaataataaacctgatcacaggcatatggaagacatggagaaagcccaagtggcctgatactagctggaagagccacagaggcatcactgagcacttgcttcaaatgcacaacttcagaccccacactcccaaagactgacaaaaacccaaatttgcattttaacaagattttcatttcattgatttgcgggtatctct

SEQ ID NO: 866251 - DNA, 633 bp, Homo sapiens
tgcaacagcctattttgacatcctctagcctcataatctgaatttggacttggattacaatgaggtgaaatttggcaataataagttgatacactttggctttttttttttgccacgtgaaagcaattatctgttttacttagaagcaagacttttaaggatttttaatgccactttgtacctactctgctttcagcaagatacacgtgtgttcagtcatttatagctgtatagcctaatgaaaatatagcaacatctaaatatattttattttccagagttatgcagggataatgaattttctgtaacatttcttttgcttgcagcattcggcatcaacagcattttatatcagcgtggcatatatccatctgaaacctttactcgagtgcagaaatacggactcaccttgcttgtaactactgatcttgagctcataaaatacytaaataatgtggtggaacaactgaaaggtattttaatcattggaaacaatttgagtcttgcagattttctagcatcttaagcagtcatttttccgctctgcacatagaagtgtactgacatctcaaatatattttcaattgagaggaagaaaataatatataaaatggaagaaatacactcttcccc

SEQ ID NO: 866252 - DNA, 633 bp, Homo sapiens
tgcaacagcctattttgacatcctctagcctcataatctgaatttggacttggattacaatgaggtgaaatttggcaataataagttgatacactttggctttttttttttgccacgtgaaagcaattatctgttttacttagaagcaagacttttaaggatttttaatgccactttgtacctactctgctttcagcaagatacacgtgtgttcagtcatttatagctgtatagcctaatgaaaatatagcaacatctaaatatattttattttccagagttatgcagggataatgaattttctgtaacatttcttttgcttgcagcattcggcatcaacagcattttatatcagcgtggcatatatccatctgaaacctttactcgagtgcagaaatacggactcaccttgcttgtaactactgatcttgagctcataaaatacctaaataatgtggtggaacaamtgaaaggtattttaatcattggaaacaatttgagtcttgcagattttctagcatcttaagcagtcatttttccgctctgcacatagaagtgtactgacatctcaaatatattttcaattgagaggaagaaaataatatataaaatggaagaaatacactcttcccc

SEQ ID NO: 866253 - DNA, 726 bp, Homo sapiens
cctttaccattatgtaatggtcttctttgtctcttttgatctctgttggtttactaggattgcaactccttcctttttatgttttccatgtgcttagtagatcttcctccatcccttcattttgagcctatgtgtggtctccgcatgtgagatgggtctcctgaatacagcacaccaatgggtcttgactctttatccaacttgccagtctgtgtcttttaattggagcatttagcccatttacatttaaggttaatattgctatgtgtgaatttgatcatgttattataatgatagctagttattttgctcattagttgatgcrgtttcttcctagcatcgatggtctttacaatttggcatgtttttgcagtggctggtactggttgttcctttccatgtttagtgctcccttcaggagctcttgtagggcaggcctggtggtgacaaaatctctcagcatttgcttgtctgtaaaggattttatttttccttcacttatgaagcttagtttggctggatatgaaattctaggtttaaaattcttttctttaagaatgttgaatattggcccccactctcttctggctcgtagagtttctgctgagagatccactgttagtctgatgggcttccctttgtgggtaaccctacctttctctctggcttaacattttttccttcatttcaactttggtgaatctgaccattatgtgtcttggagtt

SEQ ID NO: 866254 - DNA, 589 bp, Homo sapiens
ctttgacttgtagactcgccacatcaatctctgcctccattttcacatcactttcttcctggtgtctttgtgtgtcttctcctctttttaaagatgttttattgaattttgggcccacctggataatccaggataatctaatttagagatgattaactaaacactatctgcaaagaccctttttccaaataaatcatatacacaagttccaagtaaaatttctctatatctatctatccagctagcaagytatattgctatctagctatctatctgatatggtatggctctgtggccccacccaaatctcatctcaaattgtaatccccatgttttgaaggagggagctggtgggaaatgactggatcatgggggcctttcctcccatgctgtactcatgatagtgagtgagttctcatgagatctgattgttttacaaggcagttttccctgctcttgcacactttctcttgcctgttctccttctgccatgattgtaagtttcctaaggcctccccaaccatgtggaattgggagtcatttaagcctctttcctttataaattacccagtctttggcagttcttgat

SEQ ID NO: 866255 - DNA, 679 bp, Homo sapiens
gatagacagattttttttttggtggaggggtaccatttaacccactgcagttaatgccctgtatctaaaagtttacagctattgtagtgataactccctgcctgcaataataaatactaggaggcaacagctgttgcyaatttaagtacaaaattaggacaccaagattaggtttctccattgcaaaatgtaggccaattcaacaccaacctgtgactctacctgtacactggtgctggtctaaaaactttggcttgtccatgaggttataacaacagaatttaagagtaagcatttaaaaaactccattagcaatttgacacggtaaatgaaagataataataataatgaagcttctatttttaaagtctttttagaattttatagttctagtaattcagttttattttttaaaatattggtctgagctgaatttaaaaagtatataaacctgatccttcatcacaggttgtttgagaagcactggtataaactgtcattggtaaaactagaatataacaatatgcctccacaattacgttcattcaaaggagagaaaacacatcagtctcaggaactgaagggatgtgcttcatggacaatgtgctgtatatcatagataataatttctaattgccctgtttaatgtacttcagcatgtagcttttatcactgctat

SEQ ID NO: 866256 - DNA, 640 bp, Homo sapiens
tgccttcctagcgtaactgttgtaagtttactctcaagaggagaggctactagagtcctggaagagctactcccaagacatattaagaagtggacctaggcagtgcaatggatgaatattagcagatatggagatatgttacctagattccccttcaaagaatgaattgccactcgactgtgagcagttagtcacctcccatattgtctgcttcagcttcaaagagcttccttgtgaaaagttacaaccttcccttgaagcccatatttggtgactgaatgaggcatcagcataarattttggccatcttgacacaatgttcaacaactttaatggattttctttagagtgctctattttgttgggtaaggatttgtcagaatgcatttcagttcaacttctctctctgtccgataatggttctcccccttcctttacagatgttgattcataataaataccttatatctaacccctaacctgagataactttcaaacgatttgcaaagacttgaagctgaatttctgagaatatattggaacatacgttcccccagtagacagacctggatctacttgatctggagggtctttcttgatctggagaacctgagcttgaatcctaattccactaccctta

SEQ ID NO: 866257 - DNA, 577 bp, Homo sapiens
ggggagtgtggagaaaaatataaaacaaaacatcattaccatattctggtctaaaatatgaaaagtgcgatgctaataaatactttgcagtttgcttcttttcaactcttgatctctgtcttgtttactcaaacatgcttcctctccactatcccattgccttcgcccttctactgcccactcctttttgtactctcctacttctgtctagaagaatacactcatgttggacagaatacacaatagtgcccaatgarccttacatttccctgattaaaccccccataattattgaaatcaagagacttcccaggtatttatctttctatccacacttaatatcgaatacccgattgcattactgtagtagctttagaaaactgaactagtacacgcaagtaaaattttaggataaagactaaggcatcttttctttttattcatgtattacctttctagatagatagatagatagatagatagatagatagatagatagatgatagatagacctctcaatcttttttctgtatgggacatggctttgccatgagggcagagacttttttggtcgctt

SEQ ID NO: 866258 - DNA, 523 bp, Homo sapiens
gccttacctacaaacctcagagcttggtcttcctgtgttctgaattggcaaataaaaatgagtatcctgaatctagcatgagagagagaggagaggaggcacattctagctcatgccttttcttctctggaattcctgaatgattctttatgagttgatatggggttctgtgtgtagtcagaggagtttgatgggatgggatgaacaataggaaatgacaagcagaaaggcaatgtattccttgtggcaggctagatggaagtacattgcagggtagctgcactgtgagtgaagamagatcaatggcaggcagagaagacagagctatgcctccggattcacagacactgcctccagtgctgacatggtgccagaggcatctgggaaactactacagctgacggtttgacaagccagtctggtctatggctaggagaggtgaacttgctgtctttgagcaaagaattcaggccaattgtaactacacaaagcagcgcaggaaacagtaatatgtgctatgtgt

SEQ ID NO: 866259 - DNA, 598 bp, Homo sapiens
ttagcaccactatcaccaccaccaccaccaccaaaaataaagtgtaatacaaaacaggaactatctcacttagagggtagctaaggagatgaacatccttttgctaactaacattttaatacacaatttttcaaacactaaacrgagtagaacaaattttgcagtaaacgtacatatgaccacaacctagtttaccattaaattttttcttgtgcatgtgtaccacccatctctctaaccctctctgcaataattatttaataaattttcatgatcttgatcagagtttttgatgtatttctaaggaaacagtaaatagcagtagacttctacttaaatacttcaacatacttatcactattaaatatttgtatatagttttattttgatgtaaaatttacatacaatgaaatcttaaaagtattctgagaactgacaaatacatgcatttgtgtaaccaaaacacctatcaagatataaaacatcagcatcaattcaaagacaacacagtgctgatttttctaccctagattagatttttctgttctagaacttcatatacatgtaatcatgtttgttcctttatatgcaagtatgt

SEQ ID NO: 866260 - DNA, 598 bp, Homo sapiens
ttagcaccactatcaccaccaccaccaccaccaaaaataaagtgtaatacaaaacaggaactatctcacttagagggtagctaaggagatgaacatccttttgctaactaacattttaatacacaatttttcaaacactaaacagagtagaacaaattttgcagtaaacrtacatatgaccacaacctagtttaccattaaattttttcttgtgcatgtgtaccacccatctctctaaccctctctgcaataattatttaataaattttcatgatcttgatcagagtttttgatgtatttctaaggaaacagtaaatagcagtagacttctacttaaatacttcaacatacttatcactattaaatatttgtatatagttttattttgatgtaaaatttacatacaatgaaatcttaaaagtattctgagaactgacaaatacatgcatttgtgtaaccaaaacacctatcaagatataaaacatcagcatcaattcaaagacaacacagtgctgatttttctaccctagattagatttttctgttctagaacttcatatacatgtaatcatgtttgttcctttatatgcaagtatgt

SEQ ID NO: 866261 - DNA, 549 bp, Homo sapiens
atctccaccaccaagaattcagaacgaacccctgtatctgtcagggttcagccagtaggagatatatctcaagagatttactgcagggaattggcttaggtgattgttggggctcatatggcaagttagaaattttataggataggccatcaggaaagtcaagccacaactctccatcatgagctgaggctgctgtccacaggtataatttctacttctaggaaatctcagcttttctcttaaggcctttcaactggttaaatcagcctcacccagactatctagaataatctcctttacttaaaattaatttctcataaatgttaatcacatatacaaaataccttcatacaaacacytgaattatagtttgattgaatactggggactatagccaagccaagctgacatatatactgaccatcacaaccctctaccctgttactgttatatctccattgaagtactcaccatggtgtgtcttgtgttagaattaggtacacagctgttcttccaacaaagaaacccttgagaacaaacaccatgaat

SEQ ID NO: 866262 - DNA, 591 bp, Homo sapiens
gactcacagttctgcatggctagagaggcctcaggaaacttacagtcatggtggaaggcaaaggtaaagcaagtaccttcttcacgtggtggcagaaaagagagagctagcaagagcacagaaaactaccttataaaaccatctgatctcatgagaactcactcaatatcatgagaacagcatgagggagaccgtccccatsatctaatcacctcccatctggtccttccctcgtcatgcagggattatggagattacaatttgagatgagatttgggtggggacacaaagccaatccatatcactgaggctttcttatttttactcagcatgagggttttgagatttatcaatgtcatctgtattagttttccactttgctgagtactattccattttacgaccacatgtgactatactacaattgtttatccattctcctattgatgaacaccttaactctcttcaggtttaaactattatgagtaagacagctatgaacatttctgtacaaatgttttgatgaacatatgttattatttttcttgattcatttgtgtctctatatttttgtttatggtttcttttaag

SEQ ID NO: 866263 - DNA, 591 bp, Homo sapiens
gactcacagttctgcatggctagagaggcctcaggaaacttacagtcatggtggaaggcaaaggtaaagcaagtaccttcttcacgtggtggcagaaaagagagagctagcaagagcacagaaaactaccttataaaaccatctgatctcatgagaactcactcaatatcatgagaacagcatgagggagaccgtccccatgatctaatcacctcccatctggtccttccctcgtcatgcagggattatggagattacaatttgagatgagatttgggtggggacacaaagccaatccatatcactgaggctttcttatttttactcagcatgagggttttgagatttatcaatgtcatctgtattagttttccactttgctgagtactattccattttaygaccacatgtgactatactacaattgtttatccattctcctattgatgaacaccttaactctcttcaggtttaaactattatgagtaagacagctatgaacatttctgtacaaatgttttgatgaacatatgttattatttttcttgattcatttgtgtctctatatttttgtttatggtttcttttaag

SEQ ID NO: 866264 - DNA, 623 bp, Homo sapiens
aacatctgaatatctttccagtgattttaaaacatgacaattttatctaagaatagcttggaaggttatatatctcagcctgaagatatactttgatggccgtaatctttgcctttctgcttcagtgatatggagacggrttggatgccagggtgtcagagaatccgcctagctgattaggcttccatagacataacaaaggccatactttaaattagctccaacagtctaatcagagtgaacagactacttgaatctgtgatggagacatattggcagccgatgaaggctgactagagggattctggtgaaaaaccaaagtatataaatgctaaaagcagtttgattctagtgtgaggaaagggtgatttagaagaaaacatttatgttaacaattcatttctatcttaatttcattttctttaaagtttagctttacatatatgaattttaagaatcatacaaaataattttttctcatctatttaatgagtgacttaaaaatatatatttcataataattacactcaggagcattttgatagcacagatcacatcatcaagatgcccacttccatctgaagcaaaatgcactaattgaagattcagatcttttgattgaa

SEQ ID NO: 866265 - DNA, 623 bp, Homo sapiens
aacatctgaatatctttccagtgattttaaaacatgacaattttatctaagaatagcttggaaggttatatatctcagcctgaagatatactttgatggccgtaatctttgcctttctgcttcagtgatatggagacggattggatgccagggtgtcagagaatccgcctagctgattaggcttccatagacataacaaaggccatactttaaattagctccaacagtctaatcagagtgaacagactacttgaatctgtgatggagacatattggcagccgatgaaggctgactagagggattctggtgaaaaaccaaagtatataaatgctaaaagcagtttgattctagtgtgaggaaagggtgatttagaagaaaacrtttatgttaacaattcatttctatcttaatttcattttctttaaagtttagctttacatatatgaattttaagaatcatacaaaataattttttctcatctatttaatgagtgacttaaaaatatatatttcataataattacactcaggagcattttgatagcacagatcacatcatcaagatgcccacttccatctgaagcaaaatgcactaattgaagattcagatcttttgattgaa

SEQ ID NO: 866266 - DNA, 588 bp, Homo sapiens
gtcaatggtgtctgtcaatggtgacctagtcaatgctctgagaacctggaaaccaatagtgtgtgtattagtcagggttctctagagggacagaattaataggatagatgtgtatataaaggggagtttattagggagtattaactcacacgatcacaaggtgaggttccacattaggccgtctgcaagctgaggagcraggaagccagtccaagtcccaaaactgaagaacttggagtctgacattccaggacagaaagcatccagcatgggagaaagatgcaggctgggaggcttagccagtctaatctttctacgttcttctgcctgctttctattctggttgtgctggcagctgattagattgtgcccacccagactgagggtgggtctccctttcccagtccactgactcaaatattagtctcctttggcaacaccctcacagacacacccaggaataatacttggcatccttcaatccaatcaagttgacactcaacattaaccatcacagtgtggtttcggttcagagaccagcaagctcaagacacaggaagagctcatgtttcagtttagggctgaagg

SEQ ID NO: 866267 - DNA, 663 bp, Homo sapiens
tattctgctttgcccagtgtagaattatccaaacaaatagctagaggtgcagttgcagagtgactaaggaaattatttcaatatgtgtttgtccaggtgcagtcttttcttcttgggacatagtcatcttttcacttaacaggttgtaggtctgaaacctcactcaggtccaggaaatggagaaatgaccatgacttttttaaatcaaggtcgccatcttcagcctcttgaggagtcattcctgcattttttttggttatataatttaagagatatgttttggctgttcatttatttgtatttagakatgctgtattctattaaccatctccacaactcccagaaagttatgcctccctccttaccactccaaccttaccagtcctgtgttaattgagactcccaggcccctgatggttaaatgctgccacttagcctttattgattccatttgttctgtggcaaacaaaatctctgtgacagcccctcctatcatccactctgtgacatcccctcctgtcaagccccaagtggtggcttggggaagagagccaccactgaacttcttgttgattctggtatccatctcccttgtacactcctgatggccttcttaaatgcttggggaacagagccaccactgaacttcttgttgattctggt

SEQ ID NO: 866268 - DNA, 663 bp, Homo sapiens
tattctgctttgcccagtgtagaattatccaaacaaatagctagaggtgcagttgcagagtgactaaggaaattatttcaatatgtgtttgtccaggtgcagtcttttcttcttgggacatagtcatcttttcacttaacaggttgtaggtctgaaacctcactcaggtccaggaaatggagaaatgaccatgacttttttaaatcaaggtcgccatcttcagcctcttgaggagtcattcctgcattttttttggttatataatttaagagatatgttttggctgttcatttatttgtatttagagatgctgtrttctattaaccatctccacaactcccagaaagttatgcctccctccttaccactccaaccttaccagtcctgtgttaattgagactcccaggcccctgatggttaaatgctgccacttagcctttattgattccatttgttctgtggcaaacaaaatctctgtgacagcccctcctatcatccactctgtgacatcccctcctgtcaagccccaagtggtggcttggggaagagagccaccactgaacttcttgttgattctggtatccatctcccttgtacactcctgatggccttcttaaatgcttggggaacagagccaccactgaacttcttgttgattctggt

SEQ ID NO: 866269 - DNA, 624 bp, Homo sapiens
gtcctaaactcctttagaaatatatgtgttcataaacatgtacattacatttatatgtatatacatttacatttgattttgttttaagaaacttaggagtgtgctctaaattgtcgtattaattcaaagttggtcatcttattaggctgcaaaaaatgtggcctaaataccctagtttataattcwgcaaagtgcttggaagaggcacagtaggaatgatgaatggtaaagatgggattattactcaagtctcatttgtgacagttgacttccgtgatatttatcttacatttttctttttggctgtgtgtgtgagtgtaatacactttatatattagcattggtccatctattattatattggcagcaggagattttcattgattagtttctctctatttgctttttctttctctaaaccttcatgctgtaatgcagaagatttattttcaatgatttattaaaatgtaattctaaggtgactccttatcaaggaagtaatctgcaggctatctttgtttaaacttgcaagctgctttgtcaaggaaaactgcctatgaaattttcattataatagacagcttttcataatgaatgaaaaacagctattatgattgaaaacaa

SEQ ID NO: 866270 - DNA, 672 bp, Homo sapiens
accatcacattcaatatgtaagttgaacatgtatattcaaatatttttccttttaaaatggaactgtgactcatattatacagaacttactctgaataaagtaaaactagacagattgcagtgctttcccccagtcagctaagaattctaagagcccacagacataacagtgagagtttcaggtttgttttcaatagtcagatgtgttgcttattccacttttaaaaagttcatagaactcattaatacttttatataccataatcattcaccttcaacatttgatattgtgtttaaaatatgactttacttaattattttcaacaagcacttttccggagtatccaccagtcagaaacaccatttcaagtgctctggaaccttctgcttttacatattaataattcccaaacagagtgtctgcttcagacattagtttctgaaatagaattgagtcttaattagctcaagagaaactcctacttaagtagtcttagagaaaatgcactcatttccmcctctaatatatcctcctgttgtttgactgtgatgagaatggtcttttaaaagaggcctcaggtgtgaaaccaactgttgaggctcattgtcagctgctggtttctagagtattaattcaaaattagggaaaatataagactatgtctacattgg

SEQ ID NO: 866271 - DNA, 678 bp, Homo sapiens
cagccaacttcttacctgccccataaaaagtacttataaaacaacttttttcttgtctccttcacaaccagaaaaaaaacaaatctttgtaaattactgtcaaattacaagtaccactactggtgtgatcattttttgggataatatgtttgtaaacatatttactacaaaaatcaagagttttaaattgggtaaacgcctgcccacctggttactcagttgagtagggccttccttctgtttttttttttttttttaaagtcctctgttggtgtgactattaacgccaaatcactttgaaagttcagcaaaatgttttcagttttgagctgaaaaatggtattagtggctggagatggtatcacatgacatttccagcctccagaatgataatatgttgtctgctgacttaataaactctctttctacaattgttagtatcttcrgagatatcttttcagtatttgtttttatgtatattgagcaataatacaatcatacatggtcatggatgactaaaaatattcaaattgggatacttaggtagtgaatgagttttaaaagtgctcttaaataggtaagcagttgaaaatgatttatttcaattggcgttgtactgaactggcagcaaaaggagaggcagggaaaaaaatcctcatcccttcctaaaataagaga

SEQ ID NO: 866272 - DNA, 635 bp, Homo sapiens
gtgggacaatcacagctcactgtaagctcaaactcctgggctcaagcgatcctccctctgccgcctcttgagtagcttagacaacaggcatgcaccaccatgcctggataatttttaaattttttgtagagatagggtcttgctatgttacccagtctggtctcaaaatcttggcttcaagtgttcctcctgccttggcctcccaaagtgccgggattgaaggagtgagccactgcaccctgactgttcttatgttttaaaatcaatgaaaagacagamcataaagtttggaaaaaatagttaactatagagggaaggaggcaatagaataaaatgaaaagagatagaaactatttttaaaagtatcttgttttaaagatgtgactttgaaaacataaatattttacataatgattaaattaattaaacacaaagagcagttcctaaacattgaaagtaaaaagaaacaaagaaacctcaatgcgtatcctattgatggcataaccttccacaaaggaactatccgaagtggtcttaaaatgtaacaatttgattaaacataaatggtaggacaacagaatatgaaaacaatcttttcagtaatagtattattattggtagtagtgttgatatta

SEQ ID NO: 866273 - DNA, 602 bp, Homo sapiens
ggtatcccatctgtggttatgacatataaaatatgcctgtgcattttatatgattttgatatatatagaacataaaattattttcatgcttaggtcttctatatgcaaagtcaagtaaagtggacatttttaatccacatttaaacatatagagcatttaatttacaagtaacaactcartctagtacctagtaatgagcagttttattatttaagggaacacagacagaaaatgaaaaaaaaatgcagtaatttattgacatgtttttaaaaaactccaaggtcattcttaagaaataaggaagagaataaccccaaaacataaacatacaaagtgattatgtagattgcctagccctcaacaaacctttaatttaactgggttactggaaacgaggcataccacacaaaacactgactagactatagggaacctggggcagacagattttttaggtgtatcaggggatttgattgcactagttacctgctctctggaaagtagaacggtgccagggaataataaagggtagatagtaagagagggcatagtaggtaaccatgtttcattgaactgtttacccagtcggctctcttctgcc

SEQ ID NO: 866274 - DNA, 573 bp, Homo sapiens
atgcctgtaattccaactattccagagctgaggcaggagaatcactttagctcaagagttcaagaccaacctgggtaacacagcaagaccccatcagagaataaaactgtaaaaccacaatactggataaaaacaagagagtgaatgcagatagaaagaagaaaaggtataaggactgaaatacaaagggtaaaaggtataagctctgagacacaccaatgttatgaagttatgaaaaatcagaagaggaaactgaaaagaacaatccttaggcaagagcaaaaaaaaaattcaaaaagtagaaatttttaaggttcaactgtgtcaaatgttgccractaatcaaataagaggaggactgaaaatttagcattgaattgagaaacatggcactcatttttgacaaagaaaaggacacttctgatggagtaatgagtagccaaaaaaatggaatggattcaagagaaacttgtgctagaggaagtggagactagttacttacagacaactcttctgattaattttaatataaatcgaagaaaagaagggggtgataaccagagggcaaaggag

SEQ ID NO: 866275 - DNA, 538 bp, Homo sapiens
taacagcaatagaagggataattactagagtgatggtgttgagtaggcaagaatgcgtaagatttattgtacaagaagattgtcctcagctaggagcactaaatagttcattcgtggaagaggtgagaaaacagagtagataaacacagatgcaggtaggtgaaggtcttagtctgttaaggctgtcaaaacaaaatattttagattgcataatttatgaacacaaatttattgctcacagttctggagactgggaagtctaagatcaagttacaggaaaatttggtgtctggtgagggcctgttcctcatatatggcaccttttatgtgtcttcaaagggcaggaggggcaaataaactttctcaggcctcttttataaggacactaatcccattcawaagggctcctaatcatctcctacaggctgcatctgttaatactatcataatggggattaagtttcaatgtatgaattttgggaagccacaaacattcagacaacaacagtgggtaaacatggtagagggaacagggtaa

SEQ ID NO: 866276 - DNA, 615 bp, Homo sapiens
cctcactgccaaatattcaaatgatacagtatttcaagaaattttcttaaatttacatataaattttaaaaacatagattaaataaactgagatgtagttaattaacactaatgcttaacttaatcctataaagggggttaaaatatctgccttatcagaaagaaaatacaaacgtattgggtagtcctaagtaataatagaatttartcagggcagccttataaaccctttccatttgggtacttccaaaagtctgaaatatggaggagggattgctatacacccagaaaccaggaaatgaatggcgctccatgaattagggcaggcaagaccatcagcaacaactgtggctgcactgaaatgacagctcaatcatggcctactcctttcataattgtttttgtgctgattgattatacagaatcacagaaacttggtttgaatacgtgctgattatttatgtaagaagttgatcagtagttcagtatataacagaatcttaaaagatagagtttctttctaaaaaacaccttttcaaatttggccaatccctttttcccattagtcattcattcacagaaattttgatcctaaattacctgtggtactgataa

SEQ ID NO: 866277 - DNA, 628 bp, Homo sapiens
tacccaagaaggcagttcctcaccatcctcttcattttaacagagctgctttcatttatgtgctgttattcaccggatctgactctgattattgtccttgggactgggtgacagctgatcaggagatggccttgactggtggtcagaacgaccactgctttgacaccatcagtatttaggacattcttggttttgttttcagaatctgctcctctcctggtgccaggaccttaaagacttctyaacaagtatgtttcttcattctcaccctggaagctaaccaggttggaggagtcttaaagcagagagttcctctggtgtaaattgatgttaacgccccatcgccacccttccaaagccaatccatcctccctgccagcttcaattcagcctccttctagaagcctttcaggaaatttatatgtcaatggcgtgcacctctgtggtcttgtatgttagctagtagtgtagggaaatatctgacaatgcgtctgttccttcttatccgactgtagcacccataccctcaccagagctcagggcctcttcagctcttgtctctccatcttactcctttcaacctgttctgcacaccagcacctggtgactttttctaacacaaaaaccc

SEQ ID NO: 866278 - DNA, 628 bp, Homo sapiens
tacccaagaaggcagttcctcaccatcctcttcattttaacagagctgctttcatttatgtgctgttattcaccggatctgactctgattattgtccttgggactgggtgacagctgatcaggagatggccttgactggtggtcagaacgaccactgctttgacaccatcagtatttaggacattcttggttttgttttcagaatctgctcctctcctggtgccaggaccttaaagacttctcaacaagtatgtttcttcattctcaccctggaagctaaccaggttggaggagtcttaaagcagagagttcctctggtgtaaattgatgttaacgccccatcgccacccttccaaagccaatccatcctccctgccagcttcaattyagcctccttctagaagcctttcaggaaatttatatgtcaatggcgtgcacctctgtggtcttgtatgttagctagtagtgtagggaaatatctgacaatgcgtctgttccttcttatccgactgtagcacccataccctcaccagagctcagggcctcttcagctcttgtctctccatcttactcctttcaacctgttctgcacaccagcacctggtgactttttctaacacaaaaaccc

SEQ ID NO: 866279 - DNA, 524 bp, Homo sapiens
gtgactcctagaaaaagattccacattcaaggaagctctatgaccaaaggtgattaataaagagtactgagcccagcatggtggctctcgcctgtaaccctagcaccttgggaggccgagcagagcggatcgcttgaggccaggaattrgaaaccagcctggccaacatggcgaaaccctgtctctactaaaagtacaaaaattagccaggtgtggttgctcacatgtgtagtctcagttacctgggaggctgaagtgggaggatcacctgagcctgggaggttgaagttgaggtttcagtgagccaagatcgcaacactgcactccagcctgggtgacagagtgagactctgtttcaaaaaaaaaaagaaaaaagaaaaaagaaaataaagagtactatacacatttccctactttgaaatcagactgagttttttaattcaattactgagctccctgatatattaggcttttaaatttgtttaaaaattattttttcagggtcctcactgttctattaatgt

SEQ ID NO: 866280 - DNA, 556 bp, Homo sapiens
gtctcatctcttctcagaagacacattctttttttgtctcatcatatttccatgtatccttggtgcctgtttgaggattaaaatagaggagaagagtggatatgtggtgaccaatattaattaatttatatatatatatatatatatatatatatatatatatatatatatatgacattttcttgcacaatagactgggaaggagctactgtagtggacttaatgaagtataattttggggtaaacctcaattttaattccartctgtcacttactagctgtctgacttcaacaaaatgagtcaccttctgatccttagtttcctcatctgtaacatgggattatattaggtaacatacataagacacctgtaacacaatcagtgcttgagaagaatgatgacttttcttacttatccccatgttcacagtgcctgacacatcatagggttcaatgagcatttgctgcataaacttgacactgcctttgtcagatgcctcacctggttaatttcattttttatacaattattttgttttggaagagcttctccaaa

SEQ ID NO: 866281 - DNA, 630 bp, Homo sapiens
gtatcagcttttcagatgctttgggtagagcttgtatccagacactttactaccaagattgagtctctaataacctgatccatgctgggactgatctgtgatccaatatttagcttcttttttaacactttcagcaccaaaagaaccttgtcacagttctggctcactaatcacacagccttgtagaccccaggtggtggtccaacaggaccactgtatttcaccacaygctacttccacatttgtggccttgggggaactgtctgtgctggtcaccaccttgtctttatatttctttcctgagttctttggcttctcaccctttctgaggctttgtctacaggatcacttctcccaaagggaggataagagttgaggtaattgagcactttacctcttatctgtatatttacaatgaaagtaagttaggatttgaatgagctggctcagagagaatgctagtctctaaactactcctttctctgtaaatataaagggattcattacctcagggggagacaacatcacttctgaccttatggccctcccttatcctctggtccctgtattcttgaagccctgttaacccttcctcctcctctcttggctctacttagcaatctatcaatc

SEQ ID NO: 866282 - DNA, 447 bp, Homo sapiens
ctgggctgcattccaacatactgaacacctaatctctggaagaagaaaggaattttattcagtgttttaagaaagtgattttaacttatatacagcatggaaatatgaactaaaaggaaaaataatccagtgacagtaacattatgcagaaaagctacttggtttcttctctctggggatttctacctttctarcattgtctaataagtctggctttcctgtagcaccttaccaggtctcacctatagtagaggtgactaagagtcgtgagcatgagcacaaagaggaatttcatttttcatcactgagttctgtgcgtagagctaaatgagaagcaactttggtattctgcacatttgattaattggcatcaaaaggcagcctcactagttccctaaggaagtgtggtaccttcacacataatcaagaatgtgttctctccaaagg

SEQ ID NO: 866283 - DNA, 603 bp, Homo sapiens
actcacatacccttgaccgaagaccggtcctcctttattgggaatggtcatcctcttccactgagcctgcagcttagggacggatgcacatggagtagtgagggaggaaggggacacccgcctagccagccagatcagctgaatcaaccctggcaatcgatggagtgacagatgccgcagccagatcaccctcacatcccctttatatatatcgaaacacaacaatcctatgagataggtaatattattatttatattttttatggtgaagaaaataaggaaagagaggttaaataacttgcaagaccacacagcttcagaactggtgggtgcaggatttgaatggagactgtgactattayactgtttaagaactgtgcccttgttcttaaacacctcgctacactgcctgttgcagtatgagtgtgtacgtgtgttatatacactgtattctttccctctttagttactgtttctcccctttattttctttctattcacctctcaccactaagcattttggggcattgtccagatttttttcattcatttgaatgagaatatcttactaatgagaatgagttcctccatttcatcccagat

SEQ ID NO: 866284 - DNA, 620 bp, Homo sapiens
tttctcaacaagcaggcaagcaggtagattaatcatctaagatagattttgttttatgcagtctgtattagggatctatatagtccaggatgtgccatgtgattcaagaatgctaaaatgcacatctggagctctgtggaactgattttacttcacttggtgatcatggaaggaccctgagctgagagtcagaagacttaagctccagtcctgaacaggcaggtcaccttggcaaagttgttttgcatcttgggacctattttctcctctctaaaatgaaggttctctatggataatttctaagttctctcctagttttagcaatgtgagattctgtgtaatattagaactatatgaggcagaccatctggtttcttaaggttcaaactacattctagagacaaatcaagcaatttaaaatacacacacacacacacacacacacacacacacacacacacacacacacamccttgatgggacttccaggggatttgagtctcatgggcagaacttctgcatttggctgccacttgaagcaaagctttttgactgtgtacttgaggatgacatgtttggagagaaatagaatagctatggcatctcttaattataattta

SEQ ID NO: 866285 - DNA, 583 bp, Homo sapiens
agacttctctgataagctggaagtaaaatgatgtctccattttagagaagaataactgagattcaggtgccaagatcacatgtctagaagtgaccacacccccaattattttttcacacttttcattaccagtgaatggatgggtttgttctgctattcaaagggcatcttgctcaaggctgatgtatatttgcatgctcctcagtaatggctaaatgttctcacaccacaagaaattactcatgaaaacacagtgtgaatgattaatctatatgctgctgacagatatgaatgatgaaaggatactttggagaagmatattttgtatattgtcataaaattttactaatgtttttgataagtgtaaaatatgtgaggagtgcttaggtagataaaatgaacttagagctggaagaggaggagcaccccagaaagagaacaatttctaaggaaaatcagaaggcgctggaacaggaatagccagaaaaatttacagaccaattacattgctcatgagtgtgatttattttctgcaagttcaaatttctcaacttgtacacctaattcaatgctgtccccttca

SEQ ID NO: 866286 - DNA, 602 bp, Homo sapiens
aactataagagacctgaatattaccttcacactaatgatgggcttgggtgagccgctctgggctgagagctgaggaacagggcaagaagtggagcagattgagcattgagttgtgttggggatgctacatgtcactgagtggaggtgtctggagagagcagccaaggtgggatggtagaaaacacgaagccatggcatatgaggaatatgtaaaggccttgggatgctaagtctgatgttgtatatgagaatcaggctggtgtcaggaaaggacatgaaactggagatattgcttaaaatgttacttctgctcccaattagctgtgtaackgtcatactggacccttgttgactccaatagcgatggcaccatatctgaaaggcctaagaagagacccagagataatgaatgagacataggatttactggggaaacttacatacaaggacaatccagtggtggtgggctggacaggagaactgctaccatttgtaaaatgcatgcagtttatatagcattttcacttagcaatgttcacctaaacgttcatttaacccaaaacaaagggctctgattccctgtatggcctgcattccagcag

SEQ ID NO: 866287 - DNA, 602 bp, Homo sapiens
aactataagagacctgaatattaccttcacactaatgatgggcttgggtgagccgctctgggctgagagctgaggaacagggcaagaagtggagcagattgagcattgagttgtgttggggatgctacatgtcactgagtggaggtgtctggagagagcagccaaggtgggatggtagaaaacacgaagccatggcatatgaggaatatgtaaaggccttgggatgctaagtctgatgttgtatatgagaatcaggctggtgtcaggaaaggacatgaaactggagatattgcttaaaatgttacttctgctcccaattagctgtgtaacggtcatactggacccttgttgactccaatagcgatggcaccatatctgaaaggcctaagaagagacycagagataatgaatgagacataggatttactggggaaacttacatacaaggacaatccagtggtggtgggctggacaggagaactgctaccatttgtaaaatgcatgcagtttatatagcattttcacttagcaatgttcacctaaacgttcatttaacccaaaacaaagggctctgattccctgtatggcctgcattccagcag

SEQ ID NO: 866288 - DNA, 692 bp, Homo sapiens
acgtgtgaccatttgtctctttctctgtaatcttttccttcaaaattagaaacaatttatagggcacagtgatgctttttttcctttttatattttgaaattattattgtattcaggaactgaatcatatgttcatgctttggttgaccattcattcaacaaatctttaatacgttcctacagtgtgctagattctgttctccaaggaaggagattgaggaagatgagtggagagaactgacaggyagagaagcaagagaacggagagggaaaggtaaagaaaaacactacaggagaagctagaagggagtggaggtggagttttctcaaaagaggtaaggaacagcacagactccatctaaggcagaaggcagaggaaatgaaagtaaggaatcagaaaatttagggagtgtcagccaatccttcttgtaagacaattctctcaagcaactggagccctgattgacagataacaaagtgttagtaatagctaacactataatatgtctacagtatgtcagtatttataggtcaggcactgttctaagcagatcacttacattaactcatacaaatcctcacaacattgctatggagtcaatatttaatatgacaaaaacaaatataggccaacaacatgaggcccagagaggtttagtgactttctgaaggacacagctagtcaatggaag

SEQ ID NO: 866289 - DNA, 596 bp, Homo sapiens
gtgaaccttcaagagtaatgaagagttagcaaagtgctaaagtctgaggtaggaggaggaaaagtggcccctctagacaaagcagaaaccatgtgtagtgcaaggaggtgaaaagggtatggtagattcagagaaccataatacatttcttatggatgggtataagttccctagagtgggaactgactctttagtctctagattcctagtgcatgatgcagcctagaacacagtaaatgctcattaaatgttaaatggatgaacagatcaaatcctgttctcatttaattctcataackcatcttactggataaatattatcctagttttatagatgaggaaaccaagatctggagaggttagatgactttttcaggattacgcaaatatcaagtcagagaaacgtggatctgttcaaacctcatggacatttcgcatagaccactggactaatttctgtttactggcactagaaaacaacttctgatataggctgttttctagcttagttatgagacaggtagagaagggttcatattaaggagttagggttagagttacactgagtgggaaatatcagcaatggattctaagcc

SEQ ID NO: 866290 - DNA, 663 bp, Homo sapiens
taatgctattgtacacttaacagactacagtatagtataaatataacttttatatgcacttggaaacaaaaatttgtgtgacttttttatcataatacttgctttattgtggtggtctagaaccaaacctgtaatatctcctaggtacacctggtactaagaatttgacttcttcaaaattattcttttccagactcagattcaagtatcctttagaaaatagcctttatatatttcctaaagaaaattatttacacatttccwgtgtaagaaattttagaataactttcgtcttcacagactaagttgatggtcattcatcattgaaaaagagacagttctctattgtgtggtgaggcctttaattggttgctgctataattgatggtgtattcttttgtggcatatactgagtttgaagaataagctaggtagccatgcaatcatagcataatggaaagatttcagaactctacgtcccaaaacccaaagccaagccccaactctgccaaagccagctccatggccctgagcagtcactaaaccagtctgggcttcagtttcctcatttttcaagtgagaattctgaaatatcatatcggtagatggggacctcatgagaaaataacagttatcagagtatctgacacataaccagcattc

SEQ ID NO: 866291 - DNA, 595 bp, Homo sapiens
aaacctcagagttatcttcgatttctctctttctctcaacccaatatcaaattcattagcaaatcctcttatctccacctgtcaaacatatccagaaagtggccacttcacactccctctattgccatcatcacagtcaygtccccatcacctgttcccttgtcttttgcatccactcttgctccccttagtcaattcctgtgtagcaaccaaagtgcttctttcaaaatgtaatagtttgtgtctgctatttgctcaaaaccctgccatgactttccaccacatacagaatacccaaagccttactatggctgcaggcccagcatggtctgtgtcctccctatctcaccagactgattttctgccactcttcccttggttcccccaaggttctccagctatactagccaacttgctattccttagacactccaagcaaagccacatcaaaagatctttgcccttgcagagtcttctgcctgaaatcctctttcttcagatagtcacatgacattcactttattcaagcctctgctcacatgtcacctctttagaagacttttctgaacatcctgtctaactcccatcacacacc

SEQ ID NO: 866292 - DNA, 595 bp, Homo sapiens
aaacctcagagttatcttcgatttctctctttctctcaacccaatatcaaattcattagcaaatcctcttatctccacctgtcaaacatatccagaaagtggccacttcacactccctctattgccatcatcacagtcacgtccccatcacctgttcccttgtcttttgcatccactcttgctccccttagtcaattcctgtgtagcaaccaaagtgcttctttcaaaatgtaatagtttgtgtctgctatttgctcaaaaccctgccatgactttccaccacatacagaatacccaaagccttactatggctgcaggcccagcatggtctgtgtcctccctatctcaccagactgattttctgccactcttcccttggttcccscaaggttctccagctatactagccaacttgctattccttagacactccaagcaaagccacatcaaaagatctttgcccttgcagagtcttctgcctgaaatcctctttcttcagatagtcacatgacattcactttattcaagcctctgctcacatgtcacctctttagaagacttttctgaacatcctgtctaactcccatcacacacc

SEQ ID NO: 866293 - DNA, 688 bp, Homo sapiens
ctgcagagagaattgactgacagcttcaactgctgtggtcagaaatctgtcactaaattcatgacaaggccatgcttcccatgggcttctctcaatgactaagcacggccaggatactcaatataagaccattcgtagaatagtcaggattcctctgatgggaagctttagctcatagactccccattagcctgttcagaacttttctagcactgtgctgcaatctgagactcctgatacccaaacctccttcagagggatcagacatagatgatggtctgaggctttccctacctcttgcgaatcctccctctttgccctcacaagtgtttctcccatcaaataacctataagcatctttcaaaattttgtgmaattatggcatataatttttcattttaagacattgactctaatttgatatttgacagctatttctcatgatgtgggcagtgagttcgagaatttatttttcatactgcagctcattagctatactaagtcaaagttataaatagttcatattagggcaagaaatacccctaccattttggcaaataactccattagatgaatctttctaaaacacaaaatggttgctttagcttatatatttttgtgaaacttttaatgagcagaacctcaatttagcaatacaaggttgaagaattattacatttataactgc

SEQ ID NO: 866294 - DNA, 640 bp, Homo sapiens
tctttctagatttctggaccaggcatagtcggagctttataaggattagacctgaactttaatttagaagagaaaagcggtggatgaggagaggaaagactagggtattctccctggtgaagaactgatatagagagtcagccagctagggaaaaatgactctaccttgtcctgatgctaaaatccacctaattctcagatactgctccagactaatttgtgatgacacctccctgttatcaagggagattgggtggcacttcccttccttagtctcatatgcacatgctatggtttgaatgtttgtcccttccaaaagtcatgttgaaagttaatcctcaatgtggcagtattgagagttgggttctttaataggtgattgtgtcatgagggctctgccctcatgaatggattgattcattcagagattgatrggtaagtggattaatgggttgtcatgggaggggaactggcggctttattaagaagaggaagagagacttgagctgggccactcaggcctctcaccatgtgatatcctccaccaccttgggactctacagagagtccccaccagcaagaaggccctcaccaaatgcagccccttgactttgggcttattagcctccataactgtaag

SEQ ID NO: 866295 - DNA, 663 bp, Homo sapiens
ctgctttgggtgaggtcctcaggaagcttccaatcgtggaggaaggtgaagggggagtaggtatcacatggcaagggagagtgcaagagagagagagggaggatgtgccacatcttttaaacaaccagatcttgtgtaaagwcagagcgagaactcactcattattgtgaggatggcaccaagccattcatgagggatctgccgccataatccagacacctcccacctggccccacctccaacattggaggtcacatttcaacatgagatttggaaggggcacacatctaacccataatatcagatgccacacaggtgcagttatattccaggatcacttagtcagaaaatgcccaagcacctgtagagacttggtgagtgaggaagggtatctttacttccctacaagtgtcttccactgatcagtgagggtctgtagtgtcaaatccattcctagtaaaggtggaaatgaagaatcagatgcaccttaaaaagcaccaactcaaataagaatttatatttgggtagatattatgtaggcatttctctgcccctttttagtgggatatgaaggggctgggatgtagttctgaaagcaaaggatcagataaaagcatatcttgttgttaaagagatttttaagaacagaagatactggttttt

SEQ ID NO: 866296 - DNA, 602 bp, Homo sapiens
cccttcctggacaccaccttccaggactccaccttccacagaacctccatgtattcaaccatctggaagttcccggaagccattccttatttatttattttttttttatggaggtttcaatatgtagacatggttgactaaaccactggccattggtggtcaacttaaccttcagcccctctccccttcctgaaggttgaagagtggggctgagagtctcaaacttctagtcctgccttggtctttcctgtgatcagcctcaacctgaagctacccaggagctgccagccctcagtcaactcataagtattaaaaaagaaatcactttggagattccaaggatgttaggagtggtatgtcaggaaatgggatgaagaccaaatatrtatttcacaacatcacatcctatagctacgggatatgaggagtctaagctttttggaggaagggctggtgtggcatgtgagagctcagaagagtggctgttttccagccagtgtggaagtttgtcagttgtgcaatggtcagtattcccacataggtgcaccgtggctggacaccagccttgctaccagcttcctccttgtgtgctcactcctgcc

SEQ ID NO: 866297 - DNA, 601 bp, Homo sapiens
tttctgacatgggaagctgcaggcagagccagctttgtttgtggggaccctggtccctctccttgtgattctcctgactctgatttcttccatgggctggctgtttcttcaggctgattcctcttgtggtcagaagttggctgcagtctttccaggcatcccatccagaaatgacaatgtccaaaggaagaatcttgcatctcttgtcaagaatgaagaaacaaccatggtctcccctgaagagtaagccctctgaaagtggatagctgaacaatgtcargttcttttaggagggtcaaaggagaaatggctgttggatatgcattaaataaactttgcttacaattctcatttagaattggctcttcctaagacatcttccatttctcccacccctggttctttttgctacctggctagcagaggtggggaatgtgatatttctctagcagaactctaagagtactggcaagatacagccagcatgaaaatgacatacttcttccacatgtgactctgcaaacaaaaaataagattaatcccaggctctaggagtttcatttatttttgagtttttcagtaaagagtcaatcagggagca

SEQ ID NO: 866298 - DNA, 694 bp, Homo sapiens
agccatgcatcacaatctagggaggtgggaagtgtgaagttgcatggaggcagggaacctgggctctagacacgactctgcctctaacattctgtggaaacctcaggcttctgtcgctttgagccttggttttccatgggtaaagtgagaccatggagacccaccttacataattgttgagaggattgtttaaaatacatattttggccaggtgtggtggctcacaccrgtaatcccagcgctctgggaggctgaagcaggaggatcacttgagaccaggagttcgagatcaacgtgggcaacatgaagagacctcatctctataacattttttaaaaaaaaattagccaggaatggtggtacaagcctctagtcccaactacttgggagggtgtggtgggaggattaactggctccaaaagttcaaggctgcagtgagctatgattgtgccactgtactccagcctgggcaatagagtgagaccccatctctaaaataaataaatttaaaaaattaatacatgtggaacatttcaaaaacatgaaataatagggaaaacaatgtagtgaaacttcactttctttcatccaacttcagtaattgtcagctcccagttttgtgtcatctctattcccactcccagccccttcccattatttccccttaatgccagaatatgaggacttcatggca

SEQ ID NO: 866299 - DNA, 624 bp, Homo sapiens
agtgtgactggagtgatgggccagactgtaaataagagactaagagtagtggaagaataggaagtgaagagttccaaatatcaacattacttggactgtggtgaggagctgctggccaaagtgaagtagggttgacattaggacattgaagagcaagtcagtttctggatctcagttgcttgtgatgatggcaggattggggaagatartgatgcaaatgataatcacaaagtacaagtccttatggctgaatggtgtgccccccaaaggagaggctctcatagacagaagagtaaaggcttggaagtgataggcagacagcacctcagctccgctcctcagacagtacacagaactgaatgcaagtaagcaattgctttcaatattttccaccatcagaataaatcaactactatggcattaaaacataattcatgttttaaaggcccctgaatattatttagaattaaaaatctagaagcaaccattccttataaaggaaccagttagcaacagccttctaaacaactgaacagaaatatcagaggccctgttctggtgttgcctggaatgaagtcactcactagccatgggtgtgtcacctctcctcctgtacttcaggac

SEQ ID NO: 866300 - DNA, 624 bp, Homo sapiens
agtgtgactggagtgatgggccagactgtaaataagagactaagagtagtggaagaataggaagtgaagagttccaaatatcaacattacttggactgtggtgaggagctgctggccaaagtgaagtagggttgacattaggacattgaagagcaagtcagtttctggatctcagttgcttgtgatgatggcaggattggggaagataatgatgcaratgataatcacaaagtacaagtccttatggctgaatggtgtgccccccaaaggagaggctctcatagacagaagagtaaaggcttggaagtgataggcagacagcacctcagctccgctcctcagacagtacacagaactgaatgcaagtaagcaattgctttcaatattttccaccatcagaataaatcaactactatggcattaaaacataattcatgttttaaaggcccctgaatattatttagaattaaaaatctagaagcaaccattccttataaaggaaccagttagcaacagccttctaaacaactgaacagaaatatcagaggccctgttctggtgttgcctggaatgaagtcactcactagccatgggtgtgtcacctctcctcctgtacttcaggac

SEQ ID NO: 866301 - DNA, 604 bp, Homo sapiens
cctccctggcccctcaaatttctcttcagaatccctattgagtgttatcattcgtcagcccatcctcagttttccttgtcaacagcttaaagaaaaatcttttaaaaatacccttaggtggctgggtgcagtggctcacrcctgtaatcccatcattttgggaggccaaggcaggcggatcagatcaagaggtcaggagatcgagaccatcctggctaatatggtgaaatcccgtctttactaaaaaaatacacacacacacacacacacacatgcacacatgcacaaacttagctgggggcatcgtggcatgtgcctgtagtcccagctagtcgggaggctgagacaggagaatcactcgaacctgggaggcggaggttgcagtgagccaagatcataccactgcactctagcctgggcaacagagtgagactccatccccaccccacaaaaaaatacccttaaggaaaactttagtgtgtgagtgaaactaagaattaatactgaaggaaaatgaaagaagctctactccctcttgatgtttggccttatctggaagaatatgaacgagtcttgttctaatcccatcagaaataggttcata

SEQ ID NO: 866302 - DNA, 604 bp, Homo sapiens
cctccctggcccctcaaatttctcttcagaatccctattgagtgttatcattcgtcagcccatcctcagttttccttgtcaacagcttaaagaaaaatcttttaaaaatacccttaggtggctgggtgcagtggctcacgcctgtaatcccatcattttgggaggccaaggcaggcggatcagatcamgaggtcaggagatcgagaccatcctggctaatatggtgaaatcccgtctttactaaaaaaatacacacacacacacacacacacatgcacacatgcacaaacttagctgggggcatcgtggcatgtgcctgtagtcccagctagtcgggaggctgagacaggagaatcactcgaacctgggaggcggaggttgcagtgagccaagatcataccactgcactctagcctgggcaacagagtgagactccatccccaccccacaaaaaaatacccttaaggaaaactttagtgtgtgagtgaaactaagaattaatactgaaggaaaatgaaagaagctctactccctcttgatgtttggccttatctggaagaatatgaacgagtcttgttctaatcccatcagaaataggttcata

SEQ ID NO: 866303 - DNA, 604 bp, Homo sapiens
cctccctggcccctcaaatttctcttcagaatccctattgagtgttatcattcgtcagcccatcctcagttttccttgtcaacagcttaaagaaaaatcttttaaaaatacccttaggtggctgggtgcagtggctcacgcctgtaatcccatcattttgggaggccaaggcaggcggatcagatcaagaggtcaggagatcgagaccatcctggctaatatggtgaaatcccgtctttactaaaaaaatacacacacacacacacacacacatgcacacatgcacaaacttagctgggggcatcgtggcatgtgcctgtagtcccagctagtcgggaggctgagacaggagaatcactcgaacctgggaggyggaggttgcagtgagccaagatcataccactgcactctagcctgggcaacagagtgagactccatccccaccccacaaaaaaatacccttaaggaaaactttagtgtgtgagtgaaactaagaattaatactgaaggaaaatgaaagaagctctactccctcttgatgtttggccttatctggaagaatatgaacgagtcttgttctaatcccatcagaaataggttcata

SEQ ID NO: 866304 - DNA, 604 bp, Homo sapiens
cctccctggcccctcaaatttctcttcagaatccctattgagtgttatcattcgtcagcccatcctcagttttccttgtcaacagcttaaagaaaaatcttttaaaaatacccttaggtggctgggtgcagtggctcacgcctgtaatcccatcattttgggaggccaaggcaggcggatcagatcaagaggtcaggagatcgagaccatcctggctaatatggtgaaatcccgtctttactaaaaaaatacacacacacacacacacacacatgcacacatgcacaaacttagctgggggcatcgtggcatgtgcctgtagtcccagctagtcgggaggctgagacaggagaatcactcgaacctgggaggcggaggttgcagtgagccaagatcataccactgcactctagcctgggcaacagagtgagactccatccccaccccmcaaaaaaatacccttaaggaaaactttagtgtgtgagtgaaactaagaattaatactgaaggaaaatgaaagaagctctactccctcttgatgtttggccttatctggaagaatatgaacgagtcttgttctaatcccatcagaaataggttcata

SEQ ID NO: 866305 - DNA, 626 bp, Homo sapiens
atgaaagacaaatagagttggcaacaatagaaaactcattaataagtatttagtgagtacttcccatatgcaaggcggggccttaactcttctgtttgaagccataaataaaatgggctgtaacagagctttcacatcatgaagctatgttcactgtttctactggcacaccctccttgcccagaccaaagcggctaccctgggctgttagatcaatgtccaggactccataagaaagtctgtgccctggaaaggagataaaatcctaacaagcacattttgttctctctgagagtgatactcataaagtatttttaaacttaaaataaaatttgtaactccatttcatcttcacaaaaactgcatggccagcaagggmagtgttatacgctcactttactaaggttcagactcagattctacctctaaaatgtgaatctcttttgtgtgactttgatgtcagtttctcaccatctgtactgaagtggtgtgttgggtctccatcaggaaccccagtgagcattgttctggggcattgctcttgtctaccttatactgggtactccagagagctcagagagggactgctgaatttgagaatccagtggaaagaagctttgagctct

SEQ ID NO: 866306 - DNA, 658 bp, Homo sapiens
ggtaaatgctctataaatatatgttgaatggatgaaagaataagtaagtaccttctgtgtacctggttctatacctggtgatactgcagaggtcccagtacccagtgaactcaaggtctaatgtgaaaagcatgagaaaagaagctattatgccaccttccgaaaagctttatgataaaggaatgcacaaagtctaatgggagaaggaagtaggagcatctaaatcagccacagttgaagggagtgagtgtgctgggaaatgctgccctgagtctggaccagggaggcagaagcgtttaggaaaagaatccaggcagaaggaatcaggtgaaaaaatgtagggcagtttcaggggrttctgtgtgaattggagtagcttaaggagtaagaggggggagtaagaggaacccgataaattaataaatacatgaacggggagagcggtttatggagcagactgagcacttaactggttcccgatttattaactccctccttggagcaagggtctgtgttgagttttatggaggacacaaggatttaaaacctggtctctggtgttcaatctagcaaggaggtttactgtgactgtacacccctgactttccagggcagtcccaattgcataaagtctgtttgactttttaaattataatta

SEQ ID NO: 866307 - DNA, 607 bp, Homo sapiens
ctctcaatgtagtggaataggtacaatgttcatgagtgttacaggtactctaagagaagtccatccatgctacactgatggcacaaacagaaattggatattccacctgggtggcatgtcaggaaagccttcattgttgagctgacctaggatgattgaaagacgagctgatggtcattaggtgacctggctagggggtggggaagaggagggcatagggaagtccaaactggagggaacagaaaaagccaagtcacagaggcaagaaaactcatggtgcattgtggggattgtaagaagttggccgtggctggcacactgagttgaagggaattcccatgaggtgggcaggggccagatcatggaggggagcatcgaggggctcaagtgctttgctgaggggctcgtatatcactgggaggaggcagctgaattccttaggaatcaattctggtgcctgcgtgargtcaggattcattgctggtgttctggccagaataaccatcagagggagggagtcaatgggagggatgacagaggcagagaacggcactttctgctcgggctgccagcaaacccagaccagtgcatcgccccatatcattcc

SEQ ID NO: 866308 - DNA, 644 bp, Homo sapiens
aggccctatggtaagcacaaatatgaaggcttttaaaaataggctatataatcagttttaatactgttgttggaatgttcaagaaagccttagccaagtctttttcaacatttttatttatatcttccaaaacttcgtcaacatatcttctggacatactcaccagccatcatatttaatgatgttcaatattttcctcaatggcttatataacagaaacaacaaatgttcattgtttttttactcataaaccactagaaagcctgacatgatcgctcttgcttgatgagagtcaccaaactagtcctgccctcctgctcataacaagagtctcctccaccgtgttcctggtggatggctaattcttttctacagaacacttttagagggaggaattgcttytaaggtagcaaagcattttttcttttgtttacacatccaaggaccttactaatattaagaatgtatgagtctgtgcccctcatgggcataggcttgaagcccaaatctacttccccatcttggaaaaaaaaaaaaaagatcaggttctgtggctgctttgaataccggactggcttctcacttggcagcaaaggagatggcacctgactcagggagcaatgggggtttctttctaatgtgct

SEQ ID NO: 866309 - DNA, 666 bp, Homo sapiens
ctcaaagaaaatcaatgagaaaacagatcacaaattttgtagaaacattagttactgtttttggaggatctcctaaatatcggatccttggatggaaaatttgcatgtatggtttcatttgtccctaccccctaaaaaactgtcataataagcttttagtatttccatgatttaccttaaataactgaggttcaaagaataaaagtgagagactgtcacttaagtgggatttgaacccagatctctgtgtctccaaaatttctgtttttttcatgatgctacactttttgaggatttatcaggcatattctagaagaagtcagtcacagtttgtgctgagggaayttgccaccaattaagtacagatatgaaaggtagcatttgggaaatcatcttggctccaggatcttacagtctggggactgtagtacaatagagtcacaaaatctgtagttataagaattgccttgagtactagctcctccacaatataatagggtagccttgagaaatccatttaattatttgaacctcagtttcttcttctgtgaattgagacagtaacttaacggaatgttctgaggatcaaaggagaaaatatatttgaaagtgctttctaaaatataaaatttggtatatgactattattattaccctacatatcac

SEQ ID NO: 866310 - DNA, 666 bp, Homo sapiens
ctcaaagaaaatcaatgagaaaacagatcacaaattttgtagaaacattagttactgtttttggaggatctcctaaatatcggatccttggatggaaaatttgcatgtatggtttcatttgtccctaccccctaaaaaactgtcataataagcttttagtatttccatgatttaccttaaataactgaggttcaaagaataaaagtgagagactgtcacttaagtgggatttgaacccagatctctgtgtctccaaaatttctgtttttttcatgatgctacactttttgaggatttatcaggcatattctagaagaagtcagtcacagtttgtgctgagggaacttgccaccaattaagtacagatatgaaaggtagcatttgggaaatcatcttggctccaggatcttacagtctggggactgtagtacaatagagtcacaaaatctgtagttataagaattgccttgagtactagctcctccacaatataatagggtagccttgagaaatccatttaattmtttgaacctcagtttcttcttctgtgaattgagacagtaacttaacggaatgttctgaggatcaaaggagaaaatatatttgaaagtgctttctaaaatataaaatttggtatatgactattattattaccctacatatcac

SEQ ID NO: 866311 - DNA, 638 bp, Homo sapiens
ttgtgcaatgataagtcactgtggacttgatttgcatttccctgattgtaagtgatgttgagcatttttccataaggttttttggccacgtgtatgtcttctttagaaaaaaatgtctatttaaggactttcccattttttaatctggttatttctatacttttgctaattaagttgaaagagttcctyatatattttggttattaaccccttatgagatacatggtttgcaaatattctcttccattacatagatcgtcttctcactataataatcatttcctttgctgtgcagaaactttatagtttgatatagtctgttgtctatatagtctgttgtctatgtttccttgtgttgcctatgtttttggtgtcatatccaacaaatcactaccacaaccagtgtcatgaagcttttctcctatacattcttctaggagttttacaatttcatgtctcgtgtttaagtcttcaatacattttgaaataatttttatgtagggaaagataagggtccaatttcattgttttgcatgcagatgcccagttatctcaacaccattggttgaagagactctcattttcccattgtgtgtagtcttggcatccacatctaggatcaataaaacatatatgct

SEQ ID NO: 866312 - DNA, 620 bp, Homo sapiens
tgattttttttcactttactcactgactttaatatctaatctcaaattaagatgtgactctactgtctatgttgacctgtggaagaaaaactgatatctgtaagacagtagagtttatcactagcacaatataatggctcagcaaagtcccttttgcttgtgttctttagtgtaagttttgcaacagctgcaatttgttaaatgccatctatgtgtgattgttctggtgataaatacgtggaaagacagtgatattatctgttgggataaaaggaagcagaaactacaagaagcaaaaactcagaaccaagctagaggacatatttttaacacatctctcaaaaattaattaaagtctccattggcasaatcccaggatcagtagtgagtcctaaaaattaggaatggcatagacccaagaccttcaaagtttatagacataatgaacagatctactagttgaattaaagggagaacttacctggtaaaatactgtcttaaacaagctctagaaaaagatgaattgcaagtcagatttaggcagcagatataggcacataacgcctacaatacaaactccttaatatcaaaagctctgtcttacttatcttcataatttc

SEQ ID NO: 866313 - DNA, 621 bp, Homo sapiens
ctgtctacctagaattttatacccagatacatcaagaataaaccacattaagaataaagataaaataaagaaatcttctaatatacaaaccctagagaacttacacctatagctctgagttaaagaactgttaatagatagatttcagcaagaaaaaaggtgaatctagaggaaagtccaggacacaatttwaaaaaatgacaatgggaatatggtatatgacaaagattgtgttacaaattagcaggagaagatggaaaaagaaccccaaaacaggcaaaagaatttaacaattctaagaaaaggaaagctgattgaccaaaaaacataagaaaaaatcattaatctccatgagcaggaaattaaaacaaagagataacatttcacacacctcagagtggcaaaaattaaaaagactgatatcagcgaaagttggaaaatgatatggagaaagaggaactatcatacactgctaatagatatgtaaattgccctaatctatttctaatctaattagaaaactttctgaggctagactatctgacacagatgatgtgtagacccttctattcaggattttcaacctaaggcgacatgccgcaaacatttattgcagcatta

SEQ ID NO: 866314 - DNA, 606 bp, Homo sapiens
gtcaattactttttcaaactatttttagatttcaattcaataagtggtacttttagttttgttctctcatttcttttgagttggattggatttttagtttattgttattctctttaaagttttctaagtggaatccaaacttttattatttctttttttgggcaggttctgtctgcaaactggcaaataaaccagttttaaattaggctagtttttctaaatgaaaacttttcttggaaaattgctctttttttaggtcataaggtggcaaaataccttggatttttatcttaaagtaaatggccagtgtaaacttaacctctacaatttctttatattatctccttcaattaatacataccccaaaagttcctatcacaaaaaggttaactccaattgtgtttgatctgcttaggaattttgtcagaaaaagcccttcaggattgagtctagacattcaacgtttcrtctctagccttctactaactctttattactgcccataacagtagttgaaggaaatattattttgtgaatgtttagccataattgtttcaaactttccagaagtgtgtgatgtttagaagaccatatttttcatgtaat

SEQ ID NO: 866315 - DNA, 598 bp, Homo sapiens
ctttactgaaagaattctcagagcctctaacaggcttgtgtgtgagtctttaagaaagagatttagtatatattgtattctaaactcacatgatgtcatataagtttgtttcagaatacttcattttagatgtctttcttgtaatatttggtattaggtcggtcacttctgagattaaaaaggrttcatagataggtttagtttccaggtacagaaatgaccactggctgggcacggtggctcacacctgtaatcccagcactttgggaggccaaggctggcagatcacaaggacaggagatcgagaccatcctggctaacatggtgaaatcccgtctctactaaaaatacaaaaaattagccaggcatggtggtgggcgcctgtagtcccagctgctggggaggctgaggcaggagaacggtgtgaacccgggaggcggagcttgcagcgagccaagatcgcgccactgcactccagcctgggcgacagagtgagactccgtctcagtaaaaaaaaaaaaaaaaaaaaaaaaaaaaaagaaaaaaatggccactggaatgacagaaagctaaagttttccatggtactttatcaatt

SEQ ID NO: 866316 - DNA, 587 bp, Homo sapiens
aagtcaagaaacaacaggtgctggagaagatgtggagaaataggaacacttttacactgttggtgggactgtaaactagttcaaccactgtggaagacagtgtggtgattcctcaaggatctagaactagaaatagcgtttgacccagccatcccattactgggtatatacccaaaggattataaatcatgctgctataaaggcgcatgcacatgtatgtttattgtggcactattcacgatagcaaagacttgaaaccaacccaaatgtccattaatgatagagtggataaagaaaatgtggcatatatacaccatggaatactctgcagccataaaaaagatgagttcatgtcctttgtagggacrtggatgaagctagaaaccatcattctcagcaaactattgcaagaacaaaaaaccaaacaccgcatgttgtcactcataggtgggaattgaacaacgagaacgcttggacacagaaaggggaacatcacacaccagagcctgtcgtgggctggggggaaggggggagggaaggcattaggagatatacctaatgtaaatgatgagttaatgggtgtagca

SEQ ID NO: 866317 - DNA, 642 bp, Homo sapiens
ctaatagaaaatgttaaatgcatgtatatatgttttaatctagcaatttcactcttgaatatagacaccaggaagttctatcaaaagattgagtgtgccatatgctcacatagtatagcttgtggtagcaaggtagaaataactcacatgatcattgctagtggaatggctacctcacatgtaatatacacacagagtggaactactgttgtaamagtcagaagttttgaactagactttctaacattaatggtcatcaagaacagaatgttgcacacaaattgtaagaaagagaatgcaattataacttttatttttggcataaaatgtatatgtatataaaactgtcaaaatcacatcttacatttttcaaagctcagtacacatatggaaagtggactggaataacatacattacaaatactggagtgtgtgcctattaaagagatggggaaatggaaatgggcacaggagctggtggaaaaataataataaaatatcaccaaataaacatgaagtcttagaatgacctgatttagccacaatttgaagaggatgattaattctattctattgtcccaaagggaagaaaaaagtagcattcagtgtgtgtttagaaagagaggctgtggtggtcaagaa

SEQ ID NO: 866318 - DNA, 647 bp, Homo sapiens
tcaataatgggtttcaagattgaatcagtaataaaaagcctaccaaccataaaaatcactggaccagatgaattcacagctgaattctgccatgcatataaagaagagctgatacgaatcctactgaaactattacaaaaattgaggaggagggacttctccccaattcattctatgaggccagcatcattccgatatcagaacatggcagacacacacacacacaaagaaaactttaggccaatatccctaatgaacacatatgcaaaaatcctcaacaaaatactagcaaaccaaatccagcagcacatcaaaaagctaatctgccatgatcaaktaagctttaatcctgagatgaaaggttggttcagtatacacaaatcaataaatgtgattcaccacataaacagaactaaaaacagaaaccatatgatcatctcaatagacacagaaaaggcttttgataaaattcaacatcccttcatgttaaaaaaaaaaaaaacctcagcaaactagatactgaaggaacataactcaaaataataagaggcatgtgtaacaaacccacaaccaacatcatactgaatgggcaaaagcaggaagcattccccttgaaaaccggaacaagacaaggataacctctctta

SEQ ID NO: 866319 - DNA, 594 bp, Homo sapiens
tagatgaggatagggtagaggaagaaatacagaacaacttccagtttctgacttgggcaattaatttaatgacaatgtccttttctaatatagtgtgtttaaaatagaagaacatcaggaaaagagaattagttgagtcttaaacatgttgcrtttggaacattcaaacaaagctatctagtaatttataagatatagcattctggggcccagaaaaagaagtttgagctaaagataagatttggggccattagctcattgataggatttactatgtgttgagaaaaaggggacctaagatgaaaccctgaaaaataccaaccagtatttatggataaggcagagtaagcagcttaagtaggaaaataaacatcagggagagtgatatgtaagccaataaagaagaaagttttaagtggaggaaataatcagtgtggctctgtaaaacacgcttctagtgaatttagtaactagaaggttgctgaaagcctcagcaggggaatttacaatagactgaggtgtgaaatgcattcattgctgaatccccacctagcataattattggccccttcctacatgttccgtaaatatcta

SEQ ID NO: 866320 - DNA, 621 bp, Homo sapiens
ccattaccaatgacatttgctttggggtgtctgagcaccccaagacattcccactatttaccaaacttgtccgacctgcggcctgtgcacagcatatagcccaggacagctttgaatgcagcccaaaacaaattcttaaactttcttaaaatgttatgagattcttttgtgatttttttaaagyttatcagctatcattaatgttagtgtattctgtgtgtggcccaagacaattcttcttccaatgtggtgcagggaagccaaaagattggacacccctggaaccctgaggacctgttgtaggcccaaactggcttcccatgctttcttatgtcccttaccacagaagcaacaggcctaagctgctttaagcctttaagctatcctcatctactttaattcttacagaattgaactcccacacctgtaatcttatttttaaactggacttcatatactgtacccttctctcttatcttactgttactgagaagtgtaacattgtaaactactacctagaaatggatagagaattatgaaaatagcatatttgggaatgtgtagagtttaagaaatcatgcaggtttcttaacgtcaagctccctggtttgtaaccttgct

SEQ ID NO: 866321 - DNA, 596 bp, Homo sapiens
aaaacccgtaggcattttctcacatctcttaatgtctttatatttttagatgttacatggcagtaagcaaatgtttcctaacaatttttgggggaaagatataacctaaacatggaagataatacaatcaggggcataagccagatactgtagaaagttttggtggaaattcacaaaaattatacatttgattgcagcactgtggggtgggagattgccttccagcaggtacagatcttttatcctgggtttgaacagtgattgatggcaacagccttaatgcasttctgcacttcaatttagaaagagacaagcagtgcagagccctgggtttcagactttctccaaactgcattggcttttgatatcctttggttttgaactgcttttgagattgcagaaagtgactctgataacataaggaaagaaaaatgcatctgtcttcagaagggattgtatgaattaaaagacaatagagagatttagtttcatcctcagatagctgagaagtagccactcttatcagcacctctgctacacacatatacacacattgctactacccatttctcttccctacccccaaaacatacatt

SEQ ID NO: 866322 - DNA, 566 bp, Homo sapiens
agtagagaaaggctgtaaatgctagaacaagataattgtcaggtactaccaagaagccctacccagccttcccaattagaagacaggagtcccccaatcccaaccactttcaggtcctagtttctgcccaaccccattacctgttcttcttactcaattttaatgaaagcagctctactggcagcaacttcattgtgaccccagtgctctggcaagctgggcctgtgtcagcaggccacaggggtggatgagagccaagacttttgtgattgcctctacccwcattttcctgtggaaacacagctcagaaggactatgctggagggttgatcagcttggttatgtatttgctttgcggaaaccttaagttgtccttttatgtgtcactttctctcatttcatttttttaatcctttattttccaacaggcaggttctggtcacacctacccaggtggcaccaggtgtgtgcatgtttttccaaaagttacaatgcagcatagacactggaaaatgaagatgaaaaaacacagtggtgttagattacttcatatacttcaacaccat

SEQ ID NO: 866323 - DNA, 541 bp, Homo sapiens
ttagttctctttgcttagagttagggggtgtccaatcttttccaagaaaactttgtatattctggcagtgccctctggtggatgatttactatgatccactaccattcagttcctggacattacatttcacctgaaagatttctaccttttgttaccacttagcatttttccccccatctcaagatgaatagtgttttctttcaaagtttcttgaatatctacatctacaatctacaacaaatgccactggattgtggtttgtaaggaatatctaaggtgaattcyagcaaagtgaatatcagtttctaccacttattactttcaaagtcattaaattgctaatatgggtgcaatttggctgttgcgtggaaacacttggcttgggtatgtttatgtaaatggttcaaagctgtggactgtgtatctggcaagctgcttctaagaaacaaaggagaaataggcatgttttccatttaaaagacatgtggttcttattgacttaccgagattggtttttgtttttgctttgttttattttca

SEQ ID NO: 866324 - DNA, 576 bp, Homo sapiens
taagagatactttgattgccttcacatttgtcatgcaacattttctatcactggcttttatgcaagctattttcctgcctgaagccagaaaacgggtaattaggaactgaatagcacccttaaatacaaatctctcattaggcactagttcattttcttgtaaacagaatatggtaatttccgagaaacatcaacctttccacaaatcacacaaccatttttaatatcaggaatcttttagaaaaatctcattttttttccaggacaaataaaattgtacttgctgttgttttgaccataggtgttcatctcttatggtctctcccttttgaacttctcagaagagcaatttatttgtttaagtttctttatatgaaattaasgccatactaaactttaaaaacagatattaatttattttgagacataatattaagtgaagtatactctaatctatagactatcaccatttaagtaaaaaaatggagatgatggcgtaaagcaacaccttatattttaaaaatagactgtatcttggaaaacccattgattttcatgttcatatctgtgtctaat

SEQ ID NO: 866325 - DNA, 626 bp, Homo sapiens
gtccacaccttttaacatcacactgaaggaattccttgtaatgaggtagggcagtcaaatcatccctcagaatctccaagggaatcgttgtgctagatcacatgctaagttggaaagtttggtccaaacatgttcagcaagagaagctgcctcacgagggaaaaactgtagacagtaactttttgctctactcgagtatttttattttggtagtggatttacattagaaaatctctaattttccagaaagaaaatctctaatacttaaagaagtgagagaaaagacattgaagaagttattatttttatcacagttaacaagcagtaaaaagtattcattcaaaataccaataatattttaattaaaagtagcactgtatgtgaaagaagtgtaagtaatcttattgacagttaactagaaaaagaccatatatrtatatatacacatatacatatatacatatacttatatacactgtatctctaggtttttgttttctttggaagcaatcactgtactcattgatttatttatgattgataaataaaattagtttctttacattttaatattaagtaagattctaaatagtcatatactttaacccaaatattatatatacaca

SEQ ID NO: 866326 - DNA, 611 bp, Homo sapiens
gttgaatattttaggttattcccattttttcactatgataaacaatactgttataaacatctttgaattgtggcagagctaagaaggtagctgagaaacgggagtatcagcccactgtattctcttcttttatatggacaataaagtttgcttaattgtwtgtaaaacacctcacataaaaggagtcttgaagagacagaaccctcttttaacaagttcaccatcactaacccattccatatagaggtcctcctgctgttacttatctgatacatatagcctggagcagttgtacagttaattctttaagataaatccttaaatatggaattgttaggtttaaacaatttggaccacattacagaaattagcaactgagtaagtctccatccgtttccaaggaaaacaaaatgggaatctccttatacactattataggtatttcagacatatcaggagagagacttcattaggttgtaatcattttgtagcatattacctaatttgaaaggaaatgcaaggcagtttaaagggttaaatttgtagatgttagcttcaacaggcctcagtttgaatcttgacttggaatcacagcatggaaccagtgtcta

SEQ ID NO: 866327 - DNA, 614 bp, Homo sapiens
cggaaccagttcagctttttgctctgtcactgcactctgccatttagttctggttggggagaaggcagagactgactgagctgacatctctgactgtgatttttacatcttcaaaaacagcagcaatttctccattatggtgtcctttaagattgatttcattgcaacatctgagacttgtattatctaatgacacaagagtaacatggtaacaaaagcgctcggggtcaccctgtttgactatcttcacagttagccttaaaggcttcagtctgggacagttattctgaggtttcttaccgataatgacaggaggcagacaaatgcctagatagacacgggcaggtcctggcgaaaccccacctccaagytgcagacagtttaaagcctgaaagccaagctacaagttaaatcctcggactggattgagaccccacctgcccgtttggcacactttcctctgattgatccccaccgttcacctatttttcatatacccacactttcctaattggctttctacactgtcatgtccacctttgagtggcatctttgctttgacctttttgcacagtcacaaatcaatcaatacaagctacctattctgagcccat

SEQ ID NO: 866328 - DNA, 545 bp, Homo sapiens
caaaagtggtgtggtacagggagaaaaacgaacagcaaaaaacagaaaagactttcatttttgactacttaaaaggctttatttacataacaaggccacctttttgctagtcaggccaaccaaaagagcaatggctgtcgyctcacgctgctgttccatagctaagggttctgccatctttttttccaccacaatagcctgggtttgtttcctaaatcaagccctttctggtttgatacttggtacttctaaaataacagcaatttgttccagctgaactacggtcataagatttaaaaagattttttttaaggagctcagtggttaaaagtcagcttaattacaagctaacatccaaaaatgtatgcatgtgtgtctatgtgtttgtatttaaaaggccttcatgttggcattttttttctcctaggaccttgtctttttctttttctttttttttttttttttttttgagcaaaagtttttttcttctcagttgactgaattctgttttcttcatttacttcttctgtctcttctttctcttg

SEQ ID NO: 866329 - DNA, 545 bp, Homo sapiens
caaaagtggtgtggtacagggagaaaaacgaacagcaaaaaacagaaaagactttcatttttgactacttaaaaggctttatttacataacaaggccacctttttgctagtcaggccaaccaaaagagcaatggctgtcgtctcacgctgctgttccatagctaagggttctgccatctttttttccaccacaatagcctgggtttgtttcctaaatcaagccctttctggtttgatacttggtacttctaaaataacagcaatttgttccagctgaactayggtcataagatttaaaaagattttttttaaggagctcagtggttaaaagtcagcttaattacaagctaacatccaaaaatgtatgcatgtgtgtctatgtgtttgtatttaaaaggccttcatgttggcattttttttctcctaggaccttgtctttttctttttctttttttttttttttttttttgagcaaaagtttttttcttctcagttgactgaattctgttttcttcatttacttcttctgtctcttctttctcttg

SEQ ID NO: 866330 - DNA, 545 bp, Homo sapiens
caaaagtggtgtggtacagggagaaaaacgaacagcaaaaaacagaaaagactttcatttttgactacttaaaaggctttatttacataacaaggccacctttttgctagtcaggccaaccaaaagagcaatggctgtcgtctcacgctgctgttccatagctaagggttctgccatctttttttccaccacaatagcctgggtttgtttcctaaatcaagccctttctggtttgatacttggtacttctaaaataacagcaatttgttccagctgaactacggtcataagatttwaaaagattttttttaaggagctcagtggttaaaagtcagcttaattacaagctaacatccaaaaatgtatgcatgtgtgtctatgtgtttgtatttaaaaggccttcatgttggcattttttttctcctaggaccttgtctttttctttttctttttttttttttttttttttgagcaaaagtttttttcttctcagttgactgaattctgttttcttcatttacttcttctgtctcttctttctcttg

SEQ ID NO: 866331 - DNA, 645 bp, Homo sapiens
ttcttctaccacctttgttggagttgaatgaatctttccattttattttagtaatgatacctgatatggttaggctttgtgtccccacccaaatatcatcttgaattgttatccccataatcccaataatccccacgtgtcaagggagagaccaggtggaggtaattgaaccatgggggtggtttcccccatgctgttctcatgrtagtgagtaagttctcatgagatctgatggttttataaggggctcttccctttttgcttagcacttttccttcctgccaccttttgaagaaagtgccttgcttgtccttcgccttctgccatgattgtaagtttcctggggcctccccagctatgcgaaactgtgagtcaattaaacctctttcctttataagttacccagtctcgagcagttctttatagcagtatgaaaacaaactattattaatacaatacccattattcctgtttctcccctacctcttgtttctctgaagaagtgtgagatcattttttctaactaattgtaggtataggcaagatacatgttctctggtattgtttcttacacaggaatgtgaaaacattaactcctggctttcattttccttgtctataaaatagggatcctattacttgttt

SEQ ID NO: 866332 - DNA, 664 bp, Homo sapiens
gatggggatagcattgaacctataaattactttgggcagtatgaccattttcacgacattgattcttcctatccatgagcatggaatatttttccatttgtttgtgtcctctctgatttccttgagtagtggtttgtagttctccttaaagaggttcttccctttgtaagttgtattcttagatattttaatctctttgtagcawttgtgaatgggagttcactcatgatttggttgcttgtctattattggtgtataggaatgcttgtgatttttgcacattgattttgtatcctgagactttgctgaagttgcttatcagcttaaggacattttggactgagatgatggggttttctaaatatacaatcatgtcatctgcaaacattatgtaatttttataactagtttttaccatggataatttaatgaattctgaatactagagcctagtctaaaaatcatagagtattataaaatagaagaatattatgtttgtctataatcatttgaaagataaagggcattttctttcattagtgttaacagtagtttttttttccccatcggtaatgctaaaagttgctattctaagtcttctaaccaccgctaatttaagacaattctgctgggttgcataatttcatactagtttatttagggg

SEQ ID NO: 866333 - DNA, 661 bp, Homo sapiens
cttaacttttctgtttgattatgaagagatttctgccaggacaaaaaataaactgatcaatttctatagagtcattccattaagttagcaaatttttcagacatttaggctgacctggatccaaactacaaattcatggctcttaatccaatttgaagttaactccccaagtccctaataaataggtgcaattgtgtgggattatactcttcgcttaaattcacctcaaagattttttytgatgaagttttagcccacaaatttttagtttaccatttaccatttattgaggcagtatctttcaattttgcatagtattcatataaattaaaatataatgaaaaataagtacttgaacatagcccctaaagcctcatgcaactaaaaacagtggctgataaattacaaagagaaaaataaaccagtttacagtggcactttgctaatgctgaattttaagtacgtatcaaaaaacactgaagtcaaacaaagaaaatgttttactaaatggttagaaaacaaactgaatccttcaaaatagaaacagcaccctcctctcttgctcctccccctcccacatatgttacactaagcattgtcttgtctaaacatatataaattgcttgtttagaacttggaaagaatttaaggcaaaaatcat

SEQ ID NO: 866334 - DNA, 593 bp, Homo sapiens
ggtaaaatttcctcttctccattgctatttcccattcttttcattctgtaatggctactatgcaatgtagatgcttaactctttctttggtttttaccaagccgtcttgactaaactatcaacatcctctcttgtctctccccgaggccaccctgtattccagttggagtaaatcttcttgaactttggcattagttatgctatatatctgttcaacatctgtgatgrctttctctctgtcagatagatgagtcaccatgaaactaattgctagtaaacttagattaggggtggtctctatacaaacacccacattccctccatcctctgatggttcttcaagactaaaggtaaatgtcaattgtgatgccttttctaatgtgcccagacagaataaatcacttcctcctgggtgctcccccagtgctttgtagatatctctacttcctcagttattacctgttaccttctgtgttaacagttgtttgcctgtcttcctcaagtgcagggactcttcattacattcctcacagaacatggctgagaatctgacatgcagaaggtgcccaataaatgtctgaatgactcactac

SEQ ID NO: 866335 - DNA, 791 bp, Homo sapiens
ccatttttggtaaaatttcctcttctccattgctatttcccattcttttcattctgtaatggctactatgcaatgtagatgcttaactctttctttggtttttaccaagccgtcttgactaaactatcaacatcctctcttgtctctccccgaggccaccctgtattccagttggagtaaatcttcttgaactttggcattagttatgctatatatctgttcaacatctgtgatggctttctctctgtcagatagatgagtcaccatgaaactaattgctagtaaacttagattaggggtggtctctatacaaacacccacattccctccatcctctgatggttcttcaagactaarggtaaatgtcaattgtgatgccttttctaatgtgcccagacagaataaatcacttcctcctgggtgctcccccagtgctttgtagatatctctacttcctcagttattacctgttaccttctgtgttaacagttgtttgcctgtcttcctcaagtgcagggactcttcattacattcctcacagaacatggctgagaatctgacatgcagaaggtgcccaataaatgtctgaatgactcactacatgaatatagtgattactgagttcatcttgctaaatatcagaagcagaggcttccccagtataaatgctagacacatacatggaactcaaaacaaattttttttgagaccaaaagaaggcaattaaaaaaatgctttaccatccactatctctgactacggcctgaatcctcaatttactgtcctctttg

SEQ ID NO: 866336 - DNA, 644 bp, Homo sapiens
aatggaccagttgcaaacaacgaataaagagaggcagcttcatttataaccgctatttcaacagagctctattgtaatcatagcaatctgagggtgactcattaattaattgatgttcttttttatcatgtgctattgagttaatgagtaatttgtgtgcgataattctctgaacacattgattacttgagatattttctggggctttcatatcaataacatgctggagaggtagaagatgctattcgcttttgtgtgctcattattagcaggttggagatgagcacaaaccagtgcaaagacatgttaaagttatttgatctaggccaaccctaagtctgcccaacaggaggctgaatgctcagggagaggcctgtcacatagtaggtgckcaataaatgtcaattaaactaatgactattaaatctctgctttctattaccttaaattacattaaaaccacatttaaaaaatataacaatgtttttaagaaaaagtaatgatcaaaaaggcttttgctaaaattgtattttgtgctaatggcctattacaataaacatgcagattgtttttgcaacttactgaagtgaacactaaacatgtttggcctacataatttctacgaaactgtttaagtgatgatt

SEQ ID NO: 866337 - DNA, 664 bp, Homo sapiens
tcttccttcctctcttgataaagaatcaccaactatggtagaattgaattgttgtgcccagttattttctaccgccatgaaagagacttctacattctcacctgtcatcatgcaattccattgtctccctgagggaagaacatactttccaacttggctatgtgagttactttggtcaaaaaaatgtgaatgggagtgacatatactatgtctacacaaaaactttargctgggtgtggtggctcatgtctataatcccagcactttggaggcctaggtgggaaaatctcttgagcttaagagttcaagaccagcctgggcaaagtagtgagaccctatctttacaaaagaaaaaaaaaagtagctgggcatgatagcatgtgcctatagtcctagctactcaggaggctgaaatgagaggatcacttgagtccaggaggttgaggctgcagtgaactaggatgatgcccctgcactccagcctgggcaacagacagagaccctgtctcaaaaaataaaaccaaacaaaatgtaagatccattggttgtggccattgctcttttccttctaccatgagaacagcatgttccatatatgggctgctctttcaacctagatcccagaatgaggaagaaatgcaatagagctaagacaaagctgttc

SEQ ID NO: 866338 - DNA, 574 bp, Homo sapiens
tgaaaatacttcacagcttattgactgggagctggaaataaatgatctctgcaggaattatataactctaagcgtgatgattaattgttctatgttaggccacagcctaatggccgagacatagaaaaagaatggtatagtggaacaagagttgytttggaagacaagacctgtattctgcttctgcttctgctgccagttccttttatgattctcagcaaatcattcatgttatctggaccttgtttcaccatttcgttgtccattttcctctcttaaataatgagaggataggagaatatgttctcttttgcctgttagcttgaaaaggcaccgattttaaactgaataaatgtaagtactttacatttagtgtttcaaataggatgagcttactacaacatacaacatgtcatcaagttcaaggtgatgtgaacatttcttatagatagaattatgtttagctatattctttctaatgaatgtttctcttttttttcttgcacacttgtattcagtacagattctttcatgaaataagtgatcagtaactttttctttttggtaatacctt

SEQ ID NO: 866339 - DNA, 648 bp, Homo sapiens
gtcacttaaccagaccgcacctaattttcctcatcatcaagcaggatttgtcatgcctaccttgcagagctattttaagaattagcactatgagatacatattgaacatactgaatacagcacctagcatttaatagatactcagtaaatgatagcactcatccttatctttttctcagaggtaaaatgcccacaataaaattatataaatgtcttgaggaaataggtgttatatataagttttaagtataggtgtgctatatctatttaatttcaatgagtatgtatctcttacttataaaaattaaccaaaatgtttagctaagtaatgaaatgatgcagaaaaaatgtcttccaagcattatttaagtaatattatttatagctaagaggctatgctgccatttttcagtcaaacctgaaactttgtgtaagaaraatcaattacaattataaaagaaatgaagcagtagtacttttttctttctagacataaaataaacagcattcttttacctaagactggatttggtggaggtaccattgtgttaatcatctctaagccctttgtatgtttgtaatttttatagtcagggaccagattttcaagaatcctgttgttgacagaaaaaagaattccataaattt

SEQ ID NO: 866340 - DNA, 644 bp, Homo sapiens
agtgtggtgattcctcaaagactaggggcagaaataccatttgacccagcaatctaattactaggtaatacccaaaggaatataaatcactctattctaaaaatatatgcaagcatatgtgcactgcagcactattcacaatagagaagacatggaatcaacctaaatgcccatcaatgatagactggataaagaaaatgtggtacatatacaccatggaatattatgcagccataaaaaggaacgagatcatgtcctatggatggagttggaagccattatcctcagcaaactaacacaagaacagaaacccaaacaccacatgttctcacttataagtgggagctgaatgatgagaacacatggacacgtygagggggaatgacacacactatgacctactggggggtagagcaagggagagcatcaggaagaatggccaatgaatgctgggcttagataggatgatctgtgcaggaaaccatcatggcacacatttacctatatagcaaacctgcacatcctgcacatgtacccctaaacttaaaataaatgttgaagaaagaaaataaataataaaaaataaactatttttttgttcacaggcattaaattagcatttttaaagatgtaagtacttcata

SEQ ID NO: 866341 - DNA, 644 bp, Homo sapiens
agtgtggtgattcctcaaagactaggggcagaaataccatttgacccagcaatctaattactaggtaatacccaaaggaatataaatcactctattctaaaaatatatgcaagcatatgtgcactgcagcactattcacaatagagaagacatggaatcaacctaaatgcccatcaatgatagactggataaagaaaatgtggtacatatacaccatggaatattatgcagccataaaaaggaacgagatcatgtcctatggatggagttggaagccattatcctcagcaaactaacacaagaacagaaacccaaacaccacatgttctcacttataagtgggagctgaatgatgagaacacatggacacgtcgagggggaatgacacacactatgacctactggggggtagagcaagggagagcatcaggaagaatggccaatgaatgctgggcttagataggatgatctgtgcaggaaaccatcatgrcacacatttacctatatagcaaacctgcacatcctgcacatgtacccctaaacttaaaataaatgttgaagaaagaaaataaataataaaaaataaactatttttttgttcacaggcattaaattagcatttttaaagatgtaagtacttcata

SEQ ID NO: 866342 - DNA, 655 bp, Homo sapiens
acagactccagatccctatggagattaaattgacagtagttggtgctggactgggaaaacatctgtggggcagggaagataaaaactccagatttgaatatattgtggatgcccagatgaaggacacacttggatttttggatcaggtcagagggagggtttgggaggttctcttggtctctctaaactaagtgaggaagaatccttcaagctagatgtggtggaggayaacatctccgttcatcttggccgtgcattcctggagaaggtcctctaaggcttcctgagtattggccttagatttggattatttccaaaaggctctaggaaggaaggcctcacatccatcatgttccttattataggccaatacttagaagaatgtccatcgtagtcaaaatatgtctcttcaaatatttacagataaaaatttgataggtattttccccaaaagaacagagaattagaagtgattatggtaagacagagagaagtctaggaacccatgcccaagatgcctgatatagtgactgtctgatatcctcgtcccccctttctccctaccacacatcttgtgcctctgtagagacttatgcctctatgcccccaacaccccaccttctcatgtattttaaaaacctttaaaaattgctta

SEQ ID NO: 866343 - DNA, 634 bp, Homo sapiens
aacttttattttagttatagggggcacatgtgcaggtttgttacatgggtatattgtacccagatagtgagcatagtacccaatagttagtttttcaacccatgccctcctcccttcctcccctctctagtagtccacagtgtctgttgttcccatgtgtatgtccatgtgtgctcaatgtttagctcccacttataagtcagaacatgtggtatttggttttctcttcctagcaaggaatyctgaggaagggagtgaaagaaccaaatttgtgttttagaaaaattggtcaggattgatgtggagagaggccagggccagggagaccagttaggagaaaatggtcttaatggatgtaggctggagtcctccggtctgtttgattggctatttcattctgttgatctactataccatattataaaccagaataacaaattgtaaaatatgaacactgattttttttttaaagagattgtagcatcattccaagtggattttggcttaatgtttgaaagttatcagattcttaggcctagaagggcactgaagaagtaatttgtattagcgctctgtttcaaataaggatgacatggaaaccaaatccaatttttaaagggcacaagaagcaaac

SEQ ID NO: 866344 - DNA, 634 bp, Homo sapiens
aacttttattttagttatagggggcacatgtgcaggtttgttacatgggtatattgtacccagatagtgagcatagtacccaatagttagtttttcaacccatgccctcctcccttcctcccctctctagtagtccacagtgtctgttgttcccatgtgtatgtccatgtgtgctcaatgtttagctcccacttataagtcagaacatgtggtatttggttttctcttcctagcaaggaatcctgaggaagggagtgaaagaaccaaattygtgttttagaaaaattggtcaggattgatgtggagagaggccagggccagggagaccagttaggagaaaatggtcttaatggatgtaggctggagtcctccggtctgtttgattggctatttcattctgttgatctactataccatattataaaccagaataacaaattgtaaaatatgaacactgattttttttttaaagagattgtagcatcattccaagtggattttggcttaatgtttgaaagttatcagattcttaggcctagaagggcactgaagaagtaatttgtattagcgctctgtttcaaataaggatgacatggaaaccaaatccaatttttaaagggcacaagaagcaaac

SEQ ID NO: 866345 - DNA, 634 bp, Homo sapiens
aacttttattttagttatagggggcacatgtgcaggtttgttacatgggtatattgtacccagatagtgagcatagtacccaatagttagtttttcaacccatgccctcctcccttcctcccctctctagtagtccacagtgtctgttgttcccatgtgtatgtccatgtgtgctcaatgtttagctcccacttataagtcagaacatgtggtatttggttttctcttcctagcaaggaatcctgaggaagggagtgaaagaaccaaatttgtgttttagaaaaattggtcaggattgrtgtggagagaggccagggccagggagaccagttaggagaaaatggtcttaatggatgtaggctggagtcctccggtctgtttgattggctatttcattctgttgatctactataccatattataaaccagaataacaaattgtaaaatatgaacactgattttttttttaaagagattgtagcatcattccaagtggattttggcttaatgtttgaaagttatcagattcttaggcctagaagggcactgaagaagtaatttgtattagcgctctgtttcaaataaggatgacatggaaaccaaatccaatttttaaagggcacaagaagcaaac

SEQ ID NO: 866346 - DNA, 614 bp, Homo sapiens
ttttaagtaagagaacttgtttttatttgattgtgaacttatattccttttatgcaattaaagcaactttatgatttagagtctgaaataaagataaaggtctgaaatatattttggggatagactggtttttgtrggtctgctttgttgtgatgtcttgctaaaacatatgataaacttggaattaaggaaaaatgagaattagcaaaataaagaaatttagtatttctttctggaagttaatattcttcatatcatttttattagaagttcaagcaaatattcacctcaaagtggtgaccaggaaaattagtaaagatgctgctcagtttattcatccacattatttttggccaaacttgttacctgtatacttagaatgagggaatgaatatagcatctgttggaaattaaaactttaacctaggtctaggcaaatgaacataagctaagtttactgcctgctttcccaggacttggagaaacacatcttttctagtcagaaacaccagtgggtatagctcacttctggtagcatataaatgagctttcttaaagcacagggttgttgcttgtataactctatcatctgttttatttaggaacttttggga

SEQ ID NO: 866347 - DNA, 566 bp, Homo sapiens
ctgttttggttattgtagccctttagtatagtttgaagtcaggtaatgtgatgcctccagcttttttttttttttttttagctttttttttcttggtcttggctattctggctcctttggattccatatgaattttaaaatagtkttctagtcccgtgaagaatgtcattggtagtttgataggaatagcattgaatccgtacattattctgggcagtatggccattttaatgatattgattcttcctattcatgagcatggtatgtttttccatctgtttgtgtcatctatgatttctttgagtagcgttttgtaattctcactttagagatgtttcaccccctggttagctgtattcctaggaattttatattttttgtggcaattgtgaatgaaattacgttctttgatttggctctcagcttggctgttggtgtataagaatgctactgatttttgtacattgattttatattctgaaattttgctgaagttgtttatcagctgaaggagcttttgggcagagactatagggttttctagatatggaatcatgccttgtgca

SEQ ID NO: 866348 - DNA, 566 bp, Homo sapiens
ctgttttggttattgtagccctttagtatagtttgaagtcaggtaatgtgatgcctccagcttttttttttttttttttagctttttttttcttggtcttggctattctggctcctttggattccatatgaattttaaaatagtgttctagtcccgtgaagaatgtcattggtagtttgataggaatagcattgaatccgtacattattctgggcagtatggccattttaatgatattgattcttcctattcatgagcatggtatgtttttccatctgtttgtgtcatctatgatttctttgagtagcgttttgtaattctcactttagagatgtttcascccctggttagctgtattcctaggaattttatattttttgtggcaattgtgaatgaaattacgttctttgatttggctctcagcttggctgttggtgtataagaatgctactgatttttgtacattgattttatattctgaaattttgctgaagttgtttatcagctgaaggagcttttgggcagagactatagggttttctagatatggaatcatgccttgtgca

SEQ ID NO: 866349 - DNA, 566 bp, Homo sapiens
ctgttttggttattgtagccctttagtatagtttgaagtcaggtaatgtgatgcctccagcttttttttttttttttttagctttttttttcttggtcttggctattctggctcctttggattccatatgaattttaaaatagtgttctagtcccgtgaagaatgtcattggtagtttgataggaatagcattgaatccgtacattattctgggcagtatggccattttaatgatattgattcttcctattcatgagcatggtatgtttttccatctgtttgtgtcatctatgatttctttgagtagcgttttgtaattctcactttagagatgtttcaccccctggttagctgtattcctaggaattttatattttttgtggcaaktgtgaatgaaattacgttctttgatttggctctcagcttggctgttggtgtataagaatgctactgatttttgtacattgattttatattctgaaattttgctgaagttgtttatcagctgaaggagcttttgggcagagactatagggttttctagatatggaatcatgccttgtgca

SEQ ID NO: 866350 - DNA, 645 bp, Homo sapiens
agcctaagtacattatgtgcaccaacaacccaatttgagctgtattgtaagtgggctagtaaatcagctattccgttgacaaacatgcattttaaagaatttgttcacttccacttgagtcactagttgctcaccaaggactccaagttttattttctatagcacgccctaatcgctattaacattctttaagctatcatcaacatcattgtgagtgaagaaaaatagcactccaagtatgcacaatgaggaattatgattcygagctttatttctgtgaaataggatgtaagaattggcaaacagagaggaaagggatctgaaacatttttggctgcattatctggtttctattgggaaaataaattctaaactcaataagaaaattgttttaactgggaagattctccaagtttacttataatgcatattgtactaaaataaattaaatgggaagacacgaattatagttcccctaatcaaacgtaaacataattataggggactgagctattgaatgtttatataacctaaatcattagtcactaagtttattttccacaagaatgatatacttagaatacagaaatgaaacttgagttaccaactcactgctaatagaatctatttgatttattcagtatt

SEQ ID NO: 866351 - DNA, 602 bp, Homo sapiens
gacagcattgttttttattacacctgagtacttctagagttgataatatttagaaagctttttcggcctgaagaagtaaacactttaacactgtaagcttctggatacccttggcttttgtcaaaaaaaacacagttggatgggtagacaatacacagtacatgaagaatgctgtcctaggcactgtgrggagatgcaaaagaagtcaatgacaggagaaggaaacaggccattaaagcaaaatggacaaccgcttatggtgactcaaaatttctatggggcatcactaagaaacttgtaagatgaatgattcatgttgtcaaagagagtttggttaaaaaaaatcagactcaacagtgacttgcttcagttagagtctatctgcatctcaaaggacttttaagaatctaactaaccatcttcttatgacagcagggtcacctcggagtacagcagcggggtaagagagcagccaccgtaagaataaatcagactgcataatgctgcatggggtatggaacgagggtggatttgagccaaaccactgagggaagtttatcagatctttgagtaagtagaaaacaggctgcagtttaatgaac

SEQ ID NO: 866352 - DNA, 521 bp, Homo sapiens
gactcattcactatcacaagaacagcacaggaaagacccgcccccaaaattcaatcacctctcatcgggttcctcccacaacatgtgagaattgtggtagttacaattcaagatgagatttgggtggggacacaggcaaaccatattattccacacctggcttcccaaatctcatgtcctcacatttcaaaaccagtcatgtcttctcaacagtctcccaaagtcttarctcactccagcattaactcagaaatccacagtccaacatctcacctgagacaaagcaagtcccttccacctatgagcctgtaaaatcaaaaccaagttagttacttcctagatataatgggggtacaggcattacaaccattccaaatgggagaaattgaccaaaacaaaggggctacaggccccatgcaagtccagaatccagcagggcagtaaaatcttaaagctccaaaatgatctcctttgactccatgtctcacatccaggtcacactgatgcaagaggtgggctcc

SEQ ID NO: 866353 - DNA, 522 bp, Homo sapiens
agactcattcactatcacaagaacagcacaggaaagacccgcccccaaaattcaatcacctctcatcgggttcctcccacaacatgtgagaattgtggtagttacaattcaagatgagatttgggtggggacacaggcaaaccatattattccacacctggcttcccaaatctcatgtcctcacatttcaaaaccagtcatgtcttctcaacagtctcccaaagtcttaactcactccagcattaactcagaaatccacagtccaacatctcacctgagacaaagcaagtcccttccacctatgagcctgtaaaatcaaaaccaagttagttamttcctagatataatgggggtacaggcattacaaccattccaaatgggagaaattgaccaaaacaaaggggctacaggccccatgcaagtccagaatccagcagggcagtaaaatcttaaagctccaaaatgatctcctttgactccatgtctcacatccaggtcacactgatgcaagaggtgggctcc

SEQ ID NO: 866354 - DNA, 524 bp, Homo sapiens
ttttcaatttctcaagtttccctgcaccttcctgtctgtctgtctatctatctatctatctatctatctatctatctatctatctatctatctaatctatctatctgtctaatctatctatcattccccacaattttgccatatgacctatcactccaaatgttcgattartcaacagaaactctcggctcccatcctggagtaaccattgttaagtgatgactgtgattatatgtgacagagccaacaagcataatgcactgttaaggcccacggccagccattcaccagagggaaaaggcattttcaaccagaagagccaaatagaggtaggaactgggaggaaagctctaatcagttttgtgactcggaactcaccttctcatggctgggcatgatggctcatacctgtaatcccagcattttgggaggtcggggtgggaggcttttgggcccaggactttgagaccagtctgggcaacatagtcagaactaaactctataaaaataaaaccaaaaaaatt

SEQ ID NO: 866355 - DNA, 652 bp, Homo sapiens
attatcttaatagtatagtttgaggaacagaagtttttaactttaaggcaggctaatttatcaattttttattttatgcctactatgcactgtgtctgtttaagaaaacttccctgccctcagattgtgaatatgttttcctatgttcttttgtagctttattgttttaccttttacatgtgaatctataatctatctcaaattaacttttttatatgttgaagtttactttttccatatagatatcctgtcattctagcactattttttgaaaaggctttcttttcccattgaattattttggcatgtctgtcaaaacagtaaataaccacgtacatgtgggtttatatttcagctctstatttggtttcattgatcagtttgtctattcttacgccattaccacactgtcttgattaatgtagcttgataataggtattaaattcaagtactgaagtcctttaactttcttcttatgactttggatagtctagatacttttaattttcatatacctttaaaaataagtttgttcatttttatcagaaagcctttatggtattattattagcattggattgaatatatgactgataactatactaaatcttccaattcaagaacttggcgtgtcgccccatttatttagtg

SEQ ID NO: 866356 - DNA, 591 bp, Homo sapiens
gttgtgcagagggatgcaggtatgtggtctctcttattttcccatctaatcaaccaaagtgcctctgctagccaaacatcagcaatggctaatgaggccagtgatcatcaaggtcctaccagacaggcagtattgagttgtgctgacttaaaactttttaaargccctaaacttcttatcccccgacattactaaggacttccctggcccttcaactctggtccctgaccagccttgtagcttccccttcctatgctagaagcctcagatgaggaagtatggctcatcgctcatggcctgctgtctgtgtacagaaactcacccaatcctcttcatcacatttttattttgtgttaaaccattggaactataacctggggtaccctaaaaacatgttgaggggagagggacaggaagatatgtgaactcatagtagcagaattgctaaatagactttatcatattaacagtacttcactatttgaatactttctgagctggcaacttttcgagagttaatctctcatcttttccattctacatttattgagatacggagctctgctctgtggagaatcaaaccctcaggag

SEQ ID NO: 866357 - DNA, 597 bp, Homo sapiens
atgcccaggtggaaactccatagatcagtttagggcatatctggtttaaaagcaacttgacctatataagaattttaagaaggataagaactttattgccttaaatcctagaattcctttcttgtgtaattgcaaatggtcctcaatgctgtttaaatgctgctatgaagaaaagacccagggcttagaaaatgaygattcttttgaaattacctcctcagagccactaagaaggctaaaactggctaatgaatggtaaaagaattacctagtgtatgatcccttcttgcctttcaaactcaacctaattccgcaacaccaacccatctaccctccactcacccctaatcagcacttgcctagataactaattttcagaccttgcttaatcattacttactcttgagtatctccaaccaacctgcccttccatggccctgctcaaactagattaaggtggtcaaagaaaaattgcatgggccgagtggaacagacaagagttaattcaagcctattgcaatagaacaaagagattgaacttgactccattcaaacaaaaggctggagagtatttaagcactgggtgagctagtagaa

SEQ ID NO: 866358 - DNA, 640 bp, Homo sapiens
ggtttaaaagcaacttgacctatataagaattttaagaaggataagaactttattgccttaaatcctagaattcctttcttgtgtaattgcaaatggtcctcaatgctgtttaaatgctgctatgaagaaaagacccagggcttagaaaatgacgattcttttgaaattacctcctcagagccactaagaaggctaaaactggctaatgaatggtaaaagaattacctagtgtatgatcccttcttgcctttcaaactcaacctaattccgcaacaccaacccatctaccctccactcacccctaatcagcacttgcctagataactaattttcagaccttgcttaatcattacttactcttgagtatctccaaccaacctgcccttccatggccctgctcaaactagattaaggtggtcaaagaaaaattgcatgggccgagtgraacagacaagagttaattcaagcctattgcaatagaacaaagagattgaacttgactccattcaaacaaaaggctggagagtatttaagcactgggtgagctagtagaaaactactagaggacattagtggggaggttggtcagtgtgattaggtcatttatgtttgccaattagcacataagttaggctccta

SEQ ID NO: 866359 - DNA, 573 bp, Homo sapiens
ccctcccggtgtccatgtgttctctttgttcaactcccacttatgagtgagaacatgcggtgtttggttttcggttcctgtgttagtttgccgaatgatggtttccagcttcatccatgtccctgcaaaggacatgaacagagagctaaatcatgagtgaactcccattcacaattgctacaaagagaataaaatacctaggaatacaacctgcaagggatgtgaaggatctcttcaaggagaactacaaaccactgctcraggaaataagagaggacacaaaccaatggaaaaacattccatgcttgtggataggaagaatcaatatcgtgaaaatggccatactgcccaaagtaatttatagattcaatgctatccccatcaagctaccattgactttcttcacagaattagaaaaaactattttaaattttatatgtaatcaaaaaagagcccatatagccaagacaatcctaagcaaaaagaacaaagctggaggcatcatactacctgacttcaaactatactacaaggctatagtaatcaaaacagcttgctactagtaccaaaaca

SEQ ID NO: 866360 - DNA, 578 bp, Homo sapiens
catgtgcagttcacaatagggcttgtgctcctatgagaatctaatactgccactgatctgacaggaggcagagcttaggccataatgctcacttgcctgccactcacctcctgctgtgctgcctggttctgatacgggtctgtgacctggggwttgggtacccctgatgtaatatatcaagatcatgtgataagggtaagaacacagcactcaagggaccctaagacaagcctgggacccagccttgatacatcagagaatcaagcaaattgtgctaggtggaatttgatcctggacaattcagagggcactgagaggtctaacagtgctttggattttttcattaggaataatcttcactccacaatagatttataaaggtgattgttaagagttttagatagaacaatgatgactaaacccttttggctatataggttgttaaatatttttagcttctataccttacctcttgcttcattgacaaatagtacaacttttgcttccacataatagtccctgctttctccttcaagtctgtgattctttgaatgctttcatatatcaacatctatttc

SEQ ID NO: 866361 - DNA, 602 bp, Homo sapiens
aaacattcttcccaccccagaagatacagcacatgtgtttataattaattaaatacccctgatttctacttaatatgcataaacaaagaatccctttgaatatagtaaattgtgtttccaaagttggctgcaacaatatccccccatcccaccttttcttttctttctttttttagacatctctctttgtcacccaggctggagtgcagaggcctaatcatgactcactgcagtgttgacctcccaggcttgggctcagccartcctctcaccgctcagcctcctgtgtatctgggaccacaggcatgggccaccacactcagctcattttttttgtatttcttctagagatggagttttgccatgtggcccaggcttgtcttgaatccctgggctcaagcaatccgcttgcctcagcctcctagaatgttgggattacagatgtgagccactgctcccagcctttaaaaaataataataataacaactttatctagatataattcacataccataaaactgacatatttgaagtgtacaattcaatgctctttaatatattcatagattgtacaatcaccactacaattggttttagaaca

SEQ ID NO: 866362 - DNA, 588 bp, Homo sapiens
tcctataaaatacatgcttctccacaatcactaccttagtatcctcatatttctctagctttgttatatatcactgaagacaggaaggccaaattatcaaatagacctcaccatatggcatcagcccagcacagcttcctggttgtttcacctctgaataggctattctggaccttctctctaatgtccacccctgccaatttccatctcccagaatcattcccaggttcctgcactcgtctagtgctggccttcaggaaatatccaratttattaccaggcagattttctgcatctttgccctgtttgcttgaattacagtataaagaagggctctgataccacagggcagtgtgaagaagggctctgatcctcagaggacagtatgaagaagggctttgatccctatgggctttcctccaggtgagtttgttctgattggctccagtagagcactgtgcgatctatcacctcctcttcaattgctatgtgcaaccccttgagatgctcctgtgcagaaggtgagagcaggaacgtagtctagccattttcatccttcaaaccaccaattcctttctaccatccttc

SEQ ID NO: 866363 - DNA, 570 bp, Homo sapiens
cattcattcaaaaacaatgactgtaattacatttggcattttgggtcctatcacagaaaacagccagcttaaacaacaaacaattttgcatttttgatctaggagcaaagtgctgcacgcctcagttccacaatattggagacaaaatcctcccactcatgggcacaagcccagcagcagtaataagcatggcacaccagcagggagaaaagtaacacttggtattttctatcttcagagtgtctcacatgcctcctttaattttgttcctctgkttttttttaatcataaaggaaagataagaccatattatcctctttatcattagtctttctgttgaaactaacatcaccaatcatctgtgatgcctatttgtgaagcaaacaccagcctctttttctcattggctgccctccacctccaaattgcaaacaactggcagtcactaagaggtcaatggccacttaaacttggaacttcaaggagaaatttttacgaattttttaactcttccttggggtcttttatgcactgaatatgaccctatcaaccaaatacaatgaaggatta

SEQ ID NO: 866364 - DNA, 620 bp, Homo sapiens
attcctcctatctaaccgaaattttatctcctttgagcaacatctctccagttcccacccccgggccctggtaaccaccattctattccctgcttctattaatttgacttttctagattccacatataattacaatcatgcggtatttgactttctgtgcctggcttatttcacttaatacagtgtcctccaggttcattcatgttgttgcaaaaggcagaatttccttcttttttaaggctgaacagcatttcattgtgtttatataccacatattctttcttcattcatccattaatggatgcttaggttgattctataccttggctattgacattacctgttgttctttgaaacaaactgatctttcctttttctctgttacttcaattctaacaggctttgacagttataggagagagtcttctccaagaaaggtatgcaatttctaattgattattagtttcaatgcatctytgtgtcatcccaacagccccaaaggattcttactcagaagttaaaattagatttcctactcagctgttcttacaaaacaaggacccttttagctttgctcagccctcgtgaagataccatccctgtcattatttgtactgaat

SEQ ID NO: 866365 - DNA, 598 bp, Homo sapiens
cagctcaatttctgcagagcaggcaatgaagtataagtttgcagctgaggtaataaattgataactggaatatcttgccctctcatttcctaaaagtttaccaatgtcctctttcattttcagtgtaaaaccatattcactatgctttttaaactactcagctatgtccccccaacccaactctaccccctccagaaatcccgattggcccttgaaaggagcatgacccgtggctgagaatcagtggtcaaaactgatgtgattatattcagtgagactagtgattatccctacaagtaaaggatagaggaagaatgggtttatcagtttttgtgaaaaagactgggttggaggargagggtgattgttagtttgctataagtaaactatgagcccacaatttcatgtgatttctaaaagataaaatagtctccactggtggggttcagaacaaggaatatgttggcctggtttttatatgcagagcttttgctattccttcaatattgcattcacttctaggcactttcttttaacaaaagatagtcatgaactacagcacttctgaaacaggatgatgaagaggctaagaatagtg

SEQ ID NO: 866366 - DNA, 644 bp, Homo sapiens
tgacaagagtttctttatttgctttgagacaggttcttgctcctgtcactcaggctggagtgcagtggcaagatttgcagcttcaacttcccaagctcaggtgatcctcccacctcagcctccagagtagctgggactacaggtgcgcagcaccacacccaaaaatacagtaattttttgcattttcagtagagatgaggttttgctatattgcccaggctggtctcaaactcctgggttcaagcaatctgcccaccttggtctcccaaagtgctagattacaggcatgagtcatgatagggggttagatatggaaactatgaatactatrcaagtaattggatagtctcaataatcatgtgagcatctcagaatacgtggtttttttaagaaaaaaatttaagtacaaagggtgatggtgatgagaatgatgacagttgatgatgaggaagtctagacacaacttctagttctataagaggcttctgaaatctttccaaccctggctaaggcttctattttcgtcatctgcaagttattcagtttctcaatgtcagatagcctttggaaaacatcagtcagtcctgagtgccagttgaatatttgaaagcttaatttagtgatttgtcttccattctgagttc

SEQ ID NO: 866367 - DNA, 631 bp, Homo sapiens
acaatgtcgtcaggcgaactgggacagaactttcagagtcagcacagcaaaggcatccaaggccacttcacccattgcagatgcaggctatacttagttcattgattctgtgtcttggagcagcctcatccaaaagggtacactgttgacagacaaaagtagacctaaggaaaaagataactcatcccaagggagtactcattatttgttaggtactattctaagggttttacatgtaacaaattactaataatgttgctcccattttacagatgaggagacagaagtacaaaaaggcaaaataacttgttcaaggtcacccagagagtaagtggcagagccmaggtgcagaaccaggggttctgggtccaagggccacgctttcaaccactgcaagcatggactctgaggaaggaaacaaccaccctctcctccctcatggccttcaggctaaggtttccatataatctagagcctacccagcctcctgaaaccagagataaaagcaaaactctctggcctctgctgaccagaacagacacaccaggctcatcaggtcaacaaagccaccagtatttgagcaaccaagctccccaaatctgcaaagtgggatgcaaaagtgaattcacct

SEQ ID NO: 866368 - DNA, 599 bp, Homo sapiens
aaggaaggcaatcatccacagaggaataatggtacaaaactcattcatctcaacatatggtcccgggtatggaataaaaggtgacgcagaaggagtatggacacatcaatatgccactgagtcacggatggcttctcagaaagacctaacctgtaaagctgcatcagggaaaaaggtttccctccaaggtgtattctttggggctcccattggccaactcttaattggaccatggatctcattcttattggtgattcttatgttcctrccagtagactggaagtacctggtaattaataataaccagagaagaaccactgccccccagatgcctgtggagtcactaattttatcattccttgaagtgcaggtatcacacaagtgcagaatctgatgggccagcaatttggtctcaacactggaatgtccaatggcaggctagagcctggaatttccctcacaaaagcaggcaagcaagctcttcatgcccttttaagcagtgctatgtgttggtcatgcaaaatcaaagaatcagaacatccacttactttgtaagctgtttgacaaaactaatgattgccttttcatacaggttacct

SEQ ID NO: 866369 - DNA, 599 bp, Homo sapiens
aaggaaggcaatcatccacagaggaataatggtacaaaactcattcatctcaacatatggtcccgggtatggaataaaaggtgacgcagaaggagtatggacacatcaatatgccactgagtcacggatggcttctcagaaagacctaacctgtaaagctgcatcagggaaaaaggtttccctccaaggtgtattctttggggctcccattggccaactcttaattggaccatggatctcattcttattggtgattcttatgttcctaccagtagactggaagtacctggtaattaataataaccagagaagaaccactgccccccagatgcctgtggagtcactaattttatcrttccttgaagtgcaggtatcacacaagtgcagaatctgatgggccagcaatttggtctcaacactggaatgtccaatggcaggctagagcctggaatttccctcacaaaagcaggcaagcaagctcttcatgcccttttaagcagtgctatgtgttggtcatgcaaaatcaaagaatcagaacatccacttactttgtaagctgtttgacaaaactaatgattgccttttcatacaggttacct

SEQ ID NO: 866370 - DNA, 621 bp, Homo sapiens
gtttcctgagccctccccagccctgcaaaactgagttaattaaacctctttcctttataaattactcagtctcaggtatgtctttattagcagtgygagaacagactaatagagtaaactggtaccacagagagtgggacgctgctgtaaagatacccaaaaatgtgaaagcaactttggatccggaaccatttggagggctcagaagaagaaagaaaaatgtgggtaagtttggaactccctagggacttgttaagtggctttgactaaaatgataatagtgatatggacaatgaagtccaggctgaggtggtctcagaaggagatggggaacttgttggaaaccagagtaaaggtcactcttgctatgcaaagagactggcagcattttgcccctggaccagagatctgtggaactttgaacctgagagagatgatttagggtatctggagaaagaaatttctaagcagcaaagggttcaagatgaagcagagcataagagtttacaaaatttgcagcctgatgatgcaatagaaaagaaaaacccattttctagggagacattcaagcctgctgcagaaatttgcataagtaacaaagagccaaatgttaatcatgaa

SEQ ID NO: 866371 - DNA, 621 bp, Homo sapiens
gtttcctgagccctccccagccctgcaaaactgagttaattaaacctctttcctttataaattactcagtctcaggtatgtctttattagcagtgtgagaacagactaatagagtaaactggtaccacagagagtgggacgctgctgtaaagatacccaaaaatgtgaaagcaactttggatccggaaccatttggagggctcagaagaagaaagaaaaatgtgggtaagtttggaactccctagggacttgttaagtggctttgactaaaatgwtaatagtgatatggacaatgaagtccaggctgaggtggtctcagaaggagatggggaacttgttggaaaccagagtaaaggtcactcttgctatgcaaagagactggcagcattttgcccctggaccagagatctgtggaactttgaacctgagagagatgatttagggtatctggagaaagaaatttctaagcagcaaagggttcaagatgaagcagagcataagagtttacaaaatttgcagcctgatgatgcaatagaaaagaaaaacccattttctagggagacattcaagcctgctgcagaaatttgcataagtaacaaagagccaaatgttaatcatgaa

SEQ ID NO: 866372 - DNA, 696 bp, Homo sapiens
cagagtaaaggtcactcttgctatgcaaagagactggcagcattttgcccctggaccagagatctgtggaactttgaacctgagagagatgatttagggtatctggagaaagaaatttctaagcagcaaagggttcaagatgaagcagagcataagagtttacaaaatttgcagcctgatgatgcaatagaaaagaaaaacccattttctagggagacattcaagcctgctgcagaaatttgcataagtaacaaagagccaaatgttaatcaygaaaacaatgggaaaaatgtctccagggcatgtcagagaccttcacagcagcccctcctatcacaggcctggaggcctaggagggaaaatggttttgtgggccagatccagggccaccccactctttgcagccttgggacatggtgccttgtgtcccacctgcttcagctccagccatggctaaaaggggcaaatgtacagcccaggccattgctttagagggtgcaagccccaagccttggtggcttacatgtggtgttgagcctgtgggtgcacagaagtcaagaactgaggtttgggaacctccacctacatttcagagggtgcatggaaacgcctggatgtccaggcagaggtttgctgcaggggcagagcccccatggagaacctctgctagggcagtgcagaagggaaatgtggggt

SEQ ID NO: 866373 - DNA, 644 bp, Homo sapiens
atactcacatactaccgggaaagatctatgttaggagaaaaagctcttgacttcgcctaaattcccacaggctctacttgcatttatgtgctcttctaagcatataaaacatctgtagggtccggggaaagcaagggaagcaagaaaaaccttgcataaaatcgacttgtgatttttaaaaaggtgtcagcatcggtttttggcatcacgctgttaagtttgaacrtaatgataacaatttattttccttaggagacaaaaagaaaggtgacttcccctttagtcagtgtgcagctccaaaatttccaccctcccacatcctactctcccttggtaaaataaaaaaataataataatatggaatttacttctctccagctaaaggtttatttggggcctcatagaaatgctaatattagttctcatttctctgtttttcctattatctctctcattatgaggcttttctacagaaataaaagaattcccttttgcacaaccaaaaaaaccaatggccaattttaaagagtaaaaatgaagatagagggtcacaaaaacccctcgtcaggagaaataaggctgttctcaaggggaaaggagctaaaaatacaatatggagagtaaagcataagggaaatttgcat

SEQ ID NO: 866374 - DNA, 680 bp, Homo sapiens
tactggcaaacccttttgttgacatctgtcccagaccacctttccaatgtgttcatctgtcaaaaaaaaaaaaaatacctgtaaccaacctgtaaacatttctgttagatttattagatttctcccttttcccctcaaaaaagacttaggagacatctcttttttttgcaccccttctgtttctttgaataatcatttcattctgattttgtcttatatgtttgcagaattccttacttctcctagaaataacccttttatgagctgaataaaatcatgcagtgtactgtggctttacattgacacttaaatattttcccttttctctcttgccaaatctggcttctgtgcactgccccctagcactgccaaggtgtgctggtttgagaagtactgtggtttgggaaatgcagaggtctggtgggttgctggaagacacartgtgaatgtattctgtatgctgagacctggctttcctggacccagagccaggtaattgcacttgtgagacaagccttgagggaaaaaataaaggaaaaaaaaatgtacccttacttttcttcactttataaatattcttaggccgttaggttcaaataccaactcggaacagggtagtaagggcctcagcataatgaaagaataatgccatttgctttaaaatctcagtggagatgaga

SEQ ID NO: 866375 - DNA, 680 bp, Homo sapiens
tactggcaaacccttttgttgacatctgtcccagaccacctttccaatgtgttcatctgtcaaaaaaaaaaaaaatacctgtaaccaacctgtaaacatttctgttagatttattagatttctcccttttcccctcaaaaaagacttaggagacatctcttttttttgcaccccttctgtttctttgaataatcatttcattctgattttgtcttatatgtttgcagaattccttacttctcctagaaataacccttttatgagctgaataaaatcatgcagtgtactgtggctttacattgacacttaaatattttcccttttctctcttgccaaatctggcttctgtgcactgccccctagcactgccaaggtgtgctggtttgagaagtactgtggtttgggaaatgcagaggtctggtgggttgctggaagacacagtgtgaatgtattctgtatgctgagacmtggctttcctggacccagagccaggtaattgcacttgtgagacaagccttgagggaaaaaataaaggaaaaaaaaatgtacccttacttttcttcactttataaatattcttaggccgttaggttcaaataccaactcggaacagggtagtaagggcctcagcataatgaaagaataatgccatttgctttaaaatctcagtggagatgaga

SEQ ID NO: 866376 - DNA, 680 bp, Homo sapiens
tactggcaaacccttttgttgacatctgtcccagaccacctttccaatgtgttcatctgtcaaaaaaaaaaaaaatacctgtaaccaacctgtaaacatttctgttagatttattagatttctcccttttcccctcaaaaaagacttaggagacatctcttttttttgcaccccttctgtttctttgaataatcatttcattctgattttgtcttatatgtttgcagaattccttacttctcctagaaataacccttttatgagctgaataaaatcatgcagtgtactgtggctttacattgacacttaaatattttcccttttctctcttgccaaatctggcttctgtgcactgccccctagcactgccaaggtgtgctggtttgagaagtactgtggtttgggaaatgcagaggtctggtgggttgctggaagacacagtgtgaatgtattctgtatgctgagacctggctttcctggacccagagccaggtaattgcacttgtgagacaagccttgagggaaaaaakaaaggaaaaaaaaatgtacccttacttttcttcactttataaatattcttaggccgttaggttcaaataccaactcggaacagggtagtaagggcctcagcataatgaaagaataatgccatttgctttaaaatctcagtggagatgaga

SEQ ID NO: 866377 - DNA, 658 bp, Homo sapiens
attttcttaaatgaatactttctatttctgaaatatgctactggtttttagttcatgttattgattttctattaaattcctattaagaggtaaaaactgagtctacttaaggaaaaatatcaagaaagtactgacacaggtagtgtgtatatatgaatgagaaattaaatttgacattttctaagattttttccaactctgagattctatgaaagacaaatataaccatccttcttaagcagtaaaacagaattcagagtaattcagttgttaaagatcttgtaccagaacctgactctttttgacaatcaaagaattgacagaaatatgaccctccattggggtctgagtaaacaggcagacatattttaaactttaaaaaactattttttgattattttaacgtaacaacaaaagaaaatgaaataagagggacattcaaggctcctcaaaattcaattagtcagaggaaaraatcattttcattcttgcttaaagttgtttccctcttgccttttttgcctgataggggaaagagtagattttctccatgtataacattctagaacccatttaaaaagcatttcaactgtcatagtgtaaagctatgagtgactagtgccttttgcctggtcaaatcctttggggccagttgtgt

SEQ ID NO: 866378 - DNA, 644 bp, Homo sapiens
gtattaaatgaagagttcttatgtggctccttacctgcatgtctattgaagtaagtggctactaaaattagaattaattgtgtgtctctcagttctactaaactgagttctttgaagggtgggactttgtcttatgtattctgtatctcaggtcctgagcaaatggtcaaatgcctgggattagacacatagaaggtgtttaagacttgtctgttgttgaacgttgagtaggttttatggttgaccgtctttgatgggtagataggctttcgggagtaccatygttggtcatgagaatccaagcccatcactagaatgcttctcctcatttgcaatcctggtaaattaattcagcaaatgttaatgatcacttgctaagtgccaggtatgactctagatgttacaagaaatgtgatgaacaggataccatttttgccctcaatggggtgacaactttaaagaacaggactcaaaggaaattagagctatatcaagtcatattttgagattcatcaggaaattttgatctcttggttggacatctctgagctgattctcataattctaactgtctggatccaggccaggtacatgtgataggctgggccaaagtcagtggaagagttatgtttagctgagaaatg

SEQ ID NO: 866379 - DNA, 628 bp, Homo sapiens
tctgctcatctagcttgggattcctcacaggatggcagtctcagagtagtgagacttacatgttgttggcttctctcagattgagtcttctaagaggcatggcagaagctacaagacttctataacctagccttggaagttctagaataccactgcttctgaattctatggatcaagcaagtgatggccagctcaggctccaggggatggaaaatgctccacttttttgatgaaaggaaaagtaaagaatttgtggttgtctttaatctaccacaggcatctcactggtcagctctcttagacatcagtctcttagccgaaatgtcagttgtgtcccacctggcctcagatttatcttaagcaatgcttggaaaaattcttttagctctggatgccactcagaaaacataaaagatkaatgactgaacccatctagacaaaacaataatttaaatgtccataaaaccacagactagaattactattgcatgtggatctagcattaatgcctatcatcctgtatgagggatgaactgttagaacctttctccagactccagaaagggtcagaaatgcctctggtctggtcctctctgatctttctctcaatatcctgttcttatgtcct

SEQ ID NO: 866380 - DNA, 632 bp, Homo sapiens
cattaatccaggctagacccttttccaagtctccaccataatctattcacaacagttcaaacatttgactttgttttggttgagtttactctaatgtggtttctgcatagccctctcttttatggtaatcaaatgttctgccagcatttcttctkctatgtgcaccagctaaggaaaccagatgctttgggttggtcttttcaatgtatctgagtgttgtttttgtttagtatttcagaggtttggctaaagagcactgttttgtaaatctgacccctgatgcaccccatttcccaacctactaatagttttggctactgctcccatcttgatttgaaactgctccccatcactatgcagattatcgtgtggaaagacaagctcatttaattcatcttgtttgatttgcttaattttctttttgaccatttattcctttctgcagtttaaagagggtggatagagaagctgaacagctgacccagaaccacgccctctattgtctctcaaccaatcacagacctgagtgggattggtctctgatgtgtggggatttttccctcctcacactatcagtgtgggaaggaagcaggccagttctcgtgggagtgttggtttataatgcagactga

SEQ ID NO: 866381 - DNA, 551 bp, Homo sapiens
ttgtggagcttatctcccactttctggcatgcatgtgtcttaatagggccacttctgcctaccagatccaattagcgtgatttcctcactattgtgagcagagagtaggagagattgttctgaggattaaactctcatcacagagaaagcatttaccatctttggcctttcttccttctctcgcatcattcatttcttctgttctccctagtgcaggtgctttcttaaaggttatagggtcctcatttcaagtgtctggtgtcatgaattaggtccatgcctcccttctcaggagacttatctttgtgatctacaggaccatggtcttctgcaagcatgaaccaarttacaaaccttgttaagaactcttcagacttaagaagttccagacacaaaaatctgtgaaattgaactaaattatttgagttgggttgatccaaggagactcaaagcaattccctagaagcaatgctgcctttgtccaaaatccctgtctctggtgtcaaaattgaagaacaagtgtttccactaagagttttcattgggtccct

SEQ ID NO: 866382 - DNA, 604 bp, Homo sapiens
ccttctaacagaagccccagtggagcttccaagcctctcttaaccttgagtttctccccagaaagccaagcttgagacaagggcttgagtacagcttttttgaagcgactccaggaaatagaagtggggaaagagcaggaaagaaggaagaaaggaaagaagggagggaagcagagacagagcatgaggaagacaggaagggaggagagcttgagggagggaagaagagaaggaggatggagggagggaaggagtctaacatragaatgcattatgaactagtcaccactgtaggaaattgagctcaatcccactggtatcctctacagagccatatggaatgcaccttataattgtccactggaaagatgaaaagagaaatgtttgtccgcctacttcccttctccattgatgaggggttgtaccatggttgttaaatccctcccagtttgcaattatgccagtgtccagaatttccacacagtaatatcagagaagcgccagggcaaaacaagagatacaagacacagcttagacactgactgtcaggggctccaagctggttatcacagcaatgatgtaaaaagtgggccattagggtttg

SEQ ID NO: 866383 - DNA, 589 bp, Homo sapiens
agggtggggggacctgttcacctccaaagagatgagaagcagcaccagggggtggaatagaaacaaggcagcaatgagcaggccaggagcagaaacaatgtgcttgtaaattgtttcccaactgtgagctccctcaaggctcaaccttagctcattctaccattgtgacagacactgcaagtggccccagtgaagcaacttccatggggatttcgttttaaagtcagtgtctaagggaaaagtcttatgtggtcaagctttgaattccctccattgcagagtacacaacacttctcaatagatccrgcaaggtctgctttaattccgaccttgtagaaagagatcagtttcttcaattgtgcagccggtgaagtagttgaactgtgtttaggggccatgttgtaaacaccatagtcatcccccacctaatgagctgctcacactgggggaggtacttgaggatagagaggctgggaggtgatggcagattgacagcacctatctcaggctcacatcatcacacacaccctttcaacttgttcattctgtcctctgtctctttgaattacatacatttgaattcacatta

SEQ ID NO: 866384 - DNA, 660 bp, Homo sapiens
gaggatcatgataagctgcaccagggtagagggaactcatgagacattgtcttcatatcactagctttaaggagtagctgtctcactgaagtgctggagaggtgggcaagtgccaacaccatgctttaatgcatagtgcaacaaacagaagtgccaggaagaggcagagactgtcttttgaaaggacagcccagggaagtggcattttgttcaacccagcttggcttcttaagagcacccacttccaggatacaccctgggtaccattgaaaagccatttctagactagtaagaaaactggaagctgaccctttaccctctcagctatcctggtcacaggttctccactttgtctcaggtcccatatttgcccatcctctgtctttaatgcacatgtggttaaattataccagacctctgttccgcctttcwtccaggcaagagcacctcccttaatgctctgtagggatccctatactccccgagcccttcaacccgattctcctcccctcccacgaaaacacatctagctggtcctcaacactgaataggagtttactaaatggagaagagacatggctttccagataaggggtggggggcttggagaggggccaaggtataaaatgtcatgggtgtttgggggagagggaactagtg

SEQ ID NO: 866385 - DNA, 660 bp, Homo sapiens
gaggatcatgataagctgcaccagggtagagggaactcatgagacattgtcttcatatcactagctttaaggagtagctgtctcactgaagtgctggagaggtgggcaagtgccaacaccatgctttaatgcatagtgcaacaaacagaagtgccaggaagaggcagagactgtcttttgaaaggacagcccagggaagtggcattttgttcaacccagcttggcttcttaagagcacccacttccaggatacaccctgggtaccattgaaaagccatttctagactagtaagaaaactggaagctgaccctttaccctctcagctatcctggtcacaggttctccactttgtctcaggtcccatatttgcccatcctctgtctttaatgcacatgtggttaaattataccagacctctgttccgcctttcttccaggcaagagcacctcccttaatgctctgtagggatccctatacyccccgagcccttcaacccgattctcctcccctcccacgaaaacacatctagctggtcctcaacactgaataggagtttactaaatggagaagagacatggctttccagataaggggtggggggcttggagaggggccaaggtataaaatgtcatgggtgtttgggggagagggaactagtg

SEQ ID NO: 866386 - DNA, 660 bp, Homo sapiens
gaggatcatgataagctgcaccagggtagagggaactcatgagacattgtcttcatatcactagctttaaggagtagctgtctcactgaagtgctggagaggtgggcaagtgccaacaccatgctttaatgcatagtgcaacaaacagaagtgccaggaagaggcagagactgtcttttgaaaggacagcccagggaagtggcattttgttcaacccagcttggcttcttaagagcacccacttccaggatacaccctgggtaccattgaaaagccatttctagactagtaagaaaactggaagctgaccctttaccctctcagctatcctggtcacaggttctccactttgtctcaggtcccatatttgcccatcctctgtctttaatgcacatgtggttaaattataccagacctctgttccgcctttcttccaggcaagagcacctcccttaatgctctgtagggatccctatactccccragcccttcaacccgattctcctcccctcccacgaaaacacatctagctggtcctcaacactgaataggagtttactaaatggagaagagacatggctttccagataaggggtggggggcttggagaggggccaaggtataaaatgtcatgggtgtttgggggagagggaactagtg

SEQ ID NO: 866387 - DNA, 576 bp, Homo sapiens
ctgacactgcgctgggttctgtgcagagggaatgcccgactccctgatccctggaactgacaagctcaggcaaggctggctgagctacttctaggcagccaggaagaatgggaatgaaggagagaagaggaggcaaaggaggtagacacaagacacagagtggagacacagtatggtgagtacctgataaggatcaagctgggctgcatrgaggtgaggacaattcatgaactgtaatggaagagttagcaacttatgaattagagtcttgtttacccttctcctttaatgctaatcatttgttggtttaagtgcagcttgcatctagaccaactatgttccatgctggagctcatgttgagctcatggatttctccctggggagaaatccatcaaatcctaaaaccacattatttttcttaggcactaatagtggtctgataagtctgaaccttttgaaagcattagctttctaaatggtcgcttaaacaaaagaacatcgccacacctcccaccctggatttgcaaattgttcttctctgatatagaccatatcactgatctccagggttatat

SEQ ID NO: 866388 - DNA, 574 bp, Homo sapiens
tcacatccatctcttcatgctctgagctcagggaggagtagcttgtcaccttccttcccataataaccttcctgacacttaaggatgaatattaaattacttctcagtcctggcttctctagcacagctgtattctcacaggtatatctcagtattatgagaagtaaaaggcaaatgtgatcataacagccccaaaccttcatcatggtggttgaaatgtaggtccgcactgaactggcccccggcccagttgtctcttctatcgctcaaagatgtctgagtttttgctcataggactgtactctggtggaagaaaaaggggatggtttgggttgagccaatgttttttayagacacactgcccagtctcacactttctgaggtcccttgagcaccaagctggagactacagctttagccctgtctcaagtaggggatgtgcaaatatacgcttttcaaagaccattccaggggtctaggggtctttcctttctttctttctttttttttttttgagacagggtctagctctgtcacccaggctggagtgcagtggtgtgaccacggcttactg

SEQ ID NO: 866389 - DNA, 574 bp, Homo sapiens
tcacatccatctcttcatgctctgagctcagggaggagtagcttgtcaccttccttcccataataaccttcctgacacttaaggatgaatattaaattacttctcagtcctggcttctctagcacagctgtattctcacaggtatatctcagtattatgagaagtaaaaggcaaatgtgatcataacagccccaaaccttcatcatggtggttgaaatgtaggtccgcactgaactggcccccggcccagttgtctcttctatcgctcaaagatgtctgagtttttgctcataggactgtactctggtggaagaaaaaggggatggtttgggttgagccaatgttttttatagacacactgcccagtctcacactttctgaggtcccttgagcaccaagctggagactacagctttagccctgtctcargtaggggatgtgcaaatatacgcttttcaaagaccattccaggggtctaggggtctttcctttctttctttctttttttttttttgagacagggtctagctctgtcacccaggctggagtgcagtggtgtgaccacggcttactg

SEQ ID NO: 866390 - DNA, 637 bp, Homo sapiens
gtgacagtttgaattcctctttgtagatttggatgtcctttatttctttcccttgtctgattgctctggctaggagttccagaactatattgaagaggaatggtgagagtgggcatccttgtcttattctcagagggaatgttttcaacttttctccgttcagtattttgttrgctgtgggtttgtcatagatggcttttattacattaagatatgtcccttgtatgccgattttgctgagggttttaatcataaagggatgctggattttgttgaatgcttttactgcatctattgagatgatcatgtgatttttgtttttaattctgtttatatggtgtagcacatttattgacttgcacatgttaaaacatccctgcatccctggtatgaaacccaattgatcatggtggagtatctttttgatatgttgttggattcagttagctagtatgttgttaaggattttagtatctatgttcattaaggatatcagtctgtagatttttttggttgtgtcctttcctggttttggtattagggtgatgttggcttcatagaatgaattagggagggtttcttcttctctggcttcatagaatgaattagggagggtttcttcttctctatcttgtag

SEQ ID NO: 866391 - DNA, 637 bp, Homo sapiens
gtgacagtttgaattcctctttgtagatttggatgtcctttatttctttcccttgtctgattgctctggctaggagttccagaactatattgaagaggaatggtgagagtgggcatccttgtcttattctcagagggaatgttttcaacttttctccgttcagtattttgttggctgtgggtttgtcatagatggcttttattacattaagatatgtcccttgtatgccgattttgctgagggttttaatcataaagggatgctggattttgttgaatgcttttactgcatctattgagatgatcatgtgatttttgtttttaattctgtttatatggtgtagcacatttattgacttgcacatgttaaaacatccctgcatccctggtatgaaacccaattgatcatggtggagtayctttttgatatgttgttggattcagttagctagtatgttgttaaggattttagtatctatgttcattaaggatatcagtctgtagatttttttggttgtgtcctttcctggttttggtattagggtgatgttggcttcatagaatgaattagggagggtttcttcttctctggcttcatagaatgaattagggagggtttcttcttctctatcttgtag

SEQ ID NO: 866392 - DNA, 574 bp, Homo sapiens
ttatcttcacttctattattaagtctgggctcacacgtgtttttgactacataaacagagatataaaaggctcctcctcagataagagagcagcttgagaccacgatatgccatattttggtggtttataatccataaatgaactgtgtcctatgtgactgagactctgaaagctgcccctggatatcttgagtgtctcaaatgatcacctgtgctttctttagccttccatgccttatcctttctttgtgaagtctcgtgagtactctgaaaaattagaacctctaatacaccctttttcaggaagctggaagatgtgttcatctgacacaagagagtaactcaagacagaaacaggagacccagggaacccaacttagagagaggggaaggaatttgcaatagrgtgacgaatgggactcttaagatgatagttgagccataagagcaatcagtgcagagcatgtctctgaagaagaaaaacaatggaactgaaagatatgctgatgagtttgaccaaatggagaagactgtatagttctttgaaagtttgggaagaattagagattattcc

SEQ ID NO: 866393 - DNA, 608 bp, Homo sapiens
agggtcgtctgtcagtttgtgtacacatactgaatttctttctacaggtatccaaaataatctgagtttctgcagtatttgcaaagttagattctcatgcttaatttctggtttttttctggttttgttttttttttggcagttaagtgaaaacytagactgttataatgatgttcttaaaacaaagagtctcagatattaaggcaatttagtcttccatcttcctcattcttcctccccttctttctttggattttttattaactaggattagttatctagttgtttgccagaatgttgtatctttttccttacggtattggttttgcataattaggctctttttataagcaacttagaaaaggcatttgttctcattcttaaccagggaaattctgctagggataatctgaaaaagtaaagcctagaaccttttggttgacctaaagctagatttgcttaccaatggagtgagaccagaatccaagatgagtatgtgcattcctttatgactaccatcagtgttcctgggctgctggggcatatgcttcttttataaacacatacatgtcacacatgagtattttatgtaggtttttagtttggtt

SEQ ID NO: 866394 - DNA, 608 bp, Homo sapiens
agggtcgtctgtcagtttgtgtacacatactgaatttctttctacaggtatccaaaataatctgagtttctgcagtatttgcaaagttagattctcatgcttaatttctggtttttttctggttttgttttttttttggcagttaagtgaaaacctagactgttataatgatgttcttaaaacaaagagtctcagatattaaggcaatttagtcttccatcttcctcattcttcctccccttctttctttggattttttattaactaggattagttatctagttgtttgccagaatgttgtatctttttccttacggtattggttttgcataattaggctctttttataagcaacttagaaaaggcatttgttctcattcttaaccagggaaattctgctagggataatctgaaaaagtaaagcctagaaccttttggttgacytaaagctagatttgcttaccaatggagtgagaccagaatccaagatgagtatgtgcattcctttatgactaccatcagtgttcctgggctgctggggcatatgcttcttttataaacacatacatgtcacacatgagtattttatgtaggtttttagtttggtt

SEQ ID NO: 866395 - DNA, 515 bp, Homo sapiens
gttaaaagaataaagaatcctcattgaagtcttattcttaaaaatatcaaaatgccatccttcaccattaatttcatgccaagatttaagagcaataaatattgtagactttaccacttctttatataatggcttcatacgataattttttattatataaaaattccctcttattcaagatgaatttgtttgctttgcttttaccaatgttaaaggtaatttttctgaatagcacggatggtttcctctgttaaaatactatagtgtgagcctcaaggcacagcaggcaatgccatcaccccagcaccaytgggccatttcttctatggctgaaccttctcacatcattttaaaacatggctttctaatccttttggtcttcttgctgagaattaaaaggttagaaagtttttaaagtagtagtagaagtcttatgtctcaaattacaagttacaaattacaaaaacctcccacttatctttttcaaaccattagttaggtagaaccacatcaag

SEQ ID NO: 866396 - DNA, 618 bp, Homo sapiens
gcagagtggaaacagaattaccctgtctggcctgaaaggagtgggtttccaagtgagactccaagtgtaccaagtgtctaatgggcaatccatttacacatctcttcccatattattcaagtgcaaactgtactccataagtattttcagttttatttctttacaaaacttttgaaaagaataaaaataaatccctgggtgggattatgcacaggacagagagatgccactaagccatgccaccaagcatttgtgtttattagaagagcattcctcctatgaacatcatagtttatagagtcccaactagattataatgtagacacttctgtsagatgataatatgtctgtaaaaagtctgctagatctgtattttattcataaaggcaatggtgtgaaatatacacacaaaagacccatgtgtaaaagggctcatgtgagcgaagcagcagccggggagaaggcatatccaacacacctcaggtgcagtggcggcttaaggaggcatcccaggaacacattaatcaacacattcaaggaatgcattaatcaacactgctataacggctggcatgcccattgtttcactgtagcatgctaaagagcacagagcagcaa

SEQ ID NO: 866397 - DNA, 682 bp, Homo sapiens
agaaattcacttttctaataggcagacccagggggttctggtgcatgtggtcccaggctacacaataatcaacatggtgaaataatgtctctaggataatgatggttaaacaatgaaatacacaacattgtgaggctgttagattccctttctcaaagtaatatcaggaacgttccacagggtggaaaacacactgttgacaaacacagaagagcacttggaatctaggtaagtaacaaaggattccaatccttgagcagctcagagtctcaggaaagtgaccatgagtctgtgtgtgtatgagtgcayatgtgtgtgtggagaaggtggtgataagaaggagaaaacaaagatgacccctggttctgaatagagaaaaggaggtttcattcacgggtgagcagacgtacttcagcgtggccctgggaatcccggtctcccctagccatcctagccctggaacagcctccagatgaggttgccacccaccaagttatagaatgaaacaaatgaagtcgaggcatccaaccctattcaggaagcaaaagcagttcatgtttatatattttacaaatcagacttctatgtcaagtgggaagaaagattctaaggcaaataaaaaatgttctataaatctacaactacatgaagagtcattgtttaatgggtattgaggttcaat

SEQ ID NO: 866398 - DNA, 682 bp, Homo sapiens
agaaattcacttttctaataggcagacccagggggttctggtgcatgtggtcccaggctacacaataatcaacatggtgaaataatgtctctaggataatgatggttaaacaatgaaatacacaacattgtgaggctgttagattccctttctcaaagtaatatcaggaacgttccacagggtggaaaacacactgttgacaaacacagaagagcacttggaatctaggtaagtaacaaaggattccaatccttgagcagctcagagtctcaggaaagtgaccatgagtctgtgtgtgtatgagtgcacatgtgtgtgtggagaaggtggtgataagaaggagaaaacaaagatgacccctggttctgaatagagaaaaggaggtttcattcacgggtgagcagacgtacttcagcgtggccctgggaatccyggtctcccctagccatcctagccctggaacagcctccagatgaggttgccacccaccaagttatagaatgaaacaaatgaagtcgaggcatccaaccctattcaggaagcaaaagcagttcatgtttatatattttacaaatcagacttctatgtcaagtgggaagaaagattctaaggcaaataaaaaatgttctataaatctacaactacatgaagagtcattgtttaatgggtattgaggttcaat

SEQ ID NO: 866399 - DNA, 615 bp, Homo sapiens
taaagagagctcactaaaatgctaattaggcaaaaataggaggtaaagaaatagccaatcatctatcgcctgagagcacagtgagagggacaatgatcgggatataaacccaggcattcgagctggcaatggctatgctcttcgggtcccctccttttgcatgggagctctgttttcactctattaaatcttgcaactgaaaaaaaamccctgcaaaaaccaaaccaaaatgaaaaactggttaacacgtctaatatttccataactcattttttgctgctatgaagagtaacagcacgtactactctcccaaagtgagcaattaataataaagttcaatgaactgtttatactccatactgacattctgtcccattaaataccaattccctaagtatttattaaatgactattacatgaaatgtaccattttaggagctattgggtatagatagaaattttatagtgggagaaaccacaggaattatttagcttatatttcttacttcatagttgagaaaaaaagtacatagagacaattgcctagtatgggcaataatgtcctaaccttatttccaaacaaaaatacattttagaaattagggcatcattctt

SEQ ID NO: 866400 - DNA, 624 bp, Homo sapiens
cttgctgcctttcattatatgaagtcaaggataagggggagggagaagataagaaggaaggcttgcttctgactctatcaatagaataggattcaactcaatctgtggaagttttactgaaacaaattagcaggacctgatgaacaggggataaagaatgtgggtccctgataaattcaatattttataaagaaatagtggaatgatgaagtgaattcaaataggaaaattgattgttttactgtgtatattatatatggacataaaagaggcctggaatgagaacagaaagtctgggttccaggttcatctttgaaccttagtgaactgtgtaatgctggcaagttactcaactcagaaaggttcctcagttattcagtaagatgattgtctaggtaattacaaatatcaaatctggcagtaagttcccaaaatcccatgggaagtgttttgtctagaaataaggaaaaccyatctaaatattaaagcggttcaaaaatggcaggcatatcattacaaaatagtgtttataagagcaacttctaccttgagattgatctaaatatcctcaaaatcttgctatgaactctttgtgtcctccccccacattcatatagtgaaacc

SEQ ID NO: 866401 - DNA, 632 bp, Homo sapiens
agacaagttaggcttcgggtgcattcttgtatatttggagggctttctttgcgtcttactttctatgccaactctctcagatccctcggaaatagaatcagagagtcaggcaacatagaatgttttcatgtattaccaaaagactggtctcactgtaaaaaggtcatttccaaaaataataagcatggatagcaaagaaaaaatattttaaggagagtgattaaataaatagaagaagaatatttggtcaaaactttctaggataataaattagcaatcatgctatttctgtaaacattaataaaatcgtaacgtttttcagatagccaaatatttaaytcattggccccgatttccttaatattataataaataacttgttttgtgtgctccaaagtagcagtaaaagtagactgggtaaacatttgctgtatctatttctgtaatacatctcccacattatatatacaagttaaagcttcaagactgtggttaattttaagcctagtcaagatggcagcacacccacattcccaggcttaaaatacagcatctttcataactgcttcttcacaccttacagaattcatatatacttgccgtcatattaataatatttctccaaccaggtt

SEQ ID NO: 866402 - DNA, 674 bp, Homo sapiens
tggcattgccccagataataacatgagggcaagacttgtgaacttgtgacttgtgaactacagagctaatggttgtcactggtgtgtaagtgggtgggcaacatgcatttggacttaaggtgattgataacttcctaaggggtagggaatgtttaatgatgttacatgggaagtgccayggcaaccacgtttattctaaatggggaatacacgctaagctcagattttaagacagtaattcttaaaatgtttttaaatgtccttcccatcaatagagagtacaaaacaacagtgatgccagcagagaaaaacacagccatgaaacaaaacacccagaccagagacacagaactgcttcatatagccattttcaggcaaagcagggagccagtgttttgccatgcatattagagaaaagggaagcctcctactgacataacctaatacttagtactgaaaggctattcctgaaaagtacatgagagtaagcagtcttaatgactagtaactagggctctgaagctagaagaaaacattccagtggaacacatggagaagaatctagtctgaatgagacttcagttgcagtcactagaagttatcattaagacttgatgaggaacaactgataactgaacaaaatctagtgtgtacactcaaaatgtgttacgaat

SEQ ID NO: 866403 - DNA, 674 bp, Homo sapiens
tggcattgccccagataataacatgagggcaagacttgtgaacttgtgacttgtgaactacagagctaatggttgtcactggtgtgtaagtgggtgggcaacatgcatttggacttaaggtgattgataacttcctaaggggtagggaatgtttaatgatgttacatgggaagtgccatggcaaycacgtttattctaaatggggaatacacgctaagctcagattttaagacagtaattcttaaaatgtttttaaatgtccttcccatcaatagagagtacaaaacaacagtgatgccagcagagaaaaacacagccatgaaacaaaacacccagaccagagacacagaactgcttcatatagccattttcaggcaaagcagggagccagtgttttgccatgcatattagagaaaagggaagcctcctactgacataacctaatacttagtactgaaaggctattcctgaaaagtacatgagagtaagcagtcttaatgactagtaactagggctctgaagctagaagaaaacattccagtggaacacatggagaagaatctagtctgaatgagacttcagttgcagtcactagaagttatcattaagacttgatgaggaacaactgataactgaacaaaatctagtgtgtacactcaaaatgtgttacgaat

SEQ ID NO: 866404 - DNA, 654 bp, Homo sapiens
aggccatctgaattcattatggagtactctcttaatgaggctcatttctgcgttttctcaaattagtgtaagaaattaagcatatgtagaaagatgatgaattcaaatatgaagtgagatttcaattcaacaaacactgagctatgagtaggatgctgtgctaaatactgtggtttcacagatgaaacaaatcccttgctccaaatgcaaggtaagtccacaagcaaagatatgccatgtgatgaaacaggtgccataatagaaacagaaatcagagcacagtatgggtatgygtaggctcatgatcaatgattagggagagctcaaagaaagtatgggttccaaagagagtacaaataataattttcctgctcagcagtacttgtaggcaggagatgctttcttcttgttttgttccttactgattagcaataatgaaactctgcagctttagatataaaatatttattgagagtcagtacatggaatagcacagatgtcatgaattaaatacattattgagaacacaaagtatcagaaagctagaaggctagccacccagcccagactgtctgtctcagtaaggttagattagtttcagtaaagatataacaagtcctctgattttgactgaggagcccctatctagcagca

SEQ ID NO: 866405 - DNA, 671 bp, Homo sapiens
tctgtctcagtaaggttagattagtttcagtaaagatataacaagtcctctgattttgactgaggagcccctatctagcagcacatatagctatatatgtgcctatttcctccttgtagtccatgagctacttgaaggcaataactacattatgcagcagagtgcatggcatttagaatgtgttcagtatttgaatactgaatgaatcaatgaataattctatactgaaagcaccactctctcccccaaaaataattaataatgatttttraagcccttcaaggtcttctacagcccttcaaggatctgtcacaacttctaggaatcaggacattcatccgcgtgatggatgtaagtgaaaggtccactgccaatgttagcacatttcctagttgtttgacctttaagaatttaagactactcaggaaaagcctggaaataaaaggatcatagtcttcaagatactcatgaagtcaccacttcattctaacataagcactgcctacagaaaaagaaaagacatgagagataataatggaacagctgtaaaatctctttctggagacaactaatcaagctatagctcatcttgggttctatgttaatcttatatacagccaaagcaagtatacggaaattagttaaccccatgaatatcactatttttattc

SEQ ID NO: 866406 - DNA, 623 bp, Homo sapiens
aggagtttacctattattttctattattttatctctctgtgcagcatgatagataatttattttgacctaatttccaggtcattatttgccctttagctgcaccatgtgcagctattgagttttaaacttcggttatttgttttgctgtttctataagttgtatttggtttctttttaagtcttaaatgtccctttttgggtttcctattctctgtagatttgatcaagcttatttttcatttctttaaaaatggtaagcatactttayagttattttatagtctgtatctggtaattccaacatctgaactttttgaggatctggttttgttgttgatgtagctactgcttcttgctcttggggtctagttttcttgtgtgattggtcatcttttgttgagacaggatgttgctctgttgctcaggctgagtacagtgacatgatcatggctcactgcagcctcagcttcctgggctcaagtgatcttcctgcccaaagttccaggctagcaaatagtagttctaagaccagaatctaggccacctatctctctaataaatgctcctgagtactgggttactctccctctcttttgtatgtatgtaatatcccatttcataa

SEQ ID NO: 866407 - DNA, 629 bp, Homo sapiens
gggatctccaatgaattagtcgtcctgcacacagtgtcaaggactatatttaatacccagaaataatcctacatgttagaacacagaggccaactcaactgattcagtagattagttcaataattagaaaggagggagtcctggaataccagggtaaggactgtatactttatccttcatgggatggagggccatttgaagaatttttagcttggcagaaacaggaatgaaattgcgtatttgaatggaatgtattggaragaatatggaaggcatgagaataagtaagtatatctttacaatttatgtttacagcagtggatccatttaatcaagtgagatcttaaaacacctatctgtctgtctatggagagagagggagggagggagggagggagagagggaaagagagagaatatgaatatcaatgcgagtatgtaagcagagctgttttaggtcagggtgtgatggggcccctaggctgagctgtcaggagtggaaccctcagttccgcttggtttcttttgaaagaaggtcactgtaatgtgataagtatataaggatgcaggaactagaaatgaaaggaaaactatacagacatgttttatgaaggaaggatagatcatctg

SEQ ID NO: 866408 - DNA, 635 bp, Homo sapiens
ggtgcttgatctaacatttcatgaaatgcaaaattatggttaaaagtctggagctccctcaggcagaaaaaggcaggaaaatgtggaggcagagcttcaaagaaagaacatcggttcatcatgttaatcaaattattggttaagatgggggtttggttggtggttgcaaatttatggttttaagccattagttcccgggaaaaggactgtttaaacaataacccaagccgggcttggtggctcatgtctgtaatcccagcactttgggaggccaaggtgggtggatcacctgaggtgaggagttcaagaccagtctggccaacatggcaaaaccctgtctctaytaaaaatacgaaaattagccaggcgtggtggtttgcacctgtaatctcagttactcgggaagctgaggcaggagaatcacctgaacccgggaggcagaggctgcagtgagctgagattgtgccactgcactccagcctgggtgacagagcgagactccatctaaaacaaaaaaaaaaaccctcagaagaattaggtacattttgtttaacaaagagtttaagacaaaaacatttcttgtcctctgtttctcctgctgtagcaataaaataataaattgaagggtgttggca

SEQ ID NO: 866409 - DNA, 635 bp, Homo sapiens
ggtgcttgatctaacatttcatgaaatgcaaaattatggttaaaagtctggagctccctcaggcagaaaaaggcaggaaaatgtggaggcagagcttcaaagaaagaacatcggttcatcatgttaatcaaattattggttaagatgggggtttggttggtggttgcaaatttatggttttaagccattagttcccgggaaaaggactgtttaaacaataacccaagccgggcttggtggctcatgtctgtaatcccagcactttgggaggccaaggtgggtggatcacctgaggtgaggagttcaagaccagtctggccaacatggcaaaaccctgtctctactaaaaatacgaaaattagccaggcktggtggtttgcacctgtaatctcagttactcgggaagctgaggcaggagaatcacctgaacccgggaggcagaggctgcagtgagctgagattgtgccactgcactccagcctgggtgacagagcgagactccatctaaaacaaaaaaaaaaaccctcagaagaattaggtacattttgtttaacaaagagtttaagacaaaaacatttcttgtcctctgtttctcctgctgtagcaataaaataataaattgaagggtgttggca

SEQ ID NO: 866410 - DNA, 664 bp, Homo sapiens
taattactataaaattctcagtgtataccaatgttataatggttcaataacatcagctattttaaaattattatcataatcattttttatttggaccagattcacctctgaatgatccttcaggctctgggagtatatagaatttgggataatggaaggaagcctggaattccacatccaaggaatagtggccatagggagtgggggaggggattcttaggagtgactcagttcaattccttgtgcttttctgggagtgacacaggtgcaaatctggtggcttcagaggcagagcttctattcacaggtctgcagcagagctggctcagatgtcactcctaactgccaggagtttactgtctggatatacctccttaaacagtgcttgggtcacctgctaattaacaaatgcttttcagtagtaagaaaarcagtgattttacataattttcctggttaatctaacatcaaaggaaattatcaaatgcctgaaaactgactatttttaaactaggtgataaatgccacctgtcaaaggcagtggaaagttttgctcagagcaagccattcaaataccatgtgagtgggagctgcttatcttttgtccacttcaagacaagattcaaattcgctgggttagtctactgatggcacctagaaatac

SEQ ID NO: 866411 - DNA, 595 bp, Homo sapiens
atcacttggttaagacagtgtctgccaggtttctccactccaaagttactatttccctggattccatactctgttcattagtgtccagcatacactcaagaagagggaaagtaagctccatcttctaaagaaaggagtaataaagtatttgtggacacgctaaaacttccccagtaattaatttctgcgggatagaaacactttgaagctatgcaaatatcctgtttctccttaaagtttcacccactaattttagcattcattgtttgatcttgccggctctagttattactgtgggattctaatattgacttttctatttccttcattattcctatattcattaactgggattcttytgtgaggaagatttgaacaagtaaatttttaacctgatttagatgcactaccaatagcaatgagaagagagtcaaggtaccatgaatgttgacataactttacatttaccattactaaaaatgtaatgaaaaccacatttaattaaagtttcagggtctctcatgaaggcaagaagaatggattttaaacaatatacctttaactctaacagaaatggtatggtggatggctccta

SEQ ID NO: 866412 - DNA, 544 bp, Homo sapiens
cctctgctcagggccctgcggttcccaagttaatgttcagacttcctacttggcacataaggtcccttatgatttgacacttgctcacttctgtgtggctcacacccctccccttctcattctttaagtctccatcctctccctggaagctttttgagactccctgttctgagacagatgttcttcctctgtgcccaactcaaagcttatacggaaccgcaactgttagtttacttgtctgtccccaggaagtgattttcactcgcatagacatacattagaaacccaccctacttcactacacttgtttacaagtctgtctccactgggagcctgtaagcacctcgctggggagggcaggacacacttcttgttctgctttgtgctgcacgcacttagcacagctmctggcacataattagcactccagcaaatgaatgactaatcagagttgtgggtagaagggctcattcacctactccttgaatgactgaagcagcaatgtgaacaacagacgggtgagactttgagagaggagaggaat

SEQ ID NO: 866413 - DNA, 595 bp, Homo sapiens
gttatccaacttatctttatcttgtattgttagtgttttttgtgtcctgtttatgaaatttttgctcagctcctaagtcaccgagaggctgttttctgccggttttcttagagtctcatcccacacaggcccagcttagaattctgcctaatattgagaggaaattgcatgcatgctttttgggctctttttctgaagtgtcttcctcctctggagctttctccttcaagtccgagactcctgggcaattaccaaggcctgagccctmtctccttagcccagtaaaagtcatctttattccccaactgccccattcccatcctagctcttccctcaagaaccatagcttttagtgccaggcgcggtggctcacacctgtaatcccagcactttgggaggctgatgcaggtggatcacctgaggtcaggagtttgaaaccagcctggccaacatggcgaaatcctccatctactaaaaatacaaaaaattagccaggcatggtggagggcgcctgtaatcccagctacttggaaggctgagacacgagaatcacttgaacccgggaagcggaggttgcagtaagccgagatcacac

SEQ ID NO: 866414 - DNA, 679 bp, Homo sapiens
ttttggacaactgaccaaggaggagggttaattgaggttgaattgggatccttctattatagagttaggcattttttgtctacagaaggactggtttctttacatggaagctaatttcttttagaccaagacaactctgtaattctccactagttatgacttaaacgtagcaccaaatatggcccttgggtcgagtaatatgctaacccaaaatgttttatgctgtataacaatacttgcagttatcatgctataaattcartttcagtatttttcagtgttgctgctctgtgagcgcaaaccttcctcttgtctttgttcattctttcatttgtatgctttctttcttctctttgctactctttttctcttttttaaaattcagctatttgtctttccaagaccaagaacaacttatgggggtcatattcaaccagacacactgtgttagtcagtgtttaggatcatcctaatatactttgctcaaaccccttactcttgaagtcgtggtttccaataaaggagattctctaataatggacctgaaatacactattaggctatgtgttgtagagggagaggtgcagacaggcatatttgggaaaagagcaaacattcatgctaaaaaaaaataaatgaggctagagaagttatccactctgcgctctttgagttgaat

SEQ ID NO: 866415 - DNA, 619 bp, Homo sapiens
cgaggtgccctgcacctgtaatccagctactcgggagactgagcaagagaatgacttgaacttgggaggcagaagttgcagtgagctgagatcacacgattgtactccagcctgggtgacacgagtgaaactccgtctcaaaataaataaataaataaaaaggcaagcctattttaagatgctgttactgtcttttagatagatgtagaacggtrgagaagcctatggaaacaaagtgtttgagttggtagtttcactctgtcacttcctagctgtgtgcacaaattcttaagcatctataagcctgggcataaaatatatagcacaggcctggcacatagtaacttctcaataaatagttgcaaaaatgatgatgttgtttttccccctgacttcctctacctaaaggtgtagatctctgctttactaaaaataaaaagaaaatctgaatttggatgttgaattctaacactgatttgaatactaaggtagaagccttttggttattccaaataaatgatcacacagtctacaaacagcttccacatgctcactatcattcattactagtaagtctgtgccccagccttcctgtgatagaaaaaaaaaaaggaatatc

SEQ ID NO: 866416 - DNA, 608 bp, Homo sapiens
aacagcagtgaatgtgcacttgtttaaatttgagtcatcttggtattaatttgttcacacattatcacaagcaatgtcttaaagaacttttgaagagaaaatatctaaactgtgtacaaggaaccacactagaaactacaaaggatatgaaaatccataaattccacttatttgattgtaggactacacaaattttaaagagatgatcagatggcaggaccacatactaagttaaaaaggaaccacagtatacataaattatggagttccaggtgaytttgttatgttattgtcgaatttatatctccttcgaaccactttcaagcaggggccgagggaaactttgcatggagcagtaacaccaaactcttttgcaaaaagcagtggattgtgtggaagagctcagaagaatgaacgcagcttcactggtagtgagaaagtgggtggctgctccaagaatagcacccaaactggaagctatgaatgaagaggcaccaaacacatggttttatagaatgaaagggaaaactatgtaggtgggagcaaagcagcgctgtaaaggcaattagttctaattcaaagtggaaaactgagaggaaagcaattac

SEQ ID NO: 866417 - DNA, 628 bp, Homo sapiens
aattaacaagatattgaaccaccaagccatgaaatggacactgcccctcctccaaatcagcaactcaaccccagacttcattattcagtagagaacaggtgtcagaactggacttctggactcacttttggctgaagtattcaaagaacaaccaatagcaaaaggatctgaaaacaagactgaagaggaagagcagaaagaactagggatgcttgaaagaggaaaagccttccagatggtactctttcaatatctgaaagcattttatgtttgaagaggtgtttgatgatttatttacatgattcccaaggaataaaattatggctaatataataaagaatttttaagggtcaaagcttttccacagatacaacgagctgcatttgattggaacaaaatctctgtctccagctgtgtttcaaacacaggctgaaaaaacacrtgacagaaatgtaactcaggagtctcaaaagtcaggaaggtccttggcttctaaactgttatatccctctcaaaccctgaaattctatgactcaaaatcaaaaaggatagaaaatacatagagatttttccaaacagtcaacataaaaatttatctatccagctgtaactctctgtcttagtgtaa

SEQ ID NO: 866418 - DNA, 628 bp, Homo sapiens
aattaacaagatattgaaccaccaagccatgaaatggacactgcccctcctccaaatcagcaactcaaccccagacttcattattcagtagagaacaggtgtcagaactggacttctggactcacttttggctgaagtattcaaagaacaaccaatagcaaaaggatctgaaaacaagactgaagaggaagagcagaaagaactagggatgcttgaaagaggaaaagccttccagatggtactctttcaatatctgaaagcattttatgtttgaagaggtgtttgatgatttatttacatgattcccaaggaataaaattatggctaatataataaagaatttttaagggtcaaagcttttccacagatacaacgagctgcatttgattggaacaaaatctctgtctccagctgtgtttcaaacacaggctgaaaaaacacatgayagaaatgtaactcaggagtctcaaaagtcaggaaggtccttggcttctaaactgttatatccctctcaaaccctgaaattctatgactcaaaatcaaaaaggatagaaaatacatagagatttttccaaacagtcaacataaaaatttatctatccagctgtaactctctgtcttagtgtaa

SEQ ID NO: 866419 - DNA, 560 bp, Homo sapiens
tatgaaattcacttatgtgtcatatacaccttatacacatagcctggaggtaattttatatcatatttttaataatttcgtgcatgaaagttttgtgttttgactgtgatccatcccatgaggccaggtataaaattttccacttgtggcatcatgttggtactcaaaaagttttggattttggagaactttgaatttcagattagggatgctcgactcatacctgtctataaaggaccgcccagataccccagaaaagtgacatccacctgacactgtaacctgcagtatccttcaacatctggctcccatctgcatttgtggcctcactacctattaccctatcccttacactagccyagctaagcccaggcagcctccagagacagagatctgagagttaatcactcatgggttaaagccacaaaactggttggtgtagtttcttatgtgaccatagataagtgaaacattagcctcaaggatgtaatctcctgagatgagatactcttcacctagagataagtaccacctaccaagctgctaggcagcactgaata

SEQ ID NO: 866420 - DNA, 680 bp, Homo sapiens
cagagcagtgaacagaataaaattcctgccctcatggagcttacattctagtaggaaaagtaaaacaaacaataaacatgtaaaaagatatagtatagtcagccctctgtattcatgggctggggattcacactcacagattcaactgaggatagaaaatatttgggggtggggagagaagaatggttgtaatctgtactaaacaygtacaaacttcttgtaattattccctaaacaatacagtataacaactttttacagagcacttacactgacttaaatattatagagaaaatttaaagtatatgggaggatatgtgtaggctgcatgcaaatactacaccattttatatcagggacttgggcatctgtggatttcagtgttctagggggtcctgaaaccaatccccactgatgctgagggatgactacatatcagatattgataaatgtagtggagctaaataaagcaagaaaggatggagattgcatgtagtgtagacaggagttcccattttaaatagatggtcagagaaagcctcactaagatgacatttcagcaaacatctaaaacagtgagggaaggagctacaggtccatttaggagagctttccagacagaggaaacaaatatgaaagctctagggctggaacaggcaagggggccagtagggctgtag

SEQ ID NO: 866421 - DNA, 680 bp, Homo sapiens
cagagcagtgaacagaataaaattcctgccctcatggagcttacattctagtaggaaaagtaaaacaaacaataaacatgtaaaaagatatagtatagtcagccctctgtattcatgggctggggattcacactcacagattcaactgaggatagaaaatatttgggggtggggagagaagaatggttgtaatctgtactaaacacgtacwaacttcttgtaattattccctaaacaatacagtataacaactttttacagagcacttacactgacttaaatattatagagaaaatttaaagtatatgggaggatatgtgtaggctgcatgcaaatactacaccattttatatcagggacttgggcatctgtggatttcagtgttctagggggtcctgaaaccaatccccactgatgctgagggatgactacatatcagatattgataaatgtagtggagctaaataaagcaagaaaggatggagattgcatgtagtgtagacaggagttcccattttaaatagatggtcagagaaagcctcactaagatgacatttcagcaaacatctaaaacagtgagggaaggagctacaggtccatttaggagagctttccagacagaggaaacaaatatgaaagctctagggctggaacaggcaagggggccagtagggctgtag

SEQ ID NO: 866422 - DNA, 588 bp, Homo sapiens
aacagaggtggctgcaaacagaattacttatgcaaagttgaaaataatgccacaaaaaatttaaaaatttacataataaagatgatgctgcacactgtatatgagcacactgcattagacccttgtttcctcttataatyaaaacatagaattcctcataaaggtggcaaaagaaatttctgcaaaaacccatgacttgtagcttagccacccatgagctggctaaaatgtaatcagaatgcctcaaaggaataccttgtattttcagatcacatggaattctaaaaatgaactgttaattagactgacagtccccataattgtgatcatcttcatagtatacaaaaatatattcctggtttcattctatttgtaaccctgattctatcctgcaccagaacggatcaaatggtatgtgggagattgagctgcgaaaagcctcatctttagtgtgttctccttacatatatcttggtaacttattaataatcagcaggcaaatgctatgcagttacttcatttgcttattatatgggccagaaatggtgatcataaacattttgctttcatgacctcatcacctgcatt

SEQ ID NO: 866423 - DNA, 572 bp, Homo sapiens
ctagagtgtacagttattattatattcacaatatgtggtttttatatattcacaagttgtgaggccataacgactatctaattttagaactttttcactgcctgaaaagaaaccctctattcgttagcagtcactccccattttccctcaaccattgcttccccaaccccacagccctaggtaaccactaatctgttttctgtcttgatgaatktgcctgttctggacatttttatgtgaatggaattgcataatatatggccttttgtgaccagattccttcattcagcataatgagattacctaagaggttttcaaggtttatccatgttgtagcatgaatcaatacttcattcctttttatggcagaataatattccacagtgtagaccacattttctttacccattcatcagttgatggacatttgggttgtttgcactttttggctattgtgtgtaatgctgttatgaacattcatgcaaagtctctatgtggacttacgttttcatttctctgggaacagaattgctgggtcatgtggtaattctatgtttaatcattcgaggacc

SEQ ID NO: 866424 - DNA, 659 bp, Homo sapiens
gagaaggagtttcactgtgtcagccaggatggtctcaatctcctgacctcgggatctgcccacctcggcctcccaaagtgctgggatcacaggtgtgaaccaccacgcccggctggagtttcgatcttgttgccgaggctggagtgcaatggcacgatcttggctcaccacaacctccgcctcctgggttcaagtgattctcctgtctcagcctcccgagtagctgggattacaggcatgtgccaacacgcccagctaattttgtatttttagtagagacgggggtttctccatgctggtcaggctggtctcgaactcccaacctcaggtgatctgcccrcctcggcctcccaaagtgctgggattacaggcatgagccaccaggcccggccagccatgttgatataattctgatctaaacatttgtattcaaaatgtcctggccaggtgcggtggctcacacctgtaattgcaacatttttaggaggctgaggtgggatgctgcttcagcccagcggtttcagatcagcctgggaaacacagtgagaccctgtgtgtgtaaaattaaaaattagccaggtgtggtagcacatgcctatagtctcagctactcaagaggctgaggagggagaatcgcttgagcctgggaggtagaggtt

SEQ ID NO: 866425 - DNA, 618 bp, Homo sapiens
agcaatcatctcaggggaactcctgagcaatcaaatgtgatgtcccctctcaacatcttcttctgacaaacggcaatcacgccccttccaggtgctattttcggccccaaagaaatggagaccggtttactgggaatctttcagaacacagcagcagatccagaggccttaaagggctactgagtacatctgctgggtgctcactgcatgctaacacttcagtggccatatgcattacttcatcatttaatctttgaaacaactccaaacggtgggcattctgttcctctttttataggtaagaaaactaaggcccagcgtcaacacggttcagtakaaacccaagtctgaagcctggtcctaagctctatgcacccctcaaattgggagatcacatagggaaaaaggagtgaagtaatgcaattaagtcttaaaaaaaaagggggggggccataaaaactaaaacaggagttcctaacctggggccataggtgccctgaaattggaatgacggatgtaagagcatttatctaaggagagagacacaagagatttggtggattcccaaaagtgtcttgttactcactccttgagggttaaaaatcatcaacctatgat

SEQ ID NO: 866426 - DNA, 511 bp, Homo sapiens
tttaagttcacatttaaattcattcaaataaaatatatcttaaaatttaggcagtctctgagtcccagtggtcacattctaagccacaggttcccagaggggacaatgcagacacagaacatttccatcatcagaaagttctactggtcagcacagtctagaggtcacttctacagccccttcttctacccattctacggcggggggggggggtggtggtgggacctagcagccctttcaagagaggcaggtgtcagtgactgccagggtagytctaaatccgcttgcaagtttaagcagccacagttatggggatgtgggaagaggagagagaaccatggagcgagagcttgtcatgagtgagggcctgcactggcttctctgtagggtcgctcattaggtcccgctacactacaaatggggagtgccctcctcccccctcatccctctccaactcctgcaccctcctctctcctttccttcagggtccagtcggcccagctgttgccta

SEQ ID NO: 866427 - DNA, 616 bp, Homo sapiens
ttagaccatttatatttaatgtgatatgtgatgtgataaggtttatatgctaattttgtgggagggttttgtcccatctcttctttttttttttctcttttcctgcctgattttagattaaatgaataatttttacaatttctttttgtgtcctttgttggcttataagttataatttttgttttgttattttaattgttactttaggacttatagtacatacatttagtttatcacagtttaccttcaagtgattttatgctcacatatagtrtaataatcttggaatagtatattttgatttttcccctcccaatcttttttgaaattattggaaaacatttaacctctacagattttataaactctacattatgttattatttttatttaaatagttaattgtgttttaaagagatttttaagttagaagtaaaacatgcacacacatatgtgtatatatatatgtatatgtgtatacatacacataagtacacacacacccatttccaatactcttcatcctttgtagagattcctgttaccatctggtgttattttcataacccttaaaggactttttttaaattttgtggtgaaatctgccagtgatgaa

SEQ ID NO: 866428 - DNA, 633 bp, Homo sapiens
tacattgaattccatgatatagcatatttttaaaaatatgaaaatgatgttcataataaccaactggttgaattattattttttgctgttctcaccctccaaccctcaaatacaatcgatcctccatgaagtggcgccactgtggttcagaacactttacactttgcttaragggtgctccacctggaagggcctgagctcctaaacaatcggtaatgcagtgataaagcgttaacctccaactatcaaaaagtacctgactcattcattccaactggagctcatccccgtgagctctgggtcagagagatgagctccccagccctgccacagcgtcatgccaggaaccaaactaacacgagcctcaggctcctcatcttaaagtggggttagccttagggtcatctcggcctctggtgagccatcatggcagcctctcggcagggtctggtgggcaggaggtcctcggtgagtcttgtcactgcctctgttcttccttggaatctgtggagccgagaagacagaactcattgtcctctgcttctgtactttgcacataccggttttttttgctacaagttctatattgcattgcattgatttatgcaagtatctgtttctttatctggggtc

SEQ ID NO: 866429 - DNA, 605 bp, Homo sapiens
cctgtggccacttcatgtctgaagtttcagagtacacccagaggaaaagcatcttcctttctggtccgtgtgattcctggggtattggcagatgtcctataaaaccatagcctgcctggcctcctcttgctatgcccacatagatgcctggtttatgttaaaaaaaaaattgggatacagttgttgtaatgaagtttaacattttaactagtttaaactgtacaattcattggcatgtagtgttttgcagtcaccaccagtatctagttctagaattttttttttttttcgagacagggtctcactttgtcacccaggctgaagtgcagtggcrccatctcggctcactgcaacctctgcctcccaggttcaagtgatccttccacctcagcctcccaagtagctgggactatagctgtgcgccaccatgcctggataatttttgtatatattttttttaatgtagagacagagtttcaccatggtacccaggctggtctcaaactcccgacctcaagcaactcgcctgccttggcctcccaaagtactggaattacaggcatgagccactgcacccagcccagaacattgttatcaccctaaaa

SEQ ID NO: 866430 - DNA, 602 bp, Homo sapiens
tcttttttaaggctgaattctattatgtgtatataccacattttgtttatcctttcatccattgatggacatttgggttgtttctactttggccattgtgaataatgctgctgtgaacattgatacataaatatctgtatgagtccctgctttcagttcttttgggtgcatacccagaggtggaattgctgggtcatgtggtaattctatgtttattttttttcctcccttgtaattacccacaatgtggtaaaatacacttgacatgaaatttaccactgtaactatttttaagtataagttcagtggtattaagtacattgagattgttgtgtgaccatcaccactgtccatttcctgaatgtttttcatcttgcaaayctgaaactctatatccgttaaacagcaacttcctatcctctcttcctcccagccctggtaaccactgttctactttctttctctatgattttgacttttctgtgtacttcatataaatggaatcattcagtgtttgcttgtgactggcttacttcacttagtgtaatgtcctcaagattcacccatgttgttgcataggtcagaattttcttttaaaggct

SEQ ID NO: 866431 - DNA, 602 bp, Homo sapiens
tcttttttaaggctgaattctattatgtgtatataccacattttgtttatcctttcatccattgatggacatttgggttgtttctactttggccattgtgaataatgctgctgtgaacattgatacataaatatctgtatgagtccctgctttcagttcttttgggtgcatacccagaggtggaattgctgggtcatgtggtaattctatgtttattttttttcctcccttgtaattacccacaatgtggtaaaatacacttgacatgaaatttaccactgtaactatttttaagtataagttcagtggtattaagtacattgagattgttgtgtgaccatcaccactgtccatttcctgaatgtttttcatcttgcaaacctgaaactctatatccgttaaacagcaayttcctatcctctcttcctcccagccctggtaaccactgttctactttctttctctatgattttgacttttctgtgtacttcatataaatggaatcattcagtgtttgcttgtgactggcttacttcacttagtgtaatgtcctcaagattcacccatgttgttgcataggtcagaattttcttttaaaggct

SEQ ID NO: 866432 - DNA, 574 bp, Homo sapiens
actgtggctattgcaaagttacaaaggtactgtcttgttcttcctgggtaagacctgggagaattttgtggattatcaggcattgcctcttgttctttttccatacttccccccaaataaacagagtatctccctctgagctgagctgcttgcatcaccactgtggctaccaccatgtaaattgtactgggttagatgtgaatccagcasagcactgagtccactcaaggcgcaaaatgaccactgtctggtcccttcctatgttcactcaaggcccaaatgctctacaatcagcaggtcacaaatcgagccaggattatgtccttccctttaggagaatgagttccccctggtcctgggaaggtctgttctttccattcttccctctccttttcttaagtggagtagtctctcccagaggccaccaccaccccatgcccatggcaagtactgccctgctattaccaatgatcatttaatggccaagcctctttgatcagtttgcggtgaatgctgccacttctggttctctcccttcagggaagtagactcctgctggcccagggtacattca

SEQ ID NO: 866433 - DNA, 577 bp, Homo sapiens
tggtctaaaagctcccttcgtaggtaccagctgagttctgcccgtttttgctttccactatgatagggcagcactgagtttcaacgcaaagcttgagaatcagtgttttcttcccccaagggcacagattctctctttacaccactcagccgctgccaggggttgaggaaagggtcatgtaggcaattcaacagtcttttctaccctcctcagtgcttccttcctaaaaatgatgttaaaaccagatactctaattgctcacctgatttgggattctaatgaagatgctcttttgtctgaatagttgtttagtttggcattcctgtggaggaggaasatatggtttggctgtgtcccctcaaatctcatcttgaattgtagtttccataatccccacatgtcatgggaggaaaccagtgggaagtaattagatcatgggggtggtttccctcatgctgctctcgtgatagtgagcgagttctcatgagatctgatggttttataaagggcttttccccttgtacacattcttctccctgccaccaagtatagaaggacatgtttgatttcccttctg

SEQ ID NO: 866434 - DNA, 658 bp, Homo sapiens
aacagaaattaacaacacatatttcactagtgctcgacattgaacattctatttagaaatattttgtagttatgtgaaaataacatattttgtatactctaattgaaattatgtgctatcaattttgttgctgtagcacaatttaaatgttgaaaggytatttcaaatagactctgaaaaatacatttatttatttatttatttatttatttatttatttatttaagacatggtctcagtctgttgcccaggctgcagtgcagtggcgtgatcttggcttactgcaacctctgcctcacgggttcaagtgtttctcatccctcagcctaccaagtatctggaactacaggcgcgtgccaccatgccctgtagtcccacgtgttaaattggtaataccttttacccctgtctttctctgctaaggcgtatttctcacttccctctgcctatatatactttatactgagaaaaatgttaatgtctatgcattgagtttgaaatatgacttaactggtcattagttccaattagttcacatcagacttatttatgcttctacattattcttcaaattttagatacagagaacttaacaatgatgccataccactgctacaataaatagcattttagaataaaagagagatataaataattc

SEQ ID NO: 866435 - DNA, 665 bp, Homo sapiens
ccctttttagatatatgatttacaagtatattctgtggtgacaatttctgtgtggtgtctttttaaaactctgtcattagtggctttctatgaacaactttttaaaaatttcatgtagtcccaatttgtctatttttttcttttgttgctagtgcctttggaatcatggtcaaaatatcactgacacatacagtgttttgaagctttcacctgtgttttcttctacaacttttacagttttggttcttacatttatgttatggatccactttgagttcatttctgtttgcaatgttaggtaatggtccaattttattcttttatatgtggatatccagttttcctagcaccattagttgaaaagactgtttttctcaatttaataatctttgcacccttgtttaaaatcatttgaccatatatgtaaatgtttgtttctggaatctctaggctattccattgctctatatttctgtctttatrccaatactacactgtttcgattactgtagctttagagtaagttttaaaatcagaagtggagtcctccaggttttttttttcttttcaagattcttttgaaaattaggtattctataagatagtatgtacattttaggatagttttttctatttctacaaaaaaaaattgggattttgttagg

SEQ ID NO: 866436 - DNA, 629 bp, Homo sapiens
caacacccattcttggttaaaagaacaatcaaaagctaggaattaaattggaatatctatgttttgattaaaaaataaagtccagagaatctacaggtaaaaatcacaattaatggtaaaagactgaatactattaactaagattttgaagaaggcaagtttgtttgatgttactttatctgctcaacattatgctttgggatctagccaaggcaataaggcaagaaaagaaaataagatgcatctatattggtttaaaataaatacaactacctgagttctttttctagatcaaaaagttttcaaaagcaacaaactctaagaaacacacacatacaaatcttacttgaaaaaataarcaagttgagtaacgtcataggctgcaagatcaatattaaaaaaattgtatttgtatgtactagcaaaaatcaatctgataactaaattggtaaaattattttaatgcaatagcattaaaaatacttaaatataaatttaataaagtagtaaaaaatctctacattttaaacaccaaaatacagctgagatatgttaaagaagacctattgaatgacatcaaattattaagatattctcaactttatttataagaaattctatcaaatttt

SEQ ID NO: 866437 - DNA, 602 bp, Homo sapiens
aaatgatgagatttttgttcttttatagcataatatcccattgtatgtgtgtatgtatgatatatacattgttataatgttatatatgtacatatatacaaataccatattttctttatccattcatctgttgatgaacagttaagttaaatcatggctattgtgaatagtgttgcaataaacatgggagagcagatatgtctgatatcctttcttttaaatatacacccaacagtggaattcctggatcatatagtagatttatttttgttttttcaaggaacttccatattgttctctataatggctgcactaatttacatgytgtagattatactagcattttcctttctccatatcctcaccagcatctgtatttttgtctttttggtaatagccattttcactgaggtgaggtatctcattgtggttttgatttgcatttgtcttataatttgtaatattgaaattttttcatatacctgttggctatttgcatgtctttgtttgataaatgtctatttagatcatttgaccatttttaaattggattatttatttgctataaagttaagtttcttatatattctgattattaattc

SEQ ID NO: 866438 - DNA, 602 bp, Homo sapiens
aaatgatgagatttttgttcttttatagcataatatcccattgtatgtgtgtatgtatgatatatacattgttataatgttatatatgtacatatatacaaataccatattttctttatccattcatctgttgatgaacagttaagttaaatcatggctattgtgaatagtgttgcaataaacatgggagagcagatatgtctgatatcctttcttttaaatatacacccaacagtggaattcctggatcatatagtagatttatttttgttttttcaaggaacttccatattgttctctataatggctgcactaatttacatgctgtagattatactagcattttcctttctccatatcctcaccagcatctgtatttttgyctttttggtaatagccattttcactgaggtgaggtatctcattgtggttttgatttgcatttgtcttataatttgtaatattgaaattttttcatatacctgttggctatttgcatgtctttgtttgataaatgtctatttagatcatttgaccatttttaaattggattatttatttgctataaagttaagtttcttatatattctgattattaattc

SEQ ID NO: 866439 - DNA, 581 bp, Homo sapiens
aatagttattatgctttgagatcaaaaccaagtactatttaagtgatggctattactagagtgggcagtgctgtcgcctaaattgatccttgagcccagttctcacgtagcgtctctcgggggtgatggcatgatctgggtcatctttctcacttaacaatgaggaagctgaggtgacagacctggctcagggccacataggttgctagtgcaagagccagctgagctagaagtctggtccccagactcccagccagtgttagcccctgaaacccaccctgcctctctctagcagattcagacattttttgcaaatctagttacagaattgtagctaaacataaaatcacacagtgctagctcctcaccgccaccgcycccacaccctgctgcatttaaagtgtctatctaatgtccaatgcaggaacttggttttactcagaacaaaagcgatgtggaataaagtcttctgcagtggctgctgtgtccccagagggtggtctctctgacagtctcactactccagcctttgagctgcctaaggcaaaatgacactatccgccagaagcactgggcatttg

SEQ ID NO: 866440 - DNA, 658 bp, Homo sapiens
atgcagcatgctgcatttcacctcgcattgaagaaaatggccccagttgaattccctgtgcctatggcaaatgactggtcagagggccatgacaatggggatccaacagaaagtcacatttcaaaattatgatgttgccgtggcttctgctttttgtgtgctacatggacacacaaagtagatcaccagtttccaaagggcagctgctgggggctgttgattacaaatggcaatttaaaaggcaaaaaggtcctcaaaatatttatagaaattgcttaagaattttttctagactagaagagactggctcttttcagatcccaaggagcttacagacagagtaaagagtgaattggcctgtggtgggagtcagggtggaactcagcgtggaaatcactgccatcgaatttctaggcccccataccatcagcgtcccctgcaactgagatgtggaaactagagagccacagaggtgcagcacaagaagagaataaataakgatgcaagctattatttgttaagcaccttctgtatgcttggagtttcattacatcaacatgtccttaaatttcattacaaccctgtgaggtgtgtattagttacccagccagcaagtggtgggatgtggctctgcacctgaggctaatgaccatccttt

SEQ ID NO: 866441 - DNA, 569 bp, Homo sapiens
ttaaagtctcctttaactggaggatttaagacttgggattcagatgctgcttctcaggaagtggatttggaaccaagacctaggcttctaaagttggtcaatgagcagaagaaccaagggcaactgacagacagtaaacatcttttagagtaatttaaagcaattatcataaaacttctgattcatcagagatccagcccaccaacaataagatttttaaaaggaatttgaggctgttctrctgtttaacatgaaatacgagacagaaattggtgtcacggtctatgtccttgttactacaaataagcaggtacatttctctcaaaatatccaaggcttttgttgtagagccaaaattgatcaaaggttactgcaatctaaaaacaaaagaaagaaagggagagagaattctccagttgcccggttgctaagcaaccctagtctgttctggtaactgggtctgggggtctttgctttcatttgctgctgactttcactccatatataatatataccagcatgtttattctcctgtaaatgcccagcaaataaaaagcgataaagccctt

SEQ ID NO: 866442 - DNA, 675 bp, Homo sapiens
tctgatctaaaaaagtggccattaattaactcagggagcaattcagctatttttttttctaggaaatgggaaatctggtaaatggtttgtacttctactttgtcaaaaacatgtatttttccaaactgtatgagaactttaataacactccataaatttcatgcttttagtcacacttggaatggaggctttgggaactctataaccttcttaatgacatgttggcttggcctcagcactgtagcttcaacttggttcttaatggacattaacccatagtgcatagscttcaggtaacacagttggtgatttgtattttttttctggaaaggtccaagacagatccaatattatttccttttaagaatttatccctttttgagacagagtctcactctgtcacccaagcttgagtgcagtggtgcaatcttggctcactgcaacctcccccactccccaggttcaagggatcctcccacctcagcctcctgagtagttgggaccacaggtatgcaccaccatccctggctaattagttttgtatttttagtagagtcggggtctcaccatgttgcccaggctgaattaaaaatatttctcatgaactacatgaaacctcgtaagtgtgaaggcttcttgaggacaaaggttgtatcgtgcaaacctttacatatc

SEQ ID NO: 866443 - DNA, 606 bp, Homo sapiens
gtgtgtctttctgaagagaaatctaaggctgctacgtgtaccagctgggatcctttcacattaggataattttaatggtagagcacttggcacaagttatttccttggtcttcattaggcataaaattcagccaagttaactactgatgcttatcccaaaacactttcactctaagacttcttaccttggaccttgttttcaaatatatcccattcagatttttcctaaatatctcccatccaagtactaatcagggcagaccttgcttagcttccaagattagatgagactgggcacatttagggtggcatggcctctgtattagtctgttctcatgctgctataaagcaatacctaagactgggtaattgataaaggaaagaggtttaattaactcayagttttgcattgctagggaggcctcagaaaacttacaatcatggcagaaggcacaggagaagtaggcactttcttcacagggtggcaggacagagtgagtgcaagcaagagaaacactagacgcttataaaactgtcagatcttgtgagaactcactcactatcacaagaacagtgtgggggaactgccaccatgatccaattacc

SEQ ID NO: 866444 - DNA, 617 bp, Homo sapiens
ccttttatcaccataacagataatctctaataaactctgcatatatacagtcaagtctgggtacaaagacacataggggaacttggacatagactgctggatccccacaatgttcaactgtttcttctgcggtgtcttgacccaatgattcaagccacttcagtacctttattctcagatccttaaatatatatatgtgtgtgtgtgtatatatctgttttggctccagctgtccagactgcagtcataaaattgttcccaggaaaaaaatggaagtgatatagcgcttcctctcctttcatgagwtttctgtctctcagaatttccttaaagcattctcctcatatgtcaaagtttatacatagttctttgtgttagaaagttgagaccagtagcagtcactacattataactggaagtagaagtcctaactggatattttcactacatagttatgcgttcctgagcaatatttattttaaattttacacattttgaactttaaggtaaaactatattgcatcttttattttattttactcaccatttttatgaccttcatccagatagtatctggtagaattttcattgccatgatctcttcaatttatgaatat

SEQ ID NO: 866445 - DNA, 617 bp, Homo sapiens
ccttttatcaccataacagataatctctaataaactctgcatatatacagtcaagtctgggtacaaagacacataggggaacttggacatagactgctggatccccacaatgttcaactgtttcttctgcggtgtcttgacccaatgattcaagccacttcagtacctttattctcagatccttaaatatatatatgtgtgtgtgtgtatatatctgttttggctccagctgtccagactgcagtcataaaattgttcccaggaaaaaaatggaagtgatatagcgcttcctctcctttcatgagatttctgtctctcagaatttccttaaagcattctcctcatatgtcaaagtttatacatagttctttgtgttagaaagttgagaccagtagcagtcactacattataactggaagtagaagtcctaactggatattttcactacatagttatgcgttcctsagcaatatttattttaaattttacacattttgaactttaaggtaaaactatattgcatcttttattttattttactcaccatttttatgaccttcatccagatagtatctggtagaattttcattgccatgatctcttcaatttatgaatat

SEQ ID NO: 866446 - DNA, 616 bp, Homo sapiens
tgtcgcaatttgatcctcaatgttggaggtagggcctggtgggagatatatgggttgtggggatggattcctcacgagtgtcttgtgccattctcatgggaatgagtgagttgtcactttcagttcctgcaataactgagtgttaaaaagagtctggcatgtcctttgccctcactttctcttttgccagctgatttctgaatgctggctcccctttgccttccaccatgagtagaaacagcctgaagcccttagcagaagcaaatgctggtgccatacttcttatgcagcctgcagaaccatgagccaaataaactgttttttttttcttcaaaaattgtccagcctcaggcattccttcatagcaacactaatggactaagatgcatgatgtaaaattgacaaaagttatacaccataatatgaagtctatacagttcatgttaygtgataaggaagcgagagagaaaagaaaaatatattatatacacacatatacacccacatacatattcataaaaaatgaggaaatacttatacaaataacagtcctcatctctgtaataggtcatgtgctcataacttacatttaaggcttcttcttccattgtgtatt

SEQ ID NO: 866447 - DNA, 639 bp, Homo sapiens
ctatctctctcaataaatgtgttagtttctagaggatgaagacaagggccccacacacccagcacagtgccagaaaaataagagaaacttatgcatttttgataaaataattcataaacgggcaagtgaatgaatgtgttagcatataaaatgctattttcttttcagctaaaaatcaaattctatagatctcttgatttcattctttcttaaccttgtgattccaatcgtttcccaaatcactggaagaaacccaagataatgtattaaaaaactgaattataagagccttaccttatttctcttttctgtgtatttcttttgctaggattcatccaatctgaagtggcccgttggycaggattttattaagccactttaccaatcttttatgtgacagcttaggaaaagtttttcatcactactagggtaagagagcaacaaaataatggactcttcctcaaggcagagagtagtgcactaccttgggtattgtgtgcacatattacactgactttacattttaagcatccaacatggtaattagagtagttttatgaaaatttcctttttgccattctttttgtgttgctactgatcaatttgaaatacactgcttgcattttaaatagctcttca

SEQ ID NO: 866448 - DNA, 657 bp, Homo sapiens
ttggtacacacagaccagaccatccaaatcaattaagtccataaggaaaagagaatatttcgtttgtgaaagactaaaaagaaccattctgtgtttctcaatgttttctaatgaaagacatacaatacagtatacacgaatttgtgccaatataatgactttagttcattaacctgagctctgggctattattacacattcttaaagtgtcagctaacctcctcaaaaatacttgacagcagaaaactagctgtaaaaatttagagtgagaattcataactgcatcaagyatagttaaacacattaagcaatatatcatcaagtgttaaaaataatggaaatgaaatggcacttgtcaaaataggtttttaaaaggatattttctgaattgcttgtttcaggttttttttgtcatgttcataataaaatgtaattcaatagatttggtcactaaaattagttttccacagcattgatgtgatctgttaaacattttctaagtttgatgataaatttagaagctctaaaaacttttttagacataatacttttaaatcatttaataaatggcaaggaaacttgaatattcatttctttcccattccttttgatcaaaatagcctgatcattcccttgggcctgactaaattttagaca

SEQ ID NO: 866449 - DNA, 630 bp, Homo sapiens
caatgaaccagagtctggatcctttaaaaaaataaggcaagtacacagataattttaattaaaataaagagaacaaccaagcttcagtagaagaaacagccagtgtagccctggaatttatttagaatattgtgaactatctcttttcttcaatgatgctttggagaggctcacttctaatagctttcagtcgttccttggtgcagactgtactgtaatttatgcccgcaacaaggacaacaaaaagacagagtgcagtttcccataggaaaactggggaaacttcacgaaaagaaaaggaaagagaakataggcctcaaaagtataagctgttcaagctgtcatatacacatatattcatacacatatgcactcacgcacgttcaaagtaatcattggcaaagcataattaaaacagcaaaaactttacttagtaaggttaatcatgggaaacacagactttgcagtcagccttggattcaaatcaatatttttatttactacaccatttgtaattgctaagcctcaatttattttatttactcaatattttatttacaagccgtttgaggcttgctaagcctcaatttatttgtctttaagtgaaaaaaatctagataataatagtac

SEQ ID NO: 866450 - DNA, 629 bp, Homo sapiens
aagttagttattttctagatacaatgggggtacaggcattgggcaaatgcaggcattcaaaactggaaaaattggccaaacaaagtggctacaggcccagtgaaagtctgtaatccaatagaacagtcaataaaccttaaagtttcaaaatgatctcctttgactccatgtctcacatccaggtcacactcatgcaagaggtgggttcccatggccttgggcaactccagacctgtggytttgcagggtatagcttccccccagctgctatcatgggctggtcttgtctgcggcttttcaaggtacattgtgcaagcagtcagtgaatcttccattcagggttctggaggacagtggctctcttttcacagttccactaggcagtgctccagtggagactctgtgtaggggctccaagcccacttttcccttccacactgccctagcagaggttctccatgaaggaaccacccctgcagtaaacttctgcctggatatccaggtgtttccatacatcctctgaaatctaggtggaagttcccaaaactcatttcttaagttctgtgcaccttcaggcccaacacaacacataagccaccaagtcttggggcttgcatcctctgaagcaa

SEQ ID NO: 866451 - DNA, 629 bp, Homo sapiens
aagttagttattttctagatacaatgggggtacaggcattgggcaaatgcaggcattcaaaactggaaaaattggccaaacaaagtggctacaggcccagtgaaagtctgtaatccaatagaacagtcaataaaccttaaagtttcaaaatgatctcctttgactccatgtctcacatccaggtcacactcatgcaagaggtgggttcccatggccttgggcaactccagacctgtggctttgcagggtatagcttccccccagctgctatcatgggctggtcttgtctgcggcttttcaaggtacattgtgcaagcagtcagtgaatcttccattcagggttctggaggacagtggctctcttttcacagttccactaggcagtgctccagtggagactctgtgtaggggctccaagcccacttttcccttccacactgccctagcagaggttctccatgaaggaamcacccctgcagtaaacttctgcctggatatccaggtgtttccatacatcctctgaaatctaggtggaagttcccaaaactcatttcttaagttctgtgcaccttcaggcccaacacaacacataagccaccaagtcttggggcttgcatcctctgaagcaa

SEQ ID NO: 866452 - DNA, 665 bp, Homo sapiens
tttaatgtaatttctatttctgaatttctcatttgccttgcttttcagtaacatttgatatatttggtcaacatctcactagagagagaacactgtgtagtatttaataccatggaatcttgacttcatttttgccaactatgggactttagctaggttatctgagctctttatgccttagtttcttcatttgcaaaacagttatggtaatatcacctatctaatagggatgctatgaggcttaaatgagcatgcttataatactgcctggcccaaagtcattgttcagggtacgttagtatttgttggcttttattttccttaaaataagctcatgtggattctgagattttgttttttaatctgacctcacagtgttggaatycttatgtttatatcacacttgagaatatgcagaacatattgaaattattttttgatttcagagaaccgtaggagtttgtgccacattattaggaatgtttaaaggtctagaaatatctgtcttcttcatagaaataagttttgttcttataatttgtcttatgggtttggcttgtgactcactcattgttttcactgtgatttagttatattcagtcatgaatatttaatggcttagggcaacaagtttaagttggtcagtaatgatgacagtaattgtg

SEQ ID NO: 866453 - DNA, 635 bp, Homo sapiens
tgtacataactgtgtagttttttatagaattaactggacttctacaaatttatattatcaccaggcagaaataagttggggataatgctggatcagtagaggaaacttcagctaggattagacttactccaaaattcaagaggcagaaccttgtaagcaggacggttgctaagtaaacccatggattttgatttgttcaaactcctttccatgattatccagcctttttgaacatctctatttcttcttacaaagttaatctgaatatgaaaaaaaaaatgcccttccaaaatccatcagagtaaaagccatgttgataacacgttagtggcctcatttcattttatgaaggaagwtatttacatatacatagcttggttttgggtagacttctaattagaattttcaaaatttaaggctgaattgcaaacacattttgattgcttatttggtaaggaagcaaaatgtatttgtcatttttagtgtttttttcccaatgtattattttttatgttgttttacatgatctttgcagagttctgaaaagtagtctgatttttagataattatttattttaatgaatagattgatgagtgatatatggtcattttacattatttggccataatatgtg

SEQ ID NO: 866454 - DNA, 610 bp, Homo sapiens
ctgcccaatcattcttcctgctccctctcatttcacaagagtcagaactcctttgttgccaaaggctttccttgcctgcctctgatttttccccctttatcctttataggcacttttctcagtgaatctcttgtttgtttrattccatcttggtgtctacttgtaggaagacccaaattaaaagacaacattttgcctggaatcataatagtatttttaaattattattacttgagttttagctttttcctgatctcaatcttggcatagatccctctgtgcatatagtcttcaaatctctctggagcttctatcacaaggattcttggtctgaagtatatagacctatatagttggcagcactatttagggccttttttcaggaaccaaatctttacataatctgccttttcctcacttctcccctcagtcctaaaaatctttcagaaacagtgttaatcagagtaggctagggaaatctccaaatcccagtagcttaaaaaattattttcttttcttgtcttaatatccacaagcataggtaagggacaatttccacaaagtcactcaaggagtcagaaaaaaaaaaccaattctcataaatgacaac

SEQ ID NO: 866455 - DNA, 610 bp, Homo sapiens
ctgcccaatcattcttcctgctccctctcatttcacaagagtcagaactcctttgttgccaaaggctttccttgcctgcctctgatttttccccctttatcctttataggcacttttctcagtgaatctcttgtttgtttgattccatcttggtgtctacttgtaggaagacccaaattaaaagacaacattttgcctggaatcataatagtatttttaaattattattacttgagttttagctttttcctgatctcaatcttggcatagatccctctgtgcatatagtcttcaaatctctctggagcttctatcacaaggattcttggtctgaagtatatagacctatatagttggcagcactatttagggccttttttcaggaaycaaatctttacataatctgccttttcctcacttctcccctcagtcctaaaaatctttcagaaacagtgttaatcagagtaggctagggaaatctccaaatcccagtagcttaaaaaattattttcttttcttgtcttaatatccacaagcataggtaagggacaatttccacaaagtcactcaaggagtcagaaaaaaaaaaccaattctcataaatgacaac

SEQ ID NO: 866456 - DNA, 604 bp, Homo sapiens
actgcatttgttgttaaaacagtacatgtttatgtttgatttttaagatggagcattacaacagcctcctggaaatattcacttacaaagaatgatacctaaatgcatatgattacaaatgcaattataataattaatattagcataatattgtcctggttggagaattttaatcaactatctgtaattttgtgtaagttatgagcctatctagtcattgcggttgcattctagaagcttataatttctgtaatcaaatgtattcatgaaagaagtaacacaaaggcgacatatttcaattgtaawgtttcagaaataaatgattaacaactgttttcatcaagattactgaaaaaagaaaatatataacacaattattaatgagtttcacaagaagattttactctattcatatattaacatttgatttaatttagtattcatattttgctatattaacactaaagtgttttatacacacacatatgtgtgtatgtatatatatgtatatgttatctgcagattacatatacatattatcagcacacattaagccttgtgttcattttttattaccagaaatatttaatgtagcttttttttg

SEQ ID NO: 866457 - DNA, 631 bp, Homo sapiens
aggctcgagacattgatgatatatgattaattaatgtccaatcaacaagcatctactttgttcctattataagttataataaggataattacatagtaagcctttttttttcctttttttccataaaacacttctaaaaacccaacttataaatcagataaaagtagatgaatgtgctttcatggaagagaggggggtgaggcaaaaagtccatgtagtcagcccctttcaacccctgcaggcacttctactacagggaaatatagggtattgaacgtgtgtttcccctgtaggttgtcctgaaattcctcaaaaatgacgcaaaaggggagattgaaataacaaaatagaagatagtaaaaactttctggacacccaaaagcaggcgrataactgattagataccgtggcagttatatggaggcagaggaatgctctcagatagaggaagaagcaagagtgggtttagaaagaagaattttcattaccttgtgaaaatttggaaattcctcagctcagtactttttgggataacaatcgatctatttcctacacatcaaacagaatatgaccctctcatttttaaaagtaaggattatgcttgatgaacctctgctttattataacatga

SEQ ID NO: 866458 - DNA, 635 bp, Homo sapiens
gtagctctgtttacagtatgacttgtttcatcttcttgtcattttctagggtttaacctcaatctcatcttcacaaaccttgaaccaccaggctcagggagactcctctgttctctgaagcttttctatccacagggccacaatgttgcaccattttaccactgatttgatcggttttcttttgttacccttttgccattttgttttgttttgttttytaaagaagatactagaaaattatttctctgaatacttggcaaacaatatttttcctttgattgattagaaatcatgacaaatctattctaaaaagcatatagtttaactggacatttttaagtggcctgcatctgctgaatttgttttgtagttacagtgaccatattacagaataaaattggcacatatagctaaaaaataacagtatagttggaaggataatgggacgtattcagagcagcatagtttctatagttaatacctgcacctacaacttacatagcacaaaactttatttccagaatgtgaatataaaaattgtacagtgataatgatctctctatataccattaaacttcaaatttcatgtctaatatgttacttaatatttcttttttctgcttattgatttatta

SEQ ID NO: 866459 - DNA, 635 bp, Homo sapiens
gtagctctgtttacagtatgacttgtttcatcttcttgtcattttctagggtttaacctcaatctcatcttcacaaaccttgaaccaccaggctcagggagactcctctgttctctgaagcttttctatccacagggccacaatgttgcaccattttaccactgatttgatcggttttcttttgttacccttttgccattttgttttgttttgtttttyaaagaagatactagaaaattatttctctgaatacttggcaaacaatatttttcctttgattgattagaaatcatgacaaatctattctaaaaagcatatagtttaactggacatttttaagtggcctgcatctgctgaatttgttttgtagttacagtgaccatattacagaataaaattggcacatatagctaaaaaataacagtatagttggaaggataatgggacgtattcagagcagcatagtttctatagttaatacctgcacctacaacttacatagcacaaaactttatttccagaatgtgaatataaaaattgtacagtgataatgatctctctatataccattaaacttcaaatttcatgtctaatatgttacttaatatttcttttttctgcttattgatttatta

SEQ ID NO: 866460 - DNA, 674 bp, Homo sapiens
tttttttccaatttgcagctatctgggtccttatgagaaaaaaaaaattagttttaggcaattctggtcgatctaactccctgtattactgacattttaaaacaaattattgaagtgccattacacattgcagaaaattagaaaaggaaccccccaaaaaagtaattttgcagcttctatcattctggtatagttccctctcatcttctgtctttatgtggttwatttatagtgaatatgcagttttgtattctacttttttcactgtattaaaacattttccttgttgaaaagtctctatacttaatgtctgctcaaatctcagccaaagtctcaaagcctggttcttgaaccaacagcatcagcatcagatgggaacttgtcagaaatgcacatcctcaagccctgctgcagacctgctgaatcagaaacactagctagggttttgcttttgagatggtcaaggtagaagtcagctgcatcaccagttctcaaattggcctgcatattggaattatctagaaactaaaaaacaaacaaaacacaaaaactaattcctcgaagattctgatataattggtctggatgtagcctgagcatcaggatttgtgaaatctcctgggtgattctaatgtgtagccaggattgagaagcactgagatgatttccaaaca

SEQ ID NO: 866461 - DNA, 603 bp, Homo sapiens
aacgtgtgcattcaactcacagagttgaaccattctttgattgagcagtttggaaacagtctttctgtagcattgacaaatggatatttggagcactttgaggtctatgggggaaaaggaaatatcttggcataaaagctagacagaaatattctcagaaacttctttgtgatgtatgcattcaactcacagaattgaacctttcttttgattgagaactttggaaacactctttttgtagaatctacaaatggatatttggagcactttrggggcaatagctgaaaaggaaatatcttcccataaaaacttgacagaaacattctgagaaactcctttgtgatgtgtgcattcatcttacagagttgaacccttcttttgattgagaagttttgaaacactctttttgtagaatctgcaagtgtatgtttggagtgctttgaggcctattgtggaaaaggaaatatcttcacataaaaactagacagaagcattctcaaaaacttatttatgatgtgtgcattcaactcacacagttgaagcttccttttcattgaagagtttgaaaacactcttcttgtcatatctgcaaatggatatttg

SEQ ID NO: 866462 - DNA, 651 bp, Homo sapiens
aacactctttttgtagaatctgaaagtggatatttgcagctctttgaggcctatggtggaaaaggaaatatcttcacataaaaactagacagaagcattcagagaaacttctttgtgatgtgtgcattcatctcacagagtttaacctttcttttgattgagcagttttgaaacactctttttgtagaatctgaaagtggatatttcgagcgctttgaggagtatggtggaaaaggaaatatcttcacataaaaactagacagaagcattctgagaaacttctttctgatgtgtgaattcaactcacagagttgaaaatttatttttattgagctgtttggaaacactctttttgtagtatctgtaggggatatttggagtactttgaggcctatagctgaaaaggaaatatgctcaaataaaaaccagacaaaagcattacgagaaacttatttgtgatgtgtgcattcatctcacagagttgaacctttttytgatagagcagttttgaaacactcttttgtactatcagtaggggacatttggagtgctttgaggcctatggttgaaaaggaaatatcttcatataaaaaaaagacagaaggattctcagaaacttctttgggatgtgtgcattcaaatgccagagtt

SEQ ID NO: 866463 - DNA, 696 bp, Homo sapiens
aagaagttgaaatccctgaaaaaaatttagacgactgtataactagaataaccaatacagagaagagcttaaaggagctgatggggctgaaaaccaaggctcgacaactacatgagaaatgaagaagcctcaggagctgatgagatcaactggaagaaagggtacgaatgatgcaagacaaaatgaatgaaatgaagtgagaagggaagttaagagaaaaaggaataaaaagaaatgaacaaaacctccaagaaatatgggactatgagaaaagacaaaatctacgtctgattggtgtacctmaaactgatgggaagaatggaaccaagtgggaaaacactctgcaggatattatccaggagaacttccccaatttagcaaggcagaccaacattcagattcaggaaataaagagaacgccacaaagatactcctcaagaagagcaactccaagacacataattgtcagatacaccaaagttgaaattaaggaaaaaatgttaaggtcagtgagagagaaaggttgggttacccacaaagggacgcccatcagactaacagcagatctcttggcagaaactctacaagccacaagagagtgggggccaatattcaacattcttaaagaaaagaattttcaacccagaatttcatatccagccaaactaagcttcataagggaaggagaaataaaat

SEQ ID NO: 866464 - DNA, 672 bp, Homo sapiens
ttgtgatgtgtgcattcatatcacagagttcaacctttcttttgattgagcagttttgatatactctttttgcaggatctgcaaatggatatttggagtgctttgaggcctatggtggtaaaggaaatttcttcacgtacaaactagacagaagcattctcagaaacttctttgtgatgtgtgcattcaactyacagagttgaatctttcttttgattgagcagtttggaaacactctgtttttagtaactgcaagtggatatttggagtgcatagaggcttatagctgaaaaagaaatattttcatataaaaactagacagtagcattctgagaaacttctttgtgatctttattcatctcacagatttgaaactttcttttggttgaacagttttgaaacactcttttgaaatatctgcaagtggatataatgaaagctttgaggtgtacggtggaaaaggaaataccttcacataaaaaccagatggaaggattttcagaaacttctttgtgatgtgtgcattcaattcacagagttgaacctttcttttgattgagcagtttggaagcactctttttgtagaaactgcaagtggatatttggagagctttgtggcctatggtagaaaaggaaatatcttcaactaatatctacacaaaagccttctca

SEQ ID NO: 866465 - DNA, 672 bp, Homo sapiens
ttgtgatgtgtgcattcatatcacagagttcaacctttcttttgattgagcagttttgatatactctttttgcaggatctgcaaatggatatttggagtgctttgaggcctatggtggtaaaggaaatttcttcacgtacaaactagacagaagcattctcagaaacttctttgtgatgtgtgcattcaacttacagagttgaatctttcttttgattgagcagtttggaaacactctgtttttagtaactgcaagtggatatttggagtgcatagaggcttatagctgaaaaagaaatattttcatataaaaactagacagtagcattctgagaaacttctttgtgatctttattcatctcacagatttgaaactttcttttggttgaacagytttgaaacactcttttgaaatatctgcaagtggatataatgaaagctttgaggtgtacggtggaaaaggaaataccttcacataaaaaccagatggaaggattttcagaaacttctttgtgatgtgtgcattcaattcacagagttgaacctttcttttgattgagcagtttggaagcactctttttgtagaaactgcaagtggatatttggagagctttgtggcctatggtagaaaaggaaatatcttcaactaatatctacacaaaagccttctca

SEQ ID NO: 866466 - DNA, 644 bp, Homo sapiens
ggaaaattaaatatcttcacatataaactagacagaaacattcgagaaacttctttgtgatgtctgcattcatttcacagagttgaacatttcttttgattgagcagttttcttttttttatttttttttgttttattattattacactttaagtttcagtgtatatgtgcacaatgtgcaggttagctacatatgtatacatgtgccatgctggtgtgctgcacccattatctcatcatttagcattaggtatatctcctaatgctatcccttccccctccccccaaacccacgacagtccccagagtgtgacgttagccttcctgtgtcaatgtgttctcattgttcaattcccaccaatgagtgagaacatgcattgtttggttttttgtycttgtgatagtttactgagaatgatgatttccaatttcatccgtgtccctacaaaggacatgaactcatcattttttacggctgcactgtattccatgatgtatatgtgccacattttcttaatccagtctatcattgttggacatttgggttggttccaagtctttgctattgtgaatactaccacaataatcatacgtgtgcatgtgactttacagcagcatgatttatagtcctttgggtatatacc

SEQ ID NO: 866467 - DNA, 644 bp, Homo sapiens
ggaaaattaaatatcttcacatataaactagacagaaacattcgagaaacttctttgtgatgtctgcattcatttcacagagttgaacatttcttttgattgagcagttttcttttttttatttttttttgttttattattattacactttaagtttcagtgtatatgtgcacaatgtgcaggttagctacatatgtatacatgtgccatgctggtgtgctgcacccattatctcatcatttagcattaggtatatctcctaatgctatcccttccccctccccccaaacccacgacagtccccagagtgtgacgttagccttcctgtgtcaatgtgttctcattgttcaattcccaccaatgagtgagaacatgcattgtttggttttttgttcttgtratagtttactgagaatgatgatttccaatttcatccgtgtccctacaaaggacatgaactcatcattttttacggctgcactgtattccatgatgtatatgtgccacattttcttaatccagtctatcattgttggacatttgggttggttccaagtctttgctattgtgaatactaccacaataatcatacgtgtgcatgtgactttacagcagcatgatttatagtcctttgggtatatacc

SEQ ID NO: 866468 - DNA, 565 bp, Homo sapiens
gctgtctgatcgttcttctggaacttttgtctcagaggagtacccggccgagtgaggtgtcagtctgcccctactgsgtggtgcctcccagttaggctgcttggggttcaggggtcagacaccaacttgaggaggcagcctgcccgttctcagatctctagctgaatgctgggagaacgactgctctcttcaaatctgtcagacagggacacttaagtctgcagaagtcactgctgtctttctgtttgtgtgcgccctgcccccagaggtggagcctacagaggaaggcaggagtccttgtgctgtggtggtctccacccagttggagcttcctggctgctttgtctacctaagcaagcctgggcaatggcatgcgtccctcccccagcctcgctgctgccttgaagtttgatctcagacttctgtgctagaaatcagtgagactccatgggcgtaggaccctcagagccagatgtgggatagaatctcctggtgccaagtattttaagtgcatcagaaaagcgcagtattagggtgagagtgacccaattttccaggtgccgtc

SEQ ID NO: 866469 - DNA, 648 bp, Homo sapiens
accaacttgaggaggcagcctgcccgttctcagatctctagctgaatgctgggagaacgactgctctcttcaaatctgtcagacagggacacttaagtctgcagaagtcactgctgtctttctgtttgtgtgcgccctgcccccagaggtggagcctacagaggaaggcaggagtccttgtgctgtggtggtctccacccagttggagcttcctggctgctttgtstacctaagcaagcctgggcaatggcatgcgtccctcccccagcctcgctgctgccttgaagtttgatctcagacttctgtgctagaaatcagtgagactccatgggcgtaggaccctcagagccagatgtgggatagaatctcctggtgccaagtattttaagtgcatcagaaaagcgcagtattagggtgagagtgacccaattttccaggtgccgtctgttacccctttctttgagtaagagagggaattccctgaccctttggacttcccaagtaaagcaatgccttgccatgcttcagctcgcacacgttgcaccatgcacactgtcccatgccgactctctggcaatccatagtcagatgaacccagtacctcagacagaaatgtagaaatcatccaacttcgacatctcccacgct

SEQ ID NO: 866470 - DNA, 648 bp, Homo sapiens
accaacttgaggaggcagcctgcccgttctcagatctctagctgaatgctgggagaacgactgctctcttcaaatctgtcagacagggacacttaagtctgcagaagtcactgctgtctttctgtttgtgtgcgccctgcccccagaggtggagcctacagaggaaggcaggagtccttgtgctgtggtggtctccacccagttggagcttcctggctgctttgtctacctaagcaagcctgggcaatggcatgcgtccctcccccagcctcgctgctgccttgaagtttgatctcagacttctgtgctagaaatcagtgagactccatgggcgtaggaccctcagagccagatgtgggatagaatctcctggtgccaagtattttaagtgcatcagaaaagcgcagtattagggtgagagtgacccaattttccaggtgccgtctgttacccctttctttgastaagagagggaattccctgaccctttggacttcccaagtaaagcaatgccttgccatgcttcagctcgcacacgttgcaccatgcacactgtcccatgccgactctctggcaatccatagtcagatgaacccagtacctcagacagaaatgtagaaatcatccaacttcgacatctcccacgct

SEQ ID NO: 866471 - DNA, 648 bp, Homo sapiens
accaacttgaggaggcagcctgcccgttctcagatctctagctgaatgctgggagaacgactgctctcttcaaatctgtcagacagggacacttaagtctgcagaagtcactgctgtctttctgtttgtgtgcgccctgcccccagaggtggagcctacagaggaaggcaggagtccttgtgctgtggtggtctccacccagttggagcttcctggctgctttgtctacctaagcaagcctgggcaatggcatgcgtccctcccccagcctcgctgctgccttgaagtttgatctcagacttctgtgctagaaatcagtgagactccatgggcgtaggaccctcagagccagatgtgggatagaatctcctggtgccaagtattttaagtgcatcagaaaagcgcagtattagggtgagagtgacccaattttccaggtgccgtctgttacccctttctttgagtaagagagggaattccctgaccytttggacttcccaagtaaagcaatgccttgccatgcttcagctcgcacacgttgcaccatgcacactgtcccatgccgactctctggcaatccatagtcagatgaacccagtacctcagacagaaatgtagaaatcatccaacttcgacatctcccacgct

SEQ ID NO: 866472 - DNA, 628 bp, Homo sapiens
acggctgaatcaaaagaaaggtacaactctctgagttgagttgaatgcacacaacacaaagaaggttctgagaatgcttctgtctactttttctgtgaagatatttccttttcttctataggccccatagcgctctgaatatccatttccaggtactacaaaaagagtgtttccaaactactcaatcaaaagaagggttcaactctgtgccttgaaagcacacatcaataagtggtttctgagaatgtttctgtctagtttttatgtgaagatatctccttttccactataggcctaaaagcacyccaaatatccacttgcagattctacaaaaagagtgtgacaaaactgctcaatcaaaagaaaggttcaactctgtgagatgaattcacacatcacaagcaggtttctcagaatgcttctctctagtatttatgtgaagatatttcctttttcaccttaggcctcaaggcactccaattatccatttgcagatactacaaaaagagtgtttcccaactgctcaaacaaaagaaacattcaacactgtgagatcaatgcgtacatcacaaagaagtttctcagaatatttctgtctagtttttatgtgaaggtgtttccttttcca

SEQ ID NO: 866473 - DNA, 689 bp, Homo sapiens
gtcctcaaagtgctccaaatattcatttgcagatacttacaaaaagagtgtttccaaactgctcaatcaaaggaaatgttcaactctgtgagttggatgcacacatcagaaacaagtttctgagaatgcttctatctagttttaatttgaagatatttctttttccaccataggcctcaaagcacttcaaatatccactttcagattctacaaaaagagtgcttcaaaattgctcaatctaaagaaaggttcaactctgtgagatgaatgcataaatcacaaagaagtttctcagaatgcttctgtctackttttatgtgaagatatttctttttcagctatagacctcaaagcgctccaaatagccgtttgcagatattacaaaaggaggttttccaaactgctcaatcgaaagaaatgttgaactctgtgagttgaatgcacacatccaaagaagtttctgagaatgcttctgtctattttttatgtgaagatgtttccttttccaccataggactcaaagcattccatatatccacttgcagattctaaaaaaagagtgtttcaaagctgctccatcaaaagaaatgttcagctccatgaggtgaatgcacacatcacaagtagtgtctcagaatgcttctgtctatttactatgggaaggtatttccttttcagcaataggcctc

SEQ ID NO: 866474 - DNA, 689 bp, Homo sapiens
gtcctcaaagtgctccaaatattcatttgcagatacttacaaaaagagtgtttccaaactgctcaatcaaaggaaatgttcaactctgtgagttggatgcacacatcagaaacaagtttctgagaatgcttctatctagttttaatttgaagatatttctttttccaccataggcctcaaagcacttcaaatatccactttcagattctacaaaaagagtgcttcaaaattgctcaatctaaagaaaggttcaactctgtgagatgaatgcataaatcacaaagaagtttctcagaatgcttctgtctacgttttatgtgaagatatttcyttttcagctatagacctcaaagcgctccaaatagccgtttgcagatattacaaaaggaggttttccaaactgctcaatcgaaagaaatgttgaactctgtgagttgaatgcacacatccaaagaagtttctgagaatgcttctgtctattttttatgtgaagatgtttccttttccaccataggactcaaagcattccatatatccacttgcagattctaaaaaaagagtgtttcaaagctgctccatcaaaagaaatgttcagctccatgaggtgaatgcacacatcacaagtagtgtctcagaatgcttctgtctatttactatgggaaggtatttccttttcagcaataggcctc

SEQ ID NO: 866475 - DNA, 680 bp, Homo sapiens
cttctgtctagtttttatgtgaagatatttccctttcagctataggtctcttaagcactccaaatatccatttacagttactgcaaaaagagtgtttccaaactattcaatcaaaagaaagtttcaactctgtgagttgaatgcacacatcacaaagaakattatgagaatgcttctgtctagttttcatgtgaaggtatttcttttttttaaacaattcattttgtttattgttgtgaagattacaatagataacacatgtaagtcttgcatatgttatgtgctcattatatagtgttcctcattctttttattttattattatactttaagttttagggtacatgtgcacaataggcaggttagttacatttgtatatatgtgcaatgcttgtgtgctgcaaccgttaactcgtcctttagctttacatatatctcctatagatatccctcccccctccacccccaccacaaatgtccccagaatgtgatattccccctcatgtgtccatgtgttctcattgttcaattcccacctatgagtgagaatatgcggtgtttggttttttgttcttgctgtagtttactgagaatgatgatttccaatttcatccatgtccctacaaaggacatgaactcatcattttttatggctgcgtagtattccatggtgtatatgt

SEQ ID NO: 866476 - DNA, 680 bp, Homo sapiens
cttctgtctagtttttatgtgaagatatttccctttcagctataggtctcttaagcactccaaatatccatttacagttactgcaaaaagagtgtttccaaactattcaatcaaaagaaagtttcaactctgtgagttgaatgcacacatcacaaagaatattatgagaatgcttctgtctagttttcatgtgaaggtatttcttttttttaaacaattcattttgtttattgttgtgaagattacaatagataacacatgtaagtcttgcatatgttatgtgctcattatatagtgttcctcattctttttattttattattatactttaagttttagggtacatgtgcacaataggcaggttagttacatttgtatatatgtgcaatgcttgtgtgctgcarccgttaactcgtcctttagctttacatatatctcctatagatatccctcccccctccacccccaccacaaatgtccccagaatgtgatattccccctcatgtgtccatgtgttctcattgttcaattcccacctatgagtgagaatatgcggtgtttggttttttgttcttgctgtagtttactgagaatgatgatttccaatttcatccatgtccctacaaaggacatgaactcatcattttttatggctgcgtagtattccatggtgtatatgt

SEQ ID NO: 866477 - DNA, 680 bp, Homo sapiens
cttctgtctagtttttatgtgaagatatttccctttcagctataggtctcttaagcactccaaatatccatttacagttactgcaaaaagagtgtttccaaactattcaatcaaaagaaagtttcaactctgtgagttgaatgcacacatcacaaagaatattatgagaatgcttctgtctagttttcatgtgaaggtatttcttttttttaaacaattcattttgtttattgttgtgaagattacaatagataacacatgtaagtcttgcatatgttatgtgctcattatatagtgttcctcattctttttattttattattatactttaagttttagggtacatgtgcacaataggcaggttagttacatttgtatatatgtgcaatgcttgtgtgctgcaaccgttaactcgtcctttagctttacrtatatctcctatagatatccctcccccctccacccccaccacaaatgtccccagaatgtgatattccccctcatgtgtccatgtgttctcattgttcaattcccacctatgagtgagaatatgcggtgtttggttttttgttcttgctgtagtttactgagaatgatgatttccaatttcatccatgtccctacaaaggacatgaactcatcattttttatggctgcgtagtattccatggtgtatatgt

SEQ ID NO: 866478 - DNA, 647 bp, Homo sapiens
gaagatattcccttttccaccattggcctcaaagcactccaaatatccacttgcagattatacaaaaagagtttttccaaactgctaaatcaaaagaaagtttcatctctgtaagttgaagacacacatcataaagaagtttctgagaatgcttctgtctagtttttatgtgaagatatttgcctcttgaccataggcctcaaagtgctccaaatatccacttgcagatcctacgaaaagtgtgtttcaaagctgctcaatcagaagaaaggttcaactctctgacctcaatgcacacatcacaaagaagtttctcagaatccttttgtctagttgctatgtgaagatatttgcttttccaccataggtctcaaagcgctctgaatatacacttgcagaatttacaaatagagtgtttyaaaacttctcaatgaaaataaatgttcaaatctgtgaggtgaatccacacaatacaaagaagtttctgagaatgcttccgtgtagtttttatgtgaggatgtttccttttcagctacaggcctgaaagagctccatatatccatttgcagttactacaaaaagagtgtttccaaactgctcaatcaaaagaaagggtaagctctgagagttgaatgcacacaccacaa

SEQ ID NO: 866479 - DNA, 631 bp, Homo sapiens
ctgtgtagtttttctgtgaacatattcgattttccacagtaggcctctcagcgctaaaatatccacttgaacattttacaaatagattcaaaactgctcaatcaaagaaatgttcaacattgtgacatgaatgcayacatcattaagaagtttatcagaatgcttctgtgtagtttttgtgtgaagatatttccttttccatcataggccacagagggccccaaatatccacttgcagattctacaaaaagagaaattccaaagtgctcaatgagaagataagttcaactctgtgtgatgaatgcacaccttgcaaggaaggttctgagttcttctgtgtagtttttatgtgaagatatttcgttttccacagtagaccgcaaagctcttcaaacatccacttgcagattgtataaaaagagagattctaaactgctcaatcaaaagataggttcaattctgtgagttgaatgcacacatcaagaagaagtttctgagaatgactctgtgtagtttttatttgaagatatttccttttccacaataggccacaaaggactccaattatccacttgcagattctacaaaaagagtgatacaaaactgctcaatcaaaaaagtttcacctctg

SEQ ID NO: 866480 - DNA, 631 bp, Homo sapiens
ctgtgtagtttttctgtgaacatattcgattttccacagtaggcctctcagcgctaaaatatccacttgaacattttacaaatagattcaaaactgctcaatcaaagaaatgttcaacattgtgacatgaatgcacacatcattaagaagtttatcagaatgcttctgtgtagtttttgtgtgaagatatttccttttccatcataggccacagagggccccaaatatccacttgcagattctacaaaaagagaaattccaaagtgctcaatgagaagataagttcaactctgtgtgatgaatgcacacctygcaaggaaggttctgagttcttctgtgtagtttttatgtgaagatatttcgttttccacagtagaccgcaaagctcttcaaacatccacttgcagattgtataaaaagagagattctaaactgctcaatcaaaagataggttcaattctgtgagttgaatgcacacatcaagaagaagtttctgagaatgactctgtgtagtttttatttgaagatatttccttttccacaataggccacaaaggactccaattatccacttgcagattctacaaaaagagtgatacaaaactgctcaatcaaaaaagtttcacctctg

SEQ ID NO: 866481 - DNA, 623 bp, Homo sapiens
ttcaaccctgtgagatgaatgcacacatcacaaagaagtttctctgaatacttctgtgtagtttttatgtgaatatatttccttttccacaatagacttcaaagggctccaaaaatccacttgcagattctgcaaaaagaaagattcaaaactgcttaatcaaaagataggttcaactctgtgagttgaatgcacacatcacaaagaagtttctcagaattcttctgtgtagttttgaagtggacatatttgattttccacagtaggcctcactgttctccaaatatacatttgcagattctacaaaaagagagattcaaaagtgctcaatcaaaagataggctcaactctatgagttgaatgcacatataatgaagaagtttctaagaatkcttctgactagtttttatgtgaagatatttcctttgccactataagcctcaaagggctccaattatccacttgcaggttctaaaaaaaaagtgtgccaaaactgctcaatcaaatgaaaggttcaactttgtgagatgaatgcacacatcacaaagacgtttctcagaatgcttctttgtagttcttatgtgagggtatttcctttcccaagataggcctcaaagggctcc

SEQ ID NO: 866482 - DNA, 653 bp, Homo sapiens
aatcaaaagacaggttcaactctgtgagttgaatacacacatcacaaagaagtttctcagaatgttactgagtagtctttatgtgaagatatttccttttcctcaatatgactcaaagagctccaattatccagttgcagattctacaaaaagagtgtttccaaactgttcaatgaaaaaaaggytcaactctgtgagatgaatgcacacatcacaaagtagtttcacagaatgcttctgtctagtttttatgtgaggatagttccttttccaccatagggcccaaagagccccaaatatccacttgcagattctacaaaaagagtgtttcaaaactgctctatcaaaagaaaggttcaactctgtgtgttgaacgcactcatcacaaagaagtttctgagaatgcttctgtctagtttttatgtgaagatatttcattttctgccacaggccccaaagcactcaaatatacacttgcagattctagaaaaagagagtttcaaaactgctctatcaatagaaaggttcaactctgtgagttgaatgcacacatcacaaagttgttctgggaatgcttctgtctagtttttaagtgaagatacttcctcttccaccaaaggtcacagagcactacaaagatccacttgcagatt

SEQ ID NO: 866483 - DNA, 669 bp, Homo sapiens
acttcctcttccaccaaaggtcacagagcactacaaagatccacttgcagattctactaaaagagtgtttcaaaactgatctgtcaatagaaacattcagctttgttagtagaatgcactcatcacaaagaagtttctgagagtgcttctgtctagttcctatctgaagatatttccttttacaacataggccccaaagcrctcaaaatatccacttgcagatattatgaaaagagtgtttcaaaactgctctatcaaaggaaaggttcaactctgtgagatgaatgcacacatcacaaagaagtttccgagaatgcttctgtatagtttttatgtgaagatatttccttttacaccataggcctcaaagcgctccaaatattcacttgcagattctacaaatagtgtttcaaaactgctctattaaaagaaaggttcaactcagggagctgaatgcacatattacaaagaagtttctgagaatgcttctgtctagttttcatatgaagatatttcgttttagaccattggcatcaaagcatttcaaatatcctcttgcagattctagaaaaagagtttttcaaaactgctcttacaaaagactggttcaacagtctcagttgaattcacacgtcacaaagaagtttctgagaatgcttctgtctagtt

SEQ ID NO: 866484 - DNA, 621 bp, Homo sapiens
ttattggtgtataagaatggttgtgatatttgcacattgattttgtatcctgagactttgctaaagttgcttatcagcttaaggagattatgggctgagacaatggggttttctagatatacaatcacgtcatctgtaaacaaggacaatttgacttcctattttcctaattgaataccctttatttccttctcctacctgactgccctgaccaaaacttccaacactgtgttgaataggagtggtgagagagggcatcctgtcttgtgccagttttcaacggaaatgtttccagtttctacagaatgggagaaaatttttgcaacctactcatctgacaaagggctaatatccagaatctacaatgaactcaaacaaatttacaagagaaaacaaacaaccgcatcaaaaagtgggtgaaagatatgaacagacacttctmgagagaagacatttatgcaaccaaaaaacacatgaaaaaatgctcatcatcactggccatcagagaaatgcaaatcaaaaccacaatgagataccatctcacgccagttaaaatggcgatcattaaatagtcaggaaacaacaggtgctggaaaggatgtggagaaataggaacacttt

SEQ ID NO: 866485 - DNA, 621 bp, Homo sapiens
ttattggtgtataagaatggttgtgatatttgcacattgattttgtatcctgagactttgctaaagttgcttatcagcttaaggagattatgggctgagacaatggggttttctagatatacaatcacgtcatctgtaaacaaggacaatttgacttcctattttcctaattgaataccctttatttccttctcctacctgactgccctgaccaaaacttccaacactgtgttgaataggagtggtgagagagggcatcctgtcttgtgccagttttcaacggaaatgtttccagtttctacagaatgggagaaaatttttgcaacctactcatctgacaaagggctaatatccagaatctacaatgaactcaaacaaatttacaagagaaaacaaacaaccgcatcaaaaagtgggtgaaagatatgaacagacacttctagagagaagacatttatgcarccaaaaaacacatgaaaaaatgctcatcatcactggccatcagagaaatgcaaatcaaaaccacaatgagataccatctcacgccagttaaaatggcgatcattaaatagtcaggaaacaacaggtgctggaaaggatgtggagaaataggaacacttt

SEQ ID NO: 866486 - DNA, 622 bp, Homo sapiens
agaaagattctttctagtttttatctgaagacatttcctttttcaccataggcattaatgtgctcccatatatccctttgcagattctaccaaaacagtgtttccaaaaggctgaatgaaaagaaatgttttcccctgtgagatgaatgcaaacatcacaaaactgtttctcatctagcttccttctagtttttatcctgggatattggattttttgcctatggcctgtatgagcaattaaatatcccttcacagattctacaaaaacagtgtttcctaactgctgaatgaaaagaaaggtttatctctgtgcgatgaatgcacagattacaaagctgtttctcagaaagctttcttctattttttctcctggaatgttcactttttcrcatttggcctcaatgacttgccgaatgtcccttcgcagattctaccaaaacagtgtttccaaactgctgaatgaaaagaccagtttaactctgcaagatgaatatacacatcacaaagcgatttttcagaccacttcctttgtttttattctgggatatttgctttttcacctatgccctcaatgagctatctaatatcaattctcacattctacaaaaacagtgttcccaaa

SEQ ID NO: 866487 - DNA, 582 bp, Homo sapiens
ccaaagaactgtttaactctgtgagatgaatgaacacatcgcaaagcagtttctcagaatgtttctttctggtatttatcaaaagatatttcctttttcaccttaggcctcaaagagctgccaaatatcctttcacagtttctacaaacacagtgtttccaaactgctgaattaaaagaaaggtttaactctgctggatgaatgcacacatgactaagyggtttctcagataccttccttctagttttaatcctgggatattctctttttcgccattggcttcaatgagctcccaaacctccattggcagaaaggacaaaaacagtgtgaccaagcttctgaatccaaagaaaggcttaactctgttggatgaatgaacacatcaccaagcagtttccagaaaacttcctgctactttttaactgaagatatttccttttccaccatgggccacagtcctctaccaaatacctctttgcagattctaagaaaacactctttcgaaactactgaatgaaaagaaaggtttaactctgctagatgaatgcacatgtcaccaagaagtttctcagataacttgct

SEQ ID NO: 866488 - DNA, 651 bp, Homo sapiens
gcacacatcactaagcagtttttcagatagcttccttctagttttaatcctgggatatcctctttttcacaactgtcttcaaagagctcccaaacgtccattcgcagaatggacaaaagcagtgtcaccaaactgctgaatacaaagaaaggcttaactctgttggatgaatgaacacatcacctggcagtttctcaagaagcttcctgctacctatatctgaagacgtttccttttccaccattggacacaatgcagtactgggcattcatctcatagagttgaacaattcttttgactgagcagtttggaagcagtcttttgtagaatctggaaaggaatatttgggagcaatttgaggcctatggtgaaaaaggaaatatcttcacataaaaactagaaagaagctttctgagaaactactttgtgatgagtgcattcatataacasaggtaaacgtttcttttcattgagcagtttggaaactctttttgcagaatcttcaaagagatatttgtgagcgctttgaggcctacagtgaaaaaggaaatatcttcacataaaaaccagacagaaactttctgagaaacttctttgtgatgcgtacattcatctcatagagttgaaccattcttctgaatgagcagtttg

SEQ ID NO: 866489 - DNA, 673 bp, Homo sapiens
tcttagaaactgctttgtgatgtgtgcattcatctcacagaatagaaccattcttttgattgcactgattggaacagtatttttctagaatctgcaaagggttatttgggagtgctttgaggcctctggtgaaaaaggaaatatcttcacataaaaactatacagaagctttctacaaaactgctttgtgatgtgtgcattcagctcacagtgttgaaccattgtttgattgagcagtttggaaaaagtctttttgtagaatctgccaagggatatgtgggagtgctttgaggctcatggtgaaaaaagaaacatcttcacataaaaactagaaagaaactttctgagaaactkctttgtgatgtgtgcattcatctcacacgggtcaacatttcttttcattgaacactttggaaattctattcttctagaatctagaaagttatatttccatgctctttgaggcctatggtgataaaggaaatatcttcaggtaaaaactagacagaagctttctgagaaagttctttgggaggtgtgtattcatctcttagagttgaacaatcctttttatggaaaattttgaaaacacagtgtttgtagaatctgtgaaggggtattttcattcacatagatgcctgaggtggaaaagaaataacttccaacagaaact

SEQ ID NO: 866490 - DNA, 591 bp, Homo sapiens
acataagaattagacaaaagatttctgagaattttctttgtgattcgtgcattcatctcacagagttgaatctttcttgtcattcagcagtttgcaaacactctttttgtagaatctgcaagtgcatatttggagccgtttgcrgcctatgctggaaaaggaaatatcttcacataaaatctagacagaagcaatctgagaaacttctttgagatgtgtatattcatctcacagagttaaacctttcctttgattgatcagtttggaaactctcctttgcagaatgtgcaagtggacatttggatcgctttgaggcctatgttggaaaaggaaatatcctcacataaaaactagacagaacaattctgagaaacttctttgtaatgtgtgcattcacctcacagagttgaatctttcttttgattgagccgcttgtaaacactctttttgtagaatctgcaggtggacatttggagtgctttgttgtgtatggtggaaaaagaaatatcttcaagtaaaaaccagacagaagcaatctgagaaacttctttgtgatgtgtgcattcatctaatggaattgaacttttcttt

SEQ ID NO: 866491 - DNA, 591 bp, Homo sapiens
acataagaattagacaaaagatttctgagaattttctttgtgattcgtgcattcatctcacagagttgaatctttcttgtcattcagcagtttgcaaacactctttttgtagaatctgcaagtgcatatttggagccgtttgcagcctatgctggaaaaggaaatatcttcacataaaatctagacagaagcaatctgagaaacttctttgagatgtgtatattcatctcacagagttaaacctttcctttgattgatcagtttggaaactctcctttgcagaatgtgcaagtggacatttggatcgctttgaggcctatgttggaaaaggaaatatcctcacataaaaactagacagaacaattctgagaaacttctttgtaatgtgtgcattcacctcacagagttgaayctttcttttgattgagccgcttgtaaacactctttttgtagaatctgcaggtggacatttggagtgctttgttgtgtatggtggaaaaagaaatatcttcaagtaaaaaccagacagaagcaatctgagaaacttctttgtgatgtgtgcattcatctaatggaattgaacttttcttt

SEQ ID NO: 866492 - DNA, 631 bp, Homo sapiens
gtagaatctggaagtggatatctgaagggctttaaggcctattttgggtgaggaaatatcttcacataagtactatacagaagcattctgagaaaccttttgtgatgtgtgcattcaactcacagagttgaactatcttttgattgggcagttttgtatctctcttcctgtagaatctgcaattggatatttggagtcctttacgccctatggtgtaaaatgaaatatcttcaaataaaaactacacggaagcactaagagaaacttctttgtgatgagtgcattcatcacacagatttgaacgtttcttttgtttgagcatttttgaatctctctttttgcagaatctgcaagtggatatttagagcgctttgaggcctactctggaaaagcaaatatcttcacatagaaactacacagaatcattaagagaaacatctttgtgatgtgtgcattcatctcactgggttgaacctttctttygatgaagcagtttagaaacactctttttgtagaatatgcaagtggatatttgaagcgatttgaggcctactgtggaaaaggaaatatcttaacataaaaactacacagaagcattcttagaaacttctttgtgatatgtgcattcaac

SEQ ID NO: 866493 - DNA, 563 bp, Homo sapiens
ctcacagagttgaacgtatctgttgatggagaagttttgcaactctctttttgtaaaatctggaagtgggtatttgggaccgtttgtggaatatggtggaaaaggaaataccttcatttaaaaactacacagaatcattctgtgaaacttccttgtgatgtgtgcattcatctcacagagttgaacttttcttttgattgaacagttttgaaaccttcctttctagtatccccaagtagatatttggagccctttgagrcctatggtggaaaaggaaacatcttaaaataaaaactacacagaagcattatgagaaacttatttgtgatgtgtacattcatctaacagagttgaatctttctttgtattgagcagttttgaaactctgtttttgtagaatcttcaagtggatatttagagtgctttgaggcctattttggaaaaggtaatatcttcacttaaaaactacacagaaccattctgagaaacttcttagtgatgtgtgtattcaactcacagagttgaacctttcttttgattgagcagtttggaaacaatctttt

SEQ ID NO: 866494 - DNA, 588 bp, Homo sapiens
aatttggagcgctttgaggcctatggtggaaaaggaattatcttcacataaaaactacacagaagcattctgaggaacttctttgtgatatgtgaatacagctcacggagtagaacctatcttttgatagagcagttttgaaactctctttttctagaatctgcaagtggttatttggagccctttgtggccgatggtggaaaaggaaataacttacttcccttaaaaactacacagaggaattctgagaaacttctttgtgatgtgtgcattcatctcacagaggtgaacatttgatttgattkagcagttttgagacactctttttgtagaatctgcaagtggatatttggagcactttgaggcctattttggaaaaggaatcatcctcacataaatgctatacagaagcattctcacaaacgcctttgtgaagtgtgtattcatctcacacagttgaacctatcttttgatagagcagttttgaaactctctttttgtagaatctgcaagtggatatttggagccctttgcagcctatggtggaaaaggagctatcttcatataaaaactactcagaagctttct

SEQ ID NO: 866495 - DNA, 632 bp, Homo sapiens
aatcgatatttggagtgctttgaggcctattgctgaaaaggaaatatcttcacataaaaaaaactagacagaatcattctgagaaacttcctttggatgggtgcattcatctcatggagttgaagctttcttttgcttgagaagttttgaaacactcattttgtagtatctgcaagtggatatttggaaagctttgaggcctacggtggaaaaggaaatatctttacatagaaactagagagaagcattctcagaaactactttgtgttgagtgmattcaactcacaaatttgaacctttcttttgattgagcagtttcgaaaaacactctttttgtagaatctgcaagtggatattcagagcactttgaggcctatggtggaaaacgaaatatcttcccatatatactagacagaagccttctgagaaacttctttgtgatgtgtgcgttcatctcacagagttgaacttttcttttgattgagaagctttgtaacactctttttgtagcatcccaagtggatatttggagcactttgaggcctatggtggaaaaggaaatgtcatcacatatagactagacaaaaacattctcagaaacttctttgtgatgtgtgcattcaacacacagt

SEQ ID NO: 866496 - DNA, 632 bp, Homo sapiens
aatcgatatttggagtgctttgaggcctattgctgaaaaggaaatatcttcacataaaaaaaactagacagaatcattctgagaaacttcctttggatgggtgcattcatctcatggagttgaagctttcttttgcttgagaagttttgaaacactcattttgtagtatctgcaagtggatatttggaaagctttgaggcctacggtggaaaaggaaatatctttacatagaaactagagagaagcattctcagaaactactttgtgttgagtgcattcaactcacaaakttgaacctttcttttgattgagcagtttcgaaaaacactctttttgtagaatctgcaagtggatattcagagcactttgaggcctatggtggaaaacgaaatatcttcccatatatactagacagaagccttctgagaaacttctttgtgatgtgtgcgttcatctcacagagttgaacttttcttttgattgagaagctttgtaacactctttttgtagcatcccaagtggatatttggagcactttgaggcctatggtggaaaaggaaatgtcatcacatatagactagacaaaaacattctcagaaacttctttgtgatgtgtgcattcaacacacagt

SEQ ID NO: 866497 - DNA, 633 bp, Homo sapiens
gcctatagctgaaaaggaaatatcttcacctaaaaaaagacagaagcattcagagtaacttctttgtgatgtgtgtattcacctcacagaggagaaactttcttttgattgagcagttttgaaacagtcttttgtagaatctgcaagtggatatttggaatgctttgaggcctatggtggaaatggaaatatctgaacatagaaactagacagaagcatttccggaaactgctttgtgatgtgtgcattcaactataagagttgaacctttcttttgattgaccagtttggaaacactctttttgtagcaactgcaagtggatatttgaatgcttttaggcctgtagttgaaaaggaaatatcttaacataaaaactagacggaagcattctcagaaacttctttgggatgtgtgctttcaactcacagagctgaacctttcttttgattgagcagtttggaaayactctttttgtagtatctgcaagtggatatttggagcgctttgaaccctatgttagaaaaggaaatatcttcacaagaaaactagacagagcattctcagaaacttctttgggatgtttgctttgaactcacacagttgaacatttcttttgattgagcagcatgcaa

SEQ ID NO: 866498 - DNA, 636 bp, Homo sapiens
acactctggggactgttgtgggttgggcggaggggggaagaatagcattaggagatagacctaaagctaaatgacaagttaatgggtgcagcacaccagcatggcatatgtatacatatgtaactaacctgcatattgtacacatgcaacctaaaatttaaagtgtaataataataaataaaaataaaataaaataaaaaaaggtaaactgctcaatcaaaagaaaggttcaactctgtgagatgaatggacacatcacaaagaaaattctcagaatgcttctgtctagcatttatgtgcagattttttttttcagctacatttcgttttccacaataggccttaaagcacatcaaatatccatttgcagatamtacaaaaagagtgtttccaaactgctcaatcaaaagaagggttcaactccgtgtgttgagtgtacaaatcacaaagtagtttctgagaatgcttctgtttagtttttttgtgaaaatatttcattttccaccataagcctcaaagcgctccatatatccacttgcagattcttcaaaaagagtgtttcaaaactgctcaatcaaaagaaagattcaactctgtgacatgaattcacacatcacaaacaagtttctcagaatg

SEQ ID NO: 866499 - DNA, 596 bp, Homo sapiens
aactgctcaatcaaaagaaaggtacaactctgttagttgaatgcatgcatcacaaagaattttttgagactgcttctgtctaatttttgtgtgaagttgtttcctgttccaccttaggcttcaaagygctccaaatatccacttgcagattctgcaaaacgaatgtttcaaaactgctcaatcaaaacaagtgttcaactctgtgagacgaatgcacacatcacaaaggaatttctcagaatgcttctgtctagtttttatatgaagagaattccttttccaccataggcctcaaagcgttaaaattatccacttgcagattccacaaaaaaagagtttcaaaactgctcaaacaaaagaaaggttcaactctgtgagataaatgcacacttcacaaagaattttctgagaatgcttctgtctaacatttatgtgaagatatttccttttccatgataggcctcaaaccactgcaattatccacttgcagattccacaaaaagagtgtttgaaagctgcgaaaaccaaagaacgtttcaactctgtgagatgaatgcacacattacaaagaagtttctcagaatgcttctgtctag

SEQ ID NO: 866500 - DNA, 672 bp, Homo sapiens
tctactctgtgagatgaatgcacacatcacaaagaagtttctcagaatgcttctgtccagtttttttgtgaagatatttccttttcagctataggcctcgaagaactccaaatatccatttgcagatactacagaaataatgtttccaaactgctcaatcaaaagaaaagttcaactctctatgttgaatgcacacatcacaaagaagtttctgagaatgattctgtctactttttatgtgaagatatctcgctttccaccagtggcctcaaagggctccaaatatccrcttgcagattctgcaacaagagtgtttcaaaactggtcaatcaatagaaagtttcaactctgtgagataaatgcgcacatcccaaagaagtatctcagaatgcttctgtctactttttatgtgaagataattccatttcagctgtaggcctcaaagcgctgaaattatccatttgcagatactacaaaagagtgtttccaaactgttcaatcagaagaaagtttcaaatatgagagttgaatgcacacataccaaagaagtttttgagaattcttctgtatagtttctatgtgaagatatttccttttccaccataggccttaaagcgctccaaatatccacttgcagattcttcaaaaagagagtttcaaaactgcttaatt

SEQ ID NO: 866501 - DNA, 672 bp, Homo sapiens
tctactctgtgagatgaatgcacacatcacaaagaagtttctcagaatgcttctgtccagtttttttgtgaagatatttccttttcagctataggcctcgaagaactccaaatatccatttgcagatactacagaaataatgtttccaaactgctcaatcaaaagaaaagttcaactctctatgttgaatgcacacatcacaaagaagtttctgagaatgattctgtctactttttatgtgaagatatctcgctttccaccagtggcctcaaagggctccaaatatccacttgcagattctgcaacaagagtgtttcaaaactggtcaatcaatagaaagtttcaactctgtgagataaatgcgcacatcccaaagaagtatctcagaatgcttctgtstactttttatgtgaagataattccatttcagctgtaggcctcaaagcgctgaaattatccatttgcagatactacaaaagagtgtttccaaactgttcaatcagaagaaagtttcaaatatgagagttgaatgcacacataccaaagaagtttttgagaattcttctgtatagtttctatgtgaagatatttccttttccaccataggccttaaagcgctccaaatatccacttgcagattcttcaaaaagagagtttcaaaactgcttaatt

SEQ ID NO: 866502 - DNA, 581 bp, Homo sapiens
aaaaagagagtttcaaaactgcttaattaaaagaaaggtgcaactctacgagataaatgcatctatcactaagacgtttctcagaatgcttctgtctagttttatgtgaagatacttccttttcagctatatgcctcaaatcactccaaatatccatttgcagatacaacaaaaagaatgtttccaaactgctcaatcaaaagaaagtttcaacactgtgagttgaatgcacacatcacaaagtagtttctcagaatgttctatctagtttttatgtgaagatatttacttttccaccataggcttccaagcaaacaaaatatccactttcagattaaaaaaaagagtgattcaaaactgytcagtcgaaagaaaggttcaactctatgagaggaatatgcacatcaaaaagaagtttctcagaatgcttttatttagtttttatgtgaagatatttctttttccaccacaggcctgaaagcactccaaatacccttttgtagatactacaaaaagactgattccaaactgctccatcaaaagaaaggttcttctccatgagatgaatgcacacatcacta

SEQ ID NO: 866503 - DNA, 616 bp, Homo sapiens
actgccttaccttagaataacatattagaataacaggaaggtaggtggaccaagtggatgcttacattttggaatttaaggaaacactgtgagatattaactctaccttcttatctgcactacactttcatcactagaattattctgtcttccagtaaaaatgaaaaggtttcaggactgttactacggcagtccaaaacaactttgaaattttctttagtcttgtccgratactatagtctacattctcagattaaccttttctgacctttaaacatactgtataccagaaatggttctgtaataagaggaattagaccattaccttgagcacgaaaaggtcaagtcctactctaggctaacagcctcagtctaacttaataattcaagaattatttgcattcaaagattgtttaccctcttcatacagtattttaatgttaagggtggatgtagtagttgggatggcaaatttactgagtttattaagctgggcattgtcagatatttatttaaaaaaattagaaagtcttacatagtatgcaaaatataaaacatggggaacattgcttctctgcaagaatagttactgcacgtttcttactagatagagagt

SEQ ID NO: 866504 - DNA, 633 bp, Homo sapiens
atatttatttaaaaaaattagaaagtcttacatagtatgcaaaatataaaacatggggaacattgcttctctgcaagaatagttactgcacgtttcttactagatagagagtgagcatctttaacacatggttggagtaattgaaccacttgtgaactcaaccgatgagaattcagcaaagctctggctgggtgtgttggytcatgcctataattccaacactttaggaggcccaggtgggaggatcacttgcggccaggagtggaattcagcaaagctctggctggctgtgttggttcatgcctgtaattccaacactttaggaggcccaggtgggaggatcacttgaggccaggagttccagaccagcctgggcaacaaagcaagatctctgtctctccaaaacagcaacaacaaacactctgaccattggttactcagatatattgttgtttgttgacactgtatatcaaaactctagattttagcaaatacagtaatgacatggcactctacaagcaaatacatagatagtaaaagcaaatcagtaacgacaatcactcagtaagattataaggcatatttatcacgtacaaaaataggtccttttagtgggaaagttgagaggggcag

SEQ ID NO: 866505 - DNA, 633 bp, Homo sapiens
atatttatttaaaaaaattagaaagtcttacatagtatgcaaaatataaaacatggggaacattgcttctctgcaagaatagttactgcacgtttcttactagatagagagtgagcatctttaacacatggttggagtaattgaaccacttgtgaactcaaccgatgagaattcagcaaagctctggctgggtgtgttggctcatgcctataattccaacactttaggaggcccaggtgggaggatcacttgcggccaggagtggaattcagcaaagctctggctggstgtgttggttcatgcctgtaattccaacactttaggaggcccaggtgggaggatcacttgaggccaggagttccagaccagcctgggcaacaaagcaagatctctgtctctccaaaacagcaacaacaaacactctgaccattggttactcagatatattgttgtttgttgacactgtatatcaaaactctagattttagcaaatacagtaatgacatggcactctacaagcaaatacatagatagtaaaagcaaatcagtaacgacaatcactcagtaagattataaggcatatttatcacgtacaaaaataggtccttttagtgggaaagttgagaggggcag

SEQ ID NO: 866506 - DNA, 653 bp, Homo sapiens
atgctgagcagcagcgtggttgaagatactggtattctggggagcaggactgaaagcattgacttggagattacttgagtttgggaaagagatgtgaataagatggggagtattatggcaaaatggggaagagacaaaaaattatgatagaattctaacaatttggtgcatttatagagaagaaatgatcgatgatgctgtgtacttggctggctcttgtaataggacttcatgcctgggagcaaaatacacaacaaattaaagagggccctttgtaaacccttgtgagaggggactgagtgggagagtagcatttgagtgagaatgggttctctttagttattttcttcaggatttgattatggaaattttcatgttcttcccccsccacgtccccaaatccccatcttctcctggcaatttgacaaaagtttccacttttgtgaaaccaaagtttttgtgaaacccatagtttcatgggcagattgaggttctatagagagatctgtattgccatggaaggatgcgctgatgtgatagtttgccttattaaaatgttgttcatgcaagtatggagtttggttgcaattgagaaaaaaaatgtaactaaggcatctggcgtttaactgattaggtatctttttgtacccaga

SEQ ID NO: 866507 - DNA, 665 bp, Homo sapiens
accagattttcaagtacgtcagatggacctgaaagctttggaagcactgtttttaaaaagtgcaaggtaaagcttttcttcatcaagggtcttgggttttccggayttttgttcccaggcaacccaaatatctgtggttgaattcatctctttacagacaaacaccttctattgtaacttaaatttttcaaaccaattgtcatgtgcatgagatactcatggttttaaataactcagatggattgaggctctctctctctcctctctggaggattaaacctatcagtccataaatcttcagtattttagtatgaagacaaaagcactttctctgactggtttaaggatctccacagagatcaggagtggagagatctgtattctcaggcataaacgtgagatttgattggcagggtgattgacagactggcatcttcgatcctcatcggagccataaaagtgtcctcaaagtttttaccaaaaacttaatgcagtggcatctgtgacaaaaatgtaagtaccgtttccacattaaaatttcacaatttagaatttagactgcattaaattttgcctagatggaaggacatctaaaaacaaaacatatttttcatcttttcaagggaatgtacttaagtaggtacaaagaactttgtggccagatg

SEQ ID NO: 866508 - DNA, 652 bp, Homo sapiens
ctaaaactggaaaaaaaaatcctttcacaaattaaaggtatgagctagcaaatcatcagcagagagaagtttataagaatcaacagaaatggaatattcagagttaagttttcagaggtgaggagcagggaccttggaaaagtcaaaaacattgagcttttctaggaagggtgagctcagctggaaatccagaatttgggtacatagtagaaaggctaaagagaaggaataggagtttctcagtacaagcaaatcaggcacattagaggtaarccttgtcttttgcacgattttgccattgctaactgccagaaacgcaagagaagaaaagtgaagttgatgaaatttttggaacaacctggttcatagattttgaaatagtggagtcatgtgccaccttttagtcattcctggcttttaagtttctgggcaaaggtcaataatcacatggaaagtacacaaagtaataaatgtcttgaaggactggccagtcatggtggtcagtcttctatgcaatgtctgttactcgggggccccacctgagcatggctcatgagaaaatgctcctcccttctcagggtcctcacataggagctgtgtctgctgtctgagcagcccatggagtaaaaggacttcaggagtcccatgagtc

SEQ ID NO: 866509 - DNA, 654 bp, Homo sapiens
aactcataatttcattttcttacccaggtccaactatgtatagccaacacaccagcctggcaagaagatagcgttgctgcaattaaccatttgttcctctttatacctatagatgcaaaaattctgccatttaataatattcacacttcttagaagaaactcattgctcaaatgacaatttaactcttttattacaccaatagtataaaayggacaatctttcccaagatcatttgcatgtctaagtgaacgaaaatgtgtcttttttcctcttctggtcttcaacaacagaggtttgctcaatcttaaaatgagtgtgtaggtaagtacttatttattttgaaggaagtttttgtttgtttgtttataatctcatcagaaatttctgctactgggatatttaaaaatatatacatttacaatgcttatagttctaaaagtacctaacatagtaccttagagattcaactgttaataaatggataggtgaatctactaaaacaagaacaaaaatatgccttaaagaaacatggcaaacaaacatttgaataaatgccagttctcttgtgccagttgcaatgggatgaaacaggtggttagatgtggtaatcctctaaattaattctcccattttctgttgagtgtattatagtt

SEQ ID NO: 866510 - DNA, 657 bp, Homo sapiens
ctggtaagatctcttctccttgaggattcaggatcaagactctgggctgtagctttgcccccaaaaccctgaatggcagcagaaaaggctgtattgaagcaacttgtgtctttctaaatacgtcttacaaaataaaccccggttcagatactctgtttaaatttgaaaacaattttgtcaggaaatgtaaagcccgcgttacacttaacaagaaagtgtttatccaaagagttaatacagatgagtaatctcacactcacatgccagttctctggaggtggcattcctgtaaacagccagacactttgaacttacggttgtcactttatgtcatactccaaccactaaaacagcacacaactgtgcagttcttccctgttaatcgaaaacattcccacctcgtggaaaataaccctgaaaaaaaaaaaaaaaaacgagaaagaaaagcatctttctagagaaagtgcttgttcatctcttgagtattgattrgtcttttcaccacttcaccttatttatgcctctagtataacatattgaatatttattcatctacgtctgcactagactgggtgctcctcgaaggcaaggatcattgcttattagtttttgtcttaactctgaacacagtactcactcagtaagcactcaacaagt

SEQ ID NO: 866511 - DNA, 574 bp, Homo sapiens
caaaaataaattttagaaatactttgggtctatcctattcagtataatatcatgctgttactaatgtaatcttttaaatttcttacaataatccagtgattattatttctaatatacttaggaaagtgtaatgaagtatctgaactctattatcaccaagaagttgattcttcatgagaggcagcagagtgtagggttaggggaatagattgtggagatcaaaggtctgggttcaaatcctagcactttcactgattgtttctttgcttttgggcaaacttttaacctgtctatgtcccattatttgtaccaaattacttggcttcatttttgccaatcataggaagagggtcacaatagaatggggttayagaactaagaattttggggttcatggtggaaaatatttttactcatgtctgccatataatgctataaaggtttgctatgattatatttgtatattgactaattttgcatcactttgggtattttgtaaggtgagtaaatatgtgagagacagagagctgaactagtggtccttattatgtgaagaaatattgaaaatgaaaag

SEQ ID NO: 866512 - DNA, 605 bp, Homo sapiens
ttgttgctctttaatttgagacatttgtcaaggaaagaaaatatatgtcttctgggagttcccttgtggagttacgaaggatgcaaatctggcccgagatatcatgagccttccaagaaagtcaaaactcacactcttgcttttctcatttattgcccagcttttcagctagagctggaatatgctcactgactccttctgacagtrtttttctaatggatatgagaagcattaggaccacaggctttagacccccacaggagcactgctaaaaccaaaagactaatttttaatccctcaaattaagaaaatagaaaagaaaacaccaaagatcaagggcacatcatgagtaagaaagcagctgacaagtcttgtggtttgtcttgctttcttgtccagaagaatgagattgttagttgagtttttctcattcactttacattgtttggagcaagccaattctatcccagaatctcaatttcctcctctgttatatgaaaggatcagggtgtgtaatctctaaggcctcttttgagtctatgatttttactactaatttagttaggaaaatttaggccctaaaatatagcaaatggatatatcaa

SEQ ID NO: 866513 - DNA, 699 bp, Homo sapiens
tcacctcagcctcctgagtaactcggatgagaggtccatgccaccatgcctggcatatatttttatttttaaactttttttaaagatagagtctgactgtgttgctcaggctggccgtgaactcctcccacctcagcctcccaaagagctgagattacaggcatgagccatcatgcctggcctagwtcttagtttcaatggagaccaatttattaaggttttcttttggtgtgtgagtgtgtatcttgcttttgctgttgaatctaagaaatttcaaggctaccaagattttcttctctattttcttttataagttttatcgttttagctcttacatccaggactatgatctatttcaagttagtttttataagtgatgttagattttttttgtcactgtcagtttttactcattaatatttctctgcgttcttatcatgtgtgtacataaagagcttccttttgtttttccaggtacaacagcaggttcttttctgattccgcaaagtcctgcatggggtggaggcagagacagaagagaatgtaaacactgggttccaccccctggaaattaagggaagaccccttacccagatagggactgattggagaggtggaagggaacaaggtgaaaggtaggggtcctggtaagagaaagcaggggggcctgagaacacagaggaaagtggttgagaaatg

SEQ ID NO: 866514 - DNA, 628 bp, Homo sapiens
aaggagagagctagactctaagtccagagcctggactcttttttctttttacacttcatgaaaaattatttttcatgatacaaaacacaaaatcgataaatgtctttttgttgacaacacacacacacacacacacaaagttcacctttctgagactgtgttacacttagatatcatgccatgtggaactcattcaggtccctcttttaatatatgttcagttatattttttgctatacggtaggttttatctgtgaggaatatattccactttctctgtaggttgtaaacagaagtagttctcaataaataatattgaagtgagggtctaaagggaaaaaatatcaatttatttttaatgagaatatctaaggtcaaacagttttcayaagtgagaggttaattaagagttgtgaatatgaaagagggtgagaaagatgaagttcttcattcctcaatttgtgctttgtattgttactccagtttttctataaaacaaatgaattttaaaagtgccacattcaggctagatgtagtggctcatgcctataatcccagtgctttgggaggttgaggcaggaggattgtttgagaccagcctgggcaacacagcgagactccatttctt

SEQ ID NO: 866515 - DNA, 628 bp, Homo sapiens
aaggagagagctagactctaagtccagagcctggactcttttttctttttacacttcatgaaaaattatttttcatgatacaaaacacaaaatcgataaatgtctttttgttgacaacacacacacacacacacacaaagttcacctttctgagactgtgttacacttagatatcatgccatgtggaactcattcaggtccctcttttaatatatgttcagttatattttttgctatacggtaggttttatctgtgaggaatatattccactttctctgtaggttgtaaacagaagtagttctcaataaataatattgaagtgagggtctaaagggaaaaaatatcaatttatttttaatgagaatatctaaggtcaaacagttttcacaagtgagaggttaattaagagttgygaatatgaaagagggtgagaaagatgaagttcttcattcctcaatttgtgctttgtattgttactccagtttttctataaaacaaatgaattttaaaagtgccacattcaggctagatgtagtggctcatgcctataatcccagtgctttgggaggttgaggcaggaggattgtttgagaccagcctgggcaacacagcgagactccatttctt

SEQ ID NO: 866516 - DNA, 524 bp, Homo sapiens
tgtgacaatatatgctagaagcctttaaaaagatacacttttagatgccattaacctaagatattcattaacctgacagttgtgcttctaagacttaacttgaaggaaaagtttaaaatgtgtccagagtttcagctattaagatgttcatcttggtgttgcctaatgtagcacacaccaaaaaaggaaaaatactaaatgttcaataacataggattgagtagataaattatggcacatccttacatggggtatataaaatcatagaaatgtattgacatgagaaatggtcatggggtattattaagtgtttgaaatggctawgaaatacttgtaggatcttatatttgctttttttaaaagtaatgggtcaatataccgatacttgagggaaaagtctagaagccaacgtactccaaaatattaactaattctatctgatgaatgggattatgaattttctttattttcttctttttgcctgtttgcattttccacgaagaaaatttataaacacagtggta

SEQ ID NO: 866517 - DNA, 696 bp, Homo sapiens
atgtaccttcattgtcacatgcttattttaactttctcaactagcatcatttacgtgcattttaatttgtttaatgagagtgtaaagtacttgagattagggagtatgtcttatccgttgttgagttccaatcctaaacttgcctgcattgcctgcagttaagacagtaatgggcacactgagttcagtagattactgttggatgaaacagaatgttatgagactgggttcttggctgcaagcaayagaaacctgtcctgagtgatttaagcaggaaagggatttattagagtgacatagcccacagaatcagctttataatgttggcaggaactaaaagaggttacatggcaagaatataaccaaagtcatggctgggtaagctgccaccactgacactacccctactagacactcagtctgtcattgctggatattgaatgctgatgttcactgctggaatactgtatcatctaggttatgctgcagtaacaaacaaccccatgtcaatgtcttaaatgacaaaagttaagtttttattcccattatctgtctcccatggtgtggaggatgactctgatcatcagagttgctcaagatcccaggctgatagagactccagctcaactcaggtgttcatgatcccagaggctggaaaaatgaagagcatgaggccatttgtacatcagctcttga

SEQ ID NO: 866518 - DNA, 638 bp, Homo sapiens
gcatctcagggtgcttgatgtgatattgtgtttatgttgactgtacaagatttcaggtgagagctcagtttgtgatttaactcctatgtaacatatagttttatttgggttcataagcatctgttgtaaggtctattcccatgcagtttatatttctttggttgctattctaagtgagatcccttctcataatagtctctttctcagcaatttttaccttttctcattataagagaaattgctgttctttatataaaattataaatacagatatcaacaagaagacaaattaaaagcattagtttaaaaaaatgacaagactaagaagcttcaggtatcatttccccacagaaacatttaaaaaacaaaaagcacccaactaaaattttgtgagagctttggaaaatagccaaaagtcaatggygactaaacaaatgcctgatcaagaaaaaaaaacacattaaaaacagttggaaattgtgtgatgtttttactcaccctagttccctcctctccccagcattggtgcagtcttggtctggagaagatagcaacccagttcacaattccctctctggaaccagggagtacagagcagaagttacttgaatgttttaacctgtctgggggctgctgcc

SEQ ID NO: 866519 - DNA, 612 bp, Homo sapiens
ttcttcctccaaacttgaagagtggaagaaaattaaagttcatttggatatggtgcagattctaataacatatatcagtttacagttgggcacgctcatagctgtaatttcagcctttgggaggccaaggcagatggatcacttgagcccgggaagccaagaccagtctgggacacatagtaagaccctgtctcaacaaaaaacatcaaaaaaattagccaggcatggtggtgcacacytgtagtctcagttacttaggtggtggaggcacaagaatcaactgagtctgggagatggaagttgcagtgagctgagatctcaccactgcactccagtctgaatgacagagcaagatcctgtctcaaaacaaacaagcaaaaagcatatgtcagcacactaaactattgttctttattgactgtctttaaaaagtcttcaatgtttatgctttgagtagtaaaacagagaaggcagcactcaggtgtatctgcaccttctcctttgagaaaaaaatccacaggtgccacacaaataggacatttactatttcctttaaaataacaagatagagcaaaataatttgtactcatagggaatccaagaaattctaat

SEQ ID NO: 866520 - DNA, 682 bp, Homo sapiens
gttgaataacccaatcacagtctggcaagtcgaaatgtgttacagtagagtgaaagcgagaaagaatgcattagtacctgggaaggagtgaataggtagattgaaacttaaatgagagctggccactggtaacacaaatggaactagcttccaagatggctctcagttaagtcttaccatctcgttttcatgcaactgtgtagatccttccttcccaccctgaatggggcagaactgagtaaccaagacaatgttgcagaaatgatggagtgtgacttccaaggtgaagtcttaaaagacattatggtttctgctcttctctctatctctcactctgaggaataccagccccagtgtagggcactcaagcagtcctctgaggagaaacgcatggccaggaactaagtccttctactaasagccagcattgacttgctattcatgtgagggagccatcttggaagcagatccccagctccagttgagccttcagatgactgcagccctgaccaatgactgcaacctcccaagagacctcaaaccagaagcacctagccctagccaccccaaattggatgacctgcagaaactgcatgagattatcaatgttttttatttgaaactcctaagatttggagtaatctgttttgcagcaatagacaactaatacactatgtaacat

SEQ ID NO: 866521 - DNA, 682 bp, Homo sapiens
gttgaataacccaatcacagtctggcaagtcgaaatgtgttacagtagagtgaaagcgagaaagaatgcattagtacctgggaaggagtgaataggtagattgaaacttaaatgagagctggccactggtaacacaaatggaactagcttccaagatggctctcagttaagtcttaccatctcgttttcatgcaactgtgtagatccttccttcccaccctgaatggggcagaactgagtaaccaagacaatgttgcagaaatgatggagtgtgacttccaaggtgaagtcttaaaagacattatggtttctgctcttctctctatctctcactctgaggaataccagccccagtgtagggcactcaagcagtcctctgaggagaaacgcatggccaggaactaagtccttctactaacagccagcattgacttgctatycatgtgagggagccatcttggaagcagatccccagctccagttgagccttcagatgactgcagccctgaccaatgactgcaacctcccaagagacctcaaaccagaagcacctagccctagccaccccaaattggatgacctgcagaaactgcatgagattatcaatgttttttatttgaaactcctaagatttggagtaatctgttttgcagcaatagacaactaatacactatgtaacat

SEQ ID NO: 866522 - DNA, 682 bp, Homo sapiens
gttgaataacccaatcacagtctggcaagtcgaaatgtgttacagtagagtgaaagcgagaaagaatgcattagtacctgggaaggagtgaataggtagattgaaacttaaatgagagctggccactggtaacacaaatggaactagcttccaagatggctctcagttaagtcttaccatctcgttttcatgcaactgtgtagatccttccttcccaccctgaatggggcagaactgagtaaccaagacaatgttgcagaaatgatggagtgtgacttccaaggtgaagtcttaaaagacattatggtttctgctcttctctctatctctcactctgaggaataccagccccagtgtagggcactcaagcagtcctctgaggagaaacgcatggccaggaactaagtccttctactaacagccagcattgacttgctattcatgtgagggagccatcttggragcagatccccagctccagttgagccttcagatgactgcagccctgaccaatgactgcaacctcccaagagacctcaaaccagaagcacctagccctagccaccccaaattggatgacctgcagaaactgcatgagattatcaatgttttttatttgaaactcctaagatttggagtaatctgttttgcagcaatagacaactaatacactatgtaacat

SEQ ID NO: 866523 - DNA, 560 bp, Homo sapiens
ttcaatacatgtatacattgtgtaaataatcaaatcatagtatttagcatatccgttgcttcaaatattctttgtgatgagaacattaaaaaatcctttcttgtagctattattaaattacaatacaatattgttgactatactcaccctactgtgcaatagaatacctaaacttattcctttcatctaactgtaactttgaacttattaaccaatttctccctgtccccacttccctcttccctcttccrtcaccacttccccctccgctccccagctttccataaccagtattgtgctctctacttctatagatccattttttagattgcttgtatgaatgagatcatgtggtatttgtctttctgtacaaggcttatttcacttaacataatgtcctctgggtctatctgtgctcctacacatgacagaacttcactcttttttatggctgaatagtgtccattgtatatatgtactgcaatttctttctccattcatctgctcatggacacgtaagttgattccatttcttggttattgtgaatagtgctgcaatg

SEQ ID NO: 866524 - DNA, 560 bp, Homo sapiens
ttcaatacatgtatacattgtgtaaataatcaaatcatagtatttagcatatccgttgcttcaaatattctttgtgatgagaacattaaaaaatcctttcttgtagctattattaaattacaatacaatattgttgactatactcaccctactgtgcaatagaatacctaaacttattcctttcatctaactgtaactttgaacttattaaccaatttctccctgtccccacttccctcttccctcttccatcaccacttccccctccgctccccagctttccataaccagtattgtgctctctacttcyatagatccattttttagattgcttgtatgaatgagatcatgtggtatttgtctttctgtacaaggcttatttcacttaacataatgtcctctgggtctatctgtgctcctacacatgacagaacttcactcttttttatggctgaatagtgtccattgtatatatgtactgcaatttctttctccattcatctgctcatggacacgtaagttgattccatttcttggttattgtgaatagtgctgcaatg

SEQ ID NO: 866525 - DNA, 610 bp, Homo sapiens
taaggtagaaaagatgtttctgggaggaagagattcaactctaattgcctcaatatttgctcatattgtttgataggataaccagatgagggagaaatacatttctactattttcacacaatatatacattttttagttttttggaatttctatataggartgtgtgtgtgtgtgtgtgtgtgtgtgtgtgtgtgtgtgtgtatacaagtagaaattccaagacagaaaagacagaaattactctgtgtgtgtatgtgtgtactgtatgtatgtatatatatatatatatatatatatatatatatatatatatatatatatacagtaatttctgtcttatttttttgagttggagttctcactctgtcaccaagctggagtagatacagtaattttcaagacctcaattttcaccaataagagttggcaaggaaaattaagagcatatgtctttctaaacttttgtcaaagtttgtgttaaaatcaaattatatgaatccctacagagacttaggaagccttaataccactttagcaggtcaatcattagaatggttctcaaacgatttttgtttttttttcctcttcactgaggctaaagatcacaag

SEQ ID NO: 866526 - DNA, 645 bp, Homo sapiens
tccatgagcatgggatgtgtttccatttgtttatggcatctatgatttcttttagcagtgttttgtagtttcccttgcagagtctttcacctccttggttaggtgtattcctaagtattttatttttgcatctattataaaagaggttgagttcttgatttgattctcagcttggtcactattggtgtataaaagagctactgatttgtgtacattaattttgtatctggaaactttgctgaattcttttatcagttctaggagctttctggaggagcctttatgrttttccaggtaaacagttgtatcatcagcaaacagcgacagttagacttcctctttatcaatttggatgcccttcatttctttctcttgtctgattgctctggctaggacttccagtattatgttgaagagcagtggtgagagtgggcatccttgtcttgtttcagttctcagtggaaatgctttcaacttttccccattcagtattatgttggctgtgggtttgtcatagatggattttattatattgagatatgtcctttgtatgctgattttgctgagagttttaatcataaagggatgccggattttgttgaaagctttttctgcatctattgagatgatcatgtgattcttgtt

SEQ ID NO: 866527 - DNA, 645 bp, Homo sapiens
tccatgagcatgggatgtgtttccatttgtttatggcatctatgatttcttttagcagtgttttgtagtttcccttgcagagtctttcacctccttggttaggtgtattcctaagtattttatttttgcatctattataaaagaggttgagttcttgatttgattctcagcttggtcactattggtgtataaaagagctactgatttgtgtacattaattttgtatctggaaactttgctgaattcttttatcagttctaggagctttctggaggagcctttatggttttccaggtaaacagttgtatcatcagcaaacagcgacagttwgacttcctctttatcaatttggatgcccttcatttctttctcttgtctgattgctctggctaggacttccagtattatgttgaagagcagtggtgagagtgggcatccttgtcttgtttcagttctcagtggaaatgctttcaacttttccccattcagtattatgttggctgtgggtttgtcatagatggattttattatattgagatatgtcctttgtatgctgattttgctgagagttttaatcataaagggatgccggattttgttgaaagctttttctgcatctattgagatgatcatgtgattcttgtt

SEQ ID NO: 866528 - DNA, 645 bp, Homo sapiens
tccatgagcatgggatgtgtttccatttgtttatggcatctatgatttcttttagcagtgttttgtagtttcccttgcagagtctttcacctccttggttaggtgtattcctaagtattttatttttgcatctattataaaagaggttgagttcttgatttgattctcagcttggtcactattggtgtataaaagagctactgatttgtgtacattaattttgtatctggaaactttgctgaattcttttatcagttctaggagctttctggaggagcctttatggttttccaggtaaacagttgtatcatcagcaaacagcgacagttagacttcctctttaycaatttggatgcccttcatttctttctcttgtctgattgctctggctaggacttccagtattatgttgaagagcagtggtgagagtgggcatccttgtcttgtttcagttctcagtggaaatgctttcaacttttccccattcagtattatgttggctgtgggtttgtcatagatggattttattatattgagatatgtcctttgtatgctgattttgctgagagttttaatcataaagggatgccggattttgttgaaagctttttctgcatctattgagatgatcatgtgattcttgtt

SEQ ID NO: 866529 - DNA, 668 bp, Homo sapiens
atgtaaaggtgttcatagtagccttgaatgaccttttgtatttctgtggtgtcagttgtaacatctcccatttcatttcttattgagcttatttggattttctctcttcttttcttggttaatcttgctaatggtctatcaattttatttatcttttcaaagaaccaggtttttgtttcatttatcttttgtatttttttggtttcaatttcatttagttctgctctgatcttggttatttcctttcttctgctgggtttgggtttggtttgttcttgtttctctagttccttaargtgtgaccttagattgtctgtttttgctctctcagactctttgatgtaggcatttagggctatggactctcctcttagcactgcctgtgctgtgtcccagaggttttgataggttttgtcactattgtcatatagttcaaagaattttttaatttctatcttgatttcatttttgacccaatgatcattcaggagcaggttatttaatttccatgtatttgcatggttctgaaggttccttttggagtttatttccagttttattccactgtggtctgagaaagtgcttgatataacttcaattttcttaaatttattaaggctcgttttgtggcctatcatatagtctatcttggataaggttccatgtgc

SEQ ID NO: 866530 - DNA, 668 bp, Homo sapiens
atgtaaaggtgttcatagtagccttgaatgaccttttgtatttctgtggtgtcagttgtaacatctcccatttcatttcttattgagcttatttggattttctctcttcttttcttggttaatcttgctaatggtctatcaattttatttatcttttcaaagaaccaggtttttgtttcatttatcttttgtatttttttggtttcaatttcatttagttctgctctgatcttggttatttcctttcttctgctgggtttgggtttggtttgttcttgtttctctagttccttaaggtgtgaccttagattgtctgtttktgctctctcagactctttgatgtaggcatttagggctatggactctcctcttagcactgcctgtgctgtgtcccagaggttttgataggttttgtcactattgtcatatagttcaaagaattttttaatttctatcttgatttcatttttgacccaatgatcattcaggagcaggttatttaatttccatgtatttgcatggttctgaaggttccttttggagtttatttccagttttattccactgtggtctgagaaagtgcttgatataacttcaattttcttaaatttattaaggctcgttttgtggcctatcatatagtctatcttggataaggttccatgtgc

SEQ ID NO: 866531 - DNA, 574 bp, Homo sapiens
gtttggtttgttcttgtttctctagttccttaaggtgtgaccttagattgtctgtttttgctctctcagactctttgatgtaggcatttagggctatggactctcctcttagcactgcctgtgctgtgtcccagaggttttgataggttttgtcactattgtcatatagttcaaagaattttttaatttctatcttgatttcatttttgacccaatgatcattcaggagcaggttatttaatttccatgtatttgcatggttctgaaggttccttttggagtttatttccagttttattccactgtggtctgagaaagtgcttgatataacttcaattttcttaaatttattaaggctcgttttgtggcctatcatatagtctatcttggataargttccatgtgctgttgaatagaatgtatattctgcagttgttggatggaatgttctgtatatatctgtaaagcccatttgttccagggtatagtttaaattaattgcttcttcgttgactgtcttgatgaactgtctagtgctgtcagtggagtattgaagtcccccactattattgcg

SEQ ID NO: 866532 - DNA, 647 bp, Homo sapiens
aaatatgaggagacctataaggagataatgaattcaagagattttaagaggtttaaaaagaaaaggagaatttggtggctagttaggtgtgggaaatgagtgaaaggaagaagtcccgtgtgataatcaacatattagttaacccaatgtacttgaaaaaaatatacagagttaaatttgggggctaatttcagacagttttccctgcctctagatgtcacaaaagatatgccattattcttgatggctaatctgttgtaaactcagatggagctttaattttttaaaaatagaatsttcctatgatatggagaaagaacaagggaaaatttgagagtggaatatggtagaaagtttaacatcattctgttattctaagttattgctttgtctctggaaaagtaataaaagcttatttcctttataacttcatctgtgtacccaaggctgtcacattaaccccacattagtattagattttaataacggacaacatggcaggaagaaagttgtttgctaaatctagagagtaggccatataatttagtttttggagggtttcaaatattgtttttattttttcattgtcttgaaaatgatatttgactttgtcaaataactgcaacaaaaaacaaaggctgtgttca

SEQ ID NO: 866533 - DNA, 588 bp, Homo sapiens
ttttaataaaattagaaagtgcctactgttgtgaacatcttcagatttacttagtggtcaaaatagcaattaaagatgaaaacctaggcctggcacagtggctcatgcctgtaatcccagcactttgggaggcggaggcgggaggatcacctgaggtcaggagttcgagaccagcctggccaacatggtgaaaccccgtctctactaaaaataccaaaactagccgggcgtggtggcaggtgcctgtaatcctagctacctggggggctgaggcagtagaatcgcttgaamtcaggaggcggaggttgcagtgagccgagatggcgccgttgtactccagcctggggaacaagagcaagactttgtctcaaaaaaaaaaaaaaaaaaaaaagaaaagaaaagaaaacctagttctagttctttaattcttaggaaagtatgaattctggggtggaagtttagttctttctccagggttaaattctgtctttaaaagcatgttacttgtaaaataccctttgcttcctcatttccttaaagtggtcagatggacatatttacatttatctctagagaagtgattctcaa

SEQ ID NO: 866534 - DNA, 588 bp, Homo sapiens
ttttaataaaattagaaagtgcctactgttgtgaacatcttcagatttacttagtggtcaaaatagcaattaaagatgaaaacctaggcctggcacagtggctcatgcctgtaatcccagcactttgggaggcggaggcgggaggatcacctgaggtcaggagttcgagaccagcctggccaacatggtgaaaccccgtctctactaaaaataccaaaactagccgggcgtggtggcaggtgcctgtaatcctagctacctggggggctgaggcagtagaatcgcttgaactcaggaggcggaggttgcagtgagccgagatggcgccgttgtactccagcctggggarcaagagcaagactttgtctcaaaaaaaaaaaaaaaaaaaaaagaaaagaaaagaaaacctagttctagttctttaattcttaggaaagtatgaattctggggtggaagtttagttctttctccagggttaaattctgtctttaaaagcatgttacttgtaaaataccctttgcttcctcatttccttaaagtggtcagatggacatatttacatttatctctagagaagtgattctcaa

SEQ ID NO: 866535 - DNA, 596 bp, Homo sapiens
gtgctcagagtactcatgttcttttgttctgactggtcaccacaaccagacaccactgctgctcctactggcgtcttgcctctttggtggacatactgatgtttgtaccgtgggtcttttaagaattatctattctatgctgtgatcattaattttaggtgtcaacttagctagattatggtgctyggttgtttggtcaaacactagtctagatgttgctgtggaaggatttcgtaaatgtggttaacctttacaattagttgaatataagtaaaccctccacaatgtgggaagctctcagccagtctgttgaaaatcttaagagcaaaaactgaggttccccagagaagaaagaattctgcctcaagaccgtaacatgaaaatacgaagtttctgagtttccagttgctggcctcccctgtggacttcagacttgccagtcaccaacaactgcatgagccaattttttaaaataaatctctttctgtatatgtgtctcctaatagttctgtctccttggagaacttggacaaacacagatatttatgtcaatggtactctgatactctgagccttctcaattcttgacgttccaa

SEQ ID NO: 866536 - DNA, 604 bp, Homo sapiens
tgaaaaagatatgttgaaatcctaacccccggtacctcacaatgtgattttatttggaaaagggtcattggttaagatgaggttatgctgaagtagggtggtctcctaacctattgtgagtgctattcttataagaagatggccacatgaaaacayagatacccagagagaatacccacaagaagatggagacagattggaatgatgcatctacaagcctacaaattccaaggattgatggccaccaccagcagctaggaggaggcaaggaacgatgctcccctacaggtttcaggaggacctgcactcaccttgattttagacttccagcctccaaaactgtgagacaaaaaattctgttgttcaaagccacccagtttgttatcctttgttaaagcagctgtagggaatgaatataggtcctttgcctttagaaatcagagaagctactctgaataagtgagacagaataattaggaactcctgtgggaaaacagagatggaagagggcttggaggagaagagacagcaagttagaagcagtggcttgacaaaatgctttgtgtttcagtgtttgtagtattcaatgtttgcggtacatcct

SEQ ID NO: 866537 - DNA, 576 bp, Homo sapiens
aacttttagtataaccatcacccaaatagttacattgtacacattaagtgatatctcaaccctcacccatctcccaccattccaccattcagactctccaaaatctattatcccacaccctaccctctatgattttctttgcttagaagataaaatccagactccatgcaaagccagtcataaatggatcaatttctacctctctaatctaatgattctcaagcagggtcaattttactgtccagaagacagtaaacatttgacaatgtctgaagatatttttgatgatcactttggaatgtgtgtgtgtgtgtgttactagcatctagtgggtggaggccagggatgctctgaagcttctacaatgcacaggacaaaatgtcagtagyggtgaagttgagaagccctgcttttatgtgagctgctcctttctccagtgcaacctggactccaatcacaggcaactatttgcccctccatgagcaggccatactgcattgcttgcccttatcttcacacattctgttacctttcactagaatgcttctctccatttttaccatttggaggtaaact

SEQ ID NO: 866538 - DNA, 653 bp, Homo sapiens
tctttatcagccgcatgagaacagactaatacaggccatgagccgggttaaagaaaaaagcaagaataggaaagaagagcccgatcaactgcatgacacttacttggttcacacagttcccttgagcttacatgcatgcacttttctcattttacttcttctaccctgactcagaagagatcctgggctgtccctcatattgggtgtgcctggaatcttagatgttcaatatggctgatgctctgaactggaaagggagaggggagtgaattgagagtgaggcagcaggcagggctgggcggtggggaccattggaggcatcataaggaatttagtctgtatcctaggtggggcaagggagtgacatgctcacaattgktttttttggcaggattattctggaagtgatgtggtgtattagcccattttcatgctgttgataaagatatacccgagactgggcaatttacaaaagaaagagttttaactggacttacagttccacgtggctggaaaagcctcacaatcatggtgaaaagcaaggaagagcaagttatggcttacgtggatggcaacaggcaaagagagagagcttgtgcaggggaactcctcaatttaagaccatcagatctcgtgagacttattcactatca

SEQ ID NO: 866539 - DNA, 687 bp, Homo sapiens
ttactttgtgcatctgtaaaatgggaatcgtaatagcatcttccctagaggatgcctgggccaatgcactcaatgcagtacccaatattcagtgaagagaggcatgttgaccactgtgatcataaccatggtcttcgatacatattttaagttaagtgactttaaaataattataacctcttttaacataaaattagcagtgtgcaaaatccatttttttctcaatagagtagatctatactgtaaacatgcttagcatatgtgaaagtggctatacagttcctaatacatagaaggtgtctggtccatattatttccctctgtcttagtccatttggcctgctataacaaaataccatagactgagtgggttatagacaacaaaaacttatttctcacagtgtggaggctgggtagtccaagatcagtagatgattttggtgccagtagattcagggtctggtgccagtagattcaatgtctggtgagaactccyattctggaagaagggttgaaggagctctccagggcctctttcataagggcactaatcccatttatgaggacaatgccctcatgacccagtcatttaccaaaggccccaccttctactaacatcatattaggggatagaatttcaacatatgaattttggggagacacaagccttcagtctataccacctac

SEQ ID NO: 866540 - DNA, 620 bp, Homo sapiens
accttgcttcactgggggacagggctgccatcctcgaaggccagggtctgggcctctgggccgggagctcctccatcagcttgcagccctgggggaggcttgcagccctggaggccactccctctagtgacagaacccatacctctgggaactgcttcctctgcctgcatgccccaaacttggacttggaggttgtagatggccgtggcagggcccttgcctggcccctatcctcctgcagcctggcctaggcatgggtgacttacccagtgccagcaggctgcctcagcccgtgcccactaaaaaatttgttcctggccgggcgcagtggytcacgcctgtgatcccagcactttgggaggctgaggcaggtggatcgtctgaggtcaggtgtttgagaccagcctaaccaacatggtgaaaccccgtctctactaaaaatacaaaaattagccgggcgtgatggcaggcgcctgtaatcccagctactcaggaagcttaggcaagagaatcacttgaacctgggaggcggaggttgcagtgagcggagattgcgccgctgcactccatcctggacaatagagcaagactccgtctcaaaaaaaaaaaaattgttccca

SEQ ID NO: 866541 - DNA, 620 bp, Homo sapiens
accttgcttcactgggggacagggctgccatcctcgaaggccagggtctgggcctctgggccgggagctcctccatcagcttgcagccctgggggaggcttgcagccctggaggccactccctctagtgacagaacccatacctctgggaactgcttcctctgcctgcatgccccaaacttggacttggaggttgtagatggccgtggcagggcccttgcctggcccctatcctcctgcagcctggcctaggcatgggtgacttacccagtgccagcaggctgcctcagcccgtgcccactaaaaaatttgttcctggccgggcgcagtggctcacgcctgtgatcccagcactttgggaggctgaggcaggtggatcgtctgaggtcaggtgtttgagaccagcctaaccaacatggtgaaaccccgtctctactaaaaatacaaaaattagcygggcgtgatggcaggcgcctgtaatcccagctactcaggaagcttaggcaagagaatcacttgaacctgggaggcggaggttgcagtgagcggagattgcgccgctgcactccatcctggacaatagagcaagactccgtctcaaaaaaaaaaaaattgttccca

SEQ ID NO: 866542 - DNA, 587 bp, Homo sapiens
cctagcactttgggaggctgaggcaggaggatcacttgagctcaggagtttgagaccagcctgggcaatataacgagacctcatcttactaaaaatcaaaagcattacctgggcatggtggtacacacctgtagtctcagctgcttcagaagttgaggtgggaagaactggttgagcccagaaggttgaggctacagtgagctgtaattgcactactgcactctagcctgggtggcccccatytcacacacacacaaaaagagcgagaccccgtctcaaaaaaaaaaaaaaaaaaaaaaaaaaaaagggagttcctcatttgccatgagtggacacctgcttctttactgcttcaaagtgaacacagctattccttgtaaagggttggttttactgtaaggaaatctagaacacctgtgtgtgaatgccccctgattttcaaagaaatgagtggttgcatcaaaatcaagcttatatttgtggaaaatcacatgttgccaaattctctcatcaagaaccctttattaactgactaattgtgggccatggtggcaggcacttaacaaagaccatggcagcagacctcc

SEQ ID NO: 866543 - DNA, 616 bp, Homo sapiens
aagaaacagaaagtcagaatagacctaacctagtaagggaattgagtcagtaataagacaatctcatgacaaagaaaagtcctggacctgatagctttactggtgagttctgccaaacgtttaaagaagaactaacactgattcttttcaagcatttccaaagagtggaagaggagtgaatacctcttaactctttctatgaggccagcattaccctgataccaaagccaaaaacactgtaagaaaataaaacaacagatcaatatgcctctgatcattgatgcaaaaactctaaaaatrctagtatactgggtggggcacggtggctcatgcctgtaatcccagcactttgggaggctgaggtgggtggatcacctgaggtcaggagttcaagaccagcctgaccaacatagagaaactctgtctctactaaaaatacaaaattagccatgtgtggtggtgcatgcctgtaacctcagctactcgggaggctgagacaagagaatcgcttcaacccgggaggtggaggttgtggtgagccgagatcatgccattgtacttcagcctaggcaacaagagcaaaactttgtctaaaaaaaaactatcatactgaatt

SEQ ID NO: 866544 - DNA, 517 bp, Homo sapiens
tatggataaaaatttatatgttttttctgacatcatttattgaatagtataatttttctactgacttttagtatcatatcttttattacaagtccaatgtattcagcatatctatggatctatttcttggtgcttccattttttcccattgtttaacggtgtatcactgagccaaagcaaaccattttaattattataattaaaacacatttaaatattgataggctattattgttcaaaataactttggttcttyctttccattgattattttaatatgacttttccaatcaagttctaaaaaaatactggtggtatatttattgaaataactttaatgaaattaaatgaaagatcatgtatttgttttctgaattaattcttagatacattaatgttttatgttaccatgaatgtgatattataatataatatttttaattggttgctactgtttataagaatttcattttctctttactttgccttcatatctgaaaaccttgctgatttgatt

SEQ ID NO: 866545 - DNA, 633 bp, Homo sapiens
ctatattcaagatcctcatctcacgtgcaaagacacacataggctcaaaataaagagatggaggaatatttaccaagcaaatggaaagcaaaaaaaaaaaatgcaggggttgcaatcctagtctctgataaaacagactttaaaccaacaaagataaaaaaagacaaagaaggcatccctttacacaatggtaaagggatcaacacaacaagaagagctaactattctaaatatatatgcacccaatacaggagcacccagattcataaagaaagttcttagagacctacaaagagacttagactcccacacaataatagtgggagaatttaataccccactgtcamtattagacatatcaacaagacagaaaattaacagggatattcagggcttaaactcagctctggaccaagtggagctaatagacatctacagaactctccaccccaaatcaacagaatatacattcttctcagcaccgcttcacacttattctaaaattgaccacataattggaaataaaacactcctcagcaaatgcaaaagaatggaaataataagaaagtctctcagaccacagtgcaatcaagttagaacacagaattaagaaactcactcaaaactgcacaa

SEQ ID NO: 866546 - DNA, 630 bp, Homo sapiens
gggtattgctgccatcaatagtgattgctctgttggaaataggtaaatcgaaaactttctggaaagtattcactattctagatgccattaagaacattcatgattctaggaggccaaggcgggtggatcacgaggtcaggagatcgagaccatcctggctaacatggtgaaaccccgtctctactgaaaataccaaaaatgagccgggtatggtggtgggcgcctgtagtcccagctacttgggaggctgaggcaggagaatggcgtgaacccaggaggtggagcttgcagtgagccaagattgcatcactgcactccagcctgggcgacagagcgagactccmtctcaaaacaaacaaacaaacaaaaaaacagaattcatgattcatagaaggaggtcaaaatatcaacattaatgagagtttggaagttgattccaaccctcatggatgactttgaggggctcaagatttcagtggaggaagtaactgtagatatggtataaatagtaagagaatgaagttagatgtggagcctgaagatgtaactgaatcactgcaatctcatgataaacttgaatggatgaggagttgcttcttacagataagcaaaaaatgtggtttcatgaga

SEQ ID NO: 866547 - DNA, 593 bp, Homo sapiens
gttttcaccaactatcattaagtccccaaatctagatttgacagagtcctgctcttctactttgtttcaatttgagcattcaaaaacagatattaagacttcaaaggcattaattactgaagaattccccctaaacctaaaaggaggataattataaatcatagactatatttttacttgaaaacttattattttggatatacggttagattcctgatgatatgaacaattatagatgtaggaggattgacttcatttataatttatattattccattttatgagcttttagaagtatatgaaaacaagttctttgtttcatttatatasatagagtaaaagttatttctttccttctcaatagtcatgaattctgggccagaattaaaaagtcagcctcaatacttgggaactttttcatggtaaacagtgcaatcaaatgttaggttaaaaggcaatcaagaatttgtgagtctcaagatagatgccaattgagattccaacctttgcatatggaggcaagggagacagtaggaataaggtacaagtgttcattgggtgggaccactataatccatttcctaccaggcaga

SEQ ID NO: 866548 - DNA, 579 bp, Homo sapiens
attttcatataaatgattgcttgtcaatttacacacacacacgcatgcacatgttgagattctgaccaagttaaattgacttttataaatcaataaggtgaattttgtcattttaataatattaactcatctggtacgtggacatagtatatgtttctctttatttatttctatttctttatttaactagtcttagtaatactttctggttttccatgcctttcagtagcagatttattttcagaaaatttattttttatattattgtaaatagtattgtttttcaaattttatttttcacttgattgttgccggaacacagaaatacaatttattttcatgtattgactcataatctaacagtcatgttcaatttatatttcattckaattgagattctttggattttctgcatacatgatgattctgaactttatttttgccactggtgtgaatatttctcttcatttctcccacagtagacctttatatttttttgtgctcacttgaaatgttggtcagtcctttgttggtatacaatcattttaagggtttgaccagcaaagattcaactctggt

SEQ ID NO: 866549 - DNA, 570 bp, Homo sapiens
atttaaattttaataattttatttgtcatccttgcatgggattatataggaaaataaataaataaattgtaataaaaatgcaaagaatagttacctctagccattttaaaaatgaacgttattatttttattttttatttttgaggcaggatctcgctccttcacccaggctggagtgcagtggcacaatcttggctcactgtaacctctgcctcccgagctcaagcaattctgccaccgcagcctcccaagtagctgrgaccacaggtgtgtgccaccatgcctggctaatattttgtatttttttttgtagagatggggtttcactgtgttgcccaggctggtctcaaaatcttgggctcaaatgatcctcccacctcagcctctcaaagtgctgggattgcaggtgtgagccactgcatctagttaaagtgcacacattattattttaaaagtgaattgtaatttaaaagaatgctttctattttcaaaactttcttattcaaatttaagttttcatggagaaatgcacatgggttaaggttaagtagaaactatgtttttaaattc

SEQ ID NO: 866550 - DNA, 570 bp, Homo sapiens
atttaaattttaataattttatttgtcatccttgcatgggattatataggaaaataaataaataaattgtaataaaaatgcaaagaatagttacctctagccattttaaaaatgaacgttattatttttattttttatttttgaggcaggatctcgctccttcacccaggctggagtgcagtggcacaatcttggctcactgtaacctctgcctcccgagctcaagcaattctgccaccgcagcctcccaagtagctgggaccacaggtgtgtgccaccatgcctggctaatattttgtatttttttttgtagagatggggtttcactgtgttgcccaggctggtctcaaaatcttgggctcaaatgatcctcccacctcagcctctcaaagtgctgggattgcaggtgtgagccactgcatcyagttaaagtgcacacattattattttaaaagtgaattgtaatttaaaagaatgctttctattttcaaaactttcttattcaaatttaagttttcatggagaaatgcacatgggttaaggttaagtagaaactatgtttttaaattc

SEQ ID NO: 866551 - DNA, 658 bp, Homo sapiens
gcataaaaaaagagtagatataaatatatcaatgtgccaagtgactttctacagtatggcattagcgttgaattttattttctttagagatatatgtatgaggaatattttaaaattctattttgatgaggaaaaaaagaatatttgaaaagcaaaatcaggatacattgcaaattcccagtaataaagcctcttcaaacgatgtcagccatgttctaaacataaaaacagaaacaatctaccagtcatatatgtaactgattgtaactctgtgaccacagtgcctctgcccacaccatctactcttgtgccccaaagaaartaaacacaatcaaccagaggcgaaatgtcagagagtttgcctttgtccccagtgaatctgtcagaacagggaagatgtattaactggattacagtttcattgaataaatcattttcgtttcagcagatgatttctcagatgggtgggaaggagggagagagagagacagagaagagagagagatttgaggagaaaagaagtccggtaagctaagaaacacttagggtaatgcaataacattgaaaacaaatgactgccagaaagtaagctatgtgttttgtatacattacaacaatgacaagtgtatgtatttctccttttatgagtaaagaaact

SEQ ID NO: 866552 - DNA, 658 bp, Homo sapiens
gcataaaaaaagagtagatataaatatatcaatgtgccaagtgactttctacagtatggcattagcgttgaattttattttctttagagatatatgtatgaggaatattttaaaattctattttgatgaggaaaaaaagaatatttgaaaagcaaaatcaggatacattgcaaattcccagtaataaagcctcttcaaacgatgtcagccatgttctaaacataaaaacagaaacaatctaccagtcatatatgtaactgattgtaactctgtgaccacagtgcctctgcccacaccatctactcttgtgccccaaagaaagtaaacacaatcaaccagaggcgaaatgtcagagagtttgcctttgtccccagtgaatctgtcagaacagggaagatgtattaactggattacagtttcattgaataaatcattttcgtttcagcagatgatttctcagatgggtgggaaggarggagagagagagacagagaagagagagagatttgaggagaaaagaagtccggtaagctaagaaacacttagggtaatgcaataacattgaaaacaaatgactgccagaaagtaagctatgtgttttgtatacattacaacaatgacaagtgtatgtatttctccttttatgagtaaagaaact

SEQ ID NO: 866553 - DNA, 623 bp, Homo sapiens
tttgattcaatactgggcacatttttaggtgactgaaataagcaataaggggcaaggaagttgaaggttttggaaagaaaactgttgagaggatgaacaagggaaagaaagtgaagatagaaagggacaaaagtggtcagagtagggattgtagaaactatttattaaagtcactccagctgatggtgagacttgagatgacacagaaaatgttctaaagtcagaatcttctgtgaatgtaggggagagaccaggaggtcaacttatggctgaaatattraaggaaagagtggcagattcccatgactctcaaagaagcctggtttctataggaggagggagttctggaagtttctaggaagcagtgagattgttgactcactcttcagaccctaagacataggttgggtgagagtgagcaacctctattcaggggcacacaggggaaggagccatttggaccacagagaaagggcagtccaggtatatgttaaggccaagaggtggtaggataattctgtaattaaccaaagaaaagtatttcctggaaaaagatttcaaatctctattttggaagctacattttctttaaagccacagatctattaataacctgcacaatg

SEQ ID NO: 866554 - DNA, 623 bp, Homo sapiens
tttgattcaatactgggcacatttttaggtgactgaaataagcaataaggggcaaggaagttgaaggttttggaaagaaaactgttgagaggatgaacaagggaaagaaagtgaagatagaaagggacaaaagtggtcagagtagggattgtagaaactatttattaaagtcactccagctgatggtgagacttgagatgacacagaaaatgttctaaagtcagaatcttctgtgaatgtaggggagagaccaggaggtcaacttatggctgaaatattgaaggaaagagtggcagattcccatgactctcaaagaagcctggtttctataggaggagggagttctggaagtttctaggaagcagtgagwttgttgactcactcttcagaccctaagacataggttgggtgagagtgagcaacctctattcaggggcacacaggggaaggagccatttggaccacagagaaagggcagtccaggtatatgttaaggccaagaggtggtaggataattctgtaattaaccaaagaaaagtatttcctggaaaaagatttcaaatctctattttggaagctacattttctttaaagccacagatctattaataacctgcacaatg

SEQ ID NO: 866555 - DNA, 660 bp, Homo sapiens
taaggataagccctcataatggtgcttgctttcatgtggagaattctacaaggctgcttttaataaggtactttaatcatctcctttgctcaacttttggccccactgttcctttatgaagagtcattaaaagactttgaagttcatcaaggaggaaaaattcatgacattgttcggatgaggttggggatggttccaagggggaagcctggagggagtcsgggtgagagggccctgttggcttggggcctaaccatgggtgaggaggggcaacctgtacccatcgtctccaccatacaacaccctgtaggttaatatgccggggtcactgctgaacaaagacctcactggagagcagtccaattggcagagcatgttctagggtcaatgatagacgatccttagagaaggggccagccaggtcagcactcaggacagctcccagcacgccactatcactgtggagtctcggaatctttttgcgggttttggatctattctgatgatctgcgcttgctttggaaatctctctgtctctcccccaccccgccccgccgcccctctctgtgtgtgtgttccctctctctgttgcatgtctcaaagggctaggcagggctcatcctagaatcaaggctcaagtcgatcccctttgccccaatt

SEQ ID NO: 866556 - DNA, 597 bp, Homo sapiens
ggaaaagtcaccactcgtaagaggttaaagaatattttcaagctataaaaagctttcatctaaattactgagtcaaaggttatttcctccatagattaaagtcaaagcatacaagatatggaggatgttggggtaattctagagcaagccctgtggtacagcaccaaacagtttctaaaaacaatatttaaacccccaacttttttttttttttttttttgaggcagagtcttgctgtcacccaggctagagtgcagtggcgcgatcttggctcactgaaaactctgcctcccgggttcaagcaattctcctgcctcagcctcccgagtagctgggattacaggcgcccgccactgcacccagctaatttttgtattttttagtagacagggggtttcaccatcttggccaggctggtcttgaactcctgacctcatgatccatccacctcrgcctcccaaagtgctgggattacaggcgtgagccaccgtgccggcttaaatccccaactttctaacaagacctgttccagactaacatttagaacctttccagaccattaaatcagaactagattcaagtgagaagtatttctct

SEQ ID NO: 866557 - DNA, 665 bp, Homo sapiens
aaaacctacgagaaatacggcagcgaccacttggaccgcgcctcccacccaccgctcgagccccggagacttctgggagtggccgccttgcctcgagtgcgcatgcgcagatcggccactactgggcccctggcctgaggcttagggtggagttagtgcgttcttagggccagtaggaggcgagtctgagtagaaactgatccaggtagcctcggaagggatcacctgctggatgggtgtgagctcctcagggtggggcgccgaaaccttcatggctcctgaggtagagccggcctccttggtaacacatgggactgggacttttaataccacccgacaggcccagcttgtctcgtcaagcgctaagtaaatggactcacgtcctatatgagggtttgaagttccatcacattcttcaatacatgacattatgttcttcatctttggacacgaatatatttgactaaaaatttgactraaaaatcatctgaagaaataactgctaaatagttttattatttttgttctggaataggcttcttgaagataaaataagaaatttaaaaaatttttttgatccttcatgtaatactttgtaaatcttcatagttatttagaagcatccaaaatttccaaatggtaaaaaacgaataagaaaaattttt

SEQ ID NO: 866558 - DNA, 637 bp, Homo sapiens
gaaggaacatacttcaaaattgtaacagccaaatatgacaaacccacagccaacatcatactcaatgagcaaaagctggaggcattcccctagaaaactggaacactggaaaaagacaaggatttccactctcaccacttctgttcaacatagtattcgaagtcttggccagagcaatcagtcaagagagaaaaaatgaaaagcgaagtcaaactatccatgttcacagatgacatgattctatatttagaaaaccccttagtatctgcctcaaaactcctygagctgaagtagcttcacaaagttttggactacaaaatcaatgtacaaaaataagtagtattcccatacacaaacagcacccgagccaagagtcaaatcaggaaggcaatcccattcacaattgccacaaaaaaagaattagatacctaggaatacagctaaccagggaggtgaaagatgtctacagtgagaattacaaaaaacactgctcaaagaaatcagagatgacacaaacaaatgaaagaacaccccatgctcatacataggaagaatcagtgaaattaaaatgaccatactgcccaaagcaatttacacattcaatgatattcttatcaaactaccagtgacattcttc

SEQ ID NO: 866559 - DNA, 611 bp, Homo sapiens
aaattttatccaaatattgatcaacataagattaaatagagagggtatactataatgcagatgtagttgtatgtatactgtaatgtagacatttcagtcaccaatatagcatgttgctaaagtgtagacttatctgatagttggccatttatgttgtgtgataatctgtacagaaaaccataatcatgtagaagagcatagtttaaatgtactatacaaaatgatgtactaaaacttattctgggaagaggccaaaaagattcaccagattgccaaataatccatgaaattaaaagatttggaactctgctctaagtcacaagcagtggcttgtgctgcatgaggagataatggaagagcygacgaggtcaaggacacacctgaagcagggctagtatcatgggcatgtggccagtgcagttacacagggccccatactcagaaggggacattatgcttggagttaatgctctgcagttgtcatcttgaaattcttaaacattttatctttgcgttttagttttgcaaatgaagtcagttgaaaaaacagaacatgtgccagtggcctggagacttggttcatccacctactacctcctcctcaccttcct

SEQ ID NO: 866560 - DNA, 616 bp, Homo sapiens
aacattgtttggagaaagctcaggactattagagaaataaaaccttttttaaaagatcagaagtctcaacacatccacctattttttaagtaggcctgagtctcaaggactaagtagcatttatgaaatgggaattgtttaattaacacaatttaggacagataattatgctctgctgagttataaagacagaagatagaggtttgtggacaggaattcaacccatctggagggtattcccagagccagtgctgaatgatgaatggggattcccatttggacaatttttgctttcaggtggcaaagtgagtcttctctttgcactaggggtttagaacctggaattgtggcaargcatgaaactccttctgttcatgtggaaacagagctgggaattaacattcattttgtaatttcctcagagatgaagtaggctcagttatctgcatgaaaggtagctgtctctggaaaagctaaagatgtgatttctgcatttcctcacttaatatgcaccaagaagtggacattgaccttcagagagtagagctttcatttattgggtaatgaaccaatttgctgtcaaattgtttcatcagatgctattagtcacctggga

SEQ ID NO: 866561 - DNA, 616 bp, Homo sapiens
aacattgtttggagaaagctcaggactattagagaaataaaaccttttttaaaagatcagaagtctcaacacatccacctattttttaagtaggcctgagtctcaaggactaagtagcatttatgaaatgggaattgtttaattaacacaatttaggacagataattatgctctgctgagttataaagacagaagatagaggtttgtggacaggaattcaacccatctggagggtattcccagagccagtgctgaatgatgaatggggattcccatttggacaatttttgctttcaggtggcaaagtgagtcttctctttgcactaggggtttagaacctggaattgtggcaaggcatgaaactccttctgttcatgtggaaacagagctgggaattaacattcattttgtaatttcctcagagatgaagtaggctcarttatctgcatgaaaggtagctgtctctggaaaagctaaagatgtgatttctgcatttcctcacttaatatgcaccaagaagtggacattgaccttcagagagtagagctttcatttattgggtaatgaaccaatttgctgtcaaattgtttcatcagatgctattagtcacctggga

SEQ ID NO: 866562 - DNA, 656 bp, Homo sapiens
taatgaaatagctgaaaaagcaatcaagaaggcaatctcatttataatagttataaaaaatacctggaagtaaattttacaaaggagatgaaagatttgtacaaagaaaactacaaaaccgtaataaaggaaattgaagaggatacaaacaaatggaaagatatcccatgcccacggattgaaagaattaatatcattaacatgaccatactactgaaagcaatctatagattcaatacaatccctttcaaaatatcagtcatttttcacaaaagtagaaaaaaatcctgaaattcatatggaataaaaaaagagccagaaaagccaaagcaatcctgggcaaaaagaacaaaactgaaagtcatcacattacctgacttgaaaatatattatgggttacagtaaccaaaacagcatgccactagtataaaaatagacatgtagaccagtggaacagaatagaaaacccataaaaggattcatatrtttacagctgactgatcttcataaaagctgtcaaggacatacattggagaaaggacgccctcttcaataaatggggctgggaaaactggttaaccatatgcagaagaatgaaactagaccgctatctctcaccatatacaaaatcaactcaagatggattaaatacttaa

SEQ ID NO: 866563 - DNA, 612 bp, Homo sapiens
tacttcaggacatctggatgtataagtgcaggcttgggctcagaggcctgacagtaagttcttctatgtaagaacaaattaaggccccattgtagcacattatactactttactagataggacacacttctgaggtctttcatgtcaaagtatctaacatgagaccctgtgtgccttgtcacccagcatgctcaatgtataaaataaaattgtgctgtgttcaacgtagtttattgtaatgataaggacactaatattaaraaatgtcgtgatttattgggcactattttgtcccaggactgttctaaatgctttatatgtattaatacatttaatcctcacaataatcctgtgatttctaattttattgccatttcactgatgagaaaacagaagcagataggactccataagatgttgtaactctgttcaaactgctctatttccgaacttcatgaaattcaagatctctgaagtcaagcttgaaatcattttggaggagtaacatgaacacagcactatttggggctggttaacctcctttccttcctttactttaatgttacactgaagtgctgcaattaaatcagaatgtctttgtgatcatacgtt

SEQ ID NO: 866564 - DNA, 567 bp, Homo sapiens
tgagccaatatgaatgaccatggcccagggaactgtctctggagatcctgagaaagtgtgcctgaggtggttgggttacagtttgcttttatatgtattaggagacatgaattgtaggtaaaaccataaatcaatacatggaaggtatacactgattcagtctaaagaggcaggatgtcttaaagtgggggctgggctgggggggtggcacttacaggccatagatggattcaaagattttctgattggtaattggttgaaataactaagctttgtccaaaaaacttcmagtcagcagaaagttgagttaagttaaggggggttgtagaggccaaggcgcttgttacacagatgcagcctccaggtagcaggcttcagagagaatagatggtaaatatcccatttcagacctaaaggtatcaagctctcatttaatctcccctggatctgggaaagacgtaaaaagggaagacctgtctgaattaatggagattctctacacttgcaaatttcctccgcaagaggtggctttgcacatccatttcaaaataagtcaaagaaatatgt

SEQ ID NO: 866565 - DNA, 688 bp, Homo sapiens
ggccgattctgatatagctattcttatcaccattcatcttagggcttgtttgcttgttgctttattttatttaaaaaatacttcatgaaatatgacaggcatgtaaaagcataatgaatacttgtgtatgtatcacccaaattaagaaataaaatattccaaataaaatagaagtcctctgtgtgccttttcatgacccctttcccctccttcctatccgtgaagtaattattatggatttgttgctttcatacataaaacaatatyatattgtttttcatggtttaaaatataaatgatgtcgctgtatctactgcagtgttgctttcctgaaaattatatttttatttttcccatgttgatgcaggaataattcagatttttttaacagtgtttaagttgtataatattcattatgtttatccatatttttaacatagatgattacattaatattttttaccagtaccaatcattttaaaatgagtattttatatttattggcttctgtctaagaaattaggatcaggattaagcccttcatgcccatcctagtctttcaaaatataattcataatcttttgttaaattagcatttactctacatatcattatgaatatgaaataccactcataaggaaattgtacagagttttgcagttagttttcacttctttttctacttccc

SEQ ID NO: 866566 - DNA, 616 bp, Homo sapiens
gtttaaggaatttacttcaattaacttcggtcaggaggcgatgttgcacactcttctgacatagccagatattgggttgcccacaacaattctattttttaataagtaacctgggataaagaaagacctgaaagaatgaaatacactgattaataacccatttccactgtgttttcccaatgtgtattttcagaggaaaagagagatttaggactaaattatgagmggagtttgcatatttaagtaccatccaacaacataagaaaaagcaagtagacaatctctggtaatagtttttagtttctgtggggcttccctgttattattccctacctgcagtgagggctagattttaagcctatcaaattctctattctagataccacagccatctttatcaacttcccatgacataaaaccactctgcagcccttatttttcattgaaaacattctgcagaagattcttttactatgaactaataaaaaaacgagtccctgttttatactttttgcttatagatattgttgctcttacaagaggcaaaataaaaacatgtatagtctccctttcatatctttcaattatccttcaccttttgtcagagcctctctgc

SEQ ID NO: 866567 - DNA, 540 bp, Homo sapiens
ctgtttaacttcccatagcttgtattttctcttctgtaaaagggaggttcaaagcaaggctttgcatttctattttgaggattaaagtgcctagcatagtgcctgactcagtgtgtttttcaattcataccagctatcttttctcaaagaatgagctctatttggataaagttttatatttttatagtgacaaaggatttcagatatcatcttttaactagtgatctaaatttgtattatttattgctataatcagctcatttaattgtgtttcagatataaatataataaaatgaaagtactctgggtcacagagaaatttagaagcaaaactcaaatctgaacagkataagaagggattattagaggtatgcatttttttattacaacaattgaatggtcttatctaaaaagatgtatttttttcttcaaaagaaaataagtcccaaagttcctggaacatcagaagagatgttcagacagccttcattcccatttaactgctggcttttgcttcatttgtgtcctaaaatggagtcg

SEQ ID NO: 866568 - DNA, 637 bp, Homo sapiens
tcatagcaagatataacattattaatattactattgcttctagtttatagtttgcttttggcttttctagtattgataatttctatgtaattgtatgcctagtgtggtacttgtattttagatgtgatttttagattgaaacaaatcttacattttatatataacctcacttttatttggatattcttctctctagtttgcttattttcactgttctatatggttctgtgctgttacatatattttccccattgtttgctatagatttcaaaactcgctttttcgtgtctttactgatctggcatttgtgtatattatttttgtgttattttacttaaaacaaatgtatatgtgtgtgtatatacatatatgtgtatatatgaaagcttttcgatagataatttaattttgtttcttyttttaacctaaaggataaatatacattgagtaaaccaacttgagatccaatatcaagatttttatttcccctttccgttgtatcccttctctgttttgtttaaataacttcttaagatttagattgatattattcatgactttatgggttttacacatttttaagattaggtttatttcattttcgttggatatcaagatatgttaatatcagtttttg

SEQ ID NO: 866569 - DNA, 628 bp, Homo sapiens
cacatcaaggaagcaccatatgggacaaaagaatcttatcaacaatcctggagccctagatcttccctttgacatagtctaccaaaataagaaggaaccagaaaaacaattcctgtaatatgacaaaataaggttctttaacacccccaaaaratcaccagcaatggatccaaaccaggagaaaatatctctgaattgccagaaaaataattcagaaggttggttattaagcatatcaagaaggcaccagagaaaagtgaagtcccatttagagaaatcaaaaacgtgatgcagaatatgaaaggaaaaatcttcagtgaaatagcacagataaaaaaaatcacaactatataggagggatatgtttagagaaatgaaaaatgcattggaaagtcttagcaataaaattgaacaagtagaagaaagaactgcagagctcgaaggcgaggcttttgagttaacccagtccagcaaggacaaagtaaaaagaacaacaacaacaacaacaaaaatgaacaaagcctccaggaggtttggcattatgttaaataaccaaacataggagtaattggcattctcgaggaagaagacaaatctacaagtttggaaaatatatttgagggagtaa

SEQ ID NO: 866570 - DNA, 628 bp, Homo sapiens
cacatcaaggaagcaccatatgggacaaaagaatcttatcaacaatcctggagccctagatcttccctttgacatagtctaccaaaataagaaggaaccagaaaaacaattcctgtaatatgacaaaataaggttctttaacacccccaaaagatcaccagcaatggatccaaaccaggagaaaatatctctgaattgccagaaaaataattcagaaggttggttattaagcatatcaagaaggcaccagagaaaagtgaagtcccatttagagaaatcaaaaacrtgatgcagaatatgaaaggaaaaatcttcagtgaaatagcacagataaaaaaaatcacaactatataggagggatatgtttagagaaatgaaaaatgcattggaaagtcttagcaataaaattgaacaagtagaagaaagaactgcagagctcgaaggcgaggcttttgagttaacccagtccagcaaggacaaagtaaaaagaacaacaacaacaacaacaaaaatgaacaaagcctccaggaggtttggcattatgttaaataaccaaacataggagtaattggcattctcgaggaagaagacaaatctacaagtttggaaaatatatttgagggagtaa

SEQ ID NO: 866571 - DNA, 684 bp, Homo sapiens
gaattatgttggttagtgtattctgatgtcttttctagtcctttattcattgtgttgactgtgtctaatccagtgaggtcttaatttggctttttgtggttacagattctaaaatttcaaggattttgatctgccaattcctttttcatgtttcctaattgtctgtcttaattctcacaatcatcttttacctcttttaatgctaaaagcatcattattttaaaatctgtatctgatttactctaaatctagagcatatgtgtctgtttttattgtgtatttctactgttaactttatgatattttgtttgtttgtgtgtctgrttattttttattttgtcctgaaggatgtctataaaatattacctgtagaaataatttgtgaactaggctaatgctatctttctccagaaattaccttagtttttttcaggcagacttctgtggacagtagcaatgtagaactttaacagtattccagcaattgagatggtgcaatgatgggctgtaatccctatgagagttagtacattcccactttacccttacttttaatgttcagcctcagaaatctctaccgcacatacagaggtttaacccagctcccaaaccttgttgagtcctgaactccaattgtccccataaacatgatgcattctcaaaattcctgctcagtcttttatg

SEQ ID NO: 866572 - DNA, 684 bp, Homo sapiens
gaattatgttggttagtgtattctgatgtcttttctagtcctttattcattgtgttgactgtgtctaatccagtgaggtcttaatttggctttttgtggttacagattctaaaatttcaaggattttgatctgccaattcctttttcatgtttcctaattgtctgtcttaattctcacaatcatcttttacctcttttaatgctaaaagcatcattattttaaaatctgtatctgatttactctaaatctagagcatatgtgtctgtttttattgtgtatttctactgttaactttatgatattttgtttgtttgtgtgtctggttattttttattttgtcctgaaggatgtctrtaaaatattacctgtagaaataatttgtgaactaggctaatgctatctttctccagaaattaccttagtttttttcaggcagacttctgtggacagtagcaatgtagaactttaacagtattccagcaattgagatggtgcaatgatgggctgtaatccctatgagagttagtacattcccactttacccttacttttaatgttcagcctcagaaatctctaccgcacatacagaggtttaacccagctcccaaaccttgttgagtcctgaactccaattgtccccataaacatgatgcattctcaaaattcctgctcagtcttttatg

SEQ ID NO: 866573 - DNA, 635 bp, Homo sapiens
ttgctgccgctgccgccgcctgcagtttcgcgggcacctctcggttcgggttgctcagctcgcgagttagctgcgcacgaggcttttataaccccctgcagagacgtcactgggaaggggcagtacctgggctgcgtactcgccagtcccggtgcgcagcgcggcagctgcgccagctgttgacaactgtctcattccaccgccgcagctaccacgccttttgctgcttgctacttgccgtgggagtctgcgagccgggagccccacgcactccgcgagggggcagtaggtggcttggaagtaactgacacagatgcggtccgcagctggaatcgtcgttgcacgaggggtgctgggaggaaggaaggatttgggaaacagcwggagtggaggacaatcaacttccagggaatgaagcccagagccctgagacagctctgcagaggcggcttgcctgtggcaatgggaaacggtcatgtgtgggggcgatgtgccagcgccgcgctccgggccgcgctccagctaccgagaagccagaggcgacgactccctggtccaggtgtcccgaaaacaactttcctgaggctgtgtttaggaaacacccccacaaaatatctagctcagttacctggcta

SEQ ID NO: 866574 - DNA, 680 bp, Homo sapiens
gttttgataaacccttcaggcgattgtgatatatgcttaagtttaagatccagtttggggtgtggtagcaaatgcctgtagccccagctacttaggaggctcaggtgagaggatcacttgaacccaggaggtcgaggctacagtgagctatgattgtaacactgcattccagcctgggggaygaagtgagactctggctctgaaaaacaaaaaatgtttaagatccatcatcctaaagtcaaagacgttttcttatacaatgaaaataacattgtcatattgtcatgtatttaacactaatacaacagtctattatctgttatctaattgatggtgtacttttaatttttccaatcatcctaaaatgtcttttttagctttttttttcctgatgcagacccaatcatgtaccgtacgctgcattcatttgattgtcatgttactttattttctctaatcttgaatactcctctgcctttattattatttgaaaaaaaaaacctttcagtgaatttggtattttttttgtttgtgtttttgagaaaggtcttgctctgttgcaagactgctttactctttttatagagacaaggtctcactatgtttcccaggctggtttcaaactcctgggctcaaggggttctcctgccttagcctctcaaactgttgtgattataggt

SEQ ID NO: 866575 - DNA, 680 bp, Homo sapiens
gttttgataaacccttcaggcgattgtgatatatgcttaagtttaagatccagtttggggtgtggtagcaaatgcctgtagccccagctacttaggaggctcaggtgagaggatcacttgaacccaggaggtcgaggctacagtgagctatgattgtaacactgcattccagcctgggggatgaagtgagactctggctctgaaaaacaaaaaatgtttaagatccatcatcctaaagtcaaagacgttttcttatacaatgaaaataacattgtcatattgtcatgtatttaacactaatacaacagtctattatctgttatctaattgatggtgtacttttaatttttccaatcatcctaaaatgtcttttttagctttttttttcctgatgcagacccaatcatgtaccgtacgctgcattcatttgattgtcatgttactttattttctctaatcttgaatactcctctgcctttattattatttgaaaaaaaaaacctttcagtgaatttggtattttttttgtttgtktttttgagaaaggtcttgctctgttgcaagactgctttactctttttatagagacaaggtctcactatgtttcccaggctggtttcaaactcctgggctcaaggggttctcctgccttagcctctcaaactgttgtgattataggt

SEQ ID NO: 866576 - DNA, 597 bp, Homo sapiens
actggagtagtctgggaggggcctttgacttctctgcccctaaaagtgagttctcataaaatatggtgcgcccaggctaacgctggtacttattatggcaaatcctttagcttcaggtccctgctctttttgtcctccacttctgatatgacaaatgcccaacagtggaggcaggaagacagcccaccttctgtcagagcctactccccagytcatgtttctctgtccctccgttgtatagcaaactcttgccaagccttttggaatgactttttaacaagaaaagccccatactttaatgggccaattcaaacaactgacatctgttaaagaagcacacaaatatcctttaagtccttaacctttaattaaaaagtcatgcaaatgtacatttcctaaagggatacttttcccctcactgtgattagagaggagtgagactctaggtcaatccaaaacatgcaatcatataggcacattgctctattaaaacaaaaatgatttaatattaaaacattcattatttaataaaatgtcacatcattagtttaggggagaaaaacgtggtcatctggagacagactagaaattgattca

SEQ ID NO: 866577 - DNA, 572 bp, Homo sapiens
gaatattaatgggtatagatttttttccattgatgttactttgaatatgtgagcccattttatattgattctggaaagtagattctgctcaggaaagttttattctattgtaattttatgatagctattcaacttatgctggtttctttttcaagaataactagtatgtggagttggatttctggcttgtctttttcataactaatgatttttctctccagttttcattttttcttcccctttcgtctctgttctagagcttgaatttttcttctacatgacaaatttgggttttctgtttccrttactaccttcaatgcaattttatttccaaaattgcatttttagatttcttttgtttttttcctttctcttagccagacccttttgattttcttatcatctgacttttccatttgagagaggaaacattttcttgtatattcagagaacctaatgcagtgatacggtttggttgtgtccccacccaaatcccattttgaattgtagctttcataattgccacgtgtcatgttgggaactgttgggaggtaattgagtcatggggatgg

SEQ ID NO: 866578 - DNA, 666 bp, Homo sapiens
ctggttataacattattggagggaaaccaacaaaaacgagggaaatagtatctgcgccttctttgcattctgcctaaagtcttaggatcacagtgtcctaattggatcattgaaaacctatgatggctttgatttggcaggtaatctagctgaatctttaacacattaacttccagacccctcatcattccagctgggaagagaaaagaacttcaggaacaaattttaaaaatgaaatttgttaaatcatgaaaattccaatgaagttttctcttttatcttcctagctcatgtttgaagagcccagctaagttgttgagctaactcgtatttcaagctcagggctgcattcattttggttcccatcacgaattctaaaggcatttgaaatttccccttggctccctgggactatttagaagagtatctcagttgtttgtagggttttcttttgtttaaacattttcagagtcagacaaattcttttatgaacacatattmactattcaagtggatgtttctctacagtaaaataaaattaataaatcatacaaagtgggtatttaagcttatgctcctaatctcctcacgtgccactcaatgtgcacatgaggtttttaaaaattagtgtctcaattatattctatgatagagagaacagaggtg

SEQ ID NO: 866579 - DNA, 666 bp, Homo sapiens
ctggttataacattattggagggaaaccaacaaaaacgagggaaatagtatctgcgccttctttgcattctgcctaaagtcttaggatcacagtgtcctaattggatcattgaaaacctatgatggctttgatttggcaggtaatctagctgaatctttaacacattaacttccagacccctcatcattccagctgggaagagaaaagaacttcaggaacaaattttaaaaatgaaatttgttaaatcatgaaaattccaatgaagttttctcttttatcttcctagctcatgtttgaagagcccagctaagttgttgagctaactcgtatttcaagctcagggctgcattcattttggttcccatcacgaattctaaaggcatttgaaatttccccttggctccctgggactatttagaagagtatctcagttgtttgtagggttttcttttgtttaaacattttcagagtcagacaaattcttttatgaacacatattcactattcaagtggatgtttctcyacagtaaaataaaattaataaatcatacaaagtgggtatttaagcttatgctcctaatctcctcacgtgccactcaatgtgcacatgaggtttttaaaaattagtgtctcaattatattctatgatagagagaacagaggtg

SEQ ID NO: 866580 - DNA, 606 bp, Homo sapiens
ctaacattaaccagttttcccatttcctccactaccaccctagtccatcatcacatctggtcatacaaaggttactctactgcctctcttgtgcatctgtaagctattctctctatgacgaatgaaacagaatcatattcctatttttcagatacttttcaaatacaaatgattttctgttgaatttagaataaaataggaagttcatgttgtggtctgtcaagttctataaaatctggccttcaattaccgtgcccatctatctctcaatctctgctttgctcagtgtgttcaactactccaggctcccactggrgttttcaagcacacctccacttcaggcctgtttcactcacatggagtattctcgctcagagctgcatgtttctttgttgtgtttgctcaaatgtcagcttctcagaagactgaatgtgttcaccctcgctgaaatagtaaccgcccttatccattctctatgtccttatcctgcttaaattttctttatagagcttgccattttctgaacatcaattacattatacataacactcctattgatttctttattatctgccttcccacctgaatatatccatacaaacaggg

SEQ ID NO: 866581 - DNA, 466 bp, Homo sapiens
tgttccccctaggaaatataacatcttcagttatgaattaactgcctgggacagcccaggctttgctcctctctctccaggaagtaggacgtccttcaaattgttgcccagtgagttccatggccctttagatatataacccagggcggactgccttttaaggtytgtcagctgtggggcaagtgggccactcacagccaaggctccatccattctaggcagttttcttggggcttgggggacctgtttacaatggatcccaggcatctgttgtcccttgcttccgatttgtaaataataaatctccatcatgtaacttgttgtttatgagtgtgctctgtctcatcaaactcagacaagttggtaaccagtgcaaagtgaacctgctttccaaataggatgttaggataagaaaaaaggaatattctagatttctagtgatttaatactggcagtatgtttaaat

SEQ ID NO: 866582 - DNA, 607 bp, Homo sapiens
ttcattatttgttaattaagtccctctccattctaaagcaatttctgtgatttttctgattgtggtagacttcacaattatactgatttaaaacacattaccatgtactttctggctcctagtaaattgctattcacttaagtgttatctctgagtcctaaagtgttaacagacctaccaaattatgtgaggaatctcgccttcccccacaccccaacaagcttaattttctcttgaatatttatctcmctctctcataactttcatataatttcaaactctccaaaacacacccaaaaagggagctgaaggacaggaagggattatatattttttccatggtatattctcttctaatgcagaaaggcaattaggcaaaacaagttaaaagcaagctaagctttttcttcttgagcagtgtagaacaaaaggctttatctgatttatgctaaaactagttcattgcaagcaggatcttaataccctaatcaaagaaatttaaaaataaattaaagaaaacatctcacctttgttacttagaggcaaaaattacgacaaaattatttcctggtcagcattcttagactagcctcagctattttttttt

SEQ ID NO: 866583 - DNA, 605 bp, Homo sapiens
catctcttttttttatagatgaaaaacctgaggcaccaataggggtactggtcacacaaggagaaaggggagacttcaggattcttttcttctaaattaactttgaaatcgttttactgttagcatcacgttttgagaataatttttgataaatgtggtatgcttttatcctaaaaagtgtattttcatctccaaatgaaatagtagtaataaaagtaataaaactttttatttcatttttttctagcaagagatggtcttacttttacttccaacrggagaattcttagtcaaagaaaaataatctttaacacaattaacagaaaaaagttgaatctcatttcatttcctgtggggccctcccaggcctaccattaatactcattgctaccattttgcttttctttggtccattaagtaggctgacagtccttcatatttttatatactacgttgagaaatgggaattcctgtcaaatgtatcttacgaataagcattactataataaaattattaaatgggtagatttagatgctaaaactggtagaaccacaattacaaagtatgtaaaaaagccccatcagttgtccatacacaaaagtgg

SEQ ID NO: 866584 - DNA, 612 bp, Homo sapiens
tgtcatcgtttttttaattaatatggctcagagcaatatgaaaactattctggactgagattgagaaaatagacttgataactttaaataggcctaataatagactatgagaattaaatcaatcacttgaaagtttgtaaacatgtatgaaaaygtgggtagtgtgataatttttaaaaaatgaataaattgtcaggaacaaaaaatacactaagaaactacgaatcattggagaatctaggcatttcttaccaatacttcaatgttttatctattcatcttgaagaagaaattggagagagcaaggtgcctctcgttacgagacttctagggtctgttatcacaaataagataaatctaatatactttttctaatatttaaaaatgtttctcaatgctaaatatttaacttgctccacagagcctggcacacagcaaaagaatgtaagaccccttattcaataatgccagattataaagcatcttatttatggctaatacgtatttaatgatgttagccattatattattataattaatgcttccttatacaaatcacaggctgcttaagagcaatgccttttccattccccttcttttgttcagcttcta

SEQ ID NO: 866585 - DNA, 612 bp, Homo sapiens
tgtcatcgtttttttaattaatatggctcagagcaatatgaaaactattctggactgagattgagaaaatagacttgataactttaaataggcctaataatagactatgagaattaaatcaatcacttgaaagtttgtaaacatgtatgaaaacgtgggtagtgtgataatttttaaaaaatgaataaattgtcaggaacaaaaaatacactaagaaactacgaatcattggagaatctaggcatttcttaccaatacttcaatgttttatctattcatcttgaagaagaaattggagagagcaaggtgcctstcgttacgagacttctagggtctgttatcacaaataagataaatctaatatactttttctaatatttaaaaatgtttctcaatgctaaatatttaacttgctccacagagcctggcacacagcaaaagaatgtaagaccccttattcaataatgccagattataaagcatcttatttatggctaatacgtatttaatgatgttagccattatattattataattaatgcttccttatacaaatcacaggctgcttaagagcaatgccttttccattccccttcttttgttcagcttcta

SEQ ID NO: 866586 - DNA, 534 bp, Homo sapiens
tttgataagtatgtggctcttctcctttgtgctctctctctctctcttctgccatcatgtaaggcatgccctacttcccctgcaccttctgccatgattgaaagtctcctgaggcctcccagccatgaggaactgtaagtcaattaaacctcttttctttataaattaccaagtctcaagcagctccttacagcagtgtaaaaataaactaatacgcggacttcacatgttaggctastacaaaagtaatggtggtttttgcaattacttttactggcaaaaactgcaattacttttgcaccaacctaatataatcatattttcattttatagattagaaagctatggtccagagtggttaagctgctaataagtgtcactggcaacaagacatactttctaagaacatttctatttctctttttagaccagtgctatctaatagcaccttctataatgatggaaatgttctatgaaacttaggaatgaattatcaccctaagcaagactaattctctatatgtaactgttcac

SEQ ID NO: 866587 - DNA, 534 bp, Homo sapiens
tttgataagtatgtggctcttctcctttgtgctctctctctctctcttctgccatcatgtaaggcatgccctacttcccctgcaccttctgccatgattgaaagtctcctgaggcctcccagccatgaggaactgtaagtcaattaaacctcttttctttataaattaccaagtctcaagcagctccttacagcagtgtaaaaataaactaatacgcggacttcacatgttaggctagtacaaaagtaatggkggtttttgcaattacttttactggcaaaaactgcaattacttttgcaccaacctaatataatcatattttcattttatagattagaaagctatggtccagagtggttaagctgctaataagtgtcactggcaacaagacatactttctaagaacatttctatttctctttttagaccagtgctatctaatagcaccttctataatgatggaaatgttctatgaaacttaggaatgaattatcaccctaagcaagactaattctctatatgtaactgttcac

SEQ ID NO: 866588 - DNA, 608 bp, Homo sapiens
aatatgtatggatagggaataacatagtacacaggttttagtactatctgcaatttcaagcatccactggggggccttggaacatattcccctcatgtaaggggagtaatcgctatacataatactagctacttactcaytaacgtgatgggcttaaaacaaatacactttaaaagtaagatttagctgggtgtggtggctcatgcctgtaatcccaacactttgggaggccaaggtgggcaaactgcttgagccccagagttcaaaaccagcctggccaatgtggcaaaaccctgtctatactaaaaatacaaaaattagctgggtgtggtagtgcatgcctatagtgccagcgactcaggaggctgaggcaggagaatcacttgaactcaggaagcgaaggttgcagtgggcgacagagtgagactatctcaaaaaatatataataataataataataaatttaatttaaaaaataaaaagcaagatttaacatttatagagcttaatcattatttcgtttactggcctaaatgccttacagatgacattcatcctaacaaactcaatgaggaggtaatatggtcagccccagtttacatacacgg

SEQ ID NO: 866589 - DNA, 621 bp, Homo sapiens
tccgttcattctactttaaaggtctcattctgaactcttataacacttggcagcactcttagagaacctatcatagaacagtgttatttaaacctcatttttccaattacatcgttagggagatagagagaatattgcaaatgtcttgtaccactcttagagaacytatcacagagatacaggttttctatcacacggttatttaaacctaatttttcccaattataatgtcagggagatagaatattgcaaatgtcttcacaatctacccccaattcacatgcacatctgaacagttggtaagcttaacatctgttaaatacacgatcttcattatgattactggtaagtgaagtatggccaggcatgatggtgtcggcctgtagtcctaggtacttgggaagctgagcgggggaggatctcttgagccttcccatctcaaggatgttcaagttcaaggatgtagtaagctatgattgtgcctgtgaacagccactgcactccagcctgggcaatatagtgagacccttagaccccatcttcacccccgacaaaaaagaaataaagaaatataatctttaaaacaacaacaaaaaaatctctcaaagctcagctcatttc

SEQ ID NO: 866590 - DNA, 683 bp, Homo sapiens
atgtgctatactctgtgtcttagtcaaaagtaatttttgtttgaaaaatataagattacaaagtacataatgagtattttatgataagattagtaagcaatatgaacatttagaattttgtttttgaaaatttatatatgattgtacaaagattcatcaaaatccagtacagaatttataaaaggaagagttacagttttattatttatgtaaaatgtttgtgtttcttttttcatatctaaaagttactgtaattctctgtggtaaaaggtattggttcccaatacatctcagtaatgcagaatggacaatttaaacttccacatgcttcagctgaattctagaatgattttttaattttttaagattccttttccttaaatttttcccatagtttttaacttattactttgtcagcacttayatttctcttcaatgttttttgaagcacaaaagtggtggtatataaaagttgttgctacacatacaggagaagcatgttgaggtgtgcagggacagcaccacatcctattttctgacctccttgctggagtaataaatttctaatgtcatgcatatgtagaggaaaaagagcttttgtatttaaaatatttaatggtaaattacaatgttaattttaaaactctaattttgattgcttcatgcaaggaatgaagtatttc

SEQ ID NO: 866591 - DNA, 585 bp, Homo sapiens
ctgtagatgtatggatttctttctgggttctccattctgttccactggtctgtgtgtctgtttttatggcagtaccatgatgttttggttactatacttctgtagtataatttgaagtcaggtattgtgattccttcagttatgttcttcttgctcagggtagctttggctattctaggtcttttgtgttttcgaatamataaggatcattttttctatttctgtgaggaatatcattagtagtttgatggggattgcattgaatctgtagattgctttgaatagtatggacattttaacaatattgattcttccaatgcttgaacatggaatagctttccattttttgtatcttcttcaatttctttctccagttttgtatagctttcattctagagatctttcatttctttggttaatttctaggtatttaattttatatgtggctactgtaaatggaattactttttaaattttctttctcaggttattctctgttggcatatagaaacattaatgatttttgtatgattttgtatcctacaacattactgaatttatcagttctaatagtttttttttttt

SEQ ID NO: 866592 - DNA, 585 bp, Homo sapiens
ctgtagatgtatggatttctttctgggttctccattctgttccactggtctgtgtgtctgtttttatggcagtaccatgatgttttggttactatacttctgtagtataatttgaagtcaggtattgtgattccttcagttatgttcttcttgctcagggtagctttggctattctaggtcttttgtgttttcgaatacataaggatcattttttctatttctgtgaggaatatcattagtagtttgatggggattgcattgaatctgtagattgctttgaatagtatggacattttaacaatattgattcttccaatgcttgaacatggaatagcttyccattttttgtatcttcttcaatttctttctccagttttgtatagctttcattctagagatctttcatttctttggttaatttctaggtatttaattttatatgtggctactgtaaatggaattactttttaaattttctttctcaggttattctctgttggcatatagaaacattaatgatttttgtatgattttgtatcctacaacattactgaatttatcagttctaatagtttttttttttt

SEQ ID NO: 866593 - DNA, 613 bp, Homo sapiens
attagccttagctcttaccagtcttctccatggaccttcctttctagccatgtttgtctgttagatactgatcatagtataaaaactatcctactcgcatatttatttacagaatagtttttggccgcttactatgctagatgtgatattaagcagtatgatgataatggtggattggtatagagctttttttgttcataycattactttgaagtaacagcaccctggaattcctaccttgctttcagcttatgtgcaaccactcccctgatgccctcttcatctgactcatcagcagtcatatagctttaattgctactactaatttttttgcatttagaatatgatgtatataccattttcatgtcagcctatcttttcatcaatatatattttaaaagtcaaataatgctaaaaaggcatatgagaaaaacttagttgtaacttctgccatctctagcattattcatttacagatactgcgttatgacagttgaagatcttagctctcttcattcatctttcaatcatcttatctttccagtgtactttgctgagtcaattaacagtactttcctgaaaaaagcttttcctgattttaataatttcattt

SEQ ID NO: 866594 - DNA, 579 bp, Homo sapiens
tgtttctggtcccagatactctctgtggctaaagctaatgttgaaacagagatgtttaaacaaatagcagtagtaacaaaacactttggttttaaactaagaatatacttagaccacaaaagcaagtttctacaggtttttttttgttttgtttttgttgttgttgttttgagaggaagtctcgctctgtcaaccaagctggagtgcagtggtgcgatctcagctcactgcaacctccgcctcccrggttcaagcgattctcctgcctcagcttcctgagtagctgggattacaggcatgtgccaccatgcctggctaatttttgtatttgtagtagagatggggtttcgccatgttggtcaggctggtctcgaactcctgacctcgtgatccacctgccttggcctcccaaagtgctgggattacaggcgtgagccaccgtgcctggtgggaaagggactttctcgggggattccagcttgtaagtggcagggcctggattcgactaagacctttaatgccacatcctgagctctgtccaccatactgtgaagtctacttttagggcaatcccatttc

SEQ ID NO: 866595 - DNA, 579 bp, Homo sapiens
tgtttctggtcccagatactctctgtggctaaagctaatgttgaaacagagatgtttaaacaaatagcagtagtaacaaaacactttggttttaaactaagaatatacttagaccacaaaagcaagtttctacaggtttttttttgttttgtttttgttgttgttgttttgagaggaagtctcgctctgtcaaccaagctggagtgcagtggtgcgatctcagctcactgcaacctccgcctcccaggttcaagcgattctcctgcctcagcttcctgagtagctgggattacaggcatgtgccaccatgcctggctaatttttgtatttktagtagagatggggtttcgccatgttggtcaggctggtctcgaactcctgacctcgtgatccacctgccttggcctcccaaagtgctgggattacaggcgtgagccaccgtgcctggtgggaaagggactttctcgggggattccagcttgtaagtggcagggcctggattcgactaagacctttaatgccacatcctgagctctgtccaccatactgtgaagtctacttttagggcaatcccatttc

SEQ ID NO: 866596 - DNA, 695 bp, Homo sapiens
gttggggaccattggcctactgtattcagcacagtgacatgctgcacaggtgtgtagcccaggagcaataggctgtacgatatagcctaggtatgtagtaggctacgctgtctaggtttgtataaagtacactctttggtgtctgcacagccacagaatcacctaatgatgcatttcttggaatatattaccattaaatgagatttacctgtmttagtgtcatctcaggtttattgtctagtaattttaaaagtatttgtatattctttcccagacacatcatcatactctggtgcatatctctattttattccctagacccactcttaatttttctgcattctgctttgttccttaggaggctcacctgaattggatacttcagagatctcccttaccctcatgcttttattggggttcagctaatggagggggtggcagaagataggtgagagaagagtgtgtttatcccccacctctgcccctgcagggtcagcacaggcagactgtgtccctttgctgaagatcacagcttctgtctggtgccttcttggcaagctggcactgtctctagtcaggtgactgcttggccccttactacttacactcttctgtctggtttctttgtgactttcctgctgtgctgtaagtagtccctttattagaatccatccacattacccagttatataaag

SEQ ID NO: 866597 - DNA, 571 bp, Homo sapiens
cccagctactcaggagctgaggcaggagaattgcttgaacccgggaggtggaggttgcagtgaggcaagattacaccactgcactccagcctgggccacaagagtgaaactccgtcacacacacacacacacacacaaaagaaaaaaaaggtctcctgctgggacacagactagttagagaaaggaaaaataaacaaatgatagtatgtrtattaataaaagaactagcaacacccactgcttagttgtgataataaaaactggacattaatataggcagaaaaacagaacagccttgatatggttaaccctttgacactggcaaacactgtgaccagtgctgcccacactggaagctcctgcatccctcttcctcatgtttccttcagcattaaggagcaacaagggagacagccagttcatagttccttacgcatggagccaaaggaccttcaatgtacaaggtctgagcaaggacccgcagccacatgtgcttcctgcttcagcagtgccccgtgggtctcagagctacccaaaggcctatccttccgagaggtttctcctctctccc

SEQ ID NO: 866598 - DNA, 571 bp, Homo sapiens
cccagctactcaggagctgaggcaggagaattgcttgaacccgggaggtggaggttgcagtgaggcaagattacaccactgcactccagcctgggccacaagagtgaaactccgtcacacacacacacacacacacaaaagaaaaaaaaggtctcctgctggracacagactagttagagaaaggaaaaataaacaaatgatagtatgtatattaataaaagaactagcaacacccactgcttagttgtgataataaaaactggacattaatataggcagaaaaacagaacagccttgatatggttaaccctttgacactggcaaacactgtgaccagtgctgcccacactggaagctcctgcatccctcttcctcatgtttccttcagcattaaggagcaacaagggagacagccagttcatagttccttacgcatggagccaaaggaccttcaatgtacaaggtctgagcaaggacccgcagccacatgtgcttcctgcttcagcagtgccccgtgggtctcagagctacccaaaggcctatccttccgagaggtttctcctctctccc

SEQ ID NO: 866599 - DNA, 673 bp, Homo sapiens
actccaataacttcttccctttggtctcaaactgactgggttcactcacttctattggttctttgataatgccaatgaatagtctaaaatttctgcttactccagggactgaattaggtacagaaatctttatgtttactattcaagtttgcaggcatccttttaggctatttctagatgtctccttaattcaattttttctccattttaaatatcactattaattccttgagatatttttcaccaaccttacaaacaaaakgatcaagtcacaattcctcactttggcaatcttaaaactaaattcagatttatactatcccgttatactttaaaatcccatacaagaccaatttaacctagctctccctgtctaccaaaattcaaaattcaagctcctgggtaaactggaaggcttaattcttcccacatatgtgtattcttttttgttttttatttttacttttaagttcgagggtacatgtgcaggatgtgcaggttagttacatatgtaaatgtgtgccatggtgatttgctgcacccatcaacccgtcacctaggtattaagcccagcatgcattagctatttttcctaatgctctctctcccccacctcaccccctaacagggcccagtgtgtgttgttcctctccctatgtccatgtgatctcat

SEQ ID NO: 866600 - DNA, 614 bp, Homo sapiens
ctcggagcattctgggcatttagtaggcaatacaagaaacagcaacatctaaaaacaatttatctctcaagttttattgaaatttctcttttacaaaatgtctgatttttaccctaacgactgcatcctcacccaaatctcatcttgaattgtagctcccataattcccatgtgttgtaggaggggcccagtgggagataactgaatcatgggtacagattcccccatactgttctcgtgcagtgaataagtctcacgagatctgatggtttacaagggaaaactcctttcacttggctctcattctctcttgcctgctgccatgtaagaagtgcctttcsctttccaccatgattgtgaggcctccccagccacatggaactgtgagtccattaaacctctttttctttataaattacccagtcttgggtatgtctttatcagcagcatgaaaacggcctaatacaattcctaaatattttttcatcatggcgtgttttgactcaaatcctacaccatggggaaaaatatacgtgtgtgtgtgtgtgtgtgtgtgtgtgtgtgtgtgtgtagtacaataagttaaattccagtgtttcaaagtttttaaaatc

SEQ ID NO: 866601 - DNA, 594 bp, Homo sapiens
cttgcaggacacacagacgttctaaacgggggacaaaaatactggatttgagtttgcaaaacgttacttgagttgcattgtgaaaaatgaaatgtaaagggcaagagaaaagttgaaaaacaggaggatatttcagcagctcacacagcattgctgttgccttggagaaagaggtggtggagggtgaggacagtgtgtggatgtcagacttttggcaggtctagttcagtggatttcagggcaggtgacgtgcacagcaggggattccccaagggaaggagaagaaggtgccagggctgacactttggtttctyattggaacaacaggatggatgtattagtccattttcatactgctatgaagaaatacccaagactgggtaatttatttaaaaaaagagatgtaaggaactcacagttctgcatggctggggagtcctcacaatcatggcggaaggagagaaaggaacaaaggcatgtgttagacggcagccggtaagagagtgtgtgcagcggagctgttctttataaatctcgtgagagttattcactagcatgagaacagcatgagaaaaacctgcctccagaattcaa

SEQ ID NO: 866602 - DNA, 624 bp, Homo sapiens
caagttcttttcatgtaatttctgtattgcttcactttaaatccacatggtgtcctatgtccttacttagcaaatccacattaatcttctccttaactttcacagattttaccaggaacagatacagttcgaactcatacacatatatatgtggacacacactcatcactctcacacgtacagatttatcataatcacttaattatttttaatgcttacttagcttacaatgttgctgttaaactcatcctcggaatgagtaagttaacagaacagctgctatagctgcaaactccactttgtttttaaaaagacaccttcaacatagatgtttgatttctggaggctttagatgtttcagcagaacatttacttctggtatgttctataaacatgctggtataggttgttcgataggagatataaaaaaattttatatttaataattatgtattgtagtgattgactgtggacaccctggcsttcctcctaatgcagtcctgtctggcgagaagtatacttttgggtctactgttcactattcctgcacaggaaagcgttcccttttaggccagtcatcaagaacctgccaattgaatggccattggagtggatcacaacctc

SEQ ID NO: 866603 - DNA, 594 bp, Homo sapiens
catgacacttgttatctttttatgtttttaatttttattctcatgaaagaatttgaaaaatttctcctttatttattagccatctctgtttgtgaaggtccagtttaagttgaaagacaatatttcttttgggttatttatatcttcttgtagaaattccttatatattcttgatataaactctttcttggtgacgtgtattgcaaataacctcactggttagctattcacaatcttagtagctattcaaactctttagataaacagagttcttatatctaatgtgaaacaatttaccaaggttttcctttacagtcagtatttttctgttatgtttaagaaaactgcccaccaaaakatcataaagacattctcctatattattttctggaaacagtctagttttacattttagaactacactctaacactgcaatctgcctggcatttatctgggaaatggcgtaaggaaggcatggtttctttttatgttttgttcatatggccaaccaattgtgataatgtatttgattgaatagaatgcatcaatgctctgcaatgccacctttttaaaaatcaagaagatagagtctg

SEQ ID NO: 866604 - DNA, 641 bp, Homo sapiens
gggtctgttatcactgaaaccacacacaaaatgagcgacaggggcactgtggttttgtcagagatgcttgctctcatttgcacagaaaggagttcatgcaagtctttttattattattacatgtcaccgcaacagggtattgcagtgggggaaagagactggactcaactccccacttatgcaagtcttaatccaagtggaatctcttctctggatttctagagtggcaggtgagggggcgggaagcctcttctccataatggcagtggttctcacacttcakcgtgtgcccgattctcttggtgggaaaagggggaagtgttcaaaatgcacattccagggccctaccctgagagcttgatgctgtagattttgcacagggcctccaagaccaaattctcttttttagagacagagtcttgctctgtcgcccagggtgaagtgcagtggtgtgatcatagctcactacagcctccaactcctgggctcaagtgatcctcaagcctcagcctcccaagtagctaggactacagaagtgcatcattacacctgtctaatttttattgttattattgtatttttgtagagacaaggtcttgctgtgttgcccaggctggtcttaaagtcctggcctcaagccc

SEQ ID NO: 866605 - DNA, 583 bp, Homo sapiens
cacaacagtcaggaagtctgaacgttaaccagatatttgatgctattaaggaattgcaagatggagatgattatcttttaagtgcttattctttagtgatacataatgaagtgtttataaatgaaatagtatgatgtctgggatttgcttcaaaaaaatccagtacagggttgggtgaaacaagagggtgggttataggaaaagcaagacctgccatgcgttttggtaactgttacagccaaggattcactgtctaactcttccttcactacacactttggtatctatttgtaatgttccataacaaagtcttttttgttgttgttgcaaagatggagtcttgctttgttgtccagctgggctcgactcctggactccagcaatcctcttggccccgcaaagagctgrgattacaggtgtgacccactgcatccagccaaaaaagtcttttttaagtgaaaaacaattttaaatgtacttcatcgggtagaatctgcaggtagaaataaaaagaactagaaggaaagaaaaagagaatcctatgaaatgtatacggcctaagtagggaaagaaatcatgttat

SEQ ID NO: 866606 - DNA, 583 bp, Homo sapiens
cacaacagtcaggaagtctgaacgttaaccagatatttgatgctattaaggaattgcaagatggagatgattatcttttaagtgcttattctttagtgatacataatgaagtgtttataaatgaaatagtatgatgtctgggatttgcttcaaaaaaatccagtacagggttgggtgaaacaagagggtgggttataggaaaagcaagacctgccatgcgttttggtaactgttacagccaaggattcactgtctaactcttccttcactacacactttggtatctatttgtaatgttccataacaaagtcttttttgttgttgttgcaaagatggagtcttgctttgttgtccagctgggctcgactcctggactccagcaatcctcttggccccgcaaagagctgggattacaggtgtgacccactgcatccagycaaaaaagtcttttttaagtgaaaaacaattttaaatgtacttcatcgggtagaatctgcaggtagaaataaaaagaactagaaggaaagaaaaagagaatcctatgaaatgtatacggcctaagtagggaaagaaatcatgttat

SEQ ID NO: 866607 - DNA, 613 bp, Homo sapiens
catgagccaccgtgcccgactggttttctacttttaaagttgtatataatccagaataatctcccttgtgttagggttcttaatattaattacatctgtaaactcaatttggccatgtaagataaaatatccacagattcaaaacattagcaagtgggcgtctctgggactacggcattattctgcctaactcagtctgcctctgactcccaaagattyacttaatatcacagacaaaaaactagcgccatctcaacatcctcaaaacctcaacccatgacagcgtcaacacaaagtcccaaaatatcatctaaaccacatcagtttaaaagtaacaacttttgtcaactaaattatgtaaattagatgtgggtgaaggtcttatgagaatctaccttgtggcacaatttctttccatctatagacctgtgaaagagaaataaattattttttgaaaacaaatggttgaatgagagtcagaatattatgaaatgttatatatagtcttgtttaaaaagagagacaaataaaaggacaaattagccactgatctccagaaatttagaattgaggccaggcaactcctctggctatcaaggctaagggataatcc

SEQ ID NO: 866608 - DNA, 613 bp, Homo sapiens
catgagccaccgtgcccgactggttttctacttttaaagttgtatataatccagaataatctcccttgtgttagggttcttaatattaattacatctgtaaactcaatttggccatgtaagataaaatatccacagattcaaaacattagcaagtgggcgtctctgggactacggcattattctgcctaactcagtctgcctctgactcccaaagatttacttamtatcacagacaaaaaactagcgccatctcaacatcctcaaaacctcaacccatgacagcgtcaacacaaagtcccaaaatatcatctaaaccacatcagtttaaaagtaacaacttttgtcaactaaattatgtaaattagatgtgggtgaaggtcttatgagaatctaccttgtggcacaatttctttccatctatagacctgtgaaagagaaataaattattttttgaaaacaaatggttgaatgagagtcagaatattatgaaatgttatatatagtcttgtttaaaaagagagacaaataaaaggacaaattagccactgatctccagaaatttagaattgaggccaggcaactcctctggctatcaaggctaagggataatcc

SEQ ID NO: 866609 - DNA, 599 bp, Homo sapiens
gaaaaatcacagcagagagtcacatctttgagcatatatacaggagaatgttacaataaggaaggggctgtttttaactgaaaaatgctttcagcatagatcacactgtaaaggtatgctgagttaaatgaagttacagaaatcatgagaattaactgaatacctatgtatacattttcttcaagtatttcccagctctaaaatggtggccrggcgtggtggctcacacctgtaatcccagcactttgggaggccgaggtgggtggatcacctgaggtcaggagctcaagaccagcctgaccaacatggtgaaaccctgtctctactaaagaaacaaaaattagctgggtgtggtggtgggcacctgtaatcccagctacttgggaggctgaggcaggagaatcccttgaacccaggaggcagaggttgcagtgagccgagattgcgccattgcactccagcctgggctacagagtgagactctgtttcaaaataaataaataacagaaactaaaataaaatggcatgtgtatgctacagttgtacacaagtagacaatggtcttcaaagtaaagctgcagaaatactgtattttaaaa

SEQ ID NO: 866610 - DNA, 767 bp, Homo sapiens
tatgtagagggctgagcagtgtcctcccgaaataaatacctatgtgggatcttataatgtgacctcatttagaaacagggtctctgcagaagtaattagttaaggtgaggtcatactgatttagagtgggccttaaatctaaagaatggtatcctccttataagaaggaggaggatacacagagaaacacaggaaaggccagatgaccacagaggcaatsgaacagacactctcccaaagcctacaaaaggagccaatcctgctgacaccgtgatttcagactcctggccctctgagttgtgagagtacatttctgctattttaagtttgtagccatttgttacggcaaccctaggaaactaatatagtgcatcctgattacacttaaaaattaattaagttaactctacctccatatttccccatacactttgtataatctaatttttaaatcaagataatatgatagactttaaaaaataatcttcccaagctacctaattaattttcttccaataacattactcagcatagtttttatttctaatgaaaaatatacagcaaaggattatttataatgtgatggttaacatcagtgtcttgctaagagtgtctcactcttaatacaagagacctgtctttccaatgcagtgcacttggtggtgcacctcccaccgccccctggaggacaaagtgctcatagcccaattgcccagaaggttgatcacaggcagctctcagctgagaccctctctgcaacttccctt

SEQ ID NO: 866611 - DNA, 697 bp, Homo sapiens
gaagagaaacagaatatgaagaggattcaaccaaatagagccaatgaaggagacagagcaacttaaataataagagcaattttaaaaaatgggacaaaaaggaaaggatactcagtgcatagttgatggcttaagaaaataagatttttttatattatactttaagttctagggtacatgtacacaacatgcaggtttgttacatatgtatacatgtgccatgttggtgtgctgcactcattaactcgtcatttacattaggtgtatctcctaatgctatccctcccacttcccccaccccatgacaggccctggggtgtgatgtccctcaccctgtgtccaagtcttattgttcagttcccacctatgagtgacaacatgcagtgtttggttttctgtccttgtgatggtttgctcagaatgatggtttccagcttcatccatgtccctacaaagtaggacacgaactmatcctttttatggctgcatagtattccatggtgtatatgtgccacattttcttaatccaggctatcgttgatggacttttgagttggttctaagtctttgctattgtgaatggtgccgcaataaacatacatgaacaaaaaaagtccttttttcatgatgttctcttatttcttgctgaaataaatgaaaagattcagtatgtccaagtatcctttatagctaggac

SEQ ID NO: 866612 - DNA, 600 bp, Homo sapiens
caatagaatgagataaaaatattaataaatgttaaaatttgaaaaactaacaaatatgtatgaattaacaaatacatttctaaatcaccactgagttaaataaaaaattacaagaaaatcctgaaaatatttttatatgattaaaataaaaaatgtaacatataaaaatatatgagatgcaaaaaaaggagtacttagagtaatatttatagttgtaagtgcctacattaaaatttaaaataaactcaaatcaaaagcctaactttccaccttaaaaaaatagcatactaattccaaagcaagtagaaagcagaaaaatattatatccagagcagaaataaatgaagtaggcatagaaaaatggagaaaatcagtgtaacaagatattagttctttgaaataattaacaaaattggtaaccattagctagagtgamcaaggagaaaaaaaatgagaaggttcacattattaaagccaagaatgaaagaagagccattagttttaacaatacagaaccaaaaaagagttataaaagaatgctgtgagtaatagtatgccaacaaattagataacctagatcaaatggagaaattcctataa

SEQ ID NO: 866613 - DNA, 617 bp, Homo sapiens
aaatttattatacactttttaagagcagtttcaggttctcagcaaaattaagcaaaaagtacagtgttcccatatatttctgctcaccccaccaccctctcctattatcaatttcacacactatagtgatacatttgtaacaatcattgaaccaacattaacccattattatcacccaaagttcataatttacattagggttcactcttgatgttggtcattctatgggttagaacaaatgtataatgatgtgttcaccattatagtatcatacagaatagtttcaaaaatgtcccctaaatcctctgtgctctgcctatgtatccttctytatatcctggcattcactgatctttttactatctccatagatttgccttttccagaatgtcatagagttgaaatcatgcactatgtaacctttgcagatggtcttctttcacttggtaatacgcattgaaatttcctccatgtctttccatggcttgatatctcatttctttaataatattccattgtctgaatgtaccacagtttatttgtccactcactctcgcttactgaaggatatcttggctgctcccaagttttggcaattataaatacagctgctataa

SEQ ID NO: 866614 - DNA, 641 bp, Homo sapiens
atatctcatttctttaataatattccattgtctgaatgtaccacagtttatttgtccactcactctcgcttactgaaggatatcttggctgctcccaagttttggcaattataaatacagctgctataaacatctgtatacaagcctttgtgtgggcacaggttttcaattcatttgggtaaacactaagaatcacaatttctgggttktgtggcaagagtatgtttagttttgtaaggacctgtcactctgtcttccaaagtgactgtgccattttccattagtagcaacactgaataagtgaagagaattcctgttgctccacaaaagctatcagaccttgtcaacacttgatgtttgtgttttggattttggcaattctggtatatgtgtcatgatatttcactgttgttttaattttcaacttcatcataatgacatatgatgttgaacatcttttaatatgcttgccatttaaacatctttggtgaagtgactgttaaaatcatttgctgattatttaatctggttgtttacttattgtggactagatataaactttgcaaatgttttccctgtggcttgtatttttattcttttgacaaggtctttcacaggccagaggtttttaactttagtga

SEQ ID NO: 866615 - DNA, 641 bp, Homo sapiens
atatctcatttctttaataatattccattgtctgaatgtaccacagtttatttgtccactcactctcgcttactgaaggatatcttggctgctcccaagttttggcaattataaatacagctgctataaacatctgtatacaagcctttgtgtgggcacaggttttcaattcatttgggtaaacactaagaatcacaatttctgggttgtgtsgcaagagtatgtttagttttgtaaggacctgtcactctgtcttccaaagtgactgtgccattttccattagtagcaacactgaataagtgaagagaattcctgttgctccacaaaagctatcagaccttgtcaacacttgatgtttgtgttttggattttggcaattctggtatatgtgtcatgatatttcactgttgttttaattttcaacttcatcataatgacatatgatgttgaacatcttttaatatgcttgccatttaaacatctttggtgaagtgactgttaaaatcatttgctgattatttaatctggttgtttacttattgtggactagatataaactttgcaaatgttttccctgtggcttgtatttttattcttttgacaaggtctttcacaggccagaggtttttaactttagtga

SEQ ID NO: 866616 - DNA, 641 bp, Homo sapiens
atatctcatttctttaataatattccattgtctgaatgtaccacagtttatttgtccactcactctcgcttactgaaggatatcttggctgctcccaagttttggcaattataaatacagctgctataaacatctgtatacaagcctttgtgtgggcacaggttttcaattcatttgggtaaacactaagaatcacaatttctgggttgtgtggcaagagtatgtttagttttgtaaggacctgtcactctgtcttccaaagtgactgtgccattttccattagtagcaacactgaataagygaagagaattcctgttgctccacaaaagctatcagaccttgtcaacacttgatgtttgtgttttggattttggcaattctggtatatgtgtcatgatatttcactgttgttttaattttcaacttcatcataatgacatatgatgttgaacatcttttaatatgcttgccatttaaacatctttggtgaagtgactgttaaaatcatttgctgattatttaatctggttgtttacttattgtggactagatataaactttgcaaatgttttccctgtggcttgtatttttattcttttgacaaggtctttcacaggccagaggtttttaactttagtga

SEQ ID NO: 866617 - DNA, 495 bp, Homo sapiens
agtccttttgttacttaggtgtggaaagtcggagttttccttttgatttagttctaggaagtcagcgtgaatcagccttaggttccctgcctccagaccctattctcctgcctcacaggcagccatgggcaacccaactccaccaactgagccctcctctcagccactgcagattggacatgcttcccgcctagattgaagggactgtctcattctcttacaatggagtgatgttctctggttctctgaaaattaatgtgtgaaaggtgaagaaatcttggcaccccccaaatcactgagccaaarggaagtaaggctgggaactccctcaagcaaatctgccttccgttttattcctaaataagatatctacaaagattaaaaaaaaactacatacctccctcacaatttgccacaagaaaatttcttgtggacaaaagacagacagaactggaagtcatccctctgcttgtatgagacaaatacacatctgat

SEQ ID NO: 866618 - DNA, 641 bp, Homo sapiens
atatctcatttctttaataatattccattgtctgaatgtaccacagtttatttgtccactcactctcgcttactgaaggatatcttggctgctcccaagttttggcaattataaatacagctgctataaacatctgtatacaagcctttgtgtgggcacaggttttcaattcatttgggtaaacactaagaatcacaatttctgggttgtgtggcaagagtatgtttagttttgtaaggacctgtcactctgtcttccaaagtgactgtgccattttccattagtagcaacactgaataagtgaagagaattcctgttgctccacaaaagctatcagaccttgtcaacacttgatgtttgtgttttggattttggcaattctggtatatgtgtcatgatatttcactgttgttttaattttcaacttcatcataatgacatatgatgttgaacatcttttaatatgcttgccatttaaacatctttggtgaartgactgttaaaatcatttgctgattatttaatctggttgtttacttattgtggactagatataaactttgcaaatgttttccctgtggcttgtatttttattcttttgacaaggtctttcacaggccagaggtttttaactttagtga

SEQ ID NO: 866619 - DNA, 565 bp, Homo sapiens
aagtgatgaatttttctcattaatctatcctgcatccatgctataaatcactcagaagttctaagagtattattttgttgatttcttcagatttttgtatagaaaatcatttcatctgtgaagaaatacagttttatgtatttcctcccaatttggttacctttcatttccttttttgggggatcttattcattagctaggactttcaggatgatattgaaagggagtgatgagagaggacatctagctttgtttcttagtgaaagggttttaatttctcaaaattcttgtttatatttgatattagtttttctaraaacccctagtttcaggcatcagcattttttaatccattcacattttctgagttaccagtgaagttaggcatatccatatatttataattgcattttagattacttgcttttgtgaattgccttttcatttatctctccattttttaacaacaggcattgggcattttatgaattgctagaaataattttgaaagctaatatacatcctatttaagaattttaataaatacagacacttataaggagaa

SEQ ID NO: 866620 - DNA, 565 bp, Homo sapiens
aagtgatgaatttttctcattaatctatcctgcatccatgctataaatcactcagaagttctaagagtattattttgttgatttcttcagatttttgtatagaaaatcatttcatctgtgaagaaatacagttttatgtatttcctcccaatttggttacctttcatttccttttttgggggatcttattcattagctaggactttcaggatgatattgaaagggagtgatgagagaggacatctagctttgtttcttagtgaaagggttttaatttctcaaaattcttgtttatatttgatattagtttttctaaaaacccctagtttcaggcatcagcattttttaatccattcacattttctgagttaccagtgaagttaggcatatccatatatttataattgcattttagattacktgcttttgtgaattgccttttcatttatctctccattttttaacaacaggcattgggcattttatgaattgctagaaataattttgaaagctaatatacatcctatttaagaattttaataaatacagacacttataaggagaa

SEQ ID NO: 866621 - DNA, 640 bp, Homo sapiens
gcgaggacaaagccactatttacatattttagtaatatgaatcactgaatagacacagaaatgttttctcttgcaagggggttcatcttggagacctcttcataagtaggaattatttgctgcccaggctagaacttccaccatgaggatacttcaaagcctcttcttaccgtggggggctccagatgctgcagatgtaaagcacaagagagcccagtccatggrtcgcccttgatgctgtctcctaaatcagccttatacctcgccctttgtaatccaaatcaccaaggtcagtggggcctctagaacttcctactccttagagcctgggctagactttattttgtaggccaggaagactgttctttattttcactgctgattttctttttctattcataattttatttttaccattaaaaagaaaatttagaaagcaatgagccagagtcaaggtttaagtcatgacatttaagaatgtaaggctcttctttataatattttccccaaaagaatgtctagcactccttaatgatgctaatagcaacaacatttctgagattatttttgaataatattcccagttttatttttcttttaggtagattttgtgaaatattttcccttcccacttttgcta

SEQ ID NO: 866622 - DNA, 636 bp, Homo sapiens
ccttaattttcttggtcatgggacaaagaatttagggtatacctcaggcaatgagagactgctacaattccacaaaaaagaaacttggtctcaaaaaagtaaatatcataagaatagaccacatattcattttctaagtattacatagattaaaaatttcactctattctataagcatggaagaaaagttggtctaatcaacaatcatacacattatctttccaaaataaaaatacacatgtattgaaggtgaataaatggcacagtgcatttatcacatatatacaccaggcacaggagattcaatgtttaaacaggagaattatccttgatagtgctccacatattgttcaggactgtctggcattatgtgcacatgaaacatgttttaagaaaaaactgaggctatgcgtcagtcacttctattattgggagtaaaaatgcactgtttatctcctctatgraataagttcagaaagtgctataatcttttataaatcaattttcctttttttaatattcatttttccccagtttaatggaaaccactttagtagctcttcggaaaaaaattactcctatattttgaagaattttgagtcttttgctaatccagccaggaagctaatttattta

SEQ ID NO: 866623 - DNA, 673 bp, Homo sapiens
cgagattaatcttccctacaacacttacgggtaaatattaacactctcctacagacaagaaaaataaggctcaaagaggtagctcacctcacagaaggtgaaagagctggtaagaggaggaatcacacctggagtttgtaagcccaggtccaatgccgcatttcaaatacttcacctcctatccatctaccttcaatacgatctttatattttaaaatccaagccaactaataagtgtcatcatttcctttatctggtaaaaatcagtacaataggtatgagtttaggttccagaagtgttttgactttaatactcacatttcccaatatgattgtaagttcagcaaatacctttaagcactgacactgcaactaagggatgcgggtgatattctcactgwcatggcactaaaattcagtagaaggatgtgtccatgcagagctcaggatacctcatagggaacctcaggaagccgaggctagctcacatgagaatggcagggtgggcagcaatgggcaagacagcaggtacgagccagctgtggcccaacaagtagggccagcctggggaaaacagtaaccatggttacagcttggattaagctcatgtctacatgttcgtcatggcgaactgggataaggaattactaaaatgtggcaaatgtaaagatac

SEQ ID NO: 866624 - DNA, 605 bp, Homo sapiens
gatagcaaatagggtaattatagtcaataatagctgtacatttaaaaataacttaaagagtgtaattgtattgtttacagctcaatggataagtgcctgaagggatgcataccccattcttcatcatgtgcttgtttcacattacacatttgcctgtatcaaaacatctcatgtaccccataaatatacatacctactatgtacccacaaaccttttaaaaattaagtttaaaaatatatgtttttttgagacacagtctcgctctgttgcccrggctggaggggagtggcatgatctcagctcactgcaacctctgcctcctgggttcaagtgattctcctgcctcagactcccaagtagctggggctacaggtgtgcaccaccatgcctggctaaattttgtatttttagtagaaacagggtttcatcatgttggccagactggtcaaactcctcacctcaggtgatccacctgcctcggcctcccaaaatgctgggattacaggtgtgagccaccgtgcccagctaaatttttaaaaagtaaaaaaagaggcaatcggtgaaatttgaaccttatcctaccaatggatgatattaaattaac

SEQ ID NO: 866625 - DNA, 612 bp, Homo sapiens
ctgatttttatgctggttttgatattgtcctatagctatttaacactcaaccagtgaaagaaactgggtgaatagtatgtgggacctccctgtggtatctttgaaatttcctgtgaatctataattatttcaaaacaaagagttttaaaaaataaaaattgctggctaaggatacagccaaaaactactattacacaaaaagaatgctcactaatctttattctagtaattcagaattcaagatccaatttatagtctgccatctctgacaaagcactgcctaagcaaatgaaagaggcatatatcataatgggaacrtatcaaacatacttagaaatatctatattcacttactttaacagaacttatgcatattttaatctgaagctacagattttctaccaactcattatacattaaagaagttctagcactagctcaaatgtttactgataatacactatattcaacagaatttgttgaatataaggatgaagcctagagtggtgtaaaaggttaaagagttggaagatctgaatttatagctggccttgtcattactataccaccttagacatgttacttaccctcttatgactgttttatcatcca

SEQ ID NO: 866626 - DNA, 629 bp, Homo sapiens
agtgacaacttttaactagcaaatcttaaaaggagtataactccagagcaatataacagggtattacctgaatagccataattatacaactggaattatttatgctacagggagacaaagtcagattattgaagacacaggcccacacttttgttttaaatcaggtttcacagttctctctcrcccacaacacagtaaattgtatccattcttcttttgctctgagaaacttaaagactaaaacccttgcagcttccccaatatcatcacactgcaaaagcatagaagtcttgtatgcatatgcaggagcagggaggagggggagtaacagcagatattgccagagtcagggcatcataatctactgtctgggtaattcctggataatttgagatccctgtgaaatgaatgtcaccaacactcccaaaaatctactgagccaaccaactgatttatctgtgctaataaagagtttatgctttcaggacacatcacaccctgatcctgtctccttccaggcatagcactgagaaaataagacccagccaattcagaacaattccttttggcttgagattctgggagcaaaggagcatgctgcacagctttattccgtgtcctccccatgg

SEQ ID NO: 866627 - DNA, 625 bp, Homo sapiens
atgagtagaaaaatgtcacgaggtcatagcaggacattacactaggacatctgtcctagtatattctggatatgagccctaatccaggctcaggaaggagttgaactcttagttgaagaaattacagtaattgattccaaatctcagatcattccacatggaacaatttttacgtgtatgaactggtgacatttttctacccatctttaggtgtcatttaatctgccaatctttaagaaaaaaatgtggcatctgcctagctctacctgcattccaacctgtctttgagcaaccgtactcaaccatattattttaaatctcmcagaattttatttgcctacatgatagatattatcagtaagaactcaataaaatatattattatatttttataaagagtcttcctaatgatgatgtttttcccattacccaaggcctgtcatctcccacatctcagtactgggagtagtcttactcaactctgagtatcatgtaatttttgtttcttcatgcttgctcttaaaatgttaaagccaattttacagcctaagcctagtaaatgcgataaaattaacaccttgaatttgtatgctaacctacccttgattacatcctatatcttata

SEQ ID NO: 866628 - DNA, 604 bp, Homo sapiens
cgattcacacagaagagaaggcaatgtgaccacagaggcagagattagagtgatgcagccacaagccaaggaatgccagcagcctccataatttgaaagaggcaaggaatgaactctcctggagactacagagggtgtgcagccctgccaacacctygcttttggcctagtgaagctgatttcaaacttctggtctccagaactgaaagaaaacaattttatggggttttgttttgttttaataattggagactgtttattttacttttgatatggttaggagcaaggcctttagagtcaaatcgtcctggatttgaatctatcattgtgatcttgggcatattcttgcaccttatttttctccaaaatggggctagaaaacaatacctacctcaaaggtaaagctttaaaaaattgtgggttttttggcaaaatacacaaaatataaaatttactatgtgctatggtttgaatgtttgtgttccctccaaaatttaggttgaaacttaatgtctaatgcaagggtattaagaggtagggcctttaggaggtgattagttaatgaggactcctctgtcatgaatgggattaaggctcctacaaa

SEQ ID NO: 866629 - DNA, 609 bp, Homo sapiens
atggtctacaaaggggaggcctgaataatccaccccttgtgtagcatataatcaagaaataaccttaaaaatgggcaaccagtagcccttggggctgctctgcctatggagtagccattctttatgttttactttttttttttttttttttttgagatggagtcttgctctggcacccaggmtggagtgcagtggcgtgatctcagctcactgccagctccacctcccgggttcacgccattctcttgcttcagcctcctgagtagctgggactacaagcacccaccaccatgcccagctaattttttttttttttgtatttttagtagagacggggtttcaccatgttagccaggatggtctcaatctcctgaccttgtgatccgcccgcctcggcctcccaaagtgctgggattacaggtgtgagccaccgcgcccagcctattctttacttaaacttgttttcactttgctgtatggactcaattctttcttgcacaagatccaagaatcctctcttggcgtctggatccagaccctttctggtatcagtggtaagctctgtttaagacaactgtcatacccaagagaattcttaaattgtggcag

SEQ ID NO: 866630 - DNA, 609 bp, Homo sapiens
atggtctacaaaggggaggcctgaataatccaccccttgtgtagcatataatcaagaaataaccttaaaaatgggcaaccagtagcccttggggctgctctgcctatggagtagccattctttatgttttactttttttttttttttttttttgagatggagtcttgctctggcacccaggctggagtgcagtggcgtgatctcagctcactgccagctccacctcccgggttcacgccattctcttgcttcagcctcctgagtagctgggactacaagcacccaccaccatgcccagctaattttttttttttttgtatttttagtagagacggggtttcaccatgttagccaggatggtctcaatctcctgaccttgtgatccgcccgcctcggcctcccaaagtgctgggattacaggtgtgagccaccgcgcccagcctattctttacttaaacttgttttcrctttgctgtatggactcaattctttcttgcacaagatccaagaatcctctcttggcgtctggatccagaccctttctggtatcagtggtaagctctgtttaagacaactgtcatacccaagagaattcttaaattgtggcag

SEQ ID NO: 866631 - DNA, 572 bp, Homo sapiens
tgacagcaaataggatgacttcgggaagctgaggcaggcagatcacttgagctcaggagtttaagaccagcctgggcaacatgatgagaccctgtctctacaaaaaatacaaaaattagcaggacattggctgggcgcggtggctcacccctctaatcccagcactttgggaggccgaggcgggtggatcacctgaggttgggagtttgcgaccagcctggccaacatagagaaamcctgtgtctactaaaaatacaaaattagctgggcttggtggtgcacgcctgtaatcccagctactcaggaggctgaggcaggagaatcgcttgaacctgggaggcagaggttgtagtgagccgagatcacaccattgtactccagcctgggcaacaagagcgaaactccgtctcaaaaacaaaacaaaacaacaacaacaaaaattagctaggcatggtggttcacgcctgtaatcccagctactcaggaggcttgggtaggaggatcacttgagcctgggaagcagaggttgcagtgagccaagatcacaccactgcactccagcctgggtgata

SEQ ID NO: 866632 - DNA, 659 bp, Homo sapiens
gtattacttttctccattttgtcttgccactcttaatgcacaagtcagaggccctaagataacttctgatggcctgggatgcctggggaaaaacagagaaggtgccacagactccattttgggaaaaaaatatttgttttcctcatggaaccccaggaattaaaagcaaataggtccctctcaaaatttgtttttgtcttccaggtatgcctgctttttggcctgggaaactacatgtttccctagccctgcttcttggagagctataccctgagtccagtaatttcaattaggagataggcaaatgaaaattcttacaactattggatcttcttctgtctgtgtaatcatatatgtgttagatgtgtgatggttatatagaaatagagctctaattaattggcttaaagaaaaataagyacttagatcaaatattttttgaaggaaaaataaaagctataatgccttttagttcatgtgactttaatctttgagaaataaaagtcttaaagattattggtaaaatacaaatgtcttcaaaatgtaaatatgtggtctaaagtatgcaggtcagatactaggtttgctaaatgttttaaggttataagctgcttctttagcctttgagaactgctcaacttgcctgctttacaatttgg

SEQ ID NO: 866633 - DNA, 693 bp, Homo sapiens
ttttatttatgacaattgtctaatgcaaaccgtatacccatagcctttaccagagtcgggataggggcagagaagtgaatttttatggggactgggaaattgtatataaatattgttagaggtcaagtcattgttaaagttaaggatttctattctgtacttggcctcttccaggttatcttccccagtttcttgctttgtatttcctcagctacatcatgcaaaaaagttcagaactaacactggaaatcatttaacaagctctaaacctgacagataacaagggtgttctccacaatttacacgakaattaaattggatataaatacctcctgttcttaccggtgggtgttgtgattccatttattaaggtgtgaagcagacaggaaagagataaatctttcataagtacattgtaaataggcaagtggtatataaaccatattcataggtaatagagtcaaacaatgaaaggtaaatagttgtcacaaaatagactttatcacaaaaaatggtcacaaaactagagttacatggaggggggtaaaataattgttttgctactgtttttgaaataatctggcagtatggaacaacaaaaaatgagtgacatgttttgattaagaattcttgacactgcttcagccaacccagcagcagagagtccccaaaagattttgaatgctgatacct

SEQ ID NO: 866634 - DNA, 553 bp, Homo sapiens
tccatctgttactcaggtttattgagactcatggctcacaagcctggctgcctcccctggctgcgtgcctcatcaagcccagcaggagccagggagaccagcgaggaggtaatggccttaaaaataaatcatgagagtgttgtgaggggccttcaatagatcttgatagtggggctttagaggaaggaacagttgccataagtatgtaagaagttatttattaaaaaatttaaggccaggcacagtggctcatggctgttatcctagcactttgggaggctgaggtgggtggatcacttgagctcaggagtttgagaccagcctgggtaacatggtgaaaccccatctctacaaaacatacacaaattagctggacgtggtggtgtgtgcctrtaattccagctacttggcaggttgaggcaggaggattgcttgagcccaggaggttgagactgctgtgagcccagattgcgccactgcactccagcctgggtgacaaaatgagaccctgtctcaaacaaacaaacaaatgtacatcactattaggatccta

SEQ ID NO: 866635 - DNA, 637 bp, Homo sapiens
tcctatgtttattgatctgtaatcaacaagcttgctattcatattcagttctaagaaagtcccatagtctctccccaaattagattgccctccaaagaccttcctataaagaaatgagggtaccccagctgaaacccagttctaacygacttaaacaaaaaaaggaaatatatggttcatgtatccacataagtccaggggttagatatggctggatccagacactcaagtgttctcatccagaccttgtaattgctcatctcttttttctgctttctccggtgctgtgctggattcagagcttggctctacatgaggctttcagcacccttgggcctaaatcttcatccctgtttgcagtctcaggagaaagcaaggttctcttttccacttccatcaaagacctcagaattgagtctcattgtttggttggatcatgtgtccatctctggtacaggaagatcatgagttggatcctgtgtccatttctggcatatgaagaaggttttgggtacccccaagtcatagggactgagagtggagaggagtgatcctcaccaggggtgcaataatcagaacaaggggacttggatgctaatcaagatggaagtcatgagttgtatgctggaaacagtgg

SEQ ID NO: 866636 - DNA, 614 bp, Homo sapiens
tgcaggacacaggcagggccttgaactgggttgtcatgcaggttggaatgttggtatcaaagaacaagagtcattagcagtttgctaatgtggttaagaatattgtcagcatcatttacagatgatgggaacaatagtcactggggactccaaaaggagggagggagagaggaggggcaagggttaaaaactacctatcaggtactrtgcttactacttaggtgacaggatcattcataccccaaatctcagcatcatgcaagatacccatgcaacaaacctgcatatgcattccccgcatctaaaataaaaaattaaaattaagaaagaatattgtcagcttcatttcagagttattcccaattgaataccataagggaggggtaggttaatcatgaaggtgcatctaaatggtgccttctgcctcttagaagtctgggataagtagtttgtgggttattagacatcctgcttatccgttgaagttgtagaaggtcttacctgttttcctaaaatcactgcccctagacatcaccttgcctaatgactcttcaacaggcatttctgcccctgaccagcgctaatgagatgtcagatgagactcatttagaatg

SEQ ID NO: 866637 - DNA, 533 bp, Homo sapiens
gccagttaccatttttatgtcttgggatttccagcagccttcaagtacatgctggcatttcagattcacttggtgcaattaaagaaattgcatgactgctagtttctcctcttttttttctcccctcaagataaattgtagaattcaacttgattaaaacatttattaagtgagatttaatagattccagtaatgctctgtgtgtgtgtgtgtgtgtgtgtgtgtgtgtgtgtgccctcattatccatttcttccacatgtgccaagaatggccatgtgcatagagaattgttcatggaacttgctttattctgcaatttaccagcaatgtcaaattacggggtttaatggattcctgcacaaaaattcctagtgtggttgtattagcagcamgtttcattaaaaagggctatttttctctaccgggatttcagtaaagagacaatgtttattttttcagtggaaaattgattgtaactaagaggatacttggcttgaaagtggggaattatcatatcatatgattaaatgaa

SEQ ID NO: 866638 - DNA, 583 bp, Homo sapiens
aaatcactaacgaaaagcacaaaaatgcaaaaaaaaaaaaaaaaaccaaactgtggtactaaatagagtgcaaaaagcacatttgtttacaatatgagagctgaaataagaaggtagagcattgtcttgttcaaacctcagctgggcatatgtgcgtgggccaggttaaattttttgctgttctgcccatgtctgcaagtaacctcaagagtgcccacttggggattacaaataaagtttagtgagttggtggatttgtaaatatggaatccatgagactcaactataatttgaaaaccagtattgaaagataaactcgggttggaggtggggtggagaattgcaacaggttttctgggcttctccagcacratcaggttgtatcactcagctaggcgtccaaatcctattgataaaggcctttttgttggagagggaagaagaggaagagaggaggtgtggccttcagagaagtaaggagaaactgaaggagttgtgtgagggcttaggaatccaggaagtgggggcataagagtaatggaggaagtctctggaatcaggacagctgagtacaaaaagcttg

SEQ ID NO: 866639 - DNA, 629 bp, Homo sapiens
atttccttccataaaggtaaataagcatctcaagagcaagtttctacattttgtatttccctgttttatttctgtaaaattgtgcaaccaagaattatgacctactgatattagaataaaatttgcagaagtttgactacatgagccagatgggtacttacaccagtgattactgagcgttcaccrgttaaccagggccttgcttgctgcttcttaagagacaggaacatttgtgttaaaataatgtattgctaggtgtgattccaagatatcctaatttgtatcatcagaggtgtgacttaggagtttttatttgaaagatgcccttcatgtgattctgaagtgttctgtacttgcttgttttggtgaaaattgtttaattcatgttgtagtatgttcttgcattgctgtgaagaaatacctgaggctgggtaatttatataaaaaaagaggtttaattgactcacacttctgcaggctgtacaggaactgtaacagcttctgcttctggggaggcctcaggaagcttccaatcatggcagaagacaaagggggaatgaagtgtcccacctaaggggagcaagagagaagcaggaggtgctacacacttctaaacaaccagatcttga

SEQ ID NO: 866640 - DNA, 645 bp, Homo sapiens
caagaacatcagtacccctgatgaatgctctctgaatttttggacctaactactttcctttagacaacacttacaacaaatccacgtgggcagagtaattattaaataaagtggagggggccacagagccaaatgaagatacagagccctgtattgagcctcctttcctggaggctcaractgggaagaaaacctctttattcattttaaaaacaaagccttcactccattattattattataatgttcattatgggaaatttggaaaaatatataaaagttgaaggcataaataattcttaatattttgctttatttcctttcaactttttttttcttcctatgcttggttttttactttgcatagttgtgatcatatagaatggataaacttgcagactgcctataaattggcattctttcattgtgtatgtgttactgccatggacatctttgtgcataaaactcctctttatttagggttaaaaaaataaattctcggaagtgaaataattagttttaaactataagtaatttaaagcttttgatatatactgaaaattgctttcgcaagagattatttcaattacattctcactgacaatgtatgaaattgccctcaaaagttaatcttaaaaatcatga

SEQ ID NO: 866641 - DNA, 652 bp, Homo sapiens
aattacattctcactgacaatgtatgaaattgccctcaaaagttaatcttaaaaatcatgagctgggtaatatgattttaagatagtcaatggtgagatcaagttatgtatttcttggaatagatgagatatataaaaagagaacatagtaattttttaataagctcttgctaatttaacttkcaatattgttccttattgaattcagtgttcacagttcacatttgttacagaaagtttaaatatctgttttataatgttgaaaatacactcttctgcgtttatagtataaaatccttactgtattttaaatttagtttttttgtggctgtggcatttcatacatatatacagtggtattaatgtttgtgatatctctggttttgtgtggctattttattcttgtgtggagaactgtggatgagagttttatctctatttctttttctttcctttattcctttttttttaaaaaaaatttggaaactgccaagcaaacaaccatccctcaatgaatgagataaattaatttgccttttcctgttacaagttgaaacacaaaaatgttatagcaaagaaaaagtatccggttccaattttatggttaaatctctttgtctgaaggaccagaaaaagctcttccttgaagtca

SEQ ID NO: 866642 - DNA, 652 bp, Homo sapiens
aattacattctcactgacaatgtatgaaattgccctcaaaagttaatcttaaaaatcatgagctgggtaatatgattttaagatagtcaatggtgagatcaagttatgtatttcttggaatagatgagatatataaaaagagaacatagtaattttttaataagctcttgctaatttaactttcaatattgttccttattgaattcagtgttcacagttcacatttgttacagaaagtttaaatatctgttttataatgttgaaaatacactcttctgcgtttatagtataaaatccttactgtattttaaatttagtttttttgtggctgtggcatttcatacatatatacagtggtattaatgtttgtgatatctctggttttgtgtggctattttattcttgtktggagaactgtggatgagagttttatctctatttctttttctttcctttattcctttttttttaaaaaaaatttggaaactgccaagcaaacaaccatccctcaatgaatgagataaattaatttgccttttcctgttacaagttgaaacacaaaaatgttatagcaaagaaaaagtatccggttccaattttatggttaaatctctttgtctgaaggaccagaaaaagctcttccttgaagtca

SEQ ID NO: 866643 - DNA, 613 bp, Homo sapiens
tcacatcagcattataaaaatcaatctagcaatatgtattaagaacttaaaaagagttcacatccttttttactcaataatttttcttttatggggctactgtaaattattcaaaaatctctacaaataggtatatccaaagatgttcattgcattgttatttataatagcaaactattgcaaagaacctaaatatccaacaataggaaattggttgagtacactatggtatagataccttgctacctggagtgtggttcaaagaccagccrcattgccccatccgagacataatgaataagaacctgcattttaacaagtctccctggtgattgctgtgcacattgaagtttgagaagacttgttcaggtataggagaaagcagttcccacctgatattcattataggggattttttctttttttttttttaaacagaaaacattctcagctggggcacacagactctctgatggtagaggcagattatctgtagttttaggaagctcacaggcaattctgatttacagccaaacatgagaacaacagatatataatgtgatgctactgttaaatctgctaacctctctttctactgccttccacagcacaa

SEQ ID NO: 866644 - DNA, 613 bp, Homo sapiens
tcacatcagcattataaaaatcaatctagcaatatgtattaagaacttaaaaagagttcacatccttttttactcaataatttttcttttatggggctactgtaaattattcaaaaatctctacaaataggtatatccaaagatgttcattgcattgttatttataatagcaaactattgcaaagaacctaaatatccaacaataggaaattggttgagtacactatggtatagataccttgctacctggagtgtggttcaaagaccagccgcattgccccatccgagacataatgaataagaacctgcattttaacaagtctccctggtgattgctgtgcacawtgaagtttgagaagacttgttcaggtataggagaaagcagttcccacctgatattcattataggggattttttctttttttttttttaaacagaaaacattctcagctggggcacacagactctctgatggtagaggcagattatctgtagttttaggaagctcacaggcaattctgatttacagccaaacatgagaacaacagatatataatgtgatgctactgttaaatctgctaacctctctttctactgccttccacagcacaa

SEQ ID NO: 866645 - DNA, 613 bp, Homo sapiens
tcacatcagcattataaaaatcaatctagcaatatgtattaagaacttaaaaagagttcacatccttttttactcaataatttttcttttatggggctactgtaaattattcaaaaatctctacaaataggtatatccaaagatgttcattgcattgttatttataatagcaaactattgcaaagaacctaaatatccaacaataggaaattggttgagtacactatggtatagataccttgctacctggagtgtggttcaaagaccagccgcattgccccatccgagacataatgaataagaacctgcattttaacaagtctccctggtgattgctgtgcacattgaagtttgagaagacttgttcaggtataggagaaagcagttcccacctgatattcattataggggattttttctttttttttttttaaacagaaaacattctcagcyggggcacacagactctctgatggtagaggcagattatctgtagttttaggaagctcacaggcaattctgatttacagccaaacatgagaacaacagatatataatgtgatgctactgttaaatctgctaacctctctttctactgccttccacagcacaa

SEQ ID NO: 866646 - DNA, 486 bp, Homo sapiens
cccttgtgcaggcactgtcactccctggcacacctctctactccagtgacttcttgctgcaaatacctgtaactctgcctactggctttcctctgccagtgagggcatacttgactgccccagtgcaagctgaaagtgctagagtcttaacgctttcaggagaagccctcagatgatgagagatggggatttggtgaatagatcatatcttatttgcctctaagatagggtaatactaaagcatgttctatactccctcctagagytccccaggagggctgagcttcagctgcacagtagtaacccatttgactcattatcctttattggcttccttcacttttctgttttacttctcaactcccatgctgatgtttcctgggatcacctcccaaataaactacttacagtttaattcttgcctagaggtctatttctggaggaattcaaacaaaggcagatcttttgtgttttggggggttcaga

SEQ ID NO: 866647 - DNA, 621 bp, Homo sapiens
taaactgacttaagcaaaaggaagattggttggtgagattctggggtagctccataaaatcaaagaaagagtttgtcacccaacccttgagcaggacagggagggcagcactgaagattttaggggaaatgcgaacttgtgcatcctctgggtgctctctgccccaccttcattctgttcttcctggggtgttcctcattctatgtggacatggtaccatgaccacaaacttagcttaaaaactcacagggaagagctcatgggccatctctggaccccatcactgtgtccgggaaactaggaaagtgtaaaaggacgatagtcctcatttagaycctatgaataggattgagggagaatagcagtttcccccaatagaaggggcaagaaggaaaagacagaacttggctcagatatgaccagtaggggaaatcactgtggtcggccgcctgaattggaatacagggtacagtgagcaccatgaacggacttttgaggaaaagaggggcaagagatttccaaaaggattcccacactagatctcactgtgccagactaccattccaagaggcacaggaagcctgatgttagccaaaccacatccttctcctactcaactcc

SEQ ID NO: 866648 - DNA, 662 bp, Homo sapiens
atctatcatccttcctgatggctggcagaatattctttctctagcgccaatgtttctatggaatattcagagagcagaagcatttatcacaatgacatatcctaacttccagaaattgagacatctagaaatagccatcygggtaatatcacttatatcccctgtcactttctgaaatgatccagtgagagagaaagataaagttctgtgactctgagcagagcaggtaaagcatggggcccctgacaagtctccctgctccccattgtacactggagcattttgatagcactctatcttttctctctgaatggcttgggcctctctaaatagcttatagtaccagcaaaagattggccccaattccaatatcctcaaattttccacttgtttatttgaatcaatgtattcttttctttgtcctgtgatctaaaggagagaattaaacaaggcagtattttataaaattgtattagaaggaaaaatatatcatctatcttctgtgtccctcatatcccttatgatatctttttacaggtttatgttttttcatggcctagtcttttccatttcacatttttatcaaagcacaaaggagccacttttatcagttgccttcaaaataagacatagtttggaaacactcaaatgaaacacttcaa

SEQ ID NO: 866649 - DNA, 633 bp, Homo sapiens
ataaacttgaaaggctgtctaaaccacaaggactgcaactcctgggcatgtcctagtgctgtgctgggctcacagccagtggacttgtggggcacatgacctagtgagacaccagtcagggtggctaagggagtgcttctgtcacccctctacaagcacaggcagcacagcttgcagctccaaaagagaccgcttccttctgcttgaggagaggagaaggaagagtaaacaggactttgttctgaaagttggataccagctcagccacagtagaacagggaatcsggcagagttgtgaggcccccattccaggccctagctttcagataacatttctagaaacacccttggccagaagggaacccactgcttcaaaggaaagactcaatcctggcaggattcatcacttgctgactaaagaagcccttgagccctgaataattagcagcagtaaccaagtaatacacactgtgggccttgggtgagactcagatgtgctggcttccaatgtgacccagcatattcacagcatattcagactgcagagagcctccttctgcttgagaaaggaaagggaaaaacagaggagactgtgtcttacagcctaggtaccagcttatccacagtagggga

SEQ ID NO: 866650 - DNA, 613 bp, Homo sapiens
acaatcaataacacatgaaaggatgctcaacatcattaatcaaggaaataygaatcaaaaccacaattagataccacttcatatccactatgaaggttataataaaaaggcaaacaatagcaactattggcaaggatgtggaggaagtggaaccctcatacactgctgatgggaatgtaaaatggtacagccactttggaaaacaactggcaggttctcaaaatgttacacatagatcatgtggctgccacatgttgacattccactcctaggtatttatctaagaaatatgaaaacatttgtatataagtgttcatatgtgtaatagcaatattcataacagccaaaagtgaaagcaacctgaatgttcatcatcaatgaatggattttttcaaatgcggtatatgcatacaatatattagtccccagtgaaaagaaatgaggtactgatgcatgctaaagatgaataaaccttgaaaacaacatattaaatgagtgaagatagtcacaaaagaccatctagcatcttatcccacttatatgaaatgtccataacagaaaaattgatagagacagaaagtagactagttgtttctttgagattgtgagggaa

SEQ ID NO: 866651 - DNA, 665 bp, Homo sapiens
gataaatcaagataggtaaaactatcattggtttaaaatcaggaatgtatctgaagcaattcagctggctttcccatgaagcatgcaaattgtttttgaaagcaatttcaaatgagttccaaaaatgattttgagtagagatagcatctttggaataattactgaacctcctactgtcattattttgaaaaagaaagttcatttggatatataaattctggaatattggttacatctgtctctttacttcccagtcacatctcatattggagacttagaacatatttgttatcaacgggtgggaaaacgtgtctgatatgcccatgaatattctgtgccaagaaaacagatttacaaagacattaactctccatggctcgattacccatgatgggttccctaatagctggagggcctgtacatctccttctctgactaggtccagaaattcattcttctataaaagtgaaaaaktccagcccagtgggtctaacagggaatattcctctttgcatgactgcacataaaaataggaagcttttgtatttcagatgcattccacgtctttggtctaagatatggcataatgggttactccattaattttaaaagttggaagtcatttttaatgtatatcaaaacattatgctatataccttaaatat

SEQ ID NO: 866652 - DNA, 637 bp, Homo sapiens
ccatccatttactggactagaaatatgcctgatgtgtccaaaatgtttgcttcttttggtgtcactgggtaacactagaggttttcaagtcagctttgtaaagtcagctttgttcaattaagagcttaagcagaaatgggaacaaacaaaccagtcaaatgtagagtatgctccagttgaagctggagctgtgctagggataaatggggtggcagagcctgcctactcttccctatgcactcctaacagccccagggaggctccacagaccttccagggctcaaaggagcacagtttgaaaacaatctgagatttagatagaacayaacaagctaaaatgaggtcaaaatactaaagtggaaaaacatcaaagtaagtgaaatgtaaaagctaaattaattttactgcactagacaagccaaagggtccacaaggttgcaagattatttgtctacctttattgtttaaacagaattagtttattgattttcacttagcagaatatttagaatatttctgcctcccaggcaactaggtcctattttccccaaaaaaacagtacaccttcatcattgactcagaagatattagtcagaagatagattttcttaactgatgactccttcattgcaaaaac

SEQ ID NO: 866653 - DNA, 584 bp, Homo sapiens
tcagcaggctcagacttcctggaaagggagagcctgtaactggtgaattacctgtgaggttaggggaggaggtgagggagtaggaggaagctgaagatttgtagctgtccataaaaattaaactaacttaagtatcagttctatccctgcacaatactttacttgcattatgtcatctaatttttacccaaacatttaggggataataattaktatggccataaaaattaaactaacttaagtatcagttctatccctgcacaatactttacttgcattatgtcatccaatttttacccaaacatttaggggataataattattatggctcttatacagaagaggaaatcggacctcacaaagcttcacttgtccaagttcatctggtcagtagttagggagcaaccagttcattatcaagaaatcagtcactagataaaaacaaggctcccctgcctcaccctcaagaaagaaaaataactgcttgtgacctgtgaaatgcttaaaagccctgagacaacagacctttcaacagagtaaacagcaagcactgcttagatcttcagccctgacatggaatatgc

SEQ ID NO: 866654 - DNA, 616 bp, Homo sapiens
actagccaaaagaaaaggaaagcaggccgattttgaacactttatgtctgtgtgaccttgagaaaactatctaacttcactggggtttcttcatctatggtatatttcatcctcataaaacctcatgtggaattaaaatccccatgagcagatgagaaaaccgagagacagagagtttaacaattggccaaagctgcccaaattatcagaatccaaattctttatctttccacttctcagggcccctgcactgccctgcctcccaaatatctaaacacaaacaagtcaatcagtgctaggacccggccacaggcccctgaaaagtaaagaactgatgctgccatctcctgtgtccacagctacaataacacctggtrgccttacaaatatttagatgcaatttcaaagtcagctcatagaaagaggcataaaaaagaaaatgtattatggtcttaattcccctacatttatagttctcaactgagaatgccaagccctcagacgctcccccacgcccttaacaaaaaaaaatacttcttttcttccagttaagccaaaataaatatatgtacccatcatttattcaatcaaccacatttatggattactatggtgt

SEQ ID NO: 866655 - DNA, 578 bp, Homo sapiens
taataacgtacaagagaatcctcacacagaatatagtgctaatgtggtatctactgaggaatattactaacttagcaaatacacaattttacattctaaattctttttgttttttgaggaagcactccaaaaacatttggaatggattaatgaaaagacatcaatttaaaattagcctttagatcaggtgtggtaactcacgcctgtaatcccaacactttgggaggccgaggcaggaggatcatctgcggtcaggagttcgagaccagcctggccaacatggtgagaccccatctctactaaaatacaaaaaaaaaaaaaaaatagccaggcatggtggcaggcatctgtaatcccayctacttgggaggctgagacaggagaatcgcttgaacccgggaggcggaggttgcagtgaaccaagatcacaccactgcactccatcctgggtgacagaacaagattccatctcaaagataaaataaaataaaactagcctttagaacaataagacagtttgggaagaattccttctatatactatgttctgatatctaagcccaaagctaagtctataa

SEQ ID NO: 866656 - DNA, 699 bp, Homo sapiens
cagaatgaatccggtaaatcaggtatcctttgaaaaaacgttttcttcctctttgtattattctttatgtgtatcacaagcacagatgactttgatttatatgcagcttctctttcattattctcctctatgtagcttcactgaaaaaactaatgtgtgatacctcatgtctttgtcgtctctttgtcataacaatttattttggccagtctcagaactgaatttctgaaaagtatgctacattttaaaawaaagaatacctattgttgggtataaattacacttagataaaagttaactttttagcattttctatgttagcattctctttcgtcataattatttaaattccctctgtgaaatgtcatgcctccttttattgtaggcagtatgagaaatgtcatggcttcttttattacatgcaatatgagataacatgtggtccctttaaaatatgttcaagtgtgatatttttaaaattttcacattagttcatgaactcaggtgagaatatcctaacttcaggtgatctttacctgggctggtgtggcctgaggaaacacagtctactcagtaacgctatgctcacagttgtggctgggctgtatataccacccttcacaaggcattttcttcttaaataatgcctaataaataacattgcaactcccccaaataataagactgttcctagttttt

SEQ ID NO: 866657 - DNA, 699 bp, Homo sapiens
cagaatgaatccggtaaatcaggtatcctttgaaaaaacgttttcttcctctttgtattattctttatgtgtatcacaagcacagatgactttgatttatatgcagcttctctttcattattctcctctatgtagcttcactgaaaaaactaatgtgtgatacctcatgtctttgtcgtctctttgtcataacaatttattttggccagtctcagaactgaatttctgaaaagtatgctacattttaaaataaagaatacctattgttgggtataaattacacttagataaaagttaactttttagcattttctatgttagcattctctttcgtcataattatttaaattccctctgtgaaatgtcatgcctccttttattgtaggcagtatgagaaatgtcatggcttcttttattayatgcaatatgagataacatgtggtccctttaaaatatgttcaagtgtgatatttttaaaattttcacattagttcatgaactcaggtgagaatatcctaacttcaggtgatctttacctgggctggtgtggcctgaggaaacacagtctactcagtaacgctatgctcacagttgtggctgggctgtatataccacccttcacaaggcattttcttcttaaataatgcctaataaataacattgcaactcccccaaataataagactgttcctagttttt

SEQ ID NO: 866658 - DNA, 675 bp, Homo sapiens
cactgtggaatactatgcagccataaaaaatgatgagttcatgtcctttgtagggacatggatgaaattggaaatcatcattctcagtaaactatcgcaagaacaaaaaaccaaacaccgcatattctcactcataggtgggaattgaacaatgagaacacatggacacaggaaggggaacatcacactctggggactgttgtggggtggggggaggggggagggatagctttaggagatatacctaatgctaaatgacgagttaatgggtgcagcacaccagcatggcacatgtatacatatgtaactaacctgcacattgtgcacatgtaccctaaaacttaaagtataataataataaaataaataaataaataaaaaagaaactgaaaaaaaawatctatcaataggatggctgactaaataaattatgctatgtccatgcaatagaaaaaaaaaaaaaaaggaaaggtctctgaaccacagaggaggaggacagcttagtttaaatgcttattttccattagtcagagatgtagtaacctccagcaggaaatggagatcaaagtaagactgctctactggaaatcacagcatctttacaagcttcccagaggccaagatttcataatttactgcttttttgatatccacatttcaatggtatttacattt

SEQ ID NO: 866659 - DNA, 601 bp, Homo sapiens
ctctttgaacatgaaccattatggagtgtgtttgtgtatttgcaggttgactgtttttgtggggttaggttgcttggctgccagtagccttactgatatctctctgaaacattcaagtcatattatcaaataatcatattgctcttacaggttaaaayggaggcaatacagttccagacacagatcaatataattttacaaagtttgtgctggggtgcaaagggtgacagagattgccacatgaaatctgaacaggttgtgtttactattagtgtgtgtcatgttgctcttgtatatcactcagaagcaagtgtggccagcaggtaatccttcacattcccataaaacaagccagccaatggagaagttcaggcacctcataccccagaagcttgtgttagagttagctctgcccttgtaccagatgtgtctttttggtctgagatggcaccactgaaggcactgattcctgtcctggtgtcttcctttcaaacctgtaattggtcaggttataccctgatgaggtgctgtatctgacagcccttttctaccttcaatctgaccctatgccagaattctgcctcacatttctctgtaacaa

SEQ ID NO: 866660 - DNA, 615 bp, Homo sapiens
ccccctgacaacatggctgatcaccagccaaaacttcacctgttgcccttaatggacctcctcaatgcttattacctgcttacaacaacactatctcctggtatcacatgctccctgaacaggccaggcccagccctgactatctgactagaatgcctcttatagcttctgctgagtccaaccaaagtccctgccctccctgtgagtacctggtactcctgtcccacccctrttccttctgctgcccactgagctatttgttgccacaggcaacatcatgttccagtgcctgtaggacaaccttctgccacagcaagtatccatggcaaccagatggggctggcaaatagaagtaaagtccataggcaattccccaaagttagcttagccaatagatgatttattagagcagtaaacgtttggcaaaactgagtatacagggctccaaatcctctttgttgcaccatggtctgctgtgcaatgacatggcttaaagcaagagcctggaaaaagagagggaagccccaagcttgactggcctaaaatcaaaaatactgcccagagaatgaaacaaatgaaggtaggatgcaaatcaaggtatcagttctccttatt

SEQ ID NO: 866661 - DNA, 601 bp, Homo sapiens
ctctttgaacatgaaccattatggagtgtgtttgtgtatttgcaggttgactgtttttgtggggttaggttgcttggctgccagtagccttactgatatctctctgaaacattcaagtcatattatcaaataatcatattgctcttacaggttaaaacggaggcaatacagttccagacacagatcaatataattttacaaagtttgtgctggggtgcaaagggtgacagagattgccacatgaaatctgaacaggttgtgtttactattagtgtgtgycatgttgctcttgtatatcactcagaagcaagtgtggccagcaggtaatccttcacattcccataaaacaagccagccaatggagaagttcaggcacctcataccccagaagcttgtgttagagttagctctgcccttgtaccagatgtgtctttttggtctgagatggcaccactgaaggcactgattcctgtcctggtgtcttcctttcaaacctgtaattggtcaggttataccctgatgaggtgctgtatctgacagcccttttctaccttcaatctgaccctatgccagaattctgcctcacatttctctgtaacaa

SEQ ID NO: 866662 - DNA, 583 bp, Homo sapiens
gcaaaataaaaagcactcaaaaatatgtttctaggtccataaccttgttagccaatcctgaaattgccatattcctgggaataattttatatctatactcagaagttccagtaagaaaaaaattaatgagtttctaaatttacctaataggaatataaggaggggagacgccccaaatctatttcatrtgatgtaaaattccctcaaagctaccaatctgagtaaattgattaactgtgaaatccttctttcttgagccaaatttaaacaggatacttatagagggtgaggaaacatcatgaggctagcccataggatcttcatgctctgactcagtcttttctcctaattagcaaaaagggacctacaaaaataccaaaacaaaaggtcagatttactcagaagattcgtgatgaacttttgcctcctgattctcagaagtgagaaaggatttggcttttgcttatgggtaaaaataacagaacaagctctaacttatcacagatcaatctagttataaaggtcatgatgaagataaataataccaagagtatacagggatgtatatgtttacaaaatatta

SEQ ID NO: 866663 - DNA, 583 bp, Homo sapiens
gcaaaataaaaagcactcaaaaatatgtttctaggtccataaccttgttagccaatcctgaaattgccatattcctgggaataattttatatctatactcagaagttccagtaagaaaaaaattaatgagtttctaaatttacctaataggaatataaggaggggagacgccccaaatctatttcatgtgatgtaaaattccctcaaagctaccaatctgagtaaattgattaactgtgaaatccttctttcttgagccaaatttaaacaggatacttatagagggtgaggaaacatcatgaggctagcccataggatcttcatgctctgactcagtcttttctcctaattagcaaaaagggacctacaaaaataccaaaacaaaaggkcagatttactcagaagattcgtgatgaacttttgcctcctgattctcagaagtgagaaaggatttggcttttgcttatgggtaaaaataacagaacaagctctaacttatcacagatcaatctagttataaaggtcatgatgaagataaataataccaagagtatacagggatgtatatgtttacaaaatatta

SEQ ID NO: 866664 - DNA, 606 bp, Homo sapiens
aactataggcaactttgacacatctggcaaaggggcatctgaaggatagcttttcttcttttctctggcttgtccttcccctttcaatgccttttcatttttccctcttcctattccttgtctcaggcttgggaatgccaggagcatccatgagcaaagtctagcatcacaggtcatgaagtcacatagtggcaagtgctatggagaaaaataaaggaaggtaaggggcagaggtaacctggaggggtgggggctgttgttactgtgttattttacacaggcaagtccargtaggtctccttaaaagtgtgacattttgccagagacctgaattacataaagtcctgaatcatgcaagtacctgcaggcaaaaggcagaaggaaaagcacatgcaagggcctacttcgtgtgactaaagaagagaaatgcaaagatggcctggagaggaatgagtgaggtggagcatgctgggaggtgaggcagaaagaaggcagaggcctgatcacagagggcctgtcttttaagtcctacaagaaattctgcatttagactgtaagaaggtgaagtcaattggaagggctgtaaatagaagagtgacataatga

SEQ ID NO: 866665 - DNA, 642 bp, Homo sapiens
actttcatactttcatagccctttgtctccaatcactcaattatttatttaaccctgatacaatcctcaggagtcaagctagcattgtcctcattttcaaggcagaaaaatggagcagtgagtgtgtacgtggataagagtattgtgtgtgtgacaggagaggagaatacactgttccttttcacagaatcaatccacaatatggcactagaatacataccttttctgagtkaatcatttactgtgtctctctgatgataaatatatagatttactgaccaattagctgtgaagctatgaaaaaatagaggtttaaaaaaattatcacatctggccacaagccttagaaaccagaaatacatatagttctataaagaatttctctgtagataaacttttttcttctaaactttttctattctcatttttttaaagaacattgatgagtaaagagcaaattgacaataaattattataggattatattgttccatcattaattctcctgtgggttaagcttagtggtatgtttttttttcttgtctacgtttggttttttctctgaaattattaaacttattttgctttgaaactgcagaaggcagaaagaatagaagctatctcacatttcaaaaagtcact

SEQ ID NO: 866666 - DNA, 645 bp, Homo sapiens
attaaacttattttgctttgaaactgcagaaggcagaaagaatagaagctatctcacatttcaaaaagtcacttggattaatagttcagttagacaacttcctcatccttcctcttatcctcaaatccagacaaattctattgtagaagataagtgtactctcctcctacaatcactttgacttataaacttgatttccttttaatgtcttttaaatatcttagataatagttattatacatggcatataattcagcatatgttttaatgttgccttttcttttacctttgctctcatgatgggcagacatcagtggctaattgtgtaggatcagttgagttatgtacartataccacagaagtagcaaggctgttcccaaggaagtgaaatgacaccggatgacaaaaaccttccaaacaatccaaagagggaatttctttttcaaatgttacatcaaaaattgattaattggattagcagataaaaagtactcttaaaggaaatctcatttcaatttcataaagagggtcacctctattttcactattctatatccctatcacctctatttttatgatcctatatctctgtcacctctattttcattaggaagagcagaatcacagggagagacatgttatag

SEQ ID NO: 866667 - DNA, 626 bp, Homo sapiens
aacatttttaaattgtttccaaatatataaaattgcttaagaatcagatttgggtttgtttgcattttttcctcaaattctggggatcaaagacaaaaggagacagaaaacatactcctagagaacttttaaaggtaaacaaggggggcaagcttttggctttctgaaagtatcttatacactaaaaaataaaaataatactgtatggtgcctttcaatttatttttgaaagtgcaggcaaacaaaaagatcaacataaaactaatcaaaatccaatccagtaatgggtctctattgagactaagatatgaattttctaatgtccagaaattgaaaggaaggaaagcaaaggaaaagggaaagaaacaatcctggaattttttacagaaattctggcattaagaaccatggagatggccccctytgtaagatagggtgcttttcactttttgttcctcaggaaaggtcctcaaaggaaatcttggtgtactcctgacttcactattcattagaaaatagttcgagcaagtaacttaatttctgggtcttaatttcttcaaatatagaattagagtgttcgggttcttacccaggggttcatatctgaattgcctgaggtctgatgg

SEQ ID NO: 866668 - DNA, 647 bp, Homo sapiens
cattgcagcactattcacgatagcaaagacatggaatcaacctaaatggccatcgatgacagattaactacataaaatgtggtacatatacaccacagaatactacgcagccataaaaagagcaaggtcatgtcttttgcaggaatatagatgaagctagaagccattatccttagcaaactaatgcaggaccagaaaaaaaaatactgcatgttctcacttataagtgggagctaaatgatgagaactcataarcacaaagaagtgaacgacaaacaccgggacctacttgagagtggatagtgggcggagggagaagaacagaaaaaataactatcgggtactttgcttagtacctgggtgatgaaataatccatacaacaaacatccatgacaaagggtttaccaatataacaaatcttcccacatacacttgaacttaaaacaaaagttaaaaaatgataagagtaaataaattggggaaattaaaaatatatatataacatctatttaaattttctaaatgtgacaccccaacttttgtgaaataaaaaaaaggcaaaacttcagttatcatatgcatatttggtttattactaaactacatttcttttacttattaaaaatgagaataacatttgatgttg

SEQ ID NO: 866669 - DNA, 647 bp, Homo sapiens
cattgcagcactattcacgatagcaaagacatggaatcaacctaaatggccatcgatgacagattaactacataaaatgtggtacatatacaccacagaatactacgcagccataaaaagagcaaggtcatgtcttttgcaggaatatagatgaagctagaagccattatccttagcaaactaatgcaggaccagaaaaaaaaatactgcatgttctcacttataagtgggagctaaatgatgagaactcataagcacaaagaagtgaacgacaaacaccgggacctacttgagagtggatagtgggmggagggagaagaacagaaaaaataactatcgggtactttgcttagtacctgggtgatgaaataatccatacaacaaacatccatgacaaagggtttaccaatataacaaatcttcccacatacacttgaacttaaaacaaaagttaaaaaatgataagagtaaataaattggggaaattaaaaatatatatataacatctatttaaattttctaaatgtgacaccccaacttttgtgaaataaaaaaaaggcaaaacttcagttatcatatgcatatttggtttattactaaactacatttcttttacttattaaaaatgagaataacatttgatgttg

SEQ ID NO: 866670 - DNA, 647 bp, Homo sapiens
cattgcagcactattcacgatagcaaagacatggaatcaacctaaatggccatcgatgacagattaactacataaaatgtggtacatatacaccacagaatactacgcagccataaaaagagcaaggtcatgtcttttgcaggaatatagatgaagctagaagccattatccttagcaaactaatgcaggaccagaaaaaaaaatactgcatgttctcacttataagtgggagctaaatgatgagaactcataagcacaaagaagtgaacgacaaacaccgggacctacttgagagtggatagtgggcggagggagaagaacagaaaaaataactatcgggtactttgcttagtacctgggtgatgaaataatccatacaacaaacatccatgacaaagggtttaccaatataacaaatcttcccacatacacttgaacttaaaacaaaagttaaaaaatgataaragtaaataaattggggaaattaaaaatatatatataacatctatttaaattttctaaatgtgacaccccaacttttgtgaaataaaaaaaaggcaaaacttcagttatcatatgcatatttggtttattactaaactacatttcttttacttattaaaaatgagaataacatttgatgttg

SEQ ID NO: 866671 - DNA, 621 bp, Homo sapiens
gcaacccggaaatgtcaaaagatgcagaaaacaaaactcccacgaaagcctgttctctgtaaccaaagaaccaagataggggcagcctaacaagacaaaaaattatagctaataactgctccactccagccaaacactacaaaaaaaaaaaaaaaactgcaagtcccctcacccatgccaccaaaggccgagtggaragcatggacttccaccctccaaagcacctcagccaccaaacaataacagaatgcacaatcttttcaagtactcacaaaacatataccaatataaaccatattctgggctatgaaacaacctcaacaaatttaggagagttgaaatcgtagagtgttctctcaccgtaattaaatcaaactagatatctatgataaaaagtaacaggaaaacctcaaaacacttgaaaaataaacaacatgctcataagtaatctatggatcaaagaggaaatctaaagggacattaaaaataaaaattaaattgactgaaaatgaaaatacaacataaactttgtgagatacagccaaagcagtactgagggggaaatttatagcactaaaatgcatgcattagctgtgagaaaaagcctatatcaatactcta

SEQ ID NO: 866672 - DNA, 621 bp, Homo sapiens
gcaacccggaaatgtcaaaagatgcagaaaacaaaactcccacgaaagcctgttctctgtaaccaaagaaccaagataggggcagcctaacaagacaaaaaattatagctaataactgctccactccagccaaacactacaaaaaaaaaaaaaaaactgcaagtcccctcacccatgccaccaaaggccgagtggagagcatggacttccaccctccaaagcacctcagccaccaaacaataacagaatgcacaatcttttcaagtactcacaaaacatataccaatataaaccatattctgggctatgaaacaacctcaacaaatttaggagagttgaaatcgtaragtgttctctcaccgtaattaaatcaaactagatatctatgataaaaagtaacaggaaaacctcaaaacacttgaaaaataaacaacatgctcataagtaatctatggatcaaagaggaaatctaaagggacattaaaaataaaaattaaattgactgaaaatgaaaatacaacataaactttgtgagatacagccaaagcagtactgagggggaaatttatagcactaaaatgcatgcattagctgtgagaaaaagcctatatcaatactcta

SEQ ID NO: 866673 - DNA, 616 bp, Homo sapiens
gtttatttttcataattgcgtcaaaaaattaaaatagacaagaagctgatgaaagtgcttacctgtaggaggcagtgtggataagtggggtgcatgtggacagggacaggatgcaaagaatacttcttttatatacctgctatgtggtttggattgtttgaccatttgatagaattacccattcaaaacaaaccaaaaaatgtaatttaaaaaggagtgacagtacaactactttggaaaaagrtaaaactttagagctaaatgtacaattaccctttgacctagcaatccactcctgggtattttatccaagagaaataaaaacatatatccacaaaatgacttgtaaaaaagtgttcagataagctttatttacaatacttaaaaactaactgaagtatccatcaacaagagaaagaaaacaatttgtgatacggaattcatacagcaacaaaaattaagcaacagctgactcaggcagcaatgtggaaaaattttgcagacattatgctgcataaaagaagatggacatgaacaactatatactgtatgaatccatttatagaagttcaaaaacaggcaaaattgaagttaaaaatctcagaactgtggttgt

SEQ ID NO: 866674 - DNA, 626 bp, Homo sapiens
attacctgcacatcaagtgcaaattctttagcatggcttttgaggcctctcatgacctctgaagcctcatctctgacttgcccttgctttctcccttctcccagcccccctccctcctccctgtctgtcctccatgctccagccacattccaatgcttctcactttccacactgctgcattctaccagcttctcaccacaccgttccctctccatgaaatacttctccaccactcttcctcccccagaagcactgaatcatccttcagatcccagcttaggcattatttcctcccaaagtcctcttaggacccctaagactgggttgtttgctcttcatatgctatcccatagcaccttgttcgtaactgtgttgtagcttttattgcttggcatcaaaatggcctgtttatttggaggagacactaagctctgtgagggaagaacagtatttgcctcactgtygtaccccccgccccaatgctttatactttacctagaatacagtttgcgcccaaatatttgttcaataaacaaacgaatatatacagagaaccatgtctcttatctaagtgagaacaactgaggcccaagtgtgctgtaaactttttttcaggaaagtgtcca

SEQ ID NO: 866675 - DNA, 656 bp, Homo sapiens
aaacattagccaggcgtggtggtgtatgcctgtaatcccagctaccgggaggctgaggctcaagaatcatttgaacaacacaggagacagaggttgcagtgagccgagagtcacgccactgcactccagcctgggtggcagagcaagactctgtctcaaaaataaaataaaataaaaataaatacaaggtttcttttttttcctcttttgtctatcaaattttgaattgctgggtttttttctttgttttttgagttaatgcctacctgtaaaacaatgcagtccaaaaataaactggaattttagtttgctgactwgttaaaaaaataaaataaaaaataaaggtactttatgcacctttttgaaaactttaagatcacagaaatttttacaactgaaggaactttggagataacccaatcttaaattttaattttacccatagttgggagaatttatgtaacttgctcaaggttgcacattcatttacaggagagctggaactggagcacagactactcattttcagtactctttctataatactagagattattttgttatgcttgatttatgtacattttcaaaattgtacatggttaggcctaaattataactgaaaaggttacaatttagttataaatcaaggagttata

SEQ ID NO: 866676 - DNA, 588 bp, Homo sapiens
gcttggcatggacaggcagcccaagcaggcagtcagagccactgggcttcagctcttagaccaccgttaggagcgggagccagttttccctgaggctcctggctgaggaccactgagggatgcctgaggagcagacagcatgaaggagggcagaaccgtcgtgggatcctggtgacactgttcgcatctgcatctggccatcccaagccacaaatcctggactttcccattgatgtaaaccaataaaatmtccttgcctgagctacaggaggttctgtttctttcaaatgcagacaaaatattttgacaaattacctctccaggcaattgcttctggtgttttttttttccactctaaattcaactttctaggctacctaagtcctgctgccccatagcagatctcctaacgtctccattatctgacctgttaccaggacatctgggtctccttctgtaggacttgttccccagcctgagacttgatgcctgtctccccatgttaagcccagtgcccgtcatagcaggtgcacaaaagtggtttaaacttgtgcctcctaaacctgcaccccccacctcaacatctaa

SEQ ID NO: 866677 - DNA, 588 bp, Homo sapiens
gcttggcatggacaggcagcccaagcaggcagtcagagccactgggcttcagctcttagaccaccgttaggagcgggagccagttttccctgaggctcctggctgaggaccactgagggatgcctgaggagcagacagcatgaaggagggcagaaccgtcgtgggatcctggtgacactgttcgcatctgcatctggccatcccaagccacaaatcctggactttcccattgatgtaaaccaataaaatctccttgcctgagctasaggaggttctgtttctttcaaatgcagacaaaatattttgacaaattacctctccaggcaattgcttctggtgttttttttttccactctaaattcaactttctaggctacctaagtcctgctgccccatagcagatctcctaacgtctccattatctgacctgttaccaggacatctgggtctccttctgtaggacttgttccccagcctgagacttgatgcctgtctccccatgttaagcccagtgcccgtcatagcaggtgcacaaaagtggtttaaacttgtgcctcctaaacctgcaccccccacctcaacatctaa

SEQ ID NO: 866678 - DNA, 588 bp, Homo sapiens
gcttggcatggacaggcagcccaagcaggcagtcagagccactgggcttcagctcttagaccaccgttaggagcgggagccagttttccctgaggctcctggctgaggaccactgagggatgcctgaggagcagacagcatgaaggagggcagaaccgtcgtgggatcctggtgacactgttcgcatctgcatctggccatcccaagccacaaatcctggactttcccattgatgtaaaccaataaaatctccttgcctgagctacaggaggttctgtttctttcaaatgcagacaaaatattttgacaaattacctctccaggcaattgcttctggtgttttttttttccactctaaattcaactttctargctacctaagtcctgctgccccatagcagatctcctaacgtctccattatctgacctgttaccaggacatctgggtctccttctgtaggacttgttccccagcctgagacttgatgcctgtctccccatgttaagcccagtgcccgtcatagcaggtgcacaaaagtggtttaaacttgtgcctcctaaacctgcaccccccacctcaacatctaa

SEQ ID NO: 866679 - DNA, 622 bp, Homo sapiens
atttgttaccacttggcctgcccttcaagagatgcttgaaaggaatcctacaggttgaaataaaaggacagtaggcagtaagttaaagctatattaaaaaaaataaaggtctcagtaaaagtaaatgtatgggcattttaaaaactagcatcattgtaatatacagtacattactgctraaatagatttttaacatttccaccacaaaaaatgacaaattgatgaagtgatgagtatgttaattagctcgattgagtctataatgtacacatggataaaaacatcgcattctatttcataaatatacactattatttgtccttttaaaatgaataaataaataaactagtattgtacaatggtgtataacttcgatttttgttttctatgtgatttaagagaataatgcatttttaaaagaacaattgttagctcaaaagccaatattattgtaacttcggtttgtaatttcacatttttttctacataatttaagggtctagtgcatagaaaaataagcttatgttttaggatgcacaatgtgcaaagatgtatttttgtgacattaatgactgaaaggggtggagatggagctgttaatagagcagtttttatatgtcat

SEQ ID NO: 866680 - DNA, 622 bp, Homo sapiens
atttgttaccacttggcctgcccttcaagagatgcttgaaaggaatcctacaggttgaaataaaaggacagtaggcagtaagttaaagctatattaaaaaaaataaaggtctcagtaaaagtaaatgtatgggcattttaaaaactagcatcattgtaatatacagtacattactgctaaaatagatttttaacatttccaccacaaaaaatgacaaattgatgaagtgatgagtatgttaattagctcgattgagtctataatgtacacatggataaaaacatcrcattctatttcataaatatacactattatttgtccttttaaaatgaataaataaataaactagtattgtacaatggtgtataacttcgatttttgttttctatgtgatttaagagaataatgcatttttaaaagaacaattgttagctcaaaagccaatattattgtaacttcggtttgtaatttcacatttttttctacataatttaagggtctagtgcatagaaaaataagcttatgttttaggatgcacaatgtgcaaagatgtatttttgtgacattaatgactgaaaggggtggagatggagctgttaatagagcagtttttatatgtcat

SEQ ID NO: 866681 - DNA, 645 bp, Homo sapiens
tcattgatccattcatattttctattactttataattcagtctcaatatgttctattgtttctctaatcactatttcatttatttctgctctgatctttgttatttcctttcttctgcttacttatgttgggcttagtttgttctttttctagtcccttgagataaagttaagttgtttatttgagatcttcactccttcttaatgttaagtaagtatttatcgataaaaatttccctcttaaactgcttttgctgcatcccataaattttggtatatttcatttccattttgtttatctcaattttttaaaaaaatttcttctttaacccattggttgtcactatgatctgaatatttgcatcccccttgaaaccctaaccaataccaatatggtattgggcggcgggtgggrggcctttggaatgcagagccctcatgattaggattagtgcccttataaaagagacgtcaccaagctagctagccccttcctccatgtgaagttacagtgaaaaaacattagtctatggagaaagcaggccctcaccagacattgaaactttcattgccttgatcttggacttaacctccagaactgtgagaaatatgtttattgttgataagctacctagtttatgctact

SEQ ID NO: 866682 - DNA, 645 bp, Homo sapiens
tcattgatccattcatattttctattactttataattcagtctcaatatgttctattgtttctctaatcactatttcatttatttctgctctgatctttgttatttcctttcttctgcttacttatgttgggcttagtttgttctttttctagtcccttgagataaagttaagttgtttatttgagatcttcactccttcttaatgttaagtaagtatttatcgataaaaatttccctcttaaactgcttttgctgcatcccataaattttggtatatttcatttccattttgtttatctcaattttttaaaaaaatttcttctttaacccattggttgtcactatgatctgaatatttgcatcccccttgaaaccctaaccaataccaatatggtattgggcggcgggtgggaggsctttggaatgcagagccctcatgattaggattagtgcccttataaaagagacgtcaccaagctagctagccccttcctccatgtgaagttacagtgaaaaaacattagtctatggagaaagcaggccctcaccagacattgaaactttcattgccttgatcttggacttaacctccagaactgtgagaaatatgtttattgttgataagctacctagtttatgctact

SEQ ID NO: 866683 - DNA, 548 bp, Homo sapiens
ccctggtgtgtgtatgtatatttggtttttttgcattggtctctcttactgttacatatttcacaactctctttttttttgcactcatatttcatcagtttacacaaaatttaaattctgtaatttattaaaaaatgtacaacttagtaacaaayacaacttacatgaacaggtttagttgagagcagaagaccatgggtatcagtcaataaatttgtagaatggatggagaccactggcttatttgatatgatgattaggaggttaagagagtttccaaagtatagaatttttggtcagaactctacagattttttttcaggttccaaaagatgaaactaagtggcaattcttggttttgggtaaagaactctgtgctttcttaaaatatattaaactttttttaatcgcttttaacagcccatcctatgaaactaagtcgattgcagacatttgccagaaacaagtagattgtattcttaggcattgttgctaggaaaaatttagagtggaaatgtaattttttcttttgctgccagtggaggtgc

SEQ ID NO: 866684 - DNA, 640 bp, Homo sapiens
gtctatgctgattgccactttgcctctgctttcctttatggtagctatacccgccttgcctttgacagttggcacttggcccctgccacttcaggatccaattattcccattgtatttaaattttgtagtcgagtgactacagctgccactgttagatatgacatacagtgaagggcaattacaggactcttcaaagatgcaagtgctgtcctcacgaatctatttcacaaggcattggtcaagggtatatcttctggaccctcccagctaggatgagcaggtctaagatgactaatccactccaccatcccaatctccctaagcttttggatcccttcctctacattaaaccaagggagatcaggcatttccagttcactcacagtgggccatcttttaagccatatttcagctaaccaagcaaataaactattagaatcttttttaactccctaacctgatygagctctatgttccttctaccattaccccatacccttaatgtccattcctggccaggcacggtggctcatgcctgtaatcccagcagtttgggaggctgaggtggacatttcaccttaagtcaggagtttgagaccagcctggccaacatggtgaaacactgtatttactaaaaat

SEQ ID NO: 866685 - DNA, 592 bp, Homo sapiens
atcttgcttgaaaattggaagctgatgcggggatcgtctccctggaaagggtccatggccctccattctgaacactgatgggaatgtgggagctcaggaactcaaaaaaaaagcagacattcttggggtcatatcagaatcaccttgaaaatgagagcaacaacgatgcagatgaactggctggagcatttgacgccctttaccacaggaggaagatcacattcctgcagaggaatacaccmcaaagccttgccatcaattcagattttctcccttctgtcttccctaaagagcttatctctgaagaggcctagggtggtaaaaagccctcagaggaattcagtcacaatcctgggactaagagcccgcctcctcactgaaaaaaaggaattagagctgggtgtggtggcttacacctgtaatcccaactactcaggaggctgaggcaggaggatcgcttgagcccaggagtttgaggccagcctgggtaacatagcaagaccctatctcaagaaaaaaaaaaaaaaacggggattgggagaactaggagggtggagagtaggaggtgaagtgaaaaaatgagagtcaacag

SEQ ID NO: 866686 - DNA, 704 bp, Homo sapiens
cagttctggaggcttggaagtccaagatcaaaatactagcagaatcaatgtcttatgagagcccatttcctggtttacagatgatgccttcctcacatgatggaaggggcaaaagttctctcttgggtctgttttataaggtcccactcatgaagactctgcccccatgacctaatcacctcccaaatkccccaccccctaatacatcatcaccttgggggttaggatttcaacatatgaattttgaggggccacaaacattcagacaatagcaaatactataagttgcacttttactaaaatgataatggaaagtagagaaatctgttcccatttgggcagggattggtttattctgtttcactcacatcagacctgcttatagttttgaagaatccctaatggttctcagaatgtgggtaggacctgctttgccattttcaaaaaggtctactttcatgcaaataggtaggaaactacatactgttttgactaatgtaacaaccaactggtctccatttccttataggattaaaagctattaaataaacaaaattcagcaagagtttcatgatctatgaggtggaggtaatattcttgtttgatggacttaaaactctataaacagactttacataatctttatccttagaaatcttataaaaaagtgttgtctaaattggatggttcagctgttctccctc

SEQ ID NO: 866687 - DNA, 621 bp, Homo sapiens
atacattatttccttttcttcacaaaattcgttaatggtgggatgtgacaggcattgtgacttccactttagaattaatgaaaccaaggctcagaaaggttaagtaacttacacaagactgcagggcttgtaagtgattttaactcagattagaatccaggtctgtgcccgctattccacagtgcttctccgttagcacgtctctcttcctaccccaggttgataccctctttcctccacaggctaccaagtgggtgtaacatcacagacagatgcccataacagggcatytggccatcacgtacaacttcatcactggcaggaagccaagaccccaatccacatgctgagtcctgacgcctggcttccacttgctgttgcactcactcctcaggagtgatgctcaccaacactctatatggaaagcatggctccaagttctgatgtcagcaaagccatgtgtgctcatacatcctcagcctctgatcatctgtcaaggcagatatgaccagcagccagaaaacactctgctctggtactcttctaggtctccagctaaaaaatccgatcacaatcagcagcttgttgtcttatttctcctgttcctggttcacctgaatg

SEQ ID NO: 866688 - DNA, 467 bp, Homo sapiens
ttctttaaccacatactgttgaggagaggtaatattccaaagccactatctcagtcatacaacccaacatttcacaacacttcacacaagtctaaatcaccaaatgactcctatgtgttgctacagatagaatccttgtccatgccccaaggtagcttcccaacagaagcagagctgtgtgtacgtctacttgagacgcttctcccagctggctggcctgctgtccacctcttgctctgtagccaggttcttgcaaagctccacatacagagagacacttactgagatgcctttgagraaaatggtaacagcagctccagttattcagcatctttgtattttacatctacttcctctagtcctcccaactctgcatggtaggcttcctacttctcattttacaaacaattaaaatgagcatcagaaaagtgcaacaacttgcccaaggccatgaagttagttagggg

SEQ ID NO: 866689 - DNA, 714 bp, Homo sapiens
ctcatcagcatgccaaggatggtgtgtcttgatttacttttgagtaaagactcaaaagttgtggtgctgcgacacccggaatgtaaggaaggtaactggtgactaatgggaattccatggacagatgggccatttagagtcactggcattgtggtccctctaaactgatgggcagccactcagaaaacccaggaaccacaaactcaccagactactgcagaccgctttttctctgaaagaactaagttcttgggaaaggagggaaagcagtcttaagagrgtgttcccagaggttctactactttccctgtatcacaagtcctcagcaggggcaggctattagtccctgcagcaggtgatagcagaattatctgtgtggttgccggactttggagggaccattgcttcaaccctaagagtgcccagagatccaaatcagggctgaatccactgcctgaagaacccatagttcctggacagaaatgaggggagaagggagatgctggtttgcatttcagcctggacagcaagcaaacctcagctaggtaagagagttattagagaaatctcagaagattctggttgctacagagacgtctcaaacagagtttccaatctttccaactcctaggccctcccacatcctccagaccctctgagatcaaaggcagaaactttcctctccctcttcctgcctcttctctccagggttgc

SEQ ID NO: 866690 - DNA, 714 bp, Homo sapiens
ctcatcagcatgccaaggatggtgtgtcttgatttacttttgagtaaagactcaaaagttgtggtgctgcgacacccggaatgtaaggaaggtaactggtgactaatgggaattccatggacagatgggccatttagagtcactggcattgtggtccctctaaactgatgggcagccactcagaaaacccaggaaccacaaactcaccagactactgcagaccgctttttctctgaaagaactaagttcttgggaaaggagggaaagcagtcttaagagagtgttcccagaggttctactactttccctgyatcacaagtcctcagcaggggcaggctattagtccctgcagcaggtgatagcagaattatctgtgtggttgccggactttggagggaccattgcttcaaccctaagagtgcccagagatccaaatcagggctgaatccactgcctgaagaacccatagttcctggacagaaatgaggggagaagggagatgctggtttgcatttcagcctggacagcaagcaaacctcagctaggtaagagagttattagagaaatctcagaagattctggttgctacagagacgtctcaaacagagtttccaatctttccaactcctaggccctcccacatcctccagaccctctgagatcaaaggcagaaactttcctctccctcttcctgcctcttctctccagggttgc

SEQ ID NO: 866691 - DNA, 654 bp, Homo sapiens
acatgttcagatcacagtttgtgacccctatataaaaaactgatcaatgatttattatctagtgtcaattccctttcttccattttttcatccctatatctttctctacaactattaggagctcaaaagataagaatttcaaagaaagagagcaagaagtcaagagagtacatctaggaggtacaacaccasaggcccagaacagagaaggacagagaaacttgtactgtcccagtggggcctgtagaaatggctttaccatctaatatgaaaacaaagtcttggccaaacaaaaatgaccttctcaataagaaatacagcaaggacccttgattgatactccaaagaattccttccgggtgaggtgatcaatgaggaaatcagacataacgatcctaaggtgtcactcaggaaaaatcttgacagaaccaaagaaaagcagccctgtgtcaaggagctgtccagcattcagccttcatctgaacttttggagaccactcagctcatttctgtcttcatttactcactgtcttacatgtcatccatctcttgttggactaagcacttcagtctgttccctgggaactgctctgagctctatacacttggtttagacaagacgagttacctacactccagtgacttcactgtctg

SEQ ID NO: 866692 - DNA, 481 bp, Homo sapiens
acctggagatcttctgacagagccctgtgagctgagcagctccagcaggtgagggccaagccagaagctgagaaggagaagcaaatggtcccatgcctcatggcacactcagatgccactgtgagaagtggtgtgtgtcataggtgtccaggtaacctgatgagccccgtacggcccggggaatggagaatgcattcttctcttagctaaacaacaacaataataatagaagcagatgggtgcactgctatccccgggctctctctttctttttgttcattggcttacatcaartcattttctctatagatttattcttagcacacaaaactgaaatttccacttgctctgctgtgctctctctgaaactttccattccataaacatcccacaactcagaatgagtccatcttatctgtcctgtatggccctgactcaaggcagaggcctcaaggcctttagggggcttcactatatccct

SEQ ID NO: 866693 - DNA, 614 bp, Homo sapiens
tttatttatttatattttattttaagttccaggatacatgtgcagaatgtgtaggcttgctacactggggaaaaaaaaaaaaaaaacactgctttttaaaaacaataatatcaacactgggcccaggaaaaccacctcaaaaacaccattttggcttttcttatgttctcctgaatccccatacacatcacacacacacacactcgcacagacacacacacaaatactcactttccaaattttggttgacatctgattgctgattactatgagtgtgatcttccagacaactgtgtcygcatcaagtacccctaggggtcattcccatttgattctgtgttaatatttttataatttttgtatttttataatattttcacaaaatttcataatttttccatgaggccaaatcagaagcttcttcaaagtaaagattaaatatacctttttttcttaaaatgtctgcaccttcaggctttcacaggatattaaatcagtgtgacagcacttttaggagcgtaggtaagctactagaagattagcacaatttaattctaagaacagctggtagttgataaatattaaacagtcagaagacaatttagggctagaag

SEQ ID NO: 866694 - DNA, 648 bp, Homo sapiens
taaaagtagattcttttccaattgcataacttttccctgaactgaccatcaagatcaagatcacaaagtggccatgattgctacttggaagttccagaagcacacaaaaaaacccttttcaagccctaatgcttcctcccacagacaaaaagccagctccagatacttccaactcttaacagcttcagaagcccccactacaatgactagttagcctctttcttgaacccaacagagcacaagagtggaatacaccaacgtgagagaaagtgctcttctcctagagcatctagaaagctgaackgtgtccttatccccctctctgctttgctgagtagttttcataacaaccactgaactggtttcccttctggaagaactgaaatgacaccagtaactacttgctgggttaccaagtcttccctttcattgaccagtgagacttctcctcgggcacagaaactgcagggccaaatgggtgaagttccatgaccccaaatagtactttcctcaataaaattagtcaccaatttgttcttggagaacaacagtgatgagagaccagggcattcacgtctgtatcagcctcttctgatacagatgtgctggttagatgtctggaaaaaatgacatggcaggcaagcaggc

SEQ ID NO: 866695 - DNA, 613 bp, Homo sapiens
tcttgctattttttaactccttcgttctcaccatcctctcagctcattatgtcaaactgttttatttttgagaatttacaatatttgctttgatataagcaatgagaatacaggaatggtaagaataaaaggcaaagaggttggaaggagatggaaggrgtatgcagacagtagatctgtgaaggcaaaagaagtggagcgatgcagatggaagacagcagaaataagagtaggcagaggaggaggagggtgggtgggtggaagcagcatgcagaaaccacagtgcagcctggcttcctgggaagcctgttgccctagcaacgtgatgctgaaaggttaaaggctgcttgctccctactactctggattacatgttgccaaggcaacagaaggcacccaagacacgtggtggcaggccatgaggacttgggggtatgccaggaatcctcagttcaagacaggctaccctggctggctgcaccattgtgctaccttccactctcaacccatacctcagaagctcaccccagatgcagcattccctgtgatactcttctcagtgccaccaccccactttgggaagggaggaaatgatattcagctgcaactaggt

SEQ ID NO: 866696 - DNA, 613 bp, Homo sapiens
tcttgctattttttaactccttcgttctcaccatcctctcagctcattatgtcaaactgttttatttttgagaatttacaatatttgctttgatataagcaatgagaatacaggaatggtaagaataaaaggcaaagaggttggaaggagatggaaggggtatgcagacagtagatctgtgaaggcaaaagaagtggagcgatgcagatggaagacagcagaaataagagtaggcagaggaggaggagggtgggtgggtggaagcagcatgcagaaaccacagtgcagcctggcttcctgggaagcctgttgccctagcaacgtgatgctgaaaggttaaaggctgcttgctccctactactctggattacatgttgccaaggcaacagaaggcayccaagacacgtggtggcaggccatgaggacttgggggtatgccaggaatcctcagttcaagacaggctaccctggctggctgcaccattgtgctaccttccactctcaacccatacctcagaagctcaccccagatgcagcattccctgtgatactcttctcagtgccaccaccccactttgggaagggaggaaatgatattcagctgcaactaggt

SEQ ID NO: 866697 - DNA, 613 bp, Homo sapiens
tcttgctattttttaactccttcgttctcaccatcctctcagctcattatgtcaaactgttttatttttgagaatttacaatatttgctttgatataagcaatgagaatacaggaatggtaagaataaaaggcaaagaggttggaaggagatggaaggggtatgcagacagtagatctgtgaaggcaaaagaagtggagcgatgcagatggaagacagcagaaataagagtaggcagaggaggaggagggtgggtgggtggaagcagcatgcagaaaccacagtgcagcctggcttcctgggaagcctgttgccctagcaacgtgatgctgaaaggttaaaggctgcttgctccctactactctggattacatgttgccaaggcaacagaaggcacccaagacacgtggtggcaggccatgaggacttgggggtatgccaggaatcctcagttcaagacaggctacmctggctggctgcaccattgtgctaccttccactctcaacccatacctcagaagctcaccccagatgcagcattccctgtgatactcttctcagtgccaccaccccactttgggaagggaggaaatgatattcagctgcaactaggt

SEQ ID NO: 866698 - DNA, 570 bp, Homo sapiens
aagtcacatgaactaaaaggcattatagtttttgtttttctgagaaaatatttgatataagctcttattatttttaaaccaattaattaaagctcttttatataaacattacacacaacacatgtaaatacacagacagacagaagaagatccagtagttgtaagattgttcatttgccagtttgttaattggattactggcagggtggagcctttggaggaacagggccaggaaagcatgcagtttctacagcctaacargcaggcacagctggaaggcaaaaacagatccccaaaaattaagggcctcatttttacaccaggtcctggatccccaaaagaaatgctatagaacaagacagtacaataattttaccatgcatttaattgctaggcaacccaaagtcaatcagcccattctgtgattaacccatcccccataggagtcttatgtctgggtggggggaaagggcatttccatactttttaggtggtcaagagcatgcttttctgttccaagaaaaagcaaagcgccatatattcccaaaccactgccattagttatttacc

SEQ ID NO: 866699 - DNA, 602 bp, Homo sapiens
tggaagtcctagctagtgtaatgaggcaaaaacgcatgcagattggaaaataagtgatgaactgtctatttacagacattattgccgatgtagaaaatcccaaggagtctataaagaattcataggacaaataaattaggttagcaagttcacagactaccaagtcaattaatataaaataataaaatgtatttctgtagactataaacaatagtctatggcacaattcaaatttgaattgttcactgtctgtctgtttgaacaattcaaatttgaaattaaaagcaatttaaaattgtatcaaaaattaaatatytaggcctgaatcaaacaaaatatgtgtggatctgtatgcatgaaagttaaaaaactgatgacataaagatctaaataaaaggagagatatactgtagccatggactggaagactcattgttagatgtcagtattcttcaccttgatatgtacattcaaagcaaacttaacagccttggaggatttttttttttttttttttttgccaggggtagggggtcagtattgtaaagctgattctaaaatgtgtaaggaaaggccaaagaactagaatagctaagacaatt

SEQ ID NO: 866700 - DNA, 706 bp, Homo sapiens
agagcccatggttctgcaatccagggctggctgtgccctgcatccctctctgggttgtgaggttgtgtgggctgtggatccatatcacatgccaaatactcttcctggtgagagggatgcagagatcagcagacacacgccaagacaccaataaactggcagccacctacaatccagagcatgtcagctggtgacaagggctgagaagaacacccagagtggctgcgtggccagggcggcatcctgaagaggagattgccaagcagtgctggaattgtatgagtaagtcagccagggacagtctgaagagtgtgagccaagtaaagggaacagcacacgcaaaggccctgtrgcaggaatgtggttggcttggtctggaggcagaggaagctgagtgacaagagtggagtgacaagggggaagagagaggcagaggctagaacaggtagggcctgtgagccatgggatgagcttctctaaaattcagccccctgaattttagattcagggggtccaaatgcaggtgcgttccatgggtgtattgcctgatgctgagatttgggcttctgttgaacccgtcacccaaatagggaacacagtacctgacaggtggtttttcaaccctgttccctccctccttccccactctagcagcccccagtgtctaatgttcttatctttatgtccatgagtacccagtgttagc

SEQ ID NO: 866701 - DNA, 610 bp, Homo sapiens
gaatccagcagcacatcaaaaagcttatccaccacgatcaagtcggcttcatccctgggatgcaaggctggttcaacataggcaaatcaataaaagtaatccgtcatagaaacacaaccaagtacaaaaaccacatgattatctcaacagatgcagaaaaggcctttgacaaaattcaacagcacttcatgctgaaaactctcaataacctaggtattgatgggctgtatctcaaaataacaagagccacttatgacaaacygacagccaatatcatactgaatgggcaataactggaagtattccctttgaaaacaggcataagacagggatgccctctctcatcactcctattcaacatagtgttggaagttctggccagggcaatcagacaggagaaagaaataaagggtattcaattaggaaaagaggaagccaaattgtccctgtttgcagatgacatgattgtatatttagaaaactccattgtctcagcccaaaatctccttaagctgataagcaacttcagcaaagtctcaggatacaaaatcaatgtgcaaaaattacaagcattctcatacaccaataacagacaaacagagagccaaat

SEQ ID NO: 866702 - DNA, 493 bp, Homo sapiens
gaaatgaccatttttgtcgtgtgtataaggtatttaaagccatgagattaaaggcaatcactgagagagagaccgttaataagagaggatacgtataaagacagcctggggacgttccaattttagcaatcaaggaaaggaggagaaaatggcaaagggatctggaaagcagacccagtaacgtagaagaaaagctacaagagtctggcttcctggaagccaaatgaacaaaatgtttatggaggaaaaacttttcaaatactgcaaatatttasgaaatatttcagattgcaaataggccaagtgagatgaaggctgataattgacaatttcctggccaatgtgtaggtcattagcagtttcagtgtagctataagaacataagaactggagataaaaaatagcagcaattcttttgtagagttttgctgatatatcagctatttggaaaggtgacctgctggttcaccagcttcaaaaaaactctttaatt

SEQ ID NO: 866703 - DNA, 586 bp, Homo sapiens
atggagaaagtagttcttcctggggtcaggggatggagaggggaatgtcccatccagatgctggcccttcatctgccaggttcctgtgccttccctacccccccgcccccaacaatggcttttcttgagcctaggccctaggggcagccagagcaggcctagaccacatgtgggtgtcactcggtttcttcctctttcctgtcacttatcccctctgccatgtcctcttcccccatctccagcaggtcagtcaagtcaaaggcagaagcccctttggatctgtgagcagggagggaatgaggaaaggggagaggacgataatggggtgacatgttcccctgtccttatccctgcccccacccacagcttgcgggctctgcttcttgttcaggctcckgctttaaaccatgtgagactctagggatgacagaggagggaaaaacctgccacctcaggatgactccaggatgtgtgtgtgcatgtgtgtgtgtgtttgtgcacatgtgtgtgtgcacatgcatggtggctggtggagcagggtgaggaatggagagaaggagaggaagatcctagaagccccgtgggc

SEQ ID NO: 866704 - DNA, 600 bp, Homo sapiens
aacctggtgaattaaaagaaagattttcttctcttggattaatccacacattacaaagaagtttcacagatagcctctttctagttttgatcttgtcatagttggtttgtcactatggactatggtgggcttgcaaatatcccttcaaagattctagaaaaagagtgtttttaaaccagtgaatcaaaaacaagtttaaccctttgagatgaatccacatatcactaagcagtttcacagagagcttctttgtagtttttatctgaggatattctgtttttcaccacaggcctctatgggttcccaaacctcccatcacagattctaccaaaagactgcttgcaatctgcttaataaaataaaaggwttaactctgtgagatgaatccacacatcataaaacagtttgacagacagcttctttctagattttatctgggaatattctgtttttcaccgtaggcctctatgtgtccccaaatgtcccttcacagattctacctaaagagtgtttcaaacatggtttatcaaaagaaaaattttactgtgtgaggtaaatccacacatcacaaagctgttttacagatagcttttttctagt

SEQ ID NO: 866705 - DNA, 650 bp, Homo sapiens
tgtgctcctttggaggaggagaggcactctgatttttagagtttccagtttttctgctgtttttccccgatctttgtagttttatctacttttggtctttgatgatggtgacttacagatcacctttggtgtggatgtcctttctgtttgttagttttccttctgacagtcaggaccctcakctgctggtctgttggagtttgctggaggtccactccaaaccctgtttgcctgggtataagcagcagaagctgcagaacagcagatattggtgaacagcaaatgttgctgtcttatagttcctctggaagttttgtctcagagtagtacctggctgtgtgaggtgtcagtcttcccttactttggggtgtctcccagttaggttacttgggggtcagggaccaacttgtggaggcagtctgcccgttctcagttctcaagctgcatgctgggagaacgactattctcttcaaagctgtcagacaggaatgtttaagtctgcagaggtttctgctgccttttgttcagctatgcattgccccgagaggtggagtctacagaggcaggcaagcctctttttgctgcagtcggctccacccagtttgagcttcctggccactttgtttacctactccagtttcggcaatggt

SEQ ID NO: 866706 - DNA, 650 bp, Homo sapiens
tgtgctcctttggaggaggagaggcactctgatttttagagtttccagtttttctgctgtttttccccgatctttgtagttttatctacttttggtctttgatgatggtgacttacagatcacctttggtgtggatgtcctttctgtttgttagttttccttctgacagtcaggaccctcagctgctggtctgttggagtttgctggaggtccactccaaaccctgtttgcctgggtataagcagcagaagctgcagaacagcagatattggtgaacagcaaatgttgctgtcttatagttcctctggaagttttgtctcagagtagtacctggctgtgtgaggtgtcagtcttcccttactttggggtgtctcccagttaggttacttgggggtcagggaccaacttgtggaggcagtctgcccgttctcagttctcaagctgcatgctgggagaacgactaytctcttcaaagctgtcagacaggaatgtttaagtctgcagaggtttctgctgccttttgttcagctatgcattgccccgagaggtggagtctacagaggcaggcaagcctctttttgctgcagtcggctccacccagtttgagcttcctggccactttgtttacctactccagtttcggcaatggt

SEQ ID NO: 866707 - DNA, 741 bp, Homo sapiens
aatattgccttaaatattttaatgaaggagaatattaacctgattaaacaagatcaacaggctcaaaatggaaacatttgcctgtttaatcaacagtgttttagacactgttaaggattttgcatacagtggggccttgttatgctggttgttggttagagtgattcccccattatccatgggaaagacattccagggcctccaatggatacctgaatccatagatagtgccaagccctatatacactgtgttttttcctatatgtacatacctatgataagatttaatttataaattaggcacagtmagagattaacaacaataactaataataaaatgcaggttgaatatcccttatctgaaatgcttgggaccagaaatgttttgcatttctgatttttttcagattttggaatatttgcatgtatataaaatgagatatcttaaggttggaccccagtctaaatacaaaattcatttattttcatatacaccatatacacataccctgaaggtaactttgtataatatttgtgataattttgcgcatataacaaagtttgtgtgcattaaagcatcagaaaacaaaggtgtcactatctcagccacccatggggacaatctgtggttgtttggaatcactgtcatttttctttttctttttctttttccttttctttctttctttctttttttttttttttttttttgagacagtatctccctctgtcacccaggct

SEQ ID NO: 866708 - DNA, 602 bp, Homo sapiens
caacataggccttgaggaactcccaaatatccctttgcagattgcacaaaaaacagtgtttccaaaatgctaaataaaaagaaaggtttaactctgtgagatgaaagtacacgtcacaaatctgtttctcagaacacttctttgtagtatttatctgaagatatttcctttttcaccataggcctcaatgtgctcccaaatatccctttgcatattctagaaaaacagagtttccaaactacttaatcaaaggaaaagattaactctgtgacgtraaagcacacaccatgaagctgtttcttagaaatctttctagtttttattgacgatatttcctttttcaccataggcctcaatgtgttcccaaatatccctttgcaggttctacaaaaacagtgcttccaaactgctcaatcagaagaaaggtttaactctgagagatgaatgcacacatcacaaagcagtttctcagaaagcttctttctagtttttatgtgaagatatttcctttttcaatgtagggctcaatgcttcccatatatccatggacagattatattaaaagagtgtttccaaacttctcaatcaaagaaatctttaac

SEQ ID NO: 866709 - DNA, 612 bp, Homo sapiens
tttgacccagccaccccattactggatatatacccaaagcattataaatcatgctgctataaagacacatgcacacgtatgtttattgcggcactattcacaatagcaaagacttggaaccaacccaaatgtccaacwatggtagactggattaagaaaatgtggcatatgtacgccatggaatactatgcagccgtcaaaaatgatgagttcatgtcctttgtagggacatggatgaagctgaaagccatcattctcagcaaactatcgcaaggacaaaaaaccaaacaccgcatgttctcactcataggtgggaattcaacaatgagaacacatagacaaaggaatgggaacatcacatactggggcctgttgtggggtgggggaggggggagggatagcattaggagatatacctaatgctatatgatgagttaatgggtgcagcacagcaacatggcacatgtatacatatgtaacaaacctgcatgttgtgcacatgtaccctaaaacttaaaatataataacaaaatttaaaaaaaagagaatgttttaaatctgtgagatgaatgcacacataacaaagaagtttctcagaaagcttctttctat

SEQ ID NO: 866710 - DNA, 635 bp, Homo sapiens
gagcctgggtgctgccgtccaccttataaagataatatcagtgccaatcttaccaggctatttacatatagtacttaacaccatggctggcaaagatgacagtcagcaagtggtagttaccaatggtggatcacaacaacgctgacttgattaattgaggtctagctttgtttctgcatctctgytcgatagtttcctcatctggtccacactcagcttccctaggaaaatttaaggtctagcatcttctaaaattctctagcacctcatttgcataaaccaagtttaagaattatttgggcaatgggggaagacacaaaacgcttccttatatttctaccttagtagaactgatgatgacaaacaggaaaacaaccttacttatttattaatgcagaacaaataatcaaaacattgaaaaccaaccttacaggaagtttacaaatgtagaaaagaaataaagagtactctggaaacataggaggtgatgtccttgttcctttgtctgaaacaaaaatgtgctgcctgtctgcaattccctattagcaaaccatgtggagagagatgaccaggtgagttctgactattgacttcctcccattccattgaaaagaaaaacatttaggtttttttgt

SEQ ID NO: 866711 - DNA, 636 bp, Homo sapiens
aaattagaagagccagtcttcaacatcgtcctgggctccataatccccttgcatccatgttggaagttcccactgggagcacacggggaagggtgccctgaatgtgcctttctgccacctgctctggggactgtccccattgccagggaactttgggttcttyacccctccataggcaaaggagaaccttacacagaaatcagccttctgtcctcacacagtagcctcatcacagggcttccaggggccctcaggcaggtgggtgctgaagtttccccctagatgatcagcagcctgcttccacccgaaatccagtccccctggctgcctgtgacaagagagcccttcatgctgagtgctgctctcatcgcacctttttctctccgtgtttagacagagagagtggattcatgtttgattaaacagtgtgggcccaggaaaatcaattagcaagcaaagtgatccacagtaatcaggatcagtgccatctactaagctcccacgatgtgcgaggtcccatataagggcctcactgtatcatctcccttaatcttaatgagatgagatagatagtattatctttctcactttaccaatgagtgagagggcagagagaggttaatgcagaattgctaa

SEQ ID NO: 866712 - DNA, 636 bp, Homo sapiens
aaattagaagagccagtcttcaacatcgtcctgggctccataatccccttgcatccatgttggaagttcccactgggagcacacggggaagggtgccctgaatgtgcctttctgccacctgctctggggactgtccccattgccagggaactttgggttctttacccctccataggcaaaggagaaccttacacagaaatcagccttctgtcctcacacagtagcctcatcacagggcttccaggggccctcaggcaggtgggtgctgaagtttccccctagatgatcagcagcctgcttccacccgaaatccagtccccctggctgcctgtgacaagagagcccttcatgctgagtgctgctctcatcgcacctttttctctcygtgtttagacagagagagtggattcatgtttgattaaacagtgtgggcccaggaaaatcaattagcaagcaaagtgatccacagtaatcaggatcagtgccatctactaagctcccacgatgtgcgaggtcccatataagggcctcactgtatcatctcccttaatcttaatgagatgagatagatagtattatctttctcactttaccaatgagtgagagggcagagagaggttaatgcagaattgctaa

SEQ ID NO: 866713 - DNA, 637 bp, Homo sapiens
tcatggcttttattaatcatagagcttcaagaaaacagattagaaaggctgcttagctccataagctgcaaatgttagaacagaggtaagatgagaaagaagtttccagaatgtgccaaaggtaaatatgcttcttcaacgttgtctggattttcccaagaagaaaaaggaggagaatggtgatgagaagaagatggagaaggagaaaatcctttaagatatgacttacagaggcattataaactgaaaggatcagygtctagaatgtgtgcgtgtgtgcgtgaacacagaaaaccataaacaaataagaaaaagacaaacacctaatagaaagacaggtcaaggctaagacttcttagagaaaagccaatgatcaataaataaaagctgctcgatttcaccagtggtccatgctgtgtgaactaaaacagcattctatggctccaaattggcaaaacttttgaatctgacagtataaaggattgggaggatgtgagaactgggtaggggtgcacacaactcacaagcccttaggacagcaagttggcaacctctagcacagctataaacgtgccaatcttctgctgttccagcatttccacactaggtgtgtactctcagaaaacgacagtcaatg

SEQ ID NO: 866714 - DNA, 637 bp, Homo sapiens
tcatggcttttattaatcatagagcttcaagaaaacagattagaaaggctgcttagctccataagctgcaaatgttagaacagaggtaagatgagaaagaagtttccagaatgtgccaaaggtaaatatgcttcttcaacgttgtctggattttcccaagaagaaaaaggaggagaatggtgatgagaagaagatggagaaggagaaaatcctttaagatatgacttacagaggcattataaactgaaaggatcagcgtctagaatgtgtgygtgtgtgcgtgaacacagaaaaccataaacaaataagaaaaagacaaacacctaatagaaagacaggtcaaggctaagacttcttagagaaaagccaatgatcaataaataaaagctgctcgatttcaccagtggtccatgctgtgtgaactaaaacagcattctatggctccaaattggcaaaacttttgaatctgacagtataaaggattgggaggatgtgagaactgggtaggggtgcacacaactcacaagcccttaggacagcaagttggcaacctctagcacagctataaacgtgccaatcttctgctgttccagcatttccacactaggtgtgtactctcagaaaacgacagtcaatg

SEQ ID NO: 866715 - DNA, 637 bp, Homo sapiens
tcatggcttttattaatcatagagcttcaagaaaacagattagaaaggctgcttagctccataagctgcaaatgttagaacagaggtaagatgagaaagaagtttccagaatgtgccaaaggtaaatatgcttcttcaacgttgtctggattttcccaagaagaaaaaggaggagaatggtgatgagaagaagatggagaaggagaaaatcctttaagatatgacttacagaggcattataaactgaaaggatcagcgtctagaatgtgtgcgtgtgtgcgtgaacacagaaaaccataarcaaataagaaaaagacaaacacctaatagaaagacaggtcaaggctaagacttcttagagaaaagccaatgatcaataaataaaagctgctcgatttcaccagtggtccatgctgtgtgaactaaaacagcattctatggctccaaattggcaaaacttttgaatctgacagtataaaggattgggaggatgtgagaactgggtaggggtgcacacaactcacaagcccttaggacagcaagttggcaacctctagcacagctataaacgtgccaatcttctgctgttccagcatttccacactaggtgtgtactctcagaaaacgacagtcaatg

SEQ ID NO: 866716 - DNA, 614 bp, Homo sapiens
ggaaaaactcttcttgctggaactgaaagccactgagctcaggtcagaaatcctagctgctggggggtaaaggggtcagtgctcaagatcagagatgtctttgggtgattgatatctttaagtgcttcagggggatgtgaaggaaagtaggctctgtcagtgcttgtgtgcgggcagcctctagactctagactccccgccctacgggatgtcactttctccagggaatgaatggcatctatggaaggggtcaggagttcggagagacacccaggcttgcaagagagctcttgggatggtggaaccttgcagctggatttcatttctgatttttgtcctgggtctagtatatggactgtggaccccagacaagttggaattaaggtgttctgacctacagatagagataggacaagagagaatgggggctggccccagcccacccaggatttctctrtgagctaatcccaccacctgtaactccctatattgccatcaataaatgtcagcaatgaatgctttgcctctagaaggtgagatttgtttttagtatctctttgggggatggacactgtcagtccatagaatttatatcaaacttttttagcagcaaa

SEQ ID NO: 866717 - DNA, 605 bp, Homo sapiens
atttacattcaaggttaatattgacatgtgaggttttgatcctatcatgaaattgtttgctggttgctttgtagtttctattgtgtggttgcattttctgtgggctatgtatttatgtgtgtttttctgggaacaggtatctttattttgtttccatatttagaactcctgtaagaatctcttgtaaggctgctctggtggtaataaattcccttagtgcttgcttgtctgggaaagattttatttctcctttgtttgtgaagcttagtttggtgggatatgaaattgttggttggaatttcttttctttaagaatgctgaaaataggaccgcaatctctactgactcacaargtttctgctgagaagtctgctgttggcctgatgggcttccctttgtacatgatctggccattttttctagctgcatttaagatctttttttctttagccttgatcttggatagtctggtgaccatattacttagtgatgttcattttgaatagtattttgcaggtgatcttgaattattccctcaagtacattttccaggttgtttactttttctccatctctctcaggatgccaataattaatggacttgg

SEQ ID NO: 866718 - DNA, 594 bp, Homo sapiens
taatataaaatttgcctctcatgatgaacacagtgggcattcctaaagttatagaggcacagaaaaaagcacagtgaactgagaccagaaatgtggctcctccccacagctttacctctcacacctgtgtgatctcaggattgtcctctgacctttcagcaccaaccattgagkgtggcattcggctagagtttccctgtgcctatggatctcctgggagttccttttttttttttttatttttgagatggagtctctctgtcgcccaggctggagtgcagtggtgcgatctcagcttactgtaacctccacctcccgggttcaagtgattctcctgcctcagcctcctaagtagctgggattacaggtgcccaccaccacactcagctaattttttgtatttttagtagagatggggtttcaccatgttggccaggctggtctggaactcccaaccttaagtgatctgcccacctcggtctcccaaagtgctgggattacaggtgtgaaccactgcacccagctgggaatgctcattaacaggcaggttctgattcaatagggttcaagattctgcttttctaacaagctccc

SEQ ID NO: 866719 - DNA, 539 bp, Homo sapiens
gcctcgacctcctgggttcaagccatcctcccacctcagcctctggagtagctgggaatacaggcacgcaccatcatacccggctaattaaaaaaaaatttttggcctggtgcagtggctcacgcctgtaatcccagcactttgggaggccgaggcgggtggatcacttgaagtcaggagttcaagaccagcctggtcaacatggtgaaaccttgtctctactaatatacaaaaattagctgggcgtggtggcttgcgcctgtaatcccagctactcaggagrctgaggcaggaaaattgcttgaacccgggaggtggaggttgtagtgaggggagatcacgccactacactccagcctgggaaacagagcgagactctgtctcaaaaaataattttttttttgcacagatcttgatgatcaggatcttgtgtagacctaagctaatgtgtctgtttttaacaaaaaagattttttttaaaaaaaagtacttaacttttataatagaaaaaagctcatagaataaggatataaagaatt

SEQ ID NO: 866720 - DNA, 539 bp, Homo sapiens
gcctcgacctcctgggttcaagccatcctcccacctcagcctctggagtagctgggaatacaggcacgcaccatcatacccggctaattaaaaaaaaatttttggcctggtgcagtggctcacgcctgtaatcccagcactttgggaggccgaggcgggtggatcacttgaagtcaggagttcaagaccagcctggtcaacatggtgaaaccttgtctctactaatatacaaaaattagctgggcgtggtggcttgcgcctgtaatcccagctactcaggaggctgaggcaggaaaattgcttgaacccgggaggtggaggttgtagtgaggggagatcacgccactacactccagcctgggmaacagagcgagactctgtctcaaaaaataattttttttttgcacagatcttgatgatcaggatcttgtgtagacctaagctaatgtgtctgtttttaacaaaaaagattttttttaaaaaaaagtacttaacttttataatagaaaaaagctcatagaataaggatataaagaatt

SEQ ID NO: 866721 - DNA, 641 bp, Homo sapiens
tcctgacctgtgtgccctttgcagtctaactttgtgatgtcctcccaccgagggcaaagcataatttcccatacccggggttgagcatgtgacttgtcttgaccaatgggatgttagcagacatgccagggccagccctcaggaagaggataagagacacccaagtcaccccaggcaacctagctgagatcagaggaacccggcagctgcatgagaaattaatgtttttggataccacaggttttttatgattgtgtgtgtgtgtgtgtgtgtgttttaagtgcaggcagcaatagctaatggttacagacactagaagagagagtaaatagaacacaggcaggccaaaaaaactaaatgtctactatattccgtattatagatgaggaaacaggttcaaagagatgaagactcttgcccagggcacctggatgctaagcagtggagttgggacctgaacccaggcattctgtcttcagaacccatgctggagagaaagcrctctggtccctgggcagtgagaggtaacgaggccagaccacttctgcagtgaaggcccaggctcttgcctgtcactttcacggagctcccaagcctgtcagcattcactgagagcgccatacccctaactttattccaac

SEQ ID NO: 866722 - DNA, 637 bp, Homo sapiens
gaccccccaggctgctggctggaaaggggccaaaggaagccctgggagctgcccaactgccagctccaggcagagtacccacacccaggggccctcagaagcaatgggacttgctgggccctaaacatgaggttcgagaggcctggagatgtgggggatatggacagggagacacatggaaagaggcggctcccacatgcctgtaacttactayaccctcgcaggctctctccttctctctggaaggagatagaaccaaggtgtgaaggaacaagccccaaatgctgacagcagcctgcctggggaagagggcccgggttatgggatggcagggggattttactcctctgtgcttttctataattgccagcagccagtgactgagtattgatttaggatggggggaggggcgcacagctccctgtcctcctcgggtcctgcctggagcctggggtagtgcccttggcagctgcatcaaagctcctcgtactcccgtggacccttctggctcgccacccaccttggtgaggcagcttctgctcctgggaagagcacagaggcctgggggggcagccttacagcatctgggggtggggctgcaggtggaattcgtggactctgagccacagatctggtt

SEQ ID NO: 866723 - DNA, 718 bp, Homo sapiens
ataaacagaatatacattcttctcagcacatcacacttattctaaaattgaccgcatagttggaagtaaagcactcctcagcaaatgtaaaagaacagaaatcacaacaaactgcctatcagatcacagtgcaatcaaattagacctcaggattaagaaattcactcaaaaccgcacaactacatggaatctgaacaacttgctcctgaatgactcctgggtaaacaacgaaatgaatgcagaaataaagatgttctttgaaaccaatgagaacaaagaaacaatgtaccagaatctctgtgacayatttaaaacagtgtgtagatggaaatttatgcactaaatgcccacaaaagaaagcaggaaagatctaaaattgacaccctagcatcacaattaaaagaactagagaagcaagagcaaacaattcaaaagctagcagaaggcaagaaataactaagatcagagcagaacagaaggagatagacatacaaaaaacccttcaaaaaatcaatgaatccaggagctgtttttctgaaaagatcaacaaaattggtagaccactaacaagactaataaagaggaaaagagagaagaatcaaatagatgcaataaaaaatgataaaggggttatcaccgctgatcccacagaaatacaatctaccatcagagaatactagaaacacctcacacaaataaactagaaaatctagaagaa

SEQ ID NO: 866724 - DNA, 646 bp, Homo sapiens
tcatctatctacccatgcaacatcaaatggtctactatattccaggcgttaaagtaggtgcaaaaatcaaaagaagaaatagacactatttccatcttgaaggagtttgttgtctggtgggaataaagactacttatcaataagcacaataatagcaagtagtcaatgatataataggtacattcatagtgctaacataatataaagatttattgaacacttactatgctcccaaccccatgctaagctctttacataatttctctcatttaagcctcatgatgatcctatgagacaggtgctataattttctcattttccacataaagggacttgttccacatcacatacctatgaagaggtggggctcttgaagctcaacactctatctccagaccttatgctcttaaacatcaagctacctactgctagctggaatcactgatgaagatatgactccagagaaatttacrgagttccctcagagagggtgacacttatgctgggccttaaaggagatcatcaaagagaggagggaaagaaaatttcaggcagttgcaagactgggtaccaagtcccatgtgtttagagaggagcaaacatttcttcagtatgactagaagatagaatgcatatgtgtagatgg

SEQ ID NO: 866725 - DNA, 615 bp, Homo sapiens
tgtcttcataggtggtggaggctgcacggacactccaagggccgaggccaagaatgttaaaccttctgcaagggaaagagctgtcctgccccaaatgccagtagcccctcggtgagaaacacacacttccagaaacatgtaggaaggacaactcaggctgctcaacgatctcttgtacttgaagagacgcctgcagctcgggctggatttgactggtgtcacccctggtcacacccagcctgtccccactttctgctgaatagcacccgcccatcctctgctcttccctctccaccrtcatcctcccataaaccccctggttttgacagcctccttctctgatagcttggtaggcttgtggaatatcttctgattcctcccctttcacactcaatcggtaaccacctcattctcaacacattttaaaactctcagtgccaaaaacgttcctttggctttggcctttttatccgactcttatcaataaaaacctgcctgtgtctgtcctgcctgccctcacgtttccctctgagctgccctgaagggggggtgtgcgtctgatccatgcaagggcgggctgtctggcaaggcatgcaggtacccccacccgcctct

SEQ ID NO: 866726 - DNA, 633 bp, Homo sapiens
ctgcaccaaactccactcataaaaaaatgacattaaggtttcctaggtaactaatgcatttccaaagggaataggtctcaggagacaaagagggcagggaaaagggtggggaggggaagtgaagaaaagagaaaaaaacatccgatgagacccacgtgacataaacaaaatatttcacggggaagaacccayaaagttttactgccggggtctgacacagatatggcatagccattaattccatctttggatgataaaacactcgatagactatccctctcatcacgtatgctggcatttcatatttcagatccagttctacaaatcttgagagggatttgacccttccattcatctgctaagctgcgtccactcagcagccagctgactcttgtgccctccaccaaatgttgagatgaatgtgaaaaacagggttgatttgcatgtttcagaatatacagatgcttttgatcactgtggactcttaaaattttggagtggatctgttagccttagcagaaggctggggcctgagaattgaattatgggaatggaggtttggtttgcaacccctcaactcagtggcattttcactgcagctttcttcatttggaggagggtctggatgcaaaa

SEQ ID NO: 866727 - DNA, 569 bp, Homo sapiens
aaatgactaatataattgatattaaacataattgatcttggcaatgctaatcaataaaaatatagaaggcacaaattaacaatatcaggaataaaaaaaggggaatcacagatcctaaagactttaaataaggatatataaaaggatactgggaacaaaattatatcatatttaaaaatgtgtataaagtgtacaaattcctagaaaacaaccattaattcttaaaaatgacataaattacttttaaggaaattgagtctgtaattaaaatcctcttgaaataaattccctagcctagataacttccccaatgaattcttataagtatttaatgaagaaataacatcagccttacacacagtctattagggaataaaatgagggaatacattccaaattatttatgaagctaaaacctgtaaaamatacaagaagagaaaattacataccagtctctcttataaatgtagttgcaaaatttttcattattagtaggcaaaatccgagacacaagaaagaataaaataacgttcaatttgtgtttattccagaaatgcatgattgattga

SEQ ID NO: 866728 - DNA, 597 bp, Homo sapiens
ttatgactctgcagagaaaggggaaaggatacatttttaaactaaattgggttgagtaaagtatatatcccacgtgaaaaaatatgaatcttgctcctacctcaccctatatacagaaactaactacaggtgaatggtaaacctaaatgtaagaggtaaaataataaagcatatataacatattgggaaaatttacttatgaccctgagataagagaatatttcttaggataaaaggaaagcactaaacataaaaagattgacaaactggactgtattaacttaaaaatgtttatataaaggtamctaccattaagaaagtgaaagagtaattcccaaagtgagagaagctatttgcaatacatgttataaaccaagggcttgtgtccagagcatataaataactactacaaataaatcagaaaaaagtaagatgatccagcaaaaaaaaagggggtgggcaaaagacttgaaccagcacttcactaaatagaattatctaaatataaagctgctctacctcaatagccaaaatgggaatgcaaattaaaactacaatgcaatacacttgcacccaaatcagaatggctaaaaataa

SEQ ID NO: 866729 - DNA, 680 bp, Homo sapiens
tgttgaatcagccctacctgttataactttgaggagctgcttttctgtgcttgactcagatgtctgacacctgtttgctgggaagtgggagaagaacaggacagaaattggagcagagaaggggaatggggagaagaggagaggaaggaagaagaggagaaagagagtgaaagaaattgatgagggaataggactgggggaaaggcagagaaagacaaataaaaggaagtgaaagaagaatgaatggacaggaaaaaagttattggtccctgtgtgatgggaagctggggtgactcttgattgatttgttcataagaacagactgctttgatcattgcatccccctgactgggagagggctcttcgaagccttaagcagtgaaaagtggttggtgaaaacgtggaaaaatgcctgctggaaagtcttcattccaatactactactactactactactactactamtaataataataatagttaaaagtaaattcacaaatttggatttttatgatgactttttaaaagtagaaattattacttaataatatttttaaaatagcaaatctcatcttccaaaaaatgtatatttttaatgatcctcctttgcagatgctccaagcctgggcttaaagagaggcttctcaggtattatacaccaaacagatacacatctgcca

SEQ ID NO: 866730 - DNA, 635 bp, Homo sapiens
ccccatctctaaagaaagaaagaaagaaagagaaaggaaggaaaaaaaatacaatacaatctaggtttgttataaaagtgtttgtttttaactctacttttgaactttttgaacttttcaaattggtttctggtatgtactatctccaaatccaaaggggkttcctagagctatccaatatgtgatggagctgttgaaagaacatgaattcaactatattaattatgacatatagtcacagttcaattacttccaacacagtataaattttttataaaggcagaaaaataaaaatggtcaacatcctattaaagactctgtattctcaaagatggtcatgctacctgatatagtttgactctgtgtccccacccaaatctcatgttgaattgtaatccccagtgttgagggaggaacttgttgggaggtgattggatcatggggtagatttcccccttgctgttctcataatagtgagttctcatgagatccggttgttggaaagtatgtggcacttccccctttgtgctgtctcgctctctctctcctgctccaccatggtaagatgtgcttgcttcctcttagccttctgccatgatcgtaagtttcctgaggcctcccagcaatgcttcctg

SEQ ID NO: 866731 - DNA, 635 bp, Homo sapiens
ccccatctctaaagaaagaaagaaagaaagagaaaggaaggaaaaaaaatacaatacaatctaggtttgttataaaagtgtttgtttttaactctacttttgaactttttgaacttttcaaattggtttctggtatgtactatctccaaatccaaagggggttcctagagctatccaatatgtgatggagctgttgaaagaacatgaattcaactatattawttatgacatatagtcacagttcaattacttccaacacagtataaattttttataaaggcagaaaaataaaaatggtcaacatcctattaaagactctgtattctcaaagatggtcatgctacctgatatagtttgactctgtgtccccacccaaatctcatgttgaattgtaatccccagtgttgagggaggaacttgttgggaggtgattggatcatggggtagatttcccccttgctgttctcataatagtgagttctcatgagatccggttgttggaaagtatgtggcacttccccctttgtgctgtctcgctctctctctcctgctccaccatggtaagatgtgcttgcttcctcttagccttctgccatgatcgtaagtttcctgaggcctcccagcaatgcttcctg

SEQ ID NO: 866732 - DNA, 521 bp, Homo sapiens
tgttttaaaaaatacttttatttgtttatttcagattgcttctgaggaggaaaatccttctcccaacggaggccgaggccccttctaggaaggcggtttatttgctattacttgaccattacccgggcttagggcttctttattgcatttggcacttggagcacagtcttcttgcagtattttgatgtgttttgcaaaaaaaaaaaaaaaaaaaaaaaaaaaaaaaaatctgtgtttaggggaaggttaattacgcttttcattcttccctcatctccagcactgtggaagggaacggttcattagctgtagaggcagaaaggctaaaaagcaaggcttctttttttatttgtagggactgcaragttgcaggtcttggctatagagtgcatgtgagtgtgtgtgtgaatgtgagtgagtgtgacttttgccggctagcccagctcccaggctttctgagccaaggcctcccctgggccctggggccggcttcctgcagggacagacattcaacatgtagg

SEQ ID NO: 866733 - DNA, 583 bp, Homo sapiens
aattgcagccttcggtttgagggctgatggctgtcacactgcccggtggaggagtgaaggcagccaagtcattaagcccaaagccaccaacagcaagtgtgcgctgggagccgtgagaggcttggcccatgtgtcagaacatttgcagacaccggccaaggaataaagactgggtytgggacaaggccaggctcttgctcttcaccgggaaagtcatttgagaattcaggaaacacaacagcggccttcctgggccttctgacctttcttcctctttaccctggccttatccatgatgtttgcctacctgggagggagctttttcaggaaggtaactgctaaggtcagggtgggacgttgtggagctcactttgtcttttttttttttttttttttttttttttttagacacactctcactctgtcgcccaggctggagtatagtggtgtgatctcggctcactacaacctccacctctgcaacctccactccgggtttcaagccattcttgtacctcagcctccggagtagctaggtttacaggtgcctgccaccatgcccagataatttttgtatttttag

SEQ ID NO: 866734 - DNA, 540 bp, Homo sapiens
cctggccttcttccccaattttgggatagctaagaatcatcccagcttcaagattttctacagggtaaactgtggcctccactggactgtgtcatagctcagcttctcctctatccaaccttgcttcctttttttccagaggtattgatcccaaaagcactctacaataaataccttgtgcattattgtctctcagtctgcttcccaatctgyagccatgtcagtgcttaagaactagggccagactcatttgacttcctgagctcattctgttagtttcagactgagaatctgtacaattccatactctgcattaaatgatagattttttttcagaaataatctgcaacagagcagctagtaatggccatggaggcttcatcctagaagacctagcataagaggacaaaagggaactccactgcagagattcaagtgtggcatatcatgagaccattattgctagggaataggtcatcttggtagagggctggtctttctttgataggaagatccaacatagctcaaagaggaagtaac

SEQ ID NO: 866735 - DNA, 626 bp, Homo sapiens
aactaaaagcacaagaacatgctaaatccaaaattagtagaaaaaaacaaataatgaagatcagagcgcaaatgaataaaattgaaataaaaaaagagaaaagatcaatgaaattaaaagttggctttagaaaagattaaaaaaaattgacaaagctttagccagactaaaaaaaaaacccaaaataaataaataagagattttcttttatttgtatagatacttgattttatttctcttggatagacacttcagagtggaattattggtttctgtggtgagtttatgtttaattttttcagaagccatcaaactrttttccaaagtaggtgtaccattctccatccccatcggcaaatttccaattgcttcatattgtctcgaacactctttattgtccatcttttctattttagccatcctagtgtatcgagtagtaactcattgtggttttactttgcatttctccagtgagcaacgacatccaacatctgttcatatgcttgttaaacattcttatatcttcttggtgaaatatttatttgtttagtccatttttaaattgcattgtttgttttcttatatattgagttataagagttctttatatgttctaaattcaggtc

SEQ ID NO: 866736 - DNA, 619 bp, Homo sapiens
aataaatgttaagtgttctcatcacacaaaaaaaatgtaaactaatgcttatgttaattagttttattcagccattccccagtgtacacatatttcaaaacatcatgttgcacatgataaatacatccaatttttatttgtcatttaaaataaacaaatacaaggaaacaaaagtaagaactactactaacttttcatcagaaataattctaaccagaagacaatggaaaaacctcatttaagtgctgaaagaaaaataagtacaattaacttagaattccatatccwatgaaaatattctttacaaaatgaaagtactataggttttagacaaaatctgagagaatttgtgctaacagacctatacttcaagaaatgttaaaggagcccagacatggtaatatatggaaaaatttaaaagaatttgatttcttggttttaaacattttttaaaaagatagttgactgcataaagtaaaaatagcaaccatatattaggaagcttatagcatatatagaaataaaatttatggcaacaagagcacaaaggatgatagaagagaaatggaaagttttatattatacatgatgcaatatttcaatgtaggcaatgatcagt

SEQ ID NO: 866737 - DNA, 619 bp, Homo sapiens
aataaatgttaagtgttctcatcacacaaaaaaaatgtaaactaatgcttatgttaattagttttattcagccattccccagtgtacacatatttcaaaacatcatgttgcacatgataaatacatccaatttttatttgtcatttaaaataaacaaatacaaggaaacaaaagtaagaactactactaacttttcatcagaaataattctaaccagaagacaatggaaaaacctcatttaagtgctgaaagaaaaataagtacaattaacttagaattccatatcctatgaaaatattctttacaaaatgaaagtactataggttttagacaaaatctgagagaatttgtgctaacagacctatacttcaagaaatgttaaaggagcccagacatggtaatatatggaaaaatttaaaagaatttgatttcttggttttaaacattttttaaaaagatagtkgactgcataaagtaaaaatagcaaccatatattaggaagcttatagcatatatagaaataaaatttatggcaacaagagcacaaaggatgatagaagagaaatggaaagttttatattatacatgatgcaatatttcaatgtaggcaatgatcagt

SEQ ID NO: 866738 - DNA, 602 bp, Homo sapiens
ttaattggacttacagttccacatggccagggaggcctcagaatcatggtgggaggcgaaaggcacttcttacatgttgttggcaagagaaaatgaggaagatgcaaaagggaaaaccctgatataaccatcagatcttgtgagacttattcactgccatgagaacagtatgggggaaccacccccatgactcaaattatcccccaccaggtccctcccacaacacatgggaattatgggagtacaattcaagatgagatttgagtgagaacacatccaagccataattttctaccccttgtccctccaaatctcatgtcctcacatttcaaaaccaatcatactttcccaacagtcccccaaagtcttaactcatttcagcattaacccaaaaktccacagtccaaagtctcatctgagacaaggaaagacccttccgcctatgagactgtgaaattaaaagcaagctggttacttcctagatacaatggggatacaggtattggtaaatacagcctttccaaatgagagaaattggccaaaacaaaggagtatagggcccatacaagtccaaaatttcctgtggggcagtcaaattttaa

SEQ ID NO: 866739 - DNA, 598 bp, Homo sapiens
atggaagaggtgggttcccatggtcttgggcagctctgcccctgtggctttccagggtacagcttcgctcccagctgccttgagtgctttgggctggcattgagtgtttgcagcttttccaggtgaatggtgcaagctgtaggtggatctaccattctgcagtctggaggatggtggccgtcttctcacagctccactaggtggtgccccagcagggggcrgagccccagtgggagctctgaccccacatttcccttctgcactgccctagcagagtttctccatgagtgccctgcccctgcagcaaacttctgcctgggcatctaagcatgtccatacttcttctgaagtctaggcagaggttcccaaaccccagttcttgacttctgtgaactcgcaggctcaccaccacatggaagctgccaacgcttgaggcttgcaccctctgaagccacggcccaagctctaggttggtctctttcaaccacggctgaagcagctgggacacatggcaccaagtccctaggctgcacacagcacagggaccctgggccctgcccatgaaaccattttctcctaggcctgtgggccagcgatg

SEQ ID NO: 866740 - DNA, 598 bp, Homo sapiens
tctgcgtttccagattgctccccaaataaaaacaagcattgaacttccaatcagtgatgataatttaatttctctctcagctataagtaccagaaaacagtcaggcaatcagtgagaaaaaacgtgttctcctggtttatttttacattaagtaattaacaktttcctctttaactaacatgaggtctaaaaagtataggctcagctgacctaattgtgtaggacttcttggaactctgtatgtttgggggttaggaagaacagaatggaggagtgaggtctttaaataaaacctggaaatgtttataagtgttcttcataatacagaaactctaagactgatttgtgtcataaaataatgtcaacaatttggaaatgggcaaaagagattactaggtatcttcagtggagtgtgggtcatcgtttagcagatctttctggtctggaattatcagattctacagggatgtgcacctttgttggtctattgtctaggtgattttataactctatagtgatagaagttaagtagcaatcattttttatcataatgaagcaaattaattttgtccagtagagatacaattgatttccattg

SEQ ID NO: 866741 - DNA, 608 bp, Homo sapiens
atgatacattttgattaattgtggttaaggtctgggtttaggtttacttatttgcatataaatatccaactgtttcagcacaactccttttaaactttcctccatactatgtgctttgaaagaagaggaaagagttatcctaaatgtttacttaaggggaaaaatcttctcaaacagaaatacctaaagagaaaatgaaagcttagggaagatgttctaactctttctgagttggtctaggttcttccaaatcctcatctttgatggactaagtaacatttatattttawaatataatttctaattctaaaattcttacaaaagatgtattacagtttttgttttcaagaacaaaattgggcattacaaatgtaatgttagtattttatatataattgtaatccagtcttagaaaattccttattcaaggatgcagcaccatctctgaggtgttatgctttagcttcgagctgttgactcttttctgatatgcacaagctgatctggcaatgaaactgattctaaaccattatgcaaagacatgcgctgattacccactgatgatatattgattacagatcttagcagaagagaaatagagatcacca

SEQ ID NO: 866742 - DNA, 482 bp, Homo sapiens
attatggaaaaatcatatattttcatcttgtcattaaatgacaaagtgtagcagacacttattgaacccctcagggatgttaattggacttcatgtcactaggaatgcaataaattgatgttgtagcagagtgtactgccattaattataactggcctttctcataaatatttcagaaaccatttgttatctgaaaaaaaatacrgaaagggaattttagaaaacatttttaagtgaaagatatataaaggggatttatttcctgttcagtctcaagatcattcacatgaattttgatggtgacaaagaattatcaacccttattttctgtctctaaggattccacattttaaatgttgagtttcagaataaatggaaaactgagaaaatattttaaaaagaataaataaacaaaatacaagaatatgctttataaaccttcaggttgtcatggcacccatcacatactgctttccagacac

SEQ ID NO: 866743 - DNA, 632 bp, Homo sapiens
atagcagcactattaaaattgctaaaggagtggaaataacccacactcataccaaatgatgaaagataaaatgttatatatatatatatatatatatatatatatatatatacacacacacaaacacacacatactataatgtcattaagccataaaattagaattaaacattaattgatgctccaacatggatgaatttggaaacattatgctaagtgaaggaagccagacacaaagggccacatattgtatgactccatttacatgaaatcaaaataagcaaatacatagaaacataaagaagattaatgttcaccagggatcgagggaggggtgtgaagggtgactactgatggctatgggattttttagggggtgataaaaatattccggaattagtagtgatggtcacctaactttgtgaatgtaccaaaatccactaactgtatacttaacaagagtaaatgttacggtgtgtgaatgataccttaataygtgtatatatgcatacaatttatttatttttatttattactctttcttttctaacagttagtaaaaaataacatactacaggaaaagggaattacaaaatttggaagaaaagtagaatgttccctatggtgttgga

SEQ ID NO: 866744 - DNA, 606 bp, Homo sapiens
caactatgaaagttacgtctctgctccctaaaaactactgcctactctccccatttcaagagaaaactataggtacacatcacgtcttagagttacagaaattacagatattgatgcgaattaataaaagaaaaaatgtgatttatcacagaggacagagccaacaatctactttttaaaatagtggcaatagcaataatattttcctttatgtstgtttggtgtttcttcagttttaagtatgaattgtgatgattagatcacaaaaatgaaatctatccaaatggcactgagatattttggctgcccatgcagaggaaaggtgaaacaattgtggctggtaatgagtatattttaatggcttcataccaagaaaatcatctggcacatagaagcctacctggctgaactaatatcctaagagaggaattattttggaggaatagtaataatatttatatatttagtttatgtaaagcttctcagatttggttatccatctctttttggcattttgaagtgtcctttgtcattttatcatgtagtacctattttaaataataaaagtactattatgtatatccagaattaactaagtgtcggacc

SEQ ID NO: 866745 - DNA, 612 bp, Homo sapiens
tatgtacttacaaaatcagaaagttcacaagcagcttttttcattacagagaggaaaagtactctcttgatgtagaaatgtatatttttctggattattcattgcatagaactctgtataacaaaaacaacagcataatcaatatcaataattggatgacctgattatgtagaatctaattatatagaaattttaaaatttacattgacatcatgtttatgaaactttaccagtaataataacagcaatatcgtttgctgagcaattactatgatcaggaactatgccaagcatcctatatacattttatccttcccacagcaccttgagggagagtttatgatccatgttttccaaacaaagatattgagatttaagaggttaaaaagcttcccsaaggtcacacagctggatctgaaaaatctaacacagatattctgactctaaagccttggctcttaaccaatctgctattattttctgacctctaaattaatagctctagataatgattctgccattgagttaccattgataaagttgcaggacagagactagatatttccttaatttaataaggggcagaaatgaaaaacagaagtctcagaattt

SEQ ID NO: 866746 - DNA, 632 bp, Homo sapiens
gtgattactcagtttgctttcatcagttcttttgatgttgccccctatttcccagctccaaaaatattattgcagctgaaagaagcaatatatttactattaatactataacagcagcatgagaagaaaaccaacaaacaattagagaaatgataggtagagayataaatatagagatataaatatacatgtggagaaagagaggcagcttcatattctaggacacatttttctaagggcccctgaatctgatgtatttttacagagtctctgtgaatgttactagtaatagataacaagtactgggaatttaaaacataacaaacatcacacaagtccatgcctaatacttttagactctttgccccttcctcacctggaaaccctgagaaggacttgccaagttgctcagctaatcttctccttctaccggcttcaaccatcacatttcttaatttgagaccataccctttaccttattccgaccacaaattatctagtttatctttgtccctccccagaaggggagaatattcttcatcttctgtcatcagtgtagaattcttaattaaggtagaaaagaagggacagatttaagaggatcttctgagtgaaaacgctaaccatactcg

SEQ ID NO: 866747 - DNA, 632 bp, Homo sapiens
gtgattactcagtttgctttcatcagttcttttgatgttgccccctatttcccagctccaaaaatattattgcagctgaaagaagcaatatatttactattaatactataacagcagcatgagaagaaaaccaacaaacaattagagaaatgataggtagagatataaatatagagatataaatatacatgtggagaaagagaggcagcttcatattctaggacacatttttctaagggcccctgaatctgatgtatttttacagagtctctgtgaatgttactagtaatagataacaagtactgggaatttaaaacataacaaacatcacacaagtccatgcctaatacttttagactctttgccccttcctcacctggaaaccctgagaaggacttgccaagttgctcagctaatcttctccttctaccrgcttcaaccatcacatttcttaatttgagaccataccctttaccttattccgaccacaaattatctagtttatctttgtccctccccagaaggggagaatattcttcatcttctgtcatcagtgtagaattcttaattaaggtagaaaagaagggacagatttaagaggatcttctgagtgaaaacgctaaccatactcg

SEQ ID NO: 866748 - DNA, 646 bp, Homo sapiens
aaataaacagtgaatcaaatattttgacttgaatatctaagtggttttgtggaattttataatatatgcattttgctttttttaaaaaatggcttcagtcattattggtggattgcaaaattcccttaatggctaataacttatttgtatactttaacttagagaatgttattggattatttgtaactcaaagggtaaatgcttgaggggattgataccccattctccatgatatgcttatttcacaattcatgcctgtataaaaatatctcatatatatcatttgtatgtgtatatatatatataatgtacccaaaaatgttttaaaaataattttaaaattttaaaartaataatacgtttgatatagtctaaagaaactatcattagatattaatagtatatgtaaaattaaagaaaggttgagtaatgattcagatatccaatatgtttttctccaacctacctatatttcaggcttcatgtattcagatatgagtaacagacttgtatgagtttgttctcatgtgccaataaagaaatacctgggactgggttatttataaaggaaagaggcttaactggctcacagttccacatggctggtgagttctacggctggtggaactcacagttccaaatggca

SEQ ID NO: 866749 - DNA, 646 bp, Homo sapiens
aaataaacagtgaatcaaatattttgacttgaatatctaagtggttttgtggaattttataatatatgcattttgctttttttaaaaaatggcttcagtcattattggtggattgcaaaattcccttaatggctaataacttatttgtatactttaacttagagaatgttattggattatttgtaactcaaagggtaaatgcttgaggggattgataccccattctccatgatatgcttatttcacaattcatgcctgtataaaaatatctcatatatatcatttgtatgtgtatatatatatataatgtacccaaaaatgttttaaaaataattttaaaattttaaaagtaataatacgtttgatatagtctaaagaaactatcattagatattaayagtatatgtaaaattaaagaaaggttgagtaatgattcagatatccaatatgtttttctccaacctacctatatttcaggcttcatgtattcagatatgagtaacagacttgtatgagtttgttctcatgtgccaataaagaaatacctgggactgggttatttataaaggaaagaggcttaactggctcacagttccacatggctggtgagttctacggctggtggaactcacagttccaaatggca

SEQ ID NO: 866750 - DNA, 675 bp, Homo sapiens
gtttgtcctacaacaaatatttattgagtagttcctaatgtctatatcaataaaataactacattggtagggaccaggaagaatacaatgactttacccataaccacacaactacagaaaagagaaaacaacgaatataaacattgacgactgaccatagaggaaatgtgtattaaacaatwatcaggaggtatgcttatctgtccaatatacaagttgactttgtaatatattgaatcttttattctcaattgtaatatattgaatcttttattctcagagcgccactttatcgttgtaatttcaaagcataatagctcagaagtttttattaagaacaagaataagaataaacagaaggactttttctctccttcataaacagtatcgcaatctgtggatgcagtgtaaacgtggctgcaaaaagagaagagacatgaaactttcaagacagctctcaataactgcatacctggagtgactattgattgtgtttccatttattctcagcttcaatcactccgtctcgcagttggacaacacctctcattcaaaataaaccttcagttgttgattgttccatatcaggtagctgccatttcctgccatttcttgatcagaatacattgctttgagtttttcctctttaaatccttgatacaaatgcataagcac

SEQ ID NO: 866751 - DNA, 578 bp, Homo sapiens
gacgactgaccatagaggaaatgtgtattaaacaataatcaggaggtatgcttatctgtccaatatacaagttgactttgtaatatattgaatcttttattctcaattgtaatatattgaatcttttattctcagagcgccactttatcgwtgtaatttcaaagcataatagctcagaagtttttattaagaacaagaataagaataaacagaaggactttttctctccttcataaacagtatcgcaatctgtggatgcagtgtaaacgtggctgcaaaaagagaagagacatgaaactttcaagacagctctcaataactgcatacctggagtgactattgattgtgtttccatttattctcagcttcaatcactccgtctcgcagttggacaacacctctcattcaaaataaaccttcagttgttgattgttccatatcaggtagctgccatttcctgccatttcttgatcagaatacattgctttgagtttttcctctttaaatccttgatacaaatgcataagcacagggatgacacactttggaacactatgaagcaccttccagaacttacc

SEQ ID NO: 866752 - DNA, 663 bp, Homo sapiens
ttggatgtgaggtgataagggcctgaaatagaatagtagcaatcaaaatggagaataaatttacataaagagacattgttaagggaaaaaaatgacagctatcttgactaataaaacctagctgaacttaggaaaaaaatctttcacacatcartgaaaactaccgtcttacaaggctagcggtctatttttctgttagagaaaagagagacaatgatggttaacagtaaattaaccaaaatatttactaaatcacaaattagtatcaataacaacagaaagccccctcctacctcaaatttctcacttacttgtttgaaaaaaccttctggctccccattggctctggtaaattctaatccccttaagctgtcatgtagagcttttcttttatttttttattatactttaagttctgagatacatatgcagaacctgcaggtttgttatataggtatacatgtgccatggtgatttgctgcacccatcaacccctcatctacattaggtatttctcctaatgaaatcccttcccttaccccctaccccccaacaggccccagtgtgtgatgttccactccctgtatccatgtgttctcattgttcaactcccacttatgagtgacaacatgttgtgtttggttttctgttcctgtgttagtt

SEQ ID NO: 866753 - DNA, 535 bp, Homo sapiens
acctgctatgggttataaaagaaattcaggctaaagaccaacttctggcatgacaatatctggagctccactgactccaatgaaactgataaaaaatatgtttttaaagtcctcttgaaaattgtgctaaaggcagacagcaaatgaagaaacatcaattcaaagaaatttctaaaaattcagtaagamaggcgagtccgtgatacttgaacacagaaagtcccatctctccccctacccagctcagcagggtagagcctccccattccagacttctggagccaagaatacagggattctaccattcccactctccacctagagggatttattcttaggaggagcggtacttcagtgtttctcatcctacctccaagtgcctattgctgaggctaagacctgggtaaatacggtcaagaatagcagttccctttctctgctcaatccccactcatggaatatacagtccacctgttgagaatactgagatccttatagcccctgccccagaacttgaagtgataattgttctaca

SEQ ID NO: 866754 - DNA, 535 bp, Homo sapiens
acctgctatgggttataaaagaaattcaggctaaagaccaacttctggcatgacaatatctggagctccactgactccaatgaaactgataaaaaatatgtttttaaagtcctcttgaaaattgtgctaaaggcagacagcaaatgaagaaacatcaattcaaagaaatttctaaaaattcagtaagaaaggcgagtccgtgatacttgaacacagaaagtccyatctctccccctacccagctcagcagggtagagcctccccattccagacttctggagccaagaatacagggattctaccattcccactctccacctagagggatttattcttaggaggagcggtacttcagtgtttctcatcctacctccaagtgcctattgctgaggctaagacctgggtaaatacggtcaagaatagcagttccctttctctgctcaatccccactcatggaatatacagtccacctgttgagaatactgagatccttatagcccctgccccagaacttgaagtgataattgttctaca

SEQ ID NO: 866755 - DNA, 676 bp, Homo sapiens
atactaaacaaatcattaaaaagagccaaatgaaaattctggagcagaaaactataataactgaaataaaacatttattagaattaatcttagatttgaactggaggaagaaagaattagtgaacttaaaaatagactgatagaagttaggcaagctgaagaacagacagaaaaaagaatgaggaaaaatgaatagatactcagagaaatatggaataccattaagtgcatcaatatacatataatgggaytatcagaataaaagagagaaaggaaaaaaaacatatttaaagatatagtggctgaaacttcttacatttattgacaataattacaacgaacttcaagtagggtaaacacaaacagactcacagacacatgatgtaaaaatgctaaaagtgaaagatgatggtaactcttcaaagtcataagagaaaaacagtgtgctactttttaaaaataaggcaaaataaagactttaacagataaacagaaggtgaggaaatgtgtttctagcaaactcacctggtaagtaatactgtaagaaattcttcagcctaaaagcaattgacaccagattgccatgtggagtcacacaaacaaacaaagagaatcagcaaaagtcattatgcaagtataaaagacactataaatgaatatttttcctttcttctcc

SEQ ID NO: 866756 - DNA, 618 bp, Homo sapiens
ctaatttaaaattaatgtttaagtgtatgattttttatagtgaatgatgttttaaaacacagttcctaagaagccagaatctacggctgatgaagaaaaaattggaaacgaagagagtgatttagaagaagcctgcattttgcctcatagtccaataaatgtggacaagagacccattgcaattaaatcacccaaggtgcagtgttttctgtgattctgaggttagctgaatagaatcatagcatgtagcaaaggaatccacagtcttgtacctcygtacctgagcatccggagggagggacgggcggttgttagaaatacggccccagtgatggttcatgaacttgacttatgatgtcctggtcagagctgtagctggagaagggtttccttttatttttggtactagattgtatcattaattattcaccattcattccttaaatatattctttgttccagaaacagtgctgggccctgtggctattaatatgaaccacaacttaacttcgtatgccaagctagcctgttccaacatatattagtatagagataagttcacttatatttatagcatagttttaaaaccatgtattaattactaaatttaacatattt

SEQ ID NO: 866757 - DNA, 640 bp, Homo sapiens
attttcatcataggaatgatcaaagcatgagagtacagttgtattaaaatgtgcttgtatcacaagcacaggtgctaaaaaggaggggaaaacatccttactgatattttcaatgtatgttttacttttcatcaacatgaacctcaacttgatatgatgcagattgaaggaaatcacccataattccatatgaagaaggcctgtgatattttatgggaaaataaatagagaaaatgctaacggaaactctgttaagcatgaagctttatggagcaaacacaaatccagtggtgaaagatacacactcgagttctgtttgttgtcttggaacaatacggtttagaggtgactggcgggtgaggagaacatatgygagttcaccaaagagaaaagctgaatgaggcaatgcctcttcctgaccatatctcttactcagataactatagaatttattttccagtaaagggtatattaaaaaatcatattaaaagtcatgcagtgaagttgtccagggaaatcaagacttaacagtctcactctgacaataatgaacagggggattccctcaagatagactaggacatgaccccacactggcaggtagtagtacgagaaaagaacgcatggaaaatctttacct

SEQ ID NO: 866758 - DNA, 693 bp, Homo sapiens
acaatcatattattctctggtgaaattatctcatatattcctatcgcatttaaaattaattcagaatcatcccatgattatcaaaaccctacatgctcttccacaacatggtttacttccaagatatctcttcaacatttttttcactstactgaattggtgactaatagtcgtattttttttttttgctcaaaaagtcttgacttgtaagtttttcagtttctcctttatccacaggtaactctttcctcataaggcgaattgcttgcttccttgagttctgctctcaaagatacccttcattttctacctaatattaataattttaatcattcattattccattactatgctctatagtgtatacaatttctgttctttgtcatgttattaactaaattatttattgggtccagtaacgtattccataaatattgtacacataaaaattgtgttatttttattcctgtatgctcagctgcccaataacagtctgaggattaacatatttgttaaatgcacaaatacattctttcacaaatattagtttaataattttatattaaactccctctatacttacaatatgaattagataattcagaataaacattccattggaaaaagctacacaatttgttataaaacatccttaaaagcatcagaaagttaatacagcaatgaagaattaca

SEQ ID NO: 866759 - DNA, 693 bp, Homo sapiens
acaatcatattattctctggtgaaattatctcatatattcctatcgcatttaaaattaattcagaatcatcccatgattatcaaaaccctacatgctcttccacaacatggtttacttccaagatatctcttcaacatttttttcactgtactgaattggtgactaatagtcrtattttttttttttgctcaaaaagtcttgacttgtaagtttttcagtttctcctttatccacaggtaactctttcctcataaggcgaattgcttgcttccttgagttctgctctcaaagatacccttcattttctacctaatattaataattttaatcattcattattccattactatgctctatagtgtatacaatttctgttctttgtcatgttattaactaaattatttattgggtccagtaacgtattccataaatattgtacacataaaaattgtgttatttttattcctgtatgctcagctgcccaataacagtctgaggattaacatatttgttaaatgcacaaatacattctttcacaaatattagtttaataattttatattaaactccctctatacttacaatatgaattagataattcagaataaacattccattggaaaaagctacacaatttgttataaaacatccttaaaagcatcagaaagttaatacagcaatgaagaattaca

SEQ ID NO: 866760 - DNA, 533 bp, Homo sapiens
tggtactctttcttccagttgattgcatccgctcctgaggcttctgcattcttcatgtagttcttgagccttggctttcagctccatcagctcctttaagcacttctctgcattgattattccagttatacattcatctaattgtttttcaaagtttataacttctttgctattggtttgaatttcctcctgtagctcggagtagtttgatcgtctgaagccttcttctctcaactcgtcaaagtcattctcygtccagctttgttccattgctggtgaggaactgcgttccttaggagaaggaggggcgcgctgctttttagagtttccagtttttctgctctgttatctccctatctttgtggttttatcaacttttggtctttgatgatggtgatgtacagatgggcttttggtgtgggtgtccttctgtttgttagttttccttctaaaagacaggaccctcagctgcagatctgtgggagtttcctagaggtccactccagaccctgtttgcctgggtatcagtagcg

SEQ ID NO: 866761 - DNA, 533 bp, Homo sapiens
tggtactctttcttccagttgattgcatccgctcctgaggcttctgcattcttcatgtagttcttgagccttggctttcagctccatcagctcctttaagcacttctctgcattgattattccagttatacattcatctaattgtttttcaaagtttataacttctttgctattggtttgaatttcctcctgtagctcggagtagtttgatcgtctgaagccttcttctctcaactcgtcaaagtcattctccgtccagctttgttccattgctggtgaggaactgcgttccttaggagaaggaggggcgcgytgctttttagagtttccagtttttctgctctgttatctccctatctttgtggttttatcaacttttggtctttgatgatggtgatgtacagatgggcttttggtgtgggtgtccttctgtttgttagttttccttctaaaagacaggaccctcagctgcagatctgtgggagtttcctagaggtccactccagaccctgtttgcctgggtatcagtagcg

SEQ ID NO: 866762 - DNA, 610 bp, Homo sapiens
tcatcagggaaatgcaaattaaaactgtagtgagatatcataccgttcacaatggctattattaaaaagtcaaaaataacagatgttggagaggatgaaatgtaaagtgaactcttagacactgttgatgagaatgtggacgagtacgacctctatagaaaacagtatggattgagtatgatattgactatgcatttctcataaacagctcttattattttgagatacattccatcaatacctagttaatgagcggttttagtatgaatcggtgttgaattttattgaaggccttttctgcatctattgagataataatgtttttttttccattggttctgtttatgtgatggattatgtttattgatttgcatatgttgaaccagccttgcwtcccaggtatgacgccaacttgatcatggtggatttggaaaccggcacaagacaaggatgccctgtctcaccactcccattcaacatagtattggaagttctggccagggaaatcaggcaagagaaataaataaagggtattcaaataggaaaagaggaagtcaaactgtgtctgtttgtagatgacatgattatatatttagaaaaccccatcatc

SEQ ID NO: 866763 - DNA, 598 bp, Homo sapiens
ccaggcacctagaagctgtgccccactgcaggctgccggtggagctcatgacaaggccggaacaaggccggaacgtgaagcactcccttgtctgtccttttttcctgaaggctggggcttgcccggccaatgtcacccttcaggacagggaatcagagctttgcatggctgccttaccccaccagagcagygccacagagaatcatggctgaggctttcctgtgggctgcagtgcctgaccctttagggtccccacaaaaacatctttcctgcaaataatccaccgtgtcctgcttgccagcctaggcttcctcatcagttggtgatttcaatgaaaacaaactacagtggaatgaacaaattctaaatcaggaacacacaaagaatctgtggaaagtccatttgtcatctagatttttaaaagatacacattttcccttcttgttatattcagtagtgcatgaagccaatattataatagatgtgcaactcacactaaagctgactaaagggtgaattcttattctaaggtactttgtggtctcaaatttatctgttcccacccccaggaccccattaaaactgaataattgtcatt

SEQ ID NO: 866764 - DNA, 667 bp, Homo sapiens
tattgaattttagttttgcaacataaaaacattctagagatatgttgcataacaatgtgaatatatttaatattatttaactatgtacttaaaatatttaagatggtaaattttatgtggttttgactacattaatagtgaaaaactttctaaagagatacatatttatcaatcttttcaaaaattaccttcaaatcctaaaaatatcagaaaaacaatraagaggccaggtgcagtggctcatccatgtaattgaaacacatcaggaggctgaggagggagaatagcttaagcccaaaagttggagaccagcatgggcagcgtaaaaagacctcagctgcaaatcacaagcagaaggaaactggcaaatgaaaaaatatgtgaaacttaaaacagaacactcttgacttcttgttcaagggtcagaaaatttaatattattaagatgtcaatactactcacagtgaagcacaaattcaaagtattttctatcaaaatctcaatgttacatttgtttcagaaatattaagtcttaaaattcatatggaatctcaagggacaatgagtagccaaagtagctgtggagaagaacaaagttagaggtatcacacttcctgattccaaaatatattataaagctatagcaatacaaacagaaagacaaata

SEQ ID NO: 866765 - DNA, 667 bp, Homo sapiens
tattgaattttagttttgcaacataaaaacattctagagatatgttgcataacaatgtgaatatatttaatattatttaactatgtacttaaaatatttaagatggtaaattttatgtggttttgactacattaatagtgaaaaactttctaaagagatacatatttatcaatcttttcaaaaattaccttcaaatcctaaaaatatcagaaaaacaataaagaggccaggtgcagtggctcatccatgtaattgaaacacatcaggaggctgaggagggagaatagcttaagcccaaaagttggagaccagcatgggcagcgtaaaaagacctcagctgcaaatcacaagcagaaggaaactggcaaatgaaaaaatatgtgaaacttaaaacagaacactcttgacttcttgttcaagggtcagaaaatttaatattattaagatgtcaatactactcacagtgaagcacaaattcaaagtattttctatcaaaatcycaatgttacatttgtttcagaaatattaagtcttaaaattcatatggaatctcaagggacaatgagtagccaaagtagctgtggagaagaacaaagttagaggtatcacacttcctgattccaaaatatattataaagctatagcaatacaaacagaaagacaaata

SEQ ID NO: 866766 - DNA, 631 bp, Homo sapiens
tgttggtaggaagtacctgggtgtttcatttgcatgatatgttggtaatcttagaattatcatatcttgcaagtcatttttaagtatgttgtaatgtagtcagaagctttttaaatatgaaatttaattcttgctggtgtcaattacatttaaaaaaatacaaaatagctatataagattctaggatctttcagaattttataatgtttataatggaaagttggttaaataaaaattgtaccctacacaattttgttgttggcttaaaatagcatttaatttattagtgctcagataatagttatcccctcaatagcatttttactttcatatgttgatatcaaacagtgaagtgagacagcaaatcagtacaacgtggtgattatcaaacatcataaatccatgaaggatagcgttgatcttactgagaagagtttaatyttaaaatgcatacctggaaaaggcaagttagattaacatttcaaactcatatagcattatctgattgattatagttatgattgatcattttatgtttggaccatcactttgaatccaattgggataattataaattaaggatttattatttgctttgaattttagattaaaaaatttaaaaccataaaaa

SEQ ID NO: 866767 - DNA, 644 bp, Homo sapiens
ctttcaatgatgagaatctcaggacatgcgttgtcctcagtgaataactttgaacatgggaatcactgtgaccattaaagaaaacacatataaggccatggaagatgccagagttatctttcaggtaattctctgaatgttgctctaaggtttttgcagcatttcaatacaagttaggtcatagatgaagaatatgtgtttctaatattgatttacaatatcacctttcgtatgttatcttataatctacctaatggttgtttatgaaatacttctgtcttatcttcaataatatttttcatcaagtgaatgtgtattgctgtttttaatacatggcaaatgaagcatgaacatatttatcaaaataatatttcattgaaatagtctattaattagaaccaaacattatgttgcatgttgtaaatattatcctccactctgcrtctattgatgtttggggaaaggaaggcttttctttttagttaatggtcattttataaaaatttatatttgaatatactttcatttttcctaagcaaaactttgtatgggtagttgatgcttatttctagtatcgtgggtcagaaacaacacctaaatagtacagagtttttattgcatacaacatatttcagagtcagtgg

SEQ ID NO: 866768 - DNA, 502 bp, Homo sapiens
cgtatgtcttttaagaaacagaaacgtgccatttgtttttaaattgagtagactttgtatcctttagaatttgggcagagttttcttgctatattgtagagaacctatcaaccatatcttaattttcttcttcttgaggttttcaaaattaacattggcattggtccactaattccttgttttctatttttggrtgagtgtgcataattacctccatcttaattttcaacataaatgtttagcagaatctttcatgtttcattgccatgtaagcagatgtggtttttattctttttccttttcattgaacagttacttcatttgaaatttttcacttgatttaacttttttttttggtggtagatacatctgttgccacctgtgtctggttggcattttaatgtgttgcctcgaagctgtaaccacaatagtggcacattttcctgctgttcctttattctttgtttcttgtgtatctgttttcaagaaattgcattggtat

SEQ ID NO: 866769 - DNA, 620 bp, Homo sapiens
gtcttcaggcaaatggactttgaaggctctggaacagggaaaggctgggcaaatcgaatgcctaacagggattgcttccagtatggtttacaaggacactttaaaaaagattgtccgaatagaaataagcctccccctcgtccatgccccttatgtcaagggaatcattggaaggcccactgccccaggggacgaaggtcctctgagtcagaagccactaaccagatgatacagcagcaggactgagggtgtccggggcaagcaccagcccaygccatcaccctcacagagccccgggtatgcttgatcattgagggccaggaggttaactgtctcctggacactggcgcagctgtctcagtcttactctcctgtcctggacaactgtcctccagatctgtcactatctgaggggatcctaggacaggcagtcactatatacttctcccagccactaagttgtgactggcgaactttactcttttcacatgtctttctaattatgcctgaaagccccactcctttgttagggagagacatcctaggaaaagcaggggccgttatacactagaattaggagaaggaaaaagggtaaatatatataaagactctaagtatgc

SEQ ID NO: 866770 - DNA, 542 bp, Homo sapiens
gtgacatggaccttgacacaccatctctcagcttcagcaatgacgagccttctgccattcttgtccccctcatacctctggttactgcctgcctcactccacagttatcattatttacagctctttttaaagtgacacttacacacattgaaatgcacacattttaactctacagttgtgacagatttatccatctgtgtcatcacctgatgcratattgaatatttcagtctcttccctcccagtgaattcctgcaccacccccatccctgcccaagtcaccacccttttggcttccatcttggattcgttttgcctgttctagaacttgccgtaaatgatatcacatagtgtgtgtgctttcgtgtctggctttactcactcagtagtgtatctgtgagatttatccacatcacagggttcagtagctcatttttgtctactgtttctcagtattctataccacagattgtcgattctctcggtgatagacaatgggtgtttccagctttcattcattgtgaataaagttgccgtgaata

SEQ ID NO: 866771 - DNA, 542 bp, Homo sapiens
gtgacatggaccttgacacaccatctctcagcttcagcaatgacgagccttctgccattcttgtccccctcatacctctggttactgcctgcctcactccacagttatcattatttacagctctttttaaagtgacacttacacacattgaaatgcacacattttaactctacagttgtgacagatttatccatctgtgtcatcacctgatgcaatattgaatatttcagtctcttccctcccagtgaattcctgcaccacccccatccctgcccaagtcaccacccttttggcttccatcttggattcgttttgcctgttctagaacttgccgtaaatgrtatcacatagtgtgtgtgctttcgtgtctggctttactcactcagtagtgtatctgtgagatttatccacatcacagggttcagtagctcatttttgtctactgtttctcagtattctataccacagattgtcgattctctcggtgatagacaatgggtgtttccagctttcattcattgtgaataaagttgccgtgaata

SEQ ID NO: 866772 - DNA, 627 bp, Homo sapiens
aactgccattaatacgtttggggaaaatgatgaaatgccaagaaaagaaaaacgtatccaatttttcttttcaaaactttctctgagtctgaaccaggcttagaagacatttgtgacatcaattactgcctttcctagttgcctcactcatctaaatggaaaattattctgcataattctgagttaatatgagacaagagaaaaaatatacccagaagactttgaaagttaaactgaaagagacccaaaggccaaattactcagagacacaagttgtatrgagaaatcaagtcaataaagatttgatggcctggcacagtggctcacgcctttagtcttagcacttcaggaggctgaggtgggcagatcacaaggtcaagagatcgagaccatcctggccaacatggtgaaaccctgtctctactaaaaatgcaaaaattagctgggcgtggtggcgcatgcctgtggtcccagctactcgagaggctgaggcaggagaatcactttaacccgggaggcagaggttgcagtgagctgagatcgcaccactgtattccagcctggtgacagagtgagactttgtctaaaaaaaaagattgtggagaaggtttgacagaggagaaatca

SEQ ID NO: 866773 - DNA, 627 bp, Homo sapiens
aactgccattaatacgtttggggaaaatgatgaaatgccaagaaaagaaaaacgtatccaatttttcttttcaaaactttctctgagtctgaaccaggcttagaagacatttgtgacatcaattactgcctttcctagttgcctcactcatctaaatggaaaattattctgcataattctgagttaatatgagacaagagaaaaaatatacccagaagactttgaaagttaaactgaaagagacccaaaggccaaattactcagagacacaagttgtatagagaaatcaagtcaataaagatttgatggcctggcacagtggctcacgcctttagtcttagcacttcaggaggctgaggtgggcrgatcacaaggtcaagagatcgagaccatcctggccaacatggtgaaaccctgtctctactaaaaatgcaaaaattagctgggcgtggtggcgcatgcctgtggtcccagctactcgagaggctgaggcaggagaatcactttaacccgggaggcagaggttgcagtgagctgagatcgcaccactgtattccagcctggtgacagagtgagactttgtctaaaaaaaaagattgtggagaaggtttgacagaggagaaatca

SEQ ID NO: 866774 - DNA, 650 bp, Homo sapiens
gagaagtggggatgggagtcataaaaatggggagagagatttacattttctttgtgttcaacttttcttcttactgcaagcatgtatttgttaaaaaattaaaattcagttaataaaaggccccccttttataaaaggagggctttaaaacctcagggagttgttagcactgagtaattaataatggaaatgtagcccttagttctaattcctccaacattgatgaccaatgagaaatttctaaaatggtctcaaggggtcagatgtgggctttactatttactagtcatgtggccttggggaagccccttctggacttttctgtcaatgaagaggttggaccagacttgggatatgcaaaggagatgttgcatctgctgccttggctaagggtgtggaagaatagtgaagaagcagaggaattcagatatctctgcttcaagagtggattcagcctttcctagtctayatatatggagcatccatgtaagtcacagtcaatacgagggtcctgaggttaaaatatactgaaaaatcttatatcctgtggatatcatgaatgcacatctgacattggttaccattgagtgcttatgatgtgtcaagcactgaaccagcaactttatatgcagccttttatgaattcttag

SEQ ID NO: 866775 - DNA, 596 bp, Homo sapiens
tactccacatactgcctggggctcattaggggcttcctgtctgatgcttctttctcagcccttcacagatattgggatacaagaaatgctgctaatactctcttttgcattccataagagcgaaaaataacttttgtttgygtttcttttcacaaaaatataaacataggagtttaaaaacaaaaatctgcctcttgtctacgttcaggtagaaagcatcttattctagtagatatttctatatttttattcctctcctgttattcttttcagggattacttgatatttctactcactaataagctctagactcactttgtggtcttaaaattctactctcctgctggagagagaaccggtttatagctcagtgtcagactggcccagttggctgcatctccaagaagtagagaagaaacctgaaaataagactgagcctaaggaacaaaagccacccagaatctcagagctcctgggagaagactagagctcttcaaccatgtcatgaacccacacctaaaaaaggagcttaactacttccttttttagtaaaacataaataagagagattcacttaggaaatagaacctgactt

SEQ ID NO: 866776 - DNA, 575 bp, Homo sapiens
tatacaacactgatgatgacagaaaaaaaaaatcaaaatcactaaagggacatactatgattacagcctgaaagacacaacatggtaaaaaattcaattcttttcaaattgacttacagatttaatttctgtcataatgggaccagagttggttccttccagtggattcatggtctcactgacttcaagaatggagctgcggaccttcacggtgaatcttatagctcttaaagatggcacagacccaaagagtgagcagcagcaagatttattgtgaagagtgaaagaacaaagcttccattgcrtggaaggggacccaagtgggttgccgctgctgattggggtggccagcttttatttccttattcatccccacccatgtcctgctgattcgtccattttacagagtgctgattggtccattttacagagtgctgattggtccattttacaaacctcttgtaatcagaaaagttctccaagtccccactcgacccaggaagtccagctggcttcacctctcaataatccaagcataattttagtacatgtagataagatggttacaaaattta

SEQ ID NO: 866777 - DNA, 533 bp, Homo sapiens; identical to SEQ ID NO: 866760

SEQ ID NO: 866778 - DNA, 533 bp, Homo sapiens; identical to SEQ ID NO: 866761

SEQ ID NO: 866779 - DNA, 683 bp, Homo sapiens
tctatttgtctttctgtttgtattgctatagctttataatatattttggaatcaggaagtgtgatacctctaactttgttcttctccacagctactttggctactcattgtcccttgagattccatatgaattttaagacttaatatttctgaaacaaatgtaacattgrgattttgatagaaaatactttgaatttgtgcttcactgtgagtagtattgacatcttaataatattaaattttctgacccttgaacaagaagtcaagagtgttctgttttaagtttcacatattttttcatttgccagtttccttctgcttgtgatttgcagctgaggtctttttacgctgcccatgctggtctccaacttttgggcttaagctattctccctcctcagcctcctgatgtgtttcaattacatggatgagccactgcacctggcctctttattgtttttctgatatttttaggatttgaaggtaatttttgaaaagattgataaatatgtatctctttagaaagtttttcactattaatgtagtcaaaaccacataaaatttaccatcttaaatattttaagtacatagttaaataatattaaatatattcacattgttatgcaacatatctctagaatgtttttatgttgcaaaactaaaattcaatagccatgaaacaaca

SEQ ID NO: 866780 - DNA, 683 bp, Homo sapiens
tctatttgtctttctgtttgtattgctatagctttataatatattttggaatcaggaagtgtgatacctctaactttgttcttctccacagctactttggctactcattgtcccttgagattccatatgaattttaagacttaatatttctgaaacaaatgtaacattgagattttgatagaaaatactttgaatttgtgcttcactgtgagtagtattgacatcttaataatattaaattttctgacccttgaacaagaagtcaagagtgttctgttttaagtttcacatattttttcatttgccagtttccttctgcttgtgatttgcagctgaggtctttttacgctgcccatgctggtctccaacttttgggcttaagctattctccctcctcagcctcctgatgtgtttcaattacatggatgagccactgcacctggcctcttyattgtttttctgatatttttaggatttgaaggtaatttttgaaaagattgataaatatgtatctctttagaaagtttttcactattaatgtagtcaaaaccacataaaatttaccatcttaaatattttaagtacatagttaaataatattaaatatattcacattgttatgcaacatatctctagaatgtttttatgttgcaaaactaaaattcaatagccatgaaacaaca

SEQ ID NO: 866781 - DNA, 639 bp, Homo sapiens
ctgactctgaaatatgttgtatgcaataaaaactctgtactatttaggtgttgtttctgacccacgatactagaaataagcatcaactacccatacaaagttttgcttaggaaaaatgaaagtatattcaaatataaatttttataaaatgaccattaactaaaaagaaaagccttcctttccccaaacatcaatagaygcagagtggaggataatatttacaacatgcaacataatgtttggttctaattaatagactatttcaatgaaatattattttgataaatatgttcatgcttcatttgccatgtattaaaaacagcaatacacattcacttgatgaaaaatattattgaagataagacagaagtatttcataaacaaccattaggtagattataagataacatacgaaaggtgatattgtaaatcaatattagaaacacatattcttcatctatgacctaacttgtattgaaatgctgcaaaaaccttagagcaacattcagagaattacctgaaagataactctggcatcttccatggccttatatgtgttttctttaatggtcacagtgattcccatgttcaaagttattcactgaggacaacgcatgtcctgagattctcatcattgaa

SEQ ID NO: 866782 - DNA, 538 bp, Homo sapiens
caggagagagaaaaggggtctgtgggactccagcctttattgggcccagaacattatccaaataagttttccacggggcactagtcggtggggtgagtgccagcaggcacacttcttgactcctgctgcaatcgagcaggtcactctggcgtgtgggggctgtccatgtgcactgtgaggtctgtggggtgagtcaggtaggttgtatccaacgcttccatagctggtagtcaccaggaggaggcaactgtgtagggtcaatatctgggccagccacactgaggaactgtgagggttagaactggaaattgtcaagggaatccgaacccagctaccatatgagagagttcaacttatgttcaatgtgaatgccatggcaatattaaaaggtacgaattcgctmcatacgtgcttgaggtaaataggagaaacctagaatttatgtaaacagtgagaagattggatgcgttttatgtcacatattttaatactagcagcttattatatatgtcaatccatcaggcattcagaagtatag

SEQ ID NO: 866783 - DNA, 524 bp, Homo sapiens
gttaatggcatccaagaaggaaattgctgattctttactgcctgccgacctacctatattttgctccagtatattggtggctacctcagttactcactacttgcccccagaatgaggttaaatttgtcaaaattatgattccccttaatgatggaaccaatattgtgattctcattctaaatcttttattgtaatgaagaggtaggaaaaatatttctacacaagaactccttaayccccagcacacatcctcattcttaaataaatatccagatatccattcacactcaatggatatttatcaagggtgttctgggtcctataagctagcagtaagcaagactggttccgttcatgctgtcatagaacttacaatctggagtgagaagagagacattaaacaattataggaattgttcgacaacagttaggatatgtatcatgagaaggcagaagttaggagagcttgtcaagctgagtataatttaacatagataaatagagaatccttgcccaagaaagca

SEQ ID NO: 866784 - DNA, 621 bp, Homo sapiens
agttatatttgttttcataactacctttataataccctttagactgaaatccttttttgataccttttatgtctatctatccatccatttatctcctgtctctttatcatcatcatcatcatcatcatcaccagccccatcatcttatccttttctctatgagcaataataaaattagtttwtgtattagtcagggttctctagagagacagaactaataggatatatgtgtgtatgaaagggagtttattaaggggaattgactcatgcaatcacaaggcaaagtcccgtgataggctgtctgcaagctgaggagccaggaagccagtagtggctcaacatccccaaacctcaaaagtagggatgccaacggtgtgcagccttcagtctgtggccaaaggcccaggagtccctggcaaatcaccggtgtaagtccaagactccaaaagccaaatagcctagagtctgacatttgggggcaggaaacatccagcacgggagaaagattaaggctggaagacttagcaagtcagctcattccaccttcttctacctgagttttctagccactctggcagccaattggatggtgcccacccagactgaaggtgaatctgcctc

SEQ ID NO: 866785 - DNA, 596 bp, Homo sapiens
aatactctgtatgatgctagactggtgcatacatgtcattatacatttgtccagacccatagaatgtacaccaccacgagcaaaccctaatgtaaaccatggactttgggtaattgtgatgtgtcagtgtagatgcatcaattgtaacaaatctagcactttggttggggatgttgataatgggggaagctgtacatgtaggagggtaggggatagatgagatatccccataccaacctttcaatttcgttatgaactactctaaaaaatagcatttttwaaaaaaacaagtttattctatctcatcacctattagaaaatccactttggggtaatttaagtgctattctatactatatcaatgacattctggtgtagattacaagaaacttctaaagaagagacagaagagtatcagcactaatctgttaagtcactcttgtatagttcctttccctttatatttaagcagtgtgtatggtggagatggtggtgaggcagcaggtagggtaataccaagataacatatggatgaaaaaatgttacatagtgtaatgagaattagctttaaaagggcaattgtttctattttaaat

SEQ ID NO: 866786 - DNA, 596 bp, Homo sapiens
aatactctgtatgatgctagactggtgcatacatgtcattatacatttgtccagacccatagaatgtacaccaccacgagcaaaccctaatgtaaaccatggactttgggtaattgtgatgtgtcagtgtagatgcatcaattgtaacaaatctagcactttggttggggatgttgataatgggggaagctgtacatgtaggagggtaggggatagatgagatatccccataccaacctttcaatttcgttatgaactactctaaaaaatagcattttttaaaaaaacaagtttattctatctcatcacctattagaaaatccactttggggtaatttaagtgctattctatactatatcaatgacattctggtgtagaytacaagaaacttctaaagaagagacagaagagtatcagcactaatctgttaagtcactcttgtatagttcctttccctttatatttaagcagtgtgtatggtggagatggtggtgaggcagcaggtagggtaataccaagataacatatggatgaaaaaatgttacatagtgtaatgagaattagctttaaaagggcaattgtttctattttaaat

SEQ ID NO: 866787 - DNA, 572 bp, Homo sapiens
tctgatgatcgttacaaatagaaaagctgtgtgtttgtgtctgtgtgtgtgtgtgtgtgtgtgtgtgtgtgtgtgtgacagagagagatacttgtgcttcgtcagtgaatatctgagctctaagtggttgattgaagtttgcagtttggctaaagctattcataaaccctttacttcgtgccttcctctgctaatgacaagaaagctaaacacagttaactcctcattttcctccagccctgagcagttagttgacccagttctgaccagggagatggaarcagaggctgctgggtggtgcttaggttaaatttttaaaaaggaacagaccctgttggtgttcttctctacccacagatctttacctgtctcccccatccccctgcaacatagacactatgccaaggaatacattagccctctgtcacccatgggtgaaagccaggtactgatgatgacagctaagcaaaaagaagaatgagcatgtgatagcagaacattctagaagagctgtgcaatgctgggcctcctgctctttcactttttgttatgtgagaccaataaaattattt

SEQ ID NO: 866788 - DNA, 633 bp, Homo sapiens
ttttttatatttaacattggcagtttccaatctgtgaacaaattgtattctgaaattatcagccaggggagtttgaaaagcatgcggtttgcacagagactgctgtgtttgaatctctatcattttttagagatgttaaattgggaaacttaattattatgattctcaaattttttatttataaagtgaagataataatatctgtatggaagctgttttttgaatacatgcctgaaatgtagtcactcaacaaatgcacttccctttcctccaaaaaatctttattttgatagtattcaaaactaacaacccaatttcctatttaaaacartaaatttcctggtggtgtatatgtatttcaaaacatcatgctatataccttgaatacatacaataaaaaattgcagttcagccaatacatccgtgtcgttcacaattcactggaaagattacactaagaatgttattccaactcctcacacctcatagtcctagtattgcttccacaggataataaaacttcagttacaacttggtacaacaaggacacgtgctgtaaggcccagaagtgagaacgctctctgctctcctgttttcagtgcccgtcagcttggcaatgagctctctgtaaga

SEQ ID NO: 866789 - DNA, 575 bp, Homo sapiens
ctttatttttccacttacttaggccaaaaatattgatgttatttttgccttctggttttatctcactcccattactgaatccaccagcaaattctagtagctctatcttaaagcatatccagtgaccacttatccccagcccacagttacctctctaagttaggacaacactgtcacccacctgtgtggttgcaacagcctcctaactggtttccctgcccctctgcagagcaggcagagaggttctgctgaaacataaagcagaacaygtccctcccctgatggaattccccccatgactcttctcttacacagggtactaggtgaaggttactatggcctaagggcacagcatggaaatggcctggccctgctttaggtctctgacctcttccttcattcattcatctccacctgtgttagcctcctcactattcctttcttttggccaagaacctggaaatgtcacaaagtaagcatttttttgatacttacaaataagtataaattgaattaatcagctacagcttgagagatgctgttgcttacccaaacatagacaacaagaaatcatt

SEQ ID NO: 866790 - DNA, 451 bp, Homo sapiens
gagacagaaagttaacaaggatatccaggaatttaactcagctctgcaccaagtggacctaatagacatctacagaactttccaccccaaatcaacagaatatacattctcagcaccacatcgcacttatctcaaatttgacgacacagttggaagtaaagcactcctcagaaaatgtaaaagaacagaaattataacaaactgtctctcagaccacagtgcaatccaactagaactcaggaataagaagctcattcaaaaccactcaactacatggaaactgaacaacctgcttctgaatgactacwgggtacataacgaaatgaagccagaaataaagatgttctttgaaaccaatgagaacaaagacacaacataccagaatgtctgggacacattcaaaggagtgtgtagagggaaatttatagcactaaatgcccacaagagaaag

SEQ ID NO: 866791 - DNA, 664 bp, Homo sapiens
gaggaaaggactccatattcataaatggtgctgggataactggctagccacatgcagaagattgaagctgaacccctcctgataccatatacaaaagttaaggcagtatgtattaaaaacttaaatgtaaaacctaaaaccataaaaaccctggaagataacctaggaaatacaattctggrcataggccctggcaaagatttcatgacaaagatgccaaaagcaactgcaataaaaccaaaaattgacaaatggaacctaattaaactaaagaacttctgtgcaggaaaagaaaatctcaacagagtacacagacaatctatagaatgggagaaaatgtttgcaaactatgcacctgacaaaggtctaatatcaagaatctacaaggaatttaaacaacttaacaagccaaaatcaatgccattaaaaagtgggcaaaggacatgaacaggcacttctaaaaagaagacattcatgcagccaacaagcatatgaaaaaatgctcaacaatactaagcatcagagaaatgaaatcaagaccgcaatgagataccatctcacaccagtcaaaatgtctgttattaaaaagtcaaaaaataacagatgctggcaagattgagaagaaaagggaacatttacacagtgctggtggatatgtaaatta

SEQ ID NO: 866792 - DNA, 633 bp, Homo sapiens
tacaaaggagatgaaggacctctttaaggagaactacaaaccactgctcaaggaaataggagaggacacaaataaatggaaaaacagtccatgctcatggataggaagaatcaatatcatgaaaatggccatagtgcccaaagtaatttatagattcaatgctatccctatcaagctaccattgactttcttcacataattagaaaaaactactttaaatttcatatggaaacaaataagagcccatatagccaagacaatcctaagcaaaaagaacaaagctggaggcatcacactacctgacttcaaactatactacaaggctacagtaactraaacagcatggtactggtaccaaaacagatatatggaccaatggaacagaacagaggcctcagaaataacaccacacatctacgaccatctgatctttgacaaacctgacaaaaacaagcaatgaggaaaggattccctatttaataaatggcattgggaaaactggctagccatatgcagaaaactgaaaccagaccccttccttacaccttatacaaaaattaactcaagatggattaaagacttaaatgtacgacctaaaaccataaaaactctagaagaaaacctaggtaatac

SEQ ID NO: 866793 - DNA, 566 bp, Homo sapiens
tgtcccctgcccctcgccagccacccaaagggaggtacagaccttggctagggtgggagggcagctgggcctttcctacgtggctattcacaagcacctgccttgactttttttcttttcagactgtaaatacactgtccacgaacgctgtgtgtccaraaacattcctggttgtgtcaaaacgtactcaaaagccaaaaggagtggtgaggttggtgacatctactgccttgttctactgcatgcctcatccaggaaacatgtccatcaacatggattcctgggcaggaaggggcactgggagcttcatccagtcccttctctgccttgaggaccacctgtaaaccatcccgttcatccatccatccattcagcaccttcctggtacccactatgtgccaggcaccatgctagggggtacacaggttgtaagagacgctccccagcctgctcaagaactatgctgtctagaaggagagacgggcatgtaagcaaagaacagaatagtgagatgtgtgctacagtaacacagctgtgtggaaggtacagtggaagcacggggcaag

SEQ ID NO: 866794 - DNA, 625 bp, Homo sapiens
caaacagtgatgagtgggaattcctaaactcactgggaataagtttcctacctaaaggatgaaggcttaaaatatagatcaagttatatttccctgagcttatgaaatcagattcagagtcacacaagtaacattctggaagtaataaagtttcctgaaacctctatttcttttttttagacagagtctcactctgttgcccatactggaaagcagtggcatgatcttggctcactacaacctttgcctccctggttgaagcgattctcctgccttagcctcccaaatagctgggattacagatgcctaccaccacacctggctaatttttstattttttttttttttagtagatacagggtttcactatgttgcccaggctggtcttgaactcctgacctgaagtgatccacccgtcttggcctcccaaagtgttgggattacagatgttagctactgcacccagcctcctgaaacctctttagaaggagctgggaaactccaggagaacacagaagcaagccaaattttaagggcctaatgggctgtaaattactccatcttggctaaagtaagctagggcagtgctagaggtcttaaaacttgcctccataaccattccagg

SEQ ID NO: 866795 - DNA, 585 bp, Homo sapiens
gagccaggactggagcatcaacctccagaacctctcatttgaagtcaacttgagcttagatctgccagctgtgttatttttactttacatggctttcaagagtttctgaagtgcagcacacacatgcaaacacataccagatgcctccttcgtttctagacccaagtttctatctggtatcaggtgcctttaacttgcttctactcagatcactgactgaaattaaagctacctggtgaagtagcaggactgggccattaaccactggcccagcagctgggagtgatggactttccgtgaaggtgagctcaggagtaccgagctcgcacaatgagcaggagtcagcccggggctgtcggtgaatcattggcctayggctcacgcatctaggaaaatcttttgaagcacagcaaagtaaagagagaaattcctagacttaatgccatcttcttgtggacagaagcctttagagatccctcactttgctctgatcgtctttcataacttaagagtacccttttgatgtctctcagccccaggactgttagaaggctttgtaaagtgcaaagagccaaacagctaata

SEQ ID NO: 866796 - DNA, 601 bp, Homo sapiens
tcttatgactgcattgtattctgtcttctcagtattatactaactagtcctccacttatttccaatttttaagtttttttcaacttttcactgttataaacaactgtgaaaacctacatcatttgcagatttttgtakgtatctttgattatttctttaggaaaagctcctagatatcgaatttcttggtcaaggtttgtacattctaatagcttttgattagttgagtcagattgtcatccaggaaagtgttatcagtgattgctccattaatattgtgttggaatatttaataccagccaaagatgggaaaaaataggcagtttgcttgataactcccaagatcctttttaaaaaagtaaactttttggccaggcacagtgtctcacgtctgtaatcccagcattttgggtggctgaggcaggcggatcacttgaggtcaggaggttgagaccagcctgaccaacatggtcaaacctgtctctactaaaaatacaaaaaaaattagctgggtgtggtggcgggcacctgtaatcccagctactcaggggggctgaggcaggaatatcacttgaacccgggaggcagagattgcagtgag

SEQ ID NO: 866797 - DNA, 603 bp, Homo sapiens
aatgtagaatgtaacctgtattattttttaatgtatattttattttacttcagagtctgaatctacatggaaacagcttgagtaaattgagagatctctccaagttaacaggacttcgaaaactaaacattagctttaatgaatttacctgtttagatgatgtataccacttggtaagaattgttcctttgaatctaaaaaagtgaaactcatagaagcagaagtagaatggtggttatcagggcctaagggctaggggaaatggggagatattggtcaaagggtataaactttcagttataaattagacaagttctaggtatctgatgcacagcaagtgtggtgatggatgtgttaatttgattgtggtaatcattacacarttatatcaaatcattacattgtacaccttgaacatattcaaatttattctgccaatttaatattttttaaaaactgtgctgactctgggcacactgcccaggagttaggcctgctctcaaaggaacagctataaaataaaaagaaaaaactttggtgcagaaaaaagatcatgaagtcagaggacaaatgataaattggaataagcatttgaaaaaagag

SEQ ID NO: 866798 - DNA, 612 bp, Homo sapiens
aaaccaatcatgccttcccaatggtcccccaactcagttcagcattagttcaaaattccacagtccaaagtgtgagctgagacaagtcaagtccctcctgcctatgagcctgtaaaatcaaaagcaagttagttacttcctagagacaatgsgggtacaggcattgggtaaatacacccattccaaatgggagaaatgggccaaaacaaaggggctacaggccgcatgcaagcccaaaatccagtgaggcagcaaaatcttaaagctctgaaatgatctcctttgactccatgtctcacatccaggtcatgctaatgcaagaggcgggctcccacagccttaggcagctccactcctgtggctttgctggatacagcctccctcctggctgctttcacaggctggcattgagtgtctgtggcttttccaggtgcacggtgcaagctgtgggtggatctaccattctggggtctgaaagacagtggtccccccctcacagctccaataggcagtgcccagtggggactctgtgtgggggctccaaccccacatttctttttggcactgccctagcagagggcagcaggcttctgcctggacatctaggtgttt

SEQ ID NO: 866799 - DNA, 603 bp, Homo sapiens
taacaaacagtctctcaaatcacaatacaatcaaattagaatttaagattaagaaattcactcaaaaccacacaactacatggaaattgagcaacctgctcctgaatgactgctgggtaaataataaaagtaaggcagaactcaagaagttctttgaaactaatgagaacaaagagacaatgtatcagaatctctgrgggcagataaaggcagtgttaagaggggaatttatagcactaaatgcccacatcaaaaagttagatctcaagttaacaacctaacatcacaaccaaaagaactagaaaccaagagcaaacagacaccaaagctagcagaagacaagaaataactgagatcagagcagaactgaaggaggaaagagacatgaaaatcccttcaaaaaatcaacaactccaggacgtggttttttgaaaaaattaataaaatagatagactgctaactagactagtaaagaagaaaagagagaagaatcagataaatacaatctaaaattgtaaggggaatatcaccactgaccccacaaaaatacaaacaaccatcagagaatactataaacacctctatgcacatgaactagaaaa

SEQ ID NO: 866800 - DNA, 622 bp, Homo sapiens
tgctgggataactggctagccatatgctgaaaattgaaactggactccttccttacacaaaaattaactcaagatggattaaagacttaactgtaaaaacctaaactataaaaaccttgaagaaaacctaggcaatatcattcaggacatgggcacgggcaaagatttcatgatgaagacaccaaaagcaattgcgacaaaagcaaaaattgacaaatggsatctaattaaactaaagagcttctgcacagcaaaaagaaactatcaatggagtaaacagacaacctacagaaaaggagaacatttctgcaaactaagcatctcacaaaggtctaatatccaacatctataaggaacttaaacaaatttgcaagaaaaaaaccaaaccaccccattaaaaagtgggcaaagaacatgaacacatacttttcaaaagaaggcatatatgtggccagtaatcatgcaaaaaactcaacatcactgataattagagaaatgcaactcaaaaccatgatgagataactatctcatacccatcagaatgactattactaaaaaggcaaaaaattactgatgctggctattcttaaaaaggcaaaaaaaatatggattatggttgcag

SEQ ID NO: 866801 - DNA, 644 bp, Homo sapiens
actaactctgctttatctttagtttccagatagcaaaactccagtatataagagaaagtatgttattaagtcactgaagggaattttgaaacattatagtctactagggctgccataaggaaatatcacagacgagaatgccttaaaaataaaaatacatttacagtcccaccaacagtgtaaaagtgttcctatttctccacatcctctccagcacctgttgtttcctgactttttaatgatygccattctaactggtgtgaaatggtatctcattgtggttttgatttgcgtttctctgatggccagtgatgatgagcattttttcatgtgtctgttggctgcataaatgtcttcttttgagaagtgtctgttcatatccttcacctactttttgatggagttgtttgatttttttcttgtaaatttgtttaacttctttgtagattctgcatattagccttttgtcagatgggtagattgtaaaaattttctcccattctgtaggttgcctattcactttgatggtagtttattttgctgtgcagaagctcgctagttcaaccattgtggaagacagtgtggcaattcctcaaggatctaaaactagaaataccatttaacccagccatcctgttactggg

SEQ ID NO: 866802 - DNA, 590 bp, Homo sapiens
gtaagctggccttattctgctgcttagagtcccattgacaacaaccttaattaaatgctgtaagggacaaactgaaaagatgtgagtagccaggggagttgtatattcatgtgaaaatctgctagaagccaagaccatagaatcgaggagtgagagaggctgtcagattgctcgtgcctctacacatcattctgggtataccaagaatgcaaggccctgactgcatctcacctgggccatttctcatggttgtgtttgcagcaagcaactttgagagaagaggcagtgtctccctccaggacaaagaggaggtctgcgtactgccttctataaaacagcagattttccaagcttgtcgttccttcacttggatgcaacccactgcctgtgcagtcatccatttaaacccrtagcgtcaccctgtgggacttggatggcaagggaaactgcttctaacatgcatcctatttcctgtaataaagtcctttgtctctaacccaggagtctcatcttctgccagcagtcacgacacaataacaagctaatttattaatttctaaataaagcaaccctgacagtctgttttcttg

SEQ ID NO: 866803 - DNA, 617 bp, Homo sapiens
gaagagataagaaagtcaaatgagaaaaaaaatccacagccaccagaggagactggtccagtgctaccacaggagatcaacccacaagttgaagagaaaacacaaacaaagccaactgagaaaattctagagttaccagatgaaaccaaaccaagggagacacatgtagaattttccaaggaagacaggccagaaccaataaagtctaagtattctgtaggaaacgatgagctagagcaccgtgagcctaaaagaggaaagttgtcactaagtgacraatttagaaaagaatattacgcattaggatctctcagagaaagtgaagaatcaattggtacacattatgagtttttgcaaccactccaaaaattgcttaatgtcagtgaagaatgctcatactcagatccctcagagtctcagacagaattaagtgagttcgttcatgaaaaggaagttgtagatttgtcccaagagttgaaggaacgggtctctgaagatgacgaaacccagccagaaaaagggactgagttacaatttgagcatcttaattgggatccagaggaagttgcagagtggattagccagctaggcttccctcaatacaaggtatacaaaaa

SEQ ID NO: 866804 - DNA, 680 bp, Homo sapiens
caacaccactggcctggggatggagacgtgtctttcttgttccccttggcaacattgagactcttcctccctgctttctagagccccctgtcttggacccacaggtgtcaacctagacatcttgctgcccatcgttgttagtcatcaaggagtcccccaggccactctccccttcccccctcactgtctccccagtttttttcctgtcttcattcttgctgatgtcaatgtccacatctccacaaagatgatccttctgatactcagccgctcgctcccacggtcatgtcctagacccgatcaccaccgatagccggaatctctttcatttcagcaccaaacatcccactttcrgcatgccactccctctgctctacacttactagccgtccacaattcttctacctccccttggaactccagtagctttccctggtcctcacccatcttgcatcttatttctctcctggctcaaattccacagcaaatcattacaattattcacctgctacaccctcaaccctcttgtgttatgctcatacttgctggggggaagcctctacccctactaagtcttccacacctgcaaccatacaggtgaatccagcacagcaagtctggctgctctcgtcaattcaagatcatgagcctccacaggccccattgttgcctggcaatcc

SEQ ID NO: 866805 - DNA, 461 bp, Homo sapiens
agtggctctgctctctgcaagttgtccgaggcagcaggctcctggtttgtgtagtagggttaaaggtgaggaagagtgaggtaagccccaacgcagccctctcagagaagtgggagctcaagatctgcctccacctccctcatctccagacacctgcactccaggctgggagccctcagccctggaggaaccatctctgaagttaggggatgcctcctgctgatggtgcaggtcagagggatcctarcccatttccaaattctttagcctcaagactgttactaggagcctagaaggtctcttcttccatattctcgccatcctcatttccaacaacacacatgtgcatgcacacatgcacacactcacacaaagtcaacacacacgcatgcacacacacgcacacatgcacagtcaacagacgtgtgcatgcacgcacacacatacagtcaacatgtgtg

SEQ ID NO: 866806 - DNA, 619 bp, Homo sapiens
gctggaagggacctgggtgatcactgtgccaatgctaatattctattcactttttcattcatttgttcatccagcagatatttattaaacacctattatatgcaggcactataccaggtgctgggaatacagccaccatcaagagagacgtttagtttatccctgatggaatttaagcttaggtggaagggcaagcggtagacaacacaagtatgtctataattacacattatgatgagtgttctgaaggcaaagtattggggggcactgagaattagagagacctaatttagaatgatggggccgggggggacaatgatagctaaaattcgttgagcactcaccgtctgcaggccctgctgcaagggcttcacaagtatcacctcatttaattttcacaatgrgtcttggagaagagctaatgttattattgttgccttgttacggaagagggaactgatacatggaaaggtgcccagtctggaactaaaaccaaagcttgtaaggctctcctacacttaacatcccaccgagatgtttttgctgagaactgaaggacagatgggggtcagaaaaaacagagaaattaggaaagtactgataatcctggccacgtgtg

SEQ ID NO: 866807 - DNA, 603 bp, Homo sapiens
tacctgatccgttcagatttcctttattgtttcatcatactaatgaactaaaaataattctttgataccatccatgttaaaataccccaaattgactcaacagtgttgttgttttctgtcctcacagtctgttcccaaacaatgttttkttggtgtgttcaagtcagagtccaaacagaatactgaaaagattcttagtatagatcagggtttctcagcttcggcactatggacattttgggcaggatgattctttgttgtggaggggcttgtcctatgcattgtaggatgtttaacagcgtccctgacctctacccattagatgccagtggcagcccccagtccgacaaccaaaaatgtttccacacattgccaagtatcccctggagacaaaattaccctctgttgagaacccttgacctaggtcagtccctcctattttctttttctacctcatgtctttgaacttgatgaaaaatctgttgtcagttttcctgtagaatgtctgacattctgcattgtctgctttttcatggtgtcacatttgacttgttcctatgtcttccacattttttttttttttgaattagaagttaactctgg

SEQ ID NO: 866808 - DNA, 603 bp, Homo sapiens
tacctgatccgttcagatttcctttattgtttcatcatactaatgaactaaaaataattctttgataccatccatgttaaaataccccaaattgactcaacagtgttgttgttttctgtcctcacagtctgttcccaaacaatgtttttttggtgtgttcaagtcagagtccaaacagaatactgaaaagattcttagtatagatcagggtttctcagcttcggcactatggacattttgggcaggatgattctttgttgtggaggggcttgtcctatgcattgtaggatgtttaacagcgtccctgacctctacccattagatgccagtggcagcccccagtccgacaaccaaaaatgtttccacacattgccaartatcccctggagacaaaattaccctctgttgagaacccttgacctaggtcagtccctcctattttctttttctacctcatgtctttgaacttgatgaaaaatctgttgtcagttttcctgtagaatgtctgacattctgcattgtctgctttttcatggtgtcacatttgacttgttcctatgtcttccacattttttttttttttgaattagaagttaactctgg

SEQ ID NO: 866809 - DNA, 646 bp, Homo sapiens
gaaggggaagggaaatggggttctggccttttctatctcctagaagttgcttcagtctggtaagggcttgcagcagtggagtggggagttgtgagcaataatggctgccggcctctgtgtttgcccttccataatcaaaagtagcaatcaacaaccagaacgcagatgctaacacttggaggacagagtgcttatygcccatgattgttcccacaagcttggtacaagctgcttcaggaacacatgcaaagcttcttgccgtgaagctggggcatggggattgggtagccactgctgagctaagagctgaaattgaccaaaattaagtaaaaattatagtttaagccttcatttggaggttacaagcctcctttgatagagtctagagttccaaaatagttatatcaggcagattctgccagtgtgattattttctaggtggggagatgaattcccagtgcttcctactccactttcttcccagaaccctctcttgtaatagttttttacttaaaatctattttgtctatacttttttttccatatatttactttttattgaatttgttaacgttacagagttcttgcactgccaaaccatgcctgagaattcaaacaaatggtacaatggacagcctcatccacc

SEQ ID NO: 866810 - DNA, 523 bp, Homo sapiens
attaatttgtgatgtgttatatggtctatcctgaaaatgtcccatgtatacttgagaagtatgtgtattatgttgttgggtagaatatcctgtgtatgtctgttaggtctagttgttttttcaggtgttgttcaagtgctgtatttccttacttatgtctggtctggttgttttattcatttgtgaaatgaagacaagggacaaaatcctaagacatcccccttaaaacggaaggaccacccgcagaaaaggactgagagacccccagaatctatagcttagctaattgatggtctttctctcctgaagytagtaaagagtggaaaagatgactccttcttcaaacatgaagaaagcaatctaagtcttcaaagaacaggaagcatgagaaaatatgacaccaccaaagaaacaaaatgaaactccagtggctgactccaaagacatgaagatctacaaattgcctgacaaagaattcaaataatcatcttagggtgacatcagcaagatggcagaacaggag

SEQ ID NO: 866811 - DNA, 617 bp, Homo sapiens
ccactaaaacaaaaggtgggcatatttgcaagcatctcttctctaagaatgggcatttcttaagctctgtttattaagctgttacacaagccctctgctgatgtggcatcagcatcatctaagccactccccaaagagacttgggggtagaaaaccaatgtgaatgtgaagctcacactgcctacagtgccataaggaatgaagtcctttgtctctgaaataggattctcatgtcttctgccaacatcaaggaaattgtggctggctaacttgttagcttagaaataggggaaaatattagatccttgttagttctcgatcataggattcttgactttgggcagtatgcacayggaaacagctcctcttcacttccaaagaacatacagtgatggttgcacctcaagagagcctcttatatctgacattgcagaggggatagtggaagattatggctttggtgagagcaataactcatgagcatgagtcagagatgatttagccaccccttctcccaacacacacgtaattcaaagtgaaacttataattcataaaatatatgaagtataataaagccagcaagtctttttccccattgtgataattttaatgcttt

SEQ ID NO: 866812 - DNA, 518 bp, Homo sapiens
aattatctgagcatggtggccacacctgtaattccagctagtctgaaggctgaggtgggataattgcttgaactcgggaggtggaggttgcagtgagctcagatggtgacactatagtccagcctgggtaatggagtgagactctttctcaaaataaataaataaataaataaatacataaatacatacataataatgtaaacttttctgatactggatttcctatgaataactgtgtttttaatatgcctggcgtatctgcccatctcttgtttargtctatctaaatccctttgtctatggtttgtctcttgtatacagcacacagttggattttaattattgagcaaatttgaaaataaaccacttttaataaaagaactgtgctcatttacacaattgatatgaatgacatatttggtcccaaatcctttgtaatatttttaaagctttattgaggtatacttggcctaaaataaattgtatatactaaaataatgtgataaactttgacatgt

SEQ ID NO: 866813 - DNA, 690 bp, Homo sapiens
atcccagcactttgggaggccaaggagggcagatcacgaggtcaggcatttgagaacagcctggccaacatagtgaaaccccgtctctactaaaaatacaaaagttagctgggtgtggtggcatgcgcctgtagtcccagctacttgggaggctgaggcaggagaattgcttgaacccaggagacagaggttgcactgagctgagagcatgccactgcactccaacctgggggacaaagtgagactctgtctcaaaaaaaaaaaaaagaaaatatttgaacaaataaataaataagaaatgatagacaaatctcccacgtagtaaaacttcaatagtttacatagacattacccaagaggtgatatatctwcccaccacttaagagtaggatgcacacattgattttcttctaaagaatactgtagagaaatggtaacagagattaaatttacagtgtgcaaacctggccagtgttaactaagacatatgaccaaagttgacagtataactgataagtcaggatcatagcacacacacttgatatgatgtagtcattcttctaataaatcataattccagtctatttatgagaaaaccccagacaaatcttaattgaggaccattttactaaaacctgacaatatttcccaaaacgcttaaggtcatcaaaaacaaatgaaaatacgaga

SEQ ID NO: 866814 - DNA, 581 bp, Homo sapiens
aagttttattgagtgaaagtagctctcagtcgatataggagacagaagggaaacggttttctcctagagttctgccacttggtggcccctgctctcctctgactgccccagccaaactctgcctagtcccgccggtcaatggcctgccatctggcgtaccagaatctctcggtgagctcttttgccggcgtgctccctcaacgtcctcttgccatcgagccgctgtgtcctcttctgctgatctgcttcgctctatgtccagccgcctgtgtatctgatcactagggtgtggggttattataggcccaggatggggccatggtgggccagggtagtcttggaaaatgcaacatttgggcctgaaagcaggagtgcctgtcctcacctaggtctgtgggggtggagccctagccagggactcgcctttctctacytccctgtcctccctttttgaatcatttaaagggactatgctcttccctttccagtacctccgtatcactggagagtaacaggtactggatattcttgggcccatggattatagaaatgtaactaagcctattttccccttctgaaag

SEQ ID NO: 866815 - DNA, 591 bp, Homo sapiens
accaaataccacatgttcacatgttctcacttacaagtgtgagctcaatgatgagaacacatagacacacagagaaaaacaacacacactttggcctattgaagggtggaggatgggaggagggagaggatcaagaaaaagaaaaataatgggtactaggcttaattttgattgatgaaataatatgtacaacaaacccccatgacacaagtttacctatataacaaacccagacatgtaccctttaacttaaaataaaattttaaaaagtcattctttttaaggtggacatgtaaacaaccaatggatattttgtaacttgtgttatttaccagctatctgccttaaatcaattgactatatagcccgtgtgatctttcatatattaatccaaaagagtaacaattgaggtagtagcatgggcaattggggtaaatctraacacataagaggagtgacttcaaatttttttaccagtaaatatcactaccaatatattccaccccgtgaaatttatatagtaatgatgtcagtgttataatcattctagctagggagaataaagaagaactcaaaaaatgtttgttagat

SEQ ID NO: 866816 - DNA, 709 bp, Homo sapiens
ggagcaggctcacatctatctcactaatttggggcctgggggaaatttacaggatcagagagcaagggaaagaatttggaatgttgatttggcagggtctgattggaaaactctaatggtgatcatttgtgttaaagtatgttgaggcagattttagcctcagatcttccaggccaatagacccctcatttttgaaagytcccaccttcaggctccagtcctgtcccagtcttcttggttccgaaaggaagaattgttggttctgggtattgttagaaatcaaacctttttcaattgtgcatgcccagtccatgtgacttgtggttttggttctgtgtatacctacacagaggtaacttgacatttagttattaatagagtaggcccagtttgggctggtccagtggttacaaagcctatactctatttagacccttcagattttacaaagtgttatattttcttataggatcacatccagagtaccacattatatttaatcaacatgtcttcttagtaatctctttcttggctttgaaagtgtctcagacgttccttgtttttaataaccttgatagttttgtggagtacttctcaggtattttgtagaatgtcccccaaataggattttccggatgggtttcctataattaaacttaggttgtgagtttagagaagtaagaccacagatataagttgccatcaagag

SEQ ID NO: 866817 - DNA, 610 bp, Homo sapiens
tactaggtcacatgataaaattatgtttaacgttgtaatatactgtcaaactctcttcctaagtggctgtatcattttgcctttccacacgcaataaacaagagttcctgttactctacatccttgccagaatttgattatgtctatattttagacattagccattgtgatagttatgtactggtattttgttttaatctgcacttcccaaaaagcataagatgttaaacagctttccatatacttattttatatctgtattgcttttttggcaaggtatcttttgcacmttctttattgggttgttattttccttatacttgatttttatcatttctttgtgtattttggatacaagtcacttatcagatgtatgttttgcaaatattttccctcattctctggcttgtcttttaattctcttacctgtgtctttcacacagcagaatattttaatacaatcaaatttataaatttttttccttagtgatgctgaaacacattacctcacccaaagtcatataaatttttttcttatgatttcttctggcagtggtatagttttcaattttacgcttatgtctatggtccattttaaaataattttgca

SEQ ID NO: 866818 - DNA, 668 bp, Homo sapiens
agatgtatgtaaaataaaccgcaatttgttttcaatccatgtgtgaatcttaaatagttgctccttcttctcgtcttccacctctttttcttgttcctgctcttgttcttctcctttacttcatcctctttctccctcttttttctctcctcttcctcctcctccttttttagacatcagtattaaagaatgtctccatgtcttctaaatagatatttagaccaacagaattcaattgaaaattggtcccaattttatgtttcaaaattgttactctaacaaataccttccctatagaacagctttattaaagcatatttgttacagaatgtacctaatcactcagtgacatgtagtcagaactcagtagattcatttaaactgatttmataactgtcatcaatgattttttttattaaactaccaaatatctttctttaaggtttaaattttaatgcaattaaagatttcactgctttattgggggttttccattttttaaattgttgtaaaatacacataacataaaacttaccatgttagcctctttcatgtgcacagtttagtaatgtgaagcatatttgttgtgcaaccaatctctagaatatttttatcttccaaaactgaagctatatacccattatacaagtcccactttcccccttccc

SEQ ID NO: 866819 - DNA, 655 bp, Homo sapiens
tattttaaataaagtagttttcttaattccattttaagactgttcattgttagcatatagaaacacaactaaatttaatgtatttattttgtaccttgaaactttgtggagtatgtttactggttctaccagtattttttcccccagggagggtgaatcttgagggttttctacatataagattatgtcatttgtaaacagaaataactttaatactttattttcaataygtatttaattactttttttgtctaatgttctagctagaacttccaatactatgttgaataaaataagtgaaagtggcatccttgccacacttctcaactgagaggaaatattttcagcctttcacctttagtttagtggtagctgcaaacttttcaggtctggcctctattatttcgaggtagtttctatctgcttcttcttagttgtatgtttttatcatgaaagtatgttgtatttttccaaatgctttttgttcaacaagtgagagaattatttgtacttcttttacttcattgttactgaggtatgttatagtcactgatttttatatgctaagccatccttgcattccaggaataaatattacaccacttgcacatggtgtgtgatcctttaatatcctgctaaatttgggttgctagta

SEQ ID NO: 866820 - DNA, 541 bp, Homo sapiens
tgtctcttttctaatcagtactatgctgttttggttattgtagtcttgtagtttagaaagttgggtaacatgatatgtccagctttgttctttttgcttaggattgccttggctattagggctcttcttttgattccatatgaattttaatagaggtttttctaattctgtaaagaatatcattggtagtttgatgggracagcattaaatctgtaaatttctttgggcagtatggccactttaacgatattgattcttcctatccatgagcatggaatgtttttctatttgtctgtgtcacctttgatttatttgagcagtgttttgtaaatctctttgtagaaatctttcacctcccttgttagctgcatttttaggtattttattctatttgtggctgttgtgaatataattatcttcatttggctctctgcttggatgttgttgatgtaccgaaatgctactgatatttgtacattgattttgtattctgaaactttgctgaagttattttatcagatatatcagcttttgggcaga

SEQ ID NO: 866821 - DNA, 549 bp, Homo sapiens
cagaagcaaacttcctttgtggtgaaagtgtaagggagagaacagtggtgcccacaggcaaagcttcactaaagtccttcactcctatcgctcctatggtacaaaacaaaaagctggtccaggaaggcttgcaaagctgttcttcccatggaaaatctatggcagttgtggtaagggaagactgagggagggagtcagagagaggaagaaaataaggaagaagtctacttttggagaaagacaagaagcatccagattgttagacattcttctggccagacctactgagaaaagggtactgcacctacttaagactgtggtgaaccaaacatttcttggaagaaaacagctttttcccatctctagtacttttcatttcaacaagaatttcatagaaaagcatccttttgaawgtatgttcctggcgcaactggcaatatatcatctctatattcaatatataattcaagataaaatcaaatataggtcaggatgattatttttgaaatgtataccaatcaatgtattggaataaagacataacttcta

SEQ ID NO: 866822 - DNA, 678 bp, Homo sapiens
atgacatgtagagattacccagagaataaaatatcaatgtgaggattattaaccgatatacatcattattcactggttagaatggaagacatttgcttagataaagggtttcagttaatctatttcccatttacaccatccaaaaagggtactctaataaaaggtttaaccaaacaacaaaagacaaaggtctttaagatgggcaattgaagtraaaggagaagtattgagcagtgaaccttgcagatacaaatatgtaaacgtaactgaacagactctgccaaagttgaagcctaagtattcttgaaataaaagggattcttaaacaaaaaaatattttaaaggattaagccattttatcaaaagtgaagtaagagtaagtggataattaaagtatttcaagtttacccccagagtcagggtaagagatagcagaagtaaaaacattgtgaagatctcacagatggaatatataagatgttatggatcaaattgtgtaccccaaagcacataacttgaagccattatatgactttatttggagatagaaactttaaggtagtaattagggttaaatgaggtgataaggctgggagtcctaatccaataggcctgatgtcctaaaaagggaaagagacaacagggatgcacttatacagggaaaaggctacaggagga

SEQ ID NO: 866823 - DNA, 635 bp, Homo sapiens
tgataaaattcctgcatgttaatgctcaatgctggataaatttgcttgactgcagtgccatctgttttcagatcaatgtactataattgactgatgggaattttaaaacagaaaatccagctgttctacatttgtcctctttgaccaaaagataaattatcatattacacatctccataattacactcatttccactagagtgtgaccttgtagatagtggtgccttcagtaatcagatgacacaagattgtgtttatggaaacttcaygttaataatagggtatcacactacaaagaaaactgtggcacaaattcaaatctaaaagtggtccaattttagatcagtcaagactgctggagtctttaacaacatttaatacctgaaatcaatatgacagtaggggaggtttcacttgccttgatggagcatatgcagttaactaggtatgcctataggacatgtctcatgttcagtttttacccatatttatattaagcatatggtatgtttaaaactacatgggaagtgattcttcttgtcttcatgagtacggtgtatgactctttgaaataatttagatacaagtaacaaaagatttattttacttgattcatttacctatttgtatactca

SEQ ID NO: 866824 - DNA, 599 bp, Homo sapiens
acctaatttgtaaattaaactttatcatagatattgtgaaaggaaagtgaatcttggggcccccaaatcactaagctaaaggaaaaaatcaagctgggaactcctcaaggcaaacctgcctcccgttctattcagtcacccctctgctcactgagataaatgcatgtctggttgcctcttttggagaggctaatcagaaactcaaagaaatgcaaccatttgtctcttttctacctatgacctggaagcccccaccctgctttcagttgtccttccttctggactgmaccaatgttcatcttacatatgttgattgatgtctcatgtcaccctaaaatgtataaaaccaaatcatgctctgaccaccttgggcacatgtcatcagggcctcgttgggctgtgtcatgggtgcatgtcctcaaccttggcaaaataaactttctaaattaactgagacctgtcccagatatttgggattcacagtatgtacgtacaggaacaaagtattatagagtttggtacggtttgaggtttcaggcacctactgaggatctaggaatgtctcacccatggataagaagggactactgtgactgttc

SEQ ID NO: 866825 - DNA, 686 bp, Homo sapiens
taattattgtgtatgtcttttgcccattgtgtttctcattgtcatgtaggaagacaaaaatttgataaaaccttggaataactaaaattaataacaaaaaaacactgtatggctttagagaggttaaaatattcttaataatataaacacagaaactaaaacaaaagatggttgcagatttacataatttttacaattgtgtggtcaaaacaaacaatcaaaaataactgtaaaaagcaaataaacatctgtttcaagatggcagagcacataaatttacctttctccttcacaaaatagaactgaagagaaagttaatatatgcaaaatatattaaaatattaataacaaaataataagtccataataagaagtagtgcyatcagcagaatagaaacattgacaaatttctggagaagaaagagcagatgatgtattgacttagatacctaagaagaagaatgtgtaactctcattttgcacagaagaaatagcaataaagatagagttcagtgacaggctgttagagaagagatcatggtaatgaattaaagaactgtctgacaatttatatgttctgtgtacaaacagcaactggctgtagcatttctccctaagataaacccaagaaatactttctgaataaccattctacagatgtgtcctattgtggaaattggagagca

SEQ ID NO: 866826 - DNA, 615 bp, Homo sapiens
actaaacgtatattgtgttttcataagagcaaaaatgatcaaacatatatatagaaattatattcactataaaaatactcagtataattgcagatgtagttcaaatttataagttgaaaatattagtgaataatgttaatattttttatattgcaaagtatttttctcaaatttctctgcttagaggtagtggaattcacatcacagaagtatttggaaactgtagtttaagacagaaaagcattttatattacttattgccaactggacaatttcaagaattttaatattgacttctccattagattaaataaataaatggacatttaaaaataattaaccatatacgtgatcacctctttatcattcctggtaattttttttcaggaagaatcagataggcacaatcagggtactggaagtcctgattactcagagacgttaatygcatactatgtgaaccccaatcatgtcctaatttgccctccaaaagaaggaacaggtaaagattatcccagctgataatatctggtgatatttaagaagtataatttccagactttatatgatcactttctatatcaaagtaggacttagaaatagtaatatcaatag

SEQ ID NO: 866827 - DNA, 584 bp, Homo sapiens
tgtcagtgaatattctagcaattatgacatagacagatattttaaggtttaatctgctaaaccaagtaatctacaaaccgcaaagttgcctatacttcccacatcagggaaacaagacagtgacaatttgaactgaakagttttaagaatattatgaaaagcacttactgcaaatccatagctcagttattttttaattgccctttttaaaaaagggatagagaggcctcttgcaccagattatttattgatgatagatgtgtgactctatatatacgatacaccgtgatccttggctatataaactgttcatatcaaggaagctgttcatatacacaaaagagaagcactgacctgaagttccatttcatctctagtaagtgtcatatcataatttctttaatctccttttaaattcgattaaacaaagagcaaatatgttactgctgtgccagggtgacacattcattaatcataatgcaatttataattatgagctacatttgtttattacactaaaataatagctgccatatgagtaactaatctgatgataatctactaaaagagttcaacactacctt

SEQ ID NO: 866828 - DNA, 584 bp, Homo sapiens
tgtcagtgaatattctagcaattatgacatagacagatattttaaggtttaatctgctaaaccaagtaatctacaaaccgcaaagttgcctatacttcccacatcagggaaacaagacagtgacaatttgaactgaagagttttaagaatattatgaaaagcacttactgcaaatccatagctcagttattttttaattgccctttttaaaaaagggatagagaggcctcttgcaccagattatttattgatgatagatgtgtgactctatatatacgatacacygtgatccttggctatataaactgttcatatcaaggaagctgttcatatacacaaaagagaagcactgacctgaagttccatttcatctctagtaagtgtcatatcataatttctttaatctccttttaaattcgattaaacaaagagcaaatatgttactgctgtgccagggtgacacattcattaatcataatgcaatttataattatgagctacatttgtttattacactaaaataatagctgccatatgagtaactaatctgatgataatctactaaaagagttcaacactacctt

SEQ ID NO: 866829 - DNA, 584 bp, Homo sapiens
tgtcagtgaatattctagcaattatgacatagacagatattttaaggtttaatctgctaaaccaagtaatctacaaaccgcaaagttgcctatacttcccacatcagggaaacaagacagtgacaatttgaactgaagagttttaagaatattatgaaaagcacttactgcaaatccatagctcagttattttttaattgccctttttaaaaaagggatagagaggcctcttgcaccagattatttattgatgatagatgtgtgactctatatatacgatacaccgtgatccttggctatataaactgttcatatcaaggaagctgttcatatacacaaaagagaagcactgacctgaagttccatttcatctctagtargtgtcatatcataatttctttaatctccttttaaattcgattaaacaaagagcaaatatgttactgctgtgccagggtgacacattcattaatcataatgcaatttataattatgagctacatttgtttattacactaaaataatagctgccatatgagtaactaatctgatgataatctactaaaagagttcaacactacctt

SEQ ID NO: 866830 - DNA, 573 bp, Homo sapiens
ctttaaagacatgtggattattctcatcttctaaaccccatctaggccacctggaaatattgagtatttatgaattcactaataaagaacttcaaagaaatgtttttgataatattttataaaaatataaatgttagtattctcattrtacatgcgcaataaggtttagatataaagtaaattgtgagtaaagtaataagtcttgataagaatagtaagtattaaatctttattgtatgcttacatgaaacaatacattttcacaacaaaatgacaatgaagcttttgtgcattatgacattctgtacttcctgtaagaaaatgtgtctatattctttcagaattctttgctcacagtgatctttttactgttttataaaagctagatttctctttttataaaaaataaaaatacgtatttcataggtttagagtatatgatggtactgaaaatataggctaccaagcattctcaaaactctccctgtgaggccttggagggaggctcttcagaaataaaagccagcaccccagaaaaggtgaaactggggttatataagagactcatgtaaa

SEQ ID NO: 866831 - DNA, 573 bp, Homo sapiens
ctttaaagacatgtggattattctcatcttctaaaccccatctaggccacctggaaatattgagtatttatgaattcactaataaagaacttcaaagaaatgtttttgataatattttataaaaatataaatgttagtattctcattatacatgcrcaataaggtttagatataaagtaaattgtgagtaaagtaataagtcttgataagaatagtaagtattaaatctttattgtatgcttacatgaaacaatacattttcacaacaaaatgacaatgaagcttttgtgcattatgacattctgtacttcctgtaagaaaatgtgtctatattctttcagaattctttgctcacagtgatctttttactgttttataaaagctagatttctctttttataaaaaataaaaatacgtatttcataggtttagagtatatgatggtactgaaaatataggctaccaagcattctcaaaactctccctgtgaggccttggagggaggctcttcagaaataaaagccagcaccccagaaaaggtgaaactggggttatataagagactcatgtaaa

SEQ ID NO: 866832 - DNA, 653 bp, Homo sapiens
tagtcatcaggaaaatggaatcaaaaccacagtgagatgctgtgagtcacacatcaagtgttgacaagaatgtggaaaaatcagaaccctcatatactgcttatgggaacataaaatggtactaccactttagaaaagtgtatggcagttcttctaactattaaacgcagttacagtataatcttatgacctaccaattccattcctaggtataatctaggagaagtgaaaataaatgcccacataaaaacttacatggaaatgtttatagcagcattatttataatagctaaaaggtagaaacaccaatgtctaacaactgataaayggatacgtaaaatgtggtaattgatacaatgcaatattattcaactttataaaggaattctgatgcatgtgacaacatggatgaaccttgaaaacacgcaaagtgaaaaagccagttacaaaagaccatatattatatgattccatttatatgaaaagtacagaataggtgaatctacagacagaaaacagactagtggttgcttagggctgagggtaatggtggtactgaggtgactgcttaaaggtacatggttctgttttgaagtgatgaaaatgctctaaaattaactgtggtagtgattacatgtatctgtgaatgcatt

SEQ ID NO: 866833 - DNA, 599 bp, Homo sapiens
tttctcttcagtaaattaatgaaattattttgtcaatgtatcttgtctttatgaaactatccacacggtggtattactttcttgatttcttctaaaagcacacctttgtttttgatgggttttattcatttgacaaatatttattgactactctatttttcaggcactgttcttgtttctggagatacaatagtaagtamatagaacaggtctccagtttttgacagatttcattccagtagctggagaataatgtaaatgaaacagtatcaattcatccatgcctcatagaatctgagctgaaatctatcacaagtccctaaaatttggccattcactcttttgttaaaccaacatttttagcatcagaaaataattataaaagtatacaactctggttttgtctggcacagtactggataaattaaagccctggggggcttttaccccattatttttagtgaatcttattgaaatataatttaaaatacacttaaaaataatatttaaaattcagtgcaaaagtcattgaattattgtgggggaaaagccaatgagtttgtcacacatgaatgttaagtagaagtctggtaatagct

SEQ ID NO: 866834 - DNA, 649 bp, Homo sapiens
tactgcaagtcagaaaatcagtcatgaaatgagaaatgaatcaatgattttgtcaattaaaatataggtaaactaaaattttaaaaatgaagatgaggttagaagagatggaaagcctagatggaatgcagagaattatacttggtaggaatgaatgtgttatagaagaagcatccaggatattgcttcagacagctgtgtgtttgtgagccacttacacttggctggggtatggttttaatgacagtttctagctggattaggaaagggaaagaaagtactgttgaartctgttcagtaattaacaggtgtttatatacacatcattttattccatctatgtcttttattttaaatggagaatcaagatttacaaaggttgggatgaacagaagtctcagcaagtttgtaatagagactaaaatgatctgactcccagactagtgtagttttatacactactctgtaggccacttagctctgactgagaaggattccaccattccctattttcttttttcaatgagaccatgaactacttctattccgttttatttcactttattttattttgacaagtcatgcgtagaaaaaaatacacaagtcatccatatccggtgtgtagttgtatttataaaaaactgatatt

SEQ ID NO: 866835 - DNA, 649 bp, Homo sapiens
tactgcaagtcagaaaatcagtcatgaaatgagaaatgaatcaatgattttgtcaattaaaatataggtaaactaaaattttaaaaatgaagatgaggttagaagagatggaaagcctagatggaatgcagagaattatacttggtaggaatgaatgtgttatagaagaagcatccaggatattgcttcagacagctgtgtgtttgtgagccacttacacttggctggggtatggttttaatgacagtttctagctggattaggaaagggaaagaaagtactgttgaagtctgttcagtaattaacaggtgtttrtatacacatcattttattccatctatgtcttttattttaaatggagaatcaagatttacaaaggttgggatgaacagaagtctcagcaagtttgtaatagagactaaaatgatctgactcccagactagtgtagttttatacactactctgtaggccacttagctctgactgagaaggattccaccattccctattttcttttttcaatgagaccatgaactacttctattccgttttatttcactttattttattttgacaagtcatgcgtagaaaaaaatacacaagtcatccatatccggtgtgtagttgtatttataaaaaactgatatt

SEQ ID NO: 866836 - DNA, 608 bp, Homo sapiens
tacactgttggtgggactgtaaactagttcaaccattgtggaagtcagtgtggcaattcctcagggatctagaactagaaataccatttgacccagccatcccattactgggtatatacccaaaggactataaatcatgctgctataaagacacatgcacatgtatgtttattgcggcattattcacaatagyaaagacttggaaccaacccaaatgtccaacaatgatagactggattaagaaaatgtggcacatatacaccatggaatactatgcagccatgaaaaatgatgagttcatatcctttgtagggacatgaaagaaattggaaatcatcattctcagtaaactatcgcaagaacaaaaaaccaaacaccgcatattctcactcataggtgggaattgaacgagaacacatggacacaggaaggggaacatcacactggggactgttgttgggtggggggaggggggagggatagcactgggagatatacctaatgctagatgacgagttggtgggtgcagcataccagcatggcacatgtatacatatgtaactaacctgcccattgtgcacatgtaccctaaaacttaaagtataata

SEQ ID NO: 866837 - DNA, 627 bp, Homo sapiens
atagctaatacaaaaatggccacagaaaaacgttacagattatttattttactatcaccttattatttttatccatggtatttggattatacttggaacatatcagaatattttcatgtaagataatattgcaaataaaataaaaattctgtgtgattttattttatttatttttattttttttgagacagagcttcactcttgttgcccaggttggagtgcaatggtgtgatcttggctcactgcaacctctgcctcccaggttcaagcgattctcctgcctcagcctcctgagtgctgggattacaggcatgcgccaccacgcccgtctaattttgtatttttagtagaaacaggtttctccatgttggtcaggctgttmttgaactccccacctcaggtgatccgcccacctcggcctcccaaagtgctgggattacagacatgaaccactgcgctcagcctgctttgtgattttatatgtatatatcaaatcaattcagggcaacttctccagccctgcattctctttccttccttccatctccgccatccttacctctattgagcttattctaatgggtggaaaagacaatgaaaatatataagaaataaatatgaatgttt

SEQ ID NO: 866838 - DNA, 683 bp, Homo sapiens
taataagtgaaggagaaataaaatactttacaggcaagcaaatgctgagggattttatcaccgccaggtctgccttacaagagctcctgaaggaagcacaaaacatggaatggaaaaaacagtaccagccactgcaaaaacacaccaaaatataaagaccaatgacactatgaagaaactgctccaactaatgtgtaaaatgactagctagcrttatgattacaggatcaaattcacacataacaatattaaccttaaatgtaaatgggctaagcaccacagttgaaagacacagactggtgaattggataaagattcaagacccactcgtgtgctgaattcaggagactcatctcatgtgcagactcacatagacttaaaacaaagggatggacaaatattcaccaagcaaacagaaagaaaaaaaaaagcaggggtttgcaatcctagtctccgataaagccaacttttaaaccaacaaagatcaaaaatttcaaagaagggcattacataatggtaaagggatcagtgcaacaagaagagcaaacgatcctaattatatatgcacccaatacccagattcatgaaacaagttcttagagaactaaaaagagacttagactcccacacaataataacgggagactttaacacccaactgtcaatgttagacagatcaatga

SEQ ID NO: 866839 - DNA, 683 bp, Homo sapiens
taataagtgaaggagaaataaaatactttacaggcaagcaaatgctgagggattttatcaccgccaggtctgccttacaagagctcctgaaggaagcacaaaacatggaatggaaaaaacagtaccagccactgcaaaaacacaccaaaatataaagaccaatgacactatgaagaaactgctccaactaatgtgtaaaatgactagctagcattatgattacaggatcaaattcacacataacaatattaaccttaaatgtaaatgggctaagcaccacagttgaaagacacagactggygaattggataaagattcaagacccactcgtgtgctgaattcaggagactcatctcatgtgcagactcacatagacttaaaacaaagggatggacaaatattcaccaagcaaacagaaagaaaaaaaaaagcaggggtttgcaatcctagtctccgataaagccaacttttaaaccaacaaagatcaaaaatttcaaagaagggcattacataatggtaaagggatcagtgcaacaagaagagcaaacgatcctaattatatatgcacccaatacccagattcatgaaacaagttcttagagaactaaaaagagacttagactcccacacaataataacgggagactttaacacccaactgtcaatgttagacagatcaatga

SEQ ID NO: 866840 - DNA, 683 bp, Homo sapiens
taataagtgaaggagaaataaaatactttacaggcaagcaaatgctgagggattttatcaccgccaggtctgccttacaagagctcctgaaggaagcacaaaacatggaatggaaaaaacagtaccagccactgcaaaaacacaccaaaatataaagaccaatgacactatgaagaaactgctccaactaatgtgtaaaatgactagctagcattatgattacaggatcaaattcacacataacaatattaaccttaaatgtaaatgggctaagcaccacagttgaaagacacagactggtgaattggataaagattcaagacccactsgtgtgctgaattcaggagactcatctcatgtgcagactcacatagacttaaaacaaagggatggacaaatattcaccaagcaaacagaaagaaaaaaaaaagcaggggtttgcaatcctagtctccgataaagccaacttttaaaccaacaaagatcaaaaatttcaaagaagggcattacataatggtaaagggatcagtgcaacaagaagagcaaacgatcctaattatatatgcacccaatacccagattcatgaaacaagttcttagagaactaaaaagagacttagactcccacacaataataacgggagactttaacacccaactgtcaatgttagacagatcaatga

SEQ ID NO: 866841 - DNA, 625 bp, Homo sapiens
cagaagatgtcaaagataaaaacactgtctaatgggtgctctttttctggctagtcttaagaacttgatgcattctcttcttaacatatcattgctagaactctgccatagtgtcaaaagtaattttactataaatcctaaactggacagagagtcaaaattaatctggtagccactaacttttactgtccttactagtttgcaaagtacacagttagtttagtttccagattgatgacatcataataccaaaaaatcaacgtatttattaataataaagtaagaacaatttttwaaaaattaaggccttaaatgagatttgaagaatattaaaaataaatgttcttgctctccagggaatgagaggggaggagcaaggagaatttaatcattggaaactaagcctgtgctagtattaaagtggtataacattccttcccactgtgttgtttacagttacttttatcttgccttgaaaaatgtaagctgtttgttatttttatgtacgtttaaagtttatgttatagttttgttagaaacaaaatttcaatggcatttaaatgcaaattaactagagtttatgaaaatctattaaaattatacagtttaatcctatttaagattc

SEQ ID NO: 866842 - DNA, 671 bp, Homo sapiens
tcatttttccccaaatttattatttctgtatttttaaagttgagtacattgtatgtaaatttctcttcaaatttactgattctatcctctcatctccactctattactgtaccaaaccagatttggttattgcattttactttggttattatttttttaggttctataaattcagtttggttcttttttaaaaaataaagcttgtgttttagagtggatttatatttacaagaaaaatatgaaaatagcacagagagattccatatatcacacacccatttttccatattaatatcaaacattggtgtggtccattttaaaaaatagactaatattgctacagtgttattaactaattccataccttactgaaattttattagttttcatttaatttccattttctgttccagaatcctgtctagggtactgctttgttgctcaattgcatttttggttgcgcatttggaactcttattagttgtttcctgtgtcccatcgacayactgctatcaccatagggttatctggaatactttattgttttgtgataattagctctgtgcttagacctgccagacatcacctagcaggtggctccatgcttggcatacatcacttagcaagtcactccatgcttggccctagtgaaatcatggcagagtgtatac

SEQ ID NO: 866843 - DNA, 652 bp, Homo sapiens
aaaacctaattcaaggaatctaaggattacagtaaaaggatacagaagctgatagacaaaatggctattataagacagaaacaaagtgatctgatagagctgaaaaacatataagaatttgataatgcaatcgcaagtattaacagaatcgatcaagcaagctgagaaaagaatctcagagctcaaagaccagttctctgaaataattagacaaaaataaagaaaaactagaaagaataaaatatctgagaaatatgggattatgtaaagagacctaatctatgaccgactggcattcctgaaagagagggagataaccaagcaatgttgttaacatatttcaggatattgtccataaaartttcctcaacctcactagagaggtcagcattcaaattcaggaaaagcactgactctctgcaaaatgctacacctgaagaccatccccaaggcatgtagtcatcagattctccaaggttgaaatggaagaaaaaatgttaaaggtagctagagagaaggggcaggtcacctacaaagggaaccccatcaggctaacagcagacttgtcagcagaaaaactacaagccagaagagattgggagtgtacattcagcattcttaaagctaagaattttccaccaaaaaaattata

SEQ ID NO: 866844 - DNA, 599 bp, Homo sapiens
ccagcactttaggaggccaaggcaggcggatcatctgaggtcaggagttggagaccagcctggccaacatggtgaaaccccatctctactaaaaatccaaaaaaattagcccggtgtggtggcaggtgcctgtaatcccagctactcaggaggctgaggcaggagaatcgcttgaacccaggaggcagaggttgcagtgagccaagatcatgccattgcactccagcctgggtgacaagagtgaaactccatctcaaaataaataaataaataaatacataaaaattgagtatataatacasgaagttcccatattattctgtctcctcaccctcacttcctaatttcacctattagtaacatcttacattactgtggtacatttgctagaataatgagaaaatattgacacattattatctgaagtctacatttgcataatgttcattctttctgttatacatatatatgaattttgaaatatttaaaacattatgttcacccttatggtctcataaagaaaatgttcacttccctaaaaatcctctcttctcattaatctctgtcctctttctccagaaaccttggcaactattaat

SEQ ID NO: 866845 - DNA, 569 bp, Homo sapiens
cagctactcaggagctgaggcaggagaattgcttgaacccgggaggtggaggttgcagtgaggcaagattacaccactgcactccagcctgggccacaagagtgaaactccgtcacacacacacacacacacacaaaagaaaaaaaaggtctcctgctggracacagactagttagagaaaggaaaaataaacaaatgatagtatgtatattaataaaagaactagcaacacccactgcttagttgtgataataaaaactggacattaatataggcagaaaaacagaacagccttgatatggttaaccctttgacactggcaaacactgtgaccagtgctgcccacactggaagctcctgcatccctcttcctcatgtttccttcagcattaaggagcaacaagggagacagccagttcatagttccttacgcatggagccaaaggaccttcaatgtacaaggtctgagcaaggacccgcagccacatgtgcttcctgcttcagcagtgccccgtgggtctcagagctacccaaaggcctatccttccgagaggtttctcctctctccc

SEQ ID NO: 866846 - DNA, 569 bp, Homo sapiens
cagctactcaggagctgaggcaggagaattgcttgaacccgggaggtggaggttgcagtgaggcaagattacaccactgcactccagcctgggccacaagagtgaaactccgtcacacacacacacacacacacaaaagaaaaaaaaggtctcctgctgggacacagactagttagagaaaggaaaaataaacaaatgatagtatgtrtattaataaaagaactagcaacacccactgcttagttgtgataataaaaactggacattaatataggcagaaaaacagaacagccttgatatggttaaccctttgacactggcaaacactgtgaccagtgctgcccacactggaagctcctgcatccctcttcctcatgtttccttcagcattaaggagcaacaagggagacagccagttcatagttccttacgcatggagccaaaggaccttcaatgtacaaggtctgagcaaggacccgcagccacatgtgcttcctgcttcagcagtgccccgtgggtctcagagctacccaaaggcctatccttccgagaggtttctcctctctccc

SEQ ID NO: 866847 - DNA, 656 bp, Homo sapiens
ttgttggtttaaagtctgttttatcagagactaggattgcaacgcctgctttttttgctttccatttgcttggtaaatcttcctccatccctttattttgagcctatgtgtgtctttgcacatgagatgggtcttctgaatacagcacagtaattggtcttgactctttatccaattttccagcctgtgtcttttaactgggacatttagcccatttacatttaaggttaatatcgttatgtgtgaatttgatcctgtcattatcatgatagctggttattttgcccattagttgatgcagtttcttcatagtattgatggtctttacaatttggtatgtttttgcagtggctggtacyggtttttcctttccatatttagtgcttccttcaggagctcttgtaaggcgggcctggtggtgacaaaatctctcagcaattgcttgtctgtaaaggattttatttctccttctcttatgaagattagtttggctggatatgaaattctggattgaaaactctttgttttaagaattttgaatattggcccccactctcttctggtttgtaaggtttctgcagagagatctgctgttagtctggtgagcttctctttgtgggtaacccgacctttctctctgactgcccttaacattt

SEQ ID NO: 866848 - DNA, 684 bp, Homo sapiens
tttctaatttttttcctattaagcagcaaaaagaaccctgtgttcttttcaaatgaatgattatggaatctcctcccctgcatataaaaggtaagaagtttgcttctttgggttgaggagtgtacagagattcagaaagcccatctcttatctttctctcccactctcgtccctggggcagcacttgaaaaatcacagatctgtctaggaccttccttttacaaatgagaaagctgaaggccagagaaatagagtgacttggccaggttcacacacttattttagcggcaaatttgggagggggaccaaggtcttcaaactgttacctaagtgacctttccattctatgacattaacttttggctgaaagaaagagaaaggaargaaaggaagaagggagggaggaaagaatggaagggaggaaggaagggaaacagtagtgaggggggagagaaaggaaataaaggaaaaactatatattcaatacatcatggagagtttatattttcttctttctgacctcagcatcaacacagccttatgcttggtatagcagagctcctctccagttaaaagttcaaagattaagttttgtatggagaatttcagaaaagaaatttaggtacaaatattaatgattaactcaaatagttattaatactaaaacttcacactatcaacttg

SEQ ID NO: 866849 - DNA, 627 bp, Homo sapiens
tgctccagaagaagtctgagtagagaacaagtgtttgctaaaagctggccctgatgaccttcaaggtaaccccatgatatgaactctcaggatactgcttcactgaggctgtggtgcagccacagaatagggtagccattgttggtggcgacataggctaatagtaagtttctggggcccatctattcagaagcttggtcaacagagactcccaaagaatcacttgcttgatcacaccctgagtagacagaaccttggatttacctgcaagttactgacagaaagtacttgaaaacattctgaactagccacggtactggttgytgagaaatgatgtctgggaattccgctctgccttcccacccttccagctccccccaatccagtaatggccttgtgatctcatcctctaagacagattttgcaggcagaatgagtctgatgtatgtaaatcttgtgccctcaccagactctcccggggaggctgccgtgaagaaaatctattgccctaatcaattaccaaacttccaaatgaaatagattgttctctcttgctggaagaccatcaagctgtcatttttcttggtaatgagcagcagtgcaggagggaaattgcactttctctgt

SEQ ID NO: 866850 - DNA, 627 bp, Homo sapiens
tgctccagaagaagtctgagtagagaacaagtgtttgctaaaagctggccctgatgaccttcaaggtaaccccatgatatgaactctcaggatactgcttcactgaggctgtggtgcagccacagaatagggtagccattgttggtggcgacataggctaatagtaagtttctggggcccatctattcagaagcttggtcaacagagactcccaaagaatcacttgcttgatcacaccctgagtagacagaaccttggatttacctgcaagttactgacagaaagtacttgaaaacattctgaactagccacggtactggttgttgagaaatgatgtctgggaattccgctctgccttcccacccttccagctccccccaatccagtaatggccttgtgatctcatcctctaagacagattttgcaggcagaatgagtctgatgtatgtaaatcttgtgccctcaccagactctcccggggaggctgcygtgaagaaaatctattgccctaatcaattaccaaacttccaaatgaaatagattgttctctcttgctggaagaccatcaagctgtcatttttcttggtaatgagcagcagtgcaggagggaaattgcactttctctgt

SEQ ID NO: 866851 - DNA, 610 bp, Homo sapiens
aaatcccacttggtaggattaccaacatattagacattgcagaagaaaaaaaaaatatatatatatatatattttaattatactttaagttctagggtacatgttcacaacatgcaggtttgttacatatgtatacctgtgccatgtttttgtgctgcacccattaactcgtcatttacattaggtatgtctcttaatgctttccttcccccttccccctaccccaygacaggccccggtgtgtgatgttccccttcctgtgtgcaagtgttctcattgttcaattcccacctatgagtgagaacatgtggtgtttggtttttttgtccttgtgacagttggctgagaatgatggtttccagcttcatccatgtccctacaaaggacatgaactcatcattttttatggctgcatagtattccatggtgtatatgtgccacattttcttaatccagtctatcattgatggactggatttgggttggttccaagtctttgctattgtgaatagtgccgcaataaatatatgtgtgcatgtgtctttatagcagcatgatttataatctttgggtatataaccagtaatgggatggctgggtcaaatggtat

SEQ ID NO: 866852 - DNA, 607 bp, Homo sapiens
catttaagtctgcagaggtttctgctgccttttgtttagctctgctctgcccccagaggtggagtctgcagaggcagataggcctccttgagctgcggtgggctccacccagttctagcttcctggctgctttgtttacctactgaagcctcagcaatggtgggtgcccctccccccagcctcactgcagccttgcagtttgatctcagactgctgtgctagcaatgagcgaggctccgtgggcatgggaccctccaagccaggcacaggatataatctcctggtgtgcagtttgctaagaccattggaaaagcacagtattagggtgggagtgagccaattttccagctgctgtctgtcatagcttcccttggctaggaaagggaattccctgaccccttgagcttcccagggaaggcgatgccatgccttgcttyggttcacactcggtgggctgcacccactgtcctgcacccactgtctgacaagtcccagtgagatgaacccggtacctcagttgggaatgcagaaatcacccatcttctgtgttgctcaggctgggagctgtagattggacctgttcctattcagccatcttggaaccacc

SEQ ID NO: 866853 - DNA, 590 bp, Homo sapiens
agggcgcatcctgccagtctctttattgcaaacaatagcaagaaaatgtagcacgttatggggtgcttacattgagctggcaacagtcctgagcttctgacagccattatttcattcaatcctcctaaccctttacgggcacttttatgacctatttttcacagatgacaaaaccaaagctcagagatgaaatgatttgctcacaccacagagactgggtgaacaattgacacagggtttgaagcaggttttgtcggattctggagtggggctttgagcaaccatgggacayctccctccaaaggtgcctgcgtgttcacctagaaccatcccccactgcctgcccttccaccccaccctctactagtaaagggggcagtttgtgcaggacggtctgaatctgcctgttgcttctcttctgcttgcacagtagcatccggggacacaaatgttatgtgcgggaaatgcgcgagggaagaaaagacacacccacgatacctttaagggtaaacaacctttatcccatgtaaatggcaatgtagatataataagcaaatgatataataataagcagattgatataataagca

SEQ ID NO: 866854 - DNA, 548 bp, Homo sapiens
atgtgtgtggaggtgcctgtctgcatactgagagctcccccagcccatcccctaccccagccagagcccccagtccagctcaacttgggggccacagagacatcagagaatctaaccctggccaaagccaacagcaacctctccaccgcctccttatacacgccctggccaggcttccctgtcgttccctctgtccctaatgtagaaagccgcgtccctttgtcccctrtcaagagacaggtcccagggagacagccctaagcccagaggggctatgatctaagctagtgaagacatgcccctgccacctccttgccagcctcaaggacacgtgagtgagattcgcttctggcgtgaagccgccagcatcctcttgaagtcctgggagatctaattacctaggcgaggggaaagtgttgagcaagtgagcgctggggtttagaataatcagtttttcaaccgctgcagttaatgcgaggccaggccgcaaaactctccctctcatgttctggctcctggaactgctgactgtttgatctagaactgcc

SEQ ID NO: 866855 - DNA, 683 bp, Homo sapiens
tttaagaataatggatttaatttaaagtctacagactaccatactggtgatacaaaacagtcattctcttagaatattcttttcaggctactgcctacatgattgaaaggcaggaatttcatagaaatttcagtgtttttcaagctgtgtagcatggatctctaaaagtttagagctagtctatggtatgtgtatggtgggagggttgatgttgtgcaggggtggcaggggcttttctcttgtatatgttaggctcccaaacataggtttttctttattttccttttttctagaaagggttccaaagctaaaacaaatacaatagttygaaaaaccgtttgtatagagaggtcatggaagcataaatgccttactagagaagtcaggcatttatccttatccagaagttggataatatggtcatgaagacagattcaaatatgaacattataatttattactaattagaatttcaataatatggttataaaaacaagactcagagaggaaatgttctgtgcagaattttctctgacctcctccacttgctggtatattgcccaatactgtcctttgagcttttgttgatagagacatcctgcacaggagattcattgatgctgtttatacacaaatagcagtagaaagaaacacaagggaatcataatgaaattaagcaaatt

SEQ ID NO: 866856 - DNA, 603 bp, Homo sapiens
ccctttcagagaaaatcaggaattcaaagattctgatgaactgggcaactaagaatatcaaccttaaatgggtaggcaaagctgaggcacacttgggcatggaccccaccccaggtactgcacaatacagttggaaaggaattcctaacatacagctgttccctgaggggaggagagtttgggccacacatacagtgtcctaactcaaaggttccccatggtttggctcttgattcatcaacttggaacaaaggggactaggcatacacaagagtctctagaccacagaaaaaaaagtgcagttttgtatggacacacaaacacttgcaggggcttcattcctgggaatagggcagagaaaactcaaatattcccagttgttctggaargcacttgccagcatactctgccgcctgttgctgctgaccattagcttctgactagtctgcatcagagagctaatgtggccaactagccttagacttccagcagcccgagtaggacctgggcactttctcatccctcttccctggctcaccccagcaataacttcaggtctactgtttcctcctggaagaagtttgtgtgggcaatgagcacccc

SEQ ID NO: 866857 - DNA, 614 bp, Homo sapiens
cagcatttgccattatttgaaacagcactttgtttatttatttacataatgtatagtctgtgctcctacaccctactagaatataagttccatgagggcaggattttttattaatgcatagcttcttttggggttttattattgttttatccccaaaatgtggaacaacacctggcacatataggagcacatatagggtctcactaactgctgaatgaactgaatgcatgcaagcataactagtcttgttagaatcatgggaaggaacatttcaggcagatgtcataggtcatraagtatctccataatggggaaaggcttagtgtgtttgaggaaaccaaaggtcagtgtggctagagcaaagtgggaaaagagaagagcgctccaagattctgcctcctaaagaagaaagagtcagatgacaagtacctttccttgccccaagtgttgcctgccatatcctgatgcttttctccctctgatggatgaatgaactgtacatttcaattgcagcacttctaaaacacaatacattctactatgtaatgcagtagagaattaaacttagggaatctgctcaggacctcagcatcatttgggcctttgagaaacac

SEQ ID NO: 866858 - DNA, 651 bp, Homo sapiens
agttgtgtcaaagtggaagggagccctccctgtgaaacatgactaatggtctctgcagttgacaccttctcattattatatccaatagacatgtccttcccagggattggcaaattctccagtctcttaacatattacggagtgaaattttcaaagacatatagaaggtgtcaaccacaggctccaatgatttgaaaggcttgaatttgatcaaagccaggttggtatgatttcaattggagttttctaaatgataccccagtgtccatatgcctggatatggtgtatggaccaaatggtatatgccatttatgtggtatatgaatcacatggcatataccatatataccacttcattctgcagatatgaacattctgatatcactaagtgacaggctggaaaggtgtccatgcctctaggacatcatcatgttcyttccccagtctgaccctgctgaagcccagagggactctacattgtcctgatgctaacagcattatcatgcataccttctggccattctcttttatgtatccatgttttcagatgctctgccccccgcctttattttttagtgtctgggggtgctccaaatgtgctcataattctgttttatagtagttagaaataagagacagagctccactgac

SEQ ID NO: 866859 - DNA, 615 bp, Homo sapiens
agatactgcatgcccaaggacagttttatatacaaaggaatggtatgaagaattcaattattttcttattcatatttgttgtagaacagaactttctaagaatcagctttgattcaaatagtaacatgtttgctttcagtttcaatccatttcattttcctaatgtagtgtttttcagaatgaggtttccaatgcctacctcacaaccactcctcattcttatctacttttggtggaaagagktttttaaaaatgtgtaagttactcaggggagtgtccgagagtgatgcaaggaaacagtttgcacttgtcttcaaaggaggggtgagaaagtcacaggcaaggaagagaaaagtgggaaggagccaccagagggagaaggaactcagagatgcatatctgatgctaccttgaatgtatggaaaatagagttgccagatttagccaagaaacaaaaccacacactcagaaatgacaacaacaaaaacaggatgtccaggtaaatttgaatttctaataatggataataatttctaataatgaataacttacaacatatgtctcaagtattgccttatggcattgctagcatcctacaattaaatgggacataca

SEQ ID NO: 866860 - DNA, 642 bp, Homo sapiens
gcaagtctgtaatctgaacctcaaaccagcctctttcacaatgtttctcttcaatgtgttgacttcagctcttcagtgaatatgtgtttcctgtgcattgttttatctgaattaaaaaacttttaaaatagtttacagtaaatatgtctatgtgtctgtcacttttgcaaataaaataaaattttctcttactaaaggaaccaagaagtatttttttaaggttgttgggaaggtgggcaggaagttaatggaaaaactgaatggtataataattattaagatagaagctttggtgttgagtggagagcaattttgtacagatttatttctattagtatttcctgataccaatattaggaaacgccaggtctgaattgtggttaactgattttttttttttttttttagagaattttcgacactgacctcatgaggctttgaaattaatataagcaagatgccttcatcmagaaatgagactgtgattcctcagtgctatcacattgtgccacttacgggaagagaaccaacatcatgctccacctcccacaggaaaaaatgacaaggaaagctcagcagcaccatatacaggcagtaagctaggcaagcccttgggcaggcacactcatgtaaggggaattt

SEQ ID NO: 866861 - DNA, 616 bp, Homo sapiens
ttctagagacaaggcataagttttaaacaaatactaaatgttattttattttgttataatcattgattagtatttatcttatgtaagaaaagctgcaataagcaattgcaatataacaagttgtatgttgaattaaatatgtttaggtagcaaagtcacaactttgaaacacaacacctgaggtccagagattttaaaaataaattcaagaaaaataagaatttaacttataaatgatttttcataataagggtcaatgaaatagcatgaaaagttggtatccacagacattccaaagttttttattttatgaaatttctccaaataaacttttaaataaagtaacaaaaaaactkatcagaagaacttttttattttaagcagttagtttcaaaatggccaaaagaaaaagagacaaaataaactaagcgataaataagaaaaactttttaaaaatgtcttattgttattgacagcttcaataacatactggatctgaccttgaagataggtcttttgaaattacccaatcagtggggaaaaaagcataagaatgaaaaagaatgaagacagcctataggaattttgggacaccattaagtgaacaaacatttgc

SEQ ID NO: 866862 - DNA, 590 bp, Homo sapiens
gttatatacctaggagcagaatatctggtcatgaagtaactgtttaactattcgaagaacttccaaattgtattccaaagctgcatcattttacatccccaccaacaatgtacaaaggttccaatttctctacatcctcatcaacacttgtcttactgtctgtccttgattatagccctgcaagtgagcacgaagtggtatcttgttgtgtgtgtgtgttttgtttgtttgttttgtttttgttttttgtagtatataatatttaacatcttctcatgttcttactggcggtttgcatgtcttccttggagaaatatctatgcaaatcctttgctcattttttaatttggttgtctttytatatttgagttgtaagagttagttacatattctagttataagtccctcatcagagctatgatttgccaatattttctcccattctgtgagtcatcttttcactttgttaatgatgtcctttagagcacaaatgtttatggtttttttgtgtgtgggtgggggttttcagcccctcccctctgataattcatctgattggtgaatttgggaaattagctggacaagttcag

SEQ ID NO: 866863 - DNA, 614 bp, Homo sapiens
gagtgagatgagacagaagagacatatccttgttaccgctctctgggaaagtgatggcgaggacaggaagaggcctgggaccaacccaggttttgatggagcaggtttcccctctgtagggtggggcatcccaaagaaccccttcttyccagcctgcataatgcccggaagcccatagggtcgggagagccgggaatttaggctgttggctgtgggactccatgcaagcaagggacgttttagcaagtaaatctcctgggagaaagcacaaatttcataaactcttctttctccttgtcgcctttatcaacaaaccatttattacttttttcttcctacccagaaaggaatttaattgtggggaggagaaaatgcacaaatatagaggaaatttacccacttcccactttcaatctcttggccctggaaggagaagctgggaaaggctcgggaagggaatatacgatttaaccatcagagaaagcgccacaaagcggggaagagcattcagaatagcaaaaaggaaaggaggctgactcctaatgcctgaaacccaccaccccacccccagccctcactctgcagcaccgttactggctgatgacttcaaaggg

SEQ ID NO: 866864 - DNA, 595 bp, Homo sapiens
tgtttggctggtagagacagtgcgaccctgctggttgtttcaagccagtgctgctatgatgcccacagggtaacaattataagtattttcaatatcacctcatgatcacagttaagatcaacagacatttcaaagcaccctgtgtctggcctcaccaccgcctcccaccagcttctggatgtgaccctttacctgagccatctccccagcctctctcagctctgcccatcacacctctgccctaagttggggctcagtttttgtgtcttcctctccatagccatcttctacactgtctctggctgatggtcccttacgctgttgagaaacctccgcatcacaccatccacagtccgcagtgttctagaattagctggggggagttggaagtgggcccggtgccagggcaggggtggggctggtcccgctgatggggmcttcgctcctaccctcctcagctgagtgatgaactgaagcagcacttgaaccggactctggctgagaactacgggcagcccggagccacgcagatcaccgcctcagtggaccgactccagcaggatgtaagccatgccccatatggccttgaaggcca

SEQ ID NO: 866865 - DNA, 690 bp, Homo sapiens
agcaatagtccctcctggaatccattggcttgcctcaagagtgtctgagccttctcttttagggttaccagataaatgcaggatgcacagttaatatgcattggagaaaatattaatttattattagataatacataatttctttagcataagcatgtcctgtgccatgtttagttaagggcatacttatgctaaaaaattatttcttcttatctgaaattcagaattaactaggcattttatatttttatttgctaaatctggctaccctattctcttcgtaatattcttcaactctcccagctttgccctccttccctgtcygctcttctaggggagtcggatcgagttgtaaggagaacatgcccactgtcttgatggctgcagtgtgtggtccccacaggtggtgaggaagagatgggtttccacccatgctgtacacggaatgtttgtgtcctccccaaattcctatgttgaagccctaaccaccaatgtaatggtatttggagatgggcctttggtaggtaattagggttatatgaggccatggggtggggccctcatgatggatctggtaagaaaagagaacagtgtctctctctacccaccaagtgaggacacaaagagaatgtggctgcgtgcaaaccaggaggagagccctcaccaggaaccaatctaactgacaccttg

SEQ ID NO: 866866 - DNA, 599 bp, Homo sapiens
gtgttttccactgttgctggcagactgttctatatatatatcaattagaacttggttgattgtgttgtttatatcttctatatctttgctaattttctatctagtagttctattagtttctgaaacgtgggtgttgatgtcctcaactaaatrcagatgtatctacttctcctttctactctatcagtttttgcttcatgtgttttgaagcctgttgcttggtgtgtgcacacttaggcttatctcttcctgattaattgaccctttattcttatgttcatgataggaacaatggacacctcttgtctgtagtaattttattttctctaaagcctgttttaccatatattaatatagatactccttctttatattattaatttttgtatgtatatctatttccatccttttattttcaaccaactatgtcattgaactagaagtaaatttcttataagtggcatatagttgggtcatggtttttattcactctccaatctctgttgatgggtatattcaaaccactagcttataaggtaattattgatatattagtgcttaggccaaccattttattatttgttttctttggttcttgt

SEQ ID NO: 866867 - DNA, 635 bp, Homo sapiens
aaattaaggccatctgtttaggctgaaaaggcaatttcatttctagaatgacaaaccagatagtctctggaaatagtttaagaataactttgtaaaggattttaaaaattggattagtgaacattatgaaactcattctgaaaaggaaactgaggaaagcaaatggtgtgatattgttttcctcagcagcctataattctacattatgatctgcaattagtgcttattcaatattgtcaaaactggtccaattagtaggcttacgaataagctttttatggtatatacatagtgccagaggacttaatttgtttcacagtgttaaacagaataaataagtatgagatataggctcattttcagagaatagtcacagtttgttttttagtcrcttgttaaaaaggtgcattcaagtcaataagctgagttagagtgagttagaggcagtcctatatgtccagggcctctgaatgtgaaagcagtctcctggctcccagaaagattaacatttggcctaatgatatgagatcacagaaagtttatggcaataataggtagaacggttggagtaaatgcaaaagcttcttcctctttctgaataaggaataggaaaattccaaacagaactgaaggtg

SEQ ID NO: 866868 - DNA, 578 bp, Homo sapiens
tgtcacaaaaatagctggtttcatttaccaaatactaattttttgcaagatgatagttctttagaaggagatatttcctgaatgctagttagttataaaatttgttttacataagtttgttgaatgttgtaatatttgtgaaaatagaggtgggtgcataatgtcatggtttgttaattgaatgctgacctaaataacgatacgatggtgtaatgggaggagtcctggactagcaggcaggaaaggttagctcttggtactgcttggttgtgacctttggcaattcccttgacctctcttggcctcagtttctctacagaamtagataatgcataaggctccttctaactctataagcaaagttctaagtctatgtagctggaaagcttgcaaaatcagcaagggtgtgtgtttttattcacatatcttaaactcatctcctagaactttgggtcaaaattgaccttgtgaaaaataaaaccaaacagttgaaggctctagcttatctgacaccctaacttaattttgatcaaatgttgtttttatatgaaatagattactaagataataatatgctt

SEQ ID NO: 866869 - DNA, 531 bp, Homo sapiens
tttaagctgctcacaagagctactacctaattggagctctgtgtatctctgagcttacaaccctgggggacttttaaaaaaactgttgtcgttagaaccttctattttgaacaaatgggctagtaagaacaaaagtagaagtgtctcttgtacaaaaaagagaagacttagcttagaaaacctaaacacacttaaaaaaaataccaggaggctttgatttttatgttttacttttgtgttatgcatatatatcatctsccacctaaagtgatcaggaaggagtctgaagaatgaagataatttttaaataacaaatattccaatatttgtttattctgtgcccaggaggcagagagaacaacaaatgtggtccctgtattttgtcttctccatactctttgctctgtgacttcctttctacttccttatttagtctgaattttaatatgtagtattcaagtgggctcataatgctcatttcctttcaatgagattttccagtaaatatactgactccactgttcacaggaa

SEQ ID NO: 866870 - DNA, 628 bp, Homo sapiens
aaaatagatatgactcagattataatttaaatagtgcctatgcatttggatcactaaagttatatggtcaactagggagaaaacctaaagatatcaataggtcagatgaatctcttaaaggatgacttattagaatcctttctacagtcttattaggccctaaatgtggaggtgacacatgatccttaggcatgaatccagaaaacataccacgtagtcccaaaatgagggttattgcaacgcaattcccaaagtttattgatgcaagagagttgttttgtaataacctggacaaatccctttagaagatgggtttctttatgtccaggccaaatttagctttgtgttttcatggccatgtttatatatatattcttatatttgsaaacactatatttatagactcttctagaaatctccacttatccaaatgacatatttttgctcatctattcttttttacagcagccctataattccttaactttcacttctatgaactctttctagtataattataattgtttagtagtgactgaggtgttcatctcttttcttccttgggaaatggaacaaagatgaaggtgttatttattattattattctctgtatgatagattattaaaa

SEQ ID NO: 866871 - DNA, 618 bp, Homo sapiens
aaagaagtcacaaaaaacatatgaaaaaatgctcaacatcactaatcatcagagaaatgcaaattaaaaccacaatgagatatcatcttacaccagttagaatggctattatgaaaaatacaaataaaaaaaagcagatgttggcaaagatgcagagaaaaggaatgcttacagactgttggcgggaatgtaaattagtamaacctctgtggaaaacagcgtggatatttttcaaagaatttaaaatagaactactatttgattcagcgatctcactactgggtatctacccaaagaaaaataagtaagtttatttttaaacaaatatctgcatttgtatgtttattgcagtatccttcctatcctttatattatctttgtctagtatttaattctatacatatagcaattcccacaaggcatttttataaatgctttgaagaaataattttaacttaaatttcctccctctaatacccttcattcttctcttcacctccatgtttccatcttggatcattttttttgaaatcaatttttttgaaaaaatatctttgtgagttttttatttctgtaaaggtttactggcatgagttctgtcctttttttgtctaaaaa

SEQ ID NO: 866872 - DNA, 615 bp, Homo sapiens
gctccaaggaagggactctctacatatctacattgtttgcagattttacaataatcatttattcttgcatggctgatcattgttaaccaatacaaataaaataataaagaaatgacccacattttatgttgggagtttgatctgccatttatcaagtatggaatcttgaacaargggttaaacatctgaatgtctccatcacttcatctctaaagtgggggtgctcacacccactgggctcccccgcccaggttggtgccggactctccctgggcccccttgttctctcaccagccacatccattctccccccagaggcgctagtgactgtgcgtggctttccattcccaccacgtttgtctctaaccccagtggcagatcagtgtaagaacacagctgagtgctcctcgcctccttgccccttcaagggctcctcaccacccaccagatcaggtgcaaacttccaagccttactggatccccttccacattctgagctccgcctgccttcccatcgctatccttccccacctgcctccctggtagagaaaagcggagtgtgtgatgctgtctgaatgctgagcatggccttttgcagccagtccactgtgtacg

SEQ ID NO: 866873 - DNA, 615 bp, Homo sapiens
gctccaaggaagggactctctacatatctacattgtttgcagattttacaataatcatttattcttgcatggctgatcattgttaaccaatacaaataaaataataaagaaatgacccacattttatgttgggagtttgatctgccatttatcaagtatggaatcttgaacaaggggttaaacatctgaatgtctccatcacttcatctctaaagtgggggtgctcacacccactgggctcccccgcccaggttggtgccggactctccctgggcccccytgttctctcaccagccacatccattctccccccagaggcgctagtgactgtgcgtggctttccattcccaccacgtttgtctctaaccccagtggcagatcagtgtaagaacacagctgagtgctcctcgcctccttgccccttcaagggctcctcaccacccaccagatcaggtgcaaacttccaagccttactggatccccttccacattctgagctccgcctgccttcccatcgctatccttccccacctgcctccctggtagagaaaagcggagtgtgtgatgctgtctgaatgctgagcatggccttttgcagccagtccactgtgtacg

SEQ ID NO: 866874 - DNA, 517 bp, Homo sapiens
tatggataaaaatttatatgttttttctgacatcatttattgaatagtataatttttctactgacttttagtatcatatcttttattacaagtccaatgtattcagcatatctatggatctatttcttggtgcttccattttttcccattgtttaacggtgtatcactgagccaaagcaaaccattttaattattataattaaaacacatttaaatattgataggctattattgttcaaaataactttggttcttyctttccattgattattttaatatgacttttccaatcaagttctaaaaaaatactggtggtatatttattgaaataactttaatgaaattaaatgaaagatcatgtatttgttttctgaattaattcttagatacattaatgttttatgttaccatgaatgtgatattataatataatatttttaattggttgctactgtttataagaatttcattttctgtttactttgccttcatatctgaaaaccttgctgatttgatt

SEQ ID NO: 866875 - DNA, 589 bp, Homo sapiens
aatcttatttgccatatacatcttcagataagtgaatctcgtcattttcacagataaacccagagttgggattattgtccacattatatagctaatatgtagagaaataaaatactatagattgtattctacatggtgatgagcttctggatcttcacaaagagaaagatgaatacagtggttagtattcatttactgagacctctctgtgtctcagtaagtcatgaagccttgactagagctcctttcatgcctctgcatgtaactcygagacactgtgtcattggttatcccagaagcaacagctgttattgctggcctctgttcctaagtctagtagagtttggaataatgaggtttctagtcatctttaaaatgagatgttgcctttaggtcctagggaagtaaaatgtcaataacactttccagttccctgagaaatctttgaatgacctgaaagctggttccagccatcagttacaatctgtgggaaaacagtattattcaggagcaatgaggaaagaatatgtttacatctttttgctgagacaagtctttggtcatctaaggattctggttatcttgaaag

SEQ ID NO: 866876 - DNA, 668 bp, Homo sapiens
aattttttaaaactataattaataggctaagaattttaatggataaagtcaacaacatacaagaacagatggataatgtaaacagagagatggaaattctaagaaagaatacaaaataaatgctggagattaaaaacactgtgacagaaatgaagaatgcttttgatgggattattgctatactggacatggctgaggaaataatctctgaacttaaggatatgatgatagaaacttccaaagataaaaagtcaagagaaaaaagaccaaaaaaccccagagcaggatatccaagaactgtcggatggctataaaagatgtaacaaacatataatggggaaataaaaaggaraagaaagaaaggaacagaagcaatatttgcagaaataatgactgagaatttccctaaattattgcagacatcaaaccacagatctaggaagctcagagaacactaagcaagataaatgccaaaacaaaaacaaaaacaaaaaaacccacaaaaaaccagcatcaaggcatatcattttcaaactgcaaacatcaaagacaaagaaaaaatcctgaaagaagccagaggggggaaattaacacatccagagagtaacaaaattaagtattacatccaaaaaccatgcaagcaagaggagagtggcatgaagtattta

SEQ ID NO: 866877 - DNA, 668 bp, Homo sapiens
aattttttaaaactataattaataggctaagaattttaatggataaagtcaacaacatacaagaacagatggataatgtaaacagagagatggaaattctaagaaagaatacaaaataaatgctggagattaaaaacactgtgacagaaatgaagaatgcttttgatgggattattgctatactggacatggctgaggaaataatctctgaacttaaggatatgatgatagaaacttccaaagataaaaagtcaagagaaaaaagaccaaaaaaccccagagcaggatatccaagaactgtcggatggctataaaagatgtaacaaacatataatggggaaataaaaaggagaagaaagaaaggaacagaagcaatatttgcagaaataatgactgagaatttccctaaattattgcagacatcaaaccacagatctaggaagctcagagaacmctaagcaagataaatgccaaaacaaaaacaaaaacaaaaaaacccacaaaaaaccagcatcaaggcatatcattttcaaactgcaaacatcaaagacaaagaaaaaatcctgaaagaagccagaggggggaaattaacacatccagagagtaacaaaattaagtattacatccaaaaaccatgcaagcaagaggagagtggcatgaagtattta

SEQ ID NO: 866878 - DNA, 614 bp, Homo sapiens
gtttgtatctttagtttacatttgttgcaatatgtataaaagctggaaagggaagactgacaaaaatctctgtggggacaggaaatacagaagaacttgtgacttcagtttgttttgagagagggtccatatcttctgtttcagtctcagtttcctgtttttgctccatttagctatgttcctacatttttttcctccactccatttctggtgtctctttccccaattcgaggggaagccctggttttccaccacccattctgctcctgattttgaacagggcrtctcatctgcctacaaatctgagtgaattaaccatggtctgttcctcccagatcagtgagtccctcaatctttttttttttttttttgagatagggtctcactgtgttgcccaggctggagtgcagtggcgtgatgatggctaacttcagcctcaacctcctgggctcaagcgatcctcccacctcagcccctggagtagcagggactgtaggtacatgcctccaaacccagctaatttttggattgtttttgtagatttggggttttagcatgttggccaggctggtctcgaactcctgtgttcaagctatccacccaccttggcctcc

SEQ ID NO: 866879 - DNA, 631 bp, Homo sapiens
taatgcaggacttaacatttactagtggttaagtatcgtttttccaaaaaagggaatgaacgagtttttgtcataattttctaaattaaaaattatgtttaaaaataacactataaaaaacaaatttctccattaaatatgtgcttctaaaacaacattgagaatatatttctacttccaagaaattgtaggtaaattcatgaatgtctttacaggtaaatgttaaagcaaacagttaccttttcaatgttttacttttctctacccacagtgtaagctaataaaacttatttccaagtgaatttttctgaaatttgtatgcagaaattgcttcttattttttgaaacataatcaattatgttaaagcctggccaacatggcgaaaccctgtctttattaaaaatacgaaagttagccaggcatggtggcaggtgcctgtaatcctaactaktctggaggctgaggcaggagaatcaaggagaatcgcttgaaccagggaggtggaggttgcagtgagccgagatcataccactgcactccagcctgggtgacagcatgagaatttgtctcaaaaaatatatatatatataattttagttatctactgtgaaaccataacggtagaaaata

SEQ ID NO: 866880 - DNA, 628 bp, Homo sapiens
gtgttttccaacttgattgcattctccccgtcactttcaggtacaccaatcaaacatagatatggtctattcatatagtcccatatttcttggaggctttgtttgtttctttttactctttgttctctaaccttgtcttctcactttatttcattaatttgatcttcaatcagtgataccttttcttccacttgatcgaatcggctattgaagcttgtgcatgcatcatgaagttctcgtgccatggttttcagctccatcaggtcatttatggtcttctctacactgtttattctagttagccattcrtctaaccttttttcaaggcttttagcttccttgagatgggttcgaacatgctcctttagctcggagaagtttgttattactgaccttctgaagcctacttctgtcaatttgtcaaagtcattctccgtccagctttgttcagttgctggtgaggagctgcaatcctttggaggagaagacgtgctctggtttttagaattttcagcttttctgctctggtttctccccatctttgtggttttatctacctttggtctttgatgttggtgacctacagatggggttttggtgtagatgaccttttcgttgatgttgacgc

SEQ ID NO: 866881 - DNA, 628 bp, Homo sapiens
gtgttttccaacttgattgcattctccccgtcactttcaggtacaccaatcaaacatagatatggtctattcatatagtcccatatttcttggaggctttgtttgtttctttttactctttgttctctaaccttgtcttctcactttatttcattaatttgatcttcaatcagtgataccttttcttccacttgatcgaatcggctattgaagcttgtgcatgcatcatgaagttctcgtgccatggttttcagctccatcaggtcatttatggtcttctctacactgtttattctagttagccattcgtctaaccttttttcaaggcttttagcttccttgagatgggttcgaacatgctcctttagctcrgagaagtttgttattactgaccttctgaagcctacttctgtcaatttgtcaaagtcattctccgtccagctttgttcagttgctggtgaggagctgcaatcctttggaggagaagacgtgctctggtttttagaattttcagcttttctgctctggtttctccccatctttgtggttttatctacctttggtctttgatgttggtgacctacagatggggttttggtgtagatgaccttttcgttgatgttgacgc

SEQ ID NO: 866882 - DNA, 628 bp, Homo sapiens
gtgttttccaacttgattgcattctccccgtcactttcaggtacaccaatcaaacatagatatggtctattcatatagtcccatatttcttggaggctttgtttgtttctttttactctttgttctctaaccttgtcttctcactttatttcattaatttgatcttcaatcagtgataccttttcttccacttgatcgaatcggctattgaagcttgtgcatgcatcatgaagttctcgtgccatggttttcagctccatcaggtcatttatggtcttctctacactgtttattctagttagccattcgtctaaccttttttcaaggcttttagcttccttgagatgggttcgaacatgctcctttagctcggagaagtttgttattactgaccttctgaagcctacttctgtcmatttgtcaaagtcattctccgtccagctttgttcagttgctggtgaggagctgcaatcctttggaggagaagacgtgctctggtttttagaattttcagcttttctgctctggtttctccccatctttgtggttttatctacctttggtctttgatgttggtgacctacagatggggttttggtgtagatgaccttttcgttgatgttgacgc

SEQ ID NO: 866883 - DNA, 647 bp, Homo sapiens
ctgatatcctttcttccatttgatcgatttggctattgattcttgtgtatgcttcacgaagttctcgtgctgtatttttcagctccatcaggtcatttatgttcttctctaaactggttattctagttagcagttcctgtaaccttttktcaaagatctcagcttccttgcattctgttataacatgctcctttagctcgcaggagtttgttattacccaccttctgaagcctacttctttcattttgtcaaactaattctctgtccagttttgtgcccttgttggagaagagtttcgatcatttggaggagaagaggcattctggtttttggaattttcagccgttttgcactggtttttcctcatcttcatggatttatctatctttgatctttgaagttggtgacctttggatggtgtttctgtgtgggggttctttttgttgatgttgatgttattgctttctgtttgttagtttttcttcttacagtcaggcccctcttctgcaggactgctccagaccctatttgtctgggtatcaccagcagaggctgcatagcagcaaagattgctgttgcctgctccttcctctggaagctttgtcccagaggggcactggcctgatgtcaaccagagctctcctgta

SEQ ID NO: 866884 - DNA, 478 bp, Homo sapiens
ctttattttgagcccatgtgcgtctctgcatgtgagatgggtctcctgaatacagcatactcatgggtcttgactctttttccaatttgccaatctgtgtcttttaattggggaatttagcccatttacatttaagattaatattgttatgtttgaatttgatcctgtcattatcacgttagctggtcattttgcctgttaattgatgcagttccttcatagcgttgctggtctttacaatttgacatttttttttcagtggctagtaccagttgttcctttccatgtttagcgcttccttcaggatttcttgtaagccaggcctgktggtgacaaaatctctcagcatttgcttgtttgtaaaggattttattttgccttcatttatgaagctcagtttggctggatatgagattctgggttgaaaattcttttctttaagaatgtttaatattggcccccactcttttctgacttg

SEQ ID NO: 866885 - DNA, 590 bp, Homo sapiens
tccagccagtatatttaaaggtaatgagataatgatgagtgttttgaaaaatgtttagtgttcaaatagaaaccattcgtgtcccttcactctctgaacatagtctgcaaatctctccctctctggtatgtttctgttttgtggattagactgctaaataagcgaagagttaattttgaagttcaggtcaacaaattcctgtttggagacgggctgttcctgaataccaggttgttatctgtctattacagccccttcacttctgggctcctggccctttgcgaagtacttcagaaagcctagagagaagagagggccctcaaatcccattccagcccctaaatgaaagtggcatcacaaggagaaaagtggaggtagaaatgtaccatgggggacgttgccccattgcctttcttcccctgactactgggcttcctctatcagcttttaacgyctggaagtagctgagtctccagtcactggtggccttccccaagtgagctcagcagcatgtgctaataggtgccaatactgtgctggctccagtgggattcctctctgcaaagctgctggcttagcttgactgtttc

SEQ ID NO: 866886 - DNA, 601 bp, Homo sapiens
ctttaaaaattccaatccctggaccaattgaattagaaactctggaggtggtgcctgggcatcagtatttttaaaaagagataaacagaaattgaaagacacgccacaaactggagaaagtatttgcaaaaatacatacctaatataggacttgtctctagaatatataaggaatgcttaaaagtgattaataagaaaataaagaacctaattacaaaatgggcaaaagggctaggcgtgggctcatgcctgtaagcccagcactttgggaggccaaggcaggcagatcacgaggtcaggagttcgagaccagcctggccaatgtggtaaaaccctgtctcaactacaaatacaaaaattagccatgtgtgatgtcatgcacctgtagtcccagctactcgggaggctgaggcagaagagtcgcttgaaccygggaggtggaggttgtggtgagccgagatcgtgccattgcacaccagcctgggagacagagcaagactccatctcaaaaaaaaaagaaaaaggtggggggtgggcaaaagatttaaatagacactttaccaaggagagcacatggatgacaaataaactcatagaaaga

SEQ ID NO: 866887 - DNA, 671 bp, Homo sapiens
catcttcgacctggtaatcaatggaatccagactgacctattacaagagtggggtccctatgctctttacatagtctcccttgtcagtttcctgaaatttattgtgccaactatggtgggagttaaagcgttaaggtttggcttatttgttttgggcagatcacagagatccaggactcagagctagggaatagacagctgaccccaagctggaaaaactttcccagatactccctcctgcctaggaagtggcctatgaaaaagcagtttaaataatggcagcctaaaatatagttctatatgcaacatttttttttctatgaaaactaccttttgccttatacaacctgttaaaaagtgggagatttcactaataggagggcaggagttgagcacagatccaatagaggaaaaatactgtcttcaggcagataggggatgtgccactggggccgagatgaygagtttcgtgaaaaacagagttcaaaagaggaggctcttgagtgtaaagataatttgaggggaaaagaaaaagatagaatgtgactggaaggaacggaataggaaaagcagcatgatatagatggaaatctcctcatttctttgacgtccttaacaagaacatcaagtgaggcagaatagtcaagaacttggactctagaatccaaatt

SEQ ID NO: 866888 - DNA, 669 bp, Homo sapiens
agtaggacagtcaactggcctctagcctataaagaaatattcctttcagatagactctagtatataatatcattctgctattcatcaggaagtggctgaataatttattatacaacttgtctatagatcagagtagaygaataataaaatctttagtatgtaaaaaccttacaagaaagttgagacttatggtagcaaaggatccagaaggattgggtcattttgtagttattagtaaacatatgtctgtgataaagaccactttggcaaaccgaggtatctctctacccatcatcctgcttcaggagaacttgggctctgataagtatgtacgtaatgatcaaatcccccacatttaccaacctgctccagtcatcattgtggtagatgtgtgcacgagaaaaatgctcattttattccattccatggatacttacattctctgcgtgtttatttaggaagcattttattgaaatgattcctcattatgtgtaacttaataccatttattcattaatttatttactcagtacacattaattgagtacatacaatgtgcctggtgctgggaaagcaaaagaaaaaaccaccatacttatcctcaaagtcatctcagtctatttgtagaggtgaataataaatgactgtaatacatggtgaggaagacca

SEQ ID NO: 866889 - DNA, 655 bp, Homo sapiens
actactagacatcttcatgtcatgtagccaacatctttttttcctttgcaccatataatctgttttctctatgggtaaaaatcacattttaatgatggggtggaacttcctttattccaaaactcatttgtagtcggggttgggcacatatctaggtctgataaatcagaatagcctattcttctgtccacagctatttatttttaatgttttcaagctgattttacctttctgctagagtcatcagggaagatactctctttccactggggttgttaaacaagtagaatgcaaggctagactactagcaggcatccttctcattaattagcgagagaagagcttgtctgaactatggagggaaaaatagagaatcaatatctaacggtattctttaagaccctgaatccagccacacttgaaccatttttctaaaggaaygtgaattcatagtgtttttcttttatcttgggtctatgttatttgattttaaaatatattaaaatctagcaatgttattttatatgtggctgatacattatatatccatagtcaaggagatagcactaatcacataccatgacaatagacacaagtctgatctaaactctgtatagatattggcactgcccttgttttccagattatctctgga

SEQ ID NO: 866890 - DNA, 655 bp, Homo sapiens
actactagacatcttcatgtcatgtagccaacatctttttttcctttgcaccatataatctgttttctctatgggtaaaaatcacattttaatgatggggtggaacttcctttattccaaaactcatttgtagtcggggttgggcacatatctaggtctgataaatcagaatagcctattcttctgtccacagctatttatttttaatgttttcaagctgattttacctttctgctagagtcatcagggaagatactctctttccactggggttgttaaacaagtagaatgcaaggctagactactagcaggcatccttctcattaattagcgagagaagagcttgtctgaactatggagggaaaaatagagaatcaatatctaacggtattctttaagaccctgaatccagccacacttgaaccatttttctaaaggaatgtgaattcatagtgtttttcttttatcttggktctatgttatttgattttaaaatatattaaaatctagcaatgttattttatatgtggctgatacattatatatccatagtcaaggagatagcactaatcacataccatgacaatagacacaagtctgatctaaactctgtatagatattggcactgcccttgttttccagattatctctgga

SEQ ID NO: 866891 - DNA, 620 bp, Homo sapiens
atactctctttccactggggttgttaaacaagtagaatgcaaggctagactactagcaggcatccttctcattaattagcgagagaagagcttgtctgaactatggagggaaaaatagagaatcaatatctaacggtattctttaagaccctgaatccagccacacttgaaccatttttctaaaggaatgtgaattcatagtgtttttcttttatcttgggtctatgttatttgattttaaaatatattaaaatctagcaatgttattttatatgtggctgatacattatatatccatagtcaaggagatagcactaatcacataccatgacaatagacacaagtctgatctaaactctgtatagatattggcactgcccttgttttccagattatctctggagtgctctgagggatcagttggttggccaacaaataccatttgtgcctcaggctytttgtaaaacctaggggaatgtctgaatttcccttgattgagacatctcccttccctgtcaagtcctgaaggagctgtaaactcaaggaataatgccaaaggagaaattagtgtctgccttattatcaattgtacttttgttcataactcgcaataatttggt

SEQ ID NO: 866892 - DNA, 639 bp, Homo sapiens
ttcctctttccccctttctgacatggaaatagcgagcgaagatttgagggccagttttttcatgttgttgttttgggatgttttttggtgtgctgtcatagattttattttttcatttagagaagccaggtccaacctaaacagtttcatactcttaccaagaggatgctttgtccttcactgtttcaagtttgtacaggattcaggaccatgttttgcacctagtaaatgagtcttcgtttatccaaactattttgagttctcacctttatgcctttgctgttgctatgtcatttctcctgaaggcccttctccttctctttgttcacttgattactcttagtttttacatttcagctcaggtgtcaactgctccaagaagcctttctcgagctcatgctccccttcaccaaactgccacaacaacctgtgtgaatcttgatcaccaagcttacagtgctgtttgarataattatctgctcaagtttctggtgttcccattagactgtcagtgcctcatcgatgtgctcagcctctagctgtgaatggtgcacaggtgaccccagtggatattttttgaataaaaaaataaatgtatggatgaactgagcaatgttttgttaccatggatgttggtca

SEQ ID NO: 866893 - DNA, 606 bp, Homo sapiens
gagtaaacctggccatatctaatgactggaagcctgagtttctcttcaaactcagaagagaaaaatgaatttatggttttgggcgcagctttagttttgtctttggggatgagtatgtattttgttgggaaggtggatgccctgaagcagggttgggaaacaagattagaggtttttgaataagactgtgtttgaatacagcttggctatggtcttctccatttcaagtctgttcaacttaacaaatattgagcccttactaggtgtcagacattcttgggtatttagaatacagtatattttgattttggtgttgaaaaaggtgtggaggtatgcagggaaaaatctcacatgcttttacctacacacacacacattcaygcaacacaaagtgcacgcacatattggtcttgaaattccccaaggaccaaaatggacccatgtgatgagtctgtgttataacagggaatctaccgtaggttcttggctaccttttgtgaaccttctgtcttctttcctctcacttacaagtaatcccctgagtttttacctcctgaaccctgtgatttcaagggttcacaactaaatgcttcttatgctgagcaa

SEQ ID NO: 866894 - DNA, 650 bp, Homo sapiens
ccaatcttctgtaacgaggtagactccatttagaatctggtgatgtatcgcatacaagttagattgcttgacaagtcacaccaaggtttactcaaagtcactgccattatggtatataatcacaggctcaccagtgtcccacaagggtgaaggcagaggttaatggttttctttttatttgcattattacttgatctctggctttcctggtgagatgggtttttataagctcttcccatctcacttttygaagtgtttttaagctattttaaggctgttttataggtgccttttcttatgtttgttttgtatgctagaaagtaagtaaagaggatccaggatatgagctattgatactaccaggcacactgaagtaagtattaagtcttttattgagctttctaaatggcaaagtatatttcttttttatttaaaatgttaaaaaaaaaagtggtcaattctaactaactgccctaaatgtatcaaaaggcccttagaagttttcttctttgccaccatggtgaatccttcaagcaaattgattttaagcttgtacaacaatgtgaatgcaatgacactaaagtgtacacttaaaatggtacattttatgtatgtatattttaccacaataaaaaaatagattttaagca

SEQ ID NO: 866895 - DNA, 650 bp, Homo sapiens
ccaatcttctgtaacgaggtagactccatttagaatctggtgatgtatcgcatacaagttagattgcttgacaagtcacaccaaggtttactcaaagtcactgccattatggtatataatcacaggctcaccagtgtcccacaagggtgaaggcagaggttaatggttttctttttatttgcattattacttgatctctggctttcctggtgagatgggtttttataagctcttcccatctcactttttgaagtgtttttaagctattttaaggctgttttataggtgccttttcttatgtttgtttwgtatgctagaaagtaagtaaagaggatccaggatatgagctattgatactaccaggcacactgaagtaagtattaagtcttttattgagctttctaaatggcaaagtatatttcttttttatttaaaatgttaaaaaaaaaagtggtcaattctaactaactgccctaaatgtatcaaaaggcccttagaagttttcttctttgccaccatggtgaatccttcaagcaaattgattttaagcttgtacaacaatgtgaatgcaatgacactaaagtgtacacttaaaatggtacattttatgtatgtatattttaccacaataaaaaaatagattttaagca

SEQ ID NO: 866896 - DNA, 633 bp, Homo sapiens
atgaacagaattttaaaaaatcaaatattctggcattctggcttcaaaaaccttgcgtttgatgttctctacttagaaataaataaccaaacatgagaggaatgagaggagatggggatggggagtgggaggaagagggtagatagaaataaaaggaagaacaacattacagagaagcrgagatgacacagagggtggacacgtgggaaggcctggatcacaggggaaagagtgagccccaaaataacactgtggcttttgcagcaaggaggaaataagtgataagaggaaaggcacctggggaaatcttgaagggatcatatgtcaaacggctgaagagcaaacattaaagctttattttgaaaaggatatttgaaaatatttgacaccaaaaattctgtagggaagtaattcttgtggagtttgccttctttttagtttaactcttctgaatcaggtacttgttataacaaatcatatattgagggattattttgtgccacagatttgcaacatgctttatatacatttccttttaattctcaccgcaatcccatgttgcaattattattacgatccccttttaaatatgaagaaactaaaacttaaaatgcactaagacatggctaaaac

SEQ ID NO: 866897 - DNA, 558 bp, Homo sapiens
cagttgggcttcaatactttcacctcaaagtattctgttcttcacaatattataattccacagtgcatgtgcttgttgcacacgtctccaggagttgaaatacttgatattagagccagtggtccaaatgaaaatgaccagaagaggccaaatgtataatgttctcaatcccttatcaaaaatagatgggaataaacacacatatatttaagtacaataaaatgtgactaatatgtttttttctaaaacccagtcccatataggtgtcggatccacagaagtaatttaagaatggtttatttgaagatctctwtgtataatttatagatttctcagtgtgattaagaaatgaagttattacatttttttctctaattagtaatgcacgtatgcctccttttaatgatattatgatgtttactactcatagggccattctttcttgagtatagccatcactttctgttgaagaattgatttcactctttgtttaaatgtacatacttgttgctatatgaaatatatgactgaatatcattaaagatttagcaagaatgt

SEQ ID NO: 866898 - DNA, 645 bp, Homo sapiens
tgctaataattagagggaaataaattacataaaacaatgccagtcatgtcattgataaaaaggaaattaaagtgtgattgtgtttctctttctctctctccctcattttcagtgagctacatcctcttgttgtcctcctcacctgattaggcatttttgtaagggagtttgcctccgtcctctgttgtaaacattttccttacctcagcatcctttttaaattcaaaagacactttcctttgcaatgcactatgaaaggcgattgtgttagagaatatcagagatggctttgtcatgtctggtgctcttaaatccttttcttttttttcttttcttttcttgagacggtgtctcactccgtcacccaggctggagggcagtggcgtgatcggggctcactgcaacctctgcctcccrggttcacgccattctcctgcctcagcctcctgagtagctgggactacaggtgcccaccaccgcacctggccaattttttgtatttttagtagagatggggtttcaccgtgttagccaggatggtctcgatctcctgacctcgtgatccacccacctcagcctcccaaagagctgggattacaggcgtgagccactgtgcccagcctcttaaatcctgttgtgtcctaa

SEQ ID NO: 866899 - DNA, 598 bp, Homo sapiens
gattcctgctatggacccatcacccttgtagactctgaggctgcaatgaaaatacaataaaatcagtaattctagttcttatggaacatacattctgggagtgggggcagagactaccgataaataaattagcaagagaatataatatgcagggacaagtgctatcaagaaaataaacctgcgcaatgtcacacagaatgcctgatgggtgggtaggtagtttaggggaagttactctaaggaagaaacatttaacctgagattggaatgataaaacatgtcaggtctgtgaagtctgggggaagaacatttacagcagagggaacggttagtgtaaaggcctttaggctggaacatgttgagcagtgtttgaaagatgatgaatrtggctgtagcagaagaaatctggtgtgaggtaagatctgagaagtggcagggactgaaacagacagggcctgtttggctgtggaaagcagtttaggttttataaaagtgcaatggcaaactattagaacgtactaagtaaaggagtgacatgatgtgacttatgttttttaaagattactctgccatgttgagaaaatattgtaaagcagca

SEQ ID NO: 866900 - DNA, 606 bp, Homo sapiens
caactcatatgactacatgggccatataaaataaatgagtcaatgtgccgaagatcaggaaagtgatagctcaggcaagactgacactaattcttggcctctctgtctaagagacagaagagagtgctagagactatggcacccaggagaacccagaccgaagagggcagccactgctcagctgctgccagtcatcacagcacaggagcaatggaccaatattatgaatttatcttcttttgaaagacaatccagaagtcgagacttttataaaaagtctgaattcattacctgtattaaattttctttgatttaaaacactgatcaggctaaatacaacatacctgtaagatattacayacctactgcaagaaccctgcctctgcatataaaggagaaagataagcacagttgattctcttcacaagccctgtgtcatgcaaacaggattaatagcccagttctaggctaacaatttcatagcaaccatgtggttattatgtgttgtatatatgaaattatgccataatgagctgtctcctaacaagattgtgcaggctataaagctgttttatagctccaagagagttgctcctgagttcattg

SEQ ID NO: 866901 - DNA, 593 bp, Homo sapiens
attgaggttcagagagtttaaataatattgtcaaaaacatataggaagtgatgaagttaagctttaaggccaggcctgtctactcaaaagcctgtgattgttatattaagggttaaaaaaacaaaaaagtttgcaagagacagacaagttatttgaacggaatgaagtataagaaaacctgtgctttccttaatttttcttgaatccygtggccttctcagtctatcctttattgaggttcagagaggttgctacttatatggtagcaaaagtatttcccttccctacttaccctactatacaaaacaaacaaacaaacaaacaaacaaaaaacagaaaacttgatgataaatgtcaatcaacactcagcctctgcatctgatgagcaacagaaattagcggggactgtggtgaattggaaaacctgtgcctttctctcccaatcagctctggctgattgtcctacagaaaatgttggctctgtgttactaaatcttaccattttttaaaagaacagtctagctgttcacgagagatctgatcttaaaatgttgaaaactaattcacatagaaaaatactatgtagtacccac

SEQ ID NO: 866902 - DNA, 593 bp, Homo sapiens
attgaggttcagagagtttaaataatattgtcaaaaacatataggaagtgatgaagttaagctttaaggccaggcctgtctactcaaaagcctgtgattgttatattaagggttaaaaaaacaaaaaagtttgcaagagacagacaagttatttgaacggaatgaagtataagaaaacctgtgctttccttaatttttcttgaatcctgtggccttctcagtctatcctttattgaggttcagagaggttgctacttatatggtagcaaaagtatttcccttccctacttaccctactatacaaaacaaacaaacaaacaaacaaamaaaaaacagaaaacttgatgataaatgtcaatcaacactcagcctctgcatctgatgagcaacagaaattagcggggactgtggtgaattggaaaacctgtgcctttctctcccaatcagctctggctgattgtcctacagaaaatgttggctctgtgttactaaatcttaccattttttaaaagaacagtctagctgttcacgagagatctgatcttaaaatgttgaaaactaattcacatagaaaaatactatgtagtacccac

SEQ ID NO: 866903 - DNA, 593 bp, Homo sapiens
attgaggttcagagagtttaaataatattgtcaaaaacatataggaagtgatgaagttaagctttaaggccaggcctgtctactcaaaagcctgtgattgttatattaagggttaaaaaaacaaaaaagtttgcaagagacagacaagttatttgaacggaatgaagtataagaaaacctgtgctttccttaatttttcttgaatcctgtggccttctcagtctatcctttattgaggttcagagaggttgctacttatatggtagcaaaagtatttcccttccctacttaccctactatacaaaacaaacaaacaaacaaacaaacaaaaamcagaaaacttgatgataaatgtcaatcaacactcagcctctgcatctgatgagcaacagaaattagcggggactgtggtgaattggaaaacctgtgcctttctctcccaatcagctctggctgattgtcctacagaaaatgttggctctgtgttactaaatcttaccattttttaaaagaacagtctagctgttcacgagagatctgatcttaaaatgttgaaaactaattcacatagaaaaatactatgtagtacccac

SEQ ID NO: 866904 - DNA, 606 bp, Homo sapiens
agctgaagtgttgaaggacatcctgttctggtaggaagtggaacagagacttggctattccagccagttcctccttatctgagaatgttacatttctggtatattctttagttatttttgagaactacaagtgagaaaagaacacaaaccaggttggtccgaggctacctagagaactttcttccaataggtgaatgagcaggtatgttacaggttcctcatttgatcctcycaccctatttgagttattctgaccacttgtacatcaactattgattaaaatctgaaaaaagaaaatcataggtgaccttaaattaaacttaaattaaacttaaaaaaaaaaacttaaaaaaaattaaacttaaaaaaagttccacaacgaacaggggtcagcaactttttctgtaaagggccagaaagtaaatattttaggcttgtaggccacatgatctctgttgcagctactcatgtctgctgttgtagcatggaagcagccaaagataataatacatcaatgaatgagtccagccgtgtcccaataaaactttatttataaaaacagggaacaattatatttggcacacagtttgctgatctctgctctag

SEQ ID NO: 866905 - DNA, 595 bp, Homo sapiens
cctttcttcccttcctcgtctctgcctcttttcctttcttttctccctccgcctctctgtcagctcttcccgtcgtttcctcggcacccagctccagtccaggcgctgtcccagggtaggaagaagggcgatgccccttcttccccttctctggtcccctccccagcctccggctccccaaggtgcagggctccggcgggggctgggccgggcgggtgggtttctgagccgcagcgcttggagctgggggagcgggagcaggggcggcccggcgggcgggccgggacccggcttttccggctacccgtgggycaggtgcgggtttcagcacgcggggcgcgtgtgggcggaggcgccggggcccgcggctccgcttgttcgcgcgttgtcgctggcgaggcgtttcttgtccccggcgcccgctcggtgccgtctcagtgagtttgattgaaacgcggctgcgggaaggggtcgacagaggcaagctgcgagcaaggcgggggtgggggcgaggaaggggacccggagagctcccggagggcttggccggccaccgccgcgcggcgctgctcggggactgctactttgcaaggcg

SEQ ID NO: 866906 - DNA, 607 bp, Homo sapiens
cacctgagatggggagttcgagaccagaatgaccaacagggagaaaccccgtctctactaaaaatacaaaaaattagccgggcatggtggtgcatgcctgtaatcccagctacctgggaggctgaggcaggagaatcgcttgaacccggaaggctgagtttgtggtgagctgaaatcgcgccattgcactccagcctgggcaacaagagcaaaactttgtctcaaaaaaaaaaaaaaaaaaaaaaaaaaaagcccagtttcaagatttacctaactatctcaccaggctctggtgctaagatgggcaagtgccactctcaagatatataggatggaggctcctttgacatagtgaggtttataaaactgcctttgcaaaaattataactgagaaaattatgacagtgaaagacwtctgacataactgactccaccttgcttctaacctccaagttgtccttgttcattcctgggcatagactgaactaactatgggaggaaattagtttatagtttaactttgaaacaaagacaataacagccctttcccaaaacaaacccccttcctgcctggagactagattgcttttacaggactaacaagtta

SEQ ID NO: 866907 - DNA, 652 bp, Homo sapiens
agtcacatgtcaggtgtgtactgtgacagcatttcagagtccctcctgaaaaagatctgacctccatttcaaacaaggttttctgggtctattaactgctttgagtctgagaacttgatgagagtccatttattactactatgaaaacttaagtcaaatttctgcccattacacctagaattcttttgatcatttaaatcaagctataatttagaatgctacctattgacttcattcttaagtatctcgtgataaatgagccaccaccatagaagtcaaaagccctgattatcatattgttcctgccactgtttatggcaatatccccttttgagaacctgagtcctggagttggggttacctagggtgaactstagccttggagggatacagccactgccagattgcagcacaataaagcagataaaaagcttaaggagtaaatacctcagtctctttctcttctctcccttcagtatcttgctcgttcctcccatctgttgagcccaataaagacagagggctaaggagcctggctaatagcaaatgtatattcagggatcaacctgcaaggctgtgcaatgcagggaagagaagggtggagaatggatagagggagggggaacttgaaaaagagccacataaccaggca

SEQ ID NO: 866908 - DNA, 649 bp, Homo sapiens
cacatggcgaagactaaggtagtagtcaggactacaactctgaatccaatgtttatttaactattataaatacttgacgctaggtatgatgcttgtttgtcctgtttagtcactaaagatggtcccttaacaaaccacacttacattcatagccttgggtcatcttctcccacagtgaatctgggcttgtcctgtgtagtcaatataattcagtggaacggaggctgcatgactttgggctaggttgtaagaagccttgcagcttctggcttggtctctgtgctccagaaaaacttggaagacatcygactacctgagattgccttgcttagggaagccgaagttggccaggtgcataggccatatgcacagagagagagagagagaaagaaatggtctagacagctccagatgttcctagccatcccagctgcgggcacacaaaacaacttggatgtccagaccagtcaagccttcatatgcctctagccccaaccactatatctttgtcactacatgagcaatgccaagttggaactgtccagctgagtccagtcaactcactgaaagagcataatgaattgtagttttaaggcattgagttctgaggcggtttgttacacagaaacagaaaatcaaaacactgctt

SEQ ID NO: 866909 - DNA, 620 bp, Homo sapiens
atttgggaactaacaagagcaaagcaaataattcagtaagttgttgcatggaataaatttactatggtaaaaaacaccatttactttgagaacattccgatatttttcaaaataactcataacatcattttgtataatggatgagtttcttttagtggtcatggtttcataatttgtaaaacctaaaaaatgtctaaccttctagttagttttcatttttgtacttcttttagaagtacaaaattctatgctatgacatattaatttgctatgggttgagtgtgctaaattccaagagatatggcttccaaaggcactcagataagcaggcagaaaggacagagtcattgaatcccaacagttatttaagtctaayggagcgtatgcgatcacagcttggattgtggttctgaaccaatgaaaaggttgagtttcaaaactatgaagtttgagcctcagactcattttcatagaaaccctgatgtaaatgatacataaattcccaatttaatgggtatggttgctggaagggtaaccccaaatctgaagttggggacaagtctcattggtgatgactgtatttgaagggttgcttgtggtattgagtgagtggtctctgt

SEQ ID NO: 866910 - DNA, 615 bp, Homo sapiens
cttgtatttgacatttaattgatgggaaagagatacatacttctctcactctgctaatatgtgaaacccaagaatcaaatcagagtaaagataaggaatgatttatctgtagaaatgtagcatggggctattttgaaattcggaaaacagaatttgttgataaaaaatcaaacgtgtaataaaatataccacccagccttgcaaaatagcagaataaatgagatcatcttattataggtatccaaaaagaacctctaagatgaatcagcctattattcgctgtaaaaacactgaaactcagaaaggaatggctttgttactggcattttgaggtcaacactccgtatctctttgtacctggcagcaattacataccatartactcccaccgggatacaggcgccacggctattccacacttgaacacgccacttcccgatcccaggaccattgaggttacgtaccctccatatgactaaggaatggaaacagttatttttatggaggtaaaagaataaggacatatggtaagcgagtcgcagtttccacatttctcacatctttatatactgtgcctctttagagataaaaagcatggtataggaggcttaaatt

SEQ ID NO: 866911 - DNA, 636 bp, Homo sapiens
ccccgatttctgtctttcagaattttcaattcaacttaggtatttgcccttctccttccatgtgctagcaaaagaagatactttccaacctgagaaaggtgagtcttgagtagtctggttcaatcacggcaattcattctccttgccggtgattggtttggatatggacaagtgacacaaatgtcgccagtaagatctgaaagtttgcayctggtcagaggacttatggaaatggttttcctccctgatacagcagaacatgaatgaggaagagcatcctcttctgccctgtgaatgagctgtatgagcaagtgctgggttgagctgcagaagccatgctcaaccatgagatgacatactggagatcaaaagacaaaactccaaggatggcagagctgaaaggtggaaaggccccatgttcttgatgtgttcaggccattacattaacaaacccaagaaccactttacttctgcacttccaattataaaagatgctaatgacaatacagtaataaaacgctatcattcaaataacttttggccaggtattgggttccttgaagcccaaaacatcctgatacaatcctcatacagcatcagggggctgtaagtcagtgaggatggacacggaggtgc

SEQ ID NO: 866912 - DNA, 613 bp, Homo sapiens
aaacatacttttaaaactataaagtattatacgaaaaattggtattaccagaaacgatttgaaaacttcagtattatatttttagaagctttaaaatttagtcaaacctttaaaagaactctaaatcctaacaagattacttatcctgtattcaattagaccccccctaccatcacaatggttggagaaaaaaaagtcactagggcttctagtaattactaccaaaacagaaattcttctcaaggtcacctctttggaggtattacsgagcaacaacaactgaagaaggaaaggaaatacaaggaaagaagataaactgaataacaatctaagctcaccatctcaaagacacttctggtaatttggagtcaaaatatctttgaaatgatggactaaagattatgaaaattatttcccaaattcttaattctccaataagcaaacatctaaggaagaacttaaagggcagcacagatgtcttgggaaaacattttatttctcagcatatctcagtgaaatcacaacttatcagaaatactgaggataaatgaaatgatacaatatattcaaagacaaacaatttccttgactttctaggggtcccaaaccaaag

SEQ ID NO: 866913 - DNA, 613 bp, Homo sapiens
aaacatacttttaaaactataaagtattatacgaaaaattggtattaccagaaacgatttgaaaacttcagtattatatttttagaagctttaaaatttagtcaaacctttaaaagaactctaaatcctaacaagattacttatcctgtattcaattagaccccccctaccatcacaatggttggagaaaaaaaagtcactagggcttctagtaattactaccaaaacagaaattcttctcaaggtcacctctttggaggtattacggagcaacaacaactgaagaaggaaaggaaatacaaggaaagaagataaactgaataacaatctaagctcaccatctcaaagacacttctggtaatttggagtcaaaatatctttgaaatgatggactaaagattatgaaaattatttcccaaattcttaattctccaataagcaaacatctaaggaagaacttaaagggyagcacagatgtcttgggaaaacattttatttctcagcatatctcagtgaaatcacaacttatcagaaatactgaggataaatgaaatgatacaatatattcaaagacaaacaatttccttgactttctaggggtcccaaaccaaag

SEQ ID NO: 866914 - DNA, 700 bp, Homo sapiens
aagagcctagattaccacagagaagacctgctcatctgtagtgtaaagacaggtgcccagtggaaagacccacactttagtgtgatcctgacatatgatttgtgttacattgggctggatacttaacattagactcatttttcctcatcttgagagatcaatagtcaatcaatatgaaagtgattttaaaagtttaaggtactatacaatgtcaaaaactattttataccattacttgaaaaagaacacacagtgacgggaaacatactggaccccaaaatacaagacttggattccacatctgcaaactagagatactaataatgttttaatggcactagctgaggtgaaatgagggatgtaaagctcygagaaaagacagattctatagaaatggcaaacagaatgtaatcctagtgtgggagggatattgaggcacctcacttctggcgactcagaatttaggtgagcaatgaagcacaaaatgaacccagaatttgctccttagatatttccttgtctttcccccatctattactatggccagctccccaactaagaaccaaggactgaaacccaagtttgtcaggaatccgattcttatttctcatttatctgtacttaggttcattagagactcaggactgggttttcttccatgcctggaaaatattatatccaccagtcacctgcaagtatg

SEQ ID NO: 866915 - DNA, 602 bp, Homo sapiens
cagagcttttttattaaaccgggctaaagcacatggtttaggcttaacacagacagggcatcgctaggcctcttccagctgggcagggctcaagtgatagtaacagtcctacagagtgcttcagaggaagagaaasagtaaggtggccacatctggactagtaggttctgactcagcttacccactgggacaggacaggacaaaagagtcatattcatggacatggtcctgcatatttataaggttagcccaaccatgtgtgggaatttgactgcccctgtgcctgagaccttcaaaaaggaaactctggttacagtgtgaagaaggtggcttgggaatggggagactgatcacaggaacataagtgagtaggcaaattcagttgtctatgcaataaatggcacctcataacatcaaggctgggtggaaacaatttgtgtttaacaaatggtacaaatagaacagcagggtagctaaacctggtaccatctccccggtacacctcctatgcactgcacaggttacctcagctccatatatatgccactagattctaaacgaggaaaattaagggggcaagacaaaaatgggtccctgtggag

SEQ ID NO: 866916 - DNA, 647 bp, Homo sapiens
ttattctgtcatattgccatatttaaacacatcctttgttgttataatgtctttataattgatatttttaacatttaaataatacttgttcatgtggatatgccataatttttaagtcatttccataatattgaacatttcagcagtcttcagatttttttctattagaacttttactgcagtgaatatctttgaatatacagcgttttgcttctcttatttggttaaggtaaactttctrtatttgaattactggggaaaaaaagtatgaacatctttgtgcctctcattaaataatatcatattttcttttcaaaaagatatataaatttatcagcaatgaataagtgtaccagctacactacaaccataattatattacaatcatttaaagttgtgctaaaaggtacaaaattgcatctcaagtttgctttaatttaaatttctttgattcctaatgagattgtatgggcttttttaatgtataattattgtttctacttttgtgaattatctcctcctatattttgtgattatcctagttttagttgcacttttcttataaatttggatgtaaaattacagattagaaatattaacctttagaaatattagcctttgattaaaatgtttttccagtcagttgt

SEQ ID NO: 866917 - DNA, 646 bp, Homo sapiens
acccatttctccaaggacttggatgtgtttgactagtgggattgggcaaatgacactcctttagagaatcttttgtaattagaccagtcatgaacatatctttgcttcattccataaacctggcaacttctgaaaatctggaattctcctttcaatttattttcctttgtcccatgaaatcatctgagataggaaaataactgtgctacttctctacacttcatcagcctaaaagttaaaasactatgaggcaaatgaggctgaaaagactcccttctttctattttctaaattctattcatcctccaagactcaatcccaacaaatcttcacaagatctttcccaaacaatcatagcccaccctgacttactatggatgttaacttcagtatcatatattattcaggtctcttcccaacttgatttctgtaaaaactgagagttaaaaagaagaataaacataaagatcaaaatattgactttattactacgtgattttgctaagactaacccctagtttatttatctaggtagacttacccccaatctcaggcagccctggagcagggcaagaggtggatgcacacccaagtgaaacacacaagttggaagggaagcatcgaggaaggcccatgctctgtatag

SEQ ID NO: 866918 - DNA, 646 bp, Homo sapiens
acccatttctccaaggacttggatgtgtttgactagtgggattgggcaaatgacactcctttagagaatcttttgtaattagaccagtcatgaacatatctttgcttcattccataaacctggcaacttctgaaaatctggaattctcctttcaatttattttcctttgtcccatgaaatcatctgagataggaaaataactgtgctacttctctacacttcatcagcctaaaagttaaaagamtatgaggcaaatgaggctgaaaagactcccttctttctattttctaaattctattcatcctccaagactcaatcccaacaaatcttcacaagatctttcccaaacaatcatagcccaccctgacttactatggatgttaacttcagtatcatatattattcaggtctcttcccaacttgatttctgtaaaaactgagagttaaaaagaagaataaacataaagatcaaaatattgactttattactacgtgattttgctaagactaacccctagtttatttatctaggtagacttacccccaatctcaggcagccctggagcagggcaagaggtggatgcacacccaagtgaaacacacaagttggaagggaagcatcgaggaaggcccatgctctgtatag

SEQ ID NO: 866919 - DNA, 529 bp, Homo sapiens
cttagacacctaaaacccaatcagtcagaaagaagatataattggtcttaaaaaacttaggaaagatgggacttctaagagccaatctgtcaggcccctttgagcagcatccagggatcagcgaagcactttatcagtccagctcagataccaatctaccwgctgtggattctcttttctaaaaatatatgcaatgggacacaccagtagagacttatgacatgaaatatttaaactatattattaaatctcttagccttgattccattgtcaccaagtggccttctgataatttggtttttcatgcatggaacatatcttcaggaaaagtgtgcccagtcaggccaaccaagaatgtctggtcccgtggtaataacatttctcttagtaagctggcatcctgacttcatacatcagcctgttgagagctttgctcatgtgaggaatttcccttaagtccagtttaactcaggaataccagcaagatctcagtttctagattttggaacccaaaaagcaagactttgat

SEQ ID NO: 866920 - DNA, 597 bp, Homo sapiens
cagaacttcacacaaaggaccagaggccaccccaccgccatcccagggccttgcaaaaggctctgagacattgttcattactgcaactgcaggaagcccccagtaagcagaattgctgcctgaaccccacggagtgtggctcatgagtgtgcctgacttggggacctgaagcagtggtgctatctgggactggggrtcagcgagaaagagggatatagatcagggaacactctcctagcaaagttctgcgcatgtaaagacctccccatctttgtgcagctttaagcaagataaagctcacaccaaactgcctttctcagatcccctatctcgtcaataaaaatttcataaatttgtctaatagtcttgtaaggtttatggagcagagaccagagtagcaggcagactccaggaaggggaaggacttacccacttccactctgacacaaactccactggagacaggctggagggccatctttcccttctactccaagtggagtttcaattgaaatggtggatgcctgagaatgctgtgttccctgatcgcctcccttgcccaggttagggaggagcactctccaggacaggacagag

SEQ ID NO: 866921 - DNA, 616 bp, Homo sapiens
ttttttgttgttgttgatgttgtttttttttttttttttttttttttttagagacagggtctcactattttgcctaggctagtctcaaagtcttggcctcaagccatctgcccaccttgacctccctcccaaagctctgagattacagacgtgaactaccatgcctggccctgttttctatttcattgctttctgtttttattttttattatttccttctttctacttactttgggtctaatttattcttatttttctagcttgtgaagatagaagctgaggccaggcaagatggctgatgcctgtaatcccagcactttgggaggctgaggtgggaggatcccttgagccyaggagttcaagactagcctgggcaacatagggagaccctctcttaaaaaaaaaaaaaaagtagccaggtgtggtggtacatgcctgtagtaccagctacttgggaggccaaagcaggcctatgagctatgatcgtgccattgcactctagtctgggtgatagaacaagaccttgtctcaaaaaagaaaaaaaaaaaaagatagaagctgagattattgatttgacatctttctcttttgtaataaaaatatgtaaaactataaa

SEQ ID NO: 866922 - DNA, 644 bp, Homo sapiens
actaactacttaaagacagaaaaaaggtaacccaaaatattcctggcctaaaagtctggtgatgggcctctaaacctattctcaagttgtgacttgtcttggcatttttaaaagccatcctatccaacaaggtgacagtacagatgagtagtatctttaaagactaaaacctgtgctagttactggacctctgcatgtatcagctctctcattctaaaagggcatgacgataatgcctatattatagagttgttaacaagagctaagtgggaaaatacaaatttctcataatagtatttggcacatagtaaatactgaatatttcattaatgcatgkatgagaaggtctcactgaatgctatgagatcctgacataagtatcagtatttatataggaggtatactgaggacctgttaatagttaaattgatactccaagctcaattaacacctcatagaagcaagaacacccatggattgttcttctgcctaaatgactgtatcctcaccaaccctgagctcaagatacagaaatagcctatagatagatacttccatttcttgggccataaaattgagaggtaaccccttataactttttttctttagtgtctgccaaatgcttgtccaacatttgagtaaat

SEQ ID NO: 866923 - DNA, 603 bp, Homo sapiens
tcaactatgaactgagaaatggagaaaaagtccccaaatagtcacctgaattctccaaactcctctcattggaatgattgctacaagttatcacattaccatgtctccaaaaggcttctagtaaatatgcatgtttctttcttagcaaagaagtgatgataacacaatgggagttatgaacacctaagcttatgtgcaagatcccaaagggaaggagctataarggagttgtggaaggagaaaaagcttaatctaaaatcttatttagaaatgattcttctcaaacccctgcttactactactggaaaataacaccaccaagactgagaacatttcagtagaggagacaccacggaagccgtacactgattttcaacactaatcattagatcacagataactagcctgcttcattaatttgcataaacattcagagggtgccactgacacacactcacagatatttaaggaaggccttaactgagccaggttctaggctgagcgcaccactagttaaatgtatgggtgacttttctgttagcacataaccatgacataacaagaaaccagcatgccatttttgcccaatgacctgaacaaaga

SEQ ID NO: 866924 - DNA, 645 bp, Homo sapiens
aaaaaaaggcaagagcaactcagcaaagccagagagagtcctgctagcaggtttcctgcctcactgattgaatcccaggtcacatagtaacaggcaaggccacgctcctcccccatgcaaagggcacgaattccgaggctccaccccatcctcccagtgtkcaggtgggcattattcagaaagaattagttgagaaagtgtgggtgtcatccacaaccagcagtccagtgttttcagctttcaggctgttttaggcttgaaatcagggtttctccagggacccttggctgtctcctgtctctatcatgagttcctcctttacaatggaagaaaaagagtagaacttctcccttgttttgtggcttcctagaggaatagtttctttctcccctaactcagagagtaattgggaatgatgatatagtttgaaaatcaggtttcaggccactgaaagccgcaataggcacaacaacacattaaagctttggggaattcaagacctatggggtcctggaggcaacagagtagaggccgaggaatacaatagaagacttaaggtcctgaaaagaatcagaagtaaggctcttaaggaaaataggatatataaaagcagctgtgtataccgggacttgggagaaggaagaa

SEQ ID NO: 866925 - DNA, 688 bp, Homo sapiens
aattccatttgggggataaatgtcaaaatgtcaggtcattctatagttaataatgtggcaaactagtgttattttctctggtgactctctatgaaacacatacactaaaacacaagcatgcatacagatacacaccaccaccatcaccaagttatttatgaaraacagaatcgtggataaaagcttaaaagtttgaaaagtcagaccgatgcttcctggaccttcacttgctagtctctctaagttctcatttgcaaaattgggaacatgataaaaccagccaaattgtcccatacagctgatatttaaggtctttttgaatcaacattgtaattgaccctcctagtcttaaagcttgaaatttatatttgtcttatctgagtccctttttcaggaaactgaccctctggcctcccagatagtataaaggaactgaaactcaccagatcaccacatccagacaatgaaatgccaaacccctcatttgtcatgattgcttccttacctctcactaattcctgttttcctgcatagctacattccttccccactatataaactccaaattttagttagttgaggagacagatttaaggcttttctctggtcttctcagctaatgtcttccaattaaagtttttcttccctggcgatactcactgtctccatgattggcttcctgtgtggc

SEQ ID NO: 866926 - DNA, 610 bp, Homo sapiens
taaataataaaatggtatacatatatatatgtatatacatgtgtatatgtatatgtatgtgtatatgtatatatatacacacacacacacacacaatgggggtcctatcatcagatgcttgcatttagggttactataactggctatgattcattattttasggttcctataactggctataactggctatgattcattattttacactttgaaaaatgattattgaacacctcctcagtactaggcactggggcacagttctaagcattggggatataatgatataaataaacacattctctgctcttagaaagtttacattccagtgaaagttcccagataataaacaaataagtaaataaataaatatgccaggtgctaggtggtgctatgaacgaatataaagctgagaaagggctagaaactgactagggagtctattttataagggtcactaacaaaggcctctctaataaggtgccatttgaacagagacctgagtgaattgagagcaccagccacatgagtgtctcagagaagacatttctaggcagagaatagtaagtgtaaaaggtttcgaggaaacacctgtgggtgggttgttattaa

SEQ ID NO: 866927 - DNA, 607 bp, Homo sapiens
gtgtggaaagattgaggttttaataatgttggaggccaggcatggtggctcacacctgaaatcccagtactttgggaggccaaggcaagcggttcgattgagatcaggaatttgggaccagcctgggcaacatagcgagaccccaactctacaaaaaaatacaaaagttagccatgtgtggtggcacatgcctgcagtcccagctacttgagaagctgaggtgggaggatcacttgagcccaggaggcagaggttgcagtgagccaagatggagccactgcattcaagcytagataacaaagcaagagtctgtatcaaaaaaaaaaaagaaagaaaacaataaataatgttgaaaaaaattggataaccatatgtttctcacatcatacagaattaaatcatgcatggatcagagattaaatataaaaattaaaaccatgcaaatactttaaaaaacaccaaataattgttgtatagcataggagtggggaaaactttcctaactgtggctcatattccattaaaaagtaaaaaagtaataaatacaaccatatgaaaatagaaaaaaagcacgtttacaatatgaaaagtgtaattcaatttttaa

SEQ ID NO: 866928 - DNA, 664 bp, Homo sapiens
caggaagattgcttgcatccaggagttcaagccgagtctgggcaacacagtgagaccctgtatcttcaaaacataaaatgttagccaggtgtggtggtgcatgcatgtggtcccagctacttgggaggctgaggtggaaggattgcttgaacccatgaagttgaggctgcaatgagccgtgattacaccactgcactccagcctgggtgacagagcaagcccctgtctctaaaatgattaaagtaacagaatggatgaccaatactaatgccagggagctgatggttataatactcttacatagagaatattagtgacaaatcagcatgaaaaaatggtcaacctcatcattatgcaaaggatttgaaaaaattactttttttcaccctaataacaaagtaaagataacttgatgcaatayactccgtgctgtggagcagttgatgaaatatctgctctcatattctatttgtgaaatagtagttggcataatctttcttaaaatcaagttggcacaacctattaattatcataaaatacaatctcaaacttcgggtaatccatcttaagaaactataatatttacatgcagaattatagataaaagataagaattttagtgttacttttgttagtataagaaagaaaacaacctaatgcccaa

SEQ ID NO: 866929 - DNA, 638 bp, Homo sapiens
acatattcccacaccatacatacagacaccttctccagaaggcacaaaaggtattcatttcaaccactgagggaaagtacctgcaacacatataaaatgtctattacatcacccattaaagtgtgtatttttagagctactgacctttatatgaactaaacaataaagcggttcasaaacctgacagagagcagcttttccaaagtgaaacagtgatccactgttcctaatgcacccatcaaactaaacaattaaattggcatttagtacaaaatttaaaaagccataacgctgccaagattattggtcctgtctcaaacacacacacacacacacacaaacacatgcaaacacgaaacactgttttgtcttgtcatttattaaaaaagaaaaagaatgtatttatttagttgacagatgaatgggctgaataaatttaaggcaatcaaaagaaactcagttgtcccagcaccacaagttgttaccaacctaacttgggctcagtggccacagacttgttctcataaaacagcaaaggcacaaacagttactgtgcagatacaacaagtctgaattcaagtcccagtttatcagttactagctgtttgactttgggtaaattacttaacctctcttgg

SEQ ID NO: 866930 - DNA, 625 bp, Homo sapiens
gttagccacccctgctcttcttcagttactatttgcatggaatatttttttccaacctttcattttcaaccaatgtgtgtgcttaagaataaagtaagtctcttggagacaagatattgctagatcttgtttttaatcctttcagccactctagccttttattagaaagtttaatccatttatatttaatgtaattattgataagtgagaacttcttattgtcattttgttagttgttttctgcctgttttgcacttgyctctctaccttccttgctttcttgatgtctttttttgttacgacatgatttttgtagtaatttggtttgatccttctctcatatcttttgtgtatcaattataggtgtttttctttgtggttaccttgaggcttgcataaaatatcttgtatttatttattttaaatcgatatcaacaacttcaatcacatataaaatctctatacttttatcacccctcacatacacacgttgtgttcttacagtcagagtttacttctttttgtattgtgtatccattaacaaatattttgtcctttaatattagggttaaaatttacacactaccattatggtattaaattatttgttgtctatatatttatc

SEQ ID NO: 866931 - DNA, 660 bp, Homo sapiens
ataggatgcttccaataagcaaactttgcttggggactccacatcagcttggatgagattttcttagaactatactgcagtctgaggcctccaaccaaatcctccttcccgtctctcctttcacagatgccagacctgccttgtggtctcaaggctcttgccttctattcctcctccctctcctttaccgtccacatgcactcccccataaattaagctygtctaattctgtcttgttgtctattccttggaggacctgaaatgataatcacaggtgtgtaaaacattgtgcattttttcaaaggattagtggaaccctgaagttcatttgtagatccccctgaggcataaagacatcaggttaagaacctcagcaggtggtacaattaaaggtaattaaaagatggatactaagccaatttttgcatcattctgctcttataaaactttggcaaatgattttttaaaaatatgcatagttcaaatctaaaacaactatatttaaatacttgttaaattatagtaatctattatttttttaaaaaatcaaataggtaataagagaaccattaaaacaccataaatgtaaaaatcccttgagtgtttttttttttagttttctggaaagaacatcacaccgtgtaatactaaagcctgagc

SEQ ID NO: 866932 - DNA, 566 bp, Homo sapiens
gcgagaccctgtcttgaaaaaaaaaaaaaaaaaaaaaaaaagatttacaagaagttgataaaatgctggtgattatgctatctatgggattagaaattatgttagttaataaagaaatttttactaatcttaacaaatagaaagaaggggggaaacaaaaagttaatgtaaagtagaaataaggagttctttcctgatataaactcttagatacagaagccttccgtgtttatgcacactagcacaggaacactagcatacttatacaaaaagttcaraagcttatacagttcacactttttttaagtttaaaggttaataatgtttgtgagaaatggagaagtacattaaacctcattttcacagatgtgagaaagagacaataaaaaaaaagtgacttttccaaggcccaacagtaaatcattaaatgcctatgattttaaaaatcaagttttcaattgaccataaaaatgaattaattctgtgtgggcagatatttttcttttatcaaattctctacattataggaatttccttttattttttcctattgtgtttttcttatt

SEQ ID NO: 866933 - DNA, 633 bp, Homo sapiens
aaaaatctcacaaaacaaaaagaaaatgaagtttatttaagtatgaccttatgaggagaatagtgtaaagaaggaaaaacacttttcctctatcctcttaccttcaatgtctgagaattaaactgataaaagacagactgacaagagaaaaaacatttaattacatatgtrcacaaagccttcacaaataaatgtgactcaaggaggcaattagaatttttgacctataccatcgtaacagaagtgattaagtgtgaagaggctacacaaaggaaagggggtatggggcttcctgtggagaacaggggtgaggggggaagttaggaaaggtgctaggaaacgtatgataaataagggttgtctagtaaggtgtgttatatgcataagcgtcctcaagagatatttccaagtagatcctttcctggtagtagagaggcagacaactttataaatggaaatttatggcctactcttagacagaaaagcaggagggaaaaagagtttttcttgtatctgctatttctcaattgctttcagctcaaaatattccttatgccaaaatggcacattttggggtaggcatattgtggtcccttcaataggaacccagaaaacatcaggaccaagacagct

SEQ ID NO: 866934 - DNA, 633 bp, Homo sapiens
aaaaatctcacaaaacaaaaagaaaatgaagtttatttaagtatgaccttatgaggagaatagtgtaaagaaggaaaaacacttttcctctatcctcttaccttcaatgtctgagaattaaactgataaaagacagactgacaagagaaaaaacatttaattacatatgtacacaaagccttcacaaataaatgtgactcaaggaggcaattagaatttttgacctataccatmgtaacagaagtgattaagtgtgaagaggctacacaaaggaaagggggtatggggcttcctgtggagaacaggggtgaggggggaagttaggaaaggtgctaggaaacgtatgataaataagggttgtctagtaaggtgtgttatatgcataagcgtcctcaagagatatttccaagtagatcctttcctggtagtagagaggcagacaactttataaatggaaatttatggcctactcttagacagaaaagcaggagggaaaaagagtttttcttgtatctgctatttctcaattgctttcagctcaaaatattccttatgccaaaatggcacattttggggtaggcatattgtggtcccttcaataggaacccagaaaacatcaggaccaagacagct

SEQ ID NO: 866935 - DNA, 633 bp, Homo sapiens
aaaaatctcacaaaacaaaaagaaaatgaagtttatttaagtatgaccttatgaggagaatagtgtaaagaaggaaaaacacttttcctctatcctcttaccttcaatgtctgagaattaaactgataaaagacagactgacaagagaaaaaacatttaattacatatgtacacaaagccttcacaaataaatgtgactcaaggaggcaattagaatttttgacctataccatcgtaacagaagtgattaagtgtgaagaggctacacaaaggaaagggggtatggggcttcctgtggagaacaggggtgagggrggaagttaggaaaggtgctaggaaacgtatgataaataagggttgtctagtaaggtgtgttatatgcataagcgtcctcaagagatatttccaagtagatcctttcctggtagtagagaggcagacaactttataaatggaaatttatggcctactcttagacagaaaagcaggagggaaaaagagtttttcttgtatctgctatttctcaattgctttcagctcaaaatattccttatgccaaaatggcacattttggggtaggcatattgtggtcccttcaataggaacccagaaaacatcaggaccaagacagct

SEQ ID NO: 866936 - DNA, 494 bp, Homo sapiens
tcacaatacagtaaggaagaactcaccctctcaagaagggggaaggccaggaaactttcagaaagtttttacaggtaatcattaggcagagccatgggaggatttgtataatatattcagaggatggggatggggtggggctcagccaatcctgaaaccaccagagccacctgagcggaactattattaagccctagcaacccttctcaggccccgcttatyccattactctctttccctcctttgccacccacctctgttttaacattcctctttaaaaagaaaaccccaaaattatcagtattggcgtactttttgaagattttatcttcacctcccccactcctccatagacacccaggtatgacaagagactcagtgctcctgcttcctcctattccttgctgcctctgctatgcttcttagggaatttaccactaatctttaggggataatatgaaaaaaataaacattggaaagttacaaagttttcg

SEQ ID NO: 866937 - DNA, 620 bp, Homo sapiens
atagaatagagggacttttcattcaagtctaatttttacatatagacaatctaccagtgttcagaaattgtggcagatttcatgaggagaattttttacttggatttgtgctcttctataaaaagtaatttaaaaattcagtgatgaaagtttctcytagaccctgttctcttcctttgtggagaaaaaaaatccgtatagaactctagtatgtatttatctataaaacaattgtttaaaaatattgaggttagctcttcccctttgctaatgcaataagcacattatttgcaaagggaagcattaattatactactattgtatgcagtattaaatgaattgtcaatgtcacgatcaaaataaacccttgaagaactggctgttgttcccataccttcatgagaattgtaaacactcatgtaaaatagaaaccattatttaccactttgcagtgaaatggatcatgtgttctgacacctgtaccctgagttgagtgggaaacagggactgtttgatgaattaaaggtaactttattcctgtataccactaggggtgcaagtgaggggactgtagacaattagtactttagatatttgttggagtcctgctgtgtgtgcag

SEQ ID NO: 866938 - DNA, 620 bp, Homo sapiens
atagaatagagggacttttcattcaagtctaatttttacatatagacaatctaccagtgttcagaaattgtggcagatttcatgaggagaattttttacttggatttgtgctcttctataaaaagtaatttaaaaattcagtgatgaaagtttctcctagaccctgttctcttcctttgtggagaaaaaaaatccgtatagaactctagtatgtatttatctataaaacaattgtttaaaaatattgaggttagctcttcccctttgctaatgcaataagsacattatttgcaaagggaagcattaattatactactattgtatgcagtattaaatgaattgtcaatgtcacgatcaaaataaacccttgaagaactggctgttgttcccataccttcatgagaattgtaaacactcatgtaaaatagaaaccattatttaccactttgcagtgaaatggatcatgtgttctgacacctgtaccctgagttgagtgggaaacagggactgtttgatgaattaaaggtaactttattcctgtataccactaggggtgcaagtgaggggactgtagacaattagtactttagatatttgttggagtcctgctgtgtgtgcag

SEQ ID NO: 866939 - DNA, 606 bp, Homo sapiens
caaaatgaagtgagagcactcccactctccaggcagcaagaccactagcaagccagacccacacttaagctcaggtgaagaaggcaagaatctgtctcaaaatctcagtaagaaatatttttcagataaaccaacccaggagacagaactatggcatggggaggataagacctctaaagatttgaagctagacaaggcaggccaacattcaaattcaggaaatacagagaacactacaaagataatcctygagaagagtaaccccaagacacctaattttcagattcaccaaggtggaaatgaaggaaaaaatgttaagggcagccagagagaaacgtcgggttacccacaaagggaagcctatcagactaacagcggatctctctgcagaaaccctacaagccagaagagagtgggggccaatattcaacatccttaaagaaaagaattttcaacccagaatttcatatccagccaaactaagtttcataagtgaaggagaaataaaatcctttatataccagcaaatgctgagagatttttgtcaccaccagacctgccttacaagtattcctgaaggaagccataaacatggaaaggaacaac

SEQ ID NO: 866940 - DNA, 606 bp, Homo sapiens
caaaatgaagtgagagcactcccactctccaggcagcaagaccactagcaagccagacccacacttaagctcaggtgaagaaggcaagaatctgtctcaaaatctcagtaagaaatatttttcagataaaccaacccaggagacagaactatggcatggggaggataagacctctaaagatttgaagctagacaaggcaggccaacattcaaattcaggaaatacagagaacactacaaagataatcctcgagaagagtaaccccaagacacctaattttcagattcaccaaggtggaaatgaaggaaaaaatgttaagggcagccagagagaaacgtcgggttacccacaaagggaagcctatcagactaacagcggatctctctgcagaaaccctacaagccagaagagagtgggrgccaatattcaacatccttaaagaaaagaattttcaacccagaatttcatatccagccaaactaagtttcataagtgaaggagaaataaaatcctttatataccagcaaatgctgagagatttttgtcaccaccagacctgccttacaagtattcctgaaggaagccataaacatggaaaggaacaac

SEQ ID NO: 866941 - DNA, 626 bp, Homo sapiens
ttcttttatggttccttctgggtccctcttataaggactgttgtcattacatcagtctcacccagataacctctgataatccccctatctgaagatccttaatttaatcacatctgcaattctctttttgccacataagataatgtattcatagcttctgagatttagggcatagacatcttggaggggctattattgagcttaccagaaaggctaagaagcaaaatagaccttctaaacatatgcctacaracccagctaaaaataagcttcatgtattaagtgaatgtgtttatccatttcttagggcttgcttctcaagacaatttgacttccttttaatttggggctgggattttaagacgtcaccagtagaatacctggcactggatgatgttcattctcattgttagttcaatgaaagcaaatcttactaataagtaaagctatgtgttaaagaagaaaatgtttacaagtttatggtaatccatgaaattttcatgatcacaaaccaagcatcagtctccaaaaatgcaagaaagcagaagcaaattactcaatttggctaatacagctcagtaagtattttgattttctagaaacttagcaccactgaaaagggttaa

SEQ ID NO: 866942 - DNA, 620 bp, Homo sapiens
catagtcaaaaggaaggcaaaaaaaaaaaaaaaaacccacatgatttattcagtgtccccatgagaataaagaccctcccctcctggcctcctttggctgtattgcatctttttcatgtatgcccaaattcccccatggaagcaccctcacaaagcataataaaatgacagtgtgcaggcctgatacaccaatgtcaagtttcccacaatgcctcacatgtggccaagacctatgtgcattacttattcttttgttgttctattctttgtggtgtaaagatattgttgataatgtcaaaaaggcctgcagatacccctgygggtcatagtaataagaaaaagaggaagcacttatatttttctatagcacaggaattcaagttgttggagaaactgggaagcagtgcaagtgtgaaatgtcttacagcagagtatggtgttagagtgaccgccatatgtaacctaaagaaagagaaagataaatcattgaagttctgtactgaaggtaaagaacagaagttaatgaaaaataaaaaaaaaaacactgcataaagctaaaattaaggtctcaatcatgtattgaaacagtggatcttagtgtcacagtgaacacatgccac

SEQ ID NO: 866943 - DNA, 620 bp, Homo sapiens
catagtcaaaaggaaggcaaaaaaaaaaaaaaaaacccacatgatttattcagtgtccccatgagaataaagaccctcccctcctggcctcctttggctgtattgcatctttttcatgtatgcccaaattcccccatggaagcaccctcacaaagcataataaaatgacagtgtgcaggcctgatacaccaatgtcaagtttcccacaatgcctcacatgtggccaagacctatgtgcattacttattcttttgttgttctattctttgtggtgtaaagatattgttgataatgtcaaaaaggcctgcagatacccctgcgggtcatagtaataagaaaaagaggaagcacttatatttttctatarcacaggaattcaagttgttggagaaactgggaagcagtgcaagtgtgaaatgtcttacagcagagtatggtgttagagtgaccgccatatgtaacctaaagaaagagaaagataaatcattgaagttctgtactgaaggtaaagaacagaagttaatgaaaaataaaaaaaaaaacactgcataaagctaaaattaaggtctcaatcatgtattgaaacagtggatcttagtgtcacagtgaacacatgccac

SEQ ID NO: 866944 - DNA, 586 bp, Homo sapiens
tgtatttatttatttttgagacagagtctcagtttgtcacccaggccagagtgcaatggtgcaatctcggctcactgcaacctccccctctcaggttcaagtgattcttgtgcctcagcctctcgagtagctgggatcacaggcctgactaatttttgtatttttagtatatacagggttttgccctgttggccaggctggtctcgaactccyggcctcaagccatccacctgccttggcctctcaaagtgctgggattacagtcatgagccactctgcccggctgataatttctaatcttttagactactatatcccagggaaaaacctctcatccagccttccttgttttaaaacagtttcctgagcctatttcatcacacacacacacacacacacacacacacacacacacacacacacacttctctttactcatgcttttccattgttaataaacatgcttattaaaaaacacctgttttccccctacccctccttttcttcaatggtcaaattgtcacctttcaacacctatatcaagccttatcttggcataaaactcatctccatcacataatccctt

SEQ ID NO: 866945 - DNA, 642 bp, Homo sapiens
gtgcattcccagcatttataatgttatcagaacaatccttctgagcaggagtttattgttactcaacatcttagtgtctggtgtcttaaagatgatgatgttaaaatatttgtaactagcataatcaaagaaacatgaaaaaatggtataatcatatcatctgaggaccattgctgtagaaatattttaaattgttgtgagattatttgaaagaaagctgtttaatataattgttagttagcatatttaaaatactatagaattttaagtcagcctttggttggttttcagaatgcagacttcagtcttcaggctttaagtaatcatgtaaagcaactaaatatacttctttcttcctagatagttaatatgattgtcattacatcaaccaatgtaagaatttgcttatcacatacaaaagaaaattagatttggcacttgaamctatcatatgtaaacagttgatctcttattggtatattgcaaagaagaaatgaataattgcaaggtctaaaacatagttcaccattaaaaataagtatctgaattataatattatgattggatggtaccttatatagaaagcctctggctttgacacaagaaaaattgaatgtttctaagtgtattgaaattgtagtc

SEQ ID NO: 866946 - DNA, 598 bp, Homo sapiens
gtgatcacttctagctgttaggaacaattttgttatctttgattatgtagtatataatggttagaatagaaaactgaaagttttttctatactccatagccagaaatcattttactaacgtgaaagkcattattatgtcccctatactttaaaattcagtttttggagatggagtctcactcttttgcccaagctagagtgcagtggtgtaatcatagctcattgcagccttgaactcttgtatatcccttattttaaacaaaaatttgaatattaaatttacagttctctggacaatatgggcatggcttcaactctatttttatcagagctttaaaaaacttgagatgtatttcatgtactgcaaaatttacccttttaaagtgtacaggtcagtgatttttaatatatttcacaagtttgggttaccataaccactatccaatttcagaacatcttcaccccgcaaaaagaaaccccacatttcttagccttctctctccaatcccgcatcctccttagttctatgcaactactaagccactttctgcctctatagagctacctttcctataaattttctataactgaaatcata

SEQ ID NO: 866947 - DNA, 609 bp, Homo sapiens
aaacctttcaggatgatgaataagtgaaatgaagaaaccacagcagttagagcagaaaggatggagtaaagtcaaatggaaagaaataaacaaacaagatagtcacttttggagaactgtatgtcattctttgacagcctgtcagtgtacctgtaaaaaaaagaagtgaagttagaattgcaggctggaaggaaataatgcaggctcttttatgcctgagggcttatatgccacacccaagaacytagactttgttctgtgacattctgaaggcgaatagttggctttccatttcaaaaagctcatttggcagcaatgatgggaatggtgtggatgaatttctgatattggatcaagagactttaattatacatagtgtttcagaacatcctggctcaagatttggtgagaaggaggtaaagagagatacccaaaggtaggaagacagacgtaataaatttccaattcaattacttagtctaaaaaaattagtgatcagttacacaccgctattcaagacattggcacaatgtcaaatatcaatgaactaatactacttggtggctggttagatatggaaaagagaggaagaagaaggagtctaaggta

SEQ ID NO: 866948 - DNA, 619 bp, Homo sapiens
ttatttcttcagtaagggcttataggcttaaacccatactgagaataagcatacaatagccatacataaacacacaatagtcattctgacctaccagaggctaggctgttattaaaaatatttgtttactttcttaaagtcttttttaacgtttagcagatggatatcaagtaggtggctaggtgacttataatttcctgggataatgggctatattatttggataaatctttcctctgaatgcagaagaaaagatttaaaaacatctccttaaaaacatcaaagagattagaaagtagtaagaaattgcaaggctaaaattgaaggggaaatgggaaaaggggaagagaggaaagatggcaactgctttttccttgagggcacttttggtgctgagcmatttgaacttctgttttgatagcctcatgggcaagcaagacaattcaaaactcagggcttgcataaagatggaatgtgtaaggaaagacttcctcactataagcgaggaagaatgaatgaatcccaagcaaacaagctctcacgtatgccgtttcttccgatgattacgggaatctggagctatggacttgtttgaggtcatcctagattactggtacct

SEQ ID NO: 866949 - DNA, 577 bp, Homo sapiens
cccctcccccatgtccatcatgaaaagatccagtgatgggtgagacagcgggttctctaagtgggttctcaaactggaacagtcggtcccacagtctcctgaggccccctgacccatctcctttggatgaggtttatggcaatccactcttcttcattcctatttttccccttgtggttatgactgtgtgctgtcctggatactgaaaagcttgttccttctttcctctttgcactaaaatgtgccagcactattgttagaggaagagtcaaagaggtgagggtgtgtagctgggatgaagccacggatatctgaatggcaagcccgcaagcctgcagaggcagggagcactgactacctgggccagaatagaacctgraagttccggtaatgcgttatcaaggatgaagcttctctcttcccccttctcacttgggtgagtcaggttttgcttcataaaggccacgttgtcacaggttgcttatgtaatgctcacccaatgaaaggaaacattcaaagggtgactttgccatttggttgccaaattaatgccttagagaaaaatgggtagagttag

SEQ ID NO: 866950 - DNA, 657 bp, Homo sapiens
agtgtaaagcagaagcaaacggccctgaataacttacttggaagtaatttatatcaacttaagctgttagctcattgtataacttttcttatgtgaccctcaccaatatccctaagtaatgcctttggaagcttcagagtagaagatgcttcctactgtgttggctctgaggagatagtaggattagataggatccagattaggaaatgatccagttagtttatctgaaaggttaactcccaggactccaggtctttgaatccagccagtagagtgaatgcttccaattaagctgtaggtgttaccctgcacttacggaactgatcaaacaggtgactccaacaggaggttgcagtactgtaaacgtcaccgcaaggcaagggatgcttaaagtcctgggttctggactttaaaagctacattggccctggagggagggacccttggcattgctttgatcaggtagtgagggaagacagggttytggggtgggggtgtatttatatataatttaggttttgtttgtacagcatactgtgtcttgtaatgacacatccttgtcctgctttccttttttgagttttttttttttttttacacaacatgcagaggcactgaagtgaccatgtcattttcaagtgtcaagaatgtagacag

SEQ ID NO: 866951 - DNA, 599 bp, Homo sapiens
ctgctatccaggatgactgtgttgctgcagtctttgagtggttggagcgctgtaatgtctatgttaatagctgggaaatcgcagtagcagcaaccagaccactccaatggaacaatccaagttggggtaagtttgattgagcaaaaaagtcatgctgactgtgtgatgaagaggcagaactggtaacagtgacaggccctgcagtcagcagctgtggattttatgtgcagggcagactgatytggaaaatgggaagagctgactgccaataacaccttggggggaggtttgttcagtgcatctccctactccttgtatacctctgatgacatgcagaagcttaggaaataaaacacacttgtaacatcacagggtgcaagtaagtacatgtggatgccagtgtagagagaagcgaaagctagttttcattgcaagaatccaaacagagtaacagggctttgtccactgtctccagtccatggttccctggtgttcctagagtcctattaaaaaaaaaaaaaaaaaaaaaaaaacacgggctggaccatagttaaactgctgcagcagagcatagatcatccatcagttagctattattt

SEQ ID NO: 866952 - DNA, 605 bp, Homo sapiens
ggaatgaaaggaagtaaagtacatttggaagaaggcctagcaggcgacttaagagatcaagtgcgtcatttgaccttttgacttggggctttgtatgttggcatacttttggggtcttgcattacttctcacctgattcttcccttgggatgggctggcacatgtgcagtgggctgtctgcaagttcagtggccagtgtgtttaatggagtcgtaggtatgctcacttgaggcaktcttcccttaccagtcgttccgagaagaagatctaggttagactccaccattttgcctcttagtgtgcatgcttaaacccacttgcccagctcctgagatcttatcaggaggctgctgatcatcagtttcaggtttttttttttggttgtttatttgttttgttttgctttgcttttgtttttttctctattgggagactgcctttccctggtgctggctgagaccaattattattttagagagacagttaacaactgcctaaccatcatttgaatttgatggtcgcctgacattcctggtgtgtgtgtgtgtgtgtgtgtgtgtgtgtgtgtggtgataggggaagcgctctcctgccctgctcatacc

SEQ ID NO: 866953 - DNA, 622 bp, Homo sapiens
tttttttttttttgaggcaagatctgtctttatagcccaggctggagtgcagtggtgtgaacttggttcactacaacctcccagggttcaagccatcctcccacctcagcctcctgagtagctgggactataggcttgtgccaccatacctggctaattttcatatttttttgtattgtagtgatgtggtttcaccatgttgcccaggctgayattttggataatacttcttaatcagatatatttgcaaatattttctccctgtctgtggcttgcccttttattttcttaacagtatcttttgccaagccgaagttcttagttttattgaagtctcacttatcaatttttctttcatggattgtgcttttggtgttgaagctacaaattcacaactaaacacaaggtcacctagagtttcttctgttatcttctagaagttttgcagttttatattttacatttaagtctatgatccactttgagttaatttttgtgaaaggtgcaaagtctgtgttagattaacttttttcttattttgcatgtggatgtcctgttgttctagaaccatttgttgaaaagattagtctttctctattgaattgcctttgctcctttgtca

SEQ ID NO: 866954 - DNA, 622 bp, Homo sapiens
tttttttttttttgaggcaagatctgtctttatagcccaggctggagtgcagtggtgtgaacttggttcactacaacctcccagggttcaagccatcctcccacctcagcctcctgagtagctgggactataggcttgtgccaccatacctggctaattttcatatttttttgtattgtagtgatgtggtttcaccatgttgcccaggctgacattttggataatacttcttaatcagatatatttgcaaatattttctccctgtctgtggcttgcccttttattttcttaacagtatcttttgccaagccgaagttcttagttttattgaagtctcacttatcaatttttctttcatggattgtgcttttggtgttgaagctacaaattcacaactaaacacaaggtcacctagagtttcttctgttatcttctagaagttttgcagttttatattttacatttaagtctatgwtccactttgagttaatttttgtgaaaggtgcaaagtctgtgttagattaacttttttcttattttgcatgtggatgtcctgttgttctagaaccatttgttgaaaagattagtctttctctattgaattgcctttgctcctttgtca

SEQ ID NO: 866955 - DNA, 740 bp, Homo sapiens
tggtcaggacgccatggttgaaaatcagcatgaaattgtggtttggttccactttatctatggggcatcattgtttgtttgttgtttttcagcactggggtgggtgtgaagagacaaaggggacaaaactagtgcctctgttcataaaatcatgtctcttacatgtgcagaggtgacgacacatcttggagaacccagaagtgacatggcctcctcatggatccctctatctcatctttcctgtctgcaaggctgctgtttaacttcccagaccccaatcccatcctagtaagcttctacccaacattcttctatggctccttattacctttagcagtggctcccaatctgtagaggactccccagaactggggctcaggaacccatgtctcacatacagtctcacacacatgatcagcaaattatgcacgttgtttttcaatgtaggtaaatgctgttgtcatcaatagaatacaaaatawtggtttaaaaagcttttttttgtggtagggggaggaagggaagaatgaatagaaataacacagaggatctttagggcagtaaaacaattattctgcatgatactgtaatggtagatgcattcaatgtacatttcaaaacccatagactatacaacacaaagagtgaaccctaatgtaaaccacagactttggtttataataatttatcagtattggctcatctattgtataaatgtaccgcactaatgcaagatgtta

SEQ ID NO: 866956 - DNA, 623 bp, Homo sapiens
tgggacttgcctgggttggggtgatgttgtttggctgttgcatgggaaagacctctcccatctcagcatcctgtcaccccagcttgatgggggctgagggtgtggtgaagttgatggttatgcgatggtggtgctgatggaggcacccatggtggcacctccacgtgattagtgcaccacctgcccttttgatgaaaatagtggcattcaggagttttttatgtgtgcagctcggccacgcaggccacaaagggagaacgtggcycctcagcagtcgaggggcactgtcttagttcattcaggctgctgtaatagaacatcatgaactgggttacttatgaagaacagacatttgtaacatttttcatagttctggagactggaagtctgagatcagggagtcagcagggcagggttctggtgagggccctcttctgggcagattgccagcttcttttattgtatcctccccaggagagagtggggagctgaggcaagctctcttgtgactccaagggcaccaaactcatgacctcttccaatcctaatcacctcccaaaggctcctgctcctaaaagcatcacatcaagggggtgggtagggtttccacatatgaactttgc

SEQ ID NO: 866957 - DNA, 615 bp, Homo sapiens
ttgccaaatacaagtaggccttctcctgtagtttggcaccacttgagtaactactgtcaatatttgcaactttacaaccactatggagaacagtttggaggttcctccaaaaataaaaacagagctaccttacaatccagcaatcccattgctaggtatataccccaaataaaggaaatcagtatagaaaagaggtctctgcattcccatgtttactgcagcactattcacagtaggcaagatttgawagcaagtgtctatcaacagatgaatggataaataaatgcagtacatatatatacaatggagtactatttggccacaaaaaagaatgtgatcctttggatggatggatgaaacatggatggaactagatcattatgttaaataaaataagccaggcacagcaagacaaacttcacatgttctcacttacttgtgagagctaaaaattaatacaattaaactcatggagacaaagagtagaaggatggttaccacaggctgggaagggtagtggtggggttaggggggtggatgggagggaagtggggagggctaatggattaaaaaaaaaagttacaaagcatgaataagacctaatatttgctagca

SEQ ID NO: 866958 - DNA, 629 bp, Homo sapiens
tctattattatagcttcaccttttcttgtattttatgttagtgaaatcacacaccatatggcctcttagtataacactttctgagatgtatccatgctgttagctgtatttgtagctcaattatttttattgctgagtagtactccatggtgacagtattctgttgtgtattttattctagtagaattttattggaatatatgaatatatcacagcttgttcatctgtttacctgttgacccacctttactttgggatctactaaaacgctggtgggtacttgcctcccccatctttatgtaatctttatgagggcagtgacagtgtctgtctgggccacgactgtttccccagtgcctaatacaatgttcagcacaggggaggcastcagtaaagattttatgaatgaatgcatgaatgaatgaacacatgcgtcaatacattggtttagctaatcaactgagaatggagactgacctatgaaaagaacacattattagctaatttctctattttgacctttttcaggttctgagcactagactaagctcagtctttcataaactgagagaaacaattcttatcttatgtgattattgtgagtattaaatgagataacctatgtaaga

SEQ ID NO: 866959 - DNA, 659 bp, Homo sapiens
ctgcctctgtagactcctcctctgggggaagggcacagctgaaaaaaaggcagcagaaacttctgcagacttaaacgtccctgtctgacagctctgaagagagcagtggttctcccagtacagtgtttgagctctgagaatggacagattgcctcctcaagtgggtccctgacccccatgtagccttactggcagacacctcccagtaggggccaactgacacctcatacagctgggtgctcctccgagatgaagcttccagaagaaggatcaggcagcaatatttgctgttctgcaatatttgctgttctgcagcctctgctggtgatacccaggcaaacagggtctgtagtgaacctccagcaaactccaacagacctgcagctgagggacctgactcttagaaggaaaactaaaaarcagaaaggaatagcatcaacatcaacaaaaaggacatccacaccaaaaccccatctgtaggtcaccatcatcaaagactgaaggtagataaaccacaaagatggtaagaaaccagagcagaaaagctgaaaattctaaaaaccagaatgcctcttctcctccaaaggaatgcagctccttaccagaaatggaaaaaagctggacggagaatgactttgactagttgacagaagtaggct

SEQ ID NO: 866960 - DNA, 621 bp, Homo sapiens
catatagtacaattactgattcactatagaagtacccatggagaactgagctcatggttgaattttggcaggagtgtaagaaaggagatgcaagaggtgaggaagctaaagaaacaatgacaaacatcaattataaatgaacttttagaacatatggtaactaatgtagcattagatgaaagtaacactaaaatgtcatctggagcacagcagtattaagatacttcaagcaagaagktagagataacaaattcttattccacaaagctttcttaaaactctaacattccagctaatattcctaatgtcggagtactgaacttattatgaaaaaaaagagagaaaaagataatatgtgttacatttaaaaagctgtaaactatcaccacttaaatttaaagaaagggaaataagtttttcataccatgtagtgctaaactctcaactaatgaacaaataagttgagtttgagaaatgaagaggcaaactcaataattctcaaagataaaaatagtagaatgagtttacaaataaccagaatcgtattcccctataagattgccaagagtttgttccaagtgccataaaaagccaaccagccaacagtcaaccagtgataaa

SEQ ID NO: 866961 - DNA, 674 bp, Homo sapiens
gttcacctatggaacgggtatatttgaagtaggtagaaggaagaggacgaagagaatgagcctgattttgaatacaatgttttcaatatgactgatgcattttaaggaagattccatttatgtattaataaggataaattacactatcctgtaataatagcttccaaatcttggtggcttgtaccaaacaagacttatttcttactctcaaaaaatacaatgcaattttgaaaagtagccacctcccttatcttgcaactatgctatccataagcagaggaaaaatgaactggcaggtagcatcagatgtttttaaggacaaagtctagatatatcttacatcattttcacccacaatccatcagtcaaaactctatctcatgacccaaactaatggtatgaaagccaggaaaagtagtctttccattttcccagaaagaggaaacagtacagtaaagacagaacagcttctatgccaaaagaggactgacagatayataagttttaagcttagggatgagattttcattaaatttatttgctgggtacttaatgaagttctacattaaaactttactttctttataaggaaagtcagtacaataaggtctgcattatctactttatgaggctattataataaaattaaatgattatgtggaagaactaagctc

SEQ ID NO: 866962 - DNA, 581 bp, Homo sapiens
atccttggatcaatagcacactgccttaattattataactttacaatatatattgatattagtgtaagtccaattttgttgttcttcaaggtgatctagagttatctctttgcattttccctatatattttagaattagcttgaaattttccaccaaaatgtccctctgggattttaattgtggttctgggtaaactatagatcaaataaaagagactcatggctgggcgcggtggctcacgcctgtaatcccagaactttgggaggcagaggagagtagatcacaaggtcaggagttccagaccagcctggtgaagatggtgaaacctcatctctactaaaaatacaaaaattagccaggcatggtggtgggcacctgtaatcccagctactcrggagactgaggcagataatcacttaaaccagggatgcagaagttgcagtgagctgagatcgtgccactgcactgcagcctaggggacacagcgtgattccgtctcaaataaataaataaataaaataataataaaagagactcatttgccagccttagaatattgggtccttgaaatgagaaacat

SEQ ID NO: 866963 - DNA, 555 bp, Homo sapiens
aaaggttaaagatgtcttaagaagaacaaaaattaaaaataaattaaaattttagaaagtcggcttcatctccgagatgcaaggctggttcaacatgtgcaaatcaataaacataatctattgcataaacagaaccattgacaaaaacaacaygattatctcaatagatacagaaaaggccttcgatgatattcaacaccccttcatgctaaaaacacatgttctcactcataagtaggagttgaacaatgagaacacatggacatagggaggggaacatcacacaccggggcctgtcgagagggcagggggttaggggaggggtaacactaggagaaatacctaatgtaggtgatgggatgatgggcgcagcaaatcaccatggcacatgtatacctatgtaacaaacctgcatattctgcacatgcaccccagaatttaaagcataataaaaaaagaaaaatatcttaagaaggaaagacactattttgaacaaacaaccccaataaaacactcgataaactaggtattgatgaaatatatctcaaaataata

SEQ ID NO: 866964 - DNA, 603 bp, Homo sapiens
agaggacacaaacaaatggaaaaacattccatgctcctggataggaagaatcaatatcatgaaaatggccatacttcccaaagcaattcatagattcagtgccatccccatcaagctactactgactttcttcacagaactggaaaaaaaactactttaaacttcatgtggaaccaaaaaagagcctgcatagccaagacaatcctgggcaagaagaacaaagctggaggcatcacactacgtgacttcaaactatactataaggctatggtaaccaaaacagcacagaactggtaacaaaacaratatatagaccactggcacagaaaagaggccgcagaaataacactacacatctacaaccatctgatctttgacaaacctgacaaaaacaagcaaatttctattattagttcatccagttgtttcattcattctccttctgctcaatcttgagtcagaagtctgctttcattaaacatgtcagcttcaggaatgacaggatccctggaaccctgaatttacaaagaactttatttacaatcagaacattattcaaataacgtcagctttcaagctggtactcaaaagccattctatttt

SEQ ID NO: 866965 - DNA, 603 bp, Homo sapiens
agaggacacaaacaaatggaaaaacattccatgctcctggataggaagaatcaatatcatgaaaatggccatacttcccaaagcaattcatagattcagtgccatccccatcaagctactactgactttcttcacagaactggaaaaaaaactactttaaacttcatgtggaaccaaaaaagagcctgcatagccaagacaatcctgggcaagaagaacaaagctggaggcatcacactacgtgacttcaaactatactataaggctatggtaaccaaaacagcacagaactggtaacaaaacaaatatatagaccactggcacagaaaagaggcygcagaaataacactacacatctacaaccatctgatctttgacaaacctgacaaaaacaagcaaatttctattattagttcatccagttgtttcattcattctccttctgctcaatcttgagtcagaagtctgctttcattaaacatgtcagcttcaggaatgacaggatccctggaaccctgaatttacaaagaactttatttacaatcagaacattattcaaataacgtcagctttcaagctggtactcaaaagccattctatttt

SEQ ID NO: 866966 - DNA, 687 bp, Homo sapiens
ccagaaaccatttatgtagccttcaccaattatcaactcatggccaatcttatttcagtcacagcctcacctattctctttctccaccattaaattattttgaaataaatacccaaaagcatatcatttaatctgggaatatttcaagttatagctctaaaagataaggactattttaaaaacataatcatggtgtatttcaaagatggaacaatttgaacatcaagaagaagaattgtggtgggttgaacaacatcaagtatctactaataatgggaatttaaaaaaaagaccctcatgacttgcctttaragattgttaggacactagcttagctcatcactctcaaaattgttaaaaggaaagaaatcaaggatttgtcctgcctgtcccatacattgtattttggaatagtcaaatagttgataaggtaaagctcttctttatagaatgccagcaaataaatatagaaggaatgctctagaaaagcataattctttagcccctaatgaaatagtggatttagccagtcgttatcatggaatgctaaaaccttcaggtcaaaagttgataatgaaatgtataatggatcgcttgacgaatcatacctgaagtcattaatgaatcttagtaccaccaaaaatgagatatttaaacattatgtgcctatacatgttacagtaaaaa

SEQ ID NO: 866967 - DNA, 577 bp, Homo sapiens
aaaaaatctctatcattagttgtttggaggtctgagagacctgagaccttttgatttatttctgacaatttcactgaggacatacaactggtatgtaccgtttgttttattacagatgaatgaattaaattctttagttggatgggaccaccatcatgaggcaattcagagttatgggaatgacatgaaaaaattatctttctctgcacaaaacytgcttattttacaaacacattataagacagatgggaaggaggataggaggaaagtagttacctatttggtttgtctggcagataaagtaggaggtaggagtgtggaaaccatttaaacgttactgctgcttgtcatttgtcctactaacacttcatcttatctgaatagtaacaatagatgctatgtattgtgtgcttacttgtagttaagcattttccaataatgttatcataatgtgcctgtgcaatagaggtgtgattcccatttttcagattaagctcagatcagctgaatggggcatttcagaagtttaaaactatgtttctttgtctgcagaggctcgtgagaagaagataaaagt

SEQ ID NO: 866968 - DNA, 560 bp, Homo sapiens
cactaggcctgaaaaatcctccccaatcctgtttccaaggattgatgccaattctccaaacgtgctcagtgctcatgttcttttcagggtcattcggcttgtacagcacagattaaacacacagcctcagtattttcagtgttgtgaggagacgcatttacattccactgacggcgttgggtgtaaaaggaagccatctgctgtgatttagcaacacgaggaggagctacaactttgacaagcgagaaagagttgcaacacagctcaactcagtccaggtcctctttgtggggtggacytgagcagaaatcacctcaatattaaaaggcatttttattaagtagttcttagaagttggtcttctattaaatgtttcattgttctctttcactaaaattcgtttgctgctatttgttagggttcttttactagtttcaggaacccagagtaaatagattaattctatgacaaagatgacaactaggtctttgattctttgagcattcgatccaggtagttaatctttcctgtatctggttcattcgctacactgggattac

SEQ ID NO: 866969 - DNA, 675 bp, Homo sapiens
ttcagaggggaggggttggggagggtgtcattctgccatgcaggtaggattatagtggttcattcatagctcactgcagccttgacctcctgggctcaggtgatcctcccacctcagcctcccaagtagctgggactacaggcacatgccaccatgcccggctaacattttgtattttctgtagagaaagggtttcgctatgttgcccaggttggtctcaaactcctgggctcaagtgatctccccacctcggccacccaaaaagctggaattctaggcataagtcaccaacctagcctattattgccaatggtaaagagctacagatgayctttaaattacatattttttaaaccggactaatttacataaatatattttggatgatcacaaatgtactatattttccactatcacagaatttataatctatcggaggaaggcaagcctgttaaaaataaaggtctattgttttctaatctctagtactagcatcatccctagttacactgggagcccgataaatgttttatgactgaattttaaaaataaaataaaaatagcaaatgagctaagccttattctatatgacatatcatcttcacaaaaataaatacaattttaaaaataaatataagtaattgcctctaatggcagttctggcatcactgctat

SEQ ID NO: 866970 - DNA, 550 bp, Homo sapiens
actatatgaattatttatatagaataattaagccacaagtaagttatggatgaaatacagctgtttttctaccctagtatgctgctcaacttcagagtgataatcattattgacataatgtttgtgtttgtttgttttaagaataagtatctttcaagttctatatattgtaccgggagtagaaaactttgtaagaacaagaaaatacttaaaacatagattagatcttatactatcaggacrtgtatgacttagcaagagttcactgtgaaagaaaattagggcatcagaaagaatgataacgtaaaaaatgtgaaatataatccaaaacatcaacattatacttattcagttccttaatgcacctggactcaatgtaatgtcaccattacaaaaggagtataaacaaactaagcaaaaatgtctgcatattgatggctattttaaatttaaaatatctgaaagactctgctgtcagatatctcatgggaatgttcaaatatttgcagattctcacaggaaataataataaatgattttcaggttatac

SEQ ID NO: 866971 - DNA, 701 bp, Homo sapiens
acatagagtatagagtatgtatggagtaaatagggaattaaagctgatgaagcaaattgggactttgttactgagaacaacatgccaattcaatacattgtgccaaggcaggataaatctttattttctaatacgaacataactgtctatgtagtttttagatttcacaagtggcaaggaatttataacttccttttgagaactatttcatagtttaatcatctttcacagctcacgtaggtctttactaaatcctttgtgatttaagatcatttcttccagctcttctgtggtgatagattacagccaactttagacatactaaattaactacatcaactcttagtcataacaggaattccttctacaatattatgcacacatggtcttgcagggccatttgtcactttttctatttgatacaaaattatttctcattaataatctaatcatgaaacacctgtttgttaggcactgaaaaaattttccctgtttgaaagcagaaaaacaaagatttgtatgtttacttcagagaggattttgtgatttctaataggaagyaaacaattgtttttcttttctcaagtcttttaaactactctgccttctattgacagagtaagaaattaaatcttcaattatttaacatagcattttatctaattaaaaataacagattttttttttctgccaaagatttg

SEQ ID NO: 866972 - DNA, 651 bp, Homo sapiens
tgggatcaatgatgatatcccctttatcattttttatttattgtgtctatttgattcttctctcttttcttcttcattgatctggctagtggtctgttttgttaatcgtttcaaaaaaccagctcctggattcattgattttttcaaagggttttttctgtctctgtctccttcaattctgctctgatcttagttatttcttgccttctgctggcttttgaatgtgtttgcccttgcttctctagttcttttaattgtgatgttagggtgtcaattttagatctttcctgctttctcttgtgtgcatttagtgctataaatttccctctaaacactgctttagctgtgtcccagagattctggtacattgtatgtttgttcttattagtttcaaagaacttatttatttctgccttygtttcgttattcacccagtagtcattcaggagcaggttttttgattttccatgtagttgtgctgttttgagttagttcttaatcctgagttctaacttgattgcactgtggtctgagagactgtttgttatgatttctggttttttgcatttgctgaggagtgttttatttccaattatgtggtcaattttagaataagtgcaatgtggtgctgagaagaatgtatattctgtt

SEQ ID NO: 866973 - DNA, 614 bp, Homo sapiens
tacagagacaaacaagcaccagaaacaaataagacaaagtctctatttttgtggggctcctagctctgtgggaaaagctggaacatcatacaaaaaaaggaaataaattatagaaaatttaaggaaactgtatactgattgcctaaacggtagattctcttttgcacttaagtcatcctaacagctcttctatccaagttcagtttatcagtcatgatgagattcatgtcagtatacggtacatccaagtgaaaagaccagaacaaaattaaatcatcattttttaacacctttatcactggggtgtagaatagtgtaattagagggccaggattaataagttcattatgaccattatttaacaggaatgctgcgttctcaggactttaaatgtgactatgatgttttagatttaagttgaacatcccttactggtttgttttgagtgattmtcaaagcagagaaataatgaaaactggtttaaaatagagaaaaaaaacgagaaggcactgagtaaaaggagaatggagatccagaaaactagggtcttttaaaatgagtcatcaccgtaaggatctagatttatcacaggtctatatttaccatggatttaa

SEQ ID NO: 866974 - DNA, 634 bp, Homo sapiens
taaagtgaacaagatacccattcactttatctgcattttttttttcttcatgatgaaaatgccagttcaatactggcttggaaaaccgattttcaccttaccttaaccaagtcagagtacctctagataatggagcggaattttaaagttacttctcattttggtacaaatttgtgttaaaaggtattcaagctgctggatttactgagttttatcatattgaacgtgagaaaatccagaggctagtttcttgagataaaaggattttctgtgaccgatgctggacacatgcaaagctttcaaaatttggttccatctgttcacatgtccatacatattctctgcttaatttcatatstcttgaaaatcccactttccttttagaaaatttcttgttacaagttgaagtcttcaaattcaccattcaaaaacataacagagtccaataaaattgccaaattgttaacatttatgctcttatccagctctaagataacaatgatccaggtttggctgaatctaccagttatttaaggttgttttttgagcacattaaaatgtatcattagaaatccttccataaaaatactttttaaaaagtcactttgcctgcctttttttttgttttcaaacg

SEQ ID NO: 866975 - DNA, 634 bp, Homo sapiens
taaagtgaacaagatacccattcactttatctgcattttttttttcttcatgatgaaaatgccagttcaatactggcttggaaaaccgattttcaccttaccttaaccaagtcagagtacctctagataatggagcggaattttaaagttacttctcattttggtacaaatttgtgttaaaaggtattcaagctgctggatttactgagttttatcatattgaacgtgagaaaatccagaggctagtttcttgagataaaaggattttctgtgaccgatgctggacacatgcaaagctttcaaaatttggttccatctgttcacatgtccatacatattctctgcttaatttcatatgtcttgaaaatcccactttccttttagaaaatttcttgttacaagttgaagtcttcaaattcaccattcaaaaacataacagagtccaataaaattgccaaattgttaacatttatgctcttatccagctctaagataayaatgatccaggtttggctgaatctaccagttatttaaggttgttttttgagcacattaaaatgtatcattagaaatccttccataaaaatactttttaaaaagtcactttgcctgcctttttttttgttttcaaacg

SEQ ID NO: 866976 - DNA, 650 bp, Homo sapiens
ttatgaagtacttacatctttaaaaatgctaatttaatgcctgtgaacaaaaaaatagtttattttttattatttattttctttcttcaacatttattttaagtttaggggtacatgtgcaggatgtgcaggtttgctatataggtaaatgtgtgycatgatggtttcctgcacagatcatcctatctaagcccagcattcattggccattcttcctgatgctctcccttgctctaccccccagtaggtcatagtgtgtgtcattccccctcgacgtgtccatgtgttctcatcattcagctcccacttataagtgagaacatgtggtgtttggttttctgttcttgtgttagtttgctgaggataatggcttccaactccatccataggacatgatctcgttcctttttatggctgcataatattccatggtgtatatgtaccacattttctttatccagtctatcattgatgggcatttaggttgattccatgtcttctctattgtgaatagtgctgcagtgcacatatgcttgcatatatttttagaatagagtgatttatattcctttgggtattacctagtaattagattgctgggtcaaatggtatttctgcccctagtctttgaggaatcaccacactgtctc

SEQ ID NO: 866977 - DNA, 650 bp, Homo sapiens
ttatgaagtacttacatctttaaaaatgctaatttaatgcctgtgaacaaaaaaatagtttattttttattatttattttctttcttcaacatttattttaagtttaggggtacatgtgcaggatgtgcaggtttgctatataggtaaatgtgtgccatgatggtttcctgcacagatcatcctatctaagcccagcattcattggccattcttcctgatgctctcccttgctctaccccccagtaggtcatagtgtgtgtcattccccctcracgtgtccatgtgttctcatcattcagctcccacttataagtgagaacatgtggtgtttggttttctgttcttgtgttagtttgctgaggataatggcttccaactccatccataggacatgatctcgttcctttttatggctgcataatattccatggtgtatatgtaccacattttctttatccagtctatcattgatgggcatttaggttgattccatgtcttctctattgtgaatagtgctgcagtgcacatatgcttgcatatatttttagaatagagtgatttatattcctttgggtattacctagtaattagattgctgggtcaaatggtatttctgcccctagtctttgaggaatcaccacactgtctc

SEQ ID NO: 866978 - DNA, 730 bp, Homo sapiens
cctttaccattatgtaatggtcttctttgtctcttttgatctctgttggtttactaggattgcaactccttcctttttatgttttccatgtgcttagtagatcttcctccatcccttcattttgagcctatgtgtggtctccgcatgtgagatgggtctcctgaatacagcacaccaatgggtcttgactctttatccaacttgccagtctgtgtcttttaattggagcatttagcccatttacatttaaggttaatattgctatgtgtgaatttgatcatgttattataatsatagctagttattttgctcattagttgatgcagtttcttcctagcatcgatggtctttacaatttggcatgtttttgcagtggctggtactggttgttcctttccatgtttagtgctcccttcaggagctcttgtagggcaggcctggtggtgacaaaatctctcagcatttgcttgtctgtaaaggattttatttttccttcacttatgaagcttagtttggctggatatgaaattctaggtttaaaattcttttctttaagaatgttgaatattggcccccactctcttctggcttgtagagtttctgctgagagatccactgttagtctgatgggcttccctttgtgggtaaccctacctttctctctggcttaacattttttccttcatttcaactttggtgaatctgaccattatgtgtcttggagttgctc

SEQ ID NO: 866979 - DNA, 640 bp, Homo sapiens
agcaaggcagtccaacattcaaattcaggaaatacagagaacgccacaaagatactcctcaagaagagcaactccaagacacataattgtcagattcactaaagttgaaatgaaggaaaaaatgttaagggcagccagagagaaaggtagggttacccacaaagggaaacccatcagactaacagtggatctcttggcagaaaccctacaagccagaagagagtgggggacaatattgaacattcttaaagaaaagaattttcaaaccagaatttcatatccagccaaactaagcttcataagtaaggagaaatgaaatcccttacagacaagtaaatgctgagagattctgtcaccaccaggcctcccttacaagagctcctgaaggaagcactaaacatagaaaggaacaactggtaccagccactgcaaaaacatgccaaattgtaaagaccattgacactatgaagaaagtgyatcaattaacgggcaaaataaacagctagcattgtaacgacatgatcaaattcacacataacaatattaaccttaaatgtaaatgggctaagtgctccaattaaaagacacagactggcaaattggataaagggtcaagacccattggtgtgctgtattcagg

SEQ ID NO: 866980 - DNA, 576 bp, Homo sapiens
ttggataaagggtcaagacccattggtgtgctgtattcaggagacccatcttacatgcaaagacacacatagtcccaaaataaagggataaaggaagatctaccaagcaaacagaaagcaaaaaaaagcaggggttgcaatcctggtctctgataaaactgactttaaaccaacaaagatcaaaagagacaaagaaggccattaaataatggtaaagggatcaattcaacaaaatgaggtaactatcctaaatatatatgcacccaatacaggagcacccagattcataaagcaagtccttagagacctacaaagagacttagactcccacacaataatgatggcagactttaacaccccactgtcaatattagactgatcaatgagagaraaaattaacaaggatatcaaggacttgaactcatctctggaacaaggagacctaatagacatccacagaactctccaccccaaatcaacagaatatacattcttcttggcaccacatcgcacttattctaaaattgaccacataattggaggtaaaacactcctcagcaaatgtaaaagaacaga

SEQ ID NO: 866981 - DNA, 641 bp, Homo sapiens
atcattcctacaagctgcatggccaaaaacattccaaaagggcttaatacaatttggctatgtccccacccaaatctcatcttgaattgtagctcccataatccccatgtgtcatgggaagaacccagtggaaggtaattgaatcatgggggttggtttttcccctgctgttctcatgataatgaataagtctcatgagatctgatggttttataaatgggagttcccctgcacacactctcttgcctgccaccatataagatgtgcctttgctcctccttctccttccaccatgattgtgaggcctcgtggaactgagtctgctaaacttctttttctttataaattatccagtcttgggtaagtctttattagcagcatgagaatggcctaatacagtaaactggyaccaggtagtggggtgctgctataaagatacctgaaaatgtgaaatcaactatggaactgggtaacaggcagaggttggaacagtttggagggctcggaagaagacaggaaattgtgggaaactttggaacttcctagagatttacagggctcagaagaaatgaagatgtgggaaagtctggaacttcctagagacttgttgaatggctttgaccaaaatgttgatagtgata

SEQ ID NO: 866982 - DNA, 680 bp, Homo sapiens
gagaaatcttaaataataaaatcaacacgcaaacagagccaagaaatggagaaagagtcccaaatacattgtttgatccgtggcttctgttgtgcctatcaatatcttcatgcctatcctcttagacatataaactaatraaaacagtttaggagctttagctagtttggctgaatttttgtcatttgcaacaaaaaaagttaaacaaaaatagattggggaattggggtaatggaaagaaggtgaacaagatttcaggacctcttcaaagacctagacaatgtctttctctgatcttcacagacatatacatggagctggatctgaaatcctgccttattcagctcagccctttggtcaagtcttgagaggaagtcccctttccattttcatctgtgaaagtaaaattcatcatcttactttttcctactttcttgtaatggagaggaaaaaaatatgaatacaatatcatggtggattccctaaggactcaagtgaaatgactgatatcttacatgaagctctttgtcttctggcttcatgccctaataccatcttagggatttccctggaaatgtatccattaattttataagtactgtactggcttcaagaatggccttgatcagatttcatcaaaaataataattattatagcagctaatatctattgagcattt

SEQ ID NO: 866983 - DNA, 657 bp, Homo sapiens
agcaaaagcattatctctctaaactctgaaagcattttgcttataatcaggcattggctaagcattttcatgtgtgtgccagggacaaaacaatgttaaggtattgacatgcttggtctctctcatcctccaccaggggttttgggttcatccagattataagtcaataatccagagacaaaacctggtattattttgcaaaagaggaaagtaaagcacagagaggttaatgtattttgtttaatgtcatgtaactcctaatatgggggtcaaaatacaaatccaaggctgctctaaatccatatgctctacagtaggacccccatatctgagggttcttcayctgtgaattctaccaatcattgattgaaaatttccaaaaaatgaataaataaaaaataataatacaacaataaaaataatacaaatagaaaataaagtataacaattatttacatagtactcacattgtattcggtattataaataatctagagataatataaagtatacaggatgtgtataggttatatgcaaataatatgccatttatataagggacttgagcatcatggcaatgtagtatctggagggagttctagaactaatcccactcagatatggagggataattgtacttagcaattgctacttttt

SEQ ID NO: 866984 - DNA, 662 bp, Homo sapiens
taggagctaaaaacagtggctcacacctgtaatcacaacgctttgggaggctgaagcaggaggatcacttgaggccaggagtttgagactagtctgggcaacatagtgagacttcatttccataaaaaattgaaaaattaatcaggtgtggtggcatacacctgtaatcctagctccttgggaggctgaagccggaggatcacttaagcccaagagtttgagtttgcagtgagctgtgatcaggccacgcattccagcctaagtgacagagtgagaacctgtctctatttttaaaaaaatggaattagggtcatcctagtaagtttttcctcaagaataatggccttgtctattcttctcaaaaatcttgcaygtgtatagaaagctggttttggaataataaacagttggctttaaagataagatcatatacagagcaaccaatatactgaaaaattaatgattttcattgaatttgactgactcaaaataggtaagtaaaaatgtagtgggaatcttgccatttctaaatttcttttaagtctttctgctttcttctagcctcagcaagtatccagtgacgtctggaaacagtactacaattctcattcctagaatatttgtttgagactagctaaataatctgttaaatgaacttatgc

SEQ ID NO: 866985 - DNA, 627 bp, Homo sapiens
agccacccaaagctatgaagaagcaagaaaggattctttcctagaagcttaaaagggtgcatggccctgcaagcaactttacattggactttagcctcagaactttgagagaataaatttctcttgtttaagcaacccaatttgttacagcagccctaggaaactcatatgccccagtttttagaaaaaaaaaaaattaatgtatgtttatttaagtataacttatctaagaatctggcttttaataaacttattgttcatgacaccaaaaattgagtgctcaagatcatctggtaagtctgtgtcataactggaacccaagaccaagacctatttggagtctttgctgtagtcrttgtctccagatgcctctaactttatgaggataattctatagaaaaatgactgctgtaaattttgctgtcagtcagtagaagctggcaaagtgctggtgctgatggtttttgtgattagtatgcagggcaaacagccttaccctctggcttataaaacaagctaaagtgtcgcctgcttcctcacctcatcatttctagaatggtacttacctttcaaaccacaaaacagtgctgttgccaaggccataaaaagtattatatggttctgcct

SEQ ID NO: 866986 - DNA, 600 bp, Homo sapiens
attaatattcagtgtattcaggggaaacagcagatgttgcaagtgcaaatgagctgtgatgacaagttacacttcactaatgttccggatcatggccccaggcacttagaaacacttctgtgtatcactgactcttacaaagcaagaaaagcaagatctttcctaagaatcaattccagctctgccaccctctcaggctggcagccatgggcttaagcaatctaagccttgatttcttggttctcagagtttrgcatgtgtaagaatcacctgggaggcttgttacgcattcagaagctcaggcttcactccagagattctgattccatgaagaccctctcttcttctcttgaagtaaggttggctgagactcattttgtgaagcgctggaccagatactcttcagcaaaccttgtctcctacattaagactcttatgtatacaaagataaaaataaatactaatagctgaaacttactgagcacttatcaggtgcccaaccctgtatgcaagcattgactgctgggttcaaatcccagttcttccacttgcttggtgagggatgttgtgcaaggtacttacctactccaaaccccatcc

SEQ ID NO: 866987 - DNA, 647 bp, Homo sapiens
cccttaggtagactcatacttgctgggcacctagtttctgtgcatcataaaggtgtagcagctacttcatgatggctcctatgccaaccatttgcctaaaaataagctaccagacttcaaaagcttctccagtctgatcacacctctcatgtgagccaggctggttcccactaccttcctttgggcatagtgtacgggccatacctgagtcctcctcctgcttgcctgttttggggcaagcatggaaataagcttgaaatacttgtcaagagtctcctgaaacactgtaaagtatttaaaaaaaaaatagaatatcttagaggggaattgccacccccscactgcctgtctgtatccttctgatactttactgaaggaccaaagttttgtcattcctggaaatcgggatttagaagtccactgtgaggagtgaggcggctgtgagagatgggggcaagggaccaacatgtactgagcagtgacacttgctgggagttttatatcttttgatttaaaaaatgttcacagtgcctgcacaaggcaatggataaaattattttattttacagatgaagaaagtgaaactctcagaggttggataagctaggatgctgtggaaccaagattcagatctgcattattccaaa

SEQ ID NO: 866988 - DNA, 620 bp, Homo sapiens
cgcctgtagtcccaggtacttgggaggctgtggtgggaggatggcttgagctggaaggtcaaggctgcaatgagccatgatttgtgtcactgtactccagcctgggtgttttgagacagagtgagacccagtctcaaaaacaaataaatgtaaaagaaatgataagagttagaaaacaagcatcataaaatgcttgtatcatattaataactgattcaagcacaaataaatgcaagtatcatattaataactgattcaagcccaaaccatcagtggatgttaaaactactgggtaaaagtttgatggtaagcaaratagtttcatggtctcaaggtatgtcgctacagaatacttattaattcaaaaagagaaaatggtaactttacagtggagaaatcaggaggataccaccttaatctcagcaataatgagacaaagtgacatgacatgtctcttgccaaaaatgcctaacttaaatcctgaaaaaatattagacaactccaaactttatagtacttttggcctgtatagttcaaaatgtaacatcacaaaagacacaaaaaggctgaagaactacagatatgataactacatgcaatacaagataatgaatggggtt

SEQ ID NO: 866989 - DNA, 585 bp, Homo sapiens
acagctttcaacgaacgctaagtattattattcatatggtttaaaactggggtccagatatgtaaattagcagtttcagggttgatttgagtgccctaacagaagtaaacacagggtgctgtgaaaatataccagaggggcacctaatcgtagctggggaggctaaggaaacactctacaggaggtgagctctgaactcagtgttgatttggactaaatagtgggggtgggaaagacacaggcaacttakggaaagaggttagagagcatggtgttaatcaggggacttcagtagtttagattgactactttcagcaaagctagaatacaaatggccttggatgccatcctaagtaactaagaatgtgtcatgaaggtaatggggaatgatcgaaaagattctgcacaattaaactttcaactttggaaagtctctctggcagtggtgtagacaaagaaggcaggagaaaggtgggaaaaccagttagaatgttattactatgttcctactgacaactgtcctaaattagggcagtgatgtaggagagcaggagactgattcaagagagaattaagacttaatga

SEQ ID NO: 866990 - DNA, 585 bp, Homo sapiens
acagctttcaacgaacgctaagtattattattcatatggtttaaaactggggtccagatatgtaaattagcagtttcagggttgatttgagtgccctaacagaagtaaacacagggtgctgtgaaaatataccagaggggcacctaatcgtagctggggaggctaaggaaacactctacaggaggtgagctctgaactcagtgttgatttggactaaatagtgggggtgggaaagacacaggcaacttagggaaagaggttagagagcatggtgttaatcaggggacttcagtagtttakattgactactttcagcaaagctagaatacaaatggccttggatgccatcctaagtaactaagaatgtgtcatgaaggtaatggggaatgatcgaaaagattctgcacaattaaactttcaactttggaaagtctctctggcagtggtgtagacaaagaaggcaggagaaaggtgggaaaaccagttagaatgttattactatgttcctactgacaactgtcctaaattagggcagtgatgtaggagagcaggagactgattcaagagagaattaagacttaatga

SEQ ID NO: 866991 - DNA, 648 bp, Homo sapiens
ggaggagttaattctgagacatcttccaccctcgctaaataaacagatactagaggaggctacagcctcagtgaatatgtgatattaaaataataactaatgtagacattaaaatagtggatactaggcttaatacatgggtgataaaataacctgtacaacaaacccccgtgacacaagtttacctacgtaacaaacctgcacttgtacccctgaacttaaaaaaatgttaaaaagacaaaaatcgcatatatatrtatatatatatatatataattacggtacatatatggcataaatctttcaaaattgaggaaaacaatatttgttagagtcaggagacccagggaatcccaagtgggatttaaaaataagaaatccacacttagacacatcatagtgaaactgcactaccacaaaagcaaatagaatatactggtaggttgggcatggtgtcccacacctgtaatcccagcactttgggagaccaaggtgggcagatcactttaggtcaggagttcaagaccagcctggccacacatggtgaaaccccatctctactaaaaatacaaaaattagctgggcatggtgacacgcacctgcattcacagctactcaggaagctgaggcacaagaattgcttgaacc

SEQ ID NO: 866992 - DNA, 648 bp, Homo sapiens
ggaggagttaattctgagacatcttccaccctcgctaaataaacagatactagaggaggctacagcctcagtgaatatgtgatattaaaataataactaatgtagacattaaaatagtggatactaggcttaatacatgggtgataaaataacctgtacaacaaacccccgtgacacaagtttacctacgtaacaaacctgcacttgtacccctgaacttaaaaaaatgttaaaaagacaaaaatcgcatatatatatatatatatatatatataattacggtacatatatggcataaatctttcaaawttgaggaaaacaatatttgttagagtcaggagacccagggaatcccaagtgggatttaaaaataagaaatccacacttagacacatcatagtgaaactgcactaccacaaaagcaaatagaatatactggtaggttgggcatggtgtcccacacctgtaatcccagcactttgggagaccaaggtgggcagatcactttaggtcaggagttcaagaccagcctggccacacatggtgaaaccccatctctactaaaaatacaaaaattagctgggcatggtgacacgcacctgcattcacagctactcaggaagctgaggcacaagaattgcttgaacc

SEQ ID NO: 866993 - DNA, 648 bp, Homo sapiens
ggaggagttaattctgagacatcttccaccctcgctaaataaacagatactagaggaggctacagcctcagtgaatatgtgatattaaaataataactaatgtagacattaaaatagtggatactaggcttaatacatgggtgataaaataacctgtacaacaaacccccgtgacacaagtttacctacgtaacaaacctgcacttgtacccctgaacttaaaaaaatgttaaaaagacaaaaatcgcatatatatatatatatatatatatataattacggtacatatatggcataaatctttcaaaattgaggaaaacaatatttgttagagtcaggagacccagggaatcccaagtgggatttaaaaataagaaatccacasttagacacatcatagtgaaactgcactaccacaaaagcaaatagaatatactggtaggttgggcatggtgtcccacacctgtaatcccagcactttgggagaccaaggtgggcagatcactttaggtcaggagttcaagaccagcctggccacacatggtgaaaccccatctctactaaaaatacaaaaattagctgggcatggtgacacgcacctgcattcacagctactcaggaagctgaggcacaagaattgcttgaacc

SEQ ID NO: 866994 - DNA, 639 bp, Homo sapiens
ttttccaagtaagagaccaccaaccatggagtggttctggccagtatggagaatgtgcaatgagggttttcatgtcctctacttcaccttttgacatcagagggttgacaactccaccatctgatcatgctaatgaagccatttttgaacttgggtctcagggagaggcatgaagctcaattatgcatgtgcatgtttctcctttcataaatatgactcctataacttattgaatatatatatttgaccccactccccaccccattcagcataaattcctgttccctttgcccctttctcagtgtctgctttcagcttctagacagaggctatcctccccagcctgtcagaatggccaccatgctctcctttccaaaattatgaacctcattattcctcagttgatactacctacactttagtattgggtactctaggtttatgactygtctcagcaatatgcatcttaaaggcaaagagatgcttcttattctaatttaactgattgtacacaatgaatttttatttggtgctagcttaattttttaaaaacctattttaagaccaaattgtactgatacatatactatcaaaagaaaaacttcagacaaattaaatttaagagagtttaatttagca

SEQ ID NO: 866995 - DNA, 622 bp, Homo sapiens
aggtgccagcattctttctctatcctttcttaaacatttacttcaaaataatgtttattcctgttctccaattttctcacctccatcttacaataattagacttctacaaccaccatatccccaaaactacagtggtaacaacmactaattgcctaattaacaaatccaatggccagttttaggtctttgccttatttaatctctctcattgctcttttaaaaaattataacataagctggacacagctttatgtgctttctaacattagcacatgtaatccctataacaagcctatgaggtaggcactattctctccattttgcagtaaaagaaagagaggcagagagaggttgagtaacttgcccagaatcactaccctctactttttttctttctttaatgtttttgtttgtttgattagtttctgacatgacagctatggtaggcagaataatgcacctcccccaacctctcgtcaaagatgtccatgtcctaatccccagaacctcctataataaatatattactttacacagcaaggagaatgaatgttgcagatgaaattaaggttactactctcctgacagagaatatcccagattatccaggtgagcccaatg

SEQ ID NO: 866996 - DNA, 515 bp, Homo sapiens
gaattctaacaataaccatgtgagtgagcatggaagtggatcctttcccagtcgagccttggaatgactacagccccacaggacacattgattgcagcttgtgaaagactctgaagcagagtacctagctaaattgtgtccaaattcctgactcacagaaactgtgattttgttcttttaagccactaaatttcggggcaatttgttatgcaacaagaaataatacattttttttgttatcagtatcataataatcattattattagcaatataacatagagttaagaatatgaccttattctakaatcaaatggcctgagtttgaatcccagctcttccacttactagctgtttgaccttatgtcaattattttcctcaacagcaagatggagctaataatagttgtgaagagtaaatgaattaatacatgtaaaaactcaggcacttagtaggtgctgtatctgctggatgctgctattatttaatgaagtggaaaccagtacacagaccctg

SEQ ID NO: 866997 - DNA, 515 bp, Homo sapiens
gaattctaacaataaccatgtgagtgagcatggaagtggatcctttcccagtcgagccttggaatgactacagccccacaggacacattgattgcagcttgtgaaagactctgaagcagagtacctagctaaattgtgtccaaattcctgactcacagaaactgtgattttgttcttttaagccactaaatttcggggcaatttgttatgcaacaagaaataatacattttttttgttatcagtatcataataatcattattattagcaatataacatagagttaagaatatgaccttattctagaatcaaatggcctgagtttgaatcccagctcttycacttactagctgtttgaccttatgtcaattattttcctcaacagcaagatggagctaataatagttgtgaagagtaaatgaattaatacatgtaaaaactcaggcacttagtaggtgctgtatctgctggatgctgctattatttaatgaagtggaaaccagtacacagaccctg

SEQ ID NO: 866998 - DNA, 632 bp, Homo sapiens
ttttgggtgaatttgtcagactattttctacaaattgttaatggggtgagatcatggagaaaaatgggtgggtgggtgaatgaatggatgatgctttgataaattcatgggtggatgtacaaatacacacacagataaatgtayaaataaatgaaagataccaggcacaatcaccgataacttgattcattagcagatcttaaagttttttatcgattactcgacatatgccagaaacagttacaggtgctggaaggatgagaaagcatatgtagtccctgtcaccaaagagctcacactccaagaaggaaggagggcatgcagcaataagaaattgcaggatagattatattaaggatatttacaatattgtgagaataaagggggaagagtgagtttcagagacactgcatggaaacccaggaaataatgagttttaagtgaataaattaatgtatgtcaaagtattttctgggagtagaaacccaagctgcctattcaagactgttcctaggtcaaatgataaagcacaatatgtgggtgccctgtgagttctctctgttttccccttacccatgtgaagagcatgggctcatgtaaatttgtatcttccttcatgaagaaacgtttag

SEQ ID NO: 866999 - DNA, 681 bp, Homo sapiens
tagaaccaattgactatagaatgctccttttatgtcaatgaagacatttggatggtgttggcttcattgattgttgattctatttcacattaaaactaattttaaatgcactatttacaacaagtttctacaaatttactaaaattcatgggattgtttcctctgctgatttacmtattggtttataagtctggtaatttgcagtgacactatttctgatgtattccatctccatctcctaattaaagtaagttttgcattttttctgaactttcagcatgttctctgtatttttcattgaagctaattctgtttcctctgctcttttgggagcctgataattaaatacatttcaggtgccaacaagctaaatatccccctcccttgcaatcctgtcctattttcttcccttgtttattatttctgttttaaatatcactatatcatcctcaacaaaagcaaacatgtattgaatgtctgctgtggtgatgacattacagtcagtaacatgaagatacgtagactgagatgcgtacagacacatatatacatctatatatatgtatatttgagagtcaaagttcacttcctttgtgttgttagtctcccttgtcttatttaaagcaaaactatatttccttttagcttccctccttttgaattctaatacttttctttgtg

SEQ ID NO: 867000 - DNA, 633 bp, Homo sapiens
ggatggtgttggcttcattgattgttgattctatttcacattaaaactaattttaaatgcactatttacaacaagtttctacaaatttactaaaattcatgggattgtttcctctgctgatttacatattggtttataagtctggtaatttgcagtgacactatttctgatgtattccatctccatctcctaattaaagtaagttttgcattttttctgaactttcarcatgttctctgtatttttcattgaagctaattctgtttcctctgctcttttgggagcctgataattaaatacatttcaggtgccaacaagctaaatatccccctcccttgcaatcctgtcctattttcttcccttgtttattatttctgttttaaatatcactatatcatcctcaacaaaagcaaacatgtattgaatgtctgctgtggtgatgacattacagtcagtaacatgaagatacgtagactgagatgcgtacagacacatatatacatctatatatatgtatatttgagagtcaaagttcacttcctttgtgttgttagtctcccttgtcttatttaaagcaaaactatatttccttttagcttccctccttttgaattctaatacttttctttgtgg

SEQ ID NO: 867001 - DNA, 714 bp, Homo sapiens
ggagaactgccgccaacaaagctactttagctttaattttaaagtccagtatgcattaagcctctgctacaccttccaaaatttttatatttgatagtaaaaagttgtgtcattacatagaccaaggaaatttttatcatattattatgctcaaccactaccataacaaaggtttccctctttaaaatacatttcattctgacagtgtcatgattttcttccagggttgggtagacggcatgaaatgggatttgtctccagaagtagaagcagcttgtgagtgtgaagtctttttttctagggatggcttttatgggtaaggttggagactaactctactattcaaattaatcagactttsttgggcagaatgcttctggaacccctgcaaagactcttttcctcttcagcaaattacttaatgaaaacaccagattacacaaaacaaaagggtttttcccatttacgtcaatcaagctttgatggttttgtttttatttctacaagaagaaaataatgggacaattttgttttacaaagtctggattcattgcctcacctgtgcataactttccaagaaaatttcactggaggtttgagaaaagtatgggcaactcaacaatttccagttaaagactcatccagtgatgagactcaaatacaagctcaatacaaactcaaatacaatgagactcaaatacaagctaaaataat

SEQ ID NO: 867002 - DNA, 677 bp, Homo sapiens
acatggaccttcttgggtggctgttattctgcctaccacaccctgaaagtggggattgttattactcctgttttatcaatgaggaggctgaggtacgtagagatgaagtaacttgccaaacagctaattggtggtaaaattgtaaaatggaatttgaacacaaatggtctcagaccacaatacaataccgagtcttggtagcagtagaacaatttttacatagtgcttactatgtgtcaagtcctatgctaaacytttgtctttacctaaaagtgagaagcctgaaaaaagacccaaataacatgaccatcatcaattgagcatctactatgtgccagccactgtggtgggtgcaatacctgtgttatttcattatacttcatcttattagagtatggagtgagtgctatcattatctccatttaccaatgtaaaaactgaggctccgagagattgagagttcttttttgtgagattttttcattgtccaggttactgagaccccaaattagggtgatgttcgtgagtaggaaaaggggataggaaagaaatgctttagagataaaaccaacaggactcagtgattctaggatccagactcataccaatgtgcccacctgacatctccacttgaccatttcccaggccttccaaacctaacacacgcaaactcaaac

SEQ ID NO: 867003 - DNA, 537 bp, Homo sapiens
tgcttctctgtgagtggccaatggtacttccacactgctgctctgtttatccagccctgacccctggtgaatccggcctgcctgtgggttttggcctccaatcagtatataaaaggtcgggaggaaggaataacccaagtccccataggtaatacaygaatagggtgatgcagtagtggctgatgaggggagttacagactgataatgtaaacttacatgaagcacagctttccaggattaggtagaaattccatctgtgtgccaaactagccctttacaagcataagcaaacccagagtcttcgtgagatgtaagatggaaaaatgatcaaatgcctgacaagagcctaacatgggcatttctagctctggcttctgccttgaccttgtatgacctttgcaattgtcctaggcaggcagacttcatgacacctgtcccctgcagcaactgtcaagtcagccccacctgatttcactaagctggaagccggatctgtccaacactgccagctgttacccacatttgcttttatggct

SEQ ID NO: 867004 - DNA, 624 bp, Homo sapiens
catcaaaatccaaaatttcacagcacataggaactcagtctttcaagagggcagcattcttagaacattacttgaaccacagaggacaaaaaacactgaacaagtctatgaagaaattatgtcaatccatggttgagccaacacatttattagatcaataaatagaagctctatgtgataatttcggtctcrgtactaattattaaaatgtgttacatgttaagtgaaaaaagttataaaacagtaagtacagtgtgctttcaattaaaaatggtatgtgcatgtgtggatatacatagacacacatatgcatttttttaaaaaactgaacaattacacatcaaaaggtaaacagtggaattatgggagatgtctatttttttatagcagttttctgtatctttgtaaggcaattcacattaatattttttacaataggaaaaaaaacaaccaacctttagaagatactattctgctagcatggtctcaaagtgtgttataagtcgatctatacaggcaaagaggaattaaagataaccaggacataaaaaacttttgcctgaaacatacaagaaaatctaacaaaaatggagtccccttcccctctcatctgcgtatttatgt

SEQ ID NO: 867005 - DNA, 581 bp, Homo sapiens
gattggcggatacagtaattataaacataaacatttactaaatgctaactacatgctaggcagcaaaccaagtgatgcatgtgcattaattaatttaatcctaaaaataatcccatgatggaatcatcatccctttttatagaggagaaaactgaggcacagaacagtaagtggatacccagacacatgagagcagatgtttgagacccagtaagtgagacccagacacgcagagcagacgtttgacttttccttgtgcagatctagtttgggtttcttgtagcttcttttagcttggtggtctctggyggaagctaagaatgaggggatctgccctgggcagagaccccagtcggggctgtgggaggcagcagggccagtgttctccgacccttaagggaacctgagtcagcagtgccatgacggccgtcactgcaaagaaaccaactgcttggagaaccctctggagggaatcacaccttctccctggtcctctgtctccttgactgaggccaagagatccagtggctgccagtggcacagtgaggcacaggctgggctggggtttctgagcaactgct

SEQ ID NO: 867006 - DNA, 593 bp, Homo sapiens
ggagtgtagaatcagagtcagggaagagctctcctggggatgagatctgagtgatgagaagaaaacagacagttgatatggtttggctttgtgtccccatccaaatctcatctcaaattgtaatcctcacgtgtaaaggasggacctgctgggaagtgattggatcatgggggcggtttcccccatgatgttcttgttctagtgagttctcatgagatctgatggtttaagtgtgtgatggttcacccccatctcactctttttcttctgctgctatgtaagatgtgccttgcttcttctttgtcttctatcatgactgtaagtttcctgaggcctccccaggcatgtggaactgtgagtcaattaaaccttttttcttgataaattacccagtctcaggtagttcttttatagcagtgtgaaaacagactaatacaccaatgaagattggtcaaaagtaggaagccagggtaggagaccaagttcaggcagaaggcacacatacccttagtcaggtatgaatttggctaacggaggactggagtttggagttcagcgagcaaaggagaaaggggaagtaagaaacatgtaag

SEQ ID NO: 867007 - DNA, 593 bp, Homo sapiens
ggagtgtagaatcagagtcagggaagagctctcctggggatgagatctgagtgatgagaagaaaacagacagttgatatggtttggctttgtgtccccatccaaatctcatctcaaattgtaatcctcacgtgtaaaggagggacctgctgggaagtgattggatcatgggggcggtttcccccatgatgttcttgttctagtgagttctcatgagatctgatggtttaagtgtgtgatggttcacccccatctcactctttttcttctgctgctatgtaagatgtgccttgcttcttctttgycttctatcatgactgtaagtttcctgaggcctccccaggcatgtggaactgtgagtcaattaaaccttttttcttgataaattacccagtctcaggtagttcttttatagcagtgtgaaaacagactaatacaccaatgaagattggtcaaaagtaggaagccagggtaggagaccaagttcaggcagaaggcacacatacccttagtcaggtatgaatttggctaacggaggactggagtttggagttcagcgagcaaaggagaaaggggaagtaagaaacatgtaag

SEQ ID NO: 867008 - DNA, 593 bp, Homo sapiens
ggagtgtagaatcagagtcagggaagagctctcctggggatgagatctgagtgatgagaagaaaacagacagttgatatggtttggctttgtgtccccatccaaatctcatctcaaattgtaatcctcacgtgtaaaggagggacctgctgggaagtgattggatcatgggggcggtttcccccatgatgttcttgttctagtgagttctcatgagatctgatggtttaagtgtgtgatggttcacccccatctcactctttttcttctgctgctatgtaagatgtgccttgcttcttctttgtcttctatcatgactgtaagtttcctgaggcctccccaggcatgtggaactgtgagtcaattaaaccttttttcttgataaattacccagtctcaggtagttcttttatagcagtgtgaaaacagactaatacaccaatgaagattggtcaaaagtaggaagccagggtaggagaccaagttcaggcagaaggcacacatacccttagtcaggtatgaatktggctaacggaggactggagtttggagttcagcgagcaaaggagaaaggggaagtaagaaacatgtaag

SEQ ID NO: 867009 - DNA, 623 bp, Homo sapiens
caataataatgggagactttaacaccccactgtccatattagacagatcaacgagacagaaggttaacaaggatatccaggacttgaactcagctctgcaccaagcagacctaatagacatctacaaaactctccaccccaaatcaacagaatatacattcttctcagcaccacatcgcacttattctaaaattgaccacataattggaagtaaaacatcccttagcaaatgtaaaagaacagaaatcacaacaaactgtctctcagaccacagtgcaatcaaattagaactcaggattaagaaactcactcaaaaccacacaactacatggaaattgaacaacctgctcctgaatgactactgggtamataacgaaaagaaggcagaaataaagatgttctttgaaaccagtgagaacaaagacacaacatatcagaatctctgggatacatttaaagcagtgtgtagagagaaatttataacactaaatgcccacaagagaaagcaggaaagatctaaaattcacacactaacatcacaattaaaagaactagagaagcaaaaacaaacaaattcaaaagctagcagaatgcaagaaataactaagatcagagcagaactg

SEQ ID NO: 867010 - DNA, 687 bp, Homo sapiens
aactcctgtcccacgctgattttcagtagtactttttttcatccttgtaatcactgaaaacctagctttgcaaagatatgacataatctgaaggaatgtagagtgatctgtttacccctgtcacgtggggttggatagacgtcaggcattgctttgcttccctcaaaaatttaaaatacctcgccggactcctgtgagttcacaacagcaccctgggcacctcagcatagctaggaactgcaaagttatgcattggtaggtgccagccagcagcaggcaaaatgcaagggcctttaaaaatacaatatggggtagggacctgtggaacagggcaggagaagggctgcttgtgggagtaagcagggggcaagggagtgargggattattgtgtagacgaggctagaaaagactaaatgtcatttaacctgaggttcttttctccattgggaaaaggtatctaatcatagctattctgtccaccttaaggattatcatgcattcaaatggactacaggtttggaaacaccttgcgaatggtatcaagcttgagcttgagcttgatataaatgctggatattgcggctaatgtgtttccttctcatcagaggttattgcagagaccctttcccacaaatactctgtactcccagcaccttgccactgcagaggaaatgtggccaattcca

SEQ ID NO: 867011 - DNA, 625 bp, Homo sapiens
cttctttttccattgaatggtcttgaaacccttgcagaaaatcaactgaccataattatcatggtttatttctgggctctcaattctatttcattgatctatgtgtctgttcttatgccagtatcacattgtcttgattactgtagctttgtagttagttttgaagttggaaagtgtgagccctccaactttgyttaagactgttttggctatcctgggtgctttacatttttatgtgaagtttagaatcagcttgtcaatttcagaaaaataagccagctggaattttgatagagattgcattaaatctgtagatcaatttgggaagtattcccatcgtagcaatagttagtcttctgatctatcaaaatggatgtattttcattatttaggtctttagtttatttcaacaatgttatacatgtttcagaatacaagtttttcacttcttttggaaaaattaatcctatgtatttcattcttttgatgctaatggaaaaggaattgttttcttatttttattttctgattattcattgcaagcatatagaaatataattgatttaatgtattgatcttatgttctgtaaccttgactaacttttttattctaatagatttttag

SEQ ID NO: 867012 - DNA, 625 bp, Homo sapiens
cttctttttccattgaatggtcttgaaacccttgcagaaaatcaactgaccataattatcatggtttatttctgggctctcaattctatttcattgatctatgtgtctgttcttatgccagtatcacattgtcttgattactgtagctttgtagttagttttgaagttggaaagtgtgagccctccaactttgcttaagactgttttggctatcctgggtgctttacatttttatgtgaagtttagaatcagcttgtcaatttcagaaaaataagccagctggaattttgatagagattgcattaaatctgtagatcaatttgggaagtattcccatcgtagcaatagttagtcttctgatctatcaaaatggatgtattttcattatttaggtctttagtttatttmaacaatgttatacatgtttcagaatacaagtttttcacttcttttggaaaaattaatcctatgtatttcattcttttgatgctaatggaaaaggaattgttttcttatttttattttctgattattcattgcaagcatatagaaatataattgatttaatgtattgatcttatgttctgtaaccttgactaacttttttattctaatagatttttag

SEQ ID NO: 867013 - DNA, 625 bp, Homo sapiens
cttctttttccattgaatggtcttgaaacccttgcagaaaatcaactgaccataattatcatggtttatttctgggctctcaattctatttcattgatctatgtgtctgttcttatgccagtatcacattgtcttgattactgtagctttgtagttagttttgaagttggaaagtgtgagccctccaactttgcttaagactgttttggctatcctgggtgctttacatttttatgtgaagtttagaatcagcttgtcaatttcagaaaaataagccagctggaattttgatagagattgcattaaatctgtagatcaatttgggaagtattcccatcgtagcaatagttagtcttctgatctatcaaaatggatgtattttcattatttaggtctttagtttatttcaacaatgttatacatgtttcagaatacaagtttttcacttmttttggaaaaattaatcctatgtatttcattcttttgatgctaatggaaaaggaattgttttcttatttttattttctgattattcattgcaagcatatagaaatataattgatttaatgtattgatcttatgttctgtaaccttgactaacttttttattctaatagatttttag

SEQ ID NO: 867014 - DNA, 634 bp, Homo sapiens
cgactgtaatcccagcactttgggaggccgaggcgggcggatcacaaggtcaggagatcgagaccatcctggctaacatggtgaaaccccgtctctacttaaaaaaaaaaaaaaaaaaaaaaaattaaaaaaattatccctggttatcagtgagtaatatatatgtcttttggggaactaagttgttaaagggatgcctagtgtcatgttattactgtatataaggaacagctttcatcaccatttacaataatcaggctcctttatttcttctttgttggtaaagccttctaagaaatgatacatatatggtcaatatgataccgcatacatctttgttatccatcaatgtatctgctatgttacatgcacagtaggcttccaatgaatatttattgaatacctgaataagcgaatttttctmtttgaagaatactctttaataactattcttcaagaatgtcaagctgtgtctaaaagtaatcaagtgtgacaattgtaatatttccctaagcttttataccttaaattttgcacgctttcacattcactttcaggtagcaagtgcattgagcatctttttcatgtttgcaatgattccacatattacagattctcagtgtcgagcgatcgc

SEQ ID NO: 867015 - DNA, 650 bp, Homo sapiens
ctttgagagtgctttgtgccacataaatctcatagaaatatctttaacttgctgccccagaaggccactgcttccctcctcagcaaacagaagcaacatcagggagtcatttgtcaaagtttcaaagggaatggttcatttatgaactgacattggatggtcttcygttccaacattcatgggattttaaaacaaagatgcattttatgattaacctccacaagcaaagagttatatttgtctcttttgacttacttcagcaacctgatttaaaaaaatctccttcaaggagaatcatatttattatacctcaaaaattcagtttatatgcatcattgttcagagcaatttctttctccctacattgaatggccaagtgatcatttgttttggagattcattcatgctttagaagacctggccacccatggaaaagaacatttttgagagcatttcccccctgcttctttcttaggacagggaaaataggtcttaaaagaattataagtgaatttagaaaatattgcttaaaagtttctcacttattctgggacatataccttcagttttctaatattcaagagctgtagtgaaaagagcattagtgtatgttaagattctctcttttgagttacgtgaacttgagccaa

SEQ ID NO: 867016 - DNA, 650 bp, Homo sapiens
ctttgagagtgctttgtgccacataaatctcatagaaatatctttaacttgctgccccagaaggccactgcttccctcctcagcaaacagaagcaacatcagggagtcatttgtcaaagtttcaaagggaatggttcatttatgaactgacattggatggtcttctgttccaacattcatgggattttaaaacaaagatgcattttatgattaacctccacaagcaaagagttatatttgtctcttttgacttacttcagcaacctgatttaaaaaaatctccttcaaggagaatcatatttattatacctcaaaaattcagtttatatgcatcattgttcagagcaatttctttctccctacattgaatggccaagtgatcatttgttttggagattyattcatgctttagaagacctggccacccatggaaaagaacatttttgagagcatttcccccctgcttctttcttaggacagggaaaataggtcttaaaagaattataagtgaatttagaaaatattgcttaaaagtttctcacttattctgggacatataccttcagttttctaatattcaagagctgtagtgaaaagagcattagtgtatgttaagattctctcttttgagttacgtgaacttgagccaa

SEQ ID NO: 867017 - DNA, 609 bp, Homo sapiens
aaatacaatggaacctgttctgtagtccttccctgtctgtaacagggggaaggaaatcaaataggagagacaactcagagctgaaggttgtcagagaaattaaatgttcttaagaggtggtgctgcgaataaagggcgtccacgcaggtgtgcctgaccaagctgatggctttcaggtgcgcattgatatttggtatgagggagaagggccattgaagaggttttgcgtttgaacacctggagagcaaagagaggggtgtggttgggggggcaagcagaagagacaaggtgattggtggttgcactctagcctgggtcagggatgaagtccaastcccatagcaagatgggctactggaacaagtgcttttcagaagcaaggggcgccactatgctcaggtaacaaagtggcacggagggaggaagggaaagaggttataggtcagatattgagcctggctcacctgtaacattttcggggtttagaacaagagttcaacttgggatccacataccatatgcctaaatatttgaaatgtttaaatcaacaaatacagcatgttttatttaatggtttatctccttccatgacaaatgtaacttcataat

SEQ ID NO: 867018 - DNA, 608 bp, Homo sapiens
atcacaccaacaataacaaaacaagaatggataaagacatgattatgcttttcacacaaaggaaatacaaatatttaatgtttatccacagaattggtgaatatatggaatgatgtgcaatctcattatcaatcaggcagaaacatgytaaacgatgtgacagtagaagttattataagaatattgctcaagagcaatgcatatccatttcaggtgacagtataagctggtacaacctctttggaaagcaacttggcactaactcatatagttgaacatttaaaaacattataacatggcagttctgttctgggggcactaagagaaacacacaagaatgttcattacaatgatacacataacacacaaaaaccaggaggaaattcaaatctctaccaatgggagaatggttatagtcacacaatggaatattaagatatataatgggacattacagcaactaagtgactgataggtagatagacagatagatgataaatagatagatgatagctatgataaacgagtactccctgtttgactcaaacacgtaatgaatcaaatatcaatcacagaagactgcatagatataccacgtttttaaagtt

SEQ ID NO: 867019 - DNA, 663 bp, Homo sapiens
tcccatccaaatgttgccttttccaaaaccatcctggcctgccccgccccccatcctgtacccataaccccaggctccactggtagaggggcagcagagcagcaaagtggctgagcagcagagaaggagagaagaaaagcagcagctggacatcagagagaacagcttgacagcrggacttcagagttcagttggggccaaattccaggggaagaccaccttcccactccatcccctttcccgctccccatcccactgagagtcacttccaccactcagtaagctcttctacatttaccactcttcagttcatttgtgcagcctgattcttcctggatgctggacaagaacttgggtaccaagaggatgggtgtgaaaggctgtcaccctgaccctccactgagctgttaagcacttaagctgtacatggacagcaaagctaaaagagcacactgtaacacacgccctctggggctctggggtcacaggtacccccttagacgccatggggaagcacagagttgtactcctgccagtgcccagaggcatgagttccagcccctgcacccactcacctgcatgctcgccatcctgtgaggggttgagagctgagggctgagcaaatgagccacccccttcgcaagtcctgcataggggtcaagg

SEQ ID NO: 867020 - DNA, 619 bp, Homo sapiens
ataataataataataataataataacaataatttgaaaagagatactttgaaactacataagcatcttgtttttcatcaaactgtccatttatctttgtatttatatctaatggactcatggactctcattttatgatttataatctgtattatttattttgatgttcagattgctctagaattggaaaggggaacaattgaagctgatttctggcatttttgtttttgacataccttcatcattcttcaagcatgttcttgcgttcttgctcgttttayactttaactactgtggcctcaaaaagagccattcctctaaagagcttctatagggaaaaatggtatttagaactcattgtctgagtaatagctgttctcatggctattctgatattatgctcctaagttctttcactctttaagtagggacacaaaatgtatgtatttatgtttctgtgtctctgcatatttgtacacatacaattacatcaatgtttgttaactacacacacatgcacatatacatagatatacatgtacaaatatatatatattttttccatatatatatatggaaaaatagaagttcattctgatgccttcaattttaatgtatcc

SEQ ID NO: 867021 - DNA, 736 bp, Homo sapiens
aagtaaagttagaaataaatggagagaaaaaaatgaaaagactaactaatagagcaaatataattgttgagatccagtggacccagccaaaattaaatcaagccaatctatgttttctgagatccaatcatgtgcaargtctcaagtatattcaaatgttttaaagattgtgtttttaggtcctcatgaaaaacacaaatacacctaagagtgaggttagggaacagtatatgaggttgtgattgacacaaagtagaatagcatattttaacattttatccacaaagacatactgattccaatagatgatgcatgctttctttcatgaggtaagtgaaagaataaaatttcatttacaaaacttaatttatcaaacttttcaagactatgcctattgtaatcatactgaaagctacctctatatattactttaaatctattatagtttgtacaactgaaaatgtattttaagcaagtattttggaggcaagaatagcagatgaaataactacatactactaggagtaatgatgacacttaagaggctgaaattttatataaatacagctagaatttttaatttaagaaacattaaaaatgaatagtggagcaggtttactaaaatgttggaaaagaataatttattataatcatacaaaaataaatgattctatacaaatggtatatgtgtttataattatctatttatatgtggtatatatattattgtatacac

SEQ ID NO: 867022 - DNA, 736 bp, Homo sapiens
aagtaaagttagaaataaatggagagaaaaaaatgaaaagactaactaatagagcaaatataattgttgagatccagtggacccagccaaaattaaatcaagccaatctatgttttctgagatccaatcatgtgcaaagtctcaagtatattcaaatgttttaaagattgtgtttttaggtcctcatgaaaaacacaaatacacctaagagtgaggttagggaacagtatatgaggttgtgattgacacaaagtagaatagcatattttaacattttatccacaaagacatactgattccaatagatgatgcatgctttctttcatgaggtaagtgaaagaataaaatttcatttacaaaacttaatttatcaaacttttcaagactatgcctattgtaatcatactgaaagctacctctatatattactttaaatctattatagtttgtacaactgaaaatktattttaagcaagtattttggaggcaagaatagcagatgaaataactacatactactaggagtaatgatgacacttaagaggctgaaattttatataaatacagctagaatttttaatttaagaaacattaaaaatgaatagtggagcaggtttactaaaatgttggaaaagaataatttattataatcatacaaaaataaatgattctatacaaatggtatatgtgtttataattatctatttatatgtggtatatatattattgtatacac

SEQ ID NO: 867023 - DNA, 597 bp, Homo sapiens
tttctattttttgttgtttgaaatggggtcttgctctgtcacccaggctggagtacagaggcatgatcatggctcactgcagcctcaacttcccaggctcaggtgattctgccacctcagccttcctagtagctggaactacaggcgcatgccaccatgcccagctaatgttttgtatttctttcttatttttttttttggcaaggggttgggggagagataggatcttactacgttgcccaggcaggggtaatttctttccctgaagttgtcctacttccaacctgtggccctaggtcccagatggattgtaaccagcttgtccrgagttctgagtaagccttgcagagggagtgtagagacctcaacaaaaacattttctctgaatagataggtgactcagcactggacaccaagaaagctgcatttagctgaaagtcagtaagaaactcgggaccgggcctggggcagttggcctcctatcctggaccatgagctcctcattcacaaagcaaggggctgggcagagagttgcccaggtggcttccagctctggcattcagtgcatctgagtgagttgtcatttatagaccagga

SEQ ID NO: 867024 - DNA, 629 bp, Homo sapiens
tctctaggcacttttatcagagagagaagggccaagaggtatgcatagtgggagatccaggggtgctcactctcagaaaacaagttagctgaagcaaatgccagaaatagaacagtttgcttaaaaccaagatgggaagaagctagaacgaggtatgagggctgggagagcaggggagtaagggatgagtgatggctgaacaaggtcagaagtagcagtgttgaggtattaattatatttttttattttctatatgagtgataatctggtatctggagtttcactgactggaaagaggctrccccacccagggcttgctaattcttagagatagcagaagactcgctgaggagagcacctttcatctgtataccaaccaatccagagcccgtactcacaaccaccttctctatctggctcttacactccaggaggtggtattcttctgccctacttatcccagaaacaggtactggacaattagggtcagctcctatgccccagagcccactgaaattattcaaactagcccattctaaatctgcatgccttgcctttcccacagaaaccacaacaaaggctctgaactctgctttccttgactttctctgcctgagactcccgccccc

SEQ ID NO: 867025 - DNA, 639 bp, Homo sapiens
cactgctaggagttgaggaagcagcctggctgggccatttttgcgaatcctagcagtggcctctggtcttgtttgcttctcagctttctctctttccaggtatcaagcttcaggccagcatgggctgggatctcagcaacaggtgcctgtgaaggggagaagaaatctcgtaataaagccagtttcattattaaaatgactcaagaaacccccattggttgttttctgctgagtgcctggccctgtgctaggagaatcagggagaagggggtttcttcagaagtcccctgtgccaatgagtgtgcccagtggagtgggatatatttatattcacatatcaggatcaaccagcaatrgcacggatgctgctggtggtactgcagactcttagctcagtgctctgtttccatgacacttcttctgaattattatcaaaacaagtctacatgagctaatactgtgcatgctcactctgcttaaacccttccactcccaatcctgtctctcttctgtgcccccatagaactatgttcatttctttactggtctgtagtattttgtcatgaggattacaaagcaattcttgagattttggagaatattaattggttgcttcaacagctattttgaaaaccatta

SEQ ID NO: 867026 - DNA, 500 bp, Homo sapiens
cctaattaagattactgaaccatttggcatgccaaatagtgcaaagctttatatcatactgaatcacagatgctgaagtatttataaaacattttagtaggcatcaatgtaggcatagtgtaggcattacatagaattattctaatgtcccaacatatgagacaggaaaaaatagttaagaatagagcatggaaaaaaaaggggtgaatctagraattcacaatctttatcaggaaaaactggtaataggggtaaattaccatatagatgatcacccaaaaggtgatctttgggcaattaattgcttaaatataagtgaaatatccatagatcatctatagcattctatttctgtgtaacattaattatatttgaaatttggagttatagcttaaattcttcaaatatttataagatttcaacaactagatatattttttgacaagaggtaatagaagcatgagatacttgtccttcaaggaaagatacgacagatttat

SEQ ID NO: 867027 - DNA, 615 bp, Homo sapiens
tggtcagtggtcccacttccacttccaccccttgattcctggaccgatgaatcctggctttgggagaaagagcaccatatattggacgctgattcagagtatacacagccttctggagaactttgcctcagccctgcaaagtattgtcacctagttggcattgtaattgtgacttcaaaaggccattccactgttctataaatccaggtgcttcaggatgatgggaaacatggtaagaccagtgaattccttgagcatgagcccactgccacaattttttaggcataaagtgagtgccttggtcagaggcattgctgtgtggaataccatgatggtggataaggcattccatgtgtccagggatggtagccttggcagaagcattgcatgcaggataggcaaacccatatctggagtaagcatctattcyagtgaggacaaacctctgccctttccatgatggaagaggtccaatataatcaacccaccaccaggtagctggctgatcaccccaagtaatggtgccatatggaaatctcagtgttggtctctgctgctggcaaattaggcactcagcagtcactgtagctaggtcagccttggtgagtggaagtc

SEQ ID NO: 867028 - DNA, 505 bp, Homo sapiens
cagtagtccctgaaatgcctatcatttctctttcaccagaagtctccttggggaaggatggaagaaatattaacagcataaattgtcagtagtgtagtggggtccttccttaaggggaccgggactccccttcattcaaggggtactgggtctgtaaactggatcaagtctggaaattgattgaggggccatgwttctctgtttttataatccaaattggtcttttgtccatttgacctagaagttttctgcttatgtaaattaaggaggaatgcaataggcttcctattaattttaattctaggaacactgtgattaattagctaatgcccaaactctacacaagtcagagtatttttaatgctgctttgcctctgctgtttattacagtagctatgctcaccttgattttgatggttcagtgccaccacttggcttctgctgcctgggatccaattattcccactgtatttaaattttgtagttgagtgactgtggttcccac

SEQ ID NO: 867029 - DNA, 663 bp, Homo sapiens
atcaatttacaaatattggaaaacgtattcggggaataaatctaagcatatatgctatgtttacacagagaacagactaggtaaaaatagtttttcttggaggcagttgtgaataaccatcaggacaaattgaagttctgttctgtaatatctatccctaggaatgtttaaatatttataaaaatttacttaaagtatttaatattttaatacacgcaacacatttgtatgtaatcctaatttttttgatagaagatgctagttacaaagaaattatgttacttttatattttaagtacaattaagggcagatgccttatgaaatgttttaccttcttgaaggcccttcattcctgggatatttatgtagttctctctctctctctctctctmtctatctatctatctatctatctatctatctatatatatatatatatatacacacactaaaaatttacatataaatttatatataaattttatttatatgtataaataaaattttagacagctgtaaccagccctctctctcctttgcccattcccccacaaataaaatttttaaagtaaatatcttaatagcctatctgattcagaatgttgagaaaaatgactattaactaatggctcagcattagagatttgttagcatgtttctca

SEQ ID NO: 867030 - DNA, 644 bp, Homo sapiens
tacttcacattgtcaatactggtctctgtaactgcacagatatgtatatgcccccaaatgcgtctgtttttccactcagatacgtagcttctatgcactataagatcactgtaccaaatggcagtcttaagaattaccctagtcttggattaaaatcgttctaaacattcttgggggaaaaagagattgtttgtgagaaagcttcataacaaataaacagaactagtgtgggggaaagccttttaagatataatcagaaatattctatagaacacatttctgttrtttataaattatttagaacacacttctattatgtataaattatttaaaaaatctgtttcatgcaggctttcctttctttctagatgataaccgattatttgcccataactatcaaaggccaaactgctttaaaaccaaattctataattttagataataactagtactgttaaggtttctatagttacccaggaaagggtcatgactgtctgaaacacatacactctctctgataattaaccacatcatgatagactgacaacacttaatgattaattaggctaagaactcaaatccttagcaggaggtaaaagcacagaatttcataatgtactgaacacctcccagagagacatgga

SEQ ID NO: 867031 - DNA, 613 bp, Homo sapiens
caagcaatagtccacatatgactttcccttgttctacagaatttgggttatttccctacaagagtcaagaatgcccgttgaacactggtgttcaaaatgaaaggccccacatttagatatttagatccctattataatgtgttataggtccatctttcccggaaacatttaaactgaagctgggatgtttttgtagttaattttaattttagctattatttggataagttaaattgaatgaatagatgtgaagtttggttctcacaaaacaaatgcttattctgtatttaaaaatgccactgtatatattttataaatttttatacaggtaatartgttaatgctgaactgtgaaaattcaggagctaaaatgtgattctatcatttaaaaagaaaaagagagaccccactgcctacccccagcagcagtagatatgctgtgctgaaaataacagctttctaataagggagttcttaatagtctttggcctcagggcttgaaagctatgctaattgagaaatgcagccacttagtgagagtttactaccagctcagtggtgtaaaagcaacaacagtagaatttcagtgtagataccagtactatggtatgct

SEQ ID NO: 867032 - DNA, 609 bp, Homo sapiens
ctgacccccaaagttaccattagtcattttgcaactcagcctaaacatctgatatctcattaaaatatgttaaaaatgaaacttgctttcccataatccacactgattcctttctccattatgtcatcttaataaatattattctattcatctagatgcagaagtagaactctccgtcatagctagcaattgtcttggggatttttgtctgtttacttttttcaaaaatctctctacaccagaattcagggaaaagaaataagaaaaggatatttccaatttcattttacccaatatctccastatgtagcatagtttgttttacatatttaatattcataaaaggagatgaataaataaatgaatgctgaattcggaacaaatataagcacaaggctttcattatagcattgtatcattagatcttatttatttcaacttgattaggcttccaaattctgcggatgcttagctgcaaactaaagttatttaattatcaggacagattcgctgttccttagaaagctactgtggcatcatagtttaccatgcctttggagtctctgtacaattgtccaatttcagttatatttttctcctattggtact

SEQ ID NO: 867033 - DNA, 595 bp, Homo sapiens
tatggtacatccagacaatggaatgttactcgggacttaaaaaaaaaatgaactattaagccatgaaaagagatggcataaacttaaatgcacattactaagtgaaatagccactctaaaatggctacatactgtatgactccaactatgtgacattctggaaaaggcaaaactgtagaaacagtaaaaagatcagtggttgccaggggctggagggagggagggatgaatrgacagggcatagacaatttttagggtggtgaaaatactcttataatgatggttacacttgtctaaacccatagaacgtacaccaccaagagtgaaccctaatgtaaactgtgagctttggatgatgaagatgtgctaatgtaggttcaccaattgtaacaagtgtaccactctggtggcagatattgctagtgtgagatgctatgcatgtgtaggggagacaggacatatgagaaatcttcatactttcctcttaattttgctcagaacctaaacctgctctaaaaaaaataaagactttaaaaataatcagtgggtatatcgggtataattcttgaaagagttctattgcaaatatgagaag

SEQ ID NO: 867034 - DNA, 574 bp, Homo sapiens
gtttgttggtggcatgactgtcttttttgggaagtgtctgttggacagtgagagcacatggacacagggaggggaataacacacactggggcctgtagaggggtggggttgatgggtagagagagcattaggaaaaatagctaacccacgctgggcttaatacctaggtgatgggttgataggtacagcaaaccaccatggcacacttttacctgtgtaacaaacctgcacattatgcacatgtactccagaacttaaaataaaaataactttaaaaataaatttaaaaaatttttaaaaaattaaagagtcaaaactattttgtttgtctttgtatttttttggaggagggattgctgaagaatatcaaccctgctgttaggtcacaaaaatattcttctcttctagcatctttctcttttagctttacgttggtascttttacattttaggtctttaatccgaggtgcaagggagtgttatcagtccatttttcctgcaacaacaaagaaacccaggatcttcctgacttatagaagcatttgtttctcgttcccttatcagaaagcttcag

SEQ ID NO: 867035 - DNA, 632 bp, Homo sapiens
caaatccctttctatctaaatcttgtatatcttttgactttgtatatctaaagtttcatctgtttcaaagaaactttattccactgtttgatgagattttatttttagatttttttcattatcacacaagtaaaacactattcagtgtaggaaagagtagactttaaaagtacttagaaacacacccttaaaataagtaatgataaaatattagtatgataacctttccaayttttgtatgctatagataagatgtacattcaaacccttctattcataataatagcatactataaatattatagaagttaattcttctttactgaacagcataacttgaaaattattttaaatattattgtataagcattctcattcttattatcaatgtattatacatatattatagttaatgatatagatgtatcactgtttgcttggacagtcttttcctatgaatatttggatggtttctaagtaattgatcttctaaacaagaatgcagaaacatccttgcaggtttattttttcacatttgtcagttcttttcattgagatacatttataggtggtaaaatttgcatttttaaaaagcatttaaatcatattgataaaggatctataagatgttg

SEQ ID NO: 867036 - DNA, 627 bp, Homo sapiens
gacttttttgttttcctcccttcagcacgtaatctttgaaaaaaaaatcatctagattttatgacttttttctcacaccttacaacatgaactccccctaaaccaatggaaatacctcatttataattcatcaatagaatcataaagagcctatcaacaggttttgcttttctcacattcagtctctcycctttctttcctttatccaacccaccagtgttttaggcttcagatccttgtatagatgataatatatggttgttgtcactgccccaactttatatgtacatttacaattactgacctaggctctaactcagcaggtctctcccccaatttatcagcttactctgaattccctacttcaataagtgacacacttatttcctaatgactcaggctcaaaatgtcaatgccatttcatacattcagttactaatttcttcatcattcattatgtacctgcttcttgccaaggaatattttatgtcctggggattacaaagcagaataaaacaatatctcttttcaatgagcttatattatattgaagaagaagactgacaagtaaacaaagtatgtggtaagtgctgttttagaggtagcactgaaagactgttagaagac

SEQ ID NO: 867037 - DNA, 588 bp, Homo sapiens
gtcaatgggtgaatatgctcccgggttagaactacactgaagcaaaggtgttggggaataagaaagtgcacgcatttcatgtcatgactgatcagaatgaaaataaatattgagaagactaagctatttgtccaataataaagcatatctggtgagggtggttttttgtttttttttttttgcaatttcatttataatctccatgtaagtgtgcttactttttcattcaataactgtatcgtatcttaccagagatgtcttaggccttggggatgagaagacggaggagtggatgagtttgtcttgtggagcgtaattttagaggcaggagactacaataaataaggagaaaaattcatgaagtaattttgttaatgaggagtgatatgaaggaaacaaaatggggtgacctatttgtcmagtattggcatctgtgaatataattgaaccctgaaatatcagggatgtgacacagtggaagctcagttctcattcatggactacccaattgtaaggtcccgaatggcagcttttctctctgtggtggttgagaaacccaggttccttccagtttatgctgcctcatca

SEQ ID NO: 867038 - DNA, 570 bp, Homo sapiens
tttattattacactttaagttctgggatacatgtgcagaacctgcaggtttgttacatacgtatacacgtgccatggtggtttgctgcacccatcaacccgtcatctacgttaggtatttctcctaatgctatccctcccctaagccccagccctcgacaagctccaatgtgtgatgttcccctccctgtgtccatgtattctcattgttcaactcccacttatgactcagaagatgtggtgtttggttttctgttcctgtgttagtttgctgagratgatggtttccagcttcatccatgtccctgcaaaggacatgaactcatccttttttatggctgtatagtattccatggtgtatatgtgacacattttctttatccagtctatcattgatgggcatttgggttggttccaagtctttgctattgtgaatagtgctgcaataaacatacacgtgcatgtgtctttatggtagaatgatttataatcctttgggtatatacccagtaatgggattgctgggtcaaacggtatttctggttctagattcctggggaatcgccacact

SEQ ID NO: 867039 - DNA, 601 bp, Homo sapiens
ttctttttcctctgcccagaacatgtgggtgtagctgatgaggagtgagtaggagagagaaagaatatgaagtcagaagtatagctaagaggcagattctactatattttgtaggtcaagtaaaaaaaaattggtagagtattaatataatgctgtcttgaattttttaaaaagtatttaaattttaagaggacagatgtaatatagtataatacagtagcaagaagaacattttactttaatccaaaaaataaacaaaaaatatcaaaggcaagtaaacatcaggcttccttacacgaaccacattattaacatycctgagcctattttccattttgtaaaatgaggacagcactgtctgaaggcagaggtgagaacaatgcattcctaaaagctaagagttaaaccttaaatctggcacatatcacatgaaatctcttctatatgaaaaacacctcgggaaaggaaaattgttccctatgccagaagcaggaaggaaaataatctggctgttactatatatgataaaaatcacatatctcaagaaagaatcagaaaatgaatcaatcagcaaggggtataagagaacagaaggcataaa

SEQ ID NO: 867040 - DNA, 626 bp, Homo sapiens
tcagattccatcaatgagtgagatcatgcagcatttgtctttcatttgtaaatgctcacatgcactaggatctacttttggattctctcttccttgtttccgctttgtctattgccgtggccatatcataatgatttatgagaagaagctttccgtttactaatatattctgaatctctttgacaagtcacttctatttctcccttgagtatccctgaagatttattcttatgtgtctacttaaacatcattttatttaaaaaggactattgagagtctaactctaaacgtgttaaatgtatatattaagtttggaagaactgatatttttaaagtattaaatattctaaggaaagaccaaatattgtgtaatgtcattagattttataatttccttcaggcagatcttacatcggtctwgttaaattgattagtaaataatgtattgatattttgctactgagagtagactatttctctttttaggaactgagttcacttgttctattttagacatggccttgctgggcaccaattttccctgattttctttccttgtataattacagatagagttgaccaaagtgaagtttcatggaatattcgaggtagaaatgaagatgcag

SEQ ID NO: 867041 - DNA, 659 bp, Homo sapiens
aaggaagtcataaagcaaggataaagatgtgagcaaatgccaggttgccaattcaagaataaagagagaattttagcatggaatcagaaggcctgggtttgatcccaacttctgaacttaccagctttctgaattttcttaggaagaatctcaacttcctagtgaattttaaagaccttcccaamtttgagggtccacaactcataagcacaattatttttaaagcagacattgcagcaacagaagttagcagattattcagtgtttttatgtgttattcatgaagcattgattcaactgacattttgaaattatgctttgtatttgggactgtgctagatgctagacacatgaatataagcaaaaaactgtttagctatagagaagctctcaattcaccaggaaaagagaatatgtagggaagctatacattactatacattatgataaataaaactttgagtgaagaacaaagtgacacaaaataaaatcaggctacttttaggaagaaggtggcacctgaaattgggtttttgagacctttctttctaaacagactttgtttacattatcaatgaagtttataaaatattgaaatgactcaagtatatgagtaagaagtattaacagtgtaaaaataacatttttaattttagaga

SEQ ID NO: 867042 - DNA, 614 bp, Homo sapiens
gtattaatagtataaagacagaaggcaagccaaagagaattatttctacacattttgtagaagaaatagttgccatcgtaaaaaaaaaaaaaaaaaaaaaaaaaaacagaattgaaagaagcaataaaaggagttaacttgtactaatttggaagttacacctcatactattgttttaatctaccagctttgatttcccatctggtaacagcatgttgattctccttagcctccttttccagctctgactccatattagtctggactcctgcagtcaaggatactttctgggttagattctctcaraagctgattctaagccaagaaattgattgcaaatgatttctttaggaggtgcttcccaaataatccacaagaaagaggggggagaaagatagggaagaggaggaagtcatacaagcatgtgatttagggtaaagttctaccctgtttcatgccagagacagagagctctgaagtataaagctgcaaattagagtttgttttgcctcacagcaagggagcttgtcttttatatctcagtcttgtaatttactatgggctgacccaaaaccaatatagacttacagacattctttcttttccatgatgtc

SEQ ID NO: 867043 - DNA, 614 bp, Homo sapiens
gtattaatagtataaagacagaaggcaagccaaagagaattatttctacacattttgtagaagaaatagttgccatcgtaaaaaaaaaaaaaaaaaaaaaaaaaaacagaattgaaagaagcaataaaaggagttaacttgtactaatttggaagttacacctcatactattgttttaatctaccagctttgatttcccatctggtaacagcatgttgattctccttagcctccttttccagctctgactccatattagtctggactcctgcagtcaaggatactttctgggttagattctctcagaagctgattctaagccaagaaattgattgcaaatgatttctttaggaggtgcttcccaaataatccacaagaaagrggggggagaaagatagggaagaggaggaagtcatacaagcatgtgatttagggtaaagttctaccctgtttcatgccagagacagagagctctgaagtataaagctgcaaattagagtttgttttgcctcacagcaagggagcttgtcttttatatctcagtcttgtaatttactatgggctgacccaaaaccaatatagacttacagacattctttcttttccatgatgtc

SEQ ID NO: 867044 - DNA, 631 bp, Homo sapiens
aaataaaaatgaagaaataaactgtctactctgtgacccacactgggttaagtactagtcataagaaatatctttttctatttggttctgttttatagtttttatttcccttctgagatgttataacttcaaacatcatgagcatattttctttacattcactaagcatagtcataaaacttgctttaaaatacttgtctagtttttaacattttggtcatgagggagtcagtctccactgattatctttttgcttcaaagtagatcacaatttcctggttctcatacgtgaagaaattttggattgtgtcctgaatattgtttgttgtggaccctaggatctactatattcttccaaagagtgttttcctttattgtctattttaaaaggcaattaatgtgtttggactcaagctcyaaactctaccttttgaatggttgttcaaatctcagttcagttcttttgtccttagctttagagcctgaaggtcaccctactcatgcatggttgatgggccagccagagatttgagcaaactttatactcagaatttagggctttctgtttctggttctctcttttctgggatttcttttctgttttctaacagctgtggttgtctcaaactgt

SEQ ID NO: 867045 - DNA, 609 bp, Homo sapiens
aaaggtacggttttcttagtatgagccactaaaggccctataagccacatacattatgacaaaatataatgaatccataaaccactatattgatctatataccaagctgtactgaaccttaaattgaatgggacattctgattttatagtatcttaaagagaactcagatgtaagtctggrcataaacagaaaaaaaaaatccagtctggctggttttgctattccttaactgttgagcagatgactttgaattatttggcagaattcattgcaaatattttctctattcttcttccttaaaaaccacctcacaaacaaggtgctatggtgttaaacttttctaatataactaatttaaaagtgagcaattcattcaagcacatgtggaaggatttgtctgcaccagtggttgccttgtccttgaaaacagaggtacccatccccataaattctctttcaggcagtttaagtatccccttttgtaggttggagcatcacagtcacaagccaagtctaaacagaacagacaaggaaggatatgcttagttcaaggaagataaatttgttttctctccatcactctctactcagcactgagatagctccaa

SEQ ID NO: 867046 - DNA, 609 bp, Homo sapiens
aaaggtacggttttcttagtatgagccactaaaggccctataagccacatacattatgacaaaatataatgaatccataaaccactatattgatctatataccaagctgtactgaaccttaaattgaatgggacattctgattttatagtatcttaaagagaactcagatgtaagtctgggcataaacagaaaaaaaaaatccagtctggctggttttgctattccttaactgttgagcagatgactttgaattatttggcagaattcattgcaaatattttctctattcttcttccttaaaaaccacctcacaaacaaggtgytatggtgttaaacttttctaatataactaatttaaaagtgagcaattcattcaagcacatgtggaaggatttgtctgcaccagtggttgccttgtccttgaaaacagaggtacccatccccataaattctctttcaggcagtttaagtatccccttttgtaggttggagcatcacagtcacaagccaagtctaaacagaacagacaaggaaggatatgcttagttcaaggaagataaatttgttttctctccatcactctctactcagcactgagatagctccaa

SEQ ID NO: 867047 - DNA, 635 bp, Homo sapiens
aatgacaccccaatataaatgagcacatctacctcccaaatctgggcttctaaataccattctccactaaaatgaactttgtggtccttgagaaaatagattttaggtttggggcagggcaagtacaagcctagatcataatgttgtgacagaaagtgctccaagaagttagaaacatgtcaaaaagacacagaaaccagattgaagagttccacttggccaaactgggagcaaattaaacatcaaaacaaataatgacaataatggatggtaatgcatggaattaagtaagaaaatatatctcaatacagatacaaataaacaactagattaaaagtttgatgagtaacaggatatttacatagttaaaagytccttcccacaataaacttatctactaagcgaaaaggtaagtggaaaagcctgacagacatcatcagaatcaaattatcaaaattagcatcattaatagttgggataataaaaactgtacaccatttgacaggatacagtgagaaaaacacatcattacttctgatgttcttgtcaaagatacatgacctgaatctagtcataatgaaaaactcaaattcagaggcattctactacaaaatactgacctgtaatctccaaaa

SEQ ID NO: 867048 - DNA, 652 bp, Homo sapiens
tacattccaaggaccccagtggatacctgaaactgtggatagcactgaacctgatacatactatgtttctttctatacatacatacctatggtattttaatttataaattaggcaccataagagattagcaaaaataactaataatatgggcaattagaataaaatgctataatagaaaagtatgtgaatgtggtctgtctcaaaatatcttactgtgctatactgtgggtaaccaaaacctgggaaagtaaaccatacataaagtggggggactactgtaagtaactggcttgcatttgtgtgtcacattacacttttattgtatagcacccctaaaatctccagmgaaaaaggccattattaaccattatcctgagcacaaaacagaaaaccagataccatgtgttctcacttaaaagcgggaactaaacattgggtactcatggacataaagatggcaacaataaacaatggaaaccatgaacggggcaaggaagggaaggcaggaagggttgaaaaactaactattgggtactatgtgcactacctgggtgacaggattaactgtactccaaatctcagcatcatgcaatatacccatgtaacaaacctgcacacgtatcccctgaatctaaagttgcaattattaga

SEQ ID NO: 867049 - DNA, 627 bp, Homo sapiens
aattctatgacccttgtgcaagtgacttcagctctctaaaccagagtcctaattttttaaattaagaacaaaactcccatctagtatggctgctgtgaggaataaacgagatactgtacataaaaaatacctaagacagtatcctagtaaaagtgtatttctcctttctatccttttttaaatctattagttgatttgctttggggctatagaataacatccaaggtgacaggtgcctgaaactcaacaaaaaacaactattaygaaaagggaagtattaaatattttatttagtctacctatagaaaaaagtctggattaacgtatatcaaggacttaacagtatttttgtttatgttataggatattttagtccattcaggctgctataacaaaataccataaattgcatggcttgtaaacaacaaaaatgtatttctcatagttttggagactggggagtccaagataaagcaccagcagatctggcatctagtaagggcctgctttctagttcacagatactgttttctaactgtatccctgcaaggttagaggttagaggttagaggggcaaggtagcttccttagacctctttcataagagcactaatcatcttccaaagg

SEQ ID NO: 867050 - DNA, 602 bp, Homo sapiens
tgcttgggaggttgaggcaagagaattgcttgaacccgggtggcggaggttgcaatgagccgagattgcaccccagcctgggcgacaagatcaaaactcagtctcaaaaaaaaaaaaaaagaaaagaaaagaaagaaaaaaaggaaatggtggttaatagcgaatacccagcggctgattttgttttgcattatcacttgggcaacgtaaaaagcaaattcagaaattttggatatcytaaggcaagatttggttatttctgcaatactaagtgaaatacatagtaccactaaaactcctaacagggaagtgagtgagaagcaacaagagattatgaaagtatactactggttcattattgaggatatagtatttttagtttttaaaattctatttttttctttttatagtttatttttgtccactgaaatttcctaatttttaatgtactgtgtacattcctttatgttcttgacacagttctcatagctggtttaaatttgtttaattggaacatttgggtcatttcatggtagatcttttggtttcaggttggtgtgatatggagaccccagattttgttatttttctctgaaaggtgt

SEQ ID NO: 867051 - DNA, 592 bp, Homo sapiens
tccatgctccttacatgtcagatcttaaaccagaagtcatcaactgatttttgacaagttgccaaagtaattcaatgaagatacctgtcatttgaacaaacaactagaattctatatgaaaaataaatgaataccaaacagtacctcatccaagaaaattaaattaattgaaaatgagtcatgaggtgaaacatgaaaactaaaaattaaaaatatttaggagaaacataaaatcctcrtaatttgaggcaggtagaaaattattagaaatggcaccacaaaactcaaactgtaaaaatatattgaaaaattggactctattaaaataaaaaatatctggtcttcagaagacgctatttgatatttttaacacggcatagactgtgagatatatatttgagaatatatatatgtatatacatacacatacacatacaaaaagaactcatgtggttcaaaaacaagaaaaatagggacttggctagaacaagcactttataaaataaaatagacaaatggtaaataagcaaacactaaagatgatcaatatcattaattagggaaatgcaaattaaaaccacaatgatatata

SEQ ID NO: 867052 - DNA, 635 bp, Homo sapiens
tgatttaggatataaagaggtggaattgtatctggaaggagagaagtctgaatagagattgtgtaaacagcagcatgaatatatacatatatatttgtgcatatatatatgtgtgtgtatatatgttatatatatgtgtgtgtgtatatatatatakagagagagagagaaagagagagagagagagagagagagagacagtttaagtggaaagtctgaagtggaaagaaagaaatcagaggtaaatcatggcatctagtcctatgcctgcccccaccgaactaaagaaggtgataaagtcttcttaaaaatggaatcaacaggaataggatgagtcatttaaggagagtcacaaacgcatgtaacacagaaagtactgcccatagggtgagctaactgtagtcagaaatcatatctgggtccctcgctctacataaaatatcttttactgaaaagctgcttagttcccattgcctagtgaataagtggtttggatttatagaggaagaaagtgagaagtcttaattcgggtagtctgattatgtcattctttcacatacagaatcaagtctaaactcttcagcatggctcacaatatctctcatgatctggccacaacctaactttctagcctg

SEQ ID NO: 867053 - DNA, 576 bp, Homo sapiens
actgtattgagacaagcgctcttagataccacaggtataagtgtaagtacatacaacgactataaaagaaaattgagaaataacagtcaagcatacaaattcatttactattgccccagaaatctcacttcaggaaatatattcataaataaacctgaatcgacttaaaatgatatatgaacaaggttatttattagaagatatttttcaaaagccaaaaaatttaaccactcaagtggatatctatgagaatgtagttaaagaaaatatgatttagctctaacatagactatcaagctgcaaaaataaaaaaaaatgtagaaactctgttctaattgactaacsctgcataacaaaccattttaaacttactgacataaaataaccactttattattttcataaattctctctgggccaagaattttaaaaaggcctcatgaggacagcttatctctgttccaggacatatggggccttaactgggaaggcttgaaggctggctgtcctctttagctggaggctaaaatcacgggaaggtttgctcacttacatatgtggtgcttgatgctggct

SEQ ID NO: 867054 - DNA, 619 bp, Homo sapiens
gttcaaaccaaatccatttagaggtgcacttacaacagagctgcaacagcccaagggaaagctgatgagcagcacaaagggagggaaatggcccacattctctggactagaaaaagagtcctaagtatgctaataacttagaaaacagcagtttatagatggcataggaggttgctaacaaacaagtatggratttgaatggtctctaatggggaatgtgtcccagttgaagggcattctagaggaagacatttcaggtgcttccattgtccatggacttcaagcaggtcctcaccaggaatcaatctgactgaccgaagctaactttgaacctgcccattgcccagtttaccctatggagtgaaagaagagtatgttccagctacagcatctcattaacattcagtgttcattcatacatggagaaatgtcttactgagcacattctctgtgccctttaccttctcggggaagcaaagatgaatcaggtcccatcactgatacccagaccaccaccagtgtggattaagttacttcgtccatcaatgtcagtgtcataaatgagctactttatttgtaatccctcaattccttaatcaatacagtgtgagtgtgtgtg

SEQ ID NO: 867055 - DNA, 619 bp, Homo sapiens
gttcaaaccaaatccatttagaggtgcacttacaacagagctgcaacagcccaagggaaagctgatgagcagcacaaagggagggaaatggcccacattctctggactagaaaaagagtcctaagtatgctaataacttagaaaacagcagtttatagatggcataggaggttgctaacaaacaagtatggaatttgaatggtctstaatggggaatgtgtcccagttgaagggcattctagaggaagacatttcaggtgcttccattgtccatggacttcaagcaggtcctcaccaggaatcaatctgactgaccgaagctaactttgaacctgcccattgcccagtttaccctatggagtgaaagaagagtatgttccagctacagcatctcattaacattcagtgttcattcatacatggagaaatgtcttactgagcacattctctgtgccctttaccttctcggggaagcaaagatgaatcaggtcccatcactgatacccagaccaccaccagtgtggattaagttacttcgtccatcaatgtcagtgtcataaatgagctactttatttgtaatccctcaattccttaatcaatacagtgtgagtgtgtgtg

SEQ ID NO: 867056 - DNA, 692 bp, Homo sapiens
agtatggaatttgaatggtctctaatggggaatgtgtcccagttgaagggcattctagaggaagacatttcaggtgcttccattgtccatggacttcaagcaggtcctcaccaggaatcaatctgactgaccgaagctaactttgaacctgcccattgcccagtttaccctatggagtgaaagaagagtatgttccagctacagcatctcattaacattcagtgttcattcatacatggagaaatgtcttactgagcacattctctgtgccctttaccttctcggggaagcaaagatgaatcaggtcccatcactgatacccagaccaccaccagtgtggattaagttacttcgtccatcaatgtcagtgtcataaatgagctactttatttgtaatccctcaattccttaatcaatacagtgtgagtgtgtgtgtgtgtgtgtgtgtgtgttaatttccmcctgtgagtctaatattttaaacactttttttttgtttccatatattaatcactgctgctgctgagcaagttaaggggcaggcttccacaaagtagctcatgtcaaattcctgtaactaatgtttcacctatagtcaaagcccacgatagggttgagagggaagggcagagaaaagtacccgtagacaaggcgacagaaactggaagctactttagcagaaattagcttgt

SEQ ID NO: 867057 - DNA, 692 bp, Homo sapiens
agtatggaatttgaatggtctctaatggggaatgtgtcccagttgaagggcattctagaggaagacatttcaggtgcttccattgtccatggacttcaagcaggtcctcaccaggaatcaatctgactgaccgaagctaactttgaacctgcccattgcccagtttaccctatggagtgaaagaagagtatgttccagctacagcatctcattaacattcagtgttcattcatacatggagaaatgtcttactgagcacattctctgtgccctttaccttctcggggaagcaaagatgaatcaggtcccatcactgatacccagaccaccaccagtgtggattaagttacttcgtccatcaatgtcagtgtcataaatgagctactttatttgtaatccctcaattccttaatcaatacagtgtgagtgtgtgtgtgtgtgtgtgtgtgtgttaatttccacctgtgagtctaatattttaaacactttttttttgtttccatatattaatcactgctgctgctgagcragttaaggggcaggcttccacaaagtagctcatgtcaaattcctgtaactaatgtttcacctatagtcaaagcccacgatagggttgagagggaagggcagagaaaagtacccgtagacaaggcgacagaaactggaagctactttagcagaaattagcttgt

SEQ ID NO: 867058 - DNA, 520 bp, Homo sapiens
tattagctggatactcacttgccagttaaaggttatatgtttcagcttctctgcagttaggtgtcagcctagtcaatgggatgcaagcagaaatagggtgagaaaagtctgagaaatatttattaaaggtgtgaggcatgccttttttggcattttttcttctgttctactgactgaaatttggatacattgactgaaacaaaggcagctttagggaacaatgagatgtcctraaaatggaagcctaatgtcatgtcaggtaaagtaaacacctaatccatgtaggatggcttttaggacataactcatcctccctaagacaagtaggtccagccctgtttatcactcatcagtcagtcatttgctatgggcttccctgagagggaatatgccatttatgggaaaggttgggatcagttctcctgaaaagaggggcagtgagtttggattacccatagcaggctgagtaatgggtgcactgaaaggaatttagatggaacatcacaatatctacaactat

SEQ ID NO: 867059 - DNA, 495 bp, Homo sapiens
aattacatatttaaaaaattactatgaatgtctgaatgtcagtcacatataactataaaatcagaagtagcaaagaacccataattaaaacaggattaagaggtcggatcacagccagatccattgacgcggcattttcaacccctccccaaatagagaaaatccacakctaacttttaaagaaatagttctttcatttaattttcttataagtgaagttgtctgtgaagattttgacaatatgttgttcaaagaaatgaaactttatggcttaataaatctattacaagttagctctttcagctaactcattatattattacctaaaaaacaaatcccattatttgattccaatttccattggaatgccagagtttcgtactaaatgtaaactattagccttcacctttgtctttcaaaatgcccaatttagaatccataacatttcaaaaccatttatgtttccaggcctctctgggatttgcttaatttcag

SEQ ID NO: 867060 - DNA, 476 bp, Homo sapiens
tgctgactcatcctgcagatcctgggatgtgcctgtctccatggccatgtgagccaattccttatcataaatctgttcacacacacacacacacacacacacacacacacacacacacacaacttggttctgtttctctgcagaaccytgagaaatacacaaggcaaggacttgctccaagctctgccccaggcactagactgatgtggaggtagttgtagcacagctgacatgcccctggggatgaagcttgaagcagacctgctaagtaggtgaccagggggaaagaagcacaaaggcagcgcctgcactgtgcccctgcaccacctccaaccctaggggcccattgatttgttagtggtggcagcagtcaggcattcaagacttgctaagagaaacagaacagaaggactgtaatgtaaattggggacaatggacatcctgggacaacttcctttctgttggctctcatcttc

SEQ ID NO: 867061 - DNA, 592 bp, Homo sapiens
agaaattatgcccccagattcaagtgttgaatattactgggaaaaaaatgaaataagaatgattgtgattttaatatattctgatctctgttttgagtgattcaaatagaagagcacaacagcaaaggttatttatggagccctcactttgtgctctgcattctgtgtagtacatacattatttcatttaatcttcacaattcacaccatcccataaggtatttatctccactttacaggtggagatgcttaggatctgtcttattccattcagactgctattgcaaaataccatagactgggtagcttacagataacagaaatttacatctcagaattcgggagcctaggaagtccaacatccaggcagattcaatayctgatgaaagccagctttcggattcgttgaggatgccttctctctgttctcacatggtggaagggcaaggtagctctctagagcctgctttataaaggcactgatttcattcataaggattctgccctcatgtctaatcacatcctgaaggctcctcctcctaataccatgacattggtaatgagttttcaatgtatacattttggaaggaca

SEQ ID NO: 867062 - DNA, 618 bp, Homo sapiens
cttggccctttccatgatggaataggtccagtataattaacctgccaccaggtagctggatgatcaccccaaggaatggtgccatatgaaggtctcagtgttggtctctgctgctggcaaactggacactcagcagtggctgtagccagttcatctttgatgagtgcaagtccatgttgctgagcccatgtgtaacctccatccctaccatcatggccactttgttcatgagcccattagkcgatgacaagggtggctagggaaagaggctgagttgtgtttacagaatgggtcatgctctctgctcgattattagaatcctcctctgctgaggtcacccatttgtgagcactcacaggggatacaaatatcttcacagtttttgaccactcagagaggtccatctgcatatgttttccccaaatttgtcaccaattttccaatcatgcttcttccaagtccctgaccatccagccaaaccattgaatacagccatgaatcagtacataattacataatggccatttttccttctgtacaaagtgcacaaccaggtggactgctcaaagttctgcccactgggaagatttcccttcactgctgtccttcagggatatc

SEQ ID NO: 867063 - DNA, 631 bp, Homo sapiens
gtaaatcatgtgttatttataccatagtatagtttcattcatcaagtaactcatttgttggtgcaataattctaaattaaatatattcttccagggctgctgtctgtacaagcccaaagtcttcgtgttatatttacataaatacaacaacaatcaacttccaaagattcaaggaaggattctccatactattttttagytcaaatcgaagtatttcaggcctaaatattcacttaaagttgctataaaggtgagagtttcatgtctaacccatggatacgtatacagcattttaagctgattactcaagattcataaatctttccctaaaaaagttaaacaagagaaaatcctagccaaatccaaactggtaaacatttctacaaatttttacaacttcattttgctcatcttgctgtcttaataaatcaaaacacaacaagaaattttgaaattcaccactatgataatctttatgatgactgaaggtgtaaatttaaatgctaaagtaaaaactccaggtaaggaatttgctgttttctcacacaatttttctcccttgcaaaatatccccctaccactcaattgctctgcaatcaaatgcacaggaatgaaacttagccttttaaaa

SEQ ID NO: 867064 - DNA, 561 bp, Homo sapiens
tgaagtagaagttcccttaattttagtcagatttgtctcccatcctctgacacacaaatgtctcaccaataagtccagtgtgtttgctatttcttgctcgctggatccaatcagcataatgtcttcaatgtaatggaccactgtgatatcttgtggaagcagaaagcgatcaagttctctccaaataagattatgacacaaagcctgagagttgatatacccctgaggtaggagagtaaaggtatattgctggctttgccagctgaaggcaaatttcttctgatgggccttatggacaasaatggagaaaaaggcatttaccaagtcaatggctgcataccaggtaccaggagatgtgttaatttgctcaagcaatgaaaccacatctggtacggcagctgcaattggagtcaccaattggttaagcttgtttaagcttggttaagcttatgatgatccactgccattcttcaaatctatctgtcttctgcacaggccaaataggagagttgaatggggatttggtgggaatcaccacacttgtgtctttcaagtccttga

SEQ ID NO: 867065 - DNA, 631 bp, Homo sapiens
gtaaatcatgtgttatttataccatagtatagtttcattcatcaagtaactcatttgttggtgcaataattctaaattaaatatattcttccagggctgctgtctgtacaagcccaaagtcttcgtgttatatttacataaatacaacaacaatcaacttccaaagattcaaggaaggattctccatactattttttagttcaaatcgaagtatttcaggcctaaatattyacttaaagttgctataaaggtgagagtttcatgtctaacccatggatacgtatacagcattttaagctgattactcaagattcataaatctttccctaaaaaagttaaacaagagaaaatcctagccaaatccaaactggtaaacatttctacaaatttttacaacttcattttgctcatcttgctgtcttaataaatcaaaacacaacaagaaattttgaaattcaccactatgataatctttatgatgactgaaggtgtaaatttaaatgctaaagtaaaaactccaggtaaggaatttgctgttttctcacacaatttttctcccttgcaaaatatccccctaccactcaattgctctgcaatcaaatgcacaggaatgaaacttagccttttaaaa

SEQ ID NO: 867066 - DNA, 631 bp, Homo sapiens
gtaaatcatgtgttatttataccatagtatagtttcattcatcaagtaactcatttgttggtgcaataattctaaattaaatatattcttccagggctgctgtctgtacaagcccaaagtcttcgtgttatatttacataaatacaacaacaatcaacttccaaagattcaaggaaggattctccatactattttttagttcaaatcgaagtatttcaggcctaaatattcacttaaagttgctataaaggtgagagtttcatgtctaacccatggatasgtatacagcattttaagctgattactcaagattcataaatctttccctaaaaaagttaaacaagagaaaatcctagccaaatccaaactggtaaacatttctacaaatttttacaacttcattttgctcatcttgctgtcttaataaatcaaaacacaacaagaaattttgaaattcaccactatgataatctttatgatgactgaaggtgtaaatttaaatgctaaagtaaaaactccaggtaaggaatttgctgttttctcacacaatttttctcccttgcaaaatatccccctaccactcaattgctctgcaatcaaatgcacaggaatgaaacttagccttttaaaa

SEQ ID NO: 867067 - DNA, 631 bp, Homo sapiens
gtaaatcatgtgttatttataccatagtatagtttcattcatcaagtaactcatttgttggtgcaataattctaaattaaatatattcttccagggctgctgtctgtacaagcccaaagtcttcgtgttatatttacataaatacaacaacaatcaacttccaaagattcaaggaaggattctccatactattttttagttcaaatcgaagtatttcaggcctaaatattcacttaaagttgctataaaggtgagagtttcatgtctaacccatggatacgtatacagcattttaagctgatwactcaagattcataaatctttccctaaaaaagttaaacaagagaaaatcctagccaaatccaaactggtaaacatttctacaaatttttacaacttcattttgctcatcttgctgtcttaataaatcaaaacacaacaagaaattttgaaattcaccactatgataatctttatgatgactgaaggtgtaaatttaaatgctaaagtaaaaactccaggtaaggaatttgctgttttctcacacaatttttctcccttgcaaaatatccccctaccactcaattgctctgcaatcaaatgcacaggaatgaaacttagccttttaaaa

SEQ ID NO: 867068 - DNA, 659 bp, Homo sapiens
aaaatgtttcagataattgaagtttctaagcatttctccccagtcctcttcctttatttttcccctgagtgaacattgtcttgaagccggtattcatcattctcatgcatgttttcaatctatgattactcatgtatatatacagaaacattatacagaagggttcttcctgttttcaaactttacttaaatagtgtaatttgcccatcattaggacacttgatttttatgctcagtattctgtttttgaggtgtcataacatagttctcgttcattcatctgaaccatttatagtattctgtgaagtcataacatttatctgttctttttaatggacatttaggtatttttagtcttcactatgacaagcagcattgccatgaacaycttacttgctatcctgtgctataagaactttctctaggatgtataaatagtgtgagggttaaggccataacacacattgctgtactgtgctaaattctactgcaatctcctcagtgaacactcctactagcataaatgagaattttcattgctccacatccttatcaactaattgaattgtaaaactagattttaatttttcaaattccatggttttgaaaggaatttcagttttttatttgcatttccccaaagaatcagtgagattgag

SEQ ID NO: 867069 - DNA, 682 bp, Homo sapiens
ggtttacttctggaatctctattatgtcacactgacattgatatttgcctttagtgccattttttaaagcaaaaccacaatatccatattatactagctttataataagtttggaagtcagatagtgtaagtgctcttttttcttctttttcaaacgtttttgcctattctagatcctttgtgtttccatatacattttagaatctagttagcaagtactgccatcctccccaaacaacagcctgcagggattttagttaggattacattgaaactatgaactgatttagggagattgatagctcaacaacggtaaaacttacaatgcaagaacttgatacatctcaccatttatttataatctcttaaatttctcttagcaatatattatagttttaatgtaaaggtatttaacatattgtcaaatttttctcwaaaatttttgtatttttgaagctattttaaatagaattctctttaaattcccatttctgcctgtttgttgctactatatggaaatataagttttacttttctgttaatttttatatattgatcttatatcttgcacccttcctaaattcactaactttttatactttttatagatttcttaggttttatatatggataatcatgttatctgaaaataaagacagttttactttcttttttcaaatat

SEQ ID NO: 867070 - DNA, 612 bp, Homo sapiens
gtgtggccaaagtggagcctgaggtagttaaacaaatacttatattcataaatgaggattaggttgagtgggtgacaaatccattatctttgaacatttaaaaaatatatcttaagtgtaagttataagattttaaaagttggttctgaaaatcgtactatattgtgatactgagaagtaactccataaytgatagcttatgttgtatgtgggggtggaaggacccactcgaagggtgtttaagctgaaccaagaaagaaacaatctgattaaaaaacacagacgaagatgtgtagcttcatttctcattggaaactttataagaaagatttataaagaggaaattttcttggctcacactggggagtaggtgggctttttggaaagctgccggtaaagaagtaatgtttaggaatacagaaaaacagaattagcactcacatcctgcaagccatgcacctcccatgtttgaagcttctgttttctccccacctccccacgttgctcacttgagtctactcatcctaggtagggccaagtaattcactccctctagtgtttttctggagattgtagtaacagagctaataaacagaattgtacttagatgct

SEQ ID NO: 867071 - DNA, 612 bp, Homo sapiens
gtgtggccaaagtggagcctgaggtagttaaacaaatacttatattcataaatgaggattaggttgagtgggtgacaaatccattatctttgaacatttaaaaaatatatcttaagtgtaagttataagattttaaaagttggttctgaaaatcgtactatattgtgatactgagaagtaactccataactgatagcttatgttgtaygtgggggtggaaggacccactcgaagggtgtttaagctgaaccaagaaagaaacaatctgattaaaaaacacagacgaagatgtgtagcttcatttctcattggaaactttataagaaagatttataaagaggaaattttcttggctcacactggggagtaggtgggctttttggaaagctgccggtaaagaagtaatgtttaggaatacagaaaaacagaattagcactcacatcctgcaagccatgcacctcccatgtttgaagcttctgttttctccccacctccccacgttgctcacttgagtctactcatcctaggtagggccaagtaattcactccctctagtgtttttctggagattgtagtaacagagctaataaacagaattgtacttagatgct

SEQ ID NO: 867072 - DNA, 652 bp, Homo sapiens
ctttggatgaatgagtaagcaaatgattcagttgaacacctgtgatattactaaaagatataagaactaagcaagatcaccaaaattaagttggataaagcatattaaaacactgaatttagaggcaggagatgtgggatgcagatggaacttttgtttttatgtagagtcacagggtacatgtgcaggagtattacatggatatattgcataatggtgaggtttggacttctagtgtacctatcacccaaatagtgaatattatacccaataggtaatttttcagtgctcacctccctcctcccttctggtgtcccatgtctgttacattggtctgtactggactctgtttttgactcagaggaatgttggatgggtcactgccttaccctcagcttgagtttcctcatctataaaatgagtatggttgtatgaaacggtttctgttggcatctaacaaagtataattccacaattcmgacattataggagtggtttttgtgaaacctatgatatgttcacagaattctggcatacttaatgctattttatggattatcttgataaaaatgattttcactctcaaattgggagaatatgtttgttgaattggttgcatgtttgaaatagtcatgataaacttgtggtttga

SEQ ID NO: 867073 - DNA, 611 bp, Homo sapiens
caatttgttgacatacaattattcatagtaccctcttataatcctttttatttctataaactcagttgctattttacctctttcatttatgattttagctgagtctttctttccttaggcaatctagctaaagacttgtcaatttcgttgatttttttttttttttttttttttttttttaacgaaccaactcttggttttcttgattttctctactgtttttattctctattttattcctggtctaatctttattatttccttctacttaatacctttcagtttgttctttctctagttccctaaggkgtaaagttaagttgttggtataagatctttcttatttattaatgaataatttacaactataaattttactcttaacattgtttttgttgtatcccttaagttttgggaagtttggtaagttccctcattatttcttctttgacccataagttgatagtatattgtttaattttcacatatttgagggtgtttttgtttttccttctgctattgatttctagttttatcccattgtaatttgaaaatatattttgtatatattcagacttttaaaatttattaagactcattttgtggcctaa

SEQ ID NO: 867074 - DNA, 647 bp, Homo sapiens
ggcatggacacaatgcagccaagtttttggtaaggcataacaaaagtgacctttgctctagttcccagtaaattcctcatttccatctgagacctcatcagcctggccttcatagtccatattaccattgtccatcagccttttagtcacaaccatttaaccaatctctaagaagttccaaactctccttaatcttcctatcttcttctgagccttctaaactcttctagcctctgtccacaaaaaagaggctctgtcttcagcctctgtgtggaactggtgtcttccagcactagttccaaaggtgcttccgtattttcaggtataacgccccactccttggtaccaattttctgtgttaggacattcttccactgctrtaaagaaattcctgagagtaggtaatttataaaaaaaaaaaaaaaaaaaaaaaaaagaggtttaactggctcatggttctgcagactttacaggaagcatagtggcatctgtttttgggaaggcctgaagaagcttccaatcatgattgaaagcaaaataagtgcaggcacatcacaaagtgaaggcaggagaaaaataatgtgtatgtgttgggcagggtgcaggggagtgacacacacttttaaatgaccagatcttgcaagaat

SEQ ID NO: 867075 - DNA, 636 bp, Homo sapiens
gaattaaaactaagagctcctaaaaatatacagatgcttcttgacttacagtggggttcatatcacaataaacccatcataagctgaaaatatgttaagttggaaatgcatttaatacacctaacctgctgaacataatagcttagcttagcatgctttaaatttgttctgaacatttacattagcttacagctgggcaaaatcagctaacacaaagcctactttataataaagtgttgaatttattatataatttattgactgcttatactgaaagtgaaaaacggaatggttgtataggtacttaaaatacagtgtctattgaatgtttattgcttttacacaatcctaaagttgaaaaatcataagtccaaccactgtaagtaagtcaggggccatctgtttaggatcccaatgagctacatcttcaattagtcatctacaaaaaaaaaaaaatcatgccacagaggargcagagaaattatgtcttggcttttggctgtgggtggagaaggaggaggagaagataaaattatatgctaagaattcgtaatcacagattatgttttctatgaccttgagtttcaaatccacagaaactgtattgtccctaaaactacatatgagaatttaatt

SEQ ID NO: 867076 - DNA, 682 bp, Homo sapiens
aagaggccatatgtaattagtaggaacttatataattttctgtaagaaaaacaaaaatttcattgttgcagaaataatgggaaaaataaaaattagatcagagttgttgaacttaaatgttttatttttaattaagagaaaggaagtttttttgtcattttgttgatctaaggagagaaatgtcctaagtgctataatgtttggagaatataaagttaattttggagatcactttttttcatataggtcatatgcggaaaagacctgatgtattaatgatggttattctttttttcttcctccagagtgaagggaatattttgattgcccaaagaaatgaaatgcagcagaagctgtacatgtcagtagaagattttattctggaagttgatgagtcatctcttaataaacgcttaaaaacattgcaggttggaattaaaaatatattaaatatacgttaaattstaagtttatttaagaagtgaaattagcatttaccttaagactttagattgttctgtgatggttgcaaaagtttttcctgtttcctgaattctgatttctttttaatgggattaaaagtttatattaatatattttgtggctatgtttatatgcatatctatcttgcaaacaaggtaaaatggctagggactccagtattcactggggaaattaatgg

SEQ ID NO: 867077 - DNA, 682 bp, Homo sapiens
aagaggccatatgtaattagtaggaacttatataattttctgtaagaaaaacaaaaatttcattgttgcagaaataatgggaaaaataaaaattagatcagagttgttgaacttaaatgttttatttttaattaagagaaaggaagtttttttgtcattttgttgatctaaggagagaaatgtcctaagtgctataatgtttggagaatataaagttaattttggagatcactttttttcatataggtcatatgcggaaaagacctgatgtattaatgatggttattctttttttcttcctccagagtgaagggaatattttgattgcccaaagaaatgaaatgcagcagaagctgtacatgtcagtagaagattttattctggaagttgatgagtcatctcttaataaacgcttaaaaacattgcaggttggaattaaaaatatattaaatatacgttaaattgtaagtttatttaagaagtgaaattagcatttaccttaagactttagattgttctgtgatggttgcaaaagtttttcytgtttcctgaattctgatttctttttaatgggattaaaagtttatattaatatattttgtggctatgtttatatgcatatctatcttgcaaacaaggtaaaatggctagggactccagtattcactggggaaattaatgg

SEQ ID NO: 867078 - DNA, 620 bp, Homo sapiens
tcccttggaactataagctaccttagttctttgctgttgtgtagttatatgaagggcctagggaagagtgaaagtctggaccacaacttttaagactttggataggtttagggaatagaatggggttatttttatttttaagggtctagcttctgatgttgccatcwgggattatctacttcctctttgcttctctcctgggtggtctgtcctactcttcagcaaacctctattccctctgcctcagctactgctcctttccaggcactaccacccttagatgtaaatgctgccagatattcaggggagaagtgaaggaaagagaatggtcaggggctggccagctcttctgtattggttatcagtttttgcctcatctgtgttcttgtgctgtacttgcataaacctgttgcctcttgatggtgctgctgtttttctttctgatgtgagggagagagaagagcctatgaaaaaagttttcttttcccacaggtaattctgtgctgtgacacagtccttctttcacttgtagggactttgttaattcaatgctaaacaccaaccatcctctgcctaagatttctcagagttttgtgattaaaaacttctgagatctctta

SEQ ID NO: 867079 - DNA, 615 bp, Homo sapiens
tctttttccaaagtcttgagtgtgacaaaaccttatctttgttgatcacataaataaaaataatctccttgttagaaaaacaagagttaagagggattaagtattaagagaaggaagactattcttatcagcccaggggccagcaagcattttctgtaaaggaccagatggtctctgttgcaagtactgagttctgctgctatagcatgaaagcagccatagacagtatgtaaacaaatcagtgtggctcttttccagtagtactttatttatggatattgaaatttgaatttcatgtagtwtgcatgtgcatgaaatagtattccttcagtttgctattaaacatttaaaaatgtgaaaactacccttggcttgcagctgtacaaaaacaagtagtggaatcagtttggtgcagaggccatatagtttgctgatctctgttccaatcagtgtaataaggtcaaaaaaagaaataaaagtcatagagtttgaaaatgaagaaataaagctgtctttatttgcagatgacatgcttaattatgtagaaaatctttgagaatgtacataaaagctactagaacaaatgagtttagaaagatagcagttttaatttca

SEQ ID NO: 867080 - DNA, 574 bp, Homo sapiens
aaagcgggaaagatctaaaatcgacaccctaacatcacaattaaaagatctacagaagcaagaacaaacaaattcaaaagctagtagaagacaagaaataattaagatcagggcagaactgcaggagctggagacatgaaaaacccttcaaaaaatcaatgaatccaggagctggtttcttgaaaagattaacaaaatagatagaccactagccagactaataaagaagaatcaaatagacacaataaaaaatgataaagcagaaatcaccactgatcccacagaaatccaagctaccgtcacagaatrcaataaacacctctatgcaaatcaactagaaaatctagaagaaatggaaaaattcctggacacatacaccctcccaagactaaatcagcaagaagtcgaatccctgaatagaccaacaataagttctgaaattgaggcagttattaatagcctaccaaccaaaaaaagtccaggaccagacagatacacagtcgaattccaccagaggtacaaagaggagctagtaccattctttctgaaactgttccaaacagtagaaaaagag

SEQ ID NO: 867081 - DNA, 620 bp, Homo sapiens
cagtaaaccctggaataaaagcataaatcaattcctttatttcacacataaatattgattagacaataacccrtctggggaagggatatttctttcagtggaagtcggagcagtgaaaattcgtgcttgagaagaaaactatgacagaaaggacattatagtggatcactgtcagaagccatcaaattcttttcccttcatgactggtgtcaccttccatctagcaatttgacacccttgttggagaaggaggaggccagatgagtggtggccagaaacaaagggtagctatcgccagagccctcatccgaaatcccaagattctgcttttggacatggccacctcagctctggacaatgagagtgaagccatggtgcaagaagtgctgagtaaggtttgtggaagtcttagtccattttacaggtccatgtggaaatgcttgtgctgctgcaggaaaggcagctccttgtggggtgggagggatgggagtagttgatactacatgggttcatgcatctagtctgattgtttagaaaatattagctgactacaatcttcctcacagttgaacagaagaaagttgtaatttgtttccaaaagctacacatgtaaaagttta

SEQ ID NO: 867082 - DNA, 595 bp, Homo sapiens
ctttttcctttgactttccatactctttattcaaacctgcctaatagcacttaccacattcttctttaccttagggtgtggtacaggcctcttctataaggtttaaattttttgaaggagaaatctgttattggctagtctttgtgtccccaacatcacctggcattggtttgtaagttgtagatgcccaataagcttctgttgaattaatgaataaatgaatgaacacattgagctaaattatatttcaacaagatactcattcatgcatgtctgaatgcagggtagtatatagcctggagaaaatctcatcagaggccctatttcctcatatcatttgtaaccatgctaaagtgaacacatcaggtatgagagaaagatatcaagaccacaatytaagccagaaggaaagtaaaggaaatagactgttgccaaggcagcaattagcagaaccatgtgggtttggaaagtatttgagccttaggtggttttttgatgaactggtaggacagctttgctccctttctctttctccctccctgactacactctgaatctgggtccaacacttgcaagagtttagggcccagagcaa

SEQ ID NO: 867083 - DNA, 612 bp, Homo sapiens
ttttttctcatcagcctgggtagaagttcacctcctccctgagccccccaacctcccacccaccaaaagaatcagtttttggtttcactgattttctttacatttcattgatttttgctcatgtattattttccttcttctgcttattttggcttcatttgctcttttttttttcttttttctctttttttttttttttttttttttttgaggkggagtcttgctctgtcacccagtctggagtgcaatggcgtgacctcagctcactgcaacttccacttcccaggttcaagtgattctcctgcctcagcctcccgagtagttgggattacaggcgcccgccaccacacctagctaatttttgtatttttagtagagacagggtttcaccacgttggccaggctggtctcgaactcctgacctcaagtgatcctcccacctcggcctcccaaagtgctaggagtataggtgtgagccaccgcacccggcctgctcttctttttttagcttcttaaggtagaagtcaagatcactgacaggacttgagggcaagaatcccaaatagaagggtagtacattttgcataagttttcctttcagtgaatctgctg

SEQ ID NO: 867084 - DNA, 618 bp, Homo sapiens
acagaattattagaactagatagaataatatattttattataaactgggtactacaaaaaggctcaacaaaaaaacattatgatcaccatgaccattaccatatgctgagtaaggaaaaaaacccaaaatcccaaacttggagtggaccattctactattatgacaaaggtattcmgcattaggcacagagctggaaaaatgcaacatttgcatctcagaggcctgggaggttacacaaatgtcgaaatcacacaggcacaagagaaagatgtcaaggcttagggtaaactggaaaggcttgtgccctaacgaccttcaaatttacattatttaaaaattttagtgctagacaagcaaaaatactctgctagtggaatagacctgcagataactatttttcacctcttgaactagggccattattcaagaactgaagctaccctgaaagaaattagaaaacaggattcctacattccaatgtgtcattatttttctctggatttctcatttaataaatacttttttctccttaggggaaaaaaagttacatgttttaattacagcaaattagagcagtgcacaaatgcacaaagagaagaagaaactaatacaatttt

SEQ ID NO: 867085 - DNA, 618 bp, Homo sapiens
acagaattattagaactagatagaataatatattttattataaactgggtactacaaaaaggctcaacaaaaaaacattatgatcaccatgaccattaccatatgctgagtaaggaaaaaaacccaaaatcccaaacttggagtggaccattctactattatgacaaaggtattcagcattaggcacagagctggaaaaatgcaacatktgcatctcagaggcctgggaggttacacaaatgtcgaaatcacacaggcacaagagaaagatgtcaaggcttagggtaaactggaaaggcttgtgccctaacgaccttcaaatttacattatttaaaaattttagtgctagacaagcaaaaatactctgctagtggaatagacctgcagataactatttttcacctcttgaactagggccattattcaagaactgaagctaccctgaaagaaattagaaaacaggattcctacattccaatgtgtcattatttttctctggatttctcatttaataaatacttttttctccttaggggaaaaaaagttacatgttttaattacagcaaattagagcagtgcacaaatgcacaaagagaagaagaaactaatacaatttt

SEQ ID NO: 867086 - DNA, 618 bp, Homo sapiens
acagaattattagaactagatagaataatatattttattataaactgggtactacaaaaaggctcaacaaaaaaacattatgatcaccatgaccattaccatatgctgagtaaggaaaaaaacccaaaatcccaaacttggagtggaccattctactattatgacaaaggtattcagcattaggcacagagctggaaaaatgcaacatttgcatctcagaggcctgggaggttacacaaatgtcgaaatcacamaggcacaagagaaagatgtcaaggcttagggtaaactggaaaggcttgtgccctaacgaccttcaaatttacattatttaaaaattttagtgctagacaagcaaaaatactctgctagtggaatagacctgcagataactatttttcacctcttgaactagggccattattcaagaactgaagctaccctgaaagaaattagaaaacaggattcctacattccaatgtgtcattatttttctctggatttctcatttaataaatacttttttctccttaggggaaaaaaagttacatgttttaattacagcaaattagagcagtgcacaaatgcacaaagagaagaagaaactaatacaatttt

SEQ ID NO: 867087 - DNA, 661 bp, Homo sapiens
gggcatttctgtaataatagtaagacattcacctcaaatttagatgtatgcatgtaactacaaagagcctctttcaacatgaaaatggaaagatttctattaaattaatgtcaagaaaatgctgtatatatgatgcgtttaagaactcagaagatgtggaaaactatcccagagtcacttcctaattagaggtgaagcaaaggccagatactggtctccraaccccaggccagtcttcttttcttgtgtcaatatttccacgtcaaaaacaggaaactgcaaagatctgagaagtacttcatatatgctagctcatttattctagcaacatctatatcagggaagcaggggttaattattttccatttttattatctaaaaaataagtagatctggaaataaagtactgagcttctgtctgttcatttaatcagtctcataaaataatgtgtgcttatgatctggtatgaagaattaatggttgcatacttttataacaacaacaagaacaaaacacattcatagtttatttgctatctgttaaaaatgtaaactagtcttttttcaaggctagaaattttgcaaatcattccaatgtttatacccttcaagtaagagatggaaagcttctcaggggaatgcctctgaagcagtttactta

SEQ ID NO: 867088 - DNA, 612 bp, Homo sapiens
atgcagcacaaaaaaatcaaagatttgggtatgttcaattatggtttagggttcactcatatttaacatttaaatgcattgcttcataagcttaatagagcattctagagaaaaatggaatgcagttattgattttttattaacataaatatatcttaaagatgattttatttatttaaagactttttatctacaaaasttaattttagggcaaggataatcagcgaattgatagggatagacgggttttgaaagtttatttaatatgtctgctgggggagagtattagttagccagggtgaaagcataactatatagcaagcatagaattataatttattcttcaattgtacaccagctcaattttggcaggactcagaaaaccattaagacataggcattaagattatttttcaaacaattgttgattcttttttctactattaattattgaactcccgttatgtacctgacaaggtgccaggcattgtgtatcatacaatgatataagtgacttggtccttgctttcaagaatttatagttcagagggaacaaacagtgattttacatagtgataatgttaactgaaaatagcaagcattgcaaaaaaa

SEQ ID NO: 867089 - DNA, 612 bp, Homo sapiens
atgcagcacaaaaaaatcaaagatttgggtatgttcaattatggtttagggttcactcatatttaacatttaaatgcattgcttcataagcttaatagagcattctagagaaaaatggaatgcagttattgattttttattaacataaatatatcttaaagatgattttatttatttaaagactttttatctacaaaacttaattttagggcaaggataatcagcgaattgatagggatagacgggttttgaaagtttatttaatatgkctgctgggggagagtattagttagccagggtgaaagcataactatatagcaagcatagaattataatttattcttcaattgtacaccagctcaattttggcaggactcagaaaaccattaagacataggcattaagattatttttcaaacaattgttgattcttttttctactattaattattgaactcccgttatgtacctgacaaggtgccaggcattgtgtatcatacaatgatataagtgacttggtccttgctttcaagaatttatagttcagagggaacaaacagtgattttacatagtgataatgttaactgaaaatagcaagcattgcaaaaaaa

SEQ ID NO: 867090 - DNA, 616 bp, Homo sapiens
atttttcttaacaaactatatatagttattaaaaccctttgctacagcagtaaatgctttggcatatatagagtttctccattgcacacatgaaaaaaaatgaagttggatgatttagaacacttttcctctccacctgtaatgcatttccttgttatttttcttaacaaattatatgtagtaattaaagtgctttgctatagaaattacaataccttaaaaaactttctgaattgtgttgatgttcaccttgacagccaagaaaccaagaaaagattaaattatggaaattaagcaaggacacttagacagatccttytacaatctgcatttctttggtgatttctagttcactgcgccacctggtctttcatgcattatgtgtaagtcttctacgggtctgcctggagttcctgtgtgtcttgatcatgtttttttttttttttttttttcccttcccactgatcaaactaggaaactggggttgggaaaagattgataaagaagaattgacaatgaaaatatgccatgtatgcagggcaaagttaaaaaataaaatttctgctaaaacatattaaaagtgaaagagggcagtagaaaggcaaaaaacagaatt

SEQ ID NO: 867091 - DNA, 705 bp, Homo sapiens
gatgtatgaagatacttgctcagataaattcagatatgttattattaccaataacattcgctgacaagaaaatcagaggaaactctctgggggcattttcagccttattattgaaaatattcagtaatgtacattgaacagctacttccatgtgttaggaaggctctcctagtagtgtatctaatacattttgaatgattgcattaaataaaatatgtaaaaggcaacttttacaacagttgaatgacttttgatattggtgaattttaktttttttcttcacagaaaggagagggcctaaaattttaagttggaagctgtaattaattccctgtggaattaatttattgcagaatccatacatgactaccacatttttaatatttaaagcgccttcttaaatgtattaatagtttattaatatttactgagcatgcatacattgtttacagggcacttcccactctgagtctggaaaaatgttagataagggtttcactgtggcatatttacatgcttcattaattaatattcatgttctaaaggagagtaatatggatctaagctttggattcataattgggttcagcagctgcctctgctttgatatacacagatgtgtgaattaagacagtgagcaaaaaaattaaagtagtcttaattattagagcaattttgcttaattattgctcagttgtgcaatag

SEQ ID NO: 867092 - DNA, 670 bp, Homo sapiens
aaagaacatggtgaacttactttaacccagtattcatattgaaggagcattataaactgtaattatacattctttcatgcacaaacatttaagtacacacacacacacacacacacacttagtattgtatatatttgtgtattatatattatatatttatttcttgatttattctactggagaccttagkatgttctatagacatcagtggagtgccagcacctctgattgagtagagaataagagatccttgctaagacctaatttcttggggggataaaagcccttttttgtaattttatttccattgactccttaaatgtacaaaaagatgtacaggtgagtgacctcttagtgaaacacaaatgccttcatgcaaagtagattatgaaattaaagataagatttatcttcaaataatagttttaaaattaagatgcaaaacaaacacatatgcacctctccctatatgttgctgttctgctcttagttttcaaaatcatcttttctagatcacagaatgtattgattttgcctttagaaaaacataatttggtcatccatattttaggcagcattctgtaagtcttaagaaaatagcaatgaaatttctaacaggttattttgggaaaacctgcagcatttgcacatatgaaagcagtccatctag

SEQ ID NO: 867093 - DNA, 645 bp, Homo sapiens
taaatgctgaatgcacttaaatgataacagtggggtcatggagtttttgatggttttcttcttatttcacactttcctctattttctgaatttgatagtaagcacattaattttatcatcagaaaatataataaatctttttatttgagaaaggaatatgaagagccactctttctagcaacctcgcgtttgtataatttggatttaccttctcttgaaaacaagactgaagttgtcaaaactgtagtaaaatagggatcatccaatgctataaaaatgtgctccmctcttaaggaaacataataggtaaaacattcatctcttacacatgttaactatttactgctcaagttaatccaagctcaattctcatattacaccagctcaccggaaagcaacataagttaatcatttaactttgccctgcacaatatttcttgtacaaaacttcagttgacattatgcctgtgaaaactgcatattttaaccaaaagacagctcaaggcaacttaactttggtctgtgtagcatttcccttaccaaacattattatctatgtcttttcccaagggtcgatgtctataatagtcaccggtataacaaatgcaactgttttttcaatctgctagtacaagtattgtcatt

SEQ ID NO: 867094 - DNA, 548 bp, Homo sapiens
cttttgcaccaacctaatcttttctgaatcatgtttcactttcttcctgtgctgtcagggggccttcaagttctgaggctgtcttgaacttctgcttagtgaattgaatctctttgcttgtaccctctgcacacactttatcgtcatttccttaccccagatgaatcatttaccacttacttccccatgttctatctcttctattgatgcctcttctcttctcctcwgtgtttttgagagtctataattgtttatattctactcttttctttttattttaattgtgtctaaggaggaaggttaatcacaaatgtgattaacctgccatttttttttagaaaacggttttatgttactttcagtcacccaaacatttcatccagtgtgctagttaatagctgctcctagattttacttcttccaattatatattttatttatgactcgacaacttctttacatgatgtaacctaattcatccctccatttattcaagtgccatctactctaatgtgacaaaacatgtctgacacccatttgtacctgtg

SEQ ID NO: 867095 - DNA, 552 bp, Homo sapiens
aggtcagtggggacattttggttcccatgtccaggtgtctcttttcagctcttaactatccagcctaatctaaatctttcttattattttgattattaggcattattaatttttgttttttgagatgcagtttcactcttgttgcccaggctagagtgcaatggtgtgatctcggctcactgcagcccccgcctcccargttcaagtgattctcctgcctcagcctccccagcagctgggattacaggtgcccgtaaccatgccgaactaattttttgtacttttagtagagatggcgtttcaccatgttggccaggctggtcttgaactcctgacctcaggtgatctgcccacctcggcctcccaaagtgctgggattacaggcgtgagccactgtgcctggctattaggcattattaatgctttattttcctacttcaaccatccagtttcttgccatctctgtattcatctcctaaatatttcccctccgcactcatgtacatgcataagcccatggttttgtcctcaggttttttcttctttttcttc

SEQ ID NO: 867096 - DNA, 552 bp, Homo sapiens
aggtcagtggggacattttggttcccatgtccaggtgtctcttttcagctcttaactatccagcctaatctaaatctttcttattattttgattattaggcattattaatttttgttttttgagatgcagtttcactcttgttgcccaggctagagtgcaatggtgtgatctcggctcactgcagcccccgcctcccaggttcaagtgattctcctgcctcagcctccccagcagctgggattacaggtgcccgtaaccatgccraactaattttttgtacttttagtagagatggcgtttcaccatgttggccaggctggtcttgaactcctgacctcaggtgatctgcccacctcggcctcccaaagtgctgggattacaggcgtgagccactgtgcctggctattaggcattattaatgctttattttcctacttcaaccatccagtttcttgccatctctgtattcatctcctaaatatttcccctccgcactcatgtacatgcataagcccatggttttgtcctcaggttttttcttctttttcttc

SEQ ID NO: 867097 - DNA, 613 bp, Homo sapiens
attgtttatcttttgtttaaatattggcccatatctcttcaggctgagaagcagacttttaccttgcttacataggcaaggagaaggtattgtcttaggagtagagaagagttgacatcaagctttagtgtttaagtgtattgatatgtgtgagataagtgtgtgtgataagctatgcaaactacttcgtgataccagtgtgatccaaatgtgcactgttagttgagattttctaatttaaaggtcggggattcaataatcaatcccctttctgagattttagccatgaacctgaaattttcaaatagtaaaggaaaactgatattggaacaacttatttgccaattattgttttgaatgccagttagaagaaagaaaataccktgaggagtatctttatattttagaaatggacacaatttgaactatggatggctctaaattgcgatcactttactcaattcattctctgtggattgtgaaattttattcagttttaatgatttcaaatatagccataagaggactcaatattttcttttaatgaacttccctccaaaacctggacatctacttgttagtgtcacttctgttaactctaagttgtttttaa

SEQ ID NO: 867098 - DNA, 667 bp, Homo sapiens
tagaaagattctcctgagaattctgtgggtacaccgtgttttatttgttgtaatatatgcacttcaagtttctgggtcaaatgcacacatagcttcatgtggcttatgtaagtatcttggaaaacagtttacaacttactgtttacagtttcatagcccttgagagaagtgatgcattaattttctggtgaagattaggggcctttttgctttataggggaattgggctaagagtttccctaaccacccaggttgtaatmcctgccatgttattaacacagtaaagccagtttattgttttagtcttatctcttgatttacaaaattgaagtgttgaattggatgttctttaaggtattgtgcccccaaaacaaacaaaaaaaactaatgaacaaacaaaactatgacttttcttgttaaatatttcagtgagaaagtttctgttcatttggagtgaagggaagtgtgtaacccatcatgcttgtttagcagggacattgacaaagccaaggatgatttttttgtgcatgcaagttagatttcctggtgaaagaacaagagaaagacactaattaattagagacacagaaggaagtaaaaagacagccccagacttgaccctcagcaggatttgaagctgacatccaggaaactttcattcttaatt

SEQ ID NO: 867099 - DNA, 665 bp, Homo sapiens
agcaaaatgaactacaacaaagcattaaggtgggtttgtcagctggattatttataacccaaaacaataaaacaaacctaggatataaagcttaaagttcaattcttaaaataggtttaaagaaagggttgcagagtatatattttatgttgtacaatcaaccttatggtctgggtcagttaataatgccactcttccctactgtaactatcataaatgtcattcatcaatccagcattattttcaactgggcctagacaaagccttagaatgtctcccaacagaactctccaagcagctattatcaatcargaagttggtatttgaattagcacgtattaccatttcaatgctggactcatctgctgaaggtatgtacagttttattaatttaaagatagaaaagccaatcagcctttatgcagcaagttaattctttctctaaagttagcggctttctagcaaaggcttctttctcagctcttgaatcttctttaagccagagctttccaactggaatacacaccagtaggtcaaaacaggtacaggtacatagaagttattgattcctcagccttgagaaggccaggtggggttgaagataccagaaatcctgggctgttatttacagccataaacagccacatctgtgtactccagtgtgc

SEQ ID NO: 867100 - DNA, 665 bp, Homo sapiens
agcaaaatgaactacaacaaagcattaaggtgggtttgtcagctggattatttataacccaaaacaataaaacaaacctaggatataaagcttaaagttcaattcttaaaataggtttaaagaaagggttgcagagtatatattttatgttgtacaatcaaccttatggtctgggtcagttaataatgccactcttccctactgtaactatcataaatgtcattcatcaatccagcattattttcaactgggcctagacaaagccttagaatgtctcccaacagaactctccaagcagctattatcaatcaggaagttggtatttgaattagcacgtattaccatttcaatgctggactcatctgctraaggtatgtacagttttattaatttaaagatagaaaagccaatcagcctttatgcagcaagttaattctttctctaaagttagcggctttctagcaaaggcttctttctcagctcttgaatcttctttaagccagagctttccaactggaatacacaccagtaggtcaaaacaggtacaggtacatagaagttattgattcctcagccttgagaaggccaggtggggttgaagataccagaaatcctgggctgttatttacagccataaacagccacatctgtgtactccagtgtgc

SEQ ID NO: 867101 - DNA, 617 bp, Homo sapiens
tgtaagtcttctagcaggctagatattaggcaatatatagccagaaacaacttttttatacattaaaaaaaaaaaaattcagattgggtgtggtggctcacacctgtaattccagcaatttgggaagccaaaatgggaggattgcttgagcccaggaatttgagaacarcctggtcaacatactgcgagaccttgtctctatttaaaaaaaaaaaaaaaaaaattagcagggcatgatggtgcatacctgtagttccagttaccgagaggctgagatgggaggatcccgtgagcctgggatttcaaggctgcagtaaatcataatcatgctgctgcactccagtctgggcaacagagcaagacctcatcttaaaataaataaataaataaataaaatttcaatcagaaatatatttcacagaaacacatcagtatatgaaaaaagttgctaaaattaattcttccaatagttttctaaaatggcaagaacattgaaacaaaaaacatttaatgctctattgtaatatttacagtgttgtgttgtgattaaaagtaaattataaaatagtacagagttatttttataaaggtaagcactagttttttaattggatata

SEQ ID NO: 867102 - DNA, 668 bp, Homo sapiens
acaattatataagactgaattatcttgaaacattggctttgaggaactaaggtactgtattgtatttcactagctattccattaaaaaatgagtatcattgtattatattaatcaaaaaagtcaattttttgtttaagtccacatggatatttacagatattctaattttggtaaaaatttgtaaaaatcagatcttagggataattaaaaattttaaattattttcctcctttgatgactcatggtggtcacattcaatattatagtttataactccagttacctcccatactatttttccctacaattcattcattatttcatttcagtattcattaaatytctgccttctttttgctggtgactcagctaggcataaaagttacaaacatgaacagttgatgccctcaagtagctcagtctgtttaaggaggatccagttggtaagggcatctcctttgttgaaactaaacacaactaacatttaaccctccaggagtaagagacaaatggaccaacagcctcctcttagtcccttgagcttcatctctcaaactgggttcacttgaactatcatcaccaccttcatgctgcctcctagatgtaggttattcttttaataataataataataataaatattcttgggaattccgttagcacaatg

SEQ ID NO: 867103 - DNA, 625 bp, Homo sapiens
ttaaaaacaatattacttaccgtgagatatttaaaagaagtctggaaaggtaatccaagagataaattattcaagaaaatgcctttttgcagatgtacaaaatggaattaataaagagctagttttgcattaactataaacagaaatcaacttcagggctttcacagcaggtatgtatagtttatgtataaactacagtcatcccttagtatcagtgaaggattgattctatgacctcccacagatactaaaatctacgaatgctcaagtccctgatacaaatggcataatatttgtacataatctatgcacatcctcccatatactgtcatctctagattatttgtaatacctaatacaatgtaaatgctatgtaaatagctgttctactgtgttgtttagggcatcatgacaagaaraaagtctgtacatgtacagtacagatgcaaatttttttcaaatatttttaatcctagggtggttcatgaatacatccaactgtatatataatttatatataactacaaataactctgtgaatgttttccattgttcattcttttatctttattagaaatcatgctgaaagctggaactaaatgctttattgcaactatctttgttt

SEQ ID NO: 867104 - DNA, 611 bp, Homo sapiens
gatttgtaaatattagacattatttattatctttctactaggagagaagagcttttggccttttttttgcacatttatacactatcttccctttttccatcttttctcatggttttgtatatactgttcactgccgagggaagtgtgctggatatcagggtttctgcttgtttttttaacatccaagttgttccctacccaaaagctctgtaaaatgctctacaatataaatttccactgtttgaaaactttcaaataattggtcagctccattttttctttcctagagacatctttcctgggctttctgaygttttactaaaatatggactcaatgctttctaggcctgttgcccagctcttgccctaagacttccctctcccatgatactaaaaatttttctcttgtattggataccacttaatcctttttcttatttactttatattttaatgaagcacattatctagtagcttgctgaaaaggggtatgtacaatgtacattttattgagaccttgactgtcgaatttttctttattttacttttttttactagactgatggattagctaggtatagaattttagattagaagttttctgttagaat

SEQ ID NO: 867105 - DNA, 561 bp, Homo sapiens
acagagaagaatcttttaattctcatgattgtggaaatgatcctggtttctgtggttctggaattagaaggcagatgggtagggaagagatctatccttcagtatgcagattctcatttagttcttattcttggtatggcacatcaccattgcccttctctatgcctgatatctctatacttggtgcctctctggttcagtttcttctacagaataaacttcctgtctctcttaggagttggggagaggtagtttcttgtttacacaagaygagagcaggaatcttgtctctaaataatatttttaattaaacacgatttcagtccctccctattcatttcctctgaggtttctgatgctctgaattcccaaacttttctgggattctgtgggagcaaagtggtttgtgtcctgatagccttcttgccactctgcctggcatgcatttaaattttatcttccttctcctctactcaataacttatcatttttcttcaatctgcttttcaccttcacacttcatattgtgattcaagttacagaatgttgaatatagcttca

SEQ ID NO: 867106 - DNA, 476 bp, Homo sapiens
tccatgatatagataaaagggaaaatcctgataatctttttggtttgataaaaaattaaacatactaaggtttccttgctcctttttcccagaaaaatggcatgacatttttcttttcttctcttttctgttttccttctctcttatgttactaagttaaaaagcacaggaaaatattattttaggaaagatttttaaatgtaaataaaaaactatataaaaaaatttatagcatcataattcagcgataacattttatgtacatgtatggttactttcaatkatattcataaattttatgtgttctagctaggtataaaatataaaatgttatattacaaaatatgaaatattgtaaatatctttccatgtcaatgcgttgcttcctatctatatattttaatggctgcatagtattccattgactatatatacactataattgaagtacccaatttcctattgtaatgatgtga

SEQ ID NO: 867107 - DNA, 624 bp, Homo sapiens
aataagcatggtttaatggccaaatataaaaacagtaccaataatataaaccatttattggaatcctcctacatggcagtactatgctaagaaccttgtataccttatctcctgtactgaaaactaactatagaaaactatataaaggtctgcatttgtcctccattttccatatgaataaaagaagctcaaaaagtttagatactctctccacagtcagatacctattttcatttgtactggagatatctaagttagtcttattttgagggattttcaataagactgcaaactcttatatttaytcaactctataccaactgttacaagtctttgtacctagattttcagatatgtttattgaatcaaacacttcagtaaacttgacacctattaaggacacagtgttgatcatcagacactaaggaaaaaggagatgaatgaaaaagggacacaggcagaaactgaagtagtaaatataatgcaaaatcagcctaagttttttcactgattaaatatacagatgatgcaaactggattcaatgctgattgacattctaaatttctaacagatgtaatgggaaaatttcttaaaaaaacagtgtttcatacatgtaataacaa

SEQ ID NO: 867108 - DNA, 599 bp, Homo sapiens
cattaattttttttactggcttgtggaaaagggacttagatcttggctgcggtgggtgggggcagggagtgagaagcaagattatgcagtatgcggagatttgaggtagaaactgcacactataaagagcattcccttaataatgcatgtaaaaatataggtagggtggtagggtaaatatgaaataaaacttgtaaggcatatttttttcaattcaattcaattcagttaacaccaaaataggcatttttaagaatgaactctgttttaatcttaaagaaaattccagacaatcatattatttcaccttgaaatatgtcagtatgtatctcttataaagattttttttwaaaaaaaaaacataatcatgatatcacaccccaaaaaattagcaataatttcttatttgtaagcttgaaaacagattgatcagagatagggcttaggaaataaggtaacagaatacaagaaaaccttacaaaggtcttgacaaaattgctgaagtctggtgtcagtatatattaaatatactagtgcacatcttgctataggttgttataggtcagagatgtttcaactccatttaattgctagcggct

SEQ ID NO: 867109 - DNA, 651 bp, Homo sapiens
atttacaagatgcactgtaatctttctagctagagtacattagattttcttcttatatccaggcacttgaaattgatacactgaatattttcttttccccaggtcacagtataagaataatatcatttagtttacaaattataccttgggagccaaactttatgtagtaccaaactaaagataggttgatagtgttttggcaatttacagaccaaacatcttcaaagcccttgggcctgcaggaataatgaggaggatgtgattaaatggcagtcccctgcttgaaatctttctgcagcttcccatcatcttggatttagttcagactcttcaccatggcccacgaggccctaagggatcctggcctacactctctctcagactttatcttgtatgattcttcctttttactatattccaagtaygcttgccttcttaatgtccttaacacatcagtctcattcctcccttgtggaatttgcccatgctgtttccccctctgaaatgattttttcatagagtgtttacttagtttgattctttttaatagtcacacttcagtttaaatgttttcacctttgagaggttttgtgatcaccattccagagtaggctcccagacactgaattatcttgccctacattttttttt

SEQ ID NO: 867110 - DNA, 651 bp, Homo sapiens
gtgaaaggaagacaggacgtggtggaattacttttgcttactcgtgatagttttgtctcaaaggttatggcactgaaagtcaggaaatactcagctaggctaaacagggtgccattcgaatttacagatgtcctatgcaagagtgtaaaacaagagcctgctgtctaacttacctcttaccttcataaagagtgggtgtggtatgcagtcaaaygaaggagagaaaaacaatgggtaagagcaaagactgggaaacaataaaaacgtgctcagaggtcagactctccaaacactccagttacttagtactccatcttgaaaactctgctctccaagcaaaaccctctagtaacaaacacaaatataattccatcttctattgtctgcaagttcagagaaaagagcaatggtggtgtgaatgtatgtgactgctttctggttccaggtgagaggagggagatacctcaccctggaagtatgttggaagttgttcttcatccttagaaggatgaccagttcaggcacagccaggcctcatgggaaatggaatgggggagatggtgacatgggtgcagatgtcaagtcttgtaaaatcagttctgcacagaaaatttgcaacatgggattatttcctataccgacattttctct

SEQ ID NO: 867111 - DNA, 624 bp, Homo sapiens
ctttgtggttttatctacctttggtctttgatgatggtgacgtacagatgggtttttggtgtggatgtcctttctgtttgttagttttccttctaacagacaggaccttcagctgcaggtctgttggagtttgctagaggtccactccagaccctgtttgcctgggtatcagcagtgatggctgcagaacagcagatattggagaactgcagatgctgctgcctgatcgttcctctggaagttttgtctcagaagagtacctggccgtatgaggtgtcagtccgcccctacttkggggtgcctcccagttaggctactcgggggtcatggacccacttgaggaggcattcttcccattctcagatctcaagctgcgtgctgggagaagcactgctctcttcaaagctgtcagagaagtacatttaagtctgcagaggttactgctgtctttttgtttgtctgtgccctgcccccagaggtggagcctacagaggcaggcaggcctccttgagctgtggtgggctccacccagttggagcttcctggccgctttgtttacctaatcaaacaactaactcatcaatggtgggcgcccctcccccagcctcactgccgccttgcagt

SEQ ID NO: 867112 - DNA, 624 bp, Homo sapiens
ctttgtggttttatctacctttggtctttgatgatggtgacgtacagatgggtttttggtgtggatgtcctttctgtttgttagttttccttctaacagacaggaccttcagctgcaggtctgttggagtttgctagaggtccactccagaccctgtttgcctgggtatcagcagtgatggctgcagaacagcagatattggagaactgcagatgctgctgcctgatcgttcctctggaagttttgtctcagaagagtacctggccgtatgaggtgtcagtccgcccctacttgggggtgcctcccagttaggctactcgggggtcatggacccacttgaggaggcattctkcccattctcagatctcaagctgcgtgctgggagaagcactgctctcttcaaagctgtcagagaagtacatttaagtctgcagaggttactgctgtctttttgtttgtctgtgccctgcccccagaggtggagcctacagaggcaggcaggcctccttgagctgtggtgggctccacccagttggagcttcctggccgctttgtttacctaatcaaacaactaactcatcaatggtgggcgcccctcccccagcctcactgccgccttgcagt

SEQ ID NO: 867113 - DNA, 665 bp, Homo sapiens
atgaatgaccttagatatgagttttctcactaggtgttataaaatgcgctagaagagaaaaaaacacagaacaatctatttataaaccatataatgagaataaggtaccctttatctaatttgcaatccataatagaaactataattgtctatagttagaggaaaataacttatatttgcttatcaattgtaccttgaagggctctgtayttaattaaatgtccaatgacaaatctgattccaccaattgcatctttagaatcagagattgatagaagccacagagtcaggggaaccatttgccacaacagtgaaatgtgggattgatgtcacttcagcctgggatggtttatttgaaaatggtaagcctctggtagcatcaataatgccatgttattatcttttggcatttatgcatatactcctgatagtgcagtccattgagtattgaattaaagagatttcaagtcctgtccttcactagaatatagcttttcttgaagtgttaatgcaaaaaaaaaaaatgtaaagacaaagaaaacttgtaatcccaaatttttctgtaccagaacatgtttatataggtttaccaagggaaagagagggagaaatacattggatttaaggtagaacctgttcatatcaagactgtttataaatgacac

SEQ ID NO: 867114 - DNA, 565 bp, Homo sapiens
agcaaacaaacaaaaacaaaatcaaaaccttactctcaccctttcaagataactgagtcgctttcttttcaaaacttaatttcctggctaagtgcagtggttcacacctgtaatccaacaatttgggaggctgaggcaggatgattgcttgatgccaggagtttgaaaccagcctgggaaacatagcaagaccccatttwcaaaaaaatacaaaaactagctaggtgtggtgctgcacacccgtagtcccagctactctggtgactgacctgggaggatcacttgagcctaggaggtcaaggctgcagtgaactatgattgtgccattatactccagcctgggcaacagagtgagaccctgtctcaaagaaatgaaaaaaaaaaaaaacaaaaaaaaaacctttaattttctgcatttaactcactgtcatttagatatgccgtaagtatttcatggttttttcctcctcccaacacccctctccctgccacggtgtgggaagctcaggttctactctttaccattctctgtgtgaaattcaactgacttctctacctctgtggg

SEQ ID NO: 867115 - DNA, 585 bp, Homo sapiens
gcattttattttctgtttagtggttgctgtagttttcttgagtcttctccctactgctaatttaggctatttggcatattcagcctcatggttgcaaaactggggttttaatattaaaacttccattgttcatttagatttttccttctgaaaatttgtagaattattcaaggcaatcttttatatacactttctaccttcctttgcctcccaaatcaacaacctgaaggtaggccgaattaatacacactagttgtggtaataatgtagttaagttgacactrtgagctgtggtctaggcagagaatgttacgtgcagagcttctattgtcttctttctcccaaacacagtggtaggttattcacattcattccttgctacacgcatctagttaaaataacttagactttttcaggaaagacaaactgaggccaaaagctattgctcatctcattgctaaaactctggcaacattttctgaattccacagatccacagtttgagaagatgattgtttaacttgtggcatcatgagggcccaacagtttagaaaacagtgggacagcctgttgccctgcagccag

SEQ ID NO: 867116 - DNA, 546 bp, Homo sapiens
aaatttttagatcttatttataggagagtagccaatcactccctcaaaacaaattttcttttaatctagacacaattctaaaaagtcatgatagctaatatctttctattcaaggtgtgttgcaaagaccagcagcaaaggcatcacctggttgctgatagaaacacaaatttttagttcccattccagagctaccaaagcagaatctgaattttaagaagatccccagattaattgtagtacactaaagtacgagaagcatyggcctaaaatgctagtacaaggtaatttgcctgagctttggcacactgggaatgtcttgctttgtttggctaggagttgatggaagcaggaagactgactacaacgacagtagtaaaaaaggcaacccacatacagcatgccagtgagaaaagacagagaaaaatttatgaacagctggctcaaaatgaaaaaacaaaaagcacctacactacttcgtgtaggcaagaagctccatacaccacagcaatccctaagggtctctgtgtatcgcagcgacgtaga

SEQ ID NO: 867117 - DNA, 546 bp, Homo sapiens
aaatttttagatcttatttataggagagtagccaatcactccctcaaaacaaattttcttttaatctagacacaattctaaaaagtcatgatagctaatatctttctattcaaggtgtgttgcaaagaccagcagcaaaggcatcacctggttgctgatagaaacacaaatttttagttcccattccagagctaccaaagcagaatctgaattttaagaagatccccagattaattgtagtacactaaagtacgagaagcatcggcctaaaatgctagtacaaggtaatttgcctgagctttggcacaytgggaatgtcttgctttgtttggctaggagttgatggaagcaggaagactgactacaacgacagtagtaaaaaaggcaacccacatacagcatgccagtgagaaaagacagagaaaaatttatgaacagctggctcaaaatgaaaaaacaaaaagcacctacactacttcgtgtaggcaagaagctccatacaccacagcaatccctaagggtctctgtgtatcgcagcgacgtaga

SEQ ID NO: 867118 - DNA, 561 bp, Homo sapiens
gccccatacccaaacatgaaactaggaggagtagaaggagcaagacgccaactggatggagagccaggaaactgggatatactcctaagtccctcctgaacagtgcagtgcagtaatttggtactgtacatctgacccacacctgaccatgccaatttagggtttccttctctttacctaaaagggaactggagcacataattcaaagagcctccaaatatgatttgacaaatgcttgattacatcgtgtagctagagagaagagatgctccttgtattttcaatatactgataatgtgattttttgaggtgcttttacaagcgctgtcctatcaaacatataatcttctctgtttatagaatatttaaacatggatgtgtgaatttaggtgagaaacttgtamtttctctgtgaagggtgtgtttgtctctaaagattagggagtccagtgctaggaataaagtttaatttccatattgcggtgagaataatgtgaaaatgtctacaagagccattcattttgaaagctggttgtatctatgtaataaatattcatgata

SEQ ID NO: 867119 - DNA, 596 bp, Homo sapiens
ccttctgttaactaagtgattatttccagccacatccatatttcttgctgttctatactccaagcatcgtgtggaatggaagttctcatctatccccaagttaaagtttatcaggtgacattggtcatagtactacccagtagcagagaaatgttttttataactggctgcttgtccaaaggtaaatgtggctccttctacatctttgatcttgaaccttcacttcgaaggtcattgtgtcaataagactgagttgatcaatacatgtttaaattgtttctggagaaactaccaatatggctaataaatgatcacttccatgtatttattcccaagatgtaataagaaataatctgacagaactctaatgatwgttgtgtgagagaaacaaagatgaatatctcattggcacttacattgtgaagacagtagttagtaagagagagaccttggaagttggaaggattttaatcagtggcttaatgagaagagagcagggagttcattgatttaattttgtagccagcatagcctgcagtgttctaagtcaaagagataaaaagacagaaagagattcaataatttgcattttcttt

SEQ ID NO: 867120 - DNA, 596 bp, Homo sapiens
ccttctgttaactaagtgattatttccagccacatccatatttcttgctgttctatactccaagcatcgtgtggaatggaagttctcatctatccccaagttaaagtttatcaggtgacattggtcatagtactacccagtagcagagaaatgttttttataactggctgcttgtccaaaggtaaatgtggctccttctacatctttgatcttgaaccttcacttcgaaggtcattgtgtcaataagactgagttgatcaatacatgtttaaattgtttctggagaaactaccaatatggctaataaatgatcacttccatgtatttattcccaagatgtaataagaaataatctgacagaactctaatgatagttgtgtragagaaacaaagatgaatatctcattggcacttacattgtgaagacagtagttagtaagagagagaccttggaagttggaaggattttaatcagtggcttaatgagaagagagcagggagttcattgatttaattttgtagccagcatagcctgcagtgttctaagtcaaagagataaaaagacagaaagagattcaataatttgcattttcttt

SEQ ID NO: 867121 - DNA, 636 bp, Homo sapiens
caaaaaaagaagagagagagagagagagagagagagagggagggagggagggagggagggagggagggagggagagagaaagaaagaaggaaggaaagaaggaaggaaggaaggaaggaaggaaggaaggaaagaaagaaagaaagaaagaaagaaagaacgaaagaaagaaagaaagaaagaaagaaagaaaratgtgatacatatacacagtggagtactattcagccatataaaagaatgagatcctaaatgaaatcctgtcatctgcaacagcagggatggcactggaggtatttacgttaagtgaaataagccagacacagaaagataaacttcacatgttctcacttttttctgggagataaaaattaaaaccatggaattcatagagatagagaatagaatgaaagctgcaagaggctgggaagggttggggaggatgaagtagggatgattaatggacacaaaaatatagttagatagaataaataagatctagtgtttgatagtacaacagggtgactacagtcaacaataatttattatgccttttaaagtaacaaagacactataattggattgtttgtaacagaaagaaaagatacatgcctgaggtgatggatagcccattta

SEQ ID NO: 867122 - DNA, 677 bp, Homo sapiens
caattgcttattgtcagtctccttgtgttagaaggtgagctccgtgagacctttgttttgtttgccagtgcatcccaagcacccatttagtatttggcacatgacggaatgctcagtacatagttttttaaatgaaggaataatgccactaggtatcaaagtccgccttggaattatgtctgttatcttcaaccctaatgctatacgccttctccatcagggcttctgctaatgttttagactctggaactcctgtgtttgcctcagaaatgtgctcacacttaaacatattgatttcctccttgtcttcgtgacattcatttaatgttgctagccaacttaaccagtttgctctyaccttcagttctctctttatctcagtcccaggttaatatttcctgaggacccaagcataccactagaaaaacaaactttagcaaaactaccaaaattaacgtcaaaccagcgttcctgtttgacttagtctctagcctcaggcttagataggactactagcacacgcagatgggacagtttctaagtggcctgatccgcattggtttctagtttggaatgtaaaaggggactggttctggtctcagccaaatctcaagactctcacctccaccctccgccctgtttacagtaatagaattaatataaaatgtagcacaata

SEQ ID NO: 867123 - DNA, 677 bp, Homo sapiens
caattgcttattgtcagtctccttgtgttagaaggtgagctccgtgagacctttgttttgtttgccagtgcatcccaagcacccatttagtatttggcacatgacggaatgctcagtacatagttttttaaatgaaggaataatgccactaggtatcaaagtccgccttggaattatgtctgttatcttcaaccctaatgctatacgccttctccatcagggcttctgctaatgttttagactctggaactcctgtgtttgcctcagaaatgtgctcacacttaaacatattgatttcctccttgtcttcgtgacattcatttaatgttgctagccaacttaaccagtttgctcttaccttcagttctctctttatctcagtcccaggttaatatttcctgaggacccaagcataccactagaaaaacaaactttagcaaaactaccaaaattaacgtcaaaccagcgttcctgtttgacttagtctctagcctcaggcttagataggactactagcacacgcagatgggacagtttctaagtggcctgatccgcattggtttctagtttggaatgtaaaaggggactggttctgrtctcagccaaatctcaagactctcacctccaccctccgccctgtttacagtaatagaattaatataaaatgtagcacaata

SEQ ID NO: 867124 - DNA, 609 bp, Homo sapiens
agctgagtgaagaaaactgttcagtgctagaagagtgggcttggaacaaagcatgtaacttttttatatagctgtcattctgtcttctttcttttaccattcttcccatatcttcggttttgagatacctgactgcatgtgccaggatagattattgatattggtaataagcaaatccaaatcatctctgccttcaaagaacaaagttgtgtggtatgccatccatcaaagtacccaacctaagggagcctctgtctctgtgctttcatatttgccaaggcagaagaaaagggaattttgtaaaatataccccatccaaaacatccacaagtaggactgactacatcttcttggtcaaagtaagtcacatggccgctccttacttcagaggtgtggaaatgtacaatcttatactcrgaggagaacccataaatagtgggtgaacagcactaatgactctttatcttgatgctgataattcctgggtcttttcagcaccctgaactacagattggtttgttctccagttctctgctgctggtttaggatttgtctttttaggtgtgttaagtctgttaccacttgtccatgttggtatcactattgtct

SEQ ID NO: 867125 - DNA, 622 bp, Homo sapiens
atgcagctcagaaggaatttaaagaattgagtgaccttgtagaactaagctccttttttatttgactctgtcattgaaactgtagcacctttagttctgaatgagtattccaccaaggagtattactgagatctcttgatttcttgaggtctactgtcctgctgtccaataaagtagacagtagacatatgtggctagtccagattgagatgtaagtgaaaaatacattgaattttgaagatgtaccacagaaaaagaatgtaaatgtaaaatagctcatttttttatattttggatatattgggtttaacaaaatattaaaattaatttcgtctgctttgttttacttttttagtgtggtaactgaaatgtctaaaatcaygtatgtgtgttgcattataatttctattggacattgcagatctagcccatgaatcagaagatctagagcaaactgggagtcctttctcccatttgcccaaggattgtctttttcagttacaatttcctccttaaaccattctctgttccacaaagtgaaaaaacacttgatgtctttcttaggtgaaactttctcccataccttgcagggcttaacagggtcaagctatcagatcaaatc

SEQ ID NO: 867126 - DNA, 661 bp, Homo sapiens
tttgaaaggcaaagtgaggaagattacataaagttgttctgaaataattatccttggttataagaaccaataacagggtaacatccgtccaggcttgactggcatttggtggtcagacctcctcacagaaatattatttgtttaagaatcgygctggcctttgtgcaagatagtggtgctcagagtctttgtactagtttttataataggcatgtgtgtgtgagggccctttttatatgacctcccaactgtttttctttggagtgtgacacgagtgactccattttgactctgacagctttcacagaggtataaaagagcatctgtttaaaatgtgctaaagataatagtcagttgttaatgggtgaaagcaacggagaggatgccattcaataaaaaaaaaaggtggaaaaagaggtatgtagttgttcatggaaagctgacaaacacaggaactgtcaaaatgcatcctccacttgacacacctcttgtttcaggcagtgcctgttttgtggtcagtggggagtatgtaggatatgtatcagagaatgaaaaaaattaaaaagtttatggagtgggtgcaagacacatacagccctgatgcgtatctctgggccctatctaaagggtccctgaagtcttcagctcactttccttaagc

SEQ ID NO: 867127 - DNA, 661 bp, Homo sapiens
tttgaaaggcaaagtgaggaagattacataaagttgttctgaaataattatccttggttataagaaccaataacagggtaacatccgtccaggcttgactggcatttggtggtcagacctcctcacagaaatattatttgtttaagaatcgcgctggcctttgtgcaagatagtggtgctcagagtctttgtactagtttttataataggcatgtgtgtgtgagggccctttttatatgacctcccaactgtttttctttggagtgtgacacgagtgactccattttgactctgacagctttcacagaggtataaaagagcatctgtttaaaatgtgctaaagataatagtcagttgttaatgggtgaaagcaacggagaggatgccattcaataaaaaaaaaaggtggaaaaagaggtatgtagttrttcatggaaagctgacaaacacaggaactgtcaaaatgcatcctccacttgacacacctcttgtttcaggcagtgcctgttttgtggtcagtggggagtatgtaggatatgtatcagagaatgaaaaaaattaaaaagtttatggagtgggtgcaagacacatacagccctgatgcgtatctctgggccctatctaaagggtccctgaagtcttcagctcactttccttaagc

SEQ ID NO: 867128 - DNA, 467 bp, Homo sapiens
ataaatatgaactcattatttccttaagattttcataggtgttatttgacaaaggcttttatcatcaaataagtatcatttatgtctggattttaaaaaatcaatcaagttactttagttaggacccattcaagtatttaatatgtgaacatttgatgggaatatctgcgggaagttggattatagtggcaggatgttttcatatgtatttgactccagatttcttaagtatggagctttttgtggggatcatcttctgagggatgtatcctggggaataattatggaaggtgacataaattwataacttattgtcaaatgaataggatcagaacaatcaaagcaaggtgtaatgtaggagtgaagcacaagtttgcctcccagagcgaccagagtagctccccttttacagaagcccctgctctaaatggtgtaataaggacagtgtcaggaatgtgaagtgacag

SEQ ID NO: 867129 - DNA, 593 bp, Homo sapiens
catgaataaaagctacaaggggaagtatttaatgccaacaggaataaagatattgactattatattaagtcaaaagtatgcagcctgtagcagtatgattttcttgatctgaatgctagttacatggttgtacttcctttgttaaaaggcatcaagctctacatatatgattagtgcagttttatgtattcatgttacacctcaataaaatgttgatttaatataataaaaaataataataacatagcactgccttactttgtcatttagaacaaggcagagagtggcaagtaattacaagaaattatacctgacaaccacgtcaaataatttaatgttgtcacactttaaaatccagttttcygaattcctagctctgcaatgttgggcaagccatattaccttctggagcctcagatttttctatatctcctaaatagaaaaaataaatactcagttcatgaagatcctatggtgtgataacataatattggttaaacaaaaagcacagacttaaaaagcacctgtctctcagcagaaatcagtaactcatttatttgttctcatttgtttgttcaagcattctttctgtc

SEQ ID NO: 867130 - DNA, 610 bp, Homo sapiens
gaaagaacttcattcagcatttccaaactgtggcaaggaacctgatgattgcagatgttactaaacaagaattactaaagtcaattagatttgagaaacactgtatattattactaagtaattgagtttcacaacatgcattagcatcctgaaaggccctgaaagaagtcctgtgggaaaagataacttttgaacctctttcacctaatattaataacctaatgtttctctaaactgagggtgaattactaaagcatagcctttcaaaatcattctgtaaaagcctaagctgaacaatgtggttcaatatgtggccttcagagggtctaagataatttaagaatgaaatttaaaatatcaggagactcraattaagtaggtacatttattaggactctgcattgtatccatcctctatttacctaccaggatttacgtgaatattttttcatagcctggagatcctttcaaaccctgtctgtgttaacagagctgctacatctgatattattttccggaatctgaagaaacaccaaagaggactgaaataataagacattaatttcagctgtagaatgccgatgttgctgaccctgcagggttattgcag

SEQ ID NO: 867131 - DNA, 613 bp, Homo sapiens
cctgactttttaatgatcgccattctaactggtatgagatggtatctcattgtggttttaatttgcatttctctgatggccagtgatgatgagcatttcttcatgtgtgtgttggctgcataaatgtcttcttttgagaagtgtctgttcagaccctttgcccactttttgatggggttgtttgtttttttcttgtaaatttgtttgagttctttgtagattctggatattagccctttgtcagatgagtagattgcaaaaattttctcccattctgtaggttgcctgtttgctttgatggtagtttcytttgcagtgcagaagctctttagtttagttagattccatttgtcaattttggcttttgttgccattgcttttggtgttttagtcatgaagtccttgcccatgccaatgtcctgaatggtattgcctaggttttcttctagggtttttatggttttgggtctaacatttaagtctttaatccattttgaattattttttgtataaggtgtaaagaagggatccagtttcagctttctacatatggatagccagttttcccagcaccatttattaaatagagaatcatttcaccatttcttgtttt

SEQ ID NO: 867132 - DNA, 568 bp, Homo sapiens
gggtatatacccagtaatggaattactgggtcaaatggtatttctggttctagatccttgaggaatcaccacataatgtcttctgtcttccacaatggtttaactagtttacgctcccatcaacagtgtaaaagcattgctatttctccacatcctctccagcatctgttgtttcctgactttttartgatcgccattctaactggcgtgagatggtatctcattgtggttttgatttgcatttctctaatgaccagtgatgatgagctttttttcatatgttttttggccgcataaatgtcttcttttgagaagtgtcttttcatatcctgtgcccactttttgatggggttgtttgtttatttcttttaaatttgcttaagtttcttgtagattctggatattagccctttgtcagacggatagattgcaaaaatgttctcccattctgtaggttgcctgttcactctgatgatagtttcttttgctgtgcagaagctctttagtttaattagatcccgtttgtcaattttggcttttgttatcattgcttttggtgttttagaca

SEQ ID NO: 867133 - DNA, 614 bp, Homo sapiens
gaagggagctcaactaaaagatagcttgggtatttggctttccatttctcccattagcacgaaagaaaacagaaccagtgactctgaggacattctccaaagtgagaatgctatttcatgagctgccacctatagttcttrctgcccacactgaaaaaaaaaaacaaaaatctgtgtgatttgccttgaaataaaataggaaacatgcagcctttaaagactaggatttgacataatacagatcaaaataaaataagtcatgaatcagtaggactttcacccagggctttgaagcctttatttttatgattattgccaccgcagagcagagccggctgcataaacaccatttagaatagctgaaggctggcatcgcataagaaaaatggcaaccagagcgatttccctgagggtccatgagtcctaattctgtttaatgtgacaattcctgaacaactctggcttcttcacagaaatatgcctgggaagttctgggagcctggctgcctagagcccacctgagagtgaactagtcttcagtgtttacagacagagtgacaattcctgaacaactctggcttcttcacagaaatgtgcctgggaagttctgggag

SEQ ID NO: 867134 - DNA, 594 bp, Homo sapiens
caaaagtacaacagacaagaaaaaacatagtcttggaactccaggaacttattggctggtggaggagacagataataaaaaaggcaacaaacagatgaaacactgcaaagtgtgaccatgaagaaggcaagcagcgggagaattaccttttagtttaagaggccagggaaaatccctctgagtaagtgaggcttaccgagaccacagaattgagaaggagcctatcagacaaagaacaaagggggctgggtgtggtggctcacgcctgtaatcccagcactttgggaggctgaggagggaggatcatttgagattgggagtttaagaccagcctggtgaacatggtgaaaccctgtctctactaaaaatacaaaaattagccgggcgtggtggcrcatgcctgtaatttcagctactcgggaggctaaggcaggaaaattgcttgaacctgggaggcggaggttgcagtgagccgagattgtgctactgcaggccagctgggtgacagagcaaaacttcatcttaaatagccaaagggaagaacattccagagagaggagatatgtagagacaggaagaacttgctatgttctg

SEQ ID NO: 867135 - DNA, 655 bp, Homo sapiens
ggtactggttaagattgtagatctaggggatcactgatctaggtcctattccaaatttgattcctcacctgctaagcttgcaagtgcaacttatttaaattctctgaaggttaaatgtttcatctaaatagggataataataaacacctatagcatagagttgtttgagattaaatgagataatacatgtaaaattatgtgcctggcatacagcaagattgttgttgttgwtgatgatgatgatgatgatatttttctatccccagtgcacaactgcttgaatgtattagataatcaatacatgtacatgtttcttgaactgagatcaatttccccatgttgtctgactgatgaagccctacattttcttctagaggagatgacatttgagcaagatcttaaagaaaatcagatgccttcacctgaccactgcttggtgatcccatggcactttgtacatctctccattagctctcatctcaccagcccatcattattgtatgtgctgccttctgaagcttgcagctggctacatcaggtagaataaaatcatcctttcataaaatagtgacctccttttttatttgcatttccaaagccaagcacgtgataggtagacaataaatgcttgctcctgggctgtgctaaaggcatc

SEQ ID NO: 867136 - DNA, 636 bp, Homo sapiens
tagctgggatcttggcctgaaacaactgtagtgaagagcgtggctgacccctctgagacgggcacttgtgtgacactagacaactcctccagcacagtgggggcctctgggctctgcaggccatgcaaccgtctgcctgggcttttccagccagacctggcacaggcccgaagactgccaggacgctggcttgctctgcgtctccttagcctctttccctatacaaatagaacgcaattcctctggaaaattggcagttaactcagttttataggcagatctgagtgctggcaggacccatgcaagagtgaaaatgaatgcctgagccctcccttgaccccattcccagttcttgtctgaacmctgaggggcttgtaaacagatgggtggacatcttgacacttcaaagtgctcccccaaaatatccaccctttgaccacaccctgactacccccaggttagctgtgtgtactggagcatgggctatgtgaggaggggcttcaggtgggcttatccccttggtcccccaggtggttctcctcattggaagagttatggctcaggaggccagagcagagcccgtggaggcacaaggcctggggcagggatcccagaggtcccatgtaaggtgatatt

SEQ ID NO: 867137 - DNA, 632 bp, Homo sapiens
aactgagaccagtgagtaagttggtgtctgggtcaggttaatggtggtgaactatgtgcctgtgagctcttcagagctggttgggttcaccaccttcataagacctgcctctgtaccatttttccttgagtgtgctttgtataaaggtctgtacaataaatcacacttttttaaagcttagattgaataggtttctgctccttgacaagagatatggcctgaataaaatgaattttgaaagaaaagcctaatatttttactatataattgcatggtttaagtaaaaattacagtcttttattaaagcrgtaatagccaaaccagtatgctgagatattttccagctaataaggccctttaccaatgccaattaggaacttttgaaagcccaggagtcatgtgaagaactgctgatatctgtgctttctctgtatgtttaatagctcttaagatacaaatcactttctgaaaattcagggaaattgtagctgcatcttctgcattgcttctgcaccatcataatgcaatgggtaatttcaaacccatgactgacttctgcttgtttccaaagtcagcacttcatttgatgttattgtgaagaaagcttaatatccgtgttaaggacattgatt

SEQ ID NO: 867138 - DNA, 628 bp, Homo sapiens
tgtttaggggacagagaaaaaagcaaagacaggaaccttttagaggtgatagatatattcattatcttgattgtggtttcacagatgtgtgtgtgtgtgtatgtacgtcaaaactgacctaacggtacactttaaatatatgcagtttactgtatgtcaattatactataataaagctattttttaaattatgggagaagaaaaccccacaaagtacattccagaaaggtattaatttacagtctaccaacagcttatgcaagtgcttgcctcattataccttcatcagcactgtaattcttaaaagaaaaaaaactgctaatttgaaaggcaaaaccatctcttctgtttcwatgtgcatgtctttacaagtagactgaacttttttcatgttcatcagctctttgcccatttttctttcattgacacaaagcaatgaagaatgctaacactagaatgctagtaaaagagggatgcctttttatctgccaggttaactagtacaaactgaaaattactaccctaaaaggtggtcataaatattcacaaatttgtcaaatcctttgaagaggagtcataattagacactcaaaactgatgcacactcaacatttaaagacaaaacctt

SEQ ID NO: 867139 - DNA, 707 bp, Homo sapiens
gtatgaacacatagtggacacaactctttctgcaaagatttaatgatttatctgaagctattgcttgagacttctccctgtatgaagcaaattacaaatttgcaatatcaaattaataagaagtttataatctctgaaatcacccaaagcaaaattcacaacttcagatctagaagttatccatgtcaaaatcaattcttcatggaaaacatcaggaacatcagcctataaattctcatcrtaaacactaaaacgcatgtcagaatgagagtttaaaaacccaaacataacctcaaatgtgaacatccccaaataagtctttgctattacgttgtaaacagcaaaataaccacatagttagaggagagatccttttcccctataatgcaggtatttttagaattggtattcttagattgaagtaattaatttcataattccataggatttcagcaaatcaaaatatgtgcatcactggaattctaataatcatgaacaaaagaagccttggaaggtgcataaaataaggagagttggaaatagtcaatatgcagctggaatagtattttggagggagtttgccaaaagaccatcaagtattctatagagtggagggtggaagatgagaccaagagggatccatgaaagataactgatattgagtacctgtggtaaggcaccatgggctacaagaacatataagacat

SEQ ID NO: 867140 - DNA, 610 bp, Homo sapiens
ttgacaaataagacatgctggttttattaagtaatatacatgcttgttttgtaaggtgactatacaaatcgtttctgctatggtctgaatgtttatgtccattcaaagtccacaggttgaaaacctaagcccaaggtgacagtattaggaggtgcagcccgtggaaggtgattagatcatgagtatggggccctcacgattaggctaattgcctttataaaagagacaatagagagtgagataacctcttcaaccatatcagaacacagctagaagtccccatctatgtgaaatcaggccttcaccaaacatcacatctgccagtgacttgattgtgaacttagcctccagatctgtgggatgtaaatttctgttatttataagctacccagtttatggtattttgttataatagccaaaatggagtaagacagtgtccagatgaaatacatmtgatgggaagttttagaattacaagactctcagacccctaaatgctgataattaatgtagaatttaaggaaagacctccatagtgctaaaatgatacaagtataattgatcacaaagcattgtaaatacgatcatagtcatagacatcaggagtcaa

SEQ ID NO: 867141 - DNA, 612 bp, Homo sapiens
ttggttgcctcatttttttgtttcacttttcctggttctttattattttaacctgctaaatatctttaagatatgctcacttttttctatcttcattgctacttcttaggtaataccaccatcatctctctcctagatgggtaaaatagttcttatactgcttttctgttatttctctgtggcttagtcagcctaggctgctataacaaaacgctgtaggctgattggctgtataaatttgtstcacagttctataagtccaagatcagagtgtcaggatgctaggatctcataagggctctcttccttatcacacactatagcccccttgttgtatccttgcatggcaaaagagagctagttactttcttatttcttcttatggagggactaattccattcacgagggctctaccctaatgaactaattacctctcaaaggccccatctccaaataccattatattggaattaatgtttcagcatatggattgtggagaggcacaaacattaagaccattgcaccctctaatctattttttacctatcaggcagataagccctttcaaaatataaagccaacctaataaatcctctgaattcaagcattta

SEQ ID NO: 867142 - DNA, 603 bp, Homo sapiens
ttctccggagaggcacaaacaataggaggtatattatatatacctgagaatccagggaatcactggtgtgagtccaacagcgggagaacctggggtttcaaagtccaaaggcaaaagaagggcatcccagttctagaagcaggagaaagagagagagagagcagtaattggctctttctcctttttgttccatccaggtccccagccaattgcatggtgcacatccaccaagaaaagattgaaaacagagtcttccccactcagtccaacaactcacataccagtctcctccagaaacactctcacggacacacctgaaacagcccamtaattctaatcagatgtcaaaccatcttgtttccctttcaacagaagagggatatgctcagtgtctactgaagcactgagaataatacaatgattgagaataatcctttaccagctatctgggtatcccttaattcagccaagttgacgcccaaaatcaactattacaagataccattataactctgtcccaaacattgagtgttaagtcagcagctaatgactgaggtattataataggagaagaaaaaaaatactctgatctcctattttaaa

SEQ ID NO: 867143 - DNA, 687 bp, Homo sapiens
caaatatgagttttgttggagctgggcaaaatggacaaagggattgtttaacattttgaggatattatgtgggaattgcaggcctagttctagtgccaggaaatccatgtcacagaattattagccccattctttctcagcctcatcaagacactccaccgaatccatcaaattttgttcttgtcttattatttattgattaattaaatgacatattcgatattccacagggtattagactaatattcttaaatataaagaaggcactttaatgttctcctgttgaaagcaattttgaaccaccagtaatttaattccaaatgtttactaatgtttcccttacatttttctcattacttctccatctttaatttatcaaaataatctccataatctgcttcatattgatcttttgctgataccaggacattagtttttattatacaaatcatttttttttccaaaatgtgatttatttatagttctccaacattttgtttagtggcattcttagcttaagatacgttctaaattgccratgcaagcagtaacagtaaaaatgtatttttttactacatgtatttttctatgtagaagacattcaattaatgtcttcaaatgtatacttagtagaagatataagatatactcatatgtacaaagcttttactatttactaggaatttt

SEQ ID NO: 867144 - DNA, 648 bp, Homo sapiens
gtatttttattccatcgttatatcctactcagatttattggctatttaaatgaaaagaaaaaaaaaaggttgcctgccatgtacatttccataccttatttccttttaattttcactatgaccatctgcagtttgttttattaaagaccagaaaggttaactgaattgaaaaaaaatcactcagctattaaggacctgagccagaattagaaacaagcgctatgtctttctaaatatataacaatttttacatgaagagacctttactgctttacggctgacttctttgtgggatggtatttgctccactctgaaatgataagactgtgtataaaaactttacctgggatagagagggacctttcaaagttcagaaaactgayggtgcaactggatgccagactatgaaacagaggtagatctaattatcagaaagctactaacaaggctgtagaagataaaagatctgtgcagtcttaaaggtgagagagaagaaaaatgtgcttgctaccaccacttctattaaatatttttgttacaaatcctaaccgagaagaagaaataaaagacatcaaatttaaagaggaaaaagtaaatatgttattatttacagataatgtgatcattatgttgaatataatgaacaaa

SEQ ID NO: 867145 - DNA, 674 bp, Homo sapiens
taatgaaactaataagagaatcacagtggtcaaaggcagtagtttgctagacctgctgacattgattctcaagaactaatttttaacaataatgtcttgtaatttcaaaatggctagaagggaggattttgaatgttctcaccacagagaagtgataagtatttgaggttatgtatatgctaattaccttgatttgattattacacaatgcacacatgtattgaaacatcacactgtatccataaatatataccaatatcatgtgccaatcaaaaacaaaataaaacttaaaaaaaaaattgacaaactgaacccawgaaaaagttaaatttcctgttcatcaaaagataccattaagaaaattacaaggaaaaccatgaactgggataaaattgcaatccatatatccttagaaaaagacttatgtcttgagtatacaataaactctttccaatgaacaataaagatagacaatgtgatttaacaattggcagaagacttgaacagacagttcaccaaagaagatacatggatggtcaataatctcatgacaaggtgatcagcattattggccatcagggtaatgcaaatgaaaacccaccatgtaaggtcatttcaacaaattagaagctataaaataaaaaaaagtgacaatgtaaaagaatagcaataat

SEQ ID NO: 867146 - DNA, 674 bp, Homo sapiens
taatgaaactaataagagaatcacagtggtcaaaggcagtagtttgctagacctgctgacattgattctcaagaactaatttttaacaataatgtcttgtaatttcaaaatggctagaagggaggattttgaatgttctcaccacagagaagtgataagtatttgaggttatgtatatgctaattaccttgatttgattattacacaatgcacacatgtattgaaacatcacactgtatccataaatatataccaatatcatgtgccaatcaaaaacaaaataaaacttaaaaaaaaaattgacaaactgaacccatgaaaaagttaaatttcctgttcatcaaaagataccattaagaaaattacaaggaaaaccatgaactgggataaaattgcaatccrtatatccttagaaaaagacttatgtcttgagtatacaataaactctttccaatgaacaataaagatagacaatgtgatttaacaattggcagaagacttgaacagacagttcaccaaagaagatacatggatggtcaataatctcatgacaaggtgatcagcattattggccatcagggtaatgcaaatgaaaacccaccatgtaaggtcatttcaacaaattagaagctataaaataaaaaaaagtgacaatgtaaaagaatagcaataat

SEQ ID NO: 867147 - DNA, 674 bp, Homo sapiens
taatgaaactaataagagaatcacagtggtcaaaggcagtagtttgctagacctgctgacattgattctcaagaactaatttttaacaataatgtcttgtaatttcaaaatggctagaagggaggattttgaatgttctcaccacagagaagtgataagtatttgaggttatgtatatgctaattaccttgatttgattattacacaatgcacacatgtattgaaacatcacactgtatccataaatatataccaatatcatgtgccaatcaaaaacaaaataaaacttaaaaaaaaaattgacaaactgaacccatgaaaaagttaaatttcctgttcatcaaaagataccattaagaaaattacaaggaaaaccatgaactgggataaaattgcaatccatatatccttagaaaaagacttrtgtcttgagtatacaataaactctttccaatgaacaataaagatagacaatgtgatttaacaattggcagaagacttgaacagacagttcaccaaagaagatacatggatggtcaataatctcatgacaaggtgatcagcattattggccatcagggtaatgcaaatgaaaacccaccatgtaaggtcatttcaacaaattagaagctataaaataaaaaaaagtgacaatgtaaaagaatagcaataat

SEQ ID NO: 867148 - DNA, 674 bp, Homo sapiens
taatgaaactaataagagaatcacagtggtcaaaggcagtagtttgctagacctgctgacattgattctcaagaactaatttttaacaataatgtcttgtaatttcaaaatggctagaagggaggattttgaatgttctcaccacagagaagtgataagtatttgaggttatgtatatgctaattaccttgatttgattattacacaatgcacacatgtattgaaacatcacactgtatccataaatatataccaatatcatgtgccaatcaaaaacaaaataaaacttaaaaaaaaaattgacaaactgaacccatgaaaaagttaaatttcctgttcatcaaaagataccattaagaaaattacaaggaaaaccatgaactgggataaaattgcaatccatatatccttagaaaaagacttatgtcttgagtatacaataaactctttccaatgaacaataaagatagacaatgtgatttaacaattggcagaagacttgaacagacagttcmccaaagaagatacatggatggtcaataatctcatgacaaggtgatcagcattattggccatcagggtaatgcaaatgaaaacccaccatgtaaggtcatttcaacaaattagaagctataaaataaaaaaaagtgacaatgtaaaagaatagcaataat

SEQ ID NO: 867149 - DNA, 569 bp, Homo sapiens
gtcattctctgactcacttgctctgtgaaaagtcagctgccatgtcatgagcttcctcatggaaagagccacatggcaaggaactaatgtttctaggcaataaccattgaggacctggggcctgccaatagacacgtgagtgagctctagagtggatatgtctaggacttacaggtaggccttaaaatgactgtggccctggccaacaacttggatatggcattgcgaaaagtgtgagccaaaagcacccagctgaagcctaatcccagatccacagagactgagatagcaaatgcttgttgctttaaacctctatgttttggggtatttgttactctgttattatctgttgatagtaatgcaggcagattctttgtttatttaataagtctctcawcaatttatcatttgcacaaattctactctgttctgtcaatgattttatataaaccaaagatttagggaaaagactcactatcacattgttttctggtaaccttttatttcctatttatgttccaaataatgtattatttaattacatagaagattagaatgtcaggtgatcc

SEQ ID NO: 867150 - DNA, 631 bp, Homo sapiens
ttctggtcacattcttcacagctatttacagtacatgaatcatcttttttatccttcttactcgacccaactctctctgcagctctctgcaattctctcattggtgataataacccataaccaattaaatcagtctttaaaatgtcagtagttatgtctgaaatattctatgaaattccagatttaaaagagggaagtctaggagttgaaggctatagtgagccataatcatgccactggtttcctgcataggtgacaaagcaagaccctatctctaaaaaataaaaaaggaaattaaagaggaaagtcagatttttcaaggaaataactaagaagcaattaaatttaaataggaaagaaggcaaataaagaaaaacttgctagttaaatccagaaccctgtgtcagcttccattgccccacatgggcacaataaacttgcctgtggtttaccagtcaaggtgatttttctagagcttcatgttyttgtagcccgtgttaagaaaacttctttaaaaaagtttttatgtgcagcaccacagacttctgacaattgtaatactcctttcctatacccacagtagaggaagcacgtgagttttagaaaggaaaatgatgatttacaagtcttg

SEQ ID NO: 867151 - DNA, 652 bp, Homo sapiens
tggaatatttgtatttatattattttagtaattatgtttgttttatgcttttataatgccctagtaccactttttaaaaaattaccttttactatctaagttgtcagttttaaatagtatcctgccaactatttaggtgatgggttgactaccatcaaccaactattcaataataaaagaattattttgtcttccttttgttgcccctgtcttagtcraagtagtgttatttctaatttgtattttaatggacctggtgcttttcaaggagtagtttcttggtctcctactaatttttgtagtatagcttcatctccagtttattgatgtatatctttttgcttttctctgaatgcaaaattgactagataatgctcactataaatctttggcccaaatttccccaatttggttggatgcagtttatcctccagtaaattcttcaagcatggcacatgagtacagtacttcctgatttcaagtttatatccatgtttaaaaatatttttctgtatgaaaactttggtttgtactttctttctttgagtttctgaaaaacgtggttccattcttttcttgtgtttatgttgttcttcagaagcttggtattagcttaatttttttgctcttgcaagtaatttggtccttccac

SEQ ID NO: 867152 - DNA, 653 bp, Homo sapiens
aaaaaaaaaaaaaaaagtaggagtaatgtaattgggggccatcttagaggccagctactataaatgcatttatgaagccctactatgtgctaggaagggtgaccatcattggttaagaacctatgttatctgctatctcatgaacccttcaaaatctctagcatcttgcacagtgcctgtgcagagtagtagctcaatttaaaaatgtgaactcagtgaacatcctgagatacagatcttataaccccarcctctccaccttccagccctcttggtaatgaatggacagctgaggcccagctctatctagctgcttgcctgaggtcatataaccaataagggaatgaggtgagattcaagcccaagttatctctggcttcaaaacctgagtgtttgctgcctctctgggctaccttaatagatacacttcattacaaagtggatgtccacagcctcccagcccgggaggactcagagctaggaggccatcagcagagagcatctcagtggctcttttcaagagcttgaggcccctgaaggctgaggtcccctgccaggctgccaggccaagctgcccctgaggaggccagggaaaagcacagggtcatctgtttacactatttccagctctacctgtgtttttcacttcctgt

SEQ ID NO: 867153 - DNA, 577 bp, Homo sapiens
ccgcaaaacatatggtcagaacatgtaccagctatgggcatataaataaaccaacagtgaaacatatagtcaaatgatctaccagccatcggcacatggactaaaggaagctaccctcctctcgaggtttacataagggaaaaaagtaacacaaaggaatcccaaagtgacaacaaatgacgtattggaaaagaaaggccagaatgarggaaagtaataaggatatagctgtggcacaatgtgttctagttcctcactgtatgactaggagtcacacatgcctaagcggaatgaggataaacaagttcatattcaaattcgtgagggcaatttttcccacatctctgatctagcttccttaacccacaggaataatatttttgcagaaaggaatgtcagaaaatggaagatattagaagtatttaatacagcaccaagattaagattttgagtaacatacagaccagtaggtaatattaaaaataatattatagttttgtaaagattaagtgtgtttcaaattgactatcatatactagacatttgtgaattagctttttgcattcctaattatctt

SEQ ID NO: 867154 - DNA, 643 bp, Homo sapiens
aaaaaaactaaaacacatttgcacataataactaatcaactgagtctgctccactgtatatgcataacaattaattcattcacagcttccagatatgtcacaacccaacaagataggtaggttgtttttcccacctttagtaatgtagggttaaaaatattaagccccacaattccatttttattgaaatataaggtatatgactgtttaggagtacayacatacgtgtacatgaatatatttatgtgcacacatgtgtatatgaacatgtgtgtatactctagaaatatatcaaaaataaattaatggtaatttcctaaaggaatatgggatttggatcagcagagggctctcccctcttattttgtatatattaatggggaacacatttcttattttgctttaatagatatgacataatcctgaattcaaaaaattaaaaccatatcaaatagtaaacaatgaaaaagtctctttttcatccttgtccctttgtctctaattcccttctctacaagcagccactgttaacagtttcttgaatatatgctttttaaaaagttgattgttgtaagagaaacaaaagtgatctacccacacaatgaaataccactcagcaataaaaaaaaaaataagtactgac

SEQ ID NO: 867155 - DNA, 542 bp, Homo sapiens
attaagggccctagaaatggcagtctgggggagtaaatattcatttttttcttaatttcttttaaaaatggttaaaagcaaaaagaacattgaattatgatgttgtaacgtacatagaaggaatatacataacaagagaacaaataataagggaagttaatagaattttactaccgttaggttcttacattttgcatgaagtgattaaatattgattctaagtagactctcataaattaagggtgtacactgtaattcccagagcagscactaaaactaaaacagacgcaacaaaaaccccaaaccaaaaaacccagcagtatagctaagaagccagttaagaaaatagtatctttttaaatattctatttacccacccacccccaccaccaaagagggcaggaatagaataaaacaaagaacatatgagaaaaatagaaaataaatagcaatgaggtagacttagatccaatcatatcaaggttatattgaatataagtagactaacaccccaattaaaaggcgtagattgtcagacttta

SEQ ID NO: 867156 - DNA, 659 bp, Homo sapiens
tctatacctaaccatggaggcaagtatcagcaattgtctttctttcctctagctagtggtactccctctaagcccccatgggcagaccacaagcattcgtgaaccacctgccaagttattgtcacaaccacataatacctttcacattgtctagtcccaaacctcaytgcctctcaccaggactccagcaatggtcgcccagcccctgtcttcactgccacacttgctttctttcaatccattctccacatacgaatagccaaagagatccttttaagatataattcatatcctattactccttacttaaaaccctccaatggcttcccaaaaggtttggaataaaacccaaacactttacccaggggctaaaagataccgcacggtgtggcccctgcaccctcatcttggcccagtcctgccaccgaccaccgtgctgcagccacccaggcctcactctattccgaatctcgccaagcttctgctcataggcatcagtattgttttcatgctgtggcctcaggaccagaaagaatcatgagagggatgcaggattcaacagaagcagttacagtcctgccctacaaagagaagtggggcacagatttaaaattgtcctgagatggagaaattactgaagaaagttagcaataaacttt

SEQ ID NO: 867157 - DNA, 659 bp, Homo sapiens
tctatacctaaccatggaggcaagtatcagcaattgtctttctttcctctagctagtggtactccctctaagcccccatgggcagaccacaagcattcgtgaaccacctgccaagttattgtcacaaccacataatacctttcacattgtctagtcccaaacctcactgcctctcaccaggactccagcaatggtcgcccagcccctgtcttcactgccacacttgctttctttcaatccattctccacatacgaatagccaaagagatccttttaagatataattcatatcctattactccttacttaaaaccctccaatggcttcccaaaaggtttggaataaaacccaaacactttacccaggggctaaaagataccgcayggtgtggcccctgcaccctcatcttggcccagtcctgccaccgaccaccgtgctgcagccacccaggcctcactctattccgaatctcgccaagcttctgctcataggcatcagtattgttttcatgctgtggcctcaggaccagaaagaatcatgagagggatgcaggattcaacagaagcagttacagtcctgccctacaaagagaagtggggcacagatttaaaattgtcctgagatggagaaattactgaagaaagttagcaataaacttt

SEQ ID NO: 867158 - DNA, 643 bp, Homo sapiens
gcccaccctctttcattagttagctctaagctcagaagtcacttgctcagacctcaggctttttgcccttgtttattctaaaacttcgctcttatttctacttgaaacacacacacatacttgttacctccccacccagaaggtgacccatgggagyagggctgcatccctggaggcccctgttgtatccccagggcacctgtgtgctcatcactgtatacttctcattacctacaatgattttctttattggtttccttccgagaacataaactccctgagaatcaggactttctctgccttgtttggagagaaacctctggaccctccaaacttaaacatttcctggcacaattatttgttgaaggagcgaatccacttgcttaaagtttttgtcccaaaatcaaccatatctttcaacttaggtttagcctctccctaagcaataatatcgagaacggcctgggtaaaatgtgctagctgcttgttttcctaatgcacattaaaataaatgcagagctactgaagtaaaaacattgttatctcaaatatctgccatcaaaaatcaccttgctgccatcatggtctgtacatctaacttgggaaacactgcaatgagcaactgtcctgctaaagggcccct

SEQ ID NO: 867159 - DNA, 643 bp, Homo sapiens
gcccaccctctttcattagttagctctaagctcagaagtcacttgctcagacctcaggctttttgcccttgtttattctaaaacttcgctcttatttctacttgaaacacacacacatacttgttacctccccacccagaaggtgacccatgggagtagggctgcatccctggaggcccctgttgtatccccagggcacctgtgtgctcatcactgtatacttctcattacctacaatgattttctttattggtttccttccgagaacataaactccctgakaatcaggactttctctgccttgtttggagagaaacctctggaccctccaaacttaaacatttcctggcacaattatttgttgaaggagcgaatccacttgcttaaagtttttgtcccaaaatcaaccatatctttcaacttaggtttagcctctccctaagcaataatatcgagaacggcctgggtaaaatgtgctagctgcttgttttcctaatgcacattaaaataaatgcagagctactgaagtaaaaacattgttatctcaaatatctgccatcaaaaatcaccttgctgccatcatggtctgtacatctaacttgggaaacactgcaatgagcaactgtcctgctaaagggcccct

SEQ ID NO: 867160 - DNA, 582 bp, Homo sapiens
agactttatgtattgttatacctctgaaggtgtgactggcatctagtaggtagagccagggctgctgctgaacactctccaatacacaagacagtctcctacaacaaagaattatccaaggcaaaatgtcctgaacaccaaggttgagaagccctggtttaggtcaatggaaccttagtccttcagactataaacctttgttttggtttcagagcctcttatcttcccttaaacagaaactgctcctttacaaagcagagaaacagcaccttcagaacattttttaaaaatcagcattctcaggaatatttataatccctagcaaattcaaagccgttgtaaaatacattgacccaaaaccctaagaacctgaggaatttataattgggatattctatgaataagtaaaataattcattcaaaaacagaygactattgaaaatactgacctctcctttcagggaattgcagagattttattgtttctttgaagaacactgcagtacaacaaagatagaagaaaagttgtgactcagggtacatggtaaggatgccctttgaggacatatggcacagccggga

SEQ ID NO: 867161 - DNA, 582 bp, Homo sapiens
agactttatgtattgttatacctctgaaggtgtgactggcatctagtaggtagagccagggctgctgctgaacactctccaatacacaagacagtctcctacaacaaagaattatccaaggcaaaatgtcctgaacaccaaggttgagaagccctggtttaggtcaatggaaccttagtccttcagactataaacctttgttttggtttcagagcctcttatcttcccttaaacagaaactgctcctttacaaagcagagaaacagcaccttcagaacattttttaaaaatcagcattctcaggaatatttataatccctagcaaattcaaagccgttgtaaaatacattgacccaaaaccctaagaacctgaggaatttataattgggatattctatgaataagtaaaataattcattcaaaaacagatgactattgaaaatactracctctcctttcagggaattgcagagattttattgtttctttgaagaacactgcagtacaacaaagatagaagaaaagttgtgactcagggtacatggtaaggatgccctttgaggacatatggcacagccggga

SEQ ID NO: 867162 - DNA, 634 bp, Homo sapiens
tgagtgtagagagtttcaagatttgtttagtccttattttaaacttttgcttcccttcctcagtattattaggtgtgttcttgggttgagtttggaaagctctgctttttctgtctttctttctttgtcctctgggttcctttggtaacatttctagtcctcatactctttctccttgatatggtttggatgtatgtcccctctaaatctcatgytgaaatgtgacccccagtgttggagatggggccaggtgggaggtgattggatcatgggggacagatccctcatgaacgaagcaccaaccccttgctgatgagcgagtttttgctcaattagttcacatgcgatctgggtgtttaaaagagtctgggacttcccccttctctttcttgctccctctctctccatgtcatgcatgggcttccccttctaccatgagtggaagttccctgagggctcactaggagcagatgcccacactatgctttctgtaaagcctgcagaatcgtgagccaatctataaagcctgcacctttctgtgaagcctaaagaatcatgagccaattaaacctcttttctttataaattatccagcctcgggttatttctttaaaacaatgcaaaaaagaaaaaa

SEQ ID NO: 867163 - DNA, 581 bp, Homo sapiens
aatgcaggaaggtgccagtcagggagctggcagatgtctcttcaaaacaaggggagcgttccctcaaatatttgcctgtcagccttgcggaggcgaccatttttagctcttcaataaattgtccctttgtggcagtagcagctaarcctcctgacgtcatctgcaggaaccttatttggttttgttggggaagcatttcaagctgagaaatgcacatgcctcctcccggatgtgacattcatctgctgagctcagcccacacacctgtgcctctcagcaaagccacatgtgctgtttcgggcagaggttgacaaacgtcaaggctggctgctctcagttgctctattatctccttcctgctgctgtcttccggttcccctcatttttcgtgcatttgcaactgttgacaggctgggttgctgagggtggttacctctgacatgcactcctcctggcattttctgaatatcatcgttctgaagtgtgtgtcccccaacacgtgggtggagatgaatgggtattccatattcagtgattggaggtaatgctggatttattctctgacatgaattttgtgattg

SEQ ID NO: 867164 - DNA, 614 bp, Homo sapiens
ctaaacaatgatgattaagttctatttttttcaggataagccagttgtgctgggataacaacaacaacagagaataaaagaaggagttatctcaaagttctccaatttctgccacagtgagaggagagttctctggagagtcttgcagcagcaattaacttatgtgtgaactctaatatgttcaacatctatattattgagcagatgttcaacatctgcttgaactccttggcccaaactagttacatagctttactctcacatggggttctcagacagaattcattcaccaaggaggccaagaaccaaagagattcagagaatgccccacatgactaccacaaactcctcctatcctgatcatggctagtgtagccattgtattgtctttacaacagtggctagaggcctggaacctatcagccyggccctcttttttttaaggtatattttttgtgatacttagtgaaagcttaaccactaaactctattgattactattgctgaggacttggcaactgttaaacaaatatgtgtctgtactttttcaccaatgtagacaaagatttcaactataaacacacaaaaataatattttaagcagaacactttac

SEQ ID NO: 867165 - DNA, 662 bp, Homo sapiens
aggctgtggcagctggttcaaagttgaaaacacaatatggtgctttggctgaacatgtgactggcttccttttctaatgctgctagacattctccttgctgggtataaatgtttaaaatatgatgaaataagcctgttagcttatcaaacaacaggtttagataaatgatgaactggagagcctggagtttatttgaatttcatctaaaatacagaaaagaatcccataatgatatctctgaagaatgcttgaaataagaatgtaaaagcagtggggaaaaagacactcaaagtacaaaattaaggcaaagtgcattcatgcccatagtcagttggccataaaaggtggattaatcagatatcacctgaagctaaaccagttactttgacataattggttactgaaaagaggagacagaattatatgtttaaaaaaccattgactcacttgcattatgttttcaatctattttctaaattttaaacgtctctatgacataacrttttttttcagtgtaacatgttcagattgaaattgggtggttgtagggtgctgggagagattttataatgtttgtgtcagatgtgtccctaggaaagcataacagggaaatgtgtgggtgttgagtggtttttaaaggtggcattgcaaagagtacgtt

SEQ ID NO: 867166 - DNA, 650 bp, Homo sapiens
tcaaattaaaatgctttaccctttcacatctattataaagaataaaattcaaaaaactgacatcagcaaatgttggtacagatataaagtatcttgaaatctcagaaattacttatgggagtataataagatacaactactttggaaaactgaactttcatataaagttaaacattatatacagtcacccttaatactgacatttccctctcaaatttattaaaaagtaacggaagtatatttccaaaaaatctcacacgcacacacacccacacacacacacacagagagagagagagagagagagagagacagaattttgatagtggcttatttcacataatagccaaaaaatgaaacaacccattctacacttgtcgatcaagtgtagaatgggtaagcaaattgattgttcatacaatggaatgctacttaacaatggaaaaayaatgagcaactgtgtattaaacaagaggaatgagaccccaaagcattatgatgaatgaaagaagccaggaaaaaagtagctactctgattttatttatagaagtccaaataaagatacactgatctatagggatagataagagagtagtggctgtccataaggaggggaattgattgaagaagtacacaaaggaactttcag

SEQ ID NO: 867167 - DNA, 650 bp, Homo sapiens
tcaaattaaaatgctttaccctttcacatctattataaagaataaaattcaaaaaactgacatcagcaaatgttggtacagatataaagtatcttgaaatctcagaaattacttatgggagtataataagatacaactactttggaaaactgaactttcatataaagttaaacattatatacagtcacccttaatactgacatttccctctcaaatttattaaaaagtaacggaagtatatttccaaaaaatctcacacgcacacacacccacacacacacacacagagagagagagagagagagagagagacagaattttgatagtggcttatttcacataatagccaaaaaatgaaacaacccattctacacttgtcgatcaagtgtagaatgggtaagcaaattgattgttcatacaatggaatgctacttaacaatggaaaaataatgagcarctgtgtattaaacaagaggaatgagaccccaaagcattatgatgaatgaaagaagccaggaaaaaagtagctactctgattttatttatagaagtccaaataaagatacactgatctatagggatagataagagagtagtggctgtccataaggaggggaattgattgaagaagtacacaaaggaactttcag

SEQ ID NO: 867168 - DNA, 674 bp, Homo sapiens
aatagtttaatatttaaaaatatattaatgtaaaaccaccttaacatacgtttgaggaatagttataaaattatttcaatatatgcataaaagtaattcaattttcaacaatctacaagtcaacattcattcacagtaacatttattgttagcaaagtgggaatagaaggaaaagcctaartctatttaactttaaacttttgaaaagtgtatttattaaaaatttacagcaaataagataccaatttaagaaaaatttagaaatgatcctattaaagtcagacagagaagacacctattatctctgcagggtgatgttgaacttgaaatgttagtcaagaaaataagacaacaaagaaaaataagacatataaatgggaaagaagaaattacattactttatgtgcagataatatagttatttacattaacaatctgttagaacatataaactattagaactaatagtgttaggcaggattgccatatataaatgacatataaaaataacatctctatacacgagcacaaagaaaacaaaagtgtaatagcaaaaaatacattccatttaaaatggcaaccaaactgtaactatgaagtttttagaaaccaatctaaccaggtataaacaagatgttcttagagaagatgacacaatttgagaaaaataaaag

SEQ ID NO: 867169 - DNA, 564 bp, Homo sapiens
ttcatgatataatcataggcacctgcatttggaaaatgtggagaaaatgcctgtagccttaagttttggagacttagatcacttccttctaattattccctctgaaatatgtttaacacaaaattgcttcttctaacattactcattttgaattgtcaatgtcatatyattgttgactttttgagaaattatggtaagattgggtcctttgtgatataaatgtttatacaaacatattttgccccttgtgcctggtaatattgttagaacgttatagtttctcttatattcaggttacctagcctagcaatctgatgacgatctcacaggtaaagaaatcctgggagacttagtctggtgatgctctggttagacaataaatgtttggaattcagtcttgaaagctctgtaggatgttgaagtccctgctcctcttcctaagtctcgattccatacttgtcttcatcacacaaattcattttgtttattacatgttccttttgataatataatacaggcacaattatctaaagttaagtattttacaataacttagaagtcaag

SEQ ID NO: 867170 - DNA, 590 bp, Homo sapiens
agtttaggagtgtaaatatttatataagtttagggttgtggatatctatataagttagaggtgtaaatagctacataagttagggtgtaaatatctatataagttggaggtatagatatccgtataagcttcgggacacaaaaaactacgtaagttaggaaaatagatatttatataactgttgaggtgtagatatctatgtaagcatagagttgtagatatatatagaagtctgtgactatagatatatatttaaattagagcataaacatctatttaagccctggtggaggctgtgaggctctgagtttttatagtgaaggtcatatatatattttgaagatgaggagacatttgggtgatgctatcagagacagaagatacagaatgcccaattaggaggaactcacagaattcatttaccttcttagaaggyggtggattaacatgaaaaaagagtcagtctaaagggtagaacgaaaggcattcttaccaaaaatctgaactattattccaggtagtgttgctttatttaatttcctcatctacaagattataataaattttatactaattgagttaaattctat

SEQ ID NO: 867171 - DNA, 627 bp, Homo sapiens
cctttcttctacccaaccttctaattttcacccctgaacctctaccaccgttgcatgatgaaaaaacccagagatgggcaagacctcctcctaagacaggcactgtggatcattggaagctaatgggcattctctgaggtataatcagcagaacttaataaaatgaaagcttaacagtggaaaaaatgcaggaatgagttctgaaatataataggaagacaataataataccataagtgcttaccacatgccatgcgctggagtaagattagtcctcccacaaacatggcaaagtcaagaatattacctccatttstcataggagagaagcagctaaacactccacgacatgatgtacatagctctgggttaacctcactaacttctgatggtacaagaactaaatgttagatctctgtaactccaaaacttaatgtctttctattatatcagaatcttagttattaagctgtgtttctaagagctcaaggaagcagcaaatattcaaagaaggccaccttcataatagattggagtaaagaagaaaaagaaatacttaagaaatgggttttaaagtatggtcagagttagctatgctgaatagatattttctacaatactgtgttg

SEQ ID NO: 867172 - DNA, 583 bp, Homo sapiens
tctgtgaaggaattctcaattagcgctaaatacacgcatgctgtgtctcctacttccctgcacagagcactcactttcacagggatttcaaggcttttttttttaagtgttatgacattatatattaatataatttgtttttaagctgcttatatttattaagcccagaatttttatatagatcaatattctactggagcaatatcttggctattctaataggtgtgggctgaagttagagaccagatagggatgagagtgctaccgagatgcakgaaatccaggctccatagtgacttcagaccattgattccacccatccagcactcagtgcttcacggatcaagttaattagatctctatcatgtttttatgcaatatagagatctagttaactttatacacacacacacacacacacacacacacacacacacacattcccaagaggcattgccaaaatggagagtgtaaacagtagaacggtgtagcagacaaccttttctgtaataagaaaggtagaatgggaaaatcttgggaaggatctgtaaacaacaaagaacaatattgatatgtttaagag

SEQ ID NO: 867173 - DNA, 621 bp, Homo sapiens
cattgctagattgtttacttgaaatatttctactttattgatgtaggcatttattgctataaacttgcttcttaatactgcctttgctgtgtcccatacattttggaatgttgtgtttctgttttcatttatttcaaggaatttttaaatttcattcttaatttcttcttttacccagtggttgttcaggaccctgttgtttacatttcatgtatttgtatggttttaaatgttcctcttgttactgatttatagtttatttccatgtagtcagagaagatacttsatatgatttcaaatttttaaaattttttgagatttgagtcctaacatatggtcagtcctggcatatgttccatgtgctgatgaaaataatgtgtattctgcagctggtggatgaaatgttctgtacgtgtccatttggtctatggtgcagattaaatttgatgttactttgttgattttctgtctagaaaatctgtccaatgctgacagtgggatgttgaaatccccagccattatcatattaggatctacctctacatttggatctaataatatttgctttatgtattgagtgctctgttattgagtgcatatatatttacaattattgtattc

SEQ ID NO: 867174 - DNA, 621 bp, Homo sapiens
agcacttagataagtaaatacaagataagcagagaactcttagtttatgtgcttatatcatgtatttggcatcagatgtggttgacatgaacagtagatcctttagtctgtcttctactaattaaaattggttttccaccttctttctacaaccccaattagtttatcatttagtttatcacaaaaatctctattttgtatcaggcaccaaaatggtgtgtgttcaaaatacagagctataattcatgttttccagagaaatatttactttaaatcatgtacaagtgtccctcttgcctcttttatattatcatatatagaattatctattatatgtagtcttttatgaattactttaacatttgcttttttgtttgttttttgagacagagtctcgctcacccaggctggagtgcagtggcacaatcttggctcactgcaacctcygcctcctgggttcaggggattctcctgcatcagcctcctgagtaactgggattacaggcacccaccaccatacccggctaatttttgtatttttagaagagatggggtttcactatgttggcaaagccagtctcaaactcttgacctcaggtgatccgcccacctcagcctccc

SEQ ID NO: 867175 - DNA, 621 bp, Homo sapiens
agcacttagataagtaaatacaagataagcagagaactcttagtttatgtgcttatatcatgtatttggcatcagatgtggttgacatgaacagtagatcctttagtctgtcttctactaattaaaattggttttccaccttctttctacaaccccaattagtttatcatttagtttatcacaaaaatctctattttgtatcaggcaccaaaatggtgtgtgttcaaaatacagagctataattcatgttttccagagaaatatttactttaaatcatgtacaagtgtccctcttgcctcttttatattatcatatatagaattatctattatatgtagtcttttatgaattactttaacatttgcttttttgtttgttttttgagacagagtctcgctcacccaggctggagtgcagtggcacaatcttggctcactgcaacctctgcctcctgggttcaggsgattctcctgcatcagcctcctgagtaactgggattacaggcacccaccaccatacccggctaatttttgtatttttagaagagatggggtttcactatgttggcaaagccagtctcaaactcttgacctcaggtgatccgcccacctcagcctccc

SEQ ID NO: 867176 - DNA, 489 bp, Homo sapiens
tcacctagaattctctcctggactccactctccctaatgttaatcattaaccttttcttagggtaaggaacaaaggcagaagtagttctcaaatcaactttaaaatattttgtaaaaatcattcccacacagattgtatgattccatttagatgaagtatctggaatagataaatccatagagacagatagaagattggtggttgccaggtactgggaagagggaggaatggggaataactgtttaatgagtatgatgtttcctttcagggtgatgacagtgttttagargtgacgataatacagtgttgtgacttaaatgccactgaactgtccaccttaatatggttaattttatgtgaatttcttaacctcagtaaaaataagcaagtaattcctaggaaaatggatgaggttacataagggctgacttaactctgtgagcacattacgcatagagaaatatttctttcattatcgcacagaagaa

SEQ ID NO: 867177 - DNA, 489 bp, Homo sapiens
tcacctagaattctctcctggactccactctccctaatgttaatcattaaccttttcttagggtaaggaacaaaggcagaagtagttctcaaatcaactttaaaatattttgtaaaaatcattcccacacagattgtatgattccatttagatgaagtatctggaatagataaatccatagagacagatagaagattggtggttgccaggtactgggaagagggaggaatggggaataactgtttaatgagtatgatgtttcctttcagggtgatgacagtgttttagaagtgacgataatacagtgytgtgacttaaatgccactgaactgtccaccttaatatggttaattttatgtgaatttcttaacctcagtaaaaataagcaagtaattcctaggaaaatggatgaggttacataagggctgacttaactctgtgagcacattacgcatagagaaatatttctttcattatcgcacagaagaa

SEQ ID NO: 867178 - DNA, 642 bp, Homo sapiens
gcattactttttgtagttataaaaaatattctaaacttagattgcagtgatggttgcacaattctgtgaatatactaaaagccattgaaatctatactttaaatggatgaattgtatggcatatacattatatgtcaatgttactggcgtccgtgtgaagagaccaccaaacaggctttgtgtgagcaataaagttttttaatcacttgagtgcaggtggactgagtccgaaaaaggagtcagcaaagggaaataggggtggggcagtataggatttgggtaggtagtggaaaactagagttaaagggggttgttctgttgtgggcaggggcgggggtcacaaggtgctcggtggggaactcctgagattcattgtccgggagaaggaaygtcacaaggtcaattgatcagttagggtggggtgggaacaaatcacaatggtggaatgtcatcagttaaggcaggaactgactatttcacttcttttgtggttcttcaattgcttcaggccatctggatgtatacgctcaggtcacaggggttatgatggcttagcttgggctcagaggcctaaagtcaattaagctgttaaaaaaagtcgtctcactgactcactgttgaatttcaaggtgatacaattat

SEQ ID NO: 867179 - DNA, 636 bp, Homo sapiens
aaccagaattccacagaagctattgtaccgtgaactatgaggaaacagtctaagtatcactcctgtgtttatcaagtttaatctagtaatagattttacatatgtagaggaatggatgcatcatacatagaactacgtagctagaacaaacttaaattattgaattatcctactataattatttctgtaagcctggttttttgagaggcctgaaaagcctgatgaagtcttgtatgtaaatagaaaaactgcagccaaaagaccaagaatctcctgttgaaaattgtcttcttttactccaaagcccaaatggaagtatgctggtagtttcagattkctctttctcatatttgacttactgtacttcataagccattggaatctgttcatttgaacagtcaatttaatcccctcttttactttagtttctctgttaaataaaaaattattttgatgccattaagcagaactcatcatgtgaatagtgtcacatgagaactgtttaaagtgttgagtaaaacttacacttaaaaaattgtttttgaagattgatagcctaaatacactgttctcaaatagcttataacatttactctgtaggaaaattgctcatttgagttctcattcacaggtgct

SEQ ID NO: 867180 - DNA, 589 bp, Homo sapiens
ttctagcatatccctcttccctgcaaggctaattagaatagagatagaggacatctgttggcaacagcaaaagtaataggcaaaagacagcaaagaaaaaatacaggaaaacttcagctagcatatataggaactgaaaagcctagcaacagcctgtaatcttttatttgaatagcaagcaattttcaaaaccttaatagcccaaaggcattactctttggagctgtgcagtataactgatgttgaaaatagttgccctgagtcatcaagaaaacgccaaattacgtttagtgtactgtgtctaagcaggcatgtctcaaaattatttccatctaaaagagtgaaaataaacttttcaygtttaaatttattacaacttctccaccattccggaaactgctgctttatagaacagtttattccctgagggctccggatagctgaggttttctctgttacagttttattccttctagaaacacacacattttttcttacccatttcaaattaattttaaaaaccggaaattgaaaatgtttttattttaaagtaaactgacagtaactactagttatgaaacttctacac

SEQ ID NO: 867181 - DNA, 632 bp, Homo sapiens
acttatggtatttatcactcaaaatatttatttaaattgtttgttgattctcttcttctagttctcactaggcagagctggtgtctgtttctcacacccttgtatccccagagacttgagcaactatgcctggtacatcatagccttgaatatgtatttgttttgttactaaaagaaataaatatacagtgaaatgaaggttcaaggataaggttctgaaaagttttcccagattggatgggggaaaattaataagctgttctttgatcactttttgataaacctaagaagactaacttttaaaatgttttagcttatagtcccaactagttgaaggctgaggcaggagaatcgcttgagcccaggagttcaaggctgcagtgagctatgaaagcaccattgcactccagcgtaggtgacaaagtgagaccctgactcatttaaaaaaatgttttaaatttaaaaaatttgtaagtaataaaacattttaaatragagaaaagagacttactagctaattatttgtggaaatgacacatatatactctaatgaaactggtgatacaaacccatcttttttccctatttctctaatactcacacttgtcttctcatttctgtttgttttaatg

SEQ ID NO: 867182 - DNA, 604 bp, Homo sapiens
ttcttcttctcctttgacagagtctggctctgttgcactggctggagtgtagtggcagaatctcagctcactgcaacttccacctcccgggcttaagttatcctcccaccttagcttccctagaagctgggactacaggtgcatgctaccacaccgaggtaatttttacattttttgcagagatgggatctcactatgttgccaaggctggtcttgaacacctgagctcaagggatccaccgcctcagcctcccaaagtgctgggattgcaggcatgaaccaccasatgtggctgggacttctttttctggttctagtgttttcttctttttcttacgctgtggctgccaatgggtggcttgcttgctggctgacagcttctctactggtggtatccaggagatccagtggtggtcaggagacccagtagtatacactgtctagtgagtttcattggcatctcagcaggcagtttactagcaagttttgaaaagtaggtggctttcaaactaattttactgccactgtagctgacaggttcccagccatgtttttctggtatcttagcaagcagtgttttgtgtgtgtcagccttgactgtgat

SEQ ID NO: 867183 - DNA, 622 bp, Homo sapiens
gattaccttcacagaaaaatattaattaaattaaattcgtgttgtacaagaggcaaggtaatatataccacaagcattacacacagtgctaataacaataatgtttattggtgatgataacttcagataagtaacagagcactcaggggatctctgagcccctacagtggttccacaggggtgtgccttgtccagttagagactggacaagaaacaagatcactcaaagagaaggctctgccttcataccactatatatttcgaggttagtccaagtccttcattattctaagaaacaacatatatctcaaaggacctctgggcctaggaacaacactagggagtttgcattacaaaggaccaggrtctacaaaccaaggactttgagaacagcagctaaagaccctactgttcctctgcacatcagctcggtggctaagcaggtttgctgatgggtcttgggaacaagagaaggaagagagcccccatgcccatttagctaagactgagggtttattccttctcagtccaccccctgacccttggtgtggctcactagatatatgcgtccccatctgcaatagaaagcaattagattttaaatggtgccttcagtgtttgt

SEQ ID NO: 867184 - DNA, 652 bp, Homo sapiens
caggaagtgaaaaacacaggtagagctggaaatagtgtaaacagatgaccctgtgcttttccctggcctcctcaggggcagcttggcctggcagcctggcaggggacctcagccttcaggggcctcaagctcttgaaaagagccactgagatgctctctgctgatggcctcctagctctgagtcctcccgggctgggaggctgtggacatccactttgtaatgaagtgtatctattaaggtagcccagagaggcagcaaacactcaggttttgaagccagagataacttgggcttgaatctcacctcattcccttattggttatatgacctcaggcaagcagctagatagagctgggcctcagctgtccattcattaccaagagggctggaaggtggagaggytggggttataagatctgtatctcaggatgttcactgagttcacatttttaaattgagctactactctgcacaggcactgtgcaagatgctagagattttgaagggttcatgagatagcagataacataggttcttaaccaatgatggtcacccttcctagcacatagtagggcttcataaatgcatttatagtagctggcctctaagatggcccccaattacattactcctactttttttttttttttt

SEQ ID NO: 867185 - DNA, 658 bp, Homo sapiens
aaaaatcactacaattgtagcagttataaaggcagcaggagaggccaataggagttaaatcatattttatcagcaactagtaataaatctggaagttaatgtggcctctctagtgaggctacctctgaaattgtactttacacttgaaactcctgatcatttcacaactgaaacctaaacaggaggcaatgaagtgaggggaaaaaaaatactaagaagaataattaaaatgccaagatcaaggaaactcaattattgacttaagcaaaaaataatttttatcaaaaacaacsatattcctttactagaggaaggatacatcttaatctaacggttaattacagtacaattttgtagttttgagcttttaatttttattaatgaacatacaacatttaacaaacatatgcatctcaccacacattatttcccttggaaatagcagggctgcacatctctgattttctgtcttcttaatctaacggtgtctattaaataacatgacctcaaattcaacatatctgaaactgagctatttctacccccacatttcctctatgtgtgttcctgtgcaatcatctacttactagttcagttcagagaatgtagagtcacctaagcccctctcactctgcaacccagcccacaccacttaatc

SEQ ID NO: 867186 - DNA, 665 bp, Homo sapiens
ccaacatgtaaacattcgtggtcactctttttgtagatattcatgtttcaggtcaacccctggaaacaaaatggagcaagatttagtttcttctaagtttttagtggctcagatgtgagtagtagaatgggaaataggttggtttgtgccccrtgttttaaacatgtggttggtgaagaccaagcccagtaaagtctcccgtagtccctgtgaaacgttatggaaaggctgaggagtttcattagcatcttgcggatgcaagtttccagacaataaagggctagtttaaaacccttaaaaagagtcagcattatgtacagcttcgaaacagtttctctttgttgttccattgattcagcaaatatttatttgagtatctattctgtggtaggcattgttcttggtgcttgcagctgtttttccttcaccattttaggcaatttaggaagagggttaccttccagagctggtttgttttgaaatcagtgtcttctaggactttaattatctggtataaaacatatgtttaacattattttgttctccagtatcatattctgtgagaccttgatcttgccagttggtttgacttaaccattagagcccttcaaaatttagtctctgtggatttttggaaggattagtggacttttacttattcattt

SEQ ID NO: 867187 - DNA, 665 bp, Homo sapiens
ccaacatgtaaacattcgtggtcactctttttgtagatattcatgtttcaggtcaacccctggaaacaaaatggagcaagatttagtttcttctaagtttttagtggctcagatgtgagtagtagaatgggaaataggttggtttgtgccccatgttttaaacatgtggttggtgaagaccaagcccagtaaagtctcccgtagtccctgtgaaackttatggaaaggctgaggagtttcattagcatcttgcggatgcaagtttccagacaataaagggctagtttaaaacccttaaaaagagtcagcattatgtacagcttcgaaacagtttctctttgttgttccattgattcagcaaatatttatttgagtatctattctgtggtaggcattgttcttggtgcttgcagctgtttttccttcaccattttaggcaatttaggaagagggttaccttccagagctggtttgttttgaaatcagtgtcttctaggactttaattatctggtataaaacatatgtttaacattattttgttctccagtatcatattctgtgagaccttgatcttgccagttggtttgacttaaccattagagcccttcaaaatttagtctctgtggatttttggaaggattagtggacttttacttattcattt

SEQ ID NO: 867188 - DNA, 682 bp, Homo sapiens
gggactggctgtcactgagacctaatgcttcatagtgttgctggactgtgtgaagacatctagcttctacttacctctaactgttggaagtaatcagtaattaccaaaggactttactaatggtgaaagtcaaatgatgtttacctgggttcctgaaattccaacctccatacatagacacacttgaaaataacccttatcaaagtcatgccactttagcactatggtgattttgactcccaagggatgtttggcaatgtttggagaaatttttgttgtcacagttggaggtaggggtgctactagcatctgataaatagaggccaggcatgctgctaagtgtcccacggggaataagacaatcgcccctcccaacaaaagtttatctggtttcaaatgtcagtagtgctgatgttgagaaattctgagcaaaggatatagttggggccccaggcctgaaaactgataagacctcattctctaagtcttactcaggagaagccacatcttcrcttcctttcagaatatcctcttgattccatcccaagatcccctttctctctcaaataaacatcaagaattatataaacttgttaattcctggtcaagcacaggagctcataaagttttgcacaacttctataatgcataatacttgggcacaaatgaggatttttatatt

SEQ ID NO: 867189 - DNA, 612 bp, Homo sapiens
ctgtaaagtgactatagttaataaaaatttattatatattttcaaatagcttcaagagagcttttttgaatgttcccaacataaaaaaatgaaaatatttgatgtataggtatacaaattacatggatttgatcattacacattgtgtatttatatcaaaacatgctctgcatcttataaatatgtgcaattattatgtgtcatttaaaattacrtaataaaaaagtgagctttgcttgcattttctttcttttacgtactttttgggggggctatcttcattatagttcagaatcacagctgtccttgctttgtaaaaagatctggaaaagcctttcttttaaactagtattttaaaaaattaatggtgtggggcagcttaaataacatagcaatagaaattatctggttcttaaaggtttattacatttcccctgtaaatagtcgcagccttgtaactgttcgaaaggcagctttttgactgcattttcaattcttttcttaatattttctgagataaatccaggaatctacatttctctttaaaataaccaattgtatttagacttcatgcattgcaatttagcatttatttatctttaggcagcttgc

SEQ ID NO: 867190 - DNA, 604 bp, Homo sapiens
catgtgtgctcagtgttcaactcccacttatgagtgagaacatgtggtgtttggttttatgttcctttgttagtttgctgagaatgatggtttccagagtcatccatgtccctgcaaaggacatgaactcattcttttttatggctgcacagtattccatggtatatatgtgccacattttctttattcagtctatcattgatgaacgtttgggttggttccaagtctttgctattgcraatactgccacaataaacatacgtgagcatgtgtctttatagtagaatgatttatattccttgggtacatacctagtaatgggattgctgggtcaactggtatttctggttctatatccttgaggaatccccacactgtcttccacaatgtttgaactaatttatactcccaccaacagtgtaaaagtgttctatttctccacatcctctccagcatctgttgtttcctgactttttaatgatcgccattctaactggcatgtaatggtatctcattgtggttttgattggcatttctctaatgacaagtgatgatgagcttttttcatatatttgttggctgcataagtgtgttcttttgagaa

SEQ ID NO: 867191 - DNA, 579 bp, Homo sapiens
aaaaacatatgaagaaaagctcaacatcactgatcgttagagaaatgcaaatcaaaaccatatatgagacaccacctcatggcagtcagaatgatgatttttaaaaagtcaagaaacaatagttgctggtgaggctgtggagaaataggaacacttttatactgtgggtgggaatgtaaattagttcaaccattgtggaagacagtgtgacaattcttcaaggatctagaaccagaaataccatttgacccagcaactgcattattggttatatacccaagggattataaatcattctgctataaagacacatgcacacatatgtttattgcagcactatttacaatagcamagacatagaaataacccaaatgcccatcaataatagatgcgataggccgggagtggtggctcacgcctgtaatcccagcactttgggaggctgagatcaggagttcaagaccagtctgaccaaaatggagaaaccccatctctactaaaaatacaaaattagcttggcgtggtggcacatacctttaatcccagctactcaggaggctgaggcaggagaatcacttg

SEQ ID NO: 867192 - DNA, 616 bp, Homo sapiens
ttaagtaatggatatcccaagtacactgatttgatctttactaattatataaacatattgaattatcacatgtacccccaaactacatacacatagtatacatcaatgtaataattgttttaaaataataaatttgcataaaattaaatcatataaattatatatttactcattcaaacattattgaaattggactcccttggaaaatctgtgatactatatgctcatcatgtgtataagagatggaattttaggagtgtgaagagaagagaaggatgggggttggatagcttaatgctgtctttgtgttttatggcctgcttcattactaagatcctattaagaatagaaaaataagtggytgatattcggacagcagcagaagcatctcccatttttttatccatccttgcttctagacaaaggctatattatatagatactacaaatgttggttctgagcctgggcaagagtcaagcacttattgagcatctactgtgtatcaagttctttcttacacatgagaggcagcatagtagagtgaaaaggaccttagatggggcatcccagtgaattctcatctcagctctgtgtgaccttgaacaagtcctgttc

SEQ ID NO: 867193 - DNA, 682 bp, Homo sapiens
acatacagtcaaataattttgaatactcagcacattgtcataggaatttttcaccaagtgggttgaattatgagtaaaatcttacactttttattttatgtatttatatatttttaaaaatagagacagggtctcactatgctgcccaggctgatctcaagcccctgggctcaagcgatccacctgcctcggattcccaaagtgctgggattacaggtgtgagccactgtgcccagccaaaattttatactttttcttttgcttgcctatgttgttgcatttttwaaaaaaataatgcactgatttcataactaaagaaaattcattttaagggggaaagtattaatgatgatttgtttcactctagaagaaatgccacctttaaaaagctttttatttaaacaccaatgaaagtataactctacagtataattaatatttgtagagagtatcaattttcaacttcaccttctattagatgattgatattatggcctgaataacaggcatttcagctggagttagcagcattccccctctgtaatgtatcgtccatttaccaatggtcagatgccaaacaacagcctctcagaggagatgtgaagtagctgtgttatcatgaaggagaggtagggaagaatatcctaccgctagatagaaagctatcagcccataaaaagtt

SEQ ID NO: 867194 - DNA, 607 bp, Homo sapiens
gggagcctccacctagatttcagaggatgtgtggaaatgtccaggcagaagtctgctgcaggggcagaaccctcatggagaacctctgctagggcagtgcaaaagggaaatgtgtggttggaaccatgtgcctggaaaagccacaggcactcaatgccagccctagaaagcacccacaggtgctgtactctgcaaagctacagragcacagctgcccaaggctgtgggagcccaccccttgcatcagcattttcctgcatatgagacatggggccaaaggatattttggagctttaagatttaatgactgcctggccaagtttcacacttgcatgaggcttgtggtccttttgttttggccaatttctcccatttggaatgagaacatttacacaatacctgtatccccattgtatctaggaaataactaacttgcttttaattttacagactcataggtggaagggacttcccttgtctcagatgagactttgtacttggacttttgcattaatgcttgaatgagttaagactttgggggactgttgggaagacatggttgtgttttgaaatgtgagaagaacatgagatttaggaggggtgaggg

SEQ ID NO: 867195 - DNA, 607 bp, Homo sapiens
gggagcctccacctagatttcagaggatgtgtggaaatgtccaggcagaagtctgctgcaggggcagaaccctcatggagaacctctgctagggcagtgcaaaagggaaatgtgtggttggaaccatgtgcctggaaaagccacaggcactcaatgccagccctagaaagcacccacaggtgctgtactctgcaaagctacaggagcasagctgcccaaggctgtgggagcccaccccttgcatcagcattttcctgcatatgagacatggggccaaaggatattttggagctttaagatttaatgactgcctggccaagtttcacacttgcatgaggcttgtggtccttttgttttggccaatttctcccatttggaatgagaacatttacacaatacctgtatccccattgtatctaggaaataactaacttgcttttaattttacagactcataggtggaagggacttcccttgtctcagatgagactttgtacttggacttttgcattaatgcttgaatgagttaagactttgggggactgttgggaagacatggttgtgttttgaaatgtgagaagaacatgagatttaggaggggtgaggg

SEQ ID NO: 867196 - DNA, 590 bp, Homo sapiens
taaaaaaaaaaaaattagccaggcatggtgaagcatgcctatagtcccagctactctggaggctgaggcaggaggattgcctgaacctaggagtccaaatgactgggtttgtgaaggctacagtgagccatgactgtaccactgtacttcaacctgtgcagcaaagtgataccttgtctcaaaaaaaaaaaaaaaaaaaaaaaaaaaaaaaaaaaaaaaraagaagcagaagaaaaaaaagaaagaaaagggaaaagaaaatagaaaacattgaaggtaaactccctcatcttcccacacgaaatctaaccaaacagaaactttgtcctttttgttacagtgaaggaaatatctctgccattatcaaatgcaaatcttcctatttttctctggatttaatcccctcttgcttgtcatggactaggagtatttgctcctctgctcctctatctagcagcatcactctcaccctttctgttagatcatacctattaacgtatctgacatgccccatgttaaaaaaaaaaaaaagtaaacacacttctgttgattccatcttattttctggatactgccctattacttttaat

SEQ ID NO: 867197 - DNA, 618 bp, Homo sapiens
aaagccctgtgcttccatttccagttcagtgtcttgccccttcttccactgtaacatatttacttgaatatatgaggtatttactatacttggtgtatagatatgtatgccattttaggggttttcagacaaaattaaattcacactcaatttttttttgctatcataaatgcaatagcagttgaacttatagctgaaggaacacttgacaatattctcttattcctyttttttatgtgtagagggaaggaaaagattccattagatgatctctattgtttcttctagttttaatatcctctgaatccatgaatcatcctagtacacattggtatgcagcaaacggcaagaggtatgtctttgtaaatttaagttgttgatataaattcctgtagtgcacatttactactgaaagcatagaataagaataaccaccacagcttaaatgagtatttattctccctttactgttgccacactgcatactctcctgcccctaccatttctccccttcattccctatcaatctgtgtaatgcgatcagtctgtaaatgcaaggtagtagaatcaaaagagcacaggctttgttataagacagacataggatttgaatccagg

SEQ ID NO: 867198 - DNA, 717 bp, Homo sapiens
acataggggtatgccaggaatatgctggttgaaaggcttattgaatcatccttaataagatttttctattactctatttttccctcagtaaattttgttcacttaaaatgttgagatctttattgtaaatataaagtctattaacattaatagctgcacttcaaaggtccttgctcttagaaatgtattttttactctttattcttatttcttattcttaagataatttttaagaataaatcagaaaatgtaacacaaaaacatttcaaccaaaatattcattaaccataccatgtaatttccaagggcaaagggtacttacaactgtaatgacaatagctgcagaatctatcaagaaaacaatgttaatgaataggaaggggaaatacataatccatagaggaacgatgccagagagaactgcaacaaatgactcagcaggagaaggtcttamtaatgtcaagggccagaaagccaagcactgtcatctaagaagaaaatctgccaagaaatcaagactactcctagagttgaagcaacttaatgtaaatcagagctactgttggtttctgtgatgataacagttaaccagttagtatgctgcccttcttagtcacttccttcccattcctctacctctttgtggtttctgaccttcagtcctaggaactcaacaattctacagtcccagtaaccccaaatagattttttccctgt

SEQ ID NO: 867199 - DNA, 671 bp, Homo sapiens
tgtttctggttagtcattaagactaacaaccaagatttattttggttaaaattattgctagttagcatgtatgaagattgaagaaaaacagttggcccataatattagacatatgaacacaaatatagcatataacaagtagcttcaataaaacaaatgtccattttcttttaatgtgtctccaaacaattgcctatactttaaactgcaagaaacaataattataatagcatctggtasaatttctatctcaatagagttgttttttttctttaataatgatatgtaattattcatgacatttgggattactgaagacaaacagaagaaagagaatgaaatgttaagccttcctgagcatcaaagagagtatatttttattataacttctaatttaattaatgtattcttaatgccatctggtcagattatcttaaaagttaacagaagagattgacacttcacaaataataaacctgaaaatgtataatactgaatttatacaatcatcatagccagaacaacacacaaaaaaaagaatgaataagaggaaaaaaccatttcagtcaactctagtgcacatttagtattatcatggaatgaagaaaggagactcattatgccctcaaccatgatttaagtcatcactataatattatatttaagtgtat

SEQ ID NO: 867200 - DNA, 539 bp, Homo sapiens
catagatctctagggcaggggtaaaatgccatcattgtctttgcatagaagagtgaccttcactccagttaccaaaaagctcctcgtctccttctgagaccacctcagcctggacttcattgtccatatcagtatcagcattttgttcaaagccactcaacaagtctctaggaacttccatactttcccacatcttcctgtcttctgagccctccaagtatctaggaagttccaaacttttccacattttcgtatcttcttctgacccctccaaactgttycaacctctactccttaccgagttccacagtcacttccacatttttggggtatctttacagcagcaccccccacctggtaccaatttactgtattagtctgttctcaccctgctagtaaagatatactcaagactggggaatttataaaggaaagaggtttaattgactcacagtttcacatggctagggagatttcacaatcatagcagaaggtgaatggagaacaaagtcatatcatatatggcggcatgcaataga

SEQ ID NO: 867201 - DNA, 650 bp, Homo sapiens
ctccaaccctgtcttcttgggcaatgcagcctaatgtcttccacaggccaagatttcatggacaaaaatctgttaactctctccaggaggtaaaaagaagcccaggtttcaaggacacaaagtcccacctaaaagcagaaaaaatacatatattttttctcttccrtgataagactatctccaagaaaacatgacctacttaaattcttagtgtgttagtctgcttcattaacttttcaaaaaattgccttattaccagaataaatcggaaaaattaaaataatgcataaccccatcccctggagattaatgaattaatgtacttattatacatagagctaaaactaattggtaagacagaatttgcttaaaaatacaaataagaagcctttggataaatagggtaaaatgtgtggcacttaattcacaaaaaaggggaactaaaatggtaaacaaagagctttgctctctcttaaagtaaaaaatgcaaattaaaacaatagtgtggttctaattttcacctattaagatagtgacatacaaaaagtactggagagagaattccacttctaggaaggtggaacagagatgctttttcctgctaagtataactagggatcctggatggcatttataacacaaactttaaa

SEQ ID NO: 867202 - DNA, 605 bp, Homo sapiens
aggcagggcatgattagagagaggcaggtaaggtactcaccttgggtgcaaaggttaagagaatgccaaaaatctcagttttcaagaaaaataatattttatataatgtttttaaaaatcatataaatgcaagccaatccacagtgaaaaaataccaaattttaagtaaacacaggatcagtattgctgagtttttcgttttgcctcaggctcagcatagcattgcagctaagcgcttgacatgtacatcaaatgcatgtgtttctgccatccgaacgattcgcctccaattaatttcccagcaagacaactggaaatttgcagagcattttaaaaaatattgttaagagcacaagtttcagactcaggaatgcytaagtccaaagcatgtccctgctgcttatgtactgtactcttgggggaggcactttattatcctggtctccatttcctcttttctaaaatggggctcatagcgcttagctcctaatgtggttattttaaatgaactcatgcatgtaaaatgcataaccaatatatttgataaatgttatctaatattatattataaaagacagaatgtagtaagctatagacatacaata

SEQ ID NO: 867203 - DNA, 657 bp, Homo sapiens
ggaatgcttccagttttagccattcagtatgctacaattgggtgtgaatccatctattatgggctttttttggttggtaacctggggtgactaagacaaggtcctctatatttttaatgatggtttcatcacttgaactgtcttgcattgatgggtatgttcaagtaaactagttgatttaagtttcctcggtttttgtgtgcctgatgtgtgctttgttgttaaatttgttttaagttctggggtacatctgcatggtgtgcagattygttacataggtaaatgtgtgccatggtggtttgtttcacctgtcaacccatcacctaggtattaagcccagcatgcattagctcttttctctaatgctctccccagatccccacgcttccccgacaggccccagtgtgtgtttttccacttcctgtgtccatgtttttcctatttctattggcaatacctgtggtttcttctccctgaaacttgcagctgtagtattttggtacatagatactaataatcgttagatgttatttgtggactgtggttttcatttctataaaatattcttttctgcttgattttatttttggcctgatgtttttcttgtttgatagcaagacaatgacacttgatttctttgcatatgaatttctctag

SEQ ID NO: 867204 - DNA, 628 bp, Homo sapiens
  misc_feature 315, 320, 321: n = A,T,C or G
caactcaggaagtttaggaggcactgaccttgtcagggtaaatcaggaccttgagggatcttcagcagcgatctcaaactttaatgactatgacaatatctagattgcttgtgaaaaatacaggccagtgagtccacccccaaacttactaaattagaaactttggttgttgccaaggcaatattcatctagtaagtgacccaatttatgcctggataggtatttgggtattaaacttgtttatttattcattyttcattcagtaaatatttataaaatatctactctacatatttttctacattgggataaatncggtnngaaaaatacaaacaggacacatacccttaaggatctacattctagcaggggagacaggtgacaaagagcataatgaataagttgactatgcaatagcctgggtaaagaaaataacaagtagagcagagaatgaggtaaatattgaggatggtaaatattaaggatggtaaatattgagttagggagtagagggttggtaacaaaaccaagtgaggtggtaaggattgggctccttgaaagttttgaagagggtgagggaactaagcagattccagggagatgggtccaaacagagcgagcagagtga

SEQ ID NO: 867205 - DNA, 626 bp, Homo sapiens
acctgagtgagaggaacaagtcaccacgtggcaaagggaagagcaggtatgcagccaggcccagggctgtggggggactctgagaaccaagatcggggctgggcaggacaggcctgggatcccctgtccctcctcctgctcaccacacctctgcaccactgagtcacygctccgggcccctaacccttctccaaggctcctgatcagccaggggtcctccaggggtgaagcttactagctgtggtggtggccagcattcattcattcacttgctccttcattcattcactcacacacacacacacacacactcaatctctctcacccaccagaactgtcacagggccctgcttcacagcctgggaggcttgtccagcctgtcatacctcctctgtcagctctctggtccctcgtgccagctaaattgagatggggtggaggggatagtcccagtcaccaccctagtcacggtagcttttctggtccttgcacttacagagctagctggtggcagagagaaagcaggggcaccgcagctcctgcctatgggcagcatgtgatcttctcccacgttctaaattggcatcaccccctccctgccagagctcattcactcaacaagtatt

SEQ ID NO: 867206 - DNA, 623 bp, Homo sapiens
tgggagagaaagcctcaagtggctgtaatttcctacctgccttcacctgcatagctcaggactgaatctgggagttatttggggctggttttccctaaatgcacaagcccttccgagatgccgtctgcccaagccaagcctggttccctargctctgacagggcatctgctggcccaggctttctcagccctaaagaaagcagcaggatgagggagaggtttgcttttgcctctagggtgtctggaaggacctcgatgtaggccctggctcaaagactaggtcgttcagacaaagaggacgcagtcgccactggcaagggccagacatcagaccctggggatgctaatagctgtggatatacctttgtcttctacctcctggtgcttgcagaaagtagagccagggagagcacgtgggaagaaaaggctgcctcacaatccaagccccacgtctctctcgctcctttcttgtgggaccacaggccagccccatccctttcagggtcccagatgccccctcagcaaaataagaagactggaaaagatcataaatgatgcagcttttcccaatacggttgcacatatgttaacaaatatactcacagcttttcacttgacaaaga

SEQ ID NO: 867207 - DNA, 623 bp, Homo sapiens
tgggagagaaagcctcaagtggctgtaatttcctacctgccttcacctgcatagctcaggactgaatctgggagttatttggggctggttttccctaaatgcacaagcccttccgagatgccgtctgcccaagccaagcctggttccctaggctctgacagggcatctgctggcccaggctttctcagccctaaagaaagcagcaggatgagggagaggtttgcttttgcctctagggtgtctggaaggacctcgatgtargccctggctcaaagactaggtcgttcagacaaagaggacgcagtcgccactggcaagggccagacatcagaccctggggatgctaatagctgtggatatacctttgtcttctacctcctggtgcttgcagaaagtagagccagggagagcacgtgggaagaaaaggctgcctcacaatccaagccccacgtctctctcgctcctttcttgtgggaccacaggccagccccatccctttcagggtcccagatgccccctcagcaaaataagaagactggaaaagatcataaatgatgcagcttttcccaatacggttgcacatatgttaacaaatatactcacagcttttcacttgacaaaga

SEQ ID NO: 867208 - DNA, 716 bp, Homo sapiens
gagaggagggagcagattagaggctcttcaagatgcccctctcaagagctgaaggaattccgtctttagagtagaataagaacttagcaactttgcaatgggcatcaaatatgcctgttgttaatcaggcatttccctggcttagaggtaaaagtatatcatgttctaacctggatagaatttggggctagggatgttgagagacttaatttatcaacattgaccaaaaaagtgaaccgtacaattcatgatgaattcttaatgctgtgaagctgcatgctcgttttagtctcatcttattaaaatatgttgccacagtagctgacatttccttatttgaagaagaacacatggactttgaagaaaaacctagattcacgtcctgccctcccccattatttgctgtgttttgttggccaagatagcaagctattctgagtctcagctttgtcatttgtataggattaagtgatgaaaatatggtgytctcaatgtttgggttctggcatccaacacaggacagaatgaaaatacttcctacttgtttagatgtaagtcttttttcagaactttttaatcaatttattaattttgttattttttccctgagcttattttatgttatgaaatatgatagtcaggtaccaacctaaactgacaagtacaaaaaaagggaaaaagcaattaatttgctggtacaagtgggaagccaggct

SEQ ID NO: 867209 - DNA, 619 bp, Homo sapiens
ctgtaaaacacacctaccttagggggctgttaagaggattcaatgtaattgaattaagtaggtacaacttaattacaaagcacttttccccaaccatttcaaattatttatctacgtattcatccatccatccaaagcacctcaataattggccaataattcctaagtgaaaggagctttacaacacacgaagaactcttctattatgtcrcacgaaattataaatataaatataaaacaaattattttacatataaacgatggaggtaaaaaataaatcggccaataataactagcaagtagtatttggtaattcttttggtgaggccgacttaaaaatttacgaaatattatttattttcattgcaagtctatcagaaatcactaatggtgtagcactgcattcttccctgcttttggttctcaaactacgtatcttagtaaacgcaatttgcagacaaaccaagcctcgctaatcagtgcatcatggctactctggtaaaggaagaaattcactgtttgccaagcatcccatcagatgggtgacttcacagccactggaagaaatctttctcatgttcgagtagatggaaactccaaaactgtgcagttgctaaat

SEQ ID NO: 867210 - DNA, 614 bp, Homo sapiens
tcccaccttggcctcccaaagttctgggattacaggcatgagccaccacacctggcccagaggtatttttgaagttcagtggggaaagggtgaacttttctataagtggttctccataagatttagaaaaaaaagagagagagagaacatcattcacaaaatcagatcaaggttaattaaaggcccacctatgaaaagcaaaactatgtaacacttaaaagacaacayagaaaaatattttatgaccttatgttaggaaaagattactgaaacatgactccaaaaagcacaaaccttaaaggaacagctggactacattaaaattaaaaatctacgcttaagcccaggagttaaacccatactccccaagacaccacacatagagtgaaaaggcaagtcaagccacaaaatagaagatatttgcaatatatatagccaacaaagcattagtaccagaatatatcgtgaaatcctaacacttcctggccactgcactccagcctctctgacttccttactgttattccgacaagcctggcaattcctgcctcagagtctttgcactggctgttccctttgcttggactgtccttcccccagaatgtctgcctggt

SEQ ID NO: 867211 - DNA, 652 bp, Homo sapiens
aagtatctgtgtgagtccgttttgcattactataaaggaatacgcgagactgggtactttataaagaaacgagttttatttggctcacagttcgacctgctgtacaggaagcatggagcaggcattgcttctgatgaggcctcaggaagcttccactcataacaaaaggtgaaggggaaacaggtgtatcacatggcaaggagggggcagtggagcgggttccagatactttttttttttttttttttgkgaggcagagtcttgctctgtcgcccaggctggagtgcagtggtgtgatctcagctcactacaacctccgcctcccaggttcaagcgattcttgtgcctcagcctcccaagtagctgagattacaggtgtgcaccaccatacctggctaatttttgtatttttagcagagacggggtttcaccatgttggccaggctggtcttgaactcctgccctgaggggatctgcctgccttggcctcccaaagtggtgggattacaggcatgagccaccgcgcctgacctctctttttaaccagatctctcatgaactcatcaccacagggaaggcaccaagtcattcatgagggatccacccccatgacccaaacacctcccactagatctcacctccaacacaggag

SEQ ID NO: 867212 - DNA, 517 bp, Homo sapiens
gtctaggcagtgggcaaggtgaacccattgggtggttacacatttgaataaatatgttataaggtgctgtgcattttcagtgacacaggaacaaacacagaaaaaactagcaattaattatgatggtgtctctatgttggtagttggtaatgagtagggaacaatgggaagagtataaatgagaaaaaaaaatatggatgaaatgtcatttaaactaagtcttgataaatgagtagaactgtagcaaatctgttaatcacaaaagcaatccatgttgactgaacgtcatgggtgaggccttgaatactctattaatgtatataatttaattagagactagagattgaagcatgtaaaggtcaagaaaraaaattaaatactcaaatattgggtctagctaaggagaataatttttttttttttttttttttttttttttgagaaggagagaaggagtcttgctattgctgtccaggctggagtgcagtggcgtgatctcggctcactgcaacctcca

SEQ ID NO: 867213 - DNA, 628 bp, Homo sapiens
aactgactgatgaaatgggactataaatagcaactagcctaccagtgtgtgaggaacacatgatgaatgtcgggcaaatattgtagagagaagaatggagagcatggtttgattgaagctggtaaactagttaagttgaagtagattatgtggagataggtcaggaacaattctgccatagtgcagttttggtcctagggacataaagagcaggatatgaaatgaggtttatataatgtcaagatcagatcacagagggttctaaattacaggctattgagtttttgtatcattttgttgagtcaaaaatctagtgaagatttttcagcaagtaaatgacacggtaagaaatttgcttcaaatattctgatccaaagaagcattgtgcaagttggaaagggtaaaaacttattggcctytcccatgcataaggctgtccaggacgggagataaggaaggctgaaacatacttcaagagatgcaccattagtggaagtaagagaacttggaaaacaaatccacatatatcacatatagtggcacattatacaaaacaagcaggataaaagtattttctctaactcaccaaggagttcttctgtgaatgaatatattaatgactgaactg

SEQ ID NO: 867214 - DNA, 617 bp, Homo sapiens
cttggtacataggaggtgtttgctaaactaataactaaaaattggaggtggagagagtgaaaattatgagaaaaagtcatgtaatcattaggcaattaaataatttatccatagtgatgaacccttatgggaaaagttttgatttagaatcatctcgcattcattgttttcttctttaaaggtgaagttttttgtacttgttggctttcctttgttacccaatatgacttcttgtatgtatagtgtttcattttgtattgcactgaactgcatacaacagaaaccttattacaatggcttctgaagaaagccttttattattcttatggacaagtttcaaggcaggtagttagggctcatgatgggttccatggtgccgtcaaaagtccaggctgcttttacctgttagctctaccactgttagcctgtggctcttgttcttgtgaactcaggatggttcctgcttctacatacaktacatctgtgtttcgtccagaaagagggatgagcaaaggaggaaggtcatggcagttgggataaactggggactcagtaactttgtcagaatttccacatactggaattctaattacatgtcattgtccagaactgtgcca

SEQ ID NO: 867215 - DNA, 591 bp, Homo sapiens
gtgcttaggagacacaggttatagcatttatagttcagaaaaaaatttagtttaatttactttttaatatatgccccaatatatacaaaggatacacaatgaaaagtaaggtactcagccactcctgtctccttgtcattttgctcttttcacaggaggtaactactatgaccaggctcttatttattttatggatgtatgggaaaacatatgcacatgtacataaaggcatagrcatatatattatacaatgatagcatgccatgcacattgtgctggttttttttttttttttttgagtgggtctattttttaaattgtaaataagcataacataaaatttactattttaacaatttttaagtgtacagtagcattacaacatttacatcattgtgcagctgttactaccatccatctctagaactttgtcatcaccccaaatgcaaactttgtacctgttgaacagtaattcccgttcctcttgctcctggcaaccactgttctgttttctgtctctacaagtttgactactctattaggtgccttatgtacgtagaatcatataatttttgtccttttctgtctgcc

SEQ ID NO: 867216 - DNA, 645 bp, Homo sapiens
gccagaaggaaactgcggcttgcagttttacagccacaaggaaataaatgctgccacaacctgaaggaacttggaagtgtaaacttctccagtcaggcctccagatgaggacacagcctggctgatactttgattattgcagcctgaattcagagactccacctaagccttgatcagactgctgacccacagaaattgtgggatagtaaacatatgttgtttttgcaggctatgtttgtgatgatttgttacataraatagaaaactcatccagtgatgggaaaaagtgatcagacatgtgccttttttctgatccctgcttcagattgtattgcccctttttgcaggtgatggaatccatactccaaagacctaggaactaagacaattcccttcccttctctgtgcctacattttctcatctgtaaaatgagaacattgtacttggggaagtctaagagaacctttcagctaagagagtttatgtcccgtggtccaaaaaggagatatccttgaaattcatttgaactgaggtgaaagagaaaggaatgaagctcggaaatagtggaatagaaattagcaagtattgaagacaagaaaaaatcaactttgagtatacagtaaaaagagcccaaaaactgatag

SEQ ID NO: 867217 - DNA, 645 bp, Homo sapiens
gccagaaggaaactgcggcttgcagttttacagccacaaggaaataaatgctgccacaacctgaaggaacttggaagtgtaaacttctccagtcaggcctccagatgaggacacagcctggctgatactttgattattgcagcctgaattcagagactccacctaagccttgatcagactgctgacccacagaaattgtgggatagtaaacatatgttgtttttgcaggctatgtttgtgatgatttgttacataamatagaaaactcatccagtgatgggaaaaagtgatcagacatgtgccttttttctgatccctgcttcagattgtattgcccctttttgcaggtgatggaatccatactccaaagacctaggaactaagacaattcccttcccttctctgtgcctacattttctcatctgtaaaatgagaacattgtacttggggaagtctaagagaacctttcagctaagagagtttatgtcccgtggtccaaaaaggagatatccttgaaattcatttgaactgaggtgaaagagaaaggaatgaagctcggaaatagtggaatagaaattagcaagtattgaagacaagaaaaaatcaactttgagtatacagtaaaaagagcccaaaaactgatag

SEQ ID NO: 867218 - DNA, 645 bp, Homo sapiens
gccagaaggaaactgcggcttgcagttttacagccacaaggaaataaatgctgccacaacctgaaggaacttggaagtgtaaacttctccagtcaggcctccagatgaggacacagcctggctgatactttgattattgcagcctgaattcagagactccacctaagccttgatcagactgctgacccacagaaattgtgggatagtaaacatatgttgtttttgcaggctatgtttgtgatgatttgttacataaaatagaaaactcatccagtgatgggaaaaagtgatcagacatgtgccttttttctgatccctgcttcagattgtattgcccctttttgcaggtgatggaatccatactccaaagacctaggaactaagacaattcccttcccttctctgtgcctacattttctcatctgtaaaatgagaacattgtacttggggaagtctaagagaacctttcagctaagagagtttatgtcccrtggtccaaaaaggagatatccttgaaattcatttgaactgaggtgaaagagaaaggaatgaagctcggaaatagtggaatagaaattagcaagtattgaagacaagaaaaaatcaactttgagtatacagtaaaaagagcccaaaaactgatag

SEQ ID NO: 867219 - DNA, 666 bp, Homo sapiens
ccatcaatgcctaacttattgagagtttttagcatgaagggtggttgaattttgtcaaaggccttttctgcatctattgagataatcatgtggtttttgtctttggctctgtttatatgctggattacatttattgatttgtgtatgttgaaccagccttgcatcccagggatgaagcccgattgatcatggtggataagctttttgatgtgctgctggattcggtttgccagtattttattgaggacttttgcatctatgttcattggggatattcgcctaaaattctctttttttgttgtgtctctgccaggctttggtatcagaatgatgctggcctcataaaatgagttagggaggattccctctttttctattgactggaatagtttcagaaggaatggtaccagctcctccttgtacctctggtagaattcggctgtgaatccatctggtcctggactttttttggttggtaagctattaattattgcctyactttcagagcctgttattggtctattcagagattcaacttcttcctggtttagtcttgggatggtgtatgtgtcaaggaatttatccatttcctctagattttctagtttatttgcatagaggtgtttacggtattctctgatggtagtttgtatttctgtgggatcg

SEQ ID NO: 867220 - DNA, 608 bp, Homo sapiens
ccatgctcatggataggaagaatcaatattgtgaaaatggtcatactgcccaaggtaatttataaattcaatgccatccccatcaagctaccaatgactttcttcacagagttggaaaaaactactttaaagttcatatggaaccaaagaatggcctgcattgccaagacaatcctaagcaaaaagaacaaagctggagacatcatgctacctgacttcaaactatactgcaaggctacagtaaccaaaccagcatggtactggtaccaaaacagatatatagaccaatcgaatagaacagaggcctcataaataacatcacasatctacagccatctgatctttgacaagcctgacaaaaacaagaaatgaggaaaggattccctatttaataaatggtgctgagaaaactggctagccatatgttgaaagctgaaactggatcccttccttacaccttatacaaaaattaaatcaagatagattaaagacttaaatgttaaacctaaaaccataaaaaccctagaagaaaacctaggcaataccattcaggacatagccatgggcaaggacttcatgactaaaacaccaaaagcaatggcaacaaa

SEQ ID NO: 867221 - DNA, 574 bp, Homo sapiens
cgcagtagatttcatacttgcatggggcttgtagcacctttgttttggccaatttctcccatttggaacaggtgtatttacccagtgtctgcacccccattgtatctaggaagtaactaacttgcttttgattttacagactcataggtggaagggacttgccttgtctcagatgagactttggacttggacatttgagttaatgctggaattagttaagactatgggggactgttgggtaggcatgattgtgttttgaaatttttgaaatttcggaggggccagggggtagaatgatatggtttggctgtgtccccagccaaatctcatcttgtaattcccataatctccacatgtcataggagggacctggtgggaggyaattgaatcatggggacagttacctccatgctgctctcataagatctgatagtgagtgagttctcacaagatctgatggttttataacggattttttccccttttgctcggcacttctccttgctgctgcttggcacggaaggacatgtttgcttccctttctgcaatgattgtaagtttcctgagttctccc

SEQ ID NO: 867222 - DNA, 662 bp, Homo sapiens
tgctcccacagttacctgaatattcatacaaggcttgaatctaaactctaaaagaaaagatccgattaatctcatgacttgtcagtgggcaagacttttccattaggataatactacttggtctacagaccccttggaactaccacatagaaaacaggttatcttatgaactgctgactaagaatcaggtgttcatttcaaatccaatttcttatggtcagggaggttgagtgatagagatttgtgtaaaagaaaccactttggaaatggaatgtaacaagcttggattaatgagtacctgctctaaccaaggataatttcataatgtggcacttagtgtttttcttayacaaaaggttttgcatttattctttcattttattttaatatttacaaaattctcatatttgtataaagaaggtattctaatctccatttttaagtagggaaatttaagtccagcaaaactaagtcattaatccaaagtatagttagaaagcctagtccatattctgtgactcagaattgttacatttttgctttttttttgctacattgcatggttatcattgtcctccattgccttctttttgtattgtgcttaaaaaacaaacctcttttgcttttatcatctcaaagagaacaacggccagagaagacaa

SEQ ID NO: 867223 - DNA, 618 bp, Homo sapiens
cttcaatttcagtgaacatttaataaatgtcggtagagggaattacttctaaaaaataaatatgaaaggtaaataaacaatacaaatggcaggtaatatggtaccattttatttgtatacttcatttttaattaaaaatcatttacacttacacttacatgctctcaaaggtacacagatatagaggccttctttagaaattttttttatgatgagtaaagaagagcacttgtttactatttaaaaaaaatgtaactgatagtggtctgtctgggtctcttctctttcaaatcrctgccacacagcattaccaggtatttctgaaattccccattgttacctctagagagggcatagtggcaattcgatcaatgctgaatacaaaaatagaatacggtagtagaatatggtagtctgcatttcctggctgtaagatctgtgtttatgcatccttggtattgtgcttgcttttgtcaggtacgacaataatcctaaattaatgagtccattcaacattggctaccagagaatttcaggcaccttttatacagtcatttaaaataattacactgcctgaattgtctgagtagactggaagtgccttctgacctgacaccc

SEQ ID NO: 867224 - DNA, 645 bp, Homo sapiens
taaaaagtcgtagttggaggagactgacctcttttactacctggagacacatggtttaaacatatgctaccagttcagccatgttttacatgcatttggttttttttttttttttttttttttcacagaaatgaaaatggagtagaacatctactcccatttcccatgcaaaatgttattcaataataaaaaacgtgaatacatacataagcacgattattaatcatgagctgttaccaaaaatgattcaaactatcatgccacttggcatctccttaataccatatttatcatcagatatttctgtcaccaaagcattcaaattgtcagataaaaatctctgcctgggggaaatataaactatggcttcttgtaatgaatgaaaatgaaatgattccccacagtttattgccaractcactggaaataaaaattactaattaaataatcttagtttaaaataggtctgggtctgtcaagcacttttcttcattgtggtacaaaatgaggatgtcctacggaaaagtttcatattaacactttgataaatcagattacaattctgaaaagcacttttataatcgagtttttcccccactttaatatctgagtaatcttatctttaggataaatggagataaagtt

SEQ ID NO: 867225 - DNA, 664 bp, Homo sapiens
caaggctgctaattttctccagttttgttctatttatttcactctgttctattctcttccaaaattattatttttccaaattatctttccagtacaggttctatttcctccaattttttaatatttagttgtagtttttacaaatgtaaggtacagtttctattatgtttctgtccagttttacaggtgttatttaatgtgcataatactgtatactgttttgtgcttcccattttacaaagcctaggtattatctcaactaattatcctttttcatatacacaattaccctaattgaattacaaattctatcatgttctttgtgaattaaataaatctgggatctgctagcactggctgttttgtaaatgaatgtcaaccaggcagttcacamgtatgttcaatcacattctcccctacaggagagaatttcagataggcatgaagcctaggacagctgaagagtgcttctggaaaacagacctagacttcacccagtacaaagtaaattcaccccaatgatcaggtagtatatatcaagagcatcctgaacaaagtcagggattgtatgtaaaatgggatgaaacaagtccttataaaaatggctccatgtcacatctcagcgtgtaaggtaccatctatgctccagtgagaacttttaaag

SEQ ID NO: 867226 - DNA, 653 bp, Homo sapiens
cagaattatacatgatatcatttgctaccaatatttggcaatatttgccaatatgctgttatgtttctcccatcaaaaataaaatattttgaaatatgctctatatgaccagagagtggttgagaagatgtgcaaatgtaacatccaacagtgctcagggacttccaagargtttggccttgggcatgctcaccaaggcatggtagagcttcagggtcctcacgtttgaatggcccctctgttggtttcaaaggccgtattttcaagtcttctggctgtcagcccaacaggtatacccatcaaggaatttccaagttgtccttcagactctctgctttacataatttgcttctctgatccactattccagtgtaggatgcttctctggagatgacaactcctaactcctatgctttctctactacttccatgttgcatggctctgcctcttgctagtttggtcattaatttcaacttgattatttcctgatcaagaaaataactttacacatgagaaatcaaatcacttgaccactgaggattagtaatttattttcttcatctttgccatacttaaattttttttctaacgtaacttcaaaattgttctagacaatctacaagacacatagaattcaaagatattaaaatac

SEQ ID NO: 867227 - DNA, 610 bp, Homo sapiens
ctgctataaagacacatgcacacgtatgtttattgcagcactcctcacaatagcaaagacttggaaccaacccaaatgtccaacaatggtagactggattaggaaaatgtggcacatggaatactaggaatacaccatggaatactaggcagccataaaaaatgatgagttcatgtcctttgtagggacatggatgaagctggaaacatcattctcagcaaactatcgcaaggacaaaaaaccaaacaccgcatgttctcactcataggtgggaattgaacaatgagcacacttggacacaggaaggggtacatcatataccggggcctgttgtggggtggggtgaggggggaggtataccattaggagacatacctaaggtaaatgacgagttaatgggtgcagcacaccaacatggcacatgtatacatatgtaacaaaccttcacrttgtgcacatgtatcctagaacttataaagtataataaaaaaatataaagaatgttaaaatgagatttgaatacatacgaattcccaaaggacacataagaatttcttaaactatatgacaattaggcatgagggtattttggggggctgaatttacaatt

SEQ ID NO: 867228 - DNA, 621 bp, Homo sapiens
caggcacggtggctcaagcctgtaatcccagcactttgggaggccgaggcgggtggatcacgaggtcagcagatccagaccatcctggctaacttggtgaaaccctgtctctcctaaaaatacaaaaaattagctgggcgtggtggcgggcgcctatagtcccagctactcgggaggctgaggcaggagaatggcgtgaacccggggggcggagcctgcagtgagctgagattacgccactgcactccagcytgtgtgacagagcgagactccgtctcaaaaaataaataaataaaataaaataaattgctggatattgaatatgtacttttatataaaatattgtgggctaggggctatgaggtatattcagctatacaaaatttactttttgcccttaaggagtttataatctaatcaagtaaataagattaacaaattaaaatgtatcactgacagggaaacagatgaaattagtaatataattaagtgtaattaagagtaatatcttagttctgaggagccaacatggcttgggatggtttccagaagatgatgagatgaaagtttattacactctatcataactacctatttacttgtcagattctcccactaaaa

SEQ ID NO: 867229 - DNA, 621 bp, Homo sapiens
caggcacggtggctcaagcctgtaatcccagcactttgggaggccgaggcgggtggatcacgaggtcagcagatccagaccatcctggctaacttggtgaaaccctgtctctcctaaaaatacaaaaaattagctgggcgtggtggcgggcgcctatagtcccagctactcgggaggctgaggcaggagaatggcgtgaacccggggggcggagcctgcagtgagctgagattacgccactgcactccagcctgtgtgacagagcgagactccgtctcaaaaaataaataaataaaataaaataaattgctggatattgaatatgtacttttatataaaatattgtgggctaggggctatgaggtatattcagctatacaaaatttactttttgccyttaaggagtttataatctaatcaagtaaataagattaacaaattaaaatgtatcactgacagggaaacagatgaaattagtaatataattaagtgtaattaagagtaatatcttagttctgaggagccaacatggcttgggatggtttccagaagatgatgagatgaaagtttattacactctatcataactacctatttacttgtcagattctcccactaaaa

SEQ ID NO: 867230 - DNA, 669 bp, Homo sapiens
tccctaaagtatgtcctggtatctgttgtttcccttttcatgtccatgtgtttttgttgtttagcttccccttaaaaatgagaacatgtagtatttggttttcagttccttcattagtttacttaagataatggcatccagctccatctackttgctgcaaaagacatgatctcattcttttatatggctgtgtagtattccatggtgcatatgtaccacattttctttatccattctactgttgatgggcatttatgttgatttcaggttttgctattatgaatagtgctgtaatgaacatacatgtgcatgtgtctttatggtagaatgatttatattcctttgggtatataccccataatggaattgctgggtagaatggaaattctgttttaagttcttcgagaaatcaccacactgctttccacaatggctgaactaggtgacattcccactaatagtgtataagcatttccttttcttggcaacctcaccagcatctgttattttttgactatttaataatagctattctgattggtgtgagatggtatctcattgtggttttgatttgcgtttctctaatgagaagtgacgttgagcattttttcataggctttttggtcatatgtatgtcttcttttgaaaagtatctgttcatgtccttt

SEQ ID NO: 867231 - DNA, 518 bp, Homo sapiens
gtggatttatctacttttggtctttgatgttggtgacctttggatggggtctttgagtggatgtgctaatcctttctgtttgtttttttccttctaatagtcaggcatctctgctgccagtctgctggagtttgctggaggtccactcccgatcctgtttgcctgagtatcaccagtggaggctgcagagcagcaaagattgctgcctgttctttcctctggaagctttggcccagcattgcacctgccagatgccagccagagctctcctgtatgagatgtctgttggccccaaatgggtggtatctctcagtcagtatacacgggggtcattgacccactagaggaggcagactgacccttagcagagctcataygctgtgctaggatgtttgctgctctcttcagagccatcaggcaaggacgtttaagtctgctataagcccctgactggggctgctgccttttttacagagatgccctgcccagagacaaacaatctggcagtctggccacag

SEQ ID NO: 867232 - DNA, 637 bp, Homo sapiens
tttttgaaaactgagaattttctaaataacagctaatatttttcagatgatgtcacacaaacttgaatatatattttcacattatatttattgatggatcttctctctgtctctcccttcagaatcccttgtttatgtttgtcccatccactcaattcccacatgtgtgtttgtttgctcatgtgaactcataaacaggtctacaaayatgtaatgtctacacacacacataactagatatttcacaacaagcttgtaaggtctgtgtgccgaacctttatatcaaacctatgtgcccaaaacttatgtataagcctgtgtgtgtatattgagcctatgtacccaaagcttgtatgtataacctgtgtatccaagacctatggcctagggggtagagtgtaaagtacatggatgtgctgtggccaagaataggccgaggcagacatcagggccagtgtgactcagccagttcggagtgcagacacataactccacttgttatgtaatcactgctatgtagccataacatgggaaggctcgtcacccaactctgagccactattgcttgtaaaaggtataactgccttgctgatgctgtacatatggcatggcttggcttgtgctgagagagagaatg

SEQ ID NO: 867233 - DNA, 522 bp, Homo sapiens
ttctctcatgatcttgtcagcacataacagcttccttggacataagtaagcactctccaggaaagtgataaagattacataaataaaatttaaaaagttggctgggtgcagtggctcatgcctgtaatctcagcactttgggaggccaaggcaggcggatcacctgaggtcaggagttcaagaccagcctgggtaacatggtgaaaccccgtctctactaaaaatacaaaaattagccaggagtggtggtgcacgcctgtaatctcagttactcaggaggctgaggcaggagaatcgcttgaacccgggaggtggagaatgcagtgagttgagatcgcgccattgcactctagcctggacaacaagagtgaatckccatctcaccaaaaaaaaaaaaaaaaaaaattttaaagtcaccctatgtttctctttcattcttcactcctattacaatacctaaaactaaccaagtagtgagacattgagcaacaggacaaacactagggacaattatacaaataa

SEQ ID NO: 867234 - DNA, 659 bp, Homo sapiens
gactgtgactatctacgttactcttagctgctttgtgttaatgttactatattgcaagcttttggatattttttcctcacttttttctctcatgatcttgtcagcacataacagcttccttggacataagtaagcactctccaggaaagtgataaagattacataaataaaatttaaaaagttggctgggtgcagtggctcatgcctgtaatctcagcactttgggaggccaaggcaggcggatcacctgaggtcaggagttcaagaccagcctgggtaacatggtgaaaccccgtctctactaaaaatacaaaaattagccaggagtggtggtgcacgcctgtaatctcagttactcaggaggctgaggcaggagaatcgcttgaacccgggaggtggagaatgcagtgagttgagatcgcgccattgcactctagcctggacaacaagagtgaatctccatctcmccaaaaaaaaaaaaaaaaaaaattttaaagtcaccctatgtttctctttcattcttcactcctattacaatacctaaaactaaccaagtagtgagacattgagcaacaggacaaacactagggacaattatacaaataaaaggacataagccatcaaataactaagacttcattgtatttatgtgtataacg

SEQ ID NO: 867235 - DNA, 600 bp, Homo sapiens
ttatctatagttaccatgttaaattcatgtttatattgtttttatatctcagggatatatttcagttatctatcacacttctgattcacttatgttgctcacatgtaaagtgtgactccataattataaatttcaggttgagtatcccttatccaaaatgcttggaaactgaagtgtttcagattttggattttttttcagattttggaatattggcatatacatatacataatgagatatctttggaattcacccaagtctaaacacagattttatttatgcttcatatataccctgttcacatagcctgaaggtaattttatacaatacttttaacaattttgtgtstgaaactgaaacaaagtctgtgtacattgaaccatcaggaagcaaaggtgtcactatttcagccaaccatgtggttgtttggcatcactgtcactccggactctgaatttatattatatgctactgataaataattgttttcctacacttattcacacataaatacttaacagtaaaaaatgtgatgtaccattaatacagtgaaaaaaatgatgtgttcaggttaactaaacagaacagtataatcacca

SEQ ID NO: 867236 - DNA, 580 bp, Homo sapiens
taggcacccaccagatgccagccagagctctcctgtatgaggtgtctgtcgactcctgctaggaggtatctttctgtcaagaagcacaggtgtcaggaacccacttgaggaggctggctgtacttcagcagagctcaagtgctgtgctgggagatcgctgctctcttcagagctggcagtcaggagcatttaagtctcaatatatttttctgaatgtcaaattttggtgggcctggccatgagggaacccactgttattctaggggcatccccacttttctaattattattaacaagaayggcttaatatttatgtgaactaaactgatactttcatggttaggagagaagtcattcagatataaaaatactagatcttccaggtactagatatatttgaaaagacatatctattccaaatatagtttgctggatctctcttctcacatacctctgacagaggctccctgacatcattccttagcctataatatgtctgagctttgtggttgaggtggagaagaagatgggtaagggaggaaggagacatttgactgtcattggaataacattcattatt

SEQ ID NO: 867237 - DNA, 588 bp, Homo sapiens
taatggtgatgataggaagtagaaatattgcattttccagaattctggtttattattatcagaatcaatagatgaaagtttctgtaaatttattgttcttttaaagatactagtttacgcctgtaatcccaggactttgggaggcagaggtgggcagatcacgtgaggtcaggagttcaagaccaacctggccaacatggtgaaaccctgtctctactaaaaatacaaaaaattagctgggtgtggtggtgggcacttgtaatcccagctactcgggaggctgagggaagaaaatcgcttgaacccgggrggcagaggttgtagtgagccgagatcgcgccattgcactccagtctgggcaacaagagtgaaactccatctcaaaaaaaaaaaaagaaaagaaaagaaaaaaataagatattagttggctaattttaacttcatgcacttttctatttttttttctgttaattacctggccactaaacacaccttgaataaactgaccaaaagaccaagagcaaaaattaaagtatcaaagatctacaggagacttacatcctgaaataaaagaatagaattagagta

SEQ ID NO: 867238 - DNA, 588 bp, Homo sapiens
taatggtgatgataggaagtagaaatattgcattttccagaattctggtttattattatcagaatcaatagatgaaagtttctgtaaatttattgttcttttaaagatactagtttacgcctgtaatcccaggactttgggaggcagaggtgggcagatcacgtgaggtcaggagttcaagaccaacctggccaacatggtgaaaccctgtctctactaaaaatacaaaaaattagctgggtgtggtggtgggcacttgtaatcccagctactcgggaggctgagggaagaaaatcgcttgaacccgggaggcagaggttgtagtgagccgagatcgcgccattgcactccagtctgggcaacaagagtgaaactccatytcaaaaaaaaaaaaagaaaagaaaagaaaaaaataagatattagttggctaattttaacttcatgcacttttctatttttttttctgttaattacctggccactaaacacaccttgaataaactgaccaaaagaccaagagcaaaaattaaagtatcaaagatctacaggagacttacatcctgaaataaaagaatagaattagagta

SEQ ID NO: 867239 - DNA, 604 bp, Homo sapiens
tgtccatgagcatggaatgtttttccatttgattgtgttctctctgattgccttgagcagtggtttacagctttccctgaagaggtccttcatttcccttgttagttacattccgaggtattttattgtcttcgtagcaattgtgaatgaaagttcattcatgatttggctatctgctttgtctgttgttggtatataataatgcctgtaatttttgcacactgactttgtatcctgagactttgttgaagttgcttatcagcttaagaagcttttggattaagatgatagtgttttctagacatgagatcatgtcatccgcaatcaaagacaatttgacttcctctcttcatatttgaataccctttatttctttctcttgcctgatttccctggccagaattttcaatactatgttgaataggagtggtaagaaaaggcagccttgwcttgtatcggttttcaaagggaaattcagtatgatattggcggtgggtttgtcataaatggctcttttattattttgaggtatgtttcttcaataccaattttattgagagttgttaacatgaagtgatgtgaattttatcagaggccttttctg

SEQ ID NO: 867240 - DNA, 584 bp, Homo sapiens
aagggaattccctagagttcttccgcgtatccaccaatgcagaaagataaaacctgaaggacaaagaccatacctgcaacttcttctatgtgttatggccttaagatttcattatgtctataaagagaattatttttcttactaggacaccgaggataaatacaatttttaaaagtgttattttatttttaattaacacataacaatcatacatctttatggggtacaaggtgatgttttgaatatacattgggtaatgatcaaatcaggttaattactaaatctgtcgcctcaaacattcatcatttcttgtggtgaggacattcaaaatcctgttttctagttattttgaagtatataatacattacygttaactgtagtcaccctactgtgcaatagaacaacagatcttattcctcataactgtctttatacccagtgatcaaactgtccctaatgcaaatatttttacgtggggtataaaagcttcaagtagcttacatattcatttgttttggcgataagataaaataagccataactttactgaaatgttttgagaaatgaaaaaatagttgtatgt

SEQ ID NO: 867241 - DNA, 635 bp, Homo sapiens
cagtgtccacttggggcctggtatttagctgaggcctgacacccacctgaggcctgggtgtttaggtgtggtctgttatctttctgttgcctgggtttttatcaggagcctgatgttcaccaggccacctaggtgtccacctggaccaaatgtctctctgggccctgatgttcacttgttgtctggtatttaccaaggcttgggcatccacctgttgactgatgttcagctggggcatagatattcacmtggggcccgagggtacacctggtgcctgacgtctgcccgggtcctagtaatccacatgggcctggtgtttaccagaagcctaatgttcaccctgggcctcatgtttacctggagccttggtgtcaacctggggccagatatcgactgggggcctagtatccacctggagatgggatgtccagctgggttctgatgtccacctaggattgtcctcatgtgtggtggatgaaatttagggcctggtggtgaaatttaaaacagagccttaaaagctatcgagccaagtgaagcaagcagaggaaggtcattccattccggcaatgagaagaatgtgagcccagtgatggagccatgaacagctcagtatgtgttgggatctgcaagag

SEQ ID NO: 867242 - DNA, 643 bp, Homo sapiens
atgcatcaggacgtctgcttatatagatttgatataaaaagcctcttgaaaacacactatatcatttggaaataaaaaatgaagttgttgaccataagaaaaatttcacatcgtggtggatggtgagccatatttcattatgctttgcaatttggggcatcataaaaagttataagtgctgcaattgtttcccatcctatagaataacaaaaytaagtatgggggatagaagggatctttgcaattatctaacctaaaatgcttatttttaaaaaaagaaaattaagggtcataggtaagtgatttttcaaatttgtatatattttttaaatttgagagggggctataatagatcgagcaaaggcaatgagttaattctttaaaagtgtggcacctctacatcattttaatcacgaaattatggcaaattatgccagggaactatgtgtttataaaataattattaaacaactgagggcttagaggggataaaccctcaaaaatatgcacttttaggttggaaaatttttattcagggctcatgtcttctattatgccatcatctagttggtggtagatgaagaaaaggcggtaacggaacaaatacacatgaaaacaataagtttttcttccccaaatgcca

SEQ ID NO: 867243 - DNA, 647 bp, Homo sapiens
gattcagagaaatgtggctgggagcagtggaaaggaaactagacttgccgccaggaaacctactgtgatgaacctgggcaaattgctcactcccacaagcacgggtttcattactcataacacggagacacagaatggaaaggaacagttgctgagcgcctgcaactggacacattctcatgtatgccatacaagttttacaatgaatctggaaagtgaattttattatcttatttttcaaataatgtactagaataagtgatgtaaaataattcacctaagttcacatggctagtcagaagtaaaagttgggtatttttgaaataagagctcatattctttctgcttccayccagttgtaagaattaattgttattgtgaagattaactgagatactctaagggaacatggacagtgcttgacctattctagatgctcacatagggaaatgcatgcaacactgcagcaataaagtctcagtcaggcagacttggtttgaatcctaattctgctgtttatgagctctgtgacttggggcaatttacttaccctctttgaacctctgtttcctaataccaactcatgaaaaaaaattatgtgataataactgatgtcagtagccgatgtctaaactatcagaattatt

SEQ ID NO: 867244 - DNA, 581 bp, Homo sapiens
acaaaatcaatgtacaaaaatcacaagcattcctatacaccaataatagacaaacagccaaatcatgagtgaactctcccattcacaattgctacaaagacaataaaatacctaggaatacagctaacaagggaagtgaargacatcttcaaggagaactagaaaccactggtcaaagaaataagagaggacacaaacaaatgcaaaaacattccatgctcatggataggaagaatcaatattgtgaaaatggccatactgcccaaattaatttatagattcaatgctatccccatcaagctaccactgactttctccacagaactggaaaaatctactttaaatttcatatggaaccaaaacaacccatatagacaagacaatgctaagcaaaaaacacaaagctggaggcctcatgctgcttgacttcaaactatgctacaaggctacagtaaccaaaacagcatggtactggtaccaaaacagatatataaaccaacagaacagaacagaggcctcagaaatcacatcacacatctacaaccatctgatctttgacaactctgacagaaacaagcaat

SEQ ID NO: 867245 - DNA, 627 bp, Homo sapiens
ggatgtgtggttgcagaggtgctataggagcttagaagaggtgcagctatatcatactggggcatcaaggaagcttcctggaaaggttggcccctgggctgaattttgagacaggagtaaatattaactggaggaataaggagaccacctagtgaggagtggatgaggagtgcaggttgtgagaggagacaatctgtagaagcaagatggagaattgtagttcttcggagtagctggaatgaaaggtgcaatctgaggaggaggaggaggaaatagagacataagaggaactatgccatgaaggattttcttcaaagctcargaaccagggttcctgtttatttccttctctggattcctgtagcaacaaactgctatacctgaacttgggcgagttattattaaaactgaaagaagaatagcagagtagagtttggcctacttttcccaggcttcattgtgggaacacatcccagccagaaaggaatgaaaacagtagggttgtcatgtaacacagacccttgctactccaactgtggtcctcggagcagcagcatgaacaccacctgaaagtttgtcagaattgccaatgctcaggccccactcggagctgctgaattagaatct

SEQ ID NO: 867246 - DNA, 574 bp, Homo sapiens
cttgtctgactatttagtcttcatgacttttttaggggttaaagatcattgtccatgtcaattcagaaaaggcaaacaggaaatcaatgccatgttaataactacaagggtcaccctgggtgaaaataagtcattcttcttatgttattggtctacatctgttatgggaattgctgttctttcgttctagatttataggaaatgtggagtatcagtaagccagatgttaagataaccagcttcataatctattccatatgctaattgtttcacaaacctactcatttctacgatcaggtgagtcaaaatctttctggcacagtattgatgaaaagcatatcccatgtgttgtacattacacaattggcatcgacaccatagagataaggtccatccctctttcccttcccctaccttcctttacagaattaagaatyggccacagccagaaggtggatactccatgggctccatcaattcctgcaggtgcatttctaaaccaggccacaggtgacagtcagtcttttcctgccattctacataactacctgtttcttcttcacggccctcagtg

SEQ ID NO: 867247 - DNA, 643 bp, Homo sapiens
ctcctaagcaccttctcctaaaattgatctgcctataatgcctgacttcccagtagtccataagaagggcacactgatgtcccatctctcatcccaaatctcactacaacagttgactctggagcctaaatatctctgaggaaccaaaaatagaaatataaagtttattttgttcaagaaaaccttttgcaatgattaattaacgcacatatgtcttatgcatatgtctgttaamggtaaagtttggtctgagaaataaggtgttttgacctatgttgaaatgctctgagttcagaataggataggtagtgtagatgatgatacctattcctttaaatgcaaatagaatgtgtcatgacactatcaagtatttgaaataaaacccacagataaaaagttaacatcacttcctcagatgggatatacttattcaaaaatgtagtttagaatcatttcatcaaatcctatcttgaaagattgatttcaattttactcaatcatcccattttatgtaaaaaatatgtaagattttgtatcttctattaacaataaatacacttttaaaaatacatgataaaattttagttgtcaaaaatgagcaagaatgttcatagattttcatatttattttaatgaataagta

SEQ ID NO: 867248 - DNA, 621 bp, Homo sapiens
acaaaaatttttttggttccccagtgcatataaaagttatatttatactgtactggtctattaaatgtgcagtagcattatgtttaaaaacataatctatatactttaattaaaaatactttgttgctaaaaatgctaacaatcatctgagcctttggygagttgtaatctttttgctggtagagggtcttgcctcagtgttgatggctgttgactaatcaaggcagtagttgctaaaggttggtgtagctatggtaatttcttttctttctttcttttttttttttttttttttttttgttttttgagtcagagtctcacactgtcacccaggctggagtgcaatggtgcaatctcggctcactgcaacctccgcctcccaggttcaagcggttctcctgcctcagcctcccaagtagctgggattacaggcatgccaccatgcctgactaattttttgtatttttagtagagacagggtttcactatgttggccaggctggtctcgaactcctgagctcgtgatcggcccgccacagcctcccaaagtactgggattacaggcattagccaccgtgcccagctggtaatttcttaaaataagaccacagtgaagtctgc

SEQ ID NO: 867249 - DNA, 621 bp, Homo sapiens
acaaaaatttttttggttccccagtgcatataaaagttatatttatactgtactggtctattaaatgtgcagtagcattatgtttaaaaacataatctatatactttaattaaaaatactttgttgctaaaaatgctaacaatcatctgagcctttggtgagttgtaatctttttgctggtagagggtcttgcctcagtgttgatggctgttgactaatcaaggcagtagttgctaaaggttggtgtagctatggtaatttcttttctttctttcttttttttttttttttttttttttgktttttgagtcagagtctcacactgtcacccaggctggagtgcaatggtgcaatctcggctcactgcaacctccgcctcccaggttcaagcggttctcctgcctcagcctcccaagtagctgggattacaggcatgccaccatgcctgactaattttttgtatttttagtagagacagggtttcactatgttggccaggctggtctcgaactcctgagctcgtgatcggcccgccacagcctcccaaagtactgggattacaggcattagccaccgtgcccagctggtaatttcttaaaataagaccacagtgaagtctgc

SEQ ID NO: 867250 - DNA, 635 bp, Homo sapiens
ttatctaatcacctcccaccaggcctcaccttcaatatttgggttattattttttttcatggctaaagttcattctcaccgagtatttgcaatgtaataaaattaagccaagcttatgtgaaccaagagctctgggtgacaaacaaaaagaatgtgcacaccggcaatattcatttaaggttaaaagatttttagtattattaatcaagaatttaaatgtcccaaatayataatacttatttgcttaggacaagatgtcctatccataactcagatgaaaactatataaaaaggaggaaagaagaaagtggtccctagaatgcattaatctagagtaatggttccagtcagccatgctgtaaatttaacttctattgctgtttgtgcactaaagggcactcatcatcccgaaagaattaatgcaacttctaaaaagtaggccagctaatttacaggcaatagcttacataccagaaaaaaactggatcagtaagtaatgcgatatttatttccaagaaatctggcaatgtttttctcactgaaaaatgagtaggaatgaagtcaatctgaaagtgatttttttcagaggcgggtgagcacaaggaaacacctttcgctgatgaaggaggaatatg

SEQ ID NO: 867251 - DNA, 635 bp, Homo sapiens
ttatctaatcacctcccaccaggcctcaccttcaatatttgggttattattttttttcatggctaaagttcattctcaccgagtatttgcaatgtaataaaattaagccaagcttatgtgaaccaagagctctgggtgacaaacaaaaagaatgtgcacaccggcaatattcatttaaggttaaaagatttttagtattattaatcaagaatttaaatgtcccaaatatataatacttatttgcttaggacaagatgtcctatccataactcagatgaaaactatataaaaaggaggaaagaagaaagtggtccctagaatgcattaatctagagtaatkgttccagtcagccatgctgtaaatttaacttctattgctgtttgtgcactaaagggcactcatcatcccgaaagaattaatgcaacttctaaaaagtaggccagctaatttacaggcaatagcttacataccagaaaaaaactggatcagtaagtaatgcgatatttatttccaagaaatctggcaatgtttttctcactgaaaaatgagtaggaatgaagtcaatctgaaagtgatttttttcagaggcgggtgagcacaaggaaacacctttcgctgatgaaggaggaatatg

SEQ ID NO: 867252 - DNA, 613 bp, Homo sapiens
gaatgagataaacttcaagagatctctgccattctaccccacaggagacagcgaatctgctcacacactgagcatattgttactacaaccaacatttgataaagccatcataaagactctctataaacaggaaactcatgcagagtcttcacccttgaaagcacccagagctgaattaggttacaataaactataatcattaaagtcacatccttaaggggaaaaaagaaaaagaaatttaaaaataaacacagttgaataaaaaagaaattctaaaataattagaagaaatactctatccaaatgaggaggaatcagaaaaaaataattctggtaatatgacaaaacagggttctataactggcccccctccactacaaagatcactgtagctttctagcaatggatcccaaccaagrtgaaattctttgaaatacccgataaataattcaaaaggttacttattaaattactggaggagatacaagagaaaggtgaaaactaacataaaaactttttaaaataattcaggatgtgaatgaaaaattttctaaagagttagatattttaaaggaaaaccaattagaacatctggaaatgaaagacccatttt

SEQ ID NO: 867253 - DNA, 613 bp, Homo sapiens
gaatgagataaacttcaagagatctctgccattctaccccacaggagacagcgaatctgctcacacactgagcatattgttactacaaccaacatttgataaagccatcataaagactctctataaacaggaaactcatgcagagtcttcacccttgaaagcacccagagctgaattaggttacaataaactataatcattaaagtcacatccttaaggggaaaaaagaaaaagaaatttaaaaataaacacagttgaataaaaaagaaattctaaaataattagaagaaatactctatccaaatgaggaggaatcagaaaaaaataattctggtaatatgacaaaacagggttctataactggcccccctccactacaaagatcactgtagctttctagcaatggatcccaaccaagatgaaattctttgaaatacccgataaataattcaaaargttacttattaaattactggaggagatacaagagaaaggtgaaaactaacataaaaactttttaaaataattcaggatgtgaatgaaaaattttctaaagagttagatattttaaaggaaaaccaattagaacatctggaaatgaaagacccatttt

SEQ ID NO: 867254 - DNA, 614 bp, Homo sapiens
acgagcattttttcatgttctttggctgcataaataacttcttttgagaagtgtttgttcatatccttcacccactttttgatggggttgtttgttttttttcttgtaaatttgcttgagttcattgtagattttggatattagcccttgtcagatgagtaggttgcraaaattttctcccattctgtaggttgcctgttcactctgacggtagtttcttttgctgtgcagaagctcttgagtttaattagatcccatttgtcaattttgtcttttgttgccattgcttttggtgttttagacatgaagtccctgcacatgcctatgtcttgaatggtattgcctaggttttcttctagggttttcatggttttagttctaacatggaagtctttaatccatcttgaattaatttttgtataaggtgtaagtaagggatccagtttcatctttctacataaggctagccagttttcccagcaccatttattaaatagggaatcctttccccatgcttgttttgtcaggttgtcaaagatcagatagttgtagatatgtggcattatttctgagagctctgttctgttccattggtttatatctctgttttggta

SEQ ID NO: 867255 - DNA, 614 bp, Homo sapiens
acgagcattttttcatgttctttggctgcataaataacttcttttgagaagtgtttgttcatatccttcacccactttttgatggggttgtttgttttttttcttgtaaatttgcttgagttcattgtagattttggatattagcccttgtcagatgagtaggttgcgaaaattttctcccattctgtaggttgcctgttcactctgacggtagtttcttttgctgtgcagaagctcttgagtttaattagatcccatttgtcaattttgkcttttgttgccattgcttttggtgttttagacatgaagtccctgcacatgcctatgtcttgaatggtattgcctaggttttcttctagggttttcatggttttagttctaacatggaagtctttaatccatcttgaattaatttttgtataaggtgtaagtaagggatccagtttcatctttctacataaggctagccagttttcccagcaccatttattaaatagggaatcctttccccatgcttgttttgtcaggttgtcaaagatcagatagttgtagatatgtggcattatttctgagagctctgttctgttccattggtttatatctctgttttggta

SEQ ID NO: 867256 - DNA, 664 bp, Homo sapiens
gttattgcccgttcctacgttcagatgttcacaggaacataacaccaacaggagaaatcaaaataaggcatgattatcgctgggcccagggcaattccacccaagattcagagattgggagctaagacagtggccacaaaatcttcaaaagtgggacaggatcttgggtccagtttccctgttccatgaatgagaaaaccaaaataagaactatggatttagaggcagtatttaccatagtaccacaccaccaacttgtcaaattctagtgaggtcacaagcaaagggttacaggagakgtcaccccccaaacacttcagacttggcaagacattcagtactgatgtcaacggaacacattgtaatttcaaaatcatctaaacaagcaaggaatagaagttaaaagccaaaacaaacaaacaaacaaacaacaacaagaaaacaaaaaacaaaccagggatctgagatacacacaaattgggcctgtgagggtgtccagggtcactcagctatgaccagaaccatagtaatacaaaattcaatatgccggtgtctctctgcacttcacctttgagaccagcatgctcacacatgtagcaatgggcaaatgccttccactgaaggaggcccaaatcctgttaagataagcaaaacctcttaagta

SEQ ID NO: 867257 - DNA, 691 bp, Homo sapiens
ggtctctaagaacttgctttatgaatctgggtgctcctgtgttgggtacataaaaccctttatcactatataatgcccttctttgtctttttttgatctttgttggtataaagtctattttgtcagaaactaggattgtaacccatgctcttttkttttccatttgcttggtagattttccttcatccctttattttgagcctatgtatgtcattgcatgtgagatgggtcacttgaagccagcatagcaatgggtgttgtttctttaccaagcttgccactctgtgtctttcaatcagggcatttagcccatttacatttaagattagtattaatatgtgtggatttgatcctgtcatcatgttagctggttattttgcagacttgtttatgtggtttcttcacagtgtcactggtctgtgtacttcagtgtgtttttgtagtggctggtaaaagtctttccatatttagtgcttccttctaatagaaaaaaagagctctaataaggcaagtctggtgccttacaaattccctcagcatttggttgtctgaaaaggatcttatttctcctttgcttgtgaagcttagtttggctggatatgaaattctgggttggaatttctttgaatgttggcccccaatctcttctggcttatagagtttcatctgagaggtctgcattagtctgatg

SEQ ID NO: 867258 - DNA, 608 bp, Homo sapiens
aggaacataatgaagttggttggttcctcctaagttcactggacaaagtgatgaaagaaaatgatgaacttagggattctaattcctagcttcagaagcagatactgaacctcaaacctgctaagattgccctgagtgagagtcttatctcctgtagagaaagagctgaaattgcgggaaattggacacaagttcttatcataccagtggctgacctgcaatgaaaggtgcatgcacagccttgccaggtgtctactgttgaaatgagggcattgattggaaaagaatgggatcctgaaacttggaatggggatatgtaaaaggaccctgatgaagctggggacactgagattrtaaattctgatgaaactttttttgccagaagaaacagctttctcatccccagtagtggcaacatgtcctccccaacccacactgccatcagcctttccacatttgtctgaggagaaaaaccctgcactgcctgaggcaacagtgatggcttcccctgaggcagttgccaggcaagataatgttgattctcctcaggacccaccccccaccacccctgtttgcttctagacctataactagactaaagtcccagg

SEQ ID NO: 867259 - DNA, 703 bp, Homo sapiens
atgtatgagctgagaggagaaaaagatatttttaaaaaaacagatttctgtcttatggattactgacagaacaagtgaattctcatctaaattcataagggtaatgttttaagttacagactctgaatttcaaaagaactcgaagtttcgaatcttcacatggctgatcattttatcactgaatggagaaaatttcrattaaaaggagaatgtcttcttgaagaaaggaaacacttgtttaaaaagcattttctccaatttctgtaaactgaatttcaaaaaatgttctaagtgtagacaaaatttcagtcaacatttcttgaattatctacattgtcaggcattttaaaacatattttatataagttgaaatgaaggctgtgtttataacatttattgacataatttgattcctaaagtggagcaactgttttctaaagtttaggggaagtttctttcttattaaaataatagatactgaaggttgctgaacaatcagatgttcacagtctccatccagagaaatgtagagaactacaaacttaacaaggtaacaattgctatatatttttgcttgggtttcttataaacaatacaagtagactaaaatactatgcatcatttagcaataaataaatgatagtgatgttaatgtttaatgaatgactaacaactaaattggttttcaagtgttatggcagca

SEQ ID NO: 867260 - DNA, 628 bp, Homo sapiens
gatatgggtttgcctatcctgcacacattgcttctgccaagattaccatctgtggactcacagaatgccttatccaccatcgtggtattccacacagcattgcctttgaccaaggcactcactttacgactaaagaagtgcagcagcgggctcatgcatatggaattcactggtctttacatgttccccatcatcctgaagcagctggattgatagaatgatggaatggccttttgaagtcacaattacaatgtcaactaggtgacaatactttgcagggctggggcaaaattctccagaaggttgtgtatgctctgaatcagcatccaatatatggtactgtttctcccatagccggaattcacaggtccaggaatcaaggggtggaagtggaagtggcaccacttaccatcacccctagtgacccactagtaaaatttttgcttactgtccctgtgacattatgttctgctggcctagagktcttagttccagagggaggaatgctgccaccagaagacacaaccacgattccattaaactggaaattaagattgacaccgggacactttttgggctcctcctacctttaaaccaacaatctaagaaggaagttacagtgttggct

SEQ ID NO: 867261 - DNA, 653 bp, Homo sapiens
tggctctttggttctagttagtaaggtgatgcccaggaagggaaggaattgtgccaaccaaggaaaggttctcatttgtactttcccatccagcaggaggttttcaaaacatagcatctgtcttaaaaggctcttgtgtgctctaatcatcatcattacttttataatcatgatgtgaatttttcagtcacaaactcaggtgtgcaaacagtataattttcttcattcttaatacctcattaatttctgactctgcattcttgttctgcataatggcagacaatgccttccctgtccagctgaacccattccttttgggtggcttcactgacaaacttggacacggtcacttctccagattcagtgatggcctttactggagcctgcttcagacttgcttattgccctctaaaagagttttgaaaatctatatacctcctttgttgacatttaaagcttttttttatcgtaagtttaaatagttaaatactaagttattacatatattgatgtttamaaaataaactgtcactattatcccatactttcttttctatttatttttttgagacggggtcttgctctgtcacccaggctggggtgcagtggtgtgatcacggcttattgcagccttgacctcctgggctcaagtg

SEQ ID NO: 867262 - DNA, 575 bp, Homo sapiens
gtcaattctagccacattatcagtgtttgcaatggttccctgaaggatgggaatactggtaagtgtgggtgaaggattacctaggtgctgaggcaagagactgaaggcacaaactgtttcagtataataaataaaatagttagaataagaatagttrtaatacaaattagctatagagatgatcatggacattatcaatcagtagtatagacattattaatcattagcttttaatattactctttgttgtattactaatataaccaaggaataaccggtgggtatagcgtcaggtgctgaagggacattgtgagaagtgacctggaaggcaagaggtgagccctctgtcatgcccgcataagggccgcttgagggctccttggtcaagcggtaacgccagtgcctgggaaggcacctgttactttgcagaacgtgaaagggagtctcctttccttagagtcagggaacactctgctccacaagcttcttgtgggaggctagatattatccaggccctcccacagtcatccggctgcataaactcctctctgtggtgctgtgcttcagtggtcacg

SEQ ID NO: 867263 - DNA, 610 bp, Homo sapiens
ctcaagagggaaattcaggacagaaagaggtgcaatgattgcccaaggtcacataaccaagtaatgacagcaccaaaacctgaacccagggctaggtgattggcccatgtatgtgctgaagcttaagaaagccattacagaggccatctctggttgggtgaggggagaagatgtgtgtctcggagggaaaggtggaggctggggctgtgagccaggccctttgttggccacagggagagaagcttgtgccagctgctactgctgattcartgacatggtgagaaatggaaggcagagagcagaggccaagcacacattcatcgtctgtgattaagagactcttgtttatctgttcctttgcttctcttattctgagacatttgaatacaaacagcatttctcttcaataattatttcctgctctccttcatgaaggctttgttctgggcagagtagtcatgaagcaggcaggcaaagcctgtcataagctcactgagggcctggataaccatagaggaccataaataaagatgtgtagcaggcctcctaggtgacaagcacatattctcttttgaaacttataacaatcttataaagttgtatgagtctt

SEQ ID NO: 867264 - DNA, 721 bp, Homo sapiens
gtctcagcatcttgaatcaatggtctttcacaatttaaacaatggatccaacaccttagaaagttcaattagaatttggatacctatgctgggcacggtggctcatgcctgtaatcccagccactttgggaggccgaggcgggtggatcacctgaggtcgggagttcaagaccagccaacatagagaaaccccgtctctactaaaaatacaaaattagccggggtggtggtatatgcctgtaatcccagctactcaggaggctgaggcaggagaattgcttgaacctgggaggcggaggttgtggtgagccgatatcgcgtcattgcactccagcctgggcaaaaagagtgaaattccgtctcaaaaaaaaawaaaataaataatttggatacttatgaataaactgggagcatgactttgagttactggaagaagttagaaacattaatccaattttctgattaggaaaaaaaaaagcactatttcctaagtttcatactctagtctctcttaaaaatgattctaggagcacaatgccaaattatgggcatccaaggacactctggctagacaaaaaggaagaaaactaggtgagcaatgaaccttattagcatgtgtcctctcaggctgatgactgtcattaggctgctggagaatgacatcattttctctaagaggcagtcagctcgaaaatgtcaactatctccatgaattaattct

SEQ ID NO: 867265 - DNA, 578 bp, Homo sapiens
ggagaagttattaaaatcttaaaattacacaatattaactttttttctaggtttaagctgaaatgtaggcgaaccatacaaaagtcattgtttttgttgtgtctttagaggacagggtggctgtcttttaaaaagtatatatatctcctagcatacttttatacaaaaacagaaattaaacccttctaaacttgaaaggtagatacatatttacattgtgatttagttatcttctgtaatgaggaaatggataatgctggcacctgatcttttgtcaacaaggtgatgcttagagtttaraataagtttctttttgtcattagattgttattataagttatgttaggtttatgggtttcatttatgcaataaatattcattgagtaattaccttgtgacagacattattctaggtacttgggatacatcagtgaacaaaatacactacagttcttactctcatgagacttatgttctagtgcgtatgtgtatgggggggatagtgagagaacagcaaagaataaacatgataattgtatatttatattatgtttaaaaggtgagggtgttaaaaatag

SEQ ID NO: 867266 - DNA, 655 bp, Homo sapiens
ggagacaccaaaaactctccaaaaaatcaatgaagccaggagctggttttctgaaaaaaattaacaaaatagatagatggctagctagactaataaagaagaaaagagaggaatcaagtagacaataaataatgataatggagatatcatcactgatcccacagaaatacaaaccaccatcagagaatactataaacacctctacgcaaataaactagcaaatctagaagaaatgcataaattcctggaaacatacaccctcccaagactaaaccaggaagaagtcaaatccctgaatagaccaataacaagttctgaaattgaggcagtaataagtaccctaccaaccaaaaaaattacaggaccagacggattcacagctgaagtcaacaagaaatacaaagaggagctgataccattccttctgaaactattccaaacaattgaaaaggagggaatcctccctaactcattttatgaagccagcaacatcctgataccaaaaccrggaagagacacagcaaaaaaagaaaacttcaggccaatatctctgatgaacatcaatgcaaacatcctcaataaaatactgggaaactgaatccagcagcacaacaaaaaacatatccaccatgatcaagtcagcttcattcctggg

SEQ ID NO: 867267 - DNA, 663 bp, Homo sapiens
catttaatcatctagtgcccagctagtactcggggaaaaaaggatttaaaatcattccatatactttttttttgctaatacttagaaagtacacaggaacgttgtccgatgctgagaatttatagagggcattctcttttaaaatcagtccctgaaatcagctgggkgtggtggcgggtgcctgtaatcccagctactcgggaggctgaggcaggagaattgtttgaacccagggggcggagattgcagtgcgccaacattgcgccattgcactctatctagcctgggagacaagagagaaactctgtctcaaaaaaaaaaataaataaaaaataaataaataaataaataaataaatccttgtttttctttaggatgttcttatcactcttattatactttttgagataattgttgattcgtacacatttgtacggaaataattcagagatatctcatgtatctttttctagtaactttcagtaagttaaatttgcttatggttttatagtttataaaatgccttaatacatctcgtttaattttcacattatctcatttaatcttgaatcctaacaataacccaaggagctaactatttttattaaccccattttacagaagagaaagtggaggctcaaatattttacttgatttgtatat

SEQ ID NO: 867268 - DNA, 663 bp, Homo sapiens
catttaatcatctagtgcccagctagtactcggggaaaaaaggatttaaaatcattccatatactttttttttgctaatacttagaaagtacacaggaacgttgtccgatgctgagaatttatagagggcattctcttttaaaatcagtccctgaaatcagctgggggtggtggcgggtgcctgtaatcccagctactcgggaggctgaggcaggagaattgtttgaacccagggggcggagattgcagtgcgccaacattgcgccattgcactctatctagcctgggagacaagagagaaactcygtctcaaaaaaaaaaataaataaaaaataaataaataaataaataaataaatccttgtttttctttaggatgttcttatcactcttattatactttttgagataattgttgattcgtacacatttgtacggaaataattcagagatatctcatgtatctttttctagtaactttcagtaagttaaatttgcttatggttttatagtttataaaatgccttaatacatctcgtttaattttcacattatctcatttaatcttgaatcctaacaataacccaaggagctaactatttttattaaccccattttacagaagagaaagtggaggctcaaatattttacttgatttgtatat

SEQ ID NO: 867269 - DNA, 663 bp, Homo sapiens
catttaatcatctagtgcccagctagtactcggggaaaaaaggatttaaaatcattccatatactttttttttgctaatacttagaaagtacacaggaacgttgtccgatgctgagaatttatagagggcattctcttttaaaatcagtccctgaaatcagctgggggtggtggcgggtgcctgtaatcccagctactcgggaggctgaggcaggagaattgtttgaacccagggggcggagattgcagtgcgccaacattgcgccattgcactctatctagcctgggagacaagagagaaactctgtctcaaaaaaaaaaataaataaaaaataaataaataaataaataaataaatccttgtttttctttaggatgttcttatcactcttattatactttttgagrtaattgttgattcgtacacatttgtacggaaataattcagagatatctcatgtatctttttctagtaactttcagtaagttaaatttgcttatggttttatagtttataaaatgccttaatacatctcgtttaattttcacattatctcatttaatcttgaatcctaacaataacccaaggagctaactatttttattaaccccattttacagaagagaaagtggaggctcaaatattttacttgatttgtatat

SEQ ID NO: 867270 - DNA, 615 bp, Homo sapiens
aaaataaatttggagagtttctcattttctttcaaaaaccttatataaatttgcaactatttatttcttaaaatattggtggacctagtctgtaaaacaaaatatctgagactagaattctgggaaaatcgcagtgtaggaaacaccaaatcttctcttcccatctagacaacaattacactgggaactatctgatgtaactacattgaaactctggagtttattgaagactaacaatttccatgcraagtcttgaacagtaaattgtgattaattttggtcaatatcagtttttttttttttttttttttttgagatggagtttccctcttgttgcccaggctggagtgcaatggcatgatcttggctcactgcaacctctgcctcccggttgaagtgattctcctgcctcagcctccaaagtaggtggaatttcaagcacccgccaccacacccagctaatttttttttctatttttagtagagacagggtttcagcatgttggccaggctagtcttgaaatcctgacctcaggtgacctgccagcctcagcctcccaaagtgctggtattacaggtgtgagccaccacatctggccaatctcagctcttagc

SEQ ID NO: 867271 - DNA, 646 bp, Homo sapiens
ggtcagcagtaagtagactaaatggtacccatgaggaagtcagcacatgtccccaaaagtaaatttcttatccccttatcacgagaagcagcctattaagtagttatggtagtaaattttaaattcccctgaagaaaagattgacaaaattgaattatgaagaagagctaagaagattaaattaccagaagaagagcaaagtcttgggagtaacttctcagcagtcttcagacccagaaagttttattaagtagggagtaggaagggtacaataagacaacattgctgaatttgcaaatgtttgggctatctatatgtaaagtccaactggtgtaaacattgcacaggaggatgaacggaatttgtaaaaatttggcattagggagtgttaggaccagcatatcccccatcctagaaccatatggctatcaagtctacttctcttatttctgagatgagcaaactgaatcgtagagaggttagttagcgtcagamcatcacttcagatttcagaatatgaaaatatttataagtcctgcataaacataaactgttattactgcaattcctctcacttaaaaaacaaacaaaacaaacaaacaaaacatttagcatacgatgatgacttttagtatgtctctccatg

SEQ ID NO: 867272 - DNA, 622 bp, Homo sapiens
tgctttttagcctaacaaaaacttcaaaaattctggaatttgagatctaaagagtagcactcttccagagattatgatttttttaattttagaaacaaaaatttgtcctaattgtaactaagtccatatgacttataacaagcattgcatagtttgcagtagaattcaagttcacagaatacccaaactaaggtgagtgatcagacagcaaatgaggccacgattgttggtacttagttggtgcttagggattttataccagtaaataacaygactgatgtgactatgattggaagtctacagccaataataaaatttgaaagacaattagaaatttgactcaaatggtctcattttgggccctaagtgtgggatcctccctacaagtgccatagtgcaatggaaagagatggctttatgtgtggaagtcccagagacgtgagggcagtgagcagcgcagcacctagagcctctgagcagcagccatgaagtcgattgctggtggatgataagctccagtggagctgaaacttatcacagagcattgtgcccagcaggcttcagaggcctctcaacctgctcatctcacccttggtagctccactgctacaaagcagagaga

SEQ ID NO: 867273 - DNA, 546 bp, Homo sapiens
ttaaatttccacatatttgttaattttccaaggttcctcctgctactgatttatagtttcatatcactgtagtttgaaacaatactagatatatggtcaatcttcttttgtggcctaacacaaggtctatcctgaagaatgttctatgcatgtgtgctagagcaaaatgtgtattctgttgttgttggatgcaaagttctgaagatgtctgttagttccaaktggtcaaaagtgcaattcaagtccagtatttccttattaattctctgtctgattaatctgcccatttttgaatgtgggggtactaaagtctcctactcttatagtattgctatctatttctcccttcatgtccattaatatttgcttaatgtatttaggtgctccaatgttgggtacatatagatttacaatggttatgtcctcttcattaattgacccttttatcattaactaatgaccttctttgtttcttgcaatagtttttcacttgaagtctattttatcatatgtaagtacagccacgcttgctttcttttgattacc

SEQ ID NO: 867274 - DNA, 546 bp, Homo sapiens
ttaaatttccacatatttgttaattttccaaggttcctcctgctactgatttatagtttcatatcactgtagtttgaaacaatactagatatatggtcaatcttcttttgtggcctaacacaaggtctatcctgaagaatgttctatgcatgtgtgctagagcaaaatgtgtattctgttgttgttggatgcaaagttctgaagatgtctgttagttccaagtggtcaaaagtgcaattcaagtccagtatttccttattaattctctgtctgattaatctrcccatttttgaatgtgggggtactaaagtctcctactcttatagtattgctatctatttctcccttcatgtccattaatatttgcttaatgtatttaggtgctccaatgttgggtacatatagatttacaatggttatgtcctcttcattaattgacccttttatcattaactaatgaccttctttgtttcttgcaatagtttttcacttgaagtctattttatcatatgtaagtacagccacgcttgctttcttttgattacc

SEQ ID NO: 867275 - DNA, 642 bp, Homo sapiens
acaggtgtgagccactgcacccggcccttactttcctttttatataactttattgcatctacatatattcctacatatagggatacacagagttagtagatgaaaagtatgttttggacctcccccaaaaaagtcattatatgaagaagacatgcacacatatatatagcagcacaattcaccaattgcaaaaatatggagccaacctaaatgcccatcaaccaatgagtggttaaaaaaatgtggcatataggacaggcacggtggctcatgcctgtaatcctagcactttgggaggccaaggtgggggtgtatcacctgaggtcaggagttcaagaccagactggccaacaaggtgaaacctcatctcactaaaaatacaaaaattagccaggcgaggtagcacgtgcctgtagtaccagctactcgagaggctgaagcaggagaatcrcttgaacctgggagacagaggttgcagtgagtcaagattgtggcactgcactccagcctgggcaacagagcaagactccatcaaaaaaaaaggaaaaaaaagtggtatatagactactcatactcagtcataaaatggaatgaaataatggcatttgcagtgacttggttggagctagaggccattattct

SEQ ID NO: 867276 - DNA, 647 bp, Homo sapiens
ggtcagcagtaagtagactaaatggtacccatgaggaagtcagcacatgtccccaaaagtaaatttcttatccccttatcacgagaagcagcctattaagtagttatggtagtaaattttaaattcccctgaagaaaagattgacaaaattgaattatgaagaagagctaagaagattaaattaccagaagaagagcaaagtcttgggagtaacttctcagcagtcttcagacccagaaagttttattaagtagggagtaggaagggtacaataagacaacattgctgaatttgcaaatgtttgggctatctatatgtaaagtccaactggtgtaaacattgcacaggaggatgaacggaatttgtaaaaatttggcattagggagtgttaggaccagcatatcccccatcctagaaccatatggctatcaagtctacttctcttatttctgagatgagcaaactgaatcgtagagaggttagttagcgtcagamcatcacttcagatttcagaatatgaaaatatttataagtcctgcataaacataaactgttattactgcaattcctctcacttaaaaaacaaacaaaacaaacaaacaaaacatttagcatacgatgatgacttttagtatgtctctccatgg

SEQ ID NO: 867277 - DNA, 605 bp, Homo sapiens
gctgcatttattggctggctagacaagtcaatccattacaaggaaataaattcaagcatattactctatcaaaatatcaagtgaattagggtaattagaacaaggctacctgtgagtctcctttagatttttttttaaataagcagaaaacataaagcaaataagcaattttgaaagaagaaattgcattcatttcttttgttttgaaaattggacagtaaggcttgctatagtaagtataccaggttccagctgggcaccgtggctcaagcctataatcccagaactctgggaggctgaggagggtggatcacttgaggtcaggggttggagaccagtctgcccagcatggtgaaaccccatgtctactaaaaataaaaaattagctgggcgtggtggtggtgagtgygtgtaatctcagctactcaggaggctgaggaggagaagcgcttgaacctgggaggtggaggttgcagtgagccaagatcgtgccactgcactccagcctgggcaacagagtgaggctccatctcaataaagaaaaaagaaaaaggtatataccaggttggaaatcttggatttgaatgtagctgaaaccaggaagc

SEQ ID NO: 867278 - DNA, 546 bp, Homo sapiens
cacaaatgctgttcttttaggtgctttgggaaacttgatgctcaaaaataataataacttacatatatggagagaaatggtctcatgcatttattgaataatagtttttaaatgatccctttgcagcatgtactttgctggggataacacagtggcaaagacagtcttcaatgtcaccaattaacgcacaggcaggaaattgaggaaaagcaaagggcaaaatctgcatgtcagctgagttggctgcattttcaaaagctttccagaaagtttctccaargacatgtgcttacatctcattgtccagctatgaggaaggctgtaaatcataggctatttgcaggcagattgccaccctgaagaaaatccattcttgttaataaggtggaggagtggatagatattgagtaagcagctaggcatgtcttccacaattacctttggtaattgtagatgtttccatctcagttgtaccaaaaaatctagaatctcatgcagtgccaaggcataaagtccttagtccccactgctccagaataccatagg

SEQ ID NO: 867279 - DNA, 595 bp, Homo sapiens
caaagctaaattctaatatagcagttagaggtgagatttaactgacttgttaatattttaaaaacagccaagtaaatgaaaattcaagtaatttctatttcttttctatctttaaaggggagcttaattaactgatttttttcagctatctaacactcctttgttagaagattcttccatccacttaagatccttttgatattttgttaaatgtgcattcctttgaaaaactacactgatgccctatcatgcccagatatttggcaaaattgtcatagagttgtttcttcaatagaatacttctaccaaataatttgtcttaatgattctcagaacatttaggataaatcatgttgatcaccatttgattttgatcaaaatcatatattgatcactaagsgtaaataatttaaaacggtaaataccaaacagtaagaaaatccttcttccatgtaatattacaatatggagactacttcagcaataagtaagtgaaaaataccagttgtagatctggaagtagaatccaagcaggctctataaccatatgtagtttgagcacaggaattatgtcataggttattctttctaaatt

SEQ ID NO: 867280 - DNA, 527 bp, Homo sapiens
tatgcctcccactttccattaaaatgctacagaatggctgggtgcggtggctcacagcctgtaatcccagcactttgggaggccaaggcaagtggatcacaaggtcaagagatcgcaaccatctcggccaacacagtgaaaccccatctctactaaaaatacaaaaattagctgggcacagtggcatgcacctgtagtccctgctacttgggaggccgaggcagaagaatcgcttgaacctgagaagcagaggttgcagtgagccgagatagcaccattgcaccccagcctggtgacasggcaagactccatctcagaaaaaaaaaaaaaaaaaaaaaaaaccactatgaataaaccattgcttctgatggaagtggatcaaatgttgggggtgtgttaagaatcacttctgtattaactaagaaattgaaaaacacttctattttaactaagagtttaatcactgaattactcaataaacatgtcttgagtaactaccacctgctcagcacctagcctctaggaac

SEQ ID NO: 867281 - DNA, 657 bp, Homo sapiens
ccactagaattaattcatttattaatcttttcttctgtattagctatgtccagtaggcactatgcaaagcactaggcactcagaaaaagatacagctcttttcctcatagatcttacattctcataaactagatagaaacttacccaataattaacatatgtatatgtatgacataattagttgtatgttaaaagataagaacaagatgttaaaaggacacaagataattcaacaactgcttcttgtggttggggacagactgctaagaggcattaaattaaataagagagattatatttctagtaatttttgaagtaatcccattactaggtatatacccaaaggattatgactcgccctactataaagacacatgcacacatatgtttattgcagcactgttcaaaatagcaaagacttggaaccaacccaaatgcctgtcaatgatagattggataaagaaaatgtggcacatatacaccatggaatactatgcagccataaaaaaggawgagtttacatcctttgcagggacatggatgaagctggaaaccatcatcctcagcaaactaacacaggaacggaaaaccaaacactgcatgttctcactcataagtcgaactgaacaatgagaacacatggacacagggagggga

SEQ ID NO: 867282 - DNA, 365 bp, Homo sapiens
aaataagaataattataataatgcctccctcataagcttgttgaatagaataattaggtatcatttctggaacataataatagctcaatgcttgttagctgttattgatacaggataggggcaggaagtgctaggtagagcaggtgaggtccctggcaagggctccaatccwctcttgggcctgtgcccacatacctaagtgagaacaggcactcctgttttcacgcacaaatgttgcattttccaagaccacttgggcccaccatgccccctatcctgtgcccataaaaacccgagcccctagcggacacacacacaagcagctagacattaagaggagcagaggagcagaagagcccactgac

SEQ ID NO: 867283 - DNA, 632 bp, Homo sapiens
ggcacaagacaaggatgcactctctcaccactcctattcaacatagggttggaagttctggccagggcaatcaggcaagagaaagaaataaatgatattcaattaggaaaagaggaagccaaattgtctctgtttgcagattatatgattgtatatttagaaaaccccatcatctcagcccaaaacctccttaagctgataagcaacttcagcaaagtctcaggatataaaatcaatgtgcaaaaatcacaagcattcctatacaccaataatagagagccaaatcatgagtgaactcccattcacaattactaaaagagaataaaataagaatccaacttacaagggatggaaggacctcttcaaggagtactacaaaccactgctcaatgaaatcaaagaggacacagacaaatggaagaacattccatgctcatggataggaagaatcaatatcatgaaaatggccatactgcccaaartaatttgtagattcagtgctatccccatcaagctaccactgactgtcttcacagaattcgaaaaaaactaccttaaaattcatatggaaccaaaaaaaagcctgcaaagtcaaggcaagcctaagccaaaagaacaaagctgaaggcatt

SEQ ID NO: 867284 - DNA, 582 bp, Homo sapiens
gatttataataatttgggtatatagccagtaatgagattgctgggtcacatggtgtttctagttctagatgcttcaggaatcgccacactgtcttccacaatggttgaactaatttacacttccaccaacagtgtaaaagctttcctatttctccacatcctctccagcagctgttgtttcctgactttttaatgatcaccattctaactggcataagatgttatctcattgtggttttggtttgcatttctctaatgaccagtgatgatgagccttttttcatatgtatgttggctgcataaataccttcttttgagaagtgtctgttcatatcctttgcccactttttgatggggttgtttttctcttgtaaatttgtttaagttctttgtagattctggatattagytcttcgtcagatggatagattgcaaaaattttctcccattctgtaggttgcctgctcactctgatgatagtttctttgctgtgcagaagctctttagtttaattaggactcatttgtctattttggcttttgttgccattgcttttggtattttggtcgtgaagtctttgcc

SEQ ID NO: 867285 - DNA, 631 bp, Homo sapiens
catggtatatatgtgacacatttcctttatccagtctatcattgatgggcatttagattggttccaagtcttttatattgtgaacagtgccacaagaaacatacacgtgcatgtgtctttatagtagaatgatttataataatttgggtatatagccagtaatgagattgctgggtcacatggtgtttctagttctagatgcttcaggaatcgccacactgtcttccacaatggttgaactaatttacacttccaccaacagtgtaaaagctttcctatttctccacatcctctccagcagctgttgtttcctgactttttaatgatcaccattctaactggcataagatgttatctcattgtggttttggtttgcatttctctaatgaccagtgatgatgagccttttttcatatgtatgttggctgcataaataccttcttttgagaagtgtctgttcatatcctttgcccactttttgatggggttgtttttctcttgtaaatttgtttaagttctttgtagattctggatattagctcttygtcagatggatagattgcaaaaattttctcccattctgtaggttgcctgctcactctgatgatagtttctttgctgtgcagaagct

SEQ ID NO: 867286 - DNA, 648 bp, Homo sapiens
tttagcccttagggaagaaaatctaattgtagttagtgatgaagggagcgttaacaatgaggtgcatcagaccccctatcccatcatggccaagcattctgttttcaaggtgactctgcattcccttggccaggaggtggtccattcagccagttgggygggggtgggggggcacttagaattttattcatatttctagataggattggccacatttgtgggaaaggcataaacaccatccagactcttcatttctttcttttttaaaaacaattattattatactttaagttctagggtacatgtgccaacgtgcaggtttgttacatatgtatacatgtgccatgttggtgtgctgcacccattaactcatcatttacattaggtatatctcctaatgctatccctccccccatccccgaccccatgacaggccccagtgtgtgatgttccccaccctgtgtccaagtgttcccattgttcaatacccacctatgagtgagaacatgtggtgtctggttttctgtccttgcaacagtttgctcagaatgatggtttccagcttaatctatgtccctataaaggacatgaactcatccttttttatggctgcatagtattccatggtgtatatgtgccacattttct

SEQ ID NO: 867287 - DNA, 749 bp, Homo sapiens
tgctatgacaaggaatatcctgatgttaactgttctaggcttctgcctgaaggaaaaattcttcgattctctaaatggttctagaatcctgaattggttcggctcatggacaagggttggtgcccagtctttactgcctgcccagcttttgtagacctgagttggctaatgtctgtataggatggtgtgtgtgtgtgtgtgtgtgtgtgtgtgtgtgtgtgtttatgaattgcagaaggtaagtttgagggtgaggggtactgacttgttttttttagcttttcccaagaaagaaatcataggccaaggctgatatacaaatgtaattttcttacctcattggaaacactgtctgctgaagaaatctctcttggttctttcatagaaacatcaaaaaaagcgagaatcaagatctctagccatgtccttgctgatatttagcagctttctgggaagaagccagaggtcttggtataccttgattaagtttgtgcatcaattgtttgacatcttagacttcaatttcccatagaattgtcttcagagaatcatgaaatattrtgacatcacattgtaattgcataattacttgtctgcctattcacttagtcttaaagtccttgagtacaggattgtatcttctcttgtctatgggttcccagactctaacacaggtgtggcacatagtatgtcttaaaaaataagaattggaagggaccttgaagactattgttagggggaggacttct

SEQ ID NO: 867288 - DNA, 579 bp, Homo sapiens
ttaagtggagatatttcctttttcagcatagatctcaaagctctgaaaaatatcacttaacagattctacaaaaagactgcttccaaatggctcaatcaaaagaatgcttcaactctgtgagataaatgcacaagtcaaaacgaagtttctctgaaatcttctgtctagtttttatgtgaagatatttcctttttcaccataagcctcaaaacactcacaaatatccctttgcagattccagaagaacagtttccaaactactcaatgaaaaaaaaaaaatttacctctgtgggatgaatgcacacatcacaaarcactttctcagaaagcttctttctactttttatgtgaagatatttccattttcagtataggcatcaaagcactctaaaatatccgtttgcagattccacaaaaagactgtttccaaactgttcaattaaaagaatgtttcaactgtgtgagatgaatgcactcgtcacaaagaagtttctcagaatggttctgtgtggtgtttttgtgaagatatttcctttgtcaccgtaggcctcaaggcactcacaaatatcccttttcag

SEQ ID NO: 867289 - DNA, 675 bp, Homo sapiens
tttctgagaaacttctttgtgaagtatgcattcttctcacagagttaaacctttcttttcattgagcagtctggaaccattgttttttttagaatctaggcagggatatatgagagcacattgaggcttgtagtgaaaaaggaagtgtcttcagataaaaactagagacaagctttctgagaaactgctttgtgctgagtgcattcatctcacagaattaaacctttctttgattgaacagtttggcaacactctttttgtagaatctgagaagggatatttgtgagcactttgaggcctatagtgaaaacgggaaggtcttcagataaaaagtagaaataagatttctgggcaaccgctttatgatgtgtgcattcatctcacagagtcaaacctttcttttgattgagcattttgccaatactctttatgtagaatctgagaagggttacttgtgagcactttgtggmctatagtgaaaaagggaacatcttcagataaaaagtagaaagaagctttctaagcaactgctttctaatgtctgcattcacctcacagagttaaactttcttttgattgaacagtttggaaacactctttttgtagactctgagaagggatatttgggagcattatgaggcctatagtgaaaaaggaaatatcttcagatgaaag

SEQ ID NO: 867290 - DNA, 667 bp, Homo sapiens
aactgctctatcaaaaggagggttcaactctgttagttgaatgcacacatcacaaagaagtttctgagaatgcttctgtctaatttttatgtgaagatattcccgtttccaacaaaggcttcaaagcggtccaaatatccacttgcagattctaccaaagagtgtttccaaactggtcaatcaaaagaaagtttctactctgtgaggggaatgcacacatcacaaagaagttaatgagaatgcttctgtctactttttatatgaagatattcccttttcaactataggcctcaaagcactccaaatatccatttgcagataatagaaaaaaagggtgttttcaaactactcartcaaaagaaaggttcaactctgtgagttgaatgcacccatcacaaagaattttgtgagaatacttctgtctagttttcatgtgaagatatttccttttccaccatagccctcaaagccctccaaatatccacttgtagattctacaaaaagagtgtttccaaactactgaatctaaaggaagattcaactctgtgagatgaatgcacacatcacaaagtagtttctcagaatgcttctgtctaccctttatatgaagatatttccttttcaactacaggcctcaaagcgctccaaatatccacttgcagaaact

SEQ ID NO: 867291 - DNA, 667 bp, Homo sapiens
aactgctctatcaaaaggagggttcaactctgttagttgaatgcacacatcacaaagaagtttctgagaatgcttctgtctaatttttatgtgaagatattcccgtttccaacaaaggcttcaaagcggtccaaatatccacttgcagattctaccaaagagtgtttccaaactggtcaatcaaaagaaagtttctactctgtgaggggaatgcacacatcacaaagaagttaatgagaatgcttctgtctactttttatatgaagatattcccttttcaactataggcctcaaagcactccaaatatccatttgcagataatagaaaaaaagggtgttttcaaactactcagtcaaaagaaaggttcaactctgtgagttgaatgcacccatcacaaagaattttgtgagaatacttctgtctagttttyatgtgaagatatttccttttccaccatagccctcaaagccctccaaatatccacttgtagattctacaaaaagagtgtttccaaactactgaatctaaaggaagattcaactctgtgagatgaatgcacacatcacaaagtagtttctcagaatgcttctgtctaccctttatatgaagatatttccttttcaactacaggcctcaaagcgctccaaatatccacttgcagaaact

SEQ ID NO: 867292 - DNA, 653 bp, Homo sapiens
tgagaatgcctctgtctggttttggcatgaagatatttccttttccacaataggcctcaaagcgctccaaatatccacttgcagattctataaaaagagtgtttcaaaactgctcagtcaaaagaaagactcaacactgtgagatgaatgcrcacataacaagaagtttctcagaatgcttctgtcaagtttttatgtgaagatatttccttttcaattataggcctcaaagtgatccaaatatccattggtggttactacaaaaaagaatgtttccaaacttctcaatcaaaataaatgttcaaatctgtgagttaaatgcacacatcacaaagaagtttcttagaatgattctgtctactttttatgtgaacatacttccttttccaccataggcttaaagcactaaaaatatccacttgcagattctacaaaaagagtgtttcaaaactgctcaatcaaaagaaaggttcaactctgtgaaatgaatgcagacaccacaaagtagtttctgagaatgcttcagtctagtttttatgtgaagctatttccttttccaccattggcctcaaagtgctccaaatatccacttgcagatactacaaaaaagtgtttcaaaactgctcagtcaaaagaaaggttcaactcagtgt

SEQ ID NO: 867293 - DNA, 612 bp, Homo sapiens
agtgctccaaatatccacttatagattctacaaaaagagtggttccaaactgctgtatctaaagaaagattcaactctgtgagataaattcacacatcacaaagtagtttctcagaatgcttctgtcttgcttttatgtgaaaatagttccttttcaactataggcctcaaagcgctccgaatatccatttgcagatactaactgcaaaaagagtgcttccaaaccgatcaatcaaaagaaatgttcaattctrtgagttgaatgcatacatcacaaataagtttctgagaatgcttctgacgagttttcatgtgaagatatttccttttccaccataggcctccaagcactccaaatatccacttgtagattctaaaaaggagtgtttcaaaattgttcaagtaaaagaaaatttcaactctgtgagatgaatgcacacatcacaaagaagtttcttagaataattctgtctagtatttatgtgaagaaatttccttttcgactataggcctcaaagtgctccaaatatccatttgcagatgctacaaaaagagtgtttctaaactgctcaatcaaaagagacattgaactctgtgagttgaatgaacata

SEQ ID NO: 867294 - DNA, 529 bp, Homo sapiens
gagttgaatacagaaatgcaaggaagtttctctgaatgcttctgtctagtttttatgtgaagatatttccatttccacgataggactcaaagcgctccaaatatccatttgcagataccacaaaaagacggtttccaaactgctcaatcaaaagaaatattcaactctgtgagatgaatgcacacatcacaaaggagtttctcagaatgcttctgtcaagtttttatgtgaagatatttccttttcaaccataggcgttaaaagtgttccaaatatccacttggagatactacaaaaagactgtttccaaactgctcaatcaaaagaaaagttcacatctctgagttgattacacacatcacaaagaagtttctcagtrtgattctgtctagattttaagtgaagatatttccttttccaccataggcctgaaagcactccaaatatccacttgcagattctacaaaaagagtgtttccaaactgttcaataaacagaagggttcaactctgtgagatgaattcacaca

SEQ ID NO: 867295 - DNA, 555 bp, Homo sapiens
ttttcagattctacacaaagagtgtttcaaaactgctcaatcaaagaaacattcaactctgtgagatgaaagcagacatcacaaacaagtttctcagaatgcttctgtctactttttatgtgaagatatttccatttcaccataggcctcaaagcgctccaaatatccactggcatattctacaaaaagattgtttcaaaactgctcattcaaagaaaggttcaactctgtcagatgaatgcaaacatcacaaagaagtttctcggaatgtttctttctagtttttatgtgaagatgtttcctatttccccataggccacaatgggctcacaaatatccatttgcagattctacaaaatgcagttttccaaactgttcaatcaaaaraaatgttcccatctgtgagatgaacgcatacatcacaagtaagtttctcagaatgcttgtgtctagtttttatgtgaagatatttccatttgcaccataggcctcaaagtgcaccaaatatccatttgcagatactacaaaaagaccgttttataactgctcaatcca

SEQ ID NO: 867296 - DNA, 635 bp, Homo sapiens
ctttgaggactgtggtgagaaaggaaatatcttcatataaaaactagacagaagcattctgggaaacatctctgtgatgtgtctattcaactcagagagttgaaactttcttttgattgagcagtttggaaagagtctttctatagaatctgcaaggggatatttttgagtcctttgaggtctatggtgaaaaaggaaaaatcttcacttaaaaactaggcagaaggtttctgagagactgcttcatgatgtgtgcatccatctctcagaagtaaacktttctttccattgacaatattggatactctgttcctgtagaattcgcagagggatatttgtgactgctttgaggcctacggtggaaaaggaaatatcttcacagaaatactagacagaagctttctgagaaactactttgtgatgtgtgcattcgtctcacacagttgaaactttcctttgattgagcagtatggaaaaagcctccttgcagggtctacaaagggatatttgtgagcagtttaagaactatggtgaaaaaggaattatgttctcataaaaactggacagaagcttttggagaaacttctttgtaatgcgtgtattcatctcacagagttgaaactttattttgattg

SEQ ID NO: 867297 - DNA, 656 bp, Homo sapiens
ctgtagaattcgcagagggatatttgtgactgctttgaggcctacggtggaaaaggaaatatcttcacakaaatactagacagaagctttctgagaaactactttgtgatgtgtgcattcgtctcacacagttgaaactttcctttgattgagcagtatggaaaaagcctccttgcagggtctacaaagggatatttgtgagcagtttaagaactatggtgaaaaaggaattatgttctcataaaaactggacagaagcttttggagaaacttctttgtaatgcgtgtattcatctcacagagttgaaactttattttgattgagcagtttggaaaccgtctttttgtagaatcagcaaatggatatttatgagggccttgaggtctcaggtaagaaaaggaaatatcttcacataaaaactagacagaaggttcctgagaaactgttttcagatgtgtgccttcatctcacagaggtaaatgtttcttttcattgagcagattggaaactctcttttttgagaatctgcaagggaatattagtgagtggtttgaggcctattgtgaaaaaggaaatattttcacataaaaattaggcagaagctttcagagaaacttctttgtgatgtgtgcattcatctcacagatttgaacct

SEQ ID NO: 867298 - DNA, 656 bp, Homo sapiens
ctgtagaattcgcagagggatatttgtgactgctttgaggcctacggtggaaaaggaaatatcttcacagaaatactagacagaagctttctgagaaactactttgtgatgtgtgcattcgtctcacacagttgaaactttcctttgattgagcagtatggaaaaagcctccttgcagggtctacaaagggatatttgtgagcagtttaagaactatggtgaaaaaggaattatgttctcataaaaactggacagaagctttyggagaaacttctttgtaatgcgtgtattcatctcacagagttgaaactttattttgattgagcagtttggaaaccgtctttttgtagaatcagcaaatggatatttatgagggccttgaggtctcaggtaagaaaaggaaatatcttcacataaaaactagacagaaggttcctgagaaactgttttcagatgtgtgccttcatctcacagaggtaaatgtttcttttcattgagcagattggaaactctcttttttgagaatctgcaagggaatattagtgagtggtttgaggcctattgtgaaaaaggaaatattttcacataaaaattaggcagaagctttcagagaaacttctttgtgatgtgtgcattcatctcacagatttgaacct

SEQ ID NO: 867299 - DNA, 656 bp, Homo sapiens
ctgtagaattcgcagagggatatttgtgactgctttgaggcctacggtggaaaaggaaatatcttcacagaaatactagacagaagctttctgagaaactactttgtgatgtgtgcattcgtctcacacagttgaaactttcctttgattgagcagtatggaaaaagcctccttgcagggtctacaaagggatatttgtgagcagtttaagaactatggtgaaaaaggaattatgttctcataaaaactggacagaagcttttggagaaacttctttgtaatgcgtgtattcatctcacagagttgaaactttattttgattgagcagtttggaaaccgtctttttgtagaatcagcaaatggatatttatgagggccwtgaggtctcaggtaagaaaaggaaatatcttcacataaaaactagacagaaggttcctgagaaactgttttcagatgtgtgccttcatctcacagaggtaaatgtttcttttcattgagcagattggaaactctcttttttgagaatctgcaagggaatattagtgagtggtttgaggcctattgtgaaaaaggaaatattttcacataaaaattaggcagaagctttcagagaaacttctttgtgatgtgtgcattcatctcacagatttgaacct

SEQ ID NO: 867300 - DNA, 654 bp, Homo sapiens
tttttgagcactttcaggcctattatgaaaaaggaaatatcttcacataaaaactagacagaagctttctgagaaaattctctgtgatgtgtgaattcatctcacatagctgagactttcttttgattgtcaatttggcaaaagtgtttttgtagcatctgcaaacggatatttgtgggctgtttgaggcctatggtgaaaaaggaaatgtcttcacataagaactagacagaagatttctgagagactgcttcatgatgttggcattcatcccacaaaggtagacattacttttcattgggcagatttgaaaccctcttcttgtagaatccacaaagttagatttgggaccactttcagtctgtggtgaaaaactaaatatcttcaaataaaaaccagacagaagcttactgagaaactgatttgtgatktgtgcattcatctcacacagttgaaactttcttttgattgagcagtttggaaacagtctttttgtagagtctgtaaagggatatctgtgagtggtttgaggcatatggttaaaaatgaaatatcttcacataaacctagacagaaattttgtgagaaactgctttgtgatgtgtgcattaatctcaaagagttgaaactttcttttgattgagcagtgtggaa

SEQ ID NO: 867301 - DNA, 608 bp, Homo sapiens
ttgtagaatctgtaaagggatatttttgagcggtttgaggcctatggtgaaaaatgaaatatcttcacataaaaaccatacagaagttttctgaggaactgctttgtgatgtgcattaatctcacagagttgaacatttcttttgattaagtagtttggaaacagtgtttctgtagaatctgcaaagggatatttgtgagtggtaggaggcctaaggtgaaaaaggaaatatcttcayataaaaactagagagaagctttctgagaaacttctttgtgatgtgtgcattcatctcacataattgaaccttttttttgattgagcagattggaaacagtcatagcagtctttttgtagaatctgcaaagggatatttgtgatcgctttgaggcctatggtggaaaaggaaatatattcatgtagaaactacccagaatctttctgagaaactactttttgatgtgtgcattcatctcacagagttgaacctttgtttttattgagaagtttggaaattgtcattaccatcttttggtagaatctgaaaagggatatttttgagcggtttgagtcctgtgtgaaaagggaaataacttcatataaaaact

SEQ ID NO: 867302 - DNA, 648 bp, Homo sapiens
gagaaactaatttgtgatgtgtgctttcatctcacagagttgaatctttcttttgattaagctggctggaaacagtctttttgtagaatttgcaaagggatatttggggtgctttgagacctatgttgaaaaaggaaatatcttaatataaaaagtagacagaagctttctgagaaacatcattrtgatgtgtgccttcaactcacagagttgaacctttcttttgattgatcagtttggaaactgtcttttgtagaatctacaaagggatatttggagctctttgagacctatggttaaaaaggacatatcttcccataaaaactagatagaagctttctgagaaacttccttatgatgtgtgcgttcatctcacagagttcaacgtttcttttgattgagcagtatggaaacattctttttgtagaatctgcaaaggaataggtgtgagtggtttcaagcctatggtgaaaaaggagataccttcacataaaaactagacagaagcttcctgagaaacttctttgtgatatgtgcattcatctcactgagttgaaactttcttttgattgagcagtttggtaatagtttcttgtagaatctgcaaagggatatttgtgagttcttggtcacctatggtagaaaggg

SEQ ID NO: 867303 - DNA, 526 bp, Homo sapiens
ttgtagaatctgcaattggatatttagagcgattagagacctaaggtgaaaaaggaaatatcttaacataatcactagaaagaaactttctgagaaacttctttgtgatgtctgctttcatctcaaacagttgaacctttcttttcattcagcagtttggaaacagtctttttgtagagtctacaaaggtatatttgtgagctgtttgaggcctatggtgaaaaaggaaatatatttatataaaatctacacagaagattttgagaaatttctttgtgatctttgtattcatctcacagagytgaacctttcttttgattgagcagtttggaaacagtctttttgtagaagttgcaaatggatatttggagtgctttgaggcctataatgaataatggatatcttcatataaaaactggacagaagatttctgaaaaacttccttgtgatgtgtgcattcatctcacagagttgaaactttcttttcattgagcagtttggaaagagtctttttgaagaatctacc

SEQ ID NO: 867304 - DNA, 630 bp, Homo sapiens
tgtttgttatgatttcagttcttttgcatttgctgaggagtgctttacttccaatttgtggtcgattttagaataagtgccatgtggcactaacaagaaggtatattctgttgatgtctgttaggtacacttgatccagagctaagttcaagtcccgaatatccttgttaattttctgtctcgttaatctatctaatattgacagagggttgttaaagcctcccattattattgtgtgggagtctaagtctctttctaggcctctaaggacttgttttatgaatctgggtgctcctgtattgggtayatgtatatttaggatagttagctcttcttgttgaattgatccctttacctttatgtaatgcccttctttgtcttatttgatctttgttggtttgaagtctgttttgtcagagacttggattccaatccctgccttttatttttgctttccatttgcttggtaaatgttcctatatccgtttattttgtatagtgtgtctttgcatgtgagatgggtctcctgaatacagcccactgatgggtcttgactccttatccagtttgccagtctgtgtcttttaattggagcatttagcccatttacatttaagtttagtattgtta

SEQ ID NO: 867305 - DNA, 582 bp, Homo sapiens
agatttatgctctttagttttgtatcttttatctaatttgatctttctttccataaataaaaataaggtaattgtttagaaagagacatctgtaatatatatatttttcccacataggagtctttttaacttaaagatccattgtctggccactaatgactaatgaatatctaatgatgtacttattttaatagtgattcaatctaataaggctctttatggaaagaccaggaggtaattgttaggcttagaataagtyttaccatataagcaaaaggagttcctggaaagggtgtcaaagagacaatgcccatgatcacccaaaattaatgcctataaatagactaagagagcaaaaagatggttacagtcacagatggttgagaacagtgttttcggaacagtgtctccagtatctcacaaatttgtggggggttgccagttacagacctgttaatctgtgatatgggcaggtcctcctggaactggactttcccagtactaatcgggcaatgagagttgagacagcaaaaggcctttatggatggtactttttattgacgtaaactcccctgagagctt

SEQ ID NO: 867306 - DNA, 607 bp, Homo sapiens
ataaatatatgataagaatggcattcaaattacttggggaaaatgtaatattcattcaatttttcagggtacctagctagccatatgcatacaaaatgagataaatgccccaattaaaagactcagactggcaaattggataaagagtcaagacccaatggtgtgctgtattcaggagacccatytcacgtgcaaagacacacataggctcaaaataaagggatggaggaatatttaccaagcaactggaaagcaaaaaaagagcaggggttgcaatcctagtctctgataaaacagactttaaatcaacaaagatcaaaagagacaaagaagggcattacataatggtaaaggtatcaatgcaacaagaagagctaattattctaaatatatatgcacccagtacaggagcacccagagtcataaagcaagttcttagagacctacaaagagactgagactctcacacaataatagtgggagattttaacaccccactgtcaatatgagacagatcaacgagacagaaaattaaggacattcagggcttcaactcagctctggaccaagtggacctaatagacatctgcagaactctccaccccaa

SEQ ID NO: 867307 - DNA, 545 bp, Homo sapiens
actctgggaggctgaggcaggaggatcacttgaggccaagactttgagacaagcctgtgcaacacggtgaaaccctgtctctactaaaactttaaaaaattcaattagccaggtgtgctggcacgtgcctgtagtcccagctatttgggaggctgaggcaggagaaccacttgaacatgggaggcagaggttgcagtgagccaagattgmgccattgcattccagcctgggcaacaagagtgaaactccatctcaaaaaaaaaaaaaaggtgctcaatgaatccatgaataggtaaatcaattgttgtccactcctaggaaagccatacaccatcaaggctgcccacctgcccccttggccacagagcaggcctgtccaagggtcaaccagaaccctaggccacaaaacataccacggccttcccagcacatgacagggagtcccaaaatcgggggcctctctcacgtcacacagatgacatgagttgctctctgctatgggagtggacaattcccatgtccaaacttgtcttgggatagggaca

SEQ ID NO: 867308 - DNA, 545 bp, Homo sapiens
actctgggaggctgaggcaggaggatcacttgaggccaagactttgagacaagcctgtgcaacacggtgaaaccctgtctctactaaaactttaaaaaattcaattagccaggtgtgctggcacgtgcctgtagtcccagctatttgggaggctgaggcaggagaaccacttgaacatgggaggcagaggttgcagtgagccaagattgagccattgcattccagcctgggcaacaagagtgaaactccrtctcaaaaaaaaaaaaaaggtgctcaatgaatccatgaataggtaaatcaattgttgtccactcctaggaaagccatacaccatcaaggctgcccacctgcccccttggccacagagcaggcctgtccaagggtcaaccagaaccctaggccacaaaacataccacggccttcccagcacatgacagggagtcccaaaatcgggggcctctctcacgtcacacagatgacatgagttgctctctgctatgggagtggacaattcccatgtccaaacttgtcttgggatagggaca

SEQ ID NO: 867309 - DNA, 678 bp, Homo sapiens
tcctagatgcataaaccctactaagacgaaacaaggaagaagttgaatctgtgattagaccaataaccagttctgaaattgaggcagtaattaatagcctaccaaacacaaaaagcccaggaccagatggattcayagctgaattctacaagaaatacaaagaggagctactaccattccttctgaaactattccaaacaatagaaaaagggggactcctccctaactcattttatgaagccagcatcatcctgataccaataccaggaagagacacaacaaaaaaaagaaaatttcaggccaatatccctgatgaacatcaatgcaaaaatcctcaataaaatactgccaaaccaaatccagcagcacatcaaaaaacatccaccatgatcaagttggtttcatcccctgggatgcaagactggttcaacatactcaaatcaataactataatccataacataaacagaaccaatgacaaaaaccacatgattatctaaatagatgcagaaaaggtatttgatagaattcagcatcccttcatgttaaaaattctcaataaattaggtactgattgaacatatctcaaaataataagacctatttatgacaaacccacagccaatatcatattgaatgggcaaaagctagaagcattccctttgaaaacgggtacaa

SEQ ID NO: 867310 - DNA, 610 bp, Homo sapiens
actaaaccagggaagcagcctcttctaaatcctgcttcaatgaggcttatgtctgcatgggtgtgctactcattgaacacaaatataaaggtgccaccagacaaggagtttttctggttcatcattgcactgcaggatgccatgaaggagtcacaggctgtggcttccatgaagcccgtgacaaatttaataccctattacttgtgtcgtctgcactagcacttcatttggtgacatcactgsgtacaactaaagttgaaatttgtgtgacatttttgcaggtgttgcttttcaccaaaaatgttattttacatagtttagccacagtgcagtgctttaagtctagaactaaacctcaggaaatctaatgaggttgaaaagaaaagtgaaagttaacggctgcagctttaacaaaggctcatcctccctccggctctaaagagtcagtaactgagttcagtaactgaaaattaaattagaagaaatgccacctctgcagctacagctacctttagcattaacaataatatagaatgggatgggggtggggggttctgctcaatagagccatcaagaaactttcagagcctttaaacgggatggaatctgc

SEQ ID NO: 867311 - DNA, 613 bp, Homo sapiens
tgattaaattagaactgttatatctgagtaatacatgagagaatatagaatgcttattgcacaggtgtattagtttattattgggtctttacatctgttacttctttaagatctctcctcacccagccctccctagccactctacacccagccctggaggcatcataatataaaatggtaaacccattgctaaattctctgggttttaaaaaatttttctgtataaatattggaattaatcacaaacttcaatcctctccccaaaatggagttctatataattttcaggaatataaagagaagttackatttcaatccaaattgtaatacatttttttctgtacccaccaaaaagttttattgtgcttttcctatacccccaaaaaagttttattgtacttttaacttgtatatttattgttattaaacttttttatacataacactagaaatgttaacattaacattataagcaatgttgtcaggctggggaacttgagctttaattgaggtcttgattagatcaccaactggctacatggcattggttaggtcacttactgtttctgggccccagttttgtcatctaggacttaataaacacgcagaagtc

SEQ ID NO: 867312 - DNA, 659 bp, Homo sapiens
aactttctaaaagcgttaaacggtacataacagctttcaaaatacacattccagggctttgcttcctgcagtggctatggattgcctgagtacaaagatagatacattacgcttgtataaattttgaatgtgaaaacattggaaatcattttcaagacctaacacaggttaatgctattaaccactatttatatcaaatccatcacctcccaatatgattgcatgaagcagcacccctgttcatcctcccattagctggattgcaatggtcccattgctaagawtatttcaaattaaagctgacaacgtgtttgaaaaatatacactcaggaatatcctgagttgaaggaggtggataaatagtgggaggaaaattgtctgattagcaaataagagttcttagattgtatttcctgaggtttaatattaacaggataatcatgcacaaaaaatttcctttgagacaaaaatgaaaaaagtaattaaaatcattcaaataactgatattgaaatttatcatttatagttcaagttcttcctctttcatgaagacattccacaacatcttgctgcaaaaatgccttgtttcaccacccaggtgataaacccttggaggacaaggcagaccagacatctgcatcctccatgaagtcaaacat

SEQ ID NO: 867313 - DNA, 739 bp, Homo sapiens
gtcaagtatatgctttgcaaagattttctttcaatgtgtggcttgtattttcaatctcataataatggattcctttttacttttacttttgaaataactatagattcataggaagttgccaaaatagtacagacacttcttgtgtatcttttccccactctcctccaatgttcacatcttgtatagctatagtaaaatatcaaaaccaggaacttgacattggtagatagttctatgccatattatcaaatgtatagatttatttaaccacagctacagttgagatatggaactattgaaacatcacaaataaatttcttgttgcactacccccttgagagtcacacccaccccttycccccatcattcctaacctctggcacccatgaatctgttctccattttcatacttttgtcatttatagaattgtcatacagtatgtgactttttaaggttggctttttttcactcaccataattcccttgaaccatcaaaattgtgatgtgcatctgtagtactttcattttttaatgttagtactccatgatatgaatataccacaatttatttaactactcgtttactgaaggaaacattgttgtttccagtttggaactattataaacaaagctgctataagcattgtgtacaggttgtagtgtgaatgcacattttcatttctctgggataaatgcccaggagtgtaattgctggattgcatagtaagtgattgttta

SEQ ID NO: 867314 - DNA, 589 bp, Homo sapiens
tattatttcagatgacaagaagtctagaagtgacagtttccaaggtggttaattaacatctcacaaatgtcacatctctgggtcagcttttttaggattctcttggcttctctgttattgttgccacaactccaagcccccatcctcatgaaataagatttaaaaacatggaggaacatgagattttcctcatgagtttgtctcttttattttttacaaaaggaaaatcaatcccaacagatttctttttatgttcatttggtgaatgagtcacatgcccgtccmtaaaccaatccctggcaaaggagaatggaattatgatgaaagggatagatgaattatgactcatgggcatacgtgtgccttatctgagcctattttttgcatggtatctgaaaagaaaccagagttctgttagcaagtacaaagagaaaagaaaaatatggaaaatcaaagtaaagacccgaaaagcttgagtttataaaaaaatcaggatgggaaccaattaagagattttatacttctaaatgtaggcaccatgtaataaaaacatccacctcggatattacatatatatttacctggcttg

SEQ ID NO: 867315 - DNA, 586 bp, Homo sapiens
cttggtgattctaatgcagaccaaagatagagaaccactgggtgatatcatccattgccaagatttcaaatcaaatccatgtttaggatgattattttaaactctccagtgacttcccattgtataagatcctacatcacctcatccttgcttttctttccagcctcctctcttgccttcctttctactaaaaacaagttgtacagaaatttttcagtattctgttttggctctcagcttycctactgactcttcattctttctgaaataactttcctctgtaggctcctttaccagactcatccagttcatcttgtaagtctcagcctagatgtcagagccctcccagatcaccaggtctaggtttggtgtctctcctatgaattctcatagcactctgatcctcccctagcattacatgtatcacattttattgcacttgcttagttatttgtttctatcccctataaggtatttccagttccatgttgtggcatttaatatatgcctcattaataggtgctttacttacgtaaattgataaatggatgaatgaacaactcacagagataggcttccagatcag

SEQ ID NO: 867316 - DNA, 550 bp, Homo sapiens
tgggtcaaatggtatttctatttctagatccttgagcagtcgccacactgtcttccacaatgattgaactagtttacagtcccaccaacagtgtaaaagttttcctatttctccacatcctctccagcactggttgcttcctgactttttaatgatcgccattctaactggtgtgagatggtatctcattgtgattttgatttgcatttctctgatggccagtgatgatgagcattttttcatgtgtcttttggctgcataaatgtcttcttctgagaagtgtctgttcatatccttcacccactttttgatggggttgatttttttcttgtaaatttgtttmagttctttgtcgattctggatattagccctttgtcagatgggtagattgcaaaaatgttctcccattctgtaggttgcctgttcactctgatggtggtttcttttgctgtgcaggagctctttagtttaattagatcccatttgtcaattttggcttctgttgccattgctttaggtgttttagtcatgaagtacttgcccatgcct

SEQ ID NO: 867317 - DNA, 597 bp, Homo sapiens
tgaaactccatctctaccaaaaatacaaaaaaaattagccgggcgtggcagcgggtgcctgtaatcccagctcctgggtaggctgaggcagaaaattgcttgaacccaggaggcagaggttgcagtgagtggagatcacaccactgcactccagcctgggtgacagagtgagactctgtctcaaaaaaaaaaacaaaaattctttaggctagcatttccaaaattttgttccatggagagctcattccttggggatgtggtctctatktatgaaaaatgctggtgttaaataaagaaaatcaaatatctttgctgtaggacttttcaggtcttttaatattctactgtatttggtaaatcgcaaagaggaaactaaagtatttctcctttctttctgctttataccaaagatcgcttttgcagaggacatagctaatttgttatttaacataatacactttgggtgacttcacattagattattcaactttcaaagaatagttatgtaaatttttttttctagctagagaaaatgtgtagattgaaactaaactgaaattatctataacatagggaattattcctgaaataggttag

SEQ ID NO: 867318 - DNA, 552 bp, Homo sapiens
gactaaaccaggaagaagttgaatctctgaatagaccaataacaggctctgaaattgaagcaataattaatagcctaccaaccaaaaaaagtccaagaccagacggattcacagcagaattctaccagaggtacaaggaggagctggtaccattccttctgaaactattccaatcaatagaaaaagagggaatcctccctaactcattttatgaggccagcatcatcataataccaaagcctggcagagacacacaaaaraagagaattttagaccaatatccctgatgaacatcagagcaaaaatcttcaataaaatactggcaaactgaatgcagcagcacatcaaaaagcttatccaccatgatcaagtgggcttcatccctgggaggcaaggctggttcaacatacgaaaatcaataaacgtaatccagcatataaacagaaccaaagacaaaaaccacatgattatctcaatagatgcagaaaaggcctgtggcaaaattcaacagtccttcatgctaaaaactctcaataaattaggtgttgatgg

SEQ ID NO: 867319 - DNA, 552 bp, Homo sapiens
gactaaaccaggaagaagttgaatctctgaatagaccaataacaggctctgaaattgaagcaataattaatagcctaccaaccaaaaaaagtccaagaccagacggattcacagcagaattctaccagaggtacaaggaggagctggtaccattccttctgaaactattccaatcaatagaaaaagagggaatcctccctaactcattttatgaggccagcatcatcataataccaaagcctggcagagacacacaaaagaagagaattttagaccaatatccctgatgaacatcagagcaaaaatcttcaataaaatactggcaaactgaatgcagcagcacatcaaaaagcttatccaccatgatcaagtgggcttcatccctgggakgcaaggctggttcaacatacgaaaatcaataaacgtaatccagcatataaacagaaccaaagacaaaaaccacatgattatctcaatagatgcagaaaaggcctgtggcaaaattcaacagtccttcatgctaaaaactctcaataaattaggtgttgatgg

SEQ ID NO: 867320 - DNA, 589 bp, Homo sapiens
aattgagatttgggaacctacccctagatttcagaggatgtatggaaatgactggatgtccagacagaagtctgctgcaggggcagagtcctcatgaagaacctctggctagggtagagctggagggaaatatggggtcagagtccccacacagagtcccaactggggcactgcctagtggaactatgagaagacgaccaccgtcttccagactccagaatggtagatccaccaatggcttgcactgtgagcctggaaaagctgcaggcgctcaataccagcctaagaagcagtcagaaatggggctgtaacctgcaaagccgtaggggcrgagctgcccaaggctgtgggattccacctcttataccagtgtgccctggatgtgagacatggagtcaaaagagatcattttggaactttaaggtttcatgactgccctattggatttcagacttgcatggggcctgtggcccctttgttttggccaatttctcccatttggagcaggtgtatttccccaatgcctgtaacgccattatatctaggaagtaactaacttgcttttgatttagcaggctcattggtagaa

SEQ ID NO: 867321 - DNA, 654 bp, Homo sapiens
accgtcttccagactccagaatggtagatccaccaatggcttgcactgtgagcctggaaaagctgcaggcgctcaataccagcctaagaagcagtcagaaatggggctgtaacctgcaaagccgtaggggcggagctgcccaaggctgtgggattccacctcttataccagtgtgccctggatgtgagacatggagtcaaaagagatcattttggaactttaaggtttcatgactgccctattggatttcagacttgcatggggcctgtggcccctttgttttggccaatttctcccatttggagcaggtgtatttccccaatgcctgtaacgccattatatctaggaagtaactaacttgcttttgatttagcaggctcattggtagaagggacttgccttgtctcagataagaccttggccttggacttttggtttaatgctggaataagttgaaattttaagggactgttggaaaggcataattgtattttgaaatgagaggacatgagatttgggaggggccagagatggaataatatggtttggctgtgtgyccccacttgaatctcatcttgaattatagttcccataatccctgggagggacctggttggaggtaattaaatcatgggggcagtttcccccacgcta

SEQ ID NO: 867322 - DNA, 609 bp, Homo sapiens
gaggtgtcagtaggaagaataatgttaatatgttctacaatgagaacacatggacatagggtgggaacatcacacaccagggcatgtcggtgggtggggggctgggggagggatagcattaggagaaataactaatgtaaatgatgagttgatgggtgcagcaaaccaacatggcacatgtatacctatgtaacaaaccttcatgttgtgtacatgtacccaaagacttaaagtattwtatatatatatatatatgttctaaacttaactgagtaaaaaaatctcatttgtcaagtgcttccatttgttgaaagaaaacagttaatggtaaatcttgaagaaagtaagcttacatttactgtttttttggtaactttttttgaatcttggcatctattacaaaaagacacaagtactaataacttattctcaatgtttgtttacaaactccttttctttccagctcgtctatccactggaaaaaaggagttaatcatgtacccttaaaaaagcattattacttttttttttttggagatggagtctcgctctgttgcccaggctagagtgcagtggcactatctcagctcactgcaacctctgcctcct

SEQ ID NO: 867323 - DNA, 602 bp, Homo sapiens
tgttttatttcatataagtttggctatttcagctcattttggttttccatttgtgtggtatatcttttcccactggttttctttgaggcttggctttttaccattaaagcgtgtctcttgtaggcagcaaatgtttggatcttacttttcttatttaatttgccagtctatatcttgtaagtggaatatttaggccaattacactcaggggtaatattgaaatgcaatgtttttattgctgtcataatgttkttacctggttgttttgtagcaacaattgtataattgctttatagactctgtgatctttttacttatgtgtgcttttatgatggcaaattttgtccttttatttctgtctttagaactcttttgagcatttcttgtaagtccagtcaagaggtgacaaattcccttagcatttgcttgtctgagaaatactttatttctccttcatttatgaagcttaatttagccaaagccaaaggttttggttggcagttctttgctttaagaagacagaaaatcgaagcctgatctcttctgggttgtacagtttttgccaagaagtccactgtcattctgatgagacagtctttata

SEQ ID NO: 867324 - DNA, 654 bp, Homo sapiens
acactagaacttaaagtataataataataataattaaaaaagtggtaaaaaactaaaaactaaaaaataaataaataaaataagttattagaagaaaaaagcaaaaaaaaaaaaaaacagccctagctgatggtaattttctttatagtatttctgttttcaatttcatttatttctattaaaatwtttattatgttttaatttttttcttcatatttaatttaatattccctttctagtttattaaggtgggagcttagattattggttgtatatcttatttttaatgtatgcaatcaatgctataaattttcctctaagcactgctttgctgcatcccacacatttgataagttgtgctttttgtttcattagaaatatttttaaatttttcttgagatttcttctttgacctattagttataagggtgttgtttattatctaagtatttcgaagtcttcttgctatctttttgttattaatttctactgtaattccattgttgtctgcaagtatacattgtatgattttcatttttttatatttgttaatgtgtgttttatggctcagaatgttgtctatattggtaactcttccacgtgagcttgatcagaatgtgttggataaagtagtctatgaatgttcatgatgtt

SEQ ID NO: 867325 - DNA, 654 bp, Homo sapiens
acactagaacttaaagtataataataataataattaaaaaagtggtaaaaaactaaaaactaaaaaataaataaataaaataagttattagaagaaaaaagcaaaaaaaaaaaaaaacagccctagctgatggtaattttctttatagtatttctgttttcaatttcatttatttctattaaaatatktattatgttttaatttttttcttcatatttaatttaatattccctttctagtttattaaggtgggagcttagattattggttgtatatcttatttttaatgtatgcaatcaatgctataaattttcctctaagcactgctttgctgcatcccacacatttgataagttgtgctttttgtttcattagaaatatttttaaatttttcttgagatttcttctttgacctattagttataagggtgttgtttattatctaagtatttcgaagtcttcttgctatctttttgttattaatttctactgtaattccattgttgtctgcaagtatacattgtatgattttcatttttttatatttgttaatgtgtgttttatggctcagaatgttgtctatattggtaactcttccacgtgagcttgatcagaatgtgttggataaagtagtctatgaatgttcatgatgtt

SEQ ID NO: 867326 - DNA, 657 bp, Homo sapiens
cagaggatccataaatccccataagtgttgtgccaaatttcttagagagtccacagtattcactggatttttgaaggggtctctgataataccattcctatcaaaaacttcctgtgtacataattttcctattcagtcctctaggcccatcacagcacatcaccaggaatttctatgtaccatatttcctcgtttctcaaacacctctttttctgcaatcagaatgcatcttctttgttttgttttgtggggctttaaaaaaaaattttttttttgagacagggtctcactctgtcgcccagtctggagrgcagtggtaatgatcatggccccctgcagcctcaacctctcgaactcaagcaatcctcccacctcagcctctggagtagctgagagtaaggcacatgccaacacaccaaacttgtatgtgtgtgtgtgcagagatggggggtgtgtgtgtgtgtgtgtgtgtgtgtgtgtagacaggtctcactatgttgaactgctgggctcaagtgatcctcctgcctcagcctcccaaactgttgggattacaggcgtgagccactgaacccagcccagaatgcattttataatccttctttatctttaatgagatgtttccctcttgctcctcaaaagtgattattaaattga

SEQ ID NO: 867327 - DNA, 628 bp, Homo sapiens
aaagcaactatcatttatttagtgatgattttgttagcagtttggactaggcctagctctgggctcactcttgcatctttggttggcttcttggtctgtyaggtggctttgctttggatgctgtctggctttcaactggggtgatggaggcagctatgccccatgtttttttaagcctctgttttcatcatatttgctactctatccttgaccaaaataagttatgtgcctaatctcagtcattgtgggaggctattataaaagtcatggatacagggagacatggaaaaatcggggtcatcactgtactcagtcaccacaaattaaatatgaaaaactgaaagtggcactcatttcatcatctctttctatttagttggcatggcttctttagcatagctcttatacttgaaacaatcattagctatggattctaaggtagtatacaaaaagtgataagctgctagaagggccaaaaaaaattatatgtagtgtaagccaatcaattcctgcttgtcagaacacctaatgcttgttgagcatcttatagatgtcaagcatcggcttaattgcttctcaaatctgccaagtaaatagtatcattttcacttttcagacgacaaaacta

SEQ ID NO: 867328 - DNA, 605 bp, Homo sapiens
atcattattcaggtgagggtttgtgatccacagacttacccttcattctcaaacccattgttcacatttgtttaaatctaaaattaggtggcttctcttttaatccaattccatggttttcacaaaggcagagaatacaggttttacgtggtgagtcttcgttatgaatcatttacttgttaatattttcacttatctgcattatgtagtagcactatgttaagccgtgctggagatgacatttttcctgaattaaatgttagaaagacatcatactgmgttctcaattccctttgttatagagcattctctgaaccatcaaccacaaagtcacagtttgatctgattttttgacctgacaccaaatcctgcctttgtggttaatagaatatcttagcaaataaggcttagctaaattacctaggaggagctatcaacaagccatataatggtgtttttcaccatgttatagataataatacagtggtcagtctgcataatctagacatctaattaatgaagatcagctttccttttgtagtttaaaaagtttaggcatgcttcccatggtgcatcctacccttgtaataagatccagctgcgat

SEQ ID NO: 867329 - DNA, 603 bp, Homo sapiens
ttaatgcttcatcatattttaaaaaaataattacatactcatgcctctatgttaaagtcattggaaacagaactagctttcaaagagttttctagtgattccggctggtggtgggtttctacctgtcaagctttgttacaccttgttccactttgcagaagcacctctccagtcttggaatgtttaggtagatatctgtctccaacattccctccaaagtggcagttgggctaaaataatttaaatgaaaagwtttacatagctaacttggtaagaatgtccatcaagtaaagcaaactatgaatggactctttccttttgggttattctgatagttggattttctttgcctcaaaaaaagaactttcatttaagagtcaatcaaatgtttcaagacaagtcctctggaaagctagttaacttctgtattgcagcagtgaatttcctcttctattcccctttcttgacaaaaactctcgaaatagcagtgtgtcagccctggctctcgggaggttgacaacattcatagaaatagacacgattttttcaggatcgctggcagagtcgttgacacggctgacaccactgcatgttgagatgaga

SEQ ID NO: 867330 - DNA, 608 bp, Homo sapiens
gttaggcagcaacattgaaaacttaaagagtgtcagtatgtatctggttttgtttaaattcttttcgttttgctttcattatgtttaattaacacaaaataatcgtacatatttatggcatatagtgtgatatttccatacatgtatacaatgtgtaatgataaaatcagagtaattagcataagcagcacctcgaacatttatcatttctttgtgttgggaacattcaaaatcttctacctatttgaaaatatacaataagttgttgytaattatagtcaccatatgcgggtattgaacacaaaacatattcctcctatctagctatacttttgtatgtgttaacttctggctctaccctgtcccccactgcccttctcagctaaatttttttaaatagagttttgttcttctatggcaagagcctattgcgtgcctcaaccaagaggctggtattttaagagagccctttaacctaggttctactagcttaactgagtgtgcactttttccttcattttttaattctcagagtatcagacttctaccacagttttatttctgtcttaaatcttggctgatatgtagttaaaatggaatgtttaaca

SEQ ID NO: 867331 - DNA, 557 bp, Homo sapiens
aaaagcaatgtacattattcagaaagaaaagaaaccttcaaaagataaagagggaaacaatgcaaaactctgaaactagattgtagttttaaaacaaaagctgtcaatccatgtcccagtgtgcagtgtgcagtctttacatgttcccgggcttagctrcttgtcagtaaataacttacatgccattatataaaattgtttacctgttttccccctccatgctaattgtcttgtatgtcattctgcagtttagcctgtaggtagcaatcttgcaccacagaagctctccatttactcgcttgcagtggaaaagcttacaccattacagatctgttaaatgtaagcagtgttatttgcataaattccagactttgatgatggtctgtgatctttgtagcctaccgattacttatgcagtttttgggccttaaagttcacgattttgctcagaggtgactttactttgcattgtgaccccatataggtgggagaccgcagaacggttgggtgcataccctggaatcttgaaaatcatgaggcctctttctgaaatgtaa

SEQ ID NO: 867332 - DNA, 557 bp, Homo sapiens
aaaagcaatgtacattattcagaaagaaaagaaaccttcaaaagataaagagggaaacaatgcaaaactctgaaactagattgtagttttaaaacaaaagctgtcaatccatgtcccagtgtgcagtgtgcagtctttacatgttcccgggcttagctgcttgtcagtaaataacttacatgccattatataaaattgtttacctrttttccccctccatgctaattgtcttgtatgtcattctgcagtttagcctgtaggtagcaatcttgcaccacagaagctctccatttactcgcttgcagtggaaaagcttacaccattacagatctgttaaatgtaagcagtgttatttgcataaattccagactttgatgatggtctgtgatctttgtagcctaccgattacttatgcagtttttgggccttaaagttcacgattttgctcagaggtgactttactttgcattgtgaccccatataggtgggagaccgcagaacggttgggtgcataccctggaatcttgaaaatcatgaggcctctttctgaaatgtaa

SEQ ID NO: 867333 - DNA, 586 bp, Homo sapiens
ggttcaccagcaggctgactgttggactggacatgtgcaggtacagcaagtcagccagctgtgtgtcaccttccccactatgcaggtctgcctgtatgggggtaagggtgttggatggattttaaggcagcatctcagctgttccactgagcctaggctctgagtagccagggttgtggtgctgtaactacccatgtgagtacagtggtatgatggcagtgtgtcagaaatggagaggtgcaayggctaccaccctccagagcagcatgtactctagcagttgatccattgttaagatgctgtggtgctgtagccacttaggtcacagtggatggaggttgcacagtggagagtcctactttggggcagtgcaactgcatgactcaactccccaaattgcattcggggcctataaagactgcagaactctctggcagcaaggactataggtgtgtgtagcagtaataaggactactgggggtatccagcttactttctcccttaaaaataaaatcactcctggctgcaagttaatcccagtagaggagataatgtggcagaggtacggtgctttgctcctctctct

SEQ ID NO: 867334 - DNA, 626 bp, Homo sapiens
tctaaggaataagacagggggaagaatgcacatggatattttactgaatagttagtgctaattatagtgttttatccattatattattctctccagagcctagcaaaatgattgatacccaataaataaatataaaaatrttgacaccatgctcaataaatttctttaagattgaatcacatcacttaccaggtaactgaattgttaagtttataactagaagatagcttgtttatttgaactgatagcggctatctagaaatttgatcacaggtagtgaagatatcctagagaattgacaaagcctatagctgcagtgatctgaaaggatattgggttaaaaaaatactaacattttctgtttattgaaggaaatgaatacagttcctgtgacatatcttttgtaccagcacagaggacagggtaatgacctagaatcaaagaatgatttataaaacagagctcttcttttactggcaggtagtagctagattattttgtgtgtgtgtgtgtgtgtgtgtgcatgcgtgtgtgtgtgtgttcaaggtacatatgttggggaagtgggcaaggaaaataatcctaggaacagccatggaagctcatgaaaatatttagaagcaaca

SEQ ID NO: 867335 - DNA, 589 bp, Homo sapiens
ggggatttactcaacatgttcctgacagtttgcaagtttgcaaaattataacacaaaagactgtattatcaactagtactttccttagctctatagtgttctgtacatcattaaacatgcaacaaacgatgtttccttgcctgaagtgtatattttttctctttgcttttactgaattatcttttttgtaccttcagcctactttgagaaatgaggatttactggaggaatttctctctgttctcagggctaggaatatgtgattctcatgaacatggtttattattttatgacccaaatattgaatattatatagctttacaccatgtatatctctttgcattagctacagaaaagcctagagacaaatttatgcccacttttataagttttaaagcttgaaaatatgtgatttrgataataatttaaatttgaattcctggcttcattcttcttatatacttttcctcctggtctgcaattcttttttgttatttttctgtttaaaaataaagttatctttttcatatacatttttgtaaaccacttagaattgtacatggaaccagttatgtacacgtctgcattt

SEQ ID NO: 867336 - DNA, 603 bp, Homo sapiens
ggggctctgtccagggagctgcagagctgctactggctcaatagccctggtggggcgtggctggaggcccaggcctagaggacctacccagtgaggagatgtggaaatgggaacccacataacagtctggccacttttcaatagggctgctgccatgtgctaggggcccactccagtccctagtcacctcagattttctggtacctagagatatcaacaatgaaggctgcaaaacaacaaagattgtggcctccccttccctctgggagctccattctagagaggtacagaccaattgccagcytaaatgcaccagtaggaggtggctggagaccacagctgggaggtcctcccaagtgaggaagaatgggattaggacacctcctttaaaaagcagtctggccatgtttttacagagcagctgtgctgtgctgggggtccagttcagtccctggtcacctcagacactccaaagcccaaaggttggaacagctaagtcacccaaacagcaaagatggagacctgcctttccttcttggagctctcttccaggaaggttggaacaggttttatttcttaatagaccaccatgtccacagaaaa

SEQ ID NO: 867337 - DNA, 611 bp, Homo sapiens
acatgagatcatagcttttgggacttttgatgagtgtgagtcatatagtcggaagagataacaaggtttcctatcgaaattgtttaagggaggagagatactgccaagactggctctgctggaaagatggtgacacatttctctgagaagaacaagtagctagtccctgaagggaaatatgtggctctagaaagcragtcggggaggggagcagattgtaacttagggtgaatgtttgtggggtttagtagtggtggggaatcaattggtttaatttattactgatattaataatagcaagaagtcccccttttaaaattttctttatttccataggttattggtgaacaggtggtgtttggttacctaagtaagttatttagtggtgatttgtgagagtttggtgcacccatcacctgagcagtatacactgcactcaacttgtagtcttttatccctcactcccttcccaccctttcctcttgagtccccaaagtccattgtgtcattcttatgcctttgcattctcatagcttagctcccacataaaacatatgatgtttggttttccactcctgagttacttcacttataataatagtctccaatct

SEQ ID NO: 867338 - DNA, 632 bp, Homo sapiens
aaaaaatctgaaaagacatcgcaaaaggctaatcttaggttctacaatagtgacattatctgcaggagtatgtgggacaattgcatatcttgtgacctccagaataatagcaggtaatcatttatgtctgcgccttagcagaattcaggcttctcttaccctcttaacctggtggtctctcattagctttacaaaggaggttgagttttgggaaagagctattaccatttaacctataaactaaatttctcccaaagttagcttggcccaagcccaggaataattcagggcagtttgaaggctaaagacaagatgggggagaggttagattagatatcttttactgccataattttctcactgttataatatttgcaaaggcagtttcaattttcattgagccaaactgatgtatccctttcagtatacgtggaaatctatatatacagaggatatattttaatccmcagtggaagaaaaattgggaataataaaatgctttgcattacaattctagtgaattttcttaacatttgagaacatatgagcaaccctcctgaagatcttaaataataacagtgctggtgtttgttttacatctaaggaaacctaacaaccagttatttgccaag

SEQ ID NO: 867339 - DNA, 639 bp, Homo sapiens
tttaggatagttagctcttcttgttgcatcgatccctttaccattatgtaatggtcttctttgtctcttttagtctttgttggtttaaagtctgttttgtcagagaccaggcaagattgcaacccttgcttttttctgctttccatttgcttggtagatcctcctccatccctttattttgagcctatgtgtgtctttgcatgtgaggkgggtctcctgaatacagcacactgatgggtcttgaccctttatccaatttgccaatctgtgtcttttaattggggcatttagcccattaacatttaaggttaatatcgttatatgtgaatttgatcctgtcattatgatgttatctggttattttgcctgttaattgatgcagtttttcatagtgtcaatggtctttacaatttggcatgtttttgcagtggctggtactggttgtttctttccatgtttagtgcttccttcaggagttcttgtaatgctggcctggtggtgacaaaatttctcagcatttggttgtctgttaaggattttatttctccttcatttatgaagcttggtttggctggatatgaaattctgggttgaaaattattttctttaagaatgttgaatattggcccccactctctt

SEQ ID NO: 867340 - DNA, 657 bp, Homo sapiens
tcttaatggtctcagctcctaacactgccacaacagcaacccaatttcaatatgagttttgcaggggacaaacattcaaactgtaacagtacacaatacttgtgacttaataaacatattcttaaataaataataaatattcccctcttttgaagccaatggctttaattggtttcagttaatgcagctatagatctacaagtggtatggaaaccagattgagtaaaagccaagagagggttaggtcattcctagggtagatttccaactacactattctctaaataaatgttcacagatgcagataagcctgtgaacatctcctgagaaagtgggttatttatgctgtagataattttatttactatgggccatctctactcacaaccaatttaaatgtttgaaatgaatcaaccagttatagtttcatgttggtaatgcagcagtctaacccaaaagtgtggtggtaracatatttagagcagctaaatcggaacttaacaggtttatatgttaatgcacatatatttcattctcaaaaaatacttcaggccctcacttaaagtctatttaatcttgttttacacaaatattatcaaatttgactctctggtttcccagaagatcaaaaaggagggagaaaaatgctacaggcca

SEQ ID NO: 867341 - DNA, 569 bp, Homo sapiens
gggtggtgaaagtcagaggtgtggtcaggattgtctcagagcatcagcttcatgtagtgagaagtgaggatggaaggaattctggggctacatcgtggcacatatatggggctggcgaaaggactcacactttattcagctggttgtggaaagagtctctacgggattggctaatggatgaactgattgcttttttttgttgttgttgttggctttttttgtttgtttgtttttgttttttgagatggagtttcactcttgttgcccaggctggagtgcagtagtgcaatctcagctcactgcaacctccgcctcccrggttcaagtgattctcctgcctcagcctcccaagtagctgggattacaggtgtctgccaccacacccagctaattttgtatttttagtagagatggggtttcaccatgttggtcaggctggtctcgaactcttgacctcaaatgatccacctgccttggcctcccaaagtgctgggattacaggcatgagccaccgcgcctggccaggactcacactttattcagctggctgtggggagtctttaggggac

SEQ ID NO: 867342 - DNA, 600 bp, Homo sapiens
gagtgtccactctgatgggttggcaaatctttctttctttctttctggtttttttttttgttttttttttttgagactgaatcttgctctgtcacccaggctggagtgcagtggcccaatctcggctcactgcaaagtccgcctcctgggttcaagagattcttctgcctcagcctcccaagtagctgggaccacaggcacacrccactatgcctggctaatttttgtatttttagtagagacggggtttcatcatattggtcaggctggtctcaaactcctgacctcaaatgatccacccgccttggcctcccaaagtgctagaattacaggcgtgagccactgcgctcagccagcaaatatttctgttgagatggctgagaaatgctgctttctggggaaaaacgtgggaatcccatttctacttccagtgttgagttgaaatctgcgggtttcagggctgaagacagaagtgtgtgaaggcagagagggacctagatagggctgggagtacgtggtggcttcagttgagtctggttctgggtccccctttctctttgtcagtgaccccaaaagtgggtcttctggtgggagacactg

SEQ ID NO: 867343 - DNA, 615 bp, Homo sapiens
agttttcacccattttatctccctcaatgtcatgagaacttatacatgcttacagctttgaatatttctatgagagaagaaaggaaatatgcttctcagtgtcctaaatgtgaaaggaaaggtaggacttaaatatcatcattgttggtatttggtacacaaaaaaaggagcattggactagcttgcatcatggagcttaatcacagataaacctcttatagggtgatatggttggatatgtgtccctgcccaaatctcatgtcgaattgtaatcccagtgttggargaggggcccggtgggaggtgattggatcatgggggtggatttgccccttgctgttcttgtgacagggagtgagttctcaggcaatctggttgtttaaaagtgtgtggcacctcccgctttgctctctcttcctcctgctccagccatgtaagtcgtgcctgcttccccttggccttccaccatgatggtatgattcctgaggcttctctagtaatgctgccagcctgcagacctatgagtcgactaaactctttcctttataagttgcccaatctcaggtagttcgttctttacagcaaggcaagaatggactaatatatagggctgt

SEQ ID NO: 867344 - DNA, 615 bp, Homo sapiens
agttttcacccattttatctccctcaatgtcatgagaacttatacatgcttacagctttgaatatttctatgagagaagaaaggaaatatgcttctcagtgtcctaaatgtgaaaggaaaggtaggacttaaatatcatcattgttggtatttggtacacaaaaaaaggagcattggactagcttgcatcatggagcttaatcacagataaacctcttatagggtgatatggttggatatgtgtccctgcccaaatctcatgtcgaattgtaatcccagtgttggaggaggggcccggtgggaggtgattggatcatgggggtggatttgccccttgctgttcttgtgacagggagtgagttctcargcaatctggttgtttaaaagtgtgtggcacctcccgctttgctctctcttcctcctgctccagccatgtaagtcgtgcctgcttccccttggccttccaccatgatggtatgattcctgaggcttctctagtaatgctgccagcctgcagacctatgagtcgactaaactctttcctttataagttgcccaatctcaggtagttcgttctttacagcaaggcaagaatggactaatatatagggctgt

SEQ ID NO: 867345 - DNA, 609 bp, Homo sapiens
atatacaacattaataggttaaaaaagaaaaatcacatggtcatataattcagtgcagaaaagcatagtcaaattgattaaggtttaatgcaaagctatcaaaatctcagcaagagtttttgtagatatagacaagataattctgaaatttatttgaaaagaaaaaggaactgcaagagctggaacagttttgaaaaagcagaataaaatgagaaaaatcatcttcccaatttcaagcattattatatagttatagtaatctgtactgtgtggtatttgcagagggacaratagatcactgggacagaacaccagagaatctaagaaatatgtccacacaaacatgcccaactgattttttacaaaagtgcaaaagcaatttaatagagttaaggtagaatgttcaacaaatgatgctggagcaatggaacatccatagccaaaaagttaaaatgaaccacagactaaaatacaaaacataaaactataaagctctcagaagaaaatgtgagaaaaacttcagaatctcggcctaggcaaacgttcttaggcttgacgccaaagcacaatctataaaaggaaaaattgataaatcagactttataaaaa

SEQ ID NO: 867346 - DNA, 609 bp, Homo sapiens
atatacaacattaataggttaaaaaagaaaaatcacatggtcatataattcagtgcagaaaagcatagtcaaattgattaaggtttaatgcaaagctatcaaaatctcagcaagagtttttgtagatatagacaagataattctgaaatttatttgaaaagaaaaaggaactgcaagagctggaacagttttgaaaaagcagaataaaatgagaaaaatcatcttcccaatttcaagcattattatatagttatagtaatctgtactgtgtggtatttgcagagggacagatagatcactgggacagaacaccagagaatctaagaaatatgtycacacaaacatgcccaactgattttttacaaaagtgcaaaagcaatttaatagagttaaggtagaatgttcaacaaatgatgctggagcaatggaacatccatagccaaaaagttaaaatgaaccacagactaaaatacaaaacataaaactataaagctctcagaagaaaatgtgagaaaaacttcagaatctcggcctaggcaaacgttcttaggcttgacgccaaagcacaatctataaaaggaaaaattgataaatcagactttataaaaa

SEQ ID NO: 867347 - DNA, 609 bp, Homo sapiens
atatacaacattaataggttaaaaaagaaaaatcacatggtcatataattcagtgcagaaaagcatagtcaaattgattaaggtttaatgcaaagctatcaaaatctcagcaagagtttttgtagatatagacaagataattctgaaatttatttgaaaagaaaaaggaactgcaagagctggaacagttttgaaaaagcagaataaaatgagaaaaatcatcttcccaatttcaagcattattatatagttatagtaatctgtactgtgtggtatttgcagagggacagatagatcactgggacagaacaccagagaatctaagaaatatgtccacacaaacatgcccaactgattttttacaaaagtgcaaaagcaatttaatagagttaaggtagaatgttcaacaaatgatgctggagcaatggaamatccatagccaaaaagttaaaatgaaccacagactaaaatacaaaacataaaactataaagctctcagaagaaaatgtgagaaaaacttcagaatctcggcctaggcaaacgttcttaggcttgacgccaaagcacaatctataaaaggaaaaattgataaatcagactttataaaaa

SEQ ID NO: 867348 - DNA, 680 bp, Homo sapiens
gtttgttgtacatattatttcataacccaagtattaagccgaatacccaatagttaccttttctgttcttctccctcctcctaccccccacccctcaagtagaccccactgtctgttgttttcttcttcgtgttcgtaagttcttatcatttagctcctacatataaatgagaacatgcgtatttggttttctgttcctgcattagtttgctaaggataatagcctccagctctatccatgttcctgcaaaaggcatgacttgttctttrtggctgcatagtatgccatggtgtatacgtaccacattttctttatccagtctgtcactgatgggcatttaggttgactctatgtctttgctcttgtgaatagtgctgcaaagaacattcactagcacgtgtctttatggtagaatgatttatagtcatctgggtatatacccagtaatgggattactgggtcaaatggtagttctgattttagctctttgaggaattaacatgttgatttccacaatggttgaagtaatttacactcctaccaacagtgtataagggttcccttttctctgcgaccttgccagcacctgttattttttgactttttaatattagccattctgactggtgtaagatggtatctcattgtggttttggattgcatttctctaatgatcagt

SEQ ID NO: 867349 - DNA, 617 bp, Homo sapiens
tgaagtgacacttttcaaaagaagacaaacttgtggccaagaatcatgtgaaaaaaaggtcaacatcactgatcataagagaaatgcaaatcaaaaccacagtgagataccatctcacaccagtcagaatggctattataaaaagtcaaaaaatagcagatgctggtgagtttgctgagaaaaaggactgcttagacactgttggtggtagtgtaaattagttcaaccattgaggaagacgtgtggcaattcctcaaagacctaaagacagaaataccattcgamctaccaatccattactgggtatataccaaaaggaatataaattattctattacaaagatacatgcacatgtatgttcattgcagcactattcaaaatagcaaagacatggaatcaacataaatgcccatcaacaataaactgcataaagaaaatgtggtacatatacaccatgcaatactatgcagtaataaaaaagaatgagatcatgtccgttgcaggaacatggatggagctggaggccattatccttagcaaactaacacaggaacagaaaaccaaatactgcattttcttacttataactgggagctaaatgatgagaacacatgga

SEQ ID NO: 867350 - DNA, 588 bp, Homo sapiens
aagaaagcagctgtgacccactgctcctagtatttggaacgatctgcaacactgccactcctaaaagcaacatcattgactttagtaccctctaattaaaatactttcattcttggacagagaagacacatcttgatcaaaattcagctaataggtctcctctttgctcaaaacgctgttaggtttcttgtgttcctgtttttctcatgctcgtgcagatccatggcatttcaaacctttaaaataaaaactaatgtcttttctatttttttcctactggcaatcacattggggtggtgggggcgtgtggtacaatctcagtcaagaggtcctctcttgtgtgggtgctggcataacactggccgtatacaatggccaagcaaagcgacattctgtcctgctgtgctttacamgtaaatagagaatggatgaggttctcagcgcccaggggtccgcggcttccgcgagggtagcgtcgggggccgctgcagagattggaagagtacccgccgggaatgggagggaagacgcggggaaggtggagaataggaatcatgtgtgttcctcgagtgtacaacccacatttga

SEQ ID NO: 867351 - DNA, 641 bp, Homo sapiens
ttagggagtccataaggacctgcattcctgagtgaggacagggattataaaggagggagaaggcaagtgaaccagcaggtgtccttttttttaattattattataatttatgttctggggtacatgtgcagaacgtgcagttttgttacataggtatacatgtcccgtggwggtttgctgcacccagcaacccatcatctacattaggtatttctcctaatgctatccctccccttgcccccaaccccccgacaggccctggtgtgtgatgttcccctccctgtgttcatgtgttgtcactgttcaactcccacttatgagtgagaacatgcagtgtttggttctctgttcttgtgttagtttgctgagaatgatggtttccagtgtcatccatgtccctgcaaaggacatgaactcattcttttttatggctgtgtagtattccatggtatatatgtgctacattttctttatccagtctatcattgatggacatttgggttggttccaactctttgctattgtaaatagcagcaggtatccttctatttggcacatgtaaagtagaagttcaaatgggtccgataacaaaaatatttttaaaaatttttgtaagttctaggaaggcaaggactaaacct

SEQ ID NO: 867352 - DNA, 641 bp, Homo sapiens
ttagggagtccataaggacctgcattcctgagtgaggacagggattataaaggagggagaaggcaagtgaaccagcaggtgtccttttttttaattattattataatttatgttctggggtacatgtgcagaacgtgcagttttgttacataggtatacatgtcccgtggaggtttgctgcacccagcaacccatcatctacattaggtatttctcctaatgctatccctccccttgcccccaaccccccgacaggcyctggtgtgtgatgttcccctccctgtgttcatgtgttgtcactgttcaactcccacttatgagtgagaacatgcagtgtttggttctctgttcttgtgttagtttgctgagaatgatggtttccagtgtcatccatgtccctgcaaaggacatgaactcattcttttttatggctgtgtagtattccatggtatatatgtgctacattttctttatccagtctatcattgatggacatttgggttggttccaactctttgctattgtaaatagcagcaggtatccttctatttggcacatgtaaagtagaagttcaaatgggtccgataacaaaaatatttttaaaaatttttgtaagttctaggaaggcaaggactaaacct

SEQ ID NO: 867353 - DNA, 630 bp, Homo sapiens
gtaggttcccattgtcttgggcagctctgaccctctgactttgcaggctacagcctccctccctgatgcttccatagtctggcgttgagcatctgtggcttttcaaagtgcacagtgcaagatgtcagtggatctaccaatctagggtctggaagacagtgaccctcttytcacagctccgctaggcagtgctccagtgaggactctgtgtgggggcttcaaccccacatttcccttccacactgccctggcagaggttctccatgaaggtaccacccccacagcaaacatgtgcctgaacatacagatgtttccatacatcctctgaaatctaggtggaggtttccaaacctcagttctcaacttctgtgcaactgcaggctcaacaccatgtggaagctgccaagggttgggacctgcaccctctgaagccacaacctgagctgtaccttggccccttttagccatggctggagcagctgggacacaggacaccaagtcccgaggctgtacacagcagggaggccctgggtctagcccacaaaaccactttttcctcctaagcctccaggcatgatgggaagggctactgcaaaggtctctgacatgccctggagacattttccctat

SEQ ID NO: 867354 - DNA, 630 bp, Homo sapiens
gtaggttcccattgtcttgggcagctctgaccctctgactttgcaggctacagcctccctccctgatgcttccatagtctggcgttgagcatctgtggcttttcaaagtgcacagtgcaagatgtcagtggatctaccaatctagggtctggaagacagtgaccctcttctcacagctccgctaggcagtgctccagtgaggactctgtgtgggggcttcaaccccacatttcccttccacactgccctggcagaggttctccatgaaggtaccacccccacagcaaacatgtgcctgaacatacagatgtttccatacatcctctgaaatctaggtggaggtttccaaacctcagttctcaacttctgtgcaactgcaggytcaacaccatgtggaagctgccaagggttgggacctgcaccctctgaagccacaacctgagctgtaccttggccccttttagccatggctggagcagctgggacacaggacaccaagtcccgaggctgtacacagcagggaggccctgggtctagcccacaaaaccactttttcctcctaagcctccaggcatgatgggaagggctactgcaaaggtctctgacatgccctggagacattttccctat

SEQ ID NO: 867355 - DNA, 655 bp, Homo sapiens
ccagttcatgataggcagttcaggtcacatgttgacattcaatttccaccaaagcccagtaacaggccaagagctgtctctcaagaagagagtagtaatctgcagaagatggcacggccttggctccaaaatcctaaaggcctctgctatgattcacctaagggggcctgccaaaggctccaaacagcatccctatctgccagtgacacctcaagtaccattggatctgctgggtcatagggcccaagtggcagagcagcttgcacagcagcctggacctgttgcagagccttctcctgttctggaacccacttaaaactggcagcctttcacattactcgataaatgggctagagtaacacactgwgatgaaaaatgtgttgcctctaaaatccaaatagcctcactgggtgttgtgcctttcttggttgtaggaggggccaaatgcagcaacttattcttcaccttagaaggaatatcttgacaggtcccacaccactggacccctagaaattttacttaggtagaagttccctgaatcttattcagatttatttcacatactctggcatgcaaacatctcaccaataagtccagtgtgtctgctacttcttgttcactggatccaatcagtataatgtcatcaatgtaatga

SEQ ID NO: 867356 - DNA, 640 bp, Homo sapiens
cctggcccaggaaaccatttttccctcctagacctctgggcctgtgatgggaggggctgctgccaagttctctgagatgccctggagacattttccccattatcttggtgattagcatttgactcctcattacttaagcaaatttctacagccagcttgaatttctccccagaaaatgggtttttcttttcttctgcattgtcaggctgcaaattttccaaacttytatactctatcttcacttgaatgctttgcttagaaatttcttctgccaggtaccctaaatcatctctctcaagttcaaagttccacagatctttagggcaggggcaaaaagccatcagtctttttgctgaagcagagcaagaatgacctttactccagttcccaacacatttcccacctccatctgaggccaccttagcctggacttcattgtctgtattactatcagcattttggtcaaggccattcaacaagtctctgggaagttccaaacatccccacatctttcttcttctgagccctccaaactgttgcaatctctgcgtgttacccaattgcaaagtcactttcacattttcgggtatctttacataattgtcctattctctgcagtagcaacgtactgtgttagtcc

SEQ ID NO: 867357 - DNA, 570 bp, Homo sapiens
tgctctgtctggagctgcaattctaattactgcctccccatctgccatgatgacctgttattctctatttggttcttttttcaaatatctttctttttggtaagtttctcatttatattctgaattgtttttcttatttctttgtattsgttttcagaattctcttttatctatgtttctttaaaatcaatattttgaattctttatctgggatttcaaaaatttctttttgattaaatctattggccgggcgtggtggttcacgcctgtaatcccagtgctttgggaggctgaggggggtggatcacaaggtcaggagattgagaccatcctggctaaaacagtgaaaccccgtctctactaaatatacaaaaaattagccgagagtggtggcccatgcctgtagtcccagctactcgggaggctgaagcaggagagttgcttgaacttgggaggtggaggttgcagtgagctgagatcattccactgcactccagcctgggtgacagagtgagactccatctcaaaaaaaaaaaaaatgctggaaaatctttgtgttgctttggaggt

SEQ ID NO: 867358 - DNA, 570 bp, Homo sapiens
tgctctgtctggagctgcaattctaattactgcctccccatctgccatgatgacctgttattctctatttggttcttttttcaaatatctttctttttggtaagtttctcatttatattctgaattgtttttcttatttctttgtattggttttcagaattctcttttatctatgtttctttaaaatcaatattttgaattctttatctgggatttcaaaaatttctttttgattaaatctattggccgggcgtggtggytcacgcctgtaatcccagtgctttgggaggctgaggggggtggatcacaaggtcaggagattgagaccatcctggctaaaacagtgaaaccccgtctctactaaatatacaaaaaattagccgagagtggtggcccatgcctgtagtcccagctactcgggaggctgaagcaggagagttgcttgaacttgggaggtggaggttgcagtgagctgagatcattccactgcactccagcctgggtgacagagtgagactccatctcaaaaaaaaaaaaaatgctggaaaatctttgtgttgctttggaggt

SEQ ID NO: 867359 - DNA, 607 bp, Homo sapiens
gtccaaagaaatttattgagttgatgaaattgctgttttctgattgtagtgatgtttatatgaaagtcaacaactgttaaaattcatagaaatgtatgccaaaaatgtccattttaatgtatataaatttaaaaataaaatgtaaaatgtttttaaaatacaatacctatttctaataaaaacacttggtaatttataaatactgttttttttgagacagggtctcgctctgtctcccaggttggagtgcagtagtgccatcacagctgattgcagcctcaacctcccaggttcaagcgatgctcctgcctcagcctcctgagtagctgggactataggtgcacaccaccatgcccagctaactttttcattttgtttttagtagaaataaggtctygctaagttgctcaggctggtcttaaactcctgagctcaagtaatccttctaccttggcctcccaaagtgctgggattacaggtatgagccaccatgactggctttcttgtgtttataaatactgaagcactagaaacttgctaaaggctcaaacctaagggtctctgatttttttttttttttttgagacaaggttttgctctgatgccc

SEQ ID NO: 867360 - DNA, 650 bp, Homo sapiens
ggtatgtctagttgttcgggcttaagcaaataatttagcttttctgatctcaagataatcatgtagaaaatagttggctctgttggctactcttataagtctgttccaatgttgggctaattaatgtcctaccattttaatttgtattctttctctctgccctccaagattcaaacttattttattaaaaataatggttttcatatataaacaggtgagagagaatatttgttaaagaaaatttaaggtccataaaattggtytattaaatgaattaaattctgtaggatataagtagtaaactgtatcttctttttcctggttactttctttgccacacgcacgtgtgcatgtgtgtgttttgggtttttttttttttttttgtattatttcaatagattgcatagctttccagttacttttaggtaaatcaactcacttccaagttttaaaaaatctagttgaatctaattcaatactagcatctcacatccaatttaaaatttatcctttcatcatcctcagactaggcacaaggatgggtatctgtattagaaagggggaatgtgttctgttttgtctcttttcttattccaaataaactgttgcttctggcttcttctgactgagggacagagggaaagtagaat

SEQ ID NO: 867361 - DNA, 576 bp, Homo sapiens
gatctgagaatgggcagactgcctcctgaagtgggtccctgacccctgagtagcctaactgggaggcatctcccagtaggggtggactgacacctcacatggccgggtactcctctgagacaaaacttccagaggaacaatcaggcagaagcatttgtggttcaccaatatccactgttctgcaaccactgctgctgatacccagrcaaacagggtctggagtggacgtccagtaaactccaacagacctgcagctgagggtcctgactgttagaaggaaaactaacaaacagaaaggacatccacaccaaaaacccatctgtacgtcaccatcatcaaagaccaaaggtagataaaatcacaaagatggggaaaaaacagagcagaaaaactggaaactctaaaaatcagagtgcctctcctcctccaaaggaacgcagctcctcatcagcaatggaacaaagctgagcggagaatgactttgacgagttgagagatcaaggcttcagaagatcaaactactccaagctaaaggaggaagttcgaaccaatggcaaagaagttaaaaaatttgaa

SEQ ID NO: 867362 - DNA, 631 bp, Homo sapiens
ctctgcatatggtgggccttgtatcaggatgtggatgggtgtggctttcagtgagtaccagagagcatttcctcaggtaaccgtgtgggttactatataggcagaactgaccataaactgtggctcaggtaactgaaactgagtcatggaactgcctcagtgaccccagtaaaggccaaggtctgcatgcctggatgcatgactgtaaatgggcaccttcctccaagtctctggaatagcaggacctctgtcagactgtggctgggaggagtttgggatggttacagagtaagtttagaattctcaatggaaccaagttgggtgaaccctatcctggtctgtagctaaaacaggggtcctgtagtatcccacgtgartgagggcctgccttctgaatagaacacttctcaaacataagctttaacagcatttcacaactgcatccctggatgtcaaatctctcttagaggtacttattttggagatggtgtcttgctacataacccaggctggtctcaaaatcctggcctgaactagttctccaaccttaacgtaccatgtagctgtcattacaggtgtaagccataatcctggttctctcataaaggcatttttgtcaggggtggctgac

SEQ ID NO: 867363 - DNA, 658 bp, Homo sapiens
gaatttccagcaccatgtcatacatagttcatcctaaattcacctggagattgaagaggccatctgtgtatactaattgcttatattcaatgacaaataaacttttcacatcttcataacaggaggtagtttagcagcttgaagccaggtgcctgctgaaggtagcctcttactctgctacaaaaatggttgaatagggttcttttttgctatttacattttagagctgtggttctgtactccctgccactgggctacagcactcctgcttgctttctcctggttgctagtatgctctcttgacctctaccatstgccactgaggcacagcccagagcacagctcacattttatgtgaatcccatttgccacagcagcactttagtgtcacatcagatagtgaagcctgagctgcaggaggagagcctgcaggcctcctgggtagaattacacattcacaataatggaaatgagagcagtgtttcaacctcagtttctacttataatggtgacaaggaaaaaatactgctgaattttcagcatgactcaagatagagatagctccaaaagttctcactatgacagcccacctcattcagaaaaaaatgggatattaatagggtttctgaaacagacacctaaagctttggagagacaa

SEQ ID NO: 867364 - DNA, 438 bp, Homo sapiens
atgcctgtagtcccagctactcaggagactgagacaggagaatggcatcaacccgggaggtggagcttgcagtgagccgagattgtgccactgctctccagcctgggcacagagcaagactccatctcaaaaaaacaaaaacaaaaacaamaaacaaacaaacaaaaaattgagtaccagatttcagggcattatgagaattaaatcacataatatgttatgcccagtacagtcctctgtatcctagttttgagcacatagtacctgtttaataagcattgtattagtacatgtgtacatgctgttttttaaatccagacttattcagacattactgccttctgtttcctctgtaaactttaaagagacagcaaagaatataaaactttaggatggagatgggttgtccatatttgtacccagaagtgtttgattgcg

SEQ ID NO: 867365 - DNA, 553 bp, Homo sapiens
ggcattatgctacctgactttatactatactacaaggctagagtaaccaaaacaccatggtactggtgacaaaacagatatatagaccattggaacagaacagaggcctcagaaataacaccacacatctacaactatctgatctttgacaaagctgacaaaaacaagatatggggaaaaaattccttatttaataaatagtgttgggaaaactggctagccatatgtagmaagttgaaactggatcccttccttacaccttacacaaaaactaactcaagatggattaacgacttaaatgttagacctaaaaccataaaaaccctagaaggaaacctaggcagtaccattcaggacataggcatgtgcaaggacttcatgactaaaacaccaaagcaatggcaacaaaggcaaaaatagagaaatgggatctaattaactaaagatcttctgcacagcaaaagaactaccatcagagtgaagaggcaactttcagaatgaaaaaaaatttttgcaatgtacccatctgacaaagagctagtatccagaatct

SEQ ID NO: 867366 - DNA, 652 bp, Homo sapiens
actaaaaattatggaacataggagttatctgtacattgaagtttgcataaaacatgtttctttaaggttaaattcagattttatttactttgtgttggaggaatatttcaacagtgatgctgtgttcttctgtgtgcattagcacatcataaaaatttgtccagtgcagttaatggttaatgattcacttgcttaaatagctctctgacagattttttcactcttcagttaattatttttctcttcattattaagtatctttatgcagctgatgtgtataaaacgctatacttaatctggcagctgcccttttttcttattttttcttcatatttttctttggaaaatgaaggcttttatctttgtttacaggtgagaaaaacttggaaaacccaggcttttccacttactggatgtgttacaaaatatccttcttgggccaaaaacatagacagtattgctgagcttgttagaaattmaaaaaatcagactttatgtcggatcttctggaaaaaaaaaaaaagaaaaaaacctgtataacaaggtcttgaacttattgtacatatcaaaatttcagaggtgtcttgtagctcaatatgtctttttccatctgaaaaatatgcacaactcattcagtatgatgtaaatatag

SEQ ID NO: 867367 - DNA, 652 bp, Homo sapiens
actaaaaattatggaacataggagttatctgtacattgaagtttgcataaaacatgtttctttaaggttaaattcagattttatttactttgtgttggaggaatatttcaacagtgatgctgtgttcttctgtgtgcattagcacatcataaaaatttgtccagtgcagttaatggttaatgattcacttgcttaaatagctctctgacagattttttcactcttcagttaattatttttctcttcattattaagtatctttatgcagctgatgtgtataaaacgctatacttaatctggcagctgcccttttttcttattttttcttcatatttttctttggaaaatgaaggcttttatctttgtttacaggtgagaaaaacttggaaaacccaggcttttccacttactggatgtgttacaaaatatccttcttgggccaaaaacatagacagtattgctgagcttgttagaaattaaaaaaatcagactttatgtcrgatcttctggaaaaaaaaaaaaagaaaaaaacctgtataacaaggtcttgaacttattgtacatatcaaaatttcagaggtgtcttgtagctcaatatgtctttttccatctgaaaaatatgcacaactcattcagtatgatgtaaatatag

SEQ ID NO: 867368 - DNA, 671 bp, Homo sapiens
atatatatatacacacacatataatgtatatgtatgtgtatatatatacatatatacatcacgtgtgtgtatatatatatatatagagagagagagagagaatgccttccttttgttcattgatcctctctgcttacatgtcttttctattttagtcaacggtggaagaagaattgacttctttctataagtggtgctgtgttgaggcagatgtaacttttcaaagttctatggctcagcaaataggaggtggcatagccacactttacaactgcacaggctgacatctgacatctctgtgttttgatgtaaaggatagcagccatgaggaagggaagctcaaaggaggaagggatgggtgaccctcccttgccttttccctctgtgctcctcttccatcactctgatttggtcgtacgccagaccacccccgatgtgtgttagggaaacaaaattaacaaatttggytgaaaataattaaatgtctcatttgtgtctttctctttcatttagacttaagaaaatcatccccacatattcacacctcgaccaaagaggatgggtatggtatagaggcccttatgtctagaagaaaaaaaggaagaaaaagctcatggctcctttgtgattattggaaattttaagactaggatgtcacatattatatagaa

SEQ ID NO: 867369 - DNA, 645 bp, Homo sapiens
ctgcgtgttagaaccaccagaggaagtgtgtgtgtgtgtgtgtgtgtgtgtgtgtgtgtgtgtgtgtgtgtgtttgagatggagtctccctctgtcgcccaggctgtagtgcaatggcgcgatctctgttcactgcaacctccgcctcccgggttcaagcgattctccctcctcagcctccagagtagctgggattacaggctcccaccattacgcccggctaatttttgtattttagtagagayggggttacaccatgttgaccaggctggtctcgaactccttaccccaagtgatctgcccagctcggcctcccaaagtgctgggattacaggtgtgagctaccgcgcctggcccagaggaacttttaaaatccctgatgcaagggactacccccagagattttgattgcattggtctggggtgcagcctgctgcccggattgttaaaagtttccctggggattttactgtgcagttaaggttgagaagggctgcaagcctgggtcattgcacactgtaagaaccttgtgtatgaatggaactgtgctatggaacaactccacaccacctgtgtgtgtaggcataggagaaacacataaaccctgaccctcaagggtctcctggaatgcaagacctcagccct

SEQ ID NO: 867370 - DNA, 617 bp, Homo sapiens
tctttttttatggctgaatagtactccattgtgtagtgtaccacattttctttgtccattcatctgttgatggacacttagtttgcttccagatcttggctattgtgaatagtgctgcaataaacatgggagtgcagctgtctcttcaatatactgatttcctttcttttgggcatatatatatacctagcagtgggattgctagatcatgtgttagttctatttttagttttctgaggacctttaactcttatccataacagttgtactaacttacgttcctaccagtagtgtacaagagttaccttttckccacatcctcaccagcatttgttatcgcatgtcttttgaatatgtcattttgactggggtgagatgatatctcattgtaatttcgatttgcatttctctgatgatcaatcatgttgcacctgttcatatgcctgttgtttgtatgccttcgtttgagaaatgtctattaagatcttttgcccatttttaaattttttttcagtttttttcctgttgagttctttgagctccttgtatagtctggttagcgttcctttatcagatggatggtttgcaaatattttctcccattctgtgggttgtct

SEQ ID NO: 867371 - DNA, 641 bp, Homo sapiens
aataatttcttataatgtgaccacttttgtcttttacaaaattacacaaaaatgttagcatttcattaatcattttttctaaaaatcacgaaaggggtaaattctaagtattgttatatatgacaaaataaaagttaataatatttatgttcaagctgtgatctgaacttgttttattcacagtttattatttacttaaccaagtgttgtaactacttacaatacccatattaaatgtcagacattggactaaatattcatatattatctctagttttcactattataccatataagcattcatatttttacttatctaggagagtttgaaagagatttagtaactttacaaagtcacaaacatgattggcctatactcaaataaaaaatttcattttagtccagttttgaattatttccattttgacagttcacattaaaacttttcaaacttttaccagttttgggtgaaytctcttttctaagttcctaaactttatctgtaaactccaaacagtaaaaaacacacagaagatatttaaaaatctgttgatcatgtagcatcacattaaagaaattaaagaacaatgatttgttataacatatatttgaataaaaatagcttttttttagaagatcta

SEQ ID NO: 867372 - DNA, 629 bp, Homo sapiens
gaaactgcatcaactaacaggtaaaataaccagctagcatcataatggcagggtcatatttacacataacaatattaaccttaaatgtaaatgggctaaatgctccaattaaaagacacagactggcaaattggataaagagtcaagacccatcagtgtgctgtattcaggagacccatctcacgttcaaagacacatgtaggctcaaaataaagagatggaggaatatttaccaagcaaatggaaaagcaaaaaaaaaaaaaaaaaaaaaaagaaaagagcaggggtagcaatactagtctctgataaaacagactttaaaccaaaaaagatcaaaagagacaaagaagggcattacataatggtaaaggsatcaatgcaaacagaagagttaactatcctaaatgtatatgcacctaatacaggaataccaagattcataaagcaagttcttagagacctgcaaagagacttagactcccacacaataatagtgggagactttaacaccctactgtcaatattagacagatcaacaagacagaaaattaacaagggtatccaggacttgaacacagctctagaccaagcagaacaaatagacatctacagaactctctaccccaaat

SEQ ID NO: 867373 - DNA, 649 bp, Homo sapiens
tgcaaatcaaaaccacaatgagataacatctcacaccagttagaaggcgatcattaaaaagtcaggaaaaaacagatgctggagagggtgtggagaaataggaatgcttttacactgttggtgggaatgtaaattagttcaaccattgtggaagacagtgtggcgattcctcaaggatctagaataagaaataccatttgacccagcaatcccattactaagtacayacccaaaagattataaatcattctactataaaaacagatgcacacgtgtgtttgttgtggcactgttctcaatagcaaagacttggaaccaacccaaatgcccatcaatgatagactggatgaagaaaatgtggcacatatacaccatggaatactatgcagccataaaaaggatgagttcatgtcctttgcagggacatggatgaagctggaaaccatcattctcagcaaactaacaccagaacagaaaaacaaaccccacatgttctcactcataagtgggagttggacaatgtgaacacatggacacagggaggggaacatcacacacaggggcctgtcgagggctggggggcttggggagggatagcattaggagaaatacctaatgtagatgacggtttgatgggtgcagcaaacca

SEQ ID NO: 867374 - DNA, 604 bp, Homo sapiens
taaaaaataacatgactatttgctccataacaaagtctaaaactgtgtttttttaatgcaggcaatcctctcctagtatcaatggaaacattgcctgtgtacagctattcgatgaattctgtaattgaagccttatagtttggtattttggtttgcattcttttttaaacatgttascttaaatctgaagcagctcaaagcatcatcataggctgctactccctgtgaaattcataattctataaaaattaatatcttaaactatcctactgatgaaaatgatacgtttgcatgcctatgcatggcaaataatgattgccttacagggagcatttaggatgccagaaaacacggggtgtgctttactgaccatcggcccagaagtcaatttttatattatattcataatgataatagctacttatgaataaaaatgtggttatacacagaagctaacgttcacactttgggagatatgactacatgatttcaggtgcaaactatcactatttctgtggataaggtatatttctaatcatcaccttattaattgatgtatcagtgtcatctttttctaaccacagattgatatcattataataat

SEQ ID NO: 867375 - DNA, 635 bp, Homo sapiens
aaatgttgctgcctgattgttcctctggaagttttatctcagaggggtacccagcagtgtgagatgtcagtctgcccctactggggggtgcctcccagttaggctacttgggggtcagggacacacttgaggaggcagtctgtccgttctcagatctcaagctccgkgctgggagaaccactactctcttccaagctgtcagacagggacatttaagtctgcagaggtttctgctgccttttgtttggctatgccctgcccccagaggtggagtctacagaggcaggcaggcctccttgagctgtggtgggctccacccagttcgatcttcctggccactttgtttgcctactcaagcctcagcaatggcgggcacccctcccccagcctcactgccacgttgcggttcgacctcagactgctgtgctagtaatctgcaaggctctgtgggcgtaggatcctctgagccatgtgcgggatagaatctcctggtgtgccgtttgctaagaccatcggaaaagtgcagtattaggatgggagcaacccgattttccaggtgccatttgtccccccttcccttggctaggaaagggaattccctgaccccttgcacttcccgggtgaggcaatgcctc

SEQ ID NO: 867376 - DNA, 630 bp, Homo sapiens
aaaaacaagtaataagattgaatcagtaataaaaaagtcacccaaaaaagaaaagcccaggagtagatgggttcactgctgaattataccaagcttataaagaagaattaaaccaatcctcctcaaagtatttcattaaagaggaggaaaaatatccccaactcattctttgaggccagccttgccctgatctagaaccagacaaagacacaataaaaatgaaaactataagctgatatccatgatgaacatagacacaaaaatccccaacaaaacactggtacattagaaagataatacaccatgatcaagtggaatatatgccagagataagtaaaycaaaaataaagttttaagccccacaactgacttaatggacccttcttcctatctaaaggtgttccaaagtaaacctgaagaaatagttccagccatgatggaaagggagggccagacatgcctcactataccctccgccctttagaactcaagcacaaccaatcagcattaacattaaagcagagatcttaaaagagacaaaacagactctttgcagcaataagatacaaaattccaacctgactgtagtatagcatcacataacagatagcaggctctgaaagaaatcac

SEQ ID NO: 867377 - DNA, 655 bp, Homo sapiens
tgctgggggaaccactgctctcttcaaagctgtcagacagggacatttaagtctgcagaggttgctgctgtctttttgtttgtatgtgccctgcccccagaggtggagcctacagagacaggcaggcctccttgagctgtggtgggctccacccagttcaagcttcctggctgctttgtttacctaagcaagcctgggcaatggtgggtgcccctccctcagccttgctaccgccttgcagtttgatctcagactgctgtgctagcaatcagcgagactccgtgggcgtaggaccctctcatccaggcatgggatataatcttctggtgcaccgtttttttagcccgtcggaaaagcgcagtattcgggtgggagtgacccgattttccaggtgccgtctgtcaccactttctttgactaggaaaggaactccctgatcccttgygcttcgagagtgagacaatgcctcgccctgcttaggctcgcgcatggcgcactgcatgcacccactgacctgcgcctactgtctggcattccctagtgagatgaacccggtacctcagatggaaatgcagaaatcacccgtcttctgcgtcattcacgctgggagctgtagaccggagctgttcctattcggccatcttggctcctccct

SEQ ID NO: 867378 - DNA, 655 bp, Homo sapiens
tgctgggggaaccactgctctcttcaaagctgtcagacagggacatttaagtctgcagaggttgctgctgtctttttgtttgtatgtgccctgcccccagaggtggagcctacagagacaggcaggcctccttgagctgtggtgggctccacccagttcaagcttcctggctgctttgtttacctaagcaagcctgggcaatggtgggtgcccctccctcagccttgctaccgccttgcagtttgatctcagactgctgtgctagcaatcagcgagactccgtgggcgtaggaccctctcatccaggcatgggatataatcttctggtgcaccgtttttttagcccgtcggaaaagcgcagtattcgggtgggagtgacccgattttccaggtgccgtctgtcaccactttctttgactaggaaaggaactccctgatcccttgcgcttsgagagtgagacaatgcctcgccctgcttaggctcgcgcatggcgcactgcatgcacccactgacctgcgcctactgtctggcattccctagtgagatgaacccggtacctcagatggaaatgcagaaatcacccgtcttctgcgtcattcacgctgggagctgtagaccggagctgttcctattcggccatcttggctcctccct

SEQ ID NO: 867379 - DNA, 588 bp, Homo sapiens
accatggaatactatgcagccataaaaaacgaagagttcatatgctttgtagggacatggttgaagctggaaaccatcattctcagcaaactatcacaaggataaaaaaccaaacaccgcatgttctcactcataggtgggaattgaacaataagaacacatggacacaggaaggggaacatcacacactggggactcttgtggggtggggggatgggggagggatagcattaggagatgtacctaatgctaaatgacgagttaatgggtgcagcacaccaacatggcacatgtatacatatgtaacaaacctgcacgttgtgcacatgtaccctamaacttaaagtataataataataaaattaaaaaaaaaagaaattcagtttagcttcaaatattttgctccctattatttgctcataatattaaaaataaatgtctggagcagtggcttttaaatttctgtatgaagaggcactggggtgcttgataagatgcatattttcagacttttagaaagtgtgatttttgactttcttaaaggtatccgaagtgattctgatgtaagtaggtccagaattatatatt

SEQ ID NO: 867380 - DNA, 698 bp, Homo sapiens
tttcatcccttctaccatgtgagcacacagcttttatttcctatggaggatggtcccatcctggaagcatatatgtgtatatatatgaaacatgacctgcgttttacaatttcatattgtagaggtttacttttcaagagactactagagtttaatagcttaatccctcaactaatgggtaacatgtctttttgcaccagcattgatatagatagatatatacatatagctgttgttaaaacctgtgaaagatttcagttttctctacatgcaagctaaaaagttaggtaccatcctttcatgaatgatggcagaaaagacatctgcctgaatcagcaacgaaggacataatactcatggcacagaaggtagcatggatatgatattaatattttcctctttgctcctcatgtccacagagctgaagcataggtgcttgaataaatgttgttcttgctgaagatttacattakaactgagtcagtccctgagtcttatatgctacaattgcttatgatatcagtttattagtgataatattgataagggtcatgattctgtttatgacaaacaattcattgagagcttactatgggccctgctttgcattaaatgactaaatatttcccattatctatttattatgaaattttcacagtaacactgagatatagaaactattgatattcccagaggag

SEQ ID NO: 867381 - DNA, 689 bp, Homo sapiens
ttgaaaccatctggaattggaggttttttaaaatgggaaagcttttaactataatttaattgctttaaaatatataggtccattcaggttatttatttctacttgaataagctttagcagtttcttcatttcatctaggttatcaaatttattggcataaagtttttattaacatttacctgtaaaaaaatctatagattttatggcgatatcacttctctcatttctaataccagtaatttgtgtcttctctctttttttcctggtaagtatagttagaagttgatccrttttgctgatcttctcaaagaactaggttttacttttgttgattttctcttttgcttttctgttttttattttattgatttcagctttgatttttattatttcttttactccccctttcactggggtttaatttgatctttgttttctagtttcttaaggtggaagctgagataatttcagagttttcttctttcataatgtaggcatttggtgctataaaatttcctctatgtgctgctttaagagcatttgacaattttgacatgttgtgattttgttttcatttactttaaaatactttctgattaatatatcttttgatttcttcattgactttgagttatttagaagtatgttattcagttccaaatatttagaaggattttccagatatcttg

SEQ ID NO: 867382 - DNA, 631 bp, Homo sapiens
gtcagcttgcagggaacttttaattttaccactgagagttcaaagagttcagttggtaaactctgggcacccgccagcctgggttcagctcacaactctgccacttttcagttctgtgattttggggtaagttacttaatctgtttatccacatatgtaaaatcaaaatgataataatagcacttacatcagacaattgttaaagggattaagtaagttaatgcatgtgaaggactaacaagcctgacacatagtaggcacraattagctttattattattgtatagctagcattaactattgttgtatccctctagtatagcttctattagctgtcagtaagtgttagctattattcctatttggatggactttgaagactgtgctcatctgtaagcttcactaccacctattgtcaaacttagctcagacatgatctttgtattgcttttttgttgtggcactttcagttggaaaaataaaggtgtatatggcagagctggaatttatagggtggtgggtcatggatgggcaccaaagactacttggaacaggtgaggaggtgggaaatctacactcagttcacagcctgtatacctccttggaaatcctttacattaatatactttct

SEQ ID NO: 867383 - DNA, 644 bp, Homo sapiens
gtttaccctgtgctctgacttcagaggcacgagaatcacctgcagatactggctcctccctagattttgattcggtaggtgcgtagtggggtcccaggatgtgtatttttaacaaggtgtgctgatgcaggtggcccatatatgcatgataatccttgttggacttatagtgccccattcaaaaggcatgccttttttgtgtgtttttaaattttagtgacttggccagagggggtcacagagaatagctggtctgtgagaacccatgcctctcctctstacttgaagggacaatggctgtaacacaacgctgttcatgtgacagccggagtaaaggacccattgttcaggggttggctgatgtgccattctgctgcggccagccgtccaactgagcttggtagccccaaggaaacagacacacttaaatcagagagacaaagaaaggaggtcaaggccttccacagttaaactacttgcagcaatgtgtcagaggtaggatctgggaaggaaaaaagtaattccaaggaagcatcattaatcctctggttttggagctgcagacatggcgttgggggaacacaagtctgtcaaaaagccagtggatctttggccaaggaagaattattttctactgcgtcaca

SEQ ID NO: 867384 - DNA, 499 bp, Homo sapiens
attatcagagcatctctccagagacattgctccctcttgagtgaatgctattcctctcaattatcttttgtgcttattttctatattggaagtcccaatattctctgagtgtgaaaaataagaaataccctttcttaacattaccatttgtatcccattagaagtttgtattttccaaaactcctgctgcagtgctgaaacactggtttgatgttttattgcccagtctgaaacaaaaacataaactgaggtttttttttttttwaaaaaaaaaggtaaaatgaaagagttaaaaattataggcctcattcatatttgtttttaaaataaacataagaaaaaagaaagctaaattgaacatttagactgtgtcaaaaaattggcaataatgagattaaagggtcaaaattttagctaatttgctacaaattgactcatttagatttaaaactaatgttaaacagaaagaatgttatcagaaaagtaggaaagatctggg

SEQ ID NO: 867385 - DNA, 652 bp, Homo sapiens
aattttaaatcaaagtaaaaaatgtaagtcattacaatattgaggtagttagtggagttgactgtataagaaattggctactactttcaaagggcttcatcattttaaagctatacaaatatttgtcttggataaggttaaaattatraagacatcaaaattcaaagaaagttcaatgccttttgggggtcagaaagtctgaaaataaaaaattcatgtattttcttttgttcataagaaatgaaaagtggtctttcattttttcccatctaatatatcaatatagcaacttttgtcaaacaaaggagataaacatctgggttactatgggtaagtttttctctttcttttcttaagggcaaccatgctttccatttgtctgtaatactagaaatatttcactgtatttttctactctatgcctcaactctatatttgacttcattagattttataaattgtctctaaattttattttgtgtttatactctaaacaaatttatactttagggtttttgcctatggagtcgaaatagtttatcattttctgactgtaattcctgtaacatatttaaaaattaaaaactaacttttttcatgttgaattatattggaacaatgttttcttccttatttttatattttttctttt

SEQ ID NO: 867386 - DNA, 652 bp, Homo sapiens
aattttaaatcaaagtaaaaaatgtaagtcattacaatattgaggtagttagtggagttgactgtataagaaattggctactactttcaaagggcttcatcattttaaagctatacaaatatttgtcttggataaggttaaaattatgaagacatcaaaattcaaagaaagttcaatgccttttgggggtcagaaagtctgaaaataaaaaattcatgtattttcttttgttcataagaaatgaaaagtggtctttcattttttcccatctaatrtatcaatatagcaacttttgtcaaacaaaggagataaacatctgggttactatgggtaagtttttctctttcttttcttaagggcaaccatgctttccatttgtctgtaatactagaaatatttcactgtatttttctactctatgcctcaactctatatttgacttcattagattttataaattgtctctaaattttattttgtgtttatactctaaacaaatttatactttagggtttttgcctatggagtcgaaatagtttatcattttctgactgtaattcctgtaacatatttaaaaattaaaaactaacttttttcatgttgaattatattggaacaatgttttcttccttatttttatattttttctttt

SEQ ID NO: 867387 - DNA, 658 bp, Homo sapiens
cattataaggacatttcttcaagcaaagcattatcctttcagtaaggttctattattaactataaaataatggctaggactgaggaatatactatgctaggaaagatatgaataactttatgccatcatctcacttattcctcacaaataacatataaagtatgtacacataccatatgtataataataattattcccaatttacacatggaaaagtgagtctcagagagatggccaagattacacaaattgtaactggtgggactgtgatttgatccaggtttctgattctagaattattctctaaatgattctgacattttgttactaataaatatgcctggaaataycatagagtcatgaacgtatatacatatacatatatatatatatatatgtttctgttattatttcccccataagaggaggaaccagaacagtacaaagcatgtggtttgtggagccaattaaaaagagagagtaaagcacctgaaaaccaacttccttttgctgaggaggactagttctggagataaattctcttttccttgtttgactttgtacctcatgctggggttgctgctgagaaacatggcagacctgttccaattagcattatagaggctcagggctggaaaagaatttggagagtgtagcc

SEQ ID NO: 867388 - DNA, 617 bp, Homo sapiens
gctcatggtaccccactgaggtaatgtcactgagggcacattttgggaaatgttagtgtaaatgaggaagttagcaaacattttctatagagagctagatagcaaatatcttaggcttttacagccatatactttctgtcacaactactcagtgctgacattgtagcacaaaagcaggcattgacaatatgaaaataaataagcatggctgtgttccaataaagctttatttacaaaaacagatggcagatttacaaaactttatttacaaaaacagattggcctgtgggttgtagtttsctgacccctggtatacactaaaaacagtcaagtgattttttgtttgctttttgtttttctgtcgttttttcttctaggtccacaacctgattccatttttaaagccttatttctttgatgaggaaaaatattggaggtaaaaaacagaattgattcatctttttaatataaaacaattagactttgttatagctttcattttcattattttgattacccccaccttttccatctgcaacaaggcattcttgccaggacaactggctttcgggaaattaaaattcagaagcactaggcagaaacccaaaatgggagaa

SEQ ID NO: 867389 - DNA, 598 bp, Homo sapiens
aacaatcatatgacaaaaagctcaaatcactaatcattagagaaatgcaaatcaaagccacagtgagatgctatctcataccagttagaatggctattaacaagtcaaaaaataacagatgctggcgaggttgcagagaagagggaacacatatacactgttggtgggagtaaattatttcaaccattgtgtaaaacagtgtggcaattcctgaaagagctaaagacagaaactaccatttgacccagcaatctcattagtgggtatatgcccagagaaatataaatcgtttaattataaagacacatgcatgtaaatgttcattgcagcactattcacaatagcaaagacatggaatcaacctaaatgcccatcaatgacagattggataaagaaaatgtggtacaaatataccatgraatattatgcagacataaaaaagtatgaaatcatgtcctttgcagggacatggatggagctagaggctattatccttagcgaaataacacaggaacagaaaaccaaataccacatgctttcacttacaaatggggcaaaaaaaacaaacaccgcatgttctcactcataggtgggaatt

SEQ ID NO: 867390 - DNA, 451 bp, Homo sapiens
tcactctgctgcctaggctggaatgcaatggtgcaatcctggctcaccgcaacatccacctcccaggttcaagcaattctcctgcctcagcctcccgagtagctgggattacaggcacctgccaccacgcccagctaagttttgtatttttagcagagacacgggtttcaccmtgttggtcaggctggccttgaactcctgacctcaggtgacccaactgccttggcctcccaaagtgctaagattacaggtgtgagtcactgcgcctggacaaaactgtcaatatttttatttgtctttcttagttggaaaattaaaggaaaatattcattttctaattttcttaatttttccccttaagagacttggtgagtgtgaggttattactgtaataacaaatatcctttttcctgctgtggccttattccaataattaagatcccttcccttt

SEQ ID NO: 867391 - DNA, 601 bp, Homo sapiens
tgtccaggaatttatccatttcttctagaatttctagtttatttgcatagaggtgtttacagtattctctgatggtagtttgtatttttgtggggttagtggtgatataccctatatcgttttttcattgtgtctatttgattcttccctattttcttctttattagtgtagatagtggtgtatctatttcattaatgttttcaaaaaccagcttctggattcattgatttttctggaagagtttttcatgtctctatctccttcagttctgctctgaccttagttatttcttgtcttctactagcttttgggtttgtttgctcttgcttttctagttcttttaattgtgatgttagggtgttgatttgcracctttctacctttctgatgtgggcatttagtgctataaatttccctcttaacactgccttagctgtgtcccagagattctggtacattgtctctttgttctcattggtttcaaaaacctcttcatgtctgccttaatttcattatttaaagtggcagtcattcaggagcaggctgttcaatttgcatgtagttgtgtggttttgagtgagtttcttaatcctgagttct

SEQ ID NO: 867392 - DNA, 605 bp, Homo sapiens
atggattcacagcagaattctacaagacattgaaagaagaattggtaccaatcctattgacaccattccacaagatagagaaggagggaatcctccctaaatcttctatgaagccagtatcacccaaatactaaaaccaggaaagaacataatcaaaaaagaaaactacagaccaatatacctgatgaacatagatgcaaaaatccttaacaaaatactagctaaccaaatccaacaacatatcaaaaagataacccaccatgatcaagtgggtttcatagcagggatgcrgggatggtttaacatatgcaagtcaataaatgtgatacaccacataaacagaattaaaaacaaaaatctcatggtcatctcaatagatgcagaaaaaacatttgacaaaatccaacatccctttatgattaaaactctcagcaaaatcggcatgcaggggacataccttaatgtaataaaagccatctatggcaaacccacagccaatatactgaatggggaaaagttgaaagcattctctctggaaactggaacaagacaaggatgcccattctcactacttctcttcaacttagtactggaagtcctagcca

SEQ ID NO: 867393 - DNA, 639 bp, Homo sapiens
catcccttactgttggggtggggggaggatattttcagctctggaatgtgaggatttgcctaatatttctaactatgtatttgccagaaaatgtggcatctagggagatcaggaaatgcagtgactgtgccagaatgtggtgccctccgcttcaktctggcatgtcagcaactggctgtggctgttggctaatactactcagtggtgctcgtgttaattccctttccagtagaaatttcttgtggttaatatcagcagctaccatgtagcaagcatcatgcgggcttttacatttactctttaaaacaaccatgtgaggtaggtgaggaaaccaaggctcagataaatccattggcttgtatacacatggctattgtcatcggaaagattaaatattactcaaaaggatgaccacagtcactgcattaacattccaagacagcaatataaatcaatttcatgagaggaaatcctatttttggttgtgtaaaggaaccaactaccagtgaaggatggagtctgagaaactaaattgctgtgcataataaagtaaaagaaacatttaggttgtccgctggcgacttgagtagaggacaggatttctggaagactgaggaaggaatagaatggagagtcttt

SEQ ID NO: 867394 - DNA, 649 bp, Homo sapiens
catttctctgattctactttccctctgtccctcagtcagaagaagccagaagcaacagtttatttggaataagaaaagagacaaaacagaacacattccccctttctaatacagatacccatccttgtgcctagtctgaggatgatgaaaggataaattttaaattggatgtgagatgctagtattgaattagattcaactagattttttaaaacttggaagtgagttgatttacctaaaagtaactggaaagctatgcaatctattgaaataatacaaaaaaaaaaaaaaaaacccaaaacacacacatgcacacgtgcgtgtggcaaagaaagtaaccaggaaaaagaagatacagtttactacttatatcctacagaatttaattcatttaataraccaattttatggaccttaaattttctttaacaaatattctctctcacctgtttatatatgaaaaccattatttttaataaaataagtttgaatcttggagggcagagagaaagaatacaaattaaaatggtaggacattaattagcccaacattggaacagacttataagagtagccaacagagccaactattttctacatgattatcttgagatcagaaaagctaaattatttgcttaagcccgaacaa

SEQ ID NO: 867395 - DNA, 589 bp, Homo sapiens
aatgtatttatacaagaaagcaaatgaaagcatccaggaaaaaaatgttcacaaacacaaattcaaaaacatacaaattaaagcaaatttgaggtgccacttacaactaaagaaacatcataacatgataatatatactaatgtgtttgtagtgaatctgacttatttctacaacagcttaggaagtgatatgacaatactaatgaatgtctactgacagtatttcagggagcgcaactccgcaatgtaaatggtggccctgtaaacaaaagtgtttttatccaataatctttgctcctggaattttttctgaacctcaaagggcacatagaacaggagattaaagttcatggcatgctcaaaaacaattgagttcttcaccagcaatcctcaaaaaagaaaatcctaaaggttgttcttgagaatagaaatayattaaattcagaaagaatggcttagatataacaataaataaagaaaaaagaaaatggctaatatatgggtaaaacttactaagtattgaccctaactagcaataatttcttatgtggattttttagaaagtaagaattaaatcaatgactaaaat

SEQ ID NO: 867396 - DNA, 626 bp, Homo sapiens
gtaaaaaagggagacataaattctgagagggcagagaccttgtgcagaggactaatgggagaggcagtgggctgagagtggaatgcagcacattctccgtatactgtgatatcttgattccttcccaagcttaagggagcctgaaaatttggggaaagaatgctagtattggaaagtgagagaagatggtttcttggatggggagttgggtggtctcatcactccttccagacatagattarcaagacttaattccagaaatattgtcagccagtaaaataaatagactaatgactgtgggaaaattgtatgttaatgtatctaggcattgtttccagtctgacccttaaatatatgtttaatcaatctagatggatgagccatcctgctcttaattaatctttctggacatttatagagaaacggcaaagtctttacgaagaccttataaatgtgtttaagcttagtatggatttttatttatgtgcatagcatgagcagtcgttacttctaaatgatggcttgttttgaatgttctcagaccttcaaaatgttttatttccacccttgggaagggaatggggggtgagtcgaaagaaaacacgtgatggccattttccatggca

SEQ ID NO: 867397 - DNA, 623 bp, Homo sapiens
gggtgtgttttgtacctttttcaacctttcactgaggataaatagcctatgacagtaagtagttatctgtttgaaaatgcaaccaaaaataaaaagccttacaaggggaaaaatgaagaagatcaggaatggagaaagaagatgataaggagtgagtgttgtatttttctccttatcagagaaatccattattgcaccatatttctagtccacaaaatgattgcccctcaatttatttccaaamttctgaccccaggtttgttactgggtgaaaaaaaaaaaagtgaacaaacaaccctagatttgtctgaatgcattgataaaggtaatcttttgtttttaattccagataaatgtagaaatcctgcatgaaagttagctaaaactgaagcttggctaaaagaatgtttataaatagttgggatggaaagacaaaagcatggtggtttttttctacgtttgctcctggagaaggttgtgtgtttagatttgctctgcaacctgccaggcggttttgtgtgggtttggacttgactccgtgtcctttgtatttattgttttagaatcactggctccaataagtcttcctgttcaacatggattttcagtaaatggcaaaggcc

SEQ ID NO: 867398 - DNA, 628 bp, Homo sapiens
aatataggaatgtgaaacaaagctaataatgcgtatatcctatgacctagcaatttcatttttgagcatcttgtcattgagaaatatttacatatgtgtcaaaagagtcacattaaggaaagataatggcaatatttgagacttgcaaaagagttaaagctaagtgttcattcagagaaagattggttaaatgaattaattaaatgaataatttattaaaataagtgaacaaataataacatccataaataatcctatagtttcactttttttgttttgataaactttattgagcataaaatgcacagacagcaaaatgcacccattttaagtgaataatgtttagacaaatacagacaaatgtctacaatatcatttctaatggctgcatagaactrcttcttaccaagcagtaatttctgttttcctggtcataaagactagtttagggatgggtccataagccaagtcagcccaaactgagccattcctggaatttctggtgaaaataccatatttgattgccagttccaaagagatggatgtttaagatgtttcaaatgttgtactgttataaataatgctgagataatgaatatttttgtagccaagtcattgcacacatttt

SEQ ID NO: 867399 - DNA, 628 bp, Homo sapiens
gttactcttaacttatatagtatccccttagttcacctaatttttcccagtagttccaccaaaagtaccaaaaattgttctgatgagcctgacgtgggccacaggccaatccctctgaaatagcctctctagccagggagatagaacacacagactggcgaggcctgaatcatgcacacacctctcgatcatagtgctaggtcttatcttctacagaccatatgaactgagagagagaaaggagtaaaggagtgatttcccatatgaaaacaaaggtacttacaccagaaaaaaggggacrtgaactgggcagggaaaaagagcaaaaattcaccgtgcttttgccattctttcttctctttccttctacccctccaaagagctttaggaggtggtttctgttatgacagtggtagtggtggttgctatagaatgagagcattttaaaattcatttggttgtgagctactgggggacagatgggaatcctttactccccataaggtccctggagatacccaggcctgttcaaataccatagctagttatcacagcataaagaaacagccagaaatgcttgcccaggagctacccaggtttgctggaaattcaacaggatcaatggaca

SEQ ID NO: 867400 - DNA, 575 bp, Homo sapiens
agaatactgattctaatctgaaaaatagcaccacctttgaaaaatagcactcaagccccacctttgaggatatcaaaagaagccaaattatggagagtgggattgtgtaaacagattgacaaagcagtttttgtgtgcaagcaaatatgtgctgtgttatccttcgttttgctttttgggagaggggtacaactactatcatatgacgcagggtcaggaaactacggtaggcaagtcaactscagcccatggcctggttttgtattgtgagctcagaatgatttttacattttcaaatggctggagtggggtgtggggaatcaaaaaatattttatgctgtgaaaattaactttaattcaaatttcagcatccataaatacaatgtgattccacacagccacactcatttatgaacttatcatctacctttaagggccccctggagagctttgaattgtaccctctgtgcttggaagatttacatgactggtgtccaactcaggcctgaaaactctgactaaaagaactgtggcccagggacctcctcctttcagggaattaaaggtgaaagaag

SEQ ID NO: 867401 - DNA, 598 bp, Homo sapiens
catattttcctttcatattttgggccataaacatgtaaagaaaccaacgtgaatttcctatagaatgattgccaaaatgaaattttctgatcgtttgttcaaaaaagggaatgcatgggcctatctcctgtaagagtactataaagtagccaggactgtggtcatttttatagataattccgagaaacctttaaagcaagatggtcaggggagtgatacatcgccaggatgcaggaaatactggcccattacctccagatcagtccccgagggttactgttcatatttggctttggggacaggagtcaataaaaattygtgttcataatactttatatactcacatgcaggcagaaggaaggctaagggaagtagaaataccttattacatagcacataataaggaccattaatatcagctgccaattctgacactaccaatgtgtgtgtttatgtggactgtagtgtcacgtggtagttactagaatggagtttggtgttagagagattgaagtcaaattgtagctttgccacttaagcagcaatgtgattttgaacatgttatctaaactctctgaccttattttcttcaatggga

SEQ ID NO: 867402 - DNA, 633 bp, Homo sapiens
ttgtattagtgaaagactcatattaaaaatacttaattgaaacagcagaggtgttgactactcggagtggatgctggccattgggatggagcagggtcctgggggccccctgcaatgctaaacattaaccctttaattgatgaattgtggggaggtcaggaatcatgaggggagaaggagatagtctctggacactgcagtttgctacctggtctggaaatactttagaactttgctatctgtgcatctgtactggtgatgcctgttgaayaactggttatgtggtgtggtgtgcatatatcctaaaacaacagggtatgtgccgagaaagaattggtggaccaggaccagatttcatcatctagtgctttaacttgctgtgtgactttggggaagtcatgtcattccctgtacctcagcttttccatcatgctaagtgattttgaggcttcttcctagttgtaacattaattttcacaattttaaagccatgatccaggcaccatttttattctttgctacaaagaacagtcaatattgtgattgagcacctgggtccttctacttggtctgagccctgctgaatgatccagggcaagctctgtaagttttctaggccccatttgacgtata

SEQ ID NO: 867403 - DNA, 634 bp, Homo sapiens
cctctctccctctccttgtcctacctctcacaataaaacgacttatctactaattacaaagacctcaatagtggaagaaatccatatcctacataacatggagagctagctatatacccttggcatcagtttttatcctacttttactttttactgactttcatttactgaacaaagcctcctttgccaaaggcagggtaaataaactcagtcacatcctgtcttccttacatctttgtttatccataaactgtcgaagatacagatgaaaatccactaaagcatgcttgaagcggttacacgaaggccaaataagatgggaatggaaatgcctgatgttaagggaagatactacctaaaatgatactgagctggccmgtgtaatgacatgaaaacaaaacaaaaaaaagataaacaaaagatgactaactgctacagttaggaatggactcatttgtgtaaagaagcagtaatgcaaaagacattaacagcaatataagaaagtgtctgtatagttagtgggaagaagataaagcttagcgattaagagcacagacgggaatgagagtagatttcaaacctggctccaccttttgcctttttacctttaactggacaactcagttaaccacgc

SEQ ID NO: 867404 - DNA, 447 bp, Homo sapiens
aataagtcttatgagatctggtggttttataaagggcagttcccctgcacatgctctcttgattgccgccatgtaagatatgcctttactcctccttcaccttccaccatgattgtgaggcctccccagccatgtggaactgcgagtccattaaacctctttcctttataaattactcagttttgtgtatgtccttatagcaacatgagaatggattaatatagtaaattggtttcagtagagtagggtgctgctgtaaagatatctgaatatgtggaratgactttggaactgggtaacagggagaggttggaacagtttggagggctcagaagaagataggaaaatgtggggaagtttggaacttcctagagacttggagagctcagaagacagaaaggtgtgggaaagtttggaacttagagacttagagacttgttgaatggc

SEQ ID NO: 867405 - DNA, 613 bp, Homo sapiens
cctcacgtgctaataagtattgcatattaacaaaaatcccaacagatttttgtgttcatttttacatctagtacattcaggccaagcttgatttatttgtgacattggcaatcctcttatttttttctctgctgcctacctatctacctttcagtgtcagatatggtgattctgtcgctgcccargtagatgttgactctgatgcagcatcaagttcacctaacacaaaagacaggacaccatgtaaaataagaacaggaaagaggcagacacaaaccactatgaggtattacctaccaacagaggtatataactcaggccaaggtcatattgtattgttggtgggggtggtcacaggggagcgtggggtcctgtctttgttgctgttggctttccttctgggacacctgacagtacagagatgagaaatctaaggatagagtgggaatcaatatggtgacctcgtcaggcagtcatacctgaagtgtcctcactttgccattgagtttggctacaaatgattcttgatcaatcccatgagataaaggttcccaagattttctcctccaaagcgtcctctcaaagtgttccctaagagctctttcatccctgc

SEQ ID NO: 867406 - DNA, 613 bp, Homo sapiens
cctcacgtgctaataagtattgcatattaacaaaaatcccaacagatttttgtgttcatttttacatctagtacattcaggccaagcttgatttatttgtgacattggcaatcctcttatttttttctctgctgcctacctatctacctttcagtgtcagatatggtgattctgtcgctgcccaggtagatgttgactctgatgcagcatcaagttcacctaacacaaaagacaggacaccatgtaaaataagaacaggaaagaggcagacacaaaccactatgaggtattacctaccaacagaggtatataactcaggccaaggtcatattgtattgttggtgggggtggtcacaggggagcgtggggtcctgtctttgttgctgttggctttccttctgggacacctgacagtacagagatgagaaatctaargatagagtgggaatcaatatggtgacctcgtcaggcagtcatacctgaagtgtcctcactttgccattgagtttggctacaaatgattcttgatcaatcccatgagataaaggttcccaagattttctcctccaaagcgtcctctcaaagtgttccctaagagctctttcatccctgc

SEQ ID NO: 867407 - DNA, 607 bp, Homo sapiens
gtgttaaattctcccactattattgtgtggtagtctaagtctcattgtaggtctctaagaacttgttttatgaatctgggttctcctgtattgggagcatatatgtttaggatagttagctcttcttgttcaattgaaccctttgccattatgtaatgctcttctttgccttttttgatgtttgttggcttattaaagtctcctttgtcagaaactaggattgcaacccctgcttttttctgctttccatttgcttggtaaattttcctccatttctttattttgagcctrtatgtgtctttgcatgtgagaggggtctcttgaaaacagcacaccaatgggtcttgactctttattcagcttcccattctgtgtcttttaattggggcatttagtccatttacatttgaggttaatatttttatgtgtgaatttgatcctgtcatcatgatgctagctggttattttgcagacttgttagtgtagttgcttcatggtgtcattggtctttgtacttcagtgtgtttttgtagtggctggtaccagaatttcctttacatatttagtgcttccttcaggagtttttgcagggcagcttggtggtgac

SEQ ID NO: 867408 - DNA, 667 bp, Homo sapiens
ccagaaatgactgtgactatctacgttactcttagctgctttgtgttaatgttactatattgcaagcttttggatattttttcctcacttttttctctcatgatcttgtcagcacataacagcttccttggacataagtaagcactctccaggaaagtgataaagattacataaataaaatttaaaaagttggctgggtgcagtggctcatgcctgtaatctcagcactttgggaggccaaggcaggcggatcacctgaggtcaggagttcaagaccagcctgggtaacatggtgaaaccccgtctctactaaaaatacaaaaattagccaggagtggtggtgcacgcctgtaatctcagttactcaggaggctgaggcaggagaatcgcttgaacccgggaggtggagaatgcagtgagttgagatcgcgccattgcactctagcctggacaacaagagtgaatctccatctcmccaaaaaaaaaaaaaaaaaaaattttaaagtcaccctatgtttctctttcattcttcactcctattacaatacctaaaactaaccaagtagtgagacattgagcaacaggacaaacactagggacaattatacaaataaaaggacataagccatcaaataactaagacttcatggtatttatgtgtataacg

SEQ ID NO: 867409 - DNA, 684 bp, Homo sapiens
aactcccaacctcaggtgatccgcccgcttcggcctcccgaagtgctgggattacaggtgtaaaccatcgcgcccggcccgaaaatgtcagtttttaaaatgttttgtcactgcatagcaaaggcttccatctttctggcatccagcattcatcactgtcacatgaccatgaagccgatgccacatgtttctactgtgatctggaccccactactgctctcctaactcactgaactccagtcacactgaccacctgtgcttttcagtactccaggcactctcctgttttggagcttttgtctttgctgttatctctccgggaggaacattccctcctcccagtatttacttgctggtcctctcctgcaagtctttactcagggttaactattttgtgaggacttccatagtgactctattttcaaaccattcaatcattcttttattgcttattttwtctccattcgggccagtgtgacacctttgaattggcttccatgaacttttgatatgactccattgattttggaaagctttatttctggtacaaaaatgtgtcccaggctcacagttgtaaaattagttatttctctaaattgcctggtctcctagagaatgaagatatagatcaaaatcttggtgttacgggtactcattgctactgggctgacataactttgagac

SEQ ID NO: 867410 - DNA, 562 bp, Homo sapiens
tgcttataccaatggacataccataacagtttctgagagttcccattgatactcatgcttgctagcatttggttttgccagacattttaatattctcttattgaggatatcatggtcttactgtggtcttaatttgcatttccctacagtaagtttggacacttttcatgtatttattagctatttgaatctcctcttttagatgtgtccattcaagtgtttcatctatgtgtgtgttgtggggagcatttttcacctttttcatttttatttgtaagagttctttatatatttgtgatactagccttttgtcaattttaagtgctgaaaacaaacagatgccaaaaagtaaaaacaacagcaataacaacaaatcatcagtggcttttctttttcaycttacggtatcctttgatgaagaaaattcttaattttaatgtcacatttagccattttcttctttaaaaatagtgtttcttttctcttttaatatgctttccctatccaataatcatgaatgtatttttctatgttaccttcttaaaggttcccttcttctaat

SEQ ID NO: 867411 - DNA, 588 bp, Homo sapiens
tctcaggaacatagtgccttctgtggtcttgagaggctgaaggcaaaatttggagagggaggggttcagtgctccctcccaggacatggttggggtcagcctctccccaccatagcaaagaacagacttaggggctatctgttactcattaccctgcagccagccctctggacctacctgcctataccctgggagcaggagctaaggcagctttccccgccctgctcccaccccaytcctggagagaacgttcatggttagacctttccctctcttagatcactctccatctggcttgacctagtggaatttgaggaaacccaaaactcggatcttaaaagctggtgttgcttgggagctgctgtcctgccttaccgccctcccccacattcctaaaacacattttcaggtggtgtaagcttttcagggcttatctgcaagggccatccctgggtgtttatgaccgttaggtattttgtagcactgcagacttcaaaggcaatgtgtctagagaccagaacttcaaattcctttcatacttccttccctgaaaaatccaaggggcttacttttctgtaacaggtgaac

SEQ ID NO: 867412 - DNA, 634 bp, Homo sapiens
agtttgaaagagaaatgtttctttaatgaaaaattattgcagagaatattcacttcaccagttatccatctcacaaatgaataaaacaaataataattagcgtactgctgatttctcagttgtgataattttcatttatttgtgagtctatagaggcccctatgtgtcctgtgtttgtaatgaaattgtttatacacagatgttagagtaatctcatgaaaataattgaagaattataaaatggacatataaattttaatcaccataccttttaactcagctcattttatttttcttctgaacgtatgagtttctgtaatgatttcacttcactaatacttcatagacctttaraagatcacttaataactacaatgtctatttaggatttcaaagttctacgtatagatatacatagacagatgaggacatctttacattagtcaaaaatcagttattttctccgagttcccgcagttagtgtttctcctctgctctacctgctgccattggcttgaaatagatgtcattagtacacatcctgtcttctgttgaggaacaaggaatacacattttactgagaattaacaatgatctgtgtttttcagaattttaatacgatattcttttgtct

SEQ ID NO: 867413 - DNA, 597 bp, Homo sapiens
tacattttcctaatgaggaatctgagttggcaagattataaatgtcattcatggctatgggagtaaacccaaataaaatgtttggaatgcacagagatttgttgtttacataaggagtagtccaaaattaggcaggagctagtgctggttcatttacccattccacgatgtcagctccaaagtctcagaaattctttcttgtcctcatggctatggaatggctgcattccaggatgaaggtggtggaagaggaagataaaggagctcagaaaaaccaaagcttgcccagaactacatgggagatctttgtccctgtctcgtttcacaggctgttatgcagccactcctctgaaaggcggcaatggaaaggagattagatgaaacaagtgcaatctctcctacatagtataatgaaattttaatttccattytcttactccagagctcagtcctctctatctacaatagacaacacatcaatgggaagggggtctgtgtctgtatagtttgtacacatgcttttgtgtttgcaaataactatgaagcttatgatatacaggggagataaggactttgccatgagattgaaaaacatct

SEQ ID NO: 867414 - DNA, 607 bp, Homo sapiens
tccacccaaactatgtagatagaaatgtggttgaaggtgacttgctaaaagaaatatgaagatgtaggaggaataagcaatgggcttcagcacaacagatgtctgctatagtgcttaaaagaaaagagtgacctcaaagtccagaaaacttatgatmagccaggttattcttctgtgaaaaggaactttaccagcagaagaaaaattctcagccaggcactgtggctcatgcctgtaatcccaacactttgaaaggctgaagcaggtggattgcttgagcccaggagtttgagcccagcctggccaacatggcaaaatcccctaactaccaaaaaagaaaaagaaaaagaaaaaatagcctgtagtcccagctacttgggaagctgaggtgggaggatagattgagcccaggaggcggaggttgcaatgagctgagatcataccactgtactccagcctggaaaaaaagaaagaaagaaagaaagaaagaaacaaagaaacattataatgtgctactttggatgcatctctaaatgtactttttgtattgagattcacacaagccaaatattttttttctcatgagcattatagcatggcaaataaa

SEQ ID NO: 867415 - DNA, 607 bp, Homo sapiens
tccacccaaactatgtagatagaaatgtggttgaaggtgacttgctaaaagaaatatgaagatgtaggaggaataagcaatgggcttcagcacaacagatgtctgctatagtgcttaaaagaaaagagtgacctcaaagtccagaaaacttatgataagccaggttattcttctgtgaaaaggaactttaccagcagaagaaaaattctcagccaggcactgtggctcatgcctgtaatcccaacactttgaaaggctgaagcaggtggattgcttgagcccaggagtttgagcccagcctggccaacatggcaaaatcccctaactaccaaaaaagaaaaagaaaaagaaaaaatagcctgtagtcccagctacttgggaagctgaggtgggaggatagattgagcccaggaggcggaggttgcaatgagctgagatcataccactgtacwccagcctggaaaaaaagaaagaaagaaagaaagaaagaaacaaagaaacattataatgtgctactttggatgcatctctaaatgtactttttgtattgagattcacacaagccaaatattttttttctcatgagcattatagcatggcaaataaa

SEQ ID NO: 867416 - DNA, 631 bp, Homo sapiens
tcaattcaacaagaagagtaactatcctaagtatatatgcactcaatacaggagcacctagatttataaaacaattgcttagagaccttcaaagggacttagattcctatgcaataatagtggaagactttagcaccccactgtcaatattagacaaatcatcgagatagaaaattaacaaagatattcaggacttgaactcagctctgaatcaagtggacctgatagatacctacagaactctgcatccctaaacaacagaatatacattcttctaggtgccacatgtcacttactctaaaattgatcacataattggaagtaaaccactcctcagcaagtgcaaaagaactgaaatcataacagtctctcagactacaatgcaattaaattggaactcaaaattaagaaactcactcaaaaccacasaactacatggaaattgaataacctgctgctgaataactctgggtaaataaagaaattaaggcagaaatcaagaagttctttcaaatgaatgagaacaaagaaacagtataccagaatctctgggacacagctaaagcagtgttaagagggaaatttataacacaaaatccccatatcagaaacctagaaagatctcaaatcg

SEQ ID NO: 867417 - DNA, 633 bp, Homo sapiens
acagttcagtcattaatatattcattcacagaagaactccttggtgagttagagaaaatacttttatcctgcttgttttgtataatgtgccactatatgtgatatatgtggatttgttttccaagttctcttacttccactaatggtgcatctcttgaagtatgtttcagccttccttatctcccgtcctggacagccttatgcatgggaraggccaataagtttttaccctttccaacttgcacaatgcttctttggatcagaatatttgaagcaaatttcttaccgtgtcatttacttgctgaaaaatcttcactagatttttgactcaacaaaatgatacaaaaactcaatagcctgtaatttagaaccctctgtgatctgatcttgacattatataaacctcatttcatatcctgctctttatgtccctaggaccaaaactgcactatggcagaattgttcctgacctatctccacataatctacttcaacttaactagtttaccagcttcaatcaaaccatgctctccattcttctctctacaatatttgcccgacattcatcatgtgttcctcacacactggtaggctagttgctatttatagtcccatttcatcagtcagttaaac

SEQ ID NO: 867418 - DNA, 580 bp, Homo sapiens
ctggctacctatttctcaaagatttttggcattccttatatattctatgtttgaattatttgataactatacatacatatgatcaatattttcttgtactctgtcacttgcttttcagtctcttaattgcatcttttgattaatagaagtttctaattttaatgtattactatttatccattattccttttgagggtagcactttttccatcctgtttaggaaatcactgtcaacatcaagtcatgcagatattcttctatattttctataagtttttttttgcatagatatctttttaaaaacaattatctaaaaaattctgatacagacagttcacatatcacattttgcaaaaccttgyaattttctgccctaagcctcacaaatccttaaaaagctgtgcaccctttccccaagccagggtccccatccttgacttcccttcttcaaggtgggctcacctcacaagccctcattgtcaggctattgtattttcttggagaattctacagcagggatacactcacaaacttgccagggtcaggtgtaaatgagtgatggaatagggtgggcaccatg

SEQ ID NO: 867419 - DNA, 652 bp, Homo sapiens
aaacagttgggaacattgagtatgagtgctactagctgtgttgtgcattgacataggggtatgtgtgagcatttaagcccatttatgacttcagccagtgatacagattgtgtaataatataaaaatttaaaaaattgttacttaaggccgggcacggtggctcactcctgtaatcccagcattttgggaggctgaggcaggcagatcatgaggtcaggagttcaagaccagcctggccaacatagtgaaaccccatctctactaaaaatacaaaaatttagccaggcatggtggcaggcacctgtaatcccagctacttgggaggctgaggcaggakaatcacttgaacccgggaggtggaggttgcagtgagcagatatcatgccactgcactccagcctgaacgacattgcgagattccgtctcaaaaaaaaaaaaaaaaattgttacatgaggttggaatttctttttttaagtaccataaagacactatattgggtggatttgaagtccagccccagcataaaacaaattttcagtaaatatgagctattcttactattaataagtgtcagataatatcttacttagtgttttaaagtttatcaagtaggctcaacaaatttatcttaattagccctcacaataacc

SEQ ID NO: 867420 - DNA, 652 bp, Homo sapiens
aaacagttgggaacattgagtatgagtgctactagctgtgttgtgcattgacataggggtatgtgtgagcatttaagcccatttatgacttcagccagtgatacagattgtgtaataatataaaaatttaaaaaattgttacttaaggccgggcacggtggctcactcctgtaatcccagcattttgggaggctgaggcaggcagatcatgaggtcaggagttcaagaccagcctggccaacatagtgaaaccccatctctactaaaaatacaaaaatttagccaggcatggtggcaggcacctgtaatcccagctacttgggaggctgaggcaggagaatcacttgaacccgggaggtggaggttgcagtgagcagatatcatgccactgcactccagcctgaaygacattgcgagattccgtctcaaaaaaaaaaaaaaaaattgttacatgaggttggaatttctttttttaagtaccataaagacactatattgggtggatttgaagtccagccccagcataaaacaaattttcagtaaatatgagctattcttactattaataagtgtcagataatatcttacttagtgttttaaagtttatcaagtaggctcaacaaatttatcttaattagccctcacaataacc

SEQ ID NO: 867421 - DNA, 592 bp, Homo sapiens
ttaatatataattctggacctacttacatcagaatcacttcggatacctttaagaaagtcaaaaatcacactttctaaaagtctgaaaatatgcatcttatcaagcaccccagtgcctcttcatacagaaatttaaaagccactgctccagacatttatttttaatattatgagcaaataatagggagcaaaatatttgaagctaaactgaatttcttttttttttaattttattattattatactttaagttktagggtacatgtgcacaacgtgcaggtttgttacatatgtatacatgtgccatgttggtgtgctgcacccattaactcgtcatttagcattaggtacatctcctaatgctatccctcccccatccccccaccccacaagagtccccagtgtgtgatgttccccttcctgtgtccatgtgttcttattgttcaattcccacctatgagtgagaacatgcggtgtttggttttttatccttgtgatagtttgctgagaatgatggtttccagcttcaaccatgtccctacaaagcatatgaactcttcgttttttatggctgcatagtattccatggtgt

SEQ ID NO: 867422 - DNA, 700 bp, Homo sapiens
ttctcctctgggaatatcaagtagatttcttatattcttccagagtgatatcacatgatggaacacatttcagtaataaatagataatgggaaatatttagtcatttaatgcaaagcagggcccatagtaagctctcaatgaattgtttgtcataaacagaatcatgacccttatcaatattatcactaataaactgatatcataagcaattgtagcatataagactcagggactgactcagttmtaatgtaaatcttcagcaagaacaacatttattcaagcacctatgcttcagctctgtggtacatgaggagcaaagaggaaaatattaatatcatatccatgctaccttctgtgccatgagtattatgtccttcgttgctgattcaggcagatgtcttttctgccatcattcatgaaaggatggtacctaactttttagcttgcatgtagagaaaactgaaatctttcacaggttttaacaacagctatatgtatatatctatctatatcaatgctggtgcaaaaagacatgttacccattagttgagggattaagctattaaacctagtagtctcttgaaaagtaaacctctacaatatgaaattgtaaaacgcaggtcatgtttcatatatatacacatatatgcttccaggatgggaccatcctccataggaaataaaagctgtgtgctcaca

SEQ ID NO: 867423 - DNA, 569 bp, Homo sapiens
gcattgtacccctgcccaagagatatgtgaaactttgaacttgagagtgatgatttagagtatctggcagaagaaatttctaagcagcaaagctttcaagatgtggccctggcagcttctaacagcctatgctcatatgtgtgagcaaagacatgacctaaaattgcaacttatttaaaggggaagcagagtgttttaaagtttgaaaaatttgcagcctggcaatgtagaagaaaagaaaaccccatttgcaggggaagaattcaagcaagcttcagaaatttgcataattaaaaagaagccaagtgctgacagccaagacagtgggaaaaaggccttgaaggcatttcagaaacctttgcagcagscctacccatcacagggcccaaggcctagaaggactgaatggtttcatgggccagggccagggccagggtccctctgccctgcacagcgtcaagacagttctccctgcatcccagtgactctagctctacccctgactcaaatgggcctaggtacaacttcagctgctgcttcagaatggacaagctgtaagccttggcagc

SEQ ID NO: 867424 - DNA, 582 bp, Homo sapiens
catgttctatttttaacaccctcaccttttaaacataatataaatatacaattatcatgtttattctttgctgttctctcactatcccccccatacacatacgcactagaacataagtctcatgagagtaagaactgtagtgtattttgttcactgatgtatcccaagtacctagaataatgtctgtcacaaggtaattactcaatgaatatttattgcataaatgaaacccataaacctaacataacttataataacaatctaatgacaaaaagaaacttattytaaactctaagcatcaccttgttgacaaaagatcaggtgccagcattatccatttcctcattacagaagataactaaatcacaatgtaaatatgtatctacctttcaagtttagaagggtttaatttctgtttttgtataaaagtatgctaggagatatatatactttttaaaagacagccaccctgtcctctaaagacacaacaaaaacaatgacttttgtatggttcgcctacatttcagcttaaacctagaaaaaaagttaatattgtgtaattttaagattttaataacttct

SEQ ID NO: 867425 - DNA, 645 bp, Homo sapiens
gactgccatgagatggtatctcattgcggttttgcattgcggattttcatttctttgatgatcagtgatgttgagctatttttcatatgtttgttggttgcatacatgtatttttttgagaggtgtctgttcatatactttgctaaatttttgatggggttgttttgtttttttcttgtaaacttgtttaagttccttgcaatttctggatattagacctttgtcagatgggtagattgcaaaaattttcttccattctgtargttgcctgttcattctgatgacagtttatttttctgtgcagaagctctttaattagattccatttgtcaactttggcttttgttgcaattgcttttggcattttgtcatgaagtctttgcccatgcctatcctgaatggtactgcctaggttttcttctagagtttatatggttttgggttttacatttaagtctttaatccatcttgagttaattttcatagaaggtgtaaggaaggtgtccagtttctgttttctgtatatgactagccagttttcccagcaccatttactgaataggagaacatttcctcattgcttgtttctgtcaggtttgttgaagatcagatagttgcatatgtgtggtgttatttctgaggtct

SEQ ID NO: 867426 - DNA, 647 bp, Homo sapiens
gctgagagactgtgaagagtctgcacattccggggttgggaggataggccctggtggcatgagtttgcaagtgggatcttccaattcatgggttgcatcattccgttgagaaagcacggtttccctggctgagtagcacactcaccacttcccttggctggggatgggggcggggatctccttccccatgtgactctcaggtaggtcaccacaccacactgttcttccttctctccgtgggtcacattagcctcctagcagttctgatgagcgaacctgggtaccttggttgccagtgaaggattcacatgtgtattatgcttttttccwatgggagcctccagacatgactgtttctagtcggccatcttggctttgccccaaaaatatttttaaggaagcaaatttattagtgagagttgctttgactgtctcttatattcaaagatcattaatattaaaagctaaatagtttgatatcactgaaaattgtcagaattttaatgaaaagaaaattagaacaaagagatctaaagaaaaggacacctaataatttatgggcacattgttcttcaagcattgtatttggaatttggtgtttaagaaataaaagtataagtagccagtgaaagaaaaatgtgttatag

SEQ ID NO: 867427 - DNA, 643 bp, Homo sapiens
gacaattatagggaacaattatagagcccctgcttgcatgcgaagctccctatttcatctatattatctctgacacccacaccaccaccacaaactggctactatagaaggagatgccgaggctcagagtggatgatacgagctgctcaaggaacatagtttataaatgatgatgccaaggtctaagattcaccctgcttgattgtaaaagagcaggctcttgctactgcaccaaacttcatgtctgcctcgctttagttagtcccttcattctacccagagaagagcagggagagccagagaagttaaatgtacctagaatcaaacagtgggtccttgacacagcatgattataacctagctcagagctttttccagcctcagatttacgccagcttcataagccctaaggcagggctgacaacctgccttcmccaaagtgcctacactgatgggtttggaagggacacctaaagctctgttaagaaagattctgaggctgtatcctggctcagtatgaaagtgtcaggactgagaagagatgcctcagcgtctgacacagcatccctaatgccacatactcatcacccctattctaggggctgccctgattgtaaacagcacagaactgtttttatcctta

SEQ ID NO: 867428 - DNA, 651 bp, Homo sapiens
ccacatgaattcacttccagtaacaggtaacaggtaggagaaaagagtaacatcacctaggtgctggtccaggaatatgtcacaataccgtattaggggaggatccaggaaaagagtcatattacctaggtgaagtgcttagagatgtgtcacaatgmcccctatgggtaggactcaggaagaagagaagagttaaattacctagaagctgtgcccagctatatgtcacaatcagcccagtgggaaaagccaaggcatgaggcacatcatgtaggtgctgggtcaagtgatatgtcacaacctcctctgtggacaggtcccaggaagaaaaggagacacacatcatctagcagaaaagcccaaagtatgtaatgatgattcctatgggcaaggatcaaggcagtagaatcacatcatctgtgtgctgggcccagtcataagtcactctcttctgtaggcatagcccaggcaggagagcagagttacatcaactaagtgctggacccagagatatgtcacattctctcctatgggcaaagagcaggtataatatggtaaccacttcaaatacttgagcttccagagaccatgtcacaatggtctctatggttagggttcaagcaggagactcacgtcacgttgattgtggcc

SEQ ID NO: 867429 - DNA, 651 bp, Homo sapiens
ccacatgaattcacttccagtaacaggtaacaggtaggagaaaagagtaacatcacctaggtgctggtccaggaatatgtcacaataccgtattaggggaggatccaggaaaagagtcatattacctaggtgaagtgcttagagatgtgtcacaatgacccctatgggtaggactcaggaagaagagaagagttaaattacctagaagctgtgcccagctatatgtcacaatcagcccagtgggaaaagccaaggcatgaggcacatcatgtaggtgctgggtcaagtgatatgtcacaacctcctctgtggacaggtcccaggaagaaaaggagacacacatcatctagcagaaaagcccaaagtatgtaatgatgattcctatgggcaaggatcaaggyagtagaatcacatcatctgtgtgctgggcccagtcataagtcactctcttctgtaggcatagcccaggcaggagagcagagttacatcaactaagtgctggacccagagatatgtcacattctctcctatgggcaaagagcaggtataatatggtaaccacttcaaatacttgagcttccagagaccatgtcacaatggtctctatggttagggttcaagcaggagactcacgtcacgttgattgtggcc

SEQ ID NO: 867430 - DNA, 594 bp, Homo sapiens
cactgtttgaacacagtaaacaagtttgcatgcaaaataataggaaatgttttaatctgaaagccatcgtaacctcatctccaaaattttttcagagaaaatgaccaaagagttgcctacagtgaggtgactaaaaataaaaactgtagactgaacttcaccmacttcaaaaattatacaacagtaaaaattttctccaaattgtaatatcagtatgaaaaataaacacttcaaatgtctaatcaacagagtacattttattatttttcaacatttaacatttacacttaaaaataggagtctgtataaaaatgtaacgtgctgtatcatagaaaattaaatttagaatccttacttaccactaactctcttttaaatataacttataagatatattttgtaacaaattttatgcttgccacactttgtgtaagaatccaataagattcttcttttacaaacaaagaaaaacaatgttaactgatttaattattccacgtgtggacagtgtatgtctcttattttaattaactaatctgaaagttatattggcaagcaaattctccacttaaaatccattttttagcacattaa

SEQ ID NO: 867431 - DNA, 547 bp, Homo sapiens
aacacaaataaatggaaaaccattttatgctcataggtagaaaagatcaaaatcattaaaatggccatactacccaaaaacggaacagatttaatgctattcttatcaaactaccaaaaacatttttaacagaactataaaaaactattttaaaattcatatggaaccataaaagagcctgagtagccaaggcaatcctaagcaaaaagaacaaagctggaggcattacattacctgacttcaaactatgcaacagggctacagtaaccaaagccacataatactggtacaagaaacagacttatagaacaatgcaacagaatagagagcccagaaataatgccacagacctaaaaccayctgatctttgacaaaactaataagaggaatgtgggaagaaatccctatttaataaatggtactgggaaaccacctagcagtatgtagaaaattgaaactggaccccttccttacatcatatacaaaaatcaactcaagatgaattaaagccttaaatgtaaaacttgaaattataagaaacccttga

SEQ ID NO: 867432 - DNA, 590 bp, Homo sapiens
aacatatataataattcagcacttaacatttttctttttttttttttttttttttttttttttttgagacggagtctcgctctgtcgcccaggctggagtgcagtggcgggatctcggctcactgcaagctccgcctcccgggttcacgccattctcctgcctcagcctcccaagtagctgggactacaggcgcccgccactacgcccggctaatttttgtatttttagtagagacggggtttcaccgtttttagccgggatggtctcgatctcctgacctcgtgatccgcccgcctcggcctcccaaagtgctgggattacaggcgygagccaccgcgcccggccaacatttttctttatcataaaaaaaatatggaactccaaattgggtgagacattgtgtctggtgctctatgaagtacaaatcgatgcttcatttcaaaacactcttccacaatcttcattggagttgaaaataaacaagtttagtcaagagtaaagaataaaaacatttattttaaaaataccatttagcatcaattgccccaagtttggcaggcatgaagagtgggcagttcatgttttatta

SEQ ID NO: 867433 - DNA, 568 bp, Homo sapiens
ttctgctataaagacacatgcacacatatatttattgcagcactattcacaatagcaaagacttggaaccaatgcaaatgtctatcaatgatggactggattaagaaaacgtggcacatatataccatggaatactatgcagccataaaaaggatgagttcatgtcctttgtagagacatggatgaaactggaaaccatcattctgagcaaactatcgcaagggcagaaaaccaaacaccgcatgttctcactcataggtgggaactgaacagtgagaacacttggatacagggtgaggaacatcacatactgggacctgttgtggggtkgggggagtggggagggatagcattaggggatatacttaatgtaaatgatgagtcaatgggtgcagcacgccaacatgcacatggacacatatgtaacaaacctgcacgttgtgcacatgtaccctagaacttaaagtataattgaagaaaaaagaaaaaaaatttttgtctaccctctgacttcatcatcttgataaaaaagactccaaaatgtgcatctctaatttcaaactttctc

SEQ ID NO: 867434 - DNA, 598 bp, Homo sapiens
tgtgaacataagaactccagtcggcaacaaaattttgttcaccagcttgcctggaactgctaacttttattgcattccttttagtaacttccctacacttcctgctagcactccaatcttcctttctaaagaaaatccttgctcttgattctttccggagactatgcttatacttaatttccctcaaagtgtaatcagtatgaaccctactatgtaccttaccacttcaaaaacaaaaatcttttcagtgtatcttagatacttctattcwgtacatacggagctacctaaattggagttctcccaaggcagaatctgagcacaggtgttgacctcctttcccaaggtagaatctttctagttgatgtgtgatagagaacggtaaggtcctctgtttgccttatttgccaaaacaaatatctagtctattggcagtagcccacatgtcagtacaaaaatatttggtataattggaggtttccctgtctgagcactgtcacaacatgaggaatacagcacactggcccagcaacttctacagtagtcaatcttgcttgcacctgcccagattgaacccttcagttaatcagctgctttg

SEQ ID NO: 867435 - DNA, 598 bp, Homo sapiens
tgtgaacataagaactccagtcggcaacaaaattttgttcaccagcttgcctggaactgctaacttttattgcattccttttagtaacttccctacacttcctgctagcactccaatcttcctttctaaagaaaatccttgctcttgattctttccggagactatgcttatacttaatttccctcaaagtgtaatcagtatgaaccctactatgtaccttaccacttcaaaaacaaaaatcttttcagtgtatcttagatacttctattcagtacatacggagctacctaaattggagttctcccaaggcagaatctgagcacaggtgttgacctcctttyccaaggtagaatctttctagttgatgtgtgatagagaacggtaaggtcctctgtttgccttatttgccaaaacaaatatctagtctattggcagtagcccacatgtcagtacaaaaatatttggtataattggaggtttccctgtctgagcactgtcacaacatgaggaatacagcacactggcccagcaacttctacagtagtcaatcttgcttgcacctgcccagattgaacccttcagttaatcagctgctttg

SEQ ID NO: 867436 - DNA, 598 bp, Homo sapiens
tgtgaacataagaactccagtcggcaacaaaattttgttcaccagcttgcctggaactgctaacttttattgcattccttttagtaacttccctacacttcctgctagcactccaatcttcctttctaaagaaaatccttgctcttgattctttccggagactatgcttatacttaatttccctcaaagtgtaatcagtatgaaccctactatgtaccttaccacttcaaaaacaaaaatcttttcagtgtatcttagatacttctattcagtacatacggagctacctaaattggagttctcccaaggcagaatctgagcacaggtgttgacctcctttcccaaggtagaatctttctagttgatgtgtgatagagaayggtaaggtcctctgtttgccttatttgccaaaacaaatatctagtctattggcagtagcccacatgtcagtacaaaaatatttggtataattggaggtttccctgtctgagcactgtcacaacatgaggaatacagcacactggcccagcaacttctacagtagtcaatcttgcttgcacctgcccagattgaacccttcagttaatcagctgctttg

SEQ ID NO: 867437 - DNA, 634 bp, Homo sapiens
acacagagcaaagatgcagagagtcagcttctatgtcaatgttaaataccttagagggtggcttgagggccacagtagaggatgttttctaagtatggttttcacaaccaacactatattcattttttcttatgcatgaaaaaatacatcagtttaaaaaaagtaggaggcttagcatgtctttgacttccctgtcagtacgtcttaacacatacaactkctactgtaacatagaagcatttttaggcctcttacactcctccaattcttatcttaatgttgaggataagtgattaaagcacagcaaattacacaatatgaaggtattgccagagtgtagcaggataagtgcagacaaaatccctcagataccgggttaaagaaggaagaggctttatttggctggaagtatcagcagacttgtgtctccagaactgagctcctcaccaagcagttcctggccctttttaagggcttacaactctaaggggtccacgtgaaagggattgagcaagcaaggggtacgtgacttgttggggtgggggggcggtgagcaggatcaatgcttctaggagaatgtttctctatactatgtctgaaatctatagataacgcatgtggttagagcagaggt

SEQ ID NO: 867438 - DNA, 558 bp, Homo sapiens
cccttactccttgtcttagaacatgtgttctaggagaactaagctgctgtgtttgagccaccccactgaatggcccacatatgatggcaaggagcagaaacttggagcccaacaggctgaagagctggagcttaccactgagtgagcttggaagcatcgtagtcctcctgatgtcaaggatatgatccaagaaccactcccccctggccaccttgtagatgcctaaccctatatacactgtattttctctgtacatatgcacctatacacaaagcatacatacacaaagcttaacagatgaattgggcacactaagattaataagaaaataaaactataacataccagcatcactactagtataccttgggacttaggtaaaataagggttgctggaagacgaacamtacaatgccacagaagttgacttagtaacaaataataactaatggctgggtagtgtgctaggtgtggataccctagacaaaggatgacttaaatccatggtgggtggaaaagctttttgatgtgctgctggattcggtttgccagtattca

SEQ ID NO: 867439 - DNA, 567 bp, Homo sapiens
cccattactggatatctacccaaaggattataaatcatgctgctataaagacacatgcacatgtatgtttattgcggcactatttgcaatagcaaagacttggaaccaacgcaaatgtccaaaaacgatagactggattaagaaatgtggcacatatacaccatggaatactattcagccacaaaaaatgagttcatgtcctttgtagtgacatgggtgaagctggaaaccatcattctcagcaaactgtggcaaggacaaaaaaccaaacacccgatgttstcattcataggtgggaattgaacaatgagaacacatggacacaggaaggggaacatcacacactggggcctgttgtggggtgggggggaagggatagcattagtagatatacctaatgttaaatgacgagttaataggtgcagcacaccaacatggcacatgtatacatatgtaacaaacctgcacattgtgcatatgtaccctaaagcttaaagtataaaaaaaaattccaaggtgggatggtatgagacttcatcatgctactcagaatgacatgcaatttaa

SEQ ID NO: 867440 - DNA, 590 bp, Homo sapiens
accatgatagaatggatcagctaaggaacattgacattggctttttgaaaatggaatatggtttcatggatttcggggtctgggagagctaagaagatcacaagagacttgtagagtcagactagaatggagtaagcaggaycaggcatgccaaggtcttgttagagtttctactgcatcagttgacactcattgccaccctagagatcataattctgagacttccctcactcagtacagggagttccctactaatagccttgaatggggtagctctgtccaataaaatgagctgtctacatttcaactactctaatagtctaatttcacctgactcttatttttcaatcttaaaattcctggattgggttagatggagattcaagtcccatctactcctattcaactgtggctctggttctaatttagggtcttctagcctgggcagtaattccctgcgtactgatgaaggaactgcctcataggcttgtttaaaatcagatgacaatttacccatgttttccttaaaaaaaaaaaattgccagctcttgggaacttagtatatgttcttaaaggaaaaatgccctctc

SEQ ID NO: 867441 - DNA, 623 bp, Homo sapiens
ccacccccaatatttcagtgtaggtcctttctattttccataagtgtcggctggctgagaaatacacagacagtacaaagagaagaattttacagctgggccgccaggggtgacatcacatatcagtaggaacatgatgctagcctgagtctcagaccagcaagtttttattaaggggttcaaaaggagagggggatgtaagaacagggagtaggtacaaagatcacacacttcaaagggcaaaaacagaaccactaataagggtctaacaaagatcacatacttctcagggaacaggacaaacggcaaaagtggaaccactgataagggcccaacaaagatcacaaggcaaagagcaaaagcagaactactgataagggtccgtgttcagtggtgcacgtattgtcttgataaacatcttaaacaacagaaaacagggttcaagagcagagaaccagtctgaccacaaatttaccagggtgkagtttttccccaccatagtaagcctgagggttctgcaggagaccagggcatatctcagtccttatctcaactacacaagaccttcccagagcagccatttatagacctccctccaggaacacattcctttcccagggtat

SEQ ID NO: 867442 - DNA, 555 bp, Homo sapiens
agtggtagagaagtgagatggaggagggaggtgagcagggatgtaacaagagtcccttggatggtgagcacagcttgatatggcaggcccatagaggctatatgggtcatatcacagttgcctcaatcagtgagggagcagaagtacttatctattgttactctgtctgatactggrtaaagccagacattatggggacacaaactgccaggtcctttgtgttcccttagggcagccccaaacatagatgcaggctgttggcagtcatataggtaggcactggtaagccaaacatgagagaggggcctaaggagatgttggcaaagcactgacagcttctgctggaaggtcctgggagcccagagctcaacgaagaaaatcctgtctcttcatttcaaatgctgagaaatcaagacccagatccagaaactggaagtgtcatggatttaaggtgaaatcaagtgatatggtggtttgtttgaactcccccagacagaccctgagagattcatgtggaactaaggaattactcctagaagaaacaagtgaaggagt

SEQ ID NO: 867443 - DNA, 555 bp, Homo sapiens
agtggtagagaagtgagatggaggagggaggtgagcagggatgtaacaagagtcccttggatggtgagcacagcttgatatggcaggcccatagaggctatatgggtcatatcacagttgcctcaatcagtgagggagcagaagtacttatctattgttactctgtctgatactggataaagccagacattatggggacacaaactgccaggtcctttgtgttcccttagggcagccccaaacatagatgcaggctgttggcagtcatataggtaggcactggtaagccaaacatgagagaggggcctaaggagatgttggcaaagcactgmcagcttctgctggaaggtcctgggagcccagagctcaacgaagaaaatcctgtctcttcatttcaaatgctgagaaatcaagacccagatccagaaactggaagtgtcatggatttaaggtgaaatcaagtgatatggtggtttgtttgaactcccccagacagaccctgagagattcatgtggaactaaggaattactcctagaagaaacaagtgaaggagt

SEQ ID NO: 867444 - DNA, 586 bp, Homo sapiens
atgtcaaacaatgctctgtccaaatatactttcttctataacatttttgcccccctctgggagggaactaagaccaggttttgtaggaaaaggtaagagctttatgcaagtttcacacatagtgctgatgtaccttcagaatagtgttgcatgagatgagggagctcctttgacacaggttagagcatggaaggcatcatccccatgatgggtgggtttggggcatcgtgamtctccctagtgatcagggagaagctccctttccctgttcaagattgtcaacaggggctggtggctcagtgaagctctatgctctgcccttaggtggtagaatggatcttccttggaaccagtctgaataggaggatacaggagaagacatagcccaaggcctcttttgtagctccctttgcttttgcctgagctattgctgccagcccttatatttagtcctgttccatattttgagtatcagggaccctttggtatagacacagaactacagatagtggcagtgtataaaatgcaagtgttagtgccttcatcattttgatcgcatgtctcctcgattgttggactcctataa

SEQ ID NO: 867445 - DNA, 586 bp, Homo sapiens
atgtcaaacaatgctctgtccaaatatactttcttctataacatttttgcccccctctgggagggaactaagaccaggttttgtaggaaaaggtaagagctttatgcaagtttcacacatagtgctgatgtaccttcagaatagtgttgcatgagatgagggagctcctttgacacaggttagagcatggaaggcatcatccccatgatgggtgggtttggggcatcgtgaatctccctagtgatcagggagaagctccctttccctgttcaagattgtcaacaggggctggtggctcagtgaagctctatgctctgcccttaggtggtagaatggatcttccttggaaccagtctgrataggaggatacaggagaagacatagcccaaggcctcttttgtagctccctttgcttttgcctgagctattgctgccagcccttatatttagtcctgttccatattttgagtatcagggaccctttggtatagacacagaactacagatagtggcagtgtataaaatgcaagtgttagtgccttcatcattttgatcgcatgtctcctcgattgttggactcctataa

SEQ ID NO: 867446 - DNA, 588 bp, Homo sapiens
ttagatgtgtattcaagtcccacctactccagttgtagctctggtcctactctagggtcttctggcctgggtggcaattccctgccctctgaaggaactgcctcatgggcttgctgagggattagatgatgagtcacccrtgctttcctcaattgctagcagttgaacttggtatgtgcatctaaaggaaaaaaaaatgccctcccagcggactagtttttaagtggcttagaagttgtctggctgagtggacaattggagattcttgtgccaccatgtgaagcaatctaggctgttcagtgttccagagtatgttccataagtgggggaaggggctatataagctgaggccatagccagcatcagaatagaaaccccagccagaactggggcagccatcccagatggcattcaatactcagagtaggaagaccccaggtaaggggaggttctcaactgtccacctctctctgaggggaagactaaagctgggcagcctacaagggtgagtggagatgcttgccatgaagtgacagtcaacctcagccagggtctatgctgaacacatccagggaggtcttattcttc

SEQ ID NO: 867447 - DNA, 588 bp, Homo sapiens
ttagatgtgtattcaagtcccacctactccagttgtagctctggtcctactctagggtcttctggcctgggtggcaattccctgccctctgaaggaactgcctcatgggcttgctgagggattagatgatgagtcacccgtgctttcctcaattgctagcagttgaacttggtatgtgcatctaaaggaaaaaaaaatgccctcccagyggactagtttttaagtggcttagaagttgtctggctgagtggacaattggagattcttgtgccaccatgtgaagcaatctaggctgttcagtgttccagagtatgttccataagtgggggaaggggctatataagctgaggccatagccagcatcagaatagaaaccccagccagaactggggcagccatcccagatggcattcaatactcagagtaggaagaccccaggtaaggggaggttctcaactgtccacctctctctgaggggaagactaaagctgggcagcctacaagggtgagtggagatgcttgccatgaagtgacagtcaacctcagccagggtctatgctgaacacatccagggaggtcttattcttc

SEQ ID NO: 867448 - DNA, 588 bp, Homo sapiens
ttagatgtgtattcaagtcccacctactccagttgtagctctggtcctactctagggtcttctggcctgggtggcaattccctgccctctgaaggaactgcctcatgggcttgctgagggattagatgatgagtcacccgtgctttcctcaattgctagcagttgaacttggtatgtgcatctaaaggaaaaaaaaatgccctcccagcggactagtttttaagtggcttagaagttgtctggctgagtggacaattggagattcttgtgccaccatgtgaagsaatctaggctgttcagtgttccagagtatgttccataagtgggggaaggggctatataagctgaggccatagccagcatcagaatagaaaccccagccagaactggggcagccatcccagatggcattcaatactcagagtaggaagaccccaggtaaggggaggttctcaactgtccacctctctctgaggggaagactaaagctgggcagcctacaagggtgagtggagatgcttgccatgaagtgacagtcaacctcagccagggtctatgctgaacacatccagggaggtcttattcttc

SEQ ID NO: 867449 - DNA, 632 bp, Homo sapiens
tgctgtttttgtcatttatacttcctgggcatgtgctcatgacttttttgcagaggggatggggcaaggcggaacagtcagaaaaacctctctaggaagagtgaatagacgttctggagaaaagggttctactaaagaccttctgtgcttggcctccatttcaagcagatccttgggtggatggaggtgaaccttgggaaactcatcaggkcatggtcttgggctctgtacctgtgaaaggaaaggaagcaggaccgggcagagggaggagctgagatttgatgcagcctccacggaagccatggccaacactgtgagggagctgtgaagccaagttgacctttagagctgacctgagttgggataagaggtctgcggttttatactcaggctgacaagaactgtatggcagccacccagtaagggatgtggccttgggtgagattctcttcagctgagcttagcctaggaggggctaacagactcctggggcatccagtagctgagaacaagtcctttgtgcctgaaaggggaaatgggtgctgcctcttggcatccaccatggcaatacttcctacgcagcagtataaaataacaaaatcactcccaaacagtgaccaacctcatatgct

SEQ ID NO: 867450 - DNA, 613 bp, Homo sapiens
atacggagagctgtagggaacagttcccagaggcaaggagatcaatttgggaagttactgggatagtaatggcccagagataatgaagtcttggtcattactggtggcagagctagaaggcagtgggcagggaacaaagctcagataggctatggggagctgagggagaagagaatcaaggtgaactgtctggatcattttytcctccagtcctttttgtggtgggaagatgggagaattggaatgatctaaatatggcttcctaatgttcatgttatcttgactaatcttgataagactttatgacaactttatctcaagctcctgcagtttcaatagaaattggattttaggatgcacaatttgatttagccaaacagctttggacttccatcctacttcattgtccctgagtgtcatgactgtcattgtctgcattctaattctgtttctatttgaatcattcattaagtacctaaaaattatgcatatagtaaattcacaggataccatatgcaaataggaagcacccctcaccctggtcctaaataaacattgtggatttgttaagtaaatttgggagtttcagatcttttttttaatgcaatgaatt

SEQ ID NO: 867451 - DNA, 671 bp, Homo sapiens
agaaacaagacaaagatgcccactcttaactcttctattcaacatattcctgcaagttcctagccagaccaattaggaaaaaaaaagtcatgtaaataacatttgacccagccatccccttattgggtatatacccaaaggaatataaatcatgctgctgtaaagacacctgcacacatatgtttattgcggcactactcacaatagcaaagacttggaaccaacccaaatgtccaacaatgatagactggattaagaaaatgtggcacatatacaccatggaatactatgcagccataaaaaatgatgagttcatgtcctttgtagggacatggatgaagctggaaaccatcattctcagcaaactatcgcaaggacaaaaaaccaaacactgcatgttctcactcataggtgggaactgaacaatgagaacacttggacacaggaaggggaacatcacacactggggcctgttgtggggtggggggagggggragggatagcattaggagatatacccaatgtaaatgacaagttaatgggtgcagcacaccaacatggcacatatgtacacatgtaacaaacctgcatgttgtgtacatgtaccctagaacttagagtataattatatatatatatatatatataaagaaaagtaagaagtgaaattg

SEQ ID NO: 867452 - DNA, 415 bp, Homo sapiens
ccaaggttatgcccggccccacctcaggctgccttggaacagctgctccttccacccttcccaccctttcccctccagcctgggctaggctgcctgtgccaagctcctggccaccaactcgcgccctcgagaggcttccagtcactccccactytgccaggtcaccactcaaagccctgtagcctgttcctgaaaaatctccaccaaactcactctcccaaaccttcagagccctgtccaaagtcccaactctacacacatccctctttattaacagaatcaccgcagggaaccctcggatccctttgcattttgcagataacaaaactgcccggagagttcaagggtcttgtccaaggccacagagcgaatcagtaacaaatctggaaagaaaatccagatctccagatcccac

SEQ ID NO: 867453 - DNA, 563 bp, Homo sapiens
catggaatactatgcagccataaaaaaaagttgagtttacgtcctttgcagggacatggatgaagctggaaaccatcattctcagcaaactaacagaggaacagaaaaccaaacaccgcatgttctcactcataagtgggagttgaacaatgagaacacatggacacagggagcggaacatcacacaccggcacctgttggggggttgggggctaggggaaaggatagcattaggagaaatgcytaatgtagaagacaggttgatgggtgcagcaaaccaccatggcacatgtatacctatgtaacaaacttgcattttctgcacatatatcccagaacttaaagtattaaaaaaaaaattagcctttcctcatttaattgacttaatgcctccacttactttaaaaacaattacgcatgtttcctgatggatgacagctgtcagagttaattattgataaaatataattagactatattgtggatgtcagtctcatctcatatcatctgcattaggaaaaaatgtgaatgtgtgttctttagtttaaaacatcacgtggtag

SEQ ID NO: 867454 - DNA, 563 bp, Homo sapiens
catggaatactatgcagccataaaaaaaagttgagtttacgtcctttgcagggacatggatgaagctggaaaccatcattctcagcaaactaacagaggaacagaaaaccaaacaccgcatgttctcactcataagtgggagttgaacaatgagaacacatggacacagggagcggaacatcacacaccggcacctgttggggggttgggggctaggggaaaggatagcattaggagaaatgcctaatgtagaagacaggttgatgggtgcagcaaaccaccatggcacatgtatacctatgtaacaaacttgcattttctgcacatatatcccagaacttaaagtattaaaaaaaaaattagcctttcctcatttaattgacttaatgcctccacttactttaaaaacaattacgcatgtttcytgatggatgacagctgtcagagttaattattgataaaatataattagactatattgtggatgtcagtctcatctcatatcatctgcattaggaaaaaatgtgaatgtgtgttctttagtttaaaacatcacgtggtag

SEQ ID NO: 867455 - DNA, 600 bp, Homo sapiens
aagaaagaaaattgtatgcaaaaaaaaaaagaatttctatcatcttgagtaacttgctacagcatcatctagaaaattcaaaatcacattcaggtatttaatcactcccatgttcagcccattatttgagaccctgatccaaggctcttgctttgtccaggtcagttgtcactcacacaaattaattatgtatttgaagaatatttatgaatacgtataaatgatcacacatatatgtgaaaaaagcaagcaaaaagttgcatatgagttataatttcattttggatgaaaaagaaaaarcaccccagtagataaacatgtatttgcaaataaaaatattaggaggaaatgtgatatggtgttataataatttgagagttccttttcttctatatactattctatattttataattctataaatataaccatctataaattttataatcaaaaaaagtaaatatctaatataacttaaaatcaaagaaagatgactgtaaaaaatctgctttgtataatatatttctaattattgttttattgagtttaagaacatatgggtttaagaagtatggtaatgctattttcaaataaattttt

SEQ ID NO: 867456 - DNA, 610 bp, Homo sapiens
ttattatctttggtttctcctgaaaaagagagaaagaaattaagaatgtgcattttgttgcctaaatgaactgaaaaagtccccaacgtgtcaaaacaaataaatatctattaattagtctatggttgaactgtaagaatgttgacgaggctgtagtgtttctgggcctaaatctaattataaaggccaatatccccttgaatgtacatttacatctgcataaatgatctgtttaaaatgctattataaaattatttactaaaacctttctggaaattttgtatttgagaaagttatttcaaagtgtcattctctaaaagcttctgaactgattgcatargaacttcatttttgttctatcccgttctctgaacaaagttgttcttgtttagttgaacgaccatttggcagtaaaacttccgtagtttcagcttccacaggtgtttgttttatgagaggggccacaactgcagactgaaatagggcatattgagaacatatatgatattacacaatcttcctttgctgttcttcaacaccaggaaagtgtcagtctgccgctgagatcccaatggctttggaagaggaacaaacttttctgagttttgaa

SEQ ID NO: 867457 - DNA, 628 bp, Homo sapiens
ctttcactctgctcgctctgtttggacccatctccctggaatctgcttagttccctcaccctcttcaaaactttcaaggagcccaatccttaccacctcacttggttttgttaccaaccctctactccctaactcaatatttaccatccttaatatttaccatcctcaatatttacctcattctctgctctacttgttattttctttacccaggctattgcatagtcaacttattcattatgctctttgtcacctgtctcccctgctagaatgtagatccttaagggtatgtgtcctgtttgtatttttcaccgatttatcccaatgtagaaaaatatgtacagtagatattttataaatatttactgaatgaaraatgaataaataaacaagtttaatacccaaatacctatccaaggcataaattgggtcacttactagatgaatattgccttggcaacaaccaaagtttctaatttagtaagtttgggggtggactcactggcctgtatttttcacaagcaatctagatattgtcatagtcattaaagtttgagatcgctgctgaagatccctcaaggtcctgatttaccctgacaaggtcagtgcctcctaaacttcctgagtt

SEQ ID NO: 867458 - DNA, 615 bp, Homo sapiens
cacgtggcccaatgaaagaatcctgagttctagtgcatctcacttctgagctgcagtttcaccacctacagagtgagagagggagagaaaagtagaatagatgattgaaggatgattcaaaatttccttcagactccaaaagtttccaagtctatctcaggcataacttggtacatgacggaaattctggaaactgctctagctttgaaaatagaagaaggaccttgaaccacctgccaaaacatatcaattaaacatgcaaaacataatttctataatgcattacgacactggattgactatatggaaatcctgaggtaattaacatgagtggctgccacagcatctcatttttgccattacaactacattttggtgtcaaaagcacatgagtcttctgtatttacattcgttctgttagtgcattataattacagatgtaatcaaaaagagaggtttgatttttcacytaaatgacacctttaatcacttctgaatgaggcatgactccaattagagatatctcaaaaaattatgcctaatagtatcagttatcagaattccaaatagaagacttttatttcaatgccatttccctttattctattttcctag

SEQ ID NO: 867459 - DNA, 623 bp, Homo sapiens
catcaattatcttcagtcttttaaaagcactctctggcttggtgtgctggctcacgcctgtaattccagcatttgggaggccaaggcaggcagatcgcttgacactaggcattcaagatcagcctaggcaacatggtgaaaccctgtctctacaaaaaatagaaaaattagctgggcatggtgatgcagacttttagttccattttcttgggaggctgaggtgggagaattgcttgagttcaggaggtggaggttgcagtgagcctagatagtatgactttcagcctgagcaacagcgtgagactctgtctcaaaaaaaaaagcactcgcccggtggattaaaaawataaaaagaatctcatgccttctttataatatttagtttaggtttttgtttctttgttttcaatgtctgtagaatctgtgtgaggaccctcttttcattgtgtgtgtgtgtgtgtgtgtgtgtgtgtgtgtgtgtgtatgtgagaatgggtctcacctaaaggcttaccaacttcatagtctttgcaaggaaacaacttttgactttgttgattcttctgttgcatggtatgttttccatttaatttcttctcatatctttagactgttcttctttt

SEQ ID NO: 867460 - DNA, 668 bp, Homo sapiens
ggctttctgtgagtcaagcagctttatggcaaatagtaactagcctaattccaagatattttcttcctgaaagccagccccatttctcccaaatgactggctttccaccccatgccctgggttccagagctcatgaaaattgtggatgatgattaatatataactcagagagcctcataacctcatggggcattagagccagctccaatacctgagcccttgggataactgatttactattgactcattccaatgctagccttctctctgagaatatattactaygggtgcccaaggtcaaggcaacacaagtcatttcccactcagggtagtgaggtcaagtttcatttatttcctgccacatgttaagttggaagatgacactagcatggcatcgtaagttcattgtagagctctaatcaccataaaaagcatcaagttttcactgaaaattttttcctttttttcctaccaggacgtctgtcattttcatattgatttatcagcccttagtgtaaggatatcatccattgtttgtcttacgtttgcaaataccaattcttttctcagtcttctgccttatgtttttacttattatgtttttcatgtgtacaagtaaagttttgtgtggccaaatctctcaagctttgtagtttctgaaacttccc

SEQ ID NO: 867461 - DNA, 668 bp, Homo sapiens
ggctttctgtgagtcaagcagctttatggcaaatagtaactagcctaattccaagatattttcttcctgaaagccagccccatttctcccaaatgactggctttccaccccatgccctgggttccagagctcatgaaaattgtggatgatgattaatatataactcagagagcctcataacctcatggggcattagagccagctccaatacctgagcccttgggataactgatttactattgactcattccaatgctagccttctctctgagaatatattactatgggtgcccaaggtcaaggcaacacaagtcatttcccactcagggtagtgaggtcaagtttcatttatttcctgccacatgttaagttggaagatgacactagcatggcatcktaagttcattgtagagctctaatcaccataaaaagcatcaagttttcactgaaaattttttcctttttttcctaccaggacgtctgtcattttcatattgatttatcagcccttagtgtaaggatatcatccattgtttgtcttacgtttgcaaataccaattcttttctcagtcttctgccttatgtttttacttattatgtttttcatgtgtacaagtaaagttttgtgtggccaaatctctcaagctttgtagtttctgaaacttccc

SEQ ID NO: 867462 - DNA, 611 bp, Homo sapiens
caagctgcctaaagataaataaatgctaaattgcaatgcatgaagtctaaatacaattggttattttaaagagaaatgtagattcctggatttatctcagaaaatattaagaaaagaattgaaaatgcagtcaaaaagctgcctttcgaacagttacaaggctgcgactatttacaggggaaatgtaataaacctttaagaaccagataatttctattgctatgttatttaagctgccccacaccattaattttttaaaatactagtttaaaagaaaggcttttccagatctttttacaaagcaaggacagctgtgattctgaactataatgaagatagcccccccaaaaagtacgtaaaagaaagaaaatgcaagcaaagctcacttttttattaygtaattttaaatgacacataataattgcacatatttataagatgcagagcatgttttgatataaatacacaatgtgtaatgatcaaatccatgtaatttgtatacctatacatcaaatattttcatttttttatgttgggaacattcaaaaaagctctcttgaagctatttgaaaatatataataaatttttattaactatagtcactttacag

SEQ ID NO: 867463 - DNA, 649 bp, Homo sapiens
tcaattgcctcataacgttgtgaaccttgctgtaatatcttttgtctttggatggtatattggtcctaataggctcagactttacattcatgtgttcattgactggatttaattttatattagttttttgacttttccccaggaaggacttgcaagatttgtacttcctgagctctttcatgttaaaaaattttacctttgtacttgaaagacagtttggtaggatataatgttatttagtcatattttgtttctcttagaactttgcacatatatccctttattctcttttgataatggatattgctgaggagaattattaggccagatttatttttgccttacatagaaaaagatagaaaatatatgtattgtataatacatattacattctctatatatgtatatacacatatacagtaacactcgggttttgatacctgtacctcaagttttattttactatggtgtgcyttttcagtatgcagatttggttcttgctccatttctgggataatttctattttttacctgtttttatggttgaatatcttttcagggataccagatatgtataatttagatcatctttgtcctccatattgattatctataattgttttgattttgttctttagtctttcattgt

SEQ ID NO: 867464 - DNA, 584 bp, Homo sapiens
aatcaattcttcctcaaccccaggatttttcttcaagacccaattgtacttaaggacaaactatcacatcagaagcacagtgtttctattcagtattgtcctagatctgttgtgtgttgtataaacagacttaacttctctttgctttttttcaaatagaattggctsaggttgggcaggaatatttgcatacaatttcaagtgtgtaagagatagtttttggatgaaagatatttaaggaagtcatgtggcatttagtgagcatttactatgtgctgggcaatgcgctacaacattttctactcattgtctcattaaatttttaaaataattttaagagggagatcaaatgatccccgcttaatagactgggaagctgaggctgagggttgaagtccctagcccaagatctcccagcaggagagtgatggtactgagattggtctccacgtgtgattatatggagctggcagacatagcactataaggcactgctgccttcacccgggaagctttccctgatctcctatctgcgctctcagtgccatgtggctcccccgttccaggatgtatgacactatgtt

SEQ ID NO: 867465 - DNA, 584 bp, Homo sapiens
aatcaattcttcctcaaccccaggatttttcttcaagacccaattgtacttaaggacaaactatcacatcagaagcacagtgtttctattcagtattgtcctagatctgttgtgtgttgtataaacagacttaacttctctttgctttttttcaaatagaattggctgaggtygggcaggaatatttgcatacaatttcaagtgtgtaagagatagtttttggatgaaagatatttaaggaagtcatgtggcatttagtgagcatttactatgtgctgggcaatgcgctacaacattttctactcattgtctcattaaatttttaaaataattttaagagggagatcaaatgatccccgcttaatagactgggaagctgaggctgagggttgaagtccctagcccaagatctcccagcaggagagtgatggtactgagattggtctccacgtgtgattatatggagctggcagacatagcactataaggcactgctgccttcacccgggaagctttccctgatctcctatctgcgctctcagtgccatgtggctcccccgttccaggatgtatgacactatgtt

SEQ ID NO: 867466 - DNA, 636 bp, Homo sapiens
cttctagttgaagaacatgtaccaaagttaaataatgttataagcctatgggagagacatcactaggtagacatcaatgtatacagtaaatgtttattaactgcctactctatactgtgagctaggcgttggtttatcatcagctgaagttcactggtcagggtgcacaagggttctggaaaaaggaaaaatctcagtagggtgcwaagttttattattctaatagcaacaaatatttatttatcccctgcatggtattaaatgtattatgtagatacaaatattatcttgtggaggagggacaatcaccatctcactttacaggtgggcccaggagtccaagaacttcccctaaggctgctagtcggtgagtggcagagctgagatcaaaccccatatctatctgactccaaggtagcaatccctaaaggcttggctcttctgatgggaactgagctggaatttgaagaagaacaagcagatccaagaaggaaagattctcatgggttgaatagcctcagagctttgaactttgctaaatatttcaaggttcccctccattcttaagataaaagaaaactggtaccaacataaccttctaaatggcccttccagatgggccagctgttcaaagca

SEQ ID NO: 867467 - DNA, 653 bp, Homo sapiens
actgttaggtagctggtctttagactatatcctggtgaactgaggtttcagagaggtgctggtgattgctaggggattggaggagattataggattacactaattataaccagctttgctagctgctttctgagggttcttgcatctcttgtatagtacaacacgagactaggaatccaagaggcaattctgctttcttatcrtagcattgttatgatggtggcttgtataatctcattttaaagatgaaccacatcagactcaaagggctcaagcagtaggcccaaagaccagtagctggtgccaagccttgatatgtattctggaaaaacactcctattccagtgctcatttcaccccattgctttaccttttgtaactcctggacactgcattttataaaatggagctgacacaggctgggtgaattcagtcttcctgataagccacccatcttaaaataacaccatctcactgtgctcacatctcagatacatttgtcacaaaaggagggcagatagacatccagccttcatttgacctttaaatcacctcctttttatcagctgtggctgatcagctgctctttttgagagcaggtgggtcgacataagattgattggttttctctgcaggggagtaacttggccctt

SEQ ID NO: 867468 - DNA, 653 bp, Homo sapiens
actgttaggtagctggtctttagactatatcctggtgaactgaggtttcagagaggtgctggtgattgctaggggattggaggagattataggattacactaattataaccagctttgctagctgctttctgagggttcttgcatctcttgtatagtacaacacgagactaggaatccaagaggcaattctgctttcttatcatagyattgttatgatggtggcttgtataatctcattttaaagatgaaccacatcagactcaaagggctcaagcagtaggcccaaagaccagtagctggtgccaagccttgatatgtattctggaaaaacactcctattccagtgctcatttcaccccattgctttaccttttgtaactcctggacactgcattttataaaatggagctgacacaggctgggtgaattcagtcttcctgataagccacccatcttaaaataacaccatctcactgtgctcacatctcagatacatttgtcacaaaaggagggcagatagacatccagccttcatttgacctttaaatcacctcctttttatcagctgtggctgatcagctgctctttttgagagcaggtgggtcgacataagattgattggttttctctgcaggggagtaacttggccctt

SEQ ID NO: 867469 - DNA, 606 bp, Homo sapiens
ctgtgggtgtatttccctgctaaaatttttcctttggaatgtctagggataaggggtgcaaagaggggtgtatggactcacaggttcttagcctgttaggggtggggacacacacagaaccgatgcagtttgaagcttgactccttccaggtgctttcctatccaatgttgttgtagcctgtgtttgcatacttactgtgatggggccctccactacctaaaggaagcacttatactttggcctctgttgagtgatggtctttttactgagttgaaatctctttcctctgctttttactcattgtttctggccctgccctctgcagccgctcagaagaattttgtttccttctcacttgttaagtcagccctgcatcttttctcttagttaagcattctcttcaccctcagccatttatctctyttttttttttttttttttgagatggagtcttgctctgttacccaggctggagtgcagtggcgcgatctcggctcactgcaagctccgcctcctgggttcacgccattctcctgcctcagcctcctgagtagctgggactactggcgcccgccaccacgcccggctaattttttttgtatttt

SEQ ID NO: 867470 - DNA, 578 bp, Homo sapiens
gcatgtgcaaaggcccagaaataagagggggcacagcacattgagggaattgagagaagagcagcaggggctgggacatagggagcttgcagagaagagactggggtaggaaagaggcaggaccctcatggtacaggattctttaagccacttttaatagtttsaacttgatcttggggaaatggggagctaataaagggttttaagctcagaagtgagacaatcagacttgagtatttgtgaggtccctagtgtggagagcatattcctgggataagtctgaaggtggggaaactgaaagggggctgttgtagctgctgaggtaaaagataatggtattctgataatcctagtgagctaagtagtatgggtgctcctggggattgggtttacgagtgctaaagcccaccttgaccctgaccatcactcaggcagcccttgtgccaggcctgtgctaattaataatttcatttaatgcttgtataatcttgccaagtatgttttgcctccacctgccaaaaagagacaaggatctacctgttgtctttctctggggggcccggtgacaaccaaaataa

SEQ ID NO: 867471 - DNA, 578 bp, Homo sapiens
gcatgtgcaaaggcccagaaataagagggggcacagcacattgagggaattgagagaagagcagcaggggctgggacatagggagcttgcagagaagagactggggtaggaaagaggcaggaccctcatggtacaggattctttaagccacttttaatagtttgaacttgatcttggggaaatggggagctaataaagggttttaagctcagaagtgagacaatcagacttgagtatttgtgaggtccctagtgtggagagcatattcctgggataagtctgaaggtggggaaactgaaagggggctgytgtagctgctgaggtaaaagataatggtattctgataatcctagtgagctaagtagtatgggtgctcctggggattgggtttacgagtgctaaagcccaccttgaccctgaccatcactcaggcagcccttgtgccaggcctgtgctaattaataatttcatttaatgcttgtataatcttgccaagtatgttttgcctccacctgccaaaaagagacaaggatctacctgttgtctttctctggggggcccggtgacaaccaaaataa

SEQ ID NO: 867472 - DNA, 589 bp, Homo sapiens
tagtgataacattaattattgcttccatttattgagcacttactatgagctaagaactatgctgaacccttcgcaggccttattccatttaatcttcatagcaattctctaagaaagggactatgattcctctcttgtagatgagaatatgaaggttcagagaagtacacttgcttgctaaatacacagtttgtatgtggaagagctggattttgaatccaggctgtctccacactccctgctagtaatggctcggcctcctcaaatcagtctgggttccttctattagcaccctttcccccagaacagtgactgtcagcctgggctacccagtggctctcagcatgcgctacccattggaattacctrttacctccaatgggtaatagggaagctttaagaacttgcatgctggggtcccaccctgaggcacagatatgattggtctggggtgtggcctgagccatgggactttagaaaactctgtaggtggttccaatgtgcagccagggttgagactctgagttgcaaagttttagtatcgtattcgcctcctgtatttgtcacaggttggctaggtgtttgctta

SEQ ID NO: 867473 - DNA, 401 bp, Homo sapiens
atgaggcagaggtcagggatcaggcaagagctggggatgtcaggaatgggtgagctccatgactgagttattagagcatttttcaatcaccatagagaccttgaggtattttggactgaagggttgggagagagggatatggatcctttatgttaggtggctgaaaataaaataaatgtctaagaactaaatttggaattaagaaaacggggtttgccttcttgctgctgcataakttactctgtgacctgtgtgaatggtgtcacgtccctgggccatctgtgaccagggggtgctagctgctcagcctcctttgtagggttgaggcagggatcacacaaattgcatcacaaatagagatttgccttaacatcacgaacatggcaaaacccataccttgc

SEQ ID NO: 867474 - DNA, 552 bp, Homo sapiens
gttttcacctaatacatattttttcaattctttctttttttttttttttttttttttttagttttcatacgggcatgcaatgtgtaataatcagatcatgtaaagtgagatagtcatccccttaagtatttatcctttgtgttacaaacaatccaattatactcttttagttatttttcaaagtacaattaaattactactgactatagtcaccttgttgtgctatcaaaaactaggtcttattcattgtttctacaattttttgtacccattaaccatccccacctccaaccccttactactctttccagcctctggtaaccatccttctgccctctgtcttcatgagttcaattgctttgatttttagatcccacaaataagtaagaacatgcaatgtttgtytttctgtgcctggcttatttcacgtagcataatgacttccagttccatccatgttgttgcaaattacaggatctcattcttttttatggctgaatagtattccattgtgtataagtaccatattttctgtgtccattcatctgttgt

SEQ ID NO: 867475 - DNA, 690 bp, Homo sapiens
ataagtcacttgctcatgatcccaggagatctgaatctgtgagcacagctggtcaattaagagggcactcagaccacatccttcactgcccatcaaaccctaggacattaccgcagagcccagaaacaagggagccactctctgtgcaggtgcccaggatcttaaagggcacagagggagcttggcttccctgctgtcctgcattctacccccctgccctctgctacctgtaggcagagaagggtggcgaccagcaggggctgtggagggaagtgctcatggcagggcttagataccacattccccacccttggcacccatgccctcaagtcacagctggaccacctttctgggctcctacttcctcatctgcccaatgaggatggtagcagtcyccctctttgtgaggctaggatggggaccgaaagagctgatgtgctcaagacctggcacacagatgcactcaatgggccatggctgttccagctgtaatgattacttactcatggaatgcactatttaattgttgtccactggatggactctgagccccttgaaagggttcacagtgtatcctcagcacctaacactcagcatggcttaataaattatgtggaaggaaagaacagggaaaggggaaaggtagacatagctgtctctccagctaacttgcgctgggctggcacacag

SEQ ID NO: 867476 - DNA, 537 bp, Homo sapiens
tataattctaagaatattgtctcaagttttgttgctgaaatggcaaaaatgtttcttttttattactatcaatattccaatttaaaatttaaataaggagaactctttttatttatgagccaggtaaaatttttctggtacgctgaataaaacaaggtactatccatcaaataaagggttatatccttggggcatcatgattaggataagataactaatttttatggcagtcccctatgtgaaatgtaaatagcaatacaccagaacttcagatatgttgaatcccagaaaaatatcctggatggctgggtttctttgaacaaaaaatctatactttttttttttttttttttttaaragacaggatcttgctctgtcacccaggctggagtgcagtggcatgatcgtagctcactgcaacctcaaactcctggtctcaagtgattcttccttctcccatttcagcctcctgagtagttaggactacaggcatgtgccaccatgcctggctattttttatttatttattttttatta

SEQ ID NO: 867477 - DNA, 594 bp, Homo sapiens
gtttgaatttatttcttcttttcataagtttattggcccatgatatttcttttatgagttgcctgttcatgtacattttttcccgattgggctatttgcctttaataacccagtaactcaaaacaaggtttgccttgtgaattgttttattgtttgcctttaaacaatacttatttatacatatatgctaatatggtatatattaatatcttaggtatattgatatatagtgataaagtgtaggccttactaagttatttgattcttagttttactgaaaatatcataaattatcttgatataaacaactttctgttatctggaggaaaaagaataggggaaagagaaaaaagaaatwgctccatgaaaatctaaaaaataaaatttggaagagtgttgctgtttctgtgcattgtctatactttctccttattgtctctatttattttgcttatgttgtattttgccttgcagaactttctaattatctgaacatatgttttcataatttcttctagttcttatgtcatgcttataaatatctcctccattctaagcttataatatttaccatagtttcatttagttttttgt

SEQ ID NO: 867478 - DNA, 639 bp, Homo sapiens
attatagggaacaattatagagcccctgcttgcatgcgaagctccctatttcatctatattatctctgacacccacaccaccaccacaaactggctactatagaaggagatgccgaggctcagagtggatgatacgagctgctcaaggaacatagtttataaatgatgatgccaaggtctaagattcaccctgcttgattgtaaaagagcaggctcttgctactgcaccaaacttcatgtctgcctcgctttagttagtcccttcattctacccagagaagagcagggagagccagagaagttaaatgtacctagaatcaaacagtgggtccttgacacagcatgattataacctagctcagagctttttccagcctcagatttacgccagcttcataagccctaaggcagggctgacaacctgccttcmccaaagtgcctacactgatgggtttggaagggacacctaaagctctgttaagaaagattctgaggctgtatcctggctcagtatgaaagtgtcaggactgagaagagatgcctcagcgtctgacacagcatccctaatgccacatactcatcacccctattctaggggctgccctgattgtaaacagcacagaactgtttttatcctta

SEQ ID NO: 867479 - DNA, 600 bp, Homo sapiens
gcaagtcccctgcccctgaaacatatctcaaatgtcctcacctcatacccctttcatttatcctacactgcccgacaccccaggttccctgagatttgaaagcactttccttttctatttctaccacaactgtaaaactagaaggcttcaaggagaccaagagagagaacaaaagagccagagttactgtctgcccccaaatcatttgaggagaaattcagacagtagcttggaaagatgaaaaggatccactggcttytggtgagacagaacaaaagaaatcaatttccaaggatagttacagtctcttctgagagcccccacattcttgatatctgctcacccttgatatctgactgagttcctcatcctcttccatcccccagagaatgcctcatcaccctggcctgccttcatcaagaatcttgttaggttggtttagccagaatcccatttacctctgatgtgtcatcttagtaattttccatccaccaacctctacattactctttgtctatacaatcccacttgcccatgttgtattcagagttgagcccaatcccactccccagctgcagtacccctatcatggtggtccta

SEQ ID NO: 867480 - DNA, 600 bp, Homo sapiens
gcaagtcccctgcccctgaaacatatctcaaatgtcctcacctcatacccctttcatttatcctacactgcccgacaccccaggttccctgagatttgaaagcactttccttttctatttctaccacaactgtaaaactagaaggcttcaaggagaccaagagagagaacaaaagagccagagttactgtctgcccccaaatcatttgaggagaaattcagacagtagcttggaaagatgaaaaggatccactggcttttggtgagacagaayaaaagaaatcaatttccaaggatagttacagtctcttctgagagcccccacattcttgatatctgctcacccttgatatctgactgagttcctcatcctcttccatcccccagagaatgcctcatcaccctggcctgccttcatcaagaatcttgttaggttggtttagccagaatcccatttacctctgatgtgtcatcttagtaattttccatccaccaacctctacattactctttgtctatacaatcccacttgcccatgttgtattcagagttgagcccaatcccactccccagctgcagtacccctatcatggtggtccta

SEQ ID NO: 867481 - DNA, 576 bp, Homo sapiens
tataatgtgcaacacaattctaatacttctgagctcatgttgtatgccctcaactatgtgtggatggaatttaataacatccccatttgaccaatgtgaaaactgaggaagttagactcattcaaggacctatgctttgtaggattataagcacattcctctttcttctttatggtattccctcttgttgtgtgagcaatgcttttaagtctgtcagttgaactattgtgaaggttgccatatttggaaatatttagatttcctgcaaatatggcttgtcctcaccaaaactcatgttgatgtttaattgcctgtgtggcaggtttaggaggtgacacytagtgggaggtgtttgggtcatggggacagatccctcacaaatggattggtgccatctggtgggaatgagtgagttcttcctctcacaggggtgaattagttttcacaaccacaatgacttataaagtgaggttgcttcttgtgtttggccctgtatacacacctactcacctttctacttctccatgtcttgacacagcacatgacccttaccagaagccaagcagatgctagtgc

SEQ ID NO: 867482 - DNA, 671 bp, Homo sapiens
aagtattcagttatagtaacagaaagtactttaagatgtttcccttttaatcttttggaaaataacatgtacttcatctcattctgaaacttagagacagttctttacagaattagaaaaagctattttaaaattcatatggaatcagaaaagagcccatatagccaagacaatcctaagcaaaaagaacaaagctggatgcatcatgctacccaacttcaaactatactacaaggctacagtaaccaaaacagcrtgatactggtacaaaaacagacacaaagaccaatagaacagaatatggaactcagaaataagaacgcacatttacaatcatctgatctttgacaaacctgtcaaaaccaagcaatggggaaaggattccctattcaataaatggtgctgagagaactggttagccatatgcagaagattgaaactggaccgttttcttacaccatatacctcaagatatattaaatacttagatgtaaaacccaaaactataatcctagaagaaaatctagcaaataccatataggacataggtacaggcaaagatttcatgacaaatgccaaaagcaattgcaataaaagcgaagattggcaaaggtgatctaattaaactaaagaatgtcagcacagcaaaagtatcatttgtaccatcagag

SEQ ID NO: 867483 - DNA, 671 bp, Homo sapiens
aagtattcagttatagtaacagaaagtactttaagatgtttcccttttaatcttttggaaaataacatgtacttcatctcattctgaaacttagagacagttctttacagaattagaaaaagctattttaaaattcatatggaatcagaaaagagcccatatagccaagacaatcctaagcaaaaagaacaaagctggatgcatcatgctacccaacttcaaactatactacaaggctacagtaaccaaaacagcatgatactggtacaaaaacagacacaaagaccaatagaacagaatatggaactcagaaataagaaygcacatttacaatcatctgatctttgacaaacctgtcaaaaccaagcaatggggaaaggattccctattcaataaatggtgctgagagaactggttagccatatgcagaagattgaaactggaccgttttcttacaccatatacctcaagatatattaaatacttagatgtaaaacccaaaactataatcctagaagaaaatctagcaaataccatataggacataggtacaggcaaagatttcatgacaaatgccaaaagcaattgcaataaaagcgaagattggcaaaggtgatctaattaaactaaagaatgtcagcacagcaaaagtatcatttgtaccatcagag

SEQ ID NO: 867484 - DNA, 671 bp, Homo sapiens
aagtattcagttatagtaacagaaagtactttaagatgtttcccttttaatcttttggaaaataacatgtacttcatctcattctgaaacttagagacagttctttacagaattagaaaaagctattttaaaattcatatggaatcagaaaagagcccatatagccaagacaatcctaagcaaaaagaacaaagctggatgcatcatgctacccaacttcaaactatactacaaggctacagtaaccaaaacagcatgatactggtacaaaaacagacacaaagaccaatagaacagaatatggaactcagaaataagaacgcacatttacaatcatctgatctttgacaaacctgtcaaaaccaagcaatggggaaaggattccctattcaataaatggtgcygagagaactggttagccatatgcagaagattgaaactggaccgttttcttacaccatatacctcaagatatattaaatacttagatgtaaaacccaaaactataatcctagaagaaaatctagcaaataccatataggacataggtacaggcaaagatttcatgacaaatgccaaaagcaattgcaataaaagcgaagattggcaaaggtgatctaattaaactaaagaatgtcagcacagcaaaagtatcatttgtaccatcagag

SEQ ID NO: 867485 - DNA, 631 bp, Homo sapiens
ttaattgagttggagagttctgtagatgtctattaggtctgcttagaacagagtggagttcaagtcctgaatatccttgttaattttctgtctcattgatcgctccaatgttgacagtgaagtgttaactcctattattgtgtgggagtctaagtctctttgtaggtctctaagaacttgctttatgaatctgagtgctcctgtattgagtgcatatatatttaggatagttagctcttcttgttgcattgatccttttaccattatgtaatgcccttctttgtctcttttgatctttgttggtttgaagtcttttttttttatttttgaggcagagtgtcgctctgttgcccaggctggagtgcagtggcacgatctaggctcactgcaagctmtgcctcctgggttcatgccattctcctgcctcagcttcctgagtagctgggactacaggtacctgccaccacgcccagttaatttttttgtgtgtatttttagtagagacggggtttcaccatgttagccaggatggtcttaatctcctgacctcatgatctgcctgcctcagcctcccaaagtgctgggattacaggcgtgagccaccacacccagcctaaagtctgttttatca

SEQ ID NO: 867486 - DNA, 574 bp, Homo sapiens
acagtgtaaaagtattcctatttctccacattctctccagcaactgttgtttcctgactttttaatgattgccattctaactggtgtgagatggtatctcattgtggttttgatttgtatttctctgatggccagtgatgatgagcattttttcatgtgtcttttggctgcataaatatcttcttttgagaagtgtctgttcatatcctttgcccactttttgatggggttgtttgtttttttcttgtaaatttgtttgagttcattgtagattctggattttagaataggaaagaaagkaaagtgtgcttggaagagacccaagcaggtgacttgaaggacaggcgtgatgtttaatcatgatcctaggactttataagctggcccctttcccatgtttcttcccttaggctggactgcctgcatgcacagtgtcctccttacccttggcaggtgagcatgcacagtgtgtttaggaagttgtgcacatgtctatctgaggctttcttcctttttccggtcatatgcctctggaaggtcatactccgccattttgtctcttaatgcacatgcc

SEQ ID NO: 867487 - DNA, 639 bp, Homo sapiens
gtttaccctgtgctctgacttcagaggcacgagaatcacctgcagatactggctcctccctagattttgattcggtaggtgcgtagtggggtcccaggatgtgtatttttaacaaggtgtgctgatgcaggtggcccatatatgcatgataatccttgttggacttatagtgccccattcaaaaggcatgccttttttgtgtgtttttaaattttagtgacttggccagagggggtcacagagaatagctggtctgtgagaacccatgcctctcctctstacttgaagggacaatggctgtaacacaacgctgttcatgtgacagccggagtaaaggacccattgttcaggggttggctgatgtgccattctgctgcggccagccgtccaactgagcttggtagccccaaggaaacagacacacttaaatcagagagacaaagaaaggaggtcaaggccttccacagttaaactacttgcagcaatgtgtcagaggtaggatctgggaaggaaaaaagtaattccaaggaagcatcattaatcctctggttttggagctgcagacatggcgttgggggaacacaagtctgtcaaaaagccagtggatctttggccaaggaagaattatcttctactgcg

SEQ ID NO: 867488 - DNA, 543 bp, Homo sapiens
ttttgttgtttgtttgtttgttttgtttttgagacagagtttcactcttgtcgcccaggctggagtgcaatggcacgatcttggctcactgcaacctctgcctcccgggttcaagtgattctcctgtctcagcctcccaagtagctgggattkcagactcccaccaccatgcccggggtttcactatgttgaccaggctggtttcgaactcctgacctcaggtcatctccctgccttggcctcccaaagtgctgggattacaggcatgaaccaccacttccagccaatgaagaggcttaatcagctcacagttctgcaggctgtacaagaagcataatggcttctgggaaggcctcaggacactttcaatcatggcagaagccaaaagggaagcaggctggtcttacatagctggagtggaaggaagagagaaaagggggaggtgccacacacttttcaacaaccaggtctcataagaactacagcatccatgatccaataacctcccaccaggccccacctccaaccctggggattacaatt

SEQ ID NO: 867489 - DNA, 543 bp, Homo sapiens
ttttgttgtttgtttgtttgttttgtttttgagacagagtttcactcttgtcgcccaggctggagtgcaatggcacgatcttggctcactgcaacctctgcctcccgggttcaagtgattctcctgtctcagcctcccaagtagctgggatttcagrctcccaccaccatgcccggggtttcactatgttgaccaggctggtttcgaactcctgacctcaggtcatctccctgccttggcctcccaaagtgctgggattacaggcatgaaccaccacttccagccaatgaagaggcttaatcagctcacagttctgcaggctgtacaagaagcataatggcttctgggaaggcctcaggacactttcaatcatggcagaagccaaaagggaagcaggctggtcttacatagctggagtggaaggaagagagaaaagggggaggtgccacacacttttcaacaaccaggtctcataagaactacagcatccatgatccaataacctcccaccaggccccacctccaaccctggggattacaatt

SEQ ID NO: 867490 - DNA, 658 bp, Homo sapiens
tgcaagagcagtcatggaggaaccatatattgaaacattatacaacttatgtggttgggtggttggcttatgcctgtaattctagcactctgggaggctgaggcaggtggatcacatgaggccaggagttcgagaccagcctggccaacgtggcaaaacgtcatctctactaaaaatacaaaaattagccaggtgtggtggtacatacctgtaatcccagctactcaggaggctgaggtatgagaatcacttgaacccgggaggtggaggttgcagtgagctgagctgagactgtgccactgaattccagtgtaggtgacagagcaagactctgtttcaaaaaagagagagagagagagagacagagaacttaggaacttaggaaataatgaaaaaaccctaagaagcttttgaggaggatrgagtctgtttaatactggtgtgttaaggcttagtggtggctgcagcctgggaaggagggtaagccatcatgtttgtggtatgatatatttaaaataaatctcctattcccacctttggacagtgatttcctgccttctcactggaagtaagtggcaacagttcagattgcgggtatagttttcatcacaggtaacagtcaaggcaatttaaaaaatctgcttgggtcaaaaattta

SEQ ID NO: 867491 - DNA, 649 bp, Homo sapiens
cagctactcaagaggctgaggcaggagaatggcatgaacctgggagcggaggttgcagtgagccgagatcgcgccactgcactccagcgtgcgggacagagcaagactccgtctcaaaaaaaaagaaaaaaaaaaaaaaagaatagmaattagccaaagcaaatgaacttattttgaaatatgtatatatatttcaaatgtaatatatattatattatatatgtatatataaaatagattatctatgtatatataaagtatacttatatatgtatatataaaacagaaaaattagaggaaggctgtccaaaaaaggaaaaggtacaataacttaaaacacagaataaaaaagaagtaactataaagactataaaaaataaataagatgagtgaaaagctaagtgcttagataaatttatatgaaaatagaaatgacaaattggtacaaatgtcataaaatttttgaatagataataattattaaaataatggaaatggtaatcacagacctgacacccccccaaaaaagaactagtctggatggttttatagtttatcaaacttccaataaactgttaatagtaatagaaaaaaataaagttgaacacttatatataatagatacatatggaaacatttatctttaaaa

SEQ ID NO: 867492 - DNA, 582 bp, Homo sapiens
cgatgcattaaataacctgttagtgagagtcagctaaggagtggtcagaccatgattcaaatattggctatctggctccagagactggatattttaaatatcatggtcaaggaagtccataatgagaagctgacatttgaacaaagacttaaactacttgaaaagtgaggcatgtaggtatctgaggatactgcattccaggcagctgaatagcaagtacaagtaccctgaggcaggagcatccctacgtgagagaaaatggagtaaggaasgagtcccaggatttttctgactacctggaagagtatagttgctattattgaaaatggggaagatttgggtgctacaggtctgttgggacagccagaagttcatttttaaagaggttaagtttgagaaatctattagatattcaagaaatgtcaagtaggcagtccaatacagtctgggtttagaggacagaaagaatatgggcttggcattaaataaagtaaatgaggatggacaagcagtccaggaactgactgctcaacatttatagccagaagataaggagttagtagcatagaaactgagatggag

SEQ ID NO: 867493 - DNA, 570 bp, Homo sapiens
tgctgtttttattactggagccttgtagtatagtttgaactcaggtagtgtgatgcctacagctttgttctttttgcttaggattgccttggctatatgggctctttttttgttccatacaaaatttaaagtagttatttctaattctgtgaagaaagtcaatggtagcttgatggggatggcattgaatctataaattactttggacagtatggccattttcacgacattgcttcttcctatccatgrgcatggaatgtttttccatttgtttgtgtcctctcttatttctttgagcagtggtttgtagttctccttgaagaggtccttcacatcccttgtaagttgtattcgtaggtattttattatcttcataggaattgtgaacgggagttcactcatgatttggcactctgtttgttactggtgtataggaatgcttgcgatttttacactttaattatgtatcctgagactttgctgaagttgtttatcagcttaaggagattttgggctgagacaatggggttttctaaataaatcatgacatctgcaaacagagacaatttg

SEQ ID NO: 867494 - DNA, 570 bp, Homo sapiens
tgctgtttttattactggagccttgtagtatagtttgaactcaggtagtgtgatgcctacagctttgttctttttgcttaggattgccttggctatatgggctctttttttgttccatacaaaatttaaagtagttatttctaattctgtgaagaaagtcaatggtagcttgatggggatggcattgaatctataaattactttggacagtatggccattttcacgacattgcttcttcctatccatgagcatggaatgtttttccatttgtttgtgtcctctcttatttctttgagcagtggtttgtagttctccttgaagaggtccttcacatcccttgtaagttgtattcgtaggtattttattatsttcataggaattgtgaacgggagttcactcatgatttggcactctgtttgttactggtgtataggaatgcttgcgatttttacactttaattatgtatcctgagactttgctgaagttgtttatcagcttaaggagattttgggctgagacaatggggttttctaaataaatcatgacatctgcaaacagagacaatttg

SEQ ID NO: 867495 - DNA, 582 bp, Homo sapiens
aaggaaaaaaatagaattcaacccaaagtcaccaagacagaaaaatctatatatttttttttctttttctttttcttttcttttctttctttctttctttctttttttttttttttgagatggagtctcgctctgttgcccaggctggagtgcagtggcatgatctcggctcactgcaacttccgcctcctgggttcaagmgattcttctgcctcagtctctgaagtagctgggattacaggcacgtgccaccatgcctggctaatttttgtatttttagtagagacggggtttcaccatgttggtcaagctggtctcaaactcctgacctcacgatctgtccacctcagcctccaaagtgctgggattacaggcatgagacaccacacctgaccaaaatctatatatttgtgaaactcttaagcatttgaattaggaatggcttggacttggatattaaagaagccacacacacacacaattggctttggaagttcatgttctcagcattgttgtccagatgactcagctaatttacagtcagttcttcctttttttattaggctggtgcaaaagtaattg

SEQ ID NO: 867496 - DNA, 582 bp, Homo sapiens
aaggaaaaaaatagaattcaacccaaagtcaccaagacagaaaaatctatatatttttttttctttttctttttcttttcttttctttctttctttctttctttttttttttttttgagatggagtctcgctctgttgcccaggctggagtgcagtggcatgatctcggctcactgcaacttccgcctcctgggttcaagagattcttctgcctcagtctctgaagtagctgggattacaggcacgtgccaccatgcctggctaatttttgtatttttagtagagacggggtttcaccatgttggtcaagctggtctcaaactcctgacctcacgatctgtccacctcagcctccaaagtgctgggattacaggcatgagacaccacrcctgaccaaaatctatatatttgtgaaactcttaagcatttgaattaggaatggcttggacttggatattaaagaagccacacacacacacaattggctttggaagttcatgttctcagcattgttgtccagatgactcagctaatttacagtcagttcttcctttttttattaggctggtgcaaaagtaattg

SEQ ID NO: 867497 - DNA, 633 bp, Homo sapiens
atttttccaacaaattttgaaacatttggtctattaattgattaactatttttgttctattatcacttttatttttttggaacttcaattttatgtatgctagactgcttaacattattcacacaggttactgaagatgtgttaatcttttttcagtcttttwctatctgttctttagcttgtatactttttattgctctgtcttcaagttaactaattctttctgtgctgtgtctcatttgttaataattcatccagtgacttttaagtttctggtatagtttttaagtgttagaatttctatattttaagggtctcaatttctcttctgagatttcccattcatccttttgttttaattatgactaccccccactttaaagttattcaatgtattttgtcattttttctgctaaattaaaaaaaaaaaaactaagtaatcccagggtctatttcaatagattttttttcctcttgactatgcatcccagttttctgggttttaaatatgtgtcttataattttaatgaacacagtagatgatactttacagagataatatgttctgttatgctcctctgtagaattatttttgttatagaaggttgattatcttgaacttgtggtattctt

SEQ ID NO: 867498 - DNA, 568 bp, Homo sapiens
atgtgatgagtgaaaaacaaaaagagatctttcattattctggattctaagccctggaatcctcgatttttaataatatccttactctttccataaattttgaacctcttctatgcgctggacactgtaataggtgctaagaatatagtgatgagtacatggccgcttccctaactaccacaaaagagtgctaataatgatggytagtatttaaaaatctttgctacatacaagtaattgcggttaaatctgttacatgcattgcctcgcttaaaacctctggcaattggtgaaagttagcattatcctaatcttatagatgaggaagttgaggtttcactgtctggcatggagattgacagattattatggtattaggagtggtgtgatttgaggaacaagaagagaagccactgacattctgaaatagccgagcctgaatagtgtgttctttggggctaagagtgagataagaaataaaccaccgggcacagtggctcacgcctgtaatcctaacactttgggaggcccaggtgggcggatcacctgaggtcaggagtttgagacc

SEQ ID NO: 867499 - DNA, 586 bp, Homo sapiens
gacttaaggtaaaaagtactgtcaaggaagttactgcctaatgagacatgcaatttaatacagagccagaaatgtgaattttgctgtttgaccagaattttaagtacatccttattttcaaaaggtagatacaaaaatcttcattgaaaatgggagacatttgatttaaacattgataactgacatttgaatggacgttctattttccataatataacttatacataaaattttcaatgttaggaggataaactgaggcatggtgtgaatagagaatttcattaagacgtggaaaagggctgatacatatcarcttcagctgggcagggtaaaggaggagtgagcagtggctttatatgatatgaacataagaacaatagatatattgtgtccatcattatttcttattgtgtaatatttgttagtaggacagcttctctctcttcacaccctgtcacatcccaaccattaagctttagataaagtggagaggccacagagtagaaagtaaggaaaaaaacctcttctgaaccactacattatgggatgtaaaggaagactggtagaaatgtgtgttccaatctcc

SEQ ID NO: 867500 - DNA, 576 bp, Homo sapiens
aataaggaatttcaaacatatcccaatattctacgactattatatggcccaatttacaggccttttgagtctataccatcaggagactctttatcttctgttaggaattaggctttcccaacccgatatgatcttaattatcagaagtgcattctcaccccagttcaatctctgacatcacaataaagtacagtagctccatttctsatgagaaaagctgattcagggtgatactgtatatatctgtttgcatagcaggaatcaggcctgaatttattttcctagagatttttcatggataacattttcattttcatcaaaggcaaccaatttaaaagttcctcttgctgttgacaatctctatagttggaaacttgggatgattacaaatggcaatgcttttcaaggggcaaagggtgttatcttatttccagagcttacagcataaggcatggtcagaatggtgctgcactagtttgcgatcttctgcttttttgtaagaattaaaggcaaataactcctcttggctaaggtggcactgacaaagttgtaaaccttatgcaactatacgtgtgc

SEQ ID NO: 867501 - DNA, 576 bp, Homo sapiens
aataaggaatttcaaacatatcccaatattctacgactattatatggcccaatttacaggccttttgagtctataccatcaggagactctttatcttctgttaggaattaggctttcccaacccgatatgatcttaattatcagaagtgcattctcaccccagttcaatctctgacatcacaataaagtacagtagctccatttctcatgagaaaagctgattcagggtgatactgtatatatctgtttgcatagcaggaatcaggcctgaatttattttcctagagatttttcatggataacattttcattttcatcaaaggcaaccaatttaaaagttcctcttgctgttgacaatctctatagttggaaacttgggatgattacaaatggcaatgcttttcaaggggcaaagggtgttatcttatttccagagcttayagcataaggcatggtcagaatggtgctgcactagtttgcgatcttctgcttttttgtaagaattaaaggcaaataactcctcttggctaaggtggcactgacaaagttgtaaaccttatgcaactatacgtgtgc

SEQ ID NO: 867502 - DNA, 632 bp, Homo sapiens
aaacctaaggaaataaaaccaaagtgctgggaatggcaaagtggagatgggaagagccagtgtcctggatggcatcactgagcagcagaaacgatgccagggttgccaaccttggacatctagctagtaaggtcaggaaatcaagcctcaatataaaccactgttagggtttttttttttttttttttttttcagttgttcttgataacttacagctgaaaggtatccctaactgaaacactgccttggctgagcatcctgagaaggactttggaattgccccctcaccttcagtttttttttttgtttttttttttttgagacagagtcttgttctgtcacccaggctggagtgcagtggcatgatcatggctcatggcagaatcaacctcctgggctcaagctatcctcccacctcagcctctgaagtagctgggattacagctgtgcaccaccacacctggctaattaaraaaaatatttcttgtagagacaggggtctcattatgttgcccaggctggtctcaaatgcctgggctcaagcaagcttctcaccttggcctcccaaagcgcagcgattacaagtgtgagcctctgtgcctggcctcaccttcagttttgaagtgtatttc

SEQ ID NO: 867503 - DNA, 644 bp, Homo sapiens
agacttatttactatcacaagaatagcatgggaaagactggcccccatgattcaattacctcccccccccggtccctcctacaacacttgggaattccgggagatacaattcaagttgagatttgagtcaaggcacagccaaaccatatcactgcccaaagtaatgtatagattcagtgctattcccatcaaactaccactgagattcttcacagaattagaaaaaaatactttaaaatgtatatggaaccaaaaaagagcccatcgagccaagtcaatcctaagcaaaaataacaaagctggaggcatcatgctacctgacttcaaactacactatgaggctacagtaaacaaaacagcrtggtactggtaccaaaacagacatatagaccaacagaacagaatagagacctcagaaataacaacacacatctgcaaccatctgatctttgacatacctgacagaaacatgcaatggggaaaggatttcctatttaataaatgatggtgggaaaactggctaaccatatacagaaaattgaaactggaccccttccttacaccttatacaaaaattaactcaagatggattaaagacttaaatgtaaaacccaaaaccgtaaaaaccctagaagaaaatctag

SEQ ID NO: 867504 - DNA, 614 bp, Homo sapiens
cctaggaaaatagaataaagggaaatggcattgaaataaaagtcttctatttggaattctgataactgatactattaggcataattttttgagatatctctaattggagtcatgcctcattcagaagtgattaaaggtgtcatttargtgaaaaatcaaacctctctttttgattacatctgtaattataatgcactaacagaacgaatgtaaatacagaagactcatgtgcttttgacaccaaaatgtagttgtaatggcaaaaatgagatgctgtggcagccactcatgttaattacctcaggatttccatatagtcaatccagtgtcgtaatgcattatagaaattatgttttgcatgtttaattgatatgttttggcaggtggttcaaggtccttcttctattttcaaagctagagcagtttccagaatttccgtcatgtaccaagttatgcctgagatagacttggaaacttttggagtctgaaggaaattttgaatcatccttcaatcatctattctacttttctctccctctctcactctgtaggtggtgaaactgcagctcagaagtgagatgcactagaactcaggattctttcattgggccacg

SEQ ID NO: 867505 - DNA, 692 bp, Homo sapiens
aaaaaagaataagaataatagaaaatgaggctgcaggtagaagccacaatgatggagttttgaatgcctgaagaatttgcattgaagttgaattgaagtgggaaattctcacttccccaactgggaaatccatcaaggagttttctatgtttttgtttttttattctgttttggtttttaaagcatagaaatagatcatcaastttttttcatcttttaaaatttttattgcgctataagatacaaagtgcacaaatatgaagtatactgattaaatttttttctttttctaaattatattttaagttctgtgatacatgtgcagaacatgcagatttgttagataggtatacacgtgccatggtggtttgctgcacccatcaaccggtcatcaacatcaggtatttctcctaatgctatccctcccctagcccccagccccagacagggccctgtgtgtgatgttcccttccctgtgtccatgtgttctcactgttcaactcccacttatgagtgagaacatgtggtgtttggttttctgttcctgtgttagtttgctcagaatgatggtttccagcttcatccatgtccctgcaaaggacatgaactcatcttttttatggctgcatagtattctatggtgtatatgtgccacattttctttttccagtctatccattgattggcatttg

SEQ ID NO: 867506 - DNA, 632 bp, Homo sapiens
agggctttcactctgctcgctctgtttggacccatctccctggaatctgcttagttccctcaccctcttcaaaactttcaaggagcccaatccttaccacctcacttggttttgttaccaaccctctactccctaactcaatatttaccatccttaatatttaccatcctcaatatttacctcattctctgctctacttgttattttctttacccaggctattgcatagtcaacttattcattatgctctttgtcacctgtctcccctgctagaatgtagatccttaagggtatgtgtcctgtttgtatttttcaccgatttatcccaatgtagaaaaatatgtacagtagatattttataaatatttactgaatgaaraatgaataaataaacaagtttaatacccaaatacctatccaaggcataaattgggtcacttactagatgaatattgccttggcaacaaccaaagtttctaatttagtaagtttgggggtggactcactggcctgtatttttcacaagcaatctagatattgtcatagtcattaaagtttgagatcgctgctgaagatccctcaaggtcctgatttaccctgacaaggtcagtgcctcctaaacttcctgagtt

SEQ ID NO: 867507 - DNA, 679 bp, Homo sapiens
atcgccagggttgatacagctgatctggctggctaggtgggtgtccccttcctctctcaccgctccacgtgcgtccctcccaaagctgcgcgctctgtcaaagaggacgatcatccctgatagacgaggaccagtctttggtcaagggtacacgagtagctgtgctctcctgctagaaccttcaaacaagctctcaaggtccatgtccctgcaaaggaaatgaactcatccttttttatggctgcatagtattccatggtctatatgtgccacattttctttatccagtctatcattgatgggcatttgggatggttccaagtctttgctattatgaacagtgctgcaataaacatatgtgtgcatgtgtgtttgcagtagaatgatttataatcttttgggtatataccaagtaatgggattgctgggtcacatggtatttctgattttagatccttgaggaatcaccacacygtcttccacaatggttgaactaatttacactcccaccaacagtgtaaaagcattcctatttctccacattctctccagcatctgttgtttgctgacttgttaatgatcgccattctaactggtatgagatggtatctcattgtggttttgatttgcatttctctaatgaccagtgattatgagcttttttcatatgtttgttggc

SEQ ID NO: 867508 - DNA, 658 bp, Homo sapiens
aaagatttgatgagatatttaagaaaagaagatatatgaatggccagtaaacccatgaaaggttgctctatatcactggtcttcaaagaaatgcaaattataactataatgaaatacaattgcacagaatggccacaattaaaaagactgataataccaagcattggcaaagatgtggagcaatagaaactctcatagatagctggcagaaatgtaaatggtacaaacacgttgggaaacattttggcatctttgataaagctcagcacacacttaacatacaacccagaaatcccattccagtcaggcatggtggctyacgcctataatcccagtactttgggaggctgaggcaggcggatcacttgagctcaggtgttcaagaccagactgggcaacatggcgagacactgtctctactaaaaatacaaaaaaaaaaaaaaaaaaagccagacatggtggtaagcacctgtggtcccagctactagggaggctgaggtgggagaattgcttaaccctggggagtggaggttgcagtgagctgagattgcaccactgcactccagcctgggtgacagagcaagaccctgtctcaaaaaaagaaaaaaagaagaagaaaagaagtcccactcctggatatttacccccaaaagaaaaa

SEQ ID NO: 867509 - DNA, 622 bp, Homo sapiens
tgactgcctcggcctcccagagtgttaggattacaggcgtgagccaccactccaggccgaaattcactttttaaaggcaattctagttgaactttctgtaacttgcaacctgacactttccattaataagccccgtcgtctaaccctctagtgtttcttctggccactttattccccgccatgcttctccagctacatctcatcactctctactcccagcaggaagcctgccaactccagtctaccccttctgccctcatcccaaagcccagtcgggaccccttatccagactagtgcaggcgagaaacakaggtctgcaatcctgtgtcactcttccctccagtgtgaactatattcagctggtgtccatgagaacgcctaaagggggacaaggattttaaggcaggggtttgagaacgaagagtatgcagtccaccccaacccgctccctgctctacctgagggtcaaagcccctcactgttcacaatgacacagactaggcaagtgctgggggagagccggggaaagacagacaaatgtggattctaagcagaagagcaagagagaacactaaacttgctgtggtcaagaaagaaagtaaaaggaggaaagaaggaagc

SEQ ID NO: 867510 - DNA, 553 bp, Homo sapiens
atagaaatcaatacattaataaatcacgaagttcataatgtctgatttgcttctaaatgagacagaactattatcgccataaagttgcacataaaatatgcccaattgtgatgtattgtgtagtctaatcaaaggcatttgagtgaataacctttccccaaaagaaggaaacaatcaaagctgaataacttcattaataattcaaggtgtgtctgccaaggcttcatttattaagtgcacagttaagaggcttcagagctgaatcctggagaggatagcaccttgccatcttctccctgcctctgggcaggcggatatacattctcagatgaactgactgcactccttgcatctggaagttcatgttccagtggagggtaatgcccagttgacttcttcagctaagaratggcccgtaacagtgctcatggactgtccggattcttaagggcagaggagccagagccaggaaatgtccttagtggccatcagttgttatgtctgttcactaatgttccaggccctatgcttctggtgtccaccacccacagac

SEQ ID NO: 867511 - DNA, 624 bp, Homo sapiens
acagttcagtcattaatatattcattcacagaagaactccttggtgagttagagaaaatacttttatcctgcttgttttgtataatgtgccactatatgtgatatatgtggatttgttttccaagttctcttacttccactaatggtgcatctcttgaagtatgtttcagccttccttatctcccgtcctggacagccttatgcatgggaraggccaataagtttttaccctttccaacttgcacaatgcttctttggatcagaatatttgaagcaaatttcttaccgtgtcatttacttgctgaaaaatcttcactagatttttgactcaacaaaatgatacaaaaactcaatagcctgtaatttagaaccctctgtgatctgatcttgacattatataaacctcatttcatatcctgctctttatgtccctaggaccaaaactgcactatggcagaattgttcctgacctatctccacataatctacttcaacttaactagtttaccagcttcaatcaaaccatgctctccattcttctctctacaatatttgcccgacattcatcatgtgttcctcacacactggtaggctagttgctatttatagtcccatttcatcagt

SEQ ID NO: 867512 - DNA, 624 bp, Homo sapiens
cctttagggtccagagcagggaaagaattttccaaaataaaagggaggatattaccaaaataaagaggataagagtgaattctgaaaagacaaaagaacaataaacaccatagcccactacatctgttatgtgacagatgaggaaatggattctgaagagggacatgtgtttttccaagttaagagtgatgggatgttatagtccagacacaaacctgggcatcctgactctctatgcttactttcccctctgrgccccagctgccttgcaaaagagaagagcattgtatttctggggctgtgaatgagggagagagagagaatgagagagagaattcttccaacctgcaagctctctgtacaaaaccctcagtccatcagctgagtgtgctggtctgaattaaccatgaagggcctccagtacacaatttgaagaggctatttcctggccccaatcctaaagtgtctgtaaaagcattaatgatttcccactgcttccatggtgacagcgagagagggctgactatcaagtgctcatgtggaaatggcccatggctcaggccctgtatgcctgaacagatacctgatgcattgctgctcctgtcacctaccattttagatggg

SEQ ID NO: 867513 - DNA, 581 bp, Homo sapiens
aaaaggaagaaaacggaggcagaagcatacttggggacatcagatctcctgggttttgtatacatgcattgcaaacatctctacaaaggattcttatagttggtgggtatgcccgaggggcagatcttgggtattttacagaaccttcctgctcttctataaggactctgcatgggtcttttgaagaaaggatgacattaggagattatcattcatttctgatcattctgtataccaagactaatattttcagtaagatctaatgggctttgtgtcttaattttctctrattcaaccataataatgtgtgtgtgttctgggggaatctatattgtgtgtgtgtgtgtgtgtgtgtgtgtgtgtgtgtgtgcatttctttggaagaaatctgttttagatagatgctagttaattatcatgtacatagggatctttaaacatttggagtttttgagtaaagacacattgattggaacttggctaaagccatttcagccccttggagagttgtaatgacagttctttttgtttagaaatctatcattttcatgtctttctcttattttcttattgcagggtaa

SEQ ID NO: 867514 - DNA, 611 bp, Homo sapiens
gagcagaggtgtctcttcccccagaggatgtacacacacacacacacacacacacacacacacacacacacacaccctgttggttttgaaaactcactggaaaatagggagggaggggcagggtgggggcagaagagccaagggagtctgtgatttaggggaatttgccagactttcattttggttacaaaagaaatatttgaaagcaaagaaatccatgaacagcagaaggctttgtggagccataaataaagatcagacacacagggcagggcgctgagcaagcaaagccacaggcaagagagtcagcctggctgcytaggctcacaggtccacagttctcagtcgttcattcactcactcaagccacaagtatttactgagcacctactatgtgctgggtgctgttcaaggtgctggggacatagctacgaatgaaaccaatgagtctgctgtcttgaggagattgaaaataaacaagttttcaaaagtcaataggattggggaaactgagaggggaggatcgcttgagcccaggagtttgaggctgcagtgagctatgactatgcctttgaatagccactgcactccaacctgggcaacacagtggg

SEQ ID NO: 867515 - DNA, 611 bp, Homo sapiens
gagcagaggtgtctcttcccccagaggatgtacacacacacacacacacacacacacacacacacacacacacaccctgttggttttgaaaactcactggaaaatagggagggaggggcagggtgggggcagaagagccaagggagtctgtgatttaggggaatttgccagactttcattttggttacaaaagaaatatttgaaagcaaagaaatccatgaacagcagaaggctttgtggagccataaataaagatcagacacacagggcagggcgctgagcaagcaaagccacaggcaagagagtcagcctggctgcctaggctcacaggtccacagttctcagtcrttcattcactcactcaagccacaagtatttactgagcacctactatgtgctgggtgctgttcaaggtgctggggacatagctacgaatgaaaccaatgagtctgctgtcttgaggagattgaaaataaacaagttttcaaaagtcaataggattggggaaactgagaggggaggatcgcttgagcccaggagtttgaggctgcagtgagctatgactatgcctttgaatagccactgcactccaacctgggcaacacagtggg

SEQ ID NO: 867516 - DNA, 543 bp, Homo sapiens
ggtccccctgaaggtggtgaggggcattgtctcagtgggaggaagaatgctgagtacttggcctgtttttagacctgcagccatagtcttggctttgtgaattttccatgtccctctgggttggaggaagaagtttgaacaagcattccctacaggggatagaggttgaggtcagatgatgaccttgttagtctgtacctcctgataagaaaatctcctccaagtgccccagcagaggcttcatggtcaagctgcagactctgckggctactggttttggctaaatttgcccattgcctcatccagtgatccactcgtctatctttccagccatccatttttctatccttccagtcatctctcagacaccacctgtccttccatccatccatccgtccatccatttacccatccatccatccaccccattttcctgaccatttacctcctcgtccttccttccatctgtccttttatccatctattcatccatcacccatcctcctgcccattcacctgcttgtccctcctttcttctgtcct

SEQ ID NO: 867517 - DNA, 530 bp, Homo sapiens
ctcattattcatctgacatgactcttgaagtggaaagctttgaagtatgcttggaacaacctggacatgtgaatcttactttacagctgtgaaccctagaaaatctaaatatggccaggcacggtggctcacacctgtaatcccagcactttgggaggccgaggcgggcagatcatgaggtcaggagattgagaccatcctrgctaacacagtgaaaccccatctctactaaaaatacaaaatattagccataatattaatacaggtgggtgtggtggcacacacctgtatcccagctactcaggaggctgaggcaggagaatggcgtgaacctgggaggcggagcttgcagtgagccgagatggcgccactgcactccagcctgggcgacagtgcgagactctgtctcaaaaaaaaaaaaaaaaagaaaagaaaagaaaaaaaagaaaatctaaatacggggcaagtacatctgataacattcaactcgcaaattgagatgtgccatcagtggaaagtacgaactggat

SEQ ID NO: 867518 - DNA, 600 bp, Homo sapiens
cttgatgtagccccaggagaacctgtttgggtggtaatggtcatttctgtagattctgccttgatgggggaggtagagagcctggtgatcacttcagatggatatgtcttgtgacattgtggactgatcagggctaggtcctctgctagaggacatgacttgtgtcatggagtcctcaatcgtggcactagtgagtgccttgtaaggaacagtgcttggctttgtggctgagtggatctcctgggaggtgctggtctcccttggtgtgggggtcagggtggatgttgactccatctcaattcttgttatctcagaggaagcaggtatggttgtagaaacaatgtcttttatggtggaagaggtgaccactggagatgtcactttggatggctctgggaggcctggataagaggaatagaattcttgtctagcrctgatggtgcccatctgagtcacagctgtgttttctgaaagctgaattgcctctgtctccatggtggctttagaagtggccagactctcatctgaggtgatattcatactgggaggtgaagtggtcacaggttccaagcttgtgtccaacatgtctgtggtcttcat

SEQ ID NO: 867519 - DNA, 645 bp, Homo sapiens
ttcctactcagccccagaggcctcccctaggggacagacatagacctgcccctctccttggggcccttgggggccaggtgtctcacccacgctttctgggaaaagccaggtgtcacctgccacctttctctcttcccactcacttcagccagaacccttctccctcatagacctatgtctgaccccttcatcaggggttgggaggccaccagccacatcaggagcagaggaagggacaactgccagctgccctgcctctcagcaaaaccctgacaacgggtgcctccaaacagcctcacccctgggggccccccggaaatttccacatcagggaaacttggttaaactgtttgctcttctccaaagcgggttggcagagaccatggtgggtgcagcagcagcccagcctcatgcagaggggatgggaggcaggagggaggctgggctctgtgcaggsagctgcaagttctaggcagggactcctttttttttttttttttctgagacaagatcttgctctgtctcccaggctggagtgcagtggtgcgatcacagctcactgcagccttaacttccaggctcaagtgatcctcccacctcagcctcccaaagtgctgagactacaggtgtgccccaccatgccca

SEQ ID NO: 867520 - DNA, 575 bp, Homo sapiens
gaggtcatgtattccctagcatagagggtctcatgggcactctccttagaggaggaagagactgggagatccagttagggggtacttccttggacatgggctaagccccctaagaggtaagggctctgatcagcaggtgcaaacttctcaggagggaaaatgatgccgccattctgaacctggagctccaccagcccttgtcccatctcaagacaattctgagagtttactctagaacatgtctggattgtggaggttgggaaacaatatgggctttgatggaactgaggtaaggtctcccatggggagggaggwgatcgatgctcagcattcttggtgacctgtggacaaagggttgcctctttaggtccaagttcattttcactgcagaggaggcttgagtgtctgaatggttcccagatcccatctatgattcttttggagagtggggtctggaaagtactgagtctcagcatttttggaaaattctgaaaagttcatttgggagtctgggaaggcctcttgcctcattcctgaatgctagatttgctgtcctggccacatatatgctcgac

SEQ ID NO: 867521 - DNA, 588 bp, Homo sapiens
ggccttatttctgggctctctattctgttccattggtctgtgtgtctgtttttgtacctgcatcatgctgttttggttaccatatccttgtagtatagtttgaagttgagtagcgtgatgcctccagctttgttcttttcgcttaggattgccttggctgtttgagctcttttttagttctatatgaatttttaaatggttttttctagttctatgaagaatgtcgttggtagtttgataggaatagcattgaatctatacattgctttgggcagtatggccattttaacaatattgattctttctatccatgagcatggaatgttttttcatttgttgacataattgtagattcacatatagttgtaagaagtaacacatagaattcyatgtactttttaccctagacccaactatattacaattgtaatattgtagcctatattataccactatattacaaggtagttgtacattttgtaagactgcagtgtaatatcacaacaaggatatcaacattgatataatcaagccatcttattcatatttcgcatttcatttgtactcatggtgggaggggtgtattta

SEQ ID NO: 867522 - DNA, 506 bp, Homo sapiens
aaaacccaaccaagtttacttgggaaatccttccaagtctggcataaatggtgcccaccatgagaatcttcctggtcttcaaagaagttgtggtttgaatgcatcctccatccctgcatcaatcagcttaggtgtatcaccctgtcagagctccttaagagccaagggcacatagtagataytgaataaaaatgttgacttatacatcacaaatatctctactatctaacattctgttggttggattttttttacttaaaaataaatgataaattcacaggaagttgcaaaagtcatataggaagtccctgtgtaccttttacctaccttttacccatttccccccaatggttatgttgctgaaataccaagggtttggtccaggtcctgctgctcactgcacagaaagccaatcactgagacaatgagtattgccagggaagaagactttatttaggtgatgcagctgaggagatgggagatcagtctcaaatctgtttcttcaa

SEQ ID NO: 867523 - DNA, 631 bp, Homo sapiens
gccacaaaaagaataaaatacctagaaaaacagctaaccagggaggtgaaagatttctacaatgagaattacaaaacactgctaaacgaaatcaaagatgacacaaatagaaaaacattccatgctcatggataggaagaatcaatattattaaaattgccatactgaccaaaggaatttacagattcaatgttgttcctacctaactactaatgacattcttcacagaactagaaaaaaactactttaaaattcatatggaggccaggagcgatggctcatgcctgtaatcccagcactttgggaggccaaggcgggwgaagcatgaggtcaggagttcgagaccagcctgaccaacatggtgaaaccccctctctactaaaaatacaaaaattagctgggcatggtggcacacacctgtagtcccagcttcttgggaggctgaggcaggagaattgcttgaacctgggaggtggaggttgcagtgagccaagattgggccactgcactccagcctggagtgcaagtgtctgtctcaaaataaataaataaataaataaaattcatatggaaccacagtagagcccgaatagccacgacaatcctgaacaaaaaagaacaaagcaggagg

SEQ ID NO: 867524 - DNA, 622 bp, Homo sapiens
caggagaattgcttgaacctgggaggtggaggttgcagtgagccaagattgggccactgcactccagcctggagtgcaagtgtctgtctcaaaataaataaataaataaataaaattcatatggaaccacagtagagcccgaatagccacgacaatcctgaacaaaaaagaacaaagcaggaggcattatgctacctaacttcaaactatattayagggctacagtaaccaaaacagcatgttactggtacaaaaccagacacatagaccaatggaacataatagatgacccagagatagagccacacacctacaaccatctgatctttgacaaagctgacaaaaacaagcaatggagaaaggactccctattccataaatggtgtgggaataactggctaggcatatacagaagattgaaattggaccctctccttacaccatatacaaaaatcaactcaagatggatcaaatacttaaatgtaaaacccaaaactataaaaactataaaaactctggaggacaacctcggcaatatcattctggacataggaaacatttcatgacaaaaacactaaaagaaattgcaacgaaagcaaaaattgacaaatgggatccaatt

SEQ ID NO: 867525 - DNA, 622 bp, Homo sapiens
caggagaattgcttgaacctgggaggtggaggttgcagtgagccaagattgggccactgcactccagcctggagtgcaagtgtctgtctcaaaataaataaataaataaataaaattcatatggaaccacagtagagcccgaatagccacgacaatcctgaacaaaaaagaacaaagcaggaggcattatgctacctaacttcaaactatattacagggctacagtaaccaaaacagcatgttactggtacaaaaccagacacatagaccaatggaacataatagatgacccagagatagagccacacacctacaaccatctgatctttgacaaagctgacaaaaacaagcaatggagaaaggactccctattccataaatggtgtgggaataactggctaggcatatacagaagattgaaattggaccctctccttacaccatatacawaaatcaactcaagatggatcaaatacttaaatgtaaaacccaaaactataaaaactataaaaactctggaggacaacctcggcaatatcattctggacataggaaacatttcatgacaaaaacactaaaagaaattgcaacgaaagcaaaaattgacaaatgggatccaatt

SEQ ID NO: 867526 - DNA, 523 bp, Homo sapiens
gcctgctgagtacgggcaggtaattctgcataaatgcaaatgttccctgggagggatcaggacagcacagggaggaagcctgccctgtcaagggctgtgcctggaactcgttcatcccgctcgactcagcactgtgtgatcgcttcttctgtcactcaktgcccagggggcgggacctggagccctatccaatcagagctatggggcggggtcgtgagaactgtcaatcaggcgcacggctggcagtagggtgccaggttcaaagagcccgcggcgtcttcacgcccctgcgctcagctctagactcagtcgctcgctgagagacgccctggaacgtctgtgtagcctcagtcgctgagagacgccctggaacgtctgtggcagcctctgtcacagtgggacccgcactggcagcgggaggcagagggaggaccctggaacatcccggaagccgggaaatggtgcgtgtgcagggtcaggcgtcccaaaagtgggaaagagctggttggaaccgtccagaacc

SEQ ID NO: 867527 - DNA, 586 bp, Homo sapiens
tagaaaggggaggcaacgcctgtcttcgttgatggttaaggaagttcagacccatctgcatctattgaggggtccctagtggagaagtgagaggctacagttcctgacgggattcctgcccctttgggaaagcaacttggcaggtgttttgagaggtttttttggactgggaacaaatcccaagggagaatccaaaggaggagggggcctcagatgtgccaggctattcctgacagcaagaggctgcaattggccatcgggccacagacatggccctggcaagcctgaagagctgccttaaagccatcttttgaggccatcrcctggagcggctccccatgtggagtcaaactgtgtctgtgctgagattaggatctagtgtacttccccagatagatggacaggtgccaagggcatcccagaaacagggcaagggcaggtggtctgtgggggcagtcgctaagggggatagaagacaggttgtgaaggagccaccttgggtcttttgggtctgtttttcctcccggtgtccttacccatggcctctcccctgccgcagggctttggtgctgtctggccagctccc

SEQ ID NO: 867528 - DNA, 628 bp, Homo sapiens
ccagtggtcatcatcttcccttacattcaaatcaggccatcactggttttatacattaacagaaagagaaggcaagggaatatgaaggaagcaaaagacagaaaaggcagatactaaagctgagtgatcctggaggacaccattagcactgacagctgtggaagaaaaaggagggaacagggcatttttggaaggtgagtcacttggctttctgrtagcaggttgacaatgagtgggagatgtattgattagtactgttctagtactagatgctttttgtacattgtcaccaatcctgacagcacctcactaaggtaacagactctgtggtccatgctttctttaccttgtagtccatgactactaacaggtcactgatgagtctccttaccctggttcttgtctgcatgctaacaccccttgattaggaactgaggatgagaagctctggaaaagtgatgatcacagtatttttcaatctgcaagataaagaatattacctgtttccttgttccagagtggtaaactcctaactgacagatctaggattcaagtccagctctgcctccaagcctctgtccattctttctttctttcctgcacaacctaatgggaatatctaacaaaa

SEQ ID NO: 867529 - DNA, 574 bp, Homo sapiens
aacaaagttataggcatcatgctacctgacttcaaactatactacaaggctacagtaaccaaaacagcatggcaccagtaccaaaacaaatatatagaccaatggaacagaacagaggcctcagaaacaatgccacacatctacaaccatctgatgaaatgagaaatggggaaagaattccctatttaataaatggtgctgggaaaattgactagccataagtagaaagctgaaactagatccctttcttacaccttatacaaaaattaattcaagatggattaaagacttaaatgttaaacctaaaaccataaaaaaccctagaagaagacttaggcaatacctttcaggacrtaggcatgggcaaggacttcatgactgaaacaccaaaggcaatggcaacaaaagccaaaatagataaatgggacctaattaaactaaagagcttctgcacagcaaaagaaactaccatcagagtgaacaggcaacctagagaatgggagaaaatttttgcaatctacccatctgacaaagagttaatatccagaatctacaaagaactcaaacaaatttg

SEQ ID NO: 867530 - DNA, 604 bp, Homo sapiens
tgggtgcagcacaccagcatgggacatgtatacatatgtaactaacctgcacattgtgcacatgtaccctaaaacttaaagtataataataataaaatttaaaaaaagaatttgttatgtggcttgggtaccagctcagccgcagtagactagtgcgccaggtagatcctaaggtttccaactttaggccctggctcctggatgrcatctctgaacctacccaggggcagggggaactcagcatcctgaagagaagaacacaagcctggctggcttttccacctgttaattgtagagcctcagggccttgagtgaacctaactggtagcaaggcagtggttactacagaccttgggcaatacccactgctatgctcgcttcagatctgacccagcacagtcccagtggtggtggccacaacagagatacttatgtcagcattccctggcttcaggcagctcagcacagagagagagactccgtttgtttggcagaaaataaatggaagagaagaagagtctctgcctggtaatccagagtactctttcgtgtctcatccaagaccaccaaggcagtacctatataagtctgcaaaagccacagc

SEQ ID NO: 867531 - DNA, 618 bp, Homo sapiens
gaactttctgtgtagctaaagcattataaatgcaccaatgagcactctgtgtctagctaaaggtttgtaaacacaccaatcagcgctctgtgtctagctaatcgggtggggacttcaagaacttttgtgtctagctaaaggattgtaaatgcaccaatcagcactctgtcaaaatggaccaatcagctctctgtaaaatggaccaatcagcaggatgtgggtgggaccagataagggaataaaagcaggccacctgagccagcagcagcaacccgctggggttcccttccacactgtggaagctttgttctttcactcttcacaataaatcttgctgctgctcactctttgggcccatgctgcctttatgagctgtaacactcaccgggaaggtctgcagcttcactcctgaagtcagcaagaccatgaactcaccagaaggaagaaactctggacacatctgaacatctgaaggaayaaactccagacacaccatctttaagaactgtaacactcactgcaagggtctacggcttcattcttgaagtcagagagaccaagaacccaccaattctggacacaggaccactaaaatatcgcatgattgctaaaaatata

SEQ ID NO: 867532 - DNA, 653 bp, Homo sapiens
ctttgagagtgctttgtgccacataaatctcatagaaatatctttaacttgctgccccagaaggccactgcttccctcctcagcaaacagaagcaacatcagggagtcatttgtcaaagtttcaaagggaatggttcatttatgaactgacattggatggtcttccgttccaacattcatgggattttaaaacaaagatgcattttatgattaacctccacaagcaaagagttatatttgtctcttttgacttacttcagcaacctgatttaaaaaaatctccttcaaggagaatcatatttattatacctcaaaaattcagtttatatgcatcattgttcagagcaatttctttctccctacattgaatggccaagtgatcatttgttttggagattyattcatgctttagaagacctggccacccatggaaaagaacatttttgagagcatttcccccctgcttctttcttaggacagggaaaataggtcttaaaagaattataagtgaatttagaaaatattgcttaaaagtttctcacttattctgggacatataccttcagttttctaatattcaagagctgtagtgaaaagagcattagtgtatgttaagattctctctttttgagttaggtgaacttgagccattt

SEQ ID NO: 867533 - DNA, 646 bp, Homo sapiens
gattcagagaaatgtggctgggagcagtggaaaggaaactagacttgccgccaggaaacctactgtgatgaacctgggcaaattgctcactcccacaagcacgggtttcattactcataacacggagacacagaatggaaaggaacagttgctgagcgcctgcaactggacacattctcatgtatgccatacaagttttacaatgaatctggaaagtgaattttattatcttatttttcaaataatgtactagaataagtgatgtaaaataattcacctaagttcacatggctagtcagaagtaaaagttgggtatttttgaaataagagctcatattctttctgcttccayccagttgtaagaattaattgttattgtgaagattaactgagatactctaagggaacatggacagtgcttgacctattctagatgctcacatagggaaatgcatgcaacactgcagcaataaagtctcagtcaggcagacttggtttgaatcctaattctgctgtttatgagctctgtgacttggggcaatttacttaccctctttgaacctctgtttcctaataccaactcatgaaaaaaaattatgtgataataactgatgtcagtagccgatgtctaaactatcagaattat

SEQ ID NO: 867534 - DNA, 644 bp, Homo sapiens
gaggagagggccactatcttccagaccccaggatggtagatccactaacagcttgcatcatgcacctggaaaagccacagacactcaatacctgcctgtgaaggcagcagggagagagactgtaccctgcaaagccacagagatggagcttcacaagaccctgggaacccacctcttgcatcagcgtgacctggatgtgagacatggagtcaaaggagatgattttggatctttaagatttgactgccctgctaggacttgcatgaggtctttagcccctttgtttttgccaacttctcccatttggaatggctgtatttacccaatgcctgtacccccactgtgtstaggaagtaactaacttacttttgattttacaggctcataggtggaagggacttgccttgtctcagatgagactttggactgtggacttctgagttaatgatgaaatgacttaagattttgggggactgttgggaacacatgactagttttgaaatgtgaggacatgagatttgggaggtaccaggggtggaatgatacagtttggctctgtcctcacccaaatttcatcttgaattcccatgtgttgttggaggaacctggtgggaggtaattgaatcatgagggcaagtcttccc

SEQ ID NO: 867535 - DNA, 644 bp, Homo sapiens
gaggagagggccactatcttccagaccccaggatggtagatccactaacagcttgcatcatgcacctggaaaagccacagacactcaatacctgcctgtgaaggcagcagggagagagactgtaccctgcaaagccacagagatggagcttcacaagaccctgggaacccacctcttgcatcagcgtgacctggatgtgagacatggagtcaaaggagatgattttggatctttaagatttgactgccctgctaggacttgcatgaggtctttagcccctttgtttttgccaacttctcccatttggaatggctgtatttacccaatgcctgtacccccactgtgtctaggaagtaactaacttacttttgattttacaggctcataggtggaagggacttgccttgtctcagatgagactttggactgtggacttctgagttaatgatgaaatgacttaagattttgggggactgttgggaacacatgactagttttgaaatgtgaggrcatgagatttgggaggtaccaggggtggaatgatacagtttggctctgtcctcacccaaatttcatcttgaattcccatgtgttgttggaggaacctggtgggaggtaattgaatcatgagggcaagtcttccc

SEQ ID NO: 867536 - DNA, 556 bp, Homo sapiens
gttcttggtcattagatttttcccccagattgcagggttggggggtgttgttttttgtgtacttgcatgactttgtaggaatttccaacattgataatgttgatatcattgatatgtcaaaaggtgtatactttttatattatgcttgatggtgccaaattgcccttcatagaggctatgccaatttacatgctcaccaacagggcatgagagtaactatttcccctctyctttttgacattttttaaaatgacatcataagttaaggaaagaaaattcaaattgtatctgcaagtacattacactgatttgtttcttatttatcatttatttgtggtatactatattttttaaaagatttgaggtagcgtataacgttaaatacacataaatgggactactcaacttttaaaataaatattaattcacaccaacaaaagaaagggcaaacatatcagaaaattgaggaaaatggactcccttccatacagcagaaactaaaacagaattagacttggttccttgactggcatcttgagatttttctgaatagtca

SEQ ID NO: 867537 - DNA, 632 bp, Homo sapiens
cacacacacacacacactcgaaagcatttcagccctatgattactggaaaggttgttaggagaattttttttcttcaatttttattctcagtaaaatcaacttagttttagcactacccagctgcaatttgtgaagtaaagtggcaaagctaaatgtgcygaaacccaacatgttccctgagcaacaaagggattgaaggccaatgttacacgtgttattgacaacactagtaatgcttgtactaagcatctgcttcactaaaggggagaaaaacctacgttataaacaaaaggagttccaaatgaagccctacctcctgaaattctggcttgaatttgaattttcacttcgtttagaacaaacttcctcttatttacccttttccgtccaacaactaaaaaattctctgatttacattctggaaacttccccataaccaactcctctatgttttcttctctctcttaaatgattgcctatattttctggtatttaccctttgtccaccatttgatttccaacaatagatgaagacaccactgaataaacatgccattaatttaaacctgtttccatgattatcatgagcaacttgtcgtcttctcagactgagagtccactgtgtgattag

SEQ ID NO: 867538 - DNA, 636 bp, Homo sapiens
ggtttgtatccaggcaaaggtgagatgtcaggaagccagctcagtttgcagagtgttacctacttctgcagagaaagctggggacttgctgtcatttcccttgtatcacttctgttactcctgtagtattttggccctgccttcctcagagaggtgaattctttgtaattttgtcccagcctttaaaaccagatacccatccattcccctggacaaggtccaatctcaatgagccttggcctttctaacctcacggcaaatgtctttgcccatttgcctgcctttctgacctaattttaacacccccattctattccagagcatcctgccttctaactcctttgaagtttactcaaaattctcatcctgaactggacttttggactcaacaacaaaaggtagcttcttctgggactttggccttcagagttctttarggtctggtttgggatcccttcatggtgctgttggtctgcaccctcctggcttagctctagcccagggttaccacactggcactggtagtgttctgagagtgaggaccagggagatctgaacttgagtgacagggtgtaaggtgtcagtcactgagtggtattccttgctctgctgtggaaggactcggcagagaggatc

SEQ ID NO: 867539 - DNA, 611 bp, Homo sapiens
tgcccacattttaatggggttgtttttctcttgtaaatttgtttaaattccttataggtgctggattttagacatttgtcagacgcatagtttgcaaatagtttctcccattctgtaggttgtctgtttattttgttaatagtttcttttgctatgcagaagctcttaataagtttaatgagatcctgatatgttaggctttgtrtccccacccaaatctcatcttgaattataatctccataatcaccacatggagagaccaggtggaggtaattgaatctgggggtggtttcacccatgctgttcttgtgatagtgaatgagttctcacgagatctaatggttttatgaggggctcttcccagctttgcctggtacttctccttcctgccgctttgtgaaaaaggtgcattgcgtccctttcaccttcttctataattgtaagtttcctgaggccttcccagccatgctgaacttcaagtcaattaaacctttttctttataaattactcagtctctggtggttctttatagcagtgtgaaaatggactaatgaagttcccatttatgaatttttgcttttgttgcaattgcttttgacatcttagtca

SEQ ID NO: 867540 - DNA, 631 bp, Homo sapiens
ttagtaagttttcacaaatgtacatatttaatcaatatctcaatcaacgcaaaaaccattgtttcacctctgaagataatttttaatcttttgcaaattattgagacttatttaatggccgagactacatagtccttcataaacgttccatgtaaatttgataaaaatattttcatgaaattttttgtgtagtgttctaaaacttgaaattagactacattagttgatagtattattagaatcttccaaatccttactaatttttatttgttcatctattgtttattttgagmcgatgattaaaatcttcaactatgactgaaagtctttctatttttctgtttagttctgtctgtttttacttcgtgcattttgacactctgttatcagttgtataaacattgagaattataatgcattgctaatgagcttaaccttttatcattccatctctgatatttcagcttattttgaatcctactttctctggtattagccagctacatcagttttacttcctttcattttcaaccaattttatgactctgtctcaaaaaaaaatgcattcattgtacagagcatatagttttgtcctttttaaatccagtctcagaattgctagctcttaatt

SEQ ID NO: 867541 - DNA, 637 bp, Homo sapiens
tatgtcaagctctgagtttctccactacctttaagaactgcaacttttaccaaacctaagcattatttctggaacagttaaattggatttagcaaaatagcatgggatacaaattcagtaatggttgagatcaaagtaggacatttttcttttttagattggaaagtttttacctgggtatgggtcttttaagagatactttcagcaatawtgaagaattcaaagaacggtttaattttcaaagagtttctagtattagtctatcttagcgatgaggaaccttttaagggctcttgacgcataaaacaaacaaccaagagcaacattagagtaaggcaacatttctttatactccaccttgttccagaaaggatctaattctactgcacgaaagtgcccagctttaaaggattaatgttaagttttttttagaaactaaattagaaatttatgacactccttgaggagaggaaactaagacttaattcacataaataattttatcactcctcggtgctgtattatatataaaacctttattgcagatagattaaagcccaatccaatgcagtaaacttttactcattgtcctagagttggaaatgcaaagatagagccatcatttctagtgctgcca

SEQ ID NO: 867542 - DNA, 630 bp, Homo sapiens
ttgtcttgcctgataatgttgttgagtgttcagcactcctagatctggatggggtgaagaactcactggaaagagcatggagtcaggataaggacacttagtcttcaatcctgactttctgctttattatccccatgtttttaggcaagtacctgagggtctccattacctcccctacagaatgaggaatatcattcctgcctcactgarcacttatgaggattaataattcaataaatatttaaagtactcagcccggaacttggcatccgttgggtgcgcttcgcatcttccagttggagaaatcagttatcagtgtttgggaattgcattaagctcataaagtaatggctggaaattattaagattgatttttaaaaatacaatcatgcttttattctcttttggaaaacagaactttattgcttctcacaacaaaactttcagtgccctccgaggagaaaaataaacttacaaaagaaaaaaaaagaaacttaaaaacaatatggcacttctgtggtatcaagcctcaaaggtcttacctcgagattattttggtaaatccatttacatttttttagtctccctgcccctccaatgtcatgtgtaagaacacatagatttttgaca

SEQ ID NO: 867543 - DNA, 630 bp, Homo sapiens
ttgtcttgcctgataatgttgttgagtgttcagcactcctagatctggatggggtgaagaactcactggaaagagcatggagtcaggataaggacacttagtcttcaatcctgactttctgctttattatccccatgtttttaggcaagtacctgagggtctccattacctcccctacagaatgaggaatatcattcctgcctcactgaacacttatgaggattaataattcaataaatatttaaagtactcagcccggaacttggcatccgttgggtgcgcttcgcatcttccagttggagaaatcagttatcagtgtttgggarttgcattaagctcataaagtaatggctggaaattattaagattgatttttaaaaatacaatcatgcttttattctcttttggaaaacagaactttattgcttctcacaacaaaactttcagtgccctccgaggagaaaaataaacttacaaaagaaaaaaaaagaaacttaaaaacaatatggcacttctgtggtatcaagcctcaaaggtcttacctcgagattattttggtaaatccatttacatttttttagtctccctgcccctccaatgtcatgtgtaagaacacatagatttttgaca

SEQ ID NO: 867544 - DNA, 630 bp, Homo sapiens
ttgtcttgcctgataatgttgttgagtgttcagcactcctagatctggatggggtgaagaactcactggaaagagcatggagtcaggataaggacacttagtcttcaatcctgactttctgctttattatccccatgtttttaggcaagtacctgagggtctccattacctcccctacagaatgaggaatatcattcctgcctcactgaacacttatgaggattaataattcaataaatatttaaagtactcagcccggaacttggcatccgttgggtgcgcttcgcatcttccagttggagaaatcagttatcagtgtttgggaattgcattaagctcataaagtaatggctggaaattattaagattgatttttaaaaatacaatcatgcttttattytcttttggaaaacagaactttattgcttctcacaacaaaactttcagtgccctccgaggagaaaaataaacttacaaaagaaaaaaaaagaaacttaaaaacaatatggcacttctgtggtatcaagcctcaaaggtcttacctcgagattattttggtaaatccatttacatttttttagtctccctgcccctccaatgtcatgtgtaagaacacatagatttttgaca

SEQ ID NO: 867545 - DNA, 645 bp, Homo sapiens
tgggcgatgatgccctctagtcttgtgtctctgtcattccaattctatttgacttctatacttcaggaacttcttaaggcttccagtttgctaggaagattcctttttcaacagttcgtttccttttaaaaatatagataacttttctcatttcaagggcatccgaggaggaggggggtacacatacatgtacaccaagatagccgtcttaatccaatcttacagtaactaagattattttaatatttattttctttaacacagaacaacatgagagccttcagtaacctacttaatagggtaagatggcaggagagctctggtgagtataaccatgactcatctgaacaccttttcttccatctycaatcatacagctctaaatgctcttgccttatagtcaccaattgtttaatttaaacttataattgaccatcgctgaacgacaggaagcaccaggaacattgaccttggaatatgaatgttaaggacaaacatataaacaataacaattctacacatttgcctcagtgatctttgcctgatctataggttgtattcctttaataaaaaatattttgcataataataagatggttttacaacttccgaaaaataacgatttttaaaggcaaaatacattat

SEQ ID NO: 867546 - DNA, 692 bp, Homo sapiens
gctgatgtttgcaggtgtgtaagaggagggagacaaagttgaaggaggtcacacctaatggccacaattttctgtagaagataagcttaccagccagccatttatacttctattactgtattcattcaagatacgctgagaatttctcatgagttacactgattgttgcaaagtaaactgttgacccttggagacttttccagtctagtggggtgccaaggtacctacacataaaaagcggccaaaaatagaaggcagaacatgaccattgccaagtaagtccagcaggcagtaaatactactggaatttgatggagaggaagattggggctttgaaaaactggtaggcttcagataagcagaaaggaagatgagcttgggacagrcaacaaaagtcaatgtaaggagaggtggcactttctagctaaaatgctctcagaataatctgaaaacaatagtgaaacatgagactagaatattctaagatgactaaaagctttagaggtatttggaagagatgtacatcagggtggagagtgctatgaaatcaatctgagcagaaaaggacacttagaaatgtcattatttagatttttttgatcccctgacactgagtcacttcaaaggaagtggccagtctctggagagtgattgacaacacaggatatggtcacttttggtttggggtgtct

SEQ ID NO: 867547 - DNA, 588 bp, Homo sapiens
catatttaatcccagtgaccccccttactgacaatggagtatttcatagatgcagctgtattttcttccccactcccttgctacatatatacctcatgtgaactaagaggacctctggaaagataattgtggcactacagtcaacacatgggggagagtaggagggcccaaatgtgaagcaacttaggttgtttccaagaacaactaaaattgaaaatctttcacattttcagttgaatttacttaatgatctgttaagtagatggggaggtaggatcccaatactagcttgtcctttatctctcttcttttcttttttttttcccrtggtaggaggaaatgccctgaataccgtaaatccaaaatttgaaattctgacatgcatgaatttttaatactgctttttgttattccctctatgtctgtcaaacatgacagtatattgcatcttttaaagagtactgaatggaagtggctcctgtgtagcatgccaacttcaagatgggagatcttggtttctagactggctcttctacattttcacataggatgttaagtatgtcatttaaattgtttgagctttgattt

SEQ ID NO: 867548 - DNA, 622 bp, Homo sapiens
tgatattaagctaaataataatgttacaatggcctctcagtgttcaaatgaaaggaagggtcacaaatcaacaactagaaatgattaagtttagtgagaaagtcatgttgaagccaagttaggttgaaagctagatcttttgtgccaaacagccaagttgtgaaagcaaaggaaaaatgtttgaaggagattaaaaatgctactccagtggacacgtgactcagaaaaaagcaagacagactcattgctgatatggagaaagttttagtacatagaggattaaaccaacccckgtatttccttaagcccaagcctaatctagagcaaagctctaactctctttaatttgtgaaggcttcaatcaggaagctgcaaaagaaaagtttgaaggtagcagagttttgttcatgaggttaaaggaaagaacccatctctataacataaaagtgcaaggtgaagcagcaagtgttgatatagaagctgcagcaaattgtctagatctacctaagagaactgttgaaggtagcaacactaaacaataatattacttgggattagaaaaaaacttctgagattttataaacacagtaaaagaattgtaaatgtctgaatctacactatg

SEQ ID NO: 867549 - DNA, 591 bp, Homo sapiens
atgaatggtaaactcacagagtgaattcattttgccttttgggtcagtgtaattacctattgatttttaggaaagaaagaaaaactgacattcacaacctttgctctttaatttctgaacagaattacggcctaaatggaagaatgatgttgtttatctgttagcacctttcagagacaaggccaatacttcwaattacttgtgcataattggtgctcagtaaacatttttgggttaaaagcttaaccccatacagatagttcctgctccattagacagattcatatcacattcctaatcaagcctctgataggcaatatgcaaaaaaatagcaactgtaaacctttatatcattcaaagttataaaattatagtctaagacatcagtggacatcagcatgcagcagtttttaaaattatgtaagtctcaatgtgctgtgaagtattaaaaactattacctcaactgggcttgaaattgcttccagctaaacaatgaatattaaattaaataataatggtttttttgcctcttagaatttataaatgcactggactttgctttgggtagaccacttttttttaaagaaaga

SEQ ID NO: 867550 - DNA, 608 bp, Homo sapiens
tgcaagcaaatgatcctactctctgaagcttatgatttcattttattttatgtttattttccctctctgaatgaaaagtaccacattaggaagtcagtgtttgtgtgtgtgatttttgttttacttggttttgtttttattctcaaatgaaagtaccctgccagtaatcactggtgttttgggaagacaaccagtagcagtgctggctccctatcttggagtgkatgggctttatgtccaggcagccatctgtgggagtggtagcctggagccaggtcttggagctacctgtgcatggtaaggatatggtttttatttagcttaattgttacagagcaataaaaataacagtttctaaagatgctttcatgaatattatatatacctgtgagaaaattataattggctccatgaagaagtttttaaaaaatattgttaaatttgtggcagcattgagtgagatcttagtagagcataatgatgaaagacctctgtacttctatggagccagcctttggtgcccccattgaggagaaatgaaatgactaccatgtgttcagcagctctcactaacaaatggcattccagatcacctgactactccccac

SEQ ID NO: 867551 - DNA, 670 bp, Homo sapiens
caggcatgagccgctgcatccagcctataattatctgtatctcacagatagagaagctgagcacagaatggttaggcactatacctaaggttgcagagcagccaggaattaaagaggtcagattccaatccaggcaactcagtgccagagtccaagcttccatcttctgctctgcttccagaagatcacagacctgtctatttatctgaaaactggaggtgtttaaccacactgcctccatccttaaggtttagtgagtccagcatgcagtgtcttaggtttcaggaaatactgcctgcacccggggtttattcccacgggcctgtgtccagcttgtgtttgtgtacacagagcacaggagcagagaaattatctctaattctctacaactctccagtctctcagcaaaattattcacctcctgttagaggccagaagtggatgcacaaatggcatrcatttgagcacagtggagagtcattgtagcattgagagaagacagagcactggatttgggggctaccatggagagatctctcatagaactttgtttttaaaatctgctcaattaattatcctatttactaaaactgtggttaaaggactggcaaaattgtatattccagatgacctgaaatcaatggcaacaaactatccctgaggcaagaag

SEQ ID NO: 867552 - DNA, 589 bp, Homo sapiens
ttagtgaagagagtgtcctttcctcagtgtatatacttggcacctttatagaaaatcagttggtggtaaatgtggtatatgctggcatcagtgttagtgtgtccaggcgggctgatctgggggcttccagtcagcttgctgaggtgctggcaatggcagctgtgggccaggtggatgggcaggtccataggccctgggcatcaggcatggtgtgggtgatggcagttgcagtggcaggacaatcctctggtacccaagtagtcccaactgattttcaaggtggctgcaggccatttcccaggcccacaggtggttcatgtctgtgggtggggggtgtatgctggctgtgatggtagtggcaggttgggtgaacccatctccaggccttcaggatgagtgctcaggygccaacaggaatagatggggctgagcaatccccaggcccctgcatgggcactagggagaagggagacagaggtgagcctcaggccccccgatggtatatataggcactagctatggtaggcaggggcgtggtgatttccaggccctcagtggaatgcttggatgggaggaccagcagctacac

SEQ ID NO: 867553 - DNA, 590 bp, Homo sapiens
gcgtggtgatttccaggccctcagtggaatgcttggatgggaggaccagcagctacaccctagccatgttgctggggttgctttcattggcagaagccttaggagggccactgggagcacacactttggccccaggtggtagttgctggtggggtagcctgttctcagggtgcttctaaatgtacggtaccctgctgatggggatggtgggtagcttccagtggcccccacattggatatggaggcagcagccagmagcagcagggtctgcgttagggggaggtcaatggggctcaaggaatctggagttgcaaggtctgtggggtcccagggtaggatgcagtctgctgggctttcaaaatggtaccttgctggagtgccttaagagtggggtaagagggagggtgggtggggtgacccagtgtgagctccccatatgaagcaatgccatcatggggtctccagccagtgccctatgtcctagcaattcattctttgcgctcctggcattctcaaatgttttgtagatgccttcttgtagcagccagtctcgtcccttttcttgaagtcaatgagcatcaaatgtgttc

SEQ ID NO: 867554 - DNA, 681 bp, Homo sapiens
tccaagccattagggaaggtataatttcacaaggcaagacagccaaggaaagtgatcctcaaagggaaactttcgtagaaaaaattttgtactttcctgtccccatccatcagtaacctcaacagagctatttttggattgtttccctttattcctattgatgactattattatatttttgaaaatgtttttgttaatgttgttagaaactggtaggttaatgaaactttagccatggttgttgttgttagaagcaggtgtaattaataaaagtttagctgtgaaggccaggcatctcagggttcaaactttagcttattgactactttttaagctatgcaacccttagcaaactgcttactcacatgacctctgttctcacagctgctaacagaagtggtggcagtgataataatgttgagaattgttttgaggtataaccaaattaccatggaaaatgcctagcaaaagtccaggcttatrgtatgagctaattaatatatcaaaatctcattcctttctttttttggctttcctttcttctacggccttctccatcttccaagacccagccttagtagcagatgatgacttgggtctcctgcctaccaagaagcccagtgcgctggcttcctgacacaagacatagccctgttagggagtcaggaatctatttactca

SEQ ID NO: 867555 - DNA, 587 bp, Homo sapiens
aaaaagtaaattactgtggaatatgatacaatgtatgcaggaagagttgtgctttatgtgatattctgactcaaaacaggagagaaaatgatttcttctcacattcagttgaacaattgattgggaagtgattacaaacttcactttgcctgtcagtgtctgtgctatgtatttattgaggagctcattcattgctactcactttcctaaccaaaccatcatgaaaaacatgcttagaaccctgagctaggtaaaatgagaatgtgtggcttagcacaaatcataattaaaaagcaatggcaacaccaaaggatgggttggggtgcccctccataaccgctacaaggttttccaaacccaccacaaataaatatgtrtcaaacataaaaacgatgtgctttctatgtaaatgcaaattcaagacaagtccccaagatcccttagcttccaatcaaattgtcatcacttctcaatctactactatctagaaattctactgtggcctttgctgaaagttcagagcattcattgatgagtatcattgtattcatgtggaagagatgacatgaggcagacaaggacggtaa

SEQ ID NO: 867556 - DNA, 637 bp, Homo sapiens
tctgtctagctggtcatactcagaggcacatgatcccttgaagtcccatttttctgattgatgatgatggctacagagaggagctcctgctatggataactttgttgaatccccaatgtgtctagaatggccaagaatgagtctctcagcagccagcaccccttaacacttcccatgaaagatctttcgggtccctagaaaagatccgttcatacgctggatagctggatcagtggagatgacaaataaggtgatcaggcatgccagtaagttggaagaaaccaaagtcaaaccaacagagtatgagttctcctttcccttgggtctatgtggaagcttcctagatrtctgagcacccagaccccaataacttcctctcacccccagccctcttttggggccagtgccatgggaccagttagtgcaatggaggtccagcattctgcaggatccttgagtaggaagctggtggagcacccaccgccctttgtctaccacggtgatgaatggttgttgacaaggctaaacaaaggtattattagtagattacatctgagaggctggactcatgcagaaacagggcagcaagagccctgggccctgctcagcccccaattagtccacaaaagcctaaacc

SEQ ID NO: 867557 - DNA, 637 bp, Homo sapiens
tctgtctagctggtcatactcagaggcacatgatcccttgaagtcccatttttctgattgatgatgatggctacagagaggagctcctgctatggataactttgttgaatccccaatgtgtctagaatggccaagaatgagtctctcagcagccagcaccccttaacacttcccatgaaagatctttcgggtccctagaaaagatccgttcatacgctggatagctggatcagtggagatgacaaataaggtgatcaggcatgccagtaagttggaagaaaccaaagtcaaaccaacagagtatgagttctcctttcccttgggtctatgtggaagcttcctagatgtctgagcacccagaccccaataacttcctctcacccccagccctcttttggggccagtgccatgggaccagttagtgcaatggaggtccagcattctgcaggatccttgagtaggaagctggtggagcacccaccgccctttgtctaccayggtgatgaatggttgttgacaaggctaaacaaaggtattattagtagattacatctgagaggctggactcatgcagaaacagggcagcaagagccctgggccctgctcagcccccaattagtccacaaaagcctaaacc

SEQ ID NO: 867558 - DNA, 657 bp, Homo sapiens
gagcacagccaggcaggccggaagcaaacaccctgcgagcatattccgacccaaggggcaggtgtgcactgctcagggtgggccaggagagaggctgtggaggagccttgggaatgactttctgtcctggcagtagtgtaaggatgtcaagaaagatgtatgggaggacaaaggcattgcctagggtgggtggtccaggcagggcacccctgcacctcttagcagaacttgaggtgagccaggaagtcacattgcagaaggacagaattgtgtctgatggtcactgtggcaggcccctgtcctacctgggaaaaggccactctctttggagttcagtcaatgagtggtcacactggagaacagcaatccttgatgctctggtggcatccagagttctgcagaggacctgccatggtcgggggttgtgattcataaggaggccactcgctgcaggcaggccaaggctgcagaaggagacatcagggaaacagagggaagacacagmagcggggacatggtaatatccacatggtaaatatcacagcagatatagccctgcaggaattaaagccaccagagattagagtcaacggcagcaaaggagaattttggcggcctcgctgggacattgggccatcccaggcttttccatgaagg

SEQ ID NO: 867559 - DNA, 657 bp, Homo sapiens
cacatctgtaaaatgcagaaccctttccgggtacttccatgtcaatgagagaactctgactcctttatttctaaggaccacataccttactatttctcctctccctacacatttagacagtgggcctctggtttgaactgttcttgctgcttaatcttacagagaacrttctcaggattccccctatcttgatgtgtctctctgcatcagccactccatcacctgaaagctttgtagtaacacagcacctctcagctgaggcttgcttctcttacacaagtgcttcccagcatgcactgataacactcggccacacagggagagaggagctgataagtccacatgcacatcagaaaatgatgccttttaaatgcaacagccaccttattctggaggtaaatcacagcactgaaaaatatctacaggtacctatggaggaggaagataaaagaaaaaatacctttttttggatggaaaataagaagccaagaagaataaggttttcatgcatggactatgtcaaggtcccacgattgccaccaagaccaccatgatggaagcatcttcttcattggccaatggacatcagtgcaaggatggtcgtgcatggaaaagaggaggcagaagggcgggagggacttggtcagccttcagagt

SEQ ID NO: 867560 - DNA, 595 bp, Homo sapiens
taaatctctattgaaagaaagccctgcaataaatgagccctgctctacatctgaattctagagtcactgttacaaaaataggagctggctgcaaatgtgaccatcaatgggctcctgcctctaccccttgctcttccctcctccctgacctgcaaatttctgaaaaattagctaacatcaccttaaatatatttaaatattaggaagccaaagggagtccaaaaacaccagaattgacctagaagctctctgcaaggctctcttttgtgtccactgattcactctgaggcacatttatggtttccttcttctttatggatcattcctggattttctttggaaattcttctttccctcatgctcctgtctgagtgtgctcttctcttagctctgtggtggacctargattcaggtctgtattagtctgttttgcattactataaaaaatatctgaggctgggtagtttacaaagaaaagaggtttattcggctcatggttctgcaggctgtacaagcatggcaccatgaattttttatggagaggcctctagaagcttttactcatggcagaaggtggagggggcaggcatgtcac

SEQ ID NO: 867561 - DNA, 668 bp, Homo sapiens
caattagtcagtaataaaaataatgtgtgacatatattcaactacccaaaccatccaacatcccttatcagagttgatgagttgaatcctgaagtttgacgcagggagatcgcaactgtgctgtatctgagtaaactcttaatttagactaattctaagaattaaaaatggttttaaaaaatctaagtgcttcaaaagaagaaaaagaagagcctagaataaaatgttttcaattcacagctataaaatgtaccacaagttgaaactrtttggttttcatttgttttccctttgcatttggaaggaagtaagaagtagaataagaatttttaaacattgggtacttgtatatagtattttaattcagcaaacaattatgcaatataagtattttagttacataaatatgactccattgtcacacccttttattgcatgttttgacaaagctcaactaattttatacatatctttcatgtgattattaaaaatatataaataatgtcatagtaaactttataatatgaaatgaacttttcaaaacttgctttaataatcagtgagaacctaagtgaataagacatgttggttctttaaagtaagttccaagatgccagttctctttgcaagaatgatttaggcaaaaaatcagttaaactttttttcag

SEQ ID NO: 867562 - DNA, 574 bp, Homo sapiens
acaaagtaacgccttcaaattatgcagaaatgggtgtgccctgtcaaaagtaacacattcttcttagttattgctgccagtgtctgaaaagaaatatttacatggagattttacattgctaggatcactatgccacttgcctgcagacattcttgatcaaatctctttagagtcagaatgtgtacaaataatggcaagaataacagaagcatcttgcagtgttttatagacggcaaaactgaagtgcaggaagactcacacaatataggatcatgtcccaaccaggtttatacagaaccatgaaaggcaggaaagagccatcatagcccaggcatgtcacctttcagaaaagaagaagctgtaaaatagtcgtttaactcacaatggaagccaggaagaaagctaacttagaraaaaaagatttggagtcagctctcatgcattatagtctcagatatctaagaattatctgtgtgacctgagacaggtcccgtaattttagagccttagttctctcatgagcaaaagggttcaataactaacttcttgaggatcatatcatgtaataagagct

SEQ ID NO: 867563 - DNA, 541 bp, Homo sapiens
gtggatttttattagaatattaagaacacataaagcacaattcccatggtaccttaatttttaatttttatttatttatttattttgagacagtctcgctctgttgctcaggctggagtgcagtggtaccatcttggctcactgcaacctctgcttcttgggttcaagtgattctcctgcctcagcctccaaattagctgggattacaggcatacaccactacacccagctaatttttttttttttcgagacggaatcttgctctgtcgcccaggctgaagtgcggtggtgcaatctcggctcactgcaacctctgcctcctgggttcaagygattctcatgcctcagccccctgagtagccaccacgtggagggtgccaccatgcccagctaatttttgtatttttagtagagacagggtttcaccattttggccaggctggtcttgaactcctgaccttgtgatctgcccacctccgcctgccagagtgatgggattacaggcgtgagccaccacgcctggccaaatactgctttatat

SEQ ID NO: 867564 - DNA, 537 bp, Homo sapiens
tttgatgtgggcatttagtgctataaatttccctattaacaccgtgttagctgtcccaaagattctggtatgttgaatcttttttatcattagtttcaaagaacttgatttctgccttaatttcattatttacccaaatgtctttcaggagtastttattcaatttctatgtaattgtatggttttaagtgaatttcttagtcttgagttctaatttgcttgcactgctgtctgagagactgtttgttatgatttcagttcttttgcatttgctgaggagtgttttacctctgattatgtgatcaattttagagtaagtgccatgtggtcataagaagaatgtatattctcttgtttttgggtggagagttctatagatgtctatcaagtctgcctgacccagagctgagttcaggtcctaaatatctttgtctaatattgtcagtgggatgttaaagtctcccactattattttgtgtaagtctaagtctctttgaaggtctttaagaacttactttatgaatctgagtgctcctg

SEQ ID NO: 867565 - DNA, 619 bp, Homo sapiens
tttgttatgatttcagttcttttgcatttgctgaggagtgttttacctctgattatgtgatcaattttagagtaagtgccatgtggtcataagaagaatgtatattctcttgtttttgggtggagagttctatagatgtctatcaagtctgcctgacccagagctgagttcaggtcctaaatatctttgtctaatattgtcagtgggatgttaaagtctcccactattattttgtgtaagtctaagtctctttgaaggtctttaagaacttactttatgaatctgagtgctcctgtgttgggtacatatatatttagaatacttagatcttcttgttcaattgaacactttatctttatgtaatgcccttcttcrtcttttttgatctttgttggtttaaagtttgttttgtcacaaactaggattgcaacccctacttttttctgttttccatttgcttggtagattttcctccatccttttattttgagcctatgtgtgtcactgcatgtgagatgggtcttttgaagatagcataccaatgggtcttgcttctttatccgcttgccactctgtgtcttttagttggggcatttagcccatttacatttaaggttag

SEQ ID NO: 867566 - DNA, 646 bp, Homo sapiens
ttttgcctaaatcattcttgcaaagagaactggcatcttggaacttactttaaagaaccaacatgtcttattcacttaggttctcactgattattaaagcaagttttgaaaagttcatttcatattataaagtttactatgacattatttatatatttttaataatcacatgaaagatatgtataaaattagttgagctttgtcaaaacatgcaataaaagggtgtgacaatggagtcatatttatgtaactaaaatacttatattgcataattgtttgctgaattaaaatactatatacaagtacccaatgtttaaaaattcttattctacttcttacttccttccaaatgcaaagggaaaacaaatgaaaaccaaayagtttcaacttgtggtacattttatagctgtgaattgaaaacattttattctaggctcttctttttcttcttttgaagcacttagattttttaaaaccatttttaattcttagaattagtctaaattaagagtttactcagatacagcacagttgcgatctccctgcgtcaaacttcaggattcaactcatcaactctgataagggatgttggatggtttgggtagttgaatatatgtcacacattatttttattactgactaattg

SEQ ID NO: 867567 - DNA, 669 bp, Homo sapiens
tttggatggtaaattatatggtcactctatacataacatttaaggaaagccaagcctaggataatgtttacctaggatgtcttccagcaacaatttcaaaattctttcactctttttcttcctcaattgtctttctttccagtctttctcctttctctttcgtcagataaggcttaaatatcctccaaacagctcatttcctcayctcactcctcatcccaatcccctagaaatttttcttctcatctccatgtttctggagtccatgttgagactacagcttgaagattttttatcttgtttgccttgtttgggggcaaggagagaaggaagtgtcctgaagctctgtgtggccagactaccctggactcttccccagaccctggaagactagagaaatggtctatcaagcatgatgtgtacaggaaatgtgctatggctgacgagcgaatcaggcactgtcaaatgaagactgagccaagtgtgaggctcagaccactaccagcagaggaacaagttgacccatgggtcttctagattaagcgaaatcacagacttctcacaaaggaatgcaagggccagaaacggccatcttattggtcccacctgtcctgtaaggttttgagctcaacgtttctccttgagttggactctatactttcaatccaa

SEQ ID NO: 867568 - DNA, 666 bp, Homo sapiens
caattagtcagtaataaaaataatgtgtgacatatattcaactacccaaaccatccaacatcccttatcagagttgatgagttgaatcctgaagtttgacgcagggagatcgcaactgtgctgtatctgagtaaactcttaatttagactaattctaagaattaaaaatggttttaaaaaatctaagtgcttcaaaagaagaaaaagaagagcctagaataaaatgttttcaattcacagctataaaatgtaccacaagttgaaactrtttggttttcatttgttttccctttgcatttggaaggaagtaagaagtagaataagaatttttaaacattgggtacttgtatatagtattttaattcagcaaacaattatgcaatataagtattttagttacataaatatgactccattgtcacacccttttattgcatgttttgacaaagctcaactaattttatacatatctttcatgtgattattaaaaatatataaataatgtcatagtaaactttataatatgaaatgaacttttcaaaacttgctttaataatcagtgagaacctaagtgaataagacatgttggttctttaaagtaagttccaagatgccagttctctttgcaagaatgatttaggcaaaaaatcagttaaactttttttc

SEQ ID NO: 867569 - DNA, 640 bp, Homo sapiens
aaaccagaagataatatcaaaaaagatagttcatcaaatgtaaattctgaacactgaccaaggtagtatacaggtaattaaaaataatacctgcagcacatcatgcttgtgagtaatcaaaggcaataatgcatagatgacatacacttaattattggacagtacaagtaaaaaaatcaagatatgctcaaatgtatggtgtaggttatttgttcaatcaacaaacactttgttgaggaaccatcatttgacagactctgttgtgtgctggggatataaagatataccacttgattttcattatggaaagtcaagttttagggaagaaaacagatgaacatgaagccgttacaaagcacgtgtgctagagataaatatgcattttcaagggaacatatacattgaatcaattaaattggttggaggtgatgacatttaagtttgataytcaatgattaatgtgtcaaatagagaatagtggaagtgttttcaagatacgacacagcatggcacaatgatgaaagaatgaaagattgtggtgggctatgtggctgatatacaggtgtatggtaggaattggtggaaggagagtctggaacggtgggttggggttttgtgtatcgtgccatgggttttattc

SEQ ID NO: 867570 - DNA, 592 bp, Homo sapiens
ctgcattacggaggctgccaagcaccaaacatattcaatatcacacctggcccgatggtcttgcaatctaaaacaaacaaacaaacaaacaaacaaacaaaaaaactcagtaattttctgtatttgtaagtggtcatcttatatgatggtgatgggatttctgtaggaaaaacatctattttcaaagttggaagacctttattattatatttgcacaagcttccttgtcttgttaattaactagttaagctagagtgctacctattgacattggaaaatattaccaggaatgtttttttctggtttccctcaytgattcaaaatcctactctcatgacatctgacattagatacaaagacaacaacaacaacaaaaatgactttctgacaagaattctcagctgtaccatgattacttcttttcatcctcctacctttgcgcaattactaactcatctatattttaagataatggtacattagggtccatttagaacgtctattagatcataatgtcacacaagcaagatgtcctgttttgaaaatagcatccagagcagctactcctctaactcatttagtaaacggggct

SEQ ID NO: 867571 - DNA, 651 bp, Homo sapiens
cctttctctcaaattcccattctccatatccctttaggtaggtgaggatcttatccctagccagcagctgtaagggaactgggccttcctttctctggacatagcactgtaggtcccagtatatgttaagaatgtagatggtcagaggaacagaggaaaacctgcatctgagtccccttgtcatccctcctgtggattcctggggaagcatggaaaacaagtatttaaaatgacaggacaatccatctgccacccgtgggaatggtagaaaataagggatattcatggaaggctgcttttgtacagtctcacaaasagcagcccttagacctaagaggacattgcctatcagtcttctcagtgtagaggaagaactgtcagggccagggagtttgggatgagagaccacaaaaggcagagaaagaattgtcctctccccaaagtgcagatagctctagaaaggaagtaggagttgctcttaatggaccacatacagatgccctatggagacaaacaaatgacctcaagagccactggaaaacctggtctcaatgtgtagcaggatttaaaaattcatgataggaaataaagaattggtggagacagagtcttcccaatattaagcagagaaagaagttgcatgatatgcag

SEQ ID NO: 867572 - DNA, 634 bp, Homo sapiens
tacacgtacatacctgtatgattttctctcagcaaaaccaagttaggttgtcaaacaggaagctgcccttttgcaggcaacatggaaagatatgagatctcattatattaactacaggtggtaaagaaatactcttcccggattactagtgtctcctaagataattgaaaatccagaagcatatcttaacaatttaatttattcacttaaaacatattcagggttgtcttgtctcagaaaacaaagaacacagagcaagagtcttcttcctaagcagcaatattyttggtatttatgaagacagtcctgtcataagcattttatctctcccagagttaaagaatattttatccaatgggttaattaatacttagtttcccttccttttgcatatttttcctaccactatcctttccctgccatctgtttacttaagttgacatttgtgctccttttcctttgttctcctctacaattgtatactatttttaagtccatgtggtatacagtccacctttttcagaacatcttgtgcctctgttcctacatcatattacagcacttccattaatcaaagttgattcgaattatagagaggatcaatgtttccaagtcaccatgcctatagcttggg

SEQ ID NO: 867573 - DNA, 622 bp, Homo sapiens
cagtaaagacttttatgctgagatcagataatactaggtaaattgcactcaacacagaatgttgctttaaaaggtcataactccatctgaaagcaatgaacttatttcaaatatagattacaggaatatctagatccatgrcactcaaaatgttaaatctgcaggccaagcgaggtggctcacacctgtaatccctaaactttgggaagctgaggcaggaggattgcttgaggccaagagttccagagcagcctgggcaccacagcaattctctgtctctaaaaaaaaatattaaattagctgagcatggtggcatggacctgtagtcccagctactcaggaggctgaggtggaggatcacttgagcccaggactccaaggctgcagtaagctgtgattacaccactgtacttcagcctcggtgacagaatgagaccctgtctctaaaacaaataaataaatagacagataatgttaatttttgcaaacaagagattatgtaaagagcactcaaaattatttatatcttacttatacatctaaaatgatatagatagctcaagaatttaacacaaaggctagagataaatttattatttccttcaaccaatattgatcattt

SEQ ID NO: 867574 - DNA, 622 bp, Homo sapiens
cagtaaagacttttatgctgagatcagataatactaggtaaattgcactcaacacagaatgttgctttaaaaggtcataactccatctgaaagcaatgaacttatttcaaatatagattacaggaatatctagatccatggcactcaaaatgttaaatctgcaggccaagcgaggtggctcacacctgtaatccctaaactttgggaagctgaggcaggaggattgcttgaggccaagagttccagagcagcctgggcaccacagcaattctctgtctctaaaaaaaaatattaaattagctgagcatgrtggcatggacctgtagtcccagctactcaggaggctgaggtggaggatcacttgagcccaggactccaaggctgcagtaagctgtgattacaccactgtacttcagcctcggtgacagaatgagaccctgtctctaaaacaaataaataaatagacagataatgttaatttttgcaaacaagagattatgtaaagagcactcaaaattatttatatcttacttatacatctaaaatgatatagatagctcaagaatttaacacaaaggctagagataaatttattatttccttcaaccaatattgatcattt

SEQ ID NO: 867575 - DNA, 667 bp, Homo sapiens
gcctacaaaaccactttttccttctaggtctgtgggcctgtgatgggaggagctgccataaagacctctgacatgccctgagacataccccgttgtcatggggataaacattgggctcctagttacttatgcaaatttctacagctggcttgaatttctcctcagaaaataggattttgttttctattgcattattgggctgcaaattttttaaacttttatgctctgcttcccttataaaactgaatgcctttaacagcacccaagtcacctcttgaatgctttgctgcttagaaatttctcccaccggataccataaatcatgtctctcaggttcaaagttccacaaatctctagggcagggcaaaatgctgccagtctctttgctaaaacataatgagtcactgttgcgccagttccccaaaagtttctcatctccrtctgagaccactcagcctggatttcattaaccatatcactatctggcatttggtcaaagccactaaacaagcctcgagggagttccaacctttcccacattttcctttcttcttctgagccctccaaactgttccaacccctgcctgttactcagtcccagagtcacttccacatttttgggtatctacagcattgccccactctcctggtatcaatttactgtatt

SEQ ID NO: 867576 - DNA, 670 bp, Homo sapiens
taatgaatctgcagcacatttgttttaaaagtgccaagtatataaggcaaggatccagggtaaggctaaggatctatagaagagaactagggaagggaaacacagctacctcatttcaacttcaaggcaacaacaacacatctcttctcaaactatgccaaagagaaaatactccaaagatttctagaattatgaagaaaatcaaattctcccaccccttgtaaatcagttccagggtttcctctsggggttatgcaacacaaggcttggagccacatttggagaattgaactcatcttttaaaaaaaaaaatctgaatttctacagtgaaactattttattttacttgattgtggggctgcatgtatgaagtatgaacatcgctgccccagtgtactggtactgtagttgtataaatcttgaatgacctgtgaaaatcttacttttgcttagtattaatataagtgatacataactaaagttgtaacactttatttttatattagctaccacttatagagcatctactaaatgccagcctctatacttagaacttgacacgtgctagtttctcattcacttctcagcacagctttaggaggcatattattttatagatagggaaaataaggctgagagaaggtaagtgatttaacaaggacacacagac

SEQ ID NO: 867577 - DNA, 608 bp, Homo sapiens
gtggaattcattgtgcttcttgattaaaaaatgcatggaatattctggaatattatttatacaatctcttcaagtgttgtcattcctttattctttctttctttttttttttttttgagatgaggtcttgctctttcgcccatagctcactgtaacctccacctcctgggttcaagcgattctcctgccttagcccctggagtagctgggattacaggcatgtgccaccatgcccagctaatttttgtatttttagtagagacgaggttttcccatgttggccagtttggtcttgaactccttacctcaggtgatccacctgccttggcctcccaaagtgctaggattaacaggcatgagccactgctccaggcctcctttrttctttttgtaatctctgctgtttctgaagctctgagtagacgtatgttggtccttctcattcttttctctgtacctcttaacttcattgctatatatgaagtgtgtgtataagtatgtatgtgtgtgtagtttttgtctctttatgctgcattgtgtataacttttttctgattcattaattctttctatttctaatctgctgtttaattcatccattaagcttt

SEQ ID NO: 867578 - DNA, 608 bp, Homo sapiens
gtggaattcattgtgcttcttgattaaaaaatgcatggaatattctggaatattatttatacaatctcttcaagtgttgtcattcctttattctttctttctttttttttttttttgagatgaggtcttgctctttcgcccatagctcactgtaacctccacctcctgggttcaagcgattctcctgccttagcccctggagtagctgggattacaggcatgtgccaccatgcccagctaatttttgtatttttagtagagacgaggttttcccatgttggccagtttggtcttgaactccttacctcaggtgatccacctgccttggcctcccaaagtgctaggattaacaggcatgagccactgctccaggcctcctttattctttttgtaatctctgctgtttctgaarctctgagtagacgtatgttggtccttctcattcttttctctgtacctcttaacttcattgctatatatgaagtgtgtgtataagtatgtatgtgtgtgtagtttttgtctctttatgctgcattgtgtataacttttttctgattcattaattctttctatttctaatctgctgtttaattcatccattaagcttt

SEQ ID NO: 867579 - DNA, 633 bp, Homo sapiens
ccagcttcccgtcagataacacatatacatgagctatatgcactcatgtgtatacacatataactcaatctaactttcccctttctataaattcaaattatgttccctgatgtggtccatcctggaggtcacgcacagagctcttacctgaaatggaagggaagataggaaggaacctaacacatatttagcatctactatatgtatataaaattaagacatatattatcctattttatcctcacaacaaccctgtcaggtatacattattacttctatagatgaaacaaaataaactcagaatggtaatagtcactcatgtttgagtgtcctggccaagaaagacaccttcctctttcccaagtctttattgtaatctcacctatgcacatatatccaggactaattctcaatcggagraaatttctaaaagggccagcaaaaaggagcactgctcagtcttcatgctcacagcagtttcctccttgaaagtttccatggcagggccatcaactggggccaggagcagtggaggagcacctggaggtggagatcttttcttcccgcctgtcagggctctgctcagatgccatccatctcacaggcccagggagtgtttaatgaagccgattt

SEQ ID NO: 867580 - DNA, 658 bp, Homo sapiens
gattctaagagcatatgtgtttgtgctaagtatccctttctgatagtcatatcaaaagaagtattactacctattatgacacttgcccagtcagaccatgagcatcaaagatatcccaagtcaggttaggacaggtaaaaatgtctatagggcaggaggtgaagattagagaggttggaagggcaaggagatagtaaacatcctttcatgtatataatttcacacaggctaaatgtgagtctgggttttaatacatagttactatttatgtatacttaaggaagttaaaaatctgtggggggagaaaggcagtgatcctttaaaatgaaacttgagcacaatggaaatcaatattacaacttttcataagagctttaattacacaaaaaaatgaagattttgatgaaaggagaaaagtttaaaattaattaataaaaactccatgaaacctctttytactttaagaaagaccatcagagggaagtctcaaacaaaagtcccgtgaccataacctttcccttgcaataagattgtagtctggctaccactaaccataaattccaaaagtaatttaaagatgaaaaaaggaaaaaaaaaaaaaaaaaagcactccatctgagttcaacggaagaattaaggcattatgttttctgagtta

SEQ ID NO: 867581 - DNA, 635 bp, Homo sapiens
actggcaatgccacagaggcaccttgatgggagtttgtaattcaaaggacaagttgaggctggagataatatttacagccatgaaactggatggagtcacctaacaatacagagaagacaaaaatctgataaataagcccccccaaactccaaaacagtgatcagaaagaagataaggaacccatagagaagcctgaaaagtagttgaggagacagaatgagtatgagaaaattgtcacagcctggaggtcaagtgaagagtgtttcaagaagtaaaaaattgtgtcaaatgatgcagagagttgacgaagaatgagtgctgtaaggtgatcactagattcagcaatgtggaagtcactggtgactttaccagaacaggttcaaatgagtgatgagaacaaagcctgatgaaatgagttaaaaacagactkgaagatgagcaagcagaaggagagtatagacaactccattgagtgttttgtcatggaggggagcagtgcaagtgggcagtaggtggagaaagacatgggactgggaattaaagttcttttgtgtttgttcttttaacatgagaaatattaagagtttttgtatacccatgggaatgatccagttgatggggaatattaatgata

SEQ ID NO: 867582 - DNA, 636 bp, Homo sapiens
cctatgtgtgtctctgcacataagatgggtctcctgaatacagcacactgatgggtctttactctttatccaatttgccagtctgtgtcttttaattggcgcatttagcccattttgcatttaaggttaatattgttatgtgtgaatttgatcctgtcattatgatgatagctggttattttgctcattagttgatgcagtttcttcctggcattgatgatctttacaatttgccatgtttttgcagtggctggtactggttgtttcttttcatgtttggtgcttccttcaggagctcctgtagggcagggctggtggtgacaaaatctctctgcatttgcttgtctgtaaagtattatatttctccttcacttrtgaagcttagtttggctggatatgaaattctgggttgaaaattcttttctttaagaatgttgaatattgcccccactctcttctggcttgtagagtttctgccgagagatctgctgttagtctgatgggtttccctttatgggtaagctgacctttctctctgactgcccttaacattttttccttcatttcagctttggtaaatctgacaattatgtgtcttggagttgctcttctcgaggagtatctttgtggcattct

SEQ ID NO: 867583 - DNA, 606 bp, Homo sapiens
aatccaactacaagaatgctcctatctaattacacatgccactcatgtcactggttttgacctatcctctgtctccgatcccggacaattgatgtacaaggttcattgatgtttcacgctttggttacctgtttttccaagcattttcaaaaataaacattccatatatgtgctaaactcttcctcagtcttgtgttttatcagaaaaataaactttaaatgctttttggycaagataaaatatatttggttcgattttgtgccagacatttttttcttaagtttggaagatcttagtggacttctacttatggaatgtagtgtcttggagggtgtgtgtgtgtgcgcacatgtgtgcgtgtgtgtgttgttttttaagtaaacattgaaacatgtaagtgttattttaggtagatgtttaagaaaatttccctctcacaaatggacgtatgggtgagaatttcatagtcttcgtgcttcaatggtccaagtttccaagcgctcaaggattgcacccccgggaagccccaaaattttcccttaagagagactgctccagcgatttctaatgtcctcactgatcttcctttaacagtgaatcaacgc

SEQ ID NO: 867584 - DNA, 604 bp, Homo sapiens
actcttcaaatgtccatgaaaagtagaataggtaaatttggtatatttatataatggaatattacacagcagaaaaaaggtacaaatgactacaacatgtatcaacatggatgactctcaaaaacatggatgaatgatgatcaacagaaataaactactaaaactcaggcagtatgstttcatttatattaagaacaaaaactagccaaactaagtattaaattctaagagatacaggcatacttagtaaactgtaaagaaaagcaggggtatgattaatacaaaattcagatgctgtttctcttgcagggaggagagggcactataatttgagagaggtacacagaggtctttaaggtactggtaatgttctgtttcttatcctgggtaattgctgcacatttcattatttttttaatactctccagataacatttattcatttttatatatgatatattcccccaattaaatgaaaagtcagctttgtaatattgtggccaagactgaatgacacaagacatataaagtgccaagcatctaagaagtgctcaatatgaagtgtctaaatttaaaaaatagaataaaataatgtttacctcag

SEQ ID NO: 867585 - DNA, 604 bp, Homo sapiens
actcttcaaatgtccatgaaaagtagaataggtaaatttggtatatttatataatggaatattacacagcagaaaaaaggtacaaatgactacaacatgtatcaacatggatgactctcaaaaacatggatgaatgatgatcaacagaaataaactactaaaactcaggcagtatgctttcatttatattaagaacaaaaactagccaaactaagtaytaaattctaagagatacaggcatacttagtaaactgtaaagaaaagcaggggtatgattaatacaaaattcagatgctgtttctcttgcagggaggagagggcactataatttgagagaggtacacagaggtctttaaggtactggtaatgttctgtttcttatcctgggtaattgctgcacatttcattatttttttaatactctccagataacatttattcatttttatatatgatatattcccccaattaaatgaaaagtcagctttgtaatattgtggccaagactgaatgacacaagacatataaagtgccaagcatctaagaagtgctcaatatgaagtgtctaaatttaaaaaatagaataaaataatgtttacctcag

SEQ ID NO: 867586 - DNA, 645 bp, Homo sapiens
cccaaagtccattgtatcattcttatgcctttgcatcctcatagcttagctcccacttatgagtgagaacatacatacgatgtctggttttccattcctgagttactttacttagaataatcgtccccaattccatccaggttgctgcgattgccattatttcattcctttctatggctgagtagtattccatggtatgtatatatatcacaatttatttatccactcattgatcaatcccagtagtgggactgacaaatcaaatgattcctctacttttagttcttgaaggaatctccacactgttttctatagtggttgtactagtttacattcccaccagcagtgtaaagrtgttcctttttcaccacatctacgctaacatctattattttctgattttttttggttatggccatttttaccaggagtaaggtggtatcgctttgtggttttgatttgcattttgctgatcattagtgatgttgagcatttttccaaatgtttgttgtctatttatatatcttctttggagaattgtcttttcatgtccttagcctattttttgatgggattgttttattttcttgctgatttgtttgagttccttttagattctagatattagcctttgtcagatgtata

SEQ ID NO: 867587 - DNA, 645 bp, Homo sapiens
cccaaagtccattgtatcattcttatgcctttgcatcctcatagcttagctcccacttatgagtgagaacatacatacgatgtctggttttccattcctgagttactttacttagaataatcgtccccaattccatccaggttgctgcgattgccattatttcattcctttctatggctgagtagtattccatggtatgtatatatatcacaatttatttatccactcattgatcaatcccagtagtgggactgacaaatcaaatgattcctctacttttagttcttgaaggaatctccacactgttttctatagtggttgtactagtttacattcccaccagcagtgtaaagatgttcctttttcaccacatctacgctaacatctattattttctgattttttttggttatggccatttttaccaggagtaaggtggtatcgctttgtggttttgatttgcattttgctgatcattagtgatgttgagcatttttccaaatgyttgttgtctatttatatatcttctttggagaattgtcttttcatgtccttagcctattttttgatgggattgttttattttcttgctgatttgtttgagttccttttagattctagatattagcctttgtcagatgtata

SEQ ID NO: 867588 - DNA, 620 bp, Homo sapiens
ctaaaagtatgtgcacatgtttaaaatggacttgtaatggaaagcaatagtttgctattgttattattattattattattattattttgagacagagtcttactctgttgaccacactgcagcgctgtggcagcgatcttggctcactacaacctccatctcctggattgaagcgattctcctgcctcagcctcccaagtagctgggactacaggctgcgccactatgcccggctaattttttattttttggtagagataaggtttcaccatgttgaccaggctggtctcaaactcctgacctcaagtgatccactggcttctgcctctcaaaatgctgggattacaggtgtgagtgaccacgcctggcctaatttgctrttctatcctactcaccaccagtctttcttcttagaggttgaatttgcttagttctgatgataatctccaaatctctaaaaatatgcttacacttaaattttggttgggcacctgtagacactattaacttcctttcatggatttttctctggaacacagcttcagagaaaaggccttcatttaataacagcagcagatccccctcctatgtagatatagttctctacccagtcaccccaa

SEQ ID NO: 867589 - DNA, 616 bp, Homo sapiens
aatcgtgaatggatattgaattttatcacatgcttccccccacctattgagattatcagatgattttctccttggtttcttgatatagggaatgacattgattcttgaaagttgaaccagtcgtgcattcctggcataatcctcctgttggtctggctgtattgtcgtctgtctrtctacctatctatctatctatctatctatctatctatctatctatctatctatcatctatctatctatcatctatctatctatctatctggttgtattttactcactagtgttttgttcaacaatccttttgaatatcttggtgattgttttgaattttcattagctctttttttttattctgttgttgtttttctaagaatactctatcttgtttgttgaggatgcaatatctttccaaatgtactagagtataattagaactatattttctccagtgtcagtgtttctgatttgcttttttgatagtctttctctttcaagttgtagactctcctcaaatatctagtgatccttgtttgtttgttcctagttaagaatgagctggttaaagctgattgtcatttaacttatggcttcatctttgggtaaatgtatgagg

SEQ ID NO: 867590 - DNA, 616 bp, Homo sapiens
aatcgtgaatggatattgaattttatcacatgcttccccccacctattgagattatcagatgattttctccttggtttcttgatatagggaatgacattgattcttgaaagttgaaccagtcgtgcattcctggcataatcctcctgttggtctggctgtattgtcgtctgtctgtctayctatctatctatctatctatctatctatctatctatctatctatctatcatctatctatctatcatctatctatctatctatctggttgtattttactcactagtgttttgttcaacaatccttttgaatatcttggtgattgttttgaattttcattagctctttttttttattctgttgttgtttttctaagaatactctatcttgtttgttgaggatgcaatatctttccaaatgtactagagtataattagaactatattttctccagtgtcagtgtttctgatttgcttttttgatagtctttctctttcaagttgtagactctcctcaaatatctagtgatccttgtttgtttgttcctagttaagaatgagctggttaaagctgattgtcatttaacttatggcttcatctttgggtaaatgtatgagg

SEQ ID NO: 867591 - DNA, 604 bp, Homo sapiens
aattattataatgatatcaatctgtggttagaaaaagatgacactgatacatcaattaataaggtgatgattagaaatataccttatccacagaaatagtgatagtttgcacctgaaatcatgtagtcatatctcccaaagtgtgaacgttagcttctgtgtataaccacatttttattcataagtagctattatcattatgaatataatataaaaattgacttctgggccgatggtcagtaaagcacaccccgtgttttctggcatcctaaatgctccctgtaaggcaatcattatttgccatgcataggcatgcaaacgtatcattttcatcagtaggatagtttaagatattaatttttatagaattatgaatttcacagggagtagcagcctatgatgatgctttgagctgcttcagatttaagstaacatgtttaaaaaagaatgcaaaccaaaataccaaactataaggcttcaattacagaattcatcgaatagctgttacacaggcaatgtttccattgatactaggagaggattgcctgcattaaaaaaacacagttttagactttgttatggagcaaatagtcatgttattttt

SEQ ID NO: 867592 - DNA, 552 bp, Homo sapiens
tgtgtgcacagggcccacatggcaaagccggaggaatcctagatcaagtaagaagaaaactgctgagacgttgttctccaggataactaagttacttggcctatattctagacacacagatctcatttttacttctcttttggttcactgcaaaggggctgctttatttattattgttgtatctgccatacagcagccaggtgttcttctcctggcagtgcgctcccctctgctcacctgcttatgatgctattgctaattccggaggcaggcatatgacccaggcccacagtcttttggccacagtgattggtccagagtcaggtctgtsgcctaataaggaccaatgagatgtagtaagacttttgttggggcagcaggtgataagccatttgctttttttgctggaacttccataagtcagatgacacatacctggagctgcccaggaagccaacaccatagaagacacagccaagaaatggagaaactgggtcctgccacactgtttgagcacttggatcagactgcacctgaagccaatatagccca

SEQ ID NO: 867593 - DNA, 674 bp, Homo sapiens
caaatgctgtagaacaagatgcaaaggttctatcggcaaatattcttttttttttttttttttttttgaggcagagtctcactcttttgcccaggctggggtgcagtggcgccatctctgctcactgcaaccctcacctccctacttcaagtgattctcctgcctcagcctcctaagtagctgagactacaggcacatgccaccatgctcggctaatttttgtatttttagtagagacggggtttcaccatgttggccaggatggtctccatctcctaacctcatgatctgccagcctcagcctcccaaagttctgggattataggcgtkagccaccacgcctggcctctatcagcaaatattctatattgagttctccagtttctcaaaatcctgacatttctaacatcattccttgattgttttaaagtgacaatttctgtagcaacagttttcatattatcagacaaggtacgaatttgttaacctcttccaatcattcacaccaaaaaatctaaggcattttttttcttatcatgtaaagtgtggcaacagagtcagggttcaatttttgaagctctgattactaagtccacattggagtatgaggaagtacagtgaccaaaactgcttcccttaaaatgactttcagacaatgtagaactctactctcc

SEQ ID NO: 867594 - DNA, 633 bp, Homo sapiens
tgcacattgattttgtatcctgagactttgctgaagttgcttatcagcttaagaagattttgggctgagacgatggggttttctagatatacaatcatgtcatctgcaaacagggacaatttgacttcctcttttcctaattgaataccatttgtttcctgctcctgtctgattgctctggccacaacttccaacactatgttgaataggagtggtgagagagggcatccctgtcttgtgccagttttcaaatggaatgcttccagttttttgccgattcagtgtgatactggctgtgggtttgtcatagatagctcttattattttgagataacgtcccatcaatacctaatttrttgagagtttttagcatgaagggttgttgaattttgtcaaaggccttttctgcatctattgagataatcatgtggtttttgtcgttggttctgtttatatgctggattacatttattgatttgcatatgttgaaccagccttgcatcccagggatgaagcccacttgatcatggtggataagcttcttgatgtactgctggatttggtttgccagtattttattgaggatttttgcattgatgttcaccagggatattggtctaaaattctcttttt

SEQ ID NO: 867595 - DNA, 502 bp, Homo sapiens
agagattagccttgattatgcaggtggacccagtgtaatcacaaggaatcttataaggcaagagggtcaatatgagagaaggcactgtcatgatagaaacaggggatgaaatagtccacttcaaagatagaggaaggggctagggttgtgggatagggaatacaggtggcctctggtggatgaaaaaagctggaaaacggattctccctgcagtcttcagaagtatcacagccctgttgacacctggatttttgccccagaagactgattttggacttctgatgcctgatctgcaggagaataaatraatttgtattgttttaagccactaagtttgtgataatttattacaggagccacaagaaagtaatacactagatcatcaagagccttccatgctgtgttagttcgttcttgcattactataaataaatgcctgggactggataatttataaagaaaagaggcttagttggatcatggttctgcagggcttacagga

SEQ ID NO: 867596 - DNA, 502 bp, Homo sapiens
agagattagccttgattatgcaggtggacccagtgtaatcacaaggaatcttataaggcaagagggtcaatatgagagaaggcactgtcatgatagaaacaggggatgaaatagtccacttcaaagatagaggaaggggctagggttgtgggatagggaatacaggtggcctctggtggatgaaaaaagctggaaaacggattctccctgcagtcttcagaagtatcacagccctgttgacacctggatttttgccccagaagactgattttggacttctgatgcctgatctgcaggagaataaataaatttgtattgttttaagccactaagtttgtgataatttattacagkagccacaagaaagtaatacactagatcatcaagagccttccatgctgtgttagttcgttcttgcattactataaataaatgcctgggactggataatttataaagaaaagaggcttagttggatcatggttctgcagggcttacagga

SEQ ID NO: 867597 - DNA, 452 bp, Homo sapiens
taatattaattaaagatcaatgtattaaaaaatctataatctacttgtggcataccaatatgtggcagaatacaaatatgcaaattctgctatacatagaaaactaaagccgatcagcggacatgctgtcaacattgacctctattgaattcagcaattcaattatttataaacctttcatacagatttttataagctgaattgtgacccacaacccccccgccgaccccrccaatccatatgttaaagtcctaactccaagtacctcagaatgtaagcgtatttggagataagtcctttaaaatagtaattaaagtaaaatgagttcatgagggtgagctgtagtttaatatgagtgaaaagattacaaaaggagattaggacacagacagacagacacagaggagaagaccagattaagaagccagaggaagatggcatctacaagccaa

SEQ ID NO: 867598 - DNA, 593 bp, Homo sapiens
tttatattttagtcattgatttaattcttactttctaaaaaatccacataagaaattattgctagttagggtcaatacttagtaagttttacccatatattagccattttcttttttctttatttattgttatatctaagccattctttctgaatttaatrtatttctattctcaagaacaacctttaggattttcttttttgaggattgctggtgaagaactcaattgtttttgagcatgccatgaactttaatctcctgttctatgtgccctttgaggttcagaaaaaattccaggagcaaagattattggataaaaacacttttgtttacagggccaccatttacattgcggagttgcgctccctgaaatactgtcagtagacattcattagtattgtcatatcacttcctaagctgttgtagaaataagtcagattcactacaaacacattagtatatattatcatgttatgatgtttctttagttgtaagtggcacctcaaatttgctttaatttgtatgtttttgaatttgtgtttgtgaacatttttttcctggatgctttcatttgctttcttgtataaatacat

SEQ ID NO: 867599 - DNA, 600 bp, Homo sapiens
ttggtgactcacagtcgggggtagatctaatggatgaatgtaaggatgggcaatttaagccattgtgccaacatggcatatggaatgattctgagagagtgtgatagggccaacccaaggcagagctctagccgagagggtgtgtttgtctttagagccccgactttcttgatgctgtcttctgtatcatctggctatcaacttaaccctgcatgtaattagcctgtgataatggagtcagaagataaatggcttaaaagggtcttggcacagtttatttcatcgtaaaggagaacacctgacagtgggcagaatcttacccccttcatgcgaggaagaaaaatcaaccattggcaatccaaaaatgtctgattgtgcactgctaggtgtgtgtycctgtgggagttacctgggggttacagaaaagtacaaggtacagctctgccctcctggaacttacaacttaggtgtggacaaaaacaccacattgaagctgtaacacttagtacagagccacatgagggaaatgtaaactaaatagcacaggccataagtgccaaaggagtggtgacgaaatgatggtttctcacagctgcttaa

SEQ ID NO: 867600 - DNA, 653 bp, Homo sapiens
ccaggtagaacttaccttctacagtaccctgatgaccaccaaccaatccctattttgcgtggtgctaaaaagcagtacatgagtaaatatcctgagatctagaaaatagaatgttattaaacttaaaaataaggaaataaactaaagttttttgttaaagtgtgtagcattagtattcaaagatcatttagacatcagccactgcatttccagcagaatttgctatcatgggtaactgttttcaatgctgacaytccatctgagacagatcagacagagccctaaaagtaataacctttaaattgagaatgtttactctaaaagttcctaacacaacccaaagccagaaaagttcacagctctacattaaaatgttagaaaaagatcacattgcagcagctgcttatgtggattacctagtctagccattctgctaaggcttaaaaaaacctgtctgagttgtaggaagaaaaaaaagaaaacaagcctcaaattatcaagttggtgcttgttgatagagctgtgatttcccatttgttgccccagaagacccaggtgtatctgaaagtcaagattttttttcaaactccgaggctgaggaaggatttctttagtgtactttccaccaatgccctgtagcttcccttgaaatt

SEQ ID NO: 867601 - DNA, 666 bp, Homo sapiens
aggttgatggcaagtatatgtctcctctccctcccaagaccacaccagcatactattagggtatttaataagatgtgaacacacaaccacaaaaagcagatagcagtgaacaacacattcagaagaaagtggctgagggaaaactgatttttaaatgaaaaggcttaatataaagtgcttgcagagaagctgacttggccccccaaagaaatactcaagaaagtaaaatgctcttagaacttaaaaatgataactaataaaatgatcaatagaaaagcagtacagtgatgttgaagaaatcttctagaaagtgtagcaaaagtcagatagaaaacaagaatggaaaagttaaagacttggacaatcaatcctggagatccaactgcaggctaataggaattctagaaacaaaacagggtaagaggatgaaggaaattatcaagaaataatacccccccaaaatgttccagaattgcagaaccggtttccggattgagaaaaccctccamgtatgtacccagtgaccaaatccagacctatatctaagcatgtaacagtgaaatttcaaaacacctatgttaggttaaacacacaaccacaatctctcagggtgggacaatgcacttcatatacaaaggaatgaaaataataatgatatcagaaggt

SEQ ID NO: 867602 - DNA, 652 bp, Homo sapiens
agagagtccatgacagtacttccaggctgttactgaatgagccagaaagttctggaagtacagaaagagaggtcactgaaggaaaatgccattacacagcacttacaaaatgaagaacatgaccatatggatggtccagatgatttgaacagacatgtaattatcttggagaagcagatagtactgggagagtcattgatgattgagggaatctgtttaaatgtagctacattgggatagtattataatcataatatttgttgagtgcttgctatgtgttgggttgtaaatcctttacctatattagcttacttaatccctacaaaaaccctgcaagatcagcagtgctattattgttcttattttacagatgaggaaactggagcaaggagaggattttgctccaaagtctaatggctaactgagctgaggtttgaatccaggcaatagtcaccwgagctgcactcacaaactcaaaactgtagtgtgaggaaggtggatcacatgctttggaagtatttcaggctgggaagtcttccagtttctggaagaaagatatgataaagcccataacagaggatatgggagccagccaaggaagtgaacccatacacatgttcccagcttctacagagggccaaattctgatagg

SEQ ID NO: 867603 - DNA, 652 bp, Homo sapiens
agagagtccatgacagtacttccaggctgttactgaatgagccagaaagttctggaagtacagaaagagaggtcactgaaggaaaatgccattacacagcacttacaaaatgaagaacatgaccatatggatggtccagatgatttgaacagacatgtaattatcttggagaagcagatagtactgggagagtcattgatgattgagggaatctgtttaaatgtagctacattgggatagtattataatcataatatttgttgagtgcttgctatgtgttgggttgtaaatcctttacctatattagcttacttaatccctacaaaaaccctgcaagatcagcagtgctattattgttcttattttacagatgaggaaactggagcaaggagaggattttgctccaaagtctaatggctaactgagctgaggtttgaatccaggcaatagtcaccagagctgcactcacaaactcaaaactgtagtgtgaggaaggtggatcacatgctttggaaktatttcaggctgggaagtcttccagtttctggaagaaagatatgataaagcccataacagaggatatgggagccagccaaggaagtgaacccatacacatgttcccagcttctacagagggccaaattctgatagg

SEQ ID NO: 867604 - DNA, 605 bp, Homo sapiens
ccccaagccttggtggcttacatgaggtgttgggcctgtggatgcacagaagtcaagaattgaggtttgggaacctccacctggatttcagaggatgtatggaaacacctggatgtccagacagaagtttgctgcagcagtggagccctcatgaaaaactttgctagggcagtgcagaagggaaatgtggggtcacagtccccacacagagtctccactggggcactgcctagtgaaggactgagaagarggccactgtcctccatatcccacaatggtagatccactgacagcttgcaccatgcttctggaatagctgcagacactcaatgccagcccatgaaagcagccaggaggtaggctatacccttgcaaagccacaggggtggagttgcttaaggctgtgggagcctacctcttgctctcacacatcagtgtggcctggatgtgaggcgtagagtcaaaggaaaccattttggaactttacagtttaataactgctctattcgatttcagagttgcatgggacctgtagccccctttgttttggccaatttctcccatttggcacaggcatatttacccaattcctgtatccccattgt

SEQ ID NO: 867605 - DNA, 609 bp, Homo sapiens
accgtttacaaagatgagggcagagctccggaaaagccaaatgccttggctggcaacatcagagagtgaccaccctgcctgggttgaaagagcaagagggaggacctattatcagaactctgaaagggccacctgagagaagcagggatttcatagaacaaaagttattatcctggtcacgtagggcagctgtactacatgttttgrctcagcctttcaggcagcttcaatctcaggacagctccatatcaacacaagctttcacaatcatcatggcaggagaagagcctggataagcacatgccagctcttaaatgctgctaattagaagtggtgcatcacttctgctcacattccattggccaaagcaaattatttggctttgcccacccaacttcaagggagtagggaagacagtcttcctatctactcaaaaacaaaggagagggccgagcactgtggctcatgcctgtaatcccagcactttgggaggccgagttggacagatcacctgaggtcaggagttcgagaccaggctggtcaacatggtgaaaccccgtctctactacaaatacaaaaattagctgggcatgagtgcctgtaatccca

SEQ ID NO: 867606 - DNA, 609 bp, Homo sapiens
accgtttacaaagatgagggcagagctccggaaaagccaaatgccttggctggcaacatcagagagtgaccaccctgcctgggttgaaagagcaagagggaggacctattatcagaactctgaaagggccacctgagagaagcagggatttcatagaacaaaagttattatcctggtcacgtagggcagctgtactacatgttttggctcagcctttcaggcagcttcaatctcaggacagctccatatcaacayaagctttcacaatcatcatggcaggagaagagcctggataagcacatgccagctcttaaatgctgctaattagaagtggtgcatcacttctgctcacattccattggccaaagcaaattatttggctttgcccacccaacttcaagggagtagggaagacagtcttcctatctactcaaaaacaaaggagagggccgagcactgtggctcatgcctgtaatcccagcactttgggaggccgagttggacagatcacctgaggtcaggagttcgagaccaggctggtcaacatggtgaaaccccgtctctactacaaatacaaaaattagctgggcatgagtgcctgtaatccca

SEQ ID NO: 867607 - DNA, 657 bp, Homo sapiens
ttataaaatgtggttacatgaaattcagtttgattaaaacaaagggagccattcctcaaacacgttgtttttcagtttcttagtttttcacagatattcaacttgaagtcttcaacttttttttttttttttttaactgggagggagagtacagagaaggccactcaccttgccttttcatatatatgtagagctgaaattgtaagatgttctgaagttttcttggaattttggtctagcaaaaactattgagtggtctgtgccacagatgtccttcctcctctccacccaccctagacccctcttcttcccctgtacccatctgtctgccctggatgctgacttgggtggtctgcaccagaagtctctcatcttwgacttttggttctgttcagctaatggagagttctggccagacaatcaaggagggaggggagcagggtcagagtgtctactcacctggttccctcctgcaaggtcgcctggtgctgaacatccagaggtgtcaggaaaagagcatcactgcaaataacccaggaagaaaggatttaatatagaaagaagagcttaggcaaaaggtggagggcactgggatgagaaagtctggatgacagattcagagggtcagagagataatcatagtcactctagccagtg

SEQ ID NO: 867608 - DNA, 634 bp, Homo sapiens
gaagacagagttggcaggttctattaaatataagagtggggtttgaggaagttgaggatgactccaaggtttttgattggagcacctagattgatggagtctggaagattgtaggaacatcaggatttggaggcaaggccagaatcttgcttttcatcttgtttgagatgcctattagtcatctaagtggacatgtcaagcaggccattggataacaagtctaacaaattgggcatttaattgcatggaagaaacaccagaaatgagtcacagggaagcatctgactctctgtgtgaaaagcaggataatttcttcaaacctcaatttcctcatcattgaaatgggagtaacaaccagtgttgtgaaggtttaataagatgataaaaggacctagcacagtttttttgagcaataaacagtaaatattattaataattacttactatttttacattttcctrcctgagtagaatctacagaaaattaagtcacttgacctaccatttagtttccttgtcctaagaataaaggaatctctgagtatttttaatgggcttggtgacttacaatttcttatagctgtcatataggtctagggtaaagatgcaatttttttcctgttttatagatgag

SEQ ID NO: 867609 - DNA, 568 bp, Homo sapiens
atttgaggagtcgcagtagtcacttgtactccccaaacacacgggaagaagttgatcagtttgcatgcttggagtcaaattacgctcagcacaaatccaacgcccctgaattaaatgagcagtagaagctctctgcaaaaaacacaacartatttgtgacccggtattatttcaggaggtaaaaacatctataagcagatgcatttgggacgtatgcatttcctggtaatgtcaatatcgcattaagctagtgggtttgggcagggaaagcctgaatcggacaagaagctggcttttttttttttaggctataaataaccagaccatgccagacacatgttcttaggctatgttcttaggctcaggtgattggagtgccccccccccatccccaccctcagggcttagggagaatggaagataaggtggatgctgtcacctgtattaatagttagggcttgcatacatacagtaaagtttcaagagtgaaacttcatcgactgaactctttatgaagtgactgcctgactctacacgcgatgttttaggagttgaatttttactttcc

SEQ ID NO: 867610 - DNA, 562 bp, Homo sapiens
tcagaacagggtgtccccacatgaagccgctaacagagcttgattcataaatggaatcaagccaatgattattgaatgaggtcagaggttggaattagagtagggttttctgctcttagcatggtgacctacttgcaactcaaactagaggaamccctcactgaaatagctaagtctgaagtttttaatctaaaatatctccatgtcagtttaaacctgttttctctcctgcaggtagatcttaaggccttgtatgtctatttttcaaagatcagtcctggcagtcaagatgaagatttgtaactacttaactagatgagcttggacaggtcacctgttccttccaggctcctgtttactcagccaggggatagagttcaactaatccctaccatgattaagggtcactcaccttttccaaaaagggctttgctgggtcttggggttttaaagcaagataagacatccactgaaaatggtaaatatacgagggaaagataactagatctcacaagcaaccaccattcaagcaccaaatatcaagaagctgtgtaaatccctc

SEQ ID NO: 867611 - DNA, 567 bp, Homo sapiens
aatcattccaacttgattgctttgccaatctcttactagataaactatgatcaagtccatgaaatgcttagaatgataactttcatattctcttcttcattaacatatgggatggatgctattcagatgggtgacacactcacatcagggtatcctagggtatgcaaaaatttccatggggataaatttaagtgtaaactgtttgccccaattcaaggataatgacaataataatagtgtcaattgctaatgtccatgtagcacttagtatatttcaratgctattgtgagaattttgtatatgttaattcatttaattaataaaatattgataaaatagtattattgttataattccaaattctacaaggcacaattgagacatagggagattaaataacttgcttaatagtatacatctaataagtagcaaatcaaagtttcaaatttaggctgactgttcaggtgaccatctttctaaccatgaggctatactgtctttggggatatgtactaacaaaatggccattataagggtgactaaaggtccaacttggtgtgtaaaaa

SEQ ID NO: 867612 - DNA, 627 bp, Homo sapiens
tttttgtattcaggaattttatcaaccacctgttgagcaaaataattctgggacatatataatgtggaagaaatatagaattatctcctccatatcacatgtcccagaattcttttgctgggtaatgtgtggaacaaacacaaaatgggtggcttaaaacaacaaaagtatacttttttctcatattactgattagctacaggttaagtcatctgttttgtgtgtgtgtggtgtgtgtgtgtgtgtgtgtgtgtgtgtgtgtgtgtgctacttctatagggaagaackgtaatggtagggaaaagatatttaagcctcatatatatatatatatatatatatatatatatatatatatatatagtgaagtacatatttatttcaaataagctaccaatttttatgtagtaatatttatcacaggaaaaaatagaggtttttaatatatcatgttcaattgttttaatttttagttcccacagatgagtgagaacatgagaagtttgtctctctgtgcttggcttatttaaattaacatagtatcctccaattctcatttattttttatagctgaatagtactctattgtgtatatgtatcacattttttctttatctattaatctgt

SEQ ID NO: 867613 - DNA, 627 bp, Homo sapiens
tttttgtattcaggaattttatcaaccacctgttgagcaaaataattctgggacatatataatgtggaagaaatatagaattatctcctccatatcacatgtcccagaattcttttgctgggtaatgtgtggaacaaacacaaaatgggtggcttaaaacaacaaaagtatacttttttctcatattactgattagctacaggttaagtcatctgttttgtgtgtgtgtggtgtgtgtgtgtgtgtgtgtgtgtgtgtgtgtgtgtgctacttctatagggaagaacggtaatggtagggaaaagatatttaagcctcatatatatatatatatatatatatatatatatatatatatatatagtgaagtacatatttatttcaaataagctaccaatttttatgtagtaatatttrtcacaggaaaaaatagaggtttttaatatatcatgttcaattgttttaatttttagttcccacagatgagtgagaacatgagaagtttgtctctctgtgcttggcttatttaaattaacatagtatcctccaattctcatttattttttatagctgaatagtactctattgtgtatatgtatcacattttttctttatctattaatctgt

SEQ ID NO: 867614 - DNA, 657 bp, Homo sapiens
aggtgaaggggcatgtttatcttcgagctttagcctagggctcatcctgcccaggttcttctgaatgcccagtgcaagtcctcactaaattggatactttttcctcaattccatttccattctcctttaaagatgtaagagaagtgggcaggttgcaaaggagaccagaatggaaactattttctttggataaggtacagaccttgtaacagaagaaggtggttctcttgggcaatttgcttcagggaaagtatggggccagccctttctttggaaagcaaaccacgggtgatttttttctagcatgaccctggctccagttagatgagaagagatcaataaactgggcccacctgggtactagatgtacaaagccctgtgtttatatgttgggagagagaagaggtgcagagctcagmtgaggaattccccacctcactctccctacagctgcttcatcccctctcctacctattcctttctctgtgacaaacacacgagatcctgggaccagcagcctacttgcatgtcagcagatctctggcttctcctctagtggatgagtcagcagctctcacaggtttccaggtagcttctgagaaatattgaggttgaataggtgattttccgcgtgcaccctggcaagaccactttgtg

SEQ ID NO: 867615 - DNA, 637 bp, Homo sapiens
ttcaaatcaaggcaagacaatttgatcagctgatttgataaatccattttgagggagacatcaaaatataaaacaactgaactgcatcaaatacaaaaaggtatttttattgatcaagtatgtgcaacacatagcactgttcttcaccatattcttcacctcatcctttctaaagaggaggaaggggaggaagggatgttgatcattattcawgcattcaactcagtctgcttaactgagctgggatctagctttggctttagctagaatttcccaaataaggattctacaggatgttcctgtgtaggaagcaaataaagaagccacaaagaaaggattagattatcaaatacttttgagaaatactgagttaaatggaatttttttttcctgtaggggctttcagagccttcaacatgggaatgtgcattttgagtcacccagggtggcaggtcaggtggcacaaagcctggcaatcacatgtagagtagggggtcaaggcagggcaaggactctgaagttccccaagaaggggatgctcatttattcgatcagcaaatattaactgagcatctactctgttctaacctaggcacttataaatatgtggtagataaaactgctctcactgaactta

SEQ ID NO: 867616 - DNA, 624 bp, Homo sapiens
aatggtttcctgggccaggtccagggctcccctgctgtgtgcaacttgagtcccagctgctccagccatggctaaaatgtgccaaggtacagctcaggatattgtttcaaaaggtgtaagcccccattcttggcagcttccacatagtgttgggcctgtgattgtatagaagacaagaattgagtttggtgaacttctgcctagatttcagaggatgtatggaaacacctggatgtccaggcagaagtctgctgcaggggcagagccctcatggagaagctctactagggcagtgcagaagggaaatgtggggttggagcccccacacggagtccctactggggtactgactagtagaactgtgagaagagggccactgtcctccagaacccagaatggtagatccactgacagcttgcattatgtggctggaaaagctgcagacactcaacagcagccatgaaagcagccaggaggggsactgtaccctacaaagccacaggggcagtgctgtccaagccatgggagcccacctcttgcatcagcatgccctggatgtgagacatgtagtctaaggagatagttttggaactttaaggtttaatgactgccctattggattac

SEQ ID NO: 867617 - DNA, 614 bp, Homo sapiens
agggagcagaggtgtctcttcccccagaggatgtacacacacacacacacacacacacacacacacacacacacacaccctgttggttttgaaaactcactggaaaatagggagggaggggcagggtgggggcagaatgagccaagggagtctgtgatttaggggaatttgtcagactttcattttggttacaaaagaaatatttgaaagcaaagaaatccatgaacagcagaaggctttgtggagccataaataaagatcagacacacagggcagggcgctgagcaagcaaagccacaggcaagagagtcagcctggctgcytaggctcacaggtccacagttctcagtcgttcattcactcactcaagccacaagtatttactgagcacctactatgtgctgggtgctgttcaaggtgctggggacatagctacgaatgaaaccaatgagtctgctgtcttgaggagattgaaaataaacaagttttcaaaagtcaataggattggggaaactgagaggggaggatcgcttgagcccaggagtttgaggctgcagtgagctatgactatgcctttgaatagccactgcactccaacctgggcaacacagtgg

SEQ ID NO: 867618 - DNA, 614 bp, Homo sapiens
agggagcagaggtgtctcttcccccagaggatgtacacacacacacacacacacacacacacacacacacacacacaccctgttggttttgaaaactcactggaaaatagggagggaggggcagggtgggggcagaatgagccaagggagtctgtgatttaggggaatttgtcagactttcattttggttacaaaagaaatatttgaaagcaaagaaatccatgaacagcagaaggctttgtggagccataaataaagatcagacacacagggcagggcgctgagcaagcaaagccacaggcaagagagtcagcctggctgcctaggctcacaggtccacagttctcagtcrttcattcactcactcaagccacaagtatttactgagcacctactatgtgctgggtgctgttcaaggtgctggggacatagctacgaatgaaaccaatgagtctgctgtcttgaggagattgaaaataaacaagttttcaaaagtcaataggattggggaaactgagaggggaggatcgcttgagcccaggagtttgaggctgcagtgagctatgactatgcctttgaatagccactgcactccaacctgggcaacacagtgg

SEQ ID NO: 867619 - DNA, 602 bp, Homo sapiens
caactacaagaatgctcctatctaattacacatgccactcatgtcactggttttgacctatcctctgtctccgatcccggacaattgatgtacaaggttcattgatgtttcacgctttggttacctgtttttccaagcattttcaaaaataaacattccatatatgtgctaaactcttcctcagtcttgtgttttatcagaaaaataaactttaaatgctttttggycaagataaaatatatttggttcgattttgtgccagacatttttttcttaagtttggaagatcttagtggacttctacttatggaatgtagtgtcttggagggtgtgtgtgtgtgcgcacatgtgtgcgtgtgtgtgttgttttttaagtaaacattgaaacatgtaagtgttattttaggtagatgtttaagaaaatttccctctcacaaatggacgtatgggtgagaatttcatagtcttcgtgcttcaatggtccaagtttccaagcgctcaaggattgcacccccgggaagccccaaaattttcccttaagagagactgctccagcgatttctaatgtcctcactgatcttcctttaacagtgaatcaacgc
